United States Patent Application Publication US 2007/0042381 A1 - sequence listing, part 60

SEQ ID NO: 2721885 - RNA, 21 nt, Human
caaauacgugggcauucaaau

SEQ ID NO: 2721886 - RNA, 23 nt, Human
caaagugcugggauuacaggugu

SEQ ID NO: 2721887 - RNA, 19 nt, Human
caaagugcugggauuacag

SEQ ID NO: 2721888 - RNA, 19 nt, Human
caaaggguaucaggugcug

SEQ ID NO: 2721889 - RNA, 15 nt, Human
caaauugugugaaag

SEQ ID NO: 2721890 - RNA, 11 nt, Human
caaauuucuaa

SEQ ID NO: 2721891 - RNA, 14 nt, Human
caaauuucuaaauc

SEQ ID NO: 2721892 - RNA, 12 nt, Human
caaauuucuaaa

SEQ ID NO: 2721893 - RNA, 15 nt, Human
caaaugucuauaaac

SEQ ID NO: 2721894 - RNA, 14 nt, Human
caaaugucuauaaa

SEQ ID NO: 2721895 - RNA, 16 nt, Human
caaaauuuuuucucua

SEQ ID NO: 2721896 - RNA, 21 nt, Human
caaaauuuuuucucuaggaaa

SEQ ID NO: 2721897 - RNA, 22 nt, Human
caaaauuuuuucucuaggaaau

SEQ ID NO: 2721898 - RNA, 15 nt, Human
caaacacauacagga

SEQ ID NO: 2721899 - RNA, 14 nt, Human
caaacccuucagug

SEQ ID NO: 2721900 - RNA, 20 nt, Human
caaacccuucagugccaaaa

SEQ ID NO: 2721901 - RNA, 22 nt, Human
caaaauugauguguuuauuuau

SEQ ID NO: 2721902 - RNA, 15 nt, Human
caaaauugauguguu

SEQ ID NO: 2721903 - RNA, 16 nt, Human
caaaauugauguguuu

SEQ ID NO: 2721904 - RNA, 12 nt, Human
caaaauaaaacu

SEQ ID NO: 2721905 - RNA, 15 nt, Human
caaaauguaggguua

SEQ ID NO: 2721906 - RNA, 17 nt, Human
caaagccuccuccagcc

SEQ ID NO: 2721907 - RNA, 18 nt, Human
caaagccuccuccagccg

SEQ ID NO: 2721908 - RNA, 22 nt, Human
caaagccaaagcuaggccuggc

SEQ ID NO: 2721909 - RNA, 17 nt, Human
caaacucaccugccccu

SEQ ID NO: 2721910 - RNA, 19 nt, Human
caaagcugaugacaacuuc

SEQ ID NO: 2721911 - RNA, 12 nt, Human
caaaggaagcac

SEQ ID NO: 2721912 - RNA, 13 nt, Human
caaaggaagcaca

SEQ ID NO: 2721913 - RNA, 13 nt, Human
caaagcuaggccu

SEQ ID NO: 2721914 - RNA, 14 nt, Human
caaagcuaggccug

SEQ ID NO: 2721915 - RNA, 19 nt, Human
caaagcuaggccuggccag

SEQ ID NO: 2721916 - RNA, 14 nt, Human
caaaggaagcacau

SEQ ID NO: 2721917 - RNA, 16 nt, Human
caaaggguaucaggug

SEQ ID NO: 2721918 - RNA, 18 nt, Human
caaaggguaucaggugcu

SEQ ID NO: 2721919 - RNA, 19 nt, Human
cacaguuuucugagaaaga

SEQ ID NO: 2721920 - RNA, 17 nt, Human
cacaguuuucugagaaa

SEQ ID NO: 2721921 - RNA, 16 nt, Human
cacaguuuucugagaa

SEQ ID NO: 2721922 - RNA, 14 nt, Human
cacauaucugucau

SEQ ID NO: 2721923 - RNA, 11 nt, Human
cacaggcaggu

SEQ ID NO: 2721924 - RNA, 14 nt, Human
cacaggcaggucca

SEQ ID NO: 2721925 - RNA, 15 nt, Human
cacaggcagguccag

SEQ ID NO: 2721926 - RNA, 22 nt, Human
cacagcugggguggggaccuca

SEQ ID NO: 2721927 - RNA, 23 nt, Human
cacagcugggguggggaccucag

SEQ ID NO: 2721928 - RNA, 21 nt, Human
cacagcuucauuuccuguguc

SEQ ID NO: 2721929 - RNA, 22 nt, Human
cacagcuucauuuccugugucu

SEQ ID NO: 2721930 - RNA, 14 nt, Human
cacaguucucuccu

SEQ ID NO: 2721931 - RNA, 15 nt, Human
cacaguucucuccuu

SEQ ID NO: 2721932 - RNA, 19 nt, Human
cacagugaucaaguuauuu

SEQ ID NO: 2721933 - RNA, 22 nt, Human
cacagugagucgaggacaggga

SEQ ID NO: 2721934 - RNA, 21 nt, Human
cacagugagucgaggacaggg

SEQ ID NO: 2721935 - RNA, 13 nt, Human
cacaguccuuacc

SEQ ID NO: 2721936 - RNA, 15 nt, Human
cacaguccuuaccag

SEQ ID NO: 2721937 - RNA, 21 nt, Human
cacaguccuuaccagcagagc

SEQ ID NO: 2721938 - RNA, 22 nt, Human
cacaguccuuaccagcagagca

SEQ ID NO: 2721939 - RNA, 16 nt, Human
cacuugacaucaacug

SEQ ID NO: 2721940 - RNA, 20 nt, Human
cacuugagaauuacccuuuu

SEQ ID NO: 2721941 - RNA, 17 nt, Human
cacuugagaauuacccu

SEQ ID NO: 2721942 - RNA, 19 nt, Human
cacuugacaucaacugcau

SEQ ID NO: 2721943 - RNA, 13 nt, Human
cacuugaguccag

SEQ ID NO: 2721944 - RNA, 13 nt, Human
cacuugcagacuc

SEQ ID NO: 2721945 - RNA, 18 nt, Human
cacuuucuagccagagga

SEQ ID NO: 2721946 - RNA, 19 nt, Human
cacuuucuagccagaggag

SEQ ID NO: 2721947 - RNA, 20 nt, Human
cacuuucuagccagaggaga

SEQ ID NO: 2721948 - RNA, 24 nt, Human
cacuugcagacucuacagaggcca

SEQ ID NO: 2721949 - RNA, 14 nt, Human
cacuugcagacucu

SEQ ID NO: 2721950 - RNA, 18 nt, Human
cacuugcagacucuacag

SEQ ID NO: 2721951 - RNA, 19 nt, Human
cacuugcagacucuacaga

SEQ ID NO: 2721952 - RNA, 22 nt, Human
cacuugcagacucuacagaggc

SEQ ID NO: 2721953 - RNA, 16 nt, Human
cacuucccuacaugga

SEQ ID NO: 2721954 - RNA, 21 nt, Human
cacuucgggaggucgaggcag

SEQ ID NO: 2721955 - RNA, 23 nt, Human
cacuucgggaggucgaggcagga

SEQ ID NO: 2721956 - RNA, 22 nt, Human
cacuucugccauauucuguugg

SEQ ID NO: 2721957 - RNA, 12 nt, Human
cacuucagcuga

SEQ ID NO: 2721958 - RNA, 21 nt, Human
cacuucagcugacuuuucugu

SEQ ID NO: 2721959 - RNA, 19 nt, Human
cacuguggguagacacaca

SEQ ID NO: 2721960 - RNA, 17 nt, Human
cacugugcugagucuga

SEQ ID NO: 2721961 - RNA, 20 nt, Human
cacugugcugagucugaagg

SEQ ID NO: 2721962 - RNA, 21 nt, Human
cacugugcugagucugaaggc

SEQ ID NO: 2721963 - RNA, 22 nt, Human
cacugugcugagucugaaggcu

SEQ ID NO: 2721964 - RNA, 13 nt, Human
cacugugcugagu

SEQ ID NO: 2721965 - RNA, 15 nt, Human
cacugugcugagucu

SEQ ID NO: 2721966 - RNA, 18 nt, Human
cacugugccaugugccag

SEQ ID NO: 2721967 - RNA, 15 nt, Human
cacugugccaugugc

SEQ ID NO: 2721968 - RNA, 16 nt, Human
cacugugccaugugcc

SEQ ID NO: 2721969 - RNA, 22 nt, Human
cacuguggguagacacacauga

SEQ ID NO: 2721970 - RNA, 24 nt, Human
cacuguggguagacacacaugaag

SEQ ID NO: 2721971 - RNA, 13 nt, Human
cacuguucucugc

SEQ ID NO: 2721972 - RNA, 14 nt, Human
cacuguucucugcc

SEQ ID NO: 2721973 - RNA, 15 nt, Human
cacuguucucugccc

SEQ ID NO: 2721974 - RNA, 16 nt, Human
cacuguucucugcccu

SEQ ID NO: 2721975 - RNA, 17 nt, Human
cacuguucucugcccuc

SEQ ID NO: 2721976 - RNA, 19 nt, Human
cacuguucucugcccucca

SEQ ID NO: 2721977 - RNA, 21 nt, Human
cacuguucucugcccuccaag

SEQ ID NO: 2721978 - RNA, 22 nt, Human
cacuguucucugcccuccaaga

SEQ ID NO: 2721979 - RNA, 14 nt, Human
cacugucaagauga

SEQ ID NO: 2721980 - RNA, 13 nt, Human
cacugugaagaga

SEQ ID NO: 2721981 - RNA, 14 nt, Human
cacugugccaugug

SEQ ID NO: 2721982 - RNA, 20 nt, Human
cacugacuucuaaguaaaac

SEQ ID NO: 2721983 - RNA, 16 nt, Human
cacugacuucuaagua

SEQ ID NO: 2721984 - RNA, 15 nt, Human
cacugacuucuaagu

SEQ ID NO: 2721985 - RNA, 14 nt, Human
cacugacuucuaag

SEQ ID NO: 2721986 - RNA, 21 nt, Human
cacugacuucuaaguaaaacc

SEQ ID NO: 2721987 - RNA, 12 nt, Human
cacugagacagc

SEQ ID NO: 2721988 - RNA, 13 nt, Human
cacugagacagcc

SEQ ID NO: 2721989 - RNA, 14 nt, Human
cacugagacagccc

SEQ ID NO: 2721990 - RNA, 17 nt, Human
cacugagacagcccggg

SEQ ID NO: 2721991 - RNA, 19 nt, Human
cacugagacagcccgggcu

SEQ ID NO: 2721992 - RNA, 22 nt, Human
cacugagacagcccgggcucug

SEQ ID NO: 2721993 - RNA, 23 nt, Human
cacucuggcagcucagagagggu

SEQ ID NO: 2721994 - RNA, 20 nt, Human
cacucuggcagcucagagag

SEQ ID NO: 2721995 - RNA, 21 nt, Human
cacucuggcagcucagagagg

SEQ ID NO: 2721996 - RNA, 15 nt, Human
cacucuggcagcuca

SEQ ID NO: 2721997 - RNA, 16 nt, Human
cacucuggcagcucag

SEQ ID NO: 2721998 - RNA, 17 nt, Human
cacucuggcagcucaga

SEQ ID NO: 2721999 - RNA, 19 nt, Human
cacucuggcagcucagaga

SEQ ID NO: 2722000 - RNA, 15 nt, Human
cacucugucgcccag

SEQ ID NO: 2722001 - RNA, 16 nt, Human
cacucugucgcccagu

SEQ ID NO: 2722002 - RNA, 19 nt, Human
cacucugucgcccagucug

SEQ ID NO: 2722003 - RNA, 23 nt, Human
cacugacauuguuggccaaagcc

SEQ ID NO: 2722004 - RNA, 13 nt, Human
cacugacagauuu

SEQ ID NO: 2722005 - RNA, 17 nt, Human
cacugacagauuuccau

SEQ ID NO: 2722006 - RNA, 22 nt, Human
cacugacagauuuccauccuag

SEQ ID NO: 2722007 - RNA, 14 nt, Human
cacugcaaccuccg

SEQ ID NO: 2722008 - RNA, 16 nt, Human
cacugcaaccuccgcc

SEQ ID NO: 2722009 - RNA, 23 nt, Human
cacugcaaccuccgccucuuggg

SEQ ID NO: 2722010 - RNA, 13 nt, Human
cacugcaaccucc

SEQ ID NO: 2722011 - RNA, 23 nt, Human
cacugauuugacauagucuggcu

SEQ ID NO: 2722012 - RNA, 21 nt, Human
cacugauuugacauagucugg

SEQ ID NO: 2722013 - RNA, 23 nt, Human
cacugagacagcccgggcucugc

SEQ ID NO: 2722014 - RNA, 14 nt, Human
cacugaugggcaac

SEQ ID NO: 2722015 - RNA, 18 nt, Human
cacugaugggcaaccccc

SEQ ID NO: 2722016 - RNA, 24 nt, Human
cacugaugggcaacccccagccug

SEQ ID NO: 2722017 - RNA, 20 nt, Human
cacugccuucucaacuccaa

SEQ ID NO: 2722018 - RNA, 12 nt, Human
cacugcucuggu

SEQ ID NO: 2722019 - RNA, 14 nt, Human
cacugcaccgggcc

SEQ ID NO: 2722020 - RNA, 15 nt, Human
cacugcaccgggcca

SEQ ID NO: 2722021 - RNA, 16 nt, Human
cacugcaccgggccac

SEQ ID NO: 2722022 - RNA, 18 nt, Human
cacugcaccgggccacag

SEQ ID NO: 2722023 - RNA, 19 nt, Human
cacugcaccgggccacaga

SEQ ID NO: 2722024 - RNA, 18 nt, Human
cacugcacuauagccuag

SEQ ID NO: 2722025 - RNA, 17 nt, Human
cacuggaacacuaauga

SEQ ID NO: 2722026 - RNA, 21 nt, Human
cacugcuuuuggucuguguga

SEQ ID NO: 2722027 - RNA, 13 nt, Human
cacugcuuaacuu

SEQ ID NO: 2722028 - RNA, 14 nt, Human
cacugcuuccagug

SEQ ID NO: 2722029 - RNA, 15 nt, Human
cacugcuuccaguga

SEQ ID NO: 2722030 - RNA, 16 nt, Human
cacugcuuccagugag

SEQ ID NO: 2722031 - RNA, 22 nt, Human
cacugcuuccagugaggcucug

SEQ ID NO: 2722032 - RNA, 20 nt, Human
cacugcuuuuggucugugug

SEQ ID NO: 2722033 - RNA, 18 nt, Human
cacugcuuccagugaggc

SEQ ID NO: 2722034 - RNA, 19 nt, Human
cacugcuuccagugaggcu

SEQ ID NO: 2722035 - RNA, 20 nt, Human
cacugcuuccagugaggcuc

SEQ ID NO: 2722036 - RNA, 21 nt, Human
cacugcuuccagugaggcucu

SEQ ID NO: 2722037 - RNA, 16 nt, Human
cacgugguccuaaucu

SEQ ID NO: 2722038 - RNA, 19 nt, Human
cacgugguccuaaucuucu

SEQ ID NO: 2722039 - RNA, 13 nt, Human
cacuaaacaaaga

SEQ ID NO: 2722040 - RNA, 23 nt, Human
cacguuucuaaaggcuaccuuug

SEQ ID NO: 2722041 - RNA, 14 nt, Human
cacguuucuaaagg

SEQ ID NO: 2722042 - RNA, 12 nt, Human
cacguuucuaaa

SEQ ID NO: 2722043 - RNA, 18 nt, Human
cacguacacacacauaca

SEQ ID NO: 2722044 - RNA, 19 nt, Human
cacguacacacacauacac

SEQ ID NO: 2722045 - RNA, 14 nt, Human
cacguacacacaca

SEQ ID NO: 2722046 - RNA, 19 nt, Human
cacgccuguaauccuagca

SEQ ID NO: 2722047 - RNA, 20 nt, Human
cacgccuguaauccuagcac

SEQ ID NO: 2722048 - RNA, 15 nt, Human
cacgcgugcacacac

SEQ ID NO: 2722049 - RNA, 16 nt, Human
cacgcgugcacacacc

SEQ ID NO: 2722050 - RNA, 21 nt, Human
cacgcgugcacacaccagagc

SEQ ID NO: 2722051 - RNA, 23 nt, Human
cacgcgugcacacaccagagccc

SEQ ID NO: 2722052 - RNA, 23 nt, Human
cacggugaauggcuuuguauaga

SEQ ID NO: 2722053 - RNA, 20 nt, Human
cacggugaauggcuuuguau

SEQ ID NO: 2722054 - RNA, 20 nt, Human
cacgcuggaccuugaacugg

SEQ ID NO: 2722055 - RNA, 17 nt, Human
cacgcuggaccuugaac

SEQ ID NO: 2722056 - RNA, 16 nt, Human
cacggcucacugcagc

SEQ ID NO: 2722057 - RNA, 17 nt, Human
cacggcucacugcagcc

SEQ ID NO: 2722058 - RNA, 19 nt, Human
cacggcucacugcagccuc

SEQ ID NO: 2722059 - RNA, 20 nt, Human
cacggcucacugcagccuca

SEQ ID NO: 2722060 - RNA, 20 nt, Human
cacgagcaggcuacugucag

SEQ ID NO: 2722061 - RNA, 19 nt, Human
cacgagcaggcuacuguca

SEQ ID NO: 2722062 - RNA, 17 nt, Human
cacgagcaggcuacugu

SEQ ID NO: 2722063 - RNA, 22 nt, Human
cacgagcaggcuacugucagcu

SEQ ID NO: 2722064 - RNA, 17 nt, Human
cacgcacuucgggaggu

SEQ ID NO: 2722065 - RNA, 16 nt, Human
cacgauuucuguuuag

SEQ ID NO: 2722066 - RNA, 14 nt, Human
cacgauuucuguuu

SEQ ID NO: 2722067 - RNA, 12 nt, Human
cacgauuucugu

SEQ ID NO: 2722068 - RNA, 17 nt, Human
cacgcccccacugguga

SEQ ID NO: 2722069 - RNA, 18 nt, Human
cacgcccccacuggugac

SEQ ID NO: 2722070 - RNA, 23 nt, Human
cacgccagauucuuuccugaggc

SEQ ID NO: 2722071 - RNA, 13 nt, Human
cacgcccccacug

SEQ ID NO: 2722072 - RNA, 15 nt, Human
cacgcccccacuggu

SEQ ID NO: 2722073 - RNA, 13 nt, Human
cacgccacugcac

SEQ ID NO: 2722074 - RNA, 15 nt, Human
cacgccacugcacua

SEQ ID NO: 2722075 - RNA, 19 nt, Human
cacgccagauucuuuccug

SEQ ID NO: 2722076 - RNA, 20 nt, Human
cacgccagauucuuuccuga

SEQ ID NO: 2722077 - RNA, 22 nt, Human
cacgccagauucuuuccugagg

SEQ ID NO: 2722078 - RNA, 18 nt, Human
caccuugacagggcacac

SEQ ID NO: 2722079 - RNA, 15 nt, Human
caccuugacagggca

SEQ ID NO: 2722080 - RNA, 16 nt, Human
caccuugacagggcac

SEQ ID NO: 2722081 - RNA, 13 nt, Human
caccuugacaggg

SEQ ID NO: 2722082 - RNA, 17 nt, Human
cacgacugcccggcagg

SEQ ID NO: 2722083 - RNA, 16 nt, Human
cacgacugcccggcag

SEQ ID NO: 2722084 - RNA, 16 nt, Human
cacgaauauugcugau

SEQ ID NO: 2722085 - RNA, 19 nt, Human
cacgaauauugcugauggu

SEQ ID NO: 2722086 - RNA, 22 nt, Human
cacgaauauugcugauggugca

SEQ ID NO: 2722087 - RNA, 21 nt, Human
caccuuagacagucccugcca

SEQ ID NO: 2722088 - RNA, 23 nt, Human
caccuuagacagucccugccaau

SEQ ID NO: 2722089 - RNA, 20 nt, Human
caccugucuugccuuuuuca

SEQ ID NO: 2722090 - RNA, 17 nt, Human
caccugucuugccuuuu

SEQ ID NO: 2722091 - RNA, 14 nt, Human
caccuuagacaguc

SEQ ID NO: 2722092 - RNA, 16 nt, Human
caccuuagacaguccc

SEQ ID NO: 2722093 - RNA, 18 nt, Human
caccuuagacagucccug

SEQ ID NO: 2722094 - RNA, 19 nt, Human
caccuuagacagucccugc

SEQ ID NO: 2722095 - RNA, 16 nt, Human
cacucaaaucaagaaa

SEQ ID NO: 2722096 - RNA, 20 nt, Human
cacucaaaagcugggcaggu

SEQ ID NO: 2722097 - RNA, 15 nt, Human
cacucaaaagcuggg

SEQ ID NO: 2722098 - RNA, 17 nt, Human
cacucaaaagcugggca

SEQ ID NO: 2722099 - RNA, 18 nt, Human
cacucaaaagcugggcag

SEQ ID NO: 2722100 - RNA, 19 nt, Human
cacucaaaagcugggcagg

SEQ ID NO: 2722101 - RNA, 20 nt, Human
cacuauguugcccaggcagg

SEQ ID NO: 2722102 - RNA, 21 nt, Human
cacuauguugcccaggcaggu

SEQ ID NO: 2722103 - RNA, 12 nt, Human
cacucagaagac

SEQ ID NO: 2722104 - RNA, 16 nt, Human
cacucagaagacacug

SEQ ID NO: 2722105 - RNA, 17 nt, Human
cacucagaagacacuga

SEQ ID NO: 2722106 - RNA, 19 nt, Human
cacucacauuuauucugcu

SEQ ID NO: 2722107 - RNA, 20 nt, Human
cacucacauuuauucugcuc

SEQ ID NO: 2722108 - RNA, 22 nt, Human
cacucagaagacacugaugggc

SEQ ID NO: 2722109 - RNA, 18 nt, Human
cacucagaagacacugau

SEQ ID NO: 2722110 - RNA, 19 nt, Human
cacucagaagacacugaug

SEQ ID NO: 2722111 - RNA, 14 nt, Human
cacuaaccacgcug

SEQ ID NO: 2722112 - RNA, 15 nt, Human
cacuaaccacgcugg

SEQ ID NO: 2722113 - RNA, 16 nt, Human
cacuaaccacgcugga

SEQ ID NO: 2722114 - RNA, 17 nt, Human
cacuaagagagaaugag

SEQ ID NO: 2722115 - RNA, 18 nt, Human
cacuaaccacgcuggacc

SEQ ID NO: 2722116 - RNA, 17 nt, Human
cacuaaggugugcucug

SEQ ID NO: 2722117 - RNA, 18 nt, Human
cacuaaggugugcucuga

SEQ ID NO: 2722118 - RNA, 14 nt, Human
cacuaguauuucua

SEQ ID NO: 2722119 - RNA, 19 nt, Human
cacuaguauuucuaugaaa

SEQ ID NO: 2722120 - RNA, 14 nt, Human
cacuauaauguaag

SEQ ID NO: 2722121 - RNA, 18 nt, Human
cacuauaauguaagcucu

SEQ ID NO: 2722122 - RNA, 14 nt, Human
cacuauagccuagg

SEQ ID NO: 2722123 - RNA, 21 nt, Human
cacuauagccuaggugacaga

SEQ ID NO: 2722124 - RNA, 15 nt, Human
cacuauguugcccag

SEQ ID NO: 2722125 - RNA, 16 nt, Human
cacuauguugcccagg

SEQ ID NO: 2722126 - RNA, 17 nt, Human
cacuauguugcccaggc

SEQ ID NO: 2722127 - RNA, 18 nt, Human
cacuauguugcccaggca

SEQ ID NO: 2722128 - RNA, 19 nt, Human
cacuauguugcccaggcag

SEQ ID NO: 2722129 - RNA, 12 nt, Human
cacucuggcagc

SEQ ID NO: 2722130 - RNA, 13 nt, Human
cacucuggcagcu

SEQ ID NO: 2722131 - RNA, 14 nt, Human
cacucuggcagcuc

SEQ ID NO: 2722132 - RNA, 12 nt, Human
cacucuccuugg

SEQ ID NO: 2722133 - RNA, 12 nt, Human
cacucugagacu

SEQ ID NO: 2722134 - RNA, 23 nt, Human
cacucugagacucgcgacaaugc

SEQ ID NO: 2722135 - RNA, 17 nt, Human
cacucuccauuuaauaa

SEQ ID NO: 2722136 - RNA, 15 nt, Human
cacucuccauuuaau

SEQ ID NO: 2722137 - RNA, 17 nt, Human
cacucccugcaaccuga

SEQ ID NO: 2722138 - RNA, 14 nt, Human
cacuccuucacaga

SEQ ID NO: 2722139 - RNA, 21 nt, Human
cacuccuucacagaugggugc

SEQ ID NO: 2722140 - RNA, 16 nt, Human
cacucaguccauagca

SEQ ID NO: 2722141 - RNA, 15 nt, Human
cacucauugaccuga

SEQ ID NO: 2722142 - RNA, 18 nt, Human
cacucauugaccugaggc

SEQ ID NO: 2722143 - RNA, 19 nt, Human
cacucauugaccugaggcc

SEQ ID NO: 2722144 - RNA, 20 nt, Human
cacucauugaccugaggccc

SEQ ID NO: 2722145 - RNA, 22 nt, Human
cacucauugaccugaggcccuu

SEQ ID NO: 2722146 - RNA, 15 nt, Human
cacuccccugcuggg

SEQ ID NO: 2722147 - RNA, 12 nt, Human
cacucccugcaa

SEQ ID NO: 2722148 - RNA, 13 nt, Human
cacucccugcaac

SEQ ID NO: 2722149 - RNA, 16 nt, Human
cacucccugcaaccug

SEQ ID NO: 2722150 - RNA, 13 nt, Human
caccucccugcaa

SEQ ID NO: 2722151 - RNA, 14 nt, Human
caccucccugcaau

SEQ ID NO: 2722152 - RNA, 14 nt, Human
caccuccugccucg

SEQ ID NO: 2722153 - RNA, 13 nt, Human
caccuccugccuc

SEQ ID NO: 2722154 - RNA, 11 nt, Human
caccuccugcc

SEQ ID NO: 2722155 - RNA, 13 nt, Human
caccucucccuug

SEQ ID NO: 2722156 - RNA, 14 nt, Human
caccucucccuugg

SEQ ID NO: 2722157 - RNA, 17 nt, Human
caccucucccuuggauu

SEQ ID NO: 2722158 - RNA, 10 nt, Human
caccucccug

SEQ ID NO: 2722159 - RNA, 11 nt, Human
caccucaugga

SEQ ID NO: 2722160 - RNA, 12 nt, Human
caccucauggaa

SEQ ID NO: 2722161 - RNA, 14 nt, Human
caccucauggaauu

SEQ ID NO: 2722162 - RNA, 21 nt, Human
caccgcagacaggaccaggga

SEQ ID NO: 2722163 - RNA, 14 nt, Human
caccgggcacucag

SEQ ID NO: 2722164 - RNA, 20 nt, Human
caccggcuggccuggccccu

SEQ ID NO: 2722165 - RNA, 17 nt, Human
caccggcuggccuggcc

SEQ ID NO: 2722166 - RNA, 18 nt, Human
caccggcuggccuggccc

SEQ ID NO: 2722167 - RNA, 14 nt, Human
caccggcuggccug

SEQ ID NO: 2722168 - RNA, 15 nt, Human
caccggcuggccugg

SEQ ID NO: 2722169 - RNA, 16 nt, Human
caccggcuggccuggc

SEQ ID NO: 2722170 - RNA, 15 nt, Human
caccgggcacucaga

SEQ ID NO: 2722171 - RNA, 22 nt, Human
caccgggcacucagaagacacu

SEQ ID NO: 2722172 - RNA, 15 nt, Human
caccgggccacagag

SEQ ID NO: 2722173 - RNA, 18 nt, Human
caccgggccacagagaaa

SEQ ID NO: 2722174 - RNA, 18 nt, Human
caccucugcacaagcugc

SEQ ID NO: 2722175 - RNA, 19 nt, Human
caccucugcacaagcugca

SEQ ID NO: 2722176 - RNA, 15 nt, Human
caccucucucacucc

SEQ ID NO: 2722177 - RNA, 17 nt, Human
caccucucucacuccuu

SEQ ID NO: 2722178 - RNA, 18 nt, Human
caccucucucacuccuug

SEQ ID NO: 2722179 - RNA, 19 nt, Human
caccucucucacuccuuga

SEQ ID NO: 2722180 - RNA, 23 nt, Human
caccugaagacucauucuucugu

SEQ ID NO: 2722181 - RNA, 14 nt, Human
caccugaagacuca

SEQ ID NO: 2722182 - RNA, 15 nt, Human
caccugaagacucau

SEQ ID NO: 2722183 - RNA, 20 nt, Human
caccugcggugcuaucuccc

SEQ ID NO: 2722184 - RNA, 23 nt, Human
caccugcggugcuaucuccccca

SEQ ID NO: 2722185 - RNA, 20 nt, Human
caccuggaauauauaaccag

SEQ ID NO: 2722186 - RNA, 23 nt, Human
caccuggccucugcacuccccug

SEQ ID NO: 2722187 - RNA, 17 nt, Human
caccuggccucugcacu

SEQ ID NO: 2722188 - RNA, 18 nt, Human
caccuggccucugcacuc

SEQ ID NO: 2722189 - RNA, 19 nt, Human
caccuggccucugcacucc

SEQ ID NO: 2722190 - RNA, 20 nt, Human
caccuggccucugcacuccc

SEQ ID NO: 2722191 - RNA, 12 nt, Human
caccuggccucu

SEQ ID NO: 2722192 - RNA, 13 nt, Human
caccuggccucug

SEQ ID NO: 2722193 - RNA, 14 nt, Human
caccuggccucugc

SEQ ID NO: 2722194 - RNA, 15 nt, Human
caccuggccucugca

SEQ ID NO: 2722195 - RNA, 12 nt, Human
cacccggccccu

SEQ ID NO: 2722196 - RNA, 19 nt, Human
cacccgcuaagagggaggg

SEQ ID NO: 2722197 - RNA, 13 nt, Human
cacccggccccug

SEQ ID NO: 2722198 - RNA, 14 nt, Human
cacccggccccugc

SEQ ID NO: 2722199 - RNA, 16 nt, Human
cacccggccccugcug

SEQ ID NO: 2722200 - RNA, 17 nt, Human
cacccggccccugcugg

SEQ ID NO: 2722201 - RNA, 18 nt, Human
cacccggccccugcuggu

SEQ ID NO: 2722202 - RNA, 21 nt, Human
cacccggccccugcugguuca

SEQ ID NO: 2722203 - RNA, 20 nt, Human
caccccucaacaccucugca

SEQ ID NO: 2722204 - RNA, 13 nt, Human
cacauauugauuu

SEQ ID NO: 2722205 - RNA, 12 nt, Human
caccgcagacag

SEQ ID NO: 2722206 - RNA, 13 nt, Human
caccgcagacagg

SEQ ID NO: 2722207 - RNA, 14 nt, Human
caccgcagacagga

SEQ ID NO: 2722208 - RNA, 15 nt, Human
caccgcagacaggac

SEQ ID NO: 2722209 - RNA, 17 nt, Human
caccgcagacaggacca

SEQ ID NO: 2722210 - RNA, 18 nt, Human
caccgcagacaggaccag

SEQ ID NO: 2722211 - RNA, 22 nt, Human
caccgaaaacguggcugcuuca

SEQ ID NO: 2722212 - RNA, 19 nt, Human
caccgaaaacguggcugcu

SEQ ID NO: 2722213 - RNA, 21 nt, Human
caccgaaaacguggcugcuuc

SEQ ID NO: 2722214 - RNA, 15 nt, Human
caccgaaaacguggc

SEQ ID NO: 2722215 - RNA, 18 nt, Human
caccgaaaacguggcugc

SEQ ID NO: 2722216 - RNA, 11 nt, Human
cacccugugau

SEQ ID NO: 2722217 - RNA, 12 nt, Human
cacccugugaug

SEQ ID NO: 2722218 - RNA, 15 nt, Human
cacccugugaugggg

SEQ ID NO: 2722219 - RNA, 18 nt, Human
cacccugugauggggccc

SEQ ID NO: 2722220 - RNA, 20 nt, Human
cacccugugauggggcccug

SEQ ID NO: 2722221 - RNA, 21 nt, Human
cacccugugauggggcccugc

SEQ ID NO: 2722222 - RNA, 22 nt, Human
cacccugugauggggcccugcc

SEQ ID NO: 2722223 - RNA, 23 nt, Human
cacccugugauggggcccugccu

SEQ ID NO: 2722224 - RNA, 20 nt, Human
cacauauugauuuccguuaa

SEQ ID NO: 2722225 - RNA, 16 nt, Human
cacgccagauucuuuc

SEQ ID NO: 2722226 - RNA, 19 nt, Human
cagacauacuaaccagcag

SEQ ID NO: 2722227 - RNA, 19 nt, Human
cagacaccuugacagggca

SEQ ID NO: 2722228 - RNA, 20 nt, Human
cagacaccuugacagggcac

SEQ ID NO: 2722229 - RNA, 22 nt, Human
cagacaccuugacagggcacac

SEQ ID NO: 2722230 - RNA, 20 nt, Human
cagacaguuaagagaaauga

SEQ ID NO: 2722231 - RNA, 14 nt, Human
cagacacaugucca

SEQ ID NO: 2722232 - RNA, 17 nt, Human
cagacacauguccaaga

SEQ ID NO: 2722233 - RNA, 21 nt, Human
cagacacauguccaagaagcc

SEQ ID NO: 2722234 - RNA, 22 nt, Human
cagacacauguccaagaagccc

SEQ ID NO: 2722235 - RNA, 23 nt, Human
cagacacauguccaagaagccca

SEQ ID NO: 2722236 - RNA, 13 nt, Human
cagacacaggccc

SEQ ID NO: 2722237 - RNA, 14 nt, Human
cagacacaggcccg

SEQ ID NO: 2722238 - RNA, 15 nt, Human
cagacacaggcccgg

SEQ ID NO: 2722239 - RNA, 17 nt, Human
cagacacaggcccggcu

SEQ ID NO: 2722240 - RNA, 18 nt, Human
cagacacaggcccggcuc

SEQ ID NO: 2722241 - RNA, 21 nt, Human
cagacacaggcccggcuccag

SEQ ID NO: 2722242 - RNA, 22 nt, Human
cagacacaggcccggcuccagg

SEQ ID NO: 2722243 - RNA, 23 nt, Human
cagacacaggcccggcuccaggc

SEQ ID NO: 2722244 - RNA, 22 nt, Human
cagacaaagcgugguggacaug

SEQ ID NO: 2722245 - RNA, 20 nt, Human
cagacaacaaaccuguuucu

SEQ ID NO: 2722246 - RNA, 12 nt, Human
cagacaaagcgu

SEQ ID NO: 2722247 - RNA, 24 nt, Human
cagaauuucccaaagcagugcaug

SEQ ID NO: 2722248 - RNA, 17 nt, Human
cagaauuucccaaagca

SEQ ID NO: 2722249 - RNA, 18 nt, Human
cagaauuucccaaagcag

SEQ ID NO: 2722250 - RNA, 19 nt, Human
cagaauuucccaaagcagu

SEQ ID NO: 2722251 - RNA, 20 nt, Human
cagaauuucccaaagcagug

SEQ ID NO: 2722252 - RNA, 11 nt, Human
cagaauucuca

SEQ ID NO: 2722253 - RNA, 18 nt, Human
cagaauucucuaguuuga

SEQ ID NO: 2722254 - RNA, 15 nt, Human
cagaauucucuaguu

SEQ ID NO: 2722255 - RNA, 14 nt, Human
cagaauuucccaaa

SEQ ID NO: 2722256 - RNA, 19 nt, Human
cagagaaaguacuucucca

SEQ ID NO: 2722257 - RNA, 23 nt, Human
cagagaaaguacuucuccacccu

SEQ ID NO: 2722258 - RNA, 22 nt, Human
cagacccugcccugugggcccc

SEQ ID NO: 2722259 - RNA, 15 nt, Human
cagacccugcccugu

SEQ ID NO: 2722260 - RNA, 16 nt, Human
cagacccugcccugug

SEQ ID NO: 2722261 - RNA, 17 nt, Human
cagacccugcccugugg

SEQ ID NO: 2722262 - RNA, 21 nt, Human
cagacccugcccugugggccc

SEQ ID NO: 2722263 - RNA, 16 nt, Human
cagacccggcugcgug

SEQ ID NO: 2722264 - RNA, 12 nt, Human
cagacccugccc

SEQ ID NO: 2722265 - RNA, 13 nt, Human
cagacccugcccu

SEQ ID NO: 2722266 - RNA, 14 nt, Human
cagacccugcccug

SEQ ID NO: 2722267 - RNA, 12 nt, Human
cagacccggcug

SEQ ID NO: 2722268 - RNA, 14 nt, Human
cagacccggcugcg

SEQ ID NO: 2722269 - RNA, 14 nt, Human
cagaccacaaaacu

SEQ ID NO: 2722270 - RNA, 20 nt, Human
cagaccacaaaacuuuucua

SEQ ID NO: 2722271 - RNA, 21 nt, Human
cagaagacacugaugggcaac

SEQ ID NO: 2722272 - RNA, 18 nt, Human
cagaaucucaaauaacua

SEQ ID NO: 2722273 - RNA, 17 nt, Human
cagaaucucaaauaacu

SEQ ID NO: 2722274 - RNA, 17 nt, Human
cagaaggaucuucaucu

SEQ ID NO: 2722275 - RNA, 19 nt, Human
cagaaggaagacuucaucc

SEQ ID NO: 2722276 - RNA, 16 nt, Human
cagaaggaagacuuca

SEQ ID NO: 2722277 - RNA, 17 nt, Human
cagaaggaagacuucau

SEQ ID NO: 2722278 - RNA, 18 nt, Human
cagaaggaagacuucauc

SEQ ID NO: 2722279 - RNA, 23 nt, Human
cagaaaauggaagacagcucuua

SEQ ID NO: 2722280 - RNA, 19 nt, Human
cagaaaauauuauguguuu

SEQ ID NO: 2722281 - RNA, 16 nt, Human
cagaaaauggaagaca

SEQ ID NO: 2722282 - RNA, 20 nt, Human
cagaaaauggaagacagcuc

SEQ ID NO: 2722283 - RNA, 21 nt, Human
cagaaaauggaagacagcucu

SEQ ID NO: 2722284 - RNA, 22 nt, Human
cagaaaauggaagacagcucuu

SEQ ID NO: 2722285 - RNA, 17 nt, Human
cagaaaaguugaauuuu

SEQ ID NO: 2722286 - RNA, 22 nt, Human
cagaaaaguugaauuuuacaug

SEQ ID NO: 2722287 - RNA, 20 nt, Human
cagaaaaguugaauuuuaca

SEQ ID NO: 2722288 - RNA, 22 nt, Human
cacuuuuguucuugguuuguaa

SEQ ID NO: 2722289 - RNA, 14 nt, Human
cacuuuuguucuug

SEQ ID NO: 2722290 - RNA, 12 nt, Human
cacuuugggagg

SEQ ID NO: 2722291 - RNA, 13 nt, Human
cacuuugggaggc

SEQ ID NO: 2722292 - RNA, 16 nt, Human
cacuuugggaggccaa

SEQ ID NO: 2722293 - RNA, 13 nt, Human
cacuuuguucugg

SEQ ID NO: 2722294 - RNA, 14 nt, Human
cacuuuguucuggc

SEQ ID NO: 2722295 - RNA, 16 nt, Human
cacuuuguucuggcuc

SEQ ID NO: 2722296 - RNA, 23 nt, Human
cacuuuguucuggcucuuccagg

SEQ ID NO: 2722297 - RNA, 22 nt, Human
cacuuucuagccagaggagaga

SEQ ID NO: 2722298 - RNA, 16 nt, Human
cagacaacaaaccugu

SEQ ID NO: 2722299 - RNA, 12 nt, Human
cagagccugcag

SEQ ID NO: 2722300 - RNA, 13 nt, Human
cagaggaaggaga

SEQ ID NO: 2722301 - RNA, 13 nt, Human
cagagccugcagu

SEQ ID NO: 2722302 - RNA, 20 nt, Human
cagaggaaagcaaaggagau

SEQ ID NO: 2722303 - RNA, 23 nt, Human
cagagcccacgcccccacuggug

SEQ ID NO: 2722304 - RNA, 17 nt, Human
cagagcccacgccccca

SEQ ID NO: 2722305 - RNA, 19 nt, Human
cagagcccacgcccccacu

SEQ ID NO: 2722306 - RNA, 20 nt, Human
cagagcccacgcccccacug

SEQ ID NO: 2722307 - RNA, 21 nt, Human
cagagcccacgcccccacugg

SEQ ID NO: 2722308 - RNA, 20 nt, Human
cagaggagagaggacccccu

SEQ ID NO: 2722309 - RNA, 11 nt, Human
cagaggcagcc

SEQ ID NO: 2722310 - RNA, 13 nt, Human
cagaggagagagg

SEQ ID NO: 2722311 - RNA, 15 nt, Human
cagaggagagaggac

SEQ ID NO: 2722312 - RNA, 19 nt, Human
cagaggagagaggaccccc

SEQ ID NO: 2722313 - RNA, 23 nt, Human
cagagcaccuuagacagucccug

SEQ ID NO: 2722314 - RNA, 11 nt, Human
cagagcagaga

SEQ ID NO: 2722315 - RNA, 12 nt, Human
cagagcagagac

SEQ ID NO: 2722316 - RNA, 18 nt, Human
cagagcaccuuagacagu

SEQ ID NO: 2722317 - RNA, 19 nt, Human
cagagcaccuuagacaguc

SEQ ID NO: 2722318 - RNA, 21 nt, Human
cagagcaccuuagacaguccc

SEQ ID NO: 2722319 - RNA, 22 nt, Human
cagagcaccuuagacagucccu

SEQ ID NO: 2722320 - RNA, 13 nt, Human
cagagcagagacc

SEQ ID NO: 2722321 - RNA, 14 nt, Human
cagagcagagacca

SEQ ID NO: 2722322 - RNA, 15 nt, Human
cagagcagagaccau

SEQ ID NO: 2722323 - RNA, 17 nt, Human
cagagcagagaccaucc

SEQ ID NO: 2722324 - RNA, 18 nt, Human
cagagcagagaccauccc

SEQ ID NO: 2722325 - RNA, 19 nt, Human
cagagcagagaccaucccu

SEQ ID NO: 2722326 - RNA, 21 nt, Human
cagagcagagaccaucccuga

SEQ ID NO: 2722327 - RNA, 15 nt, Human
cagagcccaccuugg

SEQ ID NO: 2722328 - RNA, 17 nt, Human
cagagcccaccuuggcu

SEQ ID NO: 2722329 - RNA, 19 nt, Human
cagagcccaccuuggcuca

SEQ ID NO: 2722330 - RNA, 20 nt, Human
cagagcccaccuuggcucaa

SEQ ID NO: 2722331 - RNA, 16 nt, Human
cagagcccacgccccc

SEQ ID NO: 2722332 - RNA, 13 nt, Human
cagagaccauccc

SEQ ID NO: 2722333 - RNA, 14 nt, Human
cagagaccaucccu

SEQ ID NO: 2722334 - RNA, 16 nt, Human
cagagaccaucccuga

SEQ ID NO: 2722335 - RNA, 14 nt, Human
cagagacacaagcc

SEQ ID NO: 2722336 - RNA, 15 nt, Human
cagagacacaagccu

SEQ ID NO: 2722337 - RNA, 16 nt, Human
cagagacacaagccuu

SEQ ID NO: 2722338 - RNA, 17 nt, Human
cagagacacaagccuuc

SEQ ID NO: 2722339 - RNA, 19 nt, Human
cagagaaugaaagggccca

SEQ ID NO: 2722340 - RNA, 15 nt, Human
cagagaauucucuua

SEQ ID NO: 2722341 - RNA, 20 nt, Human
cagagaaugaaagggcccag

SEQ ID NO: 2722342 - RNA, 21 nt, Human
cagagaaugaaagggcccaga

SEQ ID NO: 2722343 - RNA, 14 nt, Human
cagagcaagugaga

SEQ ID NO: 2722344 - RNA, 20 nt, Human
cagagcaagugagacccugu

SEQ ID NO: 2722345 - RNA, 16 nt, Human
cagagcaccuuagaca

SEQ ID NO: 2722346 - RNA, 13 nt, Human
cagagacuccugc

SEQ ID NO: 2722347 - RNA, 14 nt, Human
cagagacuccugca

SEQ ID NO: 2722348 - RNA, 15 nt, Human
cagagacuccugcag

SEQ ID NO: 2722349 - RNA, 16 nt, Human
cagagacuccugcagg

SEQ ID NO: 2722350 - RNA, 17 nt, Human
cagagacuccugcaggc

SEQ ID NO: 2722351 - RNA, 18 nt, Human
cagagacuccugcaggca

SEQ ID NO: 2722352 - RNA, 19 nt, Human
cagagacuccugcaggcag

SEQ ID NO: 2722353 - RNA, 21 nt, Human
cagagaccaucccugaaggcc

SEQ ID NO: 2722354 - RNA, 17 nt, Human
cagagaccaucccugaa

SEQ ID NO: 2722355 - RNA, 18 nt, Human
cagagaccaucccugaag

SEQ ID NO: 2722356 - RNA, 19 nt, Human
cagagaccaucccugaagg

SEQ ID NO: 2722357 - RNA, 20 nt, Human
cagagaccaucccugaaggc

SEQ ID NO: 2722358 - RNA, 14 nt, Human
cagauaaucacaau

SEQ ID NO: 2722359 - RNA, 14 nt, Human
cagauaaucagugu

SEQ ID NO: 2722360 - RNA, 19 nt, Human
cagaguuguuacauuuuua

SEQ ID NO: 2722361 - RNA, 18 nt, Human
cagaguuguuacauuuuu

SEQ ID NO: 2722362 - RNA, 15 nt, Human
cagaguuguuacauu

SEQ ID NO: 2722363 - RNA, 14 nt, Human
cagaguugaagaca

SEQ ID NO: 2722364 - RNA, 15 nt, Human
cagaguugaagacag

SEQ ID NO: 2722365 - RNA, 16 nt, Human
cagaguugaagacaga

SEQ ID NO: 2722366 - RNA, 22 nt, Human
cagaguugaagacagagcuaca

SEQ ID NO: 2722367 - RNA, 14 nt, Human
cagaguuguuacau

SEQ ID NO: 2722368 - RNA, 17 nt, Human
cagaguugaagacagag

SEQ ID NO: 2722369 - RNA, 18 nt, Human
cagaguugaagacagagc

SEQ ID NO: 2722370 - RNA, 19 nt, Human
cagaguugaagacagagcu

SEQ ID NO: 2722371 - RNA, 20 nt, Human
cagaguugaagacagagcua

SEQ ID NO: 2722372 - RNA, 14 nt, Human
cagauccuggaaau

SEQ ID NO: 2722373 - RNA, 20 nt, Human
cagaucucuaacuucaccau

SEQ ID NO: 2722374 - RNA, 13 nt, Human
cagauccuggaaa

SEQ ID NO: 2722375 - RNA, 22 nt, Human
cagauacaggaaaagcugcuga

SEQ ID NO: 2722376 - RNA, 20 nt, Human
cagauacaggaaaagcugcu

SEQ ID NO: 2722377 - RNA, 21 nt, Human
cagauacaggaaaagcugcug

SEQ ID NO: 2722378 - RNA, 14 nt, Human
cagaucugccuaag

SEQ ID NO: 2722379 - RNA, 17 nt, Human
cagaucugccuaaggac

SEQ ID NO: 2722380 - RNA, 16 nt, Human
cagaucugccuaagga

SEQ ID NO: 2722381 - RNA, 23 nt, Human
cagaucugccuaaggacuucuuu

SEQ ID NO: 2722382 - RNA, 21 nt, Human
cagaucugccuaaggacuucu

SEQ ID NO: 2722383 - RNA, 20 nt, Human
cagaucugccuaaggacuuc

SEQ ID NO: 2722384 - RNA, 19 nt, Human
cagaucugccuaaggacuu

SEQ ID NO: 2722385 - RNA, 13 nt, Human
cagaugcaccagc

SEQ ID NO: 2722386 - RNA, 14 nt, Human
cagaugcaccagcc

SEQ ID NO: 2722387 - RNA, 16 nt, Human
cagaugcaccagcccu

SEQ ID NO: 2722388 - RNA, 17 nt, Human
cagaugcaccagcccuu

SEQ ID NO: 2722389 - RNA, 22 nt, Human
cagaugcaccagcccuuagcag

SEQ ID NO: 2722390 - RNA, 20 nt, Human
cagaggccaugggccuccug

SEQ ID NO: 2722391 - RNA, 21 nt, Human
cagaggccaugggccuccugu

SEQ ID NO: 2722392 - RNA, 23 nt, Human
cagaggcagccccauucugccug

SEQ ID NO: 2722393 - RNA, 19 nt, Human
cagaggccaugggccuccu

SEQ ID NO: 2722394 - RNA, 16 nt, Human
cagaggccaugggccu

SEQ ID NO: 2722395 - RNA, 12 nt, Human
cagaggcagccc

SEQ ID NO: 2722396 - RNA, 13 nt, Human
cagaggcagcccc

SEQ ID NO: 2722397 - RNA, 14 nt, Human
cagaggcagcccca

SEQ ID NO: 2722398 - RNA, 15 nt, Human
cagaggcagccccau

SEQ ID NO: 2722399 - RNA, 18 nt, Human
cagaggcagccccauucu

SEQ ID NO: 2722400 - RNA, 19 nt, Human
cagaggcagccccauucug

SEQ ID NO: 2722401 - RNA, 20 nt, Human
cagaggcagccccauucugc

SEQ ID NO: 2722402 - RNA, 22 nt, Human
cagaggcagccccauucugccu

SEQ ID NO: 2722403 - RNA, 23 nt, Human
cagaggcugccucucccaucacu

SEQ ID NO: 2722404 - RNA, 14 nt, Human
cagagggagugaca

SEQ ID NO: 2722405 - RNA, 16 nt, Human
cagagggagugacaga

SEQ ID NO: 2722406 - RNA, 18 nt, Human
cagagggagugacagagg

SEQ ID NO: 2722407 - RNA, 19 nt, Human
cagagggagugacagaggc

SEQ ID NO: 2722408 - RNA, 13 nt, Human
cagaggcugccuc

SEQ ID NO: 2722409 - RNA, 13 nt, Human
cagagucucacug

SEQ ID NO: 2722410 - RNA, 17 nt, Human
cagagucucacuguugc

SEQ ID NO: 2722411 - RNA, 19 nt, Human
cagagucucacuguugccc

SEQ ID NO: 2722412 - RNA, 20 nt, Human
cagagucucacuguugccca

SEQ ID NO: 2722413 - RNA, 21 nt, Human
cagagucucacuguugcccag

SEQ ID NO: 2722414 - RNA, 15 nt, Human
cagagggccugcaag

SEQ ID NO: 2722415 - RNA, 19 nt, Human
cagagggccugcaagggag

SEQ ID NO: 2722416 - RNA, 20 nt, Human
cagagggagugacagaggca

SEQ ID NO: 2722417 - RNA, 21 nt, Human
cagagggagugacagaggcag

SEQ ID NO: 2722418 - RNA, 22 nt, Human
cagagggagugacagaggcagc

SEQ ID NO: 2722419 - RNA, 23 nt, Human
cagagggagugacagaggcagcc

SEQ ID NO: 2722420 - RNA, 19 nt, Human
cagagugagacucugucuc

SEQ ID NO: 2722421 - RNA, 20 nt, Human
cagagugagacucugucuca

SEQ ID NO: 2722422 - RNA, 22 nt, Human
cagagucucacuguugcccagg

SEQ ID NO: 2722423 - RNA, 23 nt, Human
cagagucucacuguugcccaggc

SEQ ID NO: 2722424 - RNA, 16 nt, Human
cagagugagacucugu

SEQ ID NO: 2722425 - RNA, 17 nt, Human
cagagugagacucuguc

SEQ ID NO: 2722426 - RNA, 18 nt, Human
cagagugagacucugucu

SEQ ID NO: 2722427 - RNA, 20 nt, Human
caggaaguacuggagaaaau

SEQ ID NO: 2722428 - RNA, 17 nt, Human
caggaaguacuggagaa

SEQ ID NO: 2722429 - RNA, 18 nt, Human
caggaaguacuggagaaa

SEQ ID NO: 2722430 - RNA, 12 nt, Human
caggaaguacug

SEQ ID NO: 2722431 - RNA, 14 nt, Human
caggaaguacugga

SEQ ID NO: 2722432 - RNA, 16 nt, Human
caggaaguacuggaga

SEQ ID NO: 2722433 - RNA, 15 nt, Human
caggaaggcuaaagg

SEQ ID NO: 2722434 - RNA, 23 nt, Human
caggaauggagccugcacgguga

SEQ ID NO: 2722435 - RNA, 17 nt, Human
caggaauggagccugca

SEQ ID NO: 2722436 - RNA, 23 nt, Human
caggaagcucagggccuggcuca

SEQ ID NO: 2722437 - RNA, 20 nt, Human
caggaagcucagggccuggc

SEQ ID NO: 2722438 - RNA, 21 nt, Human
caggaagcucagggccuggcu

SEQ ID NO: 2722439 - RNA, 13 nt, Human
caggaagcucagg

SEQ ID NO: 2722440 - RNA, 14 nt, Human
caggaagcucaggg

SEQ ID NO: 2722441 - RNA, 15 nt, Human
caggaagcucagggc

SEQ ID NO: 2722442 - RNA, 16 nt, Human
caggaagcucagggcc

SEQ ID NO: 2722443 - RNA, 17 nt, Human
caggaagcucagggccu

SEQ ID NO: 2722444 - RNA, 18 nt, Human
caggaagcucagggccug

SEQ ID NO: 2722445 - RNA, 19 nt, Human
caggaagcucagggccugg

SEQ ID NO: 2722446 - RNA, 22 nt, Human
caggaagccagcaggcucucag

SEQ ID NO: 2722447 - RNA, 19 nt, Human
caggaagccagcaggcucu

SEQ ID NO: 2722448 - RNA, 21 nt, Human
caggaagccagcaggcucuca

SEQ ID NO: 2722449 - RNA, 14 nt, Human
caggaagccagcag

SEQ ID NO: 2722450 - RNA, 16 nt, Human
caggaagccagcaggc

SEQ ID NO: 2722451 - RNA, 17 nt, Human
caggaagccagcaggcu

SEQ ID NO: 2722452 - RNA, 18 nt, Human
caggaagccagcaggcuc

SEQ ID NO: 2722453 - RNA, 18 nt, Human
cagcuugaaacugagaug

SEQ ID NO: 2722454 - RNA, 19 nt, Human
cagcuucauuuccuguguc

SEQ ID NO: 2722455 - RNA, 20 nt, Human
cagcuucauuuccugugucu

SEQ ID NO: 2722456 - RNA, 21 nt, Human
cagcuucauuuccugugucuu

SEQ ID NO: 2722457 - RNA, 14 nt, Human
cagcuugaggguug

SEQ ID NO: 2722458 - RNA, 15 nt, Human
cagcuugaggguugg

SEQ ID NO: 2722459 - RNA, 18 nt, Human
cagcuugaccgugaggcc

SEQ ID NO: 2722460 - RNA, 19 nt, Human
cagcuugaccgugaggcca

SEQ ID NO: 2722461 - RNA, 20 nt, Human
cagcuugaccgugaggccag

SEQ ID NO: 2722462 - RNA, 21 nt, Human
cagcuugaccgugaggccaga

SEQ ID NO: 2722463 - RNA, 18 nt, Human
cagcuugaggguugggcu

SEQ ID NO: 2722464 - RNA, 19 nt, Human
cagcuugaggguugggcug

SEQ ID NO: 2722465 - RNA, 20 nt, Human
cagcuugaggguugggcugg

SEQ ID NO: 2722466 - RNA, 21 nt, Human
cagcuugaggguugggcuggu

SEQ ID NO: 2722467 - RNA, 18 nt, Human
cagcuuguaaauagcuca

SEQ ID NO: 2722468 - RNA, 19 nt, Human
cagcuuguaaauagcucag

SEQ ID NO: 2722469 - RNA, 20 nt, Human
cagcuuguaaauagcucagg

SEQ ID NO: 2722470 - RNA, 21 nt, Human
cagcuuguaaauagcucaggu

SEQ ID NO: 2722471 - RNA, 22 nt, Human
cagcuuguaaauagcucaggug

SEQ ID NO: 2722472 - RNA, 18 nt, Human
caggaaccacaagacugc

SEQ ID NO: 2722473 - RNA, 12 nt, Human
cagcuuuguuug

SEQ ID NO: 2722474 - RNA, 21 nt, Human
cagcuuuguuuguugucagcu

SEQ ID NO: 2722475 - RNA, 22 nt, Human
cagcuuuguuuguugucagcug

SEQ ID NO: 2722476 - RNA, 23 nt, Human
cagcuuuguuuguugucagcuga

SEQ ID NO: 2722477 - RNA, 18 nt, Human
cagcuguaugauucccag

SEQ ID NO: 2722478 - RNA, 18 nt, Human
cagcugguugagguuuca

SEQ ID NO: 2722479 - RNA, 18 nt, Human
cagcuggugcccugcuuu

SEQ ID NO: 2722480 - RNA, 23 nt, Human
cagcuggugcccugcuuucagau

SEQ ID NO: 2722481 - RNA, 21 nt, Human
cagcuggugcccugcuuucag

SEQ ID NO: 2722482 - RNA, 20 nt, Human
cagcuggugcccugcuuuca

SEQ ID NO: 2722483 - RNA, 19 nt, Human
cagcuggugcccugcuuuc

SEQ ID NO: 2722484 - RNA, 21 nt, Human
cagcugggguggggaccucag

SEQ ID NO: 2722485 - RNA, 22 nt, Human
cagcugggguggggaccucagg

SEQ ID NO: 2722486 - RNA, 23 nt, Human
cagcugggguggggaccucaggc

SEQ ID NO: 2722487 - RNA, 23 nt, Human
cagcugcuuuugucuaugggacu

SEQ ID NO: 2722488 - RNA, 22 nt, Human
cagcugcuuuugucuaugggac

SEQ ID NO: 2722489 - RNA, 21 nt, Human
cagcugcugaaacaacaaaua

SEQ ID NO: 2722490 - RNA, 20 nt, Human
cagcugcugaaacaacaaau

SEQ ID NO: 2722491 - RNA, 17 nt, Human
cagcugcuacuacuccu

SEQ ID NO: 2722492 - RNA, 13 nt, Human
cagcugcuugggc

SEQ ID NO: 2722493 - RNA, 14 nt, Human
cagcugcuugggcu

SEQ ID NO: 2722494 - RNA, 15 nt, Human
cagcugcuugggcuu

SEQ ID NO: 2722495 - RNA, 16 nt, Human
cagcugcuugggcuuc

SEQ ID NO: 2722496 - RNA, 18 nt, Human
cagcugcuugggcuucau

SEQ ID NO: 2722497 - RNA, 19 nt, Human
cagcugcuugggcuucauc

SEQ ID NO: 2722498 - RNA, 21 nt, Human
cagcugcuugggcuucauccu

SEQ ID NO: 2722499 - RNA, 22 nt, Human
cagcugcuugggcuucauccuc

SEQ ID NO: 2722500 - RNA, 18 nt, Human
cagcugccugggaucccu

SEQ ID NO: 2722501 - RNA, 23 nt, Human
cagcugccugggaucccucaucc

SEQ ID NO: 2722502 - RNA, 18 nt, Human
cagcugcgguccacccag

SEQ ID NO: 2722503 - RNA, 15 nt, Human
cagcugccugggauc

SEQ ID NO: 2722504 - RNA, 19 nt, Human
cagcugcgguccacccagg

SEQ ID NO: 2722505 - RNA, 20 nt, Human
cagcugcgguccacccagga

SEQ ID NO: 2722506 - RNA, 21 nt, Human
cagcugcgguccacccaggag

SEQ ID NO: 2722507 - RNA, 22 nt, Human
cagcugcgguccacccaggagc

SEQ ID NO: 2722508 - RNA, 23 nt, Human
cagcugcgguccacccaggagcc

SEQ ID NO: 2722509 - RNA, 24 nt, Human
cagcugcgguccacccaggagccc

SEQ ID NO: 2722510 - RNA, 21 nt, Human
cagcucugcaagaauugaagc

SEQ ID NO: 2722511 - RNA, 15 nt, Human
cagcucugcaagaau

SEQ ID NO: 2722512 - RNA, 16 nt, Human
cagcucugcaagaauu

SEQ ID NO: 2722513 - RNA, 16 nt, Human
cagcuccuucuguccu

SEQ ID NO: 2722514 - RNA, 17 nt, Human
cagcuccuucuguccua

SEQ ID NO: 2722515 - RNA, 21 nt, Human
cagcuccuucuguccuacucu

SEQ ID NO: 2722516 - RNA, 23 nt, Human
cagcuccuucuguccuacucugu

SEQ ID NO: 2722517 - RNA, 13 nt, Human
cagcucagagagg

SEQ ID NO: 2722518 - RNA, 17 nt, Human
cagcucagagagggugg

SEQ ID NO: 2722519 - RNA, 19 nt, Human
cagcucagagaggguggga

SEQ ID NO: 2722520 - RNA, 20 nt, Human
cagcucagagagggugggag

SEQ ID NO: 2722521 - RNA, 10 nt, Human
cagcucuggu

SEQ ID NO: 2722522 - RNA, 13 nt, Human
cagcucuggucca

SEQ ID NO: 2722523 - RNA, 16 nt, Human
cagcucugguccauag

SEQ ID NO: 2722524 - RNA, 17 nt, Human
cagcucugguccauaga

SEQ ID NO: 2722525 - RNA, 18 nt, Human
cagcucugguccauagag

SEQ ID NO: 2722526 - RNA, 21 nt, Human
cagcucugguccauagagagc

SEQ ID NO: 2722527 - RNA, 12 nt, Human
cagcucuguccu

SEQ ID NO: 2722528 - RNA, 13 nt, Human
cagcucuguccug

SEQ ID NO: 2722529 - RNA, 22 nt, Human
cagcucugguccauagagagca

SEQ ID NO: 2722530 - RNA, 23 nt, Human
cagcucugguccauagagagcaa

SEQ ID NO: 2722531 - RNA, 14 nt, Human
cagcucuguccugg

SEQ ID NO: 2722532 - RNA, 16 nt, Human
cagcucuguccuggga

SEQ ID NO: 2722533 - RNA, 17 nt, Human
cagcucuguccugggag

SEQ ID NO: 2722534 - RNA, 18 nt, Human
cagcucuguccugggagu

SEQ ID NO: 2722535 - RNA, 23 nt, Human
cagcucuguccugggagugagcu

SEQ ID NO: 2722536 - RNA, 10 nt, Human
cagcucuuau

SEQ ID NO: 2722537 - RNA, 21 nt, Human
cagcucuuauauugccauuuc

SEQ ID NO: 2722538 - RNA, 13 nt, Human
cagcucuucucca

SEQ ID NO: 2722539 - RNA, 14 nt, Human
cagcucuucuccag

SEQ ID NO: 2722540 - RNA, 15 nt, Human
cagcucuucuccagg

SEQ ID NO: 2722541 - RNA, 16 nt, Human
cagcucuucuccaggc

SEQ ID NO: 2722542 - RNA, 17 nt, Human
cagcucuucuccaggcu

SEQ ID NO: 2722543 - RNA, 18 nt, Human
cagcucuucuccaggcug

SEQ ID NO: 2722544 - RNA, 19 nt, Human
cagcucuucuccaggcugu

SEQ ID NO: 2722545 - RNA, 23 nt, Human
cagcucuucuccaggcuguaucc

SEQ ID NO: 2722546 - RNA, 22 nt, Human
caggaagcucagggccuggcuc

SEQ ID NO: 2722547 - RNA, 21 nt, Human
cagcccgggcucugccuccca

SEQ ID NO: 2722548 - RNA, 22 nt, Human
cagcccgggcucugccucccau

SEQ ID NO: 2722549 - RNA, 17 nt, Human
cagcccgggcucugccu

SEQ ID NO: 2722550 - RNA, 18 nt, Human
cagcccgggcucugccuc

SEQ ID NO: 2722551 - RNA, 19 nt, Human
cagcccgggcucugccucc

SEQ ID NO: 2722552 - RNA, 20 nt, Human
cagcccgggcucugccuccc

SEQ ID NO: 2722553 - RNA, 13 nt, Human
cagcccgggcucu

SEQ ID NO: 2722554 - RNA, 14 nt, Human
cagcccgggcucug

SEQ ID NO: 2722555 - RNA, 15 nt, Human
cagcccgggcucugc

SEQ ID NO: 2722556 - RNA, 16 nt, Human
cagcccgggcucugcc

SEQ ID NO: 2722557 - RNA, 24 nt, Human
cagccccuucugacccaugcugcc

SEQ ID NO: 2722558 - RNA, 22 nt, Human
cagccccuucugacccaugcug

SEQ ID NO: 2722559 - RNA, 23 nt, Human
cagccccuucugacccaugcugc

SEQ ID NO: 2722560 - RNA, 16 nt, Human
cagccccuucugaccc

SEQ ID NO: 2722561 - RNA, 17 nt, Human
cagccccuucugaccca

SEQ ID NO: 2722562 - RNA, 19 nt, Human
cagccccuucugacccaug

SEQ ID NO: 2722563 - RNA, 21 nt, Human
cagccccuucugacccaugcu

SEQ ID NO: 2722564 - RNA, 13 nt, Human
cagccccagugcc

SEQ ID NO: 2722565 - RNA, 14 nt, Human
cagccccagugccc

SEQ ID NO: 2722566 - RNA, 15 nt, Human
cagccccagugccca

SEQ ID NO: 2722567 - RNA, 16 nt, Human
cagccccagugcccac

SEQ ID NO: 2722568 - RNA, 17 nt, Human
cagccccagugcccaca

SEQ ID NO: 2722569 - RNA, 18 nt, Human
cagccccagugcccacag

SEQ ID NO: 2722570 - RNA, 11 nt, Human
cagccccaucc

SEQ ID NO: 2722571 - RNA, 21 nt, Human
cagccccaucccaaacccuuc

SEQ ID NO: 2722572 - RNA, 21 nt, Human
cagccccuguucuggcagagu

SEQ ID NO: 2722573 - RNA, 20 nt, Human
cagccccuguucuggcagag

SEQ ID NO: 2722574 - RNA, 22 nt, Human
cagccccuggaugcagccucac

SEQ ID NO: 2722575 - RNA, 16 nt, Human
cagccccauucugccu

SEQ ID NO: 2722576 - RNA, 17 nt, Human
cagccccauucugccug

SEQ ID NO: 2722577 - RNA, 18 nt, Human
cagccccauucugccugc

SEQ ID NO: 2722578 - RNA, 23 nt, Human
cagccccuggaugcagccucaca

SEQ ID NO: 2722579 - RNA, 13 nt, Human
cagccccauucug

SEQ ID NO: 2722580 - RNA, 14 nt, Human
cagccccauucugc

SEQ ID NO: 2722581 - RNA, 16 nt, Human
cagccccauccucugu

SEQ ID NO: 2722582 - RNA, 22 nt, Human
cagccccauccucuguacagag

SEQ ID NO: 2722583 - RNA, 22 nt, Human
cagccccaucccaaacccuuca

SEQ ID NO: 2722584 - RNA, 12 nt, Human
cagccccauccu

SEQ ID NO: 2722585 - RNA, 13 nt, Human
cagccccauccuc

SEQ ID NO: 2722586 - RNA, 14 nt, Human
cagccccauccucu

SEQ ID NO: 2722587 - RNA, 16 nt, Human
cagccuaguugaucag

SEQ ID NO: 2722588 - RNA, 17 nt, Human
cagccucaaccuccugg

SEQ ID NO: 2722589 - RNA, 18 nt, Human
cagccucaaccuccuggg

SEQ ID NO: 2722590 - RNA, 19 nt, Human
cagccucaaccuccugggc

SEQ ID NO: 2722591 - RNA, 20 nt, Human
cagccucaaccuccugggcu

SEQ ID NO: 2722592 - RNA, 21 nt, Human
cagccucaaccuccugggcua

SEQ ID NO: 2722593 - RNA, 20 nt, Human
cagccucacaguccuuacca

SEQ ID NO: 2722594 - RNA, 14 nt, Human
cagccucacagucc

SEQ ID NO: 2722595 - RNA, 15 nt, Human
cagccucacaguccu

SEQ ID NO: 2722596 - RNA, 19 nt, Human
cagccucccaaagugcugg

SEQ ID NO: 2722597 - RNA, 20 nt, Human
cagccucccaaagugcuggg

SEQ ID NO: 2722598 - RNA, 21 nt, Human
cagccucccaaagugcuggga

SEQ ID NO: 2722599 - RNA, 23 nt, Human
cagccucccaaagugcugggauu

SEQ ID NO: 2722600 - RNA, 20 nt, Human
cagccucccgaauagcuggg

SEQ ID NO: 2722601 - RNA, 21 nt, Human
cagccucccgaauagcuggga

SEQ ID NO: 2722602 - RNA, 22 nt, Human
cagccucccgaauagcugggac

SEQ ID NO: 2722603 - RNA, 21 nt, Human
cagccguguaaccauggaccc

SEQ ID NO: 2722604 - RNA, 18 nt, Human
cagcccugcagagggcac

SEQ ID NO: 2722605 - RNA, 20 nt, Human
cagcccugcagagggcacag

SEQ ID NO: 2722606 - RNA, 13 nt, Human
cagcccugcagag

SEQ ID NO: 2722607 - RNA, 14 nt, Human
cagcccugcagagg

SEQ ID NO: 2722608 - RNA, 15 nt, Human
cagcccugcagaggg

SEQ ID NO: 2722609 - RNA, 16 nt, Human
cagcccugcagagggc

SEQ ID NO: 2722610 - RNA, 20 nt, Human
cagcuaacauggaaguacua

SEQ ID NO: 2722611 - RNA, 15 nt, Human
cagcuaaugggacac

SEQ ID NO: 2722612 - RNA, 16 nt, Human
cagcuaaugggacacu

SEQ ID NO: 2722613 - RNA, 21 nt, Human
cagcgagcccugguggcagug

SEQ ID NO: 2722614 - RNA, 19 nt, Human
cagcuaacauggaaguacu

SEQ ID NO: 2722615 - RNA, 18 nt, Human
cagcuaacauggaaguac

SEQ ID NO: 2722616 - RNA, 13 nt, Human
cagcgagcccugg

SEQ ID NO: 2722617 - RNA, 16 nt, Human
cagcgagcccuggugg

SEQ ID NO: 2722618 - RNA, 17 nt, Human
cagcgagcccugguggc

SEQ ID NO: 2722619 - RNA, 19 nt, Human
cagcgagcccugguggcag

SEQ ID NO: 2722620 - RNA, 20 nt, Human
cagcgagcccugguggcagu

SEQ ID NO: 2722621 - RNA, 12 nt, Human
cagcucagagag

SEQ ID NO: 2722622 - RNA, 19 nt, Human
cagcucaccucucccuugg

SEQ ID NO: 2722623 - RNA, 20 nt, Human
cagcucaccucucccuugga

SEQ ID NO: 2722624 - RNA, 22 nt, Human
cagcucaccagccccagugccc

SEQ ID NO: 2722625 - RNA, 20 nt, Human
cagcucaccagccccagugc

SEQ ID NO: 2722626 - RNA, 21 nt, Human
cagcucaccagccccagugcc

SEQ ID NO: 2722627 - RNA, 13 nt, Human
cagcucaccucuc

SEQ ID NO: 2722628 - RNA, 15 nt, Human
cagcucaccucuccc

SEQ ID NO: 2722629 - RNA, 16 nt, Human
cagcucaccucucccu

SEQ ID NO: 2722630 - RNA, 17 nt, Human
cagcucaccucucccuu

SEQ ID NO: 2722631 - RNA, 13 nt, Human
cagcucaccagcc

SEQ ID NO: 2722632 - RNA, 15 nt, Human
cagcucaccagcccc

SEQ ID NO: 2722633 - RNA, 16 nt, Human
cagcucaccagcccca

SEQ ID NO: 2722634 - RNA, 17 nt, Human
cagcucaccagccccag

SEQ ID NO: 2722635 - RNA, 19 nt, Human
cagcucaccagccccagug

SEQ ID NO: 2722636 - RNA, 24 nt, Human
cagccuugaccauucuccaccugc

SEQ ID NO: 2722637 - RNA, 22 nt, Human
cagccuugaccauucuccaccu

SEQ ID NO: 2722638 - RNA, 23 nt, Human
cagccuugaccauucuccaccug

SEQ ID NO: 2722639 - RNA, 17 nt, Human
cagccuugaccauucuc

SEQ ID NO: 2722640 - RNA, 20 nt, Human
cagccuugaccauucuccac

SEQ ID NO: 2722641 - RNA, 21 nt, Human
cagccuugaccauucuccacc

SEQ ID NO: 2722642 - RNA, 16 nt, Human
cagccugggcaaugug

SEQ ID NO: 2722643 - RNA, 19 nt, Human
cagccugggcaaugugaua

SEQ ID NO: 2722644 - RNA, 20 nt, Human
cagccugcuccagcuguuca

SEQ ID NO: 2722645 - RNA, 23 nt, Human
cagccucccgaauagcugggacu

SEQ ID NO: 2722646 - RNA, 19 nt, Human
cagccucccgaguagcugg

SEQ ID NO: 2722647 - RNA, 20 nt, Human
cagccucccgaguagcuggg

SEQ ID NO: 2722648 - RNA, 21 nt, Human
cagccucccgaguagcuggga

SEQ ID NO: 2722649 - RNA, 22 nt, Human
cagccucccgaguagcugggac

SEQ ID NO: 2722650 - RNA, 23 nt, Human
cagccucccgaguagcugggacu

SEQ ID NO: 2722651 - RNA, 15 nt, Human
cagccuggacccugu

SEQ ID NO: 2722652 - RNA, 19 nt, Human
cagccuggacccuguggau

SEQ ID NO: 2722653 - RNA, 23 nt, Human
cagcaacgcaggcccccaggugc

SEQ ID NO: 2722654 - RNA, 18 nt, Human
cagcaaaagaugcuucuc

SEQ ID NO: 2722655 - RNA, 14 nt, Human
cagauuuuccugaa

SEQ ID NO: 2722656 - RNA, 15 nt, Human
cagauuuuccugaaa

SEQ ID NO: 2722657 - RNA, 17 nt, Human
cagcaaaaauauuuuau

SEQ ID NO: 2722658 - RNA, 14 nt, Human
cagauucuuuccug

SEQ ID NO: 2722659 - RNA, 22 nt, Human
cagauuuuauuauguaaauccc

SEQ ID NO: 2722660 - RNA, 21 nt, Human
cagauuuuauuauguaaaucc

SEQ ID NO: 2722661 - RNA, 20 nt, Human
cagauuuuauuauguaaauc

SEQ ID NO: 2722662 - RNA, 18 nt, Human
cagauuuuauuauguaaa

SEQ ID NO: 2722663 - RNA, 16 nt, Human
cagauuuuauuaugua

SEQ ID NO: 2722664 - RNA, 15 nt, Human
cagauuuuauuaugu

SEQ ID NO: 2722665 - RNA, 13 nt, Human
cagauuuuauuau

SEQ ID NO: 2722666 - RNA, 16 nt, Human
cagauggaaugcugug

SEQ ID NO: 2722667 - RNA, 17 nt, Human
cagauggaaugcugugu

SEQ ID NO: 2722668 - RNA, 19 nt, Human
cagauggaaugcuguguua

SEQ ID NO: 2722669 - RNA, 21 nt, Human
cagauggaaugcuguguuaaa

SEQ ID NO: 2722670 - RNA, 18 nt, Human
cagaugggugcuuggagg

SEQ ID NO: 2722671 - RNA, 23 nt, Human
cagaugggugcuuggaggaagga

SEQ ID NO: 2722672 - RNA, 23 nt, Human
cagauuauucacugauuugacau

SEQ ID NO: 2722673 - RNA, 18 nt, Human
cagauuauucacugauuu

SEQ ID NO: 2722674 - RNA, 12 nt, Human
cagauuauucac

SEQ ID NO: 2722675 - RNA, 23 nt, Human
cagcaagggugaugggaaagcau

SEQ ID NO: 2722676 - RNA, 22 nt, Human
cagcaagggugaugggaaagca

SEQ ID NO: 2722677 - RNA, 12 nt, Human
cagcaagugaga

SEQ ID NO: 2722678 - RNA, 14 nt, Human
cagcaagugagagc

SEQ ID NO: 2722679 - RNA, 15 nt, Human
cagcaagugagagcu

SEQ ID NO: 2722680 - RNA, 16 nt, Human
cagcaagugagagcug

SEQ ID NO: 2722681 - RNA, 17 nt, Human
cagcaagugagagcugg

SEQ ID NO: 2722682 - RNA, 19 nt, Human
cagcaagggugaugggaaa

SEQ ID NO: 2722683 - RNA, 17 nt, Human
cagcaaggagauuuaca

SEQ ID NO: 2722684 - RNA, 18 nt, Human
cagcaaggagauuuacaa

SEQ ID NO: 2722685 - RNA, 22 nt, Human
cagcaauaaagcagcguuucua

SEQ ID NO: 2722686 - RNA, 19 nt, Human
cagcaagugagagcugggu

SEQ ID NO: 2722687 - RNA, 21 nt, Human
cagcaagugagagcugggugu

SEQ ID NO: 2722688 - RNA, 21 nt, Human
cagcaauaaagcagcguuucu

SEQ ID NO: 2722689 - RNA, 13 nt, Human
cagcaauaaagca

SEQ ID NO: 2722690 - RNA, 14 nt, Human
cagcagauuauuca

SEQ ID NO: 2722691 - RNA, 19 nt, Human
cagcagauuauucacugau

SEQ ID NO: 2722692 - RNA, 15 nt, Human
cagcagauuauucac

SEQ ID NO: 2722693 - RNA, 17 nt, Human
cagcagaaaugccuuac

SEQ ID NO: 2722694 - RNA, 15 nt, Human
cagcagaaaugccuu

SEQ ID NO: 2722695 - RNA, 11 nt, Human
cagcagagcac

SEQ ID NO: 2722696 - RNA, 13 nt, Human
cagcagagcaccu

SEQ ID NO: 2722697 - RNA, 22 nt, Human
cagcagaaaugccuuacccuca

SEQ ID NO: 2722698 - RNA, 19 nt, Human
cagcagaaaugccuuaccc

SEQ ID NO: 2722699 - RNA, 12 nt, Human
cagcaggcucuc

SEQ ID NO: 2722700 - RNA, 14 nt, Human
cagcaggcucucag

SEQ ID NO: 2722701 - RNA, 15 nt, Human
cagcaggcucucagg

SEQ ID NO: 2722702 - RNA, 19 nt, Human
cagcagccuggacccugug

SEQ ID NO: 2722703 - RNA, 22 nt, Human
cagcagccuggacccuguggau

SEQ ID NO: 2722704 - RNA, 12 nt, Human
cagcagccugga

SEQ ID NO: 2722705 - RNA, 14 nt, Human
cagcagccuggacc

SEQ ID NO: 2722706 - RNA, 15 nt, Human
cagcagccuggaccc

SEQ ID NO: 2722707 - RNA, 18 nt, Human
cagcagccuggacccugu

SEQ ID NO: 2722708 - RNA, 20 nt, Human
cagcagggagggcuucugcc

SEQ ID NO: 2722709 - RNA, 14 nt, Human
cagcauccuggcac

SEQ ID NO: 2722710 - RNA, 15 nt, Human
cagcauccuggcacc

SEQ ID NO: 2722711 - RNA, 16 nt, Human
cagcauccuggcaccc

SEQ ID NO: 2722712 - RNA, 17 nt, Human
cagcauccuggcacccg

SEQ ID NO: 2722713 - RNA, 18 nt, Human
cagcagggagggcuucug

SEQ ID NO: 2722714 - RNA, 20 nt, Human
cagcaggcucucaggccagc

SEQ ID NO: 2722715 - RNA, 22 nt, Human
cagcaggcucucaggccagcug

SEQ ID NO: 2722716 - RNA, 16 nt, Human
cagcaggcucucaggc

SEQ ID NO: 2722717 - RNA, 17 nt, Human
cagcaggcucucaggcc

SEQ ID NO: 2722718 - RNA, 18 nt, Human
cagcaggcucucaggcca

SEQ ID NO: 2722719 - RNA, 19 nt, Human
cagcaggcucucaggccag

SEQ ID NO: 2722720 - RNA, 21 nt, Human
cagcauccuggcacccggccc

SEQ ID NO: 2722721 - RNA, 19 nt, Human
cagcauccuggcacccggc

SEQ ID NO: 2722722 - RNA, 20 nt, Human
cagcauccuggcacccggcc

SEQ ID NO: 2722723 - RNA, 15 nt, Human
cagccaaagccuccu

SEQ ID NO: 2722724 - RNA, 16 nt, Human
cagccaaagccuccuc

SEQ ID NO: 2722725 - RNA, 18 nt, Human
cagccaaagccuccucca

SEQ ID NO: 2722726 - RNA, 21 nt, Human
cagccaaagccuccuccagcc

SEQ ID NO: 2722727 - RNA, 15 nt, Human
cagcccacuucugcc

SEQ ID NO: 2722728 - RNA, 15 nt, Human
cagcccaccccucaa

SEQ ID NO: 2722729 - RNA, 18 nt, Human
cagcccacuucugccaua

SEQ ID NO: 2722730 - RNA, 22 nt, Human
cagccccaaaacucuccucugc

SEQ ID NO: 2722731 - RNA, 20 nt, Human
cagccccaaaacucuccucu

SEQ ID NO: 2722732 - RNA, 21 nt, Human
cagccccaaaacucuccucug

SEQ ID NO: 2722733 - RNA, 23 nt, Human
cagccacggccaggccagaggga

SEQ ID NO: 2722734 - RNA, 13 nt, Human
cagccaguaaaug

SEQ ID NO: 2722735 - RNA, 22 nt, Human
cagccaguaaaugggggugcau

SEQ ID NO: 2722736 - RNA, 14 nt, Human
cagccacggccagg

SEQ ID NO: 2722737 - RNA, 15 nt, Human
cagccacggccaggc

SEQ ID NO: 2722738 - RNA, 16 nt, Human
cagccacggccaggcc

SEQ ID NO: 2722739 - RNA, 17 nt, Human
cagccacggccaggcca

SEQ ID NO: 2722740 - RNA, 18 nt, Human
cagccacggccaggccag

SEQ ID NO: 2722741 - RNA, 19 nt, Human
cagccacggccaggccaga

SEQ ID NO: 2722742 - RNA, 21 nt, Human
cagccacggccaggccagagg

SEQ ID NO: 2722743 - RNA, 22 nt, Human
cagccacggccaggccagaggg

SEQ ID NO: 2722744 - RNA, 14 nt, Human
cagccacauuccug

SEQ ID NO: 2722745 - RNA, 19 nt, Human
cagccacauuccugaugcu

SEQ ID NO: 2722746 - RNA, 15 nt, Human
cagccacauuccuga

SEQ ID NO: 2722747 - RNA, 17 nt, Human
cagccacauuccugaug

SEQ ID NO: 2722748 - RNA, 14 nt, Human
cagcucaccagccc

SEQ ID NO: 2722749 - RNA, 13 nt, Human
caggcuagaugua

SEQ ID NO: 2722750 - RNA, 19 nt, Human
caggcuagauguauguacu

SEQ ID NO: 2722751 - RNA, 14 nt, Human
caggcuacugucag

SEQ ID NO: 2722752 - RNA, 14 nt, Human
caggcuccuuuagc

SEQ ID NO: 2722753 - RNA, 19 nt, Human
caggcuccuuuagcgccca

SEQ ID NO: 2722754 - RNA, 20 nt, Human
caggcuccuuuagcgcccag

SEQ ID NO: 2722755 - RNA, 21 nt, Human
caggcucucaggccagcugcu

SEQ ID NO: 2722756 - RNA, 23 nt, Human
caggcucucaggccagcugcuug

SEQ ID NO: 2722757 - RNA, 17 nt, Human
caggcucucaggccagc

SEQ ID NO: 2722758 - RNA, 18 nt, Human
caggcucucaggccagcu

SEQ ID NO: 2722759 - RNA, 19 nt, Human
caggcucucaggccagcug

SEQ ID NO: 2722760 - RNA, 20 nt, Human
caggcucucaggccagcugc

SEQ ID NO: 2722761 - RNA, 21 nt, Human
caggcuccuuuagcgcccagu

SEQ ID NO: 2722762 - RNA, 20 nt, Human
caggcucgggcuccccagcc

SEQ ID NO: 2722763 - RNA, 12 nt, Human
caggcucucagg

SEQ ID NO: 2722764 - RNA, 13 nt, Human
caggcucucaggc

SEQ ID NO: 2722765 - RNA, 14 nt, Human
caggcucucaggcc

SEQ ID NO: 2722766 - RNA, 15 nt, Human
caggcucucaggcca

SEQ ID NO: 2722767 - RNA, 16 nt, Human
caggcucucaggccag

SEQ ID NO: 2722768 - RNA, 21 nt, Human
caggcccucugcccacucccu

SEQ ID NO: 2722769 - RNA, 22 nt, Human
caggcccucugcccacucccug

SEQ ID NO: 2722770 - RNA, 16 nt, Human
caggcccucugcccac

SEQ ID NO: 2722771 - RNA, 17 nt, Human
caggcccucugcccacu

SEQ ID NO: 2722772 - RNA, 19 nt, Human
caggcccucugcccacucc

SEQ ID NO: 2722773 - RNA, 20 nt, Human
caggcccucugcccacuccc

SEQ ID NO: 2722774 - RNA, 13 nt, Human
caggcccucugcc

SEQ ID NO: 2722775 - RNA, 14 nt, Human
caggcccucugccc

SEQ ID NO: 2722776 - RNA, 15 nt, Human
caggcccucugccca

SEQ ID NO: 2722777 - RNA, 22 nt, Human
caggcccggcuccaggcuccuu

SEQ ID NO: 2722778 - RNA, 20 nt, Human
caggcccggcuccaggcucc

SEQ ID NO: 2722779 - RNA, 21 nt, Human
caggcccggcuccaggcuccu

SEQ ID NO: 2722780 - RNA, 17 nt, Human
caggcccggcuccaggc

SEQ ID NO: 2722781 - RNA, 16 nt, Human
caggcccggcuccagg

SEQ ID NO: 2722782 - RNA, 18 nt, Human
caggcccggcuccaggcu

SEQ ID NO: 2722783 - RNA, 19 nt, Human
caggcccggcuccaggcuc

SEQ ID NO: 2722784 - RNA, 23 nt, Human
caggcugggcuucaguggcagcu

SEQ ID NO: 2722785 - RNA, 22 nt, Human
caggcuuagucacugagacagc

SEQ ID NO: 2722786 - RNA, 23 nt, Human
caggcuuagucacugagacagcc

SEQ ID NO: 2722787 - RNA, 12 nt, Human
caggcuggucuc

SEQ ID NO: 2722788 - RNA, 19 nt, Human
caggcuggucucaaacucu

SEQ ID NO: 2722789 - RNA, 14 nt, Human
caggcuguauccca

SEQ ID NO: 2722790 - RNA, 20 nt, Human
caggcuguaucccaugagcc

SEQ ID NO: 2722791 - RNA, 21 nt, Human
caggcuguaucccaugagccu

SEQ ID NO: 2722792 - RNA, 22 nt, Human
caggcuguaucccaugagccuc

SEQ ID NO: 2722793 - RNA, 23 nt, Human
caggcuguaucccaugagccuca

SEQ ID NO: 2722794 - RNA, 16 nt, Human
caggcuuagucacuga

SEQ ID NO: 2722795 - RNA, 17 nt, Human
caggcuuagucacugag

SEQ ID NO: 2722796 - RNA, 20 nt, Human
caggcuuagucacugagaca

SEQ ID NO: 2722797 - RNA, 21 nt, Human
caggcuuagucacugagacag

SEQ ID NO: 2722798 - RNA, 11 nt, Human
caggggacagg

SEQ ID NO: 2722799 - RNA, 16 nt, Human
caggggacaggauggu

SEQ ID NO: 2722800 - RNA, 16 nt, Human
cagggccuggcucagg

SEQ ID NO: 2722801 - RNA, 19 nt, Human
cagggccuggcucaggugg

SEQ ID NO: 2722802 - RNA, 13 nt, Human
cagggccuggcuc

SEQ ID NO: 2722803 - RNA, 14 nt, Human
cagggccuggcuca

SEQ ID NO: 2722804 - RNA, 15 nt, Human
cagggccuggcucag

SEQ ID NO: 2722805 - RNA, 19 nt, Human
caggggaggguagagcgga

SEQ ID NO: 2722806 - RNA, 17 nt, Human
cagggcauggcugggaa

SEQ ID NO: 2722807 - RNA, 18 nt, Human
cagggacaggauaagagg

SEQ ID NO: 2722808 - RNA, 23 nt, Human
cagggacagaggggguggccucc

SEQ ID NO: 2722809 - RNA, 14 nt, Human
cagggcacaccggg

SEQ ID NO: 2722810 - RNA, 22 nt, Human
cagggcacaccgggcacucaga

SEQ ID NO: 2722811 - RNA, 23 nt, Human
cagggcacaccgggcacucagaa

SEQ ID NO: 2722812 - RNA, 15 nt, Human
cagggcacaccgggc

SEQ ID NO: 2722813 - RNA, 17 nt, Human
cagggcacaccgggcac

SEQ ID NO: 2722814 - RNA, 19 nt, Human
cagggcacaccgggcacuc

SEQ ID NO: 2722815 - RNA, 21 nt, Human
cagggcacaccgggcacucag

SEQ ID NO: 2722816 - RNA, 16 nt, Human
cagggaaacagcuaau

SEQ ID NO: 2722817 - RNA, 22 nt, Human
cagggaaacagcuaaugggaca

SEQ ID NO: 2722818 - RNA, 13 nt, Human
cagggacagaggg

SEQ ID NO: 2722819 - RNA, 14 nt, Human
cagggacagagggg

SEQ ID NO: 2722820 - RNA, 20 nt, Human
cagggacagaggggguggcc

SEQ ID NO: 2722821 - RNA, 19 nt, Human
caggcccccaggugccagu

SEQ ID NO: 2722822 - RNA, 14 nt, Human
caggcccccaggug

SEQ ID NO: 2722823 - RNA, 20 nt, Human
caggcccccaggugccaguu

SEQ ID NO: 2722824 - RNA, 13 nt, Human
caggccccugcca

SEQ ID NO: 2722825 - RNA, 23 nt, Human
caggccaaacucaccugccccuc

SEQ ID NO: 2722826 - RNA, 18 nt, Human
caggccaaacucaccugc

SEQ ID NO: 2722827 - RNA, 13 nt, Human
caggccacaagac

SEQ ID NO: 2722828 - RNA, 17 nt, Human
caggccacaagacccuu

SEQ ID NO: 2722829 - RNA, 18 nt, Human
caggccacaagacccuug

SEQ ID NO: 2722830 - RNA, 20 nt, Human
caggccacaagacccuugug

SEQ ID NO: 2722831 - RNA, 21 nt, Human
caggccaggcccucugcccac

SEQ ID NO: 2722832 - RNA, 22 nt, Human
caggccaggcccucugcccacu

SEQ ID NO: 2722833 - RNA, 13 nt, Human
caggcccggcucc

SEQ ID NO: 2722834 - RNA, 14 nt, Human
caggcccggcucca

SEQ ID NO: 2722835 - RNA, 15 nt, Human
caggcccggcuccag

SEQ ID NO: 2722836 - RNA, 15 nt, Human
caggccccugccacc

SEQ ID NO: 2722837 - RNA, 17 nt, Human
caggccccugccacccu

SEQ ID NO: 2722838 - RNA, 19 nt, Human
caggccccugccacccugg

SEQ ID NO: 2722839 - RNA, 20 nt, Human
caggccccugccacccuggg

SEQ ID NO: 2722840 - RNA, 16 nt, Human
caggauuuuaaucuuu

SEQ ID NO: 2722841 - RNA, 20 nt, Human
caggauucuuccucccuccc

SEQ ID NO: 2722842 - RNA, 14 nt, Human
caggcagccaggcc

SEQ ID NO: 2722843 - RNA, 15 nt, Human
caggcagccaggcca

SEQ ID NO: 2722844 - RNA, 14 nt, Human
caggcaagcaccuc

SEQ ID NO: 2722845 - RNA, 15 nt, Human
caggcaagcaccucc

SEQ ID NO: 2722846 - RNA, 16 nt, Human
caggcaagcaccuccu

SEQ ID NO: 2722847 - RNA, 21 nt, Human
caggcaagcaccuccugccuc

SEQ ID NO: 2722848 - RNA, 16 nt, Human
caggcagccaggccac

SEQ ID NO: 2722849 - RNA, 17 nt, Human
caggcagccaggccaca

SEQ ID NO: 2722850 - RNA, 13 nt, Human
caggcagguccag

SEQ ID NO: 2722851 - RNA, 17 nt, Human
caggcaugguggcccac

SEQ ID NO: 2722852 - RNA, 15 nt, Human
caggcaggugggaug

SEQ ID NO: 2722853 - RNA, 23 nt, Human
caggcaggucuugaacuccuggc

SEQ ID NO: 2722854 - RNA, 13 nt, Human
caggcaggucuug

SEQ ID NO: 2722855 - RNA, 22 nt, Human
caggcaggucuugaacuccugg

SEQ ID NO: 2722856 - RNA, 14 nt, Human
caggcagguccagg

SEQ ID NO: 2722857 - RNA, 15 nt, Human
caggcagguccaggg

SEQ ID NO: 2722858 - RNA, 19 nt, Human
caggcagguccaggguuug

SEQ ID NO: 2722859 - RNA, 12 nt, Human
caggcaggucuu

SEQ ID NO: 2722860 - RNA, 24 nt, Human
caggcauuccccaggaggccagcc

SEQ ID NO: 2722861 - RNA, 22 nt, Human
caggcauuccccaggaggccag

SEQ ID NO: 2722862 - RNA, 23 nt, Human
caggcauuccccaggaggccagc

SEQ ID NO: 2722863 - RNA, 18 nt, Human
caggcauuccccaggagg

SEQ ID NO: 2722864 - RNA, 19 nt, Human
caggcauuccccaggaggc

SEQ ID NO: 2722865 - RNA, 20 nt, Human
caggcauuccccaggaggcc

SEQ ID NO: 2722866 - RNA, 21 nt, Human
caggcauuccccaggaggcca

SEQ ID NO: 2722867 - RNA, 15 nt, Human
caggcauguucucug

SEQ ID NO: 2722868 - RNA, 18 nt, Human
caggcauguucucugagg

SEQ ID NO: 2722869 - RNA, 19 nt, Human
caggcauguucucugagga

SEQ ID NO: 2722870 - RNA, 20 nt, Human
caggcauguucucugaggac

SEQ ID NO: 2722871 - RNA, 13 nt, Human
caggcauucccca

SEQ ID NO: 2722872 - RNA, 15 nt, Human
caggcauuccccagg

SEQ ID NO: 2722873 - RNA, 16 nt, Human
caggcauuccccagga

SEQ ID NO: 2722874 - RNA, 17 nt, Human
caggcauuccccaggag

SEQ ID NO: 2722875 - RNA, 21 nt, Human
caggaugguucccuugaugaa

SEQ ID NO: 2722876 - RNA, 23 nt, Human
caggaugguucccuugaugaaga

SEQ ID NO: 2722877 - RNA, 18 nt, Human
caggauucuuccucccuc

SEQ ID NO: 2722878 - RNA, 17 nt, Human
caggauucuuccucccu

SEQ ID NO: 2722879 - RNA, 23 nt, Human
caggauggccgggcgcgguggcu

SEQ ID NO: 2722880 - RNA, 14 nt, Human
caggaucagucuga

SEQ ID NO: 2722881 - RNA, 13 nt, Human
caggaucagucug

SEQ ID NO: 2722882 - RNA, 21 nt, Human
caggauauucucacagcucca

SEQ ID NO: 2722883 - RNA, 22 nt, Human
caggaguuugagaccaaccugg

SEQ ID NO: 2722884 - RNA, 23 nt, Human
caggaguuugagaccaaccuggg

SEQ ID NO: 2722885 - RNA, 21 nt, Human
caggaguuugagaccaaccug

SEQ ID NO: 2722886 - RNA, 12 nt, Human
caggagugagca

SEQ ID NO: 2722887 - RNA, 14 nt, Human
caggagccuccugc

SEQ ID NO: 2722888 - RNA, 17 nt, Human
caggagccuccugcccu

SEQ ID NO: 2722889 - RNA, 20 nt, Human
caggagccuccugcccuuac

SEQ ID NO: 2722890 - RNA, 23 nt, Human
caggagccccgaggccuucucug

SEQ ID NO: 2722891 - RNA, 20 nt, Human
caggagccccgaggccuucu

SEQ ID NO: 2722892 - RNA, 22 nt, Human
caggagccccgaggccuucucu

SEQ ID NO: 2722893 - RNA, 15 nt, Human
caggagccccgaggc

SEQ ID NO: 2722894 - RNA, 16 nt, Human
caggagccccgaggcc

SEQ ID NO: 2722895 - RNA, 18 nt, Human
caggagccccgaggccuu

SEQ ID NO: 2722896 - RNA, 12 nt, Human
caggagcagcca

SEQ ID NO: 2722897 - RNA, 13 nt, Human
caggagcagccac

SEQ ID NO: 2722898 - RNA, 14 nt, Human
caggagcagccaca

SEQ ID NO: 2722899 - RNA, 19 nt, Human
caggagcagccacauuccu

SEQ ID NO: 2722900 - RNA, 12 nt, Human
caggagaguaga

SEQ ID NO: 2722901 - RNA, 19 nt, Human
cagugagucgaggacaggg

SEQ ID NO: 2722902 - RNA, 20 nt, Human
cagugagucgaggacaggga

SEQ ID NO: 2722903 - RNA, 22 nt, Human
cagugagucgaggacagggagg

SEQ ID NO: 2722904 - RNA, 23 nt, Human
cagugagucgaggacagggaggu

SEQ ID NO: 2722905 - RNA, 15 nt, Human
cagugccgagaagga

SEQ ID NO: 2722906 - RNA, 18 nt, Human
cagugccgagaaggaagc

SEQ ID NO: 2722907 - RNA, 11 nt, Human
cagugccuuau

SEQ ID NO: 2722908 - RNA, 13 nt, Human
cagugccuuaugg

SEQ ID NO: 2722909 - RNA, 15 nt, Human
cagugccuuauggaa

SEQ ID NO: 2722910 - RNA, 16 nt, Human
cagugccuuauggaac

SEQ ID NO: 2722911 - RNA, 17 nt, Human
cagugccuuauggaaca

SEQ ID NO: 2722912 - RNA, 18 nt, Human
cagugccuuauggaacac

SEQ ID NO: 2722913 - RNA, 19 nt, Human
cagugccuuauggaacacu

SEQ ID NO: 2722914 - RNA, 20 nt, Human
cagugccuuauggaacacuc

SEQ ID NO: 2722915 - RNA, 21 nt, Human
cagugccuuauggaacacucu

SEQ ID NO: 2722916 - RNA, 22 nt, Human
cagugccuuauggaacacucug

SEQ ID NO: 2722917 - RNA, 20 nt, Human
cagugaaagaaaauaacaau

SEQ ID NO: 2722918 - RNA, 16 nt, Human
cagugaaagaaaauaa

SEQ ID NO: 2722919 - RNA, 19 nt, Human
cagucuggaaugcaguggu

SEQ ID NO: 2722920 - RNA, 18 nt, Human
cagucuggaaugcagugg

SEQ ID NO: 2722921 - RNA, 21 nt, Human
caguccuuaccagcagagcac

SEQ ID NO: 2722922 - RNA, 19 nt, Human
caguccuuaccagcagagc

SEQ ID NO: 2722923 - RNA, 20 nt, Human
caguccuuaccagcagagca

SEQ ID NO: 2722924 - RNA, 15 nt, Human
caguccuuaccagca

SEQ ID NO: 2722925 - RNA, 18 nt, Human
caguccuuaccagcagag

SEQ ID NO: 2722926 - RNA, 16 nt, Human
caguccucccaucuca

SEQ ID NO: 2722927 - RNA, 17 nt, Human
caguccucccaucucac

SEQ ID NO: 2722928 - RNA, 12 nt, Human
cagugaauucuu

SEQ ID NO: 2722929 - RNA, 24 nt, Human
cagugagccgagauugcaccacug

SEQ ID NO: 2722930 - RNA, 12 nt, Human
cagugaggcucu

SEQ ID NO: 2722931 - RNA, 13 nt, Human
cagugaggcucug

SEQ ID NO: 2722932 - RNA, 14 nt, Human
cagugaggcucugc

SEQ ID NO: 2722933 - RNA, 15 nt, Human
cagugaggcucugcc

SEQ ID NO: 2722934 - RNA, 16 nt, Human
cagugaggcucugccc

SEQ ID NO: 2722935 - RNA, 21 nt, Human
cagugaggcucugcccuuggu

SEQ ID NO: 2722936 - RNA, 17 nt, Human
cagugagucgaggacag

SEQ ID NO: 2722937 - RNA, 18 nt, Human
cagugagucgaggacagg

SEQ ID NO: 2722938 - RNA, 17 nt, Human
cagugaggcucugcccu

SEQ ID NO: 2722939 - RNA, 18 nt, Human
cagugaggcucugcccuu

SEQ ID NO: 2722940 - RNA, 19 nt, Human
cagugaggcucugcccuug

SEQ ID NO: 2722941 - RNA, 20 nt, Human
cagugaggcucugcccuugg

SEQ ID NO: 2722942 - RNA, 23 nt, Human
cagugccuuauggaacacucuga

SEQ ID NO: 2722943 - RNA, 21 nt, Human
caguaucuugaagacuuuucu

SEQ ID NO: 2722944 - RNA, 15 nt, Human
caguaucucagggcc

SEQ ID NO: 2722945 - RNA, 12 nt, Human
caguaucuugaa

SEQ ID NO: 2722946 - RNA, 18 nt, Human
caguaucuugaagacuuu

SEQ ID NO: 2722947 - RNA, 13 nt, Human
caguaucucaggg

SEQ ID NO: 2722948 - RNA, 21 nt, Human
caguauaauuaacauguuaaa

SEQ ID NO: 2722949 - RNA, 17 nt, Human
caguauaauuaacaugu

SEQ ID NO: 2722950 - RNA, 15 nt, Human
caguauaauuaacau

SEQ ID NO: 2722951 - RNA, 14 nt, Human
caguauaauuaaca

SEQ ID NO: 2722952 - RNA, 22 nt, Human
cagucaggaaagagaacuucca

SEQ ID NO: 2722953 - RNA, 15 nt, Human
cagucaggaaagaga

SEQ ID NO: 2722954 - RNA, 18 nt, Human
cagucaggaaagagaacu

SEQ ID NO: 2722955 - RNA, 18 nt, Human
caguauuacuucugcuac

SEQ ID NO: 2722956 - RNA, 16 nt, Human
caguauuacuucugcu

SEQ ID NO: 2722957 - RNA, 16 nt, Human
caguccauagcagaga

SEQ ID NO: 2722958 - RNA, 17 nt, Human
cagucauucagauauga

SEQ ID NO: 2722959 - RNA, 20 nt, Human
cagucauucagauaugauuc

SEQ ID NO: 2722960 - RNA, 17 nt, Human
cagucccugccaaugga

SEQ ID NO: 2722961 - RNA, 12 nt, Human
caguccucccau

SEQ ID NO: 2722962 - RNA, 13 nt, Human
caguccucccauc

SEQ ID NO: 2722963 - RNA, 14 nt, Human
caguccucccaucu

SEQ ID NO: 2722964 - RNA, 15 nt, Human
caguccucccaucuc

SEQ ID NO: 2722965 - RNA, 12 nt, Human
cagucccugcca

SEQ ID NO: 2722966 - RNA, 13 nt, Human
cagucccugccaa

SEQ ID NO: 2722967 - RNA, 14 nt, Human
cagucccugccaau

SEQ ID NO: 2722968 - RNA, 15 nt, Human
cagucccugccaaug

SEQ ID NO: 2722969 - RNA, 16 nt, Human
cagucccugccaaugg

SEQ ID NO: 2722970 - RNA, 14 nt, Human
caggggugggacac

SEQ ID NO: 2722971 - RNA, 15 nt, Human
caggggugggacacc

SEQ ID NO: 2722972 - RNA, 20 nt, Human
caggggugggacacccugug

SEQ ID NO: 2722973 - RNA, 21 nt, Human
caggggugggacacccuguga

SEQ ID NO: 2722974 - RNA, 23 nt, Human
cagggucccugguggcagcucac

SEQ ID NO: 2722975 - RNA, 18 nt, Human
caggguccuguagcccua

SEQ ID NO: 2722976 - RNA, 21 nt, Human
cagggucucacuauguugccc

SEQ ID NO: 2722977 - RNA, 22 nt, Human
cagggucucacuauguugccca

SEQ ID NO: 2722978 - RNA, 23 nt, Human
cagggucucacuauguugcccag

SEQ ID NO: 2722979 - RNA, 15 nt, Human
cagggucucacucug

SEQ ID NO: 2722980 - RNA, 16 nt, Human
caggguuuugccaugu

SEQ ID NO: 2722981 - RNA, 16 nt, Human
cagggucucacucugu

SEQ ID NO: 2722982 - RNA, 14 nt, Human
cagguaacaggcag

SEQ ID NO: 2722983 - RNA, 15 nt, Human
cagguaacaggcaga

SEQ ID NO: 2722984 - RNA, 16 nt, Human
cagguaacaggcagau

SEQ ID NO: 2722985 - RNA, 17 nt, Human
cagguaacaggcagaua

SEQ ID NO: 2722986 - RNA, 20 nt, Human
caggguauuccagagugggg

SEQ ID NO: 2722987 - RNA, 21 nt, Human
caggguauuccagagugggga

SEQ ID NO: 2722988 - RNA, 12 nt, Human
cagggucccugg

SEQ ID NO: 2722989 - RNA, 14 nt, Human
cagggucccuggug

SEQ ID NO: 2722990 - RNA, 15 nt, Human
cagggucccuggugg

SEQ ID NO: 2722991 - RNA, 18 nt, Human
cagggucccugguggcag

SEQ ID NO: 2722992 - RNA, 19 nt, Human
cagggucccugguggcagc

SEQ ID NO: 2722993 - RNA, 22 nt, Human
cagggucccugguggcagcuca

SEQ ID NO: 2722994 - RNA, 20 nt, Human
cagguaacaggcagauacag

SEQ ID NO: 2722995 - RNA, 21 nt, Human
cagguaacaggcagauacagg

SEQ ID NO: 2722996 - RNA, 20 nt, Human
caggucauauuaauauauuu

SEQ ID NO: 2722997 - RNA, 21 nt, Human
caggucauauuaauauauuuc

SEQ ID NO: 2722998 - RNA, 21 nt, Human
caggugagaagcagaggaagg

SEQ ID NO: 2722999 - RNA, 13 nt, Human
caggugagaagca

SEQ ID NO: 2723000 - RNA, 20 nt, Human
caggugagaagcagaggaag

SEQ ID NO: 2723001 - RNA, 18 nt, Human
caggucuugaacuccugg

SEQ ID NO: 2723002 - RNA, 19 nt, Human
caggucuugaacuccuggc

SEQ ID NO: 2723003 - RNA, 20 nt, Human
caggucuugaacuccuggcc

SEQ ID NO: 2723004 - RNA, 21 nt, Human
caggucuugaacuccuggccu

SEQ ID NO: 2723005 - RNA, 22 nt, Human
caggucuugaacuccuggccuc

SEQ ID NO: 2723006 - RNA, 23 nt, Human
caggucuugaacuccuggccuca

SEQ ID NO: 2723007 - RNA, 20 nt, Human
caggugguuauggagagggu

SEQ ID NO: 2723008 - RNA, 11 nt, Human
caggugucccu

SEQ ID NO: 2723009 - RNA, 14 nt, Human
caggugucccugca

SEQ ID NO: 2723010 - RNA, 18 nt, Human
caggugguuauggagagg

SEQ ID NO: 2723011 - RNA, 23 nt, Human
cagguggggucacucuggcagcu

SEQ ID NO: 2723012 - RNA, 19 nt, Human
cagguggggucacucuggc

SEQ ID NO: 2723013 - RNA, 20 nt, Human
cagguggggucacucuggca

SEQ ID NO: 2723014 - RNA, 21 nt, Human
cagguggggucacucuggcag

SEQ ID NO: 2723015 - RNA, 22 nt, Human
cagguggggucacucuggcagc

SEQ ID NO: 2723016 - RNA, 13 nt, Human
cagguggggcagc

SEQ ID NO: 2723017 - RNA, 14 nt, Human
cagguggggcagcu

SEQ ID NO: 2723018 - RNA, 15 nt, Human
cagguggggcagcuu

SEQ ID NO: 2723019 - RNA, 16 nt, Human
cagguggggcagcuug

SEQ ID NO: 2723020 - RNA, 17 nt, Human
cagguggggcagcuuga

SEQ ID NO: 2723021 - RNA, 18 nt, Human
cagguggggucacucugg

SEQ ID NO: 2723022 - RNA, 13 nt, Human
caguaauaacucu

SEQ ID NO: 2723023 - RNA, 12 nt, Human
caguaauaacuc

SEQ ID NO: 2723024 - RNA, 22 nt, Human
caguaaaugggggugcauuuga

SEQ ID NO: 2723025 - RNA, 20 nt, Human
caguaaaugggggugcauuu

SEQ ID NO: 2723026 - RNA, 21 nt, Human
caguaaaugggggugcauuug

SEQ ID NO: 2723027 - RNA, 13 nt, Human
cagguucagcuug

SEQ ID NO: 2723028 - RNA, 12 nt, Human
cagguucagcuu

SEQ ID NO: 2723029 - RNA, 15 nt, Human
caggugucccugcac

SEQ ID NO: 2723030 - RNA, 16 nt, Human
caggugucccugcacu

SEQ ID NO: 2723031 - RNA, 18 nt, Human
caggugucccugcacuug

SEQ ID NO: 2723032 - RNA, 19 nt, Human
caggugucccugcacuugc

SEQ ID NO: 2723033 - RNA, 12 nt, Human
caggugugaacc

SEQ ID NO: 2723034 - RNA, 22 nt, Human
caggugugagucaccaagccca

SEQ ID NO: 2723035 - RNA, 23 nt, Human
caggugugagucaccaagcccag

SEQ ID NO: 2723036 - RNA, 16 nt, Human
caggugugaaccacca

SEQ ID NO: 2723037 - RNA, 19 nt, Human
caggugugaaccaccacac

SEQ ID NO: 2723038 - RNA, 22 nt, Human
caggugugaaccaccacaccca

SEQ ID NO: 2723039 - RNA, 23 nt, Human
caggugugaaccaccacacccag

SEQ ID NO: 2723040 - RNA, 20 nt, Human
caggugugagucaccaagcc

SEQ ID NO: 2723041 - RNA, 21 nt, Human
caggugugagucaccaagccc

SEQ ID NO: 2723042 - RNA, 16 nt, Human
caggugugagucacca

SEQ ID NO: 2723043 - RNA, 22 nt, Human
cauuccaacuaucucauuucca

SEQ ID NO: 2723044 - RNA, 21 nt, Human
cauucagauaugauucaaaug

SEQ ID NO: 2723045 - RNA, 13 nt, Human
cauuccccaggag

SEQ ID NO: 2723046 - RNA, 15 nt, Human
cauuccccaggaggc

SEQ ID NO: 2723047 - RNA, 17 nt, Human
cauuccccaggaggcca

SEQ ID NO: 2723048 - RNA, 20 nt, Human
cauuccccaggaggccagcc

SEQ ID NO: 2723049 - RNA, 18 nt, Human
cauuccccaggaggccag

SEQ ID NO: 2723050 - RNA, 19 nt, Human
cauuccccaggaggccagc

SEQ ID NO: 2723051 - RNA, 17 nt, Human
cauuauuuuauuaugaa

SEQ ID NO: 2723052 - RNA, 16 nt, Human
cauuauucaaaguugc

SEQ ID NO: 2723053 - RNA, 22 nt, Human
cauuauucaaaguugccuaaau

SEQ ID NO: 2723054 - RNA, 21 nt, Human
cauuauucaaaguugccuaaa

SEQ ID NO: 2723055 - RNA, 18 nt, Human
cauuauucaaaguugccu

SEQ ID NO: 2723056 - RNA, 20 nt, Human
cauucaaauguauuacagug

SEQ ID NO: 2723057 - RNA, 13 nt, Human
cauucuggaauaa

SEQ ID NO: 2723058 - RNA, 17 nt, Human
cauucuguuaaucauua

SEQ ID NO: 2723059 - RNA, 12 nt, Human
cauucugccugc

SEQ ID NO: 2723060 - RNA, 13 nt, Human
cauucugccugcc

SEQ ID NO: 2723061 - RNA, 15 nt, Human
cauucugccugccca

SEQ ID NO: 2723062 - RNA, 16 nt, Human
cauucugccugcccag

SEQ ID NO: 2723063 - RNA, 17 nt, Human
cauucugccugcccagg

SEQ ID NO: 2723064 - RNA, 18 nt, Human
cauucugccugcccaggc

SEQ ID NO: 2723065 - RNA, 19 nt, Human
cauucugccugcccaggcc

SEQ ID NO: 2723066 - RNA, 20 nt, Human
cauucugccugcccaggccc

SEQ ID NO: 2723067 - RNA, 23 nt, Human
cauuccugaugcuucuucagaga

SEQ ID NO: 2723068 - RNA, 14 nt, Human
cauuccugaacagg

SEQ ID NO: 2723069 - RNA, 14 nt, Human
cauuccugaugcuu

SEQ ID NO: 2723070 - RNA, 16 nt, Human
cauuccugaugcuucu

SEQ ID NO: 2723071 - RNA, 19 nt, Human
cauuccugaugcuucuuca

SEQ ID NO: 2723072 - RNA, 22 nt, Human
cauuccugaugcuucuucagag

SEQ ID NO: 2723073 - RNA, 23 nt, Human
cauucuucuguacgucugacagg

SEQ ID NO: 2723074 - RNA, 21 nt, Human
cauuguaaaugugcuuuuaaa

SEQ ID NO: 2723075 - RNA, 20 nt, Human
cauuguacgaagaguauuuu

SEQ ID NO: 2723076 - RNA, 15 nt, Human
cauugugggaagggg

SEQ ID NO: 2723077 - RNA, 13 nt, Human
cauugugggaagg

SEQ ID NO: 2723078 - RNA, 19 nt, Human
cauuguacgaagaguauuu

SEQ ID NO: 2723079 - RNA, 15 nt, Human
cauuuaaaaaaaauc

SEQ ID NO: 2723080 - RNA, 18 nt, Human
cauugaccugaggcccuu

SEQ ID NO: 2723081 - RNA, 14 nt, Human
cauugaccugaggc

SEQ ID NO: 2723082 - RNA, 15 nt, Human
cauugaccugaggcc

SEQ ID NO: 2723083 - RNA, 17 nt, Human
cauugaccugaggcccu

SEQ ID NO: 2723084 - RNA, 19 nt, Human
cauuugaaaauuuugaugu

SEQ ID NO: 2723085 - RNA, 17 nt, Human
cauuugaaaauuuugau

SEQ ID NO: 2723086 - RNA, 13 nt, Human
cauuugcugaaua

SEQ ID NO: 2723087 - RNA, 22 nt, Human
cauuuuauuuuauuaugcauga

SEQ ID NO: 2723088 - RNA, 23 nt, Human
cauuuuauuuuauuaugcaugaa

SEQ ID NO: 2723089 - RNA, 11 nt, Human
cauuuggaaau

SEQ ID NO: 2723090 - RNA, 18 nt, Human
cauuuggaaaucuuuaaa

SEQ ID NO: 2723091 - RNA, 17 nt, Human
cauuuggaaaucuuuaa

SEQ ID NO: 2723092 - RNA, 17 nt, Human
cauuuuuaguagagaca

SEQ ID NO: 2723093 - RNA, 21 nt, Human
cauuuuuaagugcugcauuua

SEQ ID NO: 2723094 - RNA, 16 nt, Human
ccaaacccuucagugc

SEQ ID NO: 2723095 - RNA, 20 nt, Human
caugugcuaguaauuggaaa

SEQ ID NO: 2723096 - RNA, 22 nt, Human
caugugccagguuuuuggucug

SEQ ID NO: 2723097 - RNA, 14 nt, Human
caugugcacaugca

SEQ ID NO: 2723098 - RNA, 23 nt, Human
cauguuuauuacaguauaauuaa

SEQ ID NO: 2723099 - RNA, 22 nt, Human
cauguuaaaccaugggauaaau

SEQ ID NO: 2723100 - RNA, 13 nt, Human
cauguuaaaccau

SEQ ID NO: 2723101 - RNA, 21 nt, Human
caugugaugagaggaaaucac

SEQ ID NO: 2723102 - RNA, 18 nt, Human
caugugaugagaggaaau

SEQ ID NO: 2723103 - RNA, 20 nt, Human
caugugaugagaggaaauca

SEQ ID NO: 2723104 - RNA, 15 nt, Human
caugugaugagagga

SEQ ID NO: 2723105 - RNA, 16 nt, Human
caugugaugagaggaa

SEQ ID NO: 2723106 - RNA, 17 nt, Human
caugugaugagaggaaa

SEQ ID NO: 2723107 - RNA, 12 nt, Human
caugucuggcua

SEQ ID NO: 2723108 - RNA, 23 nt, Human
cauggucggaaaacaugcuacac

SEQ ID NO: 2723109 - RNA, 19 nt, Human
cauggucggaaaacaugcu

SEQ ID NO: 2723110 - RNA, 17 nt, Human
cauggucggaaaacaug

SEQ ID NO: 2723111 - RNA, 14 nt, Human
cauguuugugauug

SEQ ID NO: 2723112 - RNA, 12 nt, Human
cauguuugugau

SEQ ID NO: 2723113 - RNA, 21 nt, Human
cauuaaaaaaucaguuguaca

SEQ ID NO: 2723114 - RNA, 20 nt, Human
cauguuuuucuucucccuca

SEQ ID NO: 2723115 - RNA, 19 nt, Human
cauguuuuucuucucccuc

SEQ ID NO: 2723116 - RNA, 20 nt, Human
cauggaauuggagcucgugg

SEQ ID NO: 2723117 - RNA, 18 nt, Human
caugcuguucaugaaaga

SEQ ID NO: 2723118 - RNA, 16 nt, Human
caugcuguucaugaaa

SEQ ID NO: 2723119 - RNA, 15 nt, Human
cauggacuuccacug

SEQ ID NO: 2723120 - RNA, 15 nt, Human
caugcuguucaugaa

SEQ ID NO: 2723121 - RNA, 13 nt, Human
caugcugucccuu

SEQ ID NO: 2723122 - RNA, 15 nt, Human
caugcugucccuuac

SEQ ID NO: 2723123 - RNA, 15 nt, Human
cauggcauauuuuuc

SEQ ID NO: 2723124 - RNA, 19 nt, Human
cauggcauauuuuucacau

SEQ ID NO: 2723125 - RNA, 23 nt, Human
cauggcauauuuuucacauaucu

SEQ ID NO: 2723126 - RNA, 13 nt, Human
cauggcauauuuu

SEQ ID NO: 2723127 - RNA, 18 nt, Human
caugggccuccugugugu

SEQ ID NO: 2723128 - RNA, 17 nt, Human
caugggauaaaugccau

SEQ ID NO: 2723129 - RNA, 16 nt, Human
caugggauaaaugcca

SEQ ID NO: 2723130 - RNA, 23 nt, Human
caugggauaaaugccaucaauaa

SEQ ID NO: 2723131 - RNA, 18 nt, Human
caugggauaaaugccauc

SEQ ID NO: 2723132 - RNA, 20 nt, Human
caucccucccuccaccuccc

SEQ ID NO: 2723133 - RNA, 17 nt, Human
cauccagguucagcuug

SEQ ID NO: 2723134 - RNA, 14 nt, Human
cauccacugugcca

SEQ ID NO: 2723135 - RNA, 17 nt, Human
cauccacugugccaugu

SEQ ID NO: 2723136 - RNA, 23 nt, Human
cauccacugugccaugugccagg

SEQ ID NO: 2723137 - RNA, 18 nt, Human
caucccuuaccugggaaa

SEQ ID NO: 2723138 - RNA, 22 nt, Human
caucccucccuccaccucccug

SEQ ID NO: 2723139 - RNA, 23 nt, Human
caucccucccuccaccucccugc

SEQ ID NO: 2723140 - RNA, 22 nt, Human
caucccugaaggccccgcccag

SEQ ID NO: 2723141 - RNA, 15 nt, Human
caucccucuggggcu

SEQ ID NO: 2723142 - RNA, 13 nt, Human
caucaugucuggc

SEQ ID NO: 2723143 - RNA, 14 nt, Human
caucaugucuggcu

SEQ ID NO: 2723144 - RNA, 15 nt, Human
caucaugucuggcua

SEQ ID NO: 2723145 - RNA, 16 nt, Human
caucauccuaagcuau

SEQ ID NO: 2723146 - RNA, 12 nt, Human
caucacccgcua

SEQ ID NO: 2723147 - RNA, 20 nt, Human
caucaccaacgucugugcca

SEQ ID NO: 2723148 - RNA, 13 nt, Human
cauauauaacaau

SEQ ID NO: 2723149 - RNA, 23 nt, Human
cauauaagauucauauuuacuuc

SEQ ID NO: 2723150 - RNA, 19 nt, Human
cauagucuggcuguaccca

SEQ ID NO: 2723151 - RNA, 15 nt, Human
cauauauaacaaugc

SEQ ID NO: 2723152 - RNA, 23 nt, Human
cauauauauguuuuaagaggcag

SEQ ID NO: 2723153 - RNA, 18 nt, Human
cauauauuuuuauauuua

SEQ ID NO: 2723154 - RNA, 21 nt, Human
cauauauuuuuauauuuacua

SEQ ID NO: 2723155 - RNA, 20 nt, Human
cauauauuuuuauauuuacu

SEQ ID NO: 2723156 - RNA, 15 nt, Human
cauaucuaguaugaa

SEQ ID NO: 2723157 - RNA, 17 nt, Human
cauaucuaguaugaaau

SEQ ID NO: 2723158 - RNA, 18 nt, Human
cauaucuaguaugaaauu

SEQ ID NO: 2723159 - RNA, 16 nt, Human
cauaguaugguggcug

SEQ ID NO: 2723160 - RNA, 17 nt, Human
cauaguaugguggcugg

SEQ ID NO: 2723161 - RNA, 15 nt, Human
cauaguaugguggcu

SEQ ID NO: 2723162 - RNA, 21 nt, Human
cauaucuaguaugaaauuaua

SEQ ID NO: 2723163 - RNA, 22 nt, Human
cauauucuguuggccaguguga

SEQ ID NO: 2723164 - RNA, 17 nt, Human
cauauugauuuccguua

SEQ ID NO: 2723165 - RNA, 21 nt, Human
cauauugauuuccguuaaaau

SEQ ID NO: 2723166 - RNA, 14 nt, Human
caucaacaucuugg

SEQ ID NO: 2723167 - RNA, 13 nt, Human
caugagcaucagg

SEQ ID NO: 2723168 - RNA, 12 nt, Human
caugagccucag

SEQ ID NO: 2723169 - RNA, 15 nt, Human
caugagccucagcau

SEQ ID NO: 2723170 - RNA, 17 nt, Human
caugagccucagcaucc

SEQ ID NO: 2723171 - RNA, 18 nt, Human
caugagccucagcauccu

SEQ ID NO: 2723172 - RNA, 19 nt, Human
caugagccucagcauccug

SEQ ID NO: 2723173 - RNA, 20 nt, Human
caugagccucagcauccugg

SEQ ID NO: 2723174 - RNA, 21 nt, Human
caugagccucagcauccuggc

SEQ ID NO: 2723175 - RNA, 15 nt, Human
caugagcaucaggcc

SEQ ID NO: 2723176 - RNA, 16 nt, Human
caugagcaucaggcca

SEQ ID NO: 2723177 - RNA, 17 nt, Human
caugagcaucaggccag

SEQ ID NO: 2723178 - RNA, 18 nt, Human
caugagcaucaggccagg

SEQ ID NO: 2723179 - RNA, 20 nt, Human
caugagcaucaggccaggcc

SEQ ID NO: 2723180 - RNA, 21 nt, Human
caugagcaucaggccaggccc

SEQ ID NO: 2723181 - RNA, 22 nt, Human
caugagcaucaggccaggcccu

SEQ ID NO: 2723182 - RNA, 23 nt, Human
caugagcaucaggccaggcccuc

SEQ ID NO: 2723183 - RNA, 23 nt, Human
caugaggaacaaggcaaggcugu

SEQ ID NO: 2723184 - RNA, 22 nt, Human
caugagccucagcauccuggca

SEQ ID NO: 2723185 - RNA, 23 nt, Human
caugagccucagcauccuggcac

SEQ ID NO: 2723186 - RNA, 16 nt, Human
caugaggaacaaggca

SEQ ID NO: 2723187 - RNA, 17 nt, Human
caugaggaacaaggcaa

SEQ ID NO: 2723188 - RNA, 20 nt, Human
caugaggaacaaggcaaggc

SEQ ID NO: 2723189 - RNA, 21 nt, Human
caugaggaacaaggcaaggcu

SEQ ID NO: 2723190 - RNA, 13 nt, Human
caugaguccccug

SEQ ID NO: 2723191 - RNA, 23 nt, Human
caugaguccccuguuuguuucug

SEQ ID NO: 2723192 - RNA, 14 nt, Human
caugaguccccugu

SEQ ID NO: 2723193 - RNA, 15 nt, Human
caugaguccccuguu

SEQ ID NO: 2723194 - RNA, 13 nt, Human
caugaaaacacau

SEQ ID NO: 2723195 - RNA, 17 nt, Human
caugaaaacacauuuuu

SEQ ID NO: 2723196 - RNA, 16 nt, Human
caugaaaacacauuuu

SEQ ID NO: 2723197 - RNA, 15 nt, Human
caugaaaacacauuu

SEQ ID NO: 2723198 - RNA, 14 nt, Human
caugaaaacacauu

SEQ ID NO: 2723199 - RNA, 21 nt, Human
caugaaaacacauuuuucuua

SEQ ID NO: 2723200 - RNA, 19 nt, Human
caugaaaacacauuuuucu

SEQ ID NO: 2723201 - RNA, 14 nt, Human
caugaaagauucaa

SEQ ID NO: 2723202 - RNA, 16 nt, Human
caucuugaauuguaag

SEQ ID NO: 2723203 - RNA, 21 nt, Human
caucuugaauuguaaggaaug

SEQ ID NO: 2723204 - RNA, 15 nt, Human
caucuugcucugcug

SEQ ID NO: 2723205 - RNA, 19 nt, Human
caucuugcucugcugacag

SEQ ID NO: 2723206 - RNA, 16 nt, Human
caucuugcucugcuga

SEQ ID NO: 2723207 - RNA, 17 nt, Human
caucuugcucugcugac

SEQ ID NO: 2723208 - RNA, 16 nt, Human
caucucuacaaaaagc

SEQ ID NO: 2723209 - RNA, 17 nt, Human
caucugacuaugacaua

SEQ ID NO: 2723210 - RNA, 15 nt, Human
caucucuccuccuuu

SEQ ID NO: 2723211 - RNA, 14 nt, Human
ccaccucccugcaa

SEQ ID NO: 2723212 - RNA, 17 nt, Human
ccaccucccacaaagga

SEQ ID NO: 2723213 - RNA, 16 nt, Human
ccaccugccagggaca

SEQ ID NO: 2723214 - RNA, 17 nt, Human
ccaccugccuguugggc

SEQ ID NO: 2723215 - RNA, 20 nt, Human
ccaccugccuguugggccag

SEQ ID NO: 2723216 - RNA, 17 nt, Human
ccaccuggccucugcac

SEQ ID NO: 2723217 - RNA, 14 nt, Human
ccaccuggccucug

SEQ ID NO: 2723218 - RNA, 22 nt, Human
ccaccugcggugcuaucucccc

SEQ ID NO: 2723219 - RNA, 15 nt, Human
ccaccuggccucugc

SEQ ID NO: 2723220 - RNA, 16 nt, Human
ccaccuggccucugca

SEQ ID NO: 2723221 - RNA, 15 nt, Human
ccacggccaggccag

SEQ ID NO: 2723222 - RNA, 12 nt, Human
ccacggccaggc

SEQ ID NO: 2723223 - RNA, 13 nt, Human
ccacggccaggcc

SEQ ID NO: 2723224 - RNA, 14 nt, Human
ccacggccaggcca

SEQ ID NO: 2723225 - RNA, 18 nt, Human
ccacccugaaagcccuga

SEQ ID NO: 2723226 - RNA, 12 nt, Human
ccaccucagccu

SEQ ID NO: 2723227 - RNA, 16 nt, Human
ccacccugaaagcccu

SEQ ID NO: 2723228 - RNA, 17 nt, Human
ccacccugaaagcccug

SEQ ID NO: 2723229 - RNA, 13 nt, Human
ccaccucagccuc

SEQ ID NO: 2723230 - RNA, 14 nt, Human
ccaccucagccucc

SEQ ID NO: 2723231 - RNA, 15 nt, Human
ccaccucagccuccc

SEQ ID NO: 2723232 - RNA, 12 nt, Human
ccacccaggagc

SEQ ID NO: 2723233 - RNA, 14 nt, Human
ccacccaggagccc

SEQ ID NO: 2723234 - RNA, 13 nt, Human
ccacguuucuaaa

SEQ ID NO: 2723235 - RNA, 18 nt, Human
ccacugcacuccagccug

SEQ ID NO: 2723236 - RNA, 15 nt, Human
ccacucccugcaacc

SEQ ID NO: 2723237 - RNA, 19 nt, Human
ccacugcacuccagccugg

SEQ ID NO: 2723238 - RNA, 20 nt, Human
ccacugcacuccagccuggg

SEQ ID NO: 2723239 - RNA, 16 nt, Human
ccacugcgaccacaag

SEQ ID NO: 2723240 - RNA, 18 nt, Human
ccacucaguccauagcag

SEQ ID NO: 2723241 - RNA, 12 nt, Human
ccacucccugca

SEQ ID NO: 2723242 - RNA, 13 nt, Human
ccacucccugcaa

SEQ ID NO: 2723243 - RNA, 23 nt, Human
ccacuacggaauaguuggcuagg

SEQ ID NO: 2723244 - RNA, 22 nt, Human
ccacuacggaauaguuggcuag

SEQ ID NO: 2723245 - RNA, 18 nt, Human
ccacuacauucuguuaau

SEQ ID NO: 2723246 - RNA, 13 nt, Human
ccacacccagccc

SEQ ID NO: 2723247 - RNA, 14 nt, Human
ccacacccagccca

SEQ ID NO: 2723248 - RNA, 12 nt, Human
ccacacccagcc

SEQ ID NO: 2723249 - RNA, 14 nt, Human
ccaccaacauacuc

SEQ ID NO: 2723250 - RNA, 18 nt, Human
ccaccaacauacucccau

SEQ ID NO: 2723251 - RNA, 16 nt, Human
ccacaucuugcucugc

SEQ ID NO: 2723252 - RNA, 20 nt, Human
ccacaucuugcucugcugac

SEQ ID NO: 2723253 - RNA, 22 nt, Human
ccacaucuugcucugcugacag

SEQ ID NO: 2723254 - RNA, 23 nt, Human
ccacaucuugcucugcugacaga

SEQ ID NO: 2723255 - RNA, 14 nt, Human
ccacaucuugcucu

SEQ ID NO: 2723256 - RNA, 14 nt, Human
ccaccacacccagc

SEQ ID NO: 2723257 - RNA, 16 nt, Human
ccaccacacccagccc

SEQ ID NO: 2723258 - RNA, 20 nt, Human
ccaccaacauacucccaucu

SEQ ID NO: 2723259 - RNA, 16 nt, Human
ccacccaagggccugg

SEQ ID NO: 2723260 - RNA, 17 nt, Human
ccacccaagggccuggc

SEQ ID NO: 2723261 - RNA, 19 nt, Human
ccacccaagggccuggccu

SEQ ID NO: 2723262 - RNA, 16 nt, Human
ccacccaccucagccu

SEQ ID NO: 2723263 - RNA, 14 nt, Human
ccacccaccucagc

SEQ ID NO: 2723264 - RNA, 15 nt, Human
ccacccaccucagcc

SEQ ID NO: 2723265 - RNA, 13 nt, Human
ccacccaccucag

SEQ ID NO: 2723266 - RNA, 22 nt, Human
ccacccaagggccuggccugag

SEQ ID NO: 2723267 - RNA, 20 nt, Human
ccacccaagggccuggccug

SEQ ID NO: 2723268 - RNA, 21 nt, Human
ccacccaagggccuggccuga

SEQ ID NO: 2723269 - RNA, 13 nt, Human
ccagcaguucaga

SEQ ID NO: 2723270 - RNA, 18 nt, Human
ccagcaguucagagcugc

SEQ ID NO: 2723271 - RNA, 19 nt, Human
ccagcaguucagagcugcc

SEQ ID NO: 2723272 - RNA, 20 nt, Human
ccagcaguucagagcugccc

SEQ ID NO: 2723273 - RNA, 21 nt, Human
ccagcaguucagagcugcccu

SEQ ID NO: 2723274 - RNA, 22 nt, Human
ccagcaguucagagcugcccuc

SEQ ID NO: 2723275 - RNA, 23 nt, Human
ccagcaguucagagcugcccucu

SEQ ID NO: 2723276 - RNA, 22 nt, Human
ccagccagcaguucagagcugc

SEQ ID NO: 2723277 - RNA, 15 nt, Human
ccagccaaagccucc

SEQ ID NO: 2723278 - RNA, 18 nt, Human
ccagccaaagccuccucc

SEQ ID NO: 2723279 - RNA, 19 nt, Human
ccagccaaagccuccucca

SEQ ID NO: 2723280 - RNA, 13 nt, Human
ccagccccagugc

SEQ ID NO: 2723281 - RNA, 15 nt, Human
ccagccccagugccc

SEQ ID NO: 2723282 - RNA, 23 nt, Human
ccagccccaaaacucuccucugc

SEQ ID NO: 2723283 - RNA, 16 nt, Human
ccagccccagugccca

SEQ ID NO: 2723284 - RNA, 16 nt, Human
ccagcccuuagcaggg

SEQ ID NO: 2723285 - RNA, 17 nt, Human
ccagcccuuagcaggga

SEQ ID NO: 2723286 - RNA, 14 nt, Human
ccagccgccaugcu

SEQ ID NO: 2723287 - RNA, 23 nt, Human
ccagccgagauagccaaggccaa

SEQ ID NO: 2723288 - RNA, 18 nt, Human
ccagccgccaugcuccug

SEQ ID NO: 2723289 - RNA, 19 nt, Human
ccagccgccaugcuccugg

SEQ ID NO: 2723290 - RNA, 15 nt, Human
ccagcaagugagagc

SEQ ID NO: 2723291 - RNA, 14 nt, Human
ccagauuucacucu

SEQ ID NO: 2723292 - RNA, 16 nt, Human
ccagcaagugagagcu

SEQ ID NO: 2723293 - RNA, 20 nt, Human
ccagcaagugagagcugggu

SEQ ID NO: 2723294 - RNA, 21 nt, Human
ccagcaagugagagcugggug

SEQ ID NO: 2723295 - RNA, 22 nt, Human
ccagcaagugagagcugggugu

SEQ ID NO: 2723296 - RNA, 18 nt, Human
ccagauucuuuccugagg

SEQ ID NO: 2723297 - RNA, 19 nt, Human
ccagauucuuuccugaggc

SEQ ID NO: 2723298 - RNA, 20 nt, Human
ccagauucuuuccugaggcu

SEQ ID NO: 2723299 - RNA, 21 nt, Human
ccagauucuuuccugaggcug

SEQ ID NO: 2723300 - RNA, 22 nt, Human
ccagauucuuuccugaggcugg

SEQ ID NO: 2723301 - RNA, 13 nt, Human
ccagagggccugc

SEQ ID NO: 2723302 - RNA, 22 nt, Human
ccagagggagugacagaggcag

SEQ ID NO: 2723303 - RNA, 23 nt, Human
ccagagggagugacagaggcagc

SEQ ID NO: 2723304 - RNA, 23 nt, Human
ccagaugcaccagcccuuagcag

SEQ ID NO: 2723305 - RNA, 15 nt, Human
ccagagggccugcaa

SEQ ID NO: 2723306 - RNA, 16 nt, Human
ccagagggccugcaag

SEQ ID NO: 2723307 - RNA, 23 nt, Human
ccagauucuuuccugaggcuggg

SEQ ID NO: 2723308 - RNA, 19 nt, Human
ccagauugcaacaggcugg

SEQ ID NO: 2723309 - RNA, 20 nt, Human
ccagauugcaacaggcuggg

SEQ ID NO: 2723310 - RNA, 21 nt, Human
ccagauugcaacaggcugggc

SEQ ID NO: 2723311 - RNA, 12 nt, Human
ccagauuucacu

SEQ ID NO: 2723312 - RNA, 17 nt, Human
ccagacaccuugacagg

SEQ ID NO: 2723313 - RNA, 19 nt, Human
ccagacaccuugacagggc

SEQ ID NO: 2723314 - RNA, 20 nt, Human
ccagacaccuugacagggca

SEQ ID NO: 2723315 - RNA, 21 nt, Human
ccagagaggguggugaccucu

SEQ ID NO: 2723316 - RNA, 23 nt, Human
ccagagaggguggugaccucugc

SEQ ID NO: 2723317 - RNA, 14 nt, Human
ccagagaggguggu

SEQ ID NO: 2723318 - RNA, 16 nt, Human
ccagagggagugacag

SEQ ID NO: 2723319 - RNA, 17 nt, Human
ccagagggagugacaga

SEQ ID NO: 2723320 - RNA, 18 nt, Human
ccagagggagugacagag

SEQ ID NO: 2723321 - RNA, 19 nt, Human
ccagagggagugacagagg

SEQ ID NO: 2723322 - RNA, 20 nt, Human
ccagagggagugacagaggc

SEQ ID NO: 2723323 - RNA, 21 nt, Human
ccagagggagugacagaggca

SEQ ID NO: 2723324 - RNA, 21 nt, Human
ccagaggagagaggacccccu

SEQ ID NO: 2723325 - RNA, 22 nt, Human
ccagaggagagaggacccccug

SEQ ID NO: 2723326 - RNA, 11 nt, Human
ccagagcugcc

SEQ ID NO: 2723327 - RNA, 12 nt, Human
ccagagcugcca

SEQ ID NO: 2723328 - RNA, 13 nt, Human
ccagagcugccac

SEQ ID NO: 2723329 - RNA, 14 nt, Human
ccagagcugccacc

SEQ ID NO: 2723330 - RNA, 15 nt, Human
ccagagcugccaccu

SEQ ID NO: 2723331 - RNA, 16 nt, Human
ccagagcugccaccug

SEQ ID NO: 2723332 - RNA, 19 nt, Human
ccagagcugccaccugccu

SEQ ID NO: 2723333 - RNA, 13 nt, Human
ccaugggauaaau

SEQ ID NO: 2723334 - RNA, 17 nt, Human
ccauguuggccaggcug

SEQ ID NO: 2723335 - RNA, 16 nt, Human
ccauguuggccaggcu

SEQ ID NO: 2723336 - RNA, 18 nt, Human
ccauucuccaccugccag

SEQ ID NO: 2723337 - RNA, 22 nt, Human
ccauuauucaaaguugccuaaa

SEQ ID NO: 2723338 - RNA, 17 nt, Human
ccauuauucaaaguugc

SEQ ID NO: 2723339 - RNA, 14 nt, Human
ccauuauucaaagu

SEQ ID NO: 2723340 - RNA, 20 nt, Human
ccauguuuauuacaguauaa

SEQ ID NO: 2723341 - RNA, 13 nt, Human
ccauguuuauuac

SEQ ID NO: 2723342 - RNA, 19 nt, Human
ccauauucuguuggccagu

SEQ ID NO: 2723343 - RNA, 16 nt, Human
cccaaaacucuccucu

SEQ ID NO: 2723344 - RNA, 18 nt, Human
cccaaaacucuccucugc

SEQ ID NO: 2723345 - RNA, 13 nt, Human
cccaaagugcugg

SEQ ID NO: 2723346 - RNA, 15 nt, Human
cccaaagugcuggga

SEQ ID NO: 2723347 - RNA, 14 nt, Human
ccauuuguguuuau

SEQ ID NO: 2723348 - RNA, 19 nt, Human
ccauucuccaccugccagg

SEQ ID NO: 2723349 - RNA, 20 nt, Human
ccauucuccaccugccaggg

SEQ ID NO: 2723350 - RNA, 18 nt, Human
cccaaauggaaaugggca

SEQ ID NO: 2723351 - RNA, 22 nt, Human
cccaaauggaaaugggcagagc

SEQ ID NO: 2723352 - RNA, 16 nt, Human
cccaaagugcugggau

SEQ ID NO: 2723353 - RNA, 21 nt, Human
ccaguuauggcuauaggugcu

SEQ ID NO: 2723354 - RNA, 14 nt, Human
ccaguuauggcuau

SEQ ID NO: 2723355 - RNA, 23 nt, Human
ccauauucuguuggccaguguga

SEQ ID NO: 2723356 - RNA, 22 nt, Human
ccaguguuguggauuuaacaga

SEQ ID NO: 2723357 - RNA, 23 nt, Human
ccagugcccacaggaucagucug

SEQ ID NO: 2723358 - RNA, 16 nt, Human
ccagugaggcucugcc

SEQ ID NO: 2723359 - RNA, 14 nt, Human
ccagugaggcucug

SEQ ID NO: 2723360 - RNA, 15 nt, Human
ccagugaggcucugc

SEQ ID NO: 2723361 - RNA, 20 nt, Human
ccagugccgagaaggaagcc

SEQ ID NO: 2723362 - RNA, 22 nt, Human
ccagugguuccuaauccucuag

SEQ ID NO: 2723363 - RNA, 13 nt, Human
ccaucuacccucc

SEQ ID NO: 2723364 - RNA, 22 nt, Human
ccaggcccucugcccacucccu

SEQ ID NO: 2723365 - RNA, 23 nt, Human
ccaggcccucugcccacucccug

SEQ ID NO: 2723366 - RNA, 20 nt, Human
ccaggcccucugcccacucc

SEQ ID NO: 2723367 - RNA, 21 nt, Human
ccaggcccucugcccacuccc

SEQ ID NO: 2723368 - RNA, 24 nt, Human
ccaggcuguaucccaugagccuca

SEQ ID NO: 2723369 - RNA, 17 nt, Human
ccaggcuuagucacuga

SEQ ID NO: 2723370 - RNA, 19 nt, Human
ccaggagccuccugcccuu

SEQ ID NO: 2723371 - RNA, 12 nt, Human
ccaggagccucc

SEQ ID NO: 2723372 - RNA, 20 nt, Human
ccaggagccccgaggccuuc

SEQ ID NO: 2723373 - RNA, 16 nt, Human
ccaggagccccgaggc

SEQ ID NO: 2723374 - RNA, 19 nt, Human
ccaggagccccgaggccuu

SEQ ID NO: 2723375 - RNA, 19 nt, Human
ccaggcauuccccaggagg

SEQ ID NO: 2723376 - RNA, 21 nt, Human
ccaggcauuccccaggaggcc

SEQ ID NO: 2723377 - RNA, 17 nt, Human
ccaggcauuccccagga

SEQ ID NO: 2723378 - RNA, 18 nt, Human
ccaggcauuccccaggag

SEQ ID NO: 2723379 - RNA, 18 nt, Human
ccaggugcacaagcucca

SEQ ID NO: 2723380 - RNA, 19 nt, Human
ccaggugcacaagcuccaa

SEQ ID NO: 2723381 - RNA, 20 nt, Human
ccaggugcacaagcuccaag

SEQ ID NO: 2723382 - RNA, 13 nt, Human
ccagugaggcucu

SEQ ID NO: 2723383 - RNA, 19 nt, Human
ccagucuggaaugcagugg

SEQ ID NO: 2723384 - RNA, 20 nt, Human
ccagucuggaaugcaguggu

SEQ ID NO: 2723385 - RNA, 18 nt, Human
ccagucuggaaugcagug

SEQ ID NO: 2723386 - RNA, 15 nt, Human
ccagguucagcuugu

SEQ ID NO: 2723387 - RNA, 24 nt, Human
ccaggugcacaagcuccaagcucc

SEQ ID NO: 2723388 - RNA, 17 nt, Human
ccagguuuuuggucuga

SEQ ID NO: 2723389 - RNA, 20 nt, Human
ccaggcuuagucacugagac

SEQ ID NO: 2723390 - RNA, 14 nt, Human
ccagggacagaggg

SEQ ID NO: 2723391 - RNA, 15 nt, Human
ccagggacagagggg

SEQ ID NO: 2723392 - RNA, 21 nt, Human
ccagggacagaggggguggcc

SEQ ID NO: 2723393 - RNA, 22 nt, Human
ccagggacagaggggguggccu

SEQ ID NO: 2723394 - RNA, 19 nt, Human
ccuuggggcugaugcaguu

SEQ ID NO: 2723395 - RNA, 21 nt, Human
ccuuggugucgggcaugacac

SEQ ID NO: 2723396 - RNA, 22 nt, Human
ccuuggugucgggcaugacacg

SEQ ID NO: 2723397 - RNA, 21 nt, Human
ccuugguuaggcauuguggga

SEQ ID NO: 2723398 - RNA, 22 nt, Human
ccuugguuaggcauugugggaa

SEQ ID NO: 2723399 - RNA, 14 nt, Human
ccuugaugaagaag

SEQ ID NO: 2723400 - RNA, 16 nt, Human
ccuuugacgccauccc

SEQ ID NO: 2723401 - RNA, 17 nt, Human
ccuuugacgccauccca

SEQ ID NO: 2723402 - RNA, 18 nt, Human
ccuuugacgccaucccag

SEQ ID NO: 2723403 - RNA, 19 nt, Human
ccuugaacuuugaccucug

SEQ ID NO: 2723404 - RNA, 20 nt, Human
ccuugaguugauucagcucu

SEQ ID NO: 2723405 - RNA, 23 nt, Human
ccuugaccauucuccaccugcca

SEQ ID NO: 2723406 - RNA, 13 nt, Human
ccuugacucuuuc

SEQ ID NO: 2723407 - RNA, 22 nt, Human
ccuugaccauucuccaccugcc

SEQ ID NO: 2723408 - RNA, 15 nt, Human
ccuucuccuucaccu

SEQ ID NO: 2723409 - RNA, 19 nt, Human
ccuucuccuucaccuuugu

SEQ ID NO: 2723410 - RNA, 15 nt, Human
ccuucggcgccuuaa

SEQ ID NO: 2723411 - RNA, 15 nt, Human
ccuucugugaaagua

SEQ ID NO: 2723412 - RNA, 22 nt, Human
ccuucauuuggcauuccccacu

SEQ ID NO: 2723413 - RNA, 19 nt, Human
ccuucauuuggcauucccc

SEQ ID NO: 2723414 - RNA, 14 nt, Human
ccuucagugccaaa

SEQ ID NO: 2723415 - RNA, 11 nt, Human
ccuucagugcc

SEQ ID NO: 2723416 - RNA, 10 nt, Human
ccuucagugc

SEQ ID NO: 2723417 - RNA, 21 nt, Human
ccuucaccuuuguccccaccg

SEQ ID NO: 2723418 - RNA, 14 nt, Human
ccuuagacaguccc

SEQ ID NO: 2723419 - RNA, 17 nt, Human
ccuucacagaugggugc

SEQ ID NO: 2723420 - RNA, 19 nt, Human
ccuucaccuuuguccccac

SEQ ID NO: 2723421 - RNA, 20 nt, Human
ccuucaccuuuguccccacc

SEQ ID NO: 2723422 - RNA, 21 nt, Human
ccuguuaaaagaugaaaauau

SEQ ID NO: 2723423 - RNA, 20 nt, Human
ccuguuaaaagaugaaaaua

SEQ ID NO: 2723424 - RNA, 23 nt, Human
ccuguugggccaggagccuccug

SEQ ID NO: 2723425 - RNA, 16 nt, Human
ccuguuucugcagcca

SEQ ID NO: 2723426 - RNA, 18 nt, Human
ccuguuuguuucugaaag

SEQ ID NO: 2723427 - RNA, 14 nt, Human
ccuguuuguuucug

SEQ ID NO: 2723428 - RNA, 17 nt, Human
ccugugucuugcaaugg

SEQ ID NO: 2723429 - RNA, 19 nt, Human
ccugugucuugcaauggca

SEQ ID NO: 2723430 - RNA, 21 nt, Human
ccugugucuugcaauggcagc

SEQ ID NO: 2723431 - RNA, 22 nt, Human
ccugugucuugcaauggcagcc

SEQ ID NO: 2723432 - RNA, 20 nt, Human
ccugugugugcgccuacagg

SEQ ID NO: 2723433 - RNA, 21 nt, Human
ccugugugugcgccuacagga

SEQ ID NO: 2723434 - RNA, 17 nt, Human
ccuuagaagucacacag

SEQ ID NO: 2723435 - RNA, 18 nt, Human
ccuuagaagucacacagu

SEQ ID NO: 2723436 - RNA, 19 nt, Human
ccuuacccucauguucuua

SEQ ID NO: 2723437 - RNA, 19 nt, Human
ccuuaccugccaggaagcc

SEQ ID NO: 2723438 - RNA, 15 nt, Human
ccuuacccucauguu

SEQ ID NO: 2723439 - RNA, 20 nt, Human
ccuuaccagcagagcaccuu

SEQ ID NO: 2723440 - RNA, 13 nt, Human
ccuuaccagcaga

SEQ ID NO: 2723441 - RNA, 14 nt, Human
ccuuacacaauggu

SEQ ID NO: 2723442 - RNA, 20 nt, Human
ccuuacacaaugguuuucuu

SEQ ID NO: 2723443 - RNA, 12 nt, Human
ccuucagugccu

SEQ ID NO: 2723444 - RNA, 18 nt, Human
cgagcaggcuacugucag

SEQ ID NO: 2723445 - RNA, 20 nt, Human
cgagcaggcuucuucccccc

SEQ ID NO: 2723446 - RNA, 14 nt, Human
cgagcaugccugga

SEQ ID NO: 2723447 - RNA, 13 nt, Human
cgagcaugccugg

SEQ ID NO: 2723448 - RNA, 16 nt, Human
cgagcaugccuggaug

SEQ ID NO: 2723449 - RNA, 17 nt, Human
cgagcaugccuggaugg

SEQ ID NO: 2723450 - RNA, 20 nt, Human
cgagauugcaccacugcacu

SEQ ID NO: 2723451 - RNA, 18 nt, Human
cgagaucacgccacugca

SEQ ID NO: 2723452 - RNA, 20 nt, Human
cgagaucacgccacugcacu

SEQ ID NO: 2723453 - RNA, 13 nt, Human
cgaauagcuggga

SEQ ID NO: 2723454 - RNA, 14 nt, Human
cgaauagcugggac

SEQ ID NO: 2723455 - RNA, 17 nt, Human
cgagaucacgccacugc

SEQ ID NO: 2723456 - RNA, 18 nt, Human
cgagauagccaaggccaa

SEQ ID NO: 2723457 - RNA, 20 nt, Human
cgaaaacguggcugcuucaa

SEQ ID NO: 2723458 - RNA, 15 nt, Human
cgaaaacguggcugc

SEQ ID NO: 2723459 - RNA, 18 nt, Human
cgaaaacguggcugcuuc

SEQ ID NO: 2723460 - RNA, 19 nt, Human
cgaaaacguggcugcuuca

SEQ ID NO: 2723461 - RNA, 22 nt, Human
ccuuugacgccaucccagcccc

SEQ ID NO: 2723462 - RNA, 20 nt, Human
ccuuugacgccaucccagcc

SEQ ID NO: 2723463 - RNA, 21 nt, Human
ccuuugacgccaucccagccc

SEQ ID NO: 2723464 - RNA, 20 nt, Human
cgaaaggaugaaagugacca

SEQ ID NO: 2723465 - RNA, 19 nt, Human
cgaaagggacuuggaagcu

SEQ ID NO: 2723466 - RNA, 22 nt, Human
cgaaagggacuuggaagcuccg

SEQ ID NO: 2723467 - RNA, 12 nt, Human
cgaacuggcugc

SEQ ID NO: 2723468 - RNA, 14 nt, Human
cgaacuggcugcaa

SEQ ID NO: 2723469 - RNA, 21 nt, Human
cgaagaguauuuuugacagaa

SEQ ID NO: 2723470 - RNA, 17 nt, Human
cgccaugcuccuggccc

SEQ ID NO: 2723471 - RNA, 18 nt, Human
cgagcaugccuggauggg

SEQ ID NO: 2723472 - RNA, 15 nt, Human
cgagcccugguggca

SEQ ID NO: 2723473 - RNA, 16 nt, Human
cgagcccugguggcag

SEQ ID NO: 2723474 - RNA, 20 nt, Human
cgauuucuguuuagauaaua

SEQ ID NO: 2723475 - RNA, 14 nt, Human
cgcagcccugcaga

SEQ ID NO: 2723476 - RNA, 15 nt, Human
cgcagacaggaccag

SEQ ID NO: 2723477 - RNA, 16 nt, Human
cgcagacaggaccagg

SEQ ID NO: 2723478 - RNA, 22 nt, Human
cgccaggggaaaaucagccugc

SEQ ID NO: 2723479 - RNA, 17 nt, Human
cgccagauucuuuccug

SEQ ID NO: 2723480 - RNA, 19 nt, Human
cgccagauucuuuccugag

SEQ ID NO: 2723481 - RNA, 20 nt, Human
cgccagauucuuuccugagg

SEQ ID NO: 2723482 - RNA, 21 nt, Human
cgccagauucuuuccugaggc

SEQ ID NO: 2723483 - RNA, 16 nt, Human
ccugcaauaaaauggg

SEQ ID NO: 2723484 - RNA, 14 nt, Human
ccugcaagaacaag

SEQ ID NO: 2723485 - RNA, 19 nt, Human
ccugcaauuucauaugcug

SEQ ID NO: 2723486 - RNA, 20 nt, Human
ccugcacggugaauggcuuu

SEQ ID NO: 2723487 - RNA, 21 nt, Human
ccugcacggugaauggcuuug

SEQ ID NO: 2723488 - RNA, 14 nt, Human
ccugaggcccuucu

SEQ ID NO: 2723489 - RNA, 15 nt, Human
ccugauugugucucu

SEQ ID NO: 2723490 - RNA, 21 nt, Human
ccugaugcuucuucagagacu

SEQ ID NO: 2723491 - RNA, 22 nt, Human
ccugaugcuucuucagagacuc

SEQ ID NO: 2723492 - RNA, 11 nt, Human
ccugaggcccu

SEQ ID NO: 2723493 - RNA, 12 nt, Human
ccugaggcccuu

SEQ ID NO: 2723494 - RNA, 19 nt, Human
ccugaugcuucuucagaga

SEQ ID NO: 2723495 - RNA, 20 nt, Human
ccugaugcuucuucagagac

SEQ ID NO: 2723496 - RNA, 17 nt, Human
ccugauugugucucuug

SEQ ID NO: 2723497 - RNA, 19 nt, Human
ccugauugugucucuuggu

SEQ ID NO: 2723498 - RNA, 22 nt, Human
ccugcaaccugauugugucucu

SEQ ID NO: 2723499 - RNA, 21 nt, Human
ccugcaaccugauugugucuc

SEQ ID NO: 2723500 - RNA, 16 nt, Human
ccugccagggacagag

SEQ ID NO: 2723501 - RNA, 12 nt, Human
ccugccagggac

SEQ ID NO: 2723502 - RNA, 13 nt, Human
ccugccagggaca

SEQ ID NO: 2723503 - RNA, 14 nt, Human
ccugccagggacag

SEQ ID NO: 2723504 - RNA, 15 nt, Human
ccugccagggacaga

SEQ ID NO: 2723505 - RNA, 15 nt, Human
ccugccaggcauggu

SEQ ID NO: 2723506 - RNA, 23 nt, Human
ccugccaggaagccagcaggcuc

SEQ ID NO: 2723507 - RNA, 16 nt, Human
ccugccaggcauggug

SEQ ID NO: 2723508 - RNA, 11 nt, Human
ccugccaggga

SEQ ID NO: 2723509 - RNA, 18 nt, Human
ccugccaggaagccagca

SEQ ID NO: 2723510 - RNA, 19 nt, Human
ccugccaggaagccagcag

SEQ ID NO: 2723511 - RNA, 21 nt, Human
ccugccaggaagccagcaggc

SEQ ID NO: 2723512 - RNA, 22 nt, Human
ccugccaggaagccagcaggcu

SEQ ID NO: 2723513 - RNA, 13 nt, Human
ccugccaggaagc

SEQ ID NO: 2723514 - RNA, 14 nt, Human
ccugccaggaagcc

SEQ ID NO: 2723515 - RNA, 15 nt, Human
ccugccaggaagcca

SEQ ID NO: 2723516 - RNA, 17 nt, Human
ccugccaggaagccagc

SEQ ID NO: 2723517 - RNA, 14 nt, Human
ccugagcuuucugc

SEQ ID NO: 2723518 - RNA, 20 nt, Human
ccugagccagauuucacucu

SEQ ID NO: 2723519 - RNA, 16 nt, Human
ccugagcuuucugcua

SEQ ID NO: 2723520 - RNA, 21 nt, Human
ccugaggcccagagggccugc

SEQ ID NO: 2723521 - RNA, 23 nt, Human
ccugacaacacucauugaccuga

SEQ ID NO: 2723522 - RNA, 23 nt, Human
ccuggaaaucaggguuaguauug

SEQ ID NO: 2723523 - RNA, 14 nt, Human
ccugcuucaaauau

SEQ ID NO: 2723524 - RNA, 22 nt, Human
ccugcggugcuaucucccccag

SEQ ID NO: 2723525 - RNA, 21 nt, Human
ccugcucuccgaccagacacc

SEQ ID NO: 2723526 - RNA, 22 nt, Human
ccugcucuccgaccagacaccu

SEQ ID NO: 2723527 - RNA, 22 nt, Human
ccugccccucaacucuccucca

SEQ ID NO: 2723528 - RNA, 23 nt, Human
ccugccuguugggccaggagccu

SEQ ID NO: 2723529 - RNA, 11 nt, Human
ccugccucagc

SEQ ID NO: 2723530 - RNA, 16 nt, Human
ccugcggugcuaucuc

SEQ ID NO: 2723531 - RNA, 17 nt, Human
ccugcggugcuaucucc

SEQ ID NO: 2723532 - RNA, 22 nt, Human
ccugggcagcugccuccccucc

SEQ ID NO: 2723533 - RNA, 22 nt, Human
ccuggcacccggccccugcugg

SEQ ID NO: 2723534 - RNA, 23 nt, Human
ccuggcacccggccccugcuggu

SEQ ID NO: 2723535 - RNA, 13 nt, Human
ccuggcagccccu

SEQ ID NO: 2723536 - RNA, 12 nt, Human
ccuggcagcccc

SEQ ID NO: 2723537 - RNA, 18 nt, Human
ccuggaauauauaaccag

SEQ ID NO: 2723538 - RNA, 15 nt, Human
ccuggccagaugcac

SEQ ID NO: 2723539 - RNA, 16 nt, Human
cccgggcucugccucc

SEQ ID NO: 2723540 - RNA, 20 nt, Human
cccuacaguugaaaaacagc

SEQ ID NO: 2723541 - RNA, 12 nt, Human
cccgggcucugc

SEQ ID NO: 2723542 - RNA, 14 nt, Human
cccgggcucugccu

SEQ ID NO: 2723543 - RNA, 15 nt, Human
cccgggcucugccuc

SEQ ID NO: 2723544 - RNA, 22 nt, Human
cccgaguagcugggacuacagg

SEQ ID NO: 2723545 - RNA, 19 nt, Human
cccgcugucagccauuccu

SEQ ID NO: 2723546 - RNA, 20 nt, Human
cccgcugucagccauuccug

SEQ ID NO: 2723547 - RNA, 14 nt, Human
cccagagggccugc

SEQ ID NO: 2723548 - RNA, 21 nt, Human
cccgaggccuucucugaagga

SEQ ID NO: 2723549 - RNA, 15 nt, Human
cccagagggccugca

SEQ ID NO: 2723550 - RNA, 13 nt, Human
cccgaguagcugg

SEQ ID NO: 2723551 - RNA, 14 nt, Human
cccgaguagcuggg

SEQ ID NO: 2723552 - RNA, 15 nt, Human
cccgaguagcuggga

SEQ ID NO: 2723553 - RNA, 16 nt, Human
cccgaguagcugggac

SEQ ID NO: 2723554 - RNA, 17 nt, Human
cccgaguagcugggacu

SEQ ID NO: 2723555 - RNA, 18 nt, Human
cccgaguagcugggacua

SEQ ID NO: 2723556 - RNA, 21 nt, Human
cccgaguagcugggacuacag

SEQ ID NO: 2723557 - RNA, 11 nt, Human
cccucuccugg

SEQ ID NO: 2723558 - RNA, 12 nt, Human
cccucuccuggg

SEQ ID NO: 2723559 - RNA, 13 nt, Human
cccucuccugggc

SEQ ID NO: 2723560 - RNA, 14 nt, Human
cccucuccugggca

SEQ ID NO: 2723561 - RNA, 15 nt, Human
cccucuccugggcag

SEQ ID NO: 2723562 - RNA, 12 nt, Human
cccucuggggcu

SEQ ID NO: 2723563 - RNA, 19 nt, Human
cccuccaccucccugcaau

SEQ ID NO: 2723564 - RNA, 15 nt, Human
cccuccaccucccug

SEQ ID NO: 2723565 - RNA, 17 nt, Human
cccuccaccucccugca

SEQ ID NO: 2723566 - RNA, 14 nt, Human
cccuccaccucccu

SEQ ID NO: 2723567 - RNA, 12 nt, Human
cccuccaccucc

SEQ ID NO: 2723568 - RNA, 12 nt, Human
cccugcacuugc

SEQ ID NO: 2723569 - RNA, 19 nt, Human
cccugcacuugcagacucu

SEQ ID NO: 2723570 - RNA, 15 nt, Human
cccugaaagcccuga

SEQ ID NO: 2723571 - RNA, 13 nt, Human
cccugaggcccag

SEQ ID NO: 2723572 - RNA, 16 nt, Human
cccucuggggcuguuc

SEQ ID NO: 2723573 - RNA, 14 nt, Human
cccugaggcccaga

SEQ ID NO: 2723574 - RNA, 15 nt, Human
cccugaggcccagag

SEQ ID NO: 2723575 - RNA, 16 nt, Human
cccugaggcccagagg

SEQ ID NO: 2723576 - RNA, 17 nt, Human
cccugaggcccagaggg

SEQ ID NO: 2723577 - RNA, 18 nt, Human
cccugaggcccagagggc

SEQ ID NO: 2723578 - RNA, 19 nt, Human
cccugaggcccagagggcc

SEQ ID NO: 2723579 - RNA, 20 nt, Human
cccugaggcccagagggccu

SEQ ID NO: 2723580 - RNA, 23 nt, Human
cccugaggcccagagggccugca

SEQ ID NO: 2723581 - RNA, 18 nt, Human
cccugcccaccuggccuc

SEQ ID NO: 2723582 - RNA, 16 nt, Human
cccugcuggguguggc

SEQ ID NO: 2723583 - RNA, 21 nt, Human
cccugcuggguguggcgcagc

SEQ ID NO: 2723584 - RNA, 13 nt, Human
cccugcccaccug

SEQ ID NO: 2723585 - RNA, 14 nt, Human
cccugcccaccugg

SEQ ID NO: 2723586 - RNA, 17 nt, Human
cccugcccaccuggccu

SEQ ID NO: 2723587 - RNA, 17 nt, Human
cccugcuuucagauacu

SEQ ID NO: 2723588 - RNA, 14 nt, Human
cccugcuuucagau

SEQ ID NO: 2723589 - RNA, 22 nt, Human
cccugcuggguguggcgcagca

SEQ ID NO: 2723590 - RNA, 15 nt, Human
cccugguggcagcuc

SEQ ID NO: 2723591 - RNA, 16 nt, Human
cccugguggcagcuca

SEQ ID NO: 2723592 - RNA, 17 nt, Human
cccugguggcagcucac

SEQ ID NO: 2723593 - RNA, 21 nt, Human
cccacaaaggagagcuagcag

SEQ ID NO: 2723594 - RNA, 16 nt, Human
cccaaugcacuuuguu

SEQ ID NO: 2723595 - RNA, 20 nt, Human
cccaaugcacuuuguucugg

SEQ ID NO: 2723596 - RNA, 17 nt, Human
cccaccuggccucugca

SEQ ID NO: 2723597 - RNA, 19 nt, Human
cccaccuggccucugcacu

SEQ ID NO: 2723598 - RNA, 21 nt, Human
cccaccuggccucugcacucc

SEQ ID NO: 2723599 - RNA, 20 nt, Human
cccacgacugcccggcaggg

SEQ ID NO: 2723600 - RNA, 21 nt, Human
cccacgacugcccggcagggu

SEQ ID NO: 2723601 - RNA, 16 nt, Human
cccaccuggccucugc

SEQ ID NO: 2723602 - RNA, 23 nt, Human
cccacuugagaauuacccuuuug

SEQ ID NO: 2723603 - RNA, 12 nt, Human
cccacuucugcc

SEQ ID NO: 2723604 - RNA, 14 nt, Human
cccacgcuggagug

SEQ ID NO: 2723605 - RNA, 19 nt, Human
cccacgcuggagugcagug

SEQ ID NO: 2723606 - RNA, 20 nt, Human
cccacgcuggagugcaguga

SEQ ID NO: 2723607 - RNA, 21 nt, Human
cccacgcuggagugcagugag

SEQ ID NO: 2723608 - RNA, 17 nt, Human
cccaccucagccucccg

SEQ ID NO: 2723609 - RNA, 22 nt, Human
cccaccucucucacuccuugaa

SEQ ID NO: 2723610 - RNA, 19 nt, Human
cccaccgcagacaggacca

SEQ ID NO: 2723611 - RNA, 20 nt, Human
cccaccgcagacaggaccag

SEQ ID NO: 2723612 - RNA, 20 nt, Human
ccgggcgcgguggcucacgc

SEQ ID NO: 2723613 - RNA, 22 nt, Human
ccgggcucugccucccaucacc

SEQ ID NO: 2723614 - RNA, 14 nt, Human
ccgugcuaaggacu

SEQ ID NO: 2723615 - RNA, 16 nt, Human
ccgugcuaaggacuug

SEQ ID NO: 2723616 - RNA, 15 nt, Human
ccgugcuaaggacuu

SEQ ID NO: 2723617 - RNA, 12 nt, Human
ccgcuuucuacc

SEQ ID NO: 2723618 - RNA, 20 nt, Human
ccgggaagggggcugggaca

SEQ ID NO: 2723619 - RNA, 19 nt, Human
ccgcuuucuacccagcgag

SEQ ID NO: 2723620 - RNA, 15 nt, Human
ccggcuggccuggcc

SEQ ID NO: 2723621 - RNA, 17 nt, Human
ccggcuggccuggcccc

SEQ ID NO: 2723622 - RNA, 18 nt, Human
ccggcuggccuggccccu

SEQ ID NO: 2723623 - RNA, 19 nt, Human
ccgcacugggcuuggggac

SEQ ID NO: 2723624 - RNA, 14 nt, Human
ccgcacugggcuug

SEQ ID NO: 2723625 - RNA, 21 nt, Human
ccgcuaagagggagggagggc

SEQ ID NO: 2723626 - RNA, 23 nt, Human
ccgcuaagagggagggagggcuc

SEQ ID NO: 2723627 - RNA, 20 nt, Human
ccgaguagcugggacuacag

SEQ ID NO: 2723628 - RNA, 17 nt, Human
ccgaguagcugggacua

SEQ ID NO: 2723629 - RNA, 20 nt, Human
cccugguggcagcucaccuc

SEQ ID NO: 2723630 - RNA, 14 nt, Human
ccgaggccuucucu

SEQ ID NO: 2723631 - RNA, 17 nt, Human
ccuaaauccauuuggaa

SEQ ID NO: 2723632 - RNA, 15 nt, Human
ccuaaaauucagugg

SEQ ID NO: 2723633 - RNA, 14 nt, Human
ccuaaaguguauuu

SEQ ID NO: 2723634 - RNA, 12 nt, Human
ccuaaauccauu

SEQ ID NO: 2723635 - RNA, 13 nt, Human
ccuaguuccacca

SEQ ID NO: 2723636 - RNA, 21 nt, Human
ccuaguuccaccaucaagcca

SEQ ID NO: 2723637 - RNA, 23 nt, Human
ccuaguuccaccaucaagccacc

SEQ ID NO: 2723638 - RNA, 18 nt, Human
ccuauauuguuuucagug

SEQ ID NO: 2723639 - RNA, 22 nt, Human
ccuauauuguuuucaguguaca

SEQ ID NO: 2723640 - RNA, 13 nt, Human
ccuccaccucccu

SEQ ID NO: 2723641 - RNA, 14 nt, Human
ccuccaccucccug

SEQ ID NO: 2723642 - RNA, 15 nt, Human
ccuccaccucccugc

SEQ ID NO: 2723643 - RNA, 17 nt, Human
ccuccaccucccugcaa

SEQ ID NO: 2723644 - RNA, 22 nt, Human
ccuccaccucccugcaauaaaa

SEQ ID NO: 2723645 - RNA, 22 nt, Human
ccuccaggugcacaagcuccaa

SEQ ID NO: 2723646 - RNA, 19 nt, Human
ccuccaggugcacaagcuc

SEQ ID NO: 2723647 - RNA, 21 nt, Human
ccuccaggugcacaagcucca

SEQ ID NO: 2723648 - RNA, 16 nt, Human
ccucccaaagugcugg

SEQ ID NO: 2723649 - RNA, 23 nt, Human
ccuccaugugggcuaguugggcu

SEQ ID NO: 2723650 - RNA, 15 nt, Human
ccucccaaagugcug

SEQ ID NO: 2723651 - RNA, 13 nt, Human
ccucauccucaua

SEQ ID NO: 2723652 - RNA, 20 nt, Human
ccucauccucauacccaccc

SEQ ID NO: 2723653 - RNA, 20 nt, Human
ccucauaguaugguggcugg

SEQ ID NO: 2723654 - RNA, 13 nt, Human
ccucauacccacc

SEQ ID NO: 2723655 - RNA, 21 nt, Human
ccucauaguaugguggcuggg

SEQ ID NO: 2723656 - RNA, 22 nt, Human
ccucauaguaugguggcugggu

SEQ ID NO: 2723657 - RNA, 13 nt, Human
ccucaucaccaac

SEQ ID NO: 2723658 - RNA, 14 nt, Human
ccucaucaccaacg

SEQ ID NO: 2723659 - RNA, 20 nt, Human
ccucagucuggcccuuccuu

SEQ ID NO: 2723660 - RNA, 11 nt, Human
ccucagugcca

SEQ ID NO: 2723661 - RNA, 12 nt, Human
ccucauacccac

SEQ ID NO: 2723662 - RNA, 19 nt, Human
ccucagucuggcccuuccu

SEQ ID NO: 2723663 - RNA, 16 nt, Human
ccuccucugcuugcca

SEQ ID NO: 2723664 - RNA, 13 nt, Human
ccuccucugcuug

SEQ ID NO: 2723665 - RNA, 18 nt, Human
ccuccucugcuugccauc

SEQ ID NO: 2723666 - RNA, 23 nt, Human
ccuccugccucgaacuggcugca

SEQ ID NO: 2723667 - RNA, 14 nt, Human
ccuccugggcuaag

SEQ ID NO: 2723668 - RNA, 20 nt, Human
ccucccuccaccucccugca

SEQ ID NO: 2723669 - RNA, 17 nt, Human
ccucccuccaccucccu

SEQ ID NO: 2723670 - RNA, 10 nt, Human
ccucccuccc

SEQ ID NO: 2723671 - RNA, 14 nt, Human
ccuccucagaucuu

SEQ ID NO: 2723672 - RNA, 19 nt, Human
ccucccgaguagcugggac

SEQ ID NO: 2723673 - RNA, 20 nt, Human
ccucccgaguagcugggacu

SEQ ID NO: 2723674 - RNA, 21 nt, Human
ccucccgaguagcugggacua

SEQ ID NO: 2723675 - RNA, 16 nt, Human
ccucuaggaggucucu

SEQ ID NO: 2723676 - RNA, 16 nt, Human
ccucggugccuuccuc

SEQ ID NO: 2723677 - RNA, 14 nt, Human
ccucgguguggaga

SEQ ID NO: 2723678 - RNA, 18 nt, Human
ccucgguguggagaagcg

SEQ ID NO: 2723679 - RNA, 17 nt, Human
ccucccgaauagcuggg

SEQ ID NO: 2723680 - RNA, 19 nt, Human
cuucgggaggucgaggcag

SEQ ID NO: 2723681 - RNA, 16 nt, Human
cuucucacugccaugc

SEQ ID NO: 2723682 - RNA, 21 nt, Human
cuucucacugccaugccagcu

SEQ ID NO: 2723683 - RNA, 20 nt, Human
cuuccuuggacucauuuuaa

SEQ ID NO: 2723684 - RNA, 16 nt, Human
cuucgcuccugugucu

SEQ ID NO: 2723685 - RNA, 17 nt, Human
cuucgcuccugugucuu

SEQ ID NO: 2723686 - RNA, 16 nt, Human
cuucagccucccgagu

SEQ ID NO: 2723687 - RNA, 20 nt, Human
cuucagccucccgaguagcu

SEQ ID NO: 2723688 - RNA, 14 nt, Human
cuucagccucccga

SEQ ID NO: 2723689 - RNA, 23 nt, Human
cuucagcaaaaauauuuuaugau

SEQ ID NO: 2723690 - RNA, 20 nt, Human
cuucagcaaaaauauuuuau

SEQ ID NO: 2723691 - RNA, 16 nt, Human
cuucagcgguuuauau

SEQ ID NO: 2723692 - RNA, 15 nt, Human
cuucagcugacuuuu

SEQ ID NO: 2723693 - RNA, 19 nt, Human
cuucagcugacuuuucugu

SEQ ID NO: 2723694 - RNA, 14 nt, Human
cuucaguaagccgu

SEQ ID NO: 2723695 - RNA, 13 nt, Human
cuuccacaagagc

SEQ ID NO: 2723696 - RNA, 14 nt, Human
cuuccacaagagcc

SEQ ID NO: 2723697 - RNA, 15 nt, Human
cuuccacaagagccc

SEQ ID NO: 2723698 - RNA, 14 nt, Human
cuucagugccaaaa

SEQ ID NO: 2723699 - RNA, 17 nt, Human
cuucaaauccuugaaga

SEQ ID NO: 2723700 - RNA, 15 nt, Human
cuucaaauauuuccc

SEQ ID NO: 2723701 - RNA, 21 nt, Human
cuuagucacugagacagcccg

SEQ ID NO: 2723702 - RNA, 20 nt, Human
cuuagucacugagacagccc

SEQ ID NO: 2723703 - RNA, 22 nt, Human
cuuagucacugagacagcccgg

SEQ ID NO: 2723704 - RNA, 17 nt, Human
cuucaaggauccugagc

SEQ ID NO: 2723705 - RNA, 18 nt, Human
cuucaaggauccugagcc

SEQ ID NO: 2723706 - RNA, 19 nt, Human
cuucaaggauccugagcca

SEQ ID NO: 2723707 - RNA, 20 nt, Human
cuucaaggauccugagccag

SEQ ID NO: 2723708 - RNA, 14 nt, Human
cuucacaacagauu

SEQ ID NO: 2723709 - RNA, 12 nt, Human
cuucacaacaga

SEQ ID NO: 2723710 - RNA, 23 nt, Human
cuucaaggauccugagccagauu

SEQ ID NO: 2723711 - RNA, 21 nt, Human
cuucaaggauccugagccaga

SEQ ID NO: 2723712 - RNA, 22 nt, Human
cuucaaggauccugagccagau

SEQ ID NO: 2723713 - RNA, 17 nt, Human
cuucagcaaaaauauuu

SEQ ID NO: 2723714 - RNA, 24 nt, Human
cuucagagacuccugcaggcagcc

SEQ ID NO: 2723715 - RNA, 23 nt, Human
cuucacauauugauuuccguuaa

SEQ ID NO: 2723716 - RNA, 14 nt, Human
cuucacauauugau

SEQ ID NO: 2723717 - RNA, 15 nt, Human
cuguuuuauaauuuu

SEQ ID NO: 2723718 - RNA, 14 nt, Human
cuguuuuauaauuu

SEQ ID NO: 2723719 - RNA, 16 nt, Human
cuuaaaaaguggaaaa

SEQ ID NO: 2723720 - RNA, 17 nt, Human
cuuaaaaaguggaaaaa

SEQ ID NO: 2723721 - RNA, 18 nt, Human
cuguuuagauaauacacc

SEQ ID NO: 2723722 - RNA, 17 nt, Human
cuguuucaaacuuuacu

SEQ ID NO: 2723723 - RNA, 15 nt, Human
cuguuucaaacuuua

SEQ ID NO: 2723724 - RNA, 17 nt, Human
cuguugcccaggcuggc

SEQ ID NO: 2723725 - RNA, 17 nt, Human
cuguuuagauaauacac

SEQ ID NO: 2723726 - RNA, 14 nt, Human
cuguuuagauaaua

SEQ ID NO: 2723727 - RNA, 17 nt, Human
cuguuugcuaagugagg

SEQ ID NO: 2723728 - RNA, 19 nt, Human
cuguuugcuaagugaggau

SEQ ID NO: 2723729 - RNA, 23 nt, Human
cuguucuuucuggcuaugcauuu

SEQ ID NO: 2723730 - RNA, 12 nt, Human
cuguugcccagg

SEQ ID NO: 2723731 - RNA, 13 nt, Human
cuguugcccaggc

SEQ ID NO: 2723732 - RNA, 14 nt, Human
cuguugcccaggcu

SEQ ID NO: 2723733 - RNA, 15 nt, Human
cuguugcccaggcug

SEQ ID NO: 2723734 - RNA, 16 nt, Human
cuguugcccaggcugg

SEQ ID NO: 2723735 - RNA, 16 nt, Human
cuguuaauaguucagg

SEQ ID NO: 2723736 - RNA, 21 nt, Human
cuguucuuucuggcuaugcau

SEQ ID NO: 2723737 - RNA, 14 nt, Human
cuguucuuucuggc

SEQ ID NO: 2723738 - RNA, 13 nt, Human
cuguucuuucugg

SEQ ID NO: 2723739 - RNA, 21 nt, Human
cuguucuuuccaaaguacacu

SEQ ID NO: 2723740 - RNA, 19 nt, Human
cuguucuuuccaaaguaca

SEQ ID NO: 2723741 - RNA, 16 nt, Human
cuguucuuuccaaagu

SEQ ID NO: 2723742 - RNA, 15 nt, Human
cuguucuuuccaaag

SEQ ID NO: 2723743 - RNA, 17 nt, Human
cuuaauuaaaagaauau

SEQ ID NO: 2723744 - RNA, 16 nt, Human
cuuaauuaaaagaaua

SEQ ID NO: 2723745 - RNA, 20 nt, Human
cuuaauuaaaagaauauuuu

SEQ ID NO: 2723746 - RNA, 19 nt, Human
cuuaauuaaaagaauauuu

SEQ ID NO: 2723747 - RNA, 20 nt, Human
cuuaauucuuagcucauucu

SEQ ID NO: 2723748 - RNA, 21 nt, Human
cuuaagaagacugcauuauau

SEQ ID NO: 2723749 - RNA, 23 nt, Human
cuuaagaagacugcauuauauuu

SEQ ID NO: 2723750 - RNA, 23 nt, Human
cuuagguuggcaaaaaggcagga

SEQ ID NO: 2723751 - RNA, 21 nt, Human
cuuagguuggcaaaaaggcag

SEQ ID NO: 2723752 - RNA, 13 nt, Human
cuuaccugccagg

SEQ ID NO: 2723753 - RNA, 20 nt, Human
cuuaccugccaggaagccag

SEQ ID NO: 2723754 - RNA, 20 nt, Human
cuuagaaaaaccaccaccau

SEQ ID NO: 2723755 - RNA, 17 nt, Human
cuuagaagucacacagu

SEQ ID NO: 2723756 - RNA, 20 nt, Human
cuuagaagucacacaguauu

SEQ ID NO: 2723757 - RNA, 16 nt, Human
cuguuaaaagaugaaa

SEQ ID NO: 2723758 - RNA, 15 nt, Human
cuguuaaaagaugaa

SEQ ID NO: 2723759 - RNA, 19 nt, Human
cuguuaaaagaugaaaaua

SEQ ID NO: 2723760 - RNA, 20 nt, Human
cugugucuuuuuucacuaca

SEQ ID NO: 2723761 - RNA, 12 nt, Human
cuguggugacuu

SEQ ID NO: 2723762 - RNA, 14 nt, Human
cuguggugacuuug

SEQ ID NO: 2723763 - RNA, 13 nt, Human
cuguggugacuuu

SEQ ID NO: 2723764 - RNA, 22 nt, Human
cuguggguuucuaaagcugcca

SEQ ID NO: 2723765 - RNA, 23 nt, Human
cuguggugacuuuggauaauaag

SEQ ID NO: 2723766 - RNA, 20 nt, Human
cuguggugacuuuggauaau

SEQ ID NO: 2723767 - RNA, 18 nt, Human
cuguggugacuuuggaua

SEQ ID NO: 2723768 - RNA, 17 nt, Human
cuguggugacuuuggau

SEQ ID NO: 2723769 - RNA, 15 nt, Human
cuguggugacuuugg

SEQ ID NO: 2723770 - RNA, 21 nt, Human
cuguggguuucuaaagcugcc

SEQ ID NO: 2723771 - RNA, 18 nt, Human
cugucuucacaacagauu

SEQ ID NO: 2723772 - RNA, 18 nt, Human
cugucuucaguaagccgu

SEQ ID NO: 2723773 - RNA, 15 nt, Human
cugugaaaggaaaga

SEQ ID NO: 2723774 - RNA, 23 nt, Human
cugucuugccuuuuucauuauuu

SEQ ID NO: 2723775 - RNA, 21 nt, Human
cugucuugccuuuuucauuau

SEQ ID NO: 2723776 - RNA, 23 nt, Human
cugucauuugagcagggcucagc

SEQ ID NO: 2723777 - RNA, 21 nt, Human
cugucauuugagcagggcuca

SEQ ID NO: 2723778 - RNA, 22 nt, Human
cugucauuugagcagggcucag

SEQ ID NO: 2723779 - RNA, 18 nt, Human
cugucaauuacaggaagu

SEQ ID NO: 2723780 - RNA, 20 nt, Human
cugucauuugagcagggcuc

SEQ ID NO: 2723781 - RNA, 15 nt, Human
cugugccaugugcca

SEQ ID NO: 2723782 - RNA, 22 nt, Human
cugugccauuuuguauuuuacu

SEQ ID NO: 2723783 - RNA, 19 nt, Human
cugugcccuaaaguguauu

SEQ ID NO: 2723784 - RNA, 14 nt, Human
cugugccaugugcc

SEQ ID NO: 2723785 - RNA, 18 nt, Human
cugugaaaguacauuugg

SEQ ID NO: 2723786 - RNA, 16 nt, Human
cugugaaaggaaagag

SEQ ID NO: 2723787 - RNA, 22 nt, Human
cugugaaaggaaagagggaggu

SEQ ID NO: 2723788 - RNA, 23 nt, Human
cugugauggggcccugccuccuu

SEQ ID NO: 2723789 - RNA, 16 nt, Human
cugugauggggcccug

SEQ ID NO: 2723790 - RNA, 21 nt, Human
cugugauggggcccugccucc

SEQ ID NO: 2723791 - RNA, 15 nt, Human
cugugauggggcccu

SEQ ID NO: 2723792 - RNA, 15 nt, Human
cuguaauuugugaua

SEQ ID NO: 2723793 - RNA, 14 nt, Human
cuguaauuugugau

SEQ ID NO: 2723794 - RNA, 14 nt, Human
cuguacagagccca

SEQ ID NO: 2723795 - RNA, 15 nt, Human
cuguacagagcccac

SEQ ID NO: 2723796 - RNA, 18 nt, Human
cuguacagagcccacgcc

SEQ ID NO: 2723797 - RNA, 22 nt, Human
cuguacagagcccacgccccca

SEQ ID NO: 2723798 - RNA, 19 nt, Human
cuguaauccuagcacuuug

SEQ ID NO: 2723799 - RNA, 22 nt, Human
cugguuagagguucccuuugac

SEQ ID NO: 2723800 - RNA, 21 nt, Human
cugguuagagguucccuuuga

SEQ ID NO: 2723801 - RNA, 15 nt, Human
cugguguauguguga

SEQ ID NO: 2723802 - RNA, 16 nt, Human
cugguggcagcucacc

SEQ ID NO: 2723803 - RNA, 17 nt, Human
cugguggcagcucaccu

SEQ ID NO: 2723804 - RNA, 18 nt, Human
cugguggcagcucaccuc

SEQ ID NO: 2723805 - RNA, 15 nt, Human
cugguggcagcugcg

SEQ ID NO: 2723806 - RNA, 20 nt, Human
cugguggcagcucaccucuc

SEQ ID NO: 2723807 - RNA, 14 nt, Human
cugguggcaguggg

SEQ ID NO: 2723808 - RNA, 18 nt, Human
cugguggcagugggagcu

SEQ ID NO: 2723809 - RNA, 13 nt, Human
cugucaauuacag

SEQ ID NO: 2723810 - RNA, 15 nt, Human
cugucaauuacagga

SEQ ID NO: 2723811 - RNA, 16 nt, Human
cugucaauuacaggaa

SEQ ID NO: 2723812 - RNA, 20 nt, Human
cuguauuuuguuuuugucuu

SEQ ID NO: 2723813 - RNA, 21 nt, Human
cuguaucccaugagccucagc

SEQ ID NO: 2723814 - RNA, 22 nt, Human
cuguaucccaugagccucagca

SEQ ID NO: 2723815 - RNA, 20 nt, Human
cuguaucccaugagccucag

SEQ ID NO: 2723816 - RNA, 19 nt, Human
cuguaucccaugagccuca

SEQ ID NO: 2723817 - RNA, 19 nt, Human
cuguacgucugacaggcaa

SEQ ID NO: 2723818 - RNA, 20 nt, Human
cuguacgucugacaggcaau

SEQ ID NO: 2723819 - RNA, 17 nt, Human
cuguacaugaaaacaca

SEQ ID NO: 2723820 - RNA, 21 nt, Human
cuguacaugaaaacacauuuu

SEQ ID NO: 2723821 - RNA, 20 nt, Human
cuguacaugaaaacacauuu

SEQ ID NO: 2723822 - RNA, 14 nt, Human
cuguacgucugaca

SEQ ID NO: 2723823 - RNA, 15 nt, Human
cuguacgucugacag

SEQ ID NO: 2723824 - RNA, 16 nt, Human
cuguacgucugacagg

SEQ ID NO: 2723825 - RNA, 18 nt, Human
cuguacgucugacaggca

SEQ ID NO: 2723826 - RNA, 21 nt, Human
cugggauuacaagcgugagcc

SEQ ID NO: 2723827 - RNA, 14 nt, Human
cugggguuaucuga

SEQ ID NO: 2723828 - RNA, 18 nt, Human
cugggggcugggcagagg

SEQ ID NO: 2723829 - RNA, 14 nt, Human
cugggggcugggca

SEQ ID NO: 2723830 - RNA, 18 nt, Human
cugggcuugucuguagau

SEQ ID NO: 2723831 - RNA, 22 nt, Human
cugggcuuggggaccagagcug

SEQ ID NO: 2723832 - RNA, 15 nt, Human
cugggcuucaguggc

SEQ ID NO: 2723833 - RNA, 21 nt, Human
gaacuagaguuuagcuggaaa

SEQ ID NO: 2723834 - RNA, 22 nt, Human
gaacuagaguuuagcuggaaaa

SEQ ID NO: 2723835 - RNA, 15 nt, Human
gaacgcguugaaauu

SEQ ID NO: 2723836 - RNA, 16 nt, Human
gaacgcguugaaauug

SEQ ID NO: 2723837 - RNA, 16 nt, Human
gaaccaccacacccag

SEQ ID NO: 2723838 - RNA, 17 nt, Human
gaaccaccacacccagc

SEQ ID NO: 2723839 - RNA, 15 nt, Human
gaacagacuggaagc

SEQ ID NO: 2723840 - RNA, 16 nt, Human
gaacagacuggaagca

SEQ ID NO: 2723841 - RNA, 21 nt, Human
gaaccacaucuugcucugcug

SEQ ID NO: 2723842 - RNA, 22 nt, Human
gaacuggguacuuguggacaca

SEQ ID NO: 2723843 - RNA, 22 nt, Human
gaacuuccagauccuggaaauc

SEQ ID NO: 2723844 - RNA, 21 nt, Human
gaacuuguaaaggaauuuaaa

SEQ ID NO: 2723845 - RNA, 23 nt, Human
gaacuugguucccauuugcuccu

SEQ ID NO: 2723846 - RNA, 12 nt, Human
gaacuugguucc

SEQ ID NO: 2723847 - RNA, 13 nt, Human
gaacuuggcgcug

SEQ ID NO: 2723848 - RNA, 15 nt, Human
gaacuuggcgcugcc

SEQ ID NO: 2723849 - RNA, 16 nt, Human
gaacuuggcgcugccc

SEQ ID NO: 2723850 - RNA, 21 nt, Human
gaagaagcaccaaucaugaau

SEQ ID NO: 2723851 - RNA, 13 nt, Human
gaaauauuauguu

SEQ ID NO: 2723852 - RNA, 16 nt, Human
gaaauauuauguuaaa

SEQ ID NO: 2723853 - RNA, 14 nt, Human
gaaaugggcagagc

SEQ ID NO: 2723854 - RNA, 20 nt, Human
gaaaugggcagagcagagac

SEQ ID NO: 2723855 - RNA, 18 nt, Human
gaaauuguauuacaaauc

SEQ ID NO: 2723856 - RNA, 17 nt, Human
gaaauuuguuauaauga

SEQ ID NO: 2723857 - RNA, 20 nt, Human
gaaauaucugaaaauguaug

SEQ ID NO: 2723858 - RNA, 13 nt, Human
gaaauauaauuga

SEQ ID NO: 2723859 - RNA, 21 nt, Human
gaaauaucugaaaauguaugu

SEQ ID NO: 2723860 - RNA, 21 nt, Human
gaagccuuggggcugaugcag

SEQ ID NO: 2723861 - RNA, 21 nt, Human
gaagccgcuggggccaguugg

SEQ ID NO: 2723862 - RNA, 20 nt, Human
gaagcccaggaaaggcucca

SEQ ID NO: 2723863 - RNA, 21 nt, Human
gaagcccaggaaaggcuccag

SEQ ID NO: 2723864 - RNA, 22 nt, Human
gaagcccaggaaaggcuccagg

SEQ ID NO: 2723865 - RNA, 19 nt, Human
gaagacucauucuucugua

SEQ ID NO: 2723866 - RNA, 21 nt, Human
gaagacucauucuucuguacg

SEQ ID NO: 2723867 - RNA, 15 nt, Human
gaagccagcaggcuc

SEQ ID NO: 2723868 - RNA, 16 nt, Human
gaagccagcaggcucu

SEQ ID NO: 2723869 - RNA, 23 nt, Human
gaagccagcaggcucucaggcca

SEQ ID NO: 2723870 - RNA, 16 nt, Human
gaaggccccgcccagg

SEQ ID NO: 2723871 - RNA, 14 nt, Human
gaaggccccgccca

SEQ ID NO: 2723872 - RNA, 15 nt, Human
gaaggccccgcccag

SEQ ID NO: 2723873 - RNA, 14 nt, Human
gaaggaaaaugaua

SEQ ID NO: 2723874 - RNA, 18 nt, Human
gaaggaaacccagcucug

SEQ ID NO: 2723875 - RNA, 14 nt, Human
gaaggaaacccagc

SEQ ID NO: 2723876 - RNA, 17 nt, Human
gaaggaaacccagcucu

SEQ ID NO: 2723877 - RNA, 21 nt, Human
gaaggauacaaaagcauguga

SEQ ID NO: 2723878 - RNA, 19 nt, Human
gaaggauacaaaagcaugu

SEQ ID NO: 2723879 - RNA, 12 nt, Human
gaaggauacaaa

SEQ ID NO: 2723880 - RNA, 14 nt, Human
gaauacuuuauaaa

SEQ ID NO: 2723881 - RNA, 20 nt, Human
gaauaauccuaaacauauga

SEQ ID NO: 2723882 - RNA, 14 nt, Human
gaauaacauguaau

SEQ ID NO: 2723883 - RNA, 16 nt, Human
gaaguuuacauuguaa

SEQ ID NO: 2723884 - RNA, 17 nt, Human
gaaguuuacauuguaaa

SEQ ID NO: 2723885 - RNA, 12 nt, Human
gaaguuucugcc

SEQ ID NO: 2723886 - RNA, 19 nt, Human
gaaugaaagggcccagaga

SEQ ID NO: 2723887 - RNA, 14 nt, Human
gaaugaaagggccc

SEQ ID NO: 2723888 - RNA, 16 nt, Human
gaaucucaaauaacua

SEQ ID NO: 2723889 - RNA, 15 nt, Human
gaauagcugggacua

SEQ ID NO: 2723890 - RNA, 14 nt, Human
gaauagcugggacu

SEQ ID NO: 2723891 - RNA, 20 nt, Human
gaaaaucuuauaauuuaaaa

SEQ ID NO: 2723892 - RNA, 18 nt, Human
gaaacagcuaaugggaca

SEQ ID NO: 2723893 - RNA, 19 nt, Human
gaaaauaacgauaaaagac

SEQ ID NO: 2723894 - RNA, 13 nt, Human
gaaaagcugcuga

SEQ ID NO: 2723895 - RNA, 17 nt, Human
gaaaagcugcugacagu

SEQ ID NO: 2723896 - RNA, 19 nt, Human
gaaaaucuuauaauuuaaa

SEQ ID NO: 2723897 - RNA, 16 nt, Human
gaaaaucagccugcuc

SEQ ID NO: 2723898 - RNA, 18 nt, Human
gaaaaucagccugcucca

SEQ ID NO: 2723899 - RNA, 12 nt, Human
gaaaauaucacu

SEQ ID NO: 2723900 - RNA, 14 nt, Human
gaaaaucagccugc

SEQ ID NO: 2723901 - RNA, 17 nt, Human
gaaaauauuauguguuu

SEQ ID NO: 2723902 - RNA, 22 nt, Human
gaaaacaauaacgauaaaagac

SEQ ID NO: 2723903 - RNA, 13 nt, Human
gaaaacacauuuu

SEQ ID NO: 2723904 - RNA, 12 nt, Human
gaaaacaugcua

SEQ ID NO: 2723905 - RNA, 15 nt, Human
gaaaacaugcuacac

SEQ ID NO: 2723906 - RNA, 14 nt, Human
gaaaacaugcuaca

SEQ ID NO: 2723907 - RNA, 14 nt, Human
gaaaacguggcugc

SEQ ID NO: 2723908 - RNA, 18 nt, Human
gaaaacguggcugcuuca

SEQ ID NO: 2723909 - RNA, 15 nt, Human
gaaaacguggcugcu

SEQ ID NO: 2723910 - RNA, 16 nt, Human
gaaaacguggcugcuu

SEQ ID NO: 2723911 - RNA, 17 nt, Human
gaaaaaggaugcacaga

SEQ ID NO: 2723912 - RNA, 23 nt, Human
gaaaaaggaugcacagaguuguu

SEQ ID NO: 2723913 - RNA, 22 nt, Human
cuuuuuucucugauacagaaaa

SEQ ID NO: 2723914 - RNA, 14 nt, Human
cuuuuuuggcugcu

SEQ ID NO: 2723915 - RNA, 15 nt, Human
cuuuuuuggcugcug

SEQ ID NO: 2723916 - RNA, 15 nt, Human
cuuuuuucacuacau

SEQ ID NO: 2723917 - RNA, 20 nt, Human
cuuuuuucucugauacagaa

SEQ ID NO: 2723918 - RNA, 16 nt, Human
cuuuugagcauuuaga

SEQ ID NO: 2723919 - RNA, 21 nt, Human
cuuuugagugccuuacacaau

SEQ ID NO: 2723920 - RNA, 19 nt, Human
cuuuggacccugaggccca

SEQ ID NO: 2723921 - RNA, 17 nt, Human
cuuuggacccugaggcc

SEQ ID NO: 2723922 - RNA, 18 nt, Human
cuuuggacccugaggccc

SEQ ID NO: 2723923 - RNA, 15 nt, Human
cuuuggacccugagg

SEQ ID NO: 2723924 - RNA, 16 nt, Human
cuuuggacccugaggc

SEQ ID NO: 2723925 - RNA, 16 nt, Human
cuuucccaucuuccaa

SEQ ID NO: 2723926 - RNA, 14 nt, Human
cuuuguucuggcuc

SEQ ID NO: 2723927 - RNA, 15 nt, Human
cuuuguucuggcucu

SEQ ID NO: 2723928 - RNA, 19 nt, Human
cuuugugauuuuuguaauu

SEQ ID NO: 2723929 - RNA, 18 nt, Human
cuuugugauuuuuguaau

SEQ ID NO: 2723930 - RNA, 17 nt, Human
cuuugugauuuuuguaa

SEQ ID NO: 2723931 - RNA, 13 nt, Human
cuuugggaggcca

SEQ ID NO: 2723932 - RNA, 18 nt, Human
cuuuguccccaccgcaga

SEQ ID NO: 2723933 - RNA, 14 nt, Human
cuuugugauuuuug

SEQ ID NO: 2723934 - RNA, 22 nt, Human
cuuuguccccaccgcagacagg

SEQ ID NO: 2723935 - RNA, 18 nt, Human
cuuuguuuguugucagcu

SEQ ID NO: 2723936 - RNA, 20 nt, Human
cuuuguuuguugucagcuga

SEQ ID NO: 2723937 - RNA, 22 nt, Human
cuuuucauaaccuagccuuaga

SEQ ID NO: 2723938 - RNA, 20 nt, Human
cuuuucauaaccuagccuua

SEQ ID NO: 2723939 - RNA, 16 nt, Human
cuuuucuuucagccaa

SEQ ID NO: 2723940 - RNA, 18 nt, Human
cuuuucuugcaugaggcu

SEQ ID NO: 2723941 - RNA, 23 nt, Human
cuuuucuugcaugaggcuagugu

SEQ ID NO: 2723942 - RNA, 14 nt, Human
cuuuucugauagag

SEQ ID NO: 2723943 - RNA, 18 nt, Human
cuuuucuguccgagcuuu

SEQ ID NO: 2723944 - RNA, 23 nt, Human
cuuuucuguccgagcuuugaaaa

SEQ ID NO: 2723945 - RNA, 11 nt, Human
cuuuucugaua

SEQ ID NO: 2723946 - RNA, 18 nt, Human
cuuuaaagggauggcaag

SEQ ID NO: 2723947 - RNA, 21 nt, Human
cuuguguguuuauugucaaag

SEQ ID NO: 2723948 - RNA, 19 nt, Human
cuuguguuaaguaugugua

SEQ ID NO: 2723949 - RNA, 20 nt, Human
cuuguguguuuauugucaaa

SEQ ID NO: 2723950 - RNA, 21 nt, Human
cuuuauuuucuauaauuuaaa

SEQ ID NO: 2723951 - RNA, 13 nt, Human
cuuuccacagaag

SEQ ID NO: 2723952 - RNA, 22 nt, Human
cuuuccaaaugcccagcuuaaa

SEQ ID NO: 2723953 - RNA, 18 nt, Human
cuuuccaaaugcccagcu

SEQ ID NO: 2723954 - RNA, 19 nt, Human
cuuuccaaaugcccagcuu

SEQ ID NO: 2723955 - RNA, 19 nt, Human
cuuguaaaggaauuuaaaa

SEQ ID NO: 2723956 - RNA, 16 nt, Human
cuuggggggcugaggu

SEQ ID NO: 2723957 - RNA, 15 nt, Human
cuuggggggcugagg

SEQ ID NO: 2723958 - RNA, 22 nt, Human
cuuggggaccagagcugccacc

SEQ ID NO: 2723959 - RNA, 13 nt, Human
cuugggcuucauc

SEQ ID NO: 2723960 - RNA, 14 nt, Human
cuugggccacugug

SEQ ID NO: 2723961 - RNA, 22 nt, Human
cuugggcuucauccuccucaga

SEQ ID NO: 2723962 - RNA, 20 nt, Human
cuuggggaccagagcugcca

SEQ ID NO: 2723963 - RNA, 21 nt, Human
cuuggggaccagagcugccac

SEQ ID NO: 2723964 - RNA, 16 nt, Human
cuuggcugcagggagu

SEQ ID NO: 2723965 - RNA, 22 nt, Human
cuuggaggaaggaaacccagcu

SEQ ID NO: 2723966 - RNA, 14 nt, Human
cuuggcugcaggga

SEQ ID NO: 2723967 - RNA, 17 nt, Human
cuuggcugcagggaguc

SEQ ID NO: 2723968 - RNA, 22 nt, Human
cuugccaucccucccuccaccu

SEQ ID NO: 2723969 - RNA, 13 nt, Human
cuugcucugcuga

SEQ ID NO: 2723970 - RNA, 14 nt, Human
cuugcucugcugac

SEQ ID NO: 2723971 - RNA, 21 nt, Human
cuugccaucccucccuccacc

SEQ ID NO: 2723972 - RNA, 17 nt, Human
cuucuccacccugcucu

SEQ ID NO: 2723973 - RNA, 18 nt, Human
cuucuccacccugcucuc

SEQ ID NO: 2723974 - RNA, 21 nt, Human
cuucuccacccugcucuccga

SEQ ID NO: 2723975 - RNA, 20 nt, Human
cuugcuucaaccccaugaga

SEQ ID NO: 2723976 - RNA, 16 nt, Human
cuugcucugcugacag

SEQ ID NO: 2723977 - RNA, 17 nt, Human
cuugcucugcugacaga

SEQ ID NO: 2723978 - RNA, 13 nt, Human
cuuggaagcuccg

SEQ ID NO: 2723979 - RNA, 13 nt, Human
cuuggaggaagga

SEQ ID NO: 2723980 - RNA, 16 nt, Human
cuuggaaaugggagac

SEQ ID NO: 2723981 - RNA, 20 nt, Human
cuccccuccucugcuugcca

SEQ ID NO: 2723982 - RNA, 22 nt, Human
cuccccagcaagugagagcugg

SEQ ID NO: 2723983 - RNA, 23 nt, Human
cuccccagcaagugagagcuggg

SEQ ID NO: 2723984 - RNA, 11 nt, Human
cuccccuccuc

SEQ ID NO: 2723985 - RNA, 21 nt, Human
cuccccagcaagugagagcug

SEQ ID NO: 2723986 - RNA, 13 nt, Human
cuccccuccucug

SEQ ID NO: 2723987 - RNA, 18 nt, Human
cucccgaguagcugggac

SEQ ID NO: 2723988 - RNA, 19 nt, Human
cucccgaguagcugggacu

SEQ ID NO: 2723989 - RNA, 20 nt, Human
cucccgaguagcugggacua

SEQ ID NO: 2723990 - RNA, 20 nt, Human
cucccuuggauuguccccga

SEQ ID NO: 2723991 - RNA, 18 nt, Human
cuccucagaucuucugug

SEQ ID NO: 2723992 - RNA, 15 nt, Human
cuccuccagccgcca

SEQ ID NO: 2723993 - RNA, 13 nt, Human
cuccuccagaguc

SEQ ID NO: 2723994 - RNA, 15 nt, Human
cuccuccagagucag

SEQ ID NO: 2723995 - RNA, 22 nt, Human
cuccugccucgaacuggcugca

SEQ ID NO: 2723996 - RNA, 18 nt, Human
cuccugccucgaacuggc

SEQ ID NO: 2723997 - RNA, 20 nt, Human
cuccugccucgaacuggcug

SEQ ID NO: 2723998 - RNA, 21 nt, Human
cuccugccucgaacuggcugc

SEQ ID NO: 2723999 - RNA, 17 nt, Human
cuccugccucagccucc

SEQ ID NO: 2724000 - RNA, 16 nt, Human
cuccugccucagccuc

SEQ ID NO: 2724001 - RNA, 12 nt, Human
cuccugccucag

SEQ ID NO: 2724002 - RNA, 11 nt, Human
cuccugccuca

SEQ ID NO: 2724003 - RNA, 13 nt, Human
cuccucuccccag

SEQ ID NO: 2724004 - RNA, 15 nt, Human
cuccucuccccagca

SEQ ID NO: 2724005 - RNA, 14 nt, Human
cuccuggaaauauu

SEQ ID NO: 2724006 - RNA, 21 nt, Human
cuccugugugugcgccuacag

SEQ ID NO: 2724007 - RNA, 23 nt, Human
cuccugugugugcgccuacagga

SEQ ID NO: 2724008 - RNA, 24 nt, Human
cuccugugugugcgccuacaggag

SEQ ID NO: 2724009 - RNA, 22 nt, Human
cucgagcaugccuggauggggc

SEQ ID NO: 2724010 - RNA, 13 nt, Human
cucgagcaugccu

SEQ ID NO: 2724011 - RNA, 15 nt, Human
cucgagcaugccugg

SEQ ID NO: 2724012 - RNA, 16 nt, Human
cucgagcaugccugga

SEQ ID NO: 2724013 - RNA, 19 nt, Human
cucgagcaugccuggaugg

SEQ ID NO: 2724014 - RNA, 23 nt, Human
cuccuuggugucgggcaugacac

SEQ ID NO: 2724015 - RNA, 18 nt, Human
cuccaggagcagccacau

SEQ ID NO: 2724016 - RNA, 23 nt, Human
cuccaggagcagccacauuccug

SEQ ID NO: 2724017 - RNA, 11 nt, Human
cuccaggagca

SEQ ID NO: 2724018 - RNA, 13 nt, Human
cuccaggagcagc

SEQ ID NO: 2724019 - RNA, 14 nt, Human
cuccaggagcagcc

SEQ ID NO: 2724020 - RNA, 15 nt, Human
cuccaggagcagcca

SEQ ID NO: 2724021 - RNA, 16 nt, Human
cuccaggagcagccac

SEQ ID NO: 2724022 - RNA, 17 nt, Human
cuccaggagcagccaca

SEQ ID NO: 2724023 - RNA, 15 nt, Human
cuccagccccuggau

SEQ ID NO: 2724024 - RNA, 14 nt, Human
cuccaccugccagg

SEQ ID NO: 2724025 - RNA, 12 nt, Human
cuccaccugcca

SEQ ID NO: 2724026 - RNA, 13 nt, Human
cuccaccugccag

SEQ ID NO: 2724027 - RNA, 14 nt, Human
cuccagcucaccag

SEQ ID NO: 2724028 - RNA, 12 nt, Human
cuccagccuggg

SEQ ID NO: 2724029 - RNA, 20 nt, Human
cuccagccccuggaugcagc

SEQ ID NO: 2724030 - RNA, 16 nt, Human
cuccagccccuggaug

SEQ ID NO: 2724031 - RNA, 17 nt, Human
cuccagccccuggaugc

SEQ ID NO: 2724032 - RNA, 23 nt, Human
cuccaccucccugcaauaaaaug

SEQ ID NO: 2724033 - RNA, 15 nt, Human
cuccacccugcucuc

SEQ ID NO: 2724034 - RNA, 13 nt, Human
cuccacccugcuc

SEQ ID NO: 2724035 - RNA, 21 nt, Human
cuccaaacugacucuuaagaa

SEQ ID NO: 2724036 - RNA, 12 nt, Human
cuccaaagaaau

SEQ ID NO: 2724037 - RNA, 13 nt, Human
cuccaaagaaaug

SEQ ID NO: 2724038 - RNA, 16 nt, Human
cuccaaaauaaaacuu

SEQ ID NO: 2724039 - RNA, 15 nt, Human
cuccaaaauaaaacu

SEQ ID NO: 2724040 - RNA, 17 nt, Human
cucauuugucacacacu

SEQ ID NO: 2724041 - RNA, 21 nt, Human
cucauuuccaagcaaguauua

SEQ ID NO: 2724042 - RNA, 16 nt, Human
cucaggugagaagcag

SEQ ID NO: 2724043 - RNA, 14 nt, Human
cucaggugagaagc

SEQ ID NO: 2724044 - RNA, 19 nt, Human
cucaggugagaagcagagg

SEQ ID NO: 2724045 - RNA, 20 nt, Human
cucaggugagaagcagagga

SEQ ID NO: 2724046 - RNA, 15 nt, Human
cucagggucccuggu

SEQ ID NO: 2724047 - RNA, 16 nt, Human
cucagggucccuggug

SEQ ID NO: 2724048 - RNA, 17 nt, Human
cucagggucccuggugg

SEQ ID NO: 2724049 - RNA, 13 nt, Human
cucagggccuggc

SEQ ID NO: 2724050 - RNA, 14 nt, Human
cucagggccuggcu

SEQ ID NO: 2724051 - RNA, 15 nt, Human
cucagggccuggcuc

SEQ ID NO: 2724052 - RNA, 15 nt, Human
cucagggccuggucg

SEQ ID NO: 2724053 - RNA, 16 nt, Human
cucagggccuggcuca

SEQ ID NO: 2724054 - RNA, 18 nt, Human
cucaggaguuugagacca

SEQ ID NO: 2724055 - RNA, 23 nt, Human
cucaggaguuugagaccaaccug

SEQ ID NO: 2724056 - RNA, 18 nt, Human
cucagcauccuggcaccc

SEQ ID NO: 2724057 - RNA, 22 nt, Human
cucaucaccaacgucugugcca

SEQ ID NO: 2724058 - RNA, 23 nt, Human
cucauaguaugguggcuggguug

SEQ ID NO: 2724059 - RNA, 21 nt, Human
cucaucaccaacgucugugcc

SEQ ID NO: 2724060 - RNA, 15 nt, Human
cucauccucauaccc

SEQ ID NO: 2724061 - RNA, 14 nt, Human
cucauacucaccuc

SEQ ID NO: 2724062 - RNA, 15 nt, Human
cucauacccaccccc

SEQ ID NO: 2724063 - RNA, 22 nt, Human
cucauacucaccucaccccacu

SEQ ID NO: 2724064 - RNA, 21 nt, Human
cucauaguaugguggcugggu

SEQ ID NO: 2724065 - RNA, 20 nt, Human
cucaggugauccacccaccu

SEQ ID NO: 2724066 - RNA, 18 nt, Human
cucaggugauccacccac

SEQ ID NO: 2724067 - RNA, 19 nt, Human
cucaggugauccacccacc

SEQ ID NO: 2724068 - RNA, 16 nt, Human
cucauacccaccccca

SEQ ID NO: 2724069 - RNA, 18 nt, Human
cucauacccacccccacc

SEQ ID NO: 2724070 - RNA, 19 nt, Human
cucauacccacccccaccc

SEQ ID NO: 2724071 - RNA, 21 nt, Human
cucauacccacccccacccaa

SEQ ID NO: 2724072 - RNA, 15 nt, Human
cuauaggugcuacaa

SEQ ID NO: 2724073 - RNA, 18 nt, Human
cuauauuguuugcuaagc

SEQ ID NO: 2724074 - RNA, 20 nt, Human
cuauaggugcuacaaaaaca

SEQ ID NO: 2724075 - RNA, 17 nt, Human
cuauagccuaggugaca

SEQ ID NO: 2724076 - RNA, 22 nt, Human
cuauaggugcuacaaaaacaca

SEQ ID NO: 2724077 - RNA, 21 nt, Human
cuauaggugcuacaaaaacac

SEQ ID NO: 2724078 - RNA, 17 nt, Human
cuauauuuuacauaaau

SEQ ID NO: 2724079 - RNA, 15 nt, Human
cuauauuuucauucu

SEQ ID NO: 2724080 - RNA, 19 nt, Human
cuauauuuucauucuccua

SEQ ID NO: 2724081 - RNA, 21 nt, Human
cuauaauguaagcucuacuga

SEQ ID NO: 2724082 - RNA, 22 nt, Human
cuauaauuuaccugaagucuuu

SEQ ID NO: 2724083 - RNA, 16 nt, Human
cuauaauguaagcucu

SEQ ID NO: 2724084 - RNA, 16 nt, Human
cuauucaaacagucuc

SEQ ID NO: 2724085 - RNA, 18 nt, Human
cuauucaaacagucucag

SEQ ID NO: 2724086 - RNA, 23 nt, Human
cuauucaaacagucucaggaaau

SEQ ID NO: 2724087 - RNA, 15 nt, Human
cuauuagagaagaga

SEQ ID NO: 2724088 - RNA, 18 nt, Human
cuaugggacucaaugcac

SEQ ID NO: 2724089 - RNA, 22 nt, Human
cuaugggacucaaugcacugac

SEQ ID NO: 2724090 - RNA, 23 nt, Human
cuaugggacucaaugcacugaca

SEQ ID NO: 2724091 - RNA, 18 nt, Human
cuaugcugaguuugugcu

SEQ ID NO: 2724092 - RNA, 21 nt, Human
cuagugagcagucaggaaaga

SEQ ID NO: 2724093 - RNA, 19 nt, Human
cuagugaaagaggcagcuu

SEQ ID NO: 2724094 - RNA, 18 nt, Human
cuagugaaagaggcagcu

SEQ ID NO: 2724095 - RNA, 20 nt, Human
cuagugaaacucguuaauuu

SEQ ID NO: 2724096 - RNA, 16 nt, Human
cuaguaauuggaaagg

SEQ ID NO: 2724097 - RNA, 23 nt, Human
cgcccaguuggguggaugccugg

SEQ ID NO: 2724098 - RNA, 15 nt, Human
cgccaugcuccuggc

SEQ ID NO: 2724099 - RNA, 20 nt, Human
cgccaucccagccccaauga

SEQ ID NO: 2724100 - RNA, 17 nt, Human
cgccaucccagccccaa

SEQ ID NO: 2724101 - RNA, 22 nt, Human
cgcccaguuggguggaugccug

SEQ ID NO: 2724102 - RNA, 24 nt, Human
cuaggugacagagugagacucugu

SEQ ID NO: 2724103 - RNA, 14 nt, Human
cuaggugacagagu

SEQ ID NO: 2724104 - RNA, 18 nt, Human
cuaggugacagagugaga

SEQ ID NO: 2724105 - RNA, 13 nt, Human
cucaccagcccca

SEQ ID NO: 2724106 - RNA, 14 nt, Human
cucaccagccccag

SEQ ID NO: 2724107 - RNA, 15 nt, Human
cucaccagccccagu

SEQ ID NO: 2724108 - RNA, 17 nt, Human
cucaccagccccagugc

SEQ ID NO: 2724109 - RNA, 18 nt, Human
cucaccagccccagugcc

SEQ ID NO: 2724110 - RNA, 15 nt, Human
cucacauuuauucug

SEQ ID NO: 2724111 - RNA, 19 nt, Human
cucacauuuauucugcuca

SEQ ID NO: 2724112 - RNA, 22 nt, Human
cucacauuuauucugcucacau

SEQ ID NO: 2724113 - RNA, 17 nt, Human
cucacaguccuuaccag

SEQ ID NO: 2724114 - RNA, 19 nt, Human
cucacaguccuuaccagca

SEQ ID NO: 2724115 - RNA, 22 nt, Human
cucacaguccuuaccagcagag

SEQ ID NO: 2724116 - RNA, 21 nt, Human
cucaaguccucuuuucugaga

SEQ ID NO: 2724117 - RNA, 14 nt, Human
cucaaguccucuuu

SEQ ID NO: 2724118 - RNA, 17 nt, Human
cucaagugauucuccug

SEQ ID NO: 2724119 - RNA, 15 nt, Human
cucacaguccuuacc

SEQ ID NO: 2724120 - RNA, 22 nt, Human
cucacacaugagcaucaggcca

SEQ ID NO: 2724121 - RNA, 24 nt, Human
cucacacaugagcaucaggccagg

SEQ ID NO: 2724122 - RNA, 14 nt, Human
cuauuucuauauuu

SEQ ID NO: 2724123 - RNA, 18 nt, Human
cuauuucuauauuuucau

SEQ ID NO: 2724124 - RNA, 16 nt, Human
cuauuucuauauuuuc

SEQ ID NO: 2724125 - RNA, 23 nt, Human
cucaaauacgugggcauucaaau

SEQ ID NO: 2724126 - RNA, 21 nt, Human
cucaacaccucugcacaagcu

SEQ ID NO: 2724127 - RNA, 13 nt, Human
cucaaccuccugg

SEQ ID NO: 2724128 - RNA, 15 nt, Human
cucaaccuccugggc

SEQ ID NO: 2724129 - RNA, 17 nt, Human
cucaaccuccugggcua

SEQ ID NO: 2724130 - RNA, 13 nt, Human
cucagauuuuauu

SEQ ID NO: 2724131 - RNA, 15 nt, Human
cucagaucuucugug

SEQ ID NO: 2724132 - RNA, 18 nt, Human
cucagauuuuauuaugua

SEQ ID NO: 2724133 - RNA, 21 nt, Human
cucagcaaaagaugcuucuca

SEQ ID NO: 2724134 - RNA, 17 nt, Human
cucagauuuuauuaugu

SEQ ID NO: 2724135 - RNA, 15 nt, Human
cucagauuuuauuau

SEQ ID NO: 2724136 - RNA, 16 nt, Human
cucagcauccuggcac

SEQ ID NO: 2724137 - RNA, 17 nt, Human
cucagcauccuggcacc

SEQ ID NO: 2724138 - RNA, 20 nt, Human
cucacuguugcccaggcugg

SEQ ID NO: 2724139 - RNA, 19 nt, Human
cucacugccaugccagcuu

SEQ ID NO: 2724140 - RNA, 22 nt, Human
cucacugccaugccagcuuauc

SEQ ID NO: 2724141 - RNA, 21 nt, Human
cucacuguugcccaggcuggc

SEQ ID NO: 2724142 - RNA, 22 nt, Human
cucacuguugcccaggcuggcg

SEQ ID NO: 2724143 - RNA, 14 nt, Human
cucagagagggugg

SEQ ID NO: 2724144 - RNA, 23 nt, Human
cucacuauguugcccaggcaggu

SEQ ID NO: 2724145 - RNA, 21 nt, Human
cucacuauguugcccaggcag

SEQ ID NO: 2724146 - RNA, 22 nt, Human
cucacuauguugcccaggcagg

SEQ ID NO: 2724147 - RNA, 15 nt, Human
cucaccccagcccca

SEQ ID NO: 2724148 - RNA, 19 nt, Human
cucacuauguugcccaggc

SEQ ID NO: 2724149 - RNA, 20 nt, Human
cucacuauguugcccaggca

SEQ ID NO: 2724150 - RNA, 11 nt, Human
cucacucuguc

SEQ ID NO: 2724151 - RNA, 12 nt, Human
cucacucugucg

SEQ ID NO: 2724152 - RNA, 13 nt, Human
cucacuccuugaa

SEQ ID NO: 2724153 - RNA, 13 nt, Human
cucacugcagccu

SEQ ID NO: 2724154 - RNA, 12 nt, Human
cucacugcagcc

SEQ ID NO: 2724155 - RNA, 22 nt, Human
cucacucugucgcccagucugg

SEQ ID NO: 2724156 - RNA, 13 nt, Human
cucacucugucgc

SEQ ID NO: 2724157 - RNA, 21 nt, Human
cucacucugucgcccagucug

SEQ ID NO: 2724158 - RNA, 15 nt, Human
cugcaauaaaauggg

SEQ ID NO: 2724159 - RNA, 22 nt, Human
cugcaauaaaauggguuuuacu

SEQ ID NO: 2724160 - RNA, 18 nt, Human
cugcaauaaggggagagu

SEQ ID NO: 2724161 - RNA, 22 nt, Human
cugcacaagcugcacccucagg

SEQ ID NO: 2724162 - RNA, 18 nt, Human
cugcacaagcugcacccu

SEQ ID NO: 2724163 - RNA, 13 nt, Human
cugcacccucagg

SEQ ID NO: 2724164 - RNA, 14 nt, Human
cugcacccucaggc

SEQ ID NO: 2724165 - RNA, 20 nt, Human
cugcaccggcuggccuggcc

SEQ ID NO: 2724166 - RNA, 22 nt, Human
cugcaccggcuggccuggcccc

SEQ ID NO: 2724167 - RNA, 12 nt, Human
cugcaccgggcc

SEQ ID NO: 2724168 - RNA, 23 nt, Human
cugcaccggcuggccuggccccu

SEQ ID NO: 2724169 - RNA, 14 nt, Human
cugcacuccccugc

SEQ ID NO: 2724170 - RNA, 15 nt, Human
cugcacuccccugcu

SEQ ID NO: 2724171 - RNA, 18 nt, Human
cugcacuugcagacucua

SEQ ID NO: 2724172 - RNA, 16 nt, Human
cugcacuccccugcug

SEQ ID NO: 2724173 - RNA, 17 nt, Human
cugcacuccccugcugg

SEQ ID NO: 2724174 - RNA, 23 nt, Human
cugauuugacauagucuggcugu

SEQ ID NO: 2724175 - RNA, 22 nt, Human
cugauuugacauagucuggcug

SEQ ID NO: 2724176 - RNA, 21 nt, Human
cugauuugacauagucuggcu

SEQ ID NO: 2724177 - RNA, 21 nt, Human
cugauugugucucuugguccu

SEQ ID NO: 2724178 - RNA, 17 nt, Human
cugauugugucucuugg

SEQ ID NO: 2724179 - RNA, 17 nt, Human
cugauggugcaaugacc

SEQ ID NO: 2724180 - RNA, 19 nt, Human
cugauggugcaaugaccuu

SEQ ID NO: 2724181 - RNA, 20 nt, Human
cugauggugcaaugaccuuu

SEQ ID NO: 2724182 - RNA, 21 nt, Human
cugauggugcaaugaccuuuc

SEQ ID NO: 2724183 - RNA, 23 nt, Human
cugauuuuuuuuuccuucagugc

SEQ ID NO: 2724184 - RNA, 21 nt, Human
cugauuuuuuuuuccuucagu

SEQ ID NO: 2724185 - RNA, 22 nt, Human
cugauuuuuuuuuccuucagug

SEQ ID NO: 2724186 - RNA, 16 nt, Human
cugauuuuuuuuuccu

SEQ ID NO: 2724187 - RNA, 18 nt, Human
cugauuuuuuuuuccuuc

SEQ ID NO: 2724188 - RNA, 19 nt, Human
cugauuuuuuuuuccuuca

SEQ ID NO: 2724189 - RNA, 20 nt, Human
cugauuuuuuuuuccuucag

SEQ ID NO: 2724190 - RNA, 24 nt, Human
cugaggcccuucucuccagccccu

SEQ ID NO: 2724191 - RNA, 13 nt, Human
cugaggcugggcu

SEQ ID NO: 2724192 - RNA, 15 nt, Human
cugaggcugggcucc

SEQ ID NO: 2724193 - RNA, 16 nt, Human
cugaggcugggcuccc

SEQ ID NO: 2724194 - RNA, 17 nt, Human
cugaggcugggcucccu

SEQ ID NO: 2724195 - RNA, 22 nt, Human
cugaggcugggcucccuuccca

SEQ ID NO: 2724196 - RNA, 17 nt, Human
cugagucugaaggcugg

SEQ ID NO: 2724197 - RNA, 18 nt, Human
cugagucugaaggcuggg

SEQ ID NO: 2724198 - RNA, 19 nt, Human
cugagucugaaggcugggu

SEQ ID NO: 2724199 - RNA, 18 nt, Human
cugaguuugugcuggugu

SEQ ID NO: 2724200 - RNA, 13 nt, Human
cugaguuugugcu

SEQ ID NO: 2724201 - RNA, 20 nt, Human
cugauccuaguuccaccauc

SEQ ID NO: 2724202 - RNA, 21 nt, Human
cugauccuaguuccaccauca

SEQ ID NO: 2724203 - RNA, 14 nt, Human
cugauggugcaaug

SEQ ID NO: 2724204 - RNA, 15 nt, Human
cugauggugcaauga

SEQ ID NO: 2724205 - RNA, 16 nt, Human
cugauggugcaaugac

SEQ ID NO: 2724206 - RNA, 22 nt, Human
cugauacagaaaaguugaauuu

SEQ ID NO: 2724207 - RNA, 20 nt, Human
cugcaucagcugcugaaaca

SEQ ID NO: 2724208 - RNA, 17 nt, Human
cugcaguugccagucac

SEQ ID NO: 2724209 - RNA, 21 nt, Human
cugcaguugccagucaccccg

SEQ ID NO: 2724210 - RNA, 22 nt, Human
cugcaguugccagucaccccgg

SEQ ID NO: 2724211 - RNA, 23 nt, Human
cugcacuugcagacucuacagag

SEQ ID NO: 2724212 - RNA, 19 nt, Human
cugcaguugccagucaccc

SEQ ID NO: 2724213 - RNA, 22 nt, Human
cugcaucguuucaucuuccaac

SEQ ID NO: 2724214 - RNA, 16 nt, Human
cugcaucguuucaucu

SEQ ID NO: 2724215 - RNA, 18 nt, Human
cugcaugcgggcuuccuc

SEQ ID NO: 2724216 - RNA, 22 nt, Human
cugcaugcgggcuuccuccugg

SEQ ID NO: 2724217 - RNA, 18 nt, Human
cugccaaugggagcucau

SEQ ID NO: 2724218 - RNA, 19 nt, Human
cugccaaugggagcucaug

SEQ ID NO: 2724219 - RNA, 11 nt, Human
cugccaggcau

SEQ ID NO: 2724220 - RNA, 13 nt, Human
cugccaggcaugg

SEQ ID NO: 2724221 - RNA, 14 nt, Human
cugccaugccagcu

SEQ ID NO: 2724222 - RNA, 13 nt, Human
cugcccaccuggc

SEQ ID NO: 2724223 - RNA, 14 nt, Human
cugcccaccuggcc

SEQ ID NO: 2724224 - RNA, 15 nt, Human
cugcccaccuggccu

SEQ ID NO: 2724225 - RNA, 18 nt, Human
cugcccacucccugcaac

SEQ ID NO: 2724226 - RNA, 17 nt, Human
cugcccaccuggccucu

SEQ ID NO: 2724227 - RNA, 18 nt, Human
cugcccaccuggccucug

SEQ ID NO: 2724228 - RNA, 19 nt, Human
cugcccaccuggccucugc

SEQ ID NO: 2724229 - RNA, 20 nt, Human
cugcccaccuggccucugca

SEQ ID NO: 2724230 - RNA, 22 nt, Human
cugcccaccuggccucugcacu

SEQ ID NO: 2724231 - RNA, 14 nt, Human
cugcccacucccug

SEQ ID NO: 2724232 - RNA, 15 nt, Human
cugcccacucccugc

SEQ ID NO: 2724233 - RNA, 16 nt, Human
cugcccacucccugca

SEQ ID NO: 2724234 - RNA, 12 nt, Human
cugccgcagccc

SEQ ID NO: 2724235 - RNA, 13 nt, Human
cugccgcagcccu

SEQ ID NO: 2724236 - RNA, 23 nt, Human
cugccgcagcccugcagagggca

SEQ ID NO: 2724237 - RNA, 19 nt, Human
cugccgcagcccugcagag

SEQ ID NO: 2724238 - RNA, 20 nt, Human
cugccgcagcccugcagagg

SEQ ID NO: 2724239 - RNA, 21 nt, Human
cugccgcagcccugcagaggg

SEQ ID NO: 2724240 - RNA, 22 nt, Human
cugccgcagcccugcagagggc

SEQ ID NO: 2724241 - RNA, 15 nt, Human
cugccucagccuccc

SEQ ID NO: 2724242 - RNA, 19 nt, Human
cugccucagccucccaaag

SEQ ID NO: 2724243 - RNA, 19 nt, Human
cugcgguccacccaggagc

SEQ ID NO: 2724244 - RNA, 20 nt, Human
cugcgguccacccaggagcc

SEQ ID NO: 2724245 - RNA, 17 nt, Human
cugcgguccacccagga

SEQ ID NO: 2724246 - RNA, 18 nt, Human
cugcgguccacccaggag

SEQ ID NO: 2724247 - RNA, 21 nt, Human
cugccugcccaggccccugcc

SEQ ID NO: 2724248 - RNA, 22 nt, Human
cugccugcccaggccccugcca

SEQ ID NO: 2724249 - RNA, 17 nt, Human
cugccucugacacacag

SEQ ID NO: 2724250 - RNA, 18 nt, Human
cugccucugacacacagc

SEQ ID NO: 2724251 - RNA, 21 nt, Human
cugccucugacacacagcucu

SEQ ID NO: 2724252 - RNA, 14 nt, Human
cugaagaagauggu

SEQ ID NO: 2724253 - RNA, 17 nt, Human
cugaagucacacaguga

SEQ ID NO: 2724254 - RNA, 18 nt, Human
cugaagucacacagugag

SEQ ID NO: 2724255 - RNA, 19 nt, Human
cugaagucacacagugagu

SEQ ID NO: 2724256 - RNA, 16 nt, Human
cugaagucacacagug

SEQ ID NO: 2724257 - RNA, 21 nt, Human
cugaagucacacagugagucg

SEQ ID NO: 2724258 - RNA, 22 nt, Human
cugaagucccagauacuugggg

SEQ ID NO: 2724259 - RNA, 17 nt, Human
cugaagucuuuguacag

SEQ ID NO: 2724260 - RNA, 20 nt, Human
cugaagucuuuguacagaca

SEQ ID NO: 2724261 - RNA, 20 nt, Human
cugaaugguuuucaaaauaa

SEQ ID NO: 2724262 - RNA, 19 nt, Human
cugaaugguuuucaaaaua

SEQ ID NO: 2724263 - RNA, 13 nt, Human
cugaauuaugaaa

SEQ ID NO: 2724264 - RNA, 15 nt, Human
cugaauuaugaaacu

SEQ ID NO: 2724265 - RNA, 14 nt, Human
cugaauuaugaaac

SEQ ID NO: 2724266 - RNA, 12 nt, Human
cugaauuucuuu

SEQ ID NO: 2724267 - RNA, 16 nt, Human
cucuucuccaggcugu

SEQ ID NO: 2724268 - RNA, 22 nt, Human
cucuuuggucuacacugugcug

SEQ ID NO: 2724269 - RNA, 23 nt, Human
cucuuuggucuacacugugcuga

SEQ ID NO: 2724270 - RNA, 14 nt, Human
cucuuuucaaaaca

SEQ ID NO: 2724271 - RNA, 23 nt, Human
cugaaagggacgcuacccgggaa

SEQ ID NO: 2724272 - RNA, 23 nt, Human
cucuuugucuacaccauuaugug

SEQ ID NO: 2724273 - RNA, 20 nt, Human
cugaaauaaacgucuuaaau

SEQ ID NO: 2724274 - RNA, 16 nt, Human
cugacagacacaggcc

SEQ ID NO: 2724275 - RNA, 14 nt, Human
cugaauuucuuuug

SEQ ID NO: 2724276 - RNA, 16 nt, Human
cugaauuaugaaacuu

SEQ ID NO: 2724277 - RNA, 17 nt, Human
cugacagacacaggccc

SEQ ID NO: 2724278 - RNA, 18 nt, Human
cugacagacacaggcccg

SEQ ID NO: 2724279 - RNA, 18 nt, Human
cugagaaagacuauucaa

SEQ ID NO: 2724280 - RNA, 15 nt, Human
cugagaaagacuauu

SEQ ID NO: 2724281 - RNA, 13 nt, Human
cugagaaagacua

SEQ ID NO: 2724282 - RNA, 12 nt, Human
cugagaaagacu

SEQ ID NO: 2724283 - RNA, 21 nt, Human
cugagaugugaacacaucagc

SEQ ID NO: 2724284 - RNA, 20 nt, Human
cugagaaagacuauucaaac

SEQ ID NO: 2724285 - RNA, 19 nt, Human
cugagaaagacuauucaaa

SEQ ID NO: 2724286 - RNA, 20 nt, Human
cugagacagcccgggcucug

SEQ ID NO: 2724287 - RNA, 19 nt, Human
cugagacagcccgggcucu

SEQ ID NO: 2724288 - RNA, 20 nt, Human
cugagaugugaacacaucag

SEQ ID NO: 2724289 - RNA, 16 nt, Human
cugagaugugaacaca

SEQ ID NO: 2724290 - RNA, 21 nt, Human
cugagacagcccgggcucugc

SEQ ID NO: 2724291 - RNA, 22 nt, Human
cugagacagcccgggcucugcc

SEQ ID NO: 2724292 - RNA, 16 nt, Human
cugagcaggauuuuaa

SEQ ID NO: 2724293 - RNA, 13 nt, Human
cugagccagauuu

SEQ ID NO: 2724294 - RNA, 14 nt, Human
cugagccagauuuc

SEQ ID NO: 2724295 - RNA, 20 nt, Human
cucuggcagcucagagaggg

SEQ ID NO: 2724296 - RNA, 23 nt, Human
cucuggcagcucagagagggugg

SEQ ID NO: 2724297 - RNA, 16 nt, Human
cucugccucugacaca

SEQ ID NO: 2724298 - RNA, 21 nt, Human
cucugccucccaucacccgcu

SEQ ID NO: 2724299 - RNA, 19 nt, Human
cucugccucugacacacag

SEQ ID NO: 2724300 - RNA, 20 nt, Human
cucugccucugacacacagc

SEQ ID NO: 2724301 - RNA, 10 nt, Human
cucugccuga

SEQ ID NO: 2724302 - RNA, 14 nt, Human
cucuguccugggag

SEQ ID NO: 2724303 - RNA, 13 nt, Human
cucuguccuggga

SEQ ID NO: 2724304 - RNA, 15 nt, Human
cucuguccugggagu

SEQ ID NO: 2724305 - RNA, 22 nt, Human
cucuguccugggagugagcugg

SEQ ID NO: 2724306 - RNA, 18 nt, Human
cucugucgcccagucugg

SEQ ID NO: 2724307 - RNA, 19 nt, Human
cucugucgcccagucugga

SEQ ID NO: 2724308 - RNA, 17 nt, Human
cucugucgcccagucug

SEQ ID NO: 2724309 - RNA, 13 nt, Human
cucugucgcccag

SEQ ID NO: 2724310 - RNA, 19 nt, Human
cucuuaagaagacugcauu

SEQ ID NO: 2724311 - RNA, 19 nt, Human
cucugugucagguggggca

SEQ ID NO: 2724312 - RNA, 20 nt, Human
cucugugucagguggggcag

SEQ ID NO: 2724313 - RNA, 21 nt, Human
cucugugucagguggggcagc

SEQ ID NO: 2724314 - RNA, 22 nt, Human
cucugugucagguggggcagcu

SEQ ID NO: 2724315 - RNA, 23 nt, Human
cucugugucagguggggcagcuu

SEQ ID NO: 2724316 - RNA, 15 nt, Human
cucuucuccaggcug

SEQ ID NO: 2724317 - RNA, 13 nt, Human
cucuucuccaggc

SEQ ID NO: 2724318 - RNA, 10 nt, Human
cucugcacaa

SEQ ID NO: 2724319 - RNA, 13 nt, Human
cucugcacaagcu

SEQ ID NO: 2724320 - RNA, 15 nt, Human
cucugauacagaaaa

SEQ ID NO: 2724321 - RNA, 14 nt, Human
cucugcacaagcug

SEQ ID NO: 2724322 - RNA, 15 nt, Human
cucugcacaagcugc

SEQ ID NO: 2724323 - RNA, 12 nt, Human
cucugcccuugg

SEQ ID NO: 2724324 - RNA, 13 nt, Human
cucugccucccau

SEQ ID NO: 2724325 - RNA, 14 nt, Human
cucugccucccauc

SEQ ID NO: 2724326 - RNA, 16 nt, Human
cucugccucccaucac

SEQ ID NO: 2724327 - RNA, 17 nt, Human
cucugccucccaucacc

SEQ ID NO: 2724328 - RNA, 18 nt, Human
cucugcccacucccugca

SEQ ID NO: 2724329 - RNA, 20 nt, Human
cucugcccacucccugcaac

SEQ ID NO: 2724330 - RNA, 13 nt, Human
cucugcccacucc

SEQ ID NO: 2724331 - RNA, 15 nt, Human
cucugcccacucccu

SEQ ID NO: 2724332 - RNA, 16 nt, Human
cucugcccacucccug

SEQ ID NO: 2724333 - RNA, 17 nt, Human
cucugcccacucccugc

SEQ ID NO: 2724334 - RNA, 21 nt, Human
cucugagacucgcgacaaugc

SEQ ID NO: 2724335 - RNA, 20 nt, Human
cucugagacucgcgacaaug

SEQ ID NO: 2724336 - RNA, 23 nt, Human
cucugagacucgcgacaaugcaa

SEQ ID NO: 2724337 - RNA, 16 nt, Human
cucugaggacacuaac

SEQ ID NO: 2724338 - RNA, 12 nt, Human
cucugaggacac

SEQ ID NO: 2724339 - RNA, 14 nt, Human
cucugaggacacua

SEQ ID NO: 2724340 - RNA, 19 nt, Human
cucugaaggguaauuauau

SEQ ID NO: 2724341 - RNA, 22 nt, Human
cucugaaggacauugcggacag

SEQ ID NO: 2724342 - RNA, 14 nt, Human
cucugacacacagc

SEQ ID NO: 2724343 - RNA, 15 nt, Human
cucugacacacagcu

SEQ ID NO: 2724344 - RNA, 16 nt, Human
cucugacacacagcuc

SEQ ID NO: 2724345 - RNA, 17 nt, Human
cucugacacacagcucu

SEQ ID NO: 2724346 - RNA, 18 nt, Human
cucugacacacagcucug

SEQ ID NO: 2724347 - RNA, 23 nt, Human
cucugacagaagaaccccagggu

SEQ ID NO: 2724348 - RNA, 19 nt, Human
cucugacacacagcucugu

SEQ ID NO: 2724349 - RNA, 14 nt, Human
gagcugcccucucc

SEQ ID NO: 2724350 - RNA, 15 nt, Human
gagcugccaccugcc

SEQ ID NO: 2724351 - RNA, 16 nt, Human
gagcugccaccugccu

SEQ ID NO: 2724352 - RNA, 13 nt, Human
gagcugccaccug

SEQ ID NO: 2724353 - RNA, 15 nt, Human
gagcugcccucuccu

SEQ ID NO: 2724354 - RNA, 16 nt, Human
gagcugcccucuccug

SEQ ID NO: 2724355 - RNA, 14 nt, Human
gagcuacaaaugca

SEQ ID NO: 2724356 - RNA, 23 nt, Human
gagcuacacaggggaaaagagga

SEQ ID NO: 2724357 - RNA, 13 nt, Human
gagcuacaaaugc

SEQ ID NO: 2724358 - RNA, 12 nt, Human
gagcuacaaaug

SEQ ID NO: 2724359 - RNA, 15 nt, Human
gagccuggcaagaau

SEQ ID NO: 2724360 - RNA, 10 nt, Human
gagccuggca

SEQ ID NO: 2724361 - RNA, 13 nt, Human
gagccugggaggu

SEQ ID NO: 2724362 - RNA, 21 nt, Human
gagccugggaggucaaggcug

SEQ ID NO: 2724363 - RNA, 23 nt, Human
gagccugcacggugaauggcuuu

SEQ ID NO: 2724364 - RNA, 20 nt, Human
gagccuccugcccuuaccug

SEQ ID NO: 2724365 - RNA, 22 nt, Human
gagccuccugcccuuaccugcc

SEQ ID NO: 2724366 - RNA, 22 nt, Human
gagccugcacggugaauggcuu

SEQ ID NO: 2724367 - RNA, 17 nt, Human
gagccugcacggugaau

SEQ ID NO: 2724368 - RNA, 20 nt, Human
gagccucagcauccuggcac

SEQ ID NO: 2724369 - RNA, 21 nt, Human
gagccucagcauccuggcacc

SEQ ID NO: 2724370 - RNA, 14 nt, Human
gagccuccugcccu

SEQ ID NO: 2724371 - RNA, 15 nt, Human
gagcccugguggcag

SEQ ID NO: 2724372 - RNA, 16 nt, Human
gagcccugguggcagu

SEQ ID NO: 2724373 - RNA, 19 nt, Human
gagccucagcauccuggca

SEQ ID NO: 2724374 - RNA, 17 nt, Human
gagcccugguggcagug

SEQ ID NO: 2724375 - RNA, 21 nt, Human
gagcaggcuacugucagcucc

SEQ ID NO: 2724376 - RNA, 18 nt, Human
gagcagccacauuccuga

SEQ ID NO: 2724377 - RNA, 22 nt, Human
gagccacugcaccgggccacag

SEQ ID NO: 2724378 - RNA, 11 nt, Human
gagcccacgcc

SEQ ID NO: 2724379 - RNA, 13 nt, Human
gagcccaggccuc

SEQ ID NO: 2724380 - RNA, 14 nt, Human
gagcccaggccucc

SEQ ID NO: 2724381 - RNA, 12 nt, Human
gagcccacgccc

SEQ ID NO: 2724382 - RNA, 15 nt, Human
gagcccacgccccca

SEQ ID NO: 2724383 - RNA, 16 nt, Human
gagcccacgcccccac

SEQ ID NO: 2724384 - RNA, 12 nt, Human
gagcccaggccu

SEQ ID NO: 2724385 - RNA, 14 nt, Human
gagaucagccuggg

SEQ ID NO: 2724386 - RNA, 16 nt, Human
gagaucagccugggca

SEQ ID NO: 2724387 - RNA, 13 nt, Human
gagaucagccugg

SEQ ID NO: 2724388 - RNA, 20 nt, Human
gagaucaaccccuucgcucc

SEQ ID NO: 2724389 - RNA, 19 nt, Human
gagcaccuuagacaguccc

SEQ ID NO: 2724390 - RNA, 17 nt, Human
gagcaccuuagacaguc

SEQ ID NO: 2724391 - RNA, 19 nt, Human
gagcaaaaucgaugcagug

SEQ ID NO: 2724392 - RNA, 13 nt, Human
gagcaaagcugau

SEQ ID NO: 2724393 - RNA, 21 nt, Human
gagcaagacgcugugcugccc

SEQ ID NO: 2724394 - RNA, 18 nt, Human
gagcaagacgcugugcug

SEQ ID NO: 2724395 - RNA, 22 nt, Human
gagcaagacgcugugcugcccu

SEQ ID NO: 2724396 - RNA, 23 nt, Human
gagcaagacgcugugcugcccug

SEQ ID NO: 2724397 - RNA, 13 nt, Human
gaggcagccccau

SEQ ID NO: 2724398 - RNA, 12 nt, Human
gaggccagccuu

SEQ ID NO: 2724399 - RNA, 13 nt, Human
gaggccagccuug

SEQ ID NO: 2724400 - RNA, 23 nt, Human
gaggcagccccauucugccugcc

SEQ ID NO: 2724401 - RNA, 22 nt, Human
gaggcagccccauucugccugc

SEQ ID NO: 2724402 - RNA, 16 nt, Human
gaggauugcuugagcu

SEQ ID NO: 2724403 - RNA, 17 nt, Human
gaggauguucugggaca

SEQ ID NO: 2724404 - RNA, 20 nt, Human
gaggauguucugggacacag

SEQ ID NO: 2724405 - RNA, 12 nt, Human
gaggauguucug

SEQ ID NO: 2724406 - RNA, 23 nt, Human
gaggaguuugggguaugggagag

SEQ ID NO: 2724407 - RNA, 13 nt, Human
gaggacagggagg

SEQ ID NO: 2724408 - RNA, 22 nt, Human
gaggacagggaggugaccccag

SEQ ID NO: 2724409 - RNA, 23 nt, Human
gaggacagggaggugaccccagg

SEQ ID NO: 2724410 - RNA, 14 nt, Human
gaggaauccagacc

SEQ ID NO: 2724411 - RNA, 22 nt, Human
gaggaaggaaacccagcucugg

SEQ ID NO: 2724412 - RNA, 15 nt, Human
gaggaauccagaccc

SEQ ID NO: 2724413 - RNA, 14 nt, Human
gaggaauucuguau

SEQ ID NO: 2724414 - RNA, 17 nt, Human
gaggaauucuguauaga

SEQ ID NO: 2724415 - RNA, 16 nt, Human
gaggaauucuguauag

SEQ ID NO: 2724416 - RNA, 12 nt, Human
gaggggccucuu

SEQ ID NO: 2724417 - RNA, 22 nt, Human
gaggggccucuuaugggcuggg

SEQ ID NO: 2724418 - RNA, 23 nt, Human
gagggcacagaaaauggaagaca

SEQ ID NO: 2724419 - RNA, 14 nt, Human
gagggcacagaaaa

SEQ ID NO: 2724420 - RNA, 22 nt, Human
gagggcacagaaaauggaagac

SEQ ID NO: 2724421 - RNA, 13 nt, Human
gagggagugacag

SEQ ID NO: 2724422 - RNA, 14 nt, Human
gagggagguaagga

SEQ ID NO: 2724423 - RNA, 14 nt, Human
gagggagugacaga

SEQ ID NO: 2724424 - RNA, 14 nt, Human
gagggagggagggc

SEQ ID NO: 2724425 - RNA, 15 nt, Human
gagggagggagggcu

SEQ ID NO: 2724426 - RNA, 15 nt, Human
gagggagggcuccag

SEQ ID NO: 2724427 - RNA, 15 nt, Human
gaggcugggcucccu

SEQ ID NO: 2724428 - RNA, 13 nt, Human
gaggcugggcucc

SEQ ID NO: 2724429 - RNA, 14 nt, Human
gaggcugggcuccc

SEQ ID NO: 2724430 - RNA, 14 nt, Human
gaggccuucucuga

SEQ ID NO: 2724431 - RNA, 22 nt, Human
gaggcccuucucuccagccccu

SEQ ID NO: 2724432 - RNA, 24 nt, Human
gaggcccuucucuccagccccugg

SEQ ID NO: 2724433 - RNA, 14 nt, Human
gaggcccuucucuc

SEQ ID NO: 2724434 - RNA, 23 nt, Human
gaggcccuucucuccagccccug

SEQ ID NO: 2724435 - RNA, 14 nt, Human
gaucuuuaaaauac

SEQ ID NO: 2724436 - RNA, 23 nt, Human
gaucuucaucugacuaugacaua

SEQ ID NO: 2724437 - RNA, 16 nt, Human
gaucuuugcagacagg

SEQ ID NO: 2724438 - RNA, 15 nt, Human
gaugaaaaaauaaca

SEQ ID NO: 2724439 - RNA, 18 nt, Human
gauccucccaccucagcc

SEQ ID NO: 2724440 - RNA, 16 nt, Human
gaucuucaucugacua

SEQ ID NO: 2724441 - RNA, 23 nt, Human
gaucaaccccuucgcuccugugu

SEQ ID NO: 2724442 - RNA, 13 nt, Human
gaucacgccacug

SEQ ID NO: 2724443 - RNA, 14 nt, Human
gaucacgccacugc

SEQ ID NO: 2724444 - RNA, 15 nt, Human
gaucacgccacugca

SEQ ID NO: 2724445 - RNA, 18 nt, Human
gauccuaguuccaccauc

SEQ ID NO: 2724446 - RNA, 11 nt, Human
gauccuccagg

SEQ ID NO: 2724447 - RNA, 19 nt, Human
gauccucccaccucagccu

SEQ ID NO: 2724448 - RNA, 12 nt, Human
gauccuccaggu

SEQ ID NO: 2724449 - RNA, 20 nt, Human
gauccucccaccucagccuc

SEQ ID NO: 2724450 - RNA, 21 nt, Human
gauccucccaccucagccucc

SEQ ID NO: 2724451 - RNA, 13 nt, Human
gauccugagccag

SEQ ID NO: 2724452 - RNA, 14 nt, Human
gauccugagccaga

SEQ ID NO: 2724453 - RNA, 15 nt, Human
gauccugagccagau

SEQ ID NO: 2724454 - RNA, 19 nt, Human
gauccugagccagauuuca

SEQ ID NO: 2724455 - RNA, 16 nt, Human
gaugggaaagcauugu

SEQ ID NO: 2724456 - RNA, 22 nt, Human
gaugggcaacccccagccugcu

SEQ ID NO: 2724457 - RNA, 18 nt, Human
gaugcaguucugaagaag

SEQ ID NO: 2724458 - RNA, 22 nt, Human
gaugagaaagguugaagcacca

SEQ ID NO: 2724459 - RNA, 11 nt, Human
gaugagaaagg

SEQ ID NO: 2724460 - RNA, 21 nt, Human
gauguucuuucacccuuuucu

SEQ ID NO: 2724461 - RNA, 14 nt, Human
gauguuuuccauga

SEQ ID NO: 2724462 - RNA, 21 nt, Human
gauguuuuaaggaugcuugua

SEQ ID NO: 2724463 - RNA, 19 nt, Human
gauuaaauucuugcaaagu

SEQ ID NO: 2724464 - RNA, 12 nt, Human
gauuaaauucuu

SEQ ID NO: 2724465 - RNA, 15 nt, Human
gauguuuuccaugag

SEQ ID NO: 2724466 - RNA, 23 nt, Human
gauguuuuccaugaguccccugu

SEQ ID NO: 2724467 - RNA, 19 nt, Human
gauucaacagguuuuccug

SEQ ID NO: 2724468 - RNA, 18 nt, Human
gauuaaccacuucagcug

SEQ ID NO: 2724469 - RNA, 19 nt, Human
gauuaaccacuucagcuga

SEQ ID NO: 2724470 - RNA, 21 nt, Human
gauuaaccacuucagcugacu

SEQ ID NO: 2724471 - RNA, 14 nt, Human
gauguucugggaca

SEQ ID NO: 2724472 - RNA, 16 nt, Human
gauguucugggacaca

SEQ ID NO: 2724473 - RNA, 20 nt, Human
gauggugcaaugaccuuuca

SEQ ID NO: 2724474 - RNA, 23 nt, Human
gauggugcaaugaccuuucaaua

SEQ ID NO: 2724475 - RNA, 20 nt, Human
gauuguccccgacccuugcc

SEQ ID NO: 2724476 - RNA, 15 nt, Human
gauuguccccgaccc

SEQ ID NO: 2724477 - RNA, 18 nt, Human
gauugcuugagcucagga

SEQ ID NO: 2724478 - RNA, 23 nt, Human
gauugacgggacuguugguauug

SEQ ID NO: 2724479 - RNA, 22 nt, Human
gauucccaagcucugcuccucu

SEQ ID NO: 2724480 - RNA, 12 nt, Human
gauucagacagc

SEQ ID NO: 2724481 - RNA, 21 nt, Human
gaguugaaaaucuuauaauuu

SEQ ID NO: 2724482 - RNA, 14 nt, Human
gaguugaagacaga

SEQ ID NO: 2724483 - RNA, 13 nt, Human
gaguucugguucc

SEQ ID NO: 2724484 - RNA, 17 nt, Human
gagugugccugaagucc

SEQ ID NO: 2724485 - RNA, 23 nt, Human
gaguucaucuugaauuguaagga

SEQ ID NO: 2724486 - RNA, 19 nt, Human
gagugucuuaauuaaaaga

SEQ ID NO: 2724487 - RNA, 23 nt, Human
gagugggggaucacagccucuga

SEQ ID NO: 2724488 - RNA, 12 nt, Human
gagugggcccaa

SEQ ID NO: 2724489 - RNA, 13 nt, Human
gauagcagggcau

SEQ ID NO: 2724490 - RNA, 19 nt, Human
gauagcacagacccugccc

SEQ ID NO: 2724491 - RNA, 12 nt, Human
gauagccaaggc

SEQ ID NO: 2724492 - RNA, 13 nt, Human
gauagccaaggcc

SEQ ID NO: 2724493 - RNA, 23 nt, Human
gauauaugcucugcauguuacau

SEQ ID NO: 2724494 - RNA, 21 nt, Human
gaucaaccccuucgcuccugu

SEQ ID NO: 2724495 - RNA, 22 nt, Human
gaucaaccccuucgcuccugug

SEQ ID NO: 2724496 - RNA, 14 nt, Human
gauagaggaagccu

SEQ ID NO: 2724497 - RNA, 18 nt, Human
gauacaaugcugugcccu

SEQ ID NO: 2724498 - RNA, 13 nt, Human
gauacaaugcugu

SEQ ID NO: 2724499 - RNA, 22 nt, Human
gauagaggaagccugauuaaag

SEQ ID NO: 2724500 - RNA, 21 nt, Human
gauagaggaagccugauuaaa

SEQ ID NO: 2724501 - RNA, 15 nt, Human
gauagaggaagccug

SEQ ID NO: 2724502 - RNA, 17 nt, Human
gauagcacagacccugc

SEQ ID NO: 2724503 - RNA, 18 nt, Human
gauagcacagacccugcc

SEQ ID NO: 2724504 - RNA, 21 nt, Human
gauaaucagugugucuaaauu

SEQ ID NO: 2724505 - RNA, 17 nt, Human
gauacaaaagcauguga

SEQ ID NO: 2724506 - RNA, 14 nt, Human
gaguauuuuugaca

SEQ ID NO: 2724507 - RNA, 16 nt, Human
gaguauuuuugacaga

SEQ ID NO: 2724508 - RNA, 17 nt, Human
gaguauuuuugacagaa

SEQ ID NO: 2724509 - RNA, 12 nt, Human
gaguagcuggga

SEQ ID NO: 2724510 - RNA, 14 nt, Human
gaguagcugggacu

SEQ ID NO: 2724511 - RNA, 18 nt, Human
gaguauuuuugacagaau

SEQ ID NO: 2724512 - RNA, 14 nt, Human
gaguccccuguuug

SEQ ID NO: 2724513 - RNA, 23 nt, Human
gaguccccuguuuguuucugaaa

SEQ ID NO: 2724514 - RNA, 12 nt, Human
gaguccccuguu

SEQ ID NO: 2724515 - RNA, 17 nt, Human
gagucgaggacagggag

SEQ ID NO: 2724516 - RNA, 19 nt, Human
gagucucacuguugcccag

SEQ ID NO: 2724517 - RNA, 20 nt, Human
gagucucacuguugcccagg

SEQ ID NO: 2724518 - RNA, 21 nt, Human
gagucucacuguugcccaggc

SEQ ID NO: 2724519 - RNA, 21 nt, Human
gagucugaaggcuggguucug

SEQ ID NO: 2724520 - RNA, 22 nt, Human
gagucucacuguugcccaggcu

SEQ ID NO: 2724521 - RNA, 23 nt, Human
gagucucacuguugcccaggcug

SEQ ID NO: 2724522 - RNA, 22 nt, Human
gaggggggaggugggauccucc

SEQ ID NO: 2724523 - RNA, 15 nt, Human
gaggggguggccucc

SEQ ID NO: 2724524 - RNA, 15 nt, Human
gaggggggagguggg

SEQ ID NO: 2724525 - RNA, 21 nt, Human
gaggugggauccuccaggugc

SEQ ID NO: 2724526 - RNA, 22 nt, Human
gaggugggauccuccaggugca

SEQ ID NO: 2724527 - RNA, 18 nt, Human
gaggugggauccuccagg

SEQ ID NO: 2724528 - RNA, 18 nt, Human
gaguacuacaguccuccc

SEQ ID NO: 2724529 - RNA, 19 nt, Human
gaguacuacaguccuccca

SEQ ID NO: 2724530 - RNA, 20 nt, Human
gaguacguugugcauuuggu

SEQ ID NO: 2724531 - RNA, 15 nt, Human
gaguacuacaguccu

SEQ ID NO: 2724532 - RNA, 18 nt, Human
gaguacguugugcauuug

SEQ ID NO: 2724533 - RNA, 17 nt, Human
gaguacguugugcauuu

SEQ ID NO: 2724534 - RNA, 19 nt, Human
gagguuuuaaaaaaauccc

SEQ ID NO: 2724535 - RNA, 16 nt, Human
gaguacguugugcauu

SEQ ID NO: 2724536 - RNA, 14 nt, Human
gagguucccuuuga

SEQ ID NO: 2724537 - RNA, 19 nt, Human
gagguucaaagauauuuug

SEQ ID NO: 2724538 - RNA, 16 nt, Human
gccauuuguguuuaua

SEQ ID NO: 2724539 - RNA, 19 nt, Human
gccaugccagcuuaucuca

SEQ ID NO: 2724540 - RNA, 13 nt, Human
gccaugccagcuu

SEQ ID NO: 2724541 - RNA, 18 nt, Human
gccaugccagcuuaucuc

SEQ ID NO: 2724542 - RNA, 18 nt, Human
gccaugaggaacaaggca

SEQ ID NO: 2724543 - RNA, 16 nt, Human
gccagauuucacucuc

SEQ ID NO: 2724544 - RNA, 18 nt, Human
gccagauuucacucuccu

SEQ ID NO: 2724545 - RNA, 21 nt, Human
gccagauuucacucuccuugg

SEQ ID NO: 2724546 - RNA, 23 nt, Human
gccagggacagaggggguggccu

SEQ ID NO: 2724547 - RNA, 13 nt, Human
gccagggacagag

SEQ ID NO: 2724548 - RNA, 16 nt, Human
gccagggacagagggg

SEQ ID NO: 2724549 - RNA, 18 nt, Human
gccagggacagagggggu

SEQ ID NO: 2724550 - RNA, 17 nt, Human
gccagguuuuuggucug

SEQ ID NO: 2724551 - RNA, 20 nt, Human
gccagucaccccggccaccu

SEQ ID NO: 2724552 - RNA, 17 nt, Human
gccagucaccccggcca

SEQ ID NO: 2724553 - RNA, 18 nt, Human
gccagucaccccggccac

SEQ ID NO: 2724554 - RNA, 20 nt, Human
gcccagccccuucugaccca

SEQ ID NO: 2724555 - RNA, 24 nt, Human
gcccagccccuucugacccaugcu

SEQ ID NO: 2724556 - RNA, 13 nt, Human
gcccagccccuuc

SEQ ID NO: 2724557 - RNA, 14 nt, Human
gcccagccccuucu

SEQ ID NO: 2724558 - RNA, 16 nt, Human
gcccagccccuucuga

SEQ ID NO: 2724559 - RNA, 17 nt, Human
gcccagccccuucugac

SEQ ID NO: 2724560 - RNA, 15 nt, Human
gcccaguugggugga

SEQ ID NO: 2724561 - RNA, 19 nt, Human
gcccagucuggaaugcagu

SEQ ID NO: 2724562 - RNA, 23 nt, Human
gcccaggcuuagucacugagaca

SEQ ID NO: 2724563 - RNA, 19 nt, Human
gcccaggcuuagucacuga

SEQ ID NO: 2724564 - RNA, 21 nt, Human
gcccaggcuuagucacugaga

SEQ ID NO: 2724565 - RNA, 22 nt, Human
gcccaggcuggcgugcaguggu

SEQ ID NO: 2724566 - RNA, 19 nt, Human
gcccaggcuggcgugcagu

SEQ ID NO: 2724567 - RNA, 20 nt, Human
gcccaggcuggcgugcagug

SEQ ID NO: 2724568 - RNA, 18 nt, Human
gcccaggaaaggcuccag

SEQ ID NO: 2724569 - RNA, 19 nt, Human
gcccaggaaaggcuccagg

SEQ ID NO: 2724570 - RNA, 20 nt, Human
gcccaggaaaggcuccagga

SEQ ID NO: 2724571 - RNA, 21 nt, Human
gcccaggaaaggcuccaggag

SEQ ID NO: 2724572 - RNA, 21 nt, Human
gcccaaugcacuuuguucugg

SEQ ID NO: 2724573 - RNA, 12 nt, Human
gcccagagggcc

SEQ ID NO: 2724574 - RNA, 14 nt, Human
gcccagagggccug

SEQ ID NO: 2724575 - RNA, 15 nt, Human
gcccagagggccugc

SEQ ID NO: 2724576 - RNA, 18 nt, Human
gcccagagggccugcaag

SEQ ID NO: 2724577 - RNA, 19 nt, Human
gcccagagggccugcaagg

SEQ ID NO: 2724578 - RNA, 9 nt, Human
gcccagccc

SEQ ID NO: 2724579 - RNA, 11 nt, Human
gcccagccccu

SEQ ID NO: 2724580 - RNA, 12 nt, Human
gcccagccccuu

SEQ ID NO: 2724581 - RNA, 22 nt, Human
gcccagagggccugcaagggag

SEQ ID NO: 2724582 - RNA, 20 nt, Human
gcccagagggccugcaaggg

SEQ ID NO: 2724583 - RNA, 21 nt, Human
gcccagagggccugcaaggga

SEQ ID NO: 2724584 - RNA, 18 nt, Human
gccagacuggcacaguuu

SEQ ID NO: 2724585 - RNA, 15 nt, Human
gccagacuggcacag

SEQ ID NO: 2724586 - RNA, 19 nt, Human
gccagacuggcacaguuuu

SEQ ID NO: 2724587 - RNA, 16 nt, Human
gccagagacacaagcc

SEQ ID NO: 2724588 - RNA, 17 nt, Human
gccagagacacaagccu

SEQ ID NO: 2724589 - RNA, 19 nt, Human
gccagagacacaagccuuc

SEQ ID NO: 2724590 - RNA, 10 nt, Human
gccagaggag

SEQ ID NO: 2724591 - RNA, 20 nt, Human
gccagagacacaagccuucg

SEQ ID NO: 2724592 - RNA, 21 nt, Human
gccagagggagugacagaggc

SEQ ID NO: 2724593 - RNA, 22 nt, Human
gccagagggagugacagaggca

SEQ ID NO: 2724594 - RNA, 19 nt, Human
gccagaggagagaggaccc

SEQ ID NO: 2724595 - RNA, 22 nt, Human
gccagaggagagaggacccccu

SEQ ID NO: 2724596 - RNA, 12 nt, Human
gccagaggagag

SEQ ID NO: 2724597 - RNA, 13 nt, Human
gccagaggagaga

SEQ ID NO: 2724598 - RNA, 15 nt, Human
gccagaggagagagg

SEQ ID NO: 2724599 - RNA, 17 nt, Human
gccagaggagagaggac

SEQ ID NO: 2724600 - RNA, 23 nt, Human
gccagagggagugacagaggcag

SEQ ID NO: 2724601 - RNA, 16 nt, Human
gccagaugcaccagcc

SEQ ID NO: 2724602 - RNA, 17 nt, Human
gccagaugcaccagccc

SEQ ID NO: 2724603 - RNA, 18 nt, Human
gccagaugcaccagcccu

SEQ ID NO: 2724604 - RNA, 18 nt, Human
gccacggccaggccagag

SEQ ID NO: 2724605 - RNA, 17 nt, Human
gccacggccaggccaga

SEQ ID NO: 2724606 - RNA, 19 nt, Human
gccacggccaggccagagg

SEQ ID NO: 2724607 - RNA, 22 nt, Human
gccaccugcggugcuaucuccc

SEQ ID NO: 2724608 - RNA, 14 nt, Human
gccaccugcggugc

SEQ ID NO: 2724609 - RNA, 20 nt, Human
gccaccugcggugcuaucuc

SEQ ID NO: 2724610 - RNA, 17 nt, Human
gccaccugccuguuggg

SEQ ID NO: 2724611 - RNA, 14 nt, Human
gccaaggugggagg

SEQ ID NO: 2724612 - RNA, 15 nt, Human
gccaaggugggagga

SEQ ID NO: 2724613 - RNA, 23 nt, Human
gccaaggugggaggauugcuuga

SEQ ID NO: 2724614 - RNA, 21 nt, Human
gccaaggcugggggaagaagc

SEQ ID NO: 2724615 - RNA, 23 nt, Human
gcauuuggugguuucagaaaugu

SEQ ID NO: 2724616 - RNA, 22 nt, Human
gcauuuggugguuucagaaaug

SEQ ID NO: 2724617 - RNA, 20 nt, Human
gcauuugaggucuguucuuu

SEQ ID NO: 2724618 - RNA, 19 nt, Human
gcauuugaggucuguucuu

SEQ ID NO: 2724619 - RNA, 22 nt, Human
gccacaagacccuugugguccc

SEQ ID NO: 2724620 - RNA, 16 nt, Human
gccacaagacccuugu

SEQ ID NO: 2724621 - RNA, 23 nt, Human
gccacagagaaaguacuucucca

SEQ ID NO: 2724622 - RNA, 13 nt, Human
gccacagagaaag

SEQ ID NO: 2724623 - RNA, 14 nt, Human
gccacagagaaagu

SEQ ID NO: 2724624 - RNA, 20 nt, Human
gccacagagaaaguacuucu

SEQ ID NO: 2724625 - RNA, 18 nt, Human
gcagcucagagagggugg

SEQ ID NO: 2724626 - RNA, 19 nt, Human
gcagcucagagaggguggg

SEQ ID NO: 2724627 - RNA, 16 nt, Human
gcagcucaccucuccc

SEQ ID NO: 2724628 - RNA, 17 nt, Human
gcagcucaccucucccu

SEQ ID NO: 2724629 - RNA, 20 nt, Human
gcagcucaccucucccuugg

SEQ ID NO: 2724630 - RNA, 21 nt, Human
gcagcucaccucucccuugga

SEQ ID NO: 2724631 - RNA, 14 nt, Human
gcagcucagagagg

SEQ ID NO: 2724632 - RNA, 15 nt, Human
gcagccucacagucc

SEQ ID NO: 2724633 - RNA, 17 nt, Human
gcagccucacaguccuu

SEQ ID NO: 2724634 - RNA, 19 nt, Human
gcagccucacaguccuuac

SEQ ID NO: 2724635 - RNA, 18 nt, Human
gcagcagggagggcuucu

SEQ ID NO: 2724636 - RNA, 19 nt, Human
gcagcagggagggcuucug

SEQ ID NO: 2724637 - RNA, 16 nt, Human
gcagauuauucacuga

SEQ ID NO: 2724638 - RNA, 13 nt, Human
gcagauuauucac

SEQ ID NO: 2724639 - RNA, 18 nt, Human
gcagauggagaccccuug

SEQ ID NO: 2724640 - RNA, 22 nt, Human
gcacuucgggaggucgaggcag

SEQ ID NO: 2724641 - RNA, 14 nt, Human
gcacuugcagacuc

SEQ ID NO: 2724642 - RNA, 16 nt, Human
gcacuugcagacucua

SEQ ID NO: 2724643 - RNA, 17 nt, Human
gcagacucuacagaggc

SEQ ID NO: 2724644 - RNA, 18 nt, Human
gcagacucuacagaggcc

SEQ ID NO: 2724645 - RNA, 19 nt, Human
gcagacucuacagaggcca

SEQ ID NO: 2724646 - RNA, 22 nt, Human
gcagacucuacagaggccaugg

SEQ ID NO: 2724647 - RNA, 19 nt, Human
gcagagaccaucccugaag

SEQ ID NO: 2724648 - RNA, 22 nt, Human
gcagagaccaucccugaaggcc

SEQ ID NO: 2724649 - RNA, 20 nt, Human
gcagagaccaucccugaagg

SEQ ID NO: 2724650 - RNA, 21 nt, Human
gcagagaccaucccugaaggc

SEQ ID NO: 2724651 - RNA, 15 nt, Human
gcacagccucuuaga

SEQ ID NO: 2724652 - RNA, 20 nt, Human
gauugugucucuugguccug

SEQ ID NO: 2724653 - RNA, 18 nt, Human
gcacagccucuuagaugc

SEQ ID NO: 2724654 - RNA, 21 nt, Human
gcacagcuucauuuccugugu

SEQ ID NO: 2724655 - RNA, 23 nt, Human
gcacagcuucauuuccugugucu

SEQ ID NO: 2724656 - RNA, 13 nt, Human
gcaccagcagccu

SEQ ID NO: 2724657 - RNA, 14 nt, Human
gcaccaucucuccu

SEQ ID NO: 2724658 - RNA, 15 nt, Human
gcaccaucucuccuc

SEQ ID NO: 2724659 - RNA, 17 nt, Human
gcaccaucucuccuccu

SEQ ID NO: 2724660 - RNA, 19 nt, Human
gcacuguggguagacacac

SEQ ID NO: 2724661 - RNA, 19 nt, Human
gcacuguuuuauuuuaauu

SEQ ID NO: 2724662 - RNA, 12 nt, Human
gcacugggcuug

SEQ ID NO: 2724663 - RNA, 15 nt, Human
gcacuauaauguaag

SEQ ID NO: 2724664 - RNA, 14 nt, Human
gcacuauaauguaa

SEQ ID NO: 2724665 - RNA, 20 nt, Human
gcacuauaauguaagcucua

SEQ ID NO: 2724666 - RNA, 22 nt, Human
gcacuauaauguaagcucuacu

SEQ ID NO: 2724667 - RNA, 12 nt, Human
gcacugcuucca

SEQ ID NO: 2724668 - RNA, 13 nt, Human
gcacugcuuccag

SEQ ID NO: 2724669 - RNA, 14 nt, Human
gcacugcuuccagu

SEQ ID NO: 2724670 - RNA, 15 nt, Human
gcacugcuuccagug

SEQ ID NO: 2724671 - RNA, 16 nt, Human
gcacccucaggcaggu

SEQ ID NO: 2724672 - RNA, 19 nt, Human
gcacccucaggcagguggg

SEQ ID NO: 2724673 - RNA, 19 nt, Human
gcacuaaggugugcucuga

SEQ ID NO: 2724674 - RNA, 20 nt, Human
gcacuaaggugugcucugau

SEQ ID NO: 2724675 - RNA, 14 nt, Human
gcacgugugugcac

SEQ ID NO: 2724676 - RNA, 23 nt, Human
gcaucagcugcugaaacaacaaa

SEQ ID NO: 2724677 - RNA, 12 nt, Human
gcaucaggccag

SEQ ID NO: 2724678 - RNA, 22 nt, Human
gcaucagcugcugaaacaacaa

SEQ ID NO: 2724679 - RNA, 23 nt, Human
gcaucaggccaggcccucugccc

SEQ ID NO: 2724680 - RNA, 18 nt, Human
gcaucaggccaggcccuc

SEQ ID NO: 2724681 - RNA, 20 nt, Human
gcaucuagcaugucgucaaa

SEQ ID NO: 2724682 - RNA, 20 nt, Human
gcaugaaguaauaugcacac

SEQ ID NO: 2724683 - RNA, 22 nt, Human
gcaugaaguaauaugcacacau

SEQ ID NO: 2724684 - RNA, 21 nt, Human
gcaugaaguaauaugcacaca

SEQ ID NO: 2724685 - RNA, 20 nt, Human
gcaugacacgaauauugcug

SEQ ID NO: 2724686 - RNA, 21 nt, Human
gcaugacacgaauauugcuga

SEQ ID NO: 2724687 - RNA, 22 nt, Human
gcaugacacgaauauugcugau

SEQ ID NO: 2724688 - RNA, 14 nt, Human
gcaugccuggaugg

SEQ ID NO: 2724689 - RNA, 13 nt, Human
gcauguuacauaa

SEQ ID NO: 2724690 - RNA, 15 nt, Human
gcaugccuggauggg

SEQ ID NO: 2724691 - RNA, 24 nt, Human
gcauuaucuagauacuguaucaug

SEQ ID NO: 2724692 - RNA, 22 nt, Human
gcauuaucuagauacuguauca

SEQ ID NO: 2724693 - RNA, 19 nt, Human
gcauuaucuagauacugua

SEQ ID NO: 2724694 - RNA, 18 nt, Human
gcauuugaggucuguucu

SEQ ID NO: 2724695 - RNA, 22 nt, Human
gcauuccccaggaggccagccu

SEQ ID NO: 2724696 - RNA, 14 nt, Human
gcauuccccaggag

SEQ ID NO: 2724697 - RNA, 15 nt, Human
gcauuccccaggagg

SEQ ID NO: 2724698 - RNA, 16 nt, Human
gcauuccccaggaggc

SEQ ID NO: 2724699 - RNA, 17 nt, Human
gcauuccccaggaggcc

SEQ ID NO: 2724700 - RNA, 18 nt, Human
gcauuccccaggaggcca

SEQ ID NO: 2724701 - RNA, 19 nt, Human
gcauuccccaggaggccag

SEQ ID NO: 2724702 - RNA, 20 nt, Human
gcauuccccaggaggccagc

SEQ ID NO: 2724703 - RNA, 21 nt, Human
gcauuccccaggaggccagcc

SEQ ID NO: 2724704 - RNA, 15 nt, Human
gcaguugaaaagacu

SEQ ID NO: 2724705 - RNA, 19 nt, Human
gcaguugaaaagacuccaa

SEQ ID NO: 2724706 - RNA, 16 nt, Human
gcaguugaaaagacuc

SEQ ID NO: 2724707 - RNA, 21 nt, Human
gcaguugaaaagacuccaaag

SEQ ID NO: 2724708 - RNA, 19 nt, Human
gcauacguacacauuuuau

SEQ ID NO: 2724709 - RNA, 19 nt, Human
gcaguucagagcugcccuc

SEQ ID NO: 2724710 - RNA, 20 nt, Human
gcaguucagagcugcccucu

SEQ ID NO: 2724711 - RNA, 22 nt, Human
gcaguucagagcugcccucucc

SEQ ID NO: 2724712 - RNA, 23 nt, Human
gcaguucagagcugcccucuccu

SEQ ID NO: 2724713 - RNA, 21 nt, Human
gcaguggugguuuucuguucu

SEQ ID NO: 2724714 - RNA, 20 nt, Human
gcaguggugguuuucuguuc

SEQ ID NO: 2724715 - RNA, 22 nt, Human
gcaguggugcgaucuggguuca

SEQ ID NO: 2724716 - RNA, 19 nt, Human
gcaguggugguuuucuguu

SEQ ID NO: 2724717 - RNA, 20 nt, Human
gcaguggugcgaucuggguu

SEQ ID NO: 2724718 - RNA, 21 nt, Human
gcaguggugcgaucuggguuc

SEQ ID NO: 2724719 - RNA, 11 nt, Human
gcagugggagc

SEQ ID NO: 2724720 - RNA, 18 nt, Human
gcaguggugcgaucuggg

SEQ ID NO: 2724721 - RNA, 19 nt, Human
gcaguggugcgaucugggu

SEQ ID NO: 2724722 - RNA, 19 nt, Human
gcaggguccuagaaauucc

SEQ ID NO: 2724723 - RNA, 16 nt, Human
gcagggucucacucug

SEQ ID NO: 2724724 - RNA, 22 nt, Human
gcaggggaggguagagcggaga

SEQ ID NO: 2724725 - RNA, 18 nt, Human
gcaggcagccaggccaca

SEQ ID NO: 2724726 - RNA, 17 nt, Human
gcaggcagccaggccac

SEQ ID NO: 2724727 - RNA, 18 nt, Human
gcuugcccuguuaaaaga

SEQ ID NO: 2724728 - RNA, 12 nt, Human
gcuuguguuaag

SEQ ID NO: 2724729 - RNA, 14 nt, Human
gcuuuguauagaac

SEQ ID NO: 2724730 - RNA, 13 nt, Human
gcuuuguauagaa

SEQ ID NO: 2724731 - RNA, 12 nt, Human
gcuuuguauaga

SEQ ID NO: 2724732 - RNA, 19 nt, Human
gcuucuguuuuauaauuuu

SEQ ID NO: 2724733 - RNA, 22 nt, Human
gcuucucacugccaugccagcu

SEQ ID NO: 2724734 - RNA, 17 nt, Human
gcuucucacugccaugc

SEQ ID NO: 2724735 - RNA, 18 nt, Human
gcuucauuuccugugucu

SEQ ID NO: 2724736 - RNA, 21 nt, Human
gcuucauccuccucagaucuu

SEQ ID NO: 2724737 - RNA, 19 nt, Human
gcuucaguggcagcugcuu

SEQ ID NO: 2724738 - RNA, 20 nt, Human
gcuucaguggcagcugcuuu

SEQ ID NO: 2724739 - RNA, 20 nt, Human
gcuuauacacuuacacuuua

SEQ ID NO: 2724740 - RNA, 23 nt, Human
gcuggucccagccagcaguucag

SEQ ID NO: 2724741 - RNA, 14 nt, Human
gcugggggccucag

SEQ ID NO: 2724742 - RNA, 15 nt, Human
gcugggggccucagu

SEQ ID NO: 2724743 - RNA, 18 nt, Human
gcugggggccucagugcc

SEQ ID NO: 2724744 - RNA, 13 nt, Human
gcugggggccuca

SEQ ID NO: 2724745 - RNA, 19 nt, Human
gcugggaugauuggagggg

SEQ ID NO: 2724746 - RNA, 21 nt, Human
gcugggcucccuucccaccuc

SEQ ID NO: 2724747 - RNA, 13 nt, Human
gcuggccuggccc

SEQ ID NO: 2724748 - RNA, 12 nt, Human
gcuggccuggcc

SEQ ID NO: 2724749 - RNA, 14 nt, Human
gcuggccuggcccc

SEQ ID NO: 2724750 - RNA, 15 nt, Human
gcuggccuggccccu

SEQ ID NO: 2724751 - RNA, 21 nt, Human
gcugggcuucaguggcagcug

SEQ ID NO: 2724752 - RNA, 22 nt, Human
gcugggcuucaguggcagcugc

SEQ ID NO: 2724753 - RNA, 20 nt, Human
gcugggcuucaguggcagcu

SEQ ID NO: 2724754 - RNA, 16 nt, Human
gcugucccuuuuccuu

SEQ ID NO: 2724755 - RNA, 23 nt, Human
gcugucccuuacgugaguccugg

SEQ ID NO: 2724756 - RNA, 17 nt, Human
gcugucagccauuccug

SEQ ID NO: 2724757 - RNA, 21 nt, Human
gcugguguaugugugaaguga

SEQ ID NO: 2724758 - RNA, 14 nt, Human
gcuggugucaccug

SEQ ID NO: 2724759 - RNA, 15 nt, Human
gcuggugucaccuga

SEQ ID NO: 2724760 - RNA, 15 nt, Human
gcugugucucccuuc

SEQ ID NO: 2724761 - RNA, 18 nt, Human
gcuguguuaaauaaaccu

SEQ ID NO: 2724762 - RNA, 12 nt, Human
gcugcccucucc

SEQ ID NO: 2724763 - RNA, 13 nt, Human
gcugccaccugcc

SEQ ID NO: 2724764 - RNA, 12 nt, Human
gcugccaccugc

SEQ ID NO: 2724765 - RNA, 20 nt, Human
gcugccaaugggagcucaug

SEQ ID NO: 2724766 - RNA, 13 nt, Human
gcugcaguugcca

SEQ ID NO: 2724767 - RNA, 14 nt, Human
gcugcaguugccag

SEQ ID NO: 2724768 - RNA, 19 nt, Human
gcugcauuuaaaagauaca

SEQ ID NO: 2724769 - RNA, 18 nt, Human
gcugcauuuaaaagauac

SEQ ID NO: 2724770 - RNA, 17 nt, Human
gcugcauuuaaaagaua

SEQ ID NO: 2724771 - RNA, 17 nt, Human
gcugcaguugccaguca

SEQ ID NO: 2724772 - RNA, 22 nt, Human
gcugcaaaggguaucaggugcu

SEQ ID NO: 2724773 - RNA, 23 nt, Human
gcugcaaaggguaucaggugcug

SEQ ID NO: 2724774 - RNA, 17 nt, Human
gcugacagacacaggcc

SEQ ID NO: 2724775 - RNA, 18 nt, Human
gcugacagacacaggccc

SEQ ID NO: 2724776 - RNA, 19 nt, Human
gcugacagacacaggcccg

SEQ ID NO: 2724777 - RNA, 22 nt, Human
gcugacuguuuucucuugagag

SEQ ID NO: 2724778 - RNA, 21 nt, Human
gcucucaggccagcugcuugg

SEQ ID NO: 2724779 - RNA, 13 nt, Human
gcugcccucuccu

SEQ ID NO: 2724780 - RNA, 14 nt, Human
gcugcccucuccug

SEQ ID NO: 2724781 - RNA, 15 nt, Human
gcugcccucuccugg

SEQ ID NO: 2724782 - RNA, 16 nt, Human
gcugcccucuccuggg

SEQ ID NO: 2724783 - RNA, 17 nt, Human
gcugcccucuccugggc

SEQ ID NO: 2724784 - RNA, 18 nt, Human
gcugcccucuccugggca

SEQ ID NO: 2724785 - RNA, 20 nt, Human
gcugcccucuccugggcagc

SEQ ID NO: 2724786 - RNA, 22 nt, Human
gcugcccucuccugggcagcug

SEQ ID NO: 2724787 - RNA, 23 nt, Human
gcugcccucuccugggcagcugc

SEQ ID NO: 2724788 - RNA, 12 nt, Human
gcugcccugccc

SEQ ID NO: 2724789 - RNA, 13 nt, Human
gcugcccugccca

SEQ ID NO: 2724790 - RNA, 14 nt, Human
gcugcccugcccac

SEQ ID NO: 2724791 - RNA, 24 nt, Human
gcugcccugcccaccuggccucug

SEQ ID NO: 2724792 - RNA, 22 nt, Human
gcugcccugcccaccuggccuc

SEQ ID NO: 2724793 - RNA, 23 nt, Human
gcugcccugcccaccuggccucu

SEQ ID NO: 2724794 - RNA, 16 nt, Human
gcugcccugcccaccu

SEQ ID NO: 2724795 - RNA, 18 nt, Human
gcugcccugcccaccugg

SEQ ID NO: 2724796 - RNA, 20 nt, Human
gcugcccugcccaccuggcc

SEQ ID NO: 2724797 - RNA, 21 nt, Human
gcugcccugcccaccuggccu

SEQ ID NO: 2724798 - RNA, 22 nt, Human
gcugcgguccacccaggagccc

SEQ ID NO: 2724799 - RNA, 21 nt, Human
gcugcgguccacccaggagcc

SEQ ID NO: 2724800 - RNA, 14 nt, Human
gcugcgguccaccc

SEQ ID NO: 2724801 - RNA, 15 nt, Human
gcugcgguccaccca

SEQ ID NO: 2724802 - RNA, 20 nt, Human
gcugccuguucagcuccagc

SEQ ID NO: 2724803 - RNA, 22 nt, Human
gcugccuguucagcuccagcuc

SEQ ID NO: 2724804 - RNA, 18 nt, Human
gcugccuguucagcucca

SEQ ID NO: 2724805 - RNA, 19 nt, Human
gcugccuguucagcuccag

SEQ ID NO: 2724806 - RNA, 23 nt, Human
gcuggaaaaguauguuagugcaa

SEQ ID NO: 2724807 - RNA, 21 nt, Human
gcuggaaaaguauguuagugc

SEQ ID NO: 2724808 - RNA, 22 nt, Human
gcugcuuuugucuaugggacuc

SEQ ID NO: 2724809 - RNA, 15 nt, Human
gcuggaccuugaacu

SEQ ID NO: 2724810 - RNA, 20 nt, Human
gcuccauuuuuagugaaaua

SEQ ID NO: 2724811 - RNA, 20 nt, Human
gcucccuucccaccucucuc

SEQ ID NO: 2724812 - RNA, 18 nt, Human
gcuccgcuuucuacccag

SEQ ID NO: 2724813 - RNA, 21 nt, Human
gcuccgcuuucuacccagcga

SEQ ID NO: 2724814 - RNA, 22 nt, Human
gcuccgcuuucuacccagcgag

SEQ ID NO: 2724815 - RNA, 23 nt, Human
gcuccgcuuucuacccagcgagc

SEQ ID NO: 2724816 - RNA, 21 nt, Human
gcuccagcuguucagcugguu

SEQ ID NO: 2724817 - RNA, 20 nt, Human
gcuccagcuguucagcuggu

SEQ ID NO: 2724818 - RNA, 11 nt, Human
gcuccaggagc

SEQ ID NO: 2724819 - RNA, 12 nt, Human
gcuccaggagca

SEQ ID NO: 2724820 - RNA, 14 nt, Human
gcuccaggagcagc

SEQ ID NO: 2724821 - RNA, 12 nt, Human
gcuccaggcucc

SEQ ID NO: 2724822 - RNA, 24 nt, Human
gcuccaggcuccuuuagcgcccag

SEQ ID NO: 2724823 - RNA, 15 nt, Human
gcuccaggagcagcc

SEQ ID NO: 2724824 - RNA, 16 nt, Human
gcuccaggagcagcca

SEQ ID NO: 2724825 - RNA, 17 nt, Human
gcuccaggagcagccac

SEQ ID NO: 2724826 - RNA, 18 nt, Human
gcuccaggagcagccaca

SEQ ID NO: 2724827 - RNA, 24 nt, Human
gcuccgcuuucuacccagcgagcc

SEQ ID NO: 2724828 - RNA, 12 nt, Human
gcuccugugucu

SEQ ID NO: 2724829 - RNA, 13 nt, Human
gcuccugugucuu

SEQ ID NO: 2724830 - RNA, 13 nt, Human
gcuccuucugucc

SEQ ID NO: 2724831 - RNA, 17 nt, Human
gcuccuuuagcgcccag

SEQ ID NO: 2724832 - RNA, 17 nt, Human
gcucgagcaugccugga

SEQ ID NO: 2724833 - RNA, 21 nt, Human
gcucgagcaugccuggauggg

SEQ ID NO: 2724834 - RNA, 19 nt, Human
gcucgagcaugccuggaug

SEQ ID NO: 2724835 - RNA, 19 nt, Human
gcuauaggugcuacaaaaa

SEQ ID NO: 2724836 - RNA, 21 nt, Human
gcuauaggugcuacaaaaaca

SEQ ID NO: 2724837 - RNA, 13 nt, Human
gcuagauguaugu

SEQ ID NO: 2724838 - RNA, 19 nt, Human
gcggugcuaucucccccag

SEQ ID NO: 2724839 - RNA, 22 nt, Human
gcggugcuaucucccccagccc

SEQ ID NO: 2724840 - RNA, 14 nt, Human
gcuagauguaugua

SEQ ID NO: 2724841 - RNA, 21 nt, Human
gcuaguugggcuuccucauag

SEQ ID NO: 2724842 - RNA, 15 nt, Human
gcuaucucccccagc

SEQ ID NO: 2724843 - RNA, 14 nt, Human
gcuaucucccccag

SEQ ID NO: 2724844 - RNA, 18 nt, Human
gcucaaguccucuuuucu

SEQ ID NO: 2724845 - RNA, 13 nt, Human
gcuaucuccccca

SEQ ID NO: 2724846 - RNA, 19 nt, Human
gcucaaguccucuuuucug

SEQ ID NO: 2724847 - RNA, 22 nt, Human
gcucaaguccucuuuucugaga

SEQ ID NO: 2724848 - RNA, 16 nt, Human
gcucagcggggacagc

SEQ ID NO: 2724849 - RNA, 17 nt, Human
gcucagcggggacagcu

SEQ ID NO: 2724850 - RNA, 18 nt, Human
gcucagcggggacagcuc

SEQ ID NO: 2724851 - RNA, 19 nt, Human
gcucagcggggacagcucc

SEQ ID NO: 2724852 - RNA, 23 nt, Human
gcucagcggggacagcuccuucu

SEQ ID NO: 2724853 - RNA, 14 nt, Human
gcucaccucucccu

SEQ ID NO: 2724854 - RNA, 16 nt, Human
gcucaccucucccuug

SEQ ID NO: 2724855 - RNA, 17 nt, Human
gcucaccucucccuugg

SEQ ID NO: 2724856 - RNA, 18 nt, Human
gcucaccucucccuugga

SEQ ID NO: 2724857 - RNA, 16 nt, Human
gcucacauaucuguca

SEQ ID NO: 2724858 - RNA, 12 nt, Human
gcucaccagccc

SEQ ID NO: 2724859 - RNA, 13 nt, Human
gcucaccagcccc

SEQ ID NO: 2724860 - RNA, 14 nt, Human
gcucaccagcccca

SEQ ID NO: 2724861 - RNA, 15 nt, Human
gcucaccagccccag

SEQ ID NO: 2724862 - RNA, 17 nt, Human
gccugaagucacacagu

SEQ ID NO: 2724863 - RNA, 18 nt, Human
gccugaagucacacagug

SEQ ID NO: 2724864 - RNA, 19 nt, Human
gcccaguuggguggaugcc

SEQ ID NO: 2724865 - RNA, 21 nt, Human
gcccaguuggguggaugccug

SEQ ID NO: 2724866 - RNA, 15 nt, Human
gccugaagucacaca

SEQ ID NO: 2724867 - RNA, 16 nt, Human
gccugaagucacacag

SEQ ID NO: 2724868 - RNA, 12 nt, Human
gccugagcuggg

SEQ ID NO: 2724869 - RNA, 16 nt, Human
gccuggauggggcugc

SEQ ID NO: 2724870 - RNA, 18 nt, Human
gccuggauggggcugcac

SEQ ID NO: 2724871 - RNA, 20 nt, Human
gccuggauggggcugcaccg

SEQ ID NO: 2724872 - RNA, 13 nt, Human
gccuggccccuca

SEQ ID NO: 2724873 - RNA, 14 nt, Human
gccuggccccucag

SEQ ID NO: 2724874 - RNA, 20 nt, Human
gccuggccagaugcaccagc

SEQ ID NO: 2724875 - RNA, 16 nt, Human
gccuggccagaugcac

SEQ ID NO: 2724876 - RNA, 21 nt, Human
gccuggccagaugcaccagcc

SEQ ID NO: 2724877 - RNA, 22 nt, Human
gccuggccagaugcaccagccc

SEQ ID NO: 2724878 - RNA, 20 nt, Human
gccuguaauccuagcacuuu

SEQ ID NO: 2724879 - RNA, 15 nt, Human
gccuguaauccuagc

SEQ ID NO: 2724880 - RNA, 18 nt, Human
gccuuggggcugaugcag

SEQ ID NO: 2724881 - RNA, 15 nt, Human
gccuuacacaauggu

SEQ ID NO: 2724882 - RNA, 16 nt, Human
gccuuacacaaugguu

SEQ ID NO: 2724883 - RNA, 12 nt, Human
gcgacaaugcaa

SEQ ID NO: 2724884 - RNA, 13 nt, Human
gcgacaaugcaaa

SEQ ID NO: 2724885 - RNA, 20 nt, Human
gcgacaaugcaaaccaucau

SEQ ID NO: 2724886 - RNA, 21 nt, Human
gcgacaaugcaaaccaucauu

SEQ ID NO: 2724887 - RNA, 15 nt, Human
gcggggacagcuccu

SEQ ID NO: 2724888 - RNA, 17 nt, Human
gcggggacagcuccuuc

SEQ ID NO: 2724889 - RNA, 19 nt, Human
gcggugagaggggaacaga

SEQ ID NO: 2724890 - RNA, 13 nt, Human
gcgguccacccag

SEQ ID NO: 2724891 - RNA, 14 nt, Human
gcgguccacccagg

SEQ ID NO: 2724892 - RNA, 18 nt, Human
gcgcugccccuggcagcc

SEQ ID NO: 2724893 - RNA, 21 nt, Human
gcgcugccccuggcagccccu

SEQ ID NO: 2724894 - RNA, 16 nt, Human
gcggagaaaggaaggg

SEQ ID NO: 2724895 - RNA, 19 nt, Human
gcggagacggagucccacc

SEQ ID NO: 2724896 - RNA, 14 nt, Human
gcggggacagcucc

SEQ ID NO: 2724897 - RNA, 21 nt, Human
gcgccuuaaggauguucuagc

SEQ ID NO: 2724898 - RNA, 23 nt, Human
gcgcccaguuggguggaugccug

SEQ ID NO: 2724899 - RNA, 9 nt, Human
ggcuccaga

SEQ ID NO: 2724900 - RNA, 14 nt, Human
ggcuaugcauuuga

SEQ ID NO: 2724901 - RNA, 13 nt, Human
ggcuaugcauuug

SEQ ID NO: 2724902 - RNA, 12 nt, Human
ggcuaugcauuu

SEQ ID NO: 2724903 - RNA, 10 nt, Human
ggcuccagac

SEQ ID NO: 2724904 - RNA, 14 nt, Human
ggcuccaggagcag

SEQ ID NO: 2724905 - RNA, 16 nt, Human
ggcuccaggagcagcc

SEQ ID NO: 2724906 - RNA, 12 nt, Human
ggcuccaggcuc

SEQ ID NO: 2724907 - RNA, 13 nt, Human
ggcuccaggcucc

SEQ ID NO: 2724908 - RNA, 18 nt, Human
ggcuccaggagcagccac

SEQ ID NO: 2724909 - RNA, 17 nt, Human
ggcuccaggagcagcca

SEQ ID NO: 2724910 - RNA, 23 nt, Human
ggcuauaggugcuacaaaaacac

SEQ ID NO: 2724911 - RNA, 15 nt, Human
ggcgcgguggcucac

SEQ ID NO: 2724912 - RNA, 17 nt, Human
ggcgcugccccuggcag

SEQ ID NO: 2724913 - RNA, 11 nt, Human
ggcgcugcccc

SEQ ID NO: 2724914 - RNA, 12 nt, Human
ggcucugcccuu

SEQ ID NO: 2724915 - RNA, 16 nt, Human
ggcucugccucccauc

SEQ ID NO: 2724916 - RNA, 14 nt, Human
ggcucugcccuugg

SEQ ID NO: 2724917 - RNA, 15 nt, Human
ggcucugcccuuggu

SEQ ID NO: 2724918 - RNA, 13 nt, Human
ggcucugccuccc

SEQ ID NO: 2724919 - RNA, 15 nt, Human
ggcucugccucccau

SEQ ID NO: 2724920 - RNA, 14 nt, Human
ggcucucaggccag

SEQ ID NO: 2724921 - RNA, 17 nt, Human
ggcucucaggccagcug

SEQ ID NO: 2724922 - RNA, 18 nt, Human
ggcucucaggccagcugc

SEQ ID NO: 2724923 - RNA, 19 nt, Human
ggcucucaggccagcugcu

SEQ ID NO: 2724924 - RNA, 20 nt, Human
ggcucucaggccagcugcuu

SEQ ID NO: 2724925 - RNA, 14 nt, Human
ggcuccaggcuccu

SEQ ID NO: 2724926 - RNA, 15 nt, Human
ggcucucaggccagc

SEQ ID NO: 2724927 - RNA, 16 nt, Human
ggcucucaggccagcu

SEQ ID NO: 2724928 - RNA, 23 nt, Human
ggccugggggcugggcagaggaa

SEQ ID NO: 2724929 - RNA, 15 nt, Human
ggccuggccugagcu

SEQ ID NO: 2724930 - RNA, 16 nt, Human
ggccuggccugagcug

SEQ ID NO: 2724931 - RNA, 23 nt, Human
ggcgcagcauauucaggaagcuc

SEQ ID NO: 2724932 - RNA, 24 nt, Human
ggcgcagcauauucaggaagcuca

SEQ ID NO: 2724933 - RNA, 22 nt, Human
ggccucugcacuccccugcugg

SEQ ID NO: 2724934 - RNA, 18 nt, Human
ggccucugcacuccccug

SEQ ID NO: 2724935 - RNA, 19 nt, Human
ggccucugcacuccccugc

SEQ ID NO: 2724936 - RNA, 13 nt, Human
ggccuggccccuc

SEQ ID NO: 2724937 - RNA, 14 nt, Human
ggccuggccccuca

SEQ ID NO: 2724938 - RNA, 15 nt, Human
ggccuggccccucag

SEQ ID NO: 2724939 - RNA, 17 nt, Human
ggccuggccccucaggg

SEQ ID NO: 2724940 - RNA, 18 nt, Human
ggccuggccccucagggu

SEQ ID NO: 2724941 - RNA, 23 nt, Human
ggccuggccccucagggucccug

SEQ ID NO: 2724942 - RNA, 10 nt, Human
ggccuggccu

SEQ ID NO: 2724943 - RNA, 13 nt, Human
ggccuggccugag

SEQ ID NO: 2724944 - RNA, 14 nt, Human
ggccuggccugagc

SEQ ID NO: 2724945 - RNA, 20 nt, Human
ggcccagagggccugcaagg

SEQ ID NO: 2724946 - RNA, 17 nt, Human
ggcccagagggccugca

SEQ ID NO: 2724947 - RNA, 19 nt, Human
ggcccagagggccugcaag

SEQ ID NO: 2724948 - RNA, 14 nt, Human
ggcccagagggccu

SEQ ID NO: 2724949 - RNA, 20 nt, Human
ggccucgguguggagaagcg

SEQ ID NO: 2724950 - RNA, 14 nt, Human
ggccuccugugugu

SEQ ID NO: 2724951 - RNA, 22 nt, Human
ggccuagcauacguacacauuu

SEQ ID NO: 2724952 - RNA, 20 nt, Human
ggccuagcauacguacacau

SEQ ID NO: 2724953 - RNA, 14 nt, Human
ggccucaagugauu

SEQ ID NO: 2724954 - RNA, 22 nt, Human
ggccucaagugauucuccugcc

SEQ ID NO: 2724955 - RNA, 14 nt, Human
gggaauugaggaca

SEQ ID NO: 2724956 - RNA, 19 nt, Human
gggaauguuugccucugcc

SEQ ID NO: 2724957 - RNA, 21 nt, Human
gggaauguuugccucugccuc

SEQ ID NO: 2724958 - RNA, 14 nt, Human
gggacacccuguga

SEQ ID NO: 2724959 - RNA, 15 nt, Human
ggcuuuguauagaac

SEQ ID NO: 2724960 - RNA, 23 nt, Human
gggacucaaugcacugacauugu

SEQ ID NO: 2724961 - RNA, 17 nt, Human
gggacucaaugcacuga

SEQ ID NO: 2724962 - RNA, 19 nt, Human
gggacucaaugcacugaca

SEQ ID NO: 2724963 - RNA, 21 nt, Human
gggaggauugcuugagcucag

SEQ ID NO: 2724964 - RNA, 22 nt, Human
gggaggauguucugggacacag

SEQ ID NO: 2724965 - RNA, 23 nt, Human
gggaggaucucuugagccuggga

SEQ ID NO: 2724966 - RNA, 20 nt, Human
gggaggugggauccuccagg

SEQ ID NO: 2724967 - RNA, 23 nt, Human
gggaggauugcuugagcucagga

SEQ ID NO: 2724968 - RNA, 21 nt, Human
gggagugaguugauagcacag

SEQ ID NO: 2724969 - RNA, 17 nt, Human
gggagugacagaggcag

SEQ ID NO: 2724970 - RNA, 13 nt, Human
gggagcugccugu

SEQ ID NO: 2724971 - RNA, 21 nt, Human
gggagcugccuguucagcucc

SEQ ID NO: 2724972 - RNA, 22 nt, Human
gggagcugccuguucagcucca

SEQ ID NO: 2724973 - RNA, 16 nt, Human
ggcugggggaagaagc

SEQ ID NO: 2724974 - RNA, 14 nt, Human
ggcugggggccuca

SEQ ID NO: 2724975 - RNA, 11 nt, Human
ggcugggcuuc

SEQ ID NO: 2724976 - RNA, 21 nt, Human
ggcugggcuucaguggcagcu

SEQ ID NO: 2724977 - RNA, 22 nt, Human
ggcugggcuucaguggcagcug

SEQ ID NO: 2724978 - RNA, 18 nt, Human
ggcugggcuucaguggca

SEQ ID NO: 2724979 - RNA, 18 nt, Human
ggcugggcucccuuccca

SEQ ID NO: 2724980 - RNA, 20 nt, Human
ggcugggcucccuucccacc

SEQ ID NO: 2724981 - RNA, 21 nt, Human
ggcugggcucccuucccaccu

SEQ ID NO: 2724982 - RNA, 15 nt, Human
ggcugcuucaaggau

SEQ ID NO: 2724983 - RNA, 19 nt, Human
ggcugcuucaaggauccug

SEQ ID NO: 2724984 - RNA, 21 nt, Human
ggcugcuucaaggauccugag

SEQ ID NO: 2724985 - RNA, 20 nt, Human
ggcugcuucaaggauccuga

SEQ ID NO: 2724986 - RNA, 18 nt, Human
ggcuggagcuagaauuug

SEQ ID NO: 2724987 - RNA, 20 nt, Human
ggcuucacggaagagccuug

SEQ ID NO: 2724988 - RNA, 15 nt, Human
ggcuuagucacugag

SEQ ID NO: 2724989 - RNA, 14 nt, Human
ggcuuagucacuga

SEQ ID NO: 2724990 - RNA, 21 nt, Human
ggcuucacggaagagccuugc

SEQ ID NO: 2724991 - RNA, 17 nt, Human
ggcuuggggaccagagc

SEQ ID NO: 2724992 - RNA, 18 nt, Human
ggcuuggggaccagagcu

SEQ ID NO: 2724993 - RNA, 14 nt, Human
ggcuguuggcuggg

SEQ ID NO: 2724994 - RNA, 15 nt, Human
ggcuguuggcugggg

SEQ ID NO: 2724995 - RNA, 16 nt, Human
ggcuguuggcuggggg

SEQ ID NO: 2724996 - RNA, 20 nt, Human
ggcuguuggcugggggccuc

SEQ ID NO: 2724997 - RNA, 17 nt, Human
ggcaagcaccuccugcc

SEQ ID NO: 2724998 - RNA, 13 nt, Human
ggauucuuaaagu

SEQ ID NO: 2724999 - RNA, 16 nt, Human
ggauucuuccucccuc

SEQ ID NO: 2725000 - RNA, 21 nt, Human
ggauucuuccucccucccucu

SEQ ID NO: 2725001 - RNA, 18 nt, Human
ggcaagcaccuccugccu

SEQ ID NO: 2725002 - RNA, 19 nt, Human
ggcaagcaccuccugccuc

SEQ ID NO: 2725003 - RNA, 17 nt, Human
ggcaccagcagccugga

SEQ ID NO: 2725004 - RNA, 22 nt, Human
ggcagagcagagaccaucccug

SEQ ID NO: 2725005 - RNA, 20 nt, Human
ggcacccaccaucaugucug

SEQ ID NO: 2725006 - RNA, 18 nt, Human
ggcacccggccccugcug

SEQ ID NO: 2725007 - RNA, 19 nt, Human
ggcacccggccccugcugg

SEQ ID NO: 2725008 - RNA, 20 nt, Human
ggcacccggccccugcuggu

SEQ ID NO: 2725009 - RNA, 17 nt, Human
ggcacccggccccugcu

SEQ ID NO: 2725010 - RNA, 18 nt, Human
ggcacucagaagacacug

SEQ ID NO: 2725011 - RNA, 19 nt, Human
ggcacucagaagacacuga

SEQ ID NO: 2725012 - RNA, 17 nt, Human
ggauuagggagagaaga

SEQ ID NO: 2725013 - RNA, 18 nt, Human
ggaugccugguggcagcu

SEQ ID NO: 2725014 - RNA, 19 nt, Human
ggaugccugguggcagcug

SEQ ID NO: 2725015 - RNA, 20 nt, Human
ggaugccugguggcagcugc

SEQ ID NO: 2725016 - RNA, 21 nt, Human
ggaugccugguggcagcugcg

SEQ ID NO: 2725017 - RNA, 18 nt, Human
ggaugcccaaagaugcag

SEQ ID NO: 2725018 - RNA, 19 nt, Human
ggaugcccaaagaugcagc

SEQ ID NO: 2725019 - RNA, 13 nt, Human
ggaugccuggugg

SEQ ID NO: 2725020 - RNA, 17 nt, Human
ggaugccugguggcagc

SEQ ID NO: 2725021 - RNA, 16 nt, Human
ggaugaucuaggaaga

SEQ ID NO: 2725022 - RNA, 18 nt, Human
ggaugaucuaggaagacu

SEQ ID NO: 2725023 - RNA, 22 nt, Human
ggaugaucuaggaagacuuugg

SEQ ID NO: 2725024 - RNA, 23 nt, Human
ggagucccaccuuggcugcaggg

SEQ ID NO: 2725025 - RNA, 11 nt, Human
ggcagcugccu

SEQ ID NO: 2725026 - RNA, 12 nt, Human
ggcagcugccuc

SEQ ID NO: 2725027 - RNA, 13 nt, Human
ggcagcugccucc

SEQ ID NO: 2725028 - RNA, 21 nt, Human
ggcagcugcgguccacccagg

SEQ ID NO: 2725029 - RNA, 17 nt, Human
ggcagaguugaagacag

SEQ ID NO: 2725030 - RNA, 19 nt, Human
ggcagaguugaagacagag

SEQ ID NO: 2725031 - RNA, 21 nt, Human
ggcagaguugaagacagagcu

SEQ ID NO: 2725032 - RNA, 16 nt, Human
ggcagcugccuccccu

SEQ ID NO: 2725033 - RNA, 12 nt, Human
ggcaggguccua

SEQ ID NO: 2725034 - RNA, 23 nt, Human
ggcagcugcgguccacccaggag

SEQ ID NO: 2725035 - RNA, 24 nt, Human
ggcagcugcgguccacccaggagc

SEQ ID NO: 2725036 - RNA, 17 nt, Human
ggcagguuggugggggc

SEQ ID NO: 2725037 - RNA, 17 nt, Human
ggcagggucucacucug

SEQ ID NO: 2725038 - RNA, 18 nt, Human
ggcagggucucacucugu

SEQ ID NO: 2725039 - RNA, 22 nt, Human
ggcaugacacgaauauugcuga

SEQ ID NO: 2725040 - RNA, 18 nt, Human
ggcaugugaugagaggaa

SEQ ID NO: 2725041 - RNA, 23 nt, Human
ggcaugugaugagaggaaaucac

SEQ ID NO: 2725042 - RNA, 11 nt, Human
ggccaggagcc

SEQ ID NO: 2725043 - RNA, 13 nt, Human
ggccaggagccuc

SEQ ID NO: 2725044 - RNA, 14 nt, Human
ggccaggcccucug

SEQ ID NO: 2725045 - RNA, 17 nt, Human
ggccaggcccucugccc

SEQ ID NO: 2725046 - RNA, 15 nt, Human
ggccaggcccucugc

SEQ ID NO: 2725047 - RNA, 16 nt, Human
ggccaggcccucugcc

SEQ ID NO: 2725048 - RNA, 20 nt, Human
ggcauguucucugaggacac

SEQ ID NO: 2725049 - RNA, 22 nt, Human
ggccacagaaaauucuucucca

SEQ ID NO: 2725050 - RNA, 20 nt, Human
ggccacugugaagagaacca

SEQ ID NO: 2725051 - RNA, 16 nt, Human
ggacauuugcucaugg

SEQ ID NO: 2725052 - RNA, 17 nt, Human
ggacauuugcucaugga

SEQ ID NO: 2725053 - RNA, 20 nt, Human
ggacauuugcucauggaauu

SEQ ID NO: 2725054 - RNA, 14 nt, Human
ggaccagagcugcc

SEQ ID NO: 2725055 - RNA, 19 nt, Human
ggaccagagcugccaccug

SEQ ID NO: 2725056 - RNA, 22 nt, Human
ggacagccacggccaggccaga

SEQ ID NO: 2725057 - RNA, 20 nt, Human
ggacagaggggguggccucc

SEQ ID NO: 2725058 - RNA, 11 nt, Human
ggacagcuccu

SEQ ID NO: 2725059 - RNA, 15 nt, Human
ggacagcuccuucug

SEQ ID NO: 2725060 - RNA, 16 nt, Human
ggacagcuccuucugu

SEQ ID NO: 2725061 - RNA, 17 nt, Human
ggacagcuccuucuguc

SEQ ID NO: 2725062 - RNA, 16 nt, Human
ggacagaggggguggc

SEQ ID NO: 2725063 - RNA, 15 nt, Human
ggagaagagcuguuc

SEQ ID NO: 2725064 - RNA, 11 nt, Human
ggagaagaacu

SEQ ID NO: 2725065 - RNA, 14 nt, Human
ggagaagaacugaa

SEQ ID NO: 2725066 - RNA, 23 nt, Human
ggagaagagcuguucacagccag

SEQ ID NO: 2725067 - RNA, 19 nt, Human
ggacugaauuaugaaacuu

SEQ ID NO: 2725068 - RNA, 17 nt, Human
ggacugaauuaugaaac

SEQ ID NO: 2725069 - RNA, 18 nt, Human
ggaccuugaacuggguac

SEQ ID NO: 2725070 - RNA, 22 nt, Human
ggagucccaccuuggcugcagg

SEQ ID NO: 2725071 - RNA, 18 nt, Human
ggaggauguucugggaca

SEQ ID NO: 2725072 - RNA, 21 nt, Human
ggaggauguucugggacacag

SEQ ID NO: 2725073 - RNA, 17 nt, Human
ggagggagggcuccaga

SEQ ID NO: 2725074 - RNA, 13 nt, Human
ggagggagggcuc

SEQ ID NO: 2725075 - RNA, 16 nt, Human
ggagggagggcuccag

SEQ ID NO: 2725076 - RNA, 14 nt, Human
ggagccuccugccc

SEQ ID NO: 2725077 - RNA, 15 nt, Human
ggagccuccugcccu

SEQ ID NO: 2725078 - RNA, 14 nt, Human
ggagcuagaauuug

SEQ ID NO: 2725079 - RNA, 18 nt, Human
ucagagcugcccucuccu

SEQ ID NO: 2725080 - RNA, 19 nt, Human
ucagagcugcccucuccug

SEQ ID NO: 2725081 - RNA, 20 nt, Human
ucagagcugcccucuccugg

SEQ ID NO: 2725082 - RNA, 21 nt, Human
ucagagcugcccucuccuggg

SEQ ID NO: 2725083 - RNA, 22 nt, Human
ucagagcugcccucuccugggc

SEQ ID NO: 2725084 - RNA, 23 nt, Human
ucagagcugcccucuccugggca

SEQ ID NO: 2725085 - RNA, 13 nt, Human
ucagacagcugcc

SEQ ID NO: 2725086 - RNA, 14 nt, Human
ucagacagcugccu

SEQ ID NO: 2725087 - RNA, 16 nt, Human
ucagaauucucuaguu

SEQ ID NO: 2725088 - RNA, 15 nt, Human
ucagaaauguguuau

SEQ ID NO: 2725089 - RNA, 23 nt, Human
ucagaauucucuaguuugauuaa

SEQ ID NO: 2725090 - RNA, 10 nt, Human
ucagaaaugu

SEQ ID NO: 2725091 - RNA, 20 nt, Human
ucacuuguuuuauuuaaccu

SEQ ID NO: 2725092 - RNA, 14 nt, Human
ucacugcuuaacuu

SEQ ID NO: 2725093 - RNA, 13 nt, Human
ucaccagccccag

SEQ ID NO: 2725094 - RNA, 22 nt, Human
ucaccccggccaccugcggugc

SEQ ID NO: 2725095 - RNA, 17 nt, Human
ucacucuuauugcccac

SEQ ID NO: 2725096 - RNA, 22 nt, Human
ucacucugucgcccagucugga

SEQ ID NO: 2725097 - RNA, 18 nt, Human
ucacugccaugccagcuu

SEQ ID NO: 2725098 - RNA, 20 nt, Human
ucacucuuauugcccacgcu

SEQ ID NO: 2725099 - RNA, 17 nt, Human
ucagcuccccucggaga

SEQ ID NO: 2725100 - RNA, 18 nt, Human
ucagcuccccucggagaa

SEQ ID NO: 2725101 - RNA, 15 nt, Human
ucagcugaaccuggg

SEQ ID NO: 2725102 - RNA, 16 nt, Human
ucagcugaaccugggu

SEQ ID NO: 2725103 - RNA, 18 nt, Human
ucagccugcuccagcugu

SEQ ID NO: 2725104 - RNA, 19 nt, Human
ucagccugcuccagcuguu

SEQ ID NO: 2725105 - RNA, 21 nt, Human
ucagccucccgaguagcuggg

SEQ ID NO: 2725106 - RNA, 22 nt, Human
ucagccucccgaguagcuggga

SEQ ID NO: 2725107 - RNA, 15 nt, Human
ucagauaugauucaa

SEQ ID NO: 2725108 - RNA, 20 nt, Human
ucagccucccgaguagcugg

SEQ ID NO: 2725109 - RNA, 18 nt, Human
ucagccucccgaguagcu

SEQ ID NO: 2725110 - RNA, 21 nt, Human
ucagccucccgaauagcuggg

SEQ ID NO: 2725111 - RNA, 22 nt, Human
ucagccucccgaauagcuggga

SEQ ID NO: 2725112 - RNA, 14 nt, Human
ucagccucccaaag

SEQ ID NO: 2725113 - RNA, 19 nt, Human
ucagccucccaaagugcug

SEQ ID NO: 2725114 - RNA, 21 nt, Human
ucagccucccaaagugcuggg

SEQ ID NO: 2725115 - RNA, 13 nt, Human
ucaggcuagaugu

SEQ ID NO: 2725116 - RNA, 17 nt, Human
ucaggcuagauguaugu

SEQ ID NO: 2725117 - RNA, 14 nt, Human
ucagggccuggcuc

SEQ ID NO: 2725118 - RNA, 16 nt, Human
ucagggccuggcucag

SEQ ID NO: 2725119 - RNA, 15 nt, Human
ucaggugagaagcag

SEQ ID NO: 2725120 - RNA, 16 nt, Human
ucaggugagaagcaga

SEQ ID NO: 2725121 - RNA, 19 nt, Human
uccacagaagcuccaggua

SEQ ID NO: 2725122 - RNA, 13 nt, Human
uccaccucccugc

SEQ ID NO: 2725123 - RNA, 14 nt, Human
uccaccucccugca

SEQ ID NO: 2725124 - RNA, 12 nt, Human
uccacccugcuc

SEQ ID NO: 2725125 - RNA, 15 nt, Human
uccaccucccugcaa

SEQ ID NO: 2725126 - RNA, 16 nt, Human
uccaccucccugcaau

SEQ ID NO: 2725127 - RNA, 17 nt, Human
uccaccucccugcaaua

SEQ ID NO: 2725128 - RNA, 17 nt, Human
uccaccugccagggaca

SEQ ID NO: 2725129 - RNA, 15 nt, Human
uccaccugccaggga

SEQ ID NO: 2725130 - RNA, 18 nt, Human
uccaccugccagggacag

SEQ ID NO: 2725131 - RNA, 21 nt, Human
uccaccugccagggacagagg

SEQ ID NO: 2725132 - RNA, 18 nt, Human
uccacaaguuaaauaaau

SEQ ID NO: 2725133 - RNA, 17 nt, Human
uccacaaguuaaauaaa

SEQ ID NO: 2725134 - RNA, 16 nt, Human
uccacaagagcccagg

SEQ ID NO: 2725135 - RNA, 17 nt, Human
uccacaagagcccaggc

SEQ ID NO: 2725136 - RNA, 15 nt, Human
uccacaagagcccag

SEQ ID NO: 2725137 - RNA, 18 nt, Human
uccacaagagcccaggcc

SEQ ID NO: 2725138 - RNA, 18 nt, Human
uccaauuuacauacucug

SEQ ID NO: 2725139 - RNA, 17 nt, Human
uccaauuuacauacucu

SEQ ID NO: 2725140 - RNA, 18 nt, Human
uccaaaauaaaacuuuuu

SEQ ID NO: 2725141 - RNA, 20 nt, Human
uccaaaauaaaacuuuuuaa

SEQ ID NO: 2725142 - RNA, 15 nt, Human
uccaaaauaauuuua

SEQ ID NO: 2725143 - RNA, 19 nt, Human
uccaaaauaauuuuaagaa

SEQ ID NO: 2725144 - RNA, 23 nt, Human
uccagccaaagccuccuccagcc

SEQ ID NO: 2725145 - RNA, 17 nt, Human
uccagcuguucagcugg

SEQ ID NO: 2725146 - RNA, 16 nt, Human
uccaggagcagccaca

SEQ ID NO: 2725147 - RNA, 15 nt, Human
uccagcucaccagcc

SEQ ID NO: 2725148 - RNA, 18 nt, Human
uccagcucaccagcccca

SEQ ID NO: 2725149 - RNA, 16 nt, Human
uccagcucaccagccc

SEQ ID NO: 2725150 - RNA, 17 nt, Human
uccagcucaccagcccc

SEQ ID NO: 2725151 - RNA, 23 nt, Human
uccaggggugggacacccuguga

SEQ ID NO: 2725152 - RNA, 15 nt, Human
uccaggugcacaagc

SEQ ID NO: 2725153 - RNA, 22 nt, Human
uccaggagcagccacauuccug

SEQ ID NO: 2725154 - RNA, 22 nt, Human
uccaggggugggacacccugug

SEQ ID NO: 2725155 - RNA, 17 nt, Human
uccaggagcagccacau

SEQ ID NO: 2725156 - RNA, 18 nt, Human
uccaggagcagccacauu

SEQ ID NO: 2725157 - RNA, 15 nt, Human
uccagguucagcuug

SEQ ID NO: 2725158 - RNA, 16 nt, Human
uccagguucagcuugu

SEQ ID NO: 2725159 - RNA, 18 nt, Human
uccaggugcacaagcucc

SEQ ID NO: 2725160 - RNA, 20 nt, Human
uccaggugcacaagcuccaa

SEQ ID NO: 2725161 - RNA, 21 nt, Human
uccaggugcacaagcuccaag

SEQ ID NO: 2725162 - RNA, 22 nt, Human
uccaggugcacaagcuccaagc

SEQ ID NO: 2725163 - RNA, 18 nt, Human
ucauaccuaucaucuuaa

SEQ ID NO: 2725164 - RNA, 15 nt, Human
ucaggugcugccauc

SEQ ID NO: 2725165 - RNA, 21 nt, Human
ucauacccacccccacccaag

SEQ ID NO: 2725166 - RNA, 21 nt, Human
ucaggugagaagcagaggaag

SEQ ID NO: 2725167 - RNA, 23 nt, Human
ucaggugccucaagagaaggcaa

SEQ ID NO: 2725168 - RNA, 13 nt, Human
ucaggugcugcca

SEQ ID NO: 2725169 - RNA, 14 nt, Human
ucaggugcugccau

SEQ ID NO: 2725170 - RNA, 19 nt, Human
ucaucaccaacgucugugc

SEQ ID NO: 2725171 - RNA, 20 nt, Human
ucaucaccaacgucugugcc

SEQ ID NO: 2725172 - RNA, 21 nt, Human
ucaucaccaacgucugugcca

SEQ ID NO: 2725173 - RNA, 23 nt, Human
ucaucuuagguuggcaaaaaggc

SEQ ID NO: 2725174 - RNA, 17 nt, Human
ucaucugacuaugacau

SEQ ID NO: 2725175 - RNA, 18 nt, Human
ucaucugacuaugacaua

SEQ ID NO: 2725176 - RNA, 13 nt, Human
ucauuaucucaaa

SEQ ID NO: 2725177 - RNA, 20 nt, Human
ucauuaucucaaaacugcac

SEQ ID NO: 2725178 - RNA, 19 nt, Human
ucauuaucucaaaacugca

SEQ ID NO: 2725179 - RNA, 21 nt, Human
ucauucaacccaccugcgucu

SEQ ID NO: 2725180 - RNA, 22 nt, Human
ucauuauuuuauuaugaaacuu

SEQ ID NO: 2725181 - RNA, 23 nt, Human
ucauuauuuuauuaugaaacuug

SEQ ID NO: 2725182 - RNA, 13 nt, Human
ucauuuccaagca

SEQ ID NO: 2725183 - RNA, 16 nt, Human
ucauuuccaagcaagu

SEQ ID NO: 2725184 - RNA, 13 nt, Human
ucauuuccugugu

SEQ ID NO: 2725185 - RNA, 16 nt, Human
ucauuuccugugucuu

SEQ ID NO: 2725186 - RNA, 13 nt, Human
uauguacuucaug

SEQ ID NO: 2725187 - RNA, 17 nt, Human
uauguacuucaugcugu

SEQ ID NO: 2725188 - RNA, 12 nt, Human
uauguaaauccc

SEQ ID NO: 2725189 - RNA, 23 nt, Human
uauguaaaucccauuauucaaag

SEQ ID NO: 2725190 - RNA, 21 nt, Human
uauguaaaucccauuauucaa

SEQ ID NO: 2725191 - RNA, 20 nt, Human
uauguaaaucccauuauuca

SEQ ID NO: 2725192 - RNA, 19 nt, Human
uauguaaaucccauuauuc

SEQ ID NO: 2725193 - RNA, 15 nt, Human
uauguaaaucccauu

SEQ ID NO: 2725194 - RNA, 13 nt, Human
gggaguggccaca

SEQ ID NO: 2725195 - RNA, 15 nt, Human
gggaguggccacaga

SEQ ID NO: 2725196 - RNA, 20 nt, Human
uauguugcccaggcaggucu

SEQ ID NO: 2725197 - RNA, 16 nt, Human
uauguuucaaacuuug

SEQ ID NO: 2725198 - RNA, 13 nt, Human
uauguuucaaacu

SEQ ID NO: 2725199 - RNA, 15 nt, Human
uauguuucaaacuuu

SEQ ID NO: 2725200 - RNA, 13 nt, Human
uauguugcccagg

SEQ ID NO: 2725201 - RNA, 16 nt, Human
uauguugcccaggcag

SEQ ID NO: 2725202 - RNA, 19 nt, Human
uauguugcccaggcagguc

SEQ ID NO: 2725203 - RNA, 24 nt, Human
uauuaagaaagacuaucuaaaugu

SEQ ID NO: 2725204 - RNA, 12 nt, Human
uauuaaauuaug

SEQ ID NO: 2725205 - RNA, 12 nt, Human
uauuaauauauu

SEQ ID NO: 2725206 - RNA, 16 nt, Human
uauuauucccauucua

SEQ ID NO: 2725207 - RNA, 13 nt, Human
uauuacaguauaa

SEQ ID NO: 2725208 - RNA, 12 nt, Human
uauuacaguaua

SEQ ID NO: 2725209 - RNA, 19 nt, Human
uauucuagcuaauguaaua

SEQ ID NO: 2725210 - RNA, 20 nt, Human
uauucuaaauuuuauaucuu

SEQ ID NO: 2725211 - RNA, 15 nt, Human
uauucuaaauuuuau

SEQ ID NO: 2725212 - RNA, 19 nt, Human
uauucuaaauuuuauaucu

SEQ ID NO: 2725213 - RNA, 14 nt, Human
uauucuaaauuuua

SEQ ID NO: 2725214 - RNA, 21 nt, Human
uauugauaugcuuauacacuu

SEQ ID NO: 2725215 - RNA, 17 nt, Human
uauucucuccuguaccu

SEQ ID NO: 2725216 - RNA, 22 nt, Human
uauuggaaauuuguuauaauga

SEQ ID NO: 2725217 - RNA, 17 nt, Human
uauugcugauggugcaa

SEQ ID NO: 2725218 - RNA, 14 nt, Human
uauuguguugugaa

SEQ ID NO: 2725219 - RNA, 22 nt, Human
uauuguuuucaguguacaugga

SEQ ID NO: 2725220 - RNA, 20 nt, Human
uauuguuuucaguguacaug

SEQ ID NO: 2725221 - RNA, 18 nt, Human
uauuguuuucaguguaca

SEQ ID NO: 2725222 - RNA, 12 nt, Human
uauuguuuucag

SEQ ID NO: 2725223 - RNA, 14 nt, Human
ucaaauugugugaa

SEQ ID NO: 2725224 - RNA, 23 nt, Human
ucaaccccuucgcuccugugucu

SEQ ID NO: 2725225 - RNA, 20 nt, Human
ucaaaucaagaaacuuaagg

SEQ ID NO: 2725226 - RNA, 14 nt, Human
ucaaauaugcaaag

SEQ ID NO: 2725227 - RNA, 17 nt, Human
uauuuuuuucuuuucuu

SEQ ID NO: 2725228 - RNA, 14 nt, Human
uauuuuuuuacuaa

SEQ ID NO: 2725229 - RNA, 14 nt, Human
ucaaaaaaagaaaa

SEQ ID NO: 2725230 - RNA, 15 nt, Human
ucaaaaaaagaaaaa

SEQ ID NO: 2725231 - RNA, 22 nt, Human
uauuuucccuauuagagaagag

SEQ ID NO: 2725232 - RNA, 17 nt, Human
uauuuuauuaugcauga

SEQ ID NO: 2725233 - RNA, 14 nt, Human
uauuuuauuaugca

SEQ ID NO: 2725234 - RNA, 15 nt, Human
uauuuucauucuccu

SEQ ID NO: 2725235 - RNA, 13 nt, Human
uauuuuauuauga

SEQ ID NO: 2725236 - RNA, 23 nt, Human
uauuuuauuaugaaacuugugua

SEQ ID NO: 2725237 - RNA, 18 nt, Human
uauuuuauuaugaaacuu

SEQ ID NO: 2725238 - RNA, 21 nt, Human
ucaauaaaauccauacauuug

SEQ ID NO: 2725239 - RNA, 21 nt, Human
ucaagugauucuccugccuca

SEQ ID NO: 2725240 - RNA, 18 nt, Human
ucaagugauucuccugcc

SEQ ID NO: 2725241 - RNA, 20 nt, Human
ucaagugauucuccugccuc

SEQ ID NO: 2725242 - RNA, 21 nt, Human
ucaauuacaggaaguacugga

SEQ ID NO: 2725243 - RNA, 23 nt, Human
ucaauuacaggaaguacuggaga

SEQ ID NO: 2725244 - RNA, 20 nt, Human
ucaaugccccugaauuuaaa

SEQ ID NO: 2725245 - RNA, 18 nt, Human
ucaaugccccugaauuua

SEQ ID NO: 2725246 - RNA, 17 nt, Human
ucaaugccccugaauuu

SEQ ID NO: 2725247 - RNA, 20 nt, Human
ucaauuacaggaaguacugg

SEQ ID NO: 2725248 - RNA, 19 nt, Human
ucacaguccuuaccagcag

SEQ ID NO: 2725249 - RNA, 22 nt, Human
ucacaguccuuaccagcagagc

SEQ ID NO: 2725250 - RNA, 23 nt, Human
ucacaguccuuaccagcagagca

SEQ ID NO: 2725251 - RNA, 16 nt, Human
ucacaggcagguccag

SEQ ID NO: 2725252 - RNA, 17 nt, Human
ucacaggcagguccagg

SEQ ID NO: 2725253 - RNA, 18 nt, Human
ucacaggcagguccaggg

SEQ ID NO: 2725254 - RNA, 20 nt, Human
ucaccaaaucagcugcuacu

SEQ ID NO: 2725255 - RNA, 19 nt, Human
ucaccaaaucagcugcuac

SEQ ID NO: 2725256 - RNA, 17 nt, Human
ucacauuuauucugcuc

SEQ ID NO: 2725257 - RNA, 18 nt, Human
ucacauuuauucugcuca

SEQ ID NO: 2725258 - RNA, 19 nt, Human
ucacauuuauucugcucac

SEQ ID NO: 2725259 - RNA, 16 nt, Human
uccuuggacucauuuu

SEQ ID NO: 2725260 - RNA, 23 nt, Human
uccuuuucacaguucucuccuuc

SEQ ID NO: 2725261 - RNA, 21 nt, Human
uccuucaccuuuguccccacc

SEQ ID NO: 2725262 - RNA, 22 nt, Human
uccuucaccuuuguccccaccg

SEQ ID NO: 2725263 - RNA, 19 nt, Human
uccuucacagaugggugcu

SEQ ID NO: 2725264 - RNA, 18 nt, Human
uccuucaccuuugucccc

SEQ ID NO: 2725265 - RNA, 20 nt, Human
uccuucaccuuuguccccac

SEQ ID NO: 2725266 - RNA, 16 nt, Human
uccuuaccagcagagc

SEQ ID NO: 2725267 - RNA, 17 nt, Human
uccuuaccagcagagca

SEQ ID NO: 2725268 - RNA, 18 nt, Human
uccuuaccagcagagcac

SEQ ID NO: 2725269 - RNA, 18 nt, Human
uccuucacagaugggugc

SEQ ID NO: 2725270 - RNA, 14 nt, Human
uccuuaccagcaga

SEQ ID NO: 2725271 - RNA, 20 nt, Human
uccuguaccucuugagccuu

SEQ ID NO: 2725272 - RNA, 18 nt, Human
uccuggcacugcuuccag

SEQ ID NO: 2725273 - RNA, 22 nt, Human
uccuggcacugcuuccagugag

SEQ ID NO: 2725274 - RNA, 20 nt, Human
uccuggcacccggccccugc

SEQ ID NO: 2725275 - RNA, 21 nt, Human
uccuggcacccggccccugcu

SEQ ID NO: 2725276 - RNA, 22 nt, Human
uccuggcacccggccccugcug

SEQ ID NO: 2725277 - RNA, 17 nt, Human
uccuggcacugcuucca

SEQ ID NO: 2725278 - RNA, 14 nt, Human
uccugagccagauu

SEQ ID NO: 2725279 - RNA, 14 nt, Human
uccugccucagccu

SEQ ID NO: 2725280 - RNA, 13 nt, Human
uccugagccagau

SEQ ID NO: 2725281 - RNA, 17 nt, Human
uccuggcaauagucaaa

SEQ ID NO: 2725282 - RNA, 14 nt, Human
uccuggcacccggc

SEQ ID NO: 2725283 - RNA, 16 nt, Human
uccuggcacccggccc

SEQ ID NO: 2725284 - RNA, 19 nt, Human
uccuggcacccggccccug

SEQ ID NO: 2725285 - RNA, 17 nt, Human
uccugccucagccuccc

SEQ ID NO: 2725286 - RNA, 16 nt, Human
uccugccucagccucc

SEQ ID NO: 2725287 - RNA, 13 nt, Human
uccugccucagcc

SEQ ID NO: 2725288 - RNA, 15 nt, Human
uccugccucagccuc

SEQ ID NO: 2725289 - RNA, 13 nt, Human
ucguuaauuugua

SEQ ID NO: 2725290 - RNA, 21 nt, Human
ucuaaaucuccaaaauaaaac

SEQ ID NO: 2725291 - RNA, 16 nt, Human
ucgugauugauaagaa

SEQ ID NO: 2725292 - RNA, 21 nt, Human
ucguggaacaguuaccucugc

SEQ ID NO: 2725293 - RNA, 22 nt, Human
ucgugggacagucaccucaugg

SEQ ID NO: 2725294 - RNA, 13 nt, Human
ucuaugaaauauu

SEQ ID NO: 2725295 - RNA, 14 nt, Human
ucuaugaaauauua

SEQ ID NO: 2725296 - RNA, 17 nt, Human
ucuaugaaauauuaugu

SEQ ID NO: 2725297 - RNA, 15 nt, Human
ucuaucaaguauuau

SEQ ID NO: 2725298 - RNA, 22 nt, Human
ucuaucaaguauuauaccuuuu

SEQ ID NO: 2725299 - RNA, 21 nt, Human
ucuaucaaguauuauaccuuu

SEQ ID NO: 2725300 - RNA, 15 nt, Human
ucucaacuccaaacu

SEQ ID NO: 2725301 - RNA, 17 nt, Human
ucucaaauaacuaaaag

SEQ ID NO: 2725302 - RNA, 20 nt, Human
ucuaugcugaguuugugcug

SEQ ID NO: 2725303 - RNA, 16 nt, Human
ucuaugcugaguuugu

SEQ ID NO: 2725304 - RNA, 19 nt, Human
ucuagugagcagucaggaa

SEQ ID NO: 2725305 - RNA, 22 nt, Human
ucuagugagcagucaggaaaga

SEQ ID NO: 2725306 - RNA, 16 nt, Human
ucuaggacugaauuau

SEQ ID NO: 2725307 - RNA, 23 nt, Human
ucuaggacugaauuaugaaacuu

SEQ ID NO: 2725308 - RNA, 14 nt, Human
ucuaauauguaaca

SEQ ID NO: 2725309 - RNA, 20 nt, Human
uccucugcuugccaucccuc

SEQ ID NO: 2725310 - RNA, 19 nt, Human
uccucugcuugccaucccu

SEQ ID NO: 2725311 - RNA, 21 nt, Human
uccucugcuugccaucccucc

SEQ ID NO: 2725312 - RNA, 22 nt, Human
uccucugcuugccaucccuccc

SEQ ID NO: 2725313 - RNA, 12 nt, Human
uccucugcugcu

SEQ ID NO: 2725314 - RNA, 14 nt, Human
uccucugcugcugg

SEQ ID NO: 2725315 - RNA, 15 nt, Human
uccucugcugcuggc

SEQ ID NO: 2725316 - RNA, 16 nt, Human
uccucugcugcuggcu

SEQ ID NO: 2725317 - RNA, 16 nt, Human
uccucuguacagagcc

SEQ ID NO: 2725318 - RNA, 17 nt, Human
uccucuguacagagccc

SEQ ID NO: 2725319 - RNA, 18 nt, Human
uccucuguacagagccca

SEQ ID NO: 2725320 - RNA, 15 nt, Human
uccucuguacagagc

SEQ ID NO: 2725321 - RNA, 19 nt, Human
uccuccuuuucacaguucu

SEQ ID NO: 2725322 - RNA, 14 nt, Human
uccucuaggagguc

SEQ ID NO: 2725323 - RNA, 18 nt, Human
uccuacccacccuccuuu

SEQ ID NO: 2725324 - RNA, 13 nt, Human
uccgaccagacac

SEQ ID NO: 2725325 - RNA, 17 nt, Human
uccgaccagacaccuug

SEQ ID NO: 2725326 - RNA, 16 nt, Human
uccuaaucuucugaac

SEQ ID NO: 2725327 - RNA, 17 nt, Human
uccucauuagcauuuug

SEQ ID NO: 2725328 - RNA, 22 nt, Human
uccuaguuccaccaucaagcca

SEQ ID NO: 2725329 - RNA, 18 nt, Human
uccuauauuguuuucagu

SEQ ID NO: 2725330 - RNA, 15 nt, Human
ucccuugaugaagaa

SEQ ID NO: 2725331 - RNA, 16 nt, Human
ucccuugaugaagaag

SEQ ID NO: 2725332 - RNA, 13 nt, Human
ucccuucccaccu

SEQ ID NO: 2725333 - RNA, 16 nt, Human
ucccugcaauaaaaug

SEQ ID NO: 2725334 - RNA, 13 nt, Human
ucccugcacuugc

SEQ ID NO: 2725335 - RNA, 14 nt, Human
ucccugcacuugca

SEQ ID NO: 2725336 - RNA, 16 nt, Human
ucccuauuagagaaga

SEQ ID NO: 2725337 - RNA, 21 nt, Human
uccccuguuuguuucugaaag

SEQ ID NO: 2725338 - RNA, 17 nt, Human
uccagguuuaagcuguu

SEQ ID NO: 2725339 - RNA, 18 nt, Human
uccagguuuaagcuguua

SEQ ID NO: 2725340 - RNA, 18 nt, Human
uccccuguuuguuucuga

SEQ ID NO: 2725341 - RNA, 20 nt, Human
uccccuguuuguuucugaaa

SEQ ID NO: 2725342 - RNA, 14 nt, Human
ucucugaggacacu

SEQ ID NO: 2725343 - RNA, 17 nt, Human
ucucugaggacacuaac

SEQ ID NO: 2725344 - RNA, 15 nt, Human
ucucugauacagaaa

SEQ ID NO: 2725345 - RNA, 16 nt, Human
ucucuaguuugauuaa

SEQ ID NO: 2725346 - RNA, 15 nt, Human
ucucuaguuugauua

SEQ ID NO: 2725347 - RNA, 17 nt, Human
ucuccugccucagccuc

SEQ ID NO: 2725348 - RNA, 15 nt, Human
ucuccugccucagcc

SEQ ID NO: 2725349 - RNA, 15 nt, Human
ucuccuguaccucuu

SEQ ID NO: 2725350 - RNA, 21 nt, Human
ucuccuggaaauauuaagaaa

SEQ ID NO: 2725351 - RNA, 19 nt, Human
ucucuaacuucaccauauu

SEQ ID NO: 2725352 - RNA, 12 nt, Human
ucucuaacuuca

SEQ ID NO: 2725353 - RNA, 14 nt, Human
ucucgugauugaua

SEQ ID NO: 2725354 - RNA, 22 nt, Human
ucucgugauugauaagaaccuu

SEQ ID NO: 2725355 - RNA, 17 nt, Human
ucuccuguaccucuuga

SEQ ID NO: 2725356 - RNA, 16 nt, Human
ucuccuguaccucuug

SEQ ID NO: 2725357 - RNA, 14 nt, Human
ucugcaucagcugc

SEQ ID NO: 2725358 - RNA, 21 nt, Human
ucugcaucagcugcugaaaca

SEQ ID NO: 2725359 - RNA, 19 nt, Human
ucugcaucagcugcugaaa

SEQ ID NO: 2725360 - RNA, 20 nt, Human
ucugcaagaauugaagcagg

SEQ ID NO: 2725361 - RNA, 21 nt, Human
ucugcaagaauugaagcagga

SEQ ID NO: 2725362 - RNA, 15 nt, Human
ucugcaacucugaag

SEQ ID NO: 2725363 - RNA, 14 nt, Human
ucugcaacucugaa

SEQ ID NO: 2725364 - RNA, 14 nt, Human
ucugacccacugcu

SEQ ID NO: 2725365 - RNA, 15 nt, Human
ucugacccacugcuu

SEQ ID NO: 2725366 - RNA, 23 nt, Human
ucugaggaauccagacccggcug

SEQ ID NO: 2725367 - RNA, 14 nt, Human
ucugaggaauucug

SEQ ID NO: 2725368 - RNA, 18 nt, Human
ucugaggaauucuguaua

SEQ ID NO: 2725369 - RNA, 17 nt, Human
ucugaggaauucuguau

SEQ ID NO: 2725370 - RNA, 16 nt, Human
ucugaggaauucugua

SEQ ID NO: 2725371 - RNA, 15 nt, Human
ucugaggaauucugu

SEQ ID NO: 2725372 - RNA, 13 nt, Human
ucugaaaauguau

SEQ ID NO: 2725373 - RNA, 20 nt, Human
ucugaaauuuccugggagcu

SEQ ID NO: 2725374 - RNA, 18 nt, Human
ucugaaauuuccugggag

SEQ ID NO: 2725375 - RNA, 17 nt, Human
ucugaaauuuccuggga

SEQ ID NO: 2725376 - RNA, 16 nt, Human
ucugacacacagcucu

SEQ ID NO: 2725377 - RNA, 17 nt, Human
ucugacacacagcucug

SEQ ID NO: 2725378 - RNA, 18 nt, Human
ucugacacacagcucugu

SEQ ID NO: 2725379 - RNA, 19 nt, Human
ucugacacacagcucuguc

SEQ ID NO: 2725380 - RNA, 12 nt, Human
ucugacaggcaa

SEQ ID NO: 2725381 - RNA, 21 nt, Human
ucugacaggcaaugcuggcug

SEQ ID NO: 2725382 - RNA, 22 nt, Human
ucugacaggcaaugcuggcugu

SEQ ID NO: 2725383 - RNA, 13 nt, Human
ucugacccacugc

SEQ ID NO: 2725384 - RNA, 15 nt, Human
ucugucuucacaaca

SEQ ID NO: 2725385 - RNA, 12 nt, Human
ucuuaaaguuga

SEQ ID NO: 2725386 - RNA, 14 nt, Human
ucuuaaaguugaau

SEQ ID NO: 2725387 - RNA, 13 nt, Human
ucuuaaaguugaa

SEQ ID NO: 2725388 - RNA, 18 nt, Human
ucuuaagaagacugcauu

SEQ ID NO: 2725389 - RNA, 12 nt, Human
ucuuaagaagac

SEQ ID NO: 2725390 - RNA, 22 nt, Human
ucuuaaaguugaauuuauuggc

SEQ ID NO: 2725391 - RNA, 21 nt, Human
ucuuaaaguugaauuuauugg

SEQ ID NO: 2725392 - RNA, 20 nt, Human
ucuuaaaguugaauuuauug

SEQ ID NO: 2725393 - RNA, 19 nt, Human
ucuuaaaguugaauuuauu

SEQ ID NO: 2725394 - RNA, 16 nt, Human
ucuuaaaguugaauuu

SEQ ID NO: 2725395 - RNA, 22 nt, Human
ucuuaaauauguggaguucauc

SEQ ID NO: 2725396 - RNA, 19 nt, Human
ucuucaucugacuaugaca

SEQ ID NO: 2725397 - RNA, 22 nt, Human
ucuucagcaaaaauauuuuaug

SEQ ID NO: 2725398 - RNA, 21 nt, Human
ucuucagcaaaaauauuuuau

SEQ ID NO: 2725399 - RNA, 23 nt, Human
ucuucagcaaaaauauuuuauga

SEQ ID NO: 2725400 - RNA, 15 nt, Human
ucuucagaucucuaa

SEQ ID NO: 2725401 - RNA, 23 nt, Human
ucuucagaucucuaacuucacca

SEQ ID NO: 2725402 - RNA, 18 nt, Human
ucuucagaucucuaacuu

SEQ ID NO: 2725403 - RNA, 12 nt, Human
ucuugaacuccu

SEQ ID NO: 2725404 - RNA, 17 nt, Human
ucuggcuaugcauuuga

SEQ ID NO: 2725405 - RNA, 22 nt, Human
ucuggcuaugcauuugaaaauu

SEQ ID NO: 2725406 - RNA, 19 nt, Human
ucuggcuaugcauuugaaa

SEQ ID NO: 2725407 - RNA, 23 nt, Human
ucuggugacuuuccucuuugguc

SEQ ID NO: 2725408 - RNA, 14 nt, Human
ucugggacacaguu

SEQ ID NO: 2725409 - RNA, 18 nt, Human
ucuggcucuuccaggcug

SEQ ID NO: 2725410 - RNA, 23 nt, Human
ucuggcucuuccaggcugggaga

SEQ ID NO: 2725411 - RNA, 14 nt, Human
ucuguccuacucug

SEQ ID NO: 2725412 - RNA, 16 nt, Human
ucugucgcccagucug

SEQ ID NO: 2725413 - RNA, 14 nt, Human
ucugucgcccaguc

SEQ ID NO: 2725414 - RNA, 21 nt, Human
ucuguccugggagugagcugg

SEQ ID NO: 2725415 - RNA, 15 nt, Human
ucuguccuacucugu

SEQ ID NO: 2725416 - RNA, 19 nt, Human
ucuguccuacucuguguca

SEQ ID NO: 2725417 - RNA, 15 nt, Human
ucugccugcccaggc

SEQ ID NO: 2725418 - RNA, 16 nt, Human
ucugccugcccaggcc

SEQ ID NO: 2725419 - RNA, 18 nt, Human
ucugcuccucuccccagc

SEQ ID NO: 2725420 - RNA, 21 nt, Human
ucugcuccucuccccagcaag

SEQ ID NO: 2725421 - RNA, 18 nt, Human
ucugcugacagacacagg

SEQ ID NO: 2725422 - RNA, 17 nt, Human
ucugcugacagacacag

SEQ ID NO: 2725423 - RNA, 14 nt, Human
ucugccugcccagg

SEQ ID NO: 2725424 - RNA, 13 nt, Human
ucugccugcccag

SEQ ID NO: 2725425 - RNA, 21 nt, Human
ucuggacaggcauguucucug

SEQ ID NO: 2725426 - RNA, 16 nt, Human
ucuggaaugcaguggu

SEQ ID NO: 2725427 - RNA, 14 nt, Human
ucuggacaggcaug

SEQ ID NO: 2725428 - RNA, 15 nt, Human
ucuggaaugcagugg

SEQ ID NO: 2725429 - RNA, 19 nt, Human
ucuggaauaaggagaauga

SEQ ID NO: 2725430 - RNA, 19 nt, Human
ucugcugacagacacaggc

SEQ ID NO: 2725431 - RNA, 20 nt, Human
ucugcugacagacacaggcc

SEQ ID NO: 2725432 - RNA, 21 nt, Human
ucugcugacagacacaggccc

SEQ ID NO: 2725433 - RNA, 22 nt, Human
ucugcugacagacacaggcccg

SEQ ID NO: 2725434 - RNA, 16 nt, Human
ugguuuucuguucuuu

SEQ ID NO: 2725435 - RNA, 19 nt, Human
ugguuuucuuguguguuua

SEQ ID NO: 2725436 - RNA, 21 nt, Human
ugguuuuuaaaaaacugcuga

SEQ ID NO: 2725437 - RNA, 23 nt, Human
ugguuuuuaaaaaacugcugacu

SEQ ID NO: 2725438 - RNA, 17 nt, Human
uguaacaagccacccca

SEQ ID NO: 2725439 - RNA, 14 nt, Human
uguaacaagccacc

SEQ ID NO: 2725440 - RNA, 14 nt, Human
uguaauaacuguga

SEQ ID NO: 2725441 - RNA, 22 nt, Human
uguaauaacugugaaguuuaca

SEQ ID NO: 2725442 - RNA, 15 nt, Human
uguacaaaguauuaa

SEQ ID NO: 2725443 - RNA, 20 nt, Human
uguacaaaguauuaagcaua

SEQ ID NO: 2725444 - RNA, 19 nt, Human
uguacaaaguauuaagcau

SEQ ID NO: 2725445 - RNA, 18 nt, Human
uguacaaaguauuaagca

SEQ ID NO: 2725446 - RNA, 17 nt, Human
uguacaaaguauuaagc

SEQ ID NO: 2725447 - RNA, 14 nt, Human
uguacagacaacaa

SEQ ID NO: 2725448 - RNA, 11 nt, Human
uguacagagcc

SEQ ID NO: 2725449 - RNA, 21 nt, Human
uguacaaaguauuaagcauau

SEQ ID NO: 2725450 - RNA, 16 nt, Human
ugguucccuugaugaa

SEQ ID NO: 2725451 - RNA, 17 nt, Human
ugguucccuugaugaag

SEQ ID NO: 2725452 - RNA, 20 nt, Human
ugguucccuugaugaagaag

SEQ ID NO: 2725453 - RNA, 18 nt, Human
ugguugaugaucuuugca

SEQ ID NO: 2725454 - RNA, 16 nt, Human
uggugucaccugaaga

SEQ ID NO: 2725455 - RNA, 15 nt, Human
uggugucgggcauga

SEQ ID NO: 2725456 - RNA, 18 nt, Human
uggugucgggcaugacac

SEQ ID NO: 2725457 - RNA, 19 nt, Human
uggugucgggcaugacacg

SEQ ID NO: 2725458 - RNA, 14 nt, Human
uggguagacacaca

SEQ ID NO: 2725459 - RNA, 15 nt, Human
uggugacuuuggaua

SEQ ID NO: 2725460 - RNA, 20 nt, Human
uggguacuuguggacacagc

SEQ ID NO: 2725461 - RNA, 23 nt, Human
uggguacuuguggacacagcucu

SEQ ID NO: 2725462 - RNA, 14 nt, Human
uggugagaggcauc

SEQ ID NO: 2725463 - RNA, 23 nt, Human
uggugacuuuggauaauaaggaa

SEQ ID NO: 2725464 - RNA, 19 nt, Human
uggugacuuuggauaauaa

SEQ ID NO: 2725465 - RNA, 18 nt, Human
uggugacuuuggauaaua

SEQ ID NO: 2725466 - RNA, 16 nt, Human
uggugacuuuggauaa

SEQ ID NO: 2725467 - RNA, 14 nt, Human
uggugcaaugaccu

SEQ ID NO: 2725468 - RNA, 19 nt, Human
uggugcaaugaccuuucaa

SEQ ID NO: 2725469 - RNA, 12 nt, Human
ugguggcagugg

SEQ ID NO: 2725470 - RNA, 20 nt, Human
ugguggcagugggagcugcc

SEQ ID NO: 2725471 - RNA, 13 nt, Human
ugguggcaguggg

SEQ ID NO: 2725472 - RNA, 18 nt, Human
ugguggcagugggagcug

SEQ ID NO: 2725473 - RNA, 19 nt, Human
uggugguuuucuguucuuu

SEQ ID NO: 2725474 - RNA, 18 nt, Human
uggugguuucagaaaugu

SEQ ID NO: 2725475 - RNA, 17 nt, Human
uggugguuucagaaaug

SEQ ID NO: 2725476 - RNA, 16 nt, Human
uggugggggccucggu

SEQ ID NO: 2725477 - RNA, 18 nt, Human
uggugggggccucggugu

SEQ ID NO: 2725478 - RNA, 13 nt, Human
ugguggcuggguu

SEQ ID NO: 2725479 - RNA, 22 nt, Human
ugucuacacuaagagagaauga

SEQ ID NO: 2725480 - RNA, 18 nt, Human
ugucuacaccauuaugug

SEQ ID NO: 2725481 - RNA, 17 nt, Human
ugucuacacuaagagag

SEQ ID NO: 2725482 - RNA, 17 nt, Human
ugucuacaccauuaugu

SEQ ID NO: 2725483 - RNA, 14 nt, Human
ugucuaaugaaacc

SEQ ID NO: 2725484 - RNA, 12 nt, Human
uguccugggagu

SEQ ID NO: 2725485 - RNA, 19 nt, Human
uguccugggagugagcugg

SEQ ID NO: 2725486 - RNA, 20 nt, Human
uguccugggagugagcuggu

SEQ ID NO: 2725487 - RNA, 17 nt, Human
uguccccgcacugggcu

SEQ ID NO: 2725488 - RNA, 19 nt, Human
uguccccgcacugggcuug

SEQ ID NO: 2725489 - RNA, 12 nt, Human
ugucuuaauuaa

SEQ ID NO: 2725490 - RNA, 23 nt, Human
ugucuuuggacccugaggcccag

SEQ ID NO: 2725491 - RNA, 16 nt, Human
ugucuuuucuugcaug

SEQ ID NO: 2725492 - RNA, 21 nt, Human
ugucucaaaaaaagaaaaaga

SEQ ID NO: 2725493 - RNA, 20 nt, Human
ugucucagauuuuauuaugu

SEQ ID NO: 2725494 - RNA, 16 nt, Human
ugucucagauuuuauu

SEQ ID NO: 2725495 - RNA, 22 nt, Human
ugucucagauuuuauuauguaa

SEQ ID NO: 2725496 - RNA, 14 nt, Human
ugucuaugggacuc

SEQ ID NO: 2725497 - RNA, 15 nt, Human
ugucuaugggacuca

SEQ ID NO: 2725498 - RNA, 16 nt, Human
ugucuaugggacucaa

SEQ ID NO: 2725499 - RNA, 15 nt, Human
ugucuaguuguuuga

SEQ ID NO: 2725500 - RNA, 23 nt, Human
ugucuaguuguuugauucagaca

SEQ ID NO: 2725501 - RNA, 19 nt, Human
uguaguguuggagaagaac

SEQ ID NO: 2725502 - RNA, 20 nt, Human
uguaguguuggagaagaacu

SEQ ID NO: 2725503 - RNA, 21 nt, Human
uguaguguuggagaagaacug

SEQ ID NO: 2725504 - RNA, 13 nt, Human
uguauaaaauaau

SEQ ID NO: 2725505 - RNA, 14 nt, Human
uguauaaaauaauu

SEQ ID NO: 2725506 - RNA, 23 nt, Human
uguacagcaaggagauuuacaac

SEQ ID NO: 2725507 - RNA, 14 nt, Human
uguagcuuuaucaa

SEQ ID NO: 2725508 - RNA, 15 nt, Human
uguagcuuuaucaaa

SEQ ID NO: 2725509 - RNA, 22 nt, Human
uguacagcaaggagauuuacaa

SEQ ID NO: 2725510 - RNA, 21 nt, Human
uguacagagcccacgccccca

SEQ ID NO: 2725511 - RNA, 12 nt, Human
uguacagagccc

SEQ ID NO: 2725512 - RNA, 23 nt, Human
uguauagauuagagaguguugaa

SEQ ID NO: 2725513 - RNA, 23 nt, Human
uguauagaaccucuuugucuaca

SEQ ID NO: 2725514 - RNA, 21 nt, Human
uguauagauuagaauucugua

SEQ ID NO: 2725515 - RNA, 15 nt, Human
uguauagauuagaau

SEQ ID NO: 2725516 - RNA, 13 nt, Human
uguaucugagcag

SEQ ID NO: 2725517 - RNA, 18 nt, Human
uguauuuuaaaagaauga

SEQ ID NO: 2725518 - RNA, 19 nt, Human
uguauuuuaaaagaaugau

SEQ ID NO: 2725519 - RNA, 21 nt, Human
ugucaauuacaggaaguacug

SEQ ID NO: 2725520 - RNA, 13 nt, Human
ugucacacacuuu

SEQ ID NO: 2725521 - RNA, 14 nt, Human
ugucacaggcaggu

SEQ ID NO: 2725522 - RNA, 13 nt, Human
ugucacaggcagg

SEQ ID NO: 2725523 - RNA, 15 nt, Human
ugucacaggcagguc

SEQ ID NO: 2725524 - RNA, 16 nt, Human
ugucacaggcaggucc

SEQ ID NO: 2725525 - RNA, 17 nt, Human
ugucacaggcaggucca

SEQ ID NO: 2725526 - RNA, 21 nt, Human
ugucacaggcagguccagggu

SEQ ID NO: 2725527 - RNA, 15 nt, Human
ugucagugugacuga

SEQ ID NO: 2725528 - RNA, 14 nt, Human
ugucagugugacug

SEQ ID NO: 2725529 - RNA, 16 nt, Human
ugucagugugacugau

SEQ ID NO: 2725530 - RNA, 19 nt, Human
ugucagugugacugaucuc

SEQ ID NO: 2725531 - RNA, 17 nt, Human
ugcuucuguuuuauaau

SEQ ID NO: 2725532 - RNA, 12 nt, Human
ugcuucucacug

SEQ ID NO: 2725533 - RNA, 23 nt, Human
ugcuuccagugaggcucugcccu

SEQ ID NO: 2725534 - RNA, 21 nt, Human
ugcuuccagugaggcucugcc

SEQ ID NO: 2725535 - RNA, 22 nt, Human
ugcuuccagugaggcucugccc

SEQ ID NO: 2725536 - RNA, 19 nt, Human
ugcuuaacuucacauauug

SEQ ID NO: 2725537 - RNA, 18 nt, Human
ugcuuaacuucacauauu

SEQ ID NO: 2725538 - RNA, 17 nt, Human
ugcuuaacuucacauau

SEQ ID NO: 2725539 - RNA, 14 nt, Human
ugcuuaacuucaca

SEQ ID NO: 2725540 - RNA, 13 nt, Human
ugcuuaacuucac

SEQ ID NO: 2725541 - RNA, 15 nt, Human
uggaacacucugaga

SEQ ID NO: 2725542 - RNA, 17 nt, Human
uggaacacucugagacu

SEQ ID NO: 2725543 - RNA, 17 nt, Human
uggaacgcguugaaauu

SEQ ID NO: 2725544 - RNA, 16 nt, Human
uggaacgcguugaaau

SEQ ID NO: 2725545 - RNA, 15 nt, Human
uggaacgcguugaaa

SEQ ID NO: 2725546 - RNA, 14 nt, Human
uggaacgcguugaa

SEQ ID NO: 2725547 - RNA, 22 nt, Human
ugcuucuguuuuauaauuuugu

SEQ ID NO: 2725548 - RNA, 13 nt, Human
ugcuucuucagag

SEQ ID NO: 2725549 - RNA, 12 nt, Human
ugcuuguguuaa

SEQ ID NO: 2725550 - RNA, 18 nt, Human
ugcuugugaaaggaaaga

SEQ ID NO: 2725551 - RNA, 15 nt, Human
ugcuuguguuaagua

SEQ ID NO: 2725552 - RNA, 17 nt, Human
uggagacacaacuauuu

SEQ ID NO: 2725553 - RNA, 19 nt, Human
uggacguguuaugacucca

SEQ ID NO: 2725554 - RNA, 23 nt, Human
uggacguguuaugacuccagaau

SEQ ID NO: 2725555 - RNA, 19 nt, Human
uggacuaacuugucuuugg

SEQ ID NO: 2725556 - RNA, 20 nt, Human
uggacuaacuugucuuugga

SEQ ID NO: 2725557 - RNA, 18 nt, Human
uggacaggcauguucucu

SEQ ID NO: 2725558 - RNA, 22 nt, Human
uggacaggcauguucucugagg

SEQ ID NO: 2725559 - RNA, 17 nt, Human
uggacaggcauguucuc

SEQ ID NO: 2725560 - RNA, 23 nt, Human
uggacaggcauguucucugagga

SEQ ID NO: 2725561 - RNA, 15 nt, Human
uggaccaaaaaccag

SEQ ID NO: 2725562 - RNA, 19 nt, Human
uggcacugcuuccagugag

SEQ ID NO: 2725563 - RNA, 22 nt, Human
uggcacuauaauguaagcucua

SEQ ID NO: 2725564 - RNA, 22 nt, Human
uggcacugcuuccagugaggcu

SEQ ID NO: 2725565 - RNA, 17 nt, Human
uggauuuaacagaaaug

SEQ ID NO: 2725566 - RNA, 15 nt, Human
uggauuuaacagaaa

SEQ ID NO: 2725567 - RNA, 21 nt, Human
uggcacuauaauguaagcucu

SEQ ID NO: 2725568 - RNA, 23 nt, Human
uggaggggggaggugggauccuc

SEQ ID NO: 2725569 - RNA, 21 nt, Human
uggauuguccccgacccuugc

SEQ ID NO: 2725570 - RNA, 22 nt, Human
uggaugcagccucacaguccuu

SEQ ID NO: 2725571 - RNA, 13 nt, Human
uggaugcagccuc

SEQ ID NO: 2725572 - RNA, 21 nt, Human
uggaugcagccucacaguccu

SEQ ID NO: 2725573 - RNA, 11 nt, Human
uggcugcugaa

SEQ ID NO: 2725574 - RNA, 13 nt, Human
uggcugcugaagg

SEQ ID NO: 2725575 - RNA, 14 nt, Human
uggcugcugaaggc

SEQ ID NO: 2725576 - RNA, 16 nt, Human
uggcugcugaaggcuc

SEQ ID NO: 2725577 - RNA, 19 nt, Human
uggccucccaacucacccc

SEQ ID NO: 2725578 - RNA, 20 nt, Human
uggccucccaacucacccca

SEQ ID NO: 2725579 - RNA, 21 nt, Human
uggccucccaacucaccccag

SEQ ID NO: 2725580 - RNA, 22 nt, Human
uggccucccaacucaccccagc

SEQ ID NO: 2725581 - RNA, 11 nt, Human
uggccucccaa

SEQ ID NO: 2725582 - RNA, 14 nt, Human
uggccucccaacuc

SEQ ID NO: 2725583 - RNA, 18 nt, Human
uggccucaagugauucuc

SEQ ID NO: 2725584 - RNA, 23 nt, Human
uggccucaagugauucuccugcc

SEQ ID NO: 2725585 - RNA, 23 nt, Human
uggccuagcauacguacacauuu

SEQ ID NO: 2725586 - RNA, 19 nt, Human
uggcagcugcgguccaccc

SEQ ID NO: 2725587 - RNA, 17 nt, Human
uggcagcugcgguccac

SEQ ID NO: 2725588 - RNA, 13 nt, Human
uggccccucaggg

SEQ ID NO: 2725589 - RNA, 20 nt, Human
uggccccucagggucccugg

SEQ ID NO: 2725590 - RNA, 21 nt, Human
uggccccucagggucccuggu

SEQ ID NO: 2725591 - RNA, 22 nt, Human
uggccccucagggucccuggug

SEQ ID NO: 2725592 - RNA, 20 nt, Human
uggccuagcauacguacaca

SEQ ID NO: 2725593 - RNA, 16 nt, Human
ugggaggaucucuuga

SEQ ID NO: 2725594 - RNA, 16 nt, Human
ugggaaugaaugucag

SEQ ID NO: 2725595 - RNA, 21 nt, Human
ugggaaugaaugucaguguga

SEQ ID NO: 2725596 - RNA, 14 nt, Human
ugggacacccugug

SEQ ID NO: 2725597 - RNA, 15 nt, Human
ugggacacccuguga

SEQ ID NO: 2725598 - RNA, 18 nt, Human
ugggaugauuggaggggg

SEQ ID NO: 2725599 - RNA, 12 nt, Human
ugggauaaaugc

SEQ ID NO: 2725600 - RNA, 14 nt, Human
ugggauaaaugcca

SEQ ID NO: 2725601 - RNA, 13 nt, Human
ugggauaaaugcc

SEQ ID NO: 2725602 - RNA, 20 nt, Human
ugggcagcugccuccccucc

SEQ ID NO: 2725603 - RNA, 22 nt, Human
ugggcagcugccuccccuccuc

SEQ ID NO: 2725604 - RNA, 23 nt, Human
ugggcagcugccuccccuccucu

SEQ ID NO: 2725605 - RNA, 13 nt, Human
ugggcagagcaga

SEQ ID NO: 2725606 - RNA, 14 nt, Human
ugggcagagcagag

SEQ ID NO: 2725607 - RNA, 15 nt, Human
ugggcagagcagaga

SEQ ID NO: 2725608 - RNA, 17 nt, Human
ugggcagagcagagacc

SEQ ID NO: 2725609 - RNA, 23 nt, Human
ugggguuaucugaagucagaucu

SEQ ID NO: 2725610 - RNA, 19 nt, Human
uggggggcugaggugggag

SEQ ID NO: 2725611 - RNA, 16 nt, Human
ugggggccucagugcc

SEQ ID NO: 2725612 - RNA, 22 nt, Human
ugggcuucaguggcagcugcuu

SEQ ID NO: 2725613 - RNA, 21 nt, Human
ugggcuucaguggcagcugcu

SEQ ID NO: 2725614 - RNA, 22 nt, Human
ugggcuucauccuccucagauc

SEQ ID NO: 2725615 - RNA, 15 nt, Human
ugggcuucauccucc

SEQ ID NO: 2725616 - RNA, 17 nt, Human
ugggcuugucuguagau

SEQ ID NO: 2725617 - RNA, 23 nt, Human
ugggcuuggggaccagagcugcc

SEQ ID NO: 2725618 - RNA, 21 nt, Human
ugggcuugucuguagauuuua

SEQ ID NO: 2725619 - RNA, 22 nt, Human
ugggcuuggggaccagagcugc

SEQ ID NO: 2725620 - RNA, 13 nt, Human
uggggcagcuuga

SEQ ID NO: 2725621 - RNA, 12 nt, Human
ugacucuuaaga

SEQ ID NO: 2725622 - RNA, 13 nt, Human
ugacugaauuucu

SEQ ID NO: 2725623 - RNA, 15 nt, Human
ugacugaauuucuuu

SEQ ID NO: 2725624 - RNA, 14 nt, Human
ugacugaauuucuu

SEQ ID NO: 2725625 - RNA, 17 nt, Human
ugacugauucuucagca

SEQ ID NO: 2725626 - RNA, 16 nt, Human
ugacugauucuucagc

SEQ ID NO: 2725627 - RNA, 15 nt, Human
ugacugauucuucag

SEQ ID NO: 2725628 - RNA, 14 nt, Human
ugacugauucuuca

SEQ ID NO: 2725629 - RNA, 13 nt, Human
ugacugauucuuc

SEQ ID NO: 2725630 - RNA, 17 nt, Human
ugacgccaucccagccc

SEQ ID NO: 2725631 - RNA, 18 nt, Human
ugacgccaucccagcccc

SEQ ID NO: 2725632 - RNA, 19 nt, Human
ugacgccaucccagcccca

SEQ ID NO: 2725633 - RNA, 20 nt, Human
ugacgccaucccagccccaa

SEQ ID NO: 2725634 - RNA, 18 nt, Human
ugaccuuucaauaggaaa

SEQ ID NO: 2725635 - RNA, 22 nt, Human
ugaccuuucaauaggaaaaacu

SEQ ID NO: 2725636 - RNA, 13 nt, Human
ugacgccauccca

SEQ ID NO: 2725637 - RNA, 14 nt, Human
ugacgccaucccag

SEQ ID NO: 2725638 - RNA, 15 nt, Human
ugacgccaucccagc

SEQ ID NO: 2725639 - RNA, 16 nt, Human
ugacgccaucccagcc

SEQ ID NO: 2725640 - RNA, 15 nt, Human
ucuugaacuccuggc

SEQ ID NO: 2725641 - RNA, 17 nt, Human
ucuugaauuguaaggaa

SEQ ID NO: 2725642 - RNA, 20 nt, Human
ugaccauucuccaccugcca

SEQ ID NO: 2725643 - RNA, 21 nt, Human
ugaccauucuccaccugccag

SEQ ID NO: 2725644 - RNA, 22 nt, Human
ugaccauucuccaccugccagg

SEQ ID NO: 2725645 - RNA, 16 nt, Human
ugaccucugcagcaau

SEQ ID NO: 2725646 - RNA, 13 nt, Human
ugaccucugcagc

SEQ ID NO: 2725647 - RNA, 22 nt, Human
ugaccucaggugauccacccac

SEQ ID NO: 2725648 - RNA, 14 nt, Human
ugaccuuucaauag

SEQ ID NO: 2725649 - RNA, 15 nt, Human
ugaccuuucaauagg

SEQ ID NO: 2725650 - RNA, 16 nt, Human
ugaccuuucaauagga

SEQ ID NO: 2725651 - RNA, 12 nt, Human
ugaccucugccu

SEQ ID NO: 2725652 - RNA, 23 nt, Human
ugaccucugcagcaauaaagcag

SEQ ID NO: 2725653 - RNA, 21 nt, Human
ugaccucugcagcaauaaagc

SEQ ID NO: 2725654 - RNA, 18 nt, Human
ugaccucugcagcaauaa

SEQ ID NO: 2725655 - RNA, 17 nt, Human
ugagaaagacuauucaa

SEQ ID NO: 2725656 - RNA, 16 nt, Human
ugagaaagacuauuca

SEQ ID NO: 2725657 - RNA, 20 nt, Human
ugagaaagacuauucaaaca

SEQ ID NO: 2725658 - RNA, 18 nt, Human
ugagaaagacuauucaaa

SEQ ID NO: 2725659 - RNA, 12 nt, Human
ugagacccuguc

SEQ ID NO: 2725660 - RNA, 12 nt, Human
ugagacucuguc

SEQ ID NO: 2725661 - RNA, 13 nt, Human
ugagacucugucu

SEQ ID NO: 2725662 - RNA, 14 nt, Human
ugagacucugucuc

SEQ ID NO: 2725663 - RNA, 23 nt, Human
ugagaggcauccaguaucuugaa

SEQ ID NO: 2725664 - RNA, 22 nt, Human
ugagaggcauccaguaucuuga

SEQ ID NO: 2725665 - RNA, 19 nt, Human
ugagaggggaacagacugg

SEQ ID NO: 2725666 - RNA, 17 nt, Human
ugagaguagagucacug

SEQ ID NO: 2725667 - RNA, 20 nt, Human
ugagcagucaggaaagagaa

SEQ ID NO: 2725668 - RNA, 13 nt, Human
ugagcaucaggcc

SEQ ID NO: 2725669 - RNA, 17 nt, Human
ugagcagucaggaaaga

SEQ ID NO: 2725670 - RNA, 15 nt, Human
ugagcagucaggaaa

SEQ ID NO: 2725671 - RNA, 14 nt, Human
ugagcaucaggcca

SEQ ID NO: 2725672 - RNA, 15 nt, Human
ugagcaucaggccag

SEQ ID NO: 2725673 - RNA, 13 nt, Human
ugagccucagcau

SEQ ID NO: 2725674 - RNA, 15 nt, Human
ugagccucagcaucc

SEQ ID NO: 2725675 - RNA, 22 nt, Human
ugaucacggcucacugcagccu

SEQ ID NO: 2725676 - RNA, 21 nt, Human
ugauccacccaccucagccuc

SEQ ID NO: 2725677 - RNA, 22 nt, Human
ugauccacccaccucagccucc

SEQ ID NO: 2725678 - RNA, 19 nt, Human
ugaucuaggaagacuuugg

SEQ ID NO: 2725679 - RNA, 21 nt, Human
ugaucuaggaagacuuuggaa

SEQ ID NO: 2725680 - RNA, 13 nt, Human
ugaucauccacug

SEQ ID NO: 2725681 - RNA, 24 nt, Human
ugaucauccacugugccaugugcc

SEQ ID NO: 2725682 - RNA, 17 nt, Human
ugauccaagcugguccc

SEQ ID NO: 2725683 - RNA, 21 nt, Human
ugauccaagcuggucccacuc

SEQ ID NO: 2725684 - RNA, 15 nt, Human
ugauccacccaccuc

SEQ ID NO: 2725685 - RNA, 20 nt, Human
ugauccacccaccucagccu

SEQ ID NO: 2725686 - RNA, 14 nt, Human
ugaugccaugagga

SEQ ID NO: 2725687 - RNA, 22 nt, Human
ugaugaucuuugcagacaggca

SEQ ID NO: 2725688 - RNA, 23 nt, Human
ugaugaucuuugcagacaggcaa

SEQ ID NO: 2725689 - RNA, 20 nt, Human
ugaugaugaaaugaggucag

SEQ ID NO: 2725690 - RNA, 18 nt, Human
ugaucuuugcagacaggc

SEQ ID NO: 2725691 - RNA, 21 nt, Human
ugaucuuugcagacaggcaag

SEQ ID NO: 2725692 - RNA, 23 nt, Human
ugaucuuugcagacaggcaagca

SEQ ID NO: 2725693 - RNA, 19 nt, Human
ugaucuuugcagacaggca

SEQ ID NO: 2725694 - RNA, 20 nt, Human
ugaucuuugcagacaggcaa

SEQ ID NO: 2725695 - RNA, 13 nt, Human
ugauguauucuag

SEQ ID NO: 2725696 - RNA, 21 nt, Human
ugauguauucuagcuaaugua

SEQ ID NO: 2725697 - RNA, 14 nt, Human
ugauguauucuagc

SEQ ID NO: 2725698 - RNA, 20 nt, Human
ugauguauucuagcuaaugu

SEQ ID NO: 2725699 - RNA, 18 nt, Human
ugaugcuucuucagagac

SEQ ID NO: 2725700 - RNA, 19 nt, Human
ugaugcuucuucagagacu

SEQ ID NO: 2725701 - RNA, 21 nt, Human
ugaugcuucuucagagacucc

SEQ ID NO: 2725702 - RNA, 22 nt, Human
ugaugcuucuucagagacuccu

SEQ ID NO: 2725703 - RNA, 15 nt, Human
ugauagcacagaccc

SEQ ID NO: 2725704 - RNA, 16 nt, Human
ugauagcacagacccu

SEQ ID NO: 2725705 - RNA, 17 nt, Human
ugauagcacagacccug

SEQ ID NO: 2725706 - RNA, 18 nt, Human
ugauagcacagacccugc

SEQ ID NO: 2725707 - RNA, 20 nt, Human
ugauagcacagacccugccc

SEQ ID NO: 2725708 - RNA, 21 nt, Human
ugauagcacagacccugcccu

SEQ ID NO: 2725709 - RNA, 22 nt, Human
ugauagcacagacccugcccug

SEQ ID NO: 2725710 - RNA, 23 nt, Human
ugauagcacagacccugcccugu

SEQ ID NO: 2725711 - RNA, 16 nt, Human
ugaguugauucagcuc

SEQ ID NO: 2725712 - RNA, 19 nt, Human
ugaguugauucagcucugc

SEQ ID NO: 2725713 - RNA, 18 nt, Human
ugagucgaggacagggag

SEQ ID NO: 2725714 - RNA, 15 nt, Human
ugagucgaggacagg

SEQ ID NO: 2725715 - RNA, 16 nt, Human
ugagucgaggacaggg

SEQ ID NO: 2725716 - RNA, 21 nt, Human
ugaguugauagcacagacccu

SEQ ID NO: 2725717 - RNA, 23 nt, Human
ugaguugauagcacagacccugc

SEQ ID NO: 2725718 - RNA, 19 nt, Human
ugagguuucaaaccucccu

SEQ ID NO: 2725719 - RNA, 21 nt, Human
ugaguccccuguuuguuucug

SEQ ID NO: 2725720 - RNA, 15 nt, Human
ugaggugcuauguuc

SEQ ID NO: 2725721 - RNA, 16 nt, Human
ugaggugcuauguucu

SEQ ID NO: 2725722 - RNA, 11 nt, Human
ugaguccuggc

SEQ ID NO: 2725723 - RNA, 18 nt, Human
ugaguccuggcaugggaa

SEQ ID NO: 2725724 - RNA, 14 nt, Human
ugagucgaggacag

SEQ ID NO: 2725725 - RNA, 19 nt, Human
ugaguccuggcaugggaau

SEQ ID NO: 2725726 - RNA, 22 nt, Human
ugaguccuggcaugggaaugaa

SEQ ID NO: 2725727 - RNA, 20 nt, Human
ugaggucuguucuuuccaaa

SEQ ID NO: 2725728 - RNA, 15 nt, Human
ugaggucuguucuuu

SEQ ID NO: 2725729 - RNA, 14 nt, Human
ugaggucuguucuu

SEQ ID NO: 2725730 - RNA, 11 nt, Human
ugaggcugggc

SEQ ID NO: 2725731 - RNA, 21 nt, Human
ugcauuauauuuauuacugua

SEQ ID NO: 2725732 - RNA, 12 nt, Human
ugcauuaucuag

SEQ ID NO: 2725733 - RNA, 17 nt, Human
ugcauuaucuagauacu

SEQ ID NO: 2725734 - RNA, 15 nt, Human
ugcauguuugugauu

SEQ ID NO: 2725735 - RNA, 12 nt, Human
ugccaggaagcc

SEQ ID NO: 2725736 - RNA, 16 nt, Human
ugccaggaagccagca

SEQ ID NO: 2725737 - RNA, 18 nt, Human
ugccaggaagccagcagg

SEQ ID NO: 2725738 - RNA, 19 nt, Human
ugccaggaagccagcaggc

SEQ ID NO: 2725739 - RNA, 17 nt, Human
ugccagguuuuuggucu

SEQ ID NO: 2725740 - RNA, 15 nt, Human
ugccauccagguuca

SEQ ID NO: 2725741 - RNA, 12 nt, Human
ugccauccaggu

SEQ ID NO: 2725742 - RNA, 15 nt, Human
ugccauguuggccag

SEQ ID NO: 2725743 - RNA, 12 nt, Human
ugccauguuggc

SEQ ID NO: 2725744 - RNA, 16 nt, Human
ugccauguuggccagg

SEQ ID NO: 2725745 - RNA, 20 nt, Human
ugcccaccuggccucugcac

SEQ ID NO: 2725746 - RNA, 19 nt, Human
ugcccaccuggccucugca

SEQ ID NO: 2725747 - RNA, 18 nt, Human
ugcccacgcuggagugca

SEQ ID NO: 2725748 - RNA, 21 nt, Human
ugcccacucccugcaaccuga

SEQ ID NO: 2725749 - RNA, 13 nt, Human
ugcccacucccug

SEQ ID NO: 2725750 - RNA, 15 nt, Human
ugccaugugccaggu

SEQ ID NO: 2725751 - RNA, 14 nt, Human
ugccaugugccagg

SEQ ID NO: 2725752 - RNA, 20 nt, Human
ugccaugaggaacaaggcaa

SEQ ID NO: 2725753 - RNA, 23 nt, Human
ugccaugaggaacaaggcaaggc

SEQ ID NO: 2725754 - RNA, 17 nt, Human
ugccgucuaccugaggg

SEQ ID NO: 2725755 - RNA, 19 nt, Human
ugccgucuaccugaggggc

SEQ ID NO: 2725756 - RNA, 15 nt, Human
ugccgucuaccugag

SEQ ID NO: 2725757 - RNA, 16 nt, Human
ugccgucuaccugagg

SEQ ID NO: 2725758 - RNA, 17 nt, Human
ugcccugcuuucagaua

SEQ ID NO: 2725759 - RNA, 16 nt, Human
ugcccugcuuucagau

SEQ ID NO: 2725760 - RNA, 12 nt, Human
ugcccugcuuuc

SEQ ID NO: 2725761 - RNA, 21 nt, Human
ugcccugcccaccuggccucu

SEQ ID NO: 2725762 - RNA, 19 nt, Human
ugcccuaaaguguauuuuu

SEQ ID NO: 2725763 - RNA, 17 nt, Human
ugcccuaaaguguauuu

SEQ ID NO: 2725764 - RNA, 22 nt, Human
ugcccugcccaccuggccucug

SEQ ID NO: 2725765 - RNA, 23 nt, Human
ugcccugcccaccuggccucugc

SEQ ID NO: 2725766 - RNA, 17 nt, Human
ugccugguggcagcugc

SEQ ID NO: 2725767 - RNA, 18 nt, Human
ugccugguggcagcugcg

SEQ ID NO: 2725768 - RNA, 19 nt, Human
ugccugguggcagcugcgg

SEQ ID NO: 2725769 - RNA, 21 nt, Human
ugccucuucucuacucuaggg

SEQ ID NO: 2725770 - RNA, 13 nt, Human
ugccucugggacu

SEQ ID NO: 2725771 - RNA, 22 nt, Human
ugccuccuuugugaggaagccg

SEQ ID NO: 2725772 - RNA, 21 nt, Human
ugccuccuuugugaggaagcc

SEQ ID NO: 2725773 - RNA, 20 nt, Human
ugccuccuuugugaggaagc

SEQ ID NO: 2725774 - RNA, 21 nt, Human
ugccuaaggacuucuuuaauu

SEQ ID NO: 2725775 - RNA, 13 nt, Human
ugccuaaggacuu

SEQ ID NO: 2725776 - RNA, 12 nt, Human
ugccuaaggacu

SEQ ID NO: 2725777 - RNA, 20 nt, Human
ugccuaaggacuucuuuaau

SEQ ID NO: 2725778 - RNA, 16 nt, Human
ugccuaaggacuucuu

SEQ ID NO: 2725779 - RNA, 15 nt, Human
ugccuaaggacuucu

SEQ ID NO: 2725780 - RNA, 14 nt, Human
ugccuaaggacuuc

SEQ ID NO: 2725781 - RNA, 22 nt, Human
ugcaccuggaauauauaaccag

SEQ ID NO: 2725782 - RNA, 20 nt, Human
ugcaccuggaauauauaacc

SEQ ID NO: 2725783 - RNA, 17 nt, Human
ugcaccuggaauauaua

SEQ ID NO: 2725784 - RNA, 21 nt, Human
ugcaccggcuggccuggcccc

SEQ ID NO: 2725785 - RNA, 20 nt, Human
ugcacagaguuguuacauuu

SEQ ID NO: 2725786 - RNA, 18 nt, Human
ugcaccggcuggccuggc

SEQ ID NO: 2725787 - RNA, 19 nt, Human
ugcaccggcuggccuggcc

SEQ ID NO: 2725788 - RNA, 20 nt, Human
ugcaccggcuggccuggccc

SEQ ID NO: 2725789 - RNA, 18 nt, Human
ugcacugacauuguuggc

SEQ ID NO: 2725790 - RNA, 21 nt, Human
ugcacugacauuguuggccaa

SEQ ID NO: 2725791 - RNA, 16 nt, Human
ugcacugucaagauga

SEQ ID NO: 2725792 - RNA, 13 nt, Human
ugcaauggcagcc

SEQ ID NO: 2725793 - RNA, 14 nt, Human
ugcaauggcagccu

SEQ ID NO: 2725794 - RNA, 15 nt, Human
ugcaauggcagccuu

SEQ ID NO: 2725795 - RNA, 16 nt, Human
ugcaauggcagccuug

SEQ ID NO: 2725796 - RNA, 13 nt, Human
ugcaaugaccuuu

SEQ ID NO: 2725797 - RNA, 16 nt, Human
ugcaaugaccuuucaa

SEQ ID NO: 2725798 - RNA, 17 nt, Human
ugcaaugaccuuucaau

SEQ ID NO: 2725799 - RNA, 19 nt, Human
ugcaaugaccuuucaauag

SEQ ID NO: 2725800 - RNA, 22 nt, Human
ugcaaugaccuuucaauaggaa

SEQ ID NO: 2725801 - RNA, 23 nt, Human
ugcaaugaccuuucaauaggaaa

SEQ ID NO: 2725802 - RNA, 17 nt, Human
ugcacagaguuguuaca

SEQ ID NO: 2725803 - RNA, 19 nt, Human
ugcacagaguuguuacauu

SEQ ID NO: 2725804 - RNA, 18 nt, Human
ugcacagaguuguuacau

SEQ ID NO: 2725805 - RNA, 20 nt, Human
ugcacaaacagaggccgcca

SEQ ID NO: 2725806 - RNA, 17 nt, Human
ugcacaaacagaggccg

SEQ ID NO: 2725807 - RNA, 19 nt, Human
ugcacaaacagaggccgcc

SEQ ID NO: 2725808 - RNA, 14 nt, Human
ugcaauuucauaug

SEQ ID NO: 2725809 - RNA, 20 nt, Human
ugcaauuucauaugcuguau

SEQ ID NO: 2725810 - RNA, 15 nt, Human
ugcacaaacagaggc

SEQ ID NO: 2725811 - RNA, 16 nt, Human
ugcacaaacagaggcc

SEQ ID NO: 2725812 - RNA, 19 nt, Human
ugcaaccugauugugucuc

SEQ ID NO: 2725813 - RNA, 20 nt, Human
ugcaaccugauugugucucu

SEQ ID NO: 2725814 - RNA, 18 nt, Human
ugcaaccuccgccucuug

SEQ ID NO: 2725815 - RNA, 20 nt, Human
ugcaaccuccgccucuuggg

SEQ ID NO: 2725816 - RNA, 21 nt, Human
ugcaaccuccgccucuugggu

SEQ ID NO: 2725817 - RNA, 22 nt, Human
ugcaacucugaaggguaauuau

SEQ ID NO: 2725818 - RNA, 22 nt, Human
ugcaaccugauugugucucuug

SEQ ID NO: 2725819 - RNA, 14 nt, Human
ugcaacaggcuggg

SEQ ID NO: 2725820 - RNA, 15 nt, Human
ugcaacaggcugggc

SEQ ID NO: 2725821 - RNA, 16 nt, Human
ugcaacaggcugggcu

SEQ ID NO: 2725822 - RNA, 17 nt, Human
ugcaacaggcugggcuu

SEQ ID NO: 2725823 - RNA, 19 nt, Human
ugcaacaggcugggcuuca

SEQ ID NO: 2725824 - RNA, 20 nt, Human
ugcaacaggcugggcuucag

SEQ ID NO: 2725825 - RNA, 13 nt, Human
ugcaaccuccgcc

SEQ ID NO: 2725826 - RNA, 14 nt, Human
ugcaaccuccgccu

SEQ ID NO: 2725827 - RNA, 15 nt, Human
ugauuuucauugcug

SEQ ID NO: 2725828 - RNA, 13 nt, Human
ugauuuucauugc

SEQ ID NO: 2725829 - RNA, 22 nt, Human
ugauuuuuuuuuccuucagugc

SEQ ID NO: 2725830 - RNA, 23 nt, Human
ugauuuuuuuuuccuucagugcc

SEQ ID NO: 2725831 - RNA, 16 nt, Human
ugauuuuuuuuuccuu

SEQ ID NO: 2725832 - RNA, 17 nt, Human
ugauuuuuuuuuccuuc

SEQ ID NO: 2725833 - RNA, 19 nt, Human
ugauuuuuuuuuccuucag

SEQ ID NO: 2725834 - RNA, 20 nt, Human
ugauuuuuuuuuccuucagu

SEQ ID NO: 2725835 - RNA, 13 nt, Human
uuuucuuauuuca

SEQ ID NO: 2725836 - RNA, 23 nt, Human
uuuucuacucgaguuacagacaa

SEQ ID NO: 2725837 - RNA, 20 nt, Human
uuuucuacucgaguuacaga

SEQ ID NO: 2725838 - RNA, 22 nt, Human
uuuucuacucgaguuacagaca

SEQ ID NO: 2725839 - RNA, 13 nt, Human
uuuucuacucgag

SEQ ID NO: 2725840 - RNA, 16 nt, Human
uuuucuuucagccaag

SEQ ID NO: 2725841 - RNA, 13 nt, Human
uuuucuucucccu

SEQ ID NO: 2725842 - RNA, 22 nt, Human
uuuucuuguguguuuauuguca

SEQ ID NO: 2725843 - RNA, 16 nt, Human
uuuucacauuggaaac

SEQ ID NO: 2725844 - RNA, 22 nt, Human
uuuucagaaaauauuauguguu

SEQ ID NO: 2725845 - RNA, 18 nt, Human
uuuucccuauuagagaag

SEQ ID NO: 2725846 - RNA, 22 nt, Human
uuuucccuauuagagaagagau

SEQ ID NO: 2725847 - RNA, 23 nt, Human
uuuucagaaaauauuauguguuu

SEQ ID NO: 2725848 - RNA, 13 nt, Human
uuuuauauuugaa

SEQ ID NO: 2725849 - RNA, 18 nt, Human
uuuuauauuugaaauauu

SEQ ID NO: 2725850 - RNA, 13 nt, Human
uuuuauauuuacu

SEQ ID NO: 2725851 - RNA, 21 nt, Human
uuuuauacauaaacaagacca

SEQ ID NO: 2725852 - RNA, 13 nt, Human
uuuuauacauaaa

SEQ ID NO: 2725853 - RNA, 19 nt, Human
uuuuaucgucacugcuuaa

SEQ ID NO: 2725854 - RNA, 17 nt, Human
uuuucaaaauaaaaaug

SEQ ID NO: 2725855 - RNA, 18 nt, Human
uuuuauuuuuagacagag

SEQ ID NO: 2725856 - RNA, 21 nt, Human
uuuuaaaguaacccuacaaaa

SEQ ID NO: 2725857 - RNA, 21 nt, Human
uuuuauaauuuugugaagcaa

SEQ ID NO: 2725858 - RNA, 15 nt, Human
uuuuacuaauagaca

SEQ ID NO: 2725859 - RNA, 23 nt, Human
uuuuauaauuuugugaagcaaaa

SEQ ID NO: 2725860 - RNA, 15 nt, Human
uuuccacagaagcuc

SEQ ID NO: 2725861 - RNA, 15 nt, Human
uuuccguuaaaauac

SEQ ID NO: 2725862 - RNA, 13 nt, Human
uuugagugccuua

SEQ ID NO: 2725863 - RNA, 17 nt, Human
uuuccguuaaaauacca

SEQ ID NO: 2725864 - RNA, 12 nt, Human
uuugaguucuac

SEQ ID NO: 2725865 - RNA, 21 nt, Human
uuugagugccuuacacaaugg

SEQ ID NO: 2725866 - RNA, 13 nt, Human
uuuggacccugag

SEQ ID NO: 2725867 - RNA, 22 nt, Human
uuuggaccaaaaaccaguauug

SEQ ID NO: 2725868 - RNA, 21 nt, Human
uuuggaccaaaaaccaguauu

SEQ ID NO: 2725869 - RNA, 18 nt, Human
uuuggaccaaaaaccagu

SEQ ID NO: 2725870 - RNA, 19 nt, Human
uuuggacaaaauggaauac

SEQ ID NO: 2725871 - RNA, 15 nt, Human
uuuggaaaucuuuaa

SEQ ID NO: 2725872 - RNA, 12 nt, Human
uuuggaaaauaa

SEQ ID NO: 2725873 - RNA, 17 nt, Human
uuuguauaaaauaauuu

SEQ ID NO: 2725874 - RNA, 17 nt, Human
uuuggucuacacugugc

SEQ ID NO: 2725875 - RNA, 18 nt, Human
uuuguauaaaauaauuuu

SEQ ID NO: 2725876 - RNA, 19 nt, Human
uuuguauaaaauaauuuuu

SEQ ID NO: 2725877 - RNA, 24 nt, Human
uuuggaccaaaaaccaguauugua

SEQ ID NO: 2725878 - RNA, 15 nt, Human
uuuguauucucuccu

SEQ ID NO: 2725879 - RNA, 15 nt, Human
uuuguugucagcuga

SEQ ID NO: 2725880 - RNA, 22 nt, Human
uuuguuaguaugaggcauuugu

SEQ ID NO: 2725881 - RNA, 22 nt, Human
uuuuucauuauuuuauuaugaa

SEQ ID NO: 2725882 - RNA, 13 nt, Human
uuuuucauuauuu

SEQ ID NO: 2725883 - RNA, 22 nt, Human
uuuugacagaauauguuucaaa

SEQ ID NO: 2725884 - RNA, 23 nt, Human
uuuugacagaauauguuucaaac

SEQ ID NO: 2725885 - RNA, 11 nt, Human
uuuuuaaaugc

SEQ ID NO: 2725886 - RNA, 23 nt, Human
uuuuuaagaaaaaggaugcacag

SEQ ID NO: 2725887 - RNA, 12 nt, Human
uuuuuaagaaaa

SEQ ID NO: 2725888 - RNA, 17 nt, Human
uuuuuaagugcugcauu

SEQ ID NO: 2725889 - RNA, 16 nt, Human
uuuuuaagugcugcau

SEQ ID NO: 2725890 - RNA, 23 nt, Human
uuuuuaagugcugcauuuaaaag

SEQ ID NO: 2725891 - RNA, 22 nt, Human
uuuuuaagugcugcauuuaaaa

SEQ ID NO: 2725892 - RNA, 19 nt, Human
uuuuuaagugcugcauuua

SEQ ID NO: 2725893 - RNA, 18 nt, Human
uuuuuaagugcugcauuu

SEQ ID NO: 2725894 - RNA, 12 nt, Human
uuuuuuuuaaga

SEQ ID NO: 2725895 - RNA, 11 nt, Human
uuuuuuuacua

SEQ ID NO: 2725896 - RNA, 13 nt, Human
uuuuuuuugacaa

SEQ ID NO: 2725897 - RNA, 19 nt, Human
uuuaacucuauaauguguu

SEQ ID NO: 2725898 - RNA, 18 nt, Human
uuuaacagaaauguacag

SEQ ID NO: 2725899 - RNA, 21 nt, Human
uuguuuggaccaaaaaccagu

SEQ ID NO: 2725900 - RNA, 16 nt, Human
uuuaacaacagcuggu

SEQ ID NO: 2725901 - RNA, 13 nt, Human
uuuaauaauguuu

SEQ ID NO: 2725902 - RNA, 18 nt, Human
uuuaagaaaaaggaugca

SEQ ID NO: 2725903 - RNA, 22 nt, Human
uuuaagaaaaaggaugcacaga

SEQ ID NO: 2725904 - RNA, 13 nt, Human
uuuaccacuugug

SEQ ID NO: 2725905 - RNA, 21 nt, Human
uuuaauagguuuggacaaaau

SEQ ID NO: 2725906 - RNA, 21 nt, Human
uuuaauaauuauaugcuauuu

SEQ ID NO: 2725907 - RNA, 18 nt, Human
uuuaauaauuauaugcua

SEQ ID NO: 2725908 - RNA, 22 nt, Human
uuuacuucuuauacauuugaua

SEQ ID NO: 2725909 - RNA, 19 nt, Human
uuuacuucuuauacauuug

SEQ ID NO: 2725910 - RNA, 14 nt, Human
uuuagaaauauaau

SEQ ID NO: 2725911 - RNA, 12 nt, Human
uuuagacagagu

SEQ ID NO: 2725912 - RNA, 17 nt, Human
uuuauggcacuaguauu

SEQ ID NO: 2725913 - RNA, 16 nt, Human
uuuauggcuuuugugc

SEQ ID NO: 2725914 - RNA, 14 nt, Human
uuuauggcuuuugu

SEQ ID NO: 2725915 - RNA, 14 nt, Human
uuuauuauguaaau

SEQ ID NO: 2725916 - RNA, 17 nt, Human
uuuauuauguaaauccc

SEQ ID NO: 2725917 - RNA, 16 nt, Human
uuuauuauguaaaucc

SEQ ID NO: 2725918 - RNA, 13 nt, Human
uuuauuauggcac

SEQ ID NO: 2725919 - RNA, 13 nt, Human
uuuauuaugcaug

SEQ ID NO: 2725920 - RNA, 22 nt, Human
uuuauaauuuugugaagcaaaa

SEQ ID NO: 2725921 - RNA, 22 nt, Human
uuuauuguuuaaaaucauuucu

SEQ ID NO: 2725922 - RNA, 17 nt, Human
uuucaauaggaaaaacu

SEQ ID NO: 2725923 - RNA, 12 nt, Human
uuucaauaggaa

SEQ ID NO: 2725924 - RNA, 14 nt, Human
uuucaauaggaaaa

SEQ ID NO: 2725925 - RNA, 21 nt, Human
uuucagauacuggauuguacu

SEQ ID NO: 2725926 - RNA, 13 nt, Human
uuucagauacugg

SEQ ID NO: 2725927 - RNA, 14 nt, Human
uuucauuuagguga

SEQ ID NO: 2725928 - RNA, 18 nt, Human
uuucauuuaggugaggaa

SEQ ID NO: 2725929 - RNA, 14 nt, Human
uuucaguguacaug

SEQ ID NO: 2725930 - RNA, 13 nt, Human
uuucaguguacau

SEQ ID NO: 2725931 - RNA, 14 nt, Human
uuguuuaaaaucau

SEQ ID NO: 2725932 - RNA, 22 nt, Human
uuguuaguaugaggcauuuguu

SEQ ID NO: 2725933 - RNA, 20 nt, Human
uuguuagugugucuuagugu

SEQ ID NO: 2725934 - RNA, 17 nt, Human
uuguuguuuguuuaguc

SEQ ID NO: 2725935 - RNA, 18 nt, Human
uuguguuuugcaagccag

SEQ ID NO: 2725936 - RNA, 17 nt, Human
uuguuagaucuaguuca

SEQ ID NO: 2725937 - RNA, 21 nt, Human
uuguuaguaugaggcauuugu

SEQ ID NO: 2725938 - RNA, 19 nt, Human
uuguuaguaugaggcauuu

SEQ ID NO: 2725939 - RNA, 14 nt, Human
uuguuacauuuuua

SEQ ID NO: 2725940 - RNA, 23 nt, Human
uugugcgcuaaacuuuucugaua

SEQ ID NO: 2725941 - RNA, 22 nt, Human
uugugcgcuaaacuuuucugau

SEQ ID NO: 2725942 - RNA, 19 nt, Human
uugugcugggguuaucuga

SEQ ID NO: 2725943 - RNA, 17 nt, Human
uugugcauuaucuagau

SEQ ID NO: 2725944 - RNA, 12 nt, Human
uugugcauuugg

SEQ ID NO: 2725945 - RNA, 23 nt, Human
uugugcauuaucuagauacugua

SEQ ID NO: 2725946 - RNA, 22 nt, Human
uugugcauuaucuagauacugu

SEQ ID NO: 2725947 - RNA, 13 nt, Human
uuguguucaccuu

SEQ ID NO: 2725948 - RNA, 23 nt, Human
uuguggauuuaacagaaauguac

SEQ ID NO: 2725949 - RNA, 22 nt, Human
uuguggauuuaacagaaaugua

SEQ ID NO: 2725950 - RNA, 13 nt, Human
uuguguugugaau

SEQ ID NO: 2725951 - RNA, 20 nt, Human
uuguguugaagagguuuuaa

SEQ ID NO: 2725952 - RNA, 21 nt, Human
uuguguuuauauauaagccaa

SEQ ID NO: 2725953 - RNA, 21 nt, Human
uuguggauuuaacagaaaugu

SEQ ID NO: 2725954 - RNA, 20 nt, Human
uuguggauuuaacagaaaug

SEQ ID NO: 2725955 - RNA, 17 nt, Human
uuguggacacagcucuu

SEQ ID NO: 2725956 - RNA, 16 nt, Human
uuguggacacagcucu

SEQ ID NO: 2725957 - RNA, 15 nt, Human
uugucuagugaaacu

SEQ ID NO: 2725958 - RNA, 20 nt, Human
uugucuacaccauuaugugc

SEQ ID NO: 2725959 - RNA, 13 nt, Human
uugucucagauuu

SEQ ID NO: 2725960 - RNA, 20 nt, Human
uugucucagauuuuauuaug

SEQ ID NO: 2725961 - RNA, 16 nt, Human
uugucucagauuuuau

SEQ ID NO: 2725962 - RNA, 15 nt, Human
uugucuuaaaaagug

SEQ ID NO: 2725963 - RNA, 22 nt, Human
uugucucagauuuuauuaugua

SEQ ID NO: 2725964 - RNA, 12 nt, Human
uugugauuuuug

SEQ ID NO: 2725965 - RNA, 17 nt, Human
uugugauuuuuguaauu

SEQ ID NO: 2725966 - RNA, 16 nt, Human
uugugauuuuuguaau

SEQ ID NO: 2725967 - RNA, 20 nt, Human
uugugaaaggaaagaggcuc

SEQ ID NO: 2725968 - RNA, 23 nt, Human
uuguacgaagaguauuuuugaca

SEQ ID NO: 2725969 - RNA, 21 nt, Human
uuguacgaagaguauuuuuga

SEQ ID NO: 2725970 - RNA, 15 nt, Human
uuguacucaauuuua

SEQ ID NO: 2725971 - RNA, 14 nt, Human
uuguacucaauuuu

SEQ ID NO: 2725972 - RNA, 16 nt, Human
uuguauucucuccugu

SEQ ID NO: 2725973 - RNA, 15 nt, Human
uuguauucucuccug

SEQ ID NO: 2725974 - RNA, 19 nt, Human
uugucuacaccauuaugug

SEQ ID NO: 2725975 - RNA, 19 nt, Human
uuguauucucuccuguacc

SEQ ID NO: 2725976 - RNA, 13 nt, Human
uuggucuguguga

SEQ ID NO: 2725977 - RNA, 16 nt, Human
uuggguguauugugcg

SEQ ID NO: 2725978 - RNA, 15 nt, Human
uuggguguauugugc

SEQ ID NO: 2725979 - RNA, 13 nt, Human
uuggguguauugu

SEQ ID NO: 2725980 - RNA, 22 nt, Human
uuggguucaagcgauucuucug

SEQ ID NO: 2725981 - RNA, 14 nt, Human
uuguacauaaugcg

SEQ ID NO: 2725982 - RNA, 18 nt, Human
uuguacauaaugcgugca

SEQ ID NO: 2725983 - RNA, 23 nt, Human
uuguaaauuaacuuuuauaaacu

SEQ ID NO: 2725984 - RNA, 18 nt, Human
uuguaaauuaacuuuuau

SEQ ID NO: 2725985 - RNA, 16 nt, Human
uuguaaauuaacuuuu

SEQ ID NO: 2725986 - RNA, 15 nt, Human
uuguaaauuaacuuu

SEQ ID NO: 2725987 - RNA, 17 nt, Human
uuguaaauaguauuuga

SEQ ID NO: 2725988 - RNA, 17 nt, Human
uuguaaauagcucaggu

SEQ ID NO: 2725989 - RNA, 18 nt, Human
uuauggcuauaggugcua

SEQ ID NO: 2725990 - RNA, 16 nt, Human
uuauggcuuuugugca

SEQ ID NO: 2725991 - RNA, 14 nt, Human
uuauggcacaucag

SEQ ID NO: 2725992 - RNA, 18 nt, Human
uuauggcuuuugugcauu

SEQ ID NO: 2725993 - RNA, 17 nt, Human
uuauggcuuuugugcau

SEQ ID NO: 2725994 - RNA, 17 nt, Human
uuauggaacacucugag

SEQ ID NO: 2725995 - RNA, 21 nt, Human
uuauggacaaugacccagugg

SEQ ID NO: 2725996 - RNA, 18 nt, Human
uuauggaacacucugaga

SEQ ID NO: 2725997 - RNA, 20 nt, Human
uuauggaacacucugagacu

SEQ ID NO: 2725998 - RNA, 23 nt, Human
uuauuaaaaaucucaaauuucua

SEQ ID NO: 2725999 - RNA, 19 nt, Human
uuauuaaaugcccagcccc

SEQ ID NO: 2726000 - RNA, 21 nt, Human
uuauuaaaugcccagccccuu

SEQ ID NO: 2726001 - RNA, 16 nt, Human
uuauuacaguauaauu

SEQ ID NO: 2726002 - RNA, 22 nt, Human
uuaugauuaaguaaugauaacu

SEQ ID NO: 2726003 - RNA, 11 nt, Human
uuaucucaaaa

SEQ ID NO: 2726004 - RNA, 16 nt, Human
uuauauuuacaaaugg

SEQ ID NO: 2726005 - RNA, 20 nt, Human
uuauauuuauuacuguaaga

SEQ ID NO: 2726006 - RNA, 12 nt, Human
uuauauuugaaa

SEQ ID NO: 2726007 - RNA, 13 nt, Human
uuauauuugaaau

SEQ ID NO: 2726008 - RNA, 11 nt, Human
uuauaaucuuu

SEQ ID NO: 2726009 - RNA, 15 nt, Human
uuauaaugaaugaaa

SEQ ID NO: 2726010 - RNA, 18 nt, Human
uuauaauaauguuaacau

SEQ ID NO: 2726011 - RNA, 15 nt, Human
uuauaauaauguuaa

SEQ ID NO: 2726012 - RNA, 14 nt, Human
uuauaauuuuguga

SEQ ID NO: 2726013 - RNA, 15 nt, Human
uuauaauuuugugaa

SEQ ID NO: 2726014 - RNA, 12 nt, Human
uuauaauuuaaa

SEQ ID NO: 2726015 - RNA, 17 nt, Human
ugugaaaagaaaaauga

SEQ ID NO: 2726016 - RNA, 13 nt, Human
ugugaaaagaaaa

SEQ ID NO: 2726017 - RNA, 15 nt, Human
ugugaaaagaaaaau

SEQ ID NO: 2726018 - RNA, 16 nt, Human
uuauaauuuugugaag

SEQ ID NO: 2726019 - RNA, 17 nt, Human
uuauaauuuugugaagc

SEQ ID NO: 2726020 - RNA, 18 nt, Human
uuauaauuuugugaagca

SEQ ID NO: 2726021 - RNA, 14 nt, Human
uuauacaggucaua

SEQ ID NO: 2726022 - RNA, 23 nt, Human
uuauaucuauauuuuacauaaau

SEQ ID NO: 2726023 - RNA, 19 nt, Human
uuauaucuauauuuuacau

SEQ ID NO: 2726024 - RNA, 11 nt, Human
uuauacauaaa

SEQ ID NO: 2726025 - RNA, 22 nt, Human
uuauacaggucauauuaauaua

SEQ ID NO: 2726026 - RNA, 13 nt, Human
uuauacauaaaca

SEQ ID NO: 2726027 - RNA, 18 nt, Human
uuauaugcuauuucuaua

SEQ ID NO: 2726028 - RNA, 22 nt, Human
uuauaucuuguagcuuuaucaa

SEQ ID NO: 2726029 - RNA, 16 nt, Human
uuauaugcuauuucua

SEQ ID NO: 2726030 - RNA, 15 nt, Human
uuauaucuuguagcu

SEQ ID NO: 2726031 - RNA, 23 nt, Human
uuauaucugaggaauucuguaua

SEQ ID NO: 2726032 - RNA, 22 nt, Human
uuauaucugaggaauucuguau

SEQ ID NO: 2726033 - RNA, 14 nt, Human
uuauaucugaggaa

SEQ ID NO: 2726034 - RNA, 21 nt, Human
uuauaucugaggaauucugua

SEQ ID NO: 2726035 - RNA, 20 nt, Human
uuauaucugaggaauucugu

SEQ ID NO: 2726036 - RNA, 15 nt, Human
uucagagcugcccuc

SEQ ID NO: 2726037 - RNA, 17 nt, Human
uucagagcugcccucuc

SEQ ID NO: 2726038 - RNA, 17 nt, Human
uucagacagcugccugg

SEQ ID NO: 2726039 - RNA, 18 nt, Human
uucagagcugcccucucc

SEQ ID NO: 2726040 - RNA, 19 nt, Human
uucagagcugcccucuccu

SEQ ID NO: 2726041 - RNA, 20 nt, Human
uucagagcugcccucuccug

SEQ ID NO: 2726042 - RNA, 20 nt, Human
uucagauaaucacaauacau

SEQ ID NO: 2726043 - RNA, 20 nt, Human
uucagauacuggauuguacu

SEQ ID NO: 2726044 - RNA, 16 nt, Human
uucagauacuggauug

SEQ ID NO: 2726045 - RNA, 13 nt, Human
uucacggaagagc

SEQ ID NO: 2726046 - RNA, 22 nt, Human
uucaccuuuguccccaccgcag

SEQ ID NO: 2726047 - RNA, 17 nt, Human
uucacggaagagccuug

SEQ ID NO: 2726048 - RNA, 14 nt, Human
uucagacagcugcc

SEQ ID NO: 2726049 - RNA, 15 nt, Human
uucagacagcugccu

SEQ ID NO: 2726050 - RNA, 16 nt, Human
uucagacagcugccug

SEQ ID NO: 2726051 - RNA, 13 nt, Human
uucacccuuuucu

SEQ ID NO: 2726052 - RNA, 14 nt, Human
uucaccuuuguccc

SEQ ID NO: 2726053 - RNA, 19 nt, Human
uucaccuuuguccccaccg

SEQ ID NO: 2726054 - RNA, 20 nt, Human
uucaccuuuguccccaccgc

SEQ ID NO: 2726055 - RNA, 22 nt, Human
uucaauaggaaaaacugauuuu

SEQ ID NO: 2726056 - RNA, 21 nt, Human
uucaauaggaaaaacugauuu

SEQ ID NO: 2726057 - RNA, 20 nt, Human
uuauuuuaauaauguuucaa

SEQ ID NO: 2726058 - RNA, 14 nt, Human
uuauuuuauuauga

SEQ ID NO: 2726059 - RNA, 18 nt, Human
uuauuuuauuaugcauga

SEQ ID NO: 2726060 - RNA, 16 nt, Human
uuauuuuauuaugaaa

SEQ ID NO: 2726061 - RNA, 15 nt, Human
uuauuuuauuaugaa

SEQ ID NO: 2726062 - RNA, 17 nt, Human
uuauuuuaauaauguuu

SEQ ID NO: 2726063 - RNA, 19 nt, Human
uuauuuuaauaauguuuca

SEQ ID NO: 2726064 - RNA, 22 nt, Human
uuauuuuggaaaauaaauuauu

SEQ ID NO: 2726065 - RNA, 20 nt, Human
uuauuuuauuaugaaacuug

SEQ ID NO: 2726066 - RNA, 14 nt, Human
uuauuuuguucaua

SEQ ID NO: 2726067 - RNA, 16 nt, Human
uuauuuuguucauaca

SEQ ID NO: 2726068 - RNA, 16 nt, Human
uucaauaauaaauauu

SEQ ID NO: 2726069 - RNA, 21 nt, Human
uucaacagguuuuccugaaga

SEQ ID NO: 2726070 - RNA, 18 nt, Human
uucaaauguauuacagug

SEQ ID NO: 2726071 - RNA, 18 nt, Human
uuccagauccuggaaauc

SEQ ID NO: 2726072 - RNA, 19 nt, Human
uuccaacccucaucaccaa

SEQ ID NO: 2726073 - RNA, 14 nt, Human
uuccauggacuuug

SEQ ID NO: 2726074 - RNA, 15 nt, Human
uuccauggacuuugu

SEQ ID NO: 2726075 - RNA, 16 nt, Human
uuccaaaguacacugu

SEQ ID NO: 2726076 - RNA, 13 nt, Human
uuccaaaguacac

SEQ ID NO: 2726077 - RNA, 21 nt, Human
uuccaaaaagauuuucagaaa

SEQ ID NO: 2726078 - RNA, 23 nt, Human
uucaguuauuauauuuacaaaug

SEQ ID NO: 2726079 - RNA, 15 nt, Human
uucauaaccuagccu

SEQ ID NO: 2726080 - RNA, 15 nt, Human
uucauccuccucaga

SEQ ID NO: 2726081 - RNA, 19 nt, Human
uucauccuccucagaucuu

SEQ ID NO: 2726082 - RNA, 21 nt, Human
uucagcugguugagguuucaa

SEQ ID NO: 2726083 - RNA, 22 nt, Human
uucagcuccagcucaccagccc

SEQ ID NO: 2726084 - RNA, 12 nt, Human
uucagcuccagc

SEQ ID NO: 2726085 - RNA, 15 nt, Human
uucagcuccagcuca

SEQ ID NO: 2726086 - RNA, 22 nt, Human
uucagcuuguaaauagcucagg

SEQ ID NO: 2726087 - RNA, 14 nt, Human
uucaguggcagcug

SEQ ID NO: 2726088 - RNA, 13 nt, Human
uucaguggcagcu

SEQ ID NO: 2726089 - RNA, 13 nt, Human
uucaguguacaug

SEQ ID NO: 2726090 - RNA, 12 nt, Human
uucaguguacau

SEQ ID NO: 2726091 - RNA, 17 nt, Human
uucaguggcagcugcuu

SEQ ID NO: 2726092 - RNA, 15 nt, Human
uucaguggcagcugc

SEQ ID NO: 2726093 - RNA, 16 nt, Human
uucaguggcagcugcu

SEQ ID NO: 2726094 - RNA, 18 nt, Human
uucggugagcuacaaaug

SEQ ID NO: 2726095 - RNA, 21 nt, Human
uuccuugaguugauucagcuc

SEQ ID NO: 2726096 - RNA, 16 nt, Human
uuccauggccucuuca

SEQ ID NO: 2726097 - RNA, 12 nt, Human
uuccauggccuc

SEQ ID NO: 2726098 - RNA, 20 nt, Human
uuccugaggcugggcucccu

SEQ ID NO: 2726099 - RNA, 15 nt, Human
uuccugaggcugggc

SEQ ID NO: 2726100 - RNA, 23 nt, Human
uuccugaugcuucuucagagacu

SEQ ID NO: 2726101 - RNA, 15 nt, Human
uucuacauacuaugg

SEQ ID NO: 2726102 - RNA, 22 nt, Human
uucuacauaaguaauucaagaa

SEQ ID NO: 2726103 - RNA, 12 nt, Human
uucuacccagcg

SEQ ID NO: 2726104 - RNA, 19 nt, Human
uucuacccagcgagcccug

SEQ ID NO: 2726105 - RNA, 13 nt, Human
uucuacgccaggg

SEQ ID NO: 2726106 - RNA, 20 nt, Human
uucuacccagcgagcccugg

SEQ ID NO: 2726107 - RNA, 21 nt, Human
uucuacccagcgagcccuggu

SEQ ID NO: 2726108 - RNA, 14 nt, Human
uucuacccaggugc

SEQ ID NO: 2726109 - RNA, 22 nt, Human
uucuacucgaguuacagacaaa

SEQ ID NO: 2726110 - RNA, 21 nt, Human
uucugagaaagacuauucaaa

SEQ ID NO: 2726111 - RNA, 16 nt, Human
uucugagaaagacuau

SEQ ID NO: 2726112 - RNA, 21 nt, Human
uucugacccugcuucaaauau

SEQ ID NO: 2726113 - RNA, 18 nt, Human
uucugacccugcuucaaa

SEQ ID NO: 2726114 - RNA, 16 nt, Human
uucucugcccuccaag

SEQ ID NO: 2726115 - RNA, 17 nt, Human
uucucugcccuccaaga

SEQ ID NO: 2726116 - RNA, 23 nt, Human
uucugacccaugcugcccuguga

SEQ ID NO: 2726117 - RNA, 22 nt, Human
uucugacccaugcugcccugug

SEQ ID NO: 2726118 - RNA, 21 nt, Human
uucugauagaggaagccugau

SEQ ID NO: 2726119 - RNA, 13 nt, Human
uucugauagagga

SEQ ID NO: 2726120 - RNA, 19 nt, Human
uucugauccuaguuccacc

SEQ ID NO: 2726121 - RNA, 19 nt, Human
uucugcucacauaucuguc

SEQ ID NO: 2726122 - RNA, 21 nt, Human
uucuaugaaauauuauguuaa

SEQ ID NO: 2726123 - RNA, 14 nt, Human
uucuaugaaauauu

SEQ ID NO: 2726124 - RNA, 16 nt, Human
uucuccacccugcucu

SEQ ID NO: 2726125 - RNA, 20 nt, Human
uucuccaccugccagggaca

SEQ ID NO: 2726126 - RNA, 16 nt, Human
uucuccaccugccagg

SEQ ID NO: 2726127 - RNA, 18 nt, Human
uucuccaccugccaggga

SEQ ID NO: 2726128 - RNA, 21 nt, Human
uucuccaccucccacaaagga

SEQ ID NO: 2726129 - RNA, 12 nt, Human
uucuccaccugc

SEQ ID NO: 2726130 - RNA, 14 nt, Human
uucuccaccugcca

SEQ ID NO: 2726131 - RNA, 15 nt, Human
uucuccaccugccag

SEQ ID NO: 2726132 - RNA, 19 nt, Human
uucucuccuguaccucuug

SEQ ID NO: 2726133 - RNA, 14 nt, Human
uucucugaggacac

SEQ ID NO: 2726134 - RNA, 20 nt, Human
uucucugaggacacuaacca

SEQ ID NO: 2726135 - RNA, 11 nt, Human
uucucugcccu

SEQ ID NO: 2726136 - RNA, 12 nt, Human
uucucugcccuc

SEQ ID NO: 2726137 - RNA, 13 nt, Human
uucucuccagccc

SEQ ID NO: 2726138 - RNA, 14 nt, Human
uucucuccagcccc

SEQ ID NO: 2726139 - RNA, 18 nt, Human
uucucuccuguaccucuu

SEQ ID NO: 2726140 - RNA, 14 nt, Human
uucucuccuguacc

SEQ ID NO: 2726141 - RNA, 15 nt, Human
uucucuccagccccu

SEQ ID NO: 2726142 - RNA, 16 nt, Human
uucucuccagccccug

SEQ ID NO: 2726143 - RNA, 17 nt, Human
uugaccgugaggccaga

SEQ ID NO: 2726144 - RNA, 21 nt, Human
uugaccucaggugauccaccc

SEQ ID NO: 2726145 - RNA, 15 nt, Human
uugaccucugcagca

SEQ ID NO: 2726146 - RNA, 14 nt, Human
uugaccucugcagc

SEQ ID NO: 2726147 - RNA, 16 nt, Human
uugaccucugcagcaa

SEQ ID NO: 2726148 - RNA, 17 nt, Human
uugacgccaucccagcc

SEQ ID NO: 2726149 - RNA, 18 nt, Human
uugacgccaucccagccc

SEQ ID NO: 2726150 - RNA, 19 nt, Human
uugacgccaucccagcccc

SEQ ID NO: 2726151 - RNA, 12 nt, Human
uugaauuuuaca

SEQ ID NO: 2726152 - RNA, 21 nt, Human
uugaauuuuguguuagagauu

SEQ ID NO: 2726153 - RNA, 17 nt, Human
uugaauuuuguguuaga

SEQ ID NO: 2726154 - RNA, 13 nt, Human
uugaacuuugacc

SEQ ID NO: 2726155 - RNA, 18 nt, Human
uugaacuggguacuugug

SEQ ID NO: 2726156 - RNA, 14 nt, Human
uugaauuguaagga

SEQ ID NO: 2726157 - RNA, 22 nt, Human
uugaauuuauuggcuuuucuga

SEQ ID NO: 2726158 - RNA, 18 nt, Human
uugaauuuauuggcuuuu

SEQ ID NO: 2726159 - RNA, 15 nt, Human
uugaauuuauuggcu

SEQ ID NO: 2726160 - RNA, 23 nt, Human
uugaugaagaaguugauaugccu

SEQ ID NO: 2726161 - RNA, 13 nt, Human
uugaugaagaagu

SEQ ID NO: 2726162 - RNA, 14 nt, Human
uugaugaagaaguu

SEQ ID NO: 2726163 - RNA, 23 nt, Human
uugauagcacagacccugcccug

SEQ ID NO: 2726164 - RNA, 23 nt, Human
uugauauccucuuugagugaagc

SEQ ID NO: 2726165 - RNA, 11 nt, Human
uugagccuggg

SEQ ID NO: 2726166 - RNA, 13 nt, Human
uugaggguugggc

SEQ ID NO: 2726167 - RNA, 16 nt, Human
uugaggguugggcugg

SEQ ID NO: 2726168 - RNA, 21 nt, Human
uugcaaaguaucccuacugua

SEQ ID NO: 2726169 - RNA, 16 nt, Human
uugaugaucuuugcag

SEQ ID NO: 2726170 - RNA, 17 nt, Human
uucugucuucacaacag

SEQ ID NO: 2726171 - RNA, 19 nt, Human
uucuguccuacucuguguc

SEQ ID NO: 2726172 - RNA, 18 nt, Human
uucuguauuuuguuuuug

SEQ ID NO: 2726173 - RNA, 18 nt, Human
uucugcuuguguuaagua

SEQ ID NO: 2726174 - RNA, 19 nt, Human
uucugcuucagccucccga

SEQ ID NO: 2726175 - RNA, 15 nt, Human
uucugcuucagccuc

SEQ ID NO: 2726176 - RNA, 16 nt, Human
uucugcuucagccucc

SEQ ID NO: 2726177 - RNA, 14 nt, Human
uucugcuucagccu

SEQ ID NO: 2726178 - RNA, 15 nt, Human
uugaacuccuggccu

SEQ ID NO: 2726179 - RNA, 16 nt, Human
uugaacuccuggccuc

SEQ ID NO: 2726180 - RNA, 21 nt, Human
uucuuuccaaaguacacuguu

SEQ ID NO: 2726181 - RNA, 20 nt, Human
uugaaaaaccauuuugcugu

SEQ ID NO: 2726182 - RNA, 23 nt, Human
uugaaaacacuguucucugcccu

SEQ ID NO: 2726183 - RNA, 22 nt, Human
uugaaaacacuguucucugccc

SEQ ID NO: 2726184 - RNA, 12 nt, Human
uucuuucagcca

SEQ ID NO: 2726185 - RNA, 14 nt, Human
uucuuuccaaagua

SEQ ID NO: 2726186 - RNA, 14 nt, Human
uucuuguguguuua

SEQ ID NO: 2726187 - RNA, 13 nt, Human
uucuuccucccuc

SEQ ID NO: 2726188 - RNA, 21 nt, Human
uucuuguguguuuauugucaa

SEQ ID NO: 2726189 - RNA, 21 nt, Human
uucuuauacauuugauaaagu

SEQ ID NO: 2726190 - RNA, 17 nt, Human
uucuuccaaaaagauuu

SEQ ID NO: 2726191 - RNA, 21 nt, Human
uucuuccacaagagcccaggc

SEQ ID NO: 2726192 - RNA, 17 nt, Human
aaaacacauuuuucuua

SEQ ID NO: 2726193 - RNA, 19 nt, Human
aaaacacuguucucugccc

SEQ ID NO: 2726194 - RNA, 11 nt, Human
aaaagaaaaag

SEQ ID NO: 2726195 - RNA, 12 nt, Human
aaaagaauauuu

SEQ ID NO: 2726196 - RNA, 20 nt, Human
aaaagacaaggaaaaaauaa

SEQ ID NO: 2726197 - RNA, 13 nt, Human
aaaagaauauuuu

SEQ ID NO: 2726198 - RNA, 11 nt, Human
aaaagaaugau

SEQ ID NO: 2726199 - RNA, 13 nt, Human
aaaagacuccaaa

SEQ ID NO: 2726200 - RNA, 10 nt, Human
aaaaucauuu

SEQ ID NO: 2726201 - RNA, 12 nt, Human
aaaaucauuucu

SEQ ID NO: 2726202 - RNA, 11 nt, Human
aaaaucauuuc

SEQ ID NO: 2726203 - RNA, 13 nt, Human
aaaaucagccugc

SEQ ID NO: 2726204 - RNA, 16 nt, Human
aaaauaaaacuuuuua

SEQ ID NO: 2726205 - RNA, 17 nt, Human
aaaaucagccugcucca

SEQ ID NO: 2726206 - RNA, 21 nt, Human
aaaaucagccugcuccagcug

SEQ ID NO: 2726207 - RNA, 14 nt, Human
aaaauaaaacuuuu

SEQ ID NO: 2726208 - RNA, 18 nt, Human
aaaaguuuaauauuaaag

SEQ ID NO: 2726209 - RNA, 18 nt, Human
aaaaguugaauuuuacau

SEQ ID NO: 2726210 - RNA, 16 nt, Human
aaaaguuuaauauuaa

SEQ ID NO: 2726211 - RNA, 14 nt, Human
aaaaguuuaauauu

SEQ ID NO: 2726212 - RNA, 17 nt, Human
aaagcauuguaaaugug

SEQ ID NO: 2726213 - RNA, 15 nt, Human
aaagcauuguaaaug

SEQ ID NO: 2726214 - RNA, 18 nt, Human
aaagccugcaauuucaua

SEQ ID NO: 2726215 - RNA, 13 nt, Human
aaagccugcaauu

SEQ ID NO: 2726216 - RNA, 23 nt, Human
aaagccauguuuauuacaguaua

SEQ ID NO: 2726217 - RNA, 18 nt, Human
aaagccauguuuauuaca

SEQ ID NO: 2726218 - RNA, 17 nt, Human
aaagccauguuuauuac

SEQ ID NO: 2726219 - RNA, 16 nt, Human
aaagccauguuuauua

SEQ ID NO: 2726220 - RNA, 14 nt, Human
aaagccauguuuau

SEQ ID NO: 2726221 - RNA, 20 nt, Human
aaagauauuuugcuuuguga

SEQ ID NO: 2726222 - RNA, 21 nt, Human
aaaaucauuucugcaucagcu

SEQ ID NO: 2726223 - RNA, 16 nt, Human
aaaaucucaaauuucu

SEQ ID NO: 2726224 - RNA, 15 nt, Human
aaaaucucaaauuuc

SEQ ID NO: 2726225 - RNA, 18 nt, Human
aaaaucucaaauuucuaa

SEQ ID NO: 2726226 - RNA, 15 nt, Human
aaacugcacugucaa

SEQ ID NO: 2726227 - RNA, 12 nt, Human
aaacucuuaaaa

SEQ ID NO: 2726228 - RNA, 23 nt, Human
aaacucuuaaaacccaagugccu

SEQ ID NO: 2726229 - RNA, 22 nt, Human
aaacugauuuuuuuuuccuuca

SEQ ID NO: 2726230 - RNA, 23 nt, Human
aaacugauuuuuuuuuccuucag

SEQ ID NO: 2726231 - RNA, 15 nt, Human
aaaccgccaaggcug

SEQ ID NO: 2726232 - RNA, 16 nt, Human
aaaccgccaaggcugg

SEQ ID NO: 2726233 - RNA, 22 nt, Human
aaaccgaacugauguaaguaaa

SEQ ID NO: 2726234 - RNA, 12 nt, Human
aaacccagcucu

SEQ ID NO: 2726235 - RNA, 16 nt, Human
aaacccagcucugguc

SEQ ID NO: 2726236 - RNA, 22 nt, Human
aaaccaguauuguacaaaguau

SEQ ID NO: 2726237 - RNA, 18 nt, Human
aaaccaguauuguacaaa

SEQ ID NO: 2726238 - RNA, 17 nt, Human
aaaccaguauuguacaa

SEQ ID NO: 2726239 - RNA, 16 nt, Human
aaaccaguauuguaca

SEQ ID NO: 2726240 - RNA, 14 nt, Human
aaaccaguauugua

SEQ ID NO: 2726241 - RNA, 21 nt, Human
aaauauuuauuuuaauaaugu

SEQ ID NO: 2726242 - RNA, 18 nt, Human
aaaucucaauauuucaga

SEQ ID NO: 2726243 - RNA, 23 nt, Human
aaaucucaaauuuggauugcuaa

SEQ ID NO: 2726244 - RNA, 13 nt, Human
aaaucuuuuugcu

SEQ ID NO: 2726245 - RNA, 14 nt, Human
aaaucuuuuugcuu

SEQ ID NO: 2726246 - RNA, 23 nt, Human
aaauggacuguggugacuuugga

SEQ ID NO: 2726247 - RNA, 20 nt, Human
aaauggacuguggugacuuu

SEQ ID NO: 2726248 - RNA, 21 nt, Human
aaauggacuguggugacuuug

SEQ ID NO: 2726249 - RNA, 20 nt, Human
aaaggaugcccaaagaugca

SEQ ID NO: 2726250 - RNA, 14 nt, Human
aaaggaugcacaga

SEQ ID NO: 2726251 - RNA, 22 nt, Human
aaauguugacaugggacauuug

SEQ ID NO: 2726252 - RNA, 23 nt, Human
aaauguugacaugggacauuugc

SEQ ID NO: 2726253 - RNA, 23 nt, Human
aaccuuuugagugccuuacacaa

SEQ ID NO: 2726254 - RNA, 16 nt, Human
aaccuuuugagugccu

SEQ ID NO: 2726255 - RNA, 15 nt, Human
aaauucuugcaaagu

SEQ ID NO: 2726256 - RNA, 23 nt, Human
aaauucuucuccacuuucuagcc

SEQ ID NO: 2726257 - RNA, 11 nt, Human
aacaggcagau

SEQ ID NO: 2726258 - RNA, 20 nt, Human
aaugaauacuuuauaaagga

SEQ ID NO: 2726259 - RNA, 20 nt, Human
aaugaugccaugaggaacaa

SEQ ID NO: 2726260 - RNA, 20 nt, Human
aaugaaagacuguacaaagu

SEQ ID NO: 2726261 - RNA, 18 nt, Human
aaugaaagacuguacaaa

SEQ ID NO: 2726262 - RNA, 21 nt, Human
aaugaaagacuguacaaagua

SEQ ID NO: 2726263 - RNA, 20 nt, Human
aaugaagauacugaaauaaa

SEQ ID NO: 2726264 - RNA, 16 nt, Human
aaucucaauauuucag

SEQ ID NO: 2726265 - RNA, 16 nt, Human
aaucucauaauuuaua

SEQ ID NO: 2726266 - RNA, 22 nt, Human
aauauuaaagccauguuuauua

SEQ ID NO: 2726267 - RNA, 13 nt, Human
aauauuaagaaag

SEQ ID NO: 2726268 - RNA, 23 nt, Human
aauauguggaguucaucuugaau

SEQ ID NO: 2726269 - RNA, 21 nt, Human
aaucaccgaaaacguggcugc

SEQ ID NO: 2726270 - RNA, 23 nt, Human
aaucaccgaaaacguggcugcuu

SEQ ID NO: 2726271 - RNA, 19 nt, Human
aauaauguuaacauggaca

SEQ ID NO: 2726272 - RNA, 14 nt, Human
aauaaagcagcguu

SEQ ID NO: 2726273 - RNA, 22 nt, Human
aauaaugugaaacuggauuaaa

SEQ ID NO: 2726274 - RNA, 17 nt, Human
aauaaugugaaacugga

SEQ ID NO: 2726275 - RNA, 17 nt, Human
aaguuuaauauuaaagc

SEQ ID NO: 2726276 - RNA, 15 nt, Human
aaguuuaauauuaaa

SEQ ID NO: 2726277 - RNA, 24 nt, Human
aaguugaauuuauuggcuuuucug

SEQ ID NO: 2726278 - RNA, 23 nt, Human
aaguugaauuuauuggcuuuucu

SEQ ID NO: 2726279 - RNA, 12 nt, Human
aagugcugggau

SEQ ID NO: 2726280 - RNA, 14 nt, Human
aaguugaauuuauu

SEQ ID NO: 2726281 - RNA, 17 nt, Human
aaguugaauuuauuggc

SEQ ID NO: 2726282 - RNA, 15 nt, Human
aaguugaauuuauug

SEQ ID NO: 2726283 - RNA, 22 nt, Human
aagugcugcauuuaaaagauac

SEQ ID NO: 2726284 - RNA, 21 nt, Human
aagacaaggaaaaaauaacaa

SEQ ID NO: 2726285 - RNA, 20 nt, Human
aagaagacugcauuauauuu

SEQ ID NO: 2726286 - RNA, 15 nt, Human
aagaagacugcauua

SEQ ID NO: 2726287 - RNA, 19 nt, Human
aagacaaugugaaaagaaa

SEQ ID NO: 2726288 - RNA, 22 nt, Human
aagacaaugacuuacuguacau

SEQ ID NO: 2726289 - RNA, 20 nt, Human
aagacaaugugaaaagaaaa

SEQ ID NO: 2726290 - RNA, 20 nt, Human
aacgcaggcccccaggugcc

SEQ ID NO: 2726291 - RNA, 12 nt, Human
aagaacugaaau

SEQ ID NO: 2726292 - RNA, 13 nt, Human
aagaacugaaauc

SEQ ID NO: 2726293 - RNA, 11 nt, Human
aagaacugaaa

SEQ ID NO: 2726294 - RNA, 15 nt, Human
aagaacugaaaucau

SEQ ID NO: 2726295 - RNA, 17 nt, Human
aagaccacguuucuaaa

SEQ ID NO: 2726296 - RNA, 15 nt, Human
aagaccacguuucua

SEQ ID NO: 2726297 - RNA, 13 nt, Human
aagagaaaaaaua

SEQ ID NO: 2726298 - RNA, 19 nt, Human
aagacuuuucuuucagcca

SEQ ID NO: 2726299 - RNA, 21 nt, Human
aagacuuuuccaacccucauc

SEQ ID NO: 2726300 - RNA, 12 nt, Human
aagacuuuucuu

SEQ ID NO: 2726301 - RNA, 17 nt, Human
aagacuuuuccaacccu

SEQ ID NO: 2726302 - RNA, 14 nt, Human
aagagagaaaauaa

SEQ ID NO: 2726303 - RNA, 19 nt, Human
aagaguauuuuugacagaa

SEQ ID NO: 2726304 - RNA, 16 nt, Human
aagaguaguaauagag

SEQ ID NO: 2726305 - RNA, 20 nt, Human
aagaguaggaagacuuugga

SEQ ID NO: 2726306 - RNA, 19 nt, Human
aagauaauauuaaggaaga

SEQ ID NO: 2726307 - RNA, 21 nt, Human
aagauaauauuaaggaagaca

SEQ ID NO: 2726308 - RNA, 14 nt, Human
aagauaaaugugcu

SEQ ID NO: 2726309 - RNA, 17 nt, Human
aagauacaguuacucag

SEQ ID NO: 2726310 - RNA, 14 nt, Human
aagcggcuggcagc

SEQ ID NO: 2726311 - RNA, 15 nt, Human
aagcgugagccacug

SEQ ID NO: 2726312 - RNA, 13 nt, Human
aagcuacuuauug

SEQ ID NO: 2726313 - RNA, 15 nt, Human
aaggcaaggcuguca

SEQ ID NO: 2726314 - RNA, 23 nt, Human
aaggacuuguuagaucuaguuca

SEQ ID NO: 2726315 - RNA, 13 nt, Human
aaggcaaggcugu

SEQ ID NO: 2726316 - RNA, 13 nt, Human
aagcugcacccuc

SEQ ID NO: 2726317 - RNA, 19 nt, Human
aagcugcacccucaggcag

SEQ ID NO: 2726318 - RNA, 23 nt, Human
aaggacuucuuuaauuuuggaau

SEQ ID NO: 2726319 - RNA, 21 nt, Human
aaggacuuguuagaucuaguu

SEQ ID NO: 2726320 - RNA, 15 nt, Human
aaggacuuguuagau

SEQ ID NO: 2726321 - RNA, 15 nt, Human
aauuggagcucgugg

SEQ ID NO: 2726322 - RNA, 14 nt, Human
aauucuguuuuucu

SEQ ID NO: 2726323 - RNA, 18 nt, Human
aauucuguuuuucuaggc

SEQ ID NO: 2726324 - RNA, 22 nt, Human
aauuguaaggaaugauuaauua

SEQ ID NO: 2726325 - RNA, 20 nt, Human
aauucuguauagauuagaga

SEQ ID NO: 2726326 - RNA, 14 nt, Human
aauucuguauagau

SEQ ID NO: 2726327 - RNA, 13 nt, Human
aauucuguauaga

SEQ ID NO: 2726328 - RNA, 12 nt, Human
aauucuguauag

SEQ ID NO: 2726329 - RNA, 21 nt, Human
aauucucauuugucacacacu

SEQ ID NO: 2726330 - RNA, 15 nt, Human
aauucucuuauccaa

SEQ ID NO: 2726331 - RNA, 17 nt, Human
aauucucuaguuugauu

SEQ ID NO: 2726332 - RNA, 15 nt, Human
aauucucuaguuuga

SEQ ID NO: 2726333 - RNA, 14 nt, Human
aauucuacuuugag

SEQ ID NO: 2726334 - RNA, 19 nt, Human
aauucucagaaucucaaau

SEQ ID NO: 2726335 - RNA, 17 nt, Human
aauuauauaaguauucu

SEQ ID NO: 2726336 - RNA, 15 nt, Human
aauuauauaaguauu

SEQ ID NO: 2726337 - RNA, 16 nt, Human
aauuauauaaguauuc

SEQ ID NO: 2726338 - RNA, 21 nt, Human
aauuauaugcuauuucuauau

SEQ ID NO: 2726339 - RNA, 20 nt, Human
aauuauaugcuauuucuaua

SEQ ID NO: 2726340 - RNA, 19 nt, Human
aauuauaugcuauuucuau

SEQ ID NO: 2726341 - RNA, 23 nt, Human
aauuauaucugaggaauucugua

SEQ ID NO: 2726342 - RNA, 22 nt, Human
aauuauaucugaggaauucugu

SEQ ID NO: 2726343 - RNA, 20 nt, Human
aauuauaucugaggaauucu

SEQ ID NO: 2726344 - RNA, 12 nt, Human
aauuaugaaacu

SEQ ID NO: 2726345 - RNA, 15 nt, Human
aauuaugaaacuuuu

SEQ ID NO: 2726346 - RNA, 13 nt, Human
aauuaugaaacuu

SEQ ID NO: 2726347 - RNA, 19 nt, Human
aauuaugaguuauuuuuau

SEQ ID NO: 2726348 - RNA, 18 nt, Human
aauuaugaaacuuuugga

SEQ ID NO: 2726349 - RNA, 11 nt, Human
aauuguaauag

SEQ ID NO: 2726350 - RNA, 14 nt, Human
aauuguaauuauau

SEQ ID NO: 2726351 - RNA, 16 nt, Human
aauuguaauuauaucu

SEQ ID NO: 2726352 - RNA, 15 nt, Human
aauuguaauuauauc

SEQ ID NO: 2726353 - RNA, 22 nt, Human
aauuucauaccuaucaucuuaa

SEQ ID NO: 2726354 - RNA, 17 nt, Human
aauuguaauuauaucug

SEQ ID NO: 2726355 - RNA, 16 nt, Human
aauuucauaugcugua

SEQ ID NO: 2726356 - RNA, 18 nt, Human
aauuucauaugcuguaua

SEQ ID NO: 2726357 - RNA, 15 nt, Human
aauuucccaaagcag

SEQ ID NO: 2726358 - RNA, 17 nt, Human
aauuucccaaagcagug

SEQ ID NO: 2726359 - RNA, 15 nt, Human
aauuuccugggagcu

SEQ ID NO: 2726360 - RNA, 12 nt, Human
aauuuccuggga

SEQ ID NO: 2726361 - RNA, 13 nt, Human
acaccagagccca

SEQ ID NO: 2726362 - RNA, 18 nt, Human
acaccagagcccaccuug

SEQ ID NO: 2726363 - RNA, 23 nt, Human
acaccagagcccaccuuggcuca

SEQ ID NO: 2726364 - RNA, 18 nt, Human
acacagcucuucuccagg

SEQ ID NO: 2726365 - RNA, 14 nt, Human
acacagcucuucuc

SEQ ID NO: 2726366 - RNA, 16 nt, Human
acacagcucuucucca

SEQ ID NO: 2726367 - RNA, 15 nt, Human
acaaguuaaauaaau

SEQ ID NO: 2726368 - RNA, 16 nt, Human
acaaggcaaggcuguc

SEQ ID NO: 2726369 - RNA, 17 nt, Human
acaaggcaaggcuguca

SEQ ID NO: 2726370 - RNA, 19 nt, Human
acaaggcaaggcugucaau

SEQ ID NO: 2726371 - RNA, 15 nt, Human
acaaggcaaggcugu

SEQ ID NO: 2726372 - RNA, 24 nt, Human
acaggaugguucccuugaugaaga

SEQ ID NO: 2726373 - RNA, 22 nt, Human
acaggaugguucccuugaugaa

SEQ ID NO: 2726374 - RNA, 15 nt, Human
acaggcaaugcuggc

SEQ ID NO: 2726375 - RNA, 16 nt, Human
acaggcaaugcuggcu

SEQ ID NO: 2726376 - RNA, 14 nt, Human
acaggcacccacca

SEQ ID NO: 2726377 - RNA, 17 nt, Human
acaggcaaugcuggcug

SEQ ID NO: 2726378 - RNA, 19 nt, Human
acagcucuucuccaggcug

SEQ ID NO: 2726379 - RNA, 20 nt, Human
acagcucuucuccaggcugu

SEQ ID NO: 2726380 - RNA, 18 nt, Human
acagcucuucuccaggcu

SEQ ID NO: 2726381 - RNA, 23 nt, Human
acagugaucaaguuauuuuuaau

SEQ ID NO: 2726382 - RNA, 23 nt, Human
acaggcacccaccaucaugucug

SEQ ID NO: 2726383 - RNA, 15 nt, Human
acauuugcucaugga

SEQ ID NO: 2726384 - RNA, 16 nt, Human
acauuuguauaaaaua

SEQ ID NO: 2726385 - RNA, 19 nt, Human
acauuuguauaaaauaauu

SEQ ID NO: 2726386 - RNA, 21 nt, Human
acauuuguauaaaauaauuuu

SEQ ID NO: 2726387 - RNA, 14 nt, Human
accaacgucugugc

SEQ ID NO: 2726388 - RNA, 17 nt, Human
accaacgucugugccau

SEQ ID NO: 2726389 - RNA, 14 nt, Human
accacguuucuaaa

SEQ ID NO: 2726390 - RNA, 13 nt, Human
accacguuucuaa

SEQ ID NO: 2726391 - RNA, 18 nt, Human
accacgcuggaccuugaa

SEQ ID NO: 2726392 - RNA, 14 nt, Human
accacgcuggaccu

SEQ ID NO: 2726393 - RNA, 16 nt, Human
accacgcuggaccuug

SEQ ID NO: 2726394 - RNA, 21 nt, Human
accaacgucugugccauuuug

SEQ ID NO: 2726395 - RNA, 12 nt, Human
accagagcugcc

SEQ ID NO: 2726396 - RNA, 13 nt, Human
accagagcugcca

SEQ ID NO: 2726397 - RNA, 14 nt, Human
accagagcugccac

SEQ ID NO: 2726398 - RNA, 16 nt, Human
accagagcugccaccu

SEQ ID NO: 2726399 - RNA, 19 nt, Human
acauguuuuucuucucccu

SEQ ID NO: 2726400 - RNA, 14 nt, Human
acauguuaaaccau

SEQ ID NO: 2726401 - RNA, 23 nt, Human
acauguuaaaccaugggauaaau

SEQ ID NO: 2726402 - RNA, 21 nt, Human
acauguuaaaccaugggauaa

SEQ ID NO: 2726403 - RNA, 16 nt, Human
acauguuaaaccaugg

SEQ ID NO: 2726404 - RNA, 16 nt, Human
acauacaauuccaaac

SEQ ID NO: 2726405 - RNA, 20 nt, Human
acauacaggaagguagaaau

SEQ ID NO: 2726406 - RNA, 20 nt, Human
acauaaauuuaguauuuugu

SEQ ID NO: 2726407 - RNA, 20 nt, Human
acauaaguaauucaagaaaa

SEQ ID NO: 2726408 - RNA, 21 nt, Human
acauaaguaauucaagaaaac

SEQ ID NO: 2726409 - RNA, 13 nt, Human
acaugcacgugug

SEQ ID NO: 2726410 - RNA, 20 nt, Human
acaugccucucucaggccaa

SEQ ID NO: 2726411 - RNA, 19 nt, Human
acgauuucuguuuagauaa

SEQ ID NO: 2726412 - RNA, 23 nt, Human
acgauuucuguuuagauaauaca

SEQ ID NO: 2726413 - RNA, 20 nt, Human
acgauuucuguuuagauaau

SEQ ID NO: 2726414 - RNA, 17 nt, Human
acggacacucaaaagcu

SEQ ID NO: 2726415 - RNA, 19 nt, Human
acggaauaguuggcuagga

SEQ ID NO: 2726416 - RNA, 12 nt, Human
acgucugugcca

SEQ ID NO: 2726417 - RNA, 13 nt, Human
acgucugugccau

SEQ ID NO: 2726418 - RNA, 14 nt, Human
acgucuuaaauauu

SEQ ID NO: 2726419 - RNA, 13 nt, Human
acgucuuaaauau

SEQ ID NO: 2726420 - RNA, 22 nt, Human
acgcugugcugcccugcccacc

SEQ ID NO: 2726421 - RNA, 19 nt, Human
acgcugugcugcccugccc

SEQ ID NO: 2726422 - RNA, 20 nt, Human
acuaauguguaagacaaaaa

SEQ ID NO: 2726423 - RNA, 18 nt, Human
acuaauggggcggugaga

SEQ ID NO: 2726424 - RNA, 20 nt, Human
accucugccucagaaaacaa

SEQ ID NO: 2726425 - RNA, 12 nt, Human
accucugccuga

SEQ ID NO: 2726426 - RNA, 20 nt, Human
accucugccugaagucacac

SEQ ID NO: 2726427 - RNA, 23 nt, Human
accucugccugaagucacacagu

SEQ ID NO: 2726428 - RNA, 19 nt, Human
accugccaggaagccagca

SEQ ID NO: 2726429 - RNA, 23 nt, Human
accugccaggaagccagcaggcu

SEQ ID NO: 2726430 - RNA, 21 nt, Human
accugccaggaagccagcagg

SEQ ID NO: 2726431 - RNA, 22 nt, Human
accugccaggaagccagcaggc

SEQ ID NO: 2726432 - RNA, 12 nt, Human
accugccccuca

SEQ ID NO: 2726433 - RNA, 15 nt, Human
accugccccucaacu

SEQ ID NO: 2726434 - RNA, 13 nt, Human
acccucaggcagg

SEQ ID NO: 2726435 - RNA, 14 nt, Human
acccucaggcaggu

SEQ ID NO: 2726436 - RNA, 13 nt, Human
acccucaucacca

SEQ ID NO: 2726437 - RNA, 15 nt, Human
acccucaggcaggug

SEQ ID NO: 2726438 - RNA, 16 nt, Human
acccucaggcaggugg

SEQ ID NO: 2726439 - RNA, 23 nt, Human
acccuggcacuauaauguaagcu

SEQ ID NO: 2726440 - RNA, 23 nt, Human
acccucaucaccaacgucugugc

SEQ ID NO: 2726441 - RNA, 16 nt, Human
acccugugauggggcc

SEQ ID NO: 2726442 - RNA, 16 nt, Human
acccuggggagaaagu

SEQ ID NO: 2726443 - RNA, 13 nt, Human
acccuauugcugc

SEQ ID NO: 2726444 - RNA, 14 nt, Human
acccuauugcugcu

SEQ ID NO: 2726445 - RNA, 19 nt, Human
acccuauugcugcuugagg

SEQ ID NO: 2726446 - RNA, 11 nt, Human
accucaggccu

SEQ ID NO: 2726447 - RNA, 20 nt, Human
accucaggugauccacccac

SEQ ID NO: 2726448 - RNA, 21 nt, Human
accucaggugauccacccacc

SEQ ID NO: 2726449 - RNA, 18 nt, Human
accgugaggccagagaca

SEQ ID NO: 2726450 - RNA, 23 nt, Human
accgugaggccagagacacaagc

SEQ ID NO: 2726451 - RNA, 12 nt, Human
accucagccucc

SEQ ID NO: 2726452 - RNA, 11 nt, Human
accucagccuc

SEQ ID NO: 2726453 - RNA, 12 nt, Human
accgggcacuca

SEQ ID NO: 2726454 - RNA, 14 nt, Human
accgggcacucaga

SEQ ID NO: 2726455 - RNA, 20 nt, Human
accgggccacagagaaagua

SEQ ID NO: 2726456 - RNA, 16 nt, Human
accgggcacucagaag

SEQ ID NO: 2726457 - RNA, 17 nt, Human
acccugugauggggccc

SEQ ID NO: 2726458 - RNA, 19 nt, Human
acccugugauggggcccug

SEQ ID NO: 2726459 - RNA, 20 nt, Human
acccugugauggggcccugc

SEQ ID NO: 2726460 - RNA, 21 nt, Human
acccugugauggggcccugcc

SEQ ID NO: 2726461 - RNA, 17 nt, Human
acuguaaaauaauaacu

SEQ ID NO: 2726462 - RNA, 20 nt, Human
acuggugacugauucuucag

SEQ ID NO: 2726463 - RNA, 16 nt, Human
acuggugacugauucu

SEQ ID NO: 2726464 - RNA, 19 nt, Human
acuggugacugauucuuca

SEQ ID NO: 2726465 - RNA, 18 nt, Human
acuggugacugauucuuc

SEQ ID NO: 2726466 - RNA, 14 nt, Human
acugccaugccagc

SEQ ID NO: 2726467 - RNA, 17 nt, Human
acugugccaugugccag

SEQ ID NO: 2726468 - RNA, 18 nt, Human
acugugccaugugccagg

SEQ ID NO: 2726469 - RNA, 16 nt, Human
acugugaagagaacca

SEQ ID NO: 2726470 - RNA, 16 nt, Human
acugugccaugugcca

SEQ ID NO: 2726471 - RNA, 18 nt, Human
acuucaaauccuugaaga

SEQ ID NO: 2726472 - RNA, 17 nt, Human
acuucaaauccuugaag

SEQ ID NO: 2726473 - RNA, 19 nt, Human
acuguuucaaacuuuacua

SEQ ID NO: 2726474 - RNA, 18 nt, Human
acuguuucaaacuuuacu

SEQ ID NO: 2726475 - RNA, 15 nt, Human
acuguuucaaacuuu

SEQ ID NO: 2726476 - RNA, 18 nt, Human
acuucuuuaauuuuggaa

SEQ ID NO: 2726477 - RNA, 20 nt, Human
acuucuuuaauuuuggaauu

SEQ ID NO: 2726478 - RNA, 19 nt, Human
acuucuuuaauuuuggaau

SEQ ID NO: 2726479 - RNA, 23 nt, Human
acuuggggggcugaggugggagg

SEQ ID NO: 2726480 - RNA, 22 nt, Human
acucccaucugugaaaggaaag

SEQ ID NO: 2726481 - RNA, 14 nt, Human
acucguuaauuugu

SEQ ID NO: 2726482 - RNA, 19 nt, Human
acucguuaauuuguagugu

SEQ ID NO: 2726483 - RNA, 15 nt, Human
acucuacagaggcca

SEQ ID NO: 2726484 - RNA, 23 nt, Human
acugaauuucuuuugccguuauu

SEQ ID NO: 2726485 - RNA, 16 nt, Human
acugacagauuuccau

SEQ ID NO: 2726486 - RNA, 17 nt, Human
acugacauuguuggcca

SEQ ID NO: 2726487 - RNA, 18 nt, Human
acugacauuguuggccaa

SEQ ID NO: 2726488 - RNA, 13 nt, Human
acugaauuaugaa

SEQ ID NO: 2726489 - RNA, 15 nt, Human
acugaauuaugaaac

SEQ ID NO: 2726490 - RNA, 14 nt, Human
acugaauuaugaaa

SEQ ID NO: 2726491 - RNA, 12 nt, Human
acugaauuucuu

SEQ ID NO: 2726492 - RNA, 20 nt, Human
acugaauuaugaaacuuuug

SEQ ID NO: 2726493 - RNA, 19 nt, Human
acugauaugggucuugaua

SEQ ID NO: 2726494 - RNA, 23 nt, Human
acugaugggcaacccccagccug

SEQ ID NO: 2726495 - RNA, 16 nt, Human
acugauuuuuuuuucc

SEQ ID NO: 2726496 - RNA, 22 nt, Human
acugauuugacauagucuggcu

SEQ ID NO: 2726497 - RNA, 17 nt, Human
acugauuuuuuuuuccu

SEQ ID NO: 2726498 - RNA, 18 nt, Human
acugauuuuuuuuuccuu

SEQ ID NO: 2726499 - RNA, 19 nt, Human
acugauuuuuuuuuccuuc

SEQ ID NO: 2726500 - RNA, 20 nt, Human
acugauuuuuuuuuccuuca

SEQ ID NO: 2726501 - RNA, 15 nt, Human
auaaaagacagugaa

SEQ ID NO: 2726502 - RNA, 16 nt, Human
auaaaagacagugaaa

SEQ ID NO: 2726503 - RNA, 23 nt, Human
auaaaaauauuguguugugaaug

SEQ ID NO: 2726504 - RNA, 14 nt, Human
auaaaaacaacuuu

SEQ ID NO: 2726505 - RNA, 16 nt, Human
auaaaaaauuaugaca

SEQ ID NO: 2726506 - RNA, 20 nt, Human
auaaaaagacauucuuccaa

SEQ ID NO: 2726507 - RNA, 14 nt, Human
aguuugauuaaauu

SEQ ID NO: 2726508 - RNA, 11 nt, Human
aguuugcaguu

SEQ ID NO: 2726509 - RNA, 18 nt, Human
aguugaaaaacagcugag

SEQ ID NO: 2726510 - RNA, 16 nt, Human
aguugaagacagagcu

SEQ ID NO: 2726511 - RNA, 17 nt, Human
aguugaagacagagcua

SEQ ID NO: 2726512 - RNA, 17 nt, Human
aguugaaaaacagcuga

SEQ ID NO: 2726513 - RNA, 18 nt, Human
aguuccaccaucaagcca

SEQ ID NO: 2726514 - RNA, 21 nt, Human
aguuccaccaucaagccacca

SEQ ID NO: 2726515 - RNA, 14 nt, Human
aguucauacccugu

SEQ ID NO: 2726516 - RNA, 17 nt, Human
aguuguuagugugucuu

SEQ ID NO: 2726517 - RNA, 22 nt, Human
aguuguuagugugucuuagugu

SEQ ID NO: 2726518 - RNA, 20 nt, Human
aguuguucaauaauaaauau

SEQ ID NO: 2726519 - RNA, 17 nt, Human
auacaccacuacauucu

SEQ ID NO: 2726520 - RNA, 21 nt, Human
auaaagaugagugagcaugcc

SEQ ID NO: 2726521 - RNA, 15 nt, Human
auaaguaaaugcuag

SEQ ID NO: 2726522 - RNA, 17 nt, Human
auaaguaauucaagaaa

SEQ ID NO: 2726523 - RNA, 12 nt, Human
auaauguuaaca

SEQ ID NO: 2726524 - RNA, 23 nt, Human
auacaaugcugugcccuaaagug

SEQ ID NO: 2726525 - RNA, 15 nt, Human
auacaccacuacauu

SEQ ID NO: 2726526 - RNA, 20 nt, Human
auacacacucaaaucaagaa

SEQ ID NO: 2726527 - RNA, 18 nt, Human
auacaauuuuguuucugu

SEQ ID NO: 2726528 - RNA, 17 nt, Human
auacaauuuuguuucug

SEQ ID NO: 2726529 - RNA, 16 nt, Human
auacaauuuuguuucu

SEQ ID NO: 2726530 - RNA, 14 nt, Human
auacaauuuuguuu

SEQ ID NO: 2726531 - RNA, 15 nt, Human
aguacuggagaaaau

SEQ ID NO: 2726532 - RNA, 20 nt, Human
aguacuucuccacccugcuc

SEQ ID NO: 2726533 - RNA, 19 nt, Human
aguacuucuccacccugcu

SEQ ID NO: 2726534 - RNA, 21 nt, Human
aguacuucuccacccugcucu

SEQ ID NO: 2726535 - RNA, 21 nt, Human
aguaaaugggggugcauuuga

SEQ ID NO: 2726536 - RNA, 20 nt, Human
aguaaaugggggugcauuug

SEQ ID NO: 2726537 - RNA, 19 nt, Human
aguaaaugggggugcauuu

SEQ ID NO: 2726538 - RNA, 18 nt, Human
aguaaaugggggugcauu

SEQ ID NO: 2726539 - RNA, 17 nt, Human
aguaacuuacuuaggug

SEQ ID NO: 2726540 - RNA, 19 nt, Human
agugaugucacuagggcag

SEQ ID NO: 2726541 - RNA, 19 nt, Human
agugauccucccaccucag

SEQ ID NO: 2726542 - RNA, 20 nt, Human
agugauccucccaccucagc

SEQ ID NO: 2726543 - RNA, 22 nt, Human
agugauccucccaccucagccu

SEQ ID NO: 2726544 - RNA, 19 nt, Human
agugauucuccugccucag

SEQ ID NO: 2726545 - RNA, 18 nt, Human
agugauucuccugccuca

SEQ ID NO: 2726546 - RNA, 20 nt, Human
agugauucuccugccucagc

SEQ ID NO: 2726547 - RNA, 18 nt, Human
agugccuuauggaacacu

SEQ ID NO: 2726548 - RNA, 19 nt, Human
agugccuuauggaacacuc

SEQ ID NO: 2726549 - RNA, 20 nt, Human
agugccuuauggaacacucu

SEQ ID NO: 2726550 - RNA, 21 nt, Human
agugccuuauggaacacucug

SEQ ID NO: 2726551 - RNA, 22 nt, Human
agugccuuauggaacacucuga

SEQ ID NO: 2726552 - RNA, 16 nt, Human
agugacagaggcagcc

SEQ ID NO: 2726553 - RNA, 19 nt, Human
agugacagaggcagcccca

SEQ ID NO: 2726554 - RNA, 13 nt, Human
agugaaugaaaca

SEQ ID NO: 2726555 - RNA, 14 nt, Human
agugacagaggcag

SEQ ID NO: 2726556 - RNA, 13 nt, Human
agucauuuaauaa

SEQ ID NO: 2726557 - RNA, 14 nt, Human
aguccucuuuucug

SEQ ID NO: 2726558 - RNA, 16 nt, Human
aguccuuaccagcaga

SEQ ID NO: 2726559 - RNA, 18 nt, Human
aguccuuaccagcagagc

SEQ ID NO: 2726560 - RNA, 18 nt, Human
agucuggcccuuccuuuu

SEQ ID NO: 2726561 - RNA, 21 nt, Human
agucuggcuguacccaggaau

SEQ ID NO: 2726562 - RNA, 19 nt, Human
agucuggcuguacccagga

SEQ ID NO: 2726563 - RNA, 21 nt, Human
agucugauucccaagcucugc

SEQ ID NO: 2726564 - RNA, 22 nt, Human
agucugauucccaagcucugcu

SEQ ID NO: 2726565 - RNA, 20 nt, Human
agucugauucccaagcucug

SEQ ID NO: 2726566 - RNA, 18 nt, Human
agucuggaaugcaguggu

SEQ ID NO: 2726567 - RNA, 16 nt, Human
agucgaggacagggag

SEQ ID NO: 2726568 - RNA, 21 nt, Human
aucaugaauuaguuuuauaug

SEQ ID NO: 2726569 - RNA, 20 nt, Human
aucaugacaaagacugagua

SEQ ID NO: 2726570 - RNA, 15 nt, Human
aucauccuaagcuau

SEQ ID NO: 2726571 - RNA, 18 nt, Human
auccagcagauuauucac

SEQ ID NO: 2726572 - RNA, 21 nt, Human
auccacugugccaugugccag

SEQ ID NO: 2726573 - RNA, 12 nt, Human
auccuugaagau

SEQ ID NO: 2726574 - RNA, 22 nt, Human
aucuaggaagacuuuggaaaga

SEQ ID NO: 2726575 - RNA, 19 nt, Human
auauuuuuuucugaaauuu

SEQ ID NO: 2726576 - RNA, 18 nt, Human
auauuuuuuucuuuucuu

SEQ ID NO: 2726577 - RNA, 18 nt, Human
auauuuuuuucugaaauu

SEQ ID NO: 2726578 - RNA, 16 nt, Human
auauuuuuuucugaaa

SEQ ID NO: 2726579 - RNA, 14 nt, Human
auauuuuuuucuga

SEQ ID NO: 2726580 - RNA, 20 nt, Human
aucaaagggugaaaauuauu

SEQ ID NO: 2726581 - RNA, 18 nt, Human
aucaaagagagaaaauaa

SEQ ID NO: 2726582 - RNA, 19 nt, Human
aucaaagagguuuuaaaaa

SEQ ID NO: 2726583 - RNA, 20 nt, Human
aucaaaagguuaauaaagua

SEQ ID NO: 2726584 - RNA, 24 nt, Human
aucaaaagguuaauaaaguaauua

SEQ ID NO: 2726585 - RNA, 14 nt, Human
auagcacagacccu

SEQ ID NO: 2726586 - RNA, 23 nt, Human
auggcuuccuggcaauagucaaa

SEQ ID NO: 2726587 - RNA, 16 nt, Human
auggcuuuguauagaa

SEQ ID NO: 2726588 - RNA, 15 nt, Human
auggcuuuguauaga

SEQ ID NO: 2726589 - RNA, 20 nt, Human
augggaaagcauuguaaaug

SEQ ID NO: 2726590 - RNA, 14 nt, Human
augggaaagcauug

SEQ ID NO: 2726591 - RNA, 21 nt, Human
augggaaugaaugucagugug

SEQ ID NO: 2726592 - RNA, 20 nt, Human
augggacauuugcucaugga

SEQ ID NO: 2726593 - RNA, 16 nt, Human
augcuuugaucccuuc

SEQ ID NO: 2726594 - RNA, 19 nt, Human
augcucugcauguuacaua

SEQ ID NO: 2726595 - RNA, 18 nt, Human
augcucugcauguuacau

SEQ ID NO: 2726596 - RNA, 14 nt, Human
augcuucuucagag

SEQ ID NO: 2726597 - RNA, 17 nt, Human
augcuucuucagagacu

SEQ ID NO: 2726598 - RNA, 20 nt, Human
augcuucuucagagacuccu

SEQ ID NO: 2726599 - RNA, 21 nt, Human
augccugguggcagcugcggu

SEQ ID NO: 2726600 - RNA, 11 nt, Human
augccuggugg

SEQ ID NO: 2726601 - RNA, 12 nt, Human
augccugguggc

SEQ ID NO: 2726602 - RNA, 13 nt, Human
augccugguggca

SEQ ID NO: 2726603 - RNA, 14 nt, Human
augccugguggcag

SEQ ID NO: 2726604 - RNA, 19 nt, Human
augccugguggcagcugcg

SEQ ID NO: 2726605 - RNA, 18 nt, Human
augccugguggcagcugc

SEQ ID NO: 2726606 - RNA, 23 nt, Human
augaaguaauaugcacacauuuu

SEQ ID NO: 2726607 - RNA, 21 nt, Human
augaaguaauaugcacacauu

SEQ ID NO: 2726608 - RNA, 14 nt, Human
augaaguaauaugc

SEQ ID NO: 2726609 - RNA, 23 nt, Human
augaagcauuuacuuuguguuca

SEQ ID NO: 2726610 - RNA, 12 nt, Human
augaaagacugu

SEQ ID NO: 2726611 - RNA, 16 nt, Human
augaaacuuuuggaag

SEQ ID NO: 2726612 - RNA, 18 nt, Human
augaaacuuguguaaaua

SEQ ID NO: 2726613 - RNA, 11 nt, Human
augagccuggc

SEQ ID NO: 2726614 - RNA, 21 nt, Human
augagccucagcauccuggca

SEQ ID NO: 2726615 - RNA, 19 nt, Human
augagccucagcauccugg

SEQ ID NO: 2726616 - RNA, 13 nt, Human
augaccuuucaau

SEQ ID NO: 2726617 - RNA, 15 nt, Human
augaccuuucaauag

SEQ ID NO: 2726618 - RNA, 18 nt, Human
augaccuuucaauaggaa

SEQ ID NO: 2726619 - RNA, 23 nt, Human
aucuaggaagacuuuggaaagag

SEQ ID NO: 2726620 - RNA, 20 nt, Human
agggauuagggagagaagau

SEQ ID NO: 2726621 - RNA, 13 nt, Human
agggccuggcuca

SEQ ID NO: 2726622 - RNA, 14 nt, Human
agggccuggcucag

SEQ ID NO: 2726623 - RNA, 18 nt, Human
agggccuggcucaggugg

SEQ ID NO: 2726624 - RNA, 17 nt, Human
agggacaggauaagagg

SEQ ID NO: 2726625 - RNA, 17 nt, Human
aggcugcagugagccga

SEQ ID NO: 2726626 - RNA, 19 nt, Human
aggcugcagugagccgaga

SEQ ID NO: 2726627 - RNA, 23 nt, Human
aggcuguaucccaugagccucag

SEQ ID NO: 2726628 - RNA, 12 nt, Human
aggcugucaauu

SEQ ID NO: 2726629 - RNA, 24 nt, Human
aggcuguaucccaugagccucagc

SEQ ID NO: 2726630 - RNA, 19 nt, Human
aggcccucugcccacuccc

SEQ ID NO: 2726631 - RNA, 20 nt, Human
aggcccucugcccacucccu

SEQ ID NO: 2726632 - RNA, 23 nt, Human
aggccaugggcacuguggguaga

SEQ ID NO: 2726633 - RNA, 14 nt, Human
aggccaugggccuc

SEQ ID NO: 2726634 - RNA, 16 nt, Human
aggccaugggccuccu

SEQ ID NO: 2726635 - RNA, 17 nt, Human
aggccaugggccuccug

SEQ ID NO: 2726636 - RNA, 17 nt, Human
aggcccucugcccacuc

SEQ ID NO: 2726637 - RNA, 13 nt, Human
aggccagcugcuu

SEQ ID NO: 2726638 - RNA, 14 nt, Human
aggccagcugcuug

SEQ ID NO: 2726639 - RNA, 16 nt, Human
aggccagcugcuuggg

SEQ ID NO: 2726640 - RNA, 16 nt, Human
aggccaggcccucugc

SEQ ID NO: 2726641 - RNA, 17 nt, Human
aggccaggcccucugcc

SEQ ID NO: 2726642 - RNA, 18 nt, Human
aggccaggcccucugccc

SEQ ID NO: 2726643 - RNA, 19 nt, Human
aggccaggcccucugccca

SEQ ID NO: 2726644 - RNA, 23 nt, Human
aggccaggcccucugcccacucc

SEQ ID NO: 2726645 - RNA, 12 nt, Human
aggcauguucuc

SEQ ID NO: 2726646 - RNA, 23 nt, Human
aggcaugugaugagaggaaauca

SEQ ID NO: 2726647 - RNA, 24 nt, Human
aggcaugugaugagaggaaaucac

SEQ ID NO: 2726648 - RNA, 12 nt, Human
aggccagcugcu

SEQ ID NO: 2726649 - RNA, 22 nt, Human
aggcauuccccaggaggccagc

SEQ ID NO: 2726650 - RNA, 23 nt, Human
aggcauuccccaggaggccagcc

SEQ ID NO: 2726651 - RNA, 21 nt, Human
aggcauuccccaggaggccag

SEQ ID NO: 2726652 - RNA, 20 nt, Human
aggcauguucucugaggaca

SEQ ID NO: 2726653 - RNA, 22 nt, Human
aggcauguucucugaggacacu

SEQ ID NO: 2726654 - RNA, 13 nt, Human
aggcagauacagg

SEQ ID NO: 2726655 - RNA, 14 nt, Human
aggcagccaggcca

SEQ ID NO: 2726656 - RNA, 15 nt, Human
aggcagccaggccac

SEQ ID NO: 2726657 - RNA, 16 nt, Human
aggcagccaggccaca

SEQ ID NO: 2726658 - RNA, 15 nt, Human
aggaggucucuaaga

SEQ ID NO: 2726659 - RNA, 12 nt, Human
aggagugagcac

SEQ ID NO: 2726660 - RNA, 14 nt, Human
aggagugagcacua

SEQ ID NO: 2726661 - RNA, 14 nt, Human
aggaggucucuaag

SEQ ID NO: 2726662 - RNA, 19 nt, Human
aggaaguacuggagaaaau

SEQ ID NO: 2726663 - RNA, 13 nt, Human
agcuacaaaugca

SEQ ID NO: 2726664 - RNA, 13 nt, Human
agcucaccagccc

SEQ ID NO: 2726665 - RNA, 14 nt, Human
agcucaccagcccc

SEQ ID NO: 2726666 - RNA, 21 nt, Human
agcucaccagccccagugccc

SEQ ID NO: 2726667 - RNA, 12 nt, Human
agcuacaaaugc

SEQ ID NO: 2726668 - RNA, 15 nt, Human
agcuaaugggacacu

SEQ ID NO: 2726669 - RNA, 13 nt, Human
agcuaaugggaca

SEQ ID NO: 2726670 - RNA, 14 nt, Human
agcuaaugggacac

SEQ ID NO: 2726671 - RNA, 17 nt, Human
agcgauucuucugcuuc

SEQ ID NO: 2726672 - RNA, 19 nt, Human
agcgauucuucugcuucag

SEQ ID NO: 2726673 - RNA, 15 nt, Human
agcgauucuucugcu

SEQ ID NO: 2726674 - RNA, 20 nt, Human
agcuaacauggaaguacuau

SEQ ID NO: 2726675 - RNA, 19 nt, Human
agcuaacauggaaguacua

SEQ ID NO: 2726676 - RNA, 14 nt, Human
agccuggacccugu

SEQ ID NO: 2726677 - RNA, 20 nt, Human
agccugggaggucaaggcug

SEQ ID NO: 2726678 - RNA, 18 nt, Human
agccugggcaaugugaua

SEQ ID NO: 2726679 - RNA, 20 nt, Human
agcugcugaaacaacaaaua

SEQ ID NO: 2726680 - RNA, 16 nt, Human
agcugcugaaacaaca

SEQ ID NO: 2726681 - RNA, 15 nt, Human
agcugcugaaacaac

SEQ ID NO: 2726682 - RNA, 14 nt, Human
agcugcugaaacaa

SEQ ID NO: 2726683 - RNA, 14 nt, Human
agcuggugcccugc

SEQ ID NO: 2726684 - RNA, 15 nt, Human
agcuggucccacuca

SEQ ID NO: 2726685 - RNA, 14 nt, Human
agcuguaugauucc

SEQ ID NO: 2726686 - RNA, 15 nt, Human
agcugacuuuucugu

SEQ ID NO: 2726687 - RNA, 21 nt, Human
agcugacuuuucuguccgagc

SEQ ID NO: 2726688 - RNA, 22 nt, Human
agcucaccagccccagugccca

SEQ ID NO: 2726689 - RNA, 23 nt, Human
agcucaccagccccagugcccac

SEQ ID NO: 2726690 - RNA, 17 nt, Human
agcuguaugauucccag

SEQ ID NO: 2726691 - RNA, 18 nt, Human
agcuguaugauucccagc

SEQ ID NO: 2726692 - RNA, 18 nt, Human
aggaaaaaauaacaauga

SEQ ID NO: 2726693 - RNA, 23 nt, Human
agcuuuuuucucugauacagaaa

SEQ ID NO: 2726694 - RNA, 19 nt, Human
agcuuuuuucucugauaca

SEQ ID NO: 2726695 - RNA, 22 nt, Human
agcuuuuuucucugauacagaa

SEQ ID NO: 2726696 - RNA, 20 nt, Human
agcuuuuuucucugauacag

SEQ ID NO: 2726697 - RNA, 21 nt, Human
agcuuuguuuguugucagcug

SEQ ID NO: 2726698 - RNA, 11 nt, Human
aggaaguacug

SEQ ID NO: 2726699 - RNA, 15 nt, Human
aggaaguacuggaga

SEQ ID NO: 2726700 - RNA, 14 nt, Human
aggaagguagaaau

SEQ ID NO: 2726701 - RNA, 23 nt, Human
aggaacaaggcaaggcugucaau

SEQ ID NO: 2726702 - RNA, 12 nt, Human
aggaacacuccu

SEQ ID NO: 2726703 - RNA, 23 nt, Human
aggaacuuaaauaaugugaaacu

SEQ ID NO: 2726704 - RNA, 15 nt, Human
aggaacacuccuuca

SEQ ID NO: 2726705 - RNA, 19 nt, Human
agacaaggaaaaaauaaca

SEQ ID NO: 2726706 - RNA, 20 nt, Human
agacaaugugaaaagaaaaa

SEQ ID NO: 2726707 - RNA, 23 nt, Human
agacaaugacuuacuguacauga

SEQ ID NO: 2726708 - RNA, 20 nt, Human
agacgcugugcugcccugcc

SEQ ID NO: 2726709 - RNA, 17 nt, Human
agacgcugugcugcccu

SEQ ID NO: 2726710 - RNA, 18 nt, Human
agacgcugugcugcccug

SEQ ID NO: 2726711 - RNA, 19 nt, Human
agacgcugugcugcccugc

SEQ ID NO: 2726712 - RNA, 21 nt, Human
agacagcccgggcucugccuc

SEQ ID NO: 2726713 - RNA, 14 nt, Human
agacaauuuauuau

SEQ ID NO: 2726714 - RNA, 22 nt, Human
agacagcccgggcucugccucc

SEQ ID NO: 2726715 - RNA, 23 nt, Human
agacagcccgggcucugccuccc

SEQ ID NO: 2726716 - RNA, 14 nt, Human
agaccacguuucua

SEQ ID NO: 2726717 - RNA, 23 nt, Human
agaccaucccugaaggccccgcc

SEQ ID NO: 2726718 - RNA, 16 nt, Human
agacucuuuggacacu

SEQ ID NO: 2726719 - RNA, 17 nt, Human
agagcccacgcccccac

SEQ ID NO: 2726720 - RNA, 18 nt, Human
agagcccacgcccccacu

SEQ ID NO: 2726721 - RNA, 23 nt, Human
agagagcaagacgcugugcugcc

SEQ ID NO: 2726722 - RNA, 11 nt, Human
agagagcaaga

SEQ ID NO: 2726723 - RNA, 19 nt, Human
agagagcaagacgcugugc

SEQ ID NO: 2726724 - RNA, 17 nt, Human
agaaccaaaaagaggcu

SEQ ID NO: 2726725 - RNA, 18 nt, Human
agaaccaaaaagaggcua

SEQ ID NO: 2726726 - RNA, 19 nt, Human
agaacagauaaucagugug

SEQ ID NO: 2726727 - RNA, 13 nt, Human
agaagagcuguuc

SEQ ID NO: 2726728 - RNA, 15 nt, Human
agaagagaaugcaca

SEQ ID NO: 2726729 - RNA, 23 nt, Human
agaagagaaugcacaaacagagg

SEQ ID NO: 2726730 - RNA, 13 nt, Human
agaagauagcagg

SEQ ID NO: 2726731 - RNA, 20 nt, Human
agaagagcuguucacagcca

SEQ ID NO: 2726732 - RNA, 21 nt, Human
agaagacugcauuauauuuau

SEQ ID NO: 2726733 - RNA, 21 nt, Human
agaaccaaaaagaggcuaugu

SEQ ID NO: 2726734 - RNA, 19 nt, Human
agaagucuuagauguauau

SEQ ID NO: 2726735 - RNA, 17 nt, Human
agaagucuuagauguau

SEQ ID NO: 2726736 - RNA, 14 nt, Human
agaagucacacagu

SEQ ID NO: 2726737 - RNA, 23 nt, Human
agaaugcacaaacagaggccgcc

SEQ ID NO: 2726738 - RNA, 18 nt, Human
agaaugcucuuuacuuca

SEQ ID NO: 2726739 - RNA, 16 nt, Human
agaaugaaagggccca

SEQ ID NO: 2726740 - RNA, 17 nt, Human
agaaucucaaauaacua

SEQ ID NO: 2726741 - RNA, 23 nt, Human
agcaaaauuuuuucucuaggaaa

SEQ ID NO: 2726742 - RNA, 23 nt, Human
agcaaaauugauguguuuauuua

SEQ ID NO: 2726743 - RNA, 19 nt, Human
agcaaauucuguuuuucua

SEQ ID NO: 2726744 - RNA, 13 nt, Human
agcaaaauugaug

SEQ ID NO: 2726745 - RNA, 19 nt, Human
agcaaaauugauguguuua

SEQ ID NO: 2726746 - RNA, 16 nt, Human
agauugcaccacugca

SEQ ID NO: 2726747 - RNA, 17 nt, Human
agauugcaacaggcugg

SEQ ID NO: 2726748 - RNA, 19 nt, Human
agauugcaacaggcugggc

SEQ ID NO: 2726749 - RNA, 18 nt, Human
agauucuuuccugaggcu

SEQ ID NO: 2726750 - RNA, 15 nt, Human
agauucuuuccugag

SEQ ID NO: 2726751 - RNA, 16 nt, Human
agauucuuuccugagg

SEQ ID NO: 2726752 - RNA, 16 nt, Human
agauugcaacaggcug

SEQ ID NO: 2726753 - RNA, 18 nt, Human
agaugacaucugucuagg

SEQ ID NO: 2726754 - RNA, 20 nt, Human
agaugggugcuuggaggaag

SEQ ID NO: 2726755 - RNA, 22 nt, Human
agaugggugcuuggaggaagga

SEQ ID NO: 2726756 - RNA, 14 nt, Human
agauucuuuccuga

SEQ ID NO: 2726757 - RNA, 18 nt, Human
agaucugccuaaggacuu

SEQ ID NO: 2726758 - RNA, 13 nt, Human
agaucugccuaag

SEQ ID NO: 2726759 - RNA, 20 nt, Human
agauagauaggucagugcaa

SEQ ID NO: 2726760 - RNA, 20 nt, Human
agauagccaaggccaaagga

SEQ ID NO: 2726761 - RNA, 14 nt, Human
agaguugaagacag

SEQ ID NO: 2726762 - RNA, 15 nt, Human
agaguugaagacaga

SEQ ID NO: 2726763 - RNA, 13 nt, Human
agaguugaagaca

SEQ ID NO: 2726764 - RNA, 20 nt, Human
agagggucugaggaauccag

SEQ ID NO: 2726765 - RNA, 23 nt, Human
agaggggguggccucccaacuca

SEQ ID NO: 2726766 - RNA, 14 nt, Human
agauaugauucaaa

SEQ ID NO: 2726767 - RNA, 16 nt, Human
agauaugauucaaaug

SEQ ID NO: 2726768 - RNA, 15 nt, Human
agauaugauucaaau

SEQ ID NO: 2726769 - RNA, 19 nt, Human
agcacugacuucuaaguaa

SEQ ID NO: 2726770 - RNA, 16 nt, Human
agcagccuggacccug

SEQ ID NO: 2726771 - RNA, 17 nt, Human
agcacugacuucuaagu

SEQ ID NO: 2726772 - RNA, 20 nt, Human
agcagccuggacccugugga

SEQ ID NO: 2726773 - RNA, 18 nt, Human
agcagcguuucuaugaca

SEQ ID NO: 2726774 - RNA, 19 nt, Human
agcagcguuucuaugacac

SEQ ID NO: 2726775 - RNA, 13 nt, Human
agcagugcaugcu

SEQ ID NO: 2726776 - RNA, 16 nt, Human
agcagugcaugcuguc

SEQ ID NO: 2726777 - RNA, 17 nt, Human
agcagugcaugcugucc

SEQ ID NO: 2726778 - RNA, 20 nt, Human
agcacuaaggugugcucuga

SEQ ID NO: 2726779 - RNA, 21 nt, Human
agcacagacccugcccugugg

SEQ ID NO: 2726780 - RNA, 14 nt, Human
agccagcaguucag

SEQ ID NO: 2726781 - RNA, 23 nt, Human
agccagcaggcucucaggccagc

SEQ ID NO: 2726782 - RNA, 22 nt, Human
agccagcaggcucucaggccag

SEQ ID NO: 2726783 - RNA, 21 nt, Human
agccagcaggcucucaggcca

SEQ ID NO: 2726784 - RNA, 13 nt, Human
agcccaccuuggc

SEQ ID NO: 2726785 - RNA, 23 nt, Human
agcccaccccucaacaccucugc

SEQ ID NO: 2726786 - RNA, 17 nt, Human
agcccacgcccccacug

SEQ ID NO: 2726787 - RNA, 18 nt, Human
agcccacgcccccacugg

SEQ ID NO: 2726788 - RNA, 19 nt, Human
agcccacgcccccacuggu

SEQ ID NO: 2726789 - RNA, 14 nt, Human
agccagauuucacu

SEQ ID NO: 2726790 - RNA, 17 nt, Human
agccagauuucacucuc

SEQ ID NO: 2726791 - RNA, 20 nt, Human
agccagauuucacucuccuu

SEQ ID NO: 2726792 - RNA, 22 nt, Human
agccagauuucacucuccuugg

SEQ ID NO: 2726793 - RNA, 16 nt, Human
agcaucuaugugagac

SEQ ID NO: 2726794 - RNA, 16 nt, Human
gccugccucuucucua

SEQ ID NO: 2726795 - RNA, 15 nt, Human
gccuggccccucagg

SEQ ID NO: 2726796 - RNA, 16 nt, Human
gccuggccccucaggg

SEQ ID NO: 2726797 - RNA, 17 nt, Human
gccuggccccucagggu

SEQ ID NO: 2726798 - RNA, 10 nt, Human
gccuggccug

SEQ ID NO: 2726799 - RNA, 20 nt, Human
gccuggccccucaggguccc

SEQ ID NO: 2726800 - RNA, 22 nt, Human
gccuggccccucagggucccug

SEQ ID NO: 2726801 - RNA, 21 nt, Human
gccugggaggucaaggcugca

SEQ ID NO: 2726802 - RNA, 22 nt, Human
gccugggaggucaaggcugcag

SEQ ID NO: 2726803 - RNA, 14 nt, Human
gccugggaucccuc

SEQ ID NO: 2726804 - RNA, 21 nt, Human
gccugggaucccucauccuca

SEQ ID NO: 2726805 - RNA, 18 nt, Human
gccugggaucccucaucc

SEQ ID NO: 2726806 - RNA, 13 nt, Human
gccuccuccagcc

SEQ ID NO: 2726807 - RNA, 18 nt, Human
gccuccugcccuuaccug

SEQ ID NO: 2726808 - RNA, 12 nt, Human
gccucugggacu

SEQ ID NO: 2726809 - RNA, 13 nt, Human
gccuccugugugu

SEQ ID NO: 2726810 - RNA, 17 nt, Human
gccugcccaggccccug

SEQ ID NO: 2726811 - RNA, 18 nt, Human
gccugcccaggccccugc

SEQ ID NO: 2726812 - RNA, 19 nt, Human
gccugcccaggccccugcc

SEQ ID NO: 2726813 - RNA, 12 nt, Human
gccucuucucua

SEQ ID NO: 2726814 - RNA, 23 nt, Human
gccucuucucuacucuagggaaa

SEQ ID NO: 2726815 - RNA, 14 nt, Human
gcccugccuccuuu

SEQ ID NO: 2726816 - RNA, 16 nt, Human
gcccugccuccuuugu

SEQ ID NO: 2726817 - RNA, 22 nt, Human
gcccugccuccuuugugaggaa

SEQ ID NO: 2726818 - RNA, 13 nt, Human
gcccuguuaaaag

SEQ ID NO: 2726819 - RNA, 17 nt, Human
gcccuguuaaaagauga

SEQ ID NO: 2726820 - RNA, 14 nt, Human
gcccuguuaaaaga

SEQ ID NO: 2726821 - RNA, 21 nt, Human
gcccugugggcccccaaaugg

SEQ ID NO: 2726822 - RNA, 15 nt, Human
gccgccaugcuccug

SEQ ID NO: 2726823 - RNA, 16 nt, Human
gcccuuaccugccagg

SEQ ID NO: 2726824 - RNA, 20 nt, Human
gcccuuaccugccaggaagc

SEQ ID NO: 2726825 - RNA, 16 nt, Human
gccgccaugcuccugg

SEQ ID NO: 2726826 - RNA, 13 nt, Human
gcccacucccugc

SEQ ID NO: 2726827 - RNA, 19 nt, Human
gcccacucccugcaaccug

SEQ ID NO: 2726828 - RNA, 14 nt, Human
gcccacucccugca

SEQ ID NO: 2726829 - RNA, 15 nt, Human
gcccacucccugcaa

SEQ ID NO: 2726830 - RNA, 22 nt, Human
gcccuaaaguguauuuuuuuac

SEQ ID NO: 2726831 - RNA, 16 nt, Human
gccccuggaugcagcc

SEQ ID NO: 2726832 - RNA, 18 nt, Human
gccccuggaugcagccuc

SEQ ID NO: 2726833 - RNA, 22 nt, Human
gccccuggaugcagccucacag

SEQ ID NO: 2726834 - RNA, 16 nt, Human
gcccccaggugccagu

SEQ ID NO: 2726835 - RNA, 19 nt, Human
gccccaaaacucuccucug

SEQ ID NO: 2726836 - RNA, 18 nt, Human
gccccaaaacucuccucu

SEQ ID NO: 2726837 - RNA, 13 nt, Human
gccccugcccggc

SEQ ID NO: 2726838 - RNA, 14 nt, Human
gccccugcccggcu

SEQ ID NO: 2726839 - RNA, 16 nt, Human
gccacauuccugaugc

SEQ ID NO: 2726840 - RNA, 20 nt, Human
gccacauuccugaugcuucu

SEQ ID NO: 2726841 - RNA, 19 nt, Human
gccaccaacauacucccau

SEQ ID NO: 2726842 - RNA, 20 nt, Human
gccaccaacauacucccauc

SEQ ID NO: 2726843 - RNA, 21 nt, Human
gccaccaacauacucccaucu

SEQ ID NO: 2726844 - RNA, 22 nt, Human
gccaccaacauacucccaucug

SEQ ID NO: 2726845 - RNA, 21 nt, Human
gccacugcacuauagccuagg

SEQ ID NO: 2726846 - RNA, 13 nt, Human
gccacccugggga

SEQ ID NO: 2726847 - RNA, 19 nt, Human
gccacccuggggagaaagu

SEQ ID NO: 2726848 - RNA, 23 nt, Human
gccacugcaccgggccacagaga

SEQ ID NO: 2726849 - RNA, 18 nt, Human
gccacugugaagagaacc

SEQ ID NO: 2726850 - RNA, 19 nt, Human
gccacugugaagagaacca

SEQ ID NO: 2726851 - RNA, 21 nt, Human
gccacuguuuugaaucucaua

SEQ ID NO: 2726852 - RNA, 16 nt, Human
gccauaugaaaaggcu

SEQ ID NO: 2726853 - RNA, 19 nt, Human
gccauauucuguuggccag

SEQ ID NO: 2726854 - RNA, 20 nt, Human
gccauauucuguuggccagu

SEQ ID NO: 2726855 - RNA, 14 nt, Human
gccauguuggccag

SEQ ID NO: 2726856 - RNA, 15 nt, Human
gccauguuggccagg

SEQ ID NO: 2726857 - RNA, 16 nt, Human
gccauguuggccaggc

SEQ ID NO: 2726858 - RNA, 17 nt, Human
gccauguuggccaggcu

SEQ ID NO: 2726859 - RNA, 18 nt, Human
gccauguuggccaggcug

SEQ ID NO: 2726860 - RNA, 15 nt, Human
gcccacgcuggagug

SEQ ID NO: 2726861 - RNA, 16 nt, Human
gcccacgcuggagugc

SEQ ID NO: 2726862 - RNA, 17 nt, Human
gcccacgcuggagugca

SEQ ID NO: 2726863 - RNA, 18 nt, Human
gcccaccuuggcucaagu

SEQ ID NO: 2726864 - RNA, 13 nt, Human
gcccacgccccca

SEQ ID NO: 2726865 - RNA, 14 nt, Human
gcccacgcccccac

SEQ ID NO: 2726866 - RNA, 19 nt, Human
gccauguuggccaggcugg

SEQ ID NO: 2726867 - RNA, 20 nt, Human
gccauguuggccaggcuggu

SEQ ID NO: 2726868 - RNA, 22 nt, Human
gccauguuggccaggcuggucu

SEQ ID NO: 2726869 - RNA, 24 nt, Human
gccauguuggccaggcuggucuca

SEQ ID NO: 2726870 - RNA, 23 nt, Human
gccaggccacaagacccuugugg

SEQ ID NO: 2726871 - RNA, 12 nt, Human
gccaggccagag

SEQ ID NO: 2726872 - RNA, 13 nt, Human
gccaggccagagg

SEQ ID NO: 2726873 - RNA, 15 nt, Human
gccaggcccucugcc

SEQ ID NO: 2726874 - RNA, 16 nt, Human
gccaggcccucugccc

SEQ ID NO: 2726875 - RNA, 17 nt, Human
gccaggcccucugccca

SEQ ID NO: 2726876 - RNA, 21 nt, Human
gccaggcccucugcccacucc

SEQ ID NO: 2726877 - RNA, 19 nt, Human
gccaggcccucugcccacu

SEQ ID NO: 2726878 - RNA, 20 nt, Human
gccaggcccucugcccacuc

SEQ ID NO: 2726879 - RNA, 19 nt, Human
gccagauuuuccugaaaac

SEQ ID NO: 2726880 - RNA, 22 nt, Human
gccagcaguucagagcugcccu

SEQ ID NO: 2726881 - RNA, 23 nt, Human
gccagcaguucagagcugcccuc

SEQ ID NO: 2726882 - RNA, 21 nt, Human
gccagcaggcucucaggccag

SEQ ID NO: 2726883 - RNA, 23 nt, Human
gccagcaggcucucaggccagcu

SEQ ID NO: 2726884 - RNA, 17 nt, Human
gccagcaggcucucagg

SEQ ID NO: 2726885 - RNA, 18 nt, Human
gccagcaggcucucaggc

SEQ ID NO: 2726886 - RNA, 19 nt, Human
gccagcaggcucucaggcc

SEQ ID NO: 2726887 - RNA, 20 nt, Human
gccagcaggcucucaggcca

SEQ ID NO: 2726888 - RNA, 13 nt, Human
gccagcaggcucu

SEQ ID NO: 2726889 - RNA, 16 nt, Human
gccagcaggcucucag

SEQ ID NO: 2726890 - RNA, 22 nt, Human
gcugaauacagaggcaacugca

SEQ ID NO: 2726891 - RNA, 17 nt, Human
gcugaaugguuuucaaa

SEQ ID NO: 2726892 - RNA, 12 nt, Human
gcugaaggcucg

SEQ ID NO: 2726893 - RNA, 20 nt, Human
gcugaaggcucgagcaugcc

SEQ ID NO: 2726894 - RNA, 14 nt, Human
gcugacagacacag

SEQ ID NO: 2726895 - RNA, 15 nt, Human
gcugacagacacagg

SEQ ID NO: 2726896 - RNA, 16 nt, Human
gcugacagacacaggc

SEQ ID NO: 2726897 - RNA, 12 nt, Human
gcucuuccaggc

SEQ ID NO: 2726898 - RNA, 15 nt, Human
gcucuuccaggcugg

SEQ ID NO: 2726899 - RNA, 16 nt, Human
gcucuuccaggcuggg

SEQ ID NO: 2726900 - RNA, 15 nt, Human
gcucuguccugggag

SEQ ID NO: 2726901 - RNA, 14 nt, Human
gcucuguccuggga

SEQ ID NO: 2726902 - RNA, 16 nt, Human
gcucuguccugggagu

SEQ ID NO: 2726903 - RNA, 13 nt, Human
gcucucaggccag

SEQ ID NO: 2726904 - RNA, 14 nt, Human
gcucucaggccagc

SEQ ID NO: 2726905 - RNA, 15 nt, Human
gcucucaggccagcu

SEQ ID NO: 2726906 - RNA, 16 nt, Human
gcucucaggccagcug

SEQ ID NO: 2726907 - RNA, 20 nt, Human
gcucccaggcauuccccagg

SEQ ID NO: 2726908 - RNA, 21 nt, Human
gcucccaggcauuccccagga

SEQ ID NO: 2726909 - RNA, 22 nt, Human
gcucccaggcauuccccaggag

SEQ ID NO: 2726910 - RNA, 14 nt, Human
gcuccccagcccca

SEQ ID NO: 2726911 - RNA, 18 nt, Human
gcuccccucggagaagag

SEQ ID NO: 2726912 - RNA, 15 nt, Human
gcuccccucggagaa

SEQ ID NO: 2726913 - RNA, 21 nt, Human
gcucagguggggucacucugg

SEQ ID NO: 2726914 - RNA, 22 nt, Human
gcucagguggggucacucuggc

SEQ ID NO: 2726915 - RNA, 12 nt, Human
gcucagggccug

SEQ ID NO: 2726916 - RNA, 17 nt, Human
gcucagggccuggcuca

SEQ ID NO: 2726917 - RNA, 13 nt, Human
gcucagggccugg

SEQ ID NO: 2726918 - RNA, 16 nt, Human
gcucagggccuggcuc

SEQ ID NO: 2726919 - RNA, 15 nt, Human
gcucagagagggugg

SEQ ID NO: 2726920 - RNA, 22 nt, Human
gcucagagagggugggaguggg

SEQ ID NO: 2726921 - RNA, 18 nt, Human
gcucagagagggugggag

SEQ ID NO: 2726922 - RNA, 20 nt, Human
gcucagagagggugggagug

SEQ ID NO: 2726923 - RNA, 20 nt, Human
gccuguucagcuccagcuca

SEQ ID NO: 2726924 - RNA, 19 nt, Human
gccuguucagcuccagcuc

SEQ ID NO: 2726925 - RNA, 21 nt, Human
gcuaguaauuggaaaggcagc

SEQ ID NO: 2726926 - RNA, 14 nt, Human
gcuaggccuggcca

SEQ ID NO: 2726927 - RNA, 15 nt, Human
gcuaggccuggccag

SEQ ID NO: 2726928 - RNA, 16 nt, Human
gcuaggaacacuccuu

SEQ ID NO: 2726929 - RNA, 18 nt, Human
gcuaggaacacuccuuca

SEQ ID NO: 2726930 - RNA, 19 nt, Human
gcuaggaacacuccuucac

SEQ ID NO: 2726931 - RNA, 21 nt, Human
gcuaggaacacuccuucacag

SEQ ID NO: 2726932 - RNA, 14 nt, Human
gcuggguuggaggg

SEQ ID NO: 2726933 - RNA, 21 nt, Human
gcuggguuggaggguguccca

SEQ ID NO: 2726934 - RNA, 15 nt, Human
gcuggguucuaccca

SEQ ID NO: 2726935 - RNA, 15 nt, Human
gcuggguucugaucc

SEQ ID NO: 2726936 - RNA, 20 nt, Human
gcuguaucccaugagccuca

SEQ ID NO: 2726937 - RNA, 23 nt, Human
gcuguaucccaugagccucagca

SEQ ID NO: 2726938 - RNA, 13 nt, Human
gcugugcugcccu

SEQ ID NO: 2726939 - RNA, 21 nt, Human
gcugugcucuggacaggcaug

SEQ ID NO: 2726940 - RNA, 12 nt, Human
gcugugcugccc

SEQ ID NO: 2726941 - RNA, 21 nt, Human
gcuguuggcugggggccucag

SEQ ID NO: 2726942 - RNA, 22 nt, Human
gcuguuggcugggggccucagu

SEQ ID NO: 2726943 - RNA, 19 nt, Human
gcugugcugcccugcccac

SEQ ID NO: 2726944 - RNA, 22 nt, Human
gcugugcugcccugcccaccug

SEQ ID NO: 2726945 - RNA, 14 nt, Human
gcuuaacuucacau

SEQ ID NO: 2726946 - RNA, 22 nt, Human
gcuucaaggauccugagccaga

SEQ ID NO: 2726947 - RNA, 20 nt, Human
gcuucacggaagagccuugc

SEQ ID NO: 2726948 - RNA, 22 nt, Human
gcuuccuucugugaaaguacau

SEQ ID NO: 2726949 - RNA, 19 nt, Human
gcuugggcuucauccuccu

SEQ ID NO: 2726950 - RNA, 16 nt, Human
gcuuguacauaaugcg

SEQ ID NO: 2726951 - RNA, 14 nt, Human
gcuuguacauaaug

SEQ ID NO: 2726952 - RNA, 12 nt, Human
gcuggagugcag

SEQ ID NO: 2726953 - RNA, 15 nt, Human
gcuggguguggcgca

SEQ ID NO: 2726954 - RNA, 19 nt, Human
gcugggcagaggaaagcaa

SEQ ID NO: 2726955 - RNA, 16 nt, Human
gcugggcagaggaaag

SEQ ID NO: 2726956 - RNA, 17 nt, Human
gcugggcagaggaaagc

SEQ ID NO: 2726957 - RNA, 12 nt, Human
gcugggcucccu

SEQ ID NO: 2726958 - RNA, 16 nt, Human
gcugggcucccuuccc

SEQ ID NO: 2726959 - RNA, 17 nt, Human
gcugggcucccuuccca

SEQ ID NO: 2726960 - RNA, 20 nt, Human
gcugggcucccuucccaccu

SEQ ID NO: 2726961 - RNA, 19 nt, Human
gcugggauuacagguguga

SEQ ID NO: 2726962 - RNA, 18 nt, Human
gcugggauuacaggugug

SEQ ID NO: 2726963 - RNA, 13 nt, Human
gcugggcagagga

SEQ ID NO: 2726964 - RNA, 14 nt, Human
gcugggcagaggaa

SEQ ID NO: 2726965 - RNA, 15 nt, Human
gcugggcagaggaaa

SEQ ID NO: 2726966 - RNA, 14 nt, Human
gcuggagugcagug

SEQ ID NO: 2726967 - RNA, 15 nt, Human
gcuggagugcaguga

SEQ ID NO: 2726968 - RNA, 16 nt, Human
gcuggccuggccccuc

SEQ ID NO: 2726969 - RNA, 17 nt, Human
gcuggccuggccccuca

SEQ ID NO: 2726970 - RNA, 16 nt, Human
gcugggauuacaggug

SEQ ID NO: 2726971 - RNA, 18 nt, Human
gcuggccuggccccucag

SEQ ID NO: 2726972 - RNA, 19 nt, Human
gcuggccuggccccucagg

SEQ ID NO: 2726973 - RNA, 14 nt, Human
gcugcaccggcugg

SEQ ID NO: 2726974 - RNA, 16 nt, Human
gcugcaccggcuggcc

SEQ ID NO: 2726975 - RNA, 17 nt, Human
gcugcaccggcuggccu

SEQ ID NO: 2726976 - RNA, 22 nt, Human
gcugcaccggcuggccuggccc

SEQ ID NO: 2726977 - RNA, 18 nt, Human
gcugcaccggcuggccug

SEQ ID NO: 2726978 - RNA, 19 nt, Human
gcugcaccggcuggccugg

SEQ ID NO: 2726979 - RNA, 21 nt, Human
gcugccauccagguucagcuu

SEQ ID NO: 2726980 - RNA, 23 nt, Human
gcugccauccagguucagcuugu

SEQ ID NO: 2726981 - RNA, 19 nt, Human
gcugccagccgagauagcc

SEQ ID NO: 2726982 - RNA, 21 nt, Human
gcugccagccgagauagccaa

SEQ ID NO: 2726983 - RNA, 21 nt, Human
gcugccuccccuccucugcuu

SEQ ID NO: 2726984 - RNA, 22 nt, Human
gcugccuccccuccucugcuug

SEQ ID NO: 2726985 - RNA, 16 nt, Human
gcugccuccccuccuc

SEQ ID NO: 2726986 - RNA, 17 nt, Human
gcugccuccccuccucu

SEQ ID NO: 2726987 - RNA, 20 nt, Human
gcugccuccccuccucugcu

SEQ ID NO: 2726988 - RNA, 13 nt, Human
gcugccugggauc

SEQ ID NO: 2726989 - RNA, 19 nt, Human
gcugccugggaucccucau

SEQ ID NO: 2726990 - RNA, 16 nt, Human
gcugccugggaucccu

SEQ ID NO: 2726991 - RNA, 18 nt, Human
gcugccugggaucccuca

SEQ ID NO: 2726992 - RNA, 15 nt, Human
ggagagcuagcagca

SEQ ID NO: 2726993 - RNA, 13 nt, Human
ggagagccuucca

SEQ ID NO: 2726994 - RNA, 16 nt, Human
ggagagccuuccaggg

SEQ ID NO: 2726995 - RNA, 22 nt, Human
ggagagccuuccagggguggga

SEQ ID NO: 2726996 - RNA, 17 nt, Human
ggagagccuuccagggg

SEQ ID NO: 2726997 - RNA, 18 nt, Human
ggagagccuuccaggggu

SEQ ID NO: 2726998 - RNA, 9 nt, Human
ggacuuugu

SEQ ID NO: 2726999 - RNA, 19 nt, Human
ggagaaaauggacguguua

SEQ ID NO: 2727000 - RNA, 15 nt, Human
ggacuuggaagcucc

SEQ ID NO: 2727001 - RNA, 17 nt, Human
ggacuuggaagcuccgc

SEQ ID NO: 2727002 - RNA, 22 nt, Human
ggagaaccaaaaagaggcuaug

SEQ ID NO: 2727003 - RNA, 22 nt, Human
ggacucaaugcacugacauugu

SEQ ID NO: 2727004 - RNA, 12 nt, Human
ggaccucaggcc

SEQ ID NO: 2727005 - RNA, 20 nt, Human
ggacuacaggugugagucac

SEQ ID NO: 2727006 - RNA, 19 nt, Human
ggacccugaggcccagagg

SEQ ID NO: 2727007 - RNA, 14 nt, Human
ggacccugaggccc

SEQ ID NO: 2727008 - RNA, 15 nt, Human
ggacccugaggccca

SEQ ID NO: 2727009 - RNA, 18 nt, Human
ggacccugaggcccagag

SEQ ID NO: 2727010 - RNA, 19 nt, Human
gcuuguacauaaugcgugc

SEQ ID NO: 2727011 - RNA, 13 nt, Human
ggagcagccacau

SEQ ID NO: 2727012 - RNA, 21 nt, Human
ggagcagccacauuccugaug

SEQ ID NO: 2727013 - RNA, 15 nt, Human
ggaggucgaggcagg

SEQ ID NO: 2727014 - RNA, 16 nt, Human
ggaggucgaggcagga

SEQ ID NO: 2727015 - RNA, 14 nt, Human
ggaggucgaggcag

SEQ ID NO: 2727016 - RNA, 18 nt, Human
ggaggucgaggcaggagg

SEQ ID NO: 2727017 - RNA, 12 nt, Human
ggaggaagagaa

SEQ ID NO: 2727018 - RNA, 21 nt, Human
ggaggcaugugaugagaggaa

SEQ ID NO: 2727019 - RNA, 18 nt, Human
ggaggccaaggugggagg

SEQ ID NO: 2727020 - RNA, 13 nt, Human
ggaggccagccuu

SEQ ID NO: 2727021 - RNA, 22 nt, Human
ggagcugccuguucagcuccag

SEQ ID NO: 2727022 - RNA, 16 nt, Human
ggagcugaguggggga

SEQ ID NO: 2727023 - RNA, 12 nt, Human
ggcagaaggaag

SEQ ID NO: 2727024 - RNA, 14 nt, Human
ggcagccaggccac

SEQ ID NO: 2727025 - RNA, 10 nt, Human
ggcagagcag

SEQ ID NO: 2727026 - RNA, 15 nt, Human
ggcagccaggccaca

SEQ ID NO: 2727027 - RNA, 17 nt, Human
ggcagccaggccacaag

SEQ ID NO: 2727028 - RNA, 22 nt, Human
ggaugguucccuugaugaagaa

SEQ ID NO: 2727029 - RNA, 23 nt, Human
ggaugguucccuugaugaagaag

SEQ ID NO: 2727030 - RNA, 21 nt, Human
ggaugaauuccaaauucugcu

SEQ ID NO: 2727031 - RNA, 12 nt, Human
ggaugagaaagg

SEQ ID NO: 2727032 - RNA, 22 nt, Human
ggaugagaaagguugaagcacc

SEQ ID NO: 2727033 - RNA, 21 nt, Human
ggauuuugauccaagcugguc

SEQ ID NO: 2727034 - RNA, 23 nt, Human
ggauuaaacuuaaucuaaaugga

SEQ ID NO: 2727035 - RNA, 21 nt, Human
ggccaaaggaagcacaugccu

SEQ ID NO: 2727036 - RNA, 15 nt, Human
ggccaaagccaaagc

SEQ ID NO: 2727037 - RNA, 12 nt, Human
ggccaaaggaag

SEQ ID NO: 2727038 - RNA, 12 nt, Human
ggcauuguggga

SEQ ID NO: 2727039 - RNA, 13 nt, Human
ggccaagguggga

SEQ ID NO: 2727040 - RNA, 22 nt, Human
ggccagagggagugacagaggc

SEQ ID NO: 2727041 - RNA, 23 nt, Human
ggccagagggagugacagaggca

SEQ ID NO: 2727042 - RNA, 17 nt, Human
ggccagaugcaccagcc

SEQ ID NO: 2727043 - RNA, 19 nt, Human
ggccagaugcaccagcccu

SEQ ID NO: 2727044 - RNA, 20 nt, Human
ggccagaugcaccagcccuu

SEQ ID NO: 2727045 - RNA, 13 nt, Human
ggccucccaacuc

SEQ ID NO: 2727046 - RNA, 14 nt, Human
ggccucccaacuca

SEQ ID NO: 2727047 - RNA, 13 nt, Human
aaaaaaacacaaa

SEQ ID NO: 2727048 - RNA, 15 nt, Human
ggcuucaguggcagc

SEQ ID NO: 2727049 - RNA, 20 nt, Human
ggcuguaucccaugagccuc

SEQ ID NO: 2727050 - RNA, 22 nt, Human
ggcuguaucccaugagccucag

SEQ ID NO: 2727051 - RNA, 23 nt, Human
ggcuguaucccaugagccucagc

SEQ ID NO: 2727052 - RNA, 15 nt, Human
ggcugucaauuacag

SEQ ID NO: 2727053 - RNA, 19 nt, Human
ggcuguaucccaugagccu

SEQ ID NO: 2727054 - RNA, 16 nt, Human
ggcuggugucaccuga

SEQ ID NO: 2727055 - RNA, 16 nt, Human
ggcuucaguggcagcu

SEQ ID NO: 2727056 - RNA, 13 nt, Human
gggaaaaucagcc

SEQ ID NO: 2727057 - RNA, 23 nt, Human
gggaaaaucagccugcuccagcu

SEQ ID NO: 2727058 - RNA, 16 nt, Human
ggcucccuucccaccu

SEQ ID NO: 2727059 - RNA, 17 nt, Human
ggcucccuucccaccuc

SEQ ID NO: 2727060 - RNA, 18 nt, Human
ggcucccuucccaccucu

SEQ ID NO: 2727061 - RNA, 20 nt, Human
ggcucccuucccaccucucu

SEQ ID NO: 2727062 - RNA, 22 nt, Human
ggcucccuucccaccucucuca

SEQ ID NO: 2727063 - RNA, 20 nt, Human
ggcugcaugcgggcuuccuc

SEQ ID NO: 2727064 - RNA, 17 nt, Human
ggcugcagggaguccga

SEQ ID NO: 2727065 - RNA, 18 nt, Human
ggcucgagcaugccugga

SEQ ID NO: 2727066 - RNA, 20 nt, Human
ggcucuuccaggcugggaga

SEQ ID NO: 2727067 - RNA, 23 nt, Human
ggcucuuccaggcugggagagcc

SEQ ID NO: 2727068 - RNA, 24 nt, Human
ggcucuuccaggcugggagagccu

SEQ ID NO: 2727069 - RNA, 14 nt, Human
ggcuggcgugcagu

SEQ ID NO: 2727070 - RNA, 16 nt, Human
ggcuggcgugcagugg

SEQ ID NO: 2727071 - RNA, 20 nt, Human
ggcuggcgugcaguggugcg

SEQ ID NO: 2727072 - RNA, 17 nt, Human
ggcuggccuggccccuc

SEQ ID NO: 2727073 - RNA, 22 nt, Human
ggcuggccuggccccucagggu

SEQ ID NO: 2727074 - RNA, 22 nt, Human
aaaacuugauguguuaucucuu

SEQ ID NO: 2727075 - RNA, 19 nt, Human
aaaagccugcaauuucaua

SEQ ID NO: 2727076 - RNA, 22 nt, Human
aaaagcuccauuuuuagugaaa

SEQ ID NO: 2727077 - RNA, 14 nt, Human
aaaagcugggcagg

SEQ ID NO: 2727078 - RNA, 11 nt, Human
gggagggcucc

SEQ ID NO: 2727079 - RNA, 13 nt, Human
gggagggcuccag

SEQ ID NO: 2727080 - RNA, 18 nt, Human
aaaacugauuuuuuuuuc

SEQ ID NO: 2727081 - RNA, 22 nt, Human
aaaacugauuuuuuuuuccuuc

SEQ ID NO: 2727082 - RNA, 21 nt, Human
aaaacguggcugcuucaagga

SEQ ID NO: 2727083 - RNA, 15 nt, Human
aaaaccaauguucuc

SEQ ID NO: 2727084 - RNA, 14 nt, Human
aaaacguggcugcu

SEQ ID NO: 2727085 - RNA, 16 nt, Human
aaaacguggcugcuuc

SEQ ID NO: 2727086 - RNA, 17 nt, Human
aaaacguggcugcuuca

SEQ ID NO: 2727087 - RNA, 18 nt, Human
aaaacguggcugcuucaa

SEQ ID NO: 2727088 - RNA, 14 nt, Human
gggaacagacugga

SEQ ID NO: 2727089 - RNA, 17 nt, Human
aaaaaucucaaauuucu

SEQ ID NO: 2727090 - RNA, 22 nt, Human
gggaacagacuggaagcacagc

SEQ ID NO: 2727091 - RNA, 20 nt, Human
aaaaaucucaaauuucuaaa

SEQ ID NO: 2727092 - RNA, 19 nt, Human
aaaaaucucaaauuucuaa

SEQ ID NO: 2727093 - RNA, 12 nt, Human
gggcagcugccu

SEQ ID NO: 2727094 - RNA, 13 nt, Human
gggcagcugccuc

SEQ ID NO: 2727095 - RNA, 14 nt, Human
gggcagcugccucc

SEQ ID NO: 2727096 - RNA, 19 nt, Human
gggcagcugccuccccucc

SEQ ID NO: 2727097 - RNA, 20 nt, Human
gggcagcugccuccccuccu

SEQ ID NO: 2727098 - RNA, 23 nt, Human
gggcagcugccuccccuccucug

SEQ ID NO: 2727099 - RNA, 20 nt, Human
gggauucuuaaaguugaauu

SEQ ID NO: 2727100 - RNA, 15 nt, Human
gggauucuuaaaguu

SEQ ID NO: 2727101 - RNA, 23 nt, Human
gggcagagcagagaccaucccug

SEQ ID NO: 2727102 - RNA, 15 nt, Human
gggauuuccaugaug

SEQ ID NO: 2727103 - RNA, 20 nt, Human
aaaauaauuuuuauauuuga

SEQ ID NO: 2727104 - RNA, 12 nt, Human
aaaauaaauuau

SEQ ID NO: 2727105 - RNA, 21 nt, Human
aaaauaauuuuuauauuugaa

SEQ ID NO: 2727106 - RNA, 23 nt, Human
aaaauaauuuuuauauuugaaau

SEQ ID NO: 2727107 - RNA, 14 nt, Human
aaaauaccagccag

SEQ ID NO: 2727108 - RNA, 15 nt, Human
aaaauaccagccagu

SEQ ID NO: 2727109 - RNA, 14 nt, Human
aaaauauauuuaau

SEQ ID NO: 2727110 - RNA, 18 nt, Human
aaaauaguggugugauuu

SEQ ID NO: 2727111 - RNA, 12 nt, Human
aaaauagccugc

SEQ ID NO: 2727112 - RNA, 21 nt, Human
aaacauauauaacaaugcugu

SEQ ID NO: 2727113 - RNA, 16 nt, Human
aaacaugcuacacacu

SEQ ID NO: 2727114 - RNA, 22 nt, Human
aaacaugcuacacacugcaugu

SEQ ID NO: 2727115 - RNA, 16 nt, Human
aaacauauauaacaau

SEQ ID NO: 2727116 - RNA, 19 nt, Human
aaacauauauaacaaugcu

SEQ ID NO: 2727117 - RNA, 13 nt, Human
aaacauauauaac

SEQ ID NO: 2727118 - RNA, 14 nt, Human
aaacacaacuauau

SEQ ID NO: 2727119 - RNA, 19 nt, Human
aaacaagucagucauucag

SEQ ID NO: 2727120 - RNA, 24 nt, Human
ggggaaaaucagccugcuccagcu

SEQ ID NO: 2727121 - RNA, 13 nt, Human
ggggaccucaggc

SEQ ID NO: 2727122 - RNA, 15 nt, Human
ggggaccucaggccu

SEQ ID NO: 2727123 - RNA, 16 nt, Human
ggggaccucaggccug

SEQ ID NO: 2727124 - RNA, 17 nt, Human
ggggaccucaggccugg

SEQ ID NO: 2727125 - RNA, 17 nt, Human
ggggccaguuggucccc

SEQ ID NO: 2727126 - RNA, 16 nt, Human
ggggcccugccuccuu

SEQ ID NO: 2727127 - RNA, 15 nt, Human
ggggcccugccuccu

SEQ ID NO: 2727128 - RNA, 19 nt, Human
ggggcccugccuccuuugu

SEQ ID NO: 2727129 - RNA, 23 nt, Human
ggggcccugccuccuuugugagg

SEQ ID NO: 2727130 - RNA, 17 nt, Human
aaacaaggaugaauuaa

SEQ ID NO: 2727131 - RNA, 19 nt, Human
aaacaacuucaauauccaa

SEQ ID NO: 2727132 - RNA, 19 nt, Human
aaaauuuuuucucuaggaa

SEQ ID NO: 2727133 - RNA, 21 nt, Human
aaaauauuauguguuuccaua

SEQ ID NO: 2727134 - RNA, 14 nt, Human
aaaauauuaugugu

SEQ ID NO: 2727135 - RNA, 15 nt, Human
aaaauauuauguguu

SEQ ID NO: 2727136 - RNA, 23 nt, Human
aaaauuggggauucuuaaaguug

SEQ ID NO: 2727137 - RNA, 21 nt, Human
aaaauuggggauucuuaaagu

SEQ ID NO: 2727138 - RNA, 21 nt, Human
aaaauguaggguuauaauaau

SEQ ID NO: 2727139 - RNA, 21 nt, Human
aaaauggacguguuaugacuc

SEQ ID NO: 2727140 - RNA, 12 nt, Human
aaaauggaauac

SEQ ID NO: 2727141 - RNA, 22 nt, Human
aaaauggacuguggugacuuug

SEQ ID NO: 2727142 - RNA, 16 nt, Human
aaacuggauuaaacuu

SEQ ID NO: 2727143 - RNA, 15 nt, Human
aaaccacagcaguug

SEQ ID NO: 2727144 - RNA, 16 nt, Human
aaaccacagcaguuga

SEQ ID NO: 2727145 - RNA, 18 nt, Human
aaacggaugauuucuaug

SEQ ID NO: 2727146 - RNA, 16 nt, Human
aaacggaugauuucua

SEQ ID NO: 2727147 - RNA, 17 nt, Human
aaacguggcugcuucaa

SEQ ID NO: 2727148 - RNA, 15 nt, Human
aaacgucuuaaauau

SEQ ID NO: 2727149 - RNA, 16 nt, Human
aaacguggcugcuuca

SEQ ID NO: 2727150 - RNA, 22 nt, Human
gggucucacuauguugcccagg

SEQ ID NO: 2727151 - RNA, 23 nt, Human
gggucucacuauguugcccaggc

SEQ ID NO: 2727152 - RNA, 20 nt, Human
ggguaucaggugcugccauc

SEQ ID NO: 2727153 - RNA, 22 nt, Human
gggucacucuggcagcucagag

SEQ ID NO: 2727154 - RNA, 12 nt, Human
ggucuguucuuu

SEQ ID NO: 2727155 - RNA, 21 nt, Human
ggucuugaacuccuggccuca

SEQ ID NO: 2727156 - RNA, 22 nt, Human
ggucuugaacuccuggccucaa

SEQ ID NO: 2727157 - RNA, 19 nt, Human
ggucuguucuuuccaaagu

SEQ ID NO: 2727158 - RNA, 17 nt, Human
ggucuguucuuuccaaa

SEQ ID NO: 2727159 - RNA, 21 nt, Human
aaagauuuucagaaaauauua

SEQ ID NO: 2727160 - RNA, 16 nt, Human
ggugcacaagcuccaa

SEQ ID NO: 2727161 - RNA, 22 nt, Human
ggugcacaagcuccaagcuccc

SEQ ID NO: 2727162 - RNA, 15 nt, Human
ggugccaguuauggc

SEQ ID NO: 2727163 - RNA, 13 nt, Human
aaaggaauuuaaa

SEQ ID NO: 2727164 - RNA, 11 nt, Human
aaaggaaagag

SEQ ID NO: 2727165 - RNA, 13 nt, Human
aaagcuuauuaaa

SEQ ID NO: 2727166 - RNA, 17 nt, Human
aaagcagugcaugcugu

SEQ ID NO: 2727167 - RNA, 16 nt, Human
aaagcagugcaugcug

SEQ ID NO: 2727168 - RNA, 21 nt, Human
aaagcagugcaugcugucccu

SEQ ID NO: 2727169 - RNA, 22 nt, Human
aaagcagugcaugcugucccuu

SEQ ID NO: 2727170 - RNA, 17 nt, Human
aaagcuaggccuggcca

SEQ ID NO: 2727171 - RNA, 18 nt, Human
aaagcuaggccuggccag

SEQ ID NO: 2727172 - RNA, 17 nt, Human
aaagcuacuuauuguag

SEQ ID NO: 2727173 - RNA, 16 nt, Human
aaagcuacuuauugua

SEQ ID NO: 2727174 - RNA, 16 nt, Human
aaagaaugauuaugaa

SEQ ID NO: 2727175 - RNA, 17 nt, Human
aaacuuuucugauagag

SEQ ID NO: 2727176 - RNA, 16 nt, Human
aaacuuuucugauaga

SEQ ID NO: 2727177 - RNA, 12 nt, Human
aaacuuuucuga

SEQ ID NO: 2727178 - RNA, 14 nt, Human
aaacuuuucugaua

SEQ ID NO: 2727179 - RNA, 13 nt, Human
aaacuuuucugau

SEQ ID NO: 2727180 - RNA, 14 nt, Human
aaacuuuaccuuuu

SEQ ID NO: 2727181 - RNA, 20 nt, Human
gguccacccaggagccccga

SEQ ID NO: 2727182 - RNA, 22 nt, Human
gguccacccaggagccccgagg

SEQ ID NO: 2727183 - RNA, 12 nt, Human
ggucccacccca

SEQ ID NO: 2727184 - RNA, 15 nt, Human
aaacuuguguaaaua

SEQ ID NO: 2727185 - RNA, 17 nt, Human
aaacuuguguaaauaca

SEQ ID NO: 2727186 - RNA, 19 nt, Human
gguccacccaggagccccg

SEQ ID NO: 2727187 - RNA, 21 nt, Human
ggucauauuaauauauuucca

SEQ ID NO: 2727188 - RNA, 18 nt, Human
ggucauauuaauauauuu

SEQ ID NO: 2727189 - RNA, 23 nt, Human
gguauuggcuagagguucaaaga

SEQ ID NO: 2727190 - RNA, 23 nt, Human
aaagacuauucaaacagucucag

SEQ ID NO: 2727191 - RNA, 13 nt, Human
aaagacuccaaag

SEQ ID NO: 2727192 - RNA, 15 nt, Human
aaagacuguacaaag

SEQ ID NO: 2727193 - RNA, 22 nt, Human
aaagacuauucaaacagucuca

SEQ ID NO: 2727194 - RNA, 18 nt, Human
aaagagaacuuccagauc

SEQ ID NO: 2727195 - RNA, 19 nt, Human
aaagacuuuuccaacccuc

SEQ ID NO: 2727196 - RNA, 20 nt, Human
aaagaggcagcuugaaacug

SEQ ID NO: 2727197 - RNA, 15 nt, Human
aaagaugagugagca

SEQ ID NO: 2727198 - RNA, 13 nt, Human
aaagaggcuaugu

SEQ ID NO: 2727199 - RNA, 18 nt, Human
aaagaggcuaugugagca

SEQ ID NO: 2727200 - RNA, 14 nt, Human
aaagauuuucagaa

SEQ ID NO: 2727201 - RNA, 15 nt, Human
aaagauuuucagaaa

SEQ ID NO: 2727202 - RNA, 17 nt, Human
gacagcccgggcucugc

SEQ ID NO: 2727203 - RNA, 15 nt, Human
gacacacugaagaag

SEQ ID NO: 2727204 - RNA, 16 nt, Human
gacacacugaagaagc

SEQ ID NO: 2727205 - RNA, 14 nt, Human
gacacacugaagaa

SEQ ID NO: 2727206 - RNA, 13 nt, Human
gacacagcucuuc

SEQ ID NO: 2727207 - RNA, 14 nt, Human
gacacagcucuucu

SEQ ID NO: 2727208 - RNA, 16 nt, Human
gacacagcucuucucc

SEQ ID NO: 2727209 - RNA, 17 nt, Human
gacacagcucuucucca

SEQ ID NO: 2727210 - RNA, 22 nt, Human
gacacagcucuucuccaggcug

SEQ ID NO: 2727211 - RNA, 23 nt, Human
gacacagcucuucuccaggcugu

SEQ ID NO: 2727212 - RNA, 20 nt, Human
gaccagggauuuccaugaug

SEQ ID NO: 2727213 - RNA, 12 nt, Human
gaccaucccuga

SEQ ID NO: 2727214 - RNA, 13 nt, Human
gaccaucccugaa

SEQ ID NO: 2727215 - RNA, 18 nt, Human
gaccaucccugaaggccc

SEQ ID NO: 2727216 - RNA, 19 nt, Human
gaccaucccugaaggcccc

SEQ ID NO: 2727217 - RNA, 18 nt, Human
gaccagggauuuccauga

SEQ ID NO: 2727218 - RNA, 16 nt, Human
gacauuugcucaugga

SEQ ID NO: 2727219 - RNA, 17 nt, Human
gacauuugcucauggaa

SEQ ID NO: 2727220 - RNA, 19 nt, Human
gacauuguuggccaaagcc

SEQ ID NO: 2727221 - RNA, 20 nt, Human
gacagcccgggcucugccuc

SEQ ID NO: 2727222 - RNA, 18 nt, Human
gacagcccgggcucugcc

SEQ ID NO: 2727223 - RNA, 19 nt, Human
gacagcccgggcucugccu

SEQ ID NO: 2727224 - RNA, 14 nt, Human
gacauugcggacag

SEQ ID NO: 2727225 - RNA, 15 nt, Human
gacauugcggacagc

SEQ ID NO: 2727226 - RNA, 14 nt, Human
gacucuuaagaaga

SEQ ID NO: 2727227 - RNA, 18 nt, Human
gacucuuaagaagacugc

SEQ ID NO: 2727228 - RNA, 19 nt, Human
gacucugucucaaaaaaac

SEQ ID NO: 2727229 - RNA, 21 nt, Human
gacucuuaagaagacugcauu

SEQ ID NO: 2727230 - RNA, 14 nt, Human
gacugaauuaugaa

SEQ ID NO: 2727231 - RNA, 14 nt, Human
gacugaauuucuuu

SEQ ID NO: 2727232 - RNA, 20 nt, Human
gacugaauuaugaaacuuuu

SEQ ID NO: 2727233 - RNA, 14 nt, Human
gacuguggugacuu

SEQ ID NO: 2727234 - RNA, 13 nt, Human
gacuguggugacu

SEQ ID NO: 2727235 - RNA, 19 nt, Human
gacgcuacccgggaagggg

SEQ ID NO: 2727236 - RNA, 16 nt, Human
gacgcuacccgggaag

SEQ ID NO: 2727237 - RNA, 18 nt, Human
gacgcuacccgggaaggg

SEQ ID NO: 2727238 - RNA, 15 nt, Human
gacgccaucccagcc

SEQ ID NO: 2727239 - RNA, 17 nt, Human
gacgccaucccagcccc

SEQ ID NO: 2727240 - RNA, 18 nt, Human
gacgccaucccagcccca

SEQ ID NO: 2727241 - RNA, 11 nt, Human
gaccugaggcc

SEQ ID NO: 2727242 - RNA, 13 nt, Human
gaccugaggcccu

SEQ ID NO: 2727243 - RNA, 14 nt, Human
gaccugaggcccuu

SEQ ID NO: 2727244 - RNA, 16 nt, Human
gacgccaucccagccc

SEQ ID NO: 2727245 - RNA, 20 nt, Human
gaccaucccugaaggccccg

SEQ ID NO: 2727246 - RNA, 14 nt, Human
gaccucugcagcaa

SEQ ID NO: 2727247 - RNA, 22 nt, Human
gaaggggagauaaggguaucug

SEQ ID NO: 2727248 - RNA, 14 nt, Human
gaauauguuucaaa

SEQ ID NO: 2727249 - RNA, 15 nt, Human
gaauauguuucaaac

SEQ ID NO: 2727250 - RNA, 20 nt, Human
gaauauguuucaaacuuugg

SEQ ID NO: 2727251 - RNA, 14 nt, Human
gaauauugcugaug

SEQ ID NO: 2727252 - RNA, 15 nt, Human
gaauauugcugaugg

SEQ ID NO: 2727253 - RNA, 19 nt, Human
gaauauugcugauggugca

SEQ ID NO: 2727254 - RNA, 20 nt, Human
gaauauugcugauggugcaa

SEQ ID NO: 2727255 - RNA, 19 nt, Human
gaagcuccgcuuucuaccc

SEQ ID NO: 2727256 - RNA, 22 nt, Human
gaagcuccgcuuucuacccagc

SEQ ID NO: 2727257 - RNA, 17 nt, Human
gaaggccccgcccaggc

SEQ ID NO: 2727258 - RNA, 21 nt, Human
gaaggcucgagcaugccugga

SEQ ID NO: 2727259 - RNA, 18 nt, Human
gaaggccccgcccaggcu

SEQ ID NO: 2727260 - RNA, 19 nt, Human
gaaggccccgcccaggcuu

SEQ ID NO: 2727261 - RNA, 19 nt, Human
gaaggcucgagcaugccug

SEQ ID NO: 2727262 - RNA, 15 nt, Human
gaaggcuggguucug

SEQ ID NO: 2727263 - RNA, 19 nt, Human
gaaggcuggguucugaucc

SEQ ID NO: 2727264 - RNA, 20 nt, Human
gaaggcuggguucugauccu

SEQ ID NO: 2727265 - RNA, 22 nt, Human
gaaggcuggguucugauccuag

SEQ ID NO: 2727266 - RNA, 15 nt, Human
gaagcagaggaagga

SEQ ID NO: 2727267 - RNA, 14 nt, Human
gaagcaaaauuuuu

SEQ ID NO: 2727268 - RNA, 23 nt, Human
gaagauuuugaaauuuuuauuaa

SEQ ID NO: 2727269 - RNA, 23 nt, Human
gaagacaaugugaaaagaaaaau

SEQ ID NO: 2727270 - RNA, 22 nt, Human
gaagacaaugacuuacuguaca

SEQ ID NO: 2727271 - RNA, 16 nt, Human
gaagacaaugacuuac

SEQ ID NO: 2727272 - RNA, 15 nt, Human
gaagcacaugccucu

SEQ ID NO: 2727273 - RNA, 17 nt, Human
gaagcacaugccucucu

SEQ ID NO: 2727274 - RNA, 20 nt, Human
gaagcacaugccucucucag

SEQ ID NO: 2727275 - RNA, 14 nt, Human
gaacugaaaucaua

SEQ ID NO: 2727276 - RNA, 13 nt, Human
gaacugaaaucau

SEQ ID NO: 2727277 - RNA, 15 nt, Human
gaacuccuggccuca

SEQ ID NO: 2727278 - RNA, 11 nt, Human
gaacuggcugc

SEQ ID NO: 2727279 - RNA, 12 nt, Human
gaacuggcugca

SEQ ID NO: 2727280 - RNA, 14 nt, Human
gcaccgggccacag

SEQ ID NO: 2727281 - RNA, 23 nt, Human
gcacaucagcacgauuucuguuu

SEQ ID NO: 2727282 - RNA, 22 nt, Human
gcacaucagcacgauuucuguu

SEQ ID NO: 2727283 - RNA, 23 nt, Human
gcaccgggccacagagaaaguac

SEQ ID NO: 2727284 - RNA, 16 nt, Human
gcacuccccugcuggg

SEQ ID NO: 2727285 - RNA, 22 nt, Human
gcacuccccugcuggguguggc

SEQ ID NO: 2727286 - RNA, 13 nt, Human
gcacucagaagac

SEQ ID NO: 2727287 - RNA, 16 nt, Human
gcacucagaagacacu

SEQ ID NO: 2727288 - RNA, 17 nt, Human
gcacuccccugcugggu

SEQ ID NO: 2727289 - RNA, 21 nt, Human
gauuuuuuuguuguuuguuua

SEQ ID NO: 2727290 - RNA, 18 nt, Human
gauuuuuuuguuguuugu

SEQ ID NO: 2727291 - RNA, 20 nt, Human
gcaaguauuagaauaccaca

SEQ ID NO: 2727292 - RNA, 22 nt, Human
gcaauagucaaauugugugaaa

SEQ ID NO: 2727293 - RNA, 22 nt, Human
gcacaguuuucugagaaagacu

SEQ ID NO: 2727294 - RNA, 20 nt, Human
gcacaguuuucugagaaaga

SEQ ID NO: 2727295 - RNA, 23 nt, Human
gcacaguuuucugagaaagacua

SEQ ID NO: 2727296 - RNA, 14 nt, Human
gcacacauuuuuua

SEQ ID NO: 2727297 - RNA, 14 nt, Human
gcacaccgggcacu

SEQ ID NO: 2727298 - RNA, 22 nt, Human
gcacaagcugcacccucaggca

SEQ ID NO: 2727299 - RNA, 17 nt, Human
gaucugccuaaggacuu

SEQ ID NO: 2727300 - RNA, 23 nt, Human
gaucugccuaaggacuucuuuaa

SEQ ID NO: 2727301 - RNA, 21 nt, Human
gaucugccuaaggacuucuuu

SEQ ID NO: 2727302 - RNA, 20 nt, Human
gaucugccuaaggacuucuu

SEQ ID NO: 2727303 - RNA, 18 nt, Human
gaucugccuaaggacuuc

SEQ ID NO: 2727304 - RNA, 16 nt, Human
gaugaucuuuaaaaua

SEQ ID NO: 2727305 - RNA, 21 nt, Human
gaugaucuaggaagacuuugg

SEQ ID NO: 2727306 - RNA, 15 nt, Human
gaugaucuaggaaga

SEQ ID NO: 2727307 - RNA, 16 nt, Human
gaugagugagcaugcc

SEQ ID NO: 2727308 - RNA, 22 nt, Human
gaugguucccuugaugaagaag

SEQ ID NO: 2727309 - RNA, 14 nt, Human
gaugguucuagcau

SEQ ID NO: 2727310 - RNA, 12 nt, Human
gauuauuggaaa

SEQ ID NO: 2727311 - RNA, 22 nt, Human
gauuauucacugauuugacaua

SEQ ID NO: 2727312 - RNA, 21 nt, Human
gauuauucacugauuugacau

SEQ ID NO: 2727313 - RNA, 18 nt, Human
gauucuccugccucagcc

SEQ ID NO: 2727314 - RNA, 15 nt, Human
gauucuccugccuca

SEQ ID NO: 2727315 - RNA, 17 nt, Human
gauucuccugccucagc

SEQ ID NO: 2727316 - RNA, 15 nt, Human
gauuuaccacuugug

SEQ ID NO: 2727317 - RNA, 18 nt, Human
gauucuuccucccucccu

SEQ ID NO: 2727318 - RNA, 17 nt, Human
gauucuuccucccuccc

SEQ ID NO: 2727319 - RNA, 23 nt, Human
gauucuucagcaaaaauauuuua

SEQ ID NO: 2727320 - RNA, 16 nt, Human
gauuuaccacuugugu

SEQ ID NO: 2727321 - RNA, 13 nt, Human
gagccuugaacuu

SEQ ID NO: 2727322 - RNA, 23 nt, Human
gagccuuccaggggugggacacc

SEQ ID NO: 2727323 - RNA, 20 nt, Human
gagccuuccaggggugggac

SEQ ID NO: 2727324 - RNA, 13 nt, Human
gaggccagagaca

SEQ ID NO: 2727325 - RNA, 14 nt, Human
gaggccagagacac

SEQ ID NO: 2727326 - RNA, 19 nt, Human
gaggccagagacacaagcc

SEQ ID NO: 2727327 - RNA, 22 nt, Human
gaggcuagugugguguuuccug

SEQ ID NO: 2727328 - RNA, 14 nt, Human
gaggcagggucuca

SEQ ID NO: 2727329 - RNA, 17 nt, Human
gaggccaaggugggagg

SEQ ID NO: 2727330 - RNA, 22 nt, Human
gaggccaaggugggaggauugc

SEQ ID NO: 2727331 - RNA, 15 nt, Human
gaggcagggucucac

SEQ ID NO: 2727332 - RNA, 22 nt, Human
gaggcagggucucacucugucg

SEQ ID NO: 2727333 - RNA, 15 nt, Human
gaggucgaggcagga

SEQ ID NO: 2727334 - RNA, 23 nt, Human
gaggugaccccagguuucuaugu

SEQ ID NO: 2727335 - RNA, 12 nt, Human
gagucccaccuu

SEQ ID NO: 2727336 - RNA, 18 nt, Human
gagugacagaggcagccc

SEQ ID NO: 2727337 - RNA, 22 nt, Human
gagucagaaguuucugccgcag

SEQ ID NO: 2727338 - RNA, 15 nt, Human
gagucaccaagccca

SEQ ID NO: 2727339 - RNA, 16 nt, Human
gagucaccaagcccag

SEQ ID NO: 2727340 - RNA, 17 nt, Human
gagucaccaagcccagu

SEQ ID NO: 2727341 - RNA, 15 nt, Human
gaguugauucagcuc

SEQ ID NO: 2727342 - RNA, 16 nt, Human
gaguugauucagcucu

SEQ ID NO: 2727343 - RNA, 17 nt, Human
gaguugauucagcucug

SEQ ID NO: 2727344 - RNA, 22 nt, Human
gaguugauagcacagacccugc

SEQ ID NO: 2727345 - RNA, 20 nt, Human
gagugacagaggcagcccca

SEQ ID NO: 2727346 - RNA, 21 nt, Human
gagugaguuggguguauugug

SEQ ID NO: 2727347 - RNA, 16 nt, Human
gaguuuaaauuguaau

SEQ ID NO: 2727348 - RNA, 18 nt, Human
gaguugauucagcucugc

SEQ ID NO: 2727349 - RNA, 22 nt, Human
gaguuguuacauuuuuaagugc

SEQ ID NO: 2727350 - RNA, 13 nt, Human
cuguucagcucca

SEQ ID NO: 2727351 - RNA, 14 nt, Human
cuguucagcuccag

SEQ ID NO: 2727352 - RNA, 16 nt, Human
cugugucuugcaaugg

SEQ ID NO: 2727353 - RNA, 19 nt, Human
cugugucuugcaauggcag

SEQ ID NO: 2727354 - RNA, 11 nt, Human
cugugcugccc

SEQ ID NO: 2727355 - RNA, 20 nt, Human
cugugcugagucugaaggcu

SEQ ID NO: 2727356 - RNA, 22 nt, Human
cugugcugagucugaaggcugg

SEQ ID NO: 2727357 - RNA, 20 nt, Human
cugugucagcauagaaguaa

SEQ ID NO: 2727358 - RNA, 19 nt, Human
cugugucagguggggcagc

SEQ ID NO: 2727359 - RNA, 21 nt, Human
cugugucagguggggcagcuu

SEQ ID NO: 2727360 - RNA, 14 nt, Human
cugugucuugcaau

SEQ ID NO: 2727361 - RNA, 14 nt, Human
cugugucucccuuc

SEQ ID NO: 2727362 - RNA, 19 nt, Human
cugugucucccuucauccu

SEQ ID NO: 2727363 - RNA, 19 nt, Human
cuuaccucggugccuuccu

SEQ ID NO: 2727364 - RNA, 21 nt, Human
cuuaccucggugccuuccucu

SEQ ID NO: 2727365 - RNA, 19 nt, Human
cuuagauguauauauuucc

SEQ ID NO: 2727366 - RNA, 13 nt, Human
cuuaccucggugc

SEQ ID NO: 2727367 - RNA, 17 nt, Human
cuuacccucauguucuu

SEQ ID NO: 2727368 - RNA, 19 nt, Human
cuuacccucauguucuuaa

SEQ ID NO: 2727369 - RNA, 18 nt, Human
cuuacccucauguucuua

SEQ ID NO: 2727370 - RNA, 13 nt, Human
cuuacacaauggu

SEQ ID NO: 2727371 - RNA, 13 nt, Human
cuuaaaguugaau

SEQ ID NO: 2727372 - RNA, 11 nt, Human
cuuaaaguuga

SEQ ID NO: 2727373 - RNA, 16 nt, Human
cuguugggccaggagc

SEQ ID NO: 2727374 - RNA, 17 nt, Human
cuguugggccaggagcc

SEQ ID NO: 2727375 - RNA, 20 nt, Human
cuguugggccaggagccucc

SEQ ID NO: 2727376 - RNA, 21 nt, Human
cuuauggaacacucugagacu

SEQ ID NO: 2727377 - RNA, 14 nt, Human
cuuaugggcugggu

SEQ ID NO: 2727378 - RNA, 21 nt, Human
cuuaugggcuggguucuaccc

SEQ ID NO: 2727379 - RNA, 22 nt, Human
cuuaugggcuggguucuaccca

SEQ ID NO: 2727380 - RNA, 23 nt, Human
cuuaugggcuggguucuacccag

SEQ ID NO: 2727381 - RNA, 12 nt, Human
cuuauugcccac

SEQ ID NO: 2727382 - RNA, 13 nt, Human
cuuauugcccacg

SEQ ID NO: 2727383 - RNA, 21 nt, Human
cuuagcagggaaacagcuaau

SEQ ID NO: 2727384 - RNA, 18 nt, Human
cuuagcagggaaacagcu

SEQ ID NO: 2727385 - RNA, 16 nt, Human
cuuccauggacuuugu

SEQ ID NO: 2727386 - RNA, 17 nt, Human
cuuccauggacuuuguu

SEQ ID NO: 2727387 - RNA, 18 nt, Human
cuuccagugaggcucugc

SEQ ID NO: 2727388 - RNA, 17 nt, Human
cuuccagugaggcucug

SEQ ID NO: 2727389 - RNA, 19 nt, Human
cuuccagugaggcucugcc

SEQ ID NO: 2727390 - RNA, 20 nt, Human
cuuccagugaggcucugccc

SEQ ID NO: 2727391 - RNA, 23 nt, Human
cuucaugcugucuacacuaagag

SEQ ID NO: 2727392 - RNA, 18 nt, Human
cuucaucugacuaugaca

SEQ ID NO: 2727393 - RNA, 16 nt, Human
cuucauccuccucaga

SEQ ID NO: 2727394 - RNA, 12 nt, Human
cuucaucugacu

SEQ ID NO: 2727395 - RNA, 15 nt, Human
cuucauccuccucag

SEQ ID NO: 2727396 - RNA, 13 nt, Human
cuucaucccucug

SEQ ID NO: 2727397 - RNA, 18 nt, Human
cuucaguggcagcugcuu

SEQ ID NO: 2727398 - RNA, 23 nt, Human
cuucagagacuccugcaggcagc

SEQ ID NO: 2727399 - RNA, 16 nt, Human
cuucagagacuccugc

SEQ ID NO: 2727400 - RNA, 21 nt, Human
cuucagagacuccugcaggca

SEQ ID NO: 2727401 - RNA, 22 nt, Human
cuucagagacuccugcaggcag

SEQ ID NO: 2727402 - RNA, 14 nt, Human
cuucaccuuugucc

SEQ ID NO: 2727403 - RNA, 18 nt, Human
cuuauugcccacgcugga

SEQ ID NO: 2727404 - RNA, 17 nt, Human
cuucaccuuugucccca

SEQ ID NO: 2727405 - RNA, 20 nt, Human
cuucaccuuuguccccaccg

SEQ ID NO: 2727406 - RNA, 12 nt, Human
cuugcucugcug

SEQ ID NO: 2727407 - RNA, 23 nt, Human
cuugaaugaugccaugaggaaca

SEQ ID NO: 2727408 - RNA, 23 nt, Human
cuugccgucuaccugaggggccu

SEQ ID NO: 2727409 - RNA, 12 nt, Human
cuugacagggca

SEQ ID NO: 2727410 - RNA, 20 nt, Human
cuugccgucuaccugagggg

SEQ ID NO: 2727411 - RNA, 20 nt, Human
cuugaaugaugccaugagga

SEQ ID NO: 2727412 - RNA, 18 nt, Human
cuucuucagagacuccug

SEQ ID NO: 2727413 - RNA, 22 nt, Human
cuucuucagagacuccugcagg

SEQ ID NO: 2727414 - RNA, 15 nt, Human
cuucuguuuuauaau

SEQ ID NO: 2727415 - RNA, 20 nt, Human
cuucuguuuuauaauuuugu

SEQ ID NO: 2727416 - RNA, 20 nt, Human
cuucuucagagacuccugca

SEQ ID NO: 2727417 - RNA, 21 nt, Human
cuucuucagagacuccugcag

SEQ ID NO: 2727418 - RNA, 13 nt, Human
cuuucagauacug

SEQ ID NO: 2727419 - RNA, 20 nt, Human
cuuuaaagggauggcaagau

SEQ ID NO: 2727420 - RNA, 13 nt, Human
cuuguggacacag

SEQ ID NO: 2727421 - RNA, 14 nt, Human
cuuguggacacagc

SEQ ID NO: 2727422 - RNA, 15 nt, Human
cuuguggacacagcu

SEQ ID NO: 2727423 - RNA, 18 nt, Human
cuuucaauaggaaaaacu

SEQ ID NO: 2727424 - RNA, 20 nt, Human
cuuucaauaggaaaaacuga

SEQ ID NO: 2727425 - RNA, 21 nt, Human
cuuucaauaggaaaaacugau

SEQ ID NO: 2727426 - RNA, 22 nt, Human
cuuucaauaggaaaaacugauu

SEQ ID NO: 2727427 - RNA, 16 nt, Human
cuuuaauuuuggaauu

SEQ ID NO: 2727428 - RNA, 13 nt, Human
cuuuaauuuugga

SEQ ID NO: 2727429 - RNA, 15 nt, Human
cuuuaauuuuggaau

SEQ ID NO: 2727430 - RNA, 14 nt, Human
cuuuaauuuuggaa

SEQ ID NO: 2727431 - RNA, 15 nt, Human
cuuuucaaaacauuu

SEQ ID NO: 2727432 - RNA, 20 nt, Human
cuuuggucuacacugugcug

SEQ ID NO: 2727433 - RNA, 16 nt, Human
cuuuggucuacacugu

SEQ ID NO: 2727434 - RNA, 14 nt, Human
cuuuuauaaacuuu

SEQ ID NO: 2727435 - RNA, 18 nt, Human
cuuuuauaaacuuuaccu

SEQ ID NO: 2727436 - RNA, 16 nt, Human
cuuuuauaaacuuuac

SEQ ID NO: 2727437 - RNA, 15 nt, Human
cuuuuauaaacuuua

SEQ ID NO: 2727438 - RNA, 21 nt, Human
cuuugagugucuuaauuaaaa

SEQ ID NO: 2727439 - RNA, 18 nt, Human
cuuugacgccaucccagc

SEQ ID NO: 2727440 - RNA, 19 nt, Human
cuuugacgccaucccagcc

SEQ ID NO: 2727441 - RNA, 21 nt, Human
cuuugacgccaucccagcccc

SEQ ID NO: 2727442 - RNA, 22 nt, Human
cuuugacgccaucccagcccca

SEQ ID NO: 2727443 - RNA, 14 nt, Human
cugcucacauaucu

SEQ ID NO: 2727444 - RNA, 12 nt, Human
cugcugaaggcu

SEQ ID NO: 2727445 - RNA, 16 nt, Human
cugcucacauaucugu

SEQ ID NO: 2727446 - RNA, 19 nt, Human
cugcucacauaucugucau

SEQ ID NO: 2727447 - RNA, 13 nt, Human
cugcugacagugu

SEQ ID NO: 2727448 - RNA, 15 nt, Human
cugcugacaguguug

SEQ ID NO: 2727449 - RNA, 11 nt, Human
cugcugacagu

SEQ ID NO: 2727450 - RNA, 12 nt, Human
cugcugacagug

SEQ ID NO: 2727451 - RNA, 15 nt, Human
cugcugaaggcucga

SEQ ID NO: 2727452 - RNA, 13 nt, Human
cugcugaaggcuc

SEQ ID NO: 2727453 - RNA, 14 nt, Human
cugcugaaggcucg

SEQ ID NO: 2727454 - RNA, 20 nt, Human
cugcuuaacuucacauauug

SEQ ID NO: 2727455 - RNA, 22 nt, Human
cuggaugcagccucacaguccu

SEQ ID NO: 2727456 - RNA, 15 nt, Human
cuggaguucugguuc

SEQ ID NO: 2727457 - RNA, 16 nt, Human
cuggaguucugguucc

SEQ ID NO: 2727458 - RNA, 17 nt, Human
cuggaguucugguuccu

SEQ ID NO: 2727459 - RNA, 12 nt, Human
cuggcccuuccu

SEQ ID NO: 2727460 - RNA, 22 nt, Human
cuggcuaugcauuugaaaauuu

SEQ ID NO: 2727461 - RNA, 16 nt, Human
cuggcuaugcauuuga

SEQ ID NO: 2727462 - RNA, 15 nt, Human
cuggcuaugcauuug

SEQ ID NO: 2727463 - RNA, 14 nt, Human
cuggcuaugcauuu

SEQ ID NO: 2727464 - RNA, 13 nt, Human
cuggcuaugcauu

SEQ ID NO: 2727465 - RNA, 14 nt, Human
cugggacaugggaa

SEQ ID NO: 2727466 - RNA, 18 nt, Human
cugggacaugggaaaggg

SEQ ID NO: 2727467 - RNA, 22 nt, Human
cugggacaugggaaaggggaag

SEQ ID NO: 2727468 - RNA, 13 nt, Human
cugggacuacagg

SEQ ID NO: 2727469 - RNA, 15 nt, Human
cugggacuacaggca

SEQ ID NO: 2727470 - RNA, 16 nt, Human
cugggacuacaggcac

SEQ ID NO: 2727471 - RNA, 22 nt, Human
cugggagaaccaaaaagaggcu

SEQ ID NO: 2727472 - RNA, 15 nt, Human
cuggguguggcgcag

SEQ ID NO: 2727473 - RNA, 21 nt, Human
cuggguggcaccagcagccug

SEQ ID NO: 2727474 - RNA, 14 nt, Human
cuggguguggcgca

SEQ ID NO: 2727475 - RNA, 13 nt, Human
cugggcagcugcc

SEQ ID NO: 2727476 - RNA, 20 nt, Human
cugggcagaggaaagcaaag

SEQ ID NO: 2727477 - RNA, 12 nt, Human
cugggcagagga

SEQ ID NO: 2727478 - RNA, 13 nt, Human
cugggcagaggaa

SEQ ID NO: 2727479 - RNA, 16 nt, Human
cugggcagaggaaagc

SEQ ID NO: 2727480 - RNA, 14 nt, Human
cugggcagcugccu

SEQ ID NO: 2727481 - RNA, 15 nt, Human
cugggcagcugccuc

SEQ ID NO: 2727482 - RNA, 20 nt, Human
cugggcagguuggugggggc

SEQ ID NO: 2727483 - RNA, 13 nt, Human
cuggggagaaagu

SEQ ID NO: 2727484 - RNA, 18 nt, Human
cuggguggcaccagcagc

SEQ ID NO: 2727485 - RNA, 20 nt, Human
cuggguggcaccagcagccu

SEQ ID NO: 2727486 - RNA, 19 nt, Human
cugcccugugggcccccaa

SEQ ID NO: 2727487 - RNA, 12 nt, Human
cugcccuuaccu

SEQ ID NO: 2727488 - RNA, 16 nt, Human
cugcccuuaccugcca

SEQ ID NO: 2727489 - RNA, 17 nt, Human
cugcccuuaccugccag

SEQ ID NO: 2727490 - RNA, 16 nt, Human
cugccauauucuguug

SEQ ID NO: 2727491 - RNA, 16 nt, Human
cugccauccagguuca

SEQ ID NO: 2727492 - RNA, 18 nt, Human
cugccauccagguucagc

SEQ ID NO: 2727493 - RNA, 19 nt, Human
cugccauccagguucagcu

SEQ ID NO: 2727494 - RNA, 23 nt, Human
cugccagggacagaggggguggc

SEQ ID NO: 2727495 - RNA, 18 nt, Human
cugcauuuaaaagauaca

SEQ ID NO: 2727496 - RNA, 17 nt, Human
cugcauuuaaaagauac

SEQ ID NO: 2727497 - RNA, 20 nt, Human
cugccagggacagagggggu

SEQ ID NO: 2727498 - RNA, 22 nt, Human
cugccagggacagagggggugg

SEQ ID NO: 2727499 - RNA, 14 nt, Human
cugcauuuaaaaga

SEQ ID NO: 2727500 - RNA, 13 nt, Human
cugcauuggcuuu

SEQ ID NO: 2727501 - RNA, 15 nt, Human
cugcacuccagccug

SEQ ID NO: 2727502 - RNA, 13 nt, Human
cugcacuccagcc

SEQ ID NO: 2727503 - RNA, 22 nt, Human
cugcacuauagccuaggugaca

SEQ ID NO: 2727504 - RNA, 23 nt, Human
cugcacuauagccuaggugacag

SEQ ID NO: 2727505 - RNA, 20 nt, Human
cugcacggugaauggcuuug

SEQ ID NO: 2727506 - RNA, 17 nt, Human
cugcacggugaauggcu

SEQ ID NO: 2727507 - RNA, 15 nt, Human
cugcacggugaaugg

SEQ ID NO: 2727508 - RNA, 14 nt, Human
cugcacggugaaug

SEQ ID NO: 2727509 - RNA, 16 nt, Human
cugcacuauagccuag

SEQ ID NO: 2727510 - RNA, 17 nt, Human
cugcacuauagccuagg

SEQ ID NO: 2727511 - RNA, 18 nt, Human
cugcacuauagccuaggu

SEQ ID NO: 2727512 - RNA, 20 nt, Human
cugcacuauagccuagguga

SEQ ID NO: 2727513 - RNA, 19 nt, Human
cugcacuccagccugggug

SEQ ID NO: 2727514 - RNA, 23 nt, Human
cugcagccucaaccuccugggcu

SEQ ID NO: 2727515 - RNA, 24 nt, Human
cugcagccucaaccuccugggcua

SEQ ID NO: 2727516 - RNA, 18 nt, Human
cugcacuccagccugggu

SEQ ID NO: 2727517 - RNA, 16 nt, Human
cugcacuccagccugg

SEQ ID NO: 2727518 - RNA, 17 nt, Human
cugcacuccagccuggg

SEQ ID NO: 2727519 - RNA, 12 nt, Human
cugcagcuuugu

SEQ ID NO: 2727520 - RNA, 13 nt, Human
cugcaggcagcca

SEQ ID NO: 2727521 - RNA, 14 nt, Human
cugcaggcagccag

SEQ ID NO: 2727522 - RNA, 15 nt, Human
cugcaggcagccagg

SEQ ID NO: 2727523 - RNA, 16 nt, Human
cugcaggcagccaggc

SEQ ID NO: 2727524 - RNA, 17 nt, Human
cugcaggcagccaggcc

SEQ ID NO: 2727525 - RNA, 18 nt, Human
cugcaggcagccaggcca

SEQ ID NO: 2727526 - RNA, 19 nt, Human
cugcaggcagccaggccac

SEQ ID NO: 2727527 - RNA, 20 nt, Human
cugcaggcagccaggccaca

SEQ ID NO: 2727528 - RNA, 24 nt, Human
cugaugggcaacccccagccugcu

SEQ ID NO: 2727529 - RNA, 22 nt, Human
cugaugggcaacccccagccug

SEQ ID NO: 2727530 - RNA, 23 nt, Human
cugaugggcaacccccagccugc

SEQ ID NO: 2727531 - RNA, 21 nt, Human
cugcaaaggguaucaggugcu

SEQ ID NO: 2727532 - RNA, 22 nt, Human
cugcaaaggguaucaggugcug

SEQ ID NO: 2727533 - RNA, 20 nt, Human
cugaugcuucuucagagacu

SEQ ID NO: 2727534 - RNA, 18 nt, Human
cugaugcuucuucagaga

SEQ ID NO: 2727535 - RNA, 19 nt, Human
cugaugcuucuucagagac

SEQ ID NO: 2727536 - RNA, 18 nt, Human
cugaugggcaacccccag

SEQ ID NO: 2727537 - RNA, 21 nt, Human
cugaugggcaacccccagccu

SEQ ID NO: 2727538 - RNA, 15 nt, Human
cucuuaugggcuggg

SEQ ID NO: 2727539 - RNA, 18 nt, Human
cucuuauaucuauauuuu

SEQ ID NO: 2727540 - RNA, 15 nt, Human
cucuuauaucuauau

SEQ ID NO: 2727541 - RNA, 14 nt, Human
cucuuaugggcugg

SEQ ID NO: 2727542 - RNA, 16 nt, Human
cugaugcuucuucaga

SEQ ID NO: 2727543 - RNA, 17 nt, Human
cugaugcuucuucagag

SEQ ID NO: 2727544 - RNA, 20 nt, Human
cugcaagaauugaagcagga

SEQ ID NO: 2727545 - RNA, 12 nt, Human
cugcaagggagu

SEQ ID NO: 2727546 - RNA, 20 nt, Human
cugcaccgggccacagagaa

SEQ ID NO: 2727547 - RNA, 23 nt, Human
cugcaccgggccacagagaaagu

SEQ ID NO: 2727548 - RNA, 18 nt, Human
cugcaagaauugaagcag

SEQ ID NO: 2727549 - RNA, 22 nt, Human
cugcaaccugauugugucucuu

SEQ ID NO: 2727550 - RNA, 20 nt, Human
cugcaaccuccgccucuugg

SEQ ID NO: 2727551 - RNA, 22 nt, Human
cugcaaccuccgccucuugggu

SEQ ID NO: 2727552 - RNA, 14 nt, Human
cugcaaccugauug

SEQ ID NO: 2727553 - RNA, 19 nt, Human
cugcaaccugauugugucu

SEQ ID NO: 2727554 - RNA, 21 nt, Human
cugcaaccugauugugucucu

SEQ ID NO: 2727555 - RNA, 14 nt, Human
cauuuguauaaaau

SEQ ID NO: 2727556 - RNA, 16 nt, Human
cauuuguauaaaauaa

SEQ ID NO: 2727557 - RNA, 23 nt, Human
cauuuuuuuuaagaaaaaggaug

SEQ ID NO: 2727558 - RNA, 18 nt, Human
cauuuaggugaggaagca

SEQ ID NO: 2727559 - RNA, 16 nt, Human
cauuuaggugaggaag

SEQ ID NO: 2727560 - RNA, 17 nt, Human
cauugguguuguacuca

SEQ ID NO: 2727561 - RNA, 21 nt, Human
ccaacuccagaaagugacaag

SEQ ID NO: 2727562 - RNA, 21 nt, Human
ccaacucaccccagccccaaa

SEQ ID NO: 2727563 - RNA, 16 nt, Human
ccaagcucugcuccuc

SEQ ID NO: 2727564 - RNA, 14 nt, Human
ccaagcucugcucc

SEQ ID NO: 2727565 - RNA, 15 nt, Human
ccaagcucugcuccu

SEQ ID NO: 2727566 - RNA, 15 nt, Human
ccaaaucagcugcua

SEQ ID NO: 2727567 - RNA, 23 nt, Human
ccaaaucagcugcuacuacuccu

SEQ ID NO: 2727568 - RNA, 16 nt, Human
ccaaaucauaguggcu

SEQ ID NO: 2727569 - RNA, 13 nt, Human
ccaacucacccca

SEQ ID NO: 2727570 - RNA, 19 nt, Human
ccaauucgaacuuuuucca

SEQ ID NO: 2727571 - RNA, 23 nt, Human
ccaauggacuaacuugucuuugg

SEQ ID NO: 2727572 - RNA, 22 nt, Human
ccaauuauaugagacguuuuug

SEQ ID NO: 2727573 - RNA, 14 nt, Human
ccaaagugcuggga

SEQ ID NO: 2727574 - RNA, 22 nt, Human
ccaaaguacacuguuucaaacu

SEQ ID NO: 2727575 - RNA, 19 nt, Human
cauuauauuuauuacugua

SEQ ID NO: 2727576 - RNA, 19 nt, Human
cauguuggccaggcugguc

SEQ ID NO: 2727577 - RNA, 18 nt, Human
cauguucuuaauucuuag

SEQ ID NO: 2727578 - RNA, 18 nt, Human
cauguuggccaggcuggu

SEQ ID NO: 2727579 - RNA, 17 nt, Human
cauguuggccaggcugg

SEQ ID NO: 2727580 - RNA, 21 nt, Human
cauguuacauaagauaaaugu

SEQ ID NO: 2727581 - RNA, 16 nt, Human
cauguucuuaauucuu

SEQ ID NO: 2727582 - RNA, 13 nt, Human
cauguucuuaauu

SEQ ID NO: 2727583 - RNA, 17 nt, Human
cauguuacauaagauaa

SEQ ID NO: 2727584 - RNA, 16 nt, Human
cauguuacauaagaua

SEQ ID NO: 2727585 - RNA, 15 nt, Human
cauguccaagaagcc

SEQ ID NO: 2727586 - RNA, 16 nt, Human
cauguccaagaagccc

SEQ ID NO: 2727587 - RNA, 20 nt, Human
cauucuccuuguguuacuaa

SEQ ID NO: 2727588 - RNA, 15 nt, Human
cauuauucaaaguug

SEQ ID NO: 2727589 - RNA, 14 nt, Human
cauuauucaaaguu

SEQ ID NO: 2727590 - RNA, 17 nt, Human
cauucuccaccugccag

SEQ ID NO: 2727591 - RNA, 18 nt, Human
cauucuccaccugccagg

SEQ ID NO: 2727592 - RNA, 19 nt, Human
cauucuccaccugccaggg

SEQ ID NO: 2727593 - RNA, 21 nt, Human
cauucuccaccugccagggac

SEQ ID NO: 2727594 - RNA, 13 nt, Human
caugacaaagacu

SEQ ID NO: 2727595 - RNA, 15 nt, Human
caugcaaggucauuu

SEQ ID NO: 2727596 - RNA, 12 nt, Human
caugcaagguca

SEQ ID NO: 2727597 - RNA, 17 nt, Human
caugcuccuggcccacu

SEQ ID NO: 2727598 - RNA, 14 nt, Human
caugcuccuggccc

SEQ ID NO: 2727599 - RNA, 16 nt, Human
caugcuccuggcccac

SEQ ID NO: 2727600 - RNA, 18 nt, Human
caugggaaaggggaaguu

SEQ ID NO: 2727601 - RNA, 21 nt, Human
cauggccucuucagaucucua

SEQ ID NO: 2727602 - RNA, 19 nt, Human
caucccaaacccuucagug

SEQ ID NO: 2727603 - RNA, 19 nt, Human
caucagcacgauuucuguu

SEQ ID NO: 2727604 - RNA, 21 nt, Human
caucagcacgauuucuguuua

SEQ ID NO: 2727605 - RNA, 12 nt, Human
caucccagcccc

SEQ ID NO: 2727606 - RNA, 21 nt, Human
cauccucuguacagagcccac

SEQ ID NO: 2727607 - RNA, 22 nt, Human
cauccucuguacagagcccacg

SEQ ID NO: 2727608 - RNA, 20 nt, Human
caucccaaacccuucagugc

SEQ ID NO: 2727609 - RNA, 11 nt, Human
caucccagccc

SEQ ID NO: 2727610 - RNA, 23 nt, Human
cauagcagagaaugaaagggccc

SEQ ID NO: 2727611 - RNA, 16 nt, Human
cauagguuuaauaauu

SEQ ID NO: 2727612 - RNA, 22 nt, Human
cauauuaccacagacauacuaa

SEQ ID NO: 2727613 - RNA, 23 nt, Human
cauaaugcgugcauaccacuuuu

SEQ ID NO: 2727614 - RNA, 23 nt, Human
cauacaggaagguagaaauaucu

SEQ ID NO: 2727615 - RNA, 23 nt, Human
caguuguucaauaauaaauauuu

SEQ ID NO: 2727616 - RNA, 18 nt, Human
caguuguuagugugucuu

SEQ ID NO: 2727617 - RNA, 22 nt, Human
caguuguuagugugucuuagug

SEQ ID NO: 2727618 - RNA, 23 nt, Human
caguuuguuaguaugaggcauuu

SEQ ID NO: 2727619 - RNA, 21 nt, Human
caguuuguuaguaugaggcau

SEQ ID NO: 2727620 - RNA, 21 nt, Human
caguuauuauauuuacaaaug

SEQ ID NO: 2727621 - RNA, 17 nt, Human
caguuauuauauuuaca

SEQ ID NO: 2727622 - RNA, 20 nt, Human
caguuauggcuauaggugcu

SEQ ID NO: 2727623 - RNA, 19 nt, Human
caguuauggcuauaggugc

SEQ ID NO: 2727624 - RNA, 13 nt, Human
caguuauggcuau

SEQ ID NO: 2727625 - RNA, 20 nt, Human
caguuacucagaauucucua

SEQ ID NO: 2727626 - RNA, 21 nt, Human
cagugguaugaucacggcuca

SEQ ID NO: 2727627 - RNA, 19 nt, Human
caguggugcgaucuggguu

SEQ ID NO: 2727628 - RNA, 23 nt, Human
cagucugauucccaagcucugcu

SEQ ID NO: 2727629 - RNA, 21 nt, Human
cagugcccacaggaucagucu

SEQ ID NO: 2727630 - RNA, 18 nt, Human
cagugcccacaggaucag

SEQ ID NO: 2727631 - RNA, 22 nt, Human
cagugcccacaggaucagucug

SEQ ID NO: 2727632 - RNA, 20 nt, Human
cagugguaugaucacggcuc

SEQ ID NO: 2727633 - RNA, 16 nt, Human
cagugggagcugccug

SEQ ID NO: 2727634 - RNA, 15 nt, Human
cagugggagcugccu

SEQ ID NO: 2727635 - RNA, 17 nt, Human
cagugggagcugccugu

SEQ ID NO: 2727636 - RNA, 18 nt, Human
cagugggagcugccuguu

SEQ ID NO: 2727637 - RNA, 21 nt, Human
cagucugauucccaagcucug

SEQ ID NO: 2727638 - RNA, 22 nt, Human
cagucugauucccaagcucugc

SEQ ID NO: 2727639 - RNA, 15 nt, Human
caguucagagcugcc

SEQ ID NO: 2727640 - RNA, 16 nt, Human
caguucagagcugccc

SEQ ID NO: 2727641 - RNA, 17 nt, Human
caguucagagcugcccu

SEQ ID NO: 2727642 - RNA, 22 nt, Human
caguuauuauauuuacaaaugg

SEQ ID NO: 2727643 - RNA, 23 nt, Human
caguucagagcugcccucuccug

SEQ ID NO: 2727644 - RNA, 24 nt, Human
caguucagagcugcccucuccugg

SEQ ID NO: 2727645 - RNA, 18 nt, Human
caguucagagcugcccuc

SEQ ID NO: 2727646 - RNA, 19 nt, Human
caguucagagcugcccucu

SEQ ID NO: 2727647 - RNA, 21 nt, Human
caguucagagcugcccucucc

SEQ ID NO: 2727648 - RNA, 22 nt, Human
caguucagagcugcccucuccu

SEQ ID NO: 2727649 - RNA, 18 nt, Human
cagacuggcacaguuuuc

SEQ ID NO: 2727650 - RNA, 17 nt, Human
cagacuggcacaguuuu

SEQ ID NO: 2727651 - RNA, 20 nt, Human
cagacuggaagcacagcuuc

SEQ ID NO: 2727652 - RNA, 21 nt, Human
cagacuggaagcacagcuuca

SEQ ID NO: 2727653 - RNA, 23 nt, Human
cagacuggcacaguuuucugaga

SEQ ID NO: 2727654 - RNA, 22 nt, Human
cagacuggcacaguuuucugag

SEQ ID NO: 2727655 - RNA, 13 nt, Human
cagacuggaagca

SEQ ID NO: 2727656 - RNA, 14 nt, Human
cagacuggaagcac

SEQ ID NO: 2727657 - RNA, 16 nt, Human
cagacuggaagcacag

SEQ ID NO: 2727658 - RNA, 17 nt, Human
cagacuggaagcacagc

SEQ ID NO: 2727659 - RNA, 18 nt, Human
cagacuggaagcacagcu

SEQ ID NO: 2727660 - RNA, 17 nt, Human
cagacucuacagaggcc

SEQ ID NO: 2727661 - RNA, 22 nt, Human
cagacaggcaagcaccuccugc

SEQ ID NO: 2727662 - RNA, 23 nt, Human
cagacaggcaagcaccuccugcc

SEQ ID NO: 2727663 - RNA, 23 nt, Human
cagacucuacagaggccaugggc

SEQ ID NO: 2727664 - RNA, 18 nt, Human
cagacucuacagaggcca

SEQ ID NO: 2727665 - RNA, 19 nt, Human
cagacucuacagaggccau

SEQ ID NO: 2727666 - RNA, 20 nt, Human
cagacucuacagaggccaug

SEQ ID NO: 2727667 - RNA, 21 nt, Human
cagacucuacagaggccaugg

SEQ ID NO: 2727668 - RNA, 13 nt, Human
cagacagcugccu

SEQ ID NO: 2727669 - RNA, 14 nt, Human
cagacagcugccug

SEQ ID NO: 2727670 - RNA, 13 nt, Human
cagacaggaccag

SEQ ID NO: 2727671 - RNA, 15 nt, Human
cagacaggaccaggg

SEQ ID NO: 2727672 - RNA, 16 nt, Human
cagacaggaccaggga

SEQ ID NO: 2727673 - RNA, 15 nt, Human
cagacagcugccugg

SEQ ID NO: 2727674 - RNA, 16 nt, Human
cagacagcugccuggg

SEQ ID NO: 2727675 - RNA, 17 nt, Human
cagacagcugccuggga

SEQ ID NO: 2727676 - RNA, 18 nt, Human
cagacagcugccugggau

SEQ ID NO: 2727677 - RNA, 11 nt, Human
cagacaggcaa

SEQ ID NO: 2727678 - RNA, 17 nt, Human
cagacaggaccagggau

SEQ ID NO: 2727679 - RNA, 24 nt, Human
cagacaggaccagggauuuccaug

SEQ ID NO: 2727680 - RNA, 13 nt, Human
cagacaggcaagc

SEQ ID NO: 2727681 - RNA, 18 nt, Human
cagacaggcaagcaccuc

SEQ ID NO: 2727682 - RNA, 20 nt, Human
cagacaggcaagcaccuccu

SEQ ID NO: 2727683 - RNA, 21 nt, Human
cagacaggcaagcaccuccug

SEQ ID NO: 2727684 - RNA, 23 nt, Human
cagccagcaguucagagcugccc

SEQ ID NO: 2727685 - RNA, 18 nt, Human
cagccagacuggcacagu

SEQ ID NO: 2727686 - RNA, 15 nt, Human
cagccagacuggcac

SEQ ID NO: 2727687 - RNA, 14 nt, Human
cagccagacuggca

SEQ ID NO: 2727688 - RNA, 15 nt, Human
cagcacgauuucugu

SEQ ID NO: 2727689 - RNA, 14 nt, Human
cagcacgauuucug

SEQ ID NO: 2727690 - RNA, 19 nt, Human
cagauuucacucuccuugg

SEQ ID NO: 2727691 - RNA, 17 nt, Human
cagcaccaucucuccuc

SEQ ID NO: 2727692 - RNA, 19 nt, Human
cagcaccaucucuccuccu

SEQ ID NO: 2727693 - RNA, 20 nt, Human
cagauuucacucuccuuggu

SEQ ID NO: 2727694 - RNA, 19 nt, Human
cagauugcaacaggcuggg

SEQ ID NO: 2727695 - RNA, 20 nt, Human
cagauugcaacaggcugggc

SEQ ID NO: 2727696 - RNA, 18 nt, Human
cagauugcaacaggcugg

SEQ ID NO: 2727697 - RNA, 18 nt, Human
cagagcugcccucuccug

SEQ ID NO: 2727698 - RNA, 19 nt, Human
cagagcugcccucuccugg

SEQ ID NO: 2727699 - RNA, 20 nt, Human
cagagcugcccucuccuggg

SEQ ID NO: 2727700 - RNA, 21 nt, Human
cagagcugcccucuccugggc

SEQ ID NO: 2727701 - RNA, 23 nt, Human
cagagcugcccucuccugggcag

SEQ ID NO: 2727702 - RNA, 13 nt, Human
cagaggggguggc

SEQ ID NO: 2727703 - RNA, 17 nt, Human
cagaggaaagcaaagga

SEQ ID NO: 2727704 - RNA, 19 nt, Human
cagaggaaagcaaaggaga

SEQ ID NO: 2727705 - RNA, 13 nt, Human
cagagcugccacc

SEQ ID NO: 2727706 - RNA, 20 nt, Human
cagagagguuaaggugggua

SEQ ID NO: 2727707 - RNA, 23 nt, Human
cagagagggugggagugggccca

SEQ ID NO: 2727708 - RNA, 23 nt, Human
cagagaggguggugaccucugcc

SEQ ID NO: 2727709 - RNA, 23 nt, Human
cagagacuccugcaggcagccag

SEQ ID NO: 2727710 - RNA, 12 nt, Human
cagagagggugg

SEQ ID NO: 2727711 - RNA, 17 nt, Human
cagagaggguggugacc

SEQ ID NO: 2727712 - RNA, 20 nt, Human
cagagaggguggugaccucu

SEQ ID NO: 2727713 - RNA, 22 nt, Human
cagagaggguggugaccucugc

SEQ ID NO: 2727714 - RNA, 19 nt, Human
cagauacuuggggggcuga

SEQ ID NO: 2727715 - RNA, 14 nt, Human
cagauacuggauug

SEQ ID NO: 2727716 - RNA, 14 nt, Human
cagaggggguggcc

SEQ ID NO: 2727717 - RNA, 16 nt, Human
cagaggggguggccuc

SEQ ID NO: 2727718 - RNA, 18 nt, Human
cagauacuggauuguacu

SEQ ID NO: 2727719 - RNA, 19 nt, Human
cagauagauauaugcucug

SEQ ID NO: 2727720 - RNA, 14 nt, Human
cagauaugauucaa

SEQ ID NO: 2727721 - RNA, 11 nt, Human
caggcuacugu

SEQ ID NO: 2727722 - RNA, 21 nt, Human
caggcugggagagccuuccag

SEQ ID NO: 2727723 - RNA, 20 nt, Human
caggcugggagagccuucca

SEQ ID NO: 2727724 - RNA, 14 nt, Human
caggccuccuacag

SEQ ID NO: 2727725 - RNA, 12 nt, Human
caggccuccuac

SEQ ID NO: 2727726 - RNA, 17 nt, Human
caggggaaaaucagccu

SEQ ID NO: 2727727 - RNA, 14 nt, Human
caggggaaaagagg

SEQ ID NO: 2727728 - RNA, 16 nt, Human
caggggaaaagaggag

SEQ ID NO: 2727729 - RNA, 22 nt, Human
caggcugggagagccuuccagg

SEQ ID NO: 2727730 - RNA, 23 nt, Human
caggcugggagagccuuccaggg

SEQ ID NO: 2727731 - RNA, 11 nt, Human
caggccaggcc

SEQ ID NO: 2727732 - RNA, 12 nt, Human
caggccaggccc

SEQ ID NO: 2727733 - RNA, 19 nt, Human
caggaggaucacuugaguc

SEQ ID NO: 2727734 - RNA, 22 nt, Human
caggaggccagccuugaccauu

SEQ ID NO: 2727735 - RNA, 18 nt, Human
caggaggccagccuugac

SEQ ID NO: 2727736 - RNA, 19 nt, Human
caggaggccagccuugacc

SEQ ID NO: 2727737 - RNA, 14 nt, Human
caggcaaugcuggc

SEQ ID NO: 2727738 - RNA, 15 nt, Human
caggcaaugcuggcu

SEQ ID NO: 2727739 - RNA, 16 nt, Human
caggcaaugcuggcug

SEQ ID NO: 2727740 - RNA, 17 nt, Human
caggcaaugcuggcugu

SEQ ID NO: 2727741 - RNA, 16 nt, Human
caggaccucaggugag

SEQ ID NO: 2727742 - RNA, 23 nt, Human
caggaccucaggugagaagcaga

SEQ ID NO: 2727743 - RNA, 21 nt, Human
caggaccagggauuuccauga

SEQ ID NO: 2727744 - RNA, 16 nt, Human
caggaaagagaacuuc

SEQ ID NO: 2727745 - RNA, 20 nt, Human
caggaaagagaacuuccaga

SEQ ID NO: 2727746 - RNA, 16 nt, Human
caggaaaggcuccagg

SEQ ID NO: 2727747 - RNA, 17 nt, Human
caggaaaggcuccagga

SEQ ID NO: 2727748 - RNA, 19 nt, Human
caggaaaggcuccaggagc

SEQ ID NO: 2727749 - RNA, 20 nt, Human
caggaaaggcuccaggagca

SEQ ID NO: 2727750 - RNA, 14 nt, Human
cagcuuauugucua

SEQ ID NO: 2727751 - RNA, 20 nt, Human
cagcuguaugauucccagcc

SEQ ID NO: 2727752 - RNA, 20 nt, Human
cagcuuauugucuagugaaa

SEQ ID NO: 2727753 - RNA, 11 nt, Human
cagcugccucc

SEQ ID NO: 2727754 - RNA, 10 nt, Human
cagcugccuc

SEQ ID NO: 2727755 - RNA, 9 nt, Human
cagcugccu

SEQ ID NO: 2727756 - RNA, 14 nt, Human
cagcugccuccccu

SEQ ID NO: 2727757 - RNA, 15 nt, Human
cagcugccuccccuc

SEQ ID NO: 2727758 - RNA, 16 nt, Human
cagcugccuccccucc

SEQ ID NO: 2727759 - RNA, 17 nt, Human
cagcugccuccccuccu

SEQ ID NO: 2727760 - RNA, 18 nt, Human
cagcugccuccccuccuc

SEQ ID NO: 2727761 - RNA, 19 nt, Human
cagcugccuccccuccucu

SEQ ID NO: 2727762 - RNA, 20 nt, Human
cagcugccuccccuccucug

SEQ ID NO: 2727763 - RNA, 19 nt, Human
cagcuguaugauucccagc

SEQ ID NO: 2727764 - RNA, 21 nt, Human
cagcugacuuuucuguccgag

SEQ ID NO: 2727765 - RNA, 17 nt, Human
cagccugcuccagcugu

SEQ ID NO: 2727766 - RNA, 19 nt, Human
cagccugcuccagcuguuc

SEQ ID NO: 2727767 - RNA, 15 nt, Human
cagccugcuccagcu

SEQ ID NO: 2727768 - RNA, 16 nt, Human
cagccugcuccagcug

SEQ ID NO: 2727769 - RNA, 19 nt, Human
cagcguuucuaugacacau

SEQ ID NO: 2727770 - RNA, 15 nt, Human
cagcuaacauggaag

SEQ ID NO: 2727771 - RNA, 17 nt, Human
caaucagccuaguugau

SEQ ID NO: 2727772 - RNA, 14 nt, Human
caaucaaaucugcu

SEQ ID NO: 2727773 - RNA, 13 nt, Human
caauggcagccuu

SEQ ID NO: 2727774 - RNA, 14 nt, Human
caauggcagccuug

SEQ ID NO: 2727775 - RNA, 15 nt, Human
caauggcagccuugg

SEQ ID NO: 2727776 - RNA, 13 nt, Human
caauuuauuaugg

SEQ ID NO: 2727777 - RNA, 20 nt, Human
caauuuauuauggcacauca

SEQ ID NO: 2727778 - RNA, 20 nt, Human
caaguuauuuuuaauuuggu

SEQ ID NO: 2727779 - RNA, 15 nt, Human
caagcucugcuccuc

SEQ ID NO: 2727780 - RNA, 16 nt, Human
caagcucugcuccucu

SEQ ID NO: 2727781 - RNA, 12 nt, Human
caagcucccagg

SEQ ID NO: 2727782 - RNA, 14 nt, Human
caagcucccaggca

SEQ ID NO: 2727783 - RNA, 15 nt, Human
caagcucccaggcau

SEQ ID NO: 2727784 - RNA, 17 nt, Human
caagcucccaggcauuc

SEQ ID NO: 2727785 - RNA, 19 nt, Human
caagcuccaagcucccagg

SEQ ID NO: 2727786 - RNA, 21 nt, Human
caagcuccaagcucccaggca

SEQ ID NO: 2727787 - RNA, 17 nt, Human
caagcuccaagcuccca

SEQ ID NO: 2727788 - RNA, 18 nt, Human
caagcuccaagcucccag

SEQ ID NO: 2727789 - RNA, 13 nt, Human
caaguauuauacc

SEQ ID NO: 2727790 - RNA, 22 nt, Human
caaguauuauaccuuuuuuaga

SEQ ID NO: 2727791 - RNA, 17 nt, Human
caaguauuauaccuuuu

SEQ ID NO: 2727792 - RNA, 14 nt, Human
caaggcaaggcugu

SEQ ID NO: 2727793 - RNA, 19 nt, Human
caaggauugcuacuguccu

SEQ ID NO: 2727794 - RNA, 20 nt, Human
caaggauugcuacuguccua

SEQ ID NO: 2727795 - RNA, 19 nt, Human
caacuauauuguuugcuaa

SEQ ID NO: 2727796 - RNA, 19 nt, Human
caacuaucucauuuccaag

SEQ ID NO: 2727797 - RNA, 17 nt, Human
caaccccuucgcuccug

SEQ ID NO: 2727798 - RNA, 14 nt, Human
caaccccuucgcuc

SEQ ID NO: 2727799 - RNA, 16 nt, Human
caaccccuucgcuccu

SEQ ID NO: 2727800 - RNA, 14 nt, Human
caacccccagccug

SEQ ID NO: 2727801 - RNA, 12 nt, Human
caacuccagaaa

SEQ ID NO: 2727802 - RNA, 15 nt, Human
caacuauuuuuccaa

SEQ ID NO: 2727803 - RNA, 15 nt, Human
caagaagcccaggaa

SEQ ID NO: 2727804 - RNA, 18 nt, Human
caagaagcccaggaaagg

SEQ ID NO: 2727805 - RNA, 17 nt, Human
caagaaggaugauucaa

SEQ ID NO: 2727806 - RNA, 14 nt, Human
caagcaaguauuag

SEQ ID NO: 2727807 - RNA, 16 nt, Human
caagaccacguuucua

SEQ ID NO: 2727808 - RNA, 14 nt, Human
caagaccacguuuc

SEQ ID NO: 2727809 - RNA, 13 nt, Human
caagcaccuccug

SEQ ID NO: 2727810 - RNA, 14 nt, Human
caagcaccuccugc

SEQ ID NO: 2727811 - RNA, 11 nt, Human
cacugaagaag

SEQ ID NO: 2727812 - RNA, 23 nt, Human
cacugaagaagcaccaaucauga

SEQ ID NO: 2727813 - RNA, 16 nt, Human
cacggaagagccuugc

SEQ ID NO: 2727814 - RNA, 22 nt, Human
cacggaagagccuugcggaagg

SEQ ID NO: 2727815 - RNA, 14 nt, Human
cacuacauucuguu

SEQ ID NO: 2727816 - RNA, 13 nt, Human
cacuacauucugu

SEQ ID NO: 2727817 - RNA, 21 nt, Human
cacuacauuauaaaugucucu

SEQ ID NO: 2727818 - RNA, 15 nt, Human
cacuacauucuguua

SEQ ID NO: 2727819 - RNA, 21 nt, Human
cacgcuggagugcagugagcc

SEQ ID NO: 2727820 - RNA, 16 nt, Human
cacgcuggagugcagu

SEQ ID NO: 2727821 - RNA, 17 nt, Human
cacgcuggagugcagug

SEQ ID NO: 2727822 - RNA, 18 nt, Human
cacgcuggagugcaguga

SEQ ID NO: 2727823 - RNA, 20 nt, Human
cacgcuggagugcagugagc

SEQ ID NO: 2727824 - RNA, 15 nt, Human
cacgcuggagugcag

SEQ ID NO: 2727825 - RNA, 17 nt, Human
cacccuggggagaaagu

SEQ ID NO: 2727826 - RNA, 11 nt, Human
caccugccagg

SEQ ID NO: 2727827 - RNA, 12 nt, Human
caccugccaggg

SEQ ID NO: 2727828 - RNA, 18 nt, Human
caccugccccucaacucu

SEQ ID NO: 2727829 - RNA, 21 nt, Human
caccugccccucaacucuccu

SEQ ID NO: 2727830 - RNA, 12 nt, Human
cacccugcucuc

SEQ ID NO: 2727831 - RNA, 12 nt, Human
cacccuccuuuc

SEQ ID NO: 2727832 - RNA, 16 nt, Human
caccugcggugcuauc

SEQ ID NO: 2727833 - RNA, 17 nt, Human
caccugcggugcuaucu

SEQ ID NO: 2727834 - RNA, 19 nt, Human
caccugcggugcuaucucc

SEQ ID NO: 2727835 - RNA, 23 nt, Human
cacaucagcuugcccuguuaaaa

SEQ ID NO: 2727836 - RNA, 13 nt, Human
cacaucagcuugc

SEQ ID NO: 2727837 - RNA, 13 nt, Human
cacaucuugcucu

SEQ ID NO: 2727838 - RNA, 14 nt, Human
cacaucuugcucug

SEQ ID NO: 2727839 - RNA, 15 nt, Human
cacaucuugcucugc

SEQ ID NO: 2727840 - RNA, 20 nt, Human
cacaucuugcucugcugaca

SEQ ID NO: 2727841 - RNA, 21 nt, Human
cacaucuugcucugcugacag

SEQ ID NO: 2727842 - RNA, 22 nt, Human
cacaucuugcucugcugacaga

SEQ ID NO: 2727843 - RNA, 12 nt, Human
cacccagcccac

SEQ ID NO: 2727844 - RNA, 19 nt, Human
caccagcccuuagcaggga

SEQ ID NO: 2727845 - RNA, 18 nt, Human
caccagccccagugccca

SEQ ID NO: 2727846 - RNA, 21 nt, Human
caccagccccagugcccacag

SEQ ID NO: 2727847 - RNA, 22 nt, Human
caccagccccagugcccacagg

SEQ ID NO: 2727848 - RNA, 23 nt, Human
cacaucuugcucugcugacagac

SEQ ID NO: 2727849 - RNA, 19 nt, Human
cacaucuugcucugcugac

SEQ ID NO: 2727850 - RNA, 17 nt, Human
cacauuuauucugcuca

SEQ ID NO: 2727851 - RNA, 18 nt, Human
cacauuuauucugcucac

SEQ ID NO: 2727852 - RNA, 17 nt, Human
caccagccccagugccc

SEQ ID NO: 2727853 - RNA, 18 nt, Human
auuuucuauaauuuaaau

SEQ ID NO: 2727854 - RNA, 17 nt, Human
auuuucuauaauuuaaa

SEQ ID NO: 2727855 - RNA, 19 nt, Human
auuuucuauaauuuaaaua

SEQ ID NO: 2727856 - RNA, 14 nt, Human
auuuguuauaauga

SEQ ID NO: 2727857 - RNA, 22 nt, Human
auuuguguugaagagguuuuaa

SEQ ID NO: 2727858 - RNA, 18 nt, Human
auuuguguugaagagguu

SEQ ID NO: 2727859 - RNA, 15 nt, Human
auuuguguugaagag

SEQ ID NO: 2727860 - RNA, 14 nt, Human
auuuguguugaaga

SEQ ID NO: 2727861 - RNA, 13 nt, Human
caaaagcauguga

SEQ ID NO: 2727862 - RNA, 19 nt, Human
caaaagcaucuaugugaga

SEQ ID NO: 2727863 - RNA, 17 nt, Human
caaacauauauaacaau

SEQ ID NO: 2727864 - RNA, 20 nt, Human
caaaagguuaauaaaguaau

SEQ ID NO: 2727865 - RNA, 19 nt, Human
auuuuuauauuugaaauau

SEQ ID NO: 2727866 - RNA, 16 nt, Human
auuuuuauauuugaaa

SEQ ID NO: 2727867 - RNA, 22 nt, Human
auuuuguuuuugucuuaaaaag

SEQ ID NO: 2727868 - RNA, 16 nt, Human
auuuuuauuaaauuau

SEQ ID NO: 2727869 - RNA, 18 nt, Human
auuuuuuuguuguuuguu

SEQ ID NO: 2727870 - RNA, 17 nt, Human
auuuuuuucugaaauuu

SEQ ID NO: 2727871 - RNA, 16 nt, Human
auuuuuuucugaaauu

SEQ ID NO: 2727872 - RNA, 14 nt, Human
caaaccaucauuga

SEQ ID NO: 2727873 - RNA, 16 nt, Human
caaaccaucauugaaa

SEQ ID NO: 2727874 - RNA, 17 nt, Human
caaaccaucauugaaau

SEQ ID NO: 2727875 - RNA, 16 nt, Human
auuucagcagcugcag

SEQ ID NO: 2727876 - RNA, 14 nt, Human
auuucacucuccuu

SEQ ID NO: 2727877 - RNA, 12 nt, Human
auuucacucucc

SEQ ID NO: 2727878 - RNA, 22 nt, Human
auuuaauagguuuggacaaaau

SEQ ID NO: 2727879 - RNA, 18 nt, Human
auuuaauaauuauaugcu

SEQ ID NO: 2727880 - RNA, 15 nt, Human
auuuaauaauuauau

SEQ ID NO: 2727881 - RNA, 13 nt, Human
auuuaauaauuau

SEQ ID NO: 2727882 - RNA, 12 nt, Human
auugauaaguuc

SEQ ID NO: 2727883 - RNA, 15 nt, Human
auugauaaguucaua

SEQ ID NO: 2727884 - RNA, 16 nt, Human
auugauaaguucauac

SEQ ID NO: 2727885 - RNA, 17 nt, Human
auugauaaguucauaca

SEQ ID NO: 2727886 - RNA, 18 nt, Human
auugauaaguucauacau

SEQ ID NO: 2727887 - RNA, 19 nt, Human
auugauaaguucauacauu

SEQ ID NO: 2727888 - RNA, 21 nt, Human
auugauaaguucauacauugu

SEQ ID NO: 2727889 - RNA, 19 nt, Human
auuucuguuuagauaauac

SEQ ID NO: 2727890 - RNA, 20 nt, Human
auuucuguuuagauaauaca

SEQ ID NO: 2727891 - RNA, 21 nt, Human
auuucuguuuagauaauacac

SEQ ID NO: 2727892 - RNA, 22 nt, Human
auugaggacacugauauggguc

SEQ ID NO: 2727893 - RNA, 15 nt, Human
auucucuuauccaac

SEQ ID NO: 2727894 - RNA, 19 nt, Human
auucucuaguuugauuaaa

SEQ ID NO: 2727895 - RNA, 20 nt, Human
auucucuaguuugauuaaau

SEQ ID NO: 2727896 - RNA, 14 nt, Human
auucucuuauccaa

SEQ ID NO: 2727897 - RNA, 12 nt, Human
auucucuuaucc

SEQ ID NO: 2727898 - RNA, 23 nt, Human
auucucuaguuugauuaaauucu

SEQ ID NO: 2727899 - RNA, 12 nt, Human
auuauguaaauc

SEQ ID NO: 2727900 - RNA, 14 nt, Human
auuauguaaauccc

SEQ ID NO: 2727901 - RNA, 13 nt, Human
auuauguaaaucc

SEQ ID NO: 2727902 - RNA, 23 nt, Human
auuauguaaaucccauuauucaa

SEQ ID NO: 2727903 - RNA, 22 nt, Human
auuauguaaaucccauuauuca

SEQ ID NO: 2727904 - RNA, 17 nt, Human
auuauguaaaucccauu

SEQ ID NO: 2727905 - RNA, 15 nt, Human
auuauguaaauccca

SEQ ID NO: 2727906 - RNA, 14 nt, Human
auucauauuuacuu

SEQ ID NO: 2727907 - RNA, 22 nt, Human
auuacaagcgugagccacugca

SEQ ID NO: 2727908 - RNA, 12 nt, Human
ccuuuucccaac

SEQ ID NO: 2727909 - RNA, 23 nt, Human
cgccaaggcugggggaagaagcu

SEQ ID NO: 2727910 - RNA, 17 nt, Human
cgcuggagugcagugag

SEQ ID NO: 2727911 - RNA, 18 nt, Human
cgcuggagugcagugagc

SEQ ID NO: 2727912 - RNA, 19 nt, Human
cgcugauaagcguucaugg

SEQ ID NO: 2727913 - RNA, 19 nt, Human
cgcugccccuggcagcccc

SEQ ID NO: 2727914 - RNA, 20 nt, Human
cgcugccccuggcagccccu

SEQ ID NO: 2727915 - RNA, 23 nt, Human
cggagucccaccuuggcugcagg

SEQ ID NO: 2727916 - RNA, 21 nt, Human
cggagucccaccuuggcugca

SEQ ID NO: 2727917 - RNA, 22 nt, Human
cggagucccaccuuggcugcag

SEQ ID NO: 2727918 - RNA, 20 nt, Human
cggagacggagucccaccuu

SEQ ID NO: 2727919 - RNA, 17 nt, Human
cggagacggagucccac

SEQ ID NO: 2727920 - RNA, 19 nt, Human
cgggcucagcaaaagaugc

SEQ ID NO: 2727921 - RNA, 12 nt, Human
cgggcucugccu

SEQ ID NO: 2727922 - RNA, 22 nt, Human
cguacacauuuuauuuuauuau

SEQ ID NO: 2727923 - RNA, 20 nt, Human
cgguggcucacgccuguaau

SEQ ID NO: 2727924 - RNA, 20 nt, Human
cuacaaaaacacagcaaggg

SEQ ID NO: 2727925 - RNA, 19 nt, Human
cuacaaaaagcauaaaaau

SEQ ID NO: 2727926 - RNA, 14 nt, Human
cuaaguuuuuaugg

SEQ ID NO: 2727927 - RNA, 14 nt, Human
cuaacuugucuuug

SEQ ID NO: 2727928 - RNA, 22 nt, Human
cuaacuugucuuuggacccuga

SEQ ID NO: 2727929 - RNA, 11 nt, Human
cuaaagcugcc

SEQ ID NO: 2727930 - RNA, 15 nt, Human
cguguuaugacucca

SEQ ID NO: 2727931 - RNA, 19 nt, Human
cguguuaugacuccagaau

SEQ ID NO: 2727932 - RNA, 19 nt, Human
cgugaguccuggcauggga

SEQ ID NO: 2727933 - RNA, 18 nt, Human
cgugaguccuggcauggg

SEQ ID NO: 2727934 - RNA, 22 nt, Human
cgugagccacugcaccgggcca

SEQ ID NO: 2727935 - RNA, 14 nt, Human
cgugaggccagaga

SEQ ID NO: 2727936 - RNA, 14 nt, Human
cgugagccacugca

SEQ ID NO: 2727937 - RNA, 15 nt, Human
cgugagccacugcac

SEQ ID NO: 2727938 - RNA, 20 nt, Human
cgugagccacugcaccgggc

SEQ ID NO: 2727939 - RNA, 14 nt, Human
cgugacaacacuug

SEQ ID NO: 2727940 - RNA, 15 nt, Human
cgugacaacacuugu

SEQ ID NO: 2727941 - RNA, 12 nt, Human
cgugacaacacu

SEQ ID NO: 2727942 - RNA, 20 nt, Human
ccuucuguccuacucugugu

SEQ ID NO: 2727943 - RNA, 21 nt, Human
ccuucuguccuacucuguguc

SEQ ID NO: 2727944 - RNA, 22 nt, Human
ccuucuguccuacucuguguca

SEQ ID NO: 2727945 - RNA, 21 nt, Human
ccuucucuccagccccuggau

SEQ ID NO: 2727946 - RNA, 23 nt, Human
ccuucucuccagccccuggaugc

SEQ ID NO: 2727947 - RNA, 14 nt, Human
ccuucucugaagga

SEQ ID NO: 2727948 - RNA, 16 nt, Human
ccuucucugaaggaca

SEQ ID NO: 2727949 - RNA, 20 nt, Human
ccuucucuccagccccugga

SEQ ID NO: 2727950 - RNA, 15 nt, Human
ccuuucaauaggaaa

SEQ ID NO: 2727951 - RNA, 18 nt, Human
ccuuucaauaggaaaaac

SEQ ID NO: 2727952 - RNA, 17 nt, Human
ccuuucaauaggaaaaa

SEQ ID NO: 2727953 - RNA, 13 nt, Human
ccuguucagcucc

SEQ ID NO: 2727954 - RNA, 12 nt, Human
ccuuauggaaca

SEQ ID NO: 2727955 - RNA, 22 nt, Human
ccuuauggaacacucugagacu

SEQ ID NO: 2727956 - RNA, 19 nt, Human
ccuuauggaacacucugag

SEQ ID NO: 2727957 - RNA, 20 nt, Human
ccuuauggaacacucugaga

SEQ ID NO: 2727958 - RNA, 14 nt, Human
ccuuauggaacacu

SEQ ID NO: 2727959 - RNA, 16 nt, Human
ccuuauggaacacucu

SEQ ID NO: 2727960 - RNA, 17 nt, Human
ccuuauggaacacucug

SEQ ID NO: 2727961 - RNA, 18 nt, Human
ccuuauggaacacucuga

SEQ ID NO: 2727962 - RNA, 12 nt, Human
ccuucccaccuc

SEQ ID NO: 2727963 - RNA, 14 nt, Human
ccuucccaccucuc

SEQ ID NO: 2727964 - RNA, 19 nt, Human
ccuucccaccucucucacu

SEQ ID NO: 2727965 - RNA, 16 nt, Human
ccuuagcaaauucugu

SEQ ID NO: 2727966 - RNA, 19 nt, Human
ccuuagcagggaaacagcu

SEQ ID NO: 2727967 - RNA, 20 nt, Human
ccuuagcagggaaacagcua

SEQ ID NO: 2727968 - RNA, 16 nt, Human
ccuguugggccaggag

SEQ ID NO: 2727969 - RNA, 17 nt, Human
ccuguugggccaggagc

SEQ ID NO: 2727970 - RNA, 18 nt, Human
ccuguugggccaggagcc

SEQ ID NO: 2727971 - RNA, 19 nt, Human
ccuguugggccaggagccu

SEQ ID NO: 2727972 - RNA, 20 nt, Human
ccuguugggccaggagccuc

SEQ ID NO: 2727973 - RNA, 18 nt, Human
ccuguucccaugagauga

SEQ ID NO: 2727974 - RNA, 12 nt, Human
ccuguucuggca

SEQ ID NO: 2727975 - RNA, 17 nt, Human
ccuguucuggcagaguu

SEQ ID NO: 2727976 - RNA, 23 nt, Human
ccuguucagcuccagcucaccag

SEQ ID NO: 2727977 - RNA, 20 nt, Human
ccuguucagcuccagcucac

SEQ ID NO: 2727978 - RNA, 21 nt, Human
ccuguucagcuccagcucacc

SEQ ID NO: 2727979 - RNA, 14 nt, Human
ccuguucagcucca

SEQ ID NO: 2727980 - RNA, 15 nt, Human
ccuguucagcuccag

SEQ ID NO: 2727981 - RNA, 16 nt, Human
ccuguucagcuccagc

SEQ ID NO: 2727982 - RNA, 19 nt, Human
ccuguucagcuccagcuca

SEQ ID NO: 2727983 - RNA, 18 nt, Human
cuauguugcccaggcagg

SEQ ID NO: 2727984 - RNA, 19 nt, Human
cuauguugcccaggcaggu

SEQ ID NO: 2727985 - RNA, 21 nt, Human
cuauguugcccaggcaggucu

SEQ ID NO: 2727986 - RNA, 22 nt, Human
cuauguugcccaggcaggucuu

SEQ ID NO: 2727987 - RNA, 18 nt, Human
cuaucucauuuccaagca

SEQ ID NO: 2727988 - RNA, 13 nt, Human
cuaucucccccag

SEQ ID NO: 2727989 - RNA, 14 nt, Human
cuaucucccccagc

SEQ ID NO: 2727990 - RNA, 14 nt, Human
cuaugugagaccau

SEQ ID NO: 2727991 - RNA, 21 nt, Human
cucaagugauucuccugccuc

SEQ ID NO: 2727992 - RNA, 23 nt, Human
cucaauuauuuugcauuuuuucu

SEQ ID NO: 2727993 - RNA, 20 nt, Human
cucagucuggcccuuccuuu

SEQ ID NO: 2727994 - RNA, 15 nt, Human
cucaguccauagcag

SEQ ID NO: 2727995 - RNA, 17 nt, Human
cucaguccauagcagag

SEQ ID NO: 2727996 - RNA, 22 nt, Human
cucagucuggcccuuccuuuuc

SEQ ID NO: 2727997 - RNA, 23 nt, Human
cucaggugucccugcacuugcag

SEQ ID NO: 2727998 - RNA, 15 nt, Human
cucaggccagcugcu

SEQ ID NO: 2727999 - RNA, 21 nt, Human
cucaggccaaacucaccugcc

SEQ ID NO: 2728000 - RNA, 19 nt, Human
cucaggccaaacucaccug

SEQ ID NO: 2728001 - RNA, 20 nt, Human
cucaggccaaacucaccugc

SEQ ID NO: 2728002 - RNA, 22 nt, Human
cucaggccugggggcugggcag

SEQ ID NO: 2728003 - RNA, 11 nt, Human
cucaggccugg

SEQ ID NO: 2728004 - RNA, 16 nt, Human
cucaggccagcugcuu

SEQ ID NO: 2728005 - RNA, 17 nt, Human
cucaggccagcugcuug

SEQ ID NO: 2728006 - RNA, 18 nt, Human
cucaggccagcugcuugg

SEQ ID NO: 2728007 - RNA, 13 nt, Human
cucagaagacacu

SEQ ID NO: 2728008 - RNA, 15 nt, Human
cucagaagacacuga

SEQ ID NO: 2728009 - RNA, 17 nt, Human
cucagaagacacugaug

SEQ ID NO: 2728010 - RNA, 20 nt, Human
cucagaagacacugaugggc

SEQ ID NO: 2728011 - RNA, 22 nt, Human
cucagaagacacugaugggcaa

SEQ ID NO: 2728012 - RNA, 17 nt, Human
cucaccuuucccaucuu

SEQ ID NO: 2728013 - RNA, 23 nt, Human
cucagaagacacugaugggcaac

SEQ ID NO: 2728014 - RNA, 19 nt, Human
cucagccucccgaauagcu

SEQ ID NO: 2728015 - RNA, 21 nt, Human
cucagccucccgaauagcugg

SEQ ID NO: 2728016 - RNA, 22 nt, Human
cucagccucccgaauagcuggg

SEQ ID NO: 2728017 - RNA, 19 nt, Human
cucccuccaccucccugca

SEQ ID NO: 2728018 - RNA, 20 nt, Human
cucccuccaccucccugcaa

SEQ ID NO: 2728019 - RNA, 21 nt, Human
cucccuccaccucccugcaau

SEQ ID NO: 2728020 - RNA, 22 nt, Human
cucccuccaccucccugcaaua

SEQ ID NO: 2728021 - RNA, 20 nt, Human
cucccucuuucccucccuuc

SEQ ID NO: 2728022 - RNA, 23 nt, Human
cuccaggugcacaagcuccaagc

SEQ ID NO: 2728023 - RNA, 15 nt, Human
cuccaggcuccuuua

SEQ ID NO: 2728024 - RNA, 23 nt, Human
cuccaggcuccuuuagcgcccag

SEQ ID NO: 2728025 - RNA, 20 nt, Human
cuccaggcuguaucccauga

SEQ ID NO: 2728026 - RNA, 16 nt, Human
cuccuguaccucuuga

SEQ ID NO: 2728027 - RNA, 15 nt, Human
cuccuuucaccacau

SEQ ID NO: 2728028 - RNA, 14 nt, Human
cuccuuguguuacu

SEQ ID NO: 2728029 - RNA, 22 nt, Human
cuccucugcuugccaucccucc

SEQ ID NO: 2728030 - RNA, 15 nt, Human
cuccucugcugcugg

SEQ ID NO: 2728031 - RNA, 13 nt, Human
cuccucugcugcu

SEQ ID NO: 2728032 - RNA, 14 nt, Human
cuccucugcugcug

SEQ ID NO: 2728033 - RNA, 19 nt, Human
cuccuggccucaagugauu

SEQ ID NO: 2728034 - RNA, 18 nt, Human
cuccugggcuaagugauc

SEQ ID NO: 2728035 - RNA, 19 nt, Human
cuccuggcccacugcaucg

SEQ ID NO: 2728036 - RNA, 23 nt, Human
cuccgcuuucuacccagcgagcc

SEQ ID NO: 2728037 - RNA, 16 nt, Human
cucuccuccagaguca

SEQ ID NO: 2728038 - RNA, 12 nt, Human
cucuccuccaga

SEQ ID NO: 2728039 - RNA, 13 nt, Human
cucuccuccagag

SEQ ID NO: 2728040 - RNA, 15 nt, Human
cucuccuccagaguc

SEQ ID NO: 2728041 - RNA, 16 nt, Human
cucuccccaugauguu

SEQ ID NO: 2728042 - RNA, 15 nt, Human
cucuccccaugaugu

SEQ ID NO: 2728043 - RNA, 17 nt, Human
cucgguguggagaagcg

SEQ ID NO: 2728044 - RNA, 16 nt, Human
cucgguguggagaagc

SEQ ID NO: 2728045 - RNA, 17 nt, Human
cuccuuugugaggaagc

SEQ ID NO: 2728046 - RNA, 18 nt, Human
cuccuuugugaggaagcc

SEQ ID NO: 2728047 - RNA, 20 nt, Human
cucugcacaagcugcacccu

SEQ ID NO: 2728048 - RNA, 21 nt, Human
cucugcacaagcugcacccuc

SEQ ID NO: 2728049 - RNA, 19 nt, Human
cucugcacaagcugcaccc

SEQ ID NO: 2728050 - RNA, 14 nt, Human
cucugcacuccccu

SEQ ID NO: 2728051 - RNA, 15 nt, Human
cucugcacuccccug

SEQ ID NO: 2728052 - RNA, 16 nt, Human
cucugcacuccccugc

SEQ ID NO: 2728053 - RNA, 21 nt, Human
cucugcuccucuccccagcaa

SEQ ID NO: 2728054 - RNA, 17 nt, Human
cucugcacuccccugcu

SEQ ID NO: 2728055 - RNA, 21 nt, Human
cucugcugacagacacaggcc

SEQ ID NO: 2728056 - RNA, 22 nt, Human
cucugcugacagacacaggccc

SEQ ID NO: 2728057 - RNA, 20 nt, Human
cucugcugacagacacaggc

SEQ ID NO: 2728058 - RNA, 13 nt, Human
cucugcugcuggc

SEQ ID NO: 2728059 - RNA, 23 nt, Human
cucugcugacagacacaggcccg

SEQ ID NO: 2728060 - RNA, 13 nt, Human
cucuguacagagc

SEQ ID NO: 2728061 - RNA, 14 nt, Human
cucuguacagagcc

SEQ ID NO: 2728062 - RNA, 15 nt, Human
cucuguacagagccc

SEQ ID NO: 2728063 - RNA, 16 nt, Human
cucugcugcuggcugg

SEQ ID NO: 2728064 - RNA, 14 nt, Human
cucugcugcuggcu

SEQ ID NO: 2728065 - RNA, 15 nt, Human
cucugcugcuggcug

SEQ ID NO: 2728066 - RNA, 16 nt, Human
cucuguacagagccca

SEQ ID NO: 2728067 - RNA, 16 nt, Human
ccgugaggccagagac

SEQ ID NO: 2728068 - RNA, 17 nt, Human
ccgucuaccugaggggc

SEQ ID NO: 2728069 - RNA, 12 nt, Human
ccgugaggccag

SEQ ID NO: 2728070 - RNA, 13 nt, Human
ccgugaggccaga

SEQ ID NO: 2728071 - RNA, 14 nt, Human
ccgugaggccagag

SEQ ID NO: 2728072 - RNA, 12 nt, Human
ccggcuccaggc

SEQ ID NO: 2728073 - RNA, 13 nt, Human
ccggcuccaggcu

SEQ ID NO: 2728074 - RNA, 14 nt, Human
ccggcuccaggcuc

SEQ ID NO: 2728075 - RNA, 15 nt, Human
ccggcuccaggcucc

SEQ ID NO: 2728076 - RNA, 14 nt, Human
ccgucuaccugagg

SEQ ID NO: 2728077 - RNA, 15 nt, Human
ccgucuaccugaggg

SEQ ID NO: 2728078 - RNA, 14 nt, Human
ccuaaucuucugaa

SEQ ID NO: 2728079 - RNA, 12 nt, Human
ccuaaggacuuc

SEQ ID NO: 2728080 - RNA, 11 nt, Human
ccuaaggacuu

SEQ ID NO: 2728081 - RNA, 23 nt, Human
ccuaaggacuucuuuaauuuugg

SEQ ID NO: 2728082 - RNA, 18 nt, Human
ccuaaggacuucuuuaau

SEQ ID NO: 2728083 - RNA, 17 nt, Human
ccuaaggacuucuuuaa

SEQ ID NO: 2728084 - RNA, 16 nt, Human
ccuaaggacuucuuua

SEQ ID NO: 2728085 - RNA, 20 nt, Human
ccuagccugugccucuggga

SEQ ID NO: 2728086 - RNA, 19 nt, Human
ccuagcauacguacacauu

SEQ ID NO: 2728087 - RNA, 17 nt, Human
ccuagcacuuugggagg

SEQ ID NO: 2728088 - RNA, 18 nt, Human
ccggcaggguccuagaaa

SEQ ID NO: 2728089 - RNA, 15 nt, Human
ccggccccugcuggu

SEQ ID NO: 2728090 - RNA, 16 nt, Human
ccggccaccugcggug

SEQ ID NO: 2728091 - RNA, 15 nt, Human
cccuuccucuuucca

SEQ ID NO: 2728092 - RNA, 19 nt, Human
ccgaaagggacuuggaagc

SEQ ID NO: 2728093 - RNA, 16 nt, Human
ccgaaaacguggcugc

SEQ ID NO: 2728094 - RNA, 17 nt, Human
ccgaaaacguggcugcu

SEQ ID NO: 2728095 - RNA, 16 nt, Human
ccgaauagcugggacu

SEQ ID NO: 2728096 - RNA, 17 nt, Human
ccgaauagcugggacua

SEQ ID NO: 2728097 - RNA, 18 nt, Human
ccgaccagacaccuugac

SEQ ID NO: 2728098 - RNA, 15 nt, Human
ccgcagacaggacca

SEQ ID NO: 2728099 - RNA, 13 nt, Human
ccgaccagacacc

SEQ ID NO: 2728100 - RNA, 17 nt, Human
ccgaccagacaccuuga

SEQ ID NO: 2728101 - RNA, 12 nt, Human
ccgcccaggcuu

SEQ ID NO: 2728102 - RNA, 16 nt, Human
ccgcagacaggaccag

SEQ ID NO: 2728103 - RNA, 17 nt, Human
ccgcagacaggaccagg

SEQ ID NO: 2728104 - RNA, 23 nt, Human
cccugugauggggcccugccucc

SEQ ID NO: 2728105 - RNA, 21 nt, Human
cccugugauggggcccugccu

SEQ ID NO: 2728106 - RNA, 22 nt, Human
cccugugauggggcccugccuc

SEQ ID NO: 2728107 - RNA, 14 nt, Human
cccugagcaggauu

SEQ ID NO: 2728108 - RNA, 16 nt, Human
cccugagcuuucugcu

SEQ ID NO: 2728109 - RNA, 20 nt, Human
cccugcccaccuggccucug

SEQ ID NO: 2728110 - RNA, 22 nt, Human
cccugcccaccuggccucugca

SEQ ID NO: 2728111 - RNA, 14 nt, Human
cccugcccggcugc

SEQ ID NO: 2728112 - RNA, 17 nt, Human
cccugcccggcugcgga

SEQ ID NO: 2728113 - RNA, 13 nt, Human
cccuggaugcagc

SEQ ID NO: 2728114 - RNA, 17 nt, Human
cccuggaugcagccuca

SEQ ID NO: 2728115 - RNA, 21 nt, Human
cccuggaugcagccucacagu

SEQ ID NO: 2728116 - RNA, 13 nt, Human
cccucggagaaga

SEQ ID NO: 2728117 - RNA, 18 nt, Human
cccugaaagcccugagcu

SEQ ID NO: 2728118 - RNA, 16 nt, Human
cccugaaagcccugag

SEQ ID NO: 2728119 - RNA, 12 nt, Human
cccugaaggccc

SEQ ID NO: 2728120 - RNA, 13 nt, Human
cccugaaggcccc

SEQ ID NO: 2728121 - RNA, 14 nt, Human
cccugaaggccccg

SEQ ID NO: 2728122 - RNA, 16 nt, Human
cccugaaggccccgcc

SEQ ID NO: 2728123 - RNA, 19 nt, Human
cccugaaggccccgcccag

SEQ ID NO: 2728124 - RNA, 14 nt, Human
cccugacaacacuc

SEQ ID NO: 2728125 - RNA, 20 nt, Human
cccugaaggccccgcccagg

SEQ ID NO: 2728126 - RNA, 22 nt, Human
cccugaaggccccgcccaggcu

SEQ ID NO: 2728127 - RNA, 16 nt, Human
cccugacaacacucau

SEQ ID NO: 2728128 - RNA, 22 nt, Human
cccugacaacacucauugaccu

SEQ ID NO: 2728129 - RNA, 20 nt, Human
cccugaauuuaaauagcuuu

SEQ ID NO: 2728130 - RNA, 17 nt, Human
ccucuccugggcagcug

SEQ ID NO: 2728131 - RNA, 18 nt, Human
ccucuccugggcagcugc

SEQ ID NO: 2728132 - RNA, 19 nt, Human
ccucuccugggcagcugcc

SEQ ID NO: 2728133 - RNA, 20 nt, Human
ccucuccugggcagcugccu

SEQ ID NO: 2728134 - RNA, 14 nt, Human
ccucuccugggcag

SEQ ID NO: 2728135 - RNA, 15 nt, Human
ccucuccugggcagc

SEQ ID NO: 2728136 - RNA, 16 nt, Human
ccucuccugggcagcu

SEQ ID NO: 2728137 - RNA, 21 nt, Human
ccucuccugggcagcugccuc

SEQ ID NO: 2728138 - RNA, 22 nt, Human
ccucuccugggcagcugccucc

SEQ ID NO: 2728139 - RNA, 20 nt, Human
ccucugccucugacacacag

SEQ ID NO: 2728140 - RNA, 21 nt, Human
ccucugccucugacacacagc

SEQ ID NO: 2728141 - RNA, 23 nt, Human
ccucugccucugacacacagcuc

SEQ ID NO: 2728142 - RNA, 11 nt, Human
ccucugccuga

SEQ ID NO: 2728143 - RNA, 20 nt, Human
ccucugccugaagucacaca

SEQ ID NO: 2728144 - RNA, 12 nt, Human
ccucucucacuc

SEQ ID NO: 2728145 - RNA, 16 nt, Human
ccucgaacuggcugca

SEQ ID NO: 2728146 - RNA, 15 nt, Human
ccucgaacuggcugc

SEQ ID NO: 2728147 - RNA, 18 nt, Human
ccuccuuugugaggaagc

SEQ ID NO: 2728148 - RNA, 19 nt, Human
ccuccuuugugaggaagcc

SEQ ID NO: 2728149 - RNA, 20 nt, Human
ccuccuuugugaggaagccg

SEQ ID NO: 2728150 - RNA, 11 nt, Human
ccucaggcagg

SEQ ID NO: 2728151 - RNA, 17 nt, Human
ccucccaacucacccca

SEQ ID NO: 2728152 - RNA, 20 nt, Human
ccucccaacucaccccagcc

SEQ ID NO: 2728153 - RNA, 21 nt, Human
ccucccaacucaccccagccc

SEQ ID NO: 2728154 - RNA, 23 nt, Human
ccucccaacucaccccagcccca

SEQ ID NO: 2728155 - RNA, 12 nt, Human
ccugaggggccu

SEQ ID NO: 2728156 - RNA, 16 nt, Human
ccugaggggccucuua

SEQ ID NO: 2728157 - RNA, 16 nt, Human
ccugaggcugggcucc

SEQ ID NO: 2728158 - RNA, 17 nt, Human
ccugaggcugggcuccc

SEQ ID NO: 2728159 - RNA, 19 nt, Human
ccugaggcugggcucccuu

SEQ ID NO: 2728160 - RNA, 21 nt, Human
ccugaggcugggcucccuucc

SEQ ID NO: 2728161 - RNA, 23 nt, Human
ccugcaggcagccaggccacaag

SEQ ID NO: 2728162 - RNA, 18 nt, Human
ccugcaggcagccaggcc

SEQ ID NO: 2728163 - RNA, 19 nt, Human
ccugcaggcagccaggcca

SEQ ID NO: 2728164 - RNA, 20 nt, Human
ccugcaggcagccaggccac

SEQ ID NO: 2728165 - RNA, 21 nt, Human
ccugcaggcagccaggccaca

SEQ ID NO: 2728166 - RNA, 15 nt, Human
ccugcaggcagccag

SEQ ID NO: 2728167 - RNA, 12 nt, Human
ccugcagagggc

SEQ ID NO: 2728168 - RNA, 16 nt, Human
ccugcaggcagccagg

SEQ ID NO: 2728169 - RNA, 17 nt, Human
ccugcaggcagccaggc

SEQ ID NO: 2728170 - RNA, 21 nt, Human
ccucugccugaagucacacag

SEQ ID NO: 2728171 - RNA, 16 nt, Human
ccucuuugagugaagc

SEQ ID NO: 2728172 - RNA, 19 nt, Human
ccucuuuggucuacacugu

SEQ ID NO: 2728173 - RNA, 22 nt, Human
ccugcugcaguugccagucacc

SEQ ID NO: 2728174 - RNA, 11 nt, Human
ccugcugcagu

SEQ ID NO: 2728175 - RNA, 12 nt, Human
ccugcugcaguu

SEQ ID NO: 2728176 - RNA, 16 nt, Human
ccugcugcaguugcca

SEQ ID NO: 2728177 - RNA, 15 nt, Human
ccugccucuucucua

SEQ ID NO: 2728178 - RNA, 23 nt, Human
ccugccuccuuugugaggaagcc

SEQ ID NO: 2728179 - RNA, 21 nt, Human
ccugccuccuuugugaggaag

SEQ ID NO: 2728180 - RNA, 22 nt, Human
ccugccuccuuugugaggaagc

SEQ ID NO: 2728181 - RNA, 13 nt, Human
ccugccuccuuug

SEQ ID NO: 2728182 - RNA, 15 nt, Human
ccugccuccuuugug

SEQ ID NO: 2728183 - RNA, 19 nt, Human
ccugccuccuuugugagga

SEQ ID NO: 2728184 - RNA, 20 nt, Human
ccugccuccuuugugaggaa

SEQ ID NO: 2728185 - RNA, 14 nt, Human
cccccuuccaugga

SEQ ID NO: 2728186 - RNA, 12 nt, Human
ccccgcccaggc

SEQ ID NO: 2728187 - RNA, 13 nt, Human
ccccggccaccug

SEQ ID NO: 2728188 - RNA, 14 nt, Human
ccccggccaccugc

SEQ ID NO: 2728189 - RNA, 18 nt, Human
ccccggccaccugcggug

SEQ ID NO: 2728190 - RNA, 14 nt, Human
ccccgcccaggcuu

SEQ ID NO: 2728191 - RNA, 10 nt, Human
ccccagcccc

SEQ ID NO: 2728192 - RNA, 12 nt, Human
ccccagccccaa

SEQ ID NO: 2728193 - RNA, 21 nt, Human
ccccauucugccugcccaggc

SEQ ID NO: 2728194 - RNA, 14 nt, Human
ccccagccccaucc

SEQ ID NO: 2728195 - RNA, 14 nt, Human
ccccagccccaaaa

SEQ ID NO: 2728196 - RNA, 20 nt, Human
ccccaaaacucuccucugcu

SEQ ID NO: 2728197 - RNA, 18 nt, Human
ccccaaaacucuccucug

SEQ ID NO: 2728198 - RNA, 23 nt, Human
cccauucugccugcccaggcccc

SEQ ID NO: 2728199 - RNA, 21 nt, Human
cccagccccaaaacucuccuc

SEQ ID NO: 2728200 - RNA, 23 nt, Human
cccagccccaaaacucuccucug

SEQ ID NO: 2728201 - RNA, 17 nt, Human
cccagcccacuucugcc

SEQ ID NO: 2728202 - RNA, 19 nt, Human
cccagcccacuucugccau

SEQ ID NO: 2728203 - RNA, 19 nt, Human
cccaggcuggcgugcagug

SEQ ID NO: 2728204 - RNA, 20 nt, Human
cccaggcuggcgugcagugg

SEQ ID NO: 2728205 - RNA, 18 nt, Human
cccaggcuggcgugcagu

SEQ ID NO: 2728206 - RNA, 14 nt, Human
cccauccucuguac

SEQ ID NO: 2728207 - RNA, 20 nt, Human
cccauccucuguacagagcc

SEQ ID NO: 2728208 - RNA, 15 nt, Human
cccauccucuguaca

SEQ ID NO: 2728209 - RNA, 19 nt, Human
cccauccucuguacagagc

SEQ ID NO: 2728210 - RNA, 18 nt, Human
ccaugggcacugugggua

SEQ ID NO: 2728211 - RNA, 19 nt, Human
ccaugggauaaaugccauc

SEQ ID NO: 2728212 - RNA, 17 nt, Human
ccaugggauaaaugcca

SEQ ID NO: 2728213 - RNA, 16 nt, Human
ccaugaggaacaaggc

SEQ ID NO: 2728214 - RNA, 17 nt, Human
ccaugaggaacaaggca

SEQ ID NO: 2728215 - RNA, 18 nt, Human
ccaugaggaacaaggcaa

SEQ ID NO: 2728216 - RNA, 17 nt, Human
ccaugggccuccugugu

SEQ ID NO: 2728217 - RNA, 13 nt, Human
ccauuuaaagcuu

SEQ ID NO: 2728218 - RNA, 15 nt, Human
cccacccaagggccu

SEQ ID NO: 2728219 - RNA, 18 nt, Human
cccaccaucaugucuggc

SEQ ID NO: 2728220 - RNA, 17 nt, Human
cccaagcucugcuccuc

SEQ ID NO: 2728221 - RNA, 15 nt, Human
cccaccgcagacagg

SEQ ID NO: 2728222 - RNA, 18 nt, Human
cccaccgcagacaggacc

SEQ ID NO: 2728223 - RNA, 19 nt, Human
ccacugcacuauagccuag

SEQ ID NO: 2728224 - RNA, 20 nt, Human
ccacugcacuauagccuagg

SEQ ID NO: 2728225 - RNA, 13 nt, Human
ccacugcaccggg

SEQ ID NO: 2728226 - RNA, 14 nt, Human
ccacugcaccgggc

SEQ ID NO: 2728227 - RNA, 17 nt, Human
ccacugcaccgggccac

SEQ ID NO: 2728228 - RNA, 19 nt, Human
ccacugcaccgggccacag

SEQ ID NO: 2728229 - RNA, 13 nt, Human
ccacuuucuagcc

SEQ ID NO: 2728230 - RNA, 18 nt, Human
ccacuuucuagccagagg

SEQ ID NO: 2728231 - RNA, 19 nt, Human
ccacuuucuagccagagga

SEQ ID NO: 2728232 - RNA, 20 nt, Human
ccacuuucuagccagaggag

SEQ ID NO: 2728233 - RNA, 17 nt, Human
ccagacccggcugcgug

SEQ ID NO: 2728234 - RNA, 16 nt, Human
ccagacccggcugcgu

SEQ ID NO: 2728235 - RNA, 22 nt, Human
ccacuuuuguucuugguuugua

SEQ ID NO: 2728236 - RNA, 21 nt, Human
ccacuuuuguucuugguuugu

SEQ ID NO: 2728237 - RNA, 15 nt, Human
ccacuuuuguucuug

SEQ ID NO: 2728238 - RNA, 14 nt, Human
ccacuuuuguucuu

SEQ ID NO: 2728239 - RNA, 16 nt, Human
ccagagacacaagccu

SEQ ID NO: 2728240 - RNA, 18 nt, Human
ccagagacacaagccuuc

SEQ ID NO: 2728241 - RNA, 13 nt, Human
ccagagagggugg

SEQ ID NO: 2728242 - RNA, 13 nt, Human
ccagaugcaccag

SEQ ID NO: 2728243 - RNA, 14 nt, Human
ccagaugcaccagc

SEQ ID NO: 2728244 - RNA, 15 nt, Human
ccaggggccaugaau

SEQ ID NO: 2728245 - RNA, 20 nt, Human
ccaggggugggacacccugu

SEQ ID NO: 2728246 - RNA, 21 nt, Human
ccaggggugggacacccugug

SEQ ID NO: 2728247 - RNA, 22 nt, Human
ccaggggugggacacccuguga

SEQ ID NO: 2728248 - RNA, 13 nt, Human
ccaguaucuugaa

SEQ ID NO: 2728249 - RNA, 19 nt, Human
ccaguaucuugaagacuuu

SEQ ID NO: 2728250 - RNA, 22 nt, Human
ccaguaucuugaagacuuuucu

SEQ ID NO: 2728251 - RNA, 16 nt, Human
ccagucaccccggcca

SEQ ID NO: 2728252 - RNA, 14 nt, Human
ccaguauuguacaa

SEQ ID NO: 2728253 - RNA, 17 nt, Human
ccagucaccccggccac

SEQ ID NO: 2728254 - RNA, 18 nt, Human
ccagucaccccggccacc

SEQ ID NO: 2728255 - RNA, 21 nt, Human
ccagcgagcccugguggcagu

SEQ ID NO: 2728256 - RNA, 18 nt, Human
ccagccccuucugaccca

SEQ ID NO: 2728257 - RNA, 18 nt, Human
ccagccccuggaugcagc

SEQ ID NO: 2728258 - RNA, 15 nt, Human
ccagccccuucugac

SEQ ID NO: 2728259 - RNA, 16 nt, Human
ccagccccuucugacc

SEQ ID NO: 2728260 - RNA, 17 nt, Human
ccagccccuucugaccc

SEQ ID NO: 2728261 - RNA, 13 nt, Human
ccagccccuggau

SEQ ID NO: 2728262 - RNA, 14 nt, Human
ccagccccuggaug

SEQ ID NO: 2728263 - RNA, 15 nt, Human
ccagccccuggaugc

SEQ ID NO: 2728264 - RNA, 13 nt, Human
ccagcagccugga

SEQ ID NO: 2728265 - RNA, 23 nt, Human
ccagccccauccucuguacagag

SEQ ID NO: 2728266 - RNA, 18 nt, Human
ccagccccauccucugua

SEQ ID NO: 2728267 - RNA, 11 nt, Human
ccagcagccug

SEQ ID NO: 2728268 - RNA, 12 nt, Human
ccagcagccugg

SEQ ID NO: 2728269 - RNA, 12 nt, Human
ccagcagaaaug

SEQ ID NO: 2728270 - RNA, 22 nt, Human
ccagcagaaaugccuuacccuc

SEQ ID NO: 2728271 - RNA, 17 nt, Human
ccagcagaaaugccuua

SEQ ID NO: 2728272 - RNA, 16 nt, Human
ccagcagaaaugccuu

SEQ ID NO: 2728273 - RNA, 17 nt, Human
ccaggaaaggcuccagg

SEQ ID NO: 2728274 - RNA, 18 nt, Human
ccaggaaaggcuccagga

SEQ ID NO: 2728275 - RNA, 19 nt, Human
ccaggaaaggcuccaggag

SEQ ID NO: 2728276 - RNA, 20 nt, Human
ccaggaaaggcuccaggagc

SEQ ID NO: 2728277 - RNA, 18 nt, Human
aaauuucagcagcugcag

SEQ ID NO: 2728278 - RNA, 17 nt, Human
aaauuucagcagcugca

SEQ ID NO: 2728279 - RNA, 20 nt, Human
aaauuuaguauuuuguuuca

SEQ ID NO: 2728280 - RNA, 15 nt, Human
guauuuuuuuacuaa

SEQ ID NO: 2728281 - RNA, 14 nt, Human
guauuuuuuuacua

SEQ ID NO: 2728282 - RNA, 22 nt, Human
aaauuuccugggagcuuuugua

SEQ ID NO: 2728283 - RNA, 20 nt, Human
guauuuuugacagaauaugu

SEQ ID NO: 2728284 - RNA, 19 nt, Human
gucaaaguggugagaggca

SEQ ID NO: 2728285 - RNA, 18 nt, Human
gucaaaguggugagaggc

SEQ ID NO: 2728286 - RNA, 21 nt, Human
guauuuuuuuacuaauagaca

SEQ ID NO: 2728287 - RNA, 17 nt, Human
guauuuuuuuacuaaua

SEQ ID NO: 2728288 - RNA, 19 nt, Human
gucaacucauauuuucaug

SEQ ID NO: 2728289 - RNA, 16 nt, Human
gucacacacuuuggcu

SEQ ID NO: 2728290 - RNA, 20 nt, Human
gucacacaguauuacuucug

SEQ ID NO: 2728291 - RNA, 20 nt, Human
guauuuaauagguuuggaca

SEQ ID NO: 2728292 - RNA, 22 nt, Human
guauuggcuagagguucaaaga

SEQ ID NO: 2728293 - RNA, 19 nt, Human
aaauuaacuuuuauaaacu

SEQ ID NO: 2728294 - RNA, 21 nt, Human
aaauuaacuuuuauaaacuuu

SEQ ID NO: 2728295 - RNA, 23 nt, Human
aaauuaacuuuuauaaacuuuac

SEQ ID NO: 2728296 - RNA, 22 nt, Human
aaauuaacuuuuauaaacuuua

SEQ ID NO: 2728297 - RNA, 16 nt, Human
aaauuccccacccuga

SEQ ID NO: 2728298 - RNA, 14 nt, Human
aaauucaugcugcu

SEQ ID NO: 2728299 - RNA, 22 nt, Human
aaauuauuuuguucauacauau

SEQ ID NO: 2728300 - RNA, 20 nt, Human
aaauuauuuuguucauacau

SEQ ID NO: 2728301 - RNA, 21 nt, Human
aaauuauuuuguucauacaua

SEQ ID NO: 2728302 - RNA, 22 nt, Human
aaauuauauaaguauucuaaau

SEQ ID NO: 2728303 - RNA, 17 nt, Human
aaauuauuuuguucaua

SEQ ID NO: 2728304 - RNA, 19 nt, Human
aaauuauuuuguucauaca

SEQ ID NO: 2728305 - RNA, 16 nt, Human
aaauuauauaaguauu

SEQ ID NO: 2728306 - RNA, 18 nt, Human
aaauuauauaaguauucu

SEQ ID NO: 2728307 - RNA, 22 nt, Human
aaauguaagggaaacugccagc

SEQ ID NO: 2728308 - RNA, 18 nt, Human
aaaugggggugcauuuga

SEQ ID NO: 2728309 - RNA, 17 nt, Human
aaaugggggugcauuug

SEQ ID NO: 2728310 - RNA, 16 nt, Human
aaaugggggugcauuu

SEQ ID NO: 2728311 - RNA, 15 nt, Human
aaaugggggugcauu

SEQ ID NO: 2728312 - RNA, 14 nt, Human
guaugauucccagc

SEQ ID NO: 2728313 - RNA, 14 nt, Human
guaugggagagaag

SEQ ID NO: 2728314 - RNA, 15 nt, Human
guaucccuacuguaa

SEQ ID NO: 2728315 - RNA, 22 nt, Human
guaugaucacggcucacugcag

SEQ ID NO: 2728316 - RNA, 21 nt, Human
guaucccaugagccucagcau

SEQ ID NO: 2728317 - RNA, 13 nt, Human
guaugugugaagu

SEQ ID NO: 2728318 - RNA, 21 nt, Human
guauucucuccuguaccucuu

SEQ ID NO: 2728319 - RNA, 17 nt, Human
guaugugugaagugagu

SEQ ID NO: 2728320 - RNA, 15 nt, Human
guauucuuauuuaau

SEQ ID NO: 2728321 - RNA, 13 nt, Human
guaugguggcugg

SEQ ID NO: 2728322 - RNA, 15 nt, Human
guaugggagagaaga

SEQ ID NO: 2728323 - RNA, 17 nt, Human
aaaugaaaaucgugaca

SEQ ID NO: 2728324 - RNA, 19 nt, Human
aaaucucaaauuucuaaau

SEQ ID NO: 2728325 - RNA, 17 nt, Human
aaaucucaaauuucuaa

SEQ ID NO: 2728326 - RNA, 16 nt, Human
aaaucucaaauuucua

SEQ ID NO: 2728327 - RNA, 15 nt, Human
aaaucucaaauuucu

SEQ ID NO: 2728328 - RNA, 14 nt, Human
aaauccuugaagau

SEQ ID NO: 2728329 - RNA, 13 nt, Human
aaaucgaugcagu

SEQ ID NO: 2728330 - RNA, 15 nt, Human
aaaucccauuuaaaa

SEQ ID NO: 2728331 - RNA, 18 nt, Human
aaaucccuuaccucggug

SEQ ID NO: 2728332 - RNA, 22 nt, Human
aaaucccauuauucaaaguugc

SEQ ID NO: 2728333 - RNA, 21 nt, Human
aaaucccauuauucaaaguug

SEQ ID NO: 2728334 - RNA, 20 nt, Human
aaaucccauuauucaaaguu

SEQ ID NO: 2728335 - RNA, 19 nt, Human
aaaucccauuauucaaagu

SEQ ID NO: 2728336 - RNA, 17 nt, Human
aaaucccauuauucaaa

SEQ ID NO: 2728337 - RNA, 16 nt, Human
aaaucccauuauucaa

SEQ ID NO: 2728338 - RNA, 15 nt, Human
aaaucccauuauuca

SEQ ID NO: 2728339 - RNA, 13 nt, Human
aaaucccauuauu

SEQ ID NO: 2728340 - RNA, 23 nt, Human
aaauccauuuggaaaucuuuaaa

SEQ ID NO: 2728341 - RNA, 22 nt, Human
aaauccauuuggaaaucuuuaa

SEQ ID NO: 2728342 - RNA, 21 nt, Human
aaauccauuuggaaaucuuua

SEQ ID NO: 2728343 - RNA, 18 nt, Human
aaauccauuuggaaaucu

SEQ ID NO: 2728344 - RNA, 12 nt, Human
guagcugggacu

SEQ ID NO: 2728345 - RNA, 18 nt, Human
guagcugggacuacaggc

SEQ ID NO: 2728346 - RNA, 19 nt, Human
guagcugggacuacaggca

SEQ ID NO: 2728347 - RNA, 21 nt, Human
guagcugggacuacaggcacc

SEQ ID NO: 2728348 - RNA, 14 nt, Human
aaauccauuuggaa

SEQ ID NO: 2728349 - RNA, 16 nt, Human
aaauccauuuggaaau

SEQ ID NO: 2728350 - RNA, 15 nt, Human
aaauccauuuggaaa

SEQ ID NO: 2728351 - RNA, 15 nt, Human
guaggaagacuuugg

SEQ ID NO: 2728352 - RNA, 18 nt, Human
guaggaagguuaauguuc

SEQ ID NO: 2728353 - RNA, 13 nt, Human
aaaugagccuggc

SEQ ID NO: 2728354 - RNA, 19 nt, Human
aaaugagccuggcaagaau

SEQ ID NO: 2728355 - RNA, 23 nt, Human
aaaugagguacucuccuggaaau

SEQ ID NO: 2728356 - RNA, 16 nt, Human
aaaugagguacucucc

SEQ ID NO: 2728357 - RNA, 17 nt, Human
aaaugaggucagagccu

SEQ ID NO: 2728358 - RNA, 19 nt, Human
aaaugaggucagagccugc

SEQ ID NO: 2728359 - RNA, 14 nt, Human
aaaugcauuucuaa

SEQ ID NO: 2728360 - RNA, 13 nt, Human
aaaugcccagccc

SEQ ID NO: 2728361 - RNA, 13 nt, Human
aaaugcccagcuu

SEQ ID NO: 2728362 - RNA, 18 nt, Human
aaaugcccagccccuucu

SEQ ID NO: 2728363 - RNA, 14 nt, Human
aaaugcccagcccc

SEQ ID NO: 2728364 - RNA, 15 nt, Human
aaaugcccagccccu

SEQ ID NO: 2728365 - RNA, 19 nt, Human
aaauggcuuccuggcaaua

SEQ ID NO: 2728366 - RNA, 15 nt, Human
aaaugggcagagcag

SEQ ID NO: 2728367 - RNA, 18 nt, Human
aaaugggcagagcagaga

SEQ ID NO: 2728368 - RNA, 20 nt, Human
aaaugggcagagcagagacc

SEQ ID NO: 2728369 - RNA, 22 nt, Human
aaaugcaccuggaauauauaac

SEQ ID NO: 2728370 - RNA, 18 nt, Human
aaaugcaccuggaauaua

SEQ ID NO: 2728371 - RNA, 14 nt, Human
aaaugcaccuggaa

SEQ ID NO: 2728372 - RNA, 18 nt, Human
aacauuugguaaggggaa

SEQ ID NO: 2728373 - RNA, 14 nt, Human
aacauacucccauc

SEQ ID NO: 2728374 - RNA, 15 nt, Human
aacauacucccaucu

SEQ ID NO: 2728375 - RNA, 23 nt, Human
aacaggcugggcuucaguggcag

SEQ ID NO: 2728376 - RNA, 19 nt, Human
aacagguuuuccugaagaa

SEQ ID NO: 2728377 - RNA, 19 nt, Human
aacagacuggaagcacagc

SEQ ID NO: 2728378 - RNA, 22 nt, Human
aacaggcugggcuucaguggca

SEQ ID NO: 2728379 - RNA, 13 nt, Human
aacaggcugggcu

SEQ ID NO: 2728380 - RNA, 19 nt, Human
aacaguuguguuugaagca

SEQ ID NO: 2728381 - RNA, 13 nt, Human
guccgagcuuuga

SEQ ID NO: 2728382 - RNA, 21 nt, Human
guccggucccugucccagugc

SEQ ID NO: 2728383 - RNA, 21 nt, Human
aacagaaauguacagcaagga

SEQ ID NO: 2728384 - RNA, 15 nt, Human
aacagaaauguacag

SEQ ID NO: 2728385 - RNA, 10 nt, Human
aacagaaaug

SEQ ID NO: 2728386 - RNA, 21 nt, Human
aacaagccuccuuuuaaagua

SEQ ID NO: 2728387 - RNA, 15 nt, Human
aacaaggaugaauua

SEQ ID NO: 2728388 - RNA, 19 nt, Human
aacaagaccacguuucuaa

SEQ ID NO: 2728389 - RNA, 17 nt, Human
aacaagaccacguuucu

SEQ ID NO: 2728390 - RNA, 16 nt, Human
aacaagaccacguuuc

SEQ ID NO: 2728391 - RNA, 16 nt, Human
gucacaggcaggucca

SEQ ID NO: 2728392 - RNA, 13 nt, Human
gucacaggcaggu

SEQ ID NO: 2728393 - RNA, 15 nt, Human
gucacaggcaggucc

SEQ ID NO: 2728394 - RNA, 18 nt, Human
aacaagucagucauucag

SEQ ID NO: 2728395 - RNA, 15 nt, Human
aacaagucagucauu

SEQ ID NO: 2728396 - RNA, 23 nt, Human
aacaaggcaaggcugucaauuac

SEQ ID NO: 2728397 - RNA, 18 nt, Human
aacaaugaagauaaaaag

SEQ ID NO: 2728398 - RNA, 14 nt, Human
aacaaugaagauaa

SEQ ID NO: 2728399 - RNA, 21 nt, Human
guccaagcauuuagauguaua

SEQ ID NO: 2728400 - RNA, 24 nt, Human
guccaagcauaccaacacgagcag

SEQ ID NO: 2728401 - RNA, 22 nt, Human
gucauuugagcagggcucagcg

SEQ ID NO: 2728402 - RNA, 21 nt, Human
aacacuguucucugcccucca

SEQ ID NO: 2728403 - RNA, 21 nt, Human
gucauuugagcagggcucagc

SEQ ID NO: 2728404 - RNA, 17 nt, Human
aacacucauugaccuga

SEQ ID NO: 2728405 - RNA, 21 nt, Human
aacacucauugaccugaggcc

SEQ ID NO: 2728406 - RNA, 12 nt, Human
aacacuccuuca

SEQ ID NO: 2728407 - RNA, 11 nt, Human
aacacucugag

SEQ ID NO: 2728408 - RNA, 14 nt, Human
aacacucugagacu

SEQ ID NO: 2728409 - RNA, 12 nt, Human
aacacucugaga

SEQ ID NO: 2728410 - RNA, 13 nt, Human
aacacucugagac

SEQ ID NO: 2728411 - RNA, 15 nt, Human
aacacuguucucugc

SEQ ID NO: 2728412 - RNA, 20 nt, Human
aacacuguucucugcccucc

SEQ ID NO: 2728413 - RNA, 14 nt, Human
aacuccagaaagug

SEQ ID NO: 2728414 - RNA, 21 nt, Human
aacuccagaaagugacaagcu

SEQ ID NO: 2728415 - RNA, 18 nt, Human
aacucguuaauuuguagu

SEQ ID NO: 2728416 - RNA, 15 nt, Human
gugaacacaucagcu

SEQ ID NO: 2728417 - RNA, 19 nt, Human
gugaaccaccacacccagc

SEQ ID NO: 2728418 - RNA, 22 nt, Human
aacguggcugcuucaaggaucc

SEQ ID NO: 2728419 - RNA, 16 nt, Human
aacguggcugcuucaa

SEQ ID NO: 2728420 - RNA, 19 nt, Human
aacguggcugcuucaagga

SEQ ID NO: 2728421 - RNA, 15 nt, Human
aacguggcugcuuca

SEQ ID NO: 2728422 - RNA, 21 nt, Human
gucuuaauuaaaagaauauuu

SEQ ID NO: 2728423 - RNA, 19 nt, Human
gucuuaauuaaaagaauau

SEQ ID NO: 2728424 - RNA, 22 nt, Human
gucuuaauuaaaagaauauuuu

SEQ ID NO: 2728425 - RNA, 15 nt, Human
gucuuagauguauau

SEQ ID NO: 2728426 - RNA, 24 nt, Human
gucuuuucuugcaugaggcuagug

SEQ ID NO: 2728427 - RNA, 14 nt, Human
gucuuuucuugcau

SEQ ID NO: 2728428 - RNA, 19 nt, Human
gucuuuucuugcaugaggc

SEQ ID NO: 2728429 - RNA, 17 nt, Human
gucuuuggacccugagg

SEQ ID NO: 2728430 - RNA, 14 nt, Human
gucuuuggacccug

SEQ ID NO: 2728431 - RNA, 15 nt, Human
gucuuuggacccuga

SEQ ID NO: 2728432 - RNA, 12 nt, Human
aaccacagcagu

SEQ ID NO: 2728433 - RNA, 18 nt, Human
aaccacaucuugcucugc

SEQ ID NO: 2728434 - RNA, 23 nt, Human
aaccaucauugaaaucuuuuugc

SEQ ID NO: 2728435 - RNA, 21 nt, Human
aaccaucauugaaaucuuuuu

SEQ ID NO: 2728436 - RNA, 20 nt, Human
aaccaugggauaaaugccau

SEQ ID NO: 2728437 - RNA, 18 nt, Human
aaccaugggauaaaugcc

SEQ ID NO: 2728438 - RNA, 17 nt, Human
aaccaugggauaaaugc

SEQ ID NO: 2728439 - RNA, 15 nt, Human
aaccaugggauaaau

SEQ ID NO: 2728440 - RNA, 20 nt, Human
aaccacaucuugcucugcug

SEQ ID NO: 2728441 - RNA, 22 nt, Human
aaccacaucuugcucugcugac

SEQ ID NO: 2728442 - RNA, 19 nt, Human
aaccaucauugaaaucuuu

SEQ ID NO: 2728443 - RNA, 20 nt, Human
aaccaucauugaaaucuuuu

SEQ ID NO: 2728444 - RNA, 16 nt, Human
aacauuuugucauaua

SEQ ID NO: 2728445 - RNA, 20 nt, Human
aaccuagggugauauuaacc

SEQ ID NO: 2728446 - RNA, 17 nt, Human
aaccucaaaaugucuaa

SEQ ID NO: 2728447 - RNA, 13 nt, Human
aacccccagccug

SEQ ID NO: 2728448 - RNA, 14 nt, Human
aacccccagccugc

SEQ ID NO: 2728449 - RNA, 15 nt, Human
aacccccagccugcu

SEQ ID NO: 2728450 - RNA, 17 nt, Human
aaccuccgccucuuggg

SEQ ID NO: 2728451 - RNA, 14 nt, Human
aaccuccugggcua

SEQ ID NO: 2728452 - RNA, 24 nt, Human
aaccucuaaauucuuucauuuuag

SEQ ID NO: 2728453 - RNA, 11 nt, Human
aacccagcucu

SEQ ID NO: 2728454 - RNA, 13 nt, Human
aacccagcucugg

SEQ ID NO: 2728455 - RNA, 14 nt, Human
aacccagcucuggu

SEQ ID NO: 2728456 - RNA, 23 nt, Human
aaccauuuugcugucccuuuucc

SEQ ID NO: 2728457 - RNA, 21 nt, Human
aaccaugggauaaaugccauc

SEQ ID NO: 2728458 - RNA, 17 nt, Human
aacccagcucuggucca

SEQ ID NO: 2728459 - RNA, 13 nt, Human
guuggguggaugc

SEQ ID NO: 2728460 - RNA, 18 nt, Human
guuggucccccuuccaug

SEQ ID NO: 2728461 - RNA, 16 nt, Human
guuuaaaaucauuucu

SEQ ID NO: 2728462 - RNA, 10 nt, Human
guuuaaaauc

SEQ ID NO: 2728463 - RNA, 19 nt, Human
aaggaugcuuguacauaau

SEQ ID NO: 2728464 - RNA, 17 nt, Human
aaggaugcuuguacaua

SEQ ID NO: 2728465 - RNA, 18 nt, Human
aaggaugcacagaguugu

SEQ ID NO: 2728466 - RNA, 16 nt, Human
aaggaugcuuguacau

SEQ ID NO: 2728467 - RNA, 15 nt, Human
aaggaugcuuguaca

SEQ ID NO: 2728468 - RNA, 23 nt, Human
guugaugaucuuugcagacaggc

SEQ ID NO: 2728469 - RNA, 14 nt, Human
aaggauccugagcc

SEQ ID NO: 2728470 - RNA, 13 nt, Human
aaggauccugagc

SEQ ID NO: 2728471 - RNA, 15 nt, Human
aaggauccugagcca

SEQ ID NO: 2728472 - RNA, 17 nt, Human
aaggauccugagccaga

SEQ ID NO: 2728473 - RNA, 18 nt, Human
aaggaugaucuaggaaga

SEQ ID NO: 2728474 - RNA, 23 nt, Human
aaggaugaucuaggaagacuuug

SEQ ID NO: 2728475 - RNA, 19 nt, Human
aaggcuaccuuuguauucu

SEQ ID NO: 2728476 - RNA, 18 nt, Human
aaggccaaaggaagcaca

SEQ ID NO: 2728477 - RNA, 17 nt, Human
guugcccaggcaggucu

SEQ ID NO: 2728478 - RNA, 14 nt, Human
aaggcuccaggagc

SEQ ID NO: 2728479 - RNA, 18 nt, Human
guugcccaggcaggucuu

SEQ ID NO: 2728480 - RNA, 19 nt, Human
guugcccaggcaggucuug

SEQ ID NO: 2728481 - RNA, 21 nt, Human
guugcccaggcuggcgugcag

SEQ ID NO: 2728482 - RNA, 15 nt, Human
guugcccaggcaggu

SEQ ID NO: 2728483 - RNA, 17 nt, Human
guugcccaggcuggcgu

SEQ ID NO: 2728484 - RNA, 14 nt, Human
guugccuaaaucca

SEQ ID NO: 2728485 - RNA, 16 nt, Human
guugccuaaauccauu

SEQ ID NO: 2728486 - RNA, 15 nt, Human
guugccuaaauccau

SEQ ID NO: 2728487 - RNA, 21 nt, Human
guuucaaacauauauaacaau

SEQ ID NO: 2728488 - RNA, 13 nt, Human
aagggccuggccu

SEQ ID NO: 2728489 - RNA, 22 nt, Human
aaggggaauguuugccucugcc

SEQ ID NO: 2728490 - RNA, 23 nt, Human
aaggggaauguuugccucugccu

SEQ ID NO: 2728491 - RNA, 19 nt, Human
aagggccuggccugagcug

SEQ ID NO: 2728492 - RNA, 14 nt, Human
aagggccuggccug

SEQ ID NO: 2728493 - RNA, 17 nt, Human
aagggccuggccugagc

SEQ ID NO: 2728494 - RNA, 16 nt, Human
aaggguaucaggugcu

SEQ ID NO: 2728495 - RNA, 12 nt, Human
aaguaauaugca

SEQ ID NO: 2728496 - RNA, 19 nt, Human
guuucuaaaggcuaccuuu

SEQ ID NO: 2728497 - RNA, 16 nt, Human
aaguaauaugcacaca

SEQ ID NO: 2728498 - RNA, 15 nt, Human
aaguaauaugcacac

SEQ ID NO: 2728499 - RNA, 23 nt, Human
guuuucugagaaagacuauucaa

SEQ ID NO: 2728500 - RNA, 11 nt, Human
guuuucuguuc

SEQ ID NO: 2728501 - RNA, 19 nt, Human
guuuucuguucuuucuggc

SEQ ID NO: 2728502 - RNA, 18 nt, Human
guuuggggaugagaaagg

SEQ ID NO: 2728503 - RNA, 22 nt, Human
guuugauucagacagcugccug

SEQ ID NO: 2728504 - RNA, 20 nt, Human
guuucuguacuuuuuggcau

SEQ ID NO: 2728505 - RNA, 23 nt, Human
guuucuaaaggcuaccuuuguau

SEQ ID NO: 2728506 - RNA, 22 nt, Human
guuucuaaaggcuaccuuugua

SEQ ID NO: 2728507 - RNA, 13 nt, Human
guuugccucugcc

SEQ ID NO: 2728508 - RNA, 16 nt, Human
guuugccucugccucu

SEQ ID NO: 2728509 - RNA, 23 nt, Human
aagcuuguauuccuuuuucucuc

SEQ ID NO: 2728510 - RNA, 22 nt, Human
aagcuauucaguaauaacucua

SEQ ID NO: 2728511 - RNA, 21 nt, Human
aagcucuacugaggugcuaug

SEQ ID NO: 2728512 - RNA, 16 nt, Human
guucccauuugcuccu

SEQ ID NO: 2728513 - RNA, 20 nt, Human
guucccauuugcuccuuucu

SEQ ID NO: 2728514 - RNA, 20 nt, Human
guuccauggccucuucagau

SEQ ID NO: 2728515 - RNA, 14 nt, Human
guugacaugggaca

SEQ ID NO: 2728516 - RNA, 18 nt, Human
guugacaugggacauuug

SEQ ID NO: 2728517 - RNA, 22 nt, Human
guugaugaucuuugcagacagg

SEQ ID NO: 2728518 - RNA, 13 nt, Human
guugacaugggac

SEQ ID NO: 2728519 - RNA, 21 nt, Human
guucuugguuuguaaauuaac

SEQ ID NO: 2728520 - RNA, 17 nt, Human
guucuuaguuugcaguu

SEQ ID NO: 2728521 - RNA, 18 nt, Human
guucuagcauggcauauu

SEQ ID NO: 2728522 - RNA, 20 nt, Human
guucccuuugacgccauccc

SEQ ID NO: 2728523 - RNA, 21 nt, Human
guucccuuugacgccauccca

SEQ ID NO: 2728524 - RNA, 22 nt, Human
guucccuuugacgccaucccag

SEQ ID NO: 2728525 - RNA, 16 nt, Human
guucuacccaggugcu

SEQ ID NO: 2728526 - RNA, 23 nt, Human
guucugggacacaguucaauucu

SEQ ID NO: 2728527 - RNA, 11 nt, Human
guucauacauu

SEQ ID NO: 2728528 - RNA, 14 nt, Human
guucauacauugua

SEQ ID NO: 2728529 - RNA, 19 nt, Human
aagccuccuccagccgcca

SEQ ID NO: 2728530 - RNA, 17 nt, Human
aagcuaggccuggccag

SEQ ID NO: 2728531 - RNA, 18 nt, Human
aagcuaggccuggccaga

SEQ ID NO: 2728532 - RNA, 16 nt, Human
aagcuaggccuggcca

SEQ ID NO: 2728533 - RNA, 22 nt, Human
aagcuaggccuggccagaugca

SEQ ID NO: 2728534 - RNA, 9 nt, Human
guucauaca

SEQ ID NO: 2728535 - RNA, 10 nt, Human
guucauacau

SEQ ID NO: 2728536 - RNA, 13 nt, Human
guucauacauauu

SEQ ID NO: 2728537 - RNA, 14 nt, Human
guucauacauauuu

SEQ ID NO: 2728538 - RNA, 23 nt, Human
guucauacauauuuuuguagcac

SEQ ID NO: 2728539 - RNA, 17 nt, Human
guucaggguuggccccu

SEQ ID NO: 2728540 - RNA, 18 nt, Human
guucaggguuggccccug

SEQ ID NO: 2728541 - RNA, 19 nt, Human
guucaggguuggccccugc

SEQ ID NO: 2728542 - RNA, 15 nt, Human
guucagcuccagcuc

SEQ ID NO: 2728543 - RNA, 18 nt, Human
guucagcuccagcucacc

SEQ ID NO: 2728544 - RNA, 16 nt, Human
guucagcuccagcuca

SEQ ID NO: 2728545 - RNA, 17 nt, Human
guucagcuccagcucac

SEQ ID NO: 2728546 - RNA, 14 nt, Human
guuaaguaugugua

SEQ ID NO: 2728547 - RNA, 18 nt, Human
guuaaugauagcuacugu

SEQ ID NO: 2728548 - RNA, 12 nt, Human
guuagaucuagu

SEQ ID NO: 2728549 - RNA, 20 nt, Human
guuaguaugaggcauuuguu

SEQ ID NO: 2728550 - RNA, 17 nt, Human
guuaguaugaggcauuu

SEQ ID NO: 2728551 - RNA, 17 nt, Human
gugugacuacuccccca

SEQ ID NO: 2728552 - RNA, 18 nt, Human
gugucuuuuuucacuaca

SEQ ID NO: 2728553 - RNA, 17 nt, Human
gugucuugcaauggcag

SEQ ID NO: 2728554 - RNA, 18 nt, Human
gugucuugcaauggcagc

SEQ ID NO: 2728555 - RNA, 23 nt, Human
guguuuccuggcacugcuuccag

SEQ ID NO: 2728556 - RNA, 18 nt, Human
guguuuccauauuuuaua

SEQ ID NO: 2728557 - RNA, 19 nt, Human
guguuguacucaauuuuaa

SEQ ID NO: 2728558 - RNA, 18 nt, Human
aagagguuuuaaaaaaau

SEQ ID NO: 2728559 - RNA, 18 nt, Human
aagagguuuuaaagcuuc

SEQ ID NO: 2728560 - RNA, 14 nt, Human
aagagguuuuaaag

SEQ ID NO: 2728561 - RNA, 20 nt, Human
guggugguuuucuguucuuu

SEQ ID NO: 2728562 - RNA, 17 nt, Human
gugguuuucuguucuuu

SEQ ID NO: 2728563 - RNA, 12 nt, Human
aagaugcagccg

SEQ ID NO: 2728564 - RNA, 14 nt, Human
aagaugugacaugu

SEQ ID NO: 2728565 - RNA, 18 nt, Human
aagaugugacauguuuua

SEQ ID NO: 2728566 - RNA, 12 nt, Human
aagcaaaggaga

SEQ ID NO: 2728567 - RNA, 13 nt, Human
aagcaaaggagau

SEQ ID NO: 2728568 - RNA, 19 nt, Human
aagagcuguucacagccag

SEQ ID NO: 2728569 - RNA, 22 nt, Human
aagacccuuguggucccacccc

SEQ ID NO: 2728570 - RNA, 18 nt, Human
aagacccuugugguccca

SEQ ID NO: 2728571 - RNA, 21 nt, Human
aagacccuuguggucccaccc

SEQ ID NO: 2728572 - RNA, 17 nt, Human
aagacuaucuaaauguu

SEQ ID NO: 2728573 - RNA, 16 nt, Human
aagacuaucuaaaugu

SEQ ID NO: 2728574 - RNA, 17 nt, Human
aagacuguacaaaguag

SEQ ID NO: 2728575 - RNA, 21 nt, Human
aagacugaguacguugugcau

SEQ ID NO: 2728576 - RNA, 18 nt, Human
aagacuaucuaaauguug

SEQ ID NO: 2728577 - RNA, 17 nt, Human
aagacugaguacguugu

SEQ ID NO: 2728578 - RNA, 21 nt, Human
gugggacagucaccucaugga

SEQ ID NO: 2728579 - RNA, 22 nt, Human
gugggacacccugugauggggc

SEQ ID NO: 2728580 - RNA, 23 nt, Human
guggcgcagcauauucaggaagc

SEQ ID NO: 2728581 - RNA, 22 nt, Human
guggcgcagcauauucaggaag

SEQ ID NO: 2728582 - RNA, 23 nt, Human
gugggaggaucucuugagccugg

SEQ ID NO: 2728583 - RNA, 13 nt, Human
gugggagugggcc

SEQ ID NO: 2728584 - RNA, 14 nt, Human
gugggagugggccc

SEQ ID NO: 2728585 - RNA, 13 nt, Human
gugggauccucca

SEQ ID NO: 2728586 - RNA, 14 nt, Human
guggguacgggagg

SEQ ID NO: 2728587 - RNA, 20 nt, Human
gugggggaucacagccucug

SEQ ID NO: 2728588 - RNA, 14 nt, Human
guggugguuuucug

SEQ ID NO: 2728589 - RNA, 16 nt, Human
gugguuucagaaaugu

SEQ ID NO: 2728590 - RNA, 18 nt, Human
gugcuaguaauuggaaag

SEQ ID NO: 2728591 - RNA, 21 nt, Human
gugcuaucucccccagcccca

SEQ ID NO: 2728592 - RNA, 17 nt, Human
gugcuaggaacacuccu

SEQ ID NO: 2728593 - RNA, 22 nt, Human
gugcuaggaacacuccuucaca

SEQ ID NO: 2728594 - RNA, 18 nt, Human
gugcuaggaacacuccuu

SEQ ID NO: 2728595 - RNA, 22 nt, Human
aagaaagacuaucuaaauguug

SEQ ID NO: 2728596 - RNA, 20 nt, Human
aagaaagacuaucuaaaugu

SEQ ID NO: 2728597 - RNA, 17 nt, Human
aagaaaaaggaugcaca

SEQ ID NO: 2728598 - RNA, 15 nt, Human
aagaaaaaggaugca

SEQ ID NO: 2728599 - RNA, 18 nt, Human
aagaaaaaggaugcacag

SEQ ID NO: 2728600 - RNA, 13 nt, Human
gugccucugggac

SEQ ID NO: 2728601 - RNA, 12 nt, Human
gugccucuggga

SEQ ID NO: 2728602 - RNA, 14 nt, Human
gugccuuauggaac

SEQ ID NO: 2728603 - RNA, 21 nt, Human
gugccuuauggaacacucuga

SEQ ID NO: 2728604 - RNA, 23 nt, Human
gugccuuauggaacacucugaga

SEQ ID NO: 2728605 - RNA, 22 nt, Human
gugccgagaaggaagccuccca

SEQ ID NO: 2728606 - RNA, 21 nt, Human
gugaaccaccacacccagccc

SEQ ID NO: 2728607 - RNA, 15 nt, Human
gugccucaagagaag

SEQ ID NO: 2728608 - RNA, 11 nt, Human
gugccuuaugg

SEQ ID NO: 2728609 - RNA, 17 nt, Human
aacuuggcgcugccccu

SEQ ID NO: 2728610 - RNA, 22 nt, Human
aacuugucuuuggacccugagg

SEQ ID NO: 2728611 - RNA, 18 nt, Human
aacuugucuuuggacccu

SEQ ID NO: 2728612 - RNA, 13 nt, Human
aacuuuaccuuuu

SEQ ID NO: 2728613 - RNA, 16 nt, Human
aagaaugauuaugaau

SEQ ID NO: 2728614 - RNA, 20 nt, Human
guggcagcucaccucucccu

SEQ ID NO: 2728615 - RNA, 14 nt, Human
guggcagcucaccu

SEQ ID NO: 2728616 - RNA, 16 nt, Human
guggcagcucaccucu

SEQ ID NO: 2728617 - RNA, 18 nt, Human
guggcaccagcagccugg

SEQ ID NO: 2728618 - RNA, 19 nt, Human
guggcaccagcagccugga

SEQ ID NO: 2728619 - RNA, 19 nt, Human
guggauuuaacagaaaugu

SEQ ID NO: 2728620 - RNA, 18 nt, Human
guggauuuaacagaaaug

SEQ ID NO: 2728621 - RNA, 18 nt, Human
aagaaugauuaugaauua

SEQ ID NO: 2728622 - RNA, 16 nt, Human
aagaauugaagcagga

SEQ ID NO: 2728623 - RNA, 22 nt, Human
aagaaugguccgugcuaaggac

SEQ ID NO: 2728624 - RNA, 19 nt, Human
aagaaugguccgugcuaag

SEQ ID NO: 2728625 - RNA, 16 nt, Human
aagacaaaaagcuacu

SEQ ID NO: 2728626 - RNA, 23 nt, Human
aagacaaaaagcuacuuauugua

SEQ ID NO: 2728627 - RNA, 20 nt, Human
aagacaaaaagcuacuuauu

SEQ ID NO: 2728628 - RNA, 12 nt, Human
gugcuauguucu

SEQ ID NO: 2728629 - RNA, 19 nt, Human
gugcuaucucccccagccc

SEQ ID NO: 2728630 - RNA, 22 nt, Human
gugcuaucucccccagccccau

SEQ ID NO: 2728631 - RNA, 21 nt, Human
gugcugggauuacaagcguga

SEQ ID NO: 2728632 - RNA, 22 nt, Human
gugcugggauuacaagcgugag

SEQ ID NO: 2728633 - RNA, 20 nt, Human
gugcugggauuacaggugug

SEQ ID NO: 2728634 - RNA, 23 nt, Human
guggacacagcucuucuccaggc

SEQ ID NO: 2728635 - RNA, 18 nt, Human
guggacacagcucuucuc

SEQ ID NO: 2728636 - RNA, 22 nt, Human
guggacacagcucuucuccagg

SEQ ID NO: 2728637 - RNA, 21 nt, Human
guggaugccugguggcagcug

SEQ ID NO: 2728638 - RNA, 21 nt, Human
aaugagagacacacugaagaa

SEQ ID NO: 2728639 - RNA, 15 nt, Human
aaugagccuggcaag

SEQ ID NO: 2728640 - RNA, 18 nt, Human
aaugacuuacuguacaug

SEQ ID NO: 2728641 - RNA, 17 nt, Human
aaugacuuacuguacau

SEQ ID NO: 2728642 - RNA, 14 nt, Human
aaugacuuacugua

SEQ ID NO: 2728643 - RNA, 16 nt, Human
uaaugauaacuggaaa

SEQ ID NO: 2728644 - RNA, 13 nt, Human
uaaugaggaaacu

SEQ ID NO: 2728645 - RNA, 14 nt, Human
uaaugguguuuuaa

SEQ ID NO: 2728646 - RNA, 20 nt, Human
aaucuuuaaaaaaaaaauug

SEQ ID NO: 2728647 - RNA, 19 nt, Human
aaucuuuaaaaaaaaaauu

SEQ ID NO: 2728648 - RNA, 19 nt, Human
uaaugaaagacuguacaaa

SEQ ID NO: 2728649 - RNA, 18 nt, Human
uaaugaaagacuguacaa

SEQ ID NO: 2728650 - RNA, 17 nt, Human
uaaugaaagacuguaca

SEQ ID NO: 2728651 - RNA, 14 nt, Human
uaaugaaagacugu

SEQ ID NO: 2728652 - RNA, 23 nt, Human
uaaugaaagacuguacaaaguag

SEQ ID NO: 2728653 - RNA, 22 nt, Human
uaaugaaagacuguacaaagua

SEQ ID NO: 2728654 - RNA, 15 nt, Human
uaaugacuuaagcac

SEQ ID NO: 2728655 - RNA, 21 nt, Human
uaaugacuuaagcacacuuga

SEQ ID NO: 2728656 - RNA, 23 nt, Human
uaaucagugugucuaaauuugaa

SEQ ID NO: 2728657 - RNA, 19 nt, Human
uaauagguuuggacaaaau

SEQ ID NO: 2728658 - RNA, 14 nt, Human
uaauagguuuggac

SEQ ID NO: 2728659 - RNA, 13 nt, Human
aaucuucugaacu

SEQ ID NO: 2728660 - RNA, 20 nt, Human
aaucuucugaacuuggcgcu

SEQ ID NO: 2728661 - RNA, 18 nt, Human
uaaguuuuuuuuuaaaaa

SEQ ID NO: 2728662 - RNA, 20 nt, Human
uaaguuuuuauggcuuuugu

SEQ ID NO: 2728663 - RNA, 14 nt, Human
uaaguucauacauu

SEQ ID NO: 2728664 - RNA, 13 nt, Human
uaaguucauacau

SEQ ID NO: 2728665 - RNA, 12 nt, Human
uaaguucauaca

SEQ ID NO: 2728666 - RNA, 19 nt, Human
uaaguacuauguaucaaug

SEQ ID NO: 2728667 - RNA, 20 nt, Human
uaaguauguguaaaauguga

SEQ ID NO: 2728668 - RNA, 23 nt, Human
aaucaugaauuaguuuuauaugc

SEQ ID NO: 2728669 - RNA, 19 nt, Human
aaucaugaauuaguuuuau

SEQ ID NO: 2728670 - RNA, 17 nt, Human
aaucaugaauuaguuuu

SEQ ID NO: 2728671 - RNA, 15 nt, Human
aaucaucaagucuuu

SEQ ID NO: 2728672 - RNA, 13 nt, Human
aauccuugaagau

SEQ ID NO: 2728673 - RNA, 12 nt, Human
aaucuaaaugga

SEQ ID NO: 2728674 - RNA, 18 nt, Human
aaucuaaauggaaccacu

SEQ ID NO: 2728675 - RNA, 15 nt, Human
aaucuaaauggaacc

SEQ ID NO: 2728676 - RNA, 13 nt, Human
aaucuaaauggaa

SEQ ID NO: 2728677 - RNA, 16 nt, Human
aaucuuauaauuuaaa

SEQ ID NO: 2728678 - RNA, 14 nt, Human
aaucuuauaauuua

SEQ ID NO: 2728679 - RNA, 19 nt, Human
aaucugugaacuugaaauu

SEQ ID NO: 2728680 - RNA, 18 nt, Human
aaucugugaacuugaaau

SEQ ID NO: 2728681 - RNA, 17 nt, Human
aaucugugaacuugaaa

SEQ ID NO: 2728682 - RNA, 15 nt, Human
aaucugugaacuuga

SEQ ID NO: 2728683 - RNA, 13 nt, Human
aaucugugaacuu

SEQ ID NO: 2728684 - RNA, 13 nt, Human
aaucucaaauaac

SEQ ID NO: 2728685 - RNA, 15 nt, Human
aaucucaaauaacua

SEQ ID NO: 2728686 - RNA, 12 nt, Human
aaucucaaauuu

SEQ ID NO: 2728687 - RNA, 14 nt, Human
aaucucaaauuucu

SEQ ID NO: 2728688 - RNA, 15 nt, Human
uacaaaaacacagca

SEQ ID NO: 2728689 - RNA, 15 nt, Human
uacaaaaagcauaaa

SEQ ID NO: 2728690 - RNA, 20 nt, Human
uacaaaaagcauaaaaauua

SEQ ID NO: 2728691 - RNA, 15 nt, Human
uacaaaagcauguga

SEQ ID NO: 2728692 - RNA, 14 nt, Human
uacaaaaacacagc

SEQ ID NO: 2728693 - RNA, 13 nt, Human
uacaaaaacacag

SEQ ID NO: 2728694 - RNA, 14 nt, Human
aaugagccuggcaa

SEQ ID NO: 2728695 - RNA, 13 nt, Human
uaauucaagaaaa

SEQ ID NO: 2728696 - RNA, 17 nt, Human
uaauuuauacaggucau

SEQ ID NO: 2728697 - RNA, 18 nt, Human
aauggaagacagcucuua

SEQ ID NO: 2728698 - RNA, 16 nt, Human
aauggacguguuauga

SEQ ID NO: 2728699 - RNA, 12 nt, Human
aaugcuguguua

SEQ ID NO: 2728700 - RNA, 13 nt, Human
aaugcugugcccu

SEQ ID NO: 2728701 - RNA, 21 nt, Human
aaugccccugaauuuaaauag

SEQ ID NO: 2728702 - RNA, 21 nt, Human
aaugcugugcccuaaagugua

SEQ ID NO: 2728703 - RNA, 20 nt, Human
aaugcugugcccuaaagugu

SEQ ID NO: 2728704 - RNA, 20 nt, Human
aaugcccagccccuucugac

SEQ ID NO: 2728705 - RNA, 22 nt, Human
aaugcccagccccuucugaccc

SEQ ID NO: 2728706 - RNA, 23 nt, Human
aaugcccagccccuucugaccca

SEQ ID NO: 2728707 - RNA, 24 nt, Human
aaugcccagccccuucugacccau

SEQ ID NO: 2728708 - RNA, 13 nt, Human
aaugcccagcccc

SEQ ID NO: 2728709 - RNA, 14 nt, Human
aaugcccagccccu

SEQ ID NO: 2728710 - RNA, 15 nt, Human
aaugcccagccccuu

SEQ ID NO: 2728711 - RNA, 19 nt, Human
uacacuaagagagaaugag

SEQ ID NO: 2728712 - RNA, 18 nt, Human
uacagaggccaugggccu

SEQ ID NO: 2728713 - RNA, 23 nt, Human
uacagagcccacgcccccacugg

SEQ ID NO: 2728714 - RNA, 14 nt, Human
uacaguauaauuaa

SEQ ID NO: 2728715 - RNA, 17 nt, Human
uacaguauaauuaacau

SEQ ID NO: 2728716 - RNA, 16 nt, Human
uacaguauaauuaaca

SEQ ID NO: 2728717 - RNA, 19 nt, Human
aauggacuuuuguacauag

SEQ ID NO: 2728718 - RNA, 20 nt, Human
aauggacuguggugacuuug

SEQ ID NO: 2728719 - RNA, 20 nt, Human
uacaccacuacauucuguua

SEQ ID NO: 2728720 - RNA, 19 nt, Human
uacaccacuacauucuguu

SEQ ID NO: 2728721 - RNA, 18 nt, Human
uacaccacuacauucugu

SEQ ID NO: 2728722 - RNA, 17 nt, Human
uacaccacuacauucug

SEQ ID NO: 2728723 - RNA, 16 nt, Human
uacaccacuacauucu

SEQ ID NO: 2728724 - RNA, 15 nt, Human
uacaccacuacauuc

SEQ ID NO: 2728725 - RNA, 14 nt, Human
aauguauguguaag

SEQ ID NO: 2728726 - RNA, 12 nt, Human
aauguaugugua

SEQ ID NO: 2728727 - RNA, 18 nt, Human
aauguacugcauaugaaa

SEQ ID NO: 2728728 - RNA, 14 nt, Human
aauguacugcauau

SEQ ID NO: 2728729 - RNA, 20 nt, Human
uacauaaugcgugcauacca

SEQ ID NO: 2728730 - RNA, 19 nt, Human
uacauaaugcgugcauacc

SEQ ID NO: 2728731 - RNA, 15 nt, Human
uacaguaucucaggg

SEQ ID NO: 2728732 - RNA, 17 nt, Human
uacauaaugcgugcaua

SEQ ID NO: 2728733 - RNA, 23 nt, Human
uacaguauaauuaacauguuaaa

SEQ ID NO: 2728734 - RNA, 19 nt, Human
uacaguauaauuaacaugu

SEQ ID NO: 2728735 - RNA, 18 nt, Human
uacaguauaauuaacaug

SEQ ID NO: 2728736 - RNA, 12 nt, Human
aauguacugcau

SEQ ID NO: 2728737 - RNA, 17 nt, Human
uacauauuuuuguagca

SEQ ID NO: 2728738 - RNA, 18 nt, Human
uacauauuuuuguagcac

SEQ ID NO: 2728739 - RNA, 20 nt, Human
aauaauuuuuauauuugaaa

SEQ ID NO: 2728740 - RNA, 14 nt, Human
uaaauaaauagcua

SEQ ID NO: 2728741 - RNA, 17 nt, Human
uaaauaaauaaauagcu

SEQ ID NO: 2728742 - RNA, 19 nt, Human
uaaauaaugugaaacugga

SEQ ID NO: 2728743 - RNA, 17 nt, Human
aauaauuuuuauauuug

SEQ ID NO: 2728744 - RNA, 19 nt, Human
aauaauuuuuauauuugaa

SEQ ID NO: 2728745 - RNA, 16 nt, Human
aauaauuuuuauauuu

SEQ ID NO: 2728746 - RNA, 21 nt, Human
aauaauuuuaagaaaucaaag

SEQ ID NO: 2728747 - RNA, 20 nt, Human
aauaacugugaaguuuacau

SEQ ID NO: 2728748 - RNA, 14 nt, Human
aauaacugugaagu

SEQ ID NO: 2728749 - RNA, 16 nt, Human
aauaacugugaaguuu

SEQ ID NO: 2728750 - RNA, 14 nt, Human
uaaauuaacuuuua

SEQ ID NO: 2728751 - RNA, 12 nt, Human
uaaauuaacuuu

SEQ ID NO: 2728752 - RNA, 16 nt, Human
uaaauuaacuuuuaua

SEQ ID NO: 2728753 - RNA, 15 nt, Human
uaaauuaacuuuuau

SEQ ID NO: 2728754 - RNA, 17 nt, Human
uaaauuaacuuuuauaa

SEQ ID NO: 2728755 - RNA, 18 nt, Human
uaaauuaacuuuuauaaa

SEQ ID NO: 2728756 - RNA, 17 nt, Human
uaaauuuugaguucuac

SEQ ID NO: 2728757 - RNA, 20 nt, Human
uaaauguugaaagaucaaaa

SEQ ID NO: 2728758 - RNA, 15 nt, Human
uaaauguugaaagau

SEQ ID NO: 2728759 - RNA, 23 nt, Human
uaaaugcaccuggaauauauaac

SEQ ID NO: 2728760 - RNA, 22 nt, Human
uaaaucugugaacuugaaauuu

SEQ ID NO: 2728761 - RNA, 21 nt, Human
uaaaucugugaacuugaaauu

SEQ ID NO: 2728762 - RNA, 19 nt, Human
uaaaucugugaacuugaaa

SEQ ID NO: 2728763 - RNA, 18 nt, Human
uaaaucugugaacuugaa

SEQ ID NO: 2728764 - RNA, 17 nt, Human
uaaaucugugaacuuga

SEQ ID NO: 2728765 - RNA, 22 nt, Human
uaaaucuccaaaauaaaacuuu

SEQ ID NO: 2728766 - RNA, 16 nt, Human
uaaaucugugaacuug

SEQ ID NO: 2728767 - RNA, 15 nt, Human
uaaaucugugaacuu

SEQ ID NO: 2728768 - RNA, 14 nt, Human
uaaaucuccaaaau

SEQ ID NO: 2728769 - RNA, 18 nt, Human
uaaaucuccaaaauaaaa

SEQ ID NO: 2728770 - RNA, 15 nt, Human
uaaaucuccaaaaua

SEQ ID NO: 2728771 - RNA, 18 nt, Human
uaaauagcuagacuggug

SEQ ID NO: 2728772 - RNA, 21 nt, Human
aauaacaaugaaaguugauaa

SEQ ID NO: 2728773 - RNA, 13 nt, Human
aauaacugugaag

SEQ ID NO: 2728774 - RNA, 22 nt, Human
aauaacauguaauuaaguacua

SEQ ID NO: 2728775 - RNA, 18 nt, Human
aauaaaacuuuuuaaaau

SEQ ID NO: 2728776 - RNA, 12 nt, Human
aauaaaacuuuu

SEQ ID NO: 2728777 - RNA, 15 nt, Human
aauaaaacuuuuuaa

SEQ ID NO: 2728778 - RNA, 14 nt, Human
aauaaaacuuuuua

SEQ ID NO: 2728779 - RNA, 16 nt, Human
aauaaaucauaaaacu

SEQ ID NO: 2728780 - RNA, 20 nt, Human
aaguuuuuauggcuuuugug

SEQ ID NO: 2728781 - RNA, 20 nt, Human
aauaucugaaaauguaugug

SEQ ID NO: 2728782 - RNA, 16 nt, Human
aauaucuccgucaacu

SEQ ID NO: 2728783 - RNA, 21 nt, Human
aauaucuccgucaacucauau

SEQ ID NO: 2728784 - RNA, 19 nt, Human
aauaucugaaaauguaugu

SEQ ID NO: 2728785 - RNA, 18 nt, Human
aauaucugaaaauguaug

SEQ ID NO: 2728786 - RNA, 17 nt, Human
aauaucugaaaauguau

SEQ ID NO: 2728787 - RNA, 16 nt, Human
aauaucugaaaaugua

SEQ ID NO: 2728788 - RNA, 15 nt, Human
uaacuuuuauaaacu

SEQ ID NO: 2728789 - RNA, 18 nt, Human
uaacuuuuauaaacuuua

SEQ ID NO: 2728790 - RNA, 17 nt, Human
uaacuuuuauaaacuuu

SEQ ID NO: 2728791 - RNA, 15 nt, Human
aauauuucagauaau

SEQ ID NO: 2728792 - RNA, 14 nt, Human
aauauuucagauaa

SEQ ID NO: 2728793 - RNA, 18 nt, Human
aauauuguguugugaaug

SEQ ID NO: 2728794 - RNA, 20 nt, Human
aauauugcuuuggucauaug

SEQ ID NO: 2728795 - RNA, 18 nt, Human
aauauuuuaugauccagc

SEQ ID NO: 2728796 - RNA, 17 nt, Human
aauauuuuaugauccag

SEQ ID NO: 2728797 - RNA, 24 nt, Human
aauaugcaaagcacugacuucuaa

SEQ ID NO: 2728798 - RNA, 15 nt, Human
aauaugcacacauuu

SEQ ID NO: 2728799 - RNA, 17 nt, Human
aauauugauaugcuuau

SEQ ID NO: 2728800 - RNA, 18 nt, Human
aauauugauaugcuuaua

SEQ ID NO: 2728801 - RNA, 17 nt, Human
aauaugcaaagcacuga

SEQ ID NO: 2728802 - RNA, 15 nt, Human
aauaugcaaagcacu

SEQ ID NO: 2728803 - RNA, 11 nt, Human
aauauugcuga

SEQ ID NO: 2728804 - RNA, 12 nt, Human
aauauugcugau

SEQ ID NO: 2728805 - RNA, 13 nt, Human
aauauugcugaug

SEQ ID NO: 2728806 - RNA, 15 nt, Human
aauauugcugauggu

SEQ ID NO: 2728807 - RNA, 18 nt, Human
aauauugcugauggugca

SEQ ID NO: 2728808 - RNA, 21 nt, Human
aauauugcugauggugcaaug

SEQ ID NO: 2728809 - RNA, 22 nt, Human
aauauugcugauggugcaauga

SEQ ID NO: 2728810 - RNA, 15 nt, Human
aauaucacuugucaa

SEQ ID NO: 2728811 - RNA, 12 nt, Human
aauaucacuugu

SEQ ID NO: 2728812 - RNA, 15 nt, Human
aauaguauuugagag

SEQ ID NO: 2728813 - RNA, 14 nt, Human
uaacauggaaguac

SEQ ID NO: 2728814 - RNA, 14 nt, Human
uaacauaaaucugu

SEQ ID NO: 2728815 - RNA, 15 nt, Human
uaacauaaaucugug

SEQ ID NO: 2728816 - RNA, 20 nt, Human
uaacauaaaucugugaacuu

SEQ ID NO: 2728817 - RNA, 18 nt, Human
uaacauaaaucugugaac

SEQ ID NO: 2728818 - RNA, 17 nt, Human
uaacauaaaucugugaa

SEQ ID NO: 2728819 - RNA, 16 nt, Human
uaacauaaaucuguga

SEQ ID NO: 2728820 - RNA, 16 nt, Human
uaacauggaaguacua

SEQ ID NO: 2728821 - RNA, 15 nt, Human
uaacauggaaguacu

SEQ ID NO: 2728822 - RNA, 16 nt, Human
uaaccucuaaauucuu

SEQ ID NO: 2728823 - RNA, 15 nt, Human
uaacuaaaagguaug

SEQ ID NO: 2728824 - RNA, 14 nt, Human
uaacuaaaagguau

SEQ ID NO: 2728825 - RNA, 18 nt, Human
aauaggcguaacuaauuu

SEQ ID NO: 2728826 - RNA, 24 nt, Human
aauagcuuuuuucucugauacaga

SEQ ID NO: 2728827 - RNA, 19 nt, Human
aauaggaaaaacugauuuu

SEQ ID NO: 2728828 - RNA, 17 nt, Human
aauaggaaaaacugauu

SEQ ID NO: 2728829 - RNA, 18 nt, Human
aauaggaaaaacugauuu

SEQ ID NO: 2728830 - RNA, 15 nt, Human
aauaggaaaaacuga

SEQ ID NO: 2728831 - RNA, 16 nt, Human
aauaggaaaaacugau

SEQ ID NO: 2728832 - RNA, 18 nt, Human
aauagacaauuuauuaug

SEQ ID NO: 2728833 - RNA, 20 nt, Human
uaaauuuugucuuuaacuca

SEQ ID NO: 2728834 - RNA, 18 nt, Human
uaaauuuugaguucuaca

SEQ ID NO: 2728835 - RNA, 19 nt, Human
uaaauuuugaguucuacau

SEQ ID NO: 2728836 - RNA, 23 nt, Human
aauagacaauuuauuauggcaca

SEQ ID NO: 2728837 - RNA, 20 nt, Human
aauagccugccucuucucua

SEQ ID NO: 2728838 - RNA, 13 nt, Human
aauagcugggacu

SEQ ID NO: 2728839 - RNA, 14 nt, Human
aauagcugggacua

SEQ ID NO: 2728840 - RNA, 16 nt, Human
uagcuacuaauuuuaa

SEQ ID NO: 2728841 - RNA, 18 nt, Human
acaaugaagauaaaaaga

SEQ ID NO: 2728842 - RNA, 18 nt, Human
uagcuagacuggugacug

SEQ ID NO: 2728843 - RNA, 15 nt, Human
uagcuagacugguga

SEQ ID NO: 2728844 - RNA, 16 nt, Human
uagcucaggugucccu

SEQ ID NO: 2728845 - RNA, 22 nt, Human
acaagcuccaagcucccaggca

SEQ ID NO: 2728846 - RNA, 15 nt, Human
acaagcuccaagcuc

SEQ ID NO: 2728847 - RNA, 16 nt, Human
acaagcuccaagcucc

SEQ ID NO: 2728848 - RNA, 17 nt, Human
acaagcuccaagcuccc

SEQ ID NO: 2728849 - RNA, 19 nt, Human
acaagcuccaagcucccag

SEQ ID NO: 2728850 - RNA, 15 nt, Human
acaacagcuggugcc

SEQ ID NO: 2728851 - RNA, 17 nt, Human
acaacaucuuuuucuac

SEQ ID NO: 2728852 - RNA, 22 nt, Human
acaagcucacagaccuuugaac

SEQ ID NO: 2728853 - RNA, 13 nt, Human
acaagcuccaagc

SEQ ID NO: 2728854 - RNA, 17 nt, Human
acaagcgugagccacug

SEQ ID NO: 2728855 - RNA, 16 nt, Human
acaagaccacguuucu

SEQ ID NO: 2728856 - RNA, 17 nt, Human
acaagaccacguuucua

SEQ ID NO: 2728857 - RNA, 17 nt, Human
acaagaugguucuagca

SEQ ID NO: 2728858 - RNA, 22 nt, Human
acaagagcccaggccuccuaca

SEQ ID NO: 2728859 - RNA, 22 nt, Human
aauuuuuucucuaggaaauauu

SEQ ID NO: 2728860 - RNA, 22 nt, Human
aauuuuuuuaucgucacugcuu

SEQ ID NO: 2728861 - RNA, 21 nt, Human
aauuuuucuuauuucauuucu

SEQ ID NO: 2728862 - RNA, 15 nt, Human
aauuuuguuucugua

SEQ ID NO: 2728863 - RNA, 16 nt, Human
aauuuuguuucuguac

SEQ ID NO: 2728864 - RNA, 20 nt, Human
uacuuuuuggcauaacauaa

SEQ ID NO: 2728865 - RNA, 19 nt, Human
uacuuuuuggcauaacaua

SEQ ID NO: 2728866 - RNA, 22 nt, Human
uacuuugugcugggguuaucug

SEQ ID NO: 2728867 - RNA, 16 nt, Human
uacuuugugcuggggu

SEQ ID NO: 2728868 - RNA, 14 nt, Human
uacuuuuuggcaua

SEQ ID NO: 2728869 - RNA, 13 nt, Human
aauuugguuuuca

SEQ ID NO: 2728870 - RNA, 20 nt, Human
aauuugugauacaaugcugu

SEQ ID NO: 2728871 - RNA, 21 nt, Human
aauuugguuuucacauuggaa

SEQ ID NO: 2728872 - RNA, 15 nt, Human
aauuugguuuucaca

SEQ ID NO: 2728873 - RNA, 16 nt, Human
aauuuguuauaaugaa

SEQ ID NO: 2728874 - RNA, 21 nt, Human
uagaugcaguucugaagaaga

SEQ ID NO: 2728875 - RNA, 20 nt, Human
uagaugcaguucugaagaag

SEQ ID NO: 2728876 - RNA, 14 nt, Human
uagaucuaguucac

SEQ ID NO: 2728877 - RNA, 22 nt, Human
uagauaggucagugcaaauacu

SEQ ID NO: 2728878 - RNA, 17 nt, Human
uagauaggccaugggca

SEQ ID NO: 2728879 - RNA, 20 nt, Human
acaaaguauuaagcauauau

SEQ ID NO: 2728880 - RNA, 21 nt, Human
acaaagcgugguggacaugca

SEQ ID NO: 2728881 - RNA, 14 nt, Human
acaaaacuuuucua

SEQ ID NO: 2728882 - RNA, 16 nt, Human
uacuucaugcugucua

SEQ ID NO: 2728883 - RNA, 13 nt, Human
uacuucuccaccc

SEQ ID NO: 2728884 - RNA, 18 nt, Human
uacuucuccacccugcuc

SEQ ID NO: 2728885 - RNA, 19 nt, Human
uacuucuuaggguuaugau

SEQ ID NO: 2728886 - RNA, 15 nt, Human
uacuucugcuacaua

SEQ ID NO: 2728887 - RNA, 20 nt, Human
uacuucuccacccugcucuc

SEQ ID NO: 2728888 - RNA, 16 nt, Human
uacuucuuauacauuu

SEQ ID NO: 2728889 - RNA, 15 nt, Human
uacuucuuauacauu

SEQ ID NO: 2728890 - RNA, 14 nt, Human
uacuucuuauacau

SEQ ID NO: 2728891 - RNA, 15 nt, Human
aauuuaccugaaguc

SEQ ID NO: 2728892 - RNA, 15 nt, Human
aauuuacauacucug

SEQ ID NO: 2728893 - RNA, 17 nt, Human
aauuuaccugaagucuu

SEQ ID NO: 2728894 - RNA, 13 nt, Human
aauuuaguauuuu

SEQ ID NO: 2728895 - RNA, 19 nt, Human
aauuucucccagucauuua

SEQ ID NO: 2728896 - RNA, 23 nt, Human
aauuucuaggacugaauuaugaa

SEQ ID NO: 2728897 - RNA, 14 nt, Human
aauuuauuauggca

SEQ ID NO: 2728898 - RNA, 13 nt, Human
aauuuauuauggc

SEQ ID NO: 2728899 - RNA, 17 nt, Human
aauuucuaggacugaau

SEQ ID NO: 2728900 - RNA, 22 nt, Human
aauuucuaggacugaauuauga

SEQ ID NO: 2728901 - RNA, 18 nt, Human
aauuucuaggacugaauu

SEQ ID NO: 2728902 - RNA, 16 nt, Human
aauuuauacaggucau

SEQ ID NO: 2728903 - RNA, 17 nt, Human
aauuuauacaggucaua

SEQ ID NO: 2728904 - RNA, 18 nt, Human
aauugaggacacugauau

SEQ ID NO: 2728905 - RNA, 22 nt, Human
uacugaaauaaacgucuuaaau

SEQ ID NO: 2728906 - RNA, 19 nt, Human
uacugaaauaaacgucuua

SEQ ID NO: 2728907 - RNA, 15 nt, Human
uacuguaauuuguga

SEQ ID NO: 2728908 - RNA, 17 nt, Human
uacuguaauuugugaua

SEQ ID NO: 2728909 - RNA, 16 nt, Human
uacuguaauuugugau

SEQ ID NO: 2728910 - RNA, 13 nt, Human
uacgugaguccug

SEQ ID NO: 2728911 - RNA, 16 nt, Human
uacgucugacaggcaa

SEQ ID NO: 2728912 - RNA, 16 nt, Human
uacucuacccucuuag

SEQ ID NO: 2728913 - RNA, 22 nt, Human
uacucuacccucuuagaaaaac

SEQ ID NO: 2728914 - RNA, 15 nt, Human
uacgucugacaggca

SEQ ID NO: 2728915 - RNA, 13 nt, Human
acacacugaagaa

SEQ ID NO: 2728916 - RNA, 20 nt, Human
acacacucaaaucaagaaac

SEQ ID NO: 2728917 - RNA, 19 nt, Human
acacacagcucuguccugg

SEQ ID NO: 2728918 - RNA, 11 nt, Human
acacacagcuc

SEQ ID NO: 2728919 - RNA, 12 nt, Human
acacacagcucu

SEQ ID NO: 2728920 - RNA, 14 nt, Human
acacaacuauauug

SEQ ID NO: 2728921 - RNA, 17 nt, Human
acacaacuauauuguuu

SEQ ID NO: 2728922 - RNA, 21 nt, Human
acaaugguuuucuuguguguu

SEQ ID NO: 2728923 - RNA, 18 nt, Human
acacaacuauuuuuccaa

SEQ ID NO: 2728924 - RNA, 14 nt, Human
acaaugcuguauuu

SEQ ID NO: 2728925 - RNA, 17 nt, Human
acaaugcuguauuuuaa

SEQ ID NO: 2728926 - RNA, 15 nt, Human
acaaugguuuucuug

SEQ ID NO: 2728927 - RNA, 14 nt, Human
acacacugaagaag

SEQ ID NO: 2728928 - RNA, 22 nt, Human
acacagcucuucuccaggcugu

SEQ ID NO: 2728929 - RNA, 11 nt, Human
acacagugagu

SEQ ID NO: 2728930 - RNA, 14 nt, Human
uaguaauagagcaa

SEQ ID NO: 2728931 - RNA, 21 nt, Human
uagguuggcaaaaaggcagga

SEQ ID NO: 2728932 - RNA, 16 nt, Human
uaguguuggagaagaa

SEQ ID NO: 2728933 - RNA, 17 nt, Human
uaguguuggagaagaac

SEQ ID NO: 2728934 - RNA, 12 nt, Human
uaguguuggaga

SEQ ID NO: 2728935 - RNA, 22 nt, Human
uagucuugucucagauuuuauu

SEQ ID NO: 2728936 - RNA, 17 nt, Human
uagucuugucucagauu

SEQ ID NO: 2728937 - RNA, 13 nt, Human
uaguagagacagg

SEQ ID NO: 2728938 - RNA, 20 nt, Human
uaguaauagagcaaaauuga

SEQ ID NO: 2728939 - RNA, 17 nt, Human
acacuaagagagaauga

SEQ ID NO: 2728940 - RNA, 19 nt, Human
acacuaaccacgcuggacc

SEQ ID NO: 2728941 - RNA, 16 nt, Human
acacuaaccacgcugg

SEQ ID NO: 2728942 - RNA, 17 nt, Human
acacuaaccacgcugga

SEQ ID NO: 2728943 - RNA, 18 nt, Human
acacuaagagagaaugag

SEQ ID NO: 2728944 - RNA, 19 nt, Human
acacuaagagagaaugaga

SEQ ID NO: 2728945 - RNA, 22 nt, Human
uauaaccaguguuguggauuua

SEQ ID NO: 2728946 - RNA, 18 nt, Human
acaccucugcacaagcug

SEQ ID NO: 2728947 - RNA, 14 nt, Human
acaccuugacaggg

SEQ ID NO: 2728948 - RNA, 15 nt, Human
acaccuugacagggc

SEQ ID NO: 2728949 - RNA, 16 nt, Human
acaccuugacagggca

SEQ ID NO: 2728950 - RNA, 13 nt, Human
acacauguccaag

SEQ ID NO: 2728951 - RNA, 18 nt, Human
acacauguccaagaagcc

SEQ ID NO: 2728952 - RNA, 19 nt, Human
acacauguccaagaagccc

SEQ ID NO: 2728953 - RNA, 12 nt, Human
acacccagccca

SEQ ID NO: 2728954 - RNA, 13 nt, Human
acacccagcccac

SEQ ID NO: 2728955 - RNA, 21 nt, Human
acacauguccaagaagcccag

SEQ ID NO: 2728956 - RNA, 22 nt, Human
acacauguccaagaagcccagg

SEQ ID NO: 2728957 - RNA, 23 nt, Human
uauaaaauaauuuuuauauuuga

SEQ ID NO: 2728958 - RNA, 18 nt, Human
uaguucagguaacaggca

SEQ ID NO: 2728959 - RNA, 13 nt, Human
acacuccuucaca

SEQ ID NO: 2728960 - RNA, 11 nt, Human
acacucugaga

SEQ ID NO: 2728961 - RNA, 13 nt, Human
acacucugagacu

SEQ ID NO: 2728962 - RNA, 16 nt, Human
uauaaguauucuaaau

SEQ ID NO: 2728963 - RNA, 12 nt, Human
acacugaagaag

SEQ ID NO: 2728964 - RNA, 14 nt, Human
acacugaagaagca

SEQ ID NO: 2728965 - RNA, 14 nt, Human
acacuguucucugc

SEQ ID NO: 2728966 - RNA, 15 nt, Human
acacuguucucugcc

SEQ ID NO: 2728967 - RNA, 22 nt, Human
acacuguucucugcccuccaag

SEQ ID NO: 2728968 - RNA, 23 nt, Human
acacuguucucugcccuccaaga

SEQ ID NO: 2728969 - RNA, 16 nt, Human
acacuguucucugccc

SEQ ID NO: 2728970 - RNA, 17 nt, Human
acacuguucucugcccu

SEQ ID NO: 2728971 - RNA, 18 nt, Human
acacuguucucugcccuc

SEQ ID NO: 2728972 - RNA, 20 nt, Human
acacuguucucugcccucca

SEQ ID NO: 2728973 - RNA, 12 nt, Human
uauauuuacaaa

SEQ ID NO: 2728974 - RNA, 15 nt, Human
uauauuuaaugauaa

SEQ ID NO: 2728975 - RNA, 17 nt, Human
acagacuggaagcacag

SEQ ID NO: 2728976 - RNA, 19 nt, Human
acagacuggaagcacagcu

SEQ ID NO: 2728977 - RNA, 21 nt, Human
acagacuggaagcacagcuuc

SEQ ID NO: 2728978 - RNA, 18 nt, Human
acagacacaggcccggcu

SEQ ID NO: 2728979 - RNA, 22 nt, Human
acagacacaggcccggcuccag

SEQ ID NO: 2728980 - RNA, 17 nt, Human
acagacacaggcccggc

SEQ ID NO: 2728981 - RNA, 15 nt, Human
acagacacaggcccg

SEQ ID NO: 2728982 - RNA, 15 nt, Human
acacuguuucaaacu

SEQ ID NO: 2728983 - RNA, 23 nt, Human
acacuguuucaaacuuuacuaug

SEQ ID NO: 2728984 - RNA, 18 nt, Human
acagaaaauucuucucca

SEQ ID NO: 2728985 - RNA, 20 nt, Human
acagcccuucuuuccacaga

SEQ ID NO: 2728986 - RNA, 21 nt, Human
acagcccuucuuuccacagaa

SEQ ID NO: 2728987 - RNA, 23 nt, Human
acagcccgggcucugccucccau

SEQ ID NO: 2728988 - RNA, 21 nt, Human
acagcccgggcucugccuccc

SEQ ID NO: 2728989 - RNA, 22 nt, Human
acagcccgggcucugccuccca

SEQ ID NO: 2728990 - RNA, 16 nt, Human
uaucuuguagcuuuau

SEQ ID NO: 2728991 - RNA, 14 nt, Human
acagauaaucagug

SEQ ID NO: 2728992 - RNA, 15 nt, Human
acagaguuguuacau

SEQ ID NO: 2728993 - RNA, 22 nt, Human
acagaguuguuacauuuuuaag

SEQ ID NO: 2728994 - RNA, 21 nt, Human
acagaguuguuacauuuuuaa

SEQ ID NO: 2728995 - RNA, 20 nt, Human
acagauagauauaugcucug

SEQ ID NO: 2728996 - RNA, 23 nt, Human
acagaugggugcuuggaggaagg

SEQ ID NO: 2728997 - RNA, 19 nt, Human
uauauuuauuacuguaaga

SEQ ID NO: 2728998 - RNA, 15 nt, Human
uauauuuauuacugu

SEQ ID NO: 2728999 - RNA, 20 nt, Human
uaucccuacuguaauuugug

SEQ ID NO: 2729000 - RNA, 19 nt, Human
uaucccuacuguaauuugu

SEQ ID NO: 2729001 - RNA, 13 nt, Human
uaucucagggccu

SEQ ID NO: 2729002 - RNA, 15 nt, Human
uaucucagggccugg

SEQ ID NO: 2729003 - RNA, 21 nt, Human
acagagcaagugagacccugu

SEQ ID NO: 2729004 - RNA, 16 nt, Human
acagaguuguuacauu

SEQ ID NO: 2729005 - RNA, 20 nt, Human
acagaguuguuacauuuuua

SEQ ID NO: 2729006 - RNA, 19 nt, Human
acagaguuguuacauuuuu

SEQ ID NO: 2729007 - RNA, 18 nt, Human
acagaguuguuacauuuu

SEQ ID NO: 2729008 - RNA, 17 nt, Human
acagaguuguuacauuu

SEQ ID NO: 2729009 - RNA, 19 nt, Human
acaugagcaucaggccagg

SEQ ID NO: 2729010 - RNA, 17 nt, Human
acaugagcaucaggcca

SEQ ID NO: 2729011 - RNA, 18 nt, Human
acaugagcaucaggccag

SEQ ID NO: 2729012 - RNA, 17 nt, Human
acaugaucuucuuuaua

SEQ ID NO: 2729013 - RNA, 15 nt, Human
acaugaucuucuuua

SEQ ID NO: 2729014 - RNA, 20 nt, Human
acaugagcaucaggccaggc

SEQ ID NO: 2729015 - RNA, 22 nt, Human
acaugcuacacacugcauguuu

SEQ ID NO: 2729016 - RNA, 18 nt, Human
ucaaauaacuaaaaggua

SEQ ID NO: 2729017 - RNA, 14 nt, Human
ucaaagcugaaaug

SEQ ID NO: 2729018 - RNA, 22 nt, Human
ucaaaguugccuaaauccauuu

SEQ ID NO: 2729019 - RNA, 21 nt, Human
ucaaaguugccuaaauccauu

SEQ ID NO: 2729020 - RNA, 19 nt, Human
ucaaaguugccuaaaucca

SEQ ID NO: 2729021 - RNA, 18 nt, Human
ucaaaguugccuaaaucc

SEQ ID NO: 2729022 - RNA, 17 nt, Human
ucaaagggugaaaauua

SEQ ID NO: 2729023 - RNA, 19 nt, Human
uauuuuugacagaauaugu

SEQ ID NO: 2729024 - RNA, 23 nt, Human
uauuuuugacagaauauguuuca

SEQ ID NO: 2729025 - RNA, 13 nt, Human
uauuuuugacaga

SEQ ID NO: 2729026 - RNA, 14 nt, Human
uauuuuugacagaa

SEQ ID NO: 2729027 - RNA, 15 nt, Human
uauuuuugacagaau

SEQ ID NO: 2729028 - RNA, 16 nt, Human
uauuuuuauauuuacu

SEQ ID NO: 2729029 - RNA, 21 nt, Human
ucaaaauaccaugccauuuaa

SEQ ID NO: 2729030 - RNA, 23 nt, Human
ucaaaauaccaugccauuuaaag

SEQ ID NO: 2729031 - RNA, 21 nt, Human
ucaaaauaugccccauucaac

SEQ ID NO: 2729032 - RNA, 14 nt, Human
ucaaaaugucuaag

SEQ ID NO: 2729033 - RNA, 19 nt, Human
acauguccaagaagcccag

SEQ ID NO: 2729034 - RNA, 21 nt, Human
acauguccaagaagcccagga

SEQ ID NO: 2729035 - RNA, 17 nt, Human
ucaaauuucuaaaucuc

SEQ ID NO: 2729036 - RNA, 16 nt, Human
ucaacagguuuuccug

SEQ ID NO: 2729037 - RNA, 12 nt, Human
acauucuguuaa

SEQ ID NO: 2729038 - RNA, 14 nt, Human
ucaaauuucuaaau

SEQ ID NO: 2729039 - RNA, 15 nt, Human
acauucuguuaauca

SEQ ID NO: 2729040 - RNA, 16 nt, Human
ucaaauuucuaaaucu

SEQ ID NO: 2729041 - RNA, 15 nt, Human
ucaaauuucuaaauc

SEQ ID NO: 2729042 - RNA, 22 nt, Human
ucaagaugaugaugaucuuuaa

SEQ ID NO: 2729043 - RNA, 11 nt, Human
ucaaguauuau

SEQ ID NO: 2729044 - RNA, 15 nt, Human
ucaaguauuauaccu

SEQ ID NO: 2729045 - RNA, 23 nt, Human
ucaaguauuauaccuuuuuuaga

SEQ ID NO: 2729046 - RNA, 21 nt, Human
ucaaguauuauaccuuuuuua

SEQ ID NO: 2729047 - RNA, 16 nt, Human
ucaaguauuauaccuu

SEQ ID NO: 2729048 - RNA, 15 nt, Human
acaguuuucugagaa

SEQ ID NO: 2729049 - RNA, 17 nt, Human
acaguuuucugagaaag

SEQ ID NO: 2729050 - RNA, 16 nt, Human
acaguuuucugagaaa

SEQ ID NO: 2729051 - RNA, 20 nt, Human
acaguuuguuaguaugaggc

SEQ ID NO: 2729052 - RNA, 16 nt, Human
acaguuuguuaguaug

SEQ ID NO: 2729053 - RNA, 21 nt, Human
acaguuuucugagaaagacua

SEQ ID NO: 2729054 - RNA, 20 nt, Human
acaguuuucugagaaagacu

SEQ ID NO: 2729055 - RNA, 19 nt, Human
acaguuuucugagaaagac

SEQ ID NO: 2729056 - RNA, 18 nt, Human
acaguuuucugagaaaga

SEQ ID NO: 2729057 - RNA, 16 nt, Human
acauaaaaacaacuuu

SEQ ID NO: 2729058 - RNA, 19 nt, Human
acauaaaaacaacuuuaua

SEQ ID NO: 2729059 - RNA, 21 nt, Human
acauaaaaacaacuuuauacc

SEQ ID NO: 2729060 - RNA, 14 nt, Human
acauacucugcuua

SEQ ID NO: 2729061 - RNA, 17 nt, Human
acauacucccaucugug

SEQ ID NO: 2729062 - RNA, 13 nt, Human
acauacucccauc

SEQ ID NO: 2729063 - RNA, 22 nt, Human
acauacuaaccagcagaaaugc

SEQ ID NO: 2729064 - RNA, 21 nt, Human
acauacuaaccagcagaaaug

SEQ ID NO: 2729065 - RNA, 13 nt, Human
acauacuaaccag

SEQ ID NO: 2729066 - RNA, 21 nt, Human
uaugaaauauuauguuaaaac

SEQ ID NO: 2729067 - RNA, 13 nt, Human
uauuucauuucuu

SEQ ID NO: 2729068 - RNA, 21 nt, Human
uauuuccauuaaaaaaucagu

SEQ ID NO: 2729069 - RNA, 23 nt, Human
uauuuccuauauuguuuucagug

SEQ ID NO: 2729070 - RNA, 22 nt, Human
uauuucccucaccuuucccauc

SEQ ID NO: 2729071 - RNA, 20 nt, Human
acaguugaaaaacagcugag

SEQ ID NO: 2729072 - RNA, 15 nt, Human
acaguugaaaaacag

SEQ ID NO: 2729073 - RNA, 16 nt, Human
acaguugaaaaacagc

SEQ ID NO: 2729074 - RNA, 18 nt, Human
uauuucuauauuuucauu

SEQ ID NO: 2729075 - RNA, 17 nt, Human
uauuucuauauuuucau

SEQ ID NO: 2729076 - RNA, 16 nt, Human
uauuucuauauuuuca

SEQ ID NO: 2729077 - RNA, 18 nt, Human
acaucaacaucuugguca

SEQ ID NO: 2729078 - RNA, 16 nt, Human
acaucaacaucuuggu

SEQ ID NO: 2729079 - RNA, 16 nt, Human
acaugaaaacacauuu

SEQ ID NO: 2729080 - RNA, 19 nt, Human
acaugaaaacacauuuuuc

SEQ ID NO: 2729081 - RNA, 18 nt, Human
acaugaaaacacauuuuu

SEQ ID NO: 2729082 - RNA, 21 nt, Human
acaucuugcucugcugacaga

SEQ ID NO: 2729083 - RNA, 17 nt, Human
acaugaaaacacauuuu

SEQ ID NO: 2729084 - RNA, 18 nt, Human
acaucuugcucugcugac

SEQ ID NO: 2729085 - RNA, 19 nt, Human
acaucuugcucugcugaca

SEQ ID NO: 2729086 - RNA, 13 nt, Human
acaucuugcucug

SEQ ID NO: 2729087 - RNA, 19 nt, Human
acauauauaacaaugcugu

SEQ ID NO: 2729088 - RNA, 20 nt, Human
acauagucuggcuguaccca

SEQ ID NO: 2729089 - RNA, 15 nt, Human
acauagucuggcugu

SEQ ID NO: 2729090 - RNA, 14 nt, Human
acauagucuggcug

SEQ ID NO: 2729091 - RNA, 16 nt, Human
acauauugauuuccgu

SEQ ID NO: 2729092 - RNA, 14 nt, Human
acauauugauuucc

SEQ ID NO: 2729093 - RNA, 23 nt, Human
acauauugauuuccguuaaaaua

SEQ ID NO: 2729094 - RNA, 22 nt, Human
acauauugauuuccguuaaaau

SEQ ID NO: 2729095 - RNA, 18 nt, Human
acauauugauuuccguua

SEQ ID NO: 2729096 - RNA, 17 nt, Human
acauaucuaguaugaaa

SEQ ID NO: 2729097 - RNA, 23 nt, Human
acauaucuaguaugaaauuauau

SEQ ID NO: 2729098 - RNA, 20 nt, Human
acauaucuaguaugaaauua

SEQ ID NO: 2729099 - RNA, 22 nt, Human
acauaucuaguaugaaauuaua

SEQ ID NO: 2729100 - RNA, 15 nt, Human
ucaccugccccucaa

SEQ ID NO: 2729101 - RNA, 13 nt, Human
ucaccugccccuc

SEQ ID NO: 2729102 - RNA, 15 nt, Human
ucaccucucccuugg

SEQ ID NO: 2729103 - RNA, 16 nt, Human
ucaccugaagacucau

SEQ ID NO: 2729104 - RNA, 18 nt, Human
ucacuauguugcccaggc

SEQ ID NO: 2729105 - RNA, 17 nt, Human
ucacuauguugcccagg

SEQ ID NO: 2729106 - RNA, 19 nt, Human
ucacuauguugcccaggca

SEQ ID NO: 2729107 - RNA, 20 nt, Human
ucacuauguugcccaggcag

SEQ ID NO: 2729108 - RNA, 17 nt, Human
ucacuaccuucaugcau

SEQ ID NO: 2729109 - RNA, 18 nt, Human
accacuuguguuuugcaa

SEQ ID NO: 2729110 - RNA, 15 nt, Human
accacuuuuguucuu

SEQ ID NO: 2729111 - RNA, 21 nt, Human
accacuuuuguucuugguuug

SEQ ID NO: 2729112 - RNA, 16 nt, Human
accacuuuuguucuug

SEQ ID NO: 2729113 - RNA, 17 nt, Human
accacugcacuccagcc

SEQ ID NO: 2729114 - RNA, 20 nt, Human
accacugcacuccagccugg

SEQ ID NO: 2729115 - RNA, 17 nt, Human
ucaccccggccaccugc

SEQ ID NO: 2729116 - RNA, 18 nt, Human
ucaccccggccaccugcg

SEQ ID NO: 2729117 - RNA, 21 nt, Human
accacugcacuccagccuggg

SEQ ID NO: 2729118 - RNA, 11 nt, Human
accagacaggu

SEQ ID NO: 2729119 - RNA, 14 nt, Human
accagacaccuuga

SEQ ID NO: 2729120 - RNA, 12 nt, Human
accagagcccac

SEQ ID NO: 2729121 - RNA, 14 nt, Human
accagagcccaccu

SEQ ID NO: 2729122 - RNA, 16 nt, Human
accagagcccaccuug

SEQ ID NO: 2729123 - RNA, 22 nt, Human
accacuuuuguucuugguuugu

SEQ ID NO: 2729124 - RNA, 15 nt, Human
ucaauucuugccaaa

SEQ ID NO: 2729125 - RNA, 13 nt, Human
ucaauuuuaacaa

SEQ ID NO: 2729126 - RNA, 23 nt, Human
ucaauuuuucuuauuucauuucu

SEQ ID NO: 2729127 - RNA, 20 nt, Human
ucaauuuuucuuauuucauu

SEQ ID NO: 2729128 - RNA, 13 nt, Human
accaaucaugaau

SEQ ID NO: 2729129 - RNA, 15 nt, Human
accaaucaugaauua

SEQ ID NO: 2729130 - RNA, 15 nt, Human
accaauguucucucu

SEQ ID NO: 2729131 - RNA, 15 nt, Human
ucaagugaaaaagga

SEQ ID NO: 2729132 - RNA, 23 nt, Human
ucaagugaaaaaggaggaagaga

SEQ ID NO: 2729133 - RNA, 17 nt, Human
accaacauacucccauc

SEQ ID NO: 2729134 - RNA, 19 nt, Human
accaacauacucccaucug

SEQ ID NO: 2729135 - RNA, 21 nt, Human
accaacauacucccaucugug

SEQ ID NO: 2729136 - RNA, 22 nt, Human
accaacauacucccaucuguga

SEQ ID NO: 2729137 - RNA, 12 nt, Human
ucacauaucugu

SEQ ID NO: 2729138 - RNA, 15 nt, Human
ucacauaucugucau

SEQ ID NO: 2729139 - RNA, 17 nt, Human
ucacauaucuaguauga

SEQ ID NO: 2729140 - RNA, 21 nt, Human
ucacauaucuaguaugaaauu

SEQ ID NO: 2729141 - RNA, 22 nt, Human
ucacauaucuaguaugaaauua

SEQ ID NO: 2729142 - RNA, 15 nt, Human
ucacaguucucuccu

SEQ ID NO: 2729143 - RNA, 13 nt, Human
ucaccccagcccc

SEQ ID NO: 2729144 - RNA, 14 nt, Human
ucaccccagcccca

SEQ ID NO: 2729145 - RNA, 20 nt, Human
ucaccccagccccaaaacuc

SEQ ID NO: 2729146 - RNA, 15 nt, Human
ucaccccggccaccu

SEQ ID NO: 2729147 - RNA, 23 nt, Human
accauuucuugagguaaaagcau

SEQ ID NO: 2729148 - RNA, 10 nt, Human
acccacugcu

SEQ ID NO: 2729149 - RNA, 11 nt, Human
acccacugcuc

SEQ ID NO: 2729150 - RNA, 13 nt, Human
acccacugcucug

SEQ ID NO: 2729151 - RNA, 14 nt, Human
acccacugcucugg

SEQ ID NO: 2729152 - RNA, 15 nt, Human
acccacugcucuggu

SEQ ID NO: 2729153 - RNA, 11 nt, Human
acccacugcuu

SEQ ID NO: 2729154 - RNA, 19 nt, Human
accaugggauaaaugccau

SEQ ID NO: 2729155 - RNA, 22 nt, Human
accauggucggaaaacaugcua

SEQ ID NO: 2729156 - RNA, 21 nt, Human
ucacucuuauugcccacgcug

SEQ ID NO: 2729157 - RNA, 23 nt, Human
ucacucuuauugcccacgcugga

SEQ ID NO: 2729158 - RNA, 14 nt, Human
ucagaagacacuga

SEQ ID NO: 2729159 - RNA, 19 nt, Human
ucagaaguuucugccgcag

SEQ ID NO: 2729160 - RNA, 22 nt, Human
ucagaaguuucugccgcagccc

SEQ ID NO: 2729161 - RNA, 19 nt, Human
ucagaaucucaaauaacua

SEQ ID NO: 2729162 - RNA, 18 nt, Human
ucagaaucucaaauaacu

SEQ ID NO: 2729163 - RNA, 21 nt, Human
ucagagacuccugcaggcagc

SEQ ID NO: 2729164 - RNA, 16 nt, Human
ucagagacuccugcag

SEQ ID NO: 2729165 - RNA, 17 nt, Human
ucagagacuccugcagg

SEQ ID NO: 2729166 - RNA, 20 nt, Human
ucagagacuccugcaggcag

SEQ ID NO: 2729167 - RNA, 12 nt, Human
ucagagccugca

SEQ ID NO: 2729168 - RNA, 23 nt, Human
ucagagagggugggagugggccc

SEQ ID NO: 2729169 - RNA, 16 nt, Human
ucagagagggugggag

SEQ ID NO: 2729170 - RNA, 21 nt, Human
ucagagagggugggagugggc

SEQ ID NO: 2729171 - RNA, 13 nt, Human
ucagagccugcag

SEQ ID NO: 2729172 - RNA, 14 nt, Human
ucagagccugcagu

SEQ ID NO: 2729173 - RNA, 15 nt, Human
ucagagccugcaguu

SEQ ID NO: 2729174 - RNA, 18 nt, Human
ucagagccugcaguuauu

SEQ ID NO: 2729175 - RNA, 12 nt, Human
ucagagcugccc

SEQ ID NO: 2729176 - RNA, 22 nt, Human
ucagccaagaauucuuaaauau

SEQ ID NO: 2729177 - RNA, 23 nt, Human
ucagccguguaaccauggaccca

SEQ ID NO: 2729178 - RNA, 19 nt, Human
acccagcgagcccuggugg

SEQ ID NO: 2729179 - RNA, 23 nt, Human
acccagcgagcccugguggcagu

SEQ ID NO: 2729180 - RNA, 24 nt, Human
acccagcgagcccugguggcagug

SEQ ID NO: 2729181 - RNA, 13 nt, Human
ucaggaaagagaa

SEQ ID NO: 2729182 - RNA, 19 nt, Human
ucaggaaagagaacuucca

SEQ ID NO: 2729183 - RNA, 21 nt, Human
ucaggaaaucaaauaugcaaa

SEQ ID NO: 2729184 - RNA, 20 nt, Human
ucaggaaaucaaauaugcaa

SEQ ID NO: 2729185 - RNA, 14 nt, Human
ucagcggggacagc

SEQ ID NO: 2729186 - RNA, 20 nt, Human
ucagcuuguaaauagcucag

SEQ ID NO: 2729187 - RNA, 16 nt, Human
accccuucgcuccugu

SEQ ID NO: 2729188 - RNA, 14 nt, Human
accccuucgcuccu

SEQ ID NO: 2729189 - RNA, 15 nt, Human
accccuucgcuccug

SEQ ID NO: 2729190 - RNA, 12 nt, Human
acccccacccaa

SEQ ID NO: 2729191 - RNA, 22 nt, Human
acgccagauucuuuccugaggc

SEQ ID NO: 2729192 - RNA, 23 nt, Human
acgccagauucuuuccugaggcu

SEQ ID NO: 2729193 - RNA, 18 nt, Human
uccauuuaauaauuauau

SEQ ID NO: 2729194 - RNA, 16 nt, Human
ucccaaagcagugcau

SEQ ID NO: 2729195 - RNA, 18 nt, Human
ucccaaacccuucagugc

SEQ ID NO: 2729196 - RNA, 13 nt, Human
ucccaaagugcug

SEQ ID NO: 2729197 - RNA, 14 nt, Human
ucccaaagugcugg

SEQ ID NO: 2729198 - RNA, 21 nt, Human
ucccaaagcagugcaugcugu

SEQ ID NO: 2729199 - RNA, 17 nt, Human
ucccaaagcagugcaug

SEQ ID NO: 2729200 - RNA, 18 nt, Human
ucccaaagcagugcaugc

SEQ ID NO: 2729201 - RNA, 20 nt, Human
acgggaggguaaggcugugg

SEQ ID NO: 2729202 - RNA, 16 nt, Human
ucccacaaaggagagc

SEQ ID NO: 2729203 - RNA, 15 nt, Human
ucccaccccacacac

SEQ ID NO: 2729204 - RNA, 20 nt, Human
ucccaccccacacacgccag

SEQ ID NO: 2729205 - RNA, 20 nt, Human
acgugggcauucaaauguau

SEQ ID NO: 2729206 - RNA, 17 nt, Human
acgugggcauucaaaug

SEQ ID NO: 2729207 - RNA, 23 nt, Human
acguggcugcuucaaggauccug

SEQ ID NO: 2729208 - RNA, 15 nt, Human
acgguuuuacugcag

SEQ ID NO: 2729209 - RNA, 17 nt, Human
acgguuuuacugcagcu

SEQ ID NO: 2729210 - RNA, 22 nt, Human
ucccagucauuuaauaaaugug

SEQ ID NO: 2729211 - RNA, 14 nt, Human
ucccagucauuuaa

SEQ ID NO: 2729212 - RNA, 22 nt, Human
ucccauaugccugggcagaagg

SEQ ID NO: 2729213 - RNA, 16 nt, Human
ucccauaugccugggc

SEQ ID NO: 2729214 - RNA, 15 nt, Human
ucccaucacccgcua

SEQ ID NO: 2729215 - RNA, 15 nt, Human
acuacauucuguuaa

SEQ ID NO: 2729216 - RNA, 17 nt, Human
uccccaccgcagacagg

SEQ ID NO: 2729217 - RNA, 18 nt, Human
uccccaccgcagacagga

SEQ ID NO: 2729218 - RNA, 21 nt, Human
uccccaccgcagacaggacca

SEQ ID NO: 2729219 - RNA, 22 nt, Human
uccccaccgcagacaggaccag

SEQ ID NO: 2729220 - RNA, 17 nt, Human
ucccagccagcaguuca

SEQ ID NO: 2729221 - RNA, 18 nt, Human
ucccagccagcaguucag

SEQ ID NO: 2729222 - RNA, 12 nt, Human
ucccagccccaa

SEQ ID NO: 2729223 - RNA, 17 nt, Human
ucccagcugugcucugg

SEQ ID NO: 2729224 - RNA, 14 nt, Human
acuacauucuguua

SEQ ID NO: 2729225 - RNA, 13 nt, Human
acuacauucuguu

SEQ ID NO: 2729226 - RNA, 12 nt, Human
acuacauucugu

SEQ ID NO: 2729227 - RNA, 11 nt, Human
acuacauucug

SEQ ID NO: 2729228 - RNA, 15 nt, Human
acuacaguuuguuag

SEQ ID NO: 2729229 - RNA, 11 nt, Human
acuacaggcac

SEQ ID NO: 2729230 - RNA, 15 nt, Human
acuacaggcacccac

SEQ ID NO: 2729231 - RNA, 17 nt, Human
acuacaguccucccauc

SEQ ID NO: 2729232 - RNA, 14 nt, Human
acuacaguuuguua

SEQ ID NO: 2729233 - RNA, 13 nt, Human
acuacaguuuguu

SEQ ID NO: 2729234 - RNA, 12 nt, Human
acuaaccacgcu

SEQ ID NO: 2729235 - RNA, 16 nt, Human
uccccucggagaagag

SEQ ID NO: 2729236 - RNA, 17 nt, Human
uccccucggagaagagc

SEQ ID NO: 2729237 - RNA, 20 nt, Human
ucccgaauagcugggacuac

SEQ ID NO: 2729238 - RNA, 15 nt, Human
ucccgaguagcuggg

SEQ ID NO: 2729239 - RNA, 18 nt, Human
ucccgaguagcugggacu

SEQ ID NO: 2729240 - RNA, 16 nt, Human
ucccgaguagcuggga

SEQ ID NO: 2729241 - RNA, 17 nt, Human
ucccgaguagcugggac

SEQ ID NO: 2729242 - RNA, 17 nt, Human
acuacucccccaggugg

SEQ ID NO: 2729243 - RNA, 12 nt, Human
acucaccccagc

SEQ ID NO: 2729244 - RNA, 21 nt, Human
acucacauuuauucugcucac

SEQ ID NO: 2729245 - RNA, 13 nt, Human
ucccucccuccac

SEQ ID NO: 2729246 - RNA, 14 nt, Human
ucccucccuccacc

SEQ ID NO: 2729247 - RNA, 21 nt, Human
ucccuccaccucccugcaaua

SEQ ID NO: 2729248 - RNA, 23 nt, Human
ucccuccaccucccugcaauaaa

SEQ ID NO: 2729249 - RNA, 15 nt, Human
ucccucccuccaccu

SEQ ID NO: 2729250 - RNA, 16 nt, Human
ucccucccuccaccuc

SEQ ID NO: 2729251 - RNA, 14 nt, Human
ucccucuuucccuc

SEQ ID NO: 2729252 - RNA, 20 nt, Human
ucccucuuucccucccuucc

SEQ ID NO: 2729253 - RNA, 18 nt, Human
ucccucuuucccucccuu

SEQ ID NO: 2729254 - RNA, 21 nt, Human
ucccucuuucccucccuuccu

SEQ ID NO: 2729255 - RNA, 11 nt, Human
ucccugaaggc

SEQ ID NO: 2729256 - RNA, 15 nt, Human
ucccugaaggccccg

SEQ ID NO: 2729257 - RNA, 11 nt, Human
ucccugagcag

SEQ ID NO: 2729258 - RNA, 16 nt, Human
ucccugaaggccccgc

SEQ ID NO: 2729259 - RNA, 14 nt, Human
acuccaaagaaaug

SEQ ID NO: 2729260 - RNA, 15 nt, Human
acucauugaccugag

SEQ ID NO: 2729261 - RNA, 18 nt, Human
acuccaaagaaauguaag

SEQ ID NO: 2729262 - RNA, 15 nt, Human
acuccaaagaaaugu

SEQ ID NO: 2729263 - RNA, 21 nt, Human
acuccaaagaaauguaaggga

SEQ ID NO: 2729264 - RNA, 18 nt, Human
acuccagaaagugacaag

SEQ ID NO: 2729265 - RNA, 15 nt, Human
acuccagaauuuccc

SEQ ID NO: 2729266 - RNA, 17 nt, Human
acuccagaauuucccaa

SEQ ID NO: 2729267 - RNA, 15 nt, Human
acucauucuucugua

SEQ ID NO: 2729268 - RNA, 14 nt, Human
acucauugaccuga

SEQ ID NO: 2729269 - RNA, 18 nt, Human
acuccugcaggcagccag

SEQ ID NO: 2729270 - RNA, 19 nt, Human
acuccugcaggcagccagg

SEQ ID NO: 2729271 - RNA, 17 nt, Human
acuccugcaggcagcca

SEQ ID NO: 2729272 - RNA, 23 nt, Human
acuccagaauuucccaaagcagu

SEQ ID NO: 2729273 - RNA, 12 nt, Human
acuccagccugg

SEQ ID NO: 2729274 - RNA, 13 nt, Human
acuccagccuggg

SEQ ID NO: 2729275 - RNA, 12 nt, Human
ucccuuuuccuu

SEQ ID NO: 2729276 - RNA, 19 nt, Human
ucccuuucugcuuguguua

SEQ ID NO: 2729277 - RNA, 17 nt, Human
uccggucccugucccag

SEQ ID NO: 2729278 - RNA, 16 nt, Human
uccuagaaauucccca

SEQ ID NO: 2729279 - RNA, 17 nt, Human
ucccuuacgugaguccu

SEQ ID NO: 2729280 - RNA, 12 nt, Human
ucccugucccag

SEQ ID NO: 2729281 - RNA, 15 nt, Human
ucccugguggcagcu

SEQ ID NO: 2729282 - RNA, 21 nt, Human
acuccugcaggcagccaggcc

SEQ ID NO: 2729283 - RNA, 12 nt, Human
ucauucuucugu

SEQ ID NO: 2729284 - RNA, 12 nt, Human
ucauugaaaucu

SEQ ID NO: 2729285 - RNA, 13 nt, Human
ucauugaaaucuu

SEQ ID NO: 2729286 - RNA, 22 nt, Human
ucauugaaaucuuuuugcuuug

SEQ ID NO: 2729287 - RNA, 12 nt, Human
ucauugaccuga

SEQ ID NO: 2729288 - RNA, 14 nt, Human
ucauugaccugagg

SEQ ID NO: 2729289 - RNA, 15 nt, Human
ucauugaccugaggc

SEQ ID NO: 2729290 - RNA, 13 nt, Human
accuccugggcua

SEQ ID NO: 2729291 - RNA, 19 nt, Human
accucggugccuuccucuu

SEQ ID NO: 2729292 - RNA, 14 nt, Human
accugaggcccuuc

SEQ ID NO: 2729293 - RNA, 14 nt, Human
accucuaaauucuu

SEQ ID NO: 2729294 - RNA, 14 nt, Human
accugauugugucu

SEQ ID NO: 2729295 - RNA, 15 nt, Human
accugauugugucuc

SEQ ID NO: 2729296 - RNA, 17 nt, Human
accugauugugucucuu

SEQ ID NO: 2729297 - RNA, 18 nt, Human
accugauugugucucuug

SEQ ID NO: 2729298 - RNA, 22 nt, Human
accugaggcccuucucuccagc

SEQ ID NO: 2729299 - RNA, 15 nt, Human
accugaggcccuucu

SEQ ID NO: 2729300 - RNA, 16 nt, Human
accugaggcccuucuc

SEQ ID NO: 2729301 - RNA, 20 nt, Human
accugaggcccuucucucca

SEQ ID NO: 2729302 - RNA, 21 nt, Human
accugaggcccuucucuccag

SEQ ID NO: 2729303 - RNA, 21 nt, Human
accuagggugauauuaaccag

SEQ ID NO: 2729304 - RNA, 19 nt, Human
accucaaaaugucuaagau

SEQ ID NO: 2729305 - RNA, 23 nt, Human
ucaggaaaucaaauaugcaaagc

SEQ ID NO: 2729306 - RNA, 22 nt, Human
ucaggaaaucaaauaugcaaag

SEQ ID NO: 2729307 - RNA, 12 nt, Human
ucaggaagcuca

SEQ ID NO: 2729308 - RNA, 15 nt, Human
ucaggaagcucaggg

SEQ ID NO: 2729309 - RNA, 13 nt, Human
ucaggaagcucag

SEQ ID NO: 2729310 - RNA, 14 nt, Human
ucaggaagcucagg

SEQ ID NO: 2729311 - RNA, 16 nt, Human
ucaugaauuaguuuua

SEQ ID NO: 2729312 - RNA, 22 nt, Human
ucauccuucuggaauaaggaga

SEQ ID NO: 2729313 - RNA, 14 nt, Human
ucauccuucuggaa

SEQ ID NO: 2729314 - RNA, 18 nt, Human
ucauccucauacccaccc

SEQ ID NO: 2729315 - RNA, 13 nt, Human
ucauccuccucag

SEQ ID NO: 2729316 - RNA, 19 nt, Human
ucauccuccucagaucuuc

SEQ ID NO: 2729317 - RNA, 12 nt, Human
accucccugcaa

SEQ ID NO: 2729318 - RNA, 13 nt, Human
accucccugcaau

SEQ ID NO: 2729319 - RNA, 13 nt, Human
accuccugccucg

SEQ ID NO: 2729320 - RNA, 12 nt, Human
accuccugccuc

SEQ ID NO: 2729321 - RNA, 23 nt, Human
accuccugccucgaacuggcugc

SEQ ID NO: 2729322 - RNA, 15 nt, Human
ucauccuaagcuauu

SEQ ID NO: 2729323 - RNA, 14 nt, Human
acgagaaaacaaua

SEQ ID NO: 2729324 - RNA, 22 nt, Human
accuuuuuuauacauaaacaag

SEQ ID NO: 2729325 - RNA, 21 nt, Human
accuuuuuuauacauaaacaa

SEQ ID NO: 2729326 - RNA, 21 nt, Human
uccaggcuguaucccaugagc

SEQ ID NO: 2729327 - RNA, 20 nt, Human
accuuuuuuauacauaaaca

SEQ ID NO: 2729328 - RNA, 19 nt, Human
accuuuuuuauacauaaac

SEQ ID NO: 2729329 - RNA, 20 nt, Human
acgagcaggcuacugucagc

SEQ ID NO: 2729330 - RNA, 19 nt, Human
acgagcaggcuacugucag

SEQ ID NO: 2729331 - RNA, 16 nt, Human
acgagcaggcuucuuc

SEQ ID NO: 2729332 - RNA, 19 nt, Human
acgccagauucuuuccuga

SEQ ID NO: 2729333 - RNA, 17 nt, Human
acgccagauucuuuccu

SEQ ID NO: 2729334 - RNA, 13 nt, Human
uccagccccugga

SEQ ID NO: 2729335 - RNA, 12 nt, Human
uccagccccugg

SEQ ID NO: 2729336 - RNA, 14 nt, Human
uccaggcuguaucc

SEQ ID NO: 2729337 - RNA, 19 nt, Human
uccagacccggcugcgugg

SEQ ID NO: 2729338 - RNA, 15 nt, Human
uccagacccggcugc

SEQ ID NO: 2729339 - RNA, 18 nt, Human
uccagacccggcugcgug

SEQ ID NO: 2729340 - RNA, 14 nt, Human
uccagacccggcug

SEQ ID NO: 2729341 - RNA, 20 nt, Human
uccagaauuucccaaagcag

SEQ ID NO: 2729342 - RNA, 22 nt, Human
uccagaauuucccaaagcagug

SEQ ID NO: 2729343 - RNA, 16 nt, Human
uccagaauuucccaaa

SEQ ID NO: 2729344 - RNA, 14 nt, Human
accuuuugagugcc

SEQ ID NO: 2729345 - RNA, 17 nt, Human
accuuuugagugccuua

SEQ ID NO: 2729346 - RNA, 20 nt, Human
accuuuugagugccuuacac

SEQ ID NO: 2729347 - RNA, 21 nt, Human
uccaacuaucucauuuccaag

SEQ ID NO: 2729348 - RNA, 12 nt, Human
uccaagaagccc

SEQ ID NO: 2729349 - RNA, 16 nt, Human
uccaagcuggucccac

SEQ ID NO: 2729350 - RNA, 20 nt, Human
uccaagcuggucccacucag

SEQ ID NO: 2729351 - RNA, 21 nt, Human
uccaagcuggucccacucagu

SEQ ID NO: 2729352 - RNA, 18 nt, Human
uccaaggguacuaaggaa

SEQ ID NO: 2729353 - RNA, 23 nt, Human
uccaacccucaucaccaacgucu

SEQ ID NO: 2729354 - RNA, 16 nt, Human
uccaacccucaucacc

SEQ ID NO: 2729355 - RNA, 17 nt, Human
uccaacccucaucacca

SEQ ID NO: 2729356 - RNA, 14 nt, Human
uccaacccucauca

SEQ ID NO: 2729357 - RNA, 12 nt, Human
accugccaggaa

SEQ ID NO: 2729358 - RNA, 14 nt, Human
accugccaggaagc

SEQ ID NO: 2729359 - RNA, 15 nt, Human
accugccaggaagcc

SEQ ID NO: 2729360 - RNA, 14 nt, Human
accuggccucugca

SEQ ID NO: 2729361 - RNA, 16 nt, Human
accuggccucugcacu

SEQ ID NO: 2729362 - RNA, 17 nt, Human
accuggccucugcacuc

SEQ ID NO: 2729363 - RNA, 17 nt, Human
uccacccaccucagccu

SEQ ID NO: 2729364 - RNA, 18 nt, Human
uccacccaccucagccuc

SEQ ID NO: 2729365 - RNA, 19 nt, Human
uccacccaccucagccucc

SEQ ID NO: 2729366 - RNA, 12 nt, Human
uccacccaggag

SEQ ID NO: 2729367 - RNA, 14 nt, Human
uccacccaggagcc

SEQ ID NO: 2729368 - RNA, 15 nt, Human
uccacccaggagccc

SEQ ID NO: 2729369 - RNA, 23 nt, Human
accuggccucugcacuccccugc

SEQ ID NO: 2729370 - RNA, 18 nt, Human
accuggccucugcacucc

SEQ ID NO: 2729371 - RNA, 20 nt, Human
accuggccucugcacucccc

SEQ ID NO: 2729372 - RNA, 19 nt, Human
accuguuucugcagccacu

SEQ ID NO: 2729373 - RNA, 18 nt, Human
accuuagacagucccugc

SEQ ID NO: 2729374 - RNA, 19 nt, Human
accuuagacagucccugcc

SEQ ID NO: 2729375 - RNA, 20 nt, Human
accuuagacagucccugcca

SEQ ID NO: 2729376 - RNA, 15 nt, Human
ucgagcaugccugga

SEQ ID NO: 2729377 - RNA, 18 nt, Human
ucgagcaugccuggaugg

SEQ ID NO: 2729378 - RNA, 16 nt, Human
ucgagcaugccuggau

SEQ ID NO: 2729379 - RNA, 19 nt, Human
ucgcgacaaugcaaaccau

SEQ ID NO: 2729380 - RNA, 16 nt, Human
ucgcgacaaugcaaac

SEQ ID NO: 2729381 - RNA, 22 nt, Human
uccuuuagcgcccaguugggug

SEQ ID NO: 2729382 - RNA, 23 nt, Human
uccuuuagcgcccaguugggugg

SEQ ID NO: 2729383 - RNA, 15 nt, Human
uccuuuagcgcccag

SEQ ID NO: 2729384 - RNA, 19 nt, Human
uccuuuagcgcccaguugg

SEQ ID NO: 2729385 - RNA, 23 nt, Human
uccuuguguuacuaaguuuuuau

SEQ ID NO: 2729386 - RNA, 14 nt, Human
uccuuguguuacua

SEQ ID NO: 2729387 - RNA, 14 nt, Human
uccuucagugccuu

SEQ ID NO: 2729388 - RNA, 15 nt, Human
uccuucagugccuua

SEQ ID NO: 2729389 - RNA, 16 nt, Human
uccuucagugccuuau

SEQ ID NO: 2729390 - RNA, 17 nt, Human
uccuucagugccuuaug

SEQ ID NO: 2729391 - RNA, 14 nt, Human
acugcauuauauuu

SEQ ID NO: 2729392 - RNA, 15 nt, Human
acugcauuauauuua

SEQ ID NO: 2729393 - RNA, 20 nt, Human
acugcaucaagaugugacau

SEQ ID NO: 2729394 - RNA, 22 nt, Human
acugcaucaagaugugacaugu

SEQ ID NO: 2729395 - RNA, 16 nt, Human
acugcauguuugugau

SEQ ID NO: 2729396 - RNA, 15 nt, Human
acugcauguuuguga

SEQ ID NO: 2729397 - RNA, 21 nt, Human
uccuagaaauuccccacccug

SEQ ID NO: 2729398 - RNA, 22 nt, Human
uccuagaaauuccccacccuga

SEQ ID NO: 2729399 - RNA, 16 nt, Human
acugcauaugaaagga

SEQ ID NO: 2729400 - RNA, 13 nt, Human
acugccuucucaa

SEQ ID NO: 2729401 - RNA, 19 nt, Human
acugccuucucaacuccaa

SEQ ID NO: 2729402 - RNA, 18 nt, Human
acugcuuaacuucacaua

SEQ ID NO: 2729403 - RNA, 20 nt, Human
acuggcacaguuuucugaga

SEQ ID NO: 2729404 - RNA, 19 nt, Human
acuggcacaguuuucugag

SEQ ID NO: 2729405 - RNA, 13 nt, Human
acuggcacaguuu

SEQ ID NO: 2729406 - RNA, 15 nt, Human
acuggauuaaacuua

SEQ ID NO: 2729407 - RNA, 21 nt, Human
acugcuugugaaaggaaagag

SEQ ID NO: 2729408 - RNA, 17 nt, Human
acugcuuccagugaggc

SEQ ID NO: 2729409 - RNA, 20 nt, Human
acugcuuaacuucacauauu

SEQ ID NO: 2729410 - RNA, 20 nt, Human
ucuaaagccauuguaguccu

SEQ ID NO: 2729411 - RNA, 13 nt, Human
ucuaaagcugcca

SEQ ID NO: 2729412 - RNA, 14 nt, Human
ucuaaagcugccag

SEQ ID NO: 2729413 - RNA, 16 nt, Human
ucuaaagcugccagcc

SEQ ID NO: 2729414 - RNA, 15 nt, Human
ucuaaagcugccagc

SEQ ID NO: 2729415 - RNA, 22 nt, Human
ucuaaguaaaaccacagcaguu

SEQ ID NO: 2729416 - RNA, 21 nt, Human
ucuaaguaaaaccacagcagu

SEQ ID NO: 2729417 - RNA, 20 nt, Human
ucuaaguaaaaccacagcag

SEQ ID NO: 2729418 - RNA, 16 nt, Human
ucuacauacuauggaa

SEQ ID NO: 2729419 - RNA, 17 nt, Human
ucuacauaaguaauuca

SEQ ID NO: 2729420 - RNA, 20 nt, Human
ucuacauaaguaauucaaga

SEQ ID NO: 2729421 - RNA, 23 nt, Human
ucuaaguaaaaccacagcaguug

SEQ ID NO: 2729422 - RNA, 19 nt, Human
acuguucucugcccuccaa

SEQ ID NO: 2729423 - RNA, 21 nt, Human
acuguucucugcccuccaaga

SEQ ID NO: 2729424 - RNA, 15 nt, Human
acuguucucugcccu

SEQ ID NO: 2729425 - RNA, 20 nt, Human
acuguucucugcccuccaag

SEQ ID NO: 2729426 - RNA, 14 nt, Human
acuguucucugccc

SEQ ID NO: 2729427 - RNA, 22 nt, Human
ucuacauaaguaauucaagaaa

SEQ ID NO: 2729428 - RNA, 15 nt, Human
acuuaaauaauguga

SEQ ID NO: 2729429 - RNA, 16 nt, Human
acuuaaauaaugugaa

SEQ ID NO: 2729430 - RNA, 18 nt, Human
acuuaaauaaugugaaac

SEQ ID NO: 2729431 - RNA, 17 nt, Human
acuuaaauaaugugaaa

SEQ ID NO: 2729432 - RNA, 17 nt, Human
acuguugcccaggcugg

SEQ ID NO: 2729433 - RNA, 18 nt, Human
acuguugcccaggcuggc

SEQ ID NO: 2729434 - RNA, 12 nt, Human
acuguugcccag

SEQ ID NO: 2729435 - RNA, 13 nt, Human
acuguugcccagg

SEQ ID NO: 2729436 - RNA, 14 nt, Human
acuguugcccaggc

SEQ ID NO: 2729437 - RNA, 13 nt, Human
acuuaaucuaaau

SEQ ID NO: 2729438 - RNA, 16 nt, Human
acuuaaucuaaaugga

SEQ ID NO: 2729439 - RNA, 15 nt, Human
acuuaaucuaaaugg

SEQ ID NO: 2729440 - RNA, 18 nt, Human
acugggacaggggagaac

SEQ ID NO: 2729441 - RNA, 21 nt, Human
acugucagcuccccucggaga

SEQ ID NO: 2729442 - RNA, 18 nt, Human
acuguccuacccacccuc

SEQ ID NO: 2729443 - RNA, 23 nt, Human
acuguccuacccacccuccuuuc

SEQ ID NO: 2729444 - RNA, 17 nt, Human
acuguccuacccacccu

SEQ ID NO: 2729445 - RNA, 18 nt, Human
acuguggguagacacaca

SEQ ID NO: 2729446 - RNA, 12 nt, Human
acuguggugacu

SEQ ID NO: 2729447 - RNA, 15 nt, Human
acuguggugacuuug

SEQ ID NO: 2729448 - RNA, 14 nt, Human
acuguggugacuuu

SEQ ID NO: 2729449 - RNA, 21 nt, Human
acuguggugacuuuggauaau

SEQ ID NO: 2729450 - RNA, 20 nt, Human
acuguggugacuuuggauaa

SEQ ID NO: 2729451 - RNA, 18 nt, Human
acuguggugacuuuggau

SEQ ID NO: 2729452 - RNA, 22 nt, Human
ucggguuuuauuguuuaaaauc

SEQ ID NO: 2729453 - RNA, 11 nt, Human
ucgggcaugac

SEQ ID NO: 2729454 - RNA, 12 nt, Human
ucgggcaugaca

SEQ ID NO: 2729455 - RNA, 17 nt, Human
ucgggaggucgaggcag

SEQ ID NO: 2729456 - RNA, 19 nt, Human
ucgggaggucgaggcagga

SEQ ID NO: 2729457 - RNA, 21 nt, Human
ucgggaggucgaggcaggagg

SEQ ID NO: 2729458 - RNA, 12 nt, Human
ucugaagaagau

SEQ ID NO: 2729459 - RNA, 19 nt, Human
ucugaagucagaucugccu

SEQ ID NO: 2729460 - RNA, 15 nt, Human
ucugaagucagaucu

SEQ ID NO: 2729461 - RNA, 20 nt, Human
agaaauaucugaaaauguau

SEQ ID NO: 2729462 - RNA, 17 nt, Human
agaaaucaaagagagaa

SEQ ID NO: 2729463 - RNA, 19 nt, Human
agaaauaucugaaaaugua

SEQ ID NO: 2729464 - RNA, 14 nt, Human
agaaauauaauuga

SEQ ID NO: 2729465 - RNA, 13 nt, Human
ucugauacagaaa

SEQ ID NO: 2729466 - RNA, 18 nt, Human
ucugauucccaagcucug

SEQ ID NO: 2729467 - RNA, 18 nt, Human
ucugcacuccccugcugg

SEQ ID NO: 2729468 - RNA, 19 nt, Human
ucugcacuccccugcuggg

SEQ ID NO: 2729469 - RNA, 14 nt, Human
ucugacuaugacau

SEQ ID NO: 2729470 - RNA, 22 nt, Human
ucugagacucgcgacaaugcaa

SEQ ID NO: 2729471 - RNA, 16 nt, Human
ucugacuaugacauaa

SEQ ID NO: 2729472 - RNA, 23 nt, Human
ucugagacucgcgacaaugcaaa

SEQ ID NO: 2729473 - RNA, 20 nt, Human
ucugcacuccccugcugggu

SEQ ID NO: 2729474 - RNA, 18 nt, Human
ucugcagcaauaaagcag

SEQ ID NO: 2729475 - RNA, 17 nt, Human
ucucuugagccugggag

SEQ ID NO: 2729476 - RNA, 18 nt, Human
ucucuugagccugggagg

SEQ ID NO: 2729477 - RNA, 14 nt, Human
ucucuugauucaua

SEQ ID NO: 2729478 - RNA, 16 nt, Human
ucucuugauucauaau

SEQ ID NO: 2729479 - RNA, 13 nt, Human
agaaaaagaaaaa

SEQ ID NO: 2729480 - RNA, 20 nt, Human
ucucuuuaaugucacaggca

SEQ ID NO: 2729481 - RNA, 21 nt, Human
ucucuuuaaugucacaggcag

SEQ ID NO: 2729482 - RNA, 17 nt, Human
agaaaaaggaugcacag

SEQ ID NO: 2729483 - RNA, 17 nt, Human
ucucuccuguaccucuu

SEQ ID NO: 2729484 - RNA, 16 nt, Human
ucucuccuguaccucu

SEQ ID NO: 2729485 - RNA, 14 nt, Human
ucucuccuguaccu

SEQ ID NO: 2729486 - RNA, 11 nt, Human
ucucugcccuc

SEQ ID NO: 2729487 - RNA, 15 nt, Human
ucucugcccuccaag

SEQ ID NO: 2729488 - RNA, 16 nt, Human
ucucugcccuccaaga

SEQ ID NO: 2729489 - RNA, 17 nt, Human
ucucugcccuccaagac

SEQ ID NO: 2729490 - RNA, 17 nt, Human
ucucucacuuguuuuau

SEQ ID NO: 2729491 - RNA, 13 nt, Human
ucucucacuccuu

SEQ ID NO: 2729492 - RNA, 15 nt, Human
ucucucacuccuuga

SEQ ID NO: 2729493 - RNA, 18 nt, Human
acuuugaccucugcagca

SEQ ID NO: 2729494 - RNA, 16 nt, Human
acuuugaccucugcag

SEQ ID NO: 2729495 - RNA, 15 nt, Human
acuuugaccucugca

SEQ ID NO: 2729496 - RNA, 17 nt, Human
ucucuccagccccugga

SEQ ID NO: 2729497 - RNA, 16 nt, Human
ucucuccagccccugg

SEQ ID NO: 2729498 - RNA, 18 nt, Human
ucucuccagccccuggau

SEQ ID NO: 2729499 - RNA, 19 nt, Human
ucucuccagccccuggaug

SEQ ID NO: 2729500 - RNA, 15 nt, Human
acuucuccacccugc

SEQ ID NO: 2729501 - RNA, 16 nt, Human
acuucuccacccugcu

SEQ ID NO: 2729502 - RNA, 16 nt, Human
acuugaaauuugaauu

SEQ ID NO: 2729503 - RNA, 19 nt, Human
acuugaaauuugaauuuug

SEQ ID NO: 2729504 - RNA, 20 nt, Human
acuugaaauuugaauuuugu

SEQ ID NO: 2729505 - RNA, 19 nt, Human
acuugagcccagagugaac

SEQ ID NO: 2729506 - RNA, 16 nt, Human
acuugucaauaaaauc

SEQ ID NO: 2729507 - RNA, 16 nt, Human
acuuguggacacagcu

SEQ ID NO: 2729508 - RNA, 17 nt, Human
acuuguggacacagcuc

SEQ ID NO: 2729509 - RNA, 18 nt, Human
acuuguggacacagcucu

SEQ ID NO: 2729510 - RNA, 23 nt, Human
acuucuaaguaaaaccacagcag

SEQ ID NO: 2729511 - RNA, 14 nt, Human
acuucuccacccug

SEQ ID NO: 2729512 - RNA, 22 nt, Human
acuucgggaggucgaggcagga

SEQ ID NO: 2729513 - RNA, 13 nt, Human
ucucacuccuuga

SEQ ID NO: 2729514 - RNA, 12 nt, Human
ucucacucuguc

SEQ ID NO: 2729515 - RNA, 11 nt, Human
acuucagcuga

SEQ ID NO: 2729516 - RNA, 16 nt, Human
acuucagcugacuuuu

SEQ ID NO: 2729517 - RNA, 23 nt, Human
ucucacacaugagcaucaggcca

SEQ ID NO: 2729518 - RNA, 11 nt, Human
ucucacuccuu

SEQ ID NO: 2729519 - RNA, 21 nt, Human
ucucacagcuccaagaauuuc

SEQ ID NO: 2729520 - RNA, 12 nt, Human
ucucaggaaauc

SEQ ID NO: 2729521 - RNA, 12 nt, Human
ucucagggccug

SEQ ID NO: 2729522 - RNA, 13 nt, Human
ucucagggccugg

SEQ ID NO: 2729523 - RNA, 15 nt, Human
acuuguggacacagc

SEQ ID NO: 2729524 - RNA, 19 nt, Human
ucucagggccuggucguuu

SEQ ID NO: 2729525 - RNA, 14 nt, Human
ucucagggccuggu

SEQ ID NO: 2729526 - RNA, 15 nt, Human
ucucagggccugguc

SEQ ID NO: 2729527 - RNA, 13 nt, Human
ucuccaaaauaaa

SEQ ID NO: 2729528 - RNA, 22 nt, Human
ucuccaaaauaaaacuuuuuaa

SEQ ID NO: 2729529 - RNA, 19 nt, Human
ucuccaaaauaaaacuuuu

SEQ ID NO: 2729530 - RNA, 17 nt, Human
ucuccaaaauaaaacuu

SEQ ID NO: 2729531 - RNA, 11 nt, Human
ucuccaggcug

SEQ ID NO: 2729532 - RNA, 16 nt, Human
ucuccaggcuguaucc

SEQ ID NO: 2729533 - RNA, 16 nt, Human
acuuguguuuugcaag

SEQ ID NO: 2729534 - RNA, 15 nt, Human
acuuguuagaucuag

SEQ ID NO: 2729535 - RNA, 14 nt, Human
acuuguuagaucua

SEQ ID NO: 2729536 - RNA, 23 nt, Human
acuuguuagaucuaguucacucu

SEQ ID NO: 2729537 - RNA, 21 nt, Human
ucuccuccuuuucacaguucu

SEQ ID NO: 2729538 - RNA, 16 nt, Human
acuuucuagccagagg

SEQ ID NO: 2729539 - RNA, 17 nt, Human
acuuucuagccagagga

SEQ ID NO: 2729540 - RNA, 14 nt, Human
acuuugaccucugc

SEQ ID NO: 2729541 - RNA, 16 nt, Human
ucuccauguuugaugu

SEQ ID NO: 2729542 - RNA, 16 nt, Human
agacacacugaagaag

SEQ ID NO: 2729543 - RNA, 17 nt, Human
agacacacugaagaagc

SEQ ID NO: 2729544 - RNA, 17 nt, Human
agacacaggcccggcuc

SEQ ID NO: 2729545 - RNA, 19 nt, Human
agacacaggcccggcucca

SEQ ID NO: 2729546 - RNA, 20 nt, Human
agacacaggcccggcuccag

SEQ ID NO: 2729547 - RNA, 21 nt, Human
agacacaggcccggcuccagg

SEQ ID NO: 2729548 - RNA, 22 nt, Human
agacacaggcccggcuccaggc

SEQ ID NO: 2729549 - RNA, 14 nt, Human
agacacaagccuuc

SEQ ID NO: 2729550 - RNA, 13 nt, Human
agacacaagccuu

SEQ ID NO: 2729551 - RNA, 19 nt, Human
agacacaacuauuuuucca

SEQ ID NO: 2729552 - RNA, 20 nt, Human
agacacaacuauuuuuccaa

SEQ ID NO: 2729553 - RNA, 17 nt, Human
agaauucucuuauccaa

SEQ ID NO: 2729554 - RNA, 19 nt, Human
agaauucucuaguuugauu

SEQ ID NO: 2729555 - RNA, 18 nt, Human
agaauucucuaguuugau

SEQ ID NO: 2729556 - RNA, 22 nt, Human
agacaccuugacagggcacacc

SEQ ID NO: 2729557 - RNA, 19 nt, Human
agacaccuugacagggcac

SEQ ID NO: 2729558 - RNA, 24 nt, Human
agacacauguccaagaagcccagg

SEQ ID NO: 2729559 - RNA, 23 nt, Human
agacacaggcccggcuccaggcu

SEQ ID NO: 2729560 - RNA, 21 nt, Human
agacacauguccaagaagccc

SEQ ID NO: 2729561 - RNA, 22 nt, Human
agacacauguccaagaagccca

SEQ ID NO: 2729562 - RNA, 13 nt, Human
agacagcugccug

SEQ ID NO: 2729563 - RNA, 14 nt, Human
agacagcugccugg

SEQ ID NO: 2729564 - RNA, 23 nt, Human
ucuuagaugcaguucugaagaag

SEQ ID NO: 2729565 - RNA, 12 nt, Human
ucuuagauguau

SEQ ID NO: 2729566 - RNA, 22 nt, Human
ucuuagaugcaguucugaagaa

SEQ ID NO: 2729567 - RNA, 13 nt, Human
agacagucccugc

SEQ ID NO: 2729568 - RNA, 14 nt, Human
agacagucccugcc

SEQ ID NO: 2729569 - RNA, 19 nt, Human
agacagucccugccaaugg

SEQ ID NO: 2729570 - RNA, 12 nt, Human
agacagucccug

SEQ ID NO: 2729571 - RNA, 15 nt, Human
agacagcugccuggg

SEQ ID NO: 2729572 - RNA, 16 nt, Human
agacagcugccuggga

SEQ ID NO: 2729573 - RNA, 23 nt, Human
ucuguuuagauaauacaccacua

SEQ ID NO: 2729574 - RNA, 19 nt, Human
ucuguuuagauaauacacc

SEQ ID NO: 2729575 - RNA, 16 nt, Human
ucuguuuagauaauac

SEQ ID NO: 2729576 - RNA, 22 nt, Human
ucugugaacuugaaauuugaau

SEQ ID NO: 2729577 - RNA, 19 nt, Human
ucugugaacuugaaauuug

SEQ ID NO: 2729578 - RNA, 13 nt, Human
ucuguacuuuuug

SEQ ID NO: 2729579 - RNA, 17 nt, Human
ucuguacuuuuuggcau

SEQ ID NO: 2729580 - RNA, 14 nt, Human
ucuguacuuuuugg

SEQ ID NO: 2729581 - RNA, 18 nt, Human
ucuguacgucugacaggc

SEQ ID NO: 2729582 - RNA, 20 nt, Human
agaauuauaauuaguuccuc

SEQ ID NO: 2729583 - RNA, 20 nt, Human
agaauucucagaaucucaaa

SEQ ID NO: 2729584 - RNA, 14 nt, Human
agaauucucuaguu

SEQ ID NO: 2729585 - RNA, 21 nt, Human
agaauguguuuaaacuugguu

SEQ ID NO: 2729586 - RNA, 23 nt, Human
agaaccccaggguccuguagccc

SEQ ID NO: 2729587 - RNA, 22 nt, Human
agagaaaaaauauuuuccugcc

SEQ ID NO: 2729588 - RNA, 19 nt, Human
agacuuuucuuucagccaa

SEQ ID NO: 2729589 - RNA, 20 nt, Human
agacucgcgacaaugcaaac

SEQ ID NO: 2729590 - RNA, 12 nt, Human
agacuggugacu

SEQ ID NO: 2729591 - RNA, 14 nt, Human
agacuggugacuga

SEQ ID NO: 2729592 - RNA, 13 nt, Human
agacuggugacug

SEQ ID NO: 2729593 - RNA, 16 nt, Human
agacuguacaaaguag

SEQ ID NO: 2729594 - RNA, 15 nt, Human
agacuguacaaagua

SEQ ID NO: 2729595 - RNA, 14 nt, Human
agacuguacaaagu

SEQ ID NO: 2729596 - RNA, 17 nt, Human
agacuggugacugauuc

SEQ ID NO: 2729597 - RNA, 16 nt, Human
agacuggugacugauu

SEQ ID NO: 2729598 - RNA, 14 nt, Human
ucuugguuuguaaa

SEQ ID NO: 2729599 - RNA, 22 nt, Human
ucuuuaaugucacaggcagguc

SEQ ID NO: 2729600 - RNA, 16 nt, Human
ucuugguuuguaaauu

SEQ ID NO: 2729601 - RNA, 20 nt, Human
ucuuuaaugucacaggcagg

SEQ ID NO: 2729602 - RNA, 15 nt, Human
agacucgcgacaaug

SEQ ID NO: 2729603 - RNA, 17 nt, Human
agacucgcgacaaugca

SEQ ID NO: 2729604 - RNA, 18 nt, Human
agacucgcgacaaugcaa

SEQ ID NO: 2729605 - RNA, 19 nt, Human
agacucgcgacaaugcaaa

SEQ ID NO: 2729606 - RNA, 18 nt, Human
ucuuucuggcuaugcauu

SEQ ID NO: 2729607 - RNA, 19 nt, Human
ucuuucuggcuaugcauuu

SEQ ID NO: 2729608 - RNA, 13 nt, Human
ucuuucugcuuug

SEQ ID NO: 2729609 - RNA, 20 nt, Human
ucuuuauaauucuacuuuga

SEQ ID NO: 2729610 - RNA, 15 nt, Human
ucuuauuucauuucu

SEQ ID NO: 2729611 - RNA, 17 nt, Human
ucuuauuuaaugaaaga

SEQ ID NO: 2729612 - RNA, 16 nt, Human
ucuuauuucauuucuu

SEQ ID NO: 2729613 - RNA, 22 nt, Human
ucuucugcuucagccucccgag

SEQ ID NO: 2729614 - RNA, 21 nt, Human
ucuucuguacgucugacaggc

SEQ ID NO: 2729615 - RNA, 22 nt, Human
ucuucuguacgucugacaggca

SEQ ID NO: 2729616 - RNA, 20 nt, Human
ucuucuguacgucugacagg

SEQ ID NO: 2729617 - RNA, 23 nt, Human
ucuucuguacgucugacaggcaa

SEQ ID NO: 2729618 - RNA, 23 nt, Human
agacauacuaaccagcagaaaug

SEQ ID NO: 2729619 - RNA, 23 nt, Human
agacuauucaaacagucucagga

SEQ ID NO: 2729620 - RNA, 19 nt, Human
ucuugagccuugaacuuug

SEQ ID NO: 2729621 - RNA, 18 nt, Human
ucuugagccuugaacuuu

SEQ ID NO: 2729622 - RNA, 15 nt, Human
agacucauucuucug

SEQ ID NO: 2729623 - RNA, 17 nt, Human
ucuugagccuugaacuu

SEQ ID NO: 2729624 - RNA, 14 nt, Human
agacccggcugcgu

SEQ ID NO: 2729625 - RNA, 16 nt, Human
agaguuuagcuggaaa

SEQ ID NO: 2729626 - RNA, 17 nt, Human
agaguuuagcuggaaaa

SEQ ID NO: 2729627 - RNA, 21 nt, Human
agaguuguuacauuuuuaagu

SEQ ID NO: 2729628 - RNA, 12 nt, Human
agaguuguuaca

SEQ ID NO: 2729629 - RNA, 17 nt, Human
agaguugauacuacagu

SEQ ID NO: 2729630 - RNA, 22 nt, Human
agaguugauacuacaguuuguu

SEQ ID NO: 2729631 - RNA, 20 nt, Human
agaguugauacuacaguuug

SEQ ID NO: 2729632 - RNA, 20 nt, Human
ugaaugguuuucaaaauaaa

SEQ ID NO: 2729633 - RNA, 19 nt, Human
ugaaugucagugugacuga

SEQ ID NO: 2729634 - RNA, 22 nt, Human
agagucagaaguuucugccgca

SEQ ID NO: 2729635 - RNA, 20 nt, Human
ugacacacagcucuguccug

SEQ ID NO: 2729636 - RNA, 23 nt, Human
ugaauuuauuggcuuuucugauc

SEQ ID NO: 2729637 - RNA, 22 nt, Human
ugaauuuauuggcuuuucugau

SEQ ID NO: 2729638 - RNA, 15 nt, Human
ugaauuucuuuugcc

SEQ ID NO: 2729639 - RNA, 16 nt, Human
ugaauuuuacauggcu

SEQ ID NO: 2729640 - RNA, 21 nt, Human
ugaauuuauuggcuuuucuga

SEQ ID NO: 2729641 - RNA, 17 nt, Human
ugaauuuauuggcuuuu

SEQ ID NO: 2729642 - RNA, 17 nt, Human
agaucacgccacugcac

SEQ ID NO: 2729643 - RNA, 18 nt, Human
agaucacgccacugcacu

SEQ ID NO: 2729644 - RNA, 14 nt, Human
agaucacgccacug

SEQ ID NO: 2729645 - RNA, 15 nt, Human
agaucacgccacugc

SEQ ID NO: 2729646 - RNA, 16 nt, Human
agaucacgccacugca

SEQ ID NO: 2729647 - RNA, 12 nt, Human
agauacugaaau

SEQ ID NO: 2729648 - RNA, 15 nt, Human
agauacugaaauaaa

SEQ ID NO: 2729649 - RNA, 13 nt, Human
agauacugaaaua

SEQ ID NO: 2729650 - RNA, 12 nt, Human
agauaaaugugc

SEQ ID NO: 2729651 - RNA, 18 nt, Human
agaugcaguucugaagaa

SEQ ID NO: 2729652 - RNA, 19 nt, Human
agaugcaguucugaagaag

SEQ ID NO: 2729653 - RNA, 17 nt, Human
agaugcaguucugaaga

SEQ ID NO: 2729654 - RNA, 14 nt, Human
agaugcaccagccc

SEQ ID NO: 2729655 - RNA, 15 nt, Human
agaugcaccagcccu

SEQ ID NO: 2729656 - RNA, 23 nt, Human
ugaccauucuccaccugccaggg

SEQ ID NO: 2729657 - RNA, 12 nt, Human
ugacccacugcu

SEQ ID NO: 2729658 - RNA, 13 nt, Human
ugacccacugcuu

SEQ ID NO: 2729659 - RNA, 15 nt, Human
agaugcuucucacug

SEQ ID NO: 2729660 - RNA, 13 nt, Human
agaucagccuggg

SEQ ID NO: 2729661 - RNA, 15 nt, Human
agaucagccugggca

SEQ ID NO: 2729662 - RNA, 18 nt, Human
ugacauaaaaacaacuuu

SEQ ID NO: 2729663 - RNA, 20 nt, Human
ugacauaaaaacaacuuuau

SEQ ID NO: 2729664 - RNA, 20 nt, Human
ugacauuguuggccaaagcc

SEQ ID NO: 2729665 - RNA, 21 nt, Human
ugacauuguuggccaaagcca

SEQ ID NO: 2729666 - RNA, 18 nt, Human
ugaccaaugauggucacc

SEQ ID NO: 2729667 - RNA, 17 nt, Human
ugacauaaaaacaacuu

SEQ ID NO: 2729668 - RNA, 20 nt, Human
ugacagggcacaccgggcac

SEQ ID NO: 2729669 - RNA, 11 nt, Human
ugacagggcac

SEQ ID NO: 2729670 - RNA, 16 nt, Human
ugacagggcacaccgg

SEQ ID NO: 2729671 - RNA, 20 nt, Human
ugacaggcaaugcuggcugu

SEQ ID NO: 2729672 - RNA, 21 nt, Human
ugacacacagcucuguccugg

SEQ ID NO: 2729673 - RNA, 12 nt, Human
agagguuuuaaa

SEQ ID NO: 2729674 - RNA, 22 nt, Human
ugaagcacagugaucaaguuau

SEQ ID NO: 2729675 - RNA, 24 nt, Human
agaggcagccccauucugccugcc

SEQ ID NO: 2729676 - RNA, 13 nt, Human
agaggcagcccca

SEQ ID NO: 2729677 - RNA, 19 nt, Human
agaggcagccccauucugc

SEQ ID NO: 2729678 - RNA, 19 nt, Human
agaggccaugggccuccug

SEQ ID NO: 2729679 - RNA, 17 nt, Human
agaggcuaugugagcac

SEQ ID NO: 2729680 - RNA, 10 nt, Human
agaggcaggg

SEQ ID NO: 2729681 - RNA, 13 nt, Human
agaggcagggucu

SEQ ID NO: 2729682 - RNA, 21 nt, Human
agagcuguucacagccagacu

SEQ ID NO: 2729683 - RNA, 19 nt, Human
agagcuguucacagccaga

SEQ ID NO: 2729684 - RNA, 22 nt, Human
agagcugcccucuccugggcag

SEQ ID NO: 2729685 - RNA, 22 nt, Human
ugaacuuugaccucugcagcaa

SEQ ID NO: 2729686 - RNA, 17 nt, Human
ugaacuuugaccucugc

SEQ ID NO: 2729687 - RNA, 20 nt, Human
ugaacuuugaccucugcagc

SEQ ID NO: 2729688 - RNA, 19 nt, Human
ugaacuuugaccucugcag

SEQ ID NO: 2729689 - RNA, 23 nt, Human
ugaacuagaguuuagcuggaaaa

SEQ ID NO: 2729690 - RNA, 14 nt, Human
ugaacuccuggccu

SEQ ID NO: 2729691 - RNA, 15 nt, Human
ugaacuccuggccuc

SEQ ID NO: 2729692 - RNA, 12 nt, Human
ugaacuccuggc

SEQ ID NO: 2729693 - RNA, 15 nt, Human
ugaaauuuuuauuaa

SEQ ID NO: 2729694 - RNA, 22 nt, Human
ugaaccgaugagaaauaaaguu

SEQ ID NO: 2729695 - RNA, 18 nt, Human
ugaaauauuauguuaaaa

SEQ ID NO: 2729696 - RNA, 15 nt, Human
ugaaauuguauuaca

SEQ ID NO: 2729697 - RNA, 17 nt, Human
ugaaauuugaauuuugu

SEQ ID NO: 2729698 - RNA, 14 nt, Human
ugaaauuugaauuu

SEQ ID NO: 2729699 - RNA, 16 nt, Human
ugaaauuugaauuuug

SEQ ID NO: 2729700 - RNA, 15 nt, Human
ugaaauuugaauuuu

SEQ ID NO: 2729701 - RNA, 23 nt, Human
ugaaauuuccugggagcuuuugu

SEQ ID NO: 2729702 - RNA, 20 nt, Human
ugaaauuguaauuauaucug

SEQ ID NO: 2729703 - RNA, 21 nt, Human
ugaaauuguaauuauaucuga

SEQ ID NO: 2729704 - RNA, 15 nt, Human
agagcugcccucucc

SEQ ID NO: 2729705 - RNA, 13 nt, Human
agagcugcccucu

SEQ ID NO: 2729706 - RNA, 14 nt, Human
agagcugcccucuc

SEQ ID NO: 2729707 - RNA, 18 nt, Human
agagcugccaccugccug

SEQ ID NO: 2729708 - RNA, 20 nt, Human
agagcagagaccaucccuga

SEQ ID NO: 2729709 - RNA, 17 nt, Human
agagcagagaccauccc

SEQ ID NO: 2729710 - RNA, 18 nt, Human
agagcagagaccaucccu

SEQ ID NO: 2729711 - RNA, 11 nt, Human
agagccuugcg

SEQ ID NO: 2729712 - RNA, 21 nt, Human
agagccuugcggaagguucua

SEQ ID NO: 2729713 - RNA, 22 nt, Human
agagauuuuuuuguuguuuguu

SEQ ID NO: 2729714 - RNA, 23 nt, Human
agagauuuuuuuguuguuuguuu

SEQ ID NO: 2729715 - RNA, 17 nt, Human
ucuuuggacccugaggc

SEQ ID NO: 2729716 - RNA, 21 nt, Human
ucuuuggacccugaggcccag

SEQ ID NO: 2729717 - RNA, 14 nt, Human
agagcaaaauugau

SEQ ID NO: 2729718 - RNA, 12 nt, Human
agagcagagacc

SEQ ID NO: 2729719 - RNA, 20 nt, Human
agcaucacaugaacuuguaa

SEQ ID NO: 2729720 - RNA, 21 nt, Human
agcauauucaggaagcucagg

SEQ ID NO: 2729721 - RNA, 17 nt, Human
agcauauucaggaagcu

SEQ ID NO: 2729722 - RNA, 19 nt, Human
agcauauucaggaagcuca

SEQ ID NO: 2729723 - RNA, 15 nt, Human
ugaucacggcucacu

SEQ ID NO: 2729724 - RNA, 13 nt, Human
ugaucacggcuca

SEQ ID NO: 2729725 - RNA, 14 nt, Human
ugaucacggcucac

SEQ ID NO: 2729726 - RNA, 21 nt, Human
ugauacagaaaaguugaauuu

SEQ ID NO: 2729727 - RNA, 23 nt, Human
agcaucaggccaggcccucugcc

SEQ ID NO: 2729728 - RNA, 22 nt, Human
agcaucaggccaggcccucugc

SEQ ID NO: 2729729 - RNA, 21 nt, Human
agcaucaggccaggcccucug

SEQ ID NO: 2729730 - RNA, 16 nt, Human
agcauauucaggaagc

SEQ ID NO: 2729731 - RNA, 13 nt, Human
agcauccuggaau

SEQ ID NO: 2729732 - RNA, 13 nt, Human
agcauggcugcca

SEQ ID NO: 2729733 - RNA, 15 nt, Human
agcauccuggaauau

SEQ ID NO: 2729734 - RNA, 14 nt, Human
agcauccuggaaua

SEQ ID NO: 2729735 - RNA, 22 nt, Human
agcauuuagauguauagguuga

SEQ ID NO: 2729736 - RNA, 19 nt, Human
agcauggcugccaauggga

SEQ ID NO: 2729737 - RNA, 18 nt, Human
agcauuuguguugaagag

SEQ ID NO: 2729738 - RNA, 17 nt, Human
agcauuuguguugaaga

SEQ ID NO: 2729739 - RNA, 22 nt, Human
agcauuuugcuaaaugugaaug

SEQ ID NO: 2729740 - RNA, 15 nt, Human
agcauuuugcuaaau

SEQ ID NO: 2729741 - RNA, 16 nt, Human
ugauuaaguaaugaua

SEQ ID NO: 2729742 - RNA, 16 nt, Human
agccacggccaggcca

SEQ ID NO: 2729743 - RNA, 15 nt, Human
ugauuaaguaaugau

SEQ ID NO: 2729744 - RNA, 20 nt, Human
ugauuaaccacuucagcuga

SEQ ID NO: 2729745 - RNA, 17 nt, Human
ugauuaaauucuugcaa

SEQ ID NO: 2729746 - RNA, 16 nt, Human
ugauuaaauucuugca

SEQ ID NO: 2729747 - RNA, 13 nt, Human
ugauuaaauucuu

SEQ ID NO: 2729748 - RNA, 22 nt, Human
ugauggggcccugccuccuuug

SEQ ID NO: 2729749 - RNA, 19 nt, Human
ugauguuuuccaugagucc

SEQ ID NO: 2729750 - RNA, 21 nt, Human
ugauguuuuaaggaugcuugu

SEQ ID NO: 2729751 - RNA, 17 nt, Human
ugauguuuuccaugagu

SEQ ID NO: 2729752 - RNA, 21 nt, Human
ugaugggcaacccccagccug

SEQ ID NO: 2729753 - RNA, 22 nt, Human
ugaugggcaacccccagccugc

SEQ ID NO: 2729754 - RNA, 13 nt, Human
ugauggggcccug

SEQ ID NO: 2729755 - RNA, 21 nt, Human
ugaugaucuuugcagacaggc

SEQ ID NO: 2729756 - RNA, 22 nt, Human
ugaugaaaugaggucagagccu

SEQ ID NO: 2729757 - RNA, 14 nt, Human
ugaucuaggaagac

SEQ ID NO: 2729758 - RNA, 15 nt, Human
ugaucuaggaagacu

SEQ ID NO: 2729759 - RNA, 23 nt, Human
ugaugaaaugaggucagagccug

SEQ ID NO: 2729760 - RNA, 19 nt, Human
ugaugaucuuugcagacag

SEQ ID NO: 2729761 - RNA, 20 nt, Human
ugaugaucuuugcagacagg

SEQ ID NO: 2729762 - RNA, 19 nt, Human
ugauccagcagauuauuca

SEQ ID NO: 2729763 - RNA, 20 nt, Human
ugauccagcagauuauucac

SEQ ID NO: 2729764 - RNA, 13 nt, Human
ugaucuaggaaga

SEQ ID NO: 2729765 - RNA, 19 nt, Human
ugauccucccaccucagcc

SEQ ID NO: 2729766 - RNA, 20 nt, Human
ugauccucccaccucagccu

SEQ ID NO: 2729767 - RNA, 18 nt, Human
ugauccucccaccucagc

SEQ ID NO: 2729768 - RNA, 14 nt, Human
agcaggcuacuguc

SEQ ID NO: 2729769 - RNA, 20 nt, Human
agcaggcuacugucagcucc

SEQ ID NO: 2729770 - RNA, 19 nt, Human
agcaggcuacugucagcuc

SEQ ID NO: 2729771 - RNA, 17 nt, Human
agcaggcuacugucagc

SEQ ID NO: 2729772 - RNA, 16 nt, Human
agcaggcuacugucag

SEQ ID NO: 2729773 - RNA, 13 nt, Human
agcaggacaugga

SEQ ID NO: 2729774 - RNA, 15 nt, Human
agcagccacauuccu

SEQ ID NO: 2729775 - RNA, 11 nt, Human
agcagccacau

SEQ ID NO: 2729776 - RNA, 16 nt, Human
agcagcagggagggcu

SEQ ID NO: 2729777 - RNA, 20 nt, Human
ugacccaugcugcccuguga

SEQ ID NO: 2729778 - RNA, 17 nt, Human
ugacccaugcugcccug

SEQ ID NO: 2729779 - RNA, 18 nt, Human
ugacccaugcugcccugu

SEQ ID NO: 2729780 - RNA, 19 nt, Human
ugacccaugcugcccugug

SEQ ID NO: 2729781 - RNA, 19 nt, Human
agcagggcauggcugggaa

SEQ ID NO: 2729782 - RNA, 20 nt, Human
agcagggagggcuucugcca

SEQ ID NO: 2729783 - RNA, 13 nt, Human
agcagggcucagc

SEQ ID NO: 2729784 - RNA, 14 nt, Human
agcagggcucagcg

SEQ ID NO: 2729785 - RNA, 15 nt, Human
agcagggcucagcgg

SEQ ID NO: 2729786 - RNA, 22 nt, Human
agcagggcucagcggggacagc

SEQ ID NO: 2729787 - RNA, 13 nt, Human
agcagggaaacag

SEQ ID NO: 2729788 - RNA, 14 nt, Human
agcagggaaacagc

SEQ ID NO: 2729789 - RNA, 15 nt, Human
agcagggaaacagcu

SEQ ID NO: 2729790 - RNA, 21 nt, Human
agcaggcucucaggccagcug

SEQ ID NO: 2729791 - RNA, 22 nt, Human
agcaggcucucaggccagcugc

SEQ ID NO: 2729792 - RNA, 23 nt, Human
agcaggcucucaggccagcugcu

SEQ ID NO: 2729793 - RNA, 17 nt, Human
agcaggcucgggcuccc

SEQ ID NO: 2729794 - RNA, 13 nt, Human
agcaggcucucag

SEQ ID NO: 2729795 - RNA, 14 nt, Human
agcaggcucucagg

SEQ ID NO: 2729796 - RNA, 15 nt, Human
agcaggcucucaggc

SEQ ID NO: 2729797 - RNA, 16 nt, Human
agcaggcucucaggcc

SEQ ID NO: 2729798 - RNA, 17 nt, Human
agcaggcucucaggcca

SEQ ID NO: 2729799 - RNA, 18 nt, Human
agcaggcucucaggccag

SEQ ID NO: 2729800 - RNA, 19 nt, Human
agcaggcucucaggccagc

SEQ ID NO: 2729801 - RNA, 22 nt, Human
agcauaccaacacgagcaggcu

SEQ ID NO: 2729802 - RNA, 19 nt, Human
agcauaccaacacgagcag

SEQ ID NO: 2729803 - RNA, 15 nt, Human
agcauauauuuuuau

SEQ ID NO: 2729804 - RNA, 13 nt, Human
agcauaccaacac

SEQ ID NO: 2729805 - RNA, 23 nt, Human
agcauaaaaauuagccaagugug

SEQ ID NO: 2729806 - RNA, 22 nt, Human
agcauauauuuuuauauuuacu

SEQ ID NO: 2729807 - RNA, 20 nt, Human
agcauauauuuuuauauuua

SEQ ID NO: 2729808 - RNA, 18 nt, Human
agcauauauuuuuauauu

SEQ ID NO: 2729809 - RNA, 19 nt, Human
ugaguacguugugcauuug

SEQ ID NO: 2729810 - RNA, 18 nt, Human
ugaguacguugugcauuu

SEQ ID NO: 2729811 - RNA, 17 nt, Human
ugaguacguugugcauu

SEQ ID NO: 2729812 - RNA, 16 nt, Human
ugaguacguugugcau

SEQ ID NO: 2729813 - RNA, 19 nt, Human
agcagucaggaaagagaac

SEQ ID NO: 2729814 - RNA, 19 nt, Human
agcauaaaaauuagccaag

SEQ ID NO: 2729815 - RNA, 17 nt, Human
agcagucaggaaagaga

SEQ ID NO: 2729816 - RNA, 18 nt, Human
agcagucaggaaagagaa

SEQ ID NO: 2729817 - RNA, 21 nt, Human
ugagugggggaucacagccuc

SEQ ID NO: 2729818 - RNA, 18 nt, Human
ugaguucauacccuguua

SEQ ID NO: 2729819 - RNA, 15 nt, Human
ugauacaaugcugug

SEQ ID NO: 2729820 - RNA, 14 nt, Human
ugauacaaugcugu

SEQ ID NO: 2729821 - RNA, 15 nt, Human
ugaguucuacauaag

SEQ ID NO: 2729822 - RNA, 20 nt, Human
ugaguucuacauaaguaauu

SEQ ID NO: 2729823 - RNA, 22 nt, Human
ugaguucuacauaaguaauuca

SEQ ID NO: 2729824 - RNA, 16 nt, Human
ugauaaguaaaugcua

SEQ ID NO: 2729825 - RNA, 13 nt, Human
ugauaaguucaua

SEQ ID NO: 2729826 - RNA, 15 nt, Human
ugauaaguucauaca

SEQ ID NO: 2729827 - RNA, 17 nt, Human
ugauaaguucauacauu

SEQ ID NO: 2729828 - RNA, 19 nt, Human
ugauaaguucauacauugu

SEQ ID NO: 2729829 - RNA, 20 nt, Human
ugaguacguugugcauuugg

SEQ ID NO: 2729830 - RNA, 18 nt, Human
ugagucaccaagcccagu

SEQ ID NO: 2729831 - RNA, 16 nt, Human
ugagugccuuacacaa

SEQ ID NO: 2729832 - RNA, 17 nt, Human
ugagugcagcucuggag

SEQ ID NO: 2729833 - RNA, 13 nt, Human
ugagugccuuaca

SEQ ID NO: 2729834 - RNA, 14 nt, Human
ugagugccuuacac

SEQ ID NO: 2729835 - RNA, 17 nt, Human
ugccaguuauggcuaua

SEQ ID NO: 2729836 - RNA, 17 nt, Human
ugccagccgagauagcc

SEQ ID NO: 2729837 - RNA, 22 nt, Human
ugccagccgagauagccaaggc

SEQ ID NO: 2729838 - RNA, 13 nt, Human
ugccaauggacua

SEQ ID NO: 2729839 - RNA, 14 nt, Human
ugccaaugggagcu

SEQ ID NO: 2729840 - RNA, 16 nt, Human
ugcauuuaaaagauac

SEQ ID NO: 2729841 - RNA, 19 nt, Human
agccugugccucugggacu

SEQ ID NO: 2729842 - RNA, 18 nt, Human
agccugugccucugggac

SEQ ID NO: 2729843 - RNA, 17 nt, Human
agccugugccucuggga

SEQ ID NO: 2729844 - RNA, 20 nt, Human
agccuuagaagucacacagu

SEQ ID NO: 2729845 - RNA, 23 nt, Human
agccuugaacuuugaccucugca

SEQ ID NO: 2729846 - RNA, 13 nt, Human
agccuugaacuuu

SEQ ID NO: 2729847 - RNA, 19 nt, Human
agccuugcggaagguucua

SEQ ID NO: 2729848 - RNA, 21 nt, Human
agccuugaccauucuccaccu

SEQ ID NO: 2729849 - RNA, 18 nt, Human
agccuugaccauucucca

SEQ ID NO: 2729850 - RNA, 19 nt, Human
agccuugaccauucuccac

SEQ ID NO: 2729851 - RNA, 14 nt, Human
ugcauaccacuuuu

SEQ ID NO: 2729852 - RNA, 20 nt, Human
ugcauagauucccugagcag

SEQ ID NO: 2729853 - RNA, 16 nt, Human
ugcauaccacuuuugu

SEQ ID NO: 2729854 - RNA, 20 nt, Human
ugcauaccacuuuuguucuu

SEQ ID NO: 2729855 - RNA, 18 nt, Human
ugcauaccacuuuuguuc

SEQ ID NO: 2729856 - RNA, 18 nt, Human
ugcaugcugucccuuacg

SEQ ID NO: 2729857 - RNA, 19 nt, Human
ugcaugcugucccuuacgu

SEQ ID NO: 2729858 - RNA, 21 nt, Human
ugcaugcugucccuuacguga

SEQ ID NO: 2729859 - RNA, 17 nt, Human
ugcaucguuucaucuuc

SEQ ID NO: 2729860 - RNA, 13 nt, Human
agccuccugcccu

SEQ ID NO: 2729861 - RNA, 14 nt, Human
agccuccugcccuu

SEQ ID NO: 2729862 - RNA, 18 nt, Human
agccuccugcccuuaccu

SEQ ID NO: 2729863 - RNA, 12 nt, Human
ugcagacaggca

SEQ ID NO: 2729864 - RNA, 13 nt, Human
ugcagacaggcaa

SEQ ID NO: 2729865 - RNA, 21 nt, Human
ugcagacaggcaagcaccucc

SEQ ID NO: 2729866 - RNA, 18 nt, Human
ugcagccucacaguccuu

SEQ ID NO: 2729867 - RNA, 17 nt, Human
ugcagccucacaguccu

SEQ ID NO: 2729868 - RNA, 21 nt, Human
ugcagccucacaguccuuacc

SEQ ID NO: 2729869 - RNA, 17 nt, Human
ugcaauaaaauggguuu

SEQ ID NO: 2729870 - RNA, 21 nt, Human
ugcaauaaaauggguuuuacu

SEQ ID NO: 2729871 - RNA, 12 nt, Human
agcccaggccuc

SEQ ID NO: 2729872 - RNA, 15 nt, Human
ugcaaggucauuuuu

SEQ ID NO: 2729873 - RNA, 15 nt, Human
ugcaagccagauuuu

SEQ ID NO: 2729874 - RNA, 21 nt, Human
ugcaagccagauuuuccugaa

SEQ ID NO: 2729875 - RNA, 13 nt, Human
ugcaacaggcugg

SEQ ID NO: 2729876 - RNA, 18 nt, Human
ugcaaagcacugacuucu

SEQ ID NO: 2729877 - RNA, 22 nt, Human
ugcaaagcacugacuucuaagu

SEQ ID NO: 2729878 - RNA, 20 nt, Human
ugcaaagcacugacuucuaa

SEQ ID NO: 2729879 - RNA, 18 nt, Human
ugcaaaccaucauugaaa

SEQ ID NO: 2729880 - RNA, 20 nt, Human
ugcaaaccaucauugaaauc

SEQ ID NO: 2729881 - RNA, 21 nt, Human
ugcaaaggguaucaggugcug

SEQ ID NO: 2729882 - RNA, 20 nt, Human
ugcaaaguaucccuacugua

SEQ ID NO: 2729883 - RNA, 17 nt, Human
agccacggccaggccag

SEQ ID NO: 2729884 - RNA, 18 nt, Human
agccacggccaggccaga

SEQ ID NO: 2729885 - RNA, 12 nt, Human
ugcaaaccauca

SEQ ID NO: 2729886 - RNA, 13 nt, Human
ugcaaaccaucau

SEQ ID NO: 2729887 - RNA, 23 nt, Human
ugauuugacauagucuggcugua

SEQ ID NO: 2729888 - RNA, 15 nt, Human
ugcacuccagccugg

SEQ ID NO: 2729889 - RNA, 16 nt, Human
ugcacuccagccuggg

SEQ ID NO: 2729890 - RNA, 14 nt, Human
ugcacuccagccug

SEQ ID NO: 2729891 - RNA, 16 nt, Human
ugcaccggcuggccug

SEQ ID NO: 2729892 - RNA, 14 nt, Human
ugcaccggcuggcc

SEQ ID NO: 2729893 - RNA, 15 nt, Human
ugcaccggcuggccu

SEQ ID NO: 2729894 - RNA, 21 nt, Human
ugcaccacugcacuccagccu

SEQ ID NO: 2729895 - RNA, 13 nt, Human
ugcaccagcccuu

SEQ ID NO: 2729896 - RNA, 15 nt, Human
ugcaccacugcacuc

SEQ ID NO: 2729897 - RNA, 22 nt, Human
agccccuggaugcagccucaca

SEQ ID NO: 2729898 - RNA, 14 nt, Human
agccccgaggccuu

SEQ ID NO: 2729899 - RNA, 14 nt, Human
agcccaggccuccu

SEQ ID NO: 2729900 - RNA, 19 nt, Human
agcccaggccuccuacagc

SEQ ID NO: 2729901 - RNA, 16 nt, Human
agcccgggcucugccu

SEQ ID NO: 2729902 - RNA, 14 nt, Human
agcccugcagaggg

SEQ ID NO: 2729903 - RNA, 15 nt, Human
agcccugcagagggc

SEQ ID NO: 2729904 - RNA, 16 nt, Human
agcccugcagagggca

SEQ ID NO: 2729905 - RNA, 19 nt, Human
agcccugcagagggcacag

SEQ ID NO: 2729906 - RNA, 14 nt, Human
agccccuucugacc

SEQ ID NO: 2729907 - RNA, 15 nt, Human
agccccuucugaccc

SEQ ID NO: 2729908 - RNA, 16 nt, Human
agccccuucugaccca

SEQ ID NO: 2729909 - RNA, 19 nt, Human
agccccuucugacccaugc

SEQ ID NO: 2729910 - RNA, 13 nt, Human
agcccgggcucug

SEQ ID NO: 2729911 - RNA, 14 nt, Human
agcccgggcucugc

SEQ ID NO: 2729912 - RNA, 15 nt, Human
agcccgggcucugcc

SEQ ID NO: 2729913 - RNA, 14 nt, Human
aggaauucuguaua

SEQ ID NO: 2729914 - RNA, 13 nt, Human
aggaauucuguau

SEQ ID NO: 2729915 - RNA, 22 nt, Human
aggacuuuucuuuguggcuucc

SEQ ID NO: 2729916 - RNA, 17 nt, Human
aggacuuuucuuugugg

SEQ ID NO: 2729917 - RNA, 19 nt, Human
aggacuuuucuuuguggcu

SEQ ID NO: 2729918 - RNA, 23 nt, Human
aggacuucuuuaauuuuggaauu

SEQ ID NO: 2729919 - RNA, 22 nt, Human
aggacuucuuuaauuuuggaau

SEQ ID NO: 2729920 - RNA, 21 nt, Human
aggacuucuuuaauuuuggaa

SEQ ID NO: 2729921 - RNA, 16 nt, Human
aggacuucuuuaauuu

SEQ ID NO: 2729922 - RNA, 14 nt, Human
aggacuucuuuaau

SEQ ID NO: 2729923 - RNA, 17 nt, Human
aggagaguagaacagau

SEQ ID NO: 2729924 - RNA, 12 nt, Human
aggagcagccac

SEQ ID NO: 2729925 - RNA, 13 nt, Human
aggagcagccaca

SEQ ID NO: 2729926 - RNA, 16 nt, Human
aggagccuccugcccu

SEQ ID NO: 2729927 - RNA, 17 nt, Human
aggagccccgaggccuu

SEQ ID NO: 2729928 - RNA, 17 nt, Human
ugcuuuuaaaaaaaaau

SEQ ID NO: 2729929 - RNA, 18 nt, Human
ugcuuuuggucuguguga

SEQ ID NO: 2729930 - RNA, 23 nt, Human
ugcuuuuuaauauugauaugcuu

SEQ ID NO: 2729931 - RNA, 20 nt, Human
ugcuuuugucuaugggacuc

SEQ ID NO: 2729932 - RNA, 17 nt, Human
ugcuuugugauuuuugu

SEQ ID NO: 2729933 - RNA, 22 nt, Human
ugcuuugugauuuuuguaauuu

SEQ ID NO: 2729934 - RNA, 15 nt, Human
ugcuugagcucagga

SEQ ID NO: 2729935 - RNA, 17 nt, Human
aggagccuccugcccuu

SEQ ID NO: 2729936 - RNA, 23 nt, Human
uggaaauuuguuauaaugaauga

SEQ ID NO: 2729937 - RNA, 21 nt, Human
uggaaauuuguuauaaugaau

SEQ ID NO: 2729938 - RNA, 15 nt, Human
uggaagacagcucuu

SEQ ID NO: 2729939 - RNA, 16 nt, Human
uggaagacagcucuua

SEQ ID NO: 2729940 - RNA, 16 nt, Human
aggauucuuccucccu

SEQ ID NO: 2729941 - RNA, 22 nt, Human
aggaugcacagaguuguuacau

SEQ ID NO: 2729942 - RNA, 22 nt, Human
aggaugaucuaggaagacuuug

SEQ ID NO: 2729943 - RNA, 23 nt, Human
aggaugaucuaggaagacuuugg

SEQ ID NO: 2729944 - RNA, 19 nt, Human
aggauucuuccucccuccc

SEQ ID NO: 2729945 - RNA, 17 nt, Human
aggauucuuccucccuc

SEQ ID NO: 2729946 - RNA, 13 nt, Human
aggaucagucuga

SEQ ID NO: 2729947 - RNA, 17 nt, Human
aggcaagcaccuccugc

SEQ ID NO: 2729948 - RNA, 17 nt, Human
uggagcucguggaacag

SEQ ID NO: 2729949 - RNA, 21 nt, Human
uggagcucguggaacaguuac

SEQ ID NO: 2729950 - RNA, 20 nt, Human
aggcaagcaccuccugccuc

SEQ ID NO: 2729951 - RNA, 18 nt, Human
aggcaagcaccuccugcc

SEQ ID NO: 2729952 - RNA, 19 nt, Human
aggcaagcaccuccugccu

SEQ ID NO: 2729953 - RNA, 16 nt, Human
aggcaaggcugucaau

SEQ ID NO: 2729954 - RNA, 17 nt, Human
aggcaaggcugucaauu

SEQ ID NO: 2729955 - RNA, 14 nt, Human
uggagaaaauggac

SEQ ID NO: 2729956 - RNA, 18 nt, Human
aggauugcuacuguccua

SEQ ID NO: 2729957 - RNA, 15 nt, Human
aggauugcuacuguc

SEQ ID NO: 2729958 - RNA, 17 nt, Human
aggauugcuacuguccu

SEQ ID NO: 2729959 - RNA, 18 nt, Human
aggcauugugggaagggg

SEQ ID NO: 2729960 - RNA, 22 nt, Human
aggcauaaagucagggguuccc

SEQ ID NO: 2729961 - RNA, 15 nt, Human
aggcauaaagucagg

SEQ ID NO: 2729962 - RNA, 17 nt, Human
aggcaggugggauggau

SEQ ID NO: 2729963 - RNA, 12 nt, Human
aggcagggucuc

SEQ ID NO: 2729964 - RNA, 22 nt, Human
aggcaggucuugaacuccuggc

SEQ ID NO: 2729965 - RNA, 15 nt, Human
aggcagcuugaaacu

SEQ ID NO: 2729966 - RNA, 14 nt, Human
uggaguugaaaauc

SEQ ID NO: 2729967 - RNA, 20 nt, Human
uggagguacgaaaagagggg

SEQ ID NO: 2729968 - RNA, 16 nt, Human
aggcauuugcugaaua

SEQ ID NO: 2729969 - RNA, 20 nt, Human
aggcauuugcugaauacaga

SEQ ID NO: 2729970 - RNA, 14 nt, Human
uggagugcagugag

SEQ ID NO: 2729971 - RNA, 21 nt, Human
uggcacaucagcacgauuucu

SEQ ID NO: 2729972 - RNA, 23 nt, Human
uggcacaucagcacgauuucugu

SEQ ID NO: 2729973 - RNA, 21 nt, Human
uggaugccugguggcagcugc

SEQ ID NO: 2729974 - RNA, 23 nt, Human
uggaugccugguggcagcugcgg

SEQ ID NO: 2729975 - RNA, 15 nt, Human
aggcccccaggugcc

SEQ ID NO: 2729976 - RNA, 14 nt, Human
aggccccgcccagg

SEQ ID NO: 2729977 - RNA, 13 nt, Human
aggcccggcucca

SEQ ID NO: 2729978 - RNA, 17 nt, Human
aggcccggcuccaggcu

SEQ ID NO: 2729979 - RNA, 13 nt, Human
aggcccagagggc

SEQ ID NO: 2729980 - RNA, 13 nt, Human
uggcagcucagag

SEQ ID NO: 2729981 - RNA, 23 nt, Human
uggcagcucaccucucccuugga

SEQ ID NO: 2729982 - RNA, 21 nt, Human
uggcagcucaccucucccuug

SEQ ID NO: 2729983 - RNA, 22 nt, Human
uggcagcucaccucucccuugg

SEQ ID NO: 2729984 - RNA, 18 nt, Human
uggcacccggccccugcu

SEQ ID NO: 2729985 - RNA, 19 nt, Human
uggcacccggccccugcug

SEQ ID NO: 2729986 - RNA, 20 nt, Human
uggcacccggccccugcugg

SEQ ID NO: 2729987 - RNA, 15 nt, Human
aggccagccuugacc

SEQ ID NO: 2729988 - RNA, 13 nt, Human
aggccagccuuga

SEQ ID NO: 2729989 - RNA, 22 nt, Human
aggaaaucaaauaugcaaagca

SEQ ID NO: 2729990 - RNA, 21 nt, Human
aggaaaucaaauaugcaaagc

SEQ ID NO: 2729991 - RNA, 20 nt, Human
aggaaaucaaauaugcaaag

SEQ ID NO: 2729992 - RNA, 19 nt, Human
aggaaaucaaauaugcaaa

SEQ ID NO: 2729993 - RNA, 23 nt, Human
aggaaaggcuccaggagcagcca

SEQ ID NO: 2729994 - RNA, 16 nt, Human
aggaagcucagggccu

SEQ ID NO: 2729995 - RNA, 15 nt, Human
aggaagcucagggcc

SEQ ID NO: 2729996 - RNA, 13 nt, Human
aggaagcucaggg

SEQ ID NO: 2729997 - RNA, 14 nt, Human
aggaagcucagggc

SEQ ID NO: 2729998 - RNA, 22 nt, Human
ugcuauuucuauauuuucauuc

SEQ ID NO: 2729999 - RNA, 21 nt, Human
ugcuauuucuauauuuucauu

SEQ ID NO: 2730000 - RNA, 18 nt, Human
ugcuaucucccccagccc

SEQ ID NO: 2730001 - RNA, 16 nt, Human
aggaaaagcugcugac

SEQ ID NO: 2730002 - RNA, 13 nt, Human
ugcuaucuccccc

SEQ ID NO: 2730003 - RNA, 14 nt, Human
ugcuaucuccccca

SEQ ID NO: 2730004 - RNA, 17 nt, Human
ugcuaucucccccagcc

SEQ ID NO: 2730005 - RNA, 14 nt, Human
ugcucugcugacag

SEQ ID NO: 2730006 - RNA, 15 nt, Human
ugcucugcugacaga

SEQ ID NO: 2730007 - RNA, 20 nt, Human
ugcuccagcuguucagcugg

SEQ ID NO: 2730008 - RNA, 21 nt, Human
ugcuccagcuguucagcuggu

SEQ ID NO: 2730009 - RNA, 17 nt, Human
ugccuuuucccaacucc

SEQ ID NO: 2730010 - RNA, 19 nt, Human
ugccuuuucccaacuccag

SEQ ID NO: 2730011 - RNA, 14 nt, Human
ugcgguccacccag

SEQ ID NO: 2730012 - RNA, 15 nt, Human
ugcgguccacccagg

SEQ ID NO: 2730013 - RNA, 14 nt, Human
ugcuacaaaaacac

SEQ ID NO: 2730014 - RNA, 11 nt, Human
ugcuacacacu

SEQ ID NO: 2730015 - RNA, 20 nt, Human
agcuuaaaggggcuagagug

SEQ ID NO: 2730016 - RNA, 19 nt, Human
agcuugcccuguuaaaaga

SEQ ID NO: 2730017 - RNA, 18 nt, Human
agcuugcccuguuaaaag

SEQ ID NO: 2730018 - RNA, 16 nt, Human
agcuugcccuguuaaa

SEQ ID NO: 2730019 - RNA, 22 nt, Human
agcuugaggguugggcuggugu

SEQ ID NO: 2730020 - RNA, 23 nt, Human
agcuugaccgugaggccagagac

SEQ ID NO: 2730021 - RNA, 20 nt, Human
agcuugaccgugaggccaga

SEQ ID NO: 2730022 - RNA, 22 nt, Human
agcuugaccgugaggccagaga

SEQ ID NO: 2730023 - RNA, 14 nt, Human
aggaaaagcugcug

SEQ ID NO: 2730024 - RNA, 20 nt, Human
ugcccuguuaaaagaugaaa

SEQ ID NO: 2730025 - RNA, 19 nt, Human
ugcccuguuaaaagaugaa

SEQ ID NO: 2730026 - RNA, 13 nt, Human
agcugcccucucc

SEQ ID NO: 2730027 - RNA, 14 nt, Human
agcugcccucuccu

SEQ ID NO: 2730028 - RNA, 15 nt, Human
agcugcccucuccug

SEQ ID NO: 2730029 - RNA, 16 nt, Human
agcugcccucuccugg

SEQ ID NO: 2730030 - RNA, 18 nt, Human
ugcccuuaccugccagga

SEQ ID NO: 2730031 - RNA, 14 nt, Human
ugccgcagcccugc

SEQ ID NO: 2730032 - RNA, 12 nt, Human
ugccgcagcccu

SEQ ID NO: 2730033 - RNA, 12 nt, Human
ugccucagccuc

SEQ ID NO: 2730034 - RNA, 13 nt, Human
ugccucagccucc

SEQ ID NO: 2730035 - RNA, 16 nt, Human
agcucuguccugggag

SEQ ID NO: 2730036 - RNA, 21 nt, Human
agcucuguccugggagugagc

SEQ ID NO: 2730037 - RNA, 23 nt, Human
agcucuguccugggagugagcug

SEQ ID NO: 2730038 - RNA, 14 nt, Human
agcugccagccgag

SEQ ID NO: 2730039 - RNA, 20 nt, Human
agcugccagccgagauagcc

SEQ ID NO: 2730040 - RNA, 14 nt, Human
agcucuguccuggg

SEQ ID NO: 2730041 - RNA, 17 nt, Human
agcucugguccauagag

SEQ ID NO: 2730042 - RNA, 12 nt, Human
agcucuggucca

SEQ ID NO: 2730043 - RNA, 16 nt, Human
agcuccuucuguccua

SEQ ID NO: 2730044 - RNA, 21 nt, Human
agcuccuucuguccuacucug

SEQ ID NO: 2730045 - RNA, 13 nt, Human
agcucccaggcau

SEQ ID NO: 2730046 - RNA, 23 nt, Human
agcucccaggcauuccccaggag

SEQ ID NO: 2730047 - RNA, 15 nt, Human
agcuccuucuguccu

SEQ ID NO: 2730048 - RNA, 22 nt, Human
ugccaucaauaaaaaauuauga

SEQ ID NO: 2730049 - RNA, 14 nt, Human
ugccaucaauaaaa

SEQ ID NO: 2730050 - RNA, 14 nt, Human
agcuguucacagcc

SEQ ID NO: 2730051 - RNA, 19 nt, Human
agcuguuacugucuucagu

SEQ ID NO: 2730052 - RNA, 21 nt, Human
ugccuuacccucauguucuua

SEQ ID NO: 2730053 - RNA, 16 nt, Human
ugccuuggggacaaga

SEQ ID NO: 2730054 - RNA, 20 nt, Human
ugccuuacccucauguucuu

SEQ ID NO: 2730055 - RNA, 16 nt, Human
ugccuguugggccagg

SEQ ID NO: 2730056 - RNA, 17 nt, Human
ugccuguugggccagga

SEQ ID NO: 2730057 - RNA, 17 nt, Human
agcugugcucuggacag

SEQ ID NO: 2730058 - RNA, 18 nt, Human
agcugugcucuggacagg

SEQ ID NO: 2730059 - RNA, 18 nt, Human
agcuguuacugucuucag

SEQ ID NO: 2730060 - RNA, 14 nt, Human
agcuguuacugucu

SEQ ID NO: 2730061 - RNA, 22 nt, Human
agcugggguggggaccucaggc

SEQ ID NO: 2730062 - RNA, 23 nt, Human
agcugggguggggaccucaggcc

SEQ ID NO: 2730063 - RNA, 20 nt, Human
agcugggacuacaggcaccc

SEQ ID NO: 2730064 - RNA, 23 nt, Human
agcugggacuacaggcacccacc

SEQ ID NO: 2730065 - RNA, 16 nt, Human
agcugggacuacaggu

SEQ ID NO: 2730066 - RNA, 20 nt, Human
agcugggguggggaccucag

SEQ ID NO: 2730067 - RNA, 20 nt, Human
agcugcuugggcuucauccu

SEQ ID NO: 2730068 - RNA, 16 nt, Human
agcugcuugggcuuca

SEQ ID NO: 2730069 - RNA, 18 nt, Human
agcugccuguucagcucc

SEQ ID NO: 2730070 - RNA, 14 nt, Human
agcugccuguucag

SEQ ID NO: 2730071 - RNA, 16 nt, Human
agcugccuguucagcu

SEQ ID NO: 2730072 - RNA, 16 nt, Human
ugccuggauggggcug

SEQ ID NO: 2730073 - RNA, 17 nt, Human
ugccuggauggggcugc

SEQ ID NO: 2730074 - RNA, 20 nt, Human
ugccuggauggggcugcacc

SEQ ID NO: 2730075 - RNA, 21 nt, Human
ugccuggauggggcugcaccg

SEQ ID NO: 2730076 - RNA, 20 nt, Human
ugccugcccaggccccugcc

SEQ ID NO: 2730077 - RNA, 22 nt, Human
ugccugcccaggccccugccac

SEQ ID NO: 2730078 - RNA, 23 nt, Human
ugccugcccaggccccugccacc

SEQ ID NO: 2730079 - RNA, 14 nt, Human
ugccucagccuccc

SEQ ID NO: 2730080 - RNA, 18 nt, Human
ugccucugccucugacac

SEQ ID NO: 2730081 - RNA, 20 nt, Human
ugccucugccucugacacac

SEQ ID NO: 2730082 - RNA, 17 nt, Human
ugccucugccucugaca

SEQ ID NO: 2730083 - RNA, 16 nt, Human
uguaaaggaauuuaaa

SEQ ID NO: 2730084 - RNA, 16 nt, Human
uguaaauaguauuuga

SEQ ID NO: 2730085 - RNA, 15 nt, Human
uguaaauagcucagg

SEQ ID NO: 2730086 - RNA, 16 nt, Human
uguaaauagcucaggu

SEQ ID NO: 2730087 - RNA, 15 nt, Human
uguaaauacaauuuu

SEQ ID NO: 2730088 - RNA, 14 nt, Human
ugguuauggagagg

SEQ ID NO: 2730089 - RNA, 14 nt, Human
ugguuuucaaaaua

SEQ ID NO: 2730090 - RNA, 15 nt, Human
ugguuuguaaauuaa

SEQ ID NO: 2730091 - RNA, 17 nt, Human
ugguuuucaaaauaaaa

SEQ ID NO: 2730092 - RNA, 15 nt, Human
ugguuuucaaaauaa

SEQ ID NO: 2730093 - RNA, 14 nt, Human
aggugauccaccca

SEQ ID NO: 2730094 - RNA, 20 nt, Human
aggugauccacccaccucag

SEQ ID NO: 2730095 - RNA, 18 nt, Human
aggugccucaagagaagg

SEQ ID NO: 2730096 - RNA, 15 nt, Human
aggugggauccucca

SEQ ID NO: 2730097 - RNA, 16 nt, Human
agguggggcagcuuga

SEQ ID NO: 2730098 - RNA, 18 nt, Human
aggugggauccuccaggu

SEQ ID NO: 2730099 - RNA, 23 nt, Human
agguggggcagcuugaggguugg

SEQ ID NO: 2730100 - RNA, 16 nt, Human
aggugggauccuccag

SEQ ID NO: 2730101 - RNA, 17 nt, Human
aggugggauccuccagg

SEQ ID NO: 2730102 - RNA, 14 nt, Human
agguuuaagcuguu

SEQ ID NO: 2730103 - RNA, 19 nt, Human
agguggggucacucuggca

SEQ ID NO: 2730104 - RNA, 17 nt, Human
aggugugaaccaccaca

SEQ ID NO: 2730105 - RNA, 15 nt, Human
aggugugcucugauc

SEQ ID NO: 2730106 - RNA, 20 nt, Human
aggugugcucugaucaucca

SEQ ID NO: 2730107 - RNA, 16 nt, Human
uggugcgaucuggguu

SEQ ID NO: 2730108 - RNA, 17 nt, Human
uggugcgaucuggguuc

SEQ ID NO: 2730109 - RNA, 14 nt, Human
uggugcccugcuuu

SEQ ID NO: 2730110 - RNA, 20 nt, Human
uggugcccugcuuucagaua

SEQ ID NO: 2730111 - RNA, 19 nt, Human
uggugcccugcuuucagau

SEQ ID NO: 2730112 - RNA, 16 nt, Human
uggugcccugcuuuca

SEQ ID NO: 2730113 - RNA, 18 nt, Human
ugguuaggcauuguggga

SEQ ID NO: 2730114 - RNA, 20 nt, Human
ugguuaggcauugugggaag

SEQ ID NO: 2730115 - RNA, 14 nt, Human
ugguggcagcugcg

SEQ ID NO: 2730116 - RNA, 13 nt, Human
ugguggcagcugc

SEQ ID NO: 2730117 - RNA, 15 nt, Human
ugguggcagcugcgg

SEQ ID NO: 2730118 - RNA, 16 nt, Human
aggucuugaacuccug

SEQ ID NO: 2730119 - RNA, 15 nt, Human
uggucagauuugaac

SEQ ID NO: 2730120 - RNA, 16 nt, Human
uggucagauuugaacu

SEQ ID NO: 2730121 - RNA, 13 nt, Human
aggucagagccug

SEQ ID NO: 2730122 - RNA, 14 nt, Human
aggucagagccugc

SEQ ID NO: 2730123 - RNA, 15 nt, Human
aggucagagccugca

SEQ ID NO: 2730124 - RNA, 17 nt, Human
aggucagagccugcagu

SEQ ID NO: 2730125 - RNA, 18 nt, Human
aggucagagccugcaguu

SEQ ID NO: 2730126 - RNA, 22 nt, Human
aggugacagagugagacucugu

SEQ ID NO: 2730127 - RNA, 13 nt, Human
aggugaccccagg

SEQ ID NO: 2730128 - RNA, 17 nt, Human
aggucuugaacuccugg

SEQ ID NO: 2730129 - RNA, 13 nt, Human
aggugacagagug

SEQ ID NO: 2730130 - RNA, 15 nt, Human
aggugacagagugag

SEQ ID NO: 2730131 - RNA, 21 nt, Human
aggugagaagcagaggaagga

SEQ ID NO: 2730132 - RNA, 23 nt, Human
aggugagaagcagaggaaggaga

SEQ ID NO: 2730133 - RNA, 16 nt, Human
aggugagaagcagagg

SEQ ID NO: 2730134 - RNA, 14 nt, Human
uguaguguuggaga

SEQ ID NO: 2730135 - RNA, 15 nt, Human
uguaguguuggagaa

SEQ ID NO: 2730136 - RNA, 18 nt, Human
uguaucacaaaucuuaac

SEQ ID NO: 2730137 - RNA, 15 nt, Human
uguaucacaaaucuu

SEQ ID NO: 2730138 - RNA, 17 nt, Human
uguaucaaugaguaaca

SEQ ID NO: 2730139 - RNA, 22 nt, Human
uguauuacaaauccaaugaaau

SEQ ID NO: 2730140 - RNA, 20 nt, Human
uguauucuagcuaauguaau

SEQ ID NO: 2730141 - RNA, 13 nt, Human
uguauuacaaauc

SEQ ID NO: 2730142 - RNA, 22 nt, Human
uguauucuagcuaauguaauaa

SEQ ID NO: 2730143 - RNA, 16 nt, Human
uguauuuuuuuacuaa

SEQ ID NO: 2730144 - RNA, 20 nt, Human
uguauucucuccuguaccuc

SEQ ID NO: 2730145 - RNA, 19 nt, Human
uguauucucuccuguaccu

SEQ ID NO: 2730146 - RNA, 15 nt, Human
aguaugguggcuggg

SEQ ID NO: 2730147 - RNA, 16 nt, Human
aguaugguggcugggu

SEQ ID NO: 2730148 - RNA, 18 nt, Human
aguauuagaauaccacag

SEQ ID NO: 2730149 - RNA, 18 nt, Human
aguauuacuucugcuaca

SEQ ID NO: 2730150 - RNA, 15 nt, Human
aguauuacuucugcu

SEQ ID NO: 2730151 - RNA, 17 nt, Human
aguaugguggcuggguu

SEQ ID NO: 2730152 - RNA, 16 nt, Human
aguaguaauagagcaa

SEQ ID NO: 2730153 - RNA, 19 nt, Human
ugucaauuacaggaaguac

SEQ ID NO: 2730154 - RNA, 17 nt, Human
ugucaauuacaggaagu

SEQ ID NO: 2730155 - RNA, 14 nt, Human
ugucaauuacagga

SEQ ID NO: 2730156 - RNA, 15 nt, Human
ugucaauuacaggaa

SEQ ID NO: 2730157 - RNA, 14 nt, Human
agucaccucaugga

SEQ ID NO: 2730158 - RNA, 15 nt, Human
agucaccucauggaa

SEQ ID NO: 2730159 - RNA, 17 nt, Human
agucaccucauggaauu

SEQ ID NO: 2730160 - RNA, 19 nt, Human
agucaccccggccaccugc

SEQ ID NO: 2730161 - RNA, 15 nt, Human
agucacacagugagu

SEQ ID NO: 2730162 - RNA, 23 nt, Human
agucacacagugagucgaggaca

SEQ ID NO: 2730163 - RNA, 18 nt, Human
aguauuucuaugaaauau

SEQ ID NO: 2730164 - RNA, 23 nt, Human
agucacacaguauuacuucugcu

SEQ ID NO: 2730165 - RNA, 17 nt, Human
aguauuucuaugaaaua

SEQ ID NO: 2730166 - RNA, 16 nt, Human
aguauuucuaugaaau

SEQ ID NO: 2730167 - RNA, 14 nt, Human
aguaugguggcugg

SEQ ID NO: 2730168 - RNA, 13 nt, Human
aguaaugauaacu

SEQ ID NO: 2730169 - RNA, 17 nt, Human
aguaaugauaacuggaa

SEQ ID NO: 2730170 - RNA, 18 nt, Human
aguaaugauaacuggaaa

SEQ ID NO: 2730171 - RNA, 20 nt, Human
aguaaugauaacuggaaacu

SEQ ID NO: 2730172 - RNA, 14 nt, Human
aguaauagagcaaa

SEQ ID NO: 2730173 - RNA, 15 nt, Human
aguaauaugcacaca

SEQ ID NO: 2730174 - RNA, 14 nt, Human
aguaauaugcacac

SEQ ID NO: 2730175 - RNA, 13 nt, Human
aguaaaauccaca

SEQ ID NO: 2730176 - RNA, 16 nt, Human
uguagagccagggucu

SEQ ID NO: 2730177 - RNA, 18 nt, Human
uguagagccagggucuca

SEQ ID NO: 2730178 - RNA, 16 nt, Human
aguacauuuggagaca

SEQ ID NO: 2730179 - RNA, 20 nt, Human
aguagaagucuuagauguau

SEQ ID NO: 2730180 - RNA, 19 nt, Human
aguagaagucuuagaugua

SEQ ID NO: 2730181 - RNA, 21 nt, Human
aguagaagucuuagauguaua

SEQ ID NO: 2730182 - RNA, 17 nt, Human
aguagaagucuuagaug

SEQ ID NO: 2730183 - RNA, 15 nt, Human
aguaauucaagaaaa

SEQ ID NO: 2730184 - RNA, 17 nt, Human
uguaggcauaaagucag

SEQ ID NO: 2730185 - RNA, 20 nt, Human
uguaggcauaaagucagggg

SEQ ID NO: 2730186 - RNA, 11 nt, Human
aguagagacag

SEQ ID NO: 2730187 - RNA, 13 nt, Human
agggaaauuucag

SEQ ID NO: 2730188 - RNA, 21 nt, Human
aggcccggcuccaggcuccuu

SEQ ID NO: 2730189 - RNA, 18 nt, Human
aggcccggcuccaggcuc

SEQ ID NO: 2730190 - RNA, 20 nt, Human
aggcccggcuccaggcuccu

SEQ ID NO: 2730191 - RNA, 22 nt, Human
agggaaggauacaaaagcaugu

SEQ ID NO: 2730192 - RNA, 14 nt, Human
ugggacuacaggca

SEQ ID NO: 2730193 - RNA, 15 nt, Human
ugggacuacaggcac

SEQ ID NO: 2730194 - RNA, 16 nt, Human
ugggacuacaggcacc

SEQ ID NO: 2730195 - RNA, 20 nt, Human
ugggacucaaugcacugaca

SEQ ID NO: 2730196 - RNA, 22 nt, Human
ugggagaaccaaaaagaggcua

SEQ ID NO: 2730197 - RNA, 18 nt, Human
ugggaggaucucuugagc

SEQ ID NO: 2730198 - RNA, 16 nt, Human
ugggagagccuuccag

SEQ ID NO: 2730199 - RNA, 19 nt, Human
ugggagagaagagaaugca

SEQ ID NO: 2730200 - RNA, 21 nt, Human
ugggagagaagagaaugcaca

SEQ ID NO: 2730201 - RNA, 15 nt, Human
agggagggagggcuc

SEQ ID NO: 2730202 - RNA, 13 nt, Human
agggagggcucca

SEQ ID NO: 2730203 - RNA, 16 nt, Human
ugggcccccaaaugga

SEQ ID NO: 2730204 - RNA, 21 nt, Human
ugggcccccaaauggaaaugg

SEQ ID NO: 2730205 - RNA, 20 nt, Human
ugggaggaucucuugagccu

SEQ ID NO: 2730206 - RNA, 21 nt, Human
ugggaggaucucuugagccug

SEQ ID NO: 2730207 - RNA, 22 nt, Human
ugggaggaucucuugagccugg

SEQ ID NO: 2730208 - RNA, 19 nt, Human
ugggaggccaaggugggag

SEQ ID NO: 2730209 - RNA, 20 nt, Human
ugggaggccaaggugggagg

SEQ ID NO: 2730210 - RNA, 12 nt, Human
ugggcagaagga

SEQ ID NO: 2730211 - RNA, 11 nt, Human
ugggcagagca

SEQ ID NO: 2730212 - RNA, 12 nt, Human
ugggcagagcag

SEQ ID NO: 2730213 - RNA, 18 nt, Human
ugggccaggagccuccug

SEQ ID NO: 2730214 - RNA, 19 nt, Human
agggcucagcggggacagc

SEQ ID NO: 2730215 - RNA, 20 nt, Human
agggcucagcggggacagcu

SEQ ID NO: 2730216 - RNA, 22 nt, Human
agggcucagcggggacagcucc

SEQ ID NO: 2730217 - RNA, 23 nt, Human
agggcucagcggggacagcuccu

SEQ ID NO: 2730218 - RNA, 16 nt, Human
agggagggcuccagac

SEQ ID NO: 2730219 - RNA, 14 nt, Human
agggagggcuccag

SEQ ID NO: 2730220 - RNA, 15 nt, Human
agggagggcuccaga

SEQ ID NO: 2730221 - RNA, 21 nt, Human
aggggaauguuugccucugcc

SEQ ID NO: 2730222 - RNA, 19 nt, Human
aggggaauguuugccucug

SEQ ID NO: 2730223 - RNA, 20 nt, Human
aggggaauguuugccucugc

SEQ ID NO: 2730224 - RNA, 18 nt, Human
aggggugggacacccugu

SEQ ID NO: 2730225 - RNA, 20 nt, Human
aggggguggccucccaacuc

SEQ ID NO: 2730226 - RNA, 15 nt, Human
aggguaaggcugugg

SEQ ID NO: 2730227 - RNA, 14 nt, Human
agggucucacucug

SEQ ID NO: 2730228 - RNA, 15 nt, Human
agggucucacucugu

SEQ ID NO: 2730229 - RNA, 16 nt, Human
agggucucacucuguc

SEQ ID NO: 2730230 - RNA, 20 nt, Human
ugguagagugugccugaagu

SEQ ID NO: 2730231 - RNA, 17 nt, Human
uggguggcaccagcagc

SEQ ID NO: 2730232 - RNA, 20 nt, Human
uggguggcaccagcagccug

SEQ ID NO: 2730233 - RNA, 21 nt, Human
uggguggcaccagcagccugg

SEQ ID NO: 2730234 - RNA, 16 nt, Human
aggguggugaccucug

SEQ ID NO: 2730235 - RNA, 15 nt, Human
agggugggagugggc

SEQ ID NO: 2730236 - RNA, 22 nt, Human
uggggcugcaccggcuggccug

SEQ ID NO: 2730237 - RNA, 23 nt, Human
uggggcugcaccggcuggccugg

SEQ ID NO: 2730238 - RNA, 21 nt, Human
uggggccaguuggucccccuu

SEQ ID NO: 2730239 - RNA, 12 nt, Human
uggggcccugcc

SEQ ID NO: 2730240 - RNA, 16 nt, Human
uggggaccucaggccu

SEQ ID NO: 2730241 - RNA, 17 nt, Human
uggggaccucaggccug

SEQ ID NO: 2730242 - RNA, 14 nt, Human
uggggaccucaggc

SEQ ID NO: 2730243 - RNA, 15 nt, Human
uggggaccucaggcc

SEQ ID NO: 2730244 - RNA, 15 nt, Human
agggcuccagacaca

SEQ ID NO: 2730245 - RNA, 12 nt, Human
agggcuccagac

SEQ ID NO: 2730246 - RNA, 13 nt, Human
aggggaaaagagg

SEQ ID NO: 2730247 - RNA, 18 nt, Human
aggggaaaaucagccugc

SEQ ID NO: 2730248 - RNA, 22 nt, Human
aggggaaaaucagccugcucca

SEQ ID NO: 2730249 - RNA, 14 nt, Human
aggggaacagacug

SEQ ID NO: 2730250 - RNA, 13 nt, Human
aggggaauguuug

SEQ ID NO: 2730251 - RNA, 16 nt, Human
uggggucacucuggca

SEQ ID NO: 2730252 - RNA, 22 nt, Human
uggggucacucuggcagcucag

SEQ ID NO: 2730253 - RNA, 17 nt, Human
ugggguacccacugcuc

SEQ ID NO: 2730254 - RNA, 18 nt, Human
ugggguacccacugcucu

SEQ ID NO: 2730255 - RNA, 19 nt, Human
ugggguacccacugcucug

SEQ ID NO: 2730256 - RNA, 15 nt, Human
ugggguaugggagag

SEQ ID NO: 2730257 - RNA, 13 nt, Human
uggggucacucug

SEQ ID NO: 2730258 - RNA, 14 nt, Human
uggggucacucugg

SEQ ID NO: 2730259 - RNA, 16 nt, Human
aguucugaagaagaug

SEQ ID NO: 2730260 - RNA, 14 nt, Human
uguuuugcaagcca

SEQ ID NO: 2730261 - RNA, 14 nt, Human
aguucugguuccua

SEQ ID NO: 2730262 - RNA, 19 nt, Human
uguuuucauuaucucaaaa

SEQ ID NO: 2730263 - RNA, 20 nt, Human
uguuuuccaugaguccccug

SEQ ID NO: 2730264 - RNA, 19 nt, Human
uguuuugaaucucauaauu

SEQ ID NO: 2730265 - RNA, 19 nt, Human
uguuuggaccaaaaaccag

SEQ ID NO: 2730266 - RNA, 21 nt, Human
uguuuuauuuuaauucaguug

SEQ ID NO: 2730267 - RNA, 21 nt, Human
uguuuuauuuaaccucuaaau

SEQ ID NO: 2730268 - RNA, 14 nt, Human
uguuuauuacagua

SEQ ID NO: 2730269 - RNA, 19 nt, Human
uguuuauugucaaaguggu

SEQ ID NO: 2730270 - RNA, 17 nt, Human
uguuuauugucaaagug

SEQ ID NO: 2730271 - RNA, 23 nt, Human
uguuuagucuugucucagauuuu

SEQ ID NO: 2730272 - RNA, 20 nt, Human
uguuuagucuugucucagau

SEQ ID NO: 2730273 - RNA, 22 nt, Human
uguuuagucuugucucagauuu

SEQ ID NO: 2730274 - RNA, 19 nt, Human
uguugcccaggcaggucuu

SEQ ID NO: 2730275 - RNA, 17 nt, Human
uguuugauucagacagc

SEQ ID NO: 2730276 - RNA, 22 nt, Human
uguuugauucagacagcugccu

SEQ ID NO: 2730277 - RNA, 14 nt, Human
uguuuauuuauaga

SEQ ID NO: 2730278 - RNA, 24 nt, Human
uguuuauuuauagaguguacuuaa

SEQ ID NO: 2730279 - RNA, 16 nt, Human
aguuuagcuggaaaag

SEQ ID NO: 2730280 - RNA, 20 nt, Human
aguuuaauauuaaagccaug

SEQ ID NO: 2730281 - RNA, 19 nt, Human
aguuuaauauuaaagccau

SEQ ID NO: 2730282 - RNA, 18 nt, Human
aguuuaauauuaaagcca

SEQ ID NO: 2730283 - RNA, 16 nt, Human
aguuuaauauuaaagc

SEQ ID NO: 2730284 - RNA, 15 nt, Human
aguuuaauauuaaag

SEQ ID NO: 2730285 - RNA, 21 nt, Human
aguuguuugauucagacagcu

SEQ ID NO: 2730286 - RNA, 23 nt, Human
aguuguuugauucagacagcugc

SEQ ID NO: 2730287 - RNA, 18 nt, Human
aguuggucccccuuccau

SEQ ID NO: 2730288 - RNA, 20 nt, Human
aguuggguguauugugcgcu

SEQ ID NO: 2730289 - RNA, 17 nt, Human
aguuggguguauugugc

SEQ ID NO: 2730290 - RNA, 16 nt, Human
aguuggcuaggacccc

SEQ ID NO: 2730291 - RNA, 16 nt, Human
aguuggguguauugug

SEQ ID NO: 2730292 - RNA, 21 nt, Human
aguuggguggaugccuggugg

SEQ ID NO: 2730293 - RNA, 17 nt, Human
aguuggguggaugccug

SEQ ID NO: 2730294 - RNA, 19 nt, Human
aguugccuaaauccauuug

SEQ ID NO: 2730295 - RNA, 23 nt, Human
aguugccuaaauccauuuggaaa

SEQ ID NO: 2730296 - RNA, 22 nt, Human
aguugccuaaauccauuuggaa

SEQ ID NO: 2730297 - RNA, 14 nt, Human
uuaacaacagcugg

SEQ ID NO: 2730298 - RNA, 20 nt, Human
uuaaauucuugcaaaguauc

SEQ ID NO: 2730299 - RNA, 14 nt, Human
uuaccuuacagaag

SEQ ID NO: 2730300 - RNA, 12 nt, Human
uuaccugggaaa

SEQ ID NO: 2730301 - RNA, 20 nt, Human
uuacauaagauaaaugugcu

SEQ ID NO: 2730302 - RNA, 19 nt, Human
uuacuauggcccuggccua

SEQ ID NO: 2730303 - RNA, 23 nt, Human
uuacucagaauucucuaguuuga

SEQ ID NO: 2730304 - RNA, 18 nt, Human
uuacucagaauucucuag

SEQ ID NO: 2730305 - RNA, 15 nt, Human
uuacuguaagaaaau

SEQ ID NO: 2730306 - RNA, 14 nt, Human
uuagaaauauaauu

SEQ ID NO: 2730307 - RNA, 12 nt, Human
uuagaaauauaa

SEQ ID NO: 2730308 - RNA, 11 nt, Human
uuagaaauaua

SEQ ID NO: 2730309 - RNA, 11 nt, Human
uuagacagagu

SEQ ID NO: 2730310 - RNA, 20 nt, Human
auaaaucugugaacuugaaa

SEQ ID NO: 2730311 - RNA, 22 nt, Human
auaaaucugugaacuugaaauu

SEQ ID NO: 2730312 - RNA, 21 nt, Human
auaaaucugugaacuugaaau

SEQ ID NO: 2730313 - RNA, 18 nt, Human
auaaauagcuagacuggu

SEQ ID NO: 2730314 - RNA, 16 nt, Human
auaaauagcuagacug

SEQ ID NO: 2730315 - RNA, 14 nt, Human
uuacaggaaguacu

SEQ ID NO: 2730316 - RNA, 20 nt, Human
uuacaguauaauuaacaugu

SEQ ID NO: 2730317 - RNA, 19 nt, Human
uuacaguauaauuaacaug

SEQ ID NO: 2730318 - RNA, 18 nt, Human
uuacaguauaauuaacau

SEQ ID NO: 2730319 - RNA, 13 nt, Human
uuacaguauaauu

SEQ ID NO: 2730320 - RNA, 17 nt, Human
uuacaguauaauuaaca

SEQ ID NO: 2730321 - RNA, 16 nt, Human
uuacaguauaauuaac

SEQ ID NO: 2730322 - RNA, 16 nt, Human
auaacuaaaagguaug

SEQ ID NO: 2730323 - RNA, 20 nt, Human
uuaagaagacugcauuauau

SEQ ID NO: 2730324 - RNA, 22 nt, Human
uuaagaagacugcauuauauuu

SEQ ID NO: 2730325 - RNA, 13 nt, Human
uuaagaggcaggg

SEQ ID NO: 2730326 - RNA, 15 nt, Human
uuaagaggcaggguc

SEQ ID NO: 2730327 - RNA, 16 nt, Human
uuaagaggcagggucu

SEQ ID NO: 2730328 - RNA, 18 nt, Human
uuaaguaaugauaacugg

SEQ ID NO: 2730329 - RNA, 17 nt, Human
uuaaguacuauguauca

SEQ ID NO: 2730330 - RNA, 22 nt, Human
uuaagugcugcauuuaaaagau

SEQ ID NO: 2730331 - RNA, 15 nt, Human
auaaaauaauuuuua

SEQ ID NO: 2730332 - RNA, 16 nt, Human
auaaaauaauuuuuau

SEQ ID NO: 2730333 - RNA, 21 nt, Human
auaaaauaauuuuuauauuug

SEQ ID NO: 2730334 - RNA, 18 nt, Human
auaaaauccauacauuug

SEQ ID NO: 2730335 - RNA, 19 nt, Human
auaaaauccauacauuugu

SEQ ID NO: 2730336 - RNA, 20 nt, Human
uuaaugaaagacuguacaaa

SEQ ID NO: 2730337 - RNA, 23 nt, Human
uuaaugaaagacuguacaaagua

SEQ ID NO: 2730338 - RNA, 15 nt, Human
uuaauucuuagcuca

SEQ ID NO: 2730339 - RNA, 17 nt, Human
uuaauuccaauuauaug

SEQ ID NO: 2730340 - RNA, 19 nt, Human
uuaauuuuuuugagacaga

SEQ ID NO: 2730341 - RNA, 22 nt, Human
auaaacaagaccacguuucuaa

SEQ ID NO: 2730342 - RNA, 15 nt, Human
auaaacaagaccacg

SEQ ID NO: 2730343 - RNA, 23 nt, Human
auaaacaagaccacguuucuaaa

SEQ ID NO: 2730344 - RNA, 18 nt, Human
agucuuucacauuuaaau

SEQ ID NO: 2730345 - RNA, 14 nt, Human
agucuuuguacaga

SEQ ID NO: 2730346 - RNA, 20 nt, Human
agugaaacucguuaauuugu

SEQ ID NO: 2730347 - RNA, 22 nt, Human
agucucaggaaaucaaauaugc

SEQ ID NO: 2730348 - RNA, 16 nt, Human
agucucaggaaaucaa

SEQ ID NO: 2730349 - RNA, 16 nt, Human
ugugacugaauuucuu

SEQ ID NO: 2730350 - RNA, 15 nt, Human
ugugacugaauuucu

SEQ ID NO: 2730351 - RNA, 17 nt, Human
ugugaaccaccacaccc

SEQ ID NO: 2730352 - RNA, 12 nt, Human
ugugaacuugaa

SEQ ID NO: 2730353 - RNA, 16 nt, Human
ugugaacuugaaauuu

SEQ ID NO: 2730354 - RNA, 15 nt, Human
ugugaacuugaaauu

SEQ ID NO: 2730355 - RNA, 14 nt, Human
ugugaacuugaaau

SEQ ID NO: 2730356 - RNA, 19 nt, Human
ugugaaccaccacacccag

SEQ ID NO: 2730357 - RNA, 20 nt, Human
ugugaacaguuguguuugaa

SEQ ID NO: 2730358 - RNA, 20 nt, Human
ugugaaccaccacacccagc

SEQ ID NO: 2730359 - RNA, 21 nt, Human
ugugaaccaccacacccagcc

SEQ ID NO: 2730360 - RNA, 15 nt, Human
ugugaaaggaaagag

SEQ ID NO: 2730361 - RNA, 18 nt, Human
ugugaaaggaaagaggcu

SEQ ID NO: 2730362 - RNA, 21 nt, Human
ugugaaaggaaagagggaggu

SEQ ID NO: 2730363 - RNA, 18 nt, Human
agucacuaccuucaugca

SEQ ID NO: 2730364 - RNA, 15 nt, Human
agugaaagaaaauaa

SEQ ID NO: 2730365 - RNA, 14 nt, Human
ugugauguauucua

SEQ ID NO: 2730366 - RNA, 18 nt, Human
ugugauggggcccugccu

SEQ ID NO: 2730367 - RNA, 19 nt, Human
ugugauggggcccugccuc

SEQ ID NO: 2730368 - RNA, 20 nt, Human
ugugauggggcccugccucc

SEQ ID NO: 2730369 - RNA, 23 nt, Human
ugugcauuuggugguuucagaaa

SEQ ID NO: 2730370 - RNA, 20 nt, Human
ugugccagguuuuuggucug

SEQ ID NO: 2730371 - RNA, 12 nt, Human
ugugccaugugc

SEQ ID NO: 2730372 - RNA, 16 nt, Human
ugugccaugugccagg

SEQ ID NO: 2730373 - RNA, 15 nt, Human
agugaggcucugccc

SEQ ID NO: 2730374 - RNA, 14 nt, Human
agugaggcucugcc

SEQ ID NO: 2730375 - RNA, 16 nt, Human
agugaggcucugcccu

SEQ ID NO: 2730376 - RNA, 17 nt, Human
agugaggcucugcccuu

SEQ ID NO: 2730377 - RNA, 15 nt, Human
agugagucgaggaca

SEQ ID NO: 2730378 - RNA, 21 nt, Human
agugaguugauagcacagacc

SEQ ID NO: 2730379 - RNA, 21 nt, Human
agugaggcucugcccuugguu

SEQ ID NO: 2730380 - RNA, 19 nt, Human
agugaggcucugcccuugg

SEQ ID NO: 2730381 - RNA, 20 nt, Human
agugaggcucugcccuuggu

SEQ ID NO: 2730382 - RNA, 21 nt, Human
ugugcccccauguaagcaccc

SEQ ID NO: 2730383 - RNA, 21 nt, Human
uguggaguucaucuugaauug

SEQ ID NO: 2730384 - RNA, 18 nt, Human
ugugcugggguuaucuga

SEQ ID NO: 2730385 - RNA, 17 nt, Human
uguggaguucaucuuga

SEQ ID NO: 2730386 - RNA, 23 nt, Human
uguggguuucuaaagcugccagc

SEQ ID NO: 2730387 - RNA, 21 nt, Human
uguggguuucuaaagcugcca

SEQ ID NO: 2730388 - RNA, 13 nt, Human
uguggucccaccc

SEQ ID NO: 2730389 - RNA, 15 nt, Human
uguggucccacccca

SEQ ID NO: 2730390 - RNA, 20 nt, Human
ugugguguuuccuggcacug

SEQ ID NO: 2730391 - RNA, 18 nt, Human
uguguaagacaaaaagcu

SEQ ID NO: 2730392 - RNA, 14 nt, Human
ugugguguuuccug

SEQ ID NO: 2730393 - RNA, 16 nt, Human
ugugguguuuccuggc

SEQ ID NO: 2730394 - RNA, 20 nt, Human
agugcugggauuacaggugu

SEQ ID NO: 2730395 - RNA, 19 nt, Human
agugcugcauuuaaaagau

SEQ ID NO: 2730396 - RNA, 17 nt, Human
agugcugcauuuaaaag

SEQ ID NO: 2730397 - RNA, 16 nt, Human
agugcugcauuuaaaa

SEQ ID NO: 2730398 - RNA, 21 nt, Human
agugcugggauuacaggugug

SEQ ID NO: 2730399 - RNA, 13 nt, Human
agugcugcauuua

SEQ ID NO: 2730400 - RNA, 12 nt, Human
agugcugcauuu

SEQ ID NO: 2730401 - RNA, 20 nt, Human
agugaguuggguguauugug

SEQ ID NO: 2730402 - RNA, 19 nt, Human
agugaguuggguguauugu

SEQ ID NO: 2730403 - RNA, 22 nt, Human
agugaguugauagcacagaccc

SEQ ID NO: 2730404 - RNA, 23 nt, Human
agugaguugauagcacagacccu

SEQ ID NO: 2730405 - RNA, 13 nt, Human
uguguaaguagau

SEQ ID NO: 2730406 - RNA, 17 nt, Human
ugugucucuugguccug

SEQ ID NO: 2730407 - RNA, 20 nt, Human
ugugucucuugguccugcug

SEQ ID NO: 2730408 - RNA, 21 nt, Human
ugugucuugcaauggcagccu

SEQ ID NO: 2730409 - RNA, 21 nt, Human
ugugucucuugguccugcugc

SEQ ID NO: 2730410 - RNA, 20 nt, Human
ugugucuugcaauggcagcc

SEQ ID NO: 2730411 - RNA, 19 nt, Human
uguguguuuauugucaaag

SEQ ID NO: 2730412 - RNA, 23 nt, Human
uguguguuuauugucaaaguggu

SEQ ID NO: 2730413 - RNA, 15 nt, Human
uguuaaguaugugua

SEQ ID NO: 2730414 - RNA, 16 nt, Human
uguuaaguauguguaa

SEQ ID NO: 2730415 - RNA, 19 nt, Human
uguguuaaguauguguaaa

SEQ ID NO: 2730416 - RNA, 13 nt, Human
uguguugaagagg

SEQ ID NO: 2730417 - RNA, 15 nt, Human
uguuauaaucuuuca

SEQ ID NO: 2730418 - RNA, 14 nt, Human
agugugucuaaauu

SEQ ID NO: 2730419 - RNA, 20 nt, Human
agugugucuuagugugugca

SEQ ID NO: 2730420 - RNA, 20 nt, Human
uguuccacaaguuaaauaaa

SEQ ID NO: 2730421 - RNA, 18 nt, Human
uguuccuagugaaagagg

SEQ ID NO: 2730422 - RNA, 14 nt, Human
uguuccuagugaaa

SEQ ID NO: 2730423 - RNA, 16 nt, Human
uguucugggacacagu

SEQ ID NO: 2730424 - RNA, 13 nt, Human
uguugcccaggca

SEQ ID NO: 2730425 - RNA, 12 nt, Human
uguugcccaggc

SEQ ID NO: 2730426 - RNA, 15 nt, Human
uguugcccaggcagg

SEQ ID NO: 2730427 - RNA, 16 nt, Human
uguugcccaggcaggu

SEQ ID NO: 2730428 - RNA, 17 nt, Human
uguugcccaggcagguc

SEQ ID NO: 2730429 - RNA, 18 nt, Human
uguugcccaggcaggucu

SEQ ID NO: 2730430 - RNA, 21 nt, Human
agugguggugaacagaacaaa

SEQ ID NO: 2730431 - RNA, 18 nt, Human
aguggugguuuucuguuc

SEQ ID NO: 2730432 - RNA, 17 nt, Human
aguggugguuuucuguu

SEQ ID NO: 2730433 - RNA, 23 nt, Human
aguggugguuuucuguucuuucu

SEQ ID NO: 2730434 - RNA, 21 nt, Human
aguggugguuuucuguucuuu

SEQ ID NO: 2730435 - RNA, 20 nt, Human
aguggugguuuucuguucuu

SEQ ID NO: 2730436 - RNA, 19 nt, Human
aguggugguuuucuguucu

SEQ ID NO: 2730437 - RNA, 17 nt, Human
aguggugcgaucugggu

SEQ ID NO: 2730438 - RNA, 17 nt, Human
aguguacuuaacuauuc

SEQ ID NO: 2730439 - RNA, 17 nt, Human
agugugguguuuccugg

SEQ ID NO: 2730440 - RNA, 19 nt, Human
agugugguguuuccuggca

SEQ ID NO: 2730441 - RNA, 16 nt, Human
agugugguguuuccug

SEQ ID NO: 2730442 - RNA, 19 nt, Human
aucaauuuuucuuauuuca

SEQ ID NO: 2730443 - RNA, 22 nt, Human
aucacggcucacugcagccuca

SEQ ID NO: 2730444 - RNA, 13 nt, Human
aucaaguauuaua

SEQ ID NO: 2730445 - RNA, 18 nt, Human
aucaaguauuauaccuuu

SEQ ID NO: 2730446 - RNA, 14 nt, Human
aucaaguauuauac

SEQ ID NO: 2730447 - RNA, 13 nt, Human
auauuuuaugauc

SEQ ID NO: 2730448 - RNA, 12 nt, Human
auauuuuaugau

SEQ ID NO: 2730449 - RNA, 22 nt, Human
auauuuuaugauccagcagauu

SEQ ID NO: 2730450 - RNA, 17 nt, Human
auauuuuaugauccagc

SEQ ID NO: 2730451 - RNA, 13 nt, Human
uuccuaauccucu

SEQ ID NO: 2730452 - RNA, 15 nt, Human
uuccuaauccucuag

SEQ ID NO: 2730453 - RNA, 11 nt, Human
uuccuucagug

SEQ ID NO: 2730454 - RNA, 14 nt, Human
uuccuucagugccu

SEQ ID NO: 2730455 - RNA, 21 nt, Human
auauuuucaugcuguucauga

SEQ ID NO: 2730456 - RNA, 18 nt, Human
auauuuucaugcuguuca

SEQ ID NO: 2730457 - RNA, 15 nt, Human
uuccugggagcuuuu

SEQ ID NO: 2730458 - RNA, 11 nt, Human
uuccucuuucc

SEQ ID NO: 2730459 - RNA, 16 nt, Human
uuccugggagcuuuug

SEQ ID NO: 2730460 - RNA, 17 nt, Human
uuccuguucccaugaga

SEQ ID NO: 2730461 - RNA, 13 nt, Human
auauuugaaauau

SEQ ID NO: 2730462 - RNA, 17 nt, Human
auauuguuuucagugua

SEQ ID NO: 2730463 - RNA, 20 nt, Human
auauuguuuucaguguacau

SEQ ID NO: 2730464 - RNA, 17 nt, Human
auauuguguugugaaug

SEQ ID NO: 2730465 - RNA, 18 nt, Human
auauuguguugugaaugu

SEQ ID NO: 2730466 - RNA, 17 nt, Human
auauugcugauggugca

SEQ ID NO: 2730467 - RNA, 21 nt, Human
auauugcugauggugcaauga

SEQ ID NO: 2730468 - RNA, 22 nt, Human
auauuuguaucacaaaucuuaa

SEQ ID NO: 2730469 - RNA, 12 nt, Human
auauuuuaacuu

SEQ ID NO: 2730470 - RNA, 23 nt, Human
auauuugaaauauugacuuuuua

SEQ ID NO: 2730471 - RNA, 14 nt, Human
auauuugaaauauu

SEQ ID NO: 2730472 - RNA, 19 nt, Human
auauuugaaauauugacuu

SEQ ID NO: 2730473 - RNA, 22 nt, Human
auauuaaggaagacaaugugaa

SEQ ID NO: 2730474 - RNA, 24 nt, Human
auauuaagaaagacuaucuaaaug

SEQ ID NO: 2730475 - RNA, 23 nt, Human
auauuaaagccauguuuauuaca

SEQ ID NO: 2730476 - RNA, 18 nt, Human
auauuaaagccauguuua

SEQ ID NO: 2730477 - RNA, 15 nt, Human
auauuaaagccaugu

SEQ ID NO: 2730478 - RNA, 14 nt, Human
auauuaaagccaug

SEQ ID NO: 2730479 - RNA, 20 nt, Human
auauguuuuaagaggcaggg

SEQ ID NO: 2730480 - RNA, 18 nt, Human
auauguuuuaagaggcag

SEQ ID NO: 2730481 - RNA, 17 nt, Human
auauguuucaaacuuug

SEQ ID NO: 2730482 - RNA, 19 nt, Human
auauugauuuccguuaaaa

SEQ ID NO: 2730483 - RNA, 22 nt, Human
auauugauuuccguuaaaauac

SEQ ID NO: 2730484 - RNA, 21 nt, Human
auauugauuuccguuaaaaua

SEQ ID NO: 2730485 - RNA, 23 nt, Human
auauucucacagcuccaagaauu

SEQ ID NO: 2730486 - RNA, 22 nt, Human
auauucucacagcuccaagaau

SEQ ID NO: 2730487 - RNA, 16 nt, Human
auauucuguuggccag

SEQ ID NO: 2730488 - RNA, 21 nt, Human
auauucucacagcuccaagaa

SEQ ID NO: 2730489 - RNA, 12 nt, Human
uucugaagaaga

SEQ ID NO: 2730490 - RNA, 13 nt, Human
uucugaagaagau

SEQ ID NO: 2730491 - RNA, 21 nt, Human
uucugaaauuuccugggagcu

SEQ ID NO: 2730492 - RNA, 14 nt, Human
uucugaagaagaug

SEQ ID NO: 2730493 - RNA, 23 nt, Human
uucugcaucagcugcugaaacaa

SEQ ID NO: 2730494 - RNA, 16 nt, Human
uucugcaucagcugcu

SEQ ID NO: 2730495 - RNA, 19 nt, Human
aucauugaaaucuuuuugc

SEQ ID NO: 2730496 - RNA, 15 nt, Human
uucugaaagggacgc

SEQ ID NO: 2730497 - RNA, 23 nt, Human
uucugccgcagcccugcagaggg

SEQ ID NO: 2730498 - RNA, 16 nt, Human
uucugccgcagcccug

SEQ ID NO: 2730499 - RNA, 10 nt, Human
uucugggaca

SEQ ID NO: 2730500 - RNA, 11 nt, Human
uucugggacac

SEQ ID NO: 2730501 - RNA, 22 nt, Human
uucugggacacaguucaauucu

SEQ ID NO: 2730502 - RNA, 11 nt, Human
aucccucccuc

SEQ ID NO: 2730503 - RNA, 13 nt, Human
aucccucccucca

SEQ ID NO: 2730504 - RNA, 23 nt, Human
aucccucccuccaccucccugca

SEQ ID NO: 2730505 - RNA, 16 nt, Human
aucccauaugccuggg

SEQ ID NO: 2730506 - RNA, 17 nt, Human
aucccauaugccugggc

SEQ ID NO: 2730507 - RNA, 15 nt, Human
auccagguucagcuu

SEQ ID NO: 2730508 - RNA, 16 nt, Human
auccagguucagcuug

SEQ ID NO: 2730509 - RNA, 14 nt, Human
uucucaacuccaaa

SEQ ID NO: 2730510 - RNA, 18 nt, Human
uucucaacuccaaacuga

SEQ ID NO: 2730511 - RNA, 13 nt, Human
uucuaggccuggg

SEQ ID NO: 2730512 - RNA, 23 nt, Human
uucuaggacugaauuaugaaacu

SEQ ID NO: 2730513 - RNA, 22 nt, Human
uucucagaaucucaaauaacua

SEQ ID NO: 2730514 - RNA, 19 nt, Human
uucucagaaucucaaauaa

SEQ ID NO: 2730515 - RNA, 23 nt, Human
uucucagaaucucaaauaacuaa

SEQ ID NO: 2730516 - RNA, 14 nt, Human
aucauugaaaucuu

SEQ ID NO: 2730517 - RNA, 15 nt, Human
aucauugaaaucuuu

SEQ ID NO: 2730518 - RNA, 20 nt, Human
aucagugugucuaaauuuga

SEQ ID NO: 2730519 - RNA, 19 nt, Human
aucagugugucuaaauuug

SEQ ID NO: 2730520 - RNA, 16 nt, Human
aucagcacgauuucug

SEQ ID NO: 2730521 - RNA, 15 nt, Human
aucagcacgauuucu

SEQ ID NO: 2730522 - RNA, 18 nt, Human
aucagcacgauuucuguu

SEQ ID NO: 2730523 - RNA, 17 nt, Human
aucagcacgauuucugu

SEQ ID NO: 2730524 - RNA, 17 nt, Human
uuauuguuuaaaaucau

SEQ ID NO: 2730525 - RNA, 17 nt, Human
auagcugggacuacagg

SEQ ID NO: 2730526 - RNA, 22 nt, Human
uuauuuaaugaaagacuguaca

SEQ ID NO: 2730527 - RNA, 18 nt, Human
uuauuuaaugaaagacug

SEQ ID NO: 2730528 - RNA, 14 nt, Human
uuauuuaaauuuua

SEQ ID NO: 2730529 - RNA, 16 nt, Human
uuauuuaguuccuuga

SEQ ID NO: 2730530 - RNA, 18 nt, Human
auagcuacuaauuuuaaa

SEQ ID NO: 2730531 - RNA, 14 nt, Human
auagcuagacuggu

SEQ ID NO: 2730532 - RNA, 16 nt, Human
auagcuagacugguga

SEQ ID NO: 2730533 - RNA, 15 nt, Human
auagcuagacuggug

SEQ ID NO: 2730534 - RNA, 23 nt, Human
auagcuagacuggugacugauuc

SEQ ID NO: 2730535 - RNA, 19 nt, Human
auagcuagacuggugacug

SEQ ID NO: 2730536 - RNA, 18 nt, Human
auagcuagacuggugacu

SEQ ID NO: 2730537 - RNA, 19 nt, Human
auagcucaggugucccugc

SEQ ID NO: 2730538 - RNA, 22 nt, Human
auagcucaggugucccugcacu

SEQ ID NO: 2730539 - RNA, 20 nt, Human
auagcucaggugucccugca

SEQ ID NO: 2730540 - RNA, 21 nt, Human
auagcucaggugucccugcac

SEQ ID NO: 2730541 - RNA, 12 nt, Human
auagcugggacu

SEQ ID NO: 2730542 - RNA, 17 nt, Human
auagcuacuaauuuuaa

SEQ ID NO: 2730543 - RNA, 14 nt, Human
auagcuacuaauuu

SEQ ID NO: 2730544 - RNA, 18 nt, Human
auagccugccucuucucu

SEQ ID NO: 2730545 - RNA, 17 nt, Human
auaagauaaaugugcug

SEQ ID NO: 2730546 - RNA, 13 nt, Human
auaagauaaaugu

SEQ ID NO: 2730547 - RNA, 19 nt, Human
auaggaacuuaaauaaugu

SEQ ID NO: 2730548 - RNA, 14 nt, Human
uucacauuggaaac

SEQ ID NO: 2730549 - RNA, 22 nt, Human
uucaccacaugugcacaugcac

SEQ ID NO: 2730550 - RNA, 13 nt, Human
uucacauuggaaa

SEQ ID NO: 2730551 - RNA, 17 nt, Human
uucacauauugauuucc

SEQ ID NO: 2730552 - RNA, 20 nt, Human
uucacauaucuaguaugaaa

SEQ ID NO: 2730553 - RNA, 21 nt, Human
uucacauaucuaguaugaaau

SEQ ID NO: 2730554 - RNA, 15 nt, Human
uucaaacauauauaa

SEQ ID NO: 2730555 - RNA, 16 nt, Human
uucaaacuuuggaaca

SEQ ID NO: 2730556 - RNA, 17 nt, Human
uucaaaauaaaaaugag

SEQ ID NO: 2730557 - RNA, 15 nt, Human
uucaaggauccugag

SEQ ID NO: 2730558 - RNA, 22 nt, Human
uucaagaaaacaacuucaauau

SEQ ID NO: 2730559 - RNA, 16 nt, Human
uucaaggauccugagc

SEQ ID NO: 2730560 - RNA, 18 nt, Human
uucaaggauccugagcca

SEQ ID NO: 2730561 - RNA, 19 nt, Human
uucaaggauccugagccag

SEQ ID NO: 2730562 - RNA, 21 nt, Human
uucaaggauccugagccagau

SEQ ID NO: 2730563 - RNA, 17 nt, Human
auagucaaauuguguga

SEQ ID NO: 2730564 - RNA, 18 nt, Human
auagucaaauugugugaa

SEQ ID NO: 2730565 - RNA, 19 nt, Human
auauauaacaaugcuguau

SEQ ID NO: 2730566 - RNA, 17 nt, Human
auauauaacaaugcugu

SEQ ID NO: 2730567 - RNA, 18 nt, Human
auauauaacaaugcugua

SEQ ID NO: 2730568 - RNA, 19 nt, Human
auauaaguauucuaaauuu

SEQ ID NO: 2730569 - RNA, 19 nt, Human
auauaagcuuguauuccuu

SEQ ID NO: 2730570 - RNA, 17 nt, Human
auauaaguauucuaaau

SEQ ID NO: 2730571 - RNA, 12 nt, Human
auauaacaaugc

SEQ ID NO: 2730572 - RNA, 15 nt, Human
auauaacaaugcugu

SEQ ID NO: 2730573 - RNA, 14 nt, Human
uucagccaagaauu

SEQ ID NO: 2730574 - RNA, 19 nt, Human
uucagccaagaauucuuaa

SEQ ID NO: 2730575 - RNA, 21 nt, Human
uucagcaaaaauauuuuauga

SEQ ID NO: 2730576 - RNA, 17 nt, Human
uucagaucucuaacuuc

SEQ ID NO: 2730577 - RNA, 13 nt, Human
uucagaaaauauu

SEQ ID NO: 2730578 - RNA, 14 nt, Human
uucagaaaauauua

SEQ ID NO: 2730579 - RNA, 20 nt, Human
uucagaaaauauuauguguu

SEQ ID NO: 2730580 - RNA, 21 nt, Human
uucagaaaauauuauguguuu

SEQ ID NO: 2730581 - RNA, 15 nt, Human
auaugcaaagcacug

SEQ ID NO: 2730582 - RNA, 16 nt, Human
auaugcaaagcacuga

SEQ ID NO: 2730583 - RNA, 23 nt, Human
auaugcaaagcacugacuucuaa

SEQ ID NO: 2730584 - RNA, 14 nt, Human
auaugucaagccau

SEQ ID NO: 2730585 - RNA, 13 nt, Human
auaugugaacagu

SEQ ID NO: 2730586 - RNA, 20 nt, Human
auaugauuuaaaucagccgu

SEQ ID NO: 2730587 - RNA, 22 nt, Human
auaugauucaaaugucuauaaa

SEQ ID NO: 2730588 - RNA, 13 nt, Human
auaugauucaaau

SEQ ID NO: 2730589 - RNA, 12 nt, Human
auaugauucaaa

SEQ ID NO: 2730590 - RNA, 23 nt, Human
auaucugaggaauucuguauaga

SEQ ID NO: 2730591 - RNA, 22 nt, Human
auaucugaggaauucuguauag

SEQ ID NO: 2730592 - RNA, 21 nt, Human
auaucugaggaauucuguaua

SEQ ID NO: 2730593 - RNA, 20 nt, Human
auaucugaggaauucuguau

SEQ ID NO: 2730594 - RNA, 19 nt, Human
auaucugaggaauucugua

SEQ ID NO: 2730595 - RNA, 22 nt, Human
auaucugaaaauguauguguaa

SEQ ID NO: 2730596 - RNA, 18 nt, Human
auaucugaggaauucugu

SEQ ID NO: 2730597 - RNA, 17 nt, Human
auaucugaggaauucug

SEQ ID NO: 2730598 - RNA, 16 nt, Human
auaucugaggaauucu

SEQ ID NO: 2730599 - RNA, 15 nt, Human
auaucugaggaauuc

SEQ ID NO: 2730600 - RNA, 14 nt, Human
uucaguaauaacuc

SEQ ID NO: 2730601 - RNA, 21 nt, Human
uucauauuuacuucuuauaca

SEQ ID NO: 2730602 - RNA, 16 nt, Human
uucauauuuacuucuu

SEQ ID NO: 2730603 - RNA, 18 nt, Human
uucaucauccuaagcuau

SEQ ID NO: 2730604 - RNA, 21 nt, Human
uucaucauccuaagcuauuca

SEQ ID NO: 2730605 - RNA, 22 nt, Human
auaucuauauuuuacauaaauu

SEQ ID NO: 2730606 - RNA, 20 nt, Human
auaucuauauuuuacauaaa

SEQ ID NO: 2730607 - RNA, 16 nt, Human
auaucuauauuuuaca

SEQ ID NO: 2730608 - RNA, 17 nt, Human
auaucuauauuuuacau

SEQ ID NO: 2730609 - RNA, 18 nt, Human
augaacuuguaaaggaau

SEQ ID NO: 2730610 - RNA, 17 nt, Human
augaaugaaacauuuug

SEQ ID NO: 2730611 - RNA, 23 nt, Human
augaaccacaucuugcucugcug

SEQ ID NO: 2730612 - RNA, 22 nt, Human
augaaccacaucuugcucugcu

SEQ ID NO: 2730613 - RNA, 20 nt, Human
uugguuuucacauuggaaac

SEQ ID NO: 2730614 - RNA, 17 nt, Human
uuggugucgggcaugac

SEQ ID NO: 2730615 - RNA, 18 nt, Human
uuggugucgggcaugaca

SEQ ID NO: 2730616 - RNA, 19 nt, Human
uuggugucgggcaugacac

SEQ ID NO: 2730617 - RNA, 14 nt, Human
uugguuuguaaauu

SEQ ID NO: 2730618 - RNA, 19 nt, Human
uuggugguuucagaaaugu

SEQ ID NO: 2730619 - RNA, 18 nt, Human
uuggugguuucagaaaug

SEQ ID NO: 2730620 - RNA, 16 nt, Human
augaaugucaguguga

SEQ ID NO: 2730621 - RNA, 18 nt, Human
augaaugucagugugacu

SEQ ID NO: 2730622 - RNA, 15 nt, Human
aucuuauaauuuaaa

SEQ ID NO: 2730623 - RNA, 16 nt, Human
aucuuauaauuuaaaa

SEQ ID NO: 2730624 - RNA, 14 nt, Human
aucuugcucugcug

SEQ ID NO: 2730625 - RNA, 15 nt, Human
aucuugcucugcuga

SEQ ID NO: 2730626 - RNA, 16 nt, Human
aucuugcucugcugac

SEQ ID NO: 2730627 - RNA, 12 nt, Human
aucugucauuug

SEQ ID NO: 2730628 - RNA, 17 nt, Human
aucugucauuugagcag

SEQ ID NO: 2730629 - RNA, 22 nt, Human
aucugucauuugagcagggcuc

SEQ ID NO: 2730630 - RNA, 15 nt, Human
aucuuuaaaauacac

SEQ ID NO: 2730631 - RNA, 12 nt, Human
aucuuuaaaaua

SEQ ID NO: 2730632 - RNA, 15 nt, Human
uugcuuugugauuuu

SEQ ID NO: 2730633 - RNA, 17 nt, Human
uuggagaagaacugaaa

SEQ ID NO: 2730634 - RNA, 22 nt, Human
uuggagaagaacugaaaucaua

SEQ ID NO: 2730635 - RNA, 15 nt, Human
uuggagaagaacuga

SEQ ID NO: 2730636 - RNA, 18 nt, Human
uuggagacacaacuauuu

SEQ ID NO: 2730637 - RNA, 20 nt, Human
uugcuuugugauuuuuguaa

SEQ ID NO: 2730638 - RNA, 17 nt, Human
uuggaaaauaaauuauu

SEQ ID NO: 2730639 - RNA, 15 nt, Human
aucucaaaacugcac

SEQ ID NO: 2730640 - RNA, 20 nt, Human
aucucaaaacugcacuguca

SEQ ID NO: 2730641 - RNA, 19 nt, Human
aucucaaaacugcacuguc

SEQ ID NO: 2730642 - RNA, 21 nt, Human
aucucaaauaacuaaaaggua

SEQ ID NO: 2730643 - RNA, 14 nt, Human
aucucaaauaacua

SEQ ID NO: 2730644 - RNA, 23 nt, Human
aucucaaauaacuaaaagguaug

SEQ ID NO: 2730645 - RNA, 14 nt, Human
aucucaaauuucua

SEQ ID NO: 2730646 - RNA, 19 nt, Human
aucuagauacuguaucaug

SEQ ID NO: 2730647 - RNA, 19 nt, Human
aucuaggaagacuuuggaa

SEQ ID NO: 2730648 - RNA, 17 nt, Human
aucuaggaagacuuugg

SEQ ID NO: 2730649 - RNA, 18 nt, Human
aucuaggaagacuuugga

SEQ ID NO: 2730650 - RNA, 21 nt, Human
uugagugcugucuccauguuu

SEQ ID NO: 2730651 - RNA, 11 nt, Human
uugagugccuu

SEQ ID NO: 2730652 - RNA, 18 nt, Human
uugauagcacagacccug

SEQ ID NO: 2730653 - RNA, 17 nt, Human
uugauacuacaguuugu

SEQ ID NO: 2730654 - RNA, 15 nt, Human
uugauacuacaguuu

SEQ ID NO: 2730655 - RNA, 20 nt, Human
aucuaauauguaacaagcca

SEQ ID NO: 2730656 - RNA, 23 nt, Human
aucuaauauguaacaagccaccc

SEQ ID NO: 2730657 - RNA, 18 nt, Human
aucuagauacuguaucau

SEQ ID NO: 2730658 - RNA, 13 nt, Human
uugacaugggaca

SEQ ID NO: 2730659 - RNA, 13 nt, Human
uugacaucaacug

SEQ ID NO: 2730660 - RNA, 16 nt, Human
uugacaucaacugcau

SEQ ID NO: 2730661 - RNA, 19 nt, Human
uugacaggauuauuggaaa

SEQ ID NO: 2730662 - RNA, 10 nt, Human
uugacagggc

SEQ ID NO: 2730663 - RNA, 12 nt, Human
uugacagggcac

SEQ ID NO: 2730664 - RNA, 12 nt, Human
uugacuuuuuau

SEQ ID NO: 2730665 - RNA, 17 nt, Human
uugaccauucuccaccu

SEQ ID NO: 2730666 - RNA, 11 nt, Human
uugagacagag

SEQ ID NO: 2730667 - RNA, 12 nt, Human
uugagcagggcu

SEQ ID NO: 2730668 - RNA, 16 nt, Human
uugagcagggcucagc

SEQ ID NO: 2730669 - RNA, 17 nt, Human
aucucaaauuucuaaau

SEQ ID NO: 2730670 - RNA, 16 nt, Human
aucucaaauuucuaaa

SEQ ID NO: 2730671 - RNA, 23 nt, Human
aucucacacaugagcaucaggcc

SEQ ID NO: 2730672 - RNA, 23 nt, Human
aucugaagucagaucugccuaag

SEQ ID NO: 2730673 - RNA, 18 nt, Human
aucugaagucagaucugc

SEQ ID NO: 2730674 - RNA, 17 nt, Human
aucugaagucagaucug

SEQ ID NO: 2730675 - RNA, 16 nt, Human
aucugaagucagaucu

SEQ ID NO: 2730676 - RNA, 21 nt, Human
uugauuaaauucuugcaaagu

SEQ ID NO: 2730677 - RNA, 20 nt, Human
uugauuaaauucuugcaaag

SEQ ID NO: 2730678 - RNA, 16 nt, Human
uugauuaaauucuugc

SEQ ID NO: 2730679 - RNA, 15 nt, Human
uugauuaaauucuug

SEQ ID NO: 2730680 - RNA, 20 nt, Human
uugauguguuuauuuauaga

SEQ ID NO: 2730681 - RNA, 14 nt, Human
aucugacuaugaca

SEQ ID NO: 2730682 - RNA, 17 nt, Human
aucugacuaugacauaa

SEQ ID NO: 2730683 - RNA, 23 nt, Human
uugauguucuuucacccuuuucu

SEQ ID NO: 2730684 - RNA, 11 nt, Human
uugcccaggcu

SEQ ID NO: 2730685 - RNA, 12 nt, Human
uugcccaggcug

SEQ ID NO: 2730686 - RNA, 14 nt, Human
uugcccaggcuggc

SEQ ID NO: 2730687 - RNA, 23 nt, Human
uugcccaggcuggcgugcagugg

SEQ ID NO: 2730688 - RNA, 13 nt, Human
uugcccaggcagg

SEQ ID NO: 2730689 - RNA, 14 nt, Human
uugcccaggcaggu

SEQ ID NO: 2730690 - RNA, 16 nt, Human
uugcccaggcaggucu

SEQ ID NO: 2730691 - RNA, 18 nt, Human
uugcccaggcaggucuug

SEQ ID NO: 2730692 - RNA, 21 nt, Human
uugcaccacugcacuccagcc

SEQ ID NO: 2730693 - RNA, 14 nt, Human
uugcaauggcagcc

SEQ ID NO: 2730694 - RNA, 12 nt, Human
uugcaugaggcu

SEQ ID NO: 2730695 - RNA, 14 nt, Human
uugcaugaggcuag

SEQ ID NO: 2730696 - RNA, 21 nt, Human
uuuauaugcuucuguuuuaua

SEQ ID NO: 2730697 - RNA, 19 nt, Human
uuuauaugcuucuguuuua

SEQ ID NO: 2730698 - RNA, 23 nt, Human
uuuagucuugucucagauuuuau

SEQ ID NO: 2730699 - RNA, 17 nt, Human
uuuagucuugucucaga

SEQ ID NO: 2730700 - RNA, 17 nt, Human
uuuagggguagcauuug

SEQ ID NO: 2730701 - RNA, 15 nt, Human
uuuagucuugucuca

SEQ ID NO: 2730702 - RNA, 15 nt, Human
uuuacuucuuauaca

SEQ ID NO: 2730703 - RNA, 14 nt, Human
uuuacuucuuauac

SEQ ID NO: 2730704 - RNA, 13 nt, Human
uuuacuucuuaua

SEQ ID NO: 2730705 - RNA, 16 nt, Human
uuuacugcagcuuugu

SEQ ID NO: 2730706 - RNA, 11 nt, Human
uuuacuuaaac

SEQ ID NO: 2730707 - RNA, 22 nt, Human
uuuaccugaagucuuuguacag

SEQ ID NO: 2730708 - RNA, 18 nt, Human
uuuaccugaagucuuugu

SEQ ID NO: 2730709 - RNA, 14 nt, Human
augccuuuucccaa

SEQ ID NO: 2730710 - RNA, 15 nt, Human
augccucucucaggc

SEQ ID NO: 2730711 - RNA, 20 nt, Human
augccuuuucccaacuccag

SEQ ID NO: 2730712 - RNA, 22 nt, Human
augccuuuucccaacuccagaa

SEQ ID NO: 2730713 - RNA, 13 nt, Human
augccucucucag

SEQ ID NO: 2730714 - RNA, 14 nt, Human
augccucucucagg

SEQ ID NO: 2730715 - RNA, 18 nt, Human
augcuacaggauuugaaa

SEQ ID NO: 2730716 - RNA, 20 nt, Human
augcgugcauaccacuuuug

SEQ ID NO: 2730717 - RNA, 22 nt, Human
augcgugcauaccacuuuuguu

SEQ ID NO: 2730718 - RNA, 14 nt, Human
augccaucaauaaa

SEQ ID NO: 2730719 - RNA, 23 nt, Human
uuuaaugaaagacuguacaaagu

SEQ ID NO: 2730720 - RNA, 21 nt, Human
uuuaaugaaagacuguacaaa

SEQ ID NO: 2730721 - RNA, 17 nt, Human
augcccagccccuucug

SEQ ID NO: 2730722 - RNA, 20 nt, Human
augccccugaauuuaaauag

SEQ ID NO: 2730723 - RNA, 15 nt, Human
augccccugaauuua

SEQ ID NO: 2730724 - RNA, 15 nt, Human
augcccagccccuuc

SEQ ID NO: 2730725 - RNA, 16 nt, Human
augcccagccccuucu

SEQ ID NO: 2730726 - RNA, 21 nt, Human
augccaugaggaacaaggcaa

SEQ ID NO: 2730727 - RNA, 23 nt, Human
augcuguauuuuaaaagaaugau

SEQ ID NO: 2730728 - RNA, 23 nt, Human
augcuguucaugaaagauucaau

SEQ ID NO: 2730729 - RNA, 19 nt, Human
augcuguauuuuaaaagaa

SEQ ID NO: 2730730 - RNA, 22 nt, Human
augcuguauuuuaaaagaauga

SEQ ID NO: 2730731 - RNA, 19 nt, Human
augcuggcuguuggcuggg

SEQ ID NO: 2730732 - RNA, 20 nt, Human
augcuggcuguuggcugggg

SEQ ID NO: 2730733 - RNA, 21 nt, Human
augcuucuguuuuauaauuuu

SEQ ID NO: 2730734 - RNA, 16 nt, Human
augcuucucacugcca

SEQ ID NO: 2730735 - RNA, 20 nt, Human
augcuucucacugccaugcc

SEQ ID NO: 2730736 - RNA, 17 nt, Human
auggaagacagcucuua

SEQ ID NO: 2730737 - RNA, 18 nt, Human
auggaagacagcucuuau

SEQ ID NO: 2730738 - RNA, 14 nt, Human
uuuaucagaauucu

SEQ ID NO: 2730739 - RNA, 14 nt, Human
augcuccuggccca

SEQ ID NO: 2730740 - RNA, 19 nt, Human
augcuccuggcccacugca

SEQ ID NO: 2730741 - RNA, 18 nt, Human
augcuggcuguuggcugg

SEQ ID NO: 2730742 - RNA, 19 nt, Human
uuucaaacauauauaacaa

SEQ ID NO: 2730743 - RNA, 12 nt, Human
uuucaaacuuua

SEQ ID NO: 2730744 - RNA, 22 nt, Human
uuucacauaucuaguaugaaau

SEQ ID NO: 2730745 - RNA, 17 nt, Human
uuucaaacauauauaac

SEQ ID NO: 2730746 - RNA, 21 nt, Human
auggaaugcuguguuaaauaa

SEQ ID NO: 2730747 - RNA, 17 nt, Human
auggaaugcuguguuaa

SEQ ID NO: 2730748 - RNA, 13 nt, Human
uuucacauuggaa

SEQ ID NO: 2730749 - RNA, 19 nt, Human
uuucacauuggaaacaagu

SEQ ID NO: 2730750 - RNA, 14 nt, Human
uuucacauuggaaa

SEQ ID NO: 2730751 - RNA, 16 nt, Human
uuucccuauuagagaa

SEQ ID NO: 2730752 - RNA, 19 nt, Human
uuucaugcuguucaugaaa

SEQ ID NO: 2730753 - RNA, 21 nt, Human
uuucaugcuguucaugaaaga

SEQ ID NO: 2730754 - RNA, 12 nt, Human
uuucagaaaugu

SEQ ID NO: 2730755 - RNA, 11 nt, Human
uuucagaaaug

SEQ ID NO: 2730756 - RNA, 21 nt, Human
uuuaaauauaugcuaagucuu

SEQ ID NO: 2730757 - RNA, 11 nt, Human
uuuaaaugcac

SEQ ID NO: 2730758 - RNA, 22 nt, Human
uuuaaggaugcuuguacauaau

SEQ ID NO: 2730759 - RNA, 21 nt, Human
uuuaaggaugcuuguacauaa

SEQ ID NO: 2730760 - RNA, 20 nt, Human
uuuaaggaugcuuguacaua

SEQ ID NO: 2730761 - RNA, 16 nt, Human
uuuaaugaaagacugu

SEQ ID NO: 2730762 - RNA, 19 nt, Human
uuuaaggaugcuuguacau

SEQ ID NO: 2730763 - RNA, 21 nt, Human
uuuaagcuguuacugucuuca

SEQ ID NO: 2730764 - RNA, 12 nt, Human
uuuaagagaaau

SEQ ID NO: 2730765 - RNA, 14 nt, Human
uuuaagaggcaggg

SEQ ID NO: 2730766 - RNA, 14 nt, Human
augcaaagcacuga

SEQ ID NO: 2730767 - RNA, 13 nt, Human
augcaaagcacug

SEQ ID NO: 2730768 - RNA, 12 nt, Human
augcaaagcacu

SEQ ID NO: 2730769 - RNA, 21 nt, Human
augcacuuuguucuggcucuu

SEQ ID NO: 2730770 - RNA, 18 nt, Human
uuuaaaaaaauuccaagu

SEQ ID NO: 2730771 - RNA, 23 nt, Human
augcacuuuguucuggcucuucc

SEQ ID NO: 2730772 - RNA, 16 nt, Human
uuguucauacauauuu

SEQ ID NO: 2730773 - RNA, 18 nt, Human
uuguucauacauauuuuu

SEQ ID NO: 2730774 - RNA, 19 nt, Human
uuguucuugguuuguaaau

SEQ ID NO: 2730775 - RNA, 17 nt, Human
uuguucuugguuuguaa

SEQ ID NO: 2730776 - RNA, 16 nt, Human
uuguagcuuuaucaaa

SEQ ID NO: 2730777 - RNA, 17 nt, Human
uuguagcuuuaucaaag

SEQ ID NO: 2730778 - RNA, 18 nt, Human
uuguagcauccuggaaua

SEQ ID NO: 2730779 - RNA, 16 nt, Human
uuguagcauccuggaa

SEQ ID NO: 2730780 - RNA, 22 nt, Human
augaggucagagccugcaguua

SEQ ID NO: 2730781 - RNA, 19 nt, Human
augaggucagagccugcag

SEQ ID NO: 2730782 - RNA, 20 nt, Human
augaggucagagccugcagu

SEQ ID NO: 2730783 - RNA, 15 nt, Human
augaggucagagccu

SEQ ID NO: 2730784 - RNA, 16 nt, Human
augaggucagagccug

SEQ ID NO: 2730785 - RNA, 18 nt, Human
augaggucagagccugca

SEQ ID NO: 2730786 - RNA, 20 nt, Human
uugucaauaaaauccauaca

SEQ ID NO: 2730787 - RNA, 13 nt, Human
augaguccccugu

SEQ ID NO: 2730788 - RNA, 23 nt, Human
augaguccccuguuuguuucuga

SEQ ID NO: 2730789 - RNA, 17 nt, Human
uugucacacacuuuggc

SEQ ID NO: 2730790 - RNA, 21 nt, Human
uugucauauaagauucauauu

SEQ ID NO: 2730791 - RNA, 20 nt, Human
uuguucaauaauaaauauuu

SEQ ID NO: 2730792 - RNA, 22 nt, Human
uuguucaauaauaaauauuuuu

SEQ ID NO: 2730793 - RNA, 13 nt, Human
uuguucauacaua

SEQ ID NO: 2730794 - RNA, 13 nt, Human
uugugaggaagcc

SEQ ID NO: 2730795 - RNA, 20 nt, Human
uugugauacaaugcugugcc

SEQ ID NO: 2730796 - RNA, 19 nt, Human
uugugauacaaugcugugc

SEQ ID NO: 2730797 - RNA, 17 nt, Human
uugugaggaagccgcug

SEQ ID NO: 2730798 - RNA, 18 nt, Human
uugugaggaagccgcugg

SEQ ID NO: 2730799 - RNA, 15 nt, Human
uuguccccgacccuu

SEQ ID NO: 2730800 - RNA, 16 nt, Human
uuguccccgacccuug

SEQ ID NO: 2730801 - RNA, 18 nt, Human
uuguccccaccgcagaca

SEQ ID NO: 2730802 - RNA, 20 nt, Human
uuguccccaccgcagacagg

SEQ ID NO: 2730803 - RNA, 15 nt, Human
auuacuguaagaaaa

SEQ ID NO: 2730804 - RNA, 16 nt, Human
auuacuguaagaaaau

SEQ ID NO: 2730805 - RNA, 14 nt, Human
auuacuucugcuac

SEQ ID NO: 2730806 - RNA, 12 nt, Human
auuacuucugcu

SEQ ID NO: 2730807 - RNA, 13 nt, Human
auuacuucugcua

SEQ ID NO: 2730808 - RNA, 13 nt, Human
auuagagaagaga

SEQ ID NO: 2730809 - RNA, 21 nt, Human
auuagaauucuguauagauua

SEQ ID NO: 2730810 - RNA, 14 nt, Human
uuuugugaagcaaa

SEQ ID NO: 2730811 - RNA, 23 nt, Human
uuuugugcauuaucuagauacug

SEQ ID NO: 2730812 - RNA, 15 nt, Human
uuuuggaauuuuccu

SEQ ID NO: 2730813 - RNA, 15 nt, Human
uuuuguuuucauuau

SEQ ID NO: 2730814 - RNA, 16 nt, Human
uuuuguuuuugucuua

SEQ ID NO: 2730815 - RNA, 20 nt, Human
uuuuuauauuuacuaaaaug

SEQ ID NO: 2730816 - RNA, 23 nt, Human
uuuuuauacauaaacaagaccac

SEQ ID NO: 2730817 - RNA, 15 nt, Human
uuuuugaagcuguau

SEQ ID NO: 2730818 - RNA, 12 nt, Human
uuuuugacagaa

SEQ ID NO: 2730819 - RNA, 13 nt, Human
uuuuugacagaau

SEQ ID NO: 2730820 - RNA, 18 nt, Human
auuaaguacuauguauca

SEQ ID NO: 2730821 - RNA, 19 nt, Human
auuaaguacuauguaucaa

SEQ ID NO: 2730822 - RNA, 16 nt, Human
auuaaguacuauguau

SEQ ID NO: 2730823 - RNA, 13 nt, Human
auuaaggaagaca

SEQ ID NO: 2730824 - RNA, 17 nt, Human
uuuuuguagcacugaca

SEQ ID NO: 2730825 - RNA, 19 nt, Human
uuuuuguagcacugacaga

SEQ ID NO: 2730826 - RNA, 20 nt, Human
uuuuuguagcacugacagau

SEQ ID NO: 2730827 - RNA, 21 nt, Human
uuuuuguagcacugacagauu

SEQ ID NO: 2730828 - RNA, 24 nt, Human
uuuuuggcauaacauaaaucugug

SEQ ID NO: 2730829 - RNA, 23 nt, Human
uuuuuggcauaacauaaaucugu

SEQ ID NO: 2730830 - RNA, 17 nt, Human
auuccaagugauugaaa

SEQ ID NO: 2730831 - RNA, 17 nt, Human
auucccaagcucugcuc

SEQ ID NO: 2730832 - RNA, 22 nt, Human
auuccccaggaggccagccuug

SEQ ID NO: 2730833 - RNA, 20 nt, Human
auuccccaggaggccagccu

SEQ ID NO: 2730834 - RNA, 18 nt, Human
auucccaagcucugcucc

SEQ ID NO: 2730835 - RNA, 19 nt, Human
auucccaagcucugcuccu

SEQ ID NO: 2730836 - RNA, 17 nt, Human
auucacugauuugacau

SEQ ID NO: 2730837 - RNA, 12 nt, Human
auucacugauuu

SEQ ID NO: 2730838 - RNA, 21 nt, Human
auucaggagaguagaacagau

SEQ ID NO: 2730839 - RNA, 22 nt, Human
auucaggagaguagaacagaua

SEQ ID NO: 2730840 - RNA, 20 nt, Human
auuauauggcuugaguuuaa

SEQ ID NO: 2730841 - RNA, 19 nt, Human
auuauaugcuauuucuaua

SEQ ID NO: 2730842 - RNA, 17 nt, Human
auuauaugcuauuucua

SEQ ID NO: 2730843 - RNA, 18 nt, Human
auuauaugcuauuucuau

SEQ ID NO: 2730844 - RNA, 19 nt, Human
auuauucacugauuugaca

SEQ ID NO: 2730845 - RNA, 24 nt, Human
auuauucaaaguugccuaaaucca

SEQ ID NO: 2730846 - RNA, 18 nt, Human
auuauucaaaguugccua

SEQ ID NO: 2730847 - RNA, 22 nt, Human
auuauucaaaguugccuaaauc

SEQ ID NO: 2730848 - RNA, 19 nt, Human
auuauucaaaguugccuaa

SEQ ID NO: 2730849 - RNA, 19 nt, Human
auuauaucugaggaauucu

SEQ ID NO: 2730850 - RNA, 18 nt, Human
auuauaucugaggaauuc

SEQ ID NO: 2730851 - RNA, 16 nt, Human
auuauaugcuauuucu

SEQ ID NO: 2730852 - RNA, 22 nt, Human
auuauaucugaggaauucugua

SEQ ID NO: 2730853 - RNA, 21 nt, Human
auuauaucugaggaauucugu

SEQ ID NO: 2730854 - RNA, 20 nt, Human
auuauaucugaggaauucug

SEQ ID NO: 2730855 - RNA, 22 nt, Human
auucaaacagucucaggaaauc

SEQ ID NO: 2730856 - RNA, 19 nt, Human
uuugcuaagcauuccaacu

SEQ ID NO: 2730857 - RNA, 22 nt, Human
uuuggauuggaugaauuccaaa

SEQ ID NO: 2730858 - RNA, 18 nt, Human
uuugauucagacagcugc

SEQ ID NO: 2730859 - RNA, 22 nt, Human
uuugggguacccacugcucugg

SEQ ID NO: 2730860 - RNA, 21 nt, Human
uuugggguacccacugcucug

SEQ ID NO: 2730861 - RNA, 12 nt, Human
uuuggcugcuga

SEQ ID NO: 2730862 - RNA, 13 nt, Human
uuuggcugcugaa

SEQ ID NO: 2730863 - RNA, 15 nt, Human
uuugauucagacagc

SEQ ID NO: 2730864 - RNA, 14 nt, Human
uuugauccaagcug

SEQ ID NO: 2730865 - RNA, 13 nt, Human
uuugagaguucua

SEQ ID NO: 2730866 - RNA, 15 nt, Human
uuugauccaagcugg

SEQ ID NO: 2730867 - RNA, 13 nt, Human
uuugagacagagu

SEQ ID NO: 2730868 - RNA, 18 nt, Human
uuugaccucugcagcaau

SEQ ID NO: 2730869 - RNA, 14 nt, Human
uuugacaaggggca

SEQ ID NO: 2730870 - RNA, 21 nt, Human
uuugaccucugcagcaauaaa

SEQ ID NO: 2730871 - RNA, 19 nt, Human
uuugaccucugcagcaaua

SEQ ID NO: 2730872 - RNA, 18 nt, Human
uuugacagaauauguuuc

SEQ ID NO: 2730873 - RNA, 19 nt, Human
uuugacagaauauguuuca

SEQ ID NO: 2730874 - RNA, 20 nt, Human
uuugacagaauauguuucaa

SEQ ID NO: 2730875 - RNA, 21 nt, Human
uuugacagaauauguuucaaa

SEQ ID NO: 2730876 - RNA, 23 nt, Human
uuucccucccuuccucuuuccau

SEQ ID NO: 2730877 - RNA, 14 nt, Human
uuugaauuuugugu

SEQ ID NO: 2730878 - RNA, 12 nt, Human
uuugaauuuugu

SEQ ID NO: 2730879 - RNA, 17 nt, Human
uuuguaguguuggagaa

SEQ ID NO: 2730880 - RNA, 16 nt, Human
uuuguaauuuuuuuau

SEQ ID NO: 2730881 - RNA, 14 nt, Human
uuuguacagacaac

SEQ ID NO: 2730882 - RNA, 23 nt, Human
uuugucuuaaaaaguggaaaaau

SEQ ID NO: 2730883 - RNA, 16 nt, Human
uuugugauacaaugcu

SEQ ID NO: 2730884 - RNA, 13 nt, Human
uuugucuuaaaaa

SEQ ID NO: 2730885 - RNA, 14 nt, Human
uuugucuuaaaaag

SEQ ID NO: 2730886 - RNA, 19 nt, Human
uuugugcauuaucuagaua

SEQ ID NO: 2730887 - RNA, 15 nt, Human
uuugugauacaaugc

SEQ ID NO: 2730888 - RNA, 22 nt, Human
uuugugauacaaugcugugccc

SEQ ID NO: 2730889 - RNA, 22 nt, Human
uuugugcauuaucuagauacug

SEQ ID NO: 2730890 - RNA, 14 nt, Human
uuuguuucugaaag

SEQ ID NO: 2730891 - RNA, 16 nt, Human
uuuguuucugaaaggg

SEQ ID NO: 2730892 - RNA, 23 nt, Human
augucgucaaagcugaaauggac

SEQ ID NO: 2730893 - RNA, 14 nt, Human
augugagacugguu

SEQ ID NO: 2730894 - RNA, 13 nt, Human
augugagaccauu

SEQ ID NO: 2730895 - RNA, 12 nt, Human
auguaucaauga

SEQ ID NO: 2730896 - RNA, 16 nt, Human
auguccaagaagccca

SEQ ID NO: 2730897 - RNA, 17 nt, Human
auguccaagaagcccag

SEQ ID NO: 2730898 - RNA, 21 nt, Human
augugcuaguaauuggaaagg

SEQ ID NO: 2730899 - RNA, 20 nt, Human
augugcuaguaauuggaaag

SEQ ID NO: 2730900 - RNA, 21 nt, Human
augugccagguuuuuggucug

SEQ ID NO: 2730901 - RNA, 18 nt, Human
uuuuaaaaaacugcugac

SEQ ID NO: 2730902 - RNA, 12 nt, Human
auguguuuccau

SEQ ID NO: 2730903 - RNA, 20 nt, Human
auguuacauaagauaaaugu

SEQ ID NO: 2730904 - RNA, 12 nt, Human
auguuaagcaga

SEQ ID NO: 2730905 - RNA, 19 nt, Human
auguuacauaagauaaaug

SEQ ID NO: 2730906 - RNA, 13 nt, Human
auguuaagcagau

SEQ ID NO: 2730907 - RNA, 12 nt, Human
auguugaaagau

SEQ ID NO: 2730908 - RNA, 18 nt, Human
auguugaaagaucaaaag

SEQ ID NO: 2730909 - RNA, 13 nt, Human
auguugcccaggc

SEQ ID NO: 2730910 - RNA, 14 nt, Human
auguugcccaggca

SEQ ID NO: 2730911 - RNA, 15 nt, Human
auguugcccaggcag

SEQ ID NO: 2730912 - RNA, 21 nt, Human
uuuuagacccuauugcugcuu

SEQ ID NO: 2730913 - RNA, 17 nt, Human
uuuuagaguugauacua

SEQ ID NO: 2730914 - RNA, 22 nt, Human
uuuuauggcacuaguauuucua

SEQ ID NO: 2730915 - RNA, 19 nt, Human
uuuuauggcuuuugugcau

SEQ ID NO: 2730916 - RNA, 18 nt, Human
uuuuauggcuuuugugca

SEQ ID NO: 2730917 - RNA, 15 nt, Human
uuuuaguagagacag

SEQ ID NO: 2730918 - RNA, 12 nt, Human
uuuuauuaaauu

SEQ ID NO: 2730919 - RNA, 21 nt, Human
uuuuauggcuuuugugcauua

SEQ ID NO: 2730920 - RNA, 20 nt, Human
uuuucaggcuagauguaugu

SEQ ID NO: 2730921 - RNA, 16 nt, Human
uuuucuauaauuuaaa

SEQ ID NO: 2730922 - RNA, 16 nt, Human
uuuucucuaggaaaua

SEQ ID NO: 2730923 - RNA, 17 nt, Human
uuuucucugauacagaa

SEQ ID NO: 2730924 - RNA, 23 nt, Human
auguuuauuacaguauaauuaac

SEQ ID NO: 2730925 - RNA, 22 nt, Human
auguuuauuacaguauaauuaa

SEQ ID NO: 2730926 - RNA, 19 nt, Human
auguuuauuacaguauaau

SEQ ID NO: 2730927 - RNA, 18 nt, Human
auguuuauuacaguauaa

SEQ ID NO: 2730928 - RNA, 16 nt, Human
auguuuauuacaguau

SEQ ID NO: 2730929 - RNA, 15 nt, Human
auguuuauuacagua

SEQ ID NO: 2730930 - RNA, 23 nt, Human
auuaaaaaucucaaauuucuaaa

SEQ ID NO: 2730931 - RNA, 19 nt, Human
auuaaaacacaacaucuuu

SEQ ID NO: 2730932 - RNA, 17 nt, Human
auguuggccaggcuggu

SEQ ID NO: 2730933 - RNA, 12 nt, Human
auguuuauuaca

SEQ ID NO: 2730934 - RNA, 19 nt, Human
uuuucugauccaguuuugu

SEQ ID NO: 2730935 - RNA, 13 nt, Human
uuuucuguucuuu

SEQ ID NO: 2730936 - RNA, 12 nt, Human
auugauguguuu

SEQ ID NO: 2730937 - RNA, 19 nt, Human
auugauguguuuauuuaua

SEQ ID NO: 2730938 - RNA, 12 nt, Human
auugcaccacug

SEQ ID NO: 2730939 - RNA, 19 nt, Human
auugcaacaggcugggcuu

SEQ ID NO: 2730940 - RNA, 17 nt, Human
auugcaacaggcugggc

SEQ ID NO: 2730941 - RNA, 18 nt, Human
auugcaacaggcugggcu

SEQ ID NO: 2730942 - RNA, 16 nt, Human
auugcaacaggcuggg

SEQ ID NO: 2730943 - RNA, 16 nt, Human
auuggagcucguggaa

SEQ ID NO: 2730944 - RNA, 17 nt, Human
auuggagcucgugggac

SEQ ID NO: 2730945 - RNA, 19 nt, Human
auuggcuagagguucaaag

SEQ ID NO: 2730946 - RNA, 22 nt, Human
auuggcuagagguucaaagaua

SEQ ID NO: 2730947 - RNA, 20 nt, Human
auuggcuagagguucaaaga

SEQ ID NO: 2730948 - RNA, 22 nt, Human
auuggggauucuuaaaguugaa

SEQ ID NO: 2730949 - RNA, 17 nt, Human
auuguacgaagaguauu

SEQ ID NO: 2730950 - RNA, 21 nt, Human
auuggggauucuuaaaguuga

SEQ ID NO: 2730951 - RNA, 20 nt, Human
auuggggauucuuaaaguug

SEQ ID NO: 2730952 - RNA, 16 nt, Human
auuggggauucuuaaa

SEQ ID NO: 2730953 - RNA, 15 nt, Human
auuggggauucuuaa

SEQ ID NO: 2730954 - RNA, 14 nt, Human
auuggggauucuua

SEQ ID NO: 2730955 - RNA, 23 nt, Human
auuggcuagagguucaaagauau

SEQ ID NO: 2730956 - RNA, 13 nt, Human
auuggaaacaagu

SEQ ID NO: 2730957 - RNA, 14 nt, Human
auuggaaacaaguc

SEQ ID NO: 2730958 - RNA, 20 nt, Human
auuucuugagguaaaagcau

SEQ ID NO: 2730959 - RNA, 16 nt, Human
auuucuuccacaagag

SEQ ID NO: 2730960 - RNA, 13 nt, Human
auuugaauguuaa

SEQ ID NO: 2730961 - RNA, 18 nt, Human
auuugaauguuaagcaga

SEQ ID NO: 2730962 - RNA, 13 nt, Human
auuugaauuuugu

SEQ ID NO: 2730963 - RNA, 19 nt, Human
auuugaauguuaagcagau

SEQ ID NO: 2730964 - RNA, 15 nt, Human
auuugagcagggcuc

SEQ ID NO: 2730965 - RNA, 15 nt, Human
auuugaggucuguuc

SEQ ID NO: 2730966 - RNA, 18 nt, Human
auuugaggucuguucuuu

SEQ ID NO: 2730967 - RNA, 17 nt, Human
auuugaggucuguucuu

SEQ ID NO: 2730968 - RNA, 21 nt, Human
auuuggugguuucagaaaugu

SEQ ID NO: 2730969 - RNA, 14 nt, Human
auuugguuuucaca

SEQ ID NO: 2730970 - RNA, 12 nt, Human
auuugguuuuca

SEQ ID NO: 2730971 - RNA, 18 nt, Human
auuugauaugugaacagu

SEQ ID NO: 2730972 - RNA, 19 nt, Human
auuugauaugugaacaguu

SEQ ID NO: 2730973 - RNA, 21 nt, Human
auuugaggucuguucuuucca

SEQ ID NO: 2730974 - RNA, 21 nt, Human
auuuauuuuaauaauguuuca

SEQ ID NO: 2730975 - RNA, 23 nt, Human
auuuauuggcuuuucugauccag

SEQ ID NO: 2730976 - RNA, 20 nt, Human
auuuauuggcuuuucugauc

SEQ ID NO: 2730977 - RNA, 17 nt, Human
auuuccguuaaaauacc

SEQ ID NO: 2730978 - RNA, 14 nt, Human
auuucccaaagcag

SEQ ID NO: 2730979 - RNA, 16 nt, Human
auuucccaaagcagug

SEQ ID NO: 2730980 - RNA, 19 nt, Human
auuuauuacuguaagaaaa

SEQ ID NO: 2730981 - RNA, 20 nt, Human
auuuauuacuguaagaaaau

SEQ ID NO: 2730982 - RNA, 18 nt, Human
auuuauuggcuuuucuga

SEQ ID NO: 2730983 - RNA, 14 nt, Human
auuuauuggcuuuu

SEQ ID NO: 2730984 - RNA, 19 nt, Human
auuguuuucaguguacaug

SEQ ID NO: 2730985 - RNA, 18 nt, Human
auuguuuucaguguacau

SEQ ID NO: 2730986 - RNA, 14 nt, Human
auuuaaaaaaaauc

SEQ ID NO: 2730987 - RNA, 16 nt, Human
auuguaguccuguaau

SEQ ID NO: 2730988 - RNA, 15 nt, Human
auuguacuuugugcu

SEQ ID NO: 2730989 - RNA, 17 nt, Human
auuguagcauccuggaa

SEQ ID NO: 2730990 - RNA, 17 nt, Human
auuguuuucaguguaca

SEQ ID NO: 2730991 - RNA, 20 nt, Human
auuguagcauccuggaauau

SEQ ID NO: 2730992 - RNA, 15 nt, Human
auuuaccacuugugu

SEQ ID NO: 2730993 - RNA, 22 nt, Human
auuuaccacuuguguuuugcaa

SEQ ID NO: 2730994 - RNA, 20 nt, Human
auuuacuaaaauggacugug

SEQ ID NO: 2730995 - RNA, 19 nt, Human
auuuacuaaaauggacugu

SEQ ID NO: 2730996 - RNA, 16 nt, Human
auuuacuaaaauggac

SEQ ID NO: 2730997 - RNA, 22 nt, Human
auuuacaacugggggaggguga

SEQ ID NO: 2730998 - RNA, 16 nt, Human
auuuaaauagcuuuuu

SEQ ID NO: 2730999 - RNA, 20 nt, Human
auuuacuucuuauacauuug

SEQ ID NO: 2731000 - RNA, 19 nt, Human
auuuacuucuuauacauuu

SEQ ID NO: 2731001 - RNA, 18 nt, Human
auuuuaauaauguuucaa

SEQ ID NO: 2731002 - RNA, 19 nt, Human
auuuuaauaauguuucaaa

SEQ ID NO: 2731003 - RNA, 17 nt, Human
auuuuaacaacagcugg

SEQ ID NO: 2731004 - RNA, 14 nt, Human
caaagaaauguaag

SEQ ID NO: 2731005 - RNA, 14 nt, Human
caaagagguuuuaa

SEQ ID NO: 2731006 - RNA, 21 nt, Human
caaagagguuuuaaaaaaauc

SEQ ID NO: 2731007 - RNA, 20 nt, Human
caaaggguaucaggugcugc

SEQ ID NO: 2731008 - RNA, 21 nt, Human
caaaggguaucaggugcugcc

SEQ ID NO: 2731009 - RNA, 23 nt, Human
caaaggguaucaggugcugccau

SEQ ID NO: 2731010 - RNA, 16 nt, Human
caaaguggugagaggc

SEQ ID NO: 2731011 - RNA, 17 nt, Human
caaaguggugagaggca

SEQ ID NO: 2731012 - RNA, 20 nt, Human
caaaggagauuggaaggaac

SEQ ID NO: 2731013 - RNA, 14 nt, Human
caaaggagauugga

SEQ ID NO: 2731014 - RNA, 19 nt, Human
caaaguggugagaggcauc

SEQ ID NO: 2731015 - RNA, 14 nt, Human
caaaguugccuaaa

SEQ ID NO: 2731016 - RNA, 17 nt, Human
caaaguugccuaaaucc

SEQ ID NO: 2731017 - RNA, 15 nt, Human
caaaguugccuaaau

SEQ ID NO: 2731018 - RNA, 20 nt, Human
caacaggcugggcuucagug

SEQ ID NO: 2731019 - RNA, 18 nt, Human
caaaguugccuaaaucca

SEQ ID NO: 2731020 - RNA, 19 nt, Human
caagacugcacaucaaaau

SEQ ID NO: 2731021 - RNA, 21 nt, Human
caagacgcugugcugcccugc

SEQ ID NO: 2731022 - RNA, 22 nt, Human
caagacgcugugcugcccugcc

SEQ ID NO: 2731023 - RNA, 13 nt, Human
caagaccuucucc

SEQ ID NO: 2731024 - RNA, 19 nt, Human
caagacgcugugcugcccu

SEQ ID NO: 2731025 - RNA, 20 nt, Human
caagacgcugugcugcccug

SEQ ID NO: 2731026 - RNA, 23 nt, Human
caagacccuuguggucccacccc

SEQ ID NO: 2731027 - RNA, 17 nt, Human
caagagcccaggccucc

SEQ ID NO: 2731028 - RNA, 12 nt, Human
caagagggucug

SEQ ID NO: 2731029 - RNA, 16 nt, Human
caagagggucugagga

SEQ ID NO: 2731030 - RNA, 17 nt, Human
caagagggucugaggaa

SEQ ID NO: 2731031 - RNA, 16 nt, Human
caagcauaccaacacg

SEQ ID NO: 2731032 - RNA, 21 nt, Human
caagcauaccaacacgagcag

SEQ ID NO: 2731033 - RNA, 16 nt, Human
caagcauuuagaugua

SEQ ID NO: 2731034 - RNA, 19 nt, Human
caagcauuuagauguauag

SEQ ID NO: 2731035 - RNA, 21 nt, Human
caaggcugggggaagaagcuc

SEQ ID NO: 2731036 - RNA, 13 nt, Human
caaggcugucaau

SEQ ID NO: 2731037 - RNA, 14 nt, Human
caaggcugucaauu

SEQ ID NO: 2731038 - RNA, 17 nt, Human
caaggauccugagccag

SEQ ID NO: 2731039 - RNA, 15 nt, Human
caaggauccugagcc

SEQ ID NO: 2731040 - RNA, 16 nt, Human
caaggauccugagcca

SEQ ID NO: 2731041 - RNA, 14 nt, Human
caaggauccugagc

SEQ ID NO: 2731042 - RNA, 22 nt, Human
caagugaaaaaggaggaagaga

SEQ ID NO: 2731043 - RNA, 23 nt, Human
caagugaaaaaggaggaagagaa

SEQ ID NO: 2731044 - RNA, 14 nt, Human
caagugagacccug

SEQ ID NO: 2731045 - RNA, 15 nt, Human
caagugagacccugu

SEQ ID NO: 2731046 - RNA, 19 nt, Human
caagugagacccugucuca

SEQ ID NO: 2731047 - RNA, 19 nt, Human
caagugauucuccugccuc

SEQ ID NO: 2731048 - RNA, 18 nt, Human
caagugauucuccugccu

SEQ ID NO: 2731049 - RNA, 20 nt, Human
caagugauucuccugccuca

SEQ ID NO: 2731050 - RNA, 21 nt, Human
caaggggaauguuugccucug

SEQ ID NO: 2731051 - RNA, 15 nt, Human
caagggccuggccug

SEQ ID NO: 2731052 - RNA, 13 nt, Human
caagggccuggcc

SEQ ID NO: 2731053 - RNA, 14 nt, Human
caagggccuggccu

SEQ ID NO: 2731054 - RNA, 13 nt, Human
caaggucauuuuu

SEQ ID NO: 2731055 - RNA, 23 nt, Human
caaggggaauguuugccucugcc

SEQ ID NO: 2731056 - RNA, 14 nt, Human
caacaggcugggcu

SEQ ID NO: 2731057 - RNA, 17 nt, Human
caacaggcugggcuuca

SEQ ID NO: 2731058 - RNA, 16 nt, Human
caacauacucccaucu

SEQ ID NO: 2731059 - RNA, 14 nt, Human
caacauacucccau

SEQ ID NO: 2731060 - RNA, 15 nt, Human
caacauacucccauc

SEQ ID NO: 2731061 - RNA, 17 nt, Human
caacugcaucaagaugu

SEQ ID NO: 2731062 - RNA, 20 nt, Human
caacugcaucaagaugugac

SEQ ID NO: 2731063 - RNA, 23 nt, Human
caacugcaucaagaugugacaug

SEQ ID NO: 2731064 - RNA, 17 nt, Human
caaccugauugugucuc

SEQ ID NO: 2731065 - RNA, 19 nt, Human
caaccugauugugucucuu

SEQ ID NO: 2731066 - RNA, 21 nt, Human
caaccugauugugucucuugg

SEQ ID NO: 2731067 - RNA, 17 nt, Human
cacaaagguagcuuuuc

SEQ ID NO: 2731068 - RNA, 17 nt, Human
cacaaacgggcucagca

SEQ ID NO: 2731069 - RNA, 15 nt, Human
cacaaacagaggccg

SEQ ID NO: 2731070 - RNA, 17 nt, Human
caauuuuguuucuguac

SEQ ID NO: 2731071 - RNA, 16 nt, Human
caauuuuguuucugua

SEQ ID NO: 2731072 - RNA, 14 nt, Human
caauuuuguuucug

SEQ ID NO: 2731073 - RNA, 13 nt, Human
caauuuuguuucu

SEQ ID NO: 2731074 - RNA, 18 nt, Human
caaugguuuucuugugug

SEQ ID NO: 2731075 - RNA, 14 nt, Human
caaugcacuuuguu

SEQ ID NO: 2731076 - RNA, 14 nt, Human
cacacccagcccac

SEQ ID NO: 2731077 - RNA, 20 nt, Human
cacacccagcccacuucugc

SEQ ID NO: 2731078 - RNA, 13 nt, Human
cacacagcucugu

SEQ ID NO: 2731079 - RNA, 14 nt, Human
cacacagcucuguc

SEQ ID NO: 2731080 - RNA, 15 nt, Human
cacacagcucugucc

SEQ ID NO: 2731081 - RNA, 21 nt, Human
cacaccagagcccaccuuggc

SEQ ID NO: 2731082 - RNA, 22 nt, Human
cacaccagagcccaccuuggcu

SEQ ID NO: 2731083 - RNA, 15 nt, Human
cacacaccagagccc

SEQ ID NO: 2731084 - RNA, 16 nt, Human
cacacaccagagccca

SEQ ID NO: 2731085 - RNA, 20 nt, Human
cacacaccagagcccaccuu

SEQ ID NO: 2731086 - RNA, 14 nt, Human
cacacacuuuggcu

SEQ ID NO: 2731087 - RNA, 21 nt, Human
cacacagaggcugccucuccc

SEQ ID NO: 2731088 - RNA, 20 nt, Human
caaugcaaaccaucauugaa

SEQ ID NO: 2731089 - RNA, 23 nt, Human
caaugcaaaccaucauugaaauc

SEQ ID NO: 2731090 - RNA, 14 nt, Human
caaugcacugacau

SEQ ID NO: 2731091 - RNA, 13 nt, Human
caaugcacuuugu

SEQ ID NO: 2731092 - RNA, 14 nt, Human
caaugcaaaccauc

SEQ ID NO: 2731093 - RNA, 14 nt, Human
caaugauggucacc

SEQ ID NO: 2731094 - RNA, 21 nt, Human
caaugcaaaccaucauugaaa

SEQ ID NO: 2731095 - RNA, 22 nt, Human
caaugcaaaccaucauugaaau

SEQ ID NO: 2731096 - RNA, 13 nt, Human
caaugaccuuuca

SEQ ID NO: 2731097 - RNA, 14 nt, Human
caaugaccuuucaa

SEQ ID NO: 2731098 - RNA, 13 nt, Human
caaugauggucac

SEQ ID NO: 2731099 - RNA, 15 nt, Human
caaugaccuuucaau

SEQ ID NO: 2731100 - RNA, 16 nt, Human
caaugaccuuucaaua

SEQ ID NO: 2731101 - RNA, 17 nt, Human
cacaugaaguccaagca

SEQ ID NO: 2731102 - RNA, 20 nt, Human
cacaugaaguccaagcauuu

SEQ ID NO: 2731103 - RNA, 16 nt, Human
cacaugaaguccaagc

SEQ ID NO: 2731104 - RNA, 20 nt, Human
cacaguuuucugagaaagac

SEQ ID NO: 2731105 - RNA, 22 nt, Human
cacaguuuucugagaaagacua

SEQ ID NO: 2731106 - RNA, 21 nt, Human
cacaguuuucugagaaagacu

SEQ ID NO: 2731107 - RNA, 13 nt, Human
cacaugagcauca

SEQ ID NO: 2731108 - RNA, 17 nt, Human
cacaugagcaucaggcc

SEQ ID NO: 2731109 - RNA, 18 nt, Human
cacaugagcaucaggcca

SEQ ID NO: 2731110 - RNA, 19 nt, Human
cacaugagcaucaggccag

SEQ ID NO: 2731111 - RNA, 20 nt, Human
cacaugagcaucaggccagg

SEQ ID NO: 2731112 - RNA, 21 nt, Human
cacaugagcaucaggccaggc

SEQ ID NO: 2731113 - RNA, 20 nt, Human
cacaugccucucucaggcca

SEQ ID NO: 2731114 - RNA, 21 nt, Human
cacaugccucucucaggccaa

SEQ ID NO: 2731115 - RNA, 16 nt, Human
cacauguccaagaagc

SEQ ID NO: 2731116 - RNA, 17 nt, Human
cacauguccaagaagcc

SEQ ID NO: 2731117 - RNA, 19 nt, Human
cacaugcaaggucauuuuu

SEQ ID NO: 2731118 - RNA, 17 nt, Human
cacaugcaaggucauuu

SEQ ID NO: 2731119 - RNA, 18 nt, Human
cacaugcacgugugugca

SEQ ID NO: 2731120 - RNA, 20 nt, Human
cacaugcaaggucauuuuuu

SEQ ID NO: 2731121 - RNA, 23 nt, Human
cacaguccuuaccagcagagcac

SEQ ID NO: 2731122 - RNA, 14 nt, Human
cacaggcccggcuc

SEQ ID NO: 2731123 - RNA, 19 nt, Human
cacaggcagguccaggguu

SEQ ID NO: 2731124 - RNA, 17 nt, Human
cacaggaucagucugau

SEQ ID NO: 2731125 - RNA, 19 nt, Human
cacagcucuucuccaggcu

SEQ ID NO: 2731126 - RNA, 20 nt, Human
cacagcucuucuccaggcug

SEQ ID NO: 2731127 - RNA, 22 nt, Human
cacacggacacucaaaagcugg

SEQ ID NO: 2731128 - RNA, 18 nt, Human
cacagcucuucuccaggc

SEQ ID NO: 2731129 - RNA, 19 nt, Human
caccacacccagcccacuu

SEQ ID NO: 2731130 - RNA, 17 nt, Human
caccagagcccaccuug

SEQ ID NO: 2731131 - RNA, 18 nt, Human
caccagagcccaccuugg

SEQ ID NO: 2731132 - RNA, 20 nt, Human
caccagagcccaccuuggcu

SEQ ID NO: 2731133 - RNA, 22 nt, Human
caccagagcccaccuuggcuca

SEQ ID NO: 2731134 - RNA, 15 nt, Human
caccagagcccaccu

SEQ ID NO: 2731135 - RNA, 12 nt, Human
caccaagcccag

SEQ ID NO: 2731136 - RNA, 13 nt, Human
caccaagcccagu

SEQ ID NO: 2731137 - RNA, 17 nt, Human
caccaacgucugugcca

SEQ ID NO: 2731138 - RNA, 18 nt, Human
cacauguccaagaagccc

SEQ ID NO: 2731139 - RNA, 19 nt, Human
cacauguccaagaagccca

SEQ ID NO: 2731140 - RNA, 21 nt, Human
cacauguccaagaagcccagg

SEQ ID NO: 2731141 - RNA, 22 nt, Human
cacauguccaagaagcccagga

SEQ ID NO: 2731142 - RNA, 18 nt, Human
caccaucaugucuggcua

SEQ ID NO: 2731143 - RNA, 15 nt, Human
caccaucaugucugg

SEQ ID NO: 2731144 - RNA, 17 nt, Human
caccaucaugucuggcu

SEQ ID NO: 2731145 - RNA, 16 nt, Human
caccaucaagccacca

SEQ ID NO: 2731146 - RNA, 17 nt, Human
caccaucaagccaccaa

SEQ ID NO: 2731147 - RNA, 19 nt, Human
caccaucaagccaccaaca

SEQ ID NO: 2731148 - RNA, 24 nt, Human
caccaucaagccaccaacauacuc

SEQ ID NO: 2731149 - RNA, 13 nt, Human
caccaucaagcca

SEQ ID NO: 2731150 - RNA, 14 nt, Human
caccaucaagccac

SEQ ID NO: 2731151 - RNA, 15 nt, Human
caccaucaagccacc

SEQ ID NO: 2731152 - RNA, 21 nt, Human
caccauauuaccacagacaua

SEQ ID NO: 2731153 - RNA, 13 nt, Human
cacccaagggccu

SEQ ID NO: 2731154 - RNA, 13 nt, Human
cccaggugccagu

SEQ ID NO: 2731155 - RNA, 22 nt, Human
cccaggugcuaggaacacuccu

SEQ ID NO: 2731156 - RNA, 23 nt, Human
cccaggugcuaggaacacuccuu

SEQ ID NO: 2731157 - RNA, 20 nt, Human
cccagucuggaaugcagugg

SEQ ID NO: 2731158 - RNA, 13 nt, Human
cccagugcccaca

SEQ ID NO: 2731159 - RNA, 17 nt, Human
cccaggccuccuacagc

SEQ ID NO: 2731160 - RNA, 18 nt, Human
cccaggccuccuacagcu

SEQ ID NO: 2731161 - RNA, 11 nt, Human
cccaggcaggu

SEQ ID NO: 2731162 - RNA, 13 nt, Human
cccaggcaggucu

SEQ ID NO: 2731163 - RNA, 21 nt, Human
cccaggagccccgaggccuuc

SEQ ID NO: 2731164 - RNA, 18 nt, Human
cccaggagccccgaggcc

SEQ ID NO: 2731165 - RNA, 13 nt, Human
cccaggaggccag

SEQ ID NO: 2731166 - RNA, 22 nt, Human
cccaggaggccagccuugacca

SEQ ID NO: 2731167 - RNA, 18 nt, Human
cccaggcauuccccagga

SEQ ID NO: 2731168 - RNA, 17 nt, Human
cccaggcaggucuugaa

SEQ ID NO: 2731169 - RNA, 20 nt, Human
cccaggcauuccccaggagg

SEQ ID NO: 2731170 - RNA, 21 nt, Human
cccaggcauuccccaggaggc

SEQ ID NO: 2731171 - RNA, 22 nt, Human
cccaggcauuccccaggaggcc

SEQ ID NO: 2731172 - RNA, 23 nt, Human
cccaggcauuccccaggaggcca

SEQ ID NO: 2731173 - RNA, 11 nt, Human
cccaggccccu

SEQ ID NO: 2731174 - RNA, 16 nt, Human
cccaggccccugccac

SEQ ID NO: 2731175 - RNA, 18 nt, Human
cccaggccccugccaccc

SEQ ID NO: 2731176 - RNA, 21 nt, Human
cccaggccccugccacccugg

SEQ ID NO: 2731177 - RNA, 22 nt, Human
cccaggccccugccacccuggg

SEQ ID NO: 2731178 - RNA, 23 nt, Human
cccaaugcacuuuguucuggcuc

SEQ ID NO: 2731179 - RNA, 23 nt, Human
cccaagggccuggccugagcugg

SEQ ID NO: 2731180 - RNA, 18 nt, Human
cccaagggccuggccuga

SEQ ID NO: 2731181 - RNA, 19 nt, Human
cccaagggccuggccugag

SEQ ID NO: 2731182 - RNA, 17 nt, Human
cccaagggccuggccug

SEQ ID NO: 2731183 - RNA, 23 nt, Human
cccaaauggaaaugggcagagca

SEQ ID NO: 2731184 - RNA, 20 nt, Human
cccagagggccugcaaggga

SEQ ID NO: 2731185 - RNA, 18 nt, Human
cccagagggccugcaagg

SEQ ID NO: 2731186 - RNA, 20 nt, Human
cccagauugcaacaggcugg

SEQ ID NO: 2731187 - RNA, 21 nt, Human
cccagauugcaacaggcuggg

SEQ ID NO: 2731188 - RNA, 22 nt, Human
cccagauugcaacaggcugggc

SEQ ID NO: 2731189 - RNA, 16 nt, Human
cccagcaagugagagc

SEQ ID NO: 2731190 - RNA, 18 nt, Human
cccagcaagugagagcug

SEQ ID NO: 2731191 - RNA, 11 nt, Human
cccagccccuu

SEQ ID NO: 2731192 - RNA, 23 nt, Human
cccagcaagugagagcugggugu

SEQ ID NO: 2731193 - RNA, 19 nt, Human
cccagcaagugagagcugg

SEQ ID NO: 2731194 - RNA, 20 nt, Human
cccagcaagugagagcuggg

SEQ ID NO: 2731195 - RNA, 21 nt, Human
cccagcaagugagagcugggu

SEQ ID NO: 2731196 - RNA, 22 nt, Human
cccagcaagugagagcugggug

SEQ ID NO: 2731197 - RNA, 12 nt, Human
cccagccugcua

SEQ ID NO: 2731198 - RNA, 18 nt, Human
cccagccccuucugaccc

SEQ ID NO: 2731199 - RNA, 19 nt, Human
cccagcgagcccugguggc

SEQ ID NO: 2731200 - RNA, 23 nt, Human
cccagcgagcccugguggcagug

SEQ ID NO: 2731201 - RNA, 17 nt, Human
cccagcgagcccuggug

SEQ ID NO: 2731202 - RNA, 18 nt, Human
cccagcgagcccuggugg

SEQ ID NO: 2731203 - RNA, 15 nt, Human
cccagcgagcccugg

SEQ ID NO: 2731204 - RNA, 18 nt, Human
cccagugccgagaaggaa

SEQ ID NO: 2731205 - RNA, 17 nt, Human
cccagugccgagaagga

SEQ ID NO: 2731206 - RNA, 15 nt, Human
cccagugcccacagg

SEQ ID NO: 2731207 - RNA, 20 nt, Human
cccagugcccacaggaucag

SEQ ID NO: 2731208 - RNA, 15 nt, Human
cccaugcugcccugu

SEQ ID NO: 2731209 - RNA, 16 nt, Human
cccaugcugcccugug

SEQ ID NO: 2731210 - RNA, 17 nt, Human
cccaugcugcccuguga

SEQ ID NO: 2731211 - RNA, 18 nt, Human
cccaugcugcccugugag

SEQ ID NO: 2731212 - RNA, 13 nt, Human
cccauucugccug

SEQ ID NO: 2731213 - RNA, 22 nt, Human
ccccaaauggaaaugggcagag

SEQ ID NO: 2731214 - RNA, 14 nt, Human
ccccacccaagggc

SEQ ID NO: 2731215 - RNA, 20 nt, Human
ccccacccaagggccuggcc

SEQ ID NO: 2731216 - RNA, 17 nt, Human
ccccaggaggccagccu

SEQ ID NO: 2731217 - RNA, 22 nt, Human
ccccucagggucccugguggca

SEQ ID NO: 2731218 - RNA, 18 nt, Human
ccaucaaggguacacugc

SEQ ID NO: 2731219 - RNA, 13 nt, Human
ccaucaccagaca

SEQ ID NO: 2731220 - RNA, 20 nt, Human
ccaucaauaaaaaauuauga

SEQ ID NO: 2731221 - RNA, 19 nt, Human
ccaucaauaaaaaauuaug

SEQ ID NO: 2731222 - RNA, 17 nt, Human
ccagugaggcucugccc

SEQ ID NO: 2731223 - RNA, 20 nt, Human
ccagugaggcucugcccuug

SEQ ID NO: 2731224 - RNA, 18 nt, Human
ccagugaggcucugcccu

SEQ ID NO: 2731225 - RNA, 19 nt, Human
ccagugaggcucugcccuu

SEQ ID NO: 2731226 - RNA, 22 nt, Human
ccaucauugaaaucuuuuugcu

SEQ ID NO: 2731227 - RNA, 12 nt, Human
ccauccucugua

SEQ ID NO: 2731228 - RNA, 19 nt, Human
ccauccucuguacagagcc

SEQ ID NO: 2731229 - RNA, 16 nt, Human
ccaugauguuuagaaa

SEQ ID NO: 2731230 - RNA, 18 nt, Human
ccaugauguuuuccauga

SEQ ID NO: 2731231 - RNA, 19 nt, Human
ccaugauuaaccacuucag

SEQ ID NO: 2731232 - RNA, 21 nt, Human
ccaugauuaaccacuucagcu

SEQ ID NO: 2731233 - RNA, 11 nt, Human
ccaugcugccc

SEQ ID NO: 2731234 - RNA, 13 nt, Human
ccaugcugcccug

SEQ ID NO: 2731235 - RNA, 14 nt, Human
ccaugcugcccugu

SEQ ID NO: 2731236 - RNA, 20 nt, Human
ccauccucuguacagagccc

SEQ ID NO: 2731237 - RNA, 20 nt, Human
cccaaaacucuccucugcug

SEQ ID NO: 2731238 - RNA, 22 nt, Human
ccauuuugggguacccacugcu

SEQ ID NO: 2731239 - RNA, 20 nt, Human
ccauuuugggguacccacug

SEQ ID NO: 2731240 - RNA, 23 nt, Human
ccauuuuggauucuuauggacaa

SEQ ID NO: 2731241 - RNA, 16 nt, Human
cccaaagcagugcaug

SEQ ID NO: 2731242 - RNA, 12 nt, Human
cccaaagaugca

SEQ ID NO: 2731243 - RNA, 15 nt, Human
cccaaagaugcagcc

SEQ ID NO: 2731244 - RNA, 13 nt, Human
ccauggacuuugu

SEQ ID NO: 2731245 - RNA, 14 nt, Human
ccauggacuuuguu

SEQ ID NO: 2731246 - RNA, 15 nt, Human
ccauucuccaccugc

SEQ ID NO: 2731247 - RNA, 16 nt, Human
ccauucuccaccugcc

SEQ ID NO: 2731248 - RNA, 21 nt, Human
ccauucugccugcccaggccc

SEQ ID NO: 2731249 - RNA, 14 nt, Human
ccauucuccaccug

SEQ ID NO: 2731250 - RNA, 19 nt, Human
ccauucugccugcccaggc

SEQ ID NO: 2731251 - RNA, 20 nt, Human
ccauucugccugcccaggcc

SEQ ID NO: 2731252 - RNA, 16 nt, Human
ccauucugccugccca

SEQ ID NO: 2731253 - RNA, 17 nt, Human
ccauucuccaccugcca

SEQ ID NO: 2731254 - RNA, 17 nt, Human
ccauucugccugcccag

SEQ ID NO: 2731255 - RNA, 18 nt, Human
ccauucugccugcccagg

SEQ ID NO: 2731256 - RNA, 17 nt, Human
ccaggugccaguuaugg

SEQ ID NO: 2731257 - RNA, 19 nt, Human
ccaggugcuaggaacacuc

SEQ ID NO: 2731258 - RNA, 23 nt, Human
ccaguaaaugggggugcauuuga

SEQ ID NO: 2731259 - RNA, 14 nt, Human
ccagguucagcuug

SEQ ID NO: 2731260 - RNA, 16 nt, Human
ccagugaauucuugaa

SEQ ID NO: 2731261 - RNA, 20 nt, Human
ccagugaauucuugaaggaa

SEQ ID NO: 2731262 - RNA, 20 nt, Human
ccaggcuguaucccaugagc

SEQ ID NO: 2731263 - RNA, 19 nt, Human
ccaggcuggucucaaacuc

SEQ ID NO: 2731264 - RNA, 13 nt, Human
ccaggccccugcc

SEQ ID NO: 2731265 - RNA, 13 nt, Human
ccaggcauggugg

SEQ ID NO: 2731266 - RNA, 14 nt, Human
ccaggcauucccca

SEQ ID NO: 2731267 - RNA, 24 nt, Human
ccaggcauuccccaggaggccagc

SEQ ID NO: 2731268 - RNA, 23 nt, Human
ccaggcauuccccaggaggccag

SEQ ID NO: 2731269 - RNA, 22 nt, Human
ccaggcauuccccaggaggcca

SEQ ID NO: 2731270 - RNA, 13 nt, Human
ccaggaggccagc

SEQ ID NO: 2731271 - RNA, 12 nt, Human
ccaggaggccag

SEQ ID NO: 2731272 - RNA, 18 nt, Human
ccaggagccuccugcccu

SEQ ID NO: 2731273 - RNA, 13 nt, Human
ccaggagccuccu

SEQ ID NO: 2731274 - RNA, 14 nt, Human
ccaggagccuccug

SEQ ID NO: 2731275 - RNA, 15 nt, Human
ccaggagccccgagg

SEQ ID NO: 2731276 - RNA, 15 nt, Human
ccaggagcagccaca

SEQ ID NO: 2731277 - RNA, 16 nt, Human
ccaggagcagccacau

SEQ ID NO: 2731278 - RNA, 20 nt, Human
ccaggaagccagcaggcucu

SEQ ID NO: 2731279 - RNA, 22 nt, Human
ccaggaagccagcaggcucuca

SEQ ID NO: 2731280 - RNA, 20 nt, Human
ccaggaauggagccugcacg

SEQ ID NO: 2731281 - RNA, 11 nt, Human
ccagcucuggu

SEQ ID NO: 2731282 - RNA, 12 nt, Human
ccagcucugguc

SEQ ID NO: 2731283 - RNA, 13 nt, Human
ccagcucuggucc

SEQ ID NO: 2731284 - RNA, 14 nt, Human
ccagcgagcccugg

SEQ ID NO: 2731285 - RNA, 22 nt, Human
ccagccuugaccauucuccacc

SEQ ID NO: 2731286 - RNA, 15 nt, Human
ccagcgagcccuggu

SEQ ID NO: 2731287 - RNA, 16 nt, Human
ccagcgagcccuggug

SEQ ID NO: 2731288 - RNA, 22 nt, Human
ccagagcccaccuuggcucaag

SEQ ID NO: 2731289 - RNA, 16 nt, Human
ccagagcccaccuugg

SEQ ID NO: 2731290 - RNA, 19 nt, Human
ccagccuugaccauucucc

SEQ ID NO: 2731291 - RNA, 20 nt, Human
ccagccuugaccauucucca

SEQ ID NO: 2731292 - RNA, 20 nt, Human
ccagcugcuugggcuucauc

SEQ ID NO: 2731293 - RNA, 23 nt, Human
ccagcugcuugggcuucauccuc

SEQ ID NO: 2731294 - RNA, 14 nt, Human
ccagcucuggucca

SEQ ID NO: 2731295 - RNA, 17 nt, Human
ccagcucugguccauag

SEQ ID NO: 2731296 - RNA, 21 nt, Human
ccagcucugguccauagagag

SEQ ID NO: 2731297 - RNA, 22 nt, Human
ccagcucugguccauagagagc

SEQ ID NO: 2731298 - RNA, 23 nt, Human
ccacugcacuccagccuggguga

SEQ ID NO: 2731299 - RNA, 13 nt, Human
ccacuucagcuga

SEQ ID NO: 2731300 - RNA, 14 nt, Human
ccacuucagcugac

SEQ ID NO: 2731301 - RNA, 23 nt, Human
ccagaaguuugagaucagccugg

SEQ ID NO: 2731302 - RNA, 22 nt, Human
ccagaaguuugagaucagccug

SEQ ID NO: 2731303 - RNA, 12 nt, Human
ccagaauuuccc

SEQ ID NO: 2731304 - RNA, 19 nt, Human
ccagaauuucccaaagcag

SEQ ID NO: 2731305 - RNA, 18 nt, Human
ccagaauuucccaaagca

SEQ ID NO: 2731306 - RNA, 21 nt, Human
ccagaauuucccaaagcagug

SEQ ID NO: 2731307 - RNA, 21 nt, Human
ccagacaccuugacagggcac

SEQ ID NO: 2731308 - RNA, 15 nt, Human
ccaccccacacacgc

SEQ ID NO: 2731309 - RNA, 23 nt, Human
ccacggccaggccagagggagug

SEQ ID NO: 2731310 - RNA, 18 nt, Human
ccacgcuggagugcagug

SEQ ID NO: 2731311 - RNA, 19 nt, Human
ccacgcuggagugcaguga

SEQ ID NO: 2731312 - RNA, 16 nt, Human
ccacggccaggccaga

SEQ ID NO: 2731313 - RNA, 18 nt, Human
ccacggccaggccagagg

SEQ ID NO: 2731314 - RNA, 15 nt, Human
ccacccccacccaag

SEQ ID NO: 2731315 - RNA, 16 nt, Human
ccacgcuggagugcag

SEQ ID NO: 2731316 - RNA, 13 nt, Human
ccacgcuggagug

SEQ ID NO: 2731317 - RNA, 17 nt, Human
ccacuacauucuguuaa

SEQ ID NO: 2731318 - RNA, 16 nt, Human
ccacuacauucuguua

SEQ ID NO: 2731319 - RNA, 11 nt, Human
ccacuacauuc

SEQ ID NO: 2731320 - RNA, 14 nt, Human
ccacuacauucugu

SEQ ID NO: 2731321 - RNA, 15 nt, Human
ccacuacauucuguu

SEQ ID NO: 2731322 - RNA, 20 nt, Human
ccacaggaaccacaagacug

SEQ ID NO: 2731323 - RNA, 16 nt, Human
ccacaggaucagucug

SEQ ID NO: 2731324 - RNA, 21 nt, Human
ccacacccagcccacuucugc

SEQ ID NO: 2731325 - RNA, 22 nt, Human
ccacacccagcccacuucugcc

SEQ ID NO: 2731326 - RNA, 20 nt, Human
ccacacccagcccacuucug

SEQ ID NO: 2731327 - RNA, 15 nt, Human
ccacacccagcccac

SEQ ID NO: 2731328 - RNA, 16 nt, Human
ccacaugugcacaugc

SEQ ID NO: 2731329 - RNA, 16 nt, Human
ccacauuccugaugcu

SEQ ID NO: 2731330 - RNA, 19 nt, Human
ccacaucuugcucugcuga

SEQ ID NO: 2731331 - RNA, 18 nt, Human
ccacaucuugcucugcug

SEQ ID NO: 2731332 - RNA, 17 nt, Human
ccacaucuugcucugcu

SEQ ID NO: 2731333 - RNA, 21 nt, Human
ccaccaacauacucccaucug

SEQ ID NO: 2731334 - RNA, 21 nt, Human
ccacccaggagccccgaggcc

SEQ ID NO: 2731335 - RNA, 23 nt, Human
ccacccaggagccccgaggccuu

SEQ ID NO: 2731336 - RNA, 17 nt, Human
ccacccccacccaaggg

SEQ ID NO: 2731337 - RNA, 22 nt, Human
ccaaacugacucuuaagaagac

SEQ ID NO: 2731338 - RNA, 19 nt, Human
ccaaagcagugcaugcugu

SEQ ID NO: 2731339 - RNA, 19 nt, Human
ccaaagccaaagcuaggcc

SEQ ID NO: 2731340 - RNA, 23 nt, Human
ccaaagcagugcaugcugucccu

SEQ ID NO: 2731341 - RNA, 17 nt, Human
ccaaagccuccuccagc

SEQ ID NO: 2731342 - RNA, 22 nt, Human
ccaaagccuccuccagccgcca

SEQ ID NO: 2731343 - RNA, 20 nt, Human
ccaaacucaccugccccuca

SEQ ID NO: 2731344 - RNA, 21 nt, Human
ccaaagcuaggccuggccaga

SEQ ID NO: 2731345 - RNA, 16 nt, Human
ccaaagcuaggccugg

SEQ ID NO: 2731346 - RNA, 17 nt, Human
ccaaagcuaggccuggc

SEQ ID NO: 2731347 - RNA, 15 nt, Human
ccaaagcuaggccug

SEQ ID NO: 2731348 - RNA, 23 nt, Human
ccaaaggaagcacaugccucucu

SEQ ID NO: 2731349 - RNA, 15 nt, Human
ccaaaggaagcacau

SEQ ID NO: 2731350 - RNA, 16 nt, Human
ccaaaggcucucuccu

SEQ ID NO: 2731351 - RNA, 23 nt, Human
ccaaauuucauaccuaucaucuu

SEQ ID NO: 2731352 - RNA, 20 nt, Human
ccaaaguacacuguuucaaa

SEQ ID NO: 2731353 - RNA, 18 nt, Human
ccaaaguacacuguuuca

SEQ ID NO: 2731354 - RNA, 15 nt, Human
ccaaaguacacuguu

SEQ ID NO: 2731355 - RNA, 13 nt, Human
ccaacaucaacau

SEQ ID NO: 2731356 - RNA, 21 nt, Human
ccaacauacucccaucuguga

SEQ ID NO: 2731357 - RNA, 22 nt, Human
ccaacauacucccaucugugaa

SEQ ID NO: 2731358 - RNA, 16 nt, Human
ccaacauacucccauc

SEQ ID NO: 2731359 - RNA, 17 nt, Human
ccaacauacucccaucu

SEQ ID NO: 2731360 - RNA, 18 nt, Human
ccaacauacucccaucug

SEQ ID NO: 2731361 - RNA, 19 nt, Human
ccaacauacucccaucugu

SEQ ID NO: 2731362 - RNA, 20 nt, Human
ccaacauacucccaucugug

SEQ ID NO: 2731363 - RNA, 19 nt, Human
ccaagaagcccaggaaagg

SEQ ID NO: 2731364 - RNA, 20 nt, Human
ccaagaagcccaggaaaggc

SEQ ID NO: 2731365 - RNA, 15 nt, Human
ccaagaagcccagga

SEQ ID NO: 2731366 - RNA, 12 nt, Human
ccaacccucauc

SEQ ID NO: 2731367 - RNA, 14 nt, Human
ccaagcaaguauua

SEQ ID NO: 2731368 - RNA, 17 nt, Human
ccaagcauuuagaugua

SEQ ID NO: 2731369 - RNA, 22 nt, Human
ccaagcauaccaacacgagcag

SEQ ID NO: 2731370 - RNA, 14 nt, Human
ccaagcucccaggc

SEQ ID NO: 2731371 - RNA, 15 nt, Human
ccaagcucccaggca

SEQ ID NO: 2731372 - RNA, 16 nt, Human
ccaagcucccaggcau

SEQ ID NO: 2731373 - RNA, 22 nt, Human
ccaagcucccaggcauucccca

SEQ ID NO: 2731374 - RNA, 17 nt, Human
ccaaggccaaaggaagc

SEQ ID NO: 2731375 - RNA, 20 nt, Human
ccaagucaagugaaaaagga

SEQ ID NO: 2731376 - RNA, 23 nt, Human
ccaagguuuggggaagaacgaag

SEQ ID NO: 2731377 - RNA, 13 nt, Human
ccaaggugggagg

SEQ ID NO: 2731378 - RNA, 15 nt, Human
ccaagggccuggccu

SEQ ID NO: 2731379 - RNA, 18 nt, Human
ccaaggccaaaggaagca

SEQ ID NO: 2731380 - RNA, 21 nt, Human
ccaaggccaaaggaagcacau

SEQ ID NO: 2731381 - RNA, 22 nt, Human
ccaaggggaauguuugccucug

SEQ ID NO: 2731382 - RNA, 19 nt, Human
ccaagggccuggccugagc

SEQ ID NO: 2731383 - RNA, 16 nt, Human
ccaagggccuggccug

SEQ ID NO: 2731384 - RNA, 18 nt, Human
ccaagggccuggccugag

SEQ ID NO: 2731385 - RNA, 23 nt, Human
cauuuaauaauuauaugcuauuu

SEQ ID NO: 2731386 - RNA, 12 nt, Human
cauuuaaaagau

SEQ ID NO: 2731387 - RNA, 16 nt, Human
cauuuaaaagauacag

SEQ ID NO: 2731388 - RNA, 15 nt, Human
cauuuaaaagauaca

SEQ ID NO: 2731389 - RNA, 14 nt, Human
cauuuaauaauuau

SEQ ID NO: 2731390 - RNA, 12 nt, Human
cauuuaauaauu

SEQ ID NO: 2731391 - RNA, 19 nt, Human
cauuuaauaauuauaugcu

SEQ ID NO: 2731392 - RNA, 17 nt, Human
cauuuaauaauuauaug

SEQ ID NO: 2731393 - RNA, 16 nt, Human
cauuuaauaauuauau

SEQ ID NO: 2731394 - RNA, 15 nt, Human
cauuuaauaauuaua

SEQ ID NO: 2731395 - RNA, 12 nt, Human
cauuuccugugu

SEQ ID NO: 2731396 - RNA, 13 nt, Human
cauuuccuguguc

SEQ ID NO: 2731397 - RNA, 17 nt, Human
cauuguuggccaaagcc

SEQ ID NO: 2731398 - RNA, 18 nt, Human
cauuguuggccaaagcca

SEQ ID NO: 2731399 - RNA, 14 nt, Human
cacccaagggccug

SEQ ID NO: 2731400 - RNA, 15 nt, Human
cacccaagggccugg

SEQ ID NO: 2731401 - RNA, 13 nt, Human
cauuugcucaugg

SEQ ID NO: 2731402 - RNA, 18 nt, Human
cauuugcucauggaauug

SEQ ID NO: 2731403 - RNA, 13 nt, Human
cauuugcuccuuu

SEQ ID NO: 2731404 - RNA, 14 nt, Human
cauuugcuccuuuc

SEQ ID NO: 2731405 - RNA, 17 nt, Human
cauuuguuugaacugau

SEQ ID NO: 2731406 - RNA, 22 nt, Human
cauuuguuugaacugauaaaga

SEQ ID NO: 2731407 - RNA, 20 nt, Human
cauuuguuugaacugauaaa

SEQ ID NO: 2731408 - RNA, 20 nt, Human
cauuugagcagggcucagcg

SEQ ID NO: 2731409 - RNA, 17 nt, Human
cauuugagcagggcuca

SEQ ID NO: 2731410 - RNA, 18 nt, Human
cauuugagcagggcucag

SEQ ID NO: 2731411 - RNA, 20 nt, Human
cauuugaaaauuuugauguu

SEQ ID NO: 2731412 - RNA, 22 nt, Human
cauuugaaaauuuugauguuuu

SEQ ID NO: 2731413 - RNA, 17 nt, Human
ccaaacucaccugcccc

SEQ ID NO: 2731414 - RNA, 19 nt, Human
cauuuuagggguagcauuu

SEQ ID NO: 2731415 - RNA, 15 nt, Human
cggccuuuggcuuca

SEQ ID NO: 2731416 - RNA, 15 nt, Human
cggcuggccuggccc

SEQ ID NO: 2731417 - RNA, 16 nt, Human
cggcuggccuggcccc

SEQ ID NO: 2731418 - RNA, 14 nt, Human
cggcuggccuggcc

SEQ ID NO: 2731419 - RNA, 18 nt, Human
cggcuggccuggccccuc

SEQ ID NO: 2731420 - RNA, 20 nt, Human
cgggaggauguucugggaca

SEQ ID NO: 2731421 - RNA, 17 nt, Human
cgggaggucgaggcagg

SEQ ID NO: 2731422 - RNA, 16 nt, Human
cgggaggucgaggcag

SEQ ID NO: 2731423 - RNA, 15 nt, Human
cgggcaugacacgaa

SEQ ID NO: 2731424 - RNA, 12 nt, Human
cgggcaugacac

SEQ ID NO: 2731425 - RNA, 13 nt, Human
cggaugauuucua

SEQ ID NO: 2731426 - RNA, 14 nt, Human
cggaugauuucuau

SEQ ID NO: 2731427 - RNA, 20 nt, Human
cggaaugaaccacaucuugc

SEQ ID NO: 2731428 - RNA, 15 nt, Human
cggacagccacggcc

SEQ ID NO: 2731429 - RNA, 16 nt, Human
cggacagccacggcca

SEQ ID NO: 2731430 - RNA, 18 nt, Human
cggacagccacggccagg

SEQ ID NO: 2731431 - RNA, 13 nt, Human
cgcuccugugucu

SEQ ID NO: 2731432 - RNA, 23 nt, Human
cgcacuucgggaggucgaggcag

SEQ ID NO: 2731433 - RNA, 12 nt, Human
cgauuucuguuu

SEQ ID NO: 2731434 - RNA, 19 nt, Human
cgaucuggguucacugcaa

SEQ ID NO: 2731435 - RNA, 21 nt, Human
cgauucuucugcuucagccuc

SEQ ID NO: 2731436 - RNA, 13 nt, Human
cgauucuucugcu

SEQ ID NO: 2731437 - RNA, 19 nt, Human
cgauucuucugcuucagcc

SEQ ID NO: 2731438 - RNA, 15 nt, Human
ccuuuguauucucuc

SEQ ID NO: 2731439 - RNA, 20 nt, Human
ccuuuguauucucuccugua

SEQ ID NO: 2731440 - RNA, 18 nt, Human
ccuuuguauucucuccug

SEQ ID NO: 2731441 - RNA, 18 nt, Human
cgaggccuucucugaagg

SEQ ID NO: 2731442 - RNA, 19 nt, Human
cgaggccuucucugaagga

SEQ ID NO: 2731443 - RNA, 13 nt, Human
cgaggacagggag

SEQ ID NO: 2731444 - RNA, 12 nt, Human
cgaggacaggga

SEQ ID NO: 2731445 - RNA, 23 nt, Human
ccuuugacgccaucccagcccca

SEQ ID NO: 2731446 - RNA, 12 nt, Human
ccuuggcugcag

SEQ ID NO: 2731447 - RNA, 13 nt, Human
ccuuggcugcagg

SEQ ID NO: 2731448 - RNA, 20 nt, Human
ccuuguggucccaccccaca

SEQ ID NO: 2731449 - RNA, 16 nt, Human
ccuuguggucccaccc

SEQ ID NO: 2731450 - RNA, 19 nt, Human
ccuuguggucccaccccac

SEQ ID NO: 2731451 - RNA, 13 nt, Human
ccuuuaagagaaa

SEQ ID NO: 2731452 - RNA, 16 nt, Human
ccuuucucuuucguua

SEQ ID NO: 2731453 - RNA, 13 nt, Human
cgcagacaggacc

SEQ ID NO: 2731454 - RNA, 14 nt, Human
cgcagacaggacca

SEQ ID NO: 2731455 - RNA, 15 nt, Human
cgcccccacugguga

SEQ ID NO: 2731456 - RNA, 15 nt, Human
cgcgacaaugcaaac

SEQ ID NO: 2731457 - RNA, 16 nt, Human
cgcgacaaugcaaacc

SEQ ID NO: 2731458 - RNA, 17 nt, Human
cgcgacaaugcaaacca

SEQ ID NO: 2731459 - RNA, 21 nt, Human
cgcuaagagggagggagggcu

SEQ ID NO: 2731460 - RNA, 15 nt, Human
cgcuaagagggaggg

SEQ ID NO: 2731461 - RNA, 16 nt, Human
cgcuaagagggaggga

SEQ ID NO: 2731462 - RNA, 14 nt, Human
cgcuaagagggagg

SEQ ID NO: 2731463 - RNA, 21 nt, Human
cgcguugaaauuguaauuaua

SEQ ID NO: 2731464 - RNA, 17 nt, Human
cgcguugaaauuguaau

SEQ ID NO: 2731465 - RNA, 16 nt, Human
cgcgugcacacaccag

SEQ ID NO: 2731466 - RNA, 19 nt, Human
cgcgugcacacaccagagc

SEQ ID NO: 2731467 - RNA, 13 nt, Human
cgcguugaaauug

SEQ ID NO: 2731468 - RNA, 20 nt, Human
cgcgugcacacaccagagcc

SEQ ID NO: 2731469 - RNA, 13 nt, Human
cgucugacaggca

SEQ ID NO: 2731470 - RNA, 14 nt, Human
cgucugacaggcaa

SEQ ID NO: 2731471 - RNA, 14 nt, Human
cgucuaccugaggg

SEQ ID NO: 2731472 - RNA, 14 nt, Human
cguccccugucccc

SEQ ID NO: 2731473 - RNA, 11 nt, Human
cguccccuguc

SEQ ID NO: 2731474 - RNA, 20 nt, Human
cgugcacacaccagagccca

SEQ ID NO: 2731475 - RNA, 21 nt, Human
cgugcacacaccagagcccac

SEQ ID NO: 2731476 - RNA, 19 nt, Human
cgugcauaccacuuuuguu

SEQ ID NO: 2731477 - RNA, 22 nt, Human
cgugcaguggugcgaucugggu

SEQ ID NO: 2731478 - RNA, 22 nt, Human
cgugcacacaccagagcccacc

SEQ ID NO: 2731479 - RNA, 18 nt, Human
cgugcauaccacuuuugu

SEQ ID NO: 2731480 - RNA, 14 nt, Human
cgugcauaccacuu

SEQ ID NO: 2731481 - RNA, 23 nt, Human
cggugcuaucucccccagcccca

SEQ ID NO: 2731482 - RNA, 20 nt, Human
cgucaacucauauuuucaug

SEQ ID NO: 2731483 - RNA, 16 nt, Human
cgucaacucauauuuu

SEQ ID NO: 2731484 - RNA, 22 nt, Human
cguucauggaacgcguugaaau

SEQ ID NO: 2731485 - RNA, 17 nt, Human
cguggcugcuucaagga

SEQ ID NO: 2731486 - RNA, 21 nt, Human
cguucauggaacgcguugaaa

SEQ ID NO: 2731487 - RNA, 23 nt, Human
cguucauggaacgcguugaaauu

SEQ ID NO: 2731488 - RNA, 12 nt, Human
cguggcugcuuc

SEQ ID NO: 2731489 - RNA, 14 nt, Human
cguggcugcuucaa

SEQ ID NO: 2731490 - RNA, 15 nt, Human
cguggcugcuucaag

SEQ ID NO: 2731491 - RNA, 13 nt, Human
cguugaaauugua

SEQ ID NO: 2731492 - RNA, 20 nt, Human
cguuucuaugacacaugcaa

SEQ ID NO: 2731493 - RNA, 21 nt, Human
cguuucuaaaggcuaccuuug

SEQ ID NO: 2731494 - RNA, 19 nt, Human
cguuucuaaaggcuaccuu

SEQ ID NO: 2731495 - RNA, 20 nt, Human
ccugggcagcugccuccccu

SEQ ID NO: 2731496 - RNA, 12 nt, Human
ccugguggcagc

SEQ ID NO: 2731497 - RNA, 13 nt, Human
ccugguggcagcu

SEQ ID NO: 2731498 - RNA, 20 nt, Human
ccuguaauccuagcacuuug

SEQ ID NO: 2731499 - RNA, 12 nt, Human
ccuguaccucuu

SEQ ID NO: 2731500 - RNA, 14 nt, Human
ccugguggcagcuc

SEQ ID NO: 2731501 - RNA, 16 nt, Human
ccugguggcagcucac

SEQ ID NO: 2731502 - RNA, 17 nt, Human
ccugguggcagcucacc

SEQ ID NO: 2731503 - RNA, 18 nt, Human
ccugguggcagcucaccu

SEQ ID NO: 2731504 - RNA, 21 nt, Human
ccuguagagugggagcugagu

SEQ ID NO: 2731505 - RNA, 19 nt, Human
ccuguagagugggagcuga

SEQ ID NO: 2731506 - RNA, 23 nt, Human
ccuguagagugggagcugagugg

SEQ ID NO: 2731507 - RNA, 18 nt, Human
ccuguccccgcacugggc

SEQ ID NO: 2731508 - RNA, 16 nt, Human
ccugucccccugacaa

SEQ ID NO: 2731509 - RNA, 17 nt, Human
ccugucccccugacaac

SEQ ID NO: 2731510 - RNA, 20 nt, Human
ccugugaguacuacaguccu

SEQ ID NO: 2731511 - RNA, 17 nt, Human
ccugugauggggcccug

SEQ ID NO: 2731512 - RNA, 18 nt, Human
ccugugauggggcccugc

SEQ ID NO: 2731513 - RNA, 19 nt, Human
ccugugauggggcccugcc

SEQ ID NO: 2731514 - RNA, 22 nt, Human
ccugugauggggcccugccucc

SEQ ID NO: 2731515 - RNA, 20 nt, Human
ccugugauggggcccugccu

SEQ ID NO: 2731516 - RNA, 21 nt, Human
ccugugauggggcccugccuc

SEQ ID NO: 2731517 - RNA, 17 nt, Human
ccugugccucugggacu

SEQ ID NO: 2731518 - RNA, 15 nt, Human
ccugugccucuggga

SEQ ID NO: 2731519 - RNA, 19 nt, Human
ccugugccucugggacugg

SEQ ID NO: 2731520 - RNA, 15 nt, Human
ccugggcagcugccu

SEQ ID NO: 2731521 - RNA, 16 nt, Human
ccugggcagcugccuc

SEQ ID NO: 2731522 - RNA, 17 nt, Human
ccugggcagcugccucc

SEQ ID NO: 2731523 - RNA, 18 nt, Human
ccugggcagcugccuccc

SEQ ID NO: 2731524 - RNA, 14 nt, Human
ccugggcagaagga

SEQ ID NO: 2731525 - RNA, 12 nt, Human
ccugggcagaag

SEQ ID NO: 2731526 - RNA, 20 nt, Human
ccugggaggucaaggcugca

SEQ ID NO: 2731527 - RNA, 16 nt, Human
ccugggaucccucauc

SEQ ID NO: 2731528 - RNA, 20 nt, Human
ccugggaucccucauccuca

SEQ ID NO: 2731529 - RNA, 18 nt, Human
ccuggcaugggaaugaau

SEQ ID NO: 2731530 - RNA, 14 nt, Human
ccuggccccucagg

SEQ ID NO: 2731531 - RNA, 13 nt, Human
ccuggacccugug

SEQ ID NO: 2731532 - RNA, 14 nt, Human
ccuggacccugugg

SEQ ID NO: 2731533 - RNA, 21 nt, Human
ccuggcacugcuuccagugag

SEQ ID NO: 2731534 - RNA, 14 nt, Human
ccuggcagccccug

SEQ ID NO: 2731535 - RNA, 16 nt, Human
ccuggcagccccuguu

SEQ ID NO: 2731536 - RNA, 16 nt, Human
ccuggcaugggaauga

SEQ ID NO: 2731537 - RNA, 17 nt, Human
ccuggcaugggaaugaa

SEQ ID NO: 2731538 - RNA, 20 nt, Human
ccuggcacugcuuccaguga

SEQ ID NO: 2731539 - RNA, 17 nt, Human
ccuggcacugcuuccag

SEQ ID NO: 2731540 - RNA, 12 nt, Human
ccugcuccagcu

SEQ ID NO: 2731541 - RNA, 13 nt, Human
ccugcuccagcug

SEQ ID NO: 2731542 - RNA, 14 nt, Human
ccugcuccagcugu

SEQ ID NO: 2731543 - RNA, 22 nt, Human
ccugcuccagcuguucagcugg

SEQ ID NO: 2731544 - RNA, 23 nt, Human
ccugcgucucauacucaccucac

SEQ ID NO: 2731545 - RNA, 19 nt, Human
ccugcaacaccuuguuucc

SEQ ID NO: 2731546 - RNA, 16 nt, Human
ccugcaaccugauugu

SEQ ID NO: 2731547 - RNA, 18 nt, Human
ccugcaacaccuuguuuc

SEQ ID NO: 2731548 - RNA, 16 nt, Human
ccugcuuucagauacu

SEQ ID NO: 2731549 - RNA, 15 nt, Human
ccugcuuucagauac

SEQ ID NO: 2731550 - RNA, 21 nt, Human
ccugcuuucagauacuggauu

SEQ ID NO: 2731551 - RNA, 19 nt, Human
ccugcugguucaggguugg

SEQ ID NO: 2731552 - RNA, 13 nt, Human
ccugcugguucag

SEQ ID NO: 2731553 - RNA, 21 nt, Human
ccugcuggguguggcgcagca

SEQ ID NO: 2731554 - RNA, 13 nt, Human
ccuucagugccuu

SEQ ID NO: 2731555 - RNA, 14 nt, Human
ccuucagugccuua

SEQ ID NO: 2731556 - RNA, 19 nt, Human
ccuucagugccuuauggaa

SEQ ID NO: 2731557 - RNA, 15 nt, Human
ccuucagugccuuau

SEQ ID NO: 2731558 - RNA, 20 nt, Human
ccuucagugccuuauggaac

SEQ ID NO: 2731559 - RNA, 14 nt, Human
ccuuccucuuucca

SEQ ID NO: 2731560 - RNA, 18 nt, Human
ccuuccaggggugggaca

SEQ ID NO: 2731561 - RNA, 22 nt, Human
ccuuccaggggugggacacccu

SEQ ID NO: 2731562 - RNA, 15 nt, Human
ccuuccagggguggg

SEQ ID NO: 2731563 - RNA, 16 nt, Human
ccuuccagggguggga

SEQ ID NO: 2731564 - RNA, 16 nt, Human
ccuuagacagucccug

SEQ ID NO: 2731565 - RNA, 17 nt, Human
ccuuagacagucccugc

SEQ ID NO: 2731566 - RNA, 21 nt, Human
ccuuagacagucccugccaau

SEQ ID NO: 2731567 - RNA, 18 nt, Human
ccuuagacagucccugcc

SEQ ID NO: 2731568 - RNA, 19 nt, Human
ccuuagacagucccugcca

SEQ ID NO: 2731569 - RNA, 14 nt, Human
ccuuaccagcagag

SEQ ID NO: 2731570 - RNA, 20 nt, Human
ccuuaccucggugccuuccu

SEQ ID NO: 2731571 - RNA, 14 nt, Human
ccuuaccugccagg

SEQ ID NO: 2731572 - RNA, 17 nt, Human
ccuuaccagcagagcac

SEQ ID NO: 2731573 - RNA, 15 nt, Human
ccuuaccagcagagc

SEQ ID NO: 2731574 - RNA, 16 nt, Human
ccuuaccagcagagca

SEQ ID NO: 2731575 - RNA, 11 nt, Human
ccuuuggcuuc

SEQ ID NO: 2731576 - RNA, 22 nt, Human
ccuugaguugauucagcucugc

SEQ ID NO: 2731577 - RNA, 23 nt, Human
ccuugaguugauucagcucugca

SEQ ID NO: 2731578 - RNA, 21 nt, Human
ccuugaccauucuccaccugc

SEQ ID NO: 2731579 - RNA, 19 nt, Human
ccuuggauuguccccgacc

SEQ ID NO: 2731580 - RNA, 14 nt, Human
ccuugacagggcac

SEQ ID NO: 2731581 - RNA, 13 nt, Human
ccuugacagggca

SEQ ID NO: 2731582 - RNA, 15 nt, Human
ccuugacagggcaca

SEQ ID NO: 2731583 - RNA, 17 nt, Human
ccuugacagggcacacc

SEQ ID NO: 2731584 - RNA, 19 nt, Human
ccuugaccauucuccaccu

SEQ ID NO: 2731585 - RNA, 20 nt, Human
ccuugaccauucuccaccug

SEQ ID NO: 2731586 - RNA, 15 nt, Human
ccuugaaaacacugu

SEQ ID NO: 2731587 - RNA, 13 nt, Human
ccuucgcuccugu

SEQ ID NO: 2731588 - RNA, 14 nt, Human
ccuucgcuccugug

SEQ ID NO: 2731589 - RNA, 15 nt, Human
ccuucgcuccugugu

SEQ ID NO: 2731590 - RNA, 18 nt, Human
ccuucgcuccugugucuu

SEQ ID NO: 2731591 - RNA, 14 nt, Human
ccuugaacugggua

SEQ ID NO: 2731592 - RNA, 22 nt, Human
ccuugaaaacacuguucucugc

SEQ ID NO: 2731593 - RNA, 19 nt, Human
ccuugaaaacacuguucuc

SEQ ID NO: 2731594 - RNA, 21 nt, Human
ccuugaaaacacuguucucug

SEQ ID NO: 2731595 - RNA, 16 nt, Human
ccuugaacuggguacu

SEQ ID NO: 2731596 - RNA, 17 nt, Human
ccuugaacuuugaccuc

SEQ ID NO: 2731597 - RNA, 17 nt, Human
ccuugaaugaugccaug

SEQ ID NO: 2731598 - RNA, 17 nt, Human
ccuccccuccucugcuu

SEQ ID NO: 2731599 - RNA, 18 nt, Human
ccuccccuccucugcuug

SEQ ID NO: 2731600 - RNA, 15 nt, Human
ccucccucccucuuu

SEQ ID NO: 2731601 - RNA, 13 nt, Human
ccucccucccucu

SEQ ID NO: 2731602 - RNA, 12 nt, Human
ccucccugcaau

SEQ ID NO: 2731603 - RNA, 16 nt, Human
ccucccugcaauaaaa

SEQ ID NO: 2731604 - RNA, 16 nt, Human
ccucccucccucuuuc

SEQ ID NO: 2731605 - RNA, 11 nt, Human
ccuccucugcu

SEQ ID NO: 2731606 - RNA, 13 nt, Human
ccuccugccucga

SEQ ID NO: 2731607 - RNA, 13 nt, Human
ccuccugggcuaa

SEQ ID NO: 2731608 - RNA, 13 nt, Human
ccuccugugugug

SEQ ID NO: 2731609 - RNA, 15 nt, Human
ccuccugugugugcg

SEQ ID NO: 2731610 - RNA, 22 nt, Human
ccuccugugugugcgccuacag

SEQ ID NO: 2731611 - RNA, 15 nt, Human
ccuccccuccucugc

SEQ ID NO: 2731612 - RNA, 14 nt, Human
ccuccccuccucug

SEQ ID NO: 2731613 - RNA, 15 nt, Human
ccucagucuggcccu

SEQ ID NO: 2731614 - RNA, 16 nt, Human
ccucaggugagaagca

SEQ ID NO: 2731615 - RNA, 15 nt, Human
ccucagggucccugg

SEQ ID NO: 2731616 - RNA, 22 nt, Human
ccucaggugagaagcagaggaa

SEQ ID NO: 2731617 - RNA, 22 nt, Human
ccucaggugauccacccaccuc

SEQ ID NO: 2731618 - RNA, 17 nt, Human
ccucaggugauccaccc

SEQ ID NO: 2731619 - RNA, 19 nt, Human
ccucaggugauccacccac

SEQ ID NO: 2731620 - RNA, 20 nt, Human
ccucagaaaacaaggaugaa

SEQ ID NO: 2731621 - RNA, 16 nt, Human
ccucagcauccuggca

SEQ ID NO: 2731622 - RNA, 17 nt, Human
ccucagcauccuggcac

SEQ ID NO: 2731623 - RNA, 14 nt, Human
ccucagcauccugg

SEQ ID NO: 2731624 - RNA, 14 nt, Human
ccucagggucccug

SEQ ID NO: 2731625 - RNA, 11 nt, Human
ccucaggccug

SEQ ID NO: 2731626 - RNA, 14 nt, Human
ccucaggccugggg

SEQ ID NO: 2731627 - RNA, 21 nt, Human
ccucaggccugggggcugggc

SEQ ID NO: 2731628 - RNA, 17 nt, Human
ccucugcuugccauccc

SEQ ID NO: 2731629 - RNA, 20 nt, Human
ccucugcuugccaucccucc

SEQ ID NO: 2731630 - RNA, 21 nt, Human
ccucugcuugccaucccuccc

SEQ ID NO: 2731631 - RNA, 12 nt, Human
ccucugggacug

SEQ ID NO: 2731632 - RNA, 11 nt, Human
ccucugcacaa

SEQ ID NO: 2731633 - RNA, 15 nt, Human
ccucugcacaagcug

SEQ ID NO: 2731634 - RNA, 17 nt, Human
ccucugacacacagcuc

SEQ ID NO: 2731635 - RNA, 18 nt, Human
ccucugacacacagcucu

SEQ ID NO: 2731636 - RNA, 20 nt, Human
ccucugcacaagcugcaccc

SEQ ID NO: 2731637 - RNA, 17 nt, Human
ccucugcacaagcugca

SEQ ID NO: 2731638 - RNA, 19 nt, Human
ccucugcacaagcugcacc

SEQ ID NO: 2731639 - RNA, 22 nt, Human
ccucugcacuccccugcugggu

SEQ ID NO: 2731640 - RNA, 14 nt, Human
ccucugcacucccc

SEQ ID NO: 2731641 - RNA, 19 nt, Human
ccucugcacuccccugcug

SEQ ID NO: 2731642 - RNA, 20 nt, Human
ccucugcacuccccugcugg

SEQ ID NO: 2731643 - RNA, 21 nt, Human
ccucugcacuccccugcuggg

SEQ ID NO: 2731644 - RNA, 11 nt, Human
ccucuccuggg

SEQ ID NO: 2731645 - RNA, 12 nt, Human
ccucuccugggc

SEQ ID NO: 2731646 - RNA, 13 nt, Human
ccucuccugggca

SEQ ID NO: 2731647 - RNA, 23 nt, Human
ccucugaaaaccaauguucucuc

SEQ ID NO: 2731648 - RNA, 16 nt, Human
ccucugacacacagcu

SEQ ID NO: 2731649 - RNA, 15 nt, Human
ccucugacacacagc

SEQ ID NO: 2731650 - RNA, 23 nt, Human
ccuccugugugugcgccuacagg

SEQ ID NO: 2731651 - RNA, 12 nt, Human
ccucucccauca

SEQ ID NO: 2731652 - RNA, 23 nt, Human
ccugaggcccuucucuccagccc

SEQ ID NO: 2731653 - RNA, 21 nt, Human
ccugaggcccuucucuccagc

SEQ ID NO: 2731654 - RNA, 22 nt, Human
ccugaggcccuucucuccagcc

SEQ ID NO: 2731655 - RNA, 16 nt, Human
ccugaggcccuucucu

SEQ ID NO: 2731656 - RNA, 17 nt, Human
ccugaggcccuucucuc

SEQ ID NO: 2731657 - RNA, 19 nt, Human
ccugaggcccuucucucca

SEQ ID NO: 2731658 - RNA, 20 nt, Human
ccugaggcccuucucuccag

SEQ ID NO: 2731659 - RNA, 12 nt, Human
ccugaggcccag

SEQ ID NO: 2731660 - RNA, 13 nt, Human
ccugaggcccaga

SEQ ID NO: 2731661 - RNA, 14 nt, Human
ccugaggcccagag

SEQ ID NO: 2731662 - RNA, 12 nt, Human
ccugacaacacu

SEQ ID NO: 2731663 - RNA, 14 nt, Human
ccugacaacacuca

SEQ ID NO: 2731664 - RNA, 15 nt, Human
ccugacaacacucau

SEQ ID NO: 2731665 - RNA, 16 nt, Human
ccugacaacacucauu

SEQ ID NO: 2731666 - RNA, 14 nt, Human
ccugaugcuucuuc

SEQ ID NO: 2731667 - RNA, 13 nt, Human
ccugauuaaagaa

SEQ ID NO: 2731668 - RNA, 23 nt, Human
ccugauugugucucuugguccug

SEQ ID NO: 2731669 - RNA, 12 nt, Human
ccugauuaaaga

SEQ ID NO: 2731670 - RNA, 17 nt, Human
ccugaugcuucuucaga

SEQ ID NO: 2731671 - RNA, 18 nt, Human
ccugaugcuucuucagag

SEQ ID NO: 2731672 - RNA, 17 nt, Human
ccucuuaugggcugggu

SEQ ID NO: 2731673 - RNA, 22 nt, Human
ccucuuuggucuacacugugcu

SEQ ID NO: 2731674 - RNA, 20 nt, Human
ccugaacaggauauucucac

SEQ ID NO: 2731675 - RNA, 21 nt, Human
ccugaagacucauucuucugu

SEQ ID NO: 2731676 - RNA, 15 nt, Human
ccugaagucacacag

SEQ ID NO: 2731677 - RNA, 13 nt, Human
ccugaaggccccg

SEQ ID NO: 2731678 - RNA, 16 nt, Human
ccugaagucacacagu

SEQ ID NO: 2731679 - RNA, 17 nt, Human
ccugaagucacacagug

SEQ ID NO: 2731680 - RNA, 23 nt, Human
ccucuuagaugcaguucugaaga

SEQ ID NO: 2731681 - RNA, 14 nt, Human
ccucuuaugggcug

SEQ ID NO: 2731682 - RNA, 15 nt, Human
ccucuuaugggcugg

SEQ ID NO: 2731683 - RNA, 16 nt, Human
ccucuuaugggcuggg

SEQ ID NO: 2731684 - RNA, 14 nt, Human
ccucuuagaaaaac

SEQ ID NO: 2731685 - RNA, 14 nt, Human
ccucuguacagagc

SEQ ID NO: 2731686 - RNA, 15 nt, Human
ccucuguacagagcc

SEQ ID NO: 2731687 - RNA, 16 nt, Human
ccucuguacagagccc

SEQ ID NO: 2731688 - RNA, 23 nt, Human
ccucuguacagagcccacgcccc

SEQ ID NO: 2731689 - RNA, 17 nt, Human
ccucuguacagagccca

SEQ ID NO: 2731690 - RNA, 18 nt, Human
ccucuguacagagcccac

SEQ ID NO: 2731691 - RNA, 15 nt, Human
cccuugaugaagaag

SEQ ID NO: 2731692 - RNA, 16 nt, Human
cccuugaugaagaagu

SEQ ID NO: 2731693 - RNA, 19 nt, Human
cccuuaccucggugccuuc

SEQ ID NO: 2731694 - RNA, 22 nt, Human
cccuugccgucuaccugagggg

SEQ ID NO: 2731695 - RNA, 17 nt, Human
cccuugccgucuaccug

SEQ ID NO: 2731696 - RNA, 18 nt, Human
cccuugccgucuaccuga

SEQ ID NO: 2731697 - RNA, 20 nt, Human
cccuuugacgccaucccagc

SEQ ID NO: 2731698 - RNA, 18 nt, Human
cccuuguggucccacccc

SEQ ID NO: 2731699 - RNA, 18 nt, Human
cccuuggggagcaggcuc

SEQ ID NO: 2731700 - RNA, 14 nt, Human
cccuugugguccca

SEQ ID NO: 2731701 - RNA, 16 nt, Human
cccuuguggucccacc

SEQ ID NO: 2731702 - RNA, 18 nt, Human
ccgagaucacgccacugc

SEQ ID NO: 2731703 - RNA, 17 nt, Human
ccgaggccuucucugaa

SEQ ID NO: 2731704 - RNA, 19 nt, Human
cccuuuuuuggcugcugaa

SEQ ID NO: 2731705 - RNA, 17 nt, Human
ccgagaaggaagccucc

SEQ ID NO: 2731706 - RNA, 18 nt, Human
ccgagauagccaaggcca

SEQ ID NO: 2731707 - RNA, 19 nt, Human
ccgagauagccaaggccaa

SEQ ID NO: 2731708 - RNA, 22 nt, Human
ccgagauagccaaggccaaagg

SEQ ID NO: 2731709 - RNA, 11 nt, Human
cccuuuuccuu

SEQ ID NO: 2731710 - RNA, 13 nt, Human
cccuuuucuguuu

SEQ ID NO: 2731711 - RNA, 17 nt, Human
cccuuuuuuggcugcug

SEQ ID NO: 2731712 - RNA, 18 nt, Human
cccuuuuuuggcugcuga

SEQ ID NO: 2731713 - RNA, 21 nt, Human
cccccgcugucagccauuccu

SEQ ID NO: 2731714 - RNA, 12 nt, Human
cccccagcccca

SEQ ID NO: 2731715 - RNA, 14 nt, Human
ccccaggaggccag

SEQ ID NO: 2731716 - RNA, 15 nt, Human
ccccaggaggccagc

SEQ ID NO: 2731717 - RNA, 21 nt, Human
ccccaggaggccagccuugac

SEQ ID NO: 2731718 - RNA, 22 nt, Human
ccccaggaggccagccuugacc

SEQ ID NO: 2731719 - RNA, 13 nt, Human
ccccaggaggcca

SEQ ID NO: 2731720 - RNA, 14 nt, Human
ccccacuggugaca

SEQ ID NO: 2731721 - RNA, 12 nt, Human
ccccacugguga

SEQ ID NO: 2731722 - RNA, 13 nt, Human
ccccacuggugac

SEQ ID NO: 2731723 - RNA, 18 nt, Human
cccugugggcccccaaau

SEQ ID NO: 2731724 - RNA, 15 nt, Human
cccuguuuguuucug

SEQ ID NO: 2731725 - RNA, 16 nt, Human
cccugugggcccccaa

SEQ ID NO: 2731726 - RNA, 15 nt, Human
cccugugggccccca

SEQ ID NO: 2731727 - RNA, 17 nt, Human
ccccucagggucccugg

SEQ ID NO: 2731728 - RNA, 18 nt, Human
ccccucagggucccuggu

SEQ ID NO: 2731729 - RNA, 20 nt, Human
ccccucagggucccuggugg

SEQ ID NO: 2731730 - RNA, 21 nt, Human
cccugguggcagugggagcug

SEQ ID NO: 2731731 - RNA, 15 nt, Human
cccugguggcagugg

SEQ ID NO: 2731732 - RNA, 16 nt, Human
cccugguggcaguggg

SEQ ID NO: 2731733 - RNA, 19 nt, Human
cccugguggcagugggagc

SEQ ID NO: 2731734 - RNA, 13 nt, Human
ccggcuggccugg

SEQ ID NO: 2731735 - RNA, 15 nt, Human
ccgggcacucagaag

SEQ ID NO: 2731736 - RNA, 12 nt, Human
ccggcuggccug

SEQ ID NO: 2731737 - RNA, 23 nt, Human
ccgcuuucuacccagcgagcccu

SEQ ID NO: 2731738 - RNA, 13 nt, Human
ccgugcuaaggac

SEQ ID NO: 2731739 - RNA, 15 nt, Human
ccucaccccacugug

SEQ ID NO: 2731740 - RNA, 12 nt, Human
ccucaccccacu

SEQ ID NO: 2731741 - RNA, 21 nt, Human
ccucacccacccuuuuuuaaa

SEQ ID NO: 2731742 - RNA, 20 nt, Human
ccucacaguccuuaccagca

SEQ ID NO: 2731743 - RNA, 22 nt, Human
ccucacaguccuuaccagcaga

SEQ ID NO: 2731744 - RNA, 17 nt, Human
ccucaccuuucccaucu

SEQ ID NO: 2731745 - RNA, 17 nt, Human
ccucacaguccuuacca

SEQ ID NO: 2731746 - RNA, 21 nt, Human
cuggucccagccagcaguuca

SEQ ID NO: 2731747 - RNA, 15 nt, Human
cuggucccacucagu

SEQ ID NO: 2731748 - RNA, 18 nt, Human
cuggucccacucagucca

SEQ ID NO: 2731749 - RNA, 18 nt, Human
cugguccauagagagcaa

SEQ ID NO: 2731750 - RNA, 19 nt, Human
cuggguucuacccaggugc

SEQ ID NO: 2731751 - RNA, 13 nt, Human
cuggguuggaggg

SEQ ID NO: 2731752 - RNA, 15 nt, Human
cugguccauagagag

SEQ ID NO: 2731753 - RNA, 17 nt, Human
cugguccauagagagca

SEQ ID NO: 2731754 - RNA, 19 nt, Human
cugguggcagugggagcug

SEQ ID NO: 2731755 - RNA, 23 nt, Human
cugguggcagugggagcugccug

SEQ ID NO: 2731756 - RNA, 21 nt, Human
cuggguacuuguggacacagc

SEQ ID NO: 2731757 - RNA, 23 nt, Human
cuggguacuuguggacacagcuc

SEQ ID NO: 2731758 - RNA, 20 nt, Human
cuggguacuuguggacacag

SEQ ID NO: 2731759 - RNA, 23 nt, Human
cugggguggggaccucaggccug

SEQ ID NO: 2731760 - RNA, 21 nt, Human
cugggguggggaccucaggcc

SEQ ID NO: 2731761 - RNA, 22 nt, Human
cugggguggggaccucaggccu

SEQ ID NO: 2731762 - RNA, 13 nt, Human
cugggggccucag

SEQ ID NO: 2731763 - RNA, 17 nt, Human
cugggggccucagugcc

SEQ ID NO: 2731764 - RNA, 18 nt, Human
cugggggccucagugcca

SEQ ID NO: 2731765 - RNA, 17 nt, Human
cugggguggggaccuca

SEQ ID NO: 2731766 - RNA, 18 nt, Human
cugggguggggaccucag

SEQ ID NO: 2731767 - RNA, 19 nt, Human
cugggguggggaccucagg

SEQ ID NO: 2731768 - RNA, 21 nt, Human
cugggcuuggggaccagagcu

SEQ ID NO: 2731769 - RNA, 17 nt, Human
cugggcuuggggaccag

SEQ ID NO: 2731770 - RNA, 20 nt, Human
cugggcuuggggaccagagc

SEQ ID NO: 2731771 - RNA, 21 nt, Human
cugggcuucaguggcagcugc

SEQ ID NO: 2731772 - RNA, 22 nt, Human
cugggcuucaguggcagcugcu

SEQ ID NO: 2731773 - RNA, 23 nt, Human
cugggcuucaguggcagcugcuu

SEQ ID NO: 2731774 - RNA, 13 nt, Human
cugggcuugggga

SEQ ID NO: 2731775 - RNA, 18 nt, Human
cugggcuucaguggcagc

SEQ ID NO: 2731776 - RNA, 17 nt, Human
cugggcuucaguggcag

SEQ ID NO: 2731777 - RNA, 19 nt, Human
cugggcuucaguggcagcu

SEQ ID NO: 2731778 - RNA, 20 nt, Human
cugggcuucaguggcagcug

SEQ ID NO: 2731779 - RNA, 22 nt, Human
cugggaacccaaguccaagcau

SEQ ID NO: 2731780 - RNA, 16 nt, Human
cugggagcuuuuguag

SEQ ID NO: 2731781 - RNA, 18 nt, Human
cugggaggucaaggcugc

SEQ ID NO: 2731782 - RNA, 20 nt, Human
cugggcaaugugauaaaacc

SEQ ID NO: 2731783 - RNA, 16 nt, Human
cugggagugagcuggu

SEQ ID NO: 2731784 - RNA, 13 nt, Human
cugggagugagcu

SEQ ID NO: 2731785 - RNA, 12 nt, Human
cugggagugagc

SEQ ID NO: 2731786 - RNA, 13 nt, Human
cuggccugagcug

SEQ ID NO: 2731787 - RNA, 17 nt, Human
cuggcucuuccaggcug

SEQ ID NO: 2731788 - RNA, 20 nt, Human
cuggcucuuccaggcuggga

SEQ ID NO: 2731789 - RNA, 18 nt, Human
cuggcucuuccaggcugg

SEQ ID NO: 2731790 - RNA, 19 nt, Human
cuggcucuuccaggcuggg

SEQ ID NO: 2731791 - RNA, 22 nt, Human
cuggcuggguggcaccagcagc

SEQ ID NO: 2731792 - RNA, 19 nt, Human
cuggcuguuggcugggggc

SEQ ID NO: 2731793 - RNA, 21 nt, Human
cuggcuggguggcaccagcag

SEQ ID NO: 2731794 - RNA, 20 nt, Human
cuggcuguuggcugggggcc

SEQ ID NO: 2731795 - RNA, 19 nt, Human
cuggcacaguuuucugaga

SEQ ID NO: 2731796 - RNA, 18 nt, Human
cuggcacaguuuucugag

SEQ ID NO: 2731797 - RNA, 23 nt, Human
cuggcacuauaauguaagcucua

SEQ ID NO: 2731798 - RNA, 13 nt, Human
cuggcacugcuuc

SEQ ID NO: 2731799 - RNA, 14 nt, Human
cuggcacugcuucc

SEQ ID NO: 2731800 - RNA, 20 nt, Human
cuggauuguacuuugugcug

SEQ ID NO: 2731801 - RNA, 19 nt, Human
cuggauuguacuuugugcu

SEQ ID NO: 2731802 - RNA, 15 nt, Human
cuggauggggcugca

SEQ ID NO: 2731803 - RNA, 16 nt, Human
cuggauggggcugcac

SEQ ID NO: 2731804 - RNA, 23 nt, Human
cuggauuaaacuuaaucuaaaug

SEQ ID NO: 2731805 - RNA, 13 nt, Human
cuggauuaaacuu

SEQ ID NO: 2731806 - RNA, 16 nt, Human
cuggccagaugcacca

SEQ ID NO: 2731807 - RNA, 17 nt, Human
cuggcacugcuuccagu

SEQ ID NO: 2731808 - RNA, 15 nt, Human
cuggcacugcuucca

SEQ ID NO: 2731809 - RNA, 16 nt, Human
cuggcacugcuuccag

SEQ ID NO: 2731810 - RNA, 21 nt, Human
cuggccagaugcaccagcccu

SEQ ID NO: 2731811 - RNA, 17 nt, Human
cuggccagaugcaccag

SEQ ID NO: 2731812 - RNA, 18 nt, Human
cuggccagaugcaccagc

SEQ ID NO: 2731813 - RNA, 19 nt, Human
cuggccagaugcaccagcc

SEQ ID NO: 2731814 - RNA, 20 nt, Human
cuggccagaugcaccagccc

SEQ ID NO: 2731815 - RNA, 12 nt, Human
cuggcccacugc

SEQ ID NO: 2731816 - RNA, 13 nt, Human
cuggcccacugca

SEQ ID NO: 2731817 - RNA, 17 nt, Human
cuggccuagcauacgua

SEQ ID NO: 2731818 - RNA, 23 nt, Human
cuggccuagcauacguacacauu

SEQ ID NO: 2731819 - RNA, 23 nt, Human
cuggaauaauccuaaacauauga

SEQ ID NO: 2731820 - RNA, 14 nt, Human
cuggaagcacagcu

SEQ ID NO: 2731821 - RNA, 18 nt, Human
cuggaagcacagcuucau

SEQ ID NO: 2731822 - RNA, 15 nt, Human
cuggaagcacagcuu

SEQ ID NO: 2731823 - RNA, 14 nt, Human
cuggaaugcagugg

SEQ ID NO: 2731824 - RNA, 15 nt, Human
cuggaaugcaguggu

SEQ ID NO: 2731825 - RNA, 13 nt, Human
cugcugaaacaac

SEQ ID NO: 2731826 - RNA, 21 nt, Human
cugcuuucagauacuggauug

SEQ ID NO: 2731827 - RNA, 18 nt, Human
cugcuuucagauacugga

SEQ ID NO: 2731828 - RNA, 16 nt, Human
cugcuuucagauacug

SEQ ID NO: 2731829 - RNA, 16 nt, Human
cuggagcuagaauuug

SEQ ID NO: 2731830 - RNA, 22 nt, Human
cuggagcuagaauuugauaugu

SEQ ID NO: 2731831 - RNA, 17 nt, Human
cuggagcuagaauuuga

SEQ ID NO: 2731832 - RNA, 21 nt, Human
cugccuaaggacuucuuuaau

SEQ ID NO: 2731833 - RNA, 20 nt, Human
cugccuaaggacuucuuuaa

SEQ ID NO: 2731834 - RNA, 22 nt, Human
cugccuaaggacuucuuuaauu

SEQ ID NO: 2731835 - RNA, 19 nt, Human
cugccuaaggacuucuuua

SEQ ID NO: 2731836 - RNA, 14 nt, Human
cugccucagccucc

SEQ ID NO: 2731837 - RNA, 13 nt, Human
cugccucagccuc

SEQ ID NO: 2731838 - RNA, 13 nt, Human
cugccucuucucu

SEQ ID NO: 2731839 - RNA, 23 nt, Human
cugccugaagucacacagugagu

SEQ ID NO: 2731840 - RNA, 15 nt, Human
cugccugcccaggcc

SEQ ID NO: 2731841 - RNA, 13 nt, Human
cugccugcccagg

SEQ ID NO: 2731842 - RNA, 14 nt, Human
cugccugcccaggc

SEQ ID NO: 2731843 - RNA, 14 nt, Human
cugcuccagcuguu

SEQ ID NO: 2731844 - RNA, 16 nt, Human
cugcgguccacccagg

SEQ ID NO: 2731845 - RNA, 21 nt, Human
cugcggaaugaaccacaucuu

SEQ ID NO: 2731846 - RNA, 15 nt, Human
cugcgguccacccag

SEQ ID NO: 2731847 - RNA, 20 nt, Human
cugcggaaugaaccacaucu

SEQ ID NO: 2731848 - RNA, 16 nt, Human
cugcuccucuccccag

SEQ ID NO: 2731849 - RNA, 17 nt, Human
cugcuccucuccccagc

SEQ ID NO: 2731850 - RNA, 15 nt, Human
cugcuccagcuguuc

SEQ ID NO: 2731851 - RNA, 18 nt, Human
cugcuccucuccccagca

SEQ ID NO: 2731852 - RNA, 16 nt, Human
cugccauuucugagau

SEQ ID NO: 2731853 - RNA, 13 nt, Human
cugcccaggcccc

SEQ ID NO: 2731854 - RNA, 14 nt, Human
cugccccuggcagc

SEQ ID NO: 2731855 - RNA, 15 nt, Human
cugccccuggcagcc

SEQ ID NO: 2731856 - RNA, 16 nt, Human
cugccccuggcagccc

SEQ ID NO: 2731857 - RNA, 17 nt, Human
cugccccuggcagcccc

SEQ ID NO: 2731858 - RNA, 13 nt, Human
cugcccugcccac

SEQ ID NO: 2731859 - RNA, 14 nt, Human
cugcccugcccacc

SEQ ID NO: 2731860 - RNA, 15 nt, Human
cugcccugcccaccu

SEQ ID NO: 2731861 - RNA, 16 nt, Human
cugcccugcccaccug

SEQ ID NO: 2731862 - RNA, 11 nt, Human
cugcccggcug

SEQ ID NO: 2731863 - RNA, 15 nt, Human
cugcccggcugcgga

SEQ ID NO: 2731864 - RNA, 19 nt, Human
cugcccuccaagaccuucu

SEQ ID NO: 2731865 - RNA, 15 nt, Human
cugccaugccagcuu

SEQ ID NO: 2731866 - RNA, 17 nt, Human
cugccaugccagcuuau

SEQ ID NO: 2731867 - RNA, 19 nt, Human
cugccaugccagcuuaucu

SEQ ID NO: 2731868 - RNA, 19 nt, Human
cugccagccgagauagcca

SEQ ID NO: 2731869 - RNA, 15 nt, Human
cugccaggaagccag

SEQ ID NO: 2731870 - RNA, 16 nt, Human
cugccaggaagccagc

SEQ ID NO: 2731871 - RNA, 18 nt, Human
cugccaggaagccagcag

SEQ ID NO: 2731872 - RNA, 19 nt, Human
cugccaggaagccagcagg

SEQ ID NO: 2731873 - RNA, 14 nt, Human
cugccacccugggg

SEQ ID NO: 2731874 - RNA, 15 nt, Human
cugccacccugggga

SEQ ID NO: 2731875 - RNA, 16 nt, Human
cugccacccuggggag

SEQ ID NO: 2731876 - RNA, 20 nt, Human
cugccacccuggggagaaag

SEQ ID NO: 2731877 - RNA, 14 nt, Human
cugcacuugcagac

SEQ ID NO: 2731878 - RNA, 16 nt, Human
cugcacuugcagacuc

SEQ ID NO: 2731879 - RNA, 17 nt, Human
cugcacuugcagacucu

SEQ ID NO: 2731880 - RNA, 17 nt, Human
cugcaccggcuggccug

SEQ ID NO: 2731881 - RNA, 18 nt, Human
cugcaccggcuggccugg

SEQ ID NO: 2731882 - RNA, 19 nt, Human
cugcaccggcuggccuggc

SEQ ID NO: 2731883 - RNA, 22 nt, Human
cugcagccucaaccuccugggc

SEQ ID NO: 2731884 - RNA, 19 nt, Human
cugcagccucaaccuccug

SEQ ID NO: 2731885 - RNA, 20 nt, Human
cugcagccucaaccuccugg

SEQ ID NO: 2731886 - RNA, 22 nt, Human
cugcagggaguccgaaagggac

SEQ ID NO: 2731887 - RNA, 11 nt, Human
cugcagccuca

SEQ ID NO: 2731888 - RNA, 13 nt, Human
cugcacaagcugc

SEQ ID NO: 2731889 - RNA, 14 nt, Human
cugcacaagcugca

SEQ ID NO: 2731890 - RNA, 15 nt, Human
cugcacaagcugcac

SEQ ID NO: 2731891 - RNA, 16 nt, Human
cugcacaagcugcacc

SEQ ID NO: 2731892 - RNA, 17 nt, Human
cugcacccucaggcagg

SEQ ID NO: 2731893 - RNA, 16 nt, Human
cugcacccucaggcag

SEQ ID NO: 2731894 - RNA, 18 nt, Human
cugcacccucaggcaggu

SEQ ID NO: 2731895 - RNA, 20 nt, Human
cugcaauuucauaugcugua

SEQ ID NO: 2731896 - RNA, 18 nt, Human
cugcaauuucauaugcug

SEQ ID NO: 2731897 - RNA, 15 nt, Human
cugauucuucagcaa

SEQ ID NO: 2731898 - RNA, 21 nt, Human
cugauguuccuagugaaagag

SEQ ID NO: 2731899 - RNA, 20 nt, Human
cugauguuccuagugaaaga

SEQ ID NO: 2731900 - RNA, 18 nt, Human
cugauguuccuagugaaa

SEQ ID NO: 2731901 - RNA, 13 nt, Human
cugauguuccuag

SEQ ID NO: 2731902 - RNA, 22 nt, Human
cugauucccaagcucugcuccu

SEQ ID NO: 2731903 - RNA, 19 nt, Human
cugauucccaagcucugcu

SEQ ID NO: 2731904 - RNA, 20 nt, Human
cugauucccaagcucugcuc

SEQ ID NO: 2731905 - RNA, 17 nt, Human
cugauucccaagcucug

SEQ ID NO: 2731906 - RNA, 18 nt, Human
cugauucccaagcucugc

SEQ ID NO: 2731907 - RNA, 15 nt, Human
cugauucccaagcuc

SEQ ID NO: 2731908 - RNA, 20 nt, Human
cugauagaggaagccugauu

SEQ ID NO: 2731909 - RNA, 21 nt, Human
cugauaaagaugagugagcau

SEQ ID NO: 2731910 - RNA, 20 nt, Human
cugauccaguuuuguuugga

SEQ ID NO: 2731911 - RNA, 22 nt, Human
cugagugggggaucacagccuc

SEQ ID NO: 2731912 - RNA, 13 nt, Human
cugauaaagauga

SEQ ID NO: 2731913 - RNA, 13 nt, Human
cugagucugaagg

SEQ ID NO: 2731914 - RNA, 14 nt, Human
cugagucugaaggc

SEQ ID NO: 2731915 - RNA, 15 nt, Human
cugagucugaaggcu

SEQ ID NO: 2731916 - RNA, 16 nt, Human
cugagucugaaggcug

SEQ ID NO: 2731917 - RNA, 13 nt, Human
cucuuaagaagac

SEQ ID NO: 2731918 - RNA, 13 nt, Human
cucuuaaaaccca

SEQ ID NO: 2731919 - RNA, 24 nt, Human
cucuuaaaacccaagugccuuagc

SEQ ID NO: 2731920 - RNA, 19 nt, Human
cucuggcagcucagagagg

SEQ ID NO: 2731921 - RNA, 17 nt, Human
cucuggcagcucagaga

SEQ ID NO: 2731922 - RNA, 18 nt, Human
cucuggcagcucagagag

SEQ ID NO: 2731923 - RNA, 12 nt, Human
cucuucuccagg

SEQ ID NO: 2731924 - RNA, 23 nt, Human
cucuuccaggcugggagagccuu

SEQ ID NO: 2731925 - RNA, 22 nt, Human
cucuuccaggcugggagagccu

SEQ ID NO: 2731926 - RNA, 21 nt, Human
cucuuccaggcugggagagcc

SEQ ID NO: 2731927 - RNA, 18 nt, Human
cucuugguccugcugcag

SEQ ID NO: 2731928 - RNA, 19 nt, Human
cucuugguccugcugcagu

SEQ ID NO: 2731929 - RNA, 16 nt, Human
cucuugaccucaggug

SEQ ID NO: 2731930 - RNA, 13 nt, Human
cucuugaccucag

SEQ ID NO: 2731931 - RNA, 15 nt, Human
cucuugaccucaggu

SEQ ID NO: 2731932 - RNA, 17 nt, Human
cucuuucuauuguuucu

SEQ ID NO: 2731933 - RNA, 15 nt, Human
cucuuuggacacuca

SEQ ID NO: 2731934 - RNA, 18 nt, Human
cucuuuggacacucacac

SEQ ID NO: 2731935 - RNA, 17 nt, Human
cucuuuccaucuacccu

SEQ ID NO: 2731936 - RNA, 16 nt, Human
cugaauacagaggcaa

SEQ ID NO: 2731937 - RNA, 21 nt, Human
cugaagucagaucugccuaag

SEQ ID NO: 2731938 - RNA, 14 nt, Human
cugaagucagaucu

SEQ ID NO: 2731939 - RNA, 24 nt, Human
cugaagucuuuguacagacaacaa

SEQ ID NO: 2731940 - RNA, 16 nt, Human
cugaagucagaucugc

SEQ ID NO: 2731941 - RNA, 15 nt, Human
cugaagucagaucug

SEQ ID NO: 2731942 - RNA, 14 nt, Human
cugaagucacacag

SEQ ID NO: 2731943 - RNA, 15 nt, Human
cugaagucacacagu

SEQ ID NO: 2731944 - RNA, 19 nt, Human
cugaagacucauucuucug

SEQ ID NO: 2731945 - RNA, 21 nt, Human
cugaagacucauucuucugua

SEQ ID NO: 2731946 - RNA, 15 nt, Human
cugaacuuggcgcug

SEQ ID NO: 2731947 - RNA, 16 nt, Human
cugaacuuggcgcugc

SEQ ID NO: 2731948 - RNA, 21 nt, Human
cugaacuuggcgcugccccug

SEQ ID NO: 2731949 - RNA, 21 nt, Human
cugaaccuggguaacuaggga

SEQ ID NO: 2731950 - RNA, 18 nt, Human
cucuuugggccuggcucc

SEQ ID NO: 2731951 - RNA, 19 nt, Human
cucuuuggucuacacugug

SEQ ID NO: 2731952 - RNA, 21 nt, Human
cucuuuggucuacacugugcu

SEQ ID NO: 2731953 - RNA, 11 nt, Human
cugacccacug

SEQ ID NO: 2731954 - RNA, 17 nt, Human
cugacauuguuggccaa

SEQ ID NO: 2731955 - RNA, 20 nt, Human
cugacaggcaaugcuggcug

SEQ ID NO: 2731956 - RNA, 16 nt, Human
cugacaggcaaugcug

SEQ ID NO: 2731957 - RNA, 17 nt, Human
cugacaggcaaugcugg

SEQ ID NO: 2731958 - RNA, 18 nt, Human
cugacaggcaaugcuggc

SEQ ID NO: 2731959 - RNA, 19 nt, Human
cugacaggcaaugcuggcu

SEQ ID NO: 2731960 - RNA, 11 nt, Human
cugacaggcaa

SEQ ID NO: 2731961 - RNA, 21 nt, Human
cugacagacacaggcccggcu

SEQ ID NO: 2731962 - RNA, 18 nt, Human
cugaauuuaaauagcuuu

SEQ ID NO: 2731963 - RNA, 14 nt, Human
cugaauuuaaauag

SEQ ID NO: 2731964 - RNA, 23 nt, Human
cugaauuuaaauagcuuuuuucu

SEQ ID NO: 2731965 - RNA, 19 nt, Human
cugacagacacaggcccgg

SEQ ID NO: 2731966 - RNA, 21 nt, Human
cucuccugggcagcugccucc

SEQ ID NO: 2731967 - RNA, 13 nt, Human
cucuccuguaccu

SEQ ID NO: 2731968 - RNA, 15 nt, Human
cucuccuguaccucu

SEQ ID NO: 2731969 - RNA, 14 nt, Human
cucuccuguaccuc

SEQ ID NO: 2731970 - RNA, 22 nt, Human
cucuccuguaccucuugagccu

SEQ ID NO: 2731971 - RNA, 18 nt, Human
cucuccuguaccucuuga

SEQ ID NO: 2731972 - RNA, 17 nt, Human
cucuccuguaccucuug

SEQ ID NO: 2731973 - RNA, 14 nt, Human
cucucucacuccuu

SEQ ID NO: 2731974 - RNA, 15 nt, Human
cucucucacuccuug

SEQ ID NO: 2731975 - RNA, 16 nt, Human
cucucucacuccuuga

SEQ ID NO: 2731976 - RNA, 12 nt, Human
cucucucaggcc

SEQ ID NO: 2731977 - RNA, 22 nt, Human
cucucaggccagcugcuugggc

SEQ ID NO: 2731978 - RNA, 23 nt, Human
cucucaggccagcugcuugggcu

SEQ ID NO: 2731979 - RNA, 13 nt, Human
cucuccagccccu

SEQ ID NO: 2731980 - RNA, 12 nt, Human
cucuccagcccc

SEQ ID NO: 2731981 - RNA, 13 nt, Human
cucuccauuuaau

SEQ ID NO: 2731982 - RNA, 13 nt, Human
cucucccaucacu

SEQ ID NO: 2731983 - RNA, 18 nt, Human
cucucccaucacuucccu

SEQ ID NO: 2731984 - RNA, 14 nt, Human
cucucccaucacuu

SEQ ID NO: 2731985 - RNA, 20 nt, Human
cucucccaucacuucccuac

SEQ ID NO: 2731986 - RNA, 22 nt, Human
cucugcaagaauugaagcagga

SEQ ID NO: 2731987 - RNA, 14 nt, Human
cucugccucugaca

SEQ ID NO: 2731988 - RNA, 14 nt, Human
cucugcccuccaag

SEQ ID NO: 2731989 - RNA, 15 nt, Human
cucugcccuccaaga

SEQ ID NO: 2731990 - RNA, 16 nt, Human
cucugcccuccaagac

SEQ ID NO: 2731991 - RNA, 23 nt, Human
cucugcccuccaagaccuucucc

SEQ ID NO: 2731992 - RNA, 14 nt, Human
cuccaccucccugc

SEQ ID NO: 2731993 - RNA, 15 nt, Human
cuccaccucccugca

SEQ ID NO: 2731994 - RNA, 16 nt, Human
cuccaccucccugcaa

SEQ ID NO: 2731995 - RNA, 17 nt, Human
cuccaccucccugcaau

SEQ ID NO: 2731996 - RNA, 12 nt, Human
cuccacccugcu

SEQ ID NO: 2731997 - RNA, 15 nt, Human
cuccaccugccaggg

SEQ ID NO: 2731998 - RNA, 17 nt, Human
cuccaccugccagggac

SEQ ID NO: 2731999 - RNA, 18 nt, Human
cuccaccugccagggaca

SEQ ID NO: 2732000 - RNA, 21 nt, Human
cuccaccugccagggacagag

SEQ ID NO: 2732001 - RNA, 11 nt, Human
cuccacccugc

SEQ ID NO: 2732002 - RNA, 19 nt, Human
cuccagcucaccagcccca

SEQ ID NO: 2732003 - RNA, 20 nt, Human
cuccagcucaccagccccag

SEQ ID NO: 2732004 - RNA, 17 nt, Human
cucccagucauuuaaua

SEQ ID NO: 2732005 - RNA, 22 nt, Human
cucccaggcauuccccaggagg

SEQ ID NO: 2732006 - RNA, 17 nt, Human
cucccaggcauucccca

SEQ ID NO: 2732007 - RNA, 19 nt, Human
cucccaggcauuccccagg

SEQ ID NO: 2732008 - RNA, 20 nt, Human
cucccaggcauuccccagga

SEQ ID NO: 2732009 - RNA, 21 nt, Human
cucccaggcauuccccaggag

SEQ ID NO: 2732010 - RNA, 14 nt, Human
cuccaugugggcua

SEQ ID NO: 2732011 - RNA, 22 nt, Human
cucccaaggggcccaaauucuu

SEQ ID NO: 2732012 - RNA, 21 nt, Human
cucccaaggggcccaaauucu

SEQ ID NO: 2732013 - RNA, 15 nt, Human
cucccaggcauuccc

SEQ ID NO: 2732014 - RNA, 11 nt, Human
cuccaggcucc

SEQ ID NO: 2732015 - RNA, 18 nt, Human
cuccagcuguucagcugg

SEQ ID NO: 2732016 - RNA, 19 nt, Human
cuccagcuguucagcuggu

SEQ ID NO: 2732017 - RNA, 13 nt, Human
cuccagcuguuca

SEQ ID NO: 2732018 - RNA, 21 nt, Human
cucauuagcauuuugcuaaau

SEQ ID NO: 2732019 - RNA, 14 nt, Human
cucauauuuucaug

SEQ ID NO: 2732020 - RNA, 16 nt, Human
cucauugaccugaggc

SEQ ID NO: 2732021 - RNA, 23 nt, Human
cucauucuucuguacgucugaca

SEQ ID NO: 2732022 - RNA, 13 nt, Human
cucauugaccuga

SEQ ID NO: 2732023 - RNA, 15 nt, Human
cucauugaccugagg

SEQ ID NO: 2732024 - RNA, 13 nt, Human
cucauucuucugu

SEQ ID NO: 2732025 - RNA, 14 nt, Human
cucauucuucugua

SEQ ID NO: 2732026 - RNA, 12 nt, Human
cucauucuucug

SEQ ID NO: 2732027 - RNA, 19 nt, Human
cucaggugucccugcacuu

SEQ ID NO: 2732028 - RNA, 17 nt, Human
cucaggugucccugcac

SEQ ID NO: 2732029 - RNA, 18 nt, Human
cucaggugucccugcacu

SEQ ID NO: 2732030 - RNA, 22 nt, Human
cucauaauuuauacaggucaua

SEQ ID NO: 2732031 - RNA, 13 nt, Human
cucauaauuuaua

SEQ ID NO: 2732032 - RNA, 15 nt, Human
cucauaauuuauaca

SEQ ID NO: 2732033 - RNA, 20 nt, Human
cucauaguaugguggcuggg

SEQ ID NO: 2732034 - RNA, 18 nt, Human
cucauaguaugguggcug

SEQ ID NO: 2732035 - RNA, 19 nt, Human
cucauaguaugguggcugg

SEQ ID NO: 2732036 - RNA, 23 nt, Human
cuaaaagguaugcaaucaaaucu

SEQ ID NO: 2732037 - RNA, 12 nt, Human
cucagggucccu

SEQ ID NO: 2732038 - RNA, 14 nt, Human
cucagggucccugg

SEQ ID NO: 2732039 - RNA, 15 nt, Human
cucaggugucccugc

SEQ ID NO: 2732040 - RNA, 16 nt, Human
cucaggugucccugca

SEQ ID NO: 2732041 - RNA, 22 nt, Human
cucagguggggucacucuggca

SEQ ID NO: 2732042 - RNA, 23 nt, Human
cucagguggggucacucuggcag

SEQ ID NO: 2732043 - RNA, 12 nt, Human
cucggagaagag

SEQ ID NO: 2732044 - RNA, 20 nt, Human
cucggagaagagcuguucac

SEQ ID NO: 2732045 - RNA, 13 nt, Human
cucggagaagagc

SEQ ID NO: 2732046 - RNA, 17 nt, Human
cucuaaauucuuucauu

SEQ ID NO: 2732047 - RNA, 13 nt, Human
cucuaaauucuuu

SEQ ID NO: 2732048 - RNA, 20 nt, Human
cucgaguuacagacaaagcg

SEQ ID NO: 2732049 - RNA, 16 nt, Human
cucgaguuacagacaa

SEQ ID NO: 2732050 - RNA, 15 nt, Human
cucgcgacaaugcaa

SEQ ID NO: 2732051 - RNA, 13 nt, Human
cucgcgacaaugc

SEQ ID NO: 2732052 - RNA, 15 nt, Human
cuccugugucuugca

SEQ ID NO: 2732053 - RNA, 23 nt, Human
cuccugugucuugcaauggcagc

SEQ ID NO: 2732054 - RNA, 11 nt, Human
cuccugugugu

SEQ ID NO: 2732055 - RNA, 22 nt, Human
cuccugcaggcagccaggccac

SEQ ID NO: 2732056 - RNA, 15 nt, Human
cuccugcaggcagcc

SEQ ID NO: 2732057 - RNA, 21 nt, Human
cuccugcaggcagccaggcca

SEQ ID NO: 2732058 - RNA, 14 nt, Human
cuccuucaccuuug

SEQ ID NO: 2732059 - RNA, 16 nt, Human
cuccuucaccuuuguc

SEQ ID NO: 2732060 - RNA, 19 nt, Human
cuccuucaccuuugucccc

SEQ ID NO: 2732061 - RNA, 21 nt, Human
cuccuucaccuuuguccccac

SEQ ID NO: 2732062 - RNA, 11 nt, Human
cuccuucuucc

SEQ ID NO: 2732063 - RNA, 21 nt, Human
cuccuugaaaacacuguucuc

SEQ ID NO: 2732064 - RNA, 16 nt, Human
cucgaacuggcugcaa

SEQ ID NO: 2732065 - RNA, 14 nt, Human
cuccuucuguccua

SEQ ID NO: 2732066 - RNA, 15 nt, Human
cuccuucuguccuac

SEQ ID NO: 2732067 - RNA, 20 nt, Human
cuccuucuguccuacucugu

SEQ ID NO: 2732068 - RNA, 17 nt, Human
cucccuuggauuguccc

SEQ ID NO: 2732069 - RNA, 14 nt, Human
cucccuuccucuuu

SEQ ID NO: 2732070 - RNA, 13 nt, Human
cucccuuccucuu

SEQ ID NO: 2732071 - RNA, 10 nt, Human
cucccuuccu

SEQ ID NO: 2732072 - RNA, 23 nt, Human
cucccuucccaccucucucacuc

SEQ ID NO: 2732073 - RNA, 15 nt, Human
cucccaucucacaca

SEQ ID NO: 2732074 - RNA, 18 nt, Human
cucccaucucacacauga

SEQ ID NO: 2732075 - RNA, 14 nt, Human
cucccaucucacac

SEQ ID NO: 2732076 - RNA, 12 nt, Human
cuccugcaggca

SEQ ID NO: 2732077 - RNA, 13 nt, Human
cuccugcaggcag

SEQ ID NO: 2732078 - RNA, 14 nt, Human
cuccugcaggcagc

SEQ ID NO: 2732079 - RNA, 18 nt, Human
cuccuaucaccugucuug

SEQ ID NO: 2732080 - RNA, 12 nt, Human
cuccucagaucu

SEQ ID NO: 2732081 - RNA, 14 nt, Human
cuccucagaucuuc

SEQ ID NO: 2732082 - RNA, 20 nt, Human
cuucgggaggucgaggcagg

SEQ ID NO: 2732083 - RNA, 21 nt, Human
cuucgggaggucgaggcagga

SEQ ID NO: 2732084 - RNA, 19 nt, Human
cuuccuuggacucauuuua

SEQ ID NO: 2732085 - RNA, 13 nt, Human
cuucgcuccugug

SEQ ID NO: 2732086 - RNA, 14 nt, Human
cuucgcuccugugu

SEQ ID NO: 2732087 - RNA, 15 nt, Human
cuucgcuccuguguc

SEQ ID NO: 2732088 - RNA, 18 nt, Human
cuucugcuucagccuccc

SEQ ID NO: 2732089 - RNA, 16 nt, Human
cuucugcuucagccuc

SEQ ID NO: 2732090 - RNA, 17 nt, Human
cuucugcuucagccucc

SEQ ID NO: 2732091 - RNA, 15 nt, Human
cuucugccauauucu

SEQ ID NO: 2732092 - RNA, 17 nt, Human
cuucugccauauucugu

SEQ ID NO: 2732093 - RNA, 21 nt, Human
cuucugccauauucuguuggc

SEQ ID NO: 2732094 - RNA, 17 nt, Human
cuucuccaggcuguauc

SEQ ID NO: 2732095 - RNA, 16 nt, Human
cuucuccacccugcuc

SEQ ID NO: 2732096 - RNA, 14 nt, Human
cuucuccaggcugu

SEQ ID NO: 2732097 - RNA, 14 nt, Human
cuucuccacccugc

SEQ ID NO: 2732098 - RNA, 15 nt, Human
cuucuccacccugcu

SEQ ID NO: 2732099 - RNA, 22 nt, Human
cuucuccuucaccuuugucccc

SEQ ID NO: 2732100 - RNA, 18 nt, Human
cuucagcgguuuauauaa

SEQ ID NO: 2732101 - RNA, 11 nt, Human
cuucagcugac

SEQ ID NO: 2732102 - RNA, 22 nt, Human
cuuccacaagagcccaggccuc

SEQ ID NO: 2732103 - RNA, 23 nt, Human
cuuccacaagagcccaggccucc

SEQ ID NO: 2732104 - RNA, 11 nt, Human
cuucagugccu

SEQ ID NO: 2732105 - RNA, 12 nt, Human
cuucagugccuu

SEQ ID NO: 2732106 - RNA, 18 nt, Human
cuucauuuccugugucuu

SEQ ID NO: 2732107 - RNA, 13 nt, Human
cuucagugccuua

SEQ ID NO: 2732108 - RNA, 14 nt, Human
cuucagugccuuau

SEQ ID NO: 2732109 - RNA, 19 nt, Human
cuuccagauccuggaaauc

SEQ ID NO: 2732110 - RNA, 22 nt, Human
cuuccaggggugggacacccug

SEQ ID NO: 2732111 - RNA, 24 nt, Human
cuuccaggggugggacacccugug

SEQ ID NO: 2732112 - RNA, 14 nt, Human
cuuccagugaggcu

SEQ ID NO: 2732113 - RNA, 15 nt, Human
cuuccagugaggcuc

SEQ ID NO: 2732114 - RNA, 13 nt, Human
cuuauaauuuaaa

SEQ ID NO: 2732115 - RNA, 21 nt, Human
cuuaggguuaugauuaaguaa

SEQ ID NO: 2732116 - RNA, 17 nt, Human
cuuagguuggcaaaaag

SEQ ID NO: 2732117 - RNA, 14 nt, Human
cuuauaauuuaaaa

SEQ ID NO: 2732118 - RNA, 15 nt, Human
cuuaugauugcagau

SEQ ID NO: 2732119 - RNA, 15 nt, Human
cuuauuuaaugaaag

SEQ ID NO: 2732120 - RNA, 19 nt, Human
cuuagaugcaguucugaag

SEQ ID NO: 2732121 - RNA, 11 nt, Human
cuuagacaguc

SEQ ID NO: 2732122 - RNA, 19 nt, Human
cuuagacagucccugccaa

SEQ ID NO: 2732123 - RNA, 17 nt, Human
cuuagacagucccugcc

SEQ ID NO: 2732124 - RNA, 18 nt, Human
cuuagacagucccugcca

SEQ ID NO: 2732125 - RNA, 15 nt, Human
cuuagaagucacaca

SEQ ID NO: 2732126 - RNA, 14 nt, Human
cuuagacagucccu

SEQ ID NO: 2732127 - RNA, 15 nt, Human
cuuagacagucccug

SEQ ID NO: 2732128 - RNA, 16 nt, Human
cuuagacagucccugc

SEQ ID NO: 2732129 - RNA, 15 nt, Human
cuuacgugaguccug

SEQ ID NO: 2732130 - RNA, 13 nt, Human
cuuacuguacaug

SEQ ID NO: 2732131 - RNA, 16 nt, Human
cuuacuguacaugaaa

SEQ ID NO: 2732132 - RNA, 19 nt, Human
cuguuuuauaauuuuguga

SEQ ID NO: 2732133 - RNA, 21 nt, Human
cuguuuguuucugaaagggac

SEQ ID NO: 2732134 - RNA, 23 nt, Human
cuguuuguuucugaaagggacgc

SEQ ID NO: 2732135 - RNA, 13 nt, Human
cuguuuucucuug

SEQ ID NO: 2732136 - RNA, 14 nt, Human
cuguuuucucuuga

SEQ ID NO: 2732137 - RNA, 21 nt, Human
cuguuuuauuuuaauucaguu

SEQ ID NO: 2732138 - RNA, 17 nt, Human
cuguuuucucuugagag

SEQ ID NO: 2732139 - RNA, 18 nt, Human
cuguuuugaaucucauaa

SEQ ID NO: 2732140 - RNA, 12 nt, Human
cuguuuagauaa

SEQ ID NO: 2732141 - RNA, 18 nt, Human
cuguuuguuucugaaagg

SEQ ID NO: 2732142 - RNA, 16 nt, Human
cuuaaucuaaauggaa

SEQ ID NO: 2732143 - RNA, 14 nt, Human
cuuaaucuaaaugg

SEQ ID NO: 2732144 - RNA, 11 nt, Human
cuuaacuauuc

SEQ ID NO: 2732145 - RNA, 14 nt, Human
cuuaacuucacaua

SEQ ID NO: 2732146 - RNA, 12 nt, Human
cuuaacuucaca

SEQ ID NO: 2732147 - RNA, 22 nt, Human
cuuaacuucacauauugauuuc

SEQ ID NO: 2732148 - RNA, 17 nt, Human
cuuaacuucacauauug

SEQ ID NO: 2732149 - RNA, 16 nt, Human
cuuaacuucacauauu

SEQ ID NO: 2732150 - RNA, 15 nt, Human
cuuaacuucacauau

SEQ ID NO: 2732151 - RNA, 19 nt, Human
gaaaauaacaauaaaagac

SEQ ID NO: 2732152 - RNA, 20 nt, Human
gaaaaguauguuagugcaaa

SEQ ID NO: 2732153 - RNA, 14 nt, Human
gaaaaguauguuag

SEQ ID NO: 2732154 - RNA, 19 nt, Human
gaaaacaugcuacacacug

SEQ ID NO: 2732155 - RNA, 14 nt, Human
gaaaacaaggauga

SEQ ID NO: 2732156 - RNA, 18 nt, Human
gaaaacacuguucucugc

SEQ ID NO: 2732157 - RNA, 19 nt, Human
gaaaacacuguucucugcc

SEQ ID NO: 2732158 - RNA, 18 nt, Human
gaaaacaugcuacacacu

SEQ ID NO: 2732159 - RNA, 16 nt, Human
gaaaacaugcuacaca

SEQ ID NO: 2732160 - RNA, 20 nt, Human
gaaaacacuguucucugccc

SEQ ID NO: 2732161 - RNA, 21 nt, Human
gaaaacacuguucucugcccu

SEQ ID NO: 2732162 - RNA, 16 nt, Human
cuuuuuuagaguugau

SEQ ID NO: 2732163 - RNA, 20 nt, Human
cuuuuguucuugguuuguaa

SEQ ID NO: 2732164 - RNA, 22 nt, Human
cuuuuguucuugguuuguaaau

SEQ ID NO: 2732165 - RNA, 14 nt, Human
cuuuuucauuauuu

SEQ ID NO: 2732166 - RNA, 13 nt, Human
cuuuuucauuauu

SEQ ID NO: 2732167 - RNA, 12 nt, Human
cuuuuucauuau

SEQ ID NO: 2732168 - RNA, 15 nt, Human
cuuuuuuaaauaaau

SEQ ID NO: 2732169 - RNA, 15 nt, Human
cuuuucuguuugcua

SEQ ID NO: 2732170 - RNA, 18 nt, Human
cuuuucugauccaguuuu

SEQ ID NO: 2732171 - RNA, 16 nt, Human
cuuuucugauccaguu

SEQ ID NO: 2732172 - RNA, 21 nt, Human
cuuuguuuguugucagcugaa

SEQ ID NO: 2732173 - RNA, 11 nt, Human
cuuuucugauc

SEQ ID NO: 2732174 - RNA, 15 nt, Human
cuuuucugauccagu

SEQ ID NO: 2732175 - RNA, 14 nt, Human
cuuuucugauccag

SEQ ID NO: 2732176 - RNA, 16 nt, Human
cuuuccucuuuggucu

SEQ ID NO: 2732177 - RNA, 23 nt, Human
cuuugggaggccaaggugggagg

SEQ ID NO: 2732178 - RNA, 23 nt, Human
cuuugugaggaagccgcuggggc

SEQ ID NO: 2732179 - RNA, 13 nt, Human
cuuuguggcuucc

SEQ ID NO: 2732180 - RNA, 12 nt, Human
cuuugugauuuu

SEQ ID NO: 2732181 - RNA, 19 nt, Human
cuuugugaggaagccgcug

SEQ ID NO: 2732182 - RNA, 16 nt, Human
cuuuguucuggcucuu

SEQ ID NO: 2732183 - RNA, 21 nt, Human
cuuuguucuggcucuuccagg

SEQ ID NO: 2732184 - RNA, 12 nt, Human
cuuuggaaagac

SEQ ID NO: 2732185 - RNA, 23 nt, Human
cuuuggaaagacuuuuccaaccc

SEQ ID NO: 2732186 - RNA, 14 nt, Human
cuuuggauaauaag

SEQ ID NO: 2732187 - RNA, 16 nt, Human
cuuuggauaauaagga

SEQ ID NO: 2732188 - RNA, 17 nt, Human
cuuguacuuuauuuucu

SEQ ID NO: 2732189 - RNA, 15 nt, Human
cuugguuuguaaauu

SEQ ID NO: 2732190 - RNA, 14 nt, Human
cuugguuuguaaau

SEQ ID NO: 2732191 - RNA, 18 nt, Human
cuuggggcugaugcaguu

SEQ ID NO: 2732192 - RNA, 16 nt, Human
cuuggggcugaugcag

SEQ ID NO: 2732193 - RNA, 16 nt, Human
cuuggacucauuuuaa

SEQ ID NO: 2732194 - RNA, 18 nt, Human
cuugggccacugugaaga

SEQ ID NO: 2732195 - RNA, 20 nt, Human
cuugggccacugugaagaga

SEQ ID NO: 2732196 - RNA, 17 nt, Human
cuuuaaaaaaaaaauug

SEQ ID NO: 2732197 - RNA, 17 nt, Human
cuuuaccuuuuuuauac

SEQ ID NO: 2732198 - RNA, 20 nt, Human
cuuuaccuuuuuuauacaua

SEQ ID NO: 2732199 - RNA, 19 nt, Human
cuuuaccuuuuuuauacau

SEQ ID NO: 2732200 - RNA, 15 nt, Human
cuuguggucccaccc

SEQ ID NO: 2732201 - RNA, 16 nt, Human
cuuguuaagauaguua

SEQ ID NO: 2732202 - RNA, 16 nt, Human
cuuguggucccacccc

SEQ ID NO: 2732203 - RNA, 19 nt, Human
cuuguggucccaccccaca

SEQ ID NO: 2732204 - RNA, 16 nt, Human
cuuguuagaucuaguu

SEQ ID NO: 2732205 - RNA, 13 nt, Human
cuuguuagaucua

SEQ ID NO: 2732206 - RNA, 22 nt, Human
cuugcccuguuaaaagaugaaa

SEQ ID NO: 2732207 - RNA, 22 nt, Human
cuugcucugcugacagacacag

SEQ ID NO: 2732208 - RNA, 20 nt, Human
cuugcuugauuguauggugg

SEQ ID NO: 2732209 - RNA, 20 nt, Human
cuuggaagcuccgcuuucua

SEQ ID NO: 2732210 - RNA, 14 nt, Human
cuuggaagcuccgc

SEQ ID NO: 2732211 - RNA, 14 nt, Human
cuugccaucccucc

SEQ ID NO: 2732212 - RNA, 17 nt, Human
cuugcaugaggcuagug

SEQ ID NO: 2732213 - RNA, 13 nt, Human
cuugcaugaggcu

SEQ ID NO: 2732214 - RNA, 14 nt, Human
cuugcaugaggcua

SEQ ID NO: 2732215 - RNA, 17 nt, Human
cuugccaucccucccuc

SEQ ID NO: 2732216 - RNA, 15 nt, Human
cuugccaucccuccc

SEQ ID NO: 2732217 - RNA, 16 nt, Human
cuugccaucccucccu

SEQ ID NO: 2732218 - RNA, 19 nt, Human
cuugccaucccucccucca

SEQ ID NO: 2732219 - RNA, 14 nt, Human
cuugcccuguuaaa

SEQ ID NO: 2732220 - RNA, 21 nt, Human
cuugcagacucuacagaggcc

SEQ ID NO: 2732221 - RNA, 20 nt, Human
cuugcagacucuacagaggc

SEQ ID NO: 2732222 - RNA, 20 nt, Human
cuugaguugauucagcucug

SEQ ID NO: 2732223 - RNA, 18 nt, Human
cuugaguugauucagcuc

SEQ ID NO: 2732224 - RNA, 19 nt, Human
cuugaguugauucagcucu

SEQ ID NO: 2732225 - RNA, 15 nt, Human
cuugcaauggcagcc

SEQ ID NO: 2732226 - RNA, 16 nt, Human
cuugcaauggcagccu

SEQ ID NO: 2732227 - RNA, 17 nt, Human
cuugcaauggcagccuu

SEQ ID NO: 2732228 - RNA, 18 nt, Human
cuugcaauggcagccuug

SEQ ID NO: 2732229 - RNA, 15 nt, Human
cuugaggguugggcu

SEQ ID NO: 2732230 - RNA, 17 nt, Human
cuugaggguugggcugg

SEQ ID NO: 2732231 - RNA, 12 nt, Human
cuugagccuggg

SEQ ID NO: 2732232 - RNA, 15 nt, Human
cuugagccugggagg

SEQ ID NO: 2732233 - RNA, 24 nt, Human
gacugcauuauauuuauuacugua

SEQ ID NO: 2732234 - RNA, 13 nt, Human
gacugauucuuca

SEQ ID NO: 2732235 - RNA, 16 nt, Human
gacugauucuucagca

SEQ ID NO: 2732236 - RNA, 18 nt, Human
gacugaguacguugugca

SEQ ID NO: 2732237 - RNA, 15 nt, Human
gacucuacagaggcc

SEQ ID NO: 2732238 - RNA, 21 nt, Human
gacucuacagaggccaugggc

SEQ ID NO: 2732239 - RNA, 16 nt, Human
gacugaauuucuuuug

SEQ ID NO: 2732240 - RNA, 18 nt, Human
gacuacaggcacccacca

SEQ ID NO: 2732241 - RNA, 13 nt, Human
gacuacaggcacc

SEQ ID NO: 2732242 - RNA, 15 nt, Human
gacuacaggcaccca

SEQ ID NO: 2732243 - RNA, 18 nt, Human
gacuccugcaggcagcca

SEQ ID NO: 2732244 - RNA, 19 nt, Human
gacuccugcaggcagccag

SEQ ID NO: 2732245 - RNA, 20 nt, Human
gacuccugcaggcagccagg

SEQ ID NO: 2732246 - RNA, 21 nt, Human
gacuccugcaggcagccaggc

SEQ ID NO: 2732247 - RNA, 14 nt, Human
gacuggcacaguuu

SEQ ID NO: 2732248 - RNA, 22 nt, Human
gacuggcacaguuuucugagaa

SEQ ID NO: 2732249 - RNA, 18 nt, Human
gacuggcacaguuuucug

SEQ ID NO: 2732250 - RNA, 23 nt, Human
gacuggccaagguuuggggaaga

SEQ ID NO: 2732251 - RNA, 23 nt, Human
gacuuacuguacaugaaaacaca

SEQ ID NO: 2732252 - RNA, 18 nt, Human
gacuuacuguacaugaaa

SEQ ID NO: 2732253 - RNA, 12 nt, Human
gacuuacuguac

SEQ ID NO: 2732254 - RNA, 16 nt, Human
gacuuacuguacauga

SEQ ID NO: 2732255 - RNA, 15 nt, Human
gacuuacuguacaug

SEQ ID NO: 2732256 - RNA, 12 nt, Human
gacuucaucccu

SEQ ID NO: 2732257 - RNA, 20 nt, Human
gacuucaucccucuggggcu

SEQ ID NO: 2732258 - RNA, 23 nt, Human
gacggagucccaccuuggcugca

SEQ ID NO: 2732259 - RNA, 13 nt, Human
gacggagucccac

SEQ ID NO: 2732260 - RNA, 21 nt, Human
gacgcugugcugcccugccca

SEQ ID NO: 2732261 - RNA, 22 nt, Human
gacgcugugcugcccugcccac

SEQ ID NO: 2732262 - RNA, 22 nt, Human
gaccuuuaagagaaaugagcug

SEQ ID NO: 2732263 - RNA, 11 nt, Human
gaccuuucaau

SEQ ID NO: 2732264 - RNA, 19 nt, Human
gaccuuucaauaggaaaaa

SEQ ID NO: 2732265 - RNA, 20 nt, Human
gaccuuucaauaggaaaaac

SEQ ID NO: 2732266 - RNA, 16 nt, Human
gacuaacuugucuuug

SEQ ID NO: 2732267 - RNA, 23 nt, Human
gacuaacuugucuuuggacccug

SEQ ID NO: 2732268 - RNA, 11 nt, Human
gacguguuaug

SEQ ID NO: 2732269 - RNA, 14 nt, Human
gacguguuaugacu

SEQ ID NO: 2732270 - RNA, 15 nt, Human
gacguguuaugacuc

SEQ ID NO: 2732271 - RNA, 19 nt, Human
gacccuugccgucuaccug

SEQ ID NO: 2732272 - RNA, 20 nt, Human
gacccuugccgucuaccuga

SEQ ID NO: 2732273 - RNA, 23 nt, Human
gacccuugccgucuaccugaggg

SEQ ID NO: 2732274 - RNA, 14 nt, Human
gaccuucuccuuca

SEQ ID NO: 2732275 - RNA, 15 nt, Human
gaccuucuccuucac

SEQ ID NO: 2732276 - RNA, 16 nt, Human
gaccuucuccuucacc

SEQ ID NO: 2732277 - RNA, 14 nt, Human
gaccuugaacuggg

SEQ ID NO: 2732278 - RNA, 20 nt, Human
gaccuucuccuucaccuuug

SEQ ID NO: 2732279 - RNA, 21 nt, Human
gaccuucuccuucaccuuugu

SEQ ID NO: 2732280 - RNA, 22 nt, Human
gaccagacaccuugacagggca

SEQ ID NO: 2732281 - RNA, 21 nt, Human
gaccagacaccuugacagggc

SEQ ID NO: 2732282 - RNA, 16 nt, Human
gaccacguuucuaaag

SEQ ID NO: 2732283 - RNA, 21 nt, Human
gaccagagcugccaccugccu

SEQ ID NO: 2732284 - RNA, 23 nt, Human
gaccagacaccuugacagggcac

SEQ ID NO: 2732285 - RNA, 20 nt, Human
gaccagcaccaucucuccuc

SEQ ID NO: 2732286 - RNA, 21 nt, Human
gaccagcaccaucucuccucc

SEQ ID NO: 2732287 - RNA, 18 nt, Human
gaccacaaaacuuuucua

SEQ ID NO: 2732288 - RNA, 18 nt, Human
gacccaugcugcccugug

SEQ ID NO: 2732289 - RNA, 19 nt, Human
gacccaugcugcccuguga

SEQ ID NO: 2732290 - RNA, 20 nt, Human
gacccaugcugcccugugag

SEQ ID NO: 2732291 - RNA, 17 nt, Human
gacccaugcugcccugu

SEQ ID NO: 2732292 - RNA, 10 nt, Human
gacccugagg

SEQ ID NO: 2732293 - RNA, 11 nt, Human
gacccugaggc

SEQ ID NO: 2732294 - RNA, 12 nt, Human
gacccugaggcc

SEQ ID NO: 2732295 - RNA, 16 nt, Human
gacccugaggcccaga

SEQ ID NO: 2732296 - RNA, 17 nt, Human
gacccugcccugugggc

SEQ ID NO: 2732297 - RNA, 20 nt, Human
gacccugcccugugggcccc

SEQ ID NO: 2732298 - RNA, 22 nt, Human
gacccugcccugugggccccca

SEQ ID NO: 2732299 - RNA, 23 nt, Human
gacaggaugguucccuugaugaa

SEQ ID NO: 2732300 - RNA, 13 nt, Human
gacaggcaagcac

SEQ ID NO: 2732301 - RNA, 17 nt, Human
gacaggcaagcaccucc

SEQ ID NO: 2732302 - RNA, 18 nt, Human
gacaggcaagcaccuccu

SEQ ID NO: 2732303 - RNA, 23 nt, Human
gacaggcaaugcuggcuguuggc

SEQ ID NO: 2732304 - RNA, 20 nt, Human
gacaggcauguucucugagg

SEQ ID NO: 2732305 - RNA, 21 nt, Human
gacaggcauguucucugagga

SEQ ID NO: 2732306 - RNA, 20 nt, Human
gacaggcaagcaccuccugc

SEQ ID NO: 2732307 - RNA, 21 nt, Human
gacaggcaagcaccuccugcc

SEQ ID NO: 2732308 - RNA, 18 nt, Human
gacaggcaaugcuggcug

SEQ ID NO: 2732309 - RNA, 19 nt, Human
gacaggcaaugcuggcugu

SEQ ID NO: 2732310 - RNA, 16 nt, Human
gacaucaacugcauca

SEQ ID NO: 2732311 - RNA, 23 nt, Human
gacaucaacugcaucaagaugug

SEQ ID NO: 2732312 - RNA, 17 nt, Human
gacauaaaaacaacuuu

SEQ ID NO: 2732313 - RNA, 22 nt, Human
gacaggcauguucucugaggac

SEQ ID NO: 2732314 - RNA, 12 nt, Human
gacagaggcagc

SEQ ID NO: 2732315 - RNA, 20 nt, Human
gacagagcuacacaggggaa

SEQ ID NO: 2732316 - RNA, 23 nt, Human
gacagaggcagccccauucugcc

SEQ ID NO: 2732317 - RNA, 19 nt, Human
gacagagugagacucuguc

SEQ ID NO: 2732318 - RNA, 21 nt, Human
gacagagucucacuguugccc

SEQ ID NO: 2732319 - RNA, 16 nt, Human
gacagagugagacucu

SEQ ID NO: 2732320 - RNA, 16 nt, Human
gacacuagaagauuuu

SEQ ID NO: 2732321 - RNA, 17 nt, Human
gacagacacaggcccgg

SEQ ID NO: 2732322 - RNA, 20 nt, Human
gacagacacaggcccggcuc

SEQ ID NO: 2732323 - RNA, 22 nt, Human
gacagacacaggcccggcucca

SEQ ID NO: 2732324 - RNA, 22 nt, Human
gaauuucccaaagcagugcaug

SEQ ID NO: 2732325 - RNA, 16 nt, Human
gaauuucccaaagcag

SEQ ID NO: 2732326 - RNA, 18 nt, Human
gaauuucccaaagcagug

SEQ ID NO: 2732327 - RNA, 22 nt, Human
gacacgaauauugcugauggug

SEQ ID NO: 2732328 - RNA, 12 nt, Human
gaaguccaagca

SEQ ID NO: 2732329 - RNA, 22 nt, Human
gaaguccaagcauuuagaugua

SEQ ID NO: 2732330 - RNA, 21 nt, Human
gaaguuucugccgcagcccug

SEQ ID NO: 2732331 - RNA, 15 nt, Human
gaagucuuagaugua

SEQ ID NO: 2732332 - RNA, 20 nt, Human
gaaguuucugccgcagcccu

SEQ ID NO: 2732333 - RNA, 18 nt, Human
gaaguacuauaauuuacc

SEQ ID NO: 2732334 - RNA, 15 nt, Human
gaaguacuggagaaa

SEQ ID NO: 2732335 - RNA, 22 nt, Human
gaaguaauaugcacacauuuuu

SEQ ID NO: 2732336 - RNA, 14 nt, Human
gaagcggcuggcag

SEQ ID NO: 2732337 - RNA, 15 nt, Human
gaagggggcugggac

SEQ ID NO: 2732338 - RNA, 16 nt, Human
gaagggggcugggaca

SEQ ID NO: 2732339 - RNA, 19 nt, Human
gaagggggcugggacaugg

SEQ ID NO: 2732340 - RNA, 16 nt, Human
gaauauuuuaacuucc

SEQ ID NO: 2732341 - RNA, 13 nt, Human
gaauaccuguccc

SEQ ID NO: 2732342 - RNA, 15 nt, Human
gaauaccuguccccc

SEQ ID NO: 2732343 - RNA, 23 nt, Human
gaauagcugggacuacaggugug

SEQ ID NO: 2732344 - RNA, 22 nt, Human
gaauagcugggacuacaggugu

SEQ ID NO: 2732345 - RNA, 20 nt, Human
gaauacucuuauaucuauau

SEQ ID NO: 2732346 - RNA, 20 nt, Human
gaaguuugagaucagccugg

SEQ ID NO: 2732347 - RNA, 19 nt, Human
gaauaacauguaauuaagu

SEQ ID NO: 2732348 - RNA, 18 nt, Human
gaauaacauguaauuaag

SEQ ID NO: 2732349 - RNA, 21 nt, Human
gaauacagaggcaacugcauu

SEQ ID NO: 2732350 - RNA, 17 nt, Human
gaauaauacaguaucuc

SEQ ID NO: 2732351 - RNA, 22 nt, Human
gaauuuauuggcuuuucugauc

SEQ ID NO: 2732352 - RNA, 15 nt, Human
gaauuucccaaagca

SEQ ID NO: 2732353 - RNA, 21 nt, Human
gaauuuauuggcuuuucugau

SEQ ID NO: 2732354 - RNA, 20 nt, Human
gaauuuauuggcuuuucuga

SEQ ID NO: 2732355 - RNA, 16 nt, Human
gaauuuauuggcuuuu

SEQ ID NO: 2732356 - RNA, 14 nt, Human
gaauuuauuggcuu

SEQ ID NO: 2732357 - RNA, 22 nt, Human
gaauuuaaauagcuuuuuucuc

SEQ ID NO: 2732358 - RNA, 22 nt, Human
gaauuguaaggaaugauuaauu

SEQ ID NO: 2732359 - RNA, 20 nt, Human
gaaugucagugugacugauc

SEQ ID NO: 2732360 - RNA, 21 nt, Human
gaaugucagugugacugaucu

SEQ ID NO: 2732361 - RNA, 17 nt, Human
gaauucucagaaucuca

SEQ ID NO: 2732362 - RNA, 17 nt, Human
gaauucucuaguuugau

SEQ ID NO: 2732363 - RNA, 14 nt, Human
gaauugaaaaacca

SEQ ID NO: 2732364 - RNA, 23 nt, Human
gaauucuugaaggaaaaugauac

SEQ ID NO: 2732365 - RNA, 11 nt, Human
gaauucuguau

SEQ ID NO: 2732366 - RNA, 19 nt, Human
gaauucucuaguuugauua

SEQ ID NO: 2732367 - RNA, 19 nt, Human
gaaugaagauacugaaaua

SEQ ID NO: 2732368 - RNA, 11 nt, Human
gaaugcagugg

SEQ ID NO: 2732369 - RNA, 21 nt, Human
gaaugaagauacugaaauaaa

SEQ ID NO: 2732370 - RNA, 18 nt, Human
gaaugaagauacugaaau

SEQ ID NO: 2732371 - RNA, 17 nt, Human
gaaugaagauacugaaa

SEQ ID NO: 2732372 - RNA, 23 nt, Human
gaaugaaccacaucuugcucugc

SEQ ID NO: 2732373 - RNA, 22 nt, Human
gaaugaaccacaucuugcucug

SEQ ID NO: 2732374 - RNA, 18 nt, Human
gaaugaaccacaucuugc

SEQ ID NO: 2732375 - RNA, 14 nt, Human
gaaugucaguguga

SEQ ID NO: 2732376 - RNA, 22 nt, Human
gaaugguuuucaaaauaaaaau

SEQ ID NO: 2732377 - RNA, 23 nt, Human
gaaugguccgugcuaaggacuug

SEQ ID NO: 2732378 - RNA, 22 nt, Human
gaaugguccgugcuaaggacuu

SEQ ID NO: 2732379 - RNA, 20 nt, Human
gaaugguccgugcuaaggac

SEQ ID NO: 2732380 - RNA, 21 nt, Human
gaauggcuuuguauagaaccu

SEQ ID NO: 2732381 - RNA, 15 nt, Human
gaagauacugaaaua

SEQ ID NO: 2732382 - RNA, 20 nt, Human
gaagauaauauuaaggaaga

SEQ ID NO: 2732383 - RNA, 20 nt, Human
gaagagguuuuaaagcuucc

SEQ ID NO: 2732384 - RNA, 17 nt, Human
gaagcauuuacuuugug

SEQ ID NO: 2732385 - RNA, 23 nt, Human
gaagcccaggaaaggcuccagga

SEQ ID NO: 2732386 - RNA, 23 nt, Human
gaagcccuucuaccuuccugcaa

SEQ ID NO: 2732387 - RNA, 20 nt, Human
gaagccagcaggcucucagg

SEQ ID NO: 2732388 - RNA, 19 nt, Human
gaagccagcaggcucucag

SEQ ID NO: 2732389 - RNA, 21 nt, Human
gaagccagcaggcucucaggc

SEQ ID NO: 2732390 - RNA, 22 nt, Human
gaagccagcaggcucucaggcc

SEQ ID NO: 2732391 - RNA, 13 nt, Human
gaagcccaggaaa

SEQ ID NO: 2732392 - RNA, 15 nt, Human
gaagcccaggaaagg

SEQ ID NO: 2732393 - RNA, 16 nt, Human
gaagcccaggaaaggc

SEQ ID NO: 2732394 - RNA, 19 nt, Human
gaagcccaggaaaggcucc

SEQ ID NO: 2732395 - RNA, 12 nt, Human
gaagaacugaaa

SEQ ID NO: 2732396 - RNA, 19 nt, Human
gaagacugcauuauauuua

SEQ ID NO: 2732397 - RNA, 17 nt, Human
gaagacugcauuauauu

SEQ ID NO: 2732398 - RNA, 11 nt, Human
gaagacuuugg

SEQ ID NO: 2732399 - RNA, 13 nt, Human
gaagacuuuggaa

SEQ ID NO: 2732400 - RNA, 23 nt, Human
gaacuuugaccucugcagcaaua

SEQ ID NO: 2732401 - RNA, 19 nt, Human
gaagagaaugcacaaacag

SEQ ID NO: 2732402 - RNA, 20 nt, Human
gaagacuuuucuuucagcca

SEQ ID NO: 2732403 - RNA, 14 nt, Human
gaagacuuuggaaa

SEQ ID NO: 2732404 - RNA, 17 nt, Human
gaagacuuuggaaagag

SEQ ID NO: 2732405 - RNA, 17 nt, Human
gaaauuguaauuauauc

SEQ ID NO: 2732406 - RNA, 13 nt, Human
gaacacucugaga

SEQ ID NO: 2732407 - RNA, 14 nt, Human
gaacacucugagac

SEQ ID NO: 2732408 - RNA, 16 nt, Human
gaaauuguauuacaaa

SEQ ID NO: 2732409 - RNA, 15 nt, Human
gaacacucugagacu

SEQ ID NO: 2732410 - RNA, 15 nt, Human
gaacauaaaauacaa

SEQ ID NO: 2732411 - RNA, 18 nt, Human
gaaccuuuugagugccuu

SEQ ID NO: 2732412 - RNA, 19 nt, Human
gaaccuuuugagugccuua

SEQ ID NO: 2732413 - RNA, 21 nt, Human
gaaccuuuugagugccuuaca

SEQ ID NO: 2732414 - RNA, 22 nt, Human
gaaccuuuugagugccuuacac

SEQ ID NO: 2732415 - RNA, 13 nt, Human
gaucuuuaaaaua

SEQ ID NO: 2732416 - RNA, 22 nt, Human
gaucuucuguggguuucuaaag

SEQ ID NO: 2732417 - RNA, 19 nt, Human
gaucuucuuuauaauucua

SEQ ID NO: 2732418 - RNA, 15 nt, Human
gaugaaaugagguca

SEQ ID NO: 2732419 - RNA, 21 nt, Human
gaugaaaugaggucagagccu

SEQ ID NO: 2732420 - RNA, 14 nt, Human
gaugcagugcuucc

SEQ ID NO: 2732421 - RNA, 14 nt, Human
gaugccugguggca

SEQ ID NO: 2732422 - RNA, 15 nt, Human
gaugccugguggcag

SEQ ID NO: 2732423 - RNA, 16 nt, Human
gaugccugguggcagc

SEQ ID NO: 2732424 - RNA, 20 nt, Human
gaugaccuugaaugaugcca

SEQ ID NO: 2732425 - RNA, 23 nt, Human
gaugagaaauaaaguuucuguug

SEQ ID NO: 2732426 - RNA, 18 nt, Human
gaugaccuugaaugaugc

SEQ ID NO: 2732427 - RNA, 14 nt, Human
gaugcaccagcccu

SEQ ID NO: 2732428 - RNA, 14 nt, Human
gaugagaggaaauc

SEQ ID NO: 2732429 - RNA, 15 nt, Human
gaugcaccagcccuu

SEQ ID NO: 2732430 - RNA, 23 nt, Human
gaugcaccagcccuuagcaggga

SEQ ID NO: 2732431 - RNA, 14 nt, Human
gauccuggaaauca

SEQ ID NO: 2732432 - RNA, 12 nt, Human
gauccugagcca

SEQ ID NO: 2732433 - RNA, 13 nt, Human
gaucuaggaagac

SEQ ID NO: 2732434 - RNA, 14 nt, Human
gaucuaggaagacu

SEQ ID NO: 2732435 - RNA, 18 nt, Human
gaucuaggaagacuuugg

SEQ ID NO: 2732436 - RNA, 20 nt, Human
gaucuaggaagacuuuggaa

SEQ ID NO: 2732437 - RNA, 17 nt, Human
gaucuaguucacucucc

SEQ ID NO: 2732438 - RNA, 13 nt, Human
gaucauccacugu

SEQ ID NO: 2732439 - RNA, 18 nt, Human
gauccuaggcauuugcug

SEQ ID NO: 2732440 - RNA, 16 nt, Human
gauccucccaccucag

SEQ ID NO: 2732441 - RNA, 14 nt, Human
gauccuccaggugc

SEQ ID NO: 2732442 - RNA, 17 nt, Human
gauccucccaccucagc

SEQ ID NO: 2732443 - RNA, 21 nt, Human
gauaauaaggaaaaguuuaau

SEQ ID NO: 2732444 - RNA, 20 nt, Human
gauaauaaggaaaaguuuaa

SEQ ID NO: 2732445 - RNA, 24 nt, Human
gauaauacaccacuacauucuguu

SEQ ID NO: 2732446 - RNA, 23 nt, Human
gauaauacaccacuacauucugu

SEQ ID NO: 2732447 - RNA, 12 nt, Human
gauaauacacca

SEQ ID NO: 2732448 - RNA, 22 nt, Human
gauaauaaggaaaaguuuaaua

SEQ ID NO: 2732449 - RNA, 11 nt, Human
gaguucuacau

SEQ ID NO: 2732450 - RNA, 23 nt, Human
gaucagcuuauugucuagugaaa

SEQ ID NO: 2732451 - RNA, 23 nt, Human
gaucacggcucacugcagccuca

SEQ ID NO: 2732452 - RNA, 20 nt, Human
gaucacggcucacugcagcc

SEQ ID NO: 2732453 - RNA, 14 nt, Human
gaucacagccucug

SEQ ID NO: 2732454 - RNA, 17 nt, Human
gauaggucagugcaaau

SEQ ID NO: 2732455 - RNA, 16 nt, Human
gauacaaaagcaugug

SEQ ID NO: 2732456 - RNA, 20 nt, Human
gauagugucccacggugccu

SEQ ID NO: 2732457 - RNA, 18 nt, Human
gauauaugcucugcaugu

SEQ ID NO: 2732458 - RNA, 16 nt, Human
gcaagaugugggcagu

SEQ ID NO: 2732459 - RNA, 12 nt, Human
gcaagauguggg

SEQ ID NO: 2732460 - RNA, 18 nt, Human
gcaagcaccuccugccuc

SEQ ID NO: 2732461 - RNA, 20 nt, Human
gcaagcaccuccugccucga

SEQ ID NO: 2732462 - RNA, 15 nt, Human
gcaagcaccuccugc

SEQ ID NO: 2732463 - RNA, 16 nt, Human
gcaagcaccuccugcc

SEQ ID NO: 2732464 - RNA, 17 nt, Human
gcaauccugcaagaaca

SEQ ID NO: 2732465 - RNA, 13 nt, Human
gcaaggcugucaa

SEQ ID NO: 2732466 - RNA, 14 nt, Human
gcaaggucauuuuu

SEQ ID NO: 2732467 - RNA, 14 nt, Human
gcaaggcugucaau

SEQ ID NO: 2732468 - RNA, 18 nt, Human
gcaaggcugucaauuaca

SEQ ID NO: 2732469 - RNA, 18 nt, Human
gcaacugcauuggcuuug

SEQ ID NO: 2732470 - RNA, 16 nt, Human
gcaaaccaucauugaa

SEQ ID NO: 2732471 - RNA, 17 nt, Human
gcaaaccaucauugaaa

SEQ ID NO: 2732472 - RNA, 19 nt, Human
gcaaaccaucauugaaauc

SEQ ID NO: 2732473 - RNA, 20 nt, Human
gcaaaccaucauugaaaucu

SEQ ID NO: 2732474 - RNA, 21 nt, Human
gcaaaccaucauugaaaucuu

SEQ ID NO: 2732475 - RNA, 17 nt, Human
gaugccugguggcagcu

SEQ ID NO: 2732476 - RNA, 18 nt, Human
gauguucuagcauggcug

SEQ ID NO: 2732477 - RNA, 22 nt, Human
gauuaaguaaugauaacuggaa

SEQ ID NO: 2732478 - RNA, 14 nt, Human
gauuaaguaaugau

SEQ ID NO: 2732479 - RNA, 15 nt, Human
gauucccaagcucug

SEQ ID NO: 2732480 - RNA, 13 nt, Human
gauuacaagcgug

SEQ ID NO: 2732481 - RNA, 21 nt, Human
gauuacaagcgugagccacug

SEQ ID NO: 2732482 - RNA, 13 nt, Human
gauucagacagcu

SEQ ID NO: 2732483 - RNA, 14 nt, Human
gauucagacagcug

SEQ ID NO: 2732484 - RNA, 17 nt, Human
gauucagacagcugccu

SEQ ID NO: 2732485 - RNA, 18 nt, Human
gauucagacagcugccug

SEQ ID NO: 2732486 - RNA, 16 nt, Human
gauugcaacaggcugg

SEQ ID NO: 2732487 - RNA, 20 nt, Human
gauucuuuccugaggcuggg

SEQ ID NO: 2732488 - RNA, 22 nt, Human
gauucuuuccugaggcugggcu

SEQ ID NO: 2732489 - RNA, 16 nt, Human
gauucccaagcucugc

SEQ ID NO: 2732490 - RNA, 17 nt, Human
gauucccaagcucugcu

SEQ ID NO: 2732491 - RNA, 19 nt, Human
gauucuuuccugaggcugg

SEQ ID NO: 2732492 - RNA, 15 nt, Human
gauugcaacaggcug

SEQ ID NO: 2732493 - RNA, 17 nt, Human
gauugcaacaggcuggg

SEQ ID NO: 2732494 - RNA, 18 nt, Human
gauugcaacaggcugggc

SEQ ID NO: 2732495 - RNA, 19 nt, Human
gauuuguuaaugauagcua

SEQ ID NO: 2732496 - RNA, 21 nt, Human
gauuucuguuuagauaauaca

SEQ ID NO: 2732497 - RNA, 22 nt, Human
gauuucuguuuagauaauacac

SEQ ID NO: 2732498 - RNA, 12 nt, Human
gcagaaggaaga

SEQ ID NO: 2732499 - RNA, 13 nt, Human
gcagaaggaagac

SEQ ID NO: 2732500 - RNA, 14 nt, Human
gcagaaggaagacu

SEQ ID NO: 2732501 - RNA, 15 nt, Human
gcacugucaagauga

SEQ ID NO: 2732502 - RNA, 22 nt, Human
gcacugggcuuggggaccagag

SEQ ID NO: 2732503 - RNA, 23 nt, Human
gcacugggcuuggggaccagagc

SEQ ID NO: 2732504 - RNA, 14 nt, Human
gcacugggcuuggg

SEQ ID NO: 2732505 - RNA, 17 nt, Human
gcacuaaggugugcucu

SEQ ID NO: 2732506 - RNA, 18 nt, Human
gcacuaaggugugcucug

SEQ ID NO: 2732507 - RNA, 20 nt, Human
gcacagccucuuagaugcag

SEQ ID NO: 2732508 - RNA, 13 nt, Human
gcaaugaccuuuc

SEQ ID NO: 2732509 - RNA, 14 nt, Human
gcaaugaccuuuca

SEQ ID NO: 2732510 - RNA, 19 nt, Human
gcacagcuaacauggaagu

SEQ ID NO: 2732511 - RNA, 16 nt, Human
gcacagcuucauuucc

SEQ ID NO: 2732512 - RNA, 22 nt, Human
gcacaugccucucucaggccaa

SEQ ID NO: 2732513 - RNA, 14 nt, Human
gcacccggccccug

SEQ ID NO: 2732514 - RNA, 15 nt, Human
gcacccggccccugc

SEQ ID NO: 2732515 - RNA, 17 nt, Human
gcacccggccccugcug

SEQ ID NO: 2732516 - RNA, 14 nt, Human
gcaccuccugccuc

SEQ ID NO: 2732517 - RNA, 15 nt, Human
gcaccuccugccucg

SEQ ID NO: 2732518 - RNA, 19 nt, Human
gcaccacugcacuccagcc

SEQ ID NO: 2732519 - RNA, 18 nt, Human
gcagauggaaugcugugu

SEQ ID NO: 2732520 - RNA, 22 nt, Human
gcagauggaaugcuguguuaaa

SEQ ID NO: 2732521 - RNA, 19 nt, Human
gcagaguugaagacagagc

SEQ ID NO: 2732522 - RNA, 16 nt, Human
gcagaguugaagacag

SEQ ID NO: 2732523 - RNA, 17 nt, Human
gcagaguugaagacaga

SEQ ID NO: 2732524 - RNA, 12 nt, Human
gcagcaauaaag

SEQ ID NO: 2732525 - RNA, 17 nt, Human
gcagagaccaucccuga

SEQ ID NO: 2732526 - RNA, 14 nt, Human
gcagagaccauccc

SEQ ID NO: 2732527 - RNA, 15 nt, Human
gcagagaccaucccu

SEQ ID NO: 2732528 - RNA, 15 nt, Human
gcagaguugaagaca

SEQ ID NO: 2732529 - RNA, 19 nt, Human
gcagagaaugaaagggccc

SEQ ID NO: 2732530 - RNA, 20 nt, Human
gcagagaaugaaagggccca

SEQ ID NO: 2732531 - RNA, 21 nt, Human
gcagagaaugaaagggcccag

SEQ ID NO: 2732532 - RNA, 21 nt, Human
gcagagaauucucuuauccaa

SEQ ID NO: 2732533 - RNA, 22 nt, Human
gcagagaaugaaagggcccaga

SEQ ID NO: 2732534 - RNA, 23 nt, Human
gcagagaaugaaagggcccagag

SEQ ID NO: 2732535 - RNA, 20 nt, Human
gcagcagggagggcuucugc

SEQ ID NO: 2732536 - RNA, 19 nt, Human
gcagccucaaccuccuggg

SEQ ID NO: 2732537 - RNA, 20 nt, Human
gcagccucaaccuccugggc

SEQ ID NO: 2732538 - RNA, 21 nt, Human
gcagccucaaccuccugggcu

SEQ ID NO: 2732539 - RNA, 22 nt, Human
gcagccucaaccuccugggcua

SEQ ID NO: 2732540 - RNA, 14 nt, Human
gcagccuggacccu

SEQ ID NO: 2732541 - RNA, 15 nt, Human
gcaggcuacugucag

SEQ ID NO: 2732542 - RNA, 20 nt, Human
gcaggauucuuccucccucc

SEQ ID NO: 2732543 - RNA, 16 nt, Human
gcagggagggcuucug

SEQ ID NO: 2732544 - RNA, 12 nt, Human
gcagggcucagc

SEQ ID NO: 2732545 - RNA, 23 nt, Human
gcagugcuuccaaggauggacca

SEQ ID NO: 2732546 - RNA, 16 nt, Human
gcagugggagcugccu

SEQ ID NO: 2732547 - RNA, 13 nt, Human
gcaguucugaaga

SEQ ID NO: 2732548 - RNA, 18 nt, Human
gcauagauucccugagca

SEQ ID NO: 2732549 - RNA, 17 nt, Human
gcagugggagcugccug

SEQ ID NO: 2732550 - RNA, 18 nt, Human
gcagugggagcugccugu

SEQ ID NO: 2732551 - RNA, 20 nt, Human
gcauauucaggaagcucagg

SEQ ID NO: 2732552 - RNA, 17 nt, Human
gcauauucaggaagcuc

SEQ ID NO: 2732553 - RNA, 18 nt, Human
gcauauucaggaagcuca

SEQ ID NO: 2732554 - RNA, 21 nt, Human
gcaucaagaugugacauguuu

SEQ ID NO: 2732555 - RNA, 16 nt, Human
gcauauauuuuuauau

SEQ ID NO: 2732556 - RNA, 11 nt, Human
gcauauauuuu

SEQ ID NO: 2732557 - RNA, 15 nt, Human
gcauauauuuuuaua

SEQ ID NO: 2732558 - RNA, 14 nt, Human
gcauauauuuuuau

SEQ ID NO: 2732559 - RNA, 15 nt, Human
gcauauucaggaagc

SEQ ID NO: 2732560 - RNA, 17 nt, Human
gcaugccuggauggggc

SEQ ID NO: 2732561 - RNA, 22 nt, Human
gcaugccuggauggggcugcac

SEQ ID NO: 2732562 - RNA, 23 nt, Human
gcaugaaguaauaugcacacauu

SEQ ID NO: 2732563 - RNA, 16 nt, Human
gcaucaggccaggccc

SEQ ID NO: 2732564 - RNA, 17 nt, Human
gcaucaggccaggcccu

SEQ ID NO: 2732565 - RNA, 13 nt, Human
gcaucaggccagg

SEQ ID NO: 2732566 - RNA, 15 nt, Human
gcaucaggccaggcc

SEQ ID NO: 2732567 - RNA, 17 nt, Human
gcauguuugugauugac

SEQ ID NO: 2732568 - RNA, 15 nt, Human
gcaugcugucccuua

SEQ ID NO: 2732569 - RNA, 19 nt, Human
gccaaacucaccugccccu

SEQ ID NO: 2732570 - RNA, 21 nt, Human
gccaaacucaccugccccuca

SEQ ID NO: 2732571 - RNA, 14 nt, Human
gccaaaggaagcac

SEQ ID NO: 2732572 - RNA, 16 nt, Human
gccaaaggaagcacau

SEQ ID NO: 2732573 - RNA, 20 nt, Human
gccaaaggaagcacaugccu

SEQ ID NO: 2732574 - RNA, 22 nt, Human
gcauuuugcuaaaugugaauga

SEQ ID NO: 2732575 - RNA, 12 nt, Human
gcauuccccacu

SEQ ID NO: 2732576 - RNA, 12 nt, Human
gcauuccccagg

SEQ ID NO: 2732577 - RNA, 23 nt, Human
gcauuugcugaauacagaggcaa

SEQ ID NO: 2732578 - RNA, 17 nt, Human
gcauuugcugaauacag

SEQ ID NO: 2732579 - RNA, 21 nt, Human
gcauuuggugguuucagaaau

SEQ ID NO: 2732580 - RNA, 18 nt, Human
gcccucuccugggcagcu

SEQ ID NO: 2732581 - RNA, 19 nt, Human
gcccucuccugggcagcug

SEQ ID NO: 2732582 - RNA, 21 nt, Human
gcccucuccugggcagcugcc

SEQ ID NO: 2732583 - RNA, 22 nt, Human
gcccucugcccacucccugcaa

SEQ ID NO: 2732584 - RNA, 15 nt, Human
gcccucuccugggca

SEQ ID NO: 2732585 - RNA, 16 nt, Human
gcccucuccugggcag

SEQ ID NO: 2732586 - RNA, 21 nt, Human
gcccgggcucugccucccauc

SEQ ID NO: 2732587 - RNA, 19 nt, Human
gcccgggcucugccuccca

SEQ ID NO: 2732588 - RNA, 20 nt, Human
gcccgggcucugccucccau

SEQ ID NO: 2732589 - RNA, 20 nt, Human
gccccuucugacccaugcug

SEQ ID NO: 2732590 - RNA, 19 nt, Human
gccccuucugacccaugcu

SEQ ID NO: 2732591 - RNA, 12 nt, Human
gcccggcuccag

SEQ ID NO: 2732592 - RNA, 13 nt, Human
gcccggcuccagg

SEQ ID NO: 2732593 - RNA, 14 nt, Human
gcccggcuccaggc

SEQ ID NO: 2732594 - RNA, 15 nt, Human
gcccggcuccaggcu

SEQ ID NO: 2732595 - RNA, 12 nt, Human
gcccgggcucug

SEQ ID NO: 2732596 - RNA, 13 nt, Human
gcccgggcucugc

SEQ ID NO: 2732597 - RNA, 14 nt, Human
gcccgggcucugcc

SEQ ID NO: 2732598 - RNA, 15 nt, Human
gcccgggcucugccu

SEQ ID NO: 2732599 - RNA, 18 nt, Human
gcccgggcucugccuccc

SEQ ID NO: 2732600 - RNA, 23 nt, Human
gccccuggcagccccuguucugg

SEQ ID NO: 2732601 - RNA, 19 nt, Human
gccccucagggucccuggu

SEQ ID NO: 2732602 - RNA, 21 nt, Human
gccccucagggucccuggugg

SEQ ID NO: 2732603 - RNA, 23 nt, Human
gccccucaacucuccuccagagu

SEQ ID NO: 2732604 - RNA, 22 nt, Human
gccccgaggccuucucugaagg

SEQ ID NO: 2732605 - RNA, 14 nt, Human
gccccgcccaggcu

SEQ ID NO: 2732606 - RNA, 23 nt, Human
gccccgaggccuucucugaagga

SEQ ID NO: 2732607 - RNA, 22 nt, Human
gccccauucugccugcccaggc

SEQ ID NO: 2732608 - RNA, 23 nt, Human
gccccauucugccugcccaggcc

SEQ ID NO: 2732609 - RNA, 11 nt, Human
gcccaggcugg

SEQ ID NO: 2732610 - RNA, 12 nt, Human
gcccaggaaagg

SEQ ID NO: 2732611 - RNA, 15 nt, Human
gcccaggaaaggcuc

SEQ ID NO: 2732612 - RNA, 16 nt, Human
gcccaggaaaggcucc

SEQ ID NO: 2732613 - RNA, 18 nt, Human
gcccaggccuccuacagc

SEQ ID NO: 2732614 - RNA, 22 nt, Human
gcccagucuggaaugcaguggu

SEQ ID NO: 2732615 - RNA, 20 nt, Human
gcccagucuggaaugcagug

SEQ ID NO: 2732616 - RNA, 16 nt, Human
gcccaggcuggcgugc

SEQ ID NO: 2732617 - RNA, 14 nt, Human
gcccaggcuggcgu

SEQ ID NO: 2732618 - RNA, 15 nt, Human
gcccaggcuggcgug

SEQ ID NO: 2732619 - RNA, 23 nt, Human
gccccauccucuguacagagccc

SEQ ID NO: 2732620 - RNA, 17 nt, Human
gccccauucugccugcc

SEQ ID NO: 2732621 - RNA, 18 nt, Human
gccccauucugccugccc

SEQ ID NO: 2732622 - RNA, 20 nt, Human
gccccauucugccugcccag

SEQ ID NO: 2732623 - RNA, 21 nt, Human
gccccauucugccugcccagg

SEQ ID NO: 2732624 - RNA, 15 nt, Human
gccccagugcccaca

SEQ ID NO: 2732625 - RNA, 16 nt, Human
gccccagugcccacag

SEQ ID NO: 2732626 - RNA, 17 nt, Human
gccccagugcccacagg

SEQ ID NO: 2732627 - RNA, 21 nt, Human
gccccagugcccacaggauca

SEQ ID NO: 2732628 - RNA, 16 nt, Human
gcccacagcuguauga

SEQ ID NO: 2732629 - RNA, 15 nt, Human
gcccaaagaugcagc

SEQ ID NO: 2732630 - RNA, 16 nt, Human
gcccaaagaugcagcc

SEQ ID NO: 2732631 - RNA, 15 nt, Human
gcccaccccucaaca

SEQ ID NO: 2732632 - RNA, 19 nt, Human
gcccacaggaucagucuga

SEQ ID NO: 2732633 - RNA, 13 nt, Human
gcccacaggauca

SEQ ID NO: 2732634 - RNA, 18 nt, Human
gcccacaggaucagucug

SEQ ID NO: 2732635 - RNA, 22 nt, Human
gccauuuaaagcuuauuaaaac

SEQ ID NO: 2732636 - RNA, 17 nt, Human
gccauuucuuccacaag

SEQ ID NO: 2732637 - RNA, 20 nt, Human
gccauuucuuccacaagagc

SEQ ID NO: 2732638 - RNA, 22 nt, Human
gccauuucuuccacaagagccc

SEQ ID NO: 2732639 - RNA, 15 nt, Human
gccaucccucccucc

SEQ ID NO: 2732640 - RNA, 16 nt, Human
gccaucccucccucca

SEQ ID NO: 2732641 - RNA, 11 nt, Human
gccaucccucc

SEQ ID NO: 2732642 - RNA, 13 nt, Human
gccaucccucccu

SEQ ID NO: 2732643 - RNA, 14 nt, Human
gccaucccucccuc

SEQ ID NO: 2732644 - RNA, 14 nt, Human
gccauccagguuca

SEQ ID NO: 2732645 - RNA, 17 nt, Human
gccaucccagccccaau

SEQ ID NO: 2732646 - RNA, 13 nt, Human
gccaucccagccc

SEQ ID NO: 2732647 - RNA, 14 nt, Human
gccaucccagcccc

SEQ ID NO: 2732648 - RNA, 15 nt, Human
gccaucccagcccca

SEQ ID NO: 2732649 - RNA, 16 nt, Human
gccaucccagccccaa

SEQ ID NO: 2732650 - RNA, 19 nt, Human
gccauccagguucagcuug

SEQ ID NO: 2732651 - RNA, 20 nt, Human
gccauccagguucagcuugu

SEQ ID NO: 2732652 - RNA, 23 nt, Human
gccaggggaaaaucagccugcuc

SEQ ID NO: 2732653 - RNA, 21 nt, Human
gccaggggaaaaucagccugc

SEQ ID NO: 2732654 - RNA, 22 nt, Human
gccaggggaaaaucagccugcu

SEQ ID NO: 2732655 - RNA, 17 nt, Human
gccaggggaaaaucagc

SEQ ID NO: 2732656 - RNA, 19 nt, Human
gccaggaagccagcaggcu

SEQ ID NO: 2732657 - RNA, 11 nt, Human
gccaggaagcc

SEQ ID NO: 2732658 - RNA, 17 nt, Human
gccaggaagccagcagg

SEQ ID NO: 2732659 - RNA, 18 nt, Human
gccaggaagccagcaggc

SEQ ID NO: 2732660 - RNA, 16 nt, Human
gccacggccaggccag

SEQ ID NO: 2732661 - RNA, 21 nt, Human
gccacuauuguuagucucuug

SEQ ID NO: 2732662 - RNA, 20 nt, Human
gccacuauuguuagucucuu

SEQ ID NO: 2732663 - RNA, 14 nt, Human
gccacggccaggcc

SEQ ID NO: 2732664 - RNA, 15 nt, Human
gccacggccaggcca

SEQ ID NO: 2732665 - RNA, 17 nt, Human
gccacugcaccgggcca

SEQ ID NO: 2732666 - RNA, 18 nt, Human
gccacugcaccgggccac

SEQ ID NO: 2732667 - RNA, 18 nt, Human
gccagagggagugacaga

SEQ ID NO: 2732668 - RNA, 12 nt, Human
gccagagacaca

SEQ ID NO: 2732669 - RNA, 15 nt, Human
gccagagacacaagc

SEQ ID NO: 2732670 - RNA, 17 nt, Human
gccagauucuuuccuga

SEQ ID NO: 2732671 - RNA, 19 nt, Human
gccagagggagugacagag

SEQ ID NO: 2732672 - RNA, 20 nt, Human
gccagagggagugacagagg

SEQ ID NO: 2732673 - RNA, 16 nt, Human
gccagauucuuuccug

SEQ ID NO: 2732674 - RNA, 21 nt, Human
gccagccgagauagccaaggc

SEQ ID NO: 2732675 - RNA, 20 nt, Human
gccagccgagauagccaagg

SEQ ID NO: 2732676 - RNA, 12 nt, Human
gccagccuugac

SEQ ID NO: 2732677 - RNA, 15 nt, Human
gccagcugcuugggc

SEQ ID NO: 2732678 - RNA, 14 nt, Human
gccagcugcuuggg

SEQ ID NO: 2732679 - RNA, 14 nt, Human
gccagccuugacca

SEQ ID NO: 2732680 - RNA, 20 nt, Human
gccagccuugaccauucucc

SEQ ID NO: 2732681 - RNA, 21 nt, Human
gccagccuugaccauucucca

SEQ ID NO: 2732682 - RNA, 22 nt, Human
gccagccuugaccauucuccac

SEQ ID NO: 2732683 - RNA, 22 nt, Human
gccuuuuucauuauuuuauuau

SEQ ID NO: 2732684 - RNA, 20 nt, Human
gccuuuuucauuauuuuauu

SEQ ID NO: 2732685 - RNA, 16 nt, Human
gccuuuuucauuauuu

SEQ ID NO: 2732686 - RNA, 12 nt, Human
gccuuuuucauu

SEQ ID NO: 2732687 - RNA, 16 nt, Human
gccugguggcagcugc

SEQ ID NO: 2732688 - RNA, 17 nt, Human
gccugguggcagcugcg

SEQ ID NO: 2732689 - RNA, 15 nt, Human
gccugguggcagcug

SEQ ID NO: 2732690 - RNA, 23 nt, Human
gccuuauggaacacucugagacu

SEQ ID NO: 2732691 - RNA, 21 nt, Human
gccuuauggaacacucugaga

SEQ ID NO: 2732692 - RNA, 22 nt, Human
gccuuauggaacacucugagac

SEQ ID NO: 2732693 - RNA, 19 nt, Human
gccuuacccucauguucuu

SEQ ID NO: 2732694 - RNA, 20 nt, Human
gccuuagaagucacacagua

SEQ ID NO: 2732695 - RNA, 14 nt, Human
gcgugagccacugc

SEQ ID NO: 2732696 - RNA, 15 nt, Human
gcgugagccacugca

SEQ ID NO: 2732697 - RNA, 14 nt, Human
gcuaacauggaagu

SEQ ID NO: 2732698 - RNA, 17 nt, Human
gcuaacauggaaguacu

SEQ ID NO: 2732699 - RNA, 18 nt, Human
gcuaacauggaaguacua

SEQ ID NO: 2732700 - RNA, 22 nt, Human
gcuacacaggggaaaagaggag

SEQ ID NO: 2732701 - RNA, 22 nt, Human
gcuagacuggugacugauucuu

SEQ ID NO: 2732702 - RNA, 20 nt, Human
gcuagacuggugacugauuc

SEQ ID NO: 2732703 - RNA, 19 nt, Human
gcuagacuggugacugauu

SEQ ID NO: 2732704 - RNA, 16 nt, Human
gcuagacuggugacug

SEQ ID NO: 2732705 - RNA, 15 nt, Human
gcuagacuggugacu

SEQ ID NO: 2732706 - RNA, 13 nt, Human
gcuagacugguga

SEQ ID NO: 2732707 - RNA, 21 nt, Human
gcuagacgagcaggcuucuuc

SEQ ID NO: 2732708 - RNA, 22 nt, Human
gcuagacgagcaggcuucuucc

SEQ ID NO: 2732709 - RNA, 23 nt, Human
gcggggacagcuccuucuguccu

SEQ ID NO: 2732710 - RNA, 20 nt, Human
gcgguccacccaggagcccc

SEQ ID NO: 2732711 - RNA, 23 nt, Human
gcgguccacccaggagccccgag

SEQ ID NO: 2732712 - RNA, 19 nt, Human
gcggaaugaaccacaucuu

SEQ ID NO: 2732713 - RNA, 16 nt, Human
gcggacagccacggcc

SEQ ID NO: 2732714 - RNA, 19 nt, Human
gcggacagccacggccagg

SEQ ID NO: 2732715 - RNA, 18 nt, Human
gcggggacagcuccuucu

SEQ ID NO: 2732716 - RNA, 19 nt, Human
gcggggacagcuccuucug

SEQ ID NO: 2732717 - RNA, 23 nt, Human
gcggacagccacggccaggccag

SEQ ID NO: 2732718 - RNA, 17 nt, Human
gcgcugccccuggcagc

SEQ ID NO: 2732719 - RNA, 14 nt, Human
gcgcugccccuggc

SEQ ID NO: 2732720 - RNA, 20 nt, Human
gcgccuacaggagugagcac

SEQ ID NO: 2732721 - RNA, 21 nt, Human
gcgccuacaggagugagcacu

SEQ ID NO: 2732722 - RNA, 18 nt, Human
gcgccuacaggagugagc

SEQ ID NO: 2732723 - RNA, 11 nt, Human
gccuccccucc

SEQ ID NO: 2732724 - RNA, 12 nt, Human
gccuccccuccu

SEQ ID NO: 2732725 - RNA, 13 nt, Human
gccuccccuccuc

SEQ ID NO: 2732726 - RNA, 14 nt, Human
gccuccccuccucu

SEQ ID NO: 2732727 - RNA, 18 nt, Human
gccucccgaauagcuggg

SEQ ID NO: 2732728 - RNA, 19 nt, Human
gccucccgaauagcuggga

SEQ ID NO: 2732729 - RNA, 20 nt, Human
gccucccgaauagcugggac

SEQ ID NO: 2732730 - RNA, 21 nt, Human
gccucccgaguagcugggacu

SEQ ID NO: 2732731 - RNA, 23 nt, Human
gccucccgaguagcugggacuac

SEQ ID NO: 2732732 - RNA, 22 nt, Human
gccucagccucccaaagugcug

SEQ ID NO: 2732733 - RNA, 12 nt, Human
gccucagccucc

SEQ ID NO: 2732734 - RNA, 14 nt, Human
gccucagccuccca

SEQ ID NO: 2732735 - RNA, 15 nt, Human
gccucucccaucacu

SEQ ID NO: 2732736 - RNA, 11 nt, Human
gccugcccagg

SEQ ID NO: 2732737 - RNA, 12 nt, Human
gccugcccaggc

SEQ ID NO: 2732738 - RNA, 14 nt, Human
gccuggacccugug

SEQ ID NO: 2732739 - RNA, 15 nt, Human
gccucugacacacag

SEQ ID NO: 2732740 - RNA, 16 nt, Human
gccucugacacacagc

SEQ ID NO: 2732741 - RNA, 16 nt, Human
gccucugcacuccccu

SEQ ID NO: 2732742 - RNA, 17 nt, Human
gccucugcacuccccug

SEQ ID NO: 2732743 - RNA, 18 nt, Human
gccucugcacuccccugc

SEQ ID NO: 2732744 - RNA, 19 nt, Human
gccucugcacuccccugcu

SEQ ID NO: 2732745 - RNA, 20 nt, Human
gccucugcacuccccugcug

SEQ ID NO: 2732746 - RNA, 15 nt, Human
gccucugcacucccc

SEQ ID NO: 2732747 - RNA, 21 nt, Human
gccucugcacuccccugcugg

SEQ ID NO: 2732748 - RNA, 19 nt, Human
gcccuucuuuccacagaag

SEQ ID NO: 2732749 - RNA, 23 nt, Human
gcccuucucuccagccccuggau

SEQ ID NO: 2732750 - RNA, 13 nt, Human
gcccuucucucca

SEQ ID NO: 2732751 - RNA, 16 nt, Human
gccgagauagccaagg

SEQ ID NO: 2732752 - RNA, 13 nt, Human
gccgcagcccugc

SEQ ID NO: 2732753 - RNA, 17 nt, Human
gccgagauagccaaggc

SEQ ID NO: 2732754 - RNA, 15 nt, Human
gccgcagcccugcag

SEQ ID NO: 2732755 - RNA, 16 nt, Human
gccgcagcccugcaga

SEQ ID NO: 2732756 - RNA, 17 nt, Human
gccgcagcccugcagag

SEQ ID NO: 2732757 - RNA, 13 nt, Human
gccuaaggacuuc

SEQ ID NO: 2732758 - RNA, 12 nt, Human
gccuaaggacuu

SEQ ID NO: 2732759 - RNA, 18 nt, Human
gccuaaggacuucuuuaa

SEQ ID NO: 2732760 - RNA, 15 nt, Human
gccuaaggacuucuu

SEQ ID NO: 2732761 - RNA, 14 nt, Human
gccuaaggacuucu

SEQ ID NO: 2732762 - RNA, 22 nt, Human
gccucaagugauucuccugccu

SEQ ID NO: 2732763 - RNA, 24 nt, Human
gccucaagugauucuccugccuca

SEQ ID NO: 2732764 - RNA, 18 nt, Human
gccucagcauccuggcac

SEQ ID NO: 2732765 - RNA, 17 nt, Human
gccucagcauccuggca

SEQ ID NO: 2732766 - RNA, 21 nt, Human
gccucagcauccuggcacccg

SEQ ID NO: 2732767 - RNA, 18 nt, Human
gccgucuaccugaggggc

SEQ ID NO: 2732768 - RNA, 20 nt, Human
gccgucuaccugaggggccu

SEQ ID NO: 2732769 - RNA, 22 nt, Human
gccgucuaccugaggggccucu

SEQ ID NO: 2732770 - RNA, 23 nt, Human
gccgucuaccugaggggccucuu

SEQ ID NO: 2732771 - RNA, 11 nt, Human
gccuaaaucca

SEQ ID NO: 2732772 - RNA, 22 nt, Human
ggcagcugccuccccuccucug

SEQ ID NO: 2732773 - RNA, 21 nt, Human
ggcagcuugaggguugggcug

SEQ ID NO: 2732774 - RNA, 18 nt, Human
ggcagcugccuccccucc

SEQ ID NO: 2732775 - RNA, 21 nt, Human
ggcagcugccuccccuccucu

SEQ ID NO: 2732776 - RNA, 19 nt, Human
ggcagcugcgguccaccca

SEQ ID NO: 2732777 - RNA, 16 nt, Human
ggcagcucaccucucc

SEQ ID NO: 2732778 - RNA, 22 nt, Human
ggcagcucaccucucccuugga

SEQ ID NO: 2732779 - RNA, 18 nt, Human
ggcagcucaccucucccu

SEQ ID NO: 2732780 - RNA, 21 nt, Human
ggcagcucaccucucccuugg

SEQ ID NO: 2732781 - RNA, 23 nt, Human
ggcaggucuugaacuccuggccu

SEQ ID NO: 2732782 - RNA, 13 nt, Human
ggcagguccaggg

SEQ ID NO: 2732783 - RNA, 17 nt, Human
ggcagaggaaagcaaag

SEQ ID NO: 2732784 - RNA, 23 nt, Human
ggcagauacaggaaaagcugcug

SEQ ID NO: 2732785 - RNA, 23 nt, Human
ggcagaguugaagacagagcuac

SEQ ID NO: 2732786 - RNA, 18 nt, Human
ggcaacugcauuggcuuu

SEQ ID NO: 2732787 - RNA, 19 nt, Human
ggcaacugcauuggcuuug

SEQ ID NO: 2732788 - RNA, 15 nt, Human
ggcaaggcugucaau

SEQ ID NO: 2732789 - RNA, 21 nt, Human
ggaucagucugauucccaagc

SEQ ID NO: 2732790 - RNA, 19 nt, Human
ggcaacccccagccugcua

SEQ ID NO: 2732791 - RNA, 16 nt, Human
ggcaaggcugucaauu

SEQ ID NO: 2732792 - RNA, 15 nt, Human
ggcacccggccccug

SEQ ID NO: 2732793 - RNA, 16 nt, Human
ggcacccggccccugc

SEQ ID NO: 2732794 - RNA, 20 nt, Human
ggcagagcagagaccauccc

SEQ ID NO: 2732795 - RNA, 15 nt, Human
ggcagagcagagacc

SEQ ID NO: 2732796 - RNA, 16 nt, Human
ggcagagcagagacca

SEQ ID NO: 2732797 - RNA, 12 nt, Human
ggcagagcagag

SEQ ID NO: 2732798 - RNA, 13 nt, Human
ggccaugggccuc

SEQ ID NO: 2732799 - RNA, 16 nt, Human
ggccccucaggguccc

SEQ ID NO: 2732800 - RNA, 19 nt, Human
ggccccucagggucccugg

SEQ ID NO: 2732801 - RNA, 20 nt, Human
ggccccucagggucccuggu

SEQ ID NO: 2732802 - RNA, 21 nt, Human
ggccccucagggucccuggug

SEQ ID NO: 2732803 - RNA, 17 nt, Human
ggccccugccacccugg

SEQ ID NO: 2732804 - RNA, 18 nt, Human
ggccccugccacccuggg

SEQ ID NO: 2732805 - RNA, 13 nt, Human
ggccccugcccgg

SEQ ID NO: 2732806 - RNA, 13 nt, Human
ggccccugccacc

SEQ ID NO: 2732807 - RNA, 16 nt, Human
ggccccugccacccug

SEQ ID NO: 2732808 - RNA, 12 nt, Human
ggccccugccac

SEQ ID NO: 2732809 - RNA, 15 nt, Human
ggcagguuggugggg

SEQ ID NO: 2732810 - RNA, 23 nt, Human
ggcauguucucugaggacacuaa

SEQ ID NO: 2732811 - RNA, 15 nt, Human
ggcauuccccaggag

SEQ ID NO: 2732812 - RNA, 16 nt, Human
ggccacaagacccuug

SEQ ID NO: 2732813 - RNA, 17 nt, Human
ggccacaagacccuugu

SEQ ID NO: 2732814 - RNA, 16 nt, Human
ggccaccugcggugcu

SEQ ID NO: 2732815 - RNA, 22 nt, Human
ggccaccugcggugcuaucucc

SEQ ID NO: 2732816 - RNA, 11 nt, Human
ggccacuguga

SEQ ID NO: 2732817 - RNA, 16 nt, Human
ggccacugugaagaga

SEQ ID NO: 2732818 - RNA, 14 nt, Human
ggccaggagccucc

SEQ ID NO: 2732819 - RNA, 16 nt, Human
ggccaggagccuccug

SEQ ID NO: 2732820 - RNA, 11 nt, Human
ggccaggcugg

SEQ ID NO: 2732821 - RNA, 14 nt, Human
ggccaggccagagg

SEQ ID NO: 2732822 - RNA, 16 nt, Human
ggccaggccagaggga

SEQ ID NO: 2732823 - RNA, 12 nt, Human
ggagggagggcu

SEQ ID NO: 2732824 - RNA, 12 nt, Human
ggagggcuccag

SEQ ID NO: 2732825 - RNA, 13 nt, Human
ggagggcuccaga

SEQ ID NO: 2732826 - RNA, 23 nt, Human
ggaggaucacuugaguccagaag

SEQ ID NO: 2732827 - RNA, 17 nt, Human
ggaggaucucuugagcc

SEQ ID NO: 2732828 - RNA, 21 nt, Human
ggaggaucucuugagccuggg

SEQ ID NO: 2732829 - RNA, 15 nt, Human
ggaggauguucuggg

SEQ ID NO: 2732830 - RNA, 17 nt, Human
ggagggcuccagacaca

SEQ ID NO: 2732831 - RNA, 14 nt, Human
ggagggcuccagac

SEQ ID NO: 2732832 - RNA, 15 nt, Human
ggagggcuccagaca

SEQ ID NO: 2732833 - RNA, 20 nt, Human
ggagucccaccuuggcugca

SEQ ID NO: 2732834 - RNA, 21 nt, Human
ggagucccaccuuggcugcag

SEQ ID NO: 2732835 - RNA, 11 nt, Human
ggagugacaga

SEQ ID NO: 2732836 - RNA, 16 nt, Human
ggagugacagaggcag

SEQ ID NO: 2732837 - RNA, 16 nt, Human
ggaucacagccucuga

SEQ ID NO: 2732838 - RNA, 12 nt, Human
ggagugagcugg

SEQ ID NO: 2732839 - RNA, 14 nt, Human
ggagugagcugguu

SEQ ID NO: 2732840 - RNA, 21 nt, Human
ggagugaguugauagcacaga

SEQ ID NO: 2732841 - RNA, 17 nt, Human
ggagugacagaggcagc

SEQ ID NO: 2732842 - RNA, 18 nt, Human
ggagugacagaggcagcc

SEQ ID NO: 2732843 - RNA, 19 nt, Human
ggagugacagaggcagccc

SEQ ID NO: 2732844 - RNA, 21 nt, Human
ggagugacagaggcagcccca

SEQ ID NO: 2732845 - RNA, 20 nt, Human
ggaagccagcaggcucucag

SEQ ID NO: 2732846 - RNA, 15 nt, Human
ggagaggggcacagg

SEQ ID NO: 2732847 - RNA, 20 nt, Human
ggagauuuacaacuggggga

SEQ ID NO: 2732848 - RNA, 20 nt, Human
ggagcaaaaucgaugcagug

SEQ ID NO: 2732849 - RNA, 21 nt, Human
ggagaccccuuggggagcagg

SEQ ID NO: 2732850 - RNA, 17 nt, Human
ggagagcuagcagcagg

SEQ ID NO: 2732851 - RNA, 21 nt, Human
ggagagcuagcagcagggagg

SEQ ID NO: 2732852 - RNA, 22 nt, Human
gcuguauuuuaaaagaaugauu

SEQ ID NO: 2732853 - RNA, 22 nt, Human
gcugguucaggguuggccccug

SEQ ID NO: 2732854 - RNA, 16 nt, Human
gcugucaauuacagga

SEQ ID NO: 2732855 - RNA, 15 nt, Human
gcugguucaggguug

SEQ ID NO: 2732856 - RNA, 21 nt, Human
gcugguuagagguucccuuug

SEQ ID NO: 2732857 - RNA, 24 nt, Human
gcuggugcccugcuuucagauacu

SEQ ID NO: 2732858 - RNA, 14 nt, Human
gcuggucccacuca

SEQ ID NO: 2732859 - RNA, 22 nt, Human
gcuggugcccugcuuucagaua

SEQ ID NO: 2732860 - RNA, 20 nt, Human
gcuggucccacucaguccau

SEQ ID NO: 2732861 - RNA, 16 nt, Human
gcuggugucaccugaa

SEQ ID NO: 2732862 - RNA, 18 nt, Human
gcuggugucaccugaaga

SEQ ID NO: 2732863 - RNA, 19 nt, Human
gcugucccuuacgugaguc

SEQ ID NO: 2732864 - RNA, 22 nt, Human
gcugucccuuacgugaguccug

SEQ ID NO: 2732865 - RNA, 21 nt, Human
gcugucccuuacgugaguccu

SEQ ID NO: 2732866 - RNA, 17 nt, Human
gcugucaauuacaggaa

SEQ ID NO: 2732867 - RNA, 19 nt, Human
gcugucaauuacaggaagu

SEQ ID NO: 2732868 - RNA, 22 nt, Human
gcugucaauuacaggaaguacu

SEQ ID NO: 2732869 - RNA, 23 nt, Human
gcugucaauuacaggaaguacug

SEQ ID NO: 2732870 - RNA, 17 nt, Human
gcugucuccauguuuga

SEQ ID NO: 2732871 - RNA, 17 nt, Human
gcugggcuucaguggca

SEQ ID NO: 2732872 - RNA, 21 nt, Human
gcugggaugauuggagggggg

SEQ ID NO: 2732873 - RNA, 19 nt, Human
gcugggagagccuuccagg

SEQ ID NO: 2732874 - RNA, 22 nt, Human
gcugggagagccuuccaggggu

SEQ ID NO: 2732875 - RNA, 12 nt, Human
gcugggagagcc

SEQ ID NO: 2732876 - RNA, 13 nt, Human
gcugggagagccu

SEQ ID NO: 2732877 - RNA, 17 nt, Human
gcugggagagccuucca

SEQ ID NO: 2732878 - RNA, 18 nt, Human
gcugggagagccuuccag

SEQ ID NO: 2732879 - RNA, 19 nt, Human
gcugggggccucagugcca

SEQ ID NO: 2732880 - RNA, 20 nt, Human
gcugggggccucagugccac

SEQ ID NO: 2732881 - RNA, 15 nt, Human
gcuggucccacucag

SEQ ID NO: 2732882 - RNA, 19 nt, Human
gcuggucccacucagucca

SEQ ID NO: 2732883 - RNA, 23 nt, Human
gcugggggaagaagcucucuccu

SEQ ID NO: 2732884 - RNA, 12 nt, Human
gcuggggccagu

SEQ ID NO: 2732885 - RNA, 18 nt, Human
gcugggcuucaguggcag

SEQ ID NO: 2732886 - RNA, 19 nt, Human
gcugggcuucaguggcagc

SEQ ID NO: 2732887 - RNA, 18 nt, Human
gcuagauguauguacuuc

SEQ ID NO: 2732888 - RNA, 16 nt, Human
gcuagauguauguacu

SEQ ID NO: 2732889 - RNA, 11 nt, Human
gcugcccugug

SEQ ID NO: 2732890 - RNA, 16 nt, Human
gcugcgguccacccag

SEQ ID NO: 2732891 - RNA, 12 nt, Human
gcugcccuguga

SEQ ID NO: 2732892 - RNA, 14 nt, Human
gcugcccugugagu

SEQ ID NO: 2732893 - RNA, 23 nt, Human
gcugcuucaaggauccugagcca

SEQ ID NO: 2732894 - RNA, 21 nt, Human
gcugcuucaaggauccugagc

SEQ ID NO: 2732895 - RNA, 22 nt, Human
gcugcuucaaggauccugagcc

SEQ ID NO: 2732896 - RNA, 16 nt, Human
gcugcuugggcuucau

SEQ ID NO: 2732897 - RNA, 13 nt, Human
gcugcuucaagga

SEQ ID NO: 2732898 - RNA, 19 nt, Human
gcugcgguccacccaggag

SEQ ID NO: 2732899 - RNA, 17 nt, Human
gcugcgguccacccagg

SEQ ID NO: 2732900 - RNA, 18 nt, Human
gcugcgguccacccagga

SEQ ID NO: 2732901 - RNA, 19 nt, Human
gcugggacuacagguguga

SEQ ID NO: 2732902 - RNA, 13 nt, Human
gcugggacuacag

SEQ ID NO: 2732903 - RNA, 18 nt, Human
gcugggacuacaggcacc

SEQ ID NO: 2732904 - RNA, 19 nt, Human
gcugggacuacaggcaccc

SEQ ID NO: 2732905 - RNA, 20 nt, Human
gcugggacuacaggcaccca

SEQ ID NO: 2732906 - RNA, 20 nt, Human
gcugggacaugggaaagggg

SEQ ID NO: 2732907 - RNA, 16 nt, Human
gcuggaccuugaacug

SEQ ID NO: 2732908 - RNA, 18 nt, Human
gcuggaccuugaacuggg

SEQ ID NO: 2732909 - RNA, 17 nt, Human
gcugcuugggcuucauc

SEQ ID NO: 2732910 - RNA, 22 nt, Human
gcugcuugggcuucauccuccu

SEQ ID NO: 2732911 - RNA, 21 nt, Human
gcuggaccuugaacuggguac

SEQ ID NO: 2732912 - RNA, 22 nt, Human
gcuggaccuugaacuggguacu

SEQ ID NO: 2732913 - RNA, 19 nt, Human
ggaacagacuggaagcaca

SEQ ID NO: 2732914 - RNA, 20 nt, Human
ggaacagacuggaagcacag

SEQ ID NO: 2732915 - RNA, 21 nt, Human
ggaacgcguugaaauuguaau

SEQ ID NO: 2732916 - RNA, 16 nt, Human
ggaacgcguugaaauu

SEQ ID NO: 2732917 - RNA, 17 nt, Human
ggaacgcguugaaauug

SEQ ID NO: 2732918 - RNA, 13 nt, Human
ggaaauauuuauu

SEQ ID NO: 2732919 - RNA, 15 nt, Human
ggaaauauuuauuuu

SEQ ID NO: 2732920 - RNA, 12 nt, Human
ggaaauauuuau

SEQ ID NO: 2732921 - RNA, 17 nt, Human
ggaaauauuuauuuuaa

SEQ ID NO: 2732922 - RNA, 18 nt, Human
ggaaauauuuauuuuaau

SEQ ID NO: 2732923 - RNA, 17 nt, Human
ggaacagacuggaagca

SEQ ID NO: 2732924 - RNA, 15 nt, Human
ggaaaaucagccugc

SEQ ID NO: 2732925 - RNA, 14 nt, Human
ggaaaauaaauuau

SEQ ID NO: 2732926 - RNA, 18 nt, Human
ggaaaaguuuaauauuaa

SEQ ID NO: 2732927 - RNA, 19 nt, Human
ggaaaaguuuaauauuaaa

SEQ ID NO: 2732928 - RNA, 13 nt, Human
ggaagccagcagg

SEQ ID NO: 2732929 - RNA, 14 nt, Human
ggaagccagcaggc

SEQ ID NO: 2732930 - RNA, 15 nt, Human
ggaagccagcaggcu

SEQ ID NO: 2732931 - RNA, 16 nt, Human
ggaagccagcaggcuc

SEQ ID NO: 2732932 - RNA, 17 nt, Human
ggaagccagcaggcucu

SEQ ID NO: 2732933 - RNA, 18 nt, Human
ggaagccagcaggcucuc

SEQ ID NO: 2732934 - RNA, 23 nt, Human
ggaagcacaugccucucucaggc

SEQ ID NO: 2732935 - RNA, 21 nt, Human
ggaagcacaugccucucucag

SEQ ID NO: 2732936 - RNA, 22 nt, Human
ggaagcacaugccucucucagg

SEQ ID NO: 2732937 - RNA, 13 nt, Human
ggaagagccuugc

SEQ ID NO: 2732938 - RNA, 17 nt, Human
ggaagcacagcuucauu

SEQ ID NO: 2732939 - RNA, 13 nt, Human
ggaagcacaugcc

SEQ ID NO: 2732940 - RNA, 14 nt, Human
ggaagcacaugccu

SEQ ID NO: 2732941 - RNA, 15 nt, Human
ggaagcacaugccuc

SEQ ID NO: 2732942 - RNA, 17 nt, Human
ggaagcacaugccucuc

SEQ ID NO: 2732943 - RNA, 23 nt, Human
gcuguucacagccagacuggcac

SEQ ID NO: 2732944 - RNA, 18 nt, Human
gcuuccagugaggcucug

SEQ ID NO: 2732945 - RNA, 16 nt, Human
gcuguucacagccaga

SEQ ID NO: 2732946 - RNA, 15 nt, Human
gcuguucacagccag

SEQ ID NO: 2732947 - RNA, 21 nt, Human
gcuuccagugaggcucugccc

SEQ ID NO: 2732948 - RNA, 19 nt, Human
gcuuccagugaggcucugc

SEQ ID NO: 2732949 - RNA, 20 nt, Human
gcuuccagugaggcucugcc

SEQ ID NO: 2732950 - RNA, 18 nt, Human
gcuugccaucccucccuc

SEQ ID NO: 2732951 - RNA, 21 nt, Human
gcuugccaucccucccuccac

SEQ ID NO: 2732952 - RNA, 13 nt, Human
gcuuggaggaagg

SEQ ID NO: 2732953 - RNA, 14 nt, Human
gcuuggaggaagga

SEQ ID NO: 2732954 - RNA, 15 nt, Human
gcuuggaggaaggaa

SEQ ID NO: 2732955 - RNA, 16 nt, Human
gcuugccaucccuccc

SEQ ID NO: 2732956 - RNA, 22 nt, Human
gcuugaggguugggcugguguc

SEQ ID NO: 2732957 - RNA, 17 nt, Human
gcuuuuaaaaaaaaaua

SEQ ID NO: 2732958 - RNA, 20 nt, Human
ggaaaaaauaacaaugaaag

SEQ ID NO: 2732959 - RNA, 14 nt, Human
gcuuuuacuuaaac

SEQ ID NO: 2732960 - RNA, 13 nt, Human
ggaaaaauagccu

SEQ ID NO: 2732961 - RNA, 14 nt, Human
ggaaaaacugauuu

SEQ ID NO: 2732962 - RNA, 15 nt, Human
ggaaaaauagccugc

SEQ ID NO: 2732963 - RNA, 14 nt, Human
gcuuuaucaaaggg

SEQ ID NO: 2732964 - RNA, 22 nt, Human
ggcuugaguuuaaauuguaaua

SEQ ID NO: 2732965 - RNA, 19 nt, Human
ggcuuggggaccagagcug

SEQ ID NO: 2732966 - RNA, 21 nt, Human
ggcuuggggaccagagcugcc

SEQ ID NO: 2732967 - RNA, 12 nt, Human
ggcuuuucugau

SEQ ID NO: 2732968 - RNA, 10 nt, Human
ggcuuuugug

SEQ ID NO: 2732969 - RNA, 16 nt, Human
ggcuuuucugauccag

SEQ ID NO: 2732970 - RNA, 13 nt, Human
ggcuuuucugauc

SEQ ID NO: 2732971 - RNA, 21 nt, Human
ggcuuagucacugagacagcc

SEQ ID NO: 2732972 - RNA, 17 nt, Human
ggcugggcucccuuccc

SEQ ID NO: 2732973 - RNA, 12 nt, Human
ggcugggcuuca

SEQ ID NO: 2732974 - RNA, 15 nt, Human
ggcuuaaaacaacac

SEQ ID NO: 2732975 - RNA, 13 nt, Human
ggcugggcuucag

SEQ ID NO: 2732976 - RNA, 17 nt, Human
ggcugggcuucaguggc

SEQ ID NO: 2732977 - RNA, 12 nt, Human
gggaccucaggc

SEQ ID NO: 2732978 - RNA, 13 nt, Human
gggaccucaggcc

SEQ ID NO: 2732979 - RNA, 15 nt, Human
gggaccucaggccug

SEQ ID NO: 2732980 - RNA, 17 nt, Human
gggacuacaggcaccca

SEQ ID NO: 2732981 - RNA, 16 nt, Human
gggacucaaugcacug

SEQ ID NO: 2732982 - RNA, 17 nt, Human
gggaagggggcugggac

SEQ ID NO: 2732983 - RNA, 14 nt, Human
gggaagggggcugg

SEQ ID NO: 2732984 - RNA, 16 nt, Human
gggaagggggcuggga

SEQ ID NO: 2732985 - RNA, 13 nt, Human
gggaaugaagaua

SEQ ID NO: 2732986 - RNA, 23 nt, Human
gggaaggauacaaaagcauguga

SEQ ID NO: 2732987 - RNA, 21 nt, Human
gggaaggauacaaaagcaugu

SEQ ID NO: 2732988 - RNA, 16 nt, Human
gggaaggauacaaaag

SEQ ID NO: 2732989 - RNA, 17 nt, Human
ggcuuuucugauccagu

SEQ ID NO: 2732990 - RNA, 14 nt, Human
ggcuuuugugcauu

SEQ ID NO: 2732991 - RNA, 11 nt, Human
ggcugcuucaa

SEQ ID NO: 2732992 - RNA, 12 nt, Human
ggcugcuucaag

SEQ ID NO: 2732993 - RNA, 14 nt, Human
ggcugcuucaagga

SEQ ID NO: 2732994 - RNA, 22 nt, Human
ggcugcuucaaggauccugagc

SEQ ID NO: 2732995 - RNA, 18 nt, Human
ggcugcugaaggcucgag

SEQ ID NO: 2732996 - RNA, 15 nt, Human
ggcugcugaaggcuc

SEQ ID NO: 2732997 - RNA, 17 nt, Human
ggcugcugaaggcucga

SEQ ID NO: 2732998 - RNA, 12 nt, Human
ggcugcagggag

SEQ ID NO: 2732999 - RNA, 13 nt, Human
ggcugcagggagu

SEQ ID NO: 2733000 - RNA, 14 nt, Human
ggcugcugaaggcu

SEQ ID NO: 2733001 - RNA, 23 nt, Human
ggcugcuucaaggauccugagcc

SEQ ID NO: 2733002 - RNA, 19 nt, Human
ggcugggagagccuuccag

SEQ ID NO: 2733003 - RNA, 18 nt, Human
ggcugggagagccuucca

SEQ ID NO: 2733004 - RNA, 15 nt, Human
ggcugggcagaggaa

SEQ ID NO: 2733005 - RNA, 19 nt, Human
ggcugggcagaggaaagca

SEQ ID NO: 2733006 - RNA, 13 nt, Human
ggcugggcagagg

SEQ ID NO: 2733007 - RNA, 14 nt, Human
ggcugggcagagga

SEQ ID NO: 2733008 - RNA, 20 nt, Human
ggcugggagagccuuccagg

SEQ ID NO: 2733009 - RNA, 23 nt, Human
ggcugggagagccuuccaggggu

SEQ ID NO: 2733010 - RNA, 13 nt, Human
ggcugagguggga

SEQ ID NO: 2733011 - RNA, 15 nt, Human
ggcugaggugggagg

SEQ ID NO: 2733012 - RNA, 20 nt, Human
ggccccugcccggcugcgga

SEQ ID NO: 2733013 - RNA, 17 nt, Human
ggcucugccucccauca

SEQ ID NO: 2733014 - RNA, 16 nt, Human
ggccccugcccggcug

SEQ ID NO: 2733015 - RNA, 17 nt, Human
ggccccugcccggcugc

SEQ ID NO: 2733016 - RNA, 24 nt, Human
ggcugcaaaggguaucaggugcug

SEQ ID NO: 2733017 - RNA, 17 nt, Human
ggcugcaccggcuggcc

SEQ ID NO: 2733018 - RNA, 18 nt, Human
ggcugcaccggcuggccu

SEQ ID NO: 2733019 - RNA, 19 nt, Human
ggcugcaccggcuggccug

SEQ ID NO: 2733020 - RNA, 18 nt, Human
ggcugcaaaggguaucag

SEQ ID NO: 2733021 - RNA, 22 nt, Human
ggcugcaaaggguaucaggugc

SEQ ID NO: 2733022 - RNA, 23 nt, Human
ggcugcaaaggguaucaggugcu

SEQ ID NO: 2733023 - RNA, 14 nt, Human
gggccuggccugag

SEQ ID NO: 2733024 - RNA, 18 nt, Human
gggccuggccugagcugg

SEQ ID NO: 2733025 - RNA, 17 nt, Human
gggccuggcucaggugg

SEQ ID NO: 2733026 - RNA, 13 nt, Human
gggccuggcuccc

SEQ ID NO: 2733027 - RNA, 12 nt, Human
gggccuggccug

SEQ ID NO: 2733028 - RNA, 13 nt, Human
gggccuggccuga

SEQ ID NO: 2733029 - RNA, 13 nt, Human
gggcccugccucc

SEQ ID NO: 2733030 - RNA, 12 nt, Human
gggcaugacacg

SEQ ID NO: 2733031 - RNA, 17 nt, Human
gggcccagagagggugg

SEQ ID NO: 2733032 - RNA, 23 nt, Human
gggccacagagaaaguacuucuc

SEQ ID NO: 2733033 - RNA, 16 nt, Human
gggccacagagaaagu

SEQ ID NO: 2733034 - RNA, 21 nt, Human
gggauaugauuuaaaucagcc

SEQ ID NO: 2733035 - RNA, 13 nt, Human
gggauagagagag

SEQ ID NO: 2733036 - RNA, 15 nt, Human
gggauccuccaggug

SEQ ID NO: 2733037 - RNA, 16 nt, Human
gggauccuccaggugc

SEQ ID NO: 2733038 - RNA, 23 nt, Human
gggauccuggaguucugguuccu

SEQ ID NO: 2733039 - RNA, 20 nt, Human
gggcaacccccagccugcua

SEQ ID NO: 2733040 - RNA, 18 nt, Human
gggcaacccuggugacca

SEQ ID NO: 2733041 - RNA, 16 nt, Human
gggaggugaccccagg

SEQ ID NO: 2733042 - RNA, 17 nt, Human
gggaggugggauccucc

SEQ ID NO: 2733043 - RNA, 18 nt, Human
gggagugacagaggcagc

SEQ ID NO: 2733044 - RNA, 11 nt, Human
gggagugagcu

SEQ ID NO: 2733045 - RNA, 14 nt, Human
gggagugagcuggu

SEQ ID NO: 2733046 - RNA, 20 nt, Human
gggcacagaaaauggaagac

SEQ ID NO: 2733047 - RNA, 21 nt, Human
gggcacagaaaauggaagaca

SEQ ID NO: 2733048 - RNA, 18 nt, Human
gggcacagaaaauggaag

SEQ ID NO: 2733049 - RNA, 23 nt, Human
gggcacaccgggcacucagaaga

SEQ ID NO: 2733050 - RNA, 13 nt, Human
gggcacagggucu

SEQ ID NO: 2733051 - RNA, 16 nt, Human
gggcacagggucucua

SEQ ID NO: 2733052 - RNA, 16 nt, Human
gggcacucagaagaca

SEQ ID NO: 2733053 - RNA, 19 nt, Human
gggcacucagaagacacug

SEQ ID NO: 2733054 - RNA, 17 nt, Human
gggcagguugguggggg

SEQ ID NO: 2733055 - RNA, 11 nt, Human
gggcagagcag

SEQ ID NO: 2733056 - RNA, 20 nt, Human
gggcacucagaagacacuga

SEQ ID NO: 2733057 - RNA, 14 nt, Human
gggcagaaggaaga

SEQ ID NO: 2733058 - RNA, 18 nt, Human
gggcagaaggaagacuuc

SEQ ID NO: 2733059 - RNA, 23 nt, Human
ggugcuacaaaaacacagcaagg

SEQ ID NO: 2733060 - RNA, 21 nt, Human
ggugcuacaaaaacacagcaa

SEQ ID NO: 2733061 - RNA, 16 nt, Human
ggugcuaucuccccca

SEQ ID NO: 2733062 - RNA, 17 nt, Human
ggugcuaucucccccag

SEQ ID NO: 2733063 - RNA, 19 nt, Human
ggugcuaucucccccagcc

SEQ ID NO: 2733064 - RNA, 20 nt, Human
ggugcuaucucccccagccc

SEQ ID NO: 2733065 - RNA, 15 nt, Human
ggugagaagcagagg

SEQ ID NO: 2733066 - RNA, 16 nt, Human
ggugagaggggaacag

SEQ ID NO: 2733067 - RNA, 15 nt, Human
ggugcugccauccag

SEQ ID NO: 2733068 - RNA, 21 nt, Human
ggugcugccauccagguucag

SEQ ID NO: 2733069 - RNA, 19 nt, Human
gguggcagugggagcugcc

SEQ ID NO: 2733070 - RNA, 22 nt, Human
gguggcagugggagcugccugu

SEQ ID NO: 2733071 - RNA, 16 nt, Human
gguggcagugggagcu

SEQ ID NO: 2733072 - RNA, 22 nt, Human
gguggccucccaacucacccca

SEQ ID NO: 2733073 - RNA, 23 nt, Human
gguggccucccaacucaccccag

SEQ ID NO: 2733074 - RNA, 22 nt, Human
ggucucacucugucgcccaguc

SEQ ID NO: 2733075 - RNA, 23 nt, Human
ggucucacucugucgcccagucu

SEQ ID NO: 2733076 - RNA, 17 nt, Human
ggucccaccccacacac

SEQ ID NO: 2733077 - RNA, 14 nt, Human
ggucccaccccaca

SEQ ID NO: 2733078 - RNA, 21 nt, Human
ggugacagagugagacucugu

SEQ ID NO: 2733079 - RNA, 14 nt, Human
ggucugacccacug

SEQ ID NO: 2733080 - RNA, 18 nt, Human
ggugacuuuggauaauaa

SEQ ID NO: 2733081 - RNA, 14 nt, Human
ggugacuuuggaua

SEQ ID NO: 2733082 - RNA, 21 nt, Human
ggugacuuuggauaauaagga

SEQ ID NO: 2733083 - RNA, 20 nt, Human
ggugacuuuggauaauaagg

SEQ ID NO: 2733084 - RNA, 19 nt, Human
ggugacuuuggauaauaag

SEQ ID NO: 2733085 - RNA, 21 nt, Human
ggugaccucugccugaaguca

SEQ ID NO: 2733086 - RNA, 22 nt, Human
ggugaccagcaccaucucuccu

SEQ ID NO: 2733087 - RNA, 13 nt, Human
gguugagguuuca

SEQ ID NO: 2733088 - RNA, 21 nt, Human
gguucaaagauauuuugcuuu

SEQ ID NO: 2733089 - RNA, 13 nt, Human
gguucaaagauau

SEQ ID NO: 2733090 - RNA, 17 nt, Human
gguuaggcauuguggga

SEQ ID NO: 2733091 - RNA, 13 nt, Human
gguuauggagagg

SEQ ID NO: 2733092 - RNA, 20 nt, Human
gguuaucugaagucagaucu

SEQ ID NO: 2733093 - RNA, 21 nt, Human
gguuacccaguuagcucucaa

SEQ ID NO: 2733094 - RNA, 19 nt, Human
ggugucaagagggucugag

SEQ ID NO: 2733095 - RNA, 17 nt, Human
ggugucaagagggucug

SEQ ID NO: 2733096 - RNA, 16 nt, Human
gguguaugugugaagu

SEQ ID NO: 2733097 - RNA, 19 nt, Human
ggugucaccugaagacuca

SEQ ID NO: 2733098 - RNA, 21 nt, Human
ggugguuauggagaggguguc

SEQ ID NO: 2733099 - RNA, 18 nt, Human
ggugguuucagaaaugug

SEQ ID NO: 2733100 - RNA, 17 nt, Human
ggugguuucagaaaugu

SEQ ID NO: 2733101 - RNA, 18 nt, Human
ggugguuuucuguucuuu

SEQ ID NO: 2733102 - RNA, 15 nt, Human
ggugguuuucuguuc

SEQ ID NO: 2733103 - RNA, 16 nt, Human
gguggugaccucugcc

SEQ ID NO: 2733104 - RNA, 14 nt, Human
gguggugaccucug

SEQ ID NO: 2733105 - RNA, 15 nt, Human
gguggugaccucugc

SEQ ID NO: 2733106 - RNA, 11 nt, Human
ggucagagccu

SEQ ID NO: 2733107 - RNA, 15 nt, Human
ggucccaccccacac

SEQ ID NO: 2733108 - RNA, 16 nt, Human
ggucccaccccacaca

SEQ ID NO: 2733109 - RNA, 18 nt, Human
gguagcauuuguguugaa

SEQ ID NO: 2733110 - RNA, 23 nt, Human
gguagaaauaucugaaaauguau

SEQ ID NO: 2733111 - RNA, 22 nt, Human
gguagaagcccuucuaccuucc

SEQ ID NO: 2733112 - RNA, 22 nt, Human
gguagaaauaucugaaaaugua

SEQ ID NO: 2733113 - RNA, 16 nt, Human
gguacuuguggacaca

SEQ ID NO: 2733114 - RNA, 17 nt, Human
gguacuuguggacacag

SEQ ID NO: 2733115 - RNA, 11 nt, Human
gguacccacug

SEQ ID NO: 2733116 - RNA, 13 nt, Human
gguacccacugcu

SEQ ID NO: 2733117 - RNA, 19 nt, Human
gggugacagagcaagugag

SEQ ID NO: 2733118 - RNA, 17 nt, Human
gggugaagugaagacaa

SEQ ID NO: 2733119 - RNA, 22 nt, Human
ggguucaagcgauucuucugcu

SEQ ID NO: 2733120 - RNA, 23 nt, Human
ggguucaagcgauucuucugcuu

SEQ ID NO: 2733121 - RNA, 12 nt, Human
ggguucuaccca

SEQ ID NO: 2733122 - RNA, 12 nt, Human
gggucucacucu

SEQ ID NO: 2733123 - RNA, 14 nt, Human
gggucucacucugu

SEQ ID NO: 2733124 - RNA, 17 nt, Human
ggguaagugagagaggg

SEQ ID NO: 2733125 - RNA, 12 nt, Human
gggucugaggaa

SEQ ID NO: 2733126 - RNA, 21 nt, Human
gggucugaggaauccagaccc

SEQ ID NO: 2733127 - RNA, 12 nt, Human
gggguggccucc

SEQ ID NO: 2733128 - RNA, 17 nt, Human
gggguggggaccucagg

SEQ ID NO: 2733129 - RNA, 23 nt, Human
ggggcugcaccggcuggccuggc

SEQ ID NO: 2733130 - RNA, 22 nt, Human
gggggaggugggauccuccagg

SEQ ID NO: 2733131 - RNA, 19 nt, Human
ggggcugaggugggaggau

SEQ ID NO: 2733132 - RNA, 12 nt, Human
ggggcugcaccg

SEQ ID NO: 2733133 - RNA, 21 nt, Human
ggggcugcaccggcuggccug

SEQ ID NO: 2733134 - RNA, 22 nt, Human
ggggcugcaccggcuggccugg

SEQ ID NO: 2733135 - RNA, 22 nt, Human
gggcuuggggaccagagcugcc

SEQ ID NO: 2733136 - RNA, 16 nt, Human
ggggaaaaucagccug

SEQ ID NO: 2733137 - RNA, 17 nt, Human
ggggaaaaucagccugc

SEQ ID NO: 2733138 - RNA, 19 nt, Human
ggggaaaaucagccugcuc

SEQ ID NO: 2733139 - RNA, 15 nt, Human
ggggauucuuaaagu

SEQ ID NO: 2733140 - RNA, 11 nt, Human
ggggauucuua

SEQ ID NO: 2733141 - RNA, 21 nt, Human
ggggaaaaucagccugcucca

SEQ ID NO: 2733142 - RNA, 16 nt, Human
ggggcaacccugguga

SEQ ID NO: 2733143 - RNA, 17 nt, Human
ggggcugaggugggagg

SEQ ID NO: 2733144 - RNA, 19 nt, Human
uauauuuuuauauuuacua

SEQ ID NO: 2733145 - RNA, 17 nt, Human
uaucaggugcugccauc

SEQ ID NO: 2733146 - RNA, 16 nt, Human
uaucaugacaaagacu

SEQ ID NO: 2733147 - RNA, 19 nt, Human
uaucgucacugcuuaacuu

SEQ ID NO: 2733148 - RNA, 15 nt, Human
uaucuaaauguugaa

SEQ ID NO: 2733149 - RNA, 20 nt, Human
uauauuuauuacuguaagaa

SEQ ID NO: 2733150 - RNA, 23 nt, Human
uauauuuauuacuguaagaaaau

SEQ ID NO: 2733151 - RNA, 14 nt, Human
uauauuugaaauau

SEQ ID NO: 2733152 - RNA, 13 nt, Human
uauauuugaaaua

SEQ ID NO: 2733153 - RNA, 18 nt, Human
uauauuuuuauauuuacu

SEQ ID NO: 2733154 - RNA, 18 nt, Human
uauauaaguauucuaaau

SEQ ID NO: 2733155 - RNA, 16 nt, Human
uauaugcuauuucuau

SEQ ID NO: 2733156 - RNA, 18 nt, Human
uauaugcuauuucuauau

SEQ ID NO: 2733157 - RNA, 18 nt, Human
uagucaaauugugugaaa

SEQ ID NO: 2733158 - RNA, 13 nt, Human
uaguuucuccaag

SEQ ID NO: 2733159 - RNA, 12 nt, Human
uaguuugcaguu

SEQ ID NO: 2733160 - RNA, 23 nt, Human
uaguuugauuaaauucuugcaaa

SEQ ID NO: 2733161 - RNA, 15 nt, Human
uaguggauguucuga

SEQ ID NO: 2733162 - RNA, 20 nt, Human
uauaaugaaugaaacauuuu

SEQ ID NO: 2733163 - RNA, 18 nt, Human
uauaaugaaugaaacauu

SEQ ID NO: 2733164 - RNA, 17 nt, Human
uauaauucuacuuugag

SEQ ID NO: 2733165 - RNA, 21 nt, Human
uauaauucagaaggaucuuca

SEQ ID NO: 2733166 - RNA, 20 nt, Human
uauaauguaagcucuacuga

SEQ ID NO: 2733167 - RNA, 19 nt, Human
uauaauguaagcucuacug

SEQ ID NO: 2733168 - RNA, 14 nt, Human
uauaauguaagcuc

SEQ ID NO: 2733169 - RNA, 16 nt, Human
uauacccagaaaguua

SEQ ID NO: 2733170 - RNA, 15 nt, Human
uaggaagguuaaugu

SEQ ID NO: 2733171 - RNA, 13 nt, Human
uaggccuggccag

SEQ ID NO: 2733172 - RNA, 14 nt, Human
uaggccuggccaga

SEQ ID NO: 2733173 - RNA, 17 nt, Human
uaggaacacuccuucac

SEQ ID NO: 2733174 - RNA, 21 nt, Human
uaggaacuuaaauaaugugaa

SEQ ID NO: 2733175 - RNA, 13 nt, Human
uaggaacacuccu

SEQ ID NO: 2733176 - RNA, 14 nt, Human
uaggaacacuccuu

SEQ ID NO: 2733177 - RNA, 13 nt, Human
uaggaagacuuug

SEQ ID NO: 2733178 - RNA, 14 nt, Human
uaggaagacuuugg

SEQ ID NO: 2733179 - RNA, 15 nt, Human
uaggaagacuuugga

SEQ ID NO: 2733180 - RNA, 16 nt, Human
uaggaagacuuuggaa

SEQ ID NO: 2733181 - RNA, 17 nt, Human
uaggaagacuuuggaaa

SEQ ID NO: 2733182 - RNA, 16 nt, Human
uagccuaggugacaga

SEQ ID NO: 2733183 - RNA, 14 nt, Human
uagcccaaaaccaa

SEQ ID NO: 2733184 - RNA, 17 nt, Human
uagccugccucuucucu

SEQ ID NO: 2733185 - RNA, 22 nt, Human
uagcucauucuccuuguguuac

SEQ ID NO: 2733186 - RNA, 21 nt, Human
uagcucuaggagggcuggcaa

SEQ ID NO: 2733187 - RNA, 11 nt, Human
uagcugggacu

SEQ ID NO: 2733188 - RNA, 18 nt, Human
uagcugggacuacaggug

SEQ ID NO: 2733189 - RNA, 20 nt, Human
uagcugggacuacaggcacc

SEQ ID NO: 2733190 - RNA, 17 nt, Human
uagaguuuagcuggaaa

SEQ ID NO: 2733191 - RNA, 18 nt, Human
uagaguuuagcuggaaaa

SEQ ID NO: 2733192 - RNA, 15 nt, Human
uagagaguguugaaa

SEQ ID NO: 2733193 - RNA, 14 nt, Human
uagagaguguugaa

SEQ ID NO: 2733194 - RNA, 16 nt, Human
uagagagagaccacuu

SEQ ID NO: 2733195 - RNA, 21 nt, Human
uagagguucaaagauauuuug

SEQ ID NO: 2733196 - RNA, 16 nt, Human
uagagguucaaagaua

SEQ ID NO: 2733197 - RNA, 19 nt, Human
uagagguucaaagauauuu

SEQ ID NO: 2733198 - RNA, 11 nt, Human
uagagacaggg

SEQ ID NO: 2733199 - RNA, 18 nt, Human
uagacuggugacugauuc

SEQ ID NO: 2733200 - RNA, 17 nt, Human
uagacuggugacugauu

SEQ ID NO: 2733201 - RNA, 14 nt, Human
uagacuggugacug

SEQ ID NO: 2733202 - RNA, 13 nt, Human
uagacuggugacu

SEQ ID NO: 2733203 - RNA, 20 nt, Human
uagauguauguacuucaugc

SEQ ID NO: 2733204 - RNA, 16 nt, Human
uagauguauguacuuc

SEQ ID NO: 2733205 - RNA, 18 nt, Human
uagauaauacaccacuac

SEQ ID NO: 2733206 - RNA, 12 nt, Human
uagauguauaua

SEQ ID NO: 2733207 - RNA, 20 nt, Human
uagcagggcauggcugggaa

SEQ ID NO: 2733208 - RNA, 19 nt, Human
uagcagagaaugaaagggc

SEQ ID NO: 2733209 - RNA, 23 nt, Human
uagcagagaaugaaagggcccag

SEQ ID NO: 2733210 - RNA, 16 nt, Human
uagcacuuugggaggc

SEQ ID NO: 2733211 - RNA, 15 nt, Human
uacugaggugcuaug

SEQ ID NO: 2733212 - RNA, 23 nt, Human
uacugauguuccuagugaaagag

SEQ ID NO: 2733213 - RNA, 12 nt, Human
uacucccaucug

SEQ ID NO: 2733214 - RNA, 14 nt, Human
uacucccaucugug

SEQ ID NO: 2733215 - RNA, 16 nt, Human
uacucccaucugugaa

SEQ ID NO: 2733216 - RNA, 17 nt, Human
uacucccaucugugaaa

SEQ ID NO: 2733217 - RNA, 16 nt, Human
uacucagaauucucua

SEQ ID NO: 2733218 - RNA, 22 nt, Human
uacucagaauucucuaguuuga

SEQ ID NO: 2733219 - RNA, 20 nt, Human
uacuacaguccucccaucuc

SEQ ID NO: 2733220 - RNA, 20 nt, Human
uacuacaguuuguuaguaug

SEQ ID NO: 2733221 - RNA, 12 nt, Human
uacucaccucac

SEQ ID NO: 2733222 - RNA, 14 nt, Human
uacucaccucaccc

SEQ ID NO: 2733223 - RNA, 22 nt, Human
uaccuuuuuuauacauaaacaa

SEQ ID NO: 2733224 - RNA, 20 nt, Human
uacgaagaguauuuuugaca

SEQ ID NO: 2733225 - RNA, 22 nt, Human
uacgaagaguauuuuugacaga

SEQ ID NO: 2733226 - RNA, 23 nt, Human
uacgaagaguauuuuugacagaa

SEQ ID NO: 2733227 - RNA, 17 nt, Human
uacuaaccagcagaaau

SEQ ID NO: 2733228 - RNA, 18 nt, Human
uacuaaccagcagaaaug

SEQ ID NO: 2733229 - RNA, 19 nt, Human
uacuaaccagcagaaaugc

SEQ ID NO: 2733230 - RNA, 12 nt, Human
uacuacaguccu

SEQ ID NO: 2733231 - RNA, 17 nt, Human
uacuacaguccucccau

SEQ ID NO: 2733232 - RNA, 22 nt, Human
uacuaauaaaauuuaaaagucu

SEQ ID NO: 2733233 - RNA, 17 nt, Human
uacuaauagacaauuua

SEQ ID NO: 2733234 - RNA, 15 nt, Human
uacuaauagacaauu

SEQ ID NO: 2733235 - RNA, 22 nt, Human
uacccaucccauaugccugggc

SEQ ID NO: 2733236 - RNA, 18 nt, Human
uaccuuuuuuauacauaa

SEQ ID NO: 2733237 - RNA, 20 nt, Human
uaccuuuuuuauacauaaac

SEQ ID NO: 2733238 - RNA, 19 nt, Human
uaccuuuuuuauacauaaa

SEQ ID NO: 2733239 - RNA, 20 nt, Human
uaccuuuguauucucuccug

SEQ ID NO: 2733240 - RNA, 21 nt, Human
uacuguaucaugacaaagacu

SEQ ID NO: 2733241 - RNA, 17 nt, Human
uacugcauaugaaagga

SEQ ID NO: 2733242 - RNA, 14 nt, Human
uacuuguggacaca

SEQ ID NO: 2733243 - RNA, 19 nt, Human
uacuuguggacacagcucu

SEQ ID NO: 2733244 - RNA, 15 nt, Human
uacuuguggacacag

SEQ ID NO: 2733245 - RNA, 18 nt, Human
uacuuguggacacagcuc

SEQ ID NO: 2733246 - RNA, 23 nt, Human
uagaaauaucugaaaauguaugu

SEQ ID NO: 2733247 - RNA, 21 nt, Human
uagaaauaucugaaaauguau

SEQ ID NO: 2733248 - RNA, 20 nt, Human
uagaaauaucugaaaaugua

SEQ ID NO: 2733249 - RNA, 15 nt, Human
uagaaauauaauuga

SEQ ID NO: 2733250 - RNA, 17 nt, Human
uagaacagauaaucagu

SEQ ID NO: 2733251 - RNA, 23 nt, Human
uaccacaggaaccacaagacugc

SEQ ID NO: 2733252 - RNA, 23 nt, Human
uaccauuuugggguacccacugc

SEQ ID NO: 2733253 - RNA, 13 nt, Human
uaccacagacaua

SEQ ID NO: 2733254 - RNA, 11 nt, Human
uacccacugcu

SEQ ID NO: 2733255 - RNA, 12 nt, Human
uacccacugcuc

SEQ ID NO: 2733256 - RNA, 13 nt, Human
uacccacugcucu

SEQ ID NO: 2733257 - RNA, 14 nt, Human
uacccacugcucug

SEQ ID NO: 2733258 - RNA, 16 nt, Human
uacccagcgagcccug

SEQ ID NO: 2733259 - RNA, 18 nt, Human
uacccagcgagcccuggu

SEQ ID NO: 2733260 - RNA, 22 nt, Human
uacccaggugcuaggaacacuc

SEQ ID NO: 2733261 - RNA, 15 nt, Human
uacccaaauuaagag

SEQ ID NO: 2733262 - RNA, 12 nt, Human
uacccaccccca

SEQ ID NO: 2733263 - RNA, 15 nt, Human
uacccacccccaccc

SEQ ID NO: 2733264 - RNA, 23 nt, Human
uacccacccccacccaagggccu

SEQ ID NO: 2733265 - RNA, 17 nt, Human
uacccacccccacccaa

SEQ ID NO: 2733266 - RNA, 19 nt, Human
uacccacccccacccaagg

SEQ ID NO: 2733267 - RNA, 17 nt, Human
uacauuuguauaaaaua

SEQ ID NO: 2733268 - RNA, 11 nt, Human
uacauuugugu

SEQ ID NO: 2733269 - RNA, 16 nt, Human
uacauuuguauaaaau

SEQ ID NO: 2733270 - RNA, 23 nt, Human
uacauuuggagacacaacuauuu

SEQ ID NO: 2733271 - RNA, 16 nt, Human
uaccaacacgagcagg

SEQ ID NO: 2733272 - RNA, 22 nt, Human
uacauaagauaaaugugcugaa

SEQ ID NO: 2733273 - RNA, 19 nt, Human
uacauaagauaaaugugcu

SEQ ID NO: 2733274 - RNA, 18 nt, Human
uacauaagauaaaugugc

SEQ ID NO: 2733275 - RNA, 19 nt, Human
uacaguuacucagaauucu

SEQ ID NO: 2733276 - RNA, 23 nt, Human
uacaguuacucagaauucucuag

SEQ ID NO: 2733277 - RNA, 13 nt, Human
uacagaauuuuau

SEQ ID NO: 2733278 - RNA, 24 nt, Human
uacagcaaggagauuuacaacugg

SEQ ID NO: 2733279 - RNA, 13 nt, Human
uacacuuuaugca

SEQ ID NO: 2733280 - RNA, 18 nt, Human
uacagaaaaguugaauuu

SEQ ID NO: 2733281 - RNA, 22 nt, Human
uacagaaaaguugaauuuuaca

SEQ ID NO: 2733282 - RNA, 19 nt, Human
uacacuguuucaaacuuua

SEQ ID NO: 2733283 - RNA, 18 nt, Human
uacacuguuucaaacuuu

SEQ ID NO: 2733284 - RNA, 17 nt, Human
uacacuguuucaaacuu

SEQ ID NO: 2733285 - RNA, 14 nt, Human
uacaggauuugaaa

SEQ ID NO: 2733286 - RNA, 16 nt, Human
uacaggcacccaccau

SEQ ID NO: 2733287 - RNA, 19 nt, Human
uacaggaaaagcugcugac

SEQ ID NO: 2733288 - RNA, 23 nt, Human
uacagcuugaccgugaggccaga

SEQ ID NO: 2733289 - RNA, 17 nt, Human
uacaggaaaagcugcug

SEQ ID NO: 2733290 - RNA, 18 nt, Human
uacaggaaaagcugcuga

SEQ ID NO: 2733291 - RNA, 22 nt, Human
uacagcuugaccgugaggccag

SEQ ID NO: 2733292 - RNA, 21 nt, Human
uacagcuugaccgugaggcca

SEQ ID NO: 2733293 - RNA, 22 nt, Human
uacacacugcauguuugugauu

SEQ ID NO: 2733294 - RNA, 14 nt, Human
uacacuguuucaaa

SEQ ID NO: 2733295 - RNA, 16 nt, Human
uacacugugcugaguc

SEQ ID NO: 2733296 - RNA, 17 nt, Human
uacacacugcauguuug

SEQ ID NO: 2733297 - RNA, 21 nt, Human
uacacacacacgcgugcacac

SEQ ID NO: 2733298 - RNA, 15 nt, Human
uacacacacauacac

SEQ ID NO: 2733299 - RNA, 17 nt, Human
uacacaaugguuuucuu

SEQ ID NO: 2733300 - RNA, 21 nt, Human
uacacaaugguuuucuugugu

SEQ ID NO: 2733301 - RNA, 23 nt, Human
uacacaaugguuuucuugugugu

SEQ ID NO: 2733302 - RNA, 13 nt, Human
uaauuuuggaauu

SEQ ID NO: 2733303 - RNA, 12 nt, Human
uaauuuuggaau

SEQ ID NO: 2733304 - RNA, 18 nt, Human
uacaauuuuguuucugua

SEQ ID NO: 2733305 - RNA, 21 nt, Human
uacaauuuuguuucuguacuu

SEQ ID NO: 2733306 - RNA, 19 nt, Human
uacaauuuuguuucuguac

SEQ ID NO: 2733307 - RNA, 19 nt, Human
uaaugauaaguaaaugcua

SEQ ID NO: 2733308 - RNA, 11 nt, Human
uaaucuaaaug

SEQ ID NO: 2733309 - RNA, 14 nt, Human
uaauauauuuccau

SEQ ID NO: 2733310 - RNA, 12 nt, Human
uaauauuaaagc

SEQ ID NO: 2733311 - RNA, 14 nt, Human
uaauauuaaagcca

SEQ ID NO: 2733312 - RNA, 13 nt, Human
uaauauuaaagcc

SEQ ID NO: 2733313 - RNA, 15 nt, Human
uaauaauguuucaaa

SEQ ID NO: 2733314 - RNA, 23 nt, Human
uaauaauuauaugcuauuucuau

SEQ ID NO: 2733315 - RNA, 22 nt, Human
uaauaauuauaugcuauuucua

SEQ ID NO: 2733316 - RNA, 20 nt, Human
uaauaauuauaugcuauuuc

SEQ ID NO: 2733317 - RNA, 19 nt, Human
uaauaauuauaugcuauuu

SEQ ID NO: 2733318 - RNA, 16 nt, Human
uaauaauuauaugcua

SEQ ID NO: 2733319 - RNA, 15 nt, Human
uaauaauuauaugcu

SEQ ID NO: 2733320 - RNA, 21 nt, Human
uaauaguucagguaacaggca

SEQ ID NO: 2733321 - RNA, 15 nt, Human
uaauaacugugaagu

SEQ ID NO: 2733322 - RNA, 18 nt, Human
uaauaaggaaaaguuuaa

SEQ ID NO: 2733323 - RNA, 20 nt, Human
uaauaaggaaaaguuuaaua

SEQ ID NO: 2733324 - RNA, 20 nt, Human
uaagugguacuaacuuuccu

SEQ ID NO: 2733325 - RNA, 20 nt, Human
uaauuuguaguguuggagaa

SEQ ID NO: 2733326 - RNA, 18 nt, Human
uaauuugguuuucacauu

SEQ ID NO: 2733327 - RNA, 17 nt, Human
uaauuugguuuucacau

SEQ ID NO: 2733328 - RNA, 15 nt, Human
uaauuugguuuucac

SEQ ID NO: 2733329 - RNA, 23 nt, Human
uaauuuguaguguuggagaagaa

SEQ ID NO: 2733330 - RNA, 14 nt, Human
uaauuugugauaca

SEQ ID NO: 2733331 - RNA, 18 nt, Human
uaauuugugauacaaugc

SEQ ID NO: 2733332 - RNA, 15 nt, Human
uaauuugugauacaa

SEQ ID NO: 2733333 - RNA, 13 nt, Human
uaauuuuaagaaa

SEQ ID NO: 2733334 - RNA, 22 nt, Human
uaauuugugauacaaugcugug

SEQ ID NO: 2733335 - RNA, 19 nt, Human
uaauuugugauacaaugcu

SEQ ID NO: 2733336 - RNA, 22 nt, Human
uaauuggaaaggcagcucuaaa

SEQ ID NO: 2733337 - RNA, 20 nt, Human
uaauuaaaagaauauuuuaa

SEQ ID NO: 2733338 - RNA, 17 nt, Human
uaauuaaaacacaacau

SEQ ID NO: 2733339 - RNA, 23 nt, Human
uaauuaaauuuugaguucuacau

SEQ ID NO: 2733340 - RNA, 19 nt, Human
uaauuaacauguuaaacca

SEQ ID NO: 2733341 - RNA, 18 nt, Human
uaauuaacauguuaaacc

SEQ ID NO: 2733342 - RNA, 17 nt, Human
uaauuaacauguuaaac

SEQ ID NO: 2733343 - RNA, 15 nt, Human
uaauuaacauguuaa

SEQ ID NO: 2733344 - RNA, 14 nt, Human
uaauuaacauguua

SEQ ID NO: 2733345 - RNA, 12 nt, Human
uaauuaacaugu

SEQ ID NO: 2733346 - RNA, 15 nt, Human
uaauguuucaaacau

SEQ ID NO: 2733347 - RNA, 14 nt, Human
uaauguuucaaaca

SEQ ID NO: 2733348 - RNA, 14 nt, Human
uaaugcgugcauac

SEQ ID NO: 2733349 - RNA, 18 nt, Human
uaauucuuagcucauucu

SEQ ID NO: 2733350 - RNA, 22 nt, Human
uaauugacaggauuauuggaaa

SEQ ID NO: 2733351 - RNA, 20 nt, Human
uaauugacaggauuauugga

SEQ ID NO: 2733352 - RNA, 19 nt, Human
uaacaaugcuguauuuuaa

SEQ ID NO: 2733353 - RNA, 14 nt, Human
uaaauuuaguauuu

SEQ ID NO: 2733354 - RNA, 19 nt, Human
uaaaucccauuauucaaag

SEQ ID NO: 2733355 - RNA, 17 nt, Human
uaaaucccauuauucaa

SEQ ID NO: 2733356 - RNA, 16 nt, Human
uaaaucccauuauuca

SEQ ID NO: 2733357 - RNA, 23 nt, Human
uaaauccauuuggaaaucuuuaa

SEQ ID NO: 2733358 - RNA, 22 nt, Human
uaaauccauuuggaaaucuuua

SEQ ID NO: 2733359 - RNA, 19 nt, Human
uaaauccauuuggaaaucu

SEQ ID NO: 2733360 - RNA, 18 nt, Human
uaaauccauuuggaaauc

SEQ ID NO: 2733361 - RNA, 12 nt, Human
uaacagaaaugu

SEQ ID NO: 2733362 - RNA, 15 nt, Human
uaacagaaauguaca

SEQ ID NO: 2733363 - RNA, 14 nt, Human
uaacagaaauguac

SEQ ID NO: 2733364 - RNA, 13 nt, Human
uaacagaaaugua

SEQ ID NO: 2733365 - RNA, 20 nt, Human
uaacuuuuauaaacuuuacc

SEQ ID NO: 2733366 - RNA, 19 nt, Human
uaaccagcagaaaugccuu

SEQ ID NO: 2733367 - RNA, 16 nt, Human
uaaccagcagaaaugc

SEQ ID NO: 2733368 - RNA, 14 nt, Human
uaaccagcagaaau

SEQ ID NO: 2733369 - RNA, 18 nt, Human
uaacauguuaaaccaugg

SEQ ID NO: 2733370 - RNA, 19 nt, Human
uaacaggcagauacaggaa

SEQ ID NO: 2733371 - RNA, 17 nt, Human
uaacauguuaaaccaug

SEQ ID NO: 2733372 - RNA, 16 nt, Human
uaacauguuaaaccau

SEQ ID NO: 2733373 - RNA, 23 nt, Human
uaagagggauuagggagagaaga

SEQ ID NO: 2733374 - RNA, 23 nt, Human
uaagagggagggagggcuccaga

SEQ ID NO: 2733375 - RNA, 12 nt, Human
uaagagggaggg

SEQ ID NO: 2733376 - RNA, 22 nt, Human
uaagagggagggagggcuccag

SEQ ID NO: 2733377 - RNA, 14 nt, Human
uaagauaaaugugc

SEQ ID NO: 2733378 - RNA, 17 nt, Human
uaagauaaaugugcuga

SEQ ID NO: 2733379 - RNA, 16 nt, Human
uaagauaaaugugcug

SEQ ID NO: 2733380 - RNA, 23 nt, Human
uaagagagaaugagagacacacu

SEQ ID NO: 2733381 - RNA, 17 nt, Human
uaagagagucuauuuac

SEQ ID NO: 2733382 - RNA, 22 nt, Human
uaagaggcagggucucacucug

SEQ ID NO: 2733383 - RNA, 22 nt, Human
uaagaaccuuuugagugccuua

SEQ ID NO: 2733384 - RNA, 24 nt, Human
uaagaaagacuaucuaaauguuga

SEQ ID NO: 2733385 - RNA, 19 nt, Human
uaacuuuuauaaacuuuac

SEQ ID NO: 2733386 - RNA, 13 nt, Human
uaacugugaaguu

SEQ ID NO: 2733387 - RNA, 22 nt, Human
uaacuuuuauaaacuuuaccuu

SEQ ID NO: 2733388 - RNA, 21 nt, Human
uaacuuuuauaaacuuuaccu

SEQ ID NO: 2733389 - RNA, 20 nt, Human
uaagcauuccaacuaucuca

SEQ ID NO: 2733390 - RNA, 16 nt, Human
uaagcauuccaacuau

SEQ ID NO: 2733391 - RNA, 18 nt, Human
uaagcauuccaacuaucu

SEQ ID NO: 2733392 - RNA, 23 nt, Human
uaagcauauauuuuuauauuuac

SEQ ID NO: 2733393 - RNA, 16 nt, Human
uaagcauauauuuuua

SEQ ID NO: 2733394 - RNA, 19 nt, Human
uaagcauauauuuuuauau

SEQ ID NO: 2733395 - RNA, 22 nt, Human
uaagcauauauuuuuauauuua

SEQ ID NO: 2733396 - RNA, 21 nt, Human
uaagcauauauuuuuauauuu

SEQ ID NO: 2733397 - RNA, 19 nt, Human
uaaggaugcuuguacauaa

SEQ ID NO: 2733398 - RNA, 18 nt, Human
uaaggaugcuuguacaua

SEQ ID NO: 2733399 - RNA, 23 nt, Human
uaaggaugcuuguacauaaugcg

SEQ ID NO: 2733400 - RNA, 22 nt, Human
uaaggaugcuuguacauaaugc

SEQ ID NO: 2733401 - RNA, 21 nt, Human
uaaggaugcuuguacauaaug

SEQ ID NO: 2733402 - RNA, 20 nt, Human
uaaggaugcuuguacauaau

SEQ ID NO: 2733403 - RNA, 13 nt, Human
guuuagcaguaua

SEQ ID NO: 2733404 - RNA, 18 nt, Human
guuuagucuugucucaga

SEQ ID NO: 2733405 - RNA, 14 nt, Human
guuuagucuugucu

SEQ ID NO: 2733406 - RNA, 18 nt, Human
gguuggcaaaaaggcagg

SEQ ID NO: 2733407 - RNA, 21 nt, Human
gguuggccccugcccggcugc

SEQ ID NO: 2733408 - RNA, 16 nt, Human
guuuccuggcacugcu

SEQ ID NO: 2733409 - RNA, 20 nt, Human
guuuccuggcacugcuucca

SEQ ID NO: 2733410 - RNA, 21 nt, Human
guuuccuggcacugcuuccag

SEQ ID NO: 2733411 - RNA, 22 nt, Human
guuuccuggcacugcuuccagu

SEQ ID NO: 2733412 - RNA, 18 nt, Human
guuucagaaauguguuau

SEQ ID NO: 2733413 - RNA, 14 nt, Human
guuucagaaaugug

SEQ ID NO: 2733414 - RNA, 23 nt, Human
guuugugcugguguaugugugaa

SEQ ID NO: 2733415 - RNA, 17 nt, Human
guuuguaaauuaacuuu

SEQ ID NO: 2733416 - RNA, 19 nt, Human
guuuguaaauuaacuuuua

SEQ ID NO: 2733417 - RNA, 22 nt, Human
guuugauuaaauucuugcaaag

SEQ ID NO: 2733418 - RNA, 19 nt, Human
guuugauuaaauucuugca

SEQ ID NO: 2733419 - RNA, 17 nt, Human
guuugauuaaauucuug

SEQ ID NO: 2733420 - RNA, 20 nt, Human
guuucuaaagcugccagccg

SEQ ID NO: 2733421 - RNA, 16 nt, Human
guuucuaaagcugcca

SEQ ID NO: 2733422 - RNA, 14 nt, Human
guuucuaaagcugc

SEQ ID NO: 2733423 - RNA, 15 nt, Human
guuucuaaagcugcc

SEQ ID NO: 2733424 - RNA, 18 nt, Human
guuugagaucagccuggg

SEQ ID NO: 2733425 - RNA, 16 nt, Human
guuugaaccaagaacu

SEQ ID NO: 2733426 - RNA, 16 nt, Human
uaaaaaagaaacauuu

SEQ ID NO: 2733427 - RNA, 20 nt, Human
uaaaaaacugcugacuguuu

SEQ ID NO: 2733428 - RNA, 23 nt, Human
uaaaaaacugcugacuguuuucu

SEQ ID NO: 2733429 - RNA, 18 nt, Human
guuuucaggcuagaugua

SEQ ID NO: 2733430 - RNA, 16 nt, Human
guuuucaguguacaug

SEQ ID NO: 2733431 - RNA, 17 nt, Human
guuuucaguguacaugg

SEQ ID NO: 2733432 - RNA, 12 nt, Human
guuuguuuaguc

SEQ ID NO: 2733433 - RNA, 16 nt, Human
guuuucauuaucucaa

SEQ ID NO: 2733434 - RNA, 12 nt, Human
guuuucucuuga

SEQ ID NO: 2733435 - RNA, 19 nt, Human
guuuucucuugagagggug

SEQ ID NO: 2733436 - RNA, 19 nt, Human
guuuuuauggcuuuugugc

SEQ ID NO: 2733437 - RNA, 23 nt, Human
guuuuuauggcuuuugugcauua

SEQ ID NO: 2733438 - RNA, 22 nt, Human
guuuuuauggcuuuugugcauu

SEQ ID NO: 2733439 - RNA, 14 nt, Human
uaaaagaugaaaau

SEQ ID NO: 2733440 - RNA, 19 nt, Human
uaaaauccauacauuugug

SEQ ID NO: 2733441 - RNA, 18 nt, Human
uaaaauccauacauuugu

SEQ ID NO: 2733442 - RNA, 17 nt, Human
uaaaauggguuuuacug

SEQ ID NO: 2733443 - RNA, 18 nt, Human
uaaacaagaccacguuuc

SEQ ID NO: 2733444 - RNA, 23 nt, Human
uaaacaagaccacguuucuaaag

SEQ ID NO: 2733445 - RNA, 22 nt, Human
uaaacuuuaccuuuuuuauaca

SEQ ID NO: 2733446 - RNA, 16 nt, Human
uaaacuuuaccuuuuu

SEQ ID NO: 2733447 - RNA, 19 nt, Human
uaaacuuaaucuaaaugga

SEQ ID NO: 2733448 - RNA, 18 nt, Human
uaaacuuaaucuaaaugg

SEQ ID NO: 2733449 - RNA, 13 nt, Human
uaaacuuaaucua

SEQ ID NO: 2733450 - RNA, 14 nt, Human
uaaacuuaaucuaa

SEQ ID NO: 2733451 - RNA, 14 nt, Human
uaaaggaauuuaaa

SEQ ID NO: 2733452 - RNA, 15 nt, Human
uaaacuuuucugaua

SEQ ID NO: 2733453 - RNA, 14 nt, Human
uaaacuuuucugau

SEQ ID NO: 2733454 - RNA, 13 nt, Human
uaaacuuuucuga

SEQ ID NO: 2733455 - RNA, 17 nt, Human
uaaauaaaaauaauccu

SEQ ID NO: 2733456 - RNA, 13 nt, Human
uaaaguuucuguu

SEQ ID NO: 2733457 - RNA, 21 nt, Human
uaaaguguauuuuuuuacuaa

SEQ ID NO: 2733458 - RNA, 23 nt, Human
uaaaguguauuuuuuuacuaaua

SEQ ID NO: 2733459 - RNA, 22 nt, Human
uaaaguguauuuuuuuacuaau

SEQ ID NO: 2733460 - RNA, 20 nt, Human
uaaaguguauuuuuuuacua

SEQ ID NO: 2733461 - RNA, 13 nt, Human
uaaaguugaauuu

SEQ ID NO: 2733462 - RNA, 15 nt, Human
uaaaguugaauuuau

SEQ ID NO: 2733463 - RNA, 14 nt, Human
uaaaguugaauuua

SEQ ID NO: 2733464 - RNA, 23 nt, Human
uaaaguugaauuuauuggcuuuu

SEQ ID NO: 2733465 - RNA, 21 nt, Human
uaaaguugaauuuauuggcuu

SEQ ID NO: 2733466 - RNA, 19 nt, Human
uaaaguugaauuuauuggc

SEQ ID NO: 2733467 - RNA, 17 nt, Human
uaaaguugaauuuauug

SEQ ID NO: 2733468 - RNA, 18 nt, Human
uaaauauaugcuaagucu

SEQ ID NO: 2733469 - RNA, 22 nt, Human
uaaauaaaccucaaaaugucua

SEQ ID NO: 2733470 - RNA, 14 nt, Human
uaaauccauuugga

SEQ ID NO: 2733471 - RNA, 16 nt, Human
uaaauccauuuggaaa

SEQ ID NO: 2733472 - RNA, 15 nt, Human
uaaauccauuuggaa

SEQ ID NO: 2733473 - RNA, 19 nt, Human
uaaaucagccguguaacca

SEQ ID NO: 2733474 - RNA, 21 nt, Human
uauuucuaugaaauauuaugu

SEQ ID NO: 2733475 - RNA, 22 nt, Human
uauuucuaugaaauauuauguu

SEQ ID NO: 2733476 - RNA, 23 nt, Human
uauuuauuaaaugcccagccccu

SEQ ID NO: 2733477 - RNA, 15 nt, Human
uaucugaggaauucu

SEQ ID NO: 2733478 - RNA, 18 nt, Human
uaucugaagucagaucug

SEQ ID NO: 2733479 - RNA, 17 nt, Human
uaucugaagucagaucu

SEQ ID NO: 2733480 - RNA, 20 nt, Human
uaucugaaaauguaugugua

SEQ ID NO: 2733481 - RNA, 15 nt, Human
uaucugaaaauguau

SEQ ID NO: 2733482 - RNA, 14 nt, Human
uaucugaaaaugua

SEQ ID NO: 2733483 - RNA, 18 nt, Human
uauuugagaguucuaaau

SEQ ID NO: 2733484 - RNA, 19 nt, Human
uauuugagaguucuaaauu

SEQ ID NO: 2733485 - RNA, 15 nt, Human
uauuugagaguucua

SEQ ID NO: 2733486 - RNA, 16 nt, Human
uauuugagaguucuaa

SEQ ID NO: 2733487 - RNA, 13 nt, Human
ucaaaacugcacu

SEQ ID NO: 2733488 - RNA, 22 nt, Human
ucaaaacgguuuuacugcagcu

SEQ ID NO: 2733489 - RNA, 14 nt, Human
ucaaacucuuaaaa

SEQ ID NO: 2733490 - RNA, 17 nt, Human
uauuuuuuucugaaauu

SEQ ID NO: 2733491 - RNA, 16 nt, Human
uauuuuuuucugaaau

SEQ ID NO: 2733492 - RNA, 15 nt, Human
uauuuuuuuacuaau

SEQ ID NO: 2733493 - RNA, 12 nt, Human
uauuuuaugauc

SEQ ID NO: 2733494 - RNA, 19 nt, Human
ucaacuccaaacugacucu

SEQ ID NO: 2733495 - RNA, 13 nt, Human
ucaaccuccuggg

SEQ ID NO: 2733496 - RNA, 14 nt, Human
ucaaccuccugggc

SEQ ID NO: 2733497 - RNA, 16 nt, Human
ucaaacuuuacuaugg

SEQ ID NO: 2733498 - RNA, 22 nt, Human
ucaaacucuugaccucagguga

SEQ ID NO: 2733499 - RNA, 13 nt, Human
ucaaacuuuacua

SEQ ID NO: 2733500 - RNA, 15 nt, Human
ucaaacuuuacuaug

SEQ ID NO: 2733501 - RNA, 16 nt, Human
ucaagcgauucuucug

SEQ ID NO: 2733502 - RNA, 20 nt, Human
ucaaggauccugagccagau

SEQ ID NO: 2733503 - RNA, 22 nt, Human
ucaagugauucuccugccucag

SEQ ID NO: 2733504 - RNA, 18 nt, Human
ucaaggauccugagccag

SEQ ID NO: 2733505 - RNA, 19 nt, Human
ucaaggauccugagccaga

SEQ ID NO: 2733506 - RNA, 23 nt, Human
ucacaggacagcccuucuuucca

SEQ ID NO: 2733507 - RNA, 11 nt, Human
ucacaggcagg

SEQ ID NO: 2733508 - RNA, 21 nt, Human
ucacacaugagcaucaggcca

SEQ ID NO: 2733509 - RNA, 22 nt, Human
ucacacagugagucgaggacag

SEQ ID NO: 2733510 - RNA, 23 nt, Human
ucacacagugagucgaggacagg

SEQ ID NO: 2733511 - RNA, 21 nt, Human
ucacacaguauuacuucugcu

SEQ ID NO: 2733512 - RNA, 22 nt, Human
ucacacaguauuacuucugcua

SEQ ID NO: 2733513 - RNA, 13 nt, Human
ucacacagugagu

SEQ ID NO: 2733514 - RNA, 19 nt, Human
ucaauuacaggaaguacug

SEQ ID NO: 2733515 - RNA, 13 nt, Human
ucaauaggaaaaa

SEQ ID NO: 2733516 - RNA, 14 nt, Human
ucaaugcacugaca

SEQ ID NO: 2733517 - RNA, 14 nt, Human
ucaauaggaaaaac

SEQ ID NO: 2733518 - RNA, 18 nt, Human
ucaaugcacugacauugu

SEQ ID NO: 2733519 - RNA, 22 nt, Human
ucaaugccccugaauuuaaaua

SEQ ID NO: 2733520 - RNA, 13 nt, Human
ucaauuacaggaa

SEQ ID NO: 2733521 - RNA, 18 nt, Human
ucaauuacaggaaguacu

SEQ ID NO: 2733522 - RNA, 19 nt, Human
ucagacagcugccugggau

SEQ ID NO: 2733523 - RNA, 20 nt, Human
ucagacagcugccugggauc

SEQ ID NO: 2733524 - RNA, 15 nt, Human
ucagacagcugccug

SEQ ID NO: 2733525 - RNA, 16 nt, Human
ucagacagcugccugg

SEQ ID NO: 2733526 - RNA, 17 nt, Human
ucagacagcugccuggg

SEQ ID NO: 2733527 - RNA, 18 nt, Human
ucagacagcugccuggga

SEQ ID NO: 2733528 - RNA, 18 nt, Human
ucagcacgauuucuguuu

SEQ ID NO: 2733529 - RNA, 19 nt, Human
ucagcacgauuucuguuua

SEQ ID NO: 2733530 - RNA, 17 nt, Human
ucacuugucaauaaaau

SEQ ID NO: 2733531 - RNA, 19 nt, Human
ucacucugucgcccagucu

SEQ ID NO: 2733532 - RNA, 12 nt, Human
ucacucugucgc

SEQ ID NO: 2733533 - RNA, 16 nt, Human
ucacucugucgcccag

SEQ ID NO: 2733534 - RNA, 20 nt, Human
ucacugcuuaacuucacaua

SEQ ID NO: 2733535 - RNA, 18 nt, Human
ucacugcuuaacuucaca

SEQ ID NO: 2733536 - RNA, 17 nt, Human
ucacugcuuaacuucac

SEQ ID NO: 2733537 - RNA, 15 nt, Human
ucacugcuuaacuuc

SEQ ID NO: 2733538 - RNA, 19 nt, Human
ucagaaaauauuauguguu

SEQ ID NO: 2733539 - RNA, 20 nt, Human
ucagaaaauauuauguguuu

SEQ ID NO: 2733540 - RNA, 17 nt, Human
ucagaaaauauuaugug

SEQ ID NO: 2733541 - RNA, 14 nt, Human
ucacggaagagccu

SEQ ID NO: 2733542 - RNA, 16 nt, Human
ucacggaagagccuug

SEQ ID NO: 2733543 - RNA, 17 nt, Human
ucacggaagagccuugc

SEQ ID NO: 2733544 - RNA, 13 nt, Human
ucacggcucacug

SEQ ID NO: 2733545 - RNA, 15 nt, Human
ucacggcucacugca

SEQ ID NO: 2733546 - RNA, 20 nt, Human
ucacggcucacugcagccuc

SEQ ID NO: 2733547 - RNA, 13 nt, Human
ucacuccuugaaa

SEQ ID NO: 2733548 - RNA, 18 nt, Human
ucacucuccauuuaauaa

SEQ ID NO: 2733549 - RNA, 12 nt, Human
ucacucuccuug

SEQ ID NO: 2733550 - RNA, 14 nt, Human
ucacucuccuuggu

SEQ ID NO: 2733551 - RNA, 23 nt, Human
ucacucuccuuggugucgggcau

SEQ ID NO: 2733552 - RNA, 12 nt, Human
ucacucuggcag

SEQ ID NO: 2733553 - RNA, 13 nt, Human
ucacucuggcagc

SEQ ID NO: 2733554 - RNA, 14 nt, Human
ucacucuggcagcu

SEQ ID NO: 2733555 - RNA, 15 nt, Human
ucacucuggcagcuc

SEQ ID NO: 2733556 - RNA, 16 nt, Human
ucacucuggcagcuca

SEQ ID NO: 2733557 - RNA, 17 nt, Human
ucacucuggcagcucag

SEQ ID NO: 2733558 - RNA, 18 nt, Human
ucacucuggcagcucaga

SEQ ID NO: 2733559 - RNA, 19 nt, Human
ucacucuggcagcucagag

SEQ ID NO: 2733560 - RNA, 20 nt, Human
ucacucuggcagcucagaga

SEQ ID NO: 2733561 - RNA, 22 nt, Human
ucacucuggcagcucagagagg

SEQ ID NO: 2733562 - RNA, 19 nt, Human
ucacgccuguaauccuagc

SEQ ID NO: 2733563 - RNA, 20 nt, Human
ucacgccuguaauccuagca

SEQ ID NO: 2733564 - RNA, 16 nt, Human
ucacgccacugcacua

SEQ ID NO: 2733565 - RNA, 13 nt, Human
ucacgccacugca

SEQ ID NO: 2733566 - RNA, 14 nt, Human
ucacgccacugcac

SEQ ID NO: 2733567 - RNA, 22 nt, Human
ucaccuuuguccccaccgcaga

SEQ ID NO: 2733568 - RNA, 14 nt, Human
ucaccuuugucccc

SEQ ID NO: 2733569 - RNA, 15 nt, Human
ucaccuuugucccca

SEQ ID NO: 2733570 - RNA, 17 nt, Human
ucaccuuuguccccacc

SEQ ID NO: 2733571 - RNA, 18 nt, Human
ucaccuuuguccccaccg

SEQ ID NO: 2733572 - RNA, 14 nt, Human
ucaccuuucccauc

SEQ ID NO: 2733573 - RNA, 12 nt, Human
ucaccuuugucc

SEQ ID NO: 2733574 - RNA, 19 nt, Human
ucacaggcagguccagggu

SEQ ID NO: 2733575 - RNA, 12 nt, Human
ucacaggcaggu

SEQ ID NO: 2733576 - RNA, 15 nt, Human
ucacaggcaggucca

SEQ ID NO: 2733577 - RNA, 16 nt, Human
ucccaaauuucauacc

SEQ ID NO: 2733578 - RNA, 13 nt, Human
ucccaacucaccc

SEQ ID NO: 2733579 - RNA, 16 nt, Human
ucccaacucaccccag

SEQ ID NO: 2733580 - RNA, 14 nt, Human
ucccaacucacccc

SEQ ID NO: 2733581 - RNA, 15 nt, Human
ucccaacucacccca

SEQ ID NO: 2733582 - RNA, 17 nt, Human
ucccaagcucugcuccu

SEQ ID NO: 2733583 - RNA, 12 nt, Human
ucccaagcucug

SEQ ID NO: 2733584 - RNA, 13 nt, Human
ucccaagcucugc

SEQ ID NO: 2733585 - RNA, 14 nt, Human
ucccaagcucugcu

SEQ ID NO: 2733586 - RNA, 15 nt, Human
ucccaagcucugcuc

SEQ ID NO: 2733587 - RNA, 23 nt, Human
uccagcucaccagccccagugcc

SEQ ID NO: 2733588 - RNA, 13 nt, Human
uccauggacuuug

SEQ ID NO: 2733589 - RNA, 14 nt, Human
uccauggacuuugu

SEQ ID NO: 2733590 - RNA, 15 nt, Human
uccauggacuuuguu

SEQ ID NO: 2733591 - RNA, 21 nt, Human
ucccaaagugcugggauuaca

SEQ ID NO: 2733592 - RNA, 13 nt, Human
ucccaccucagcc

SEQ ID NO: 2733593 - RNA, 14 nt, Human
ucccaccucagccu

SEQ ID NO: 2733594 - RNA, 15 nt, Human
ucccaccucagccuc

SEQ ID NO: 2733595 - RNA, 20 nt, Human
ucccaggcauuccccaggag

SEQ ID NO: 2733596 - RNA, 21 nt, Human
ucccaggcauuccccaggagg

SEQ ID NO: 2733597 - RNA, 22 nt, Human
ucccaggcauuccccaggaggc

SEQ ID NO: 2733598 - RNA, 23 nt, Human
ucccaucucacacaugagcauca

SEQ ID NO: 2733599 - RNA, 20 nt, Human
ucccaucucacacaugagca

SEQ ID NO: 2733600 - RNA, 22 nt, Human
uccccacuugagaauuacccuu

SEQ ID NO: 2733601 - RNA, 17 nt, Human
ucccucccuccaccucc

SEQ ID NO: 2733602 - RNA, 17 nt, Human
ucccucccucuuucccu

SEQ ID NO: 2733603 - RNA, 15 nt, Human
ucccucccucuuucc

SEQ ID NO: 2733604 - RNA, 15 nt, Human
ucccuacuguaauuu

SEQ ID NO: 2733605 - RNA, 19 nt, Human
uccccuguagagugggagc

SEQ ID NO: 2733606 - RNA, 24 nt, Human
uccccugcuggguguggcgcagca

SEQ ID NO: 2733607 - RNA, 22 nt, Human
uccccuguagagugggagcuga

SEQ ID NO: 2733608 - RNA, 23 nt, Human
uccccuguccccgcacugggcuu

SEQ ID NO: 2733609 - RNA, 14 nt, Human
uccccugcugggug

SEQ ID NO: 2733610 - RNA, 15 nt, Human
uccccugcugggugu

SEQ ID NO: 2733611 - RNA, 20 nt, Human
uccccugcuggguguggcgc

SEQ ID NO: 2733612 - RNA, 21 nt, Human
uccccugcuggguguggcgca

SEQ ID NO: 2733613 - RNA, 13 nt, Human
uccccaggaggcc

SEQ ID NO: 2733614 - RNA, 20 nt, Human
uccccgcacugggcuugggg

SEQ ID NO: 2733615 - RNA, 21 nt, Human
ucccccuuccauggacuuugu

SEQ ID NO: 2733616 - RNA, 17 nt, Human
uccaagcauuuagaugu

SEQ ID NO: 2733617 - RNA, 23 nt, Human
uccaagcauaccaacacgagcag

SEQ ID NO: 2733618 - RNA, 19 nt, Human
uccaagaccuucuccuuca

SEQ ID NO: 2733619 - RNA, 20 nt, Human
uccaagaagcccaggaaagg

SEQ ID NO: 2733620 - RNA, 22 nt, Human
uccaagaagcccaggaaaggcu

SEQ ID NO: 2733621 - RNA, 14 nt, Human
uccaagaauuucua

SEQ ID NO: 2733622 - RNA, 14 nt, Human
ucauuucuuugagu

SEQ ID NO: 2733623 - RNA, 22 nt, Human
ucauuucugcaucagcugcuga

SEQ ID NO: 2733624 - RNA, 16 nt, Human
ucauuucugcaucagc

SEQ ID NO: 2733625 - RNA, 22 nt, Human
ucauucagauaugauucaaaug

SEQ ID NO: 2733626 - RNA, 12 nt, Human
uccaaagaaaug

SEQ ID NO: 2733627 - RNA, 23 nt, Human
uccaaacugacucuuaagaagac

SEQ ID NO: 2733628 - RNA, 17 nt, Human
uccaaaauaaaacuuuu

SEQ ID NO: 2733629 - RNA, 16 nt, Human
uccaaaauaaaacuuu

SEQ ID NO: 2733630 - RNA, 23 nt, Human
uccaccucccugcaauaaaaugg

SEQ ID NO: 2733631 - RNA, 12 nt, Human
uccaccugccag

SEQ ID NO: 2733632 - RNA, 12 nt, Human
uccaccucccug

SEQ ID NO: 2733633 - RNA, 20 nt, Human
uccaagcauuuagauguaua

SEQ ID NO: 2733634 - RNA, 22 nt, Human
uccaagcaggacauggacaagg

SEQ ID NO: 2733635 - RNA, 14 nt, Human
uccacaagagccca

SEQ ID NO: 2733636 - RNA, 14 nt, Human
uccagauccuggaa

SEQ ID NO: 2733637 - RNA, 16 nt, Human
uccagauccuggaaau

SEQ ID NO: 2733638 - RNA, 17 nt, Human
uccagauccuggaaauc

SEQ ID NO: 2733639 - RNA, 20 nt, Human
uccagcagauuauucacuga

SEQ ID NO: 2733640 - RNA, 17 nt, Human
uccagcagauuauucac

SEQ ID NO: 2733641 - RNA, 22 nt, Human
uccagcagauuauucacugauu

SEQ ID NO: 2733642 - RNA, 13 nt, Human
uccaccugccagg

SEQ ID NO: 2733643 - RNA, 16 nt, Human
ucauuaggugugacug

SEQ ID NO: 2733644 - RNA, 22 nt, Human
ucauuaggugugacugaauuuc

SEQ ID NO: 2733645 - RNA, 21 nt, Human
ucauuaggugugacugaauuu

SEQ ID NO: 2733646 - RNA, 18 nt, Human
ucauuaggugugacugaa

SEQ ID NO: 2733647 - RNA, 13 nt, Human
ucauuauuuuauu

SEQ ID NO: 2733648 - RNA, 15 nt, Human
ucauuauuuuauuau

SEQ ID NO: 2733649 - RNA, 14 nt, Human
ucauuauuuuauua

SEQ ID NO: 2733650 - RNA, 19 nt, Human
ucauuauuuuauuaugaaa

SEQ ID NO: 2733651 - RNA, 18 nt, Human
ucauuauuuuauuaugaa

SEQ ID NO: 2733652 - RNA, 16 nt, Human
ucauuauuuuauuaug

SEQ ID NO: 2733653 - RNA, 20 nt, Human
ucauacccacccccacccaa

SEQ ID NO: 2733654 - RNA, 14 nt, Human
ucauacccaccccc

SEQ ID NO: 2733655 - RNA, 15 nt, Human
ucauacccaccccca

SEQ ID NO: 2733656 - RNA, 13 nt, Human
ucaguuguacagu

SEQ ID NO: 2733657 - RNA, 13 nt, Human
ucauaaugacuua

SEQ ID NO: 2733658 - RNA, 13 nt, Human
ucauacauuguac

SEQ ID NO: 2733659 - RNA, 15 nt, Human
ucauacauuguacga

SEQ ID NO: 2733660 - RNA, 13 nt, Human
ucauacccacccc

SEQ ID NO: 2733661 - RNA, 16 nt, Human
ucauacauuguacgaa

SEQ ID NO: 2733662 - RNA, 15 nt, Human
ucauaauuuauacag

SEQ ID NO: 2733663 - RNA, 15 nt, Human
ucagucuggcccuuc

SEQ ID NO: 2733664 - RNA, 24 nt, Human
ucagucugauucccaagcucugcu

SEQ ID NO: 2733665 - RNA, 17 nt, Human
ucagugugacugaucuc

SEQ ID NO: 2733666 - RNA, 13 nt, Human
ucagugugacuga

SEQ ID NO: 2733667 - RNA, 11 nt, Human
ucaguguacau

SEQ ID NO: 2733668 - RNA, 23 nt, Human
ucagugguuggcaauuguuucaa

SEQ ID NO: 2733669 - RNA, 16 nt, Human
ucugaaaauguaugug

SEQ ID NO: 2733670 - RNA, 15 nt, Human
ucucuuuucaaaaca

SEQ ID NO: 2733671 - RNA, 16 nt, Human
ucucuuuucaaaacau

SEQ ID NO: 2733672 - RNA, 14 nt, Human
ucugaaauuuccug

SEQ ID NO: 2733673 - RNA, 14 nt, Human
ucugaaaauguaug

SEQ ID NO: 2733674 - RNA, 23 nt, Human
ucugaaaauguauguguaaguau

SEQ ID NO: 2733675 - RNA, 13 nt, Human
ucugaaagggacg

SEQ ID NO: 2733676 - RNA, 14 nt, Human
ucugacccaugcug

SEQ ID NO: 2733677 - RNA, 21 nt, Human
ucugaacuuggcgcugccccu

SEQ ID NO: 2733678 - RNA, 20 nt, Human
ucugaacuuggcgcugcccc

SEQ ID NO: 2733679 - RNA, 15 nt, Human
ucugacccaugcugc

SEQ ID NO: 2733680 - RNA, 16 nt, Human
ucugacccaugcugcc

SEQ ID NO: 2733681 - RNA, 17 nt, Human
ucugacccaugcugccc

SEQ ID NO: 2733682 - RNA, 18 nt, Human
ucugacccaugcugcccu

SEQ ID NO: 2733683 - RNA, 19 nt, Human
ucugcacaagcugcacccu

SEQ ID NO: 2733684 - RNA, 14 nt, Human
ucugcacaagcugc

SEQ ID NO: 2733685 - RNA, 23 nt, Human
ucugauucccaagcucugcuccu

SEQ ID NO: 2733686 - RNA, 19 nt, Human
ucugaggaauucuguauag

SEQ ID NO: 2733687 - RNA, 20 nt, Human
ucugaggaauucuguauaga

SEQ ID NO: 2733688 - RNA, 20 nt, Human
ucugaggacacuaaccacgc

SEQ ID NO: 2733689 - RNA, 23 nt, Human
ucugaggacacuaaccacgcugg

SEQ ID NO: 2733690 - RNA, 16 nt, Human
ucugaggaauccagac

SEQ ID NO: 2733691 - RNA, 17 nt, Human
ucugaggaauccagacc

SEQ ID NO: 2733692 - RNA, 13 nt, Human
ucucuaggaaaua

SEQ ID NO: 2733693 - RNA, 19 nt, Human
ucucuaggaaauauuuauu

SEQ ID NO: 2733694 - RNA, 19 nt, Human
ucucuaguuugauuaaauu

SEQ ID NO: 2733695 - RNA, 18 nt, Human
ucucuaguuugauuaaau

SEQ ID NO: 2733696 - RNA, 21 nt, Human
ucuccugggcagcugccuccc

SEQ ID NO: 2733697 - RNA, 19 nt, Human
ucuccugggcagcugccuc

SEQ ID NO: 2733698 - RNA, 20 nt, Human
ucuccugggcagcugccucc

SEQ ID NO: 2733699 - RNA, 15 nt, Human
ucucuacaaaaagca

SEQ ID NO: 2733700 - RNA, 13 nt, Human
ucuccuguaccuc

SEQ ID NO: 2733701 - RNA, 13 nt, Human
ucucugaggacac

SEQ ID NO: 2733702 - RNA, 14 nt, Human
ucucccccagcccc

SEQ ID NO: 2733703 - RNA, 15 nt, Human
ucucccccagcccca

SEQ ID NO: 2733704 - RNA, 17 nt, Human
ucucccccagccccauc

SEQ ID NO: 2733705 - RNA, 22 nt, Human
ucucccccagccccauccucug

SEQ ID NO: 2733706 - RNA, 13 nt, Human
ucucccccagccc

SEQ ID NO: 2733707 - RNA, 18 nt, Human
ucucccccagccccaucc

SEQ ID NO: 2733708 - RNA, 20 nt, Human
ucucccccagccccauccuc

SEQ ID NO: 2733709 - RNA, 14 nt, Human
ucuccugggcagcu

SEQ ID NO: 2733710 - RNA, 13 nt, Human
ucuccugggcagc

SEQ ID NO: 2733711 - RNA, 15 nt, Human
ucuccugggcagcug

SEQ ID NO: 2733712 - RNA, 16 nt, Human
ucuccugggcagcugc

SEQ ID NO: 2733713 - RNA, 17 nt, Human
ucuccugggcagcugcc

SEQ ID NO: 2733714 - RNA, 18 nt, Human
ucuccugggcagcugccu

SEQ ID NO: 2733715 - RNA, 22 nt, Human
ucuccugccucagccucccaaa

SEQ ID NO: 2733716 - RNA, 19 nt, Human
ucuccugccucagccuccc

SEQ ID NO: 2733717 - RNA, 15 nt, Human
uccuugcaucaauuu

SEQ ID NO: 2733718 - RNA, 12 nt, Human
uccuucuguccu

SEQ ID NO: 2733719 - RNA, 19 nt, Human
uccuucuguccuacucugu

SEQ ID NO: 2733720 - RNA, 20 nt, Human
uccuucugugaaaguacauu

SEQ ID NO: 2733721 - RNA, 17 nt, Human
uccuggcccacugcauc

SEQ ID NO: 2733722 - RNA, 10 nt, Human
ucccucccuu

SEQ ID NO: 2733723 - RNA, 22 nt, Human
uccuggcaugggaaugaauguc

SEQ ID NO: 2733724 - RNA, 15 nt, Human
uccugguguggaaga

SEQ ID NO: 2733725 - RNA, 17 nt, Human
ucgaguuacagacaaag

SEQ ID NO: 2733726 - RNA, 15 nt, Human
ucgaguuacagacaa

SEQ ID NO: 2733727 - RNA, 21 nt, Human
ucuacacuaagagagaaugag

SEQ ID NO: 2733728 - RNA, 22 nt, Human
ucuaacuucaccauauuaccac

SEQ ID NO: 2733729 - RNA, 16 nt, Human
ucuaacuucaccauau

SEQ ID NO: 2733730 - RNA, 15 nt, Human
ucuaacuucaccaua

SEQ ID NO: 2733731 - RNA, 22 nt, Human
ucuaaaucuccaaaauaaaacu

SEQ ID NO: 2733732 - RNA, 16 nt, Human
ucuaaauucuuucauu

SEQ ID NO: 2733733 - RNA, 13 nt, Human
ucuaaauuugaau

SEQ ID NO: 2733734 - RNA, 17 nt, Human
ucuaaauuugaauguua

SEQ ID NO: 2733735 - RNA, 19 nt, Human
ucuaacaaaaaaauauauu

SEQ ID NO: 2733736 - RNA, 22 nt, Human
ucuaaauuugaauguuaagcag

SEQ ID NO: 2733737 - RNA, 23 nt, Human
ucuaaauuugaauguuaagcaga

SEQ ID NO: 2733738 - RNA, 18 nt, Human
ucuaaauuuuauaucuug

SEQ ID NO: 2733739 - RNA, 23 nt, Human
ucuaaauuuuauaucuuguagcu

SEQ ID NO: 2733740 - RNA, 17 nt, Human
ucuacacuaagagagaa

SEQ ID NO: 2733741 - RNA, 12 nt, Human
ucuacacugugc

SEQ ID NO: 2733742 - RNA, 14 nt, Human
ucuacacugugcug

SEQ ID NO: 2733743 - RNA, 19 nt, Human
ucuacugaggugcuauguu

SEQ ID NO: 2733744 - RNA, 18 nt, Human
ucuacugaggugcuaugu

SEQ ID NO: 2733745 - RNA, 21 nt, Human
ucuacacugugcugagucuga

SEQ ID NO: 2733746 - RNA, 15 nt, Human
ucuacacugugcuga

SEQ ID NO: 2733747 - RNA, 22 nt, Human
ucuacugaggugcuauguucuu

SEQ ID NO: 2733748 - RNA, 19 nt, Human
ucuagggaaaaaccagcgu

SEQ ID NO: 2733749 - RNA, 22 nt, Human
ucuagggaaaaaccagcgugug

SEQ ID NO: 2733750 - RNA, 17 nt, Human
ucucacuguugcccagg

SEQ ID NO: 2733751 - RNA, 21 nt, Human
ucucagaaucucaaauaacua

SEQ ID NO: 2733752 - RNA, 17 nt, Human
ucucagaaucucaaaua

SEQ ID NO: 2733753 - RNA, 18 nt, Human
ucucacuguugcccaggc

SEQ ID NO: 2733754 - RNA, 19 nt, Human
ucucacuguugcccaggcu

SEQ ID NO: 2733755 - RNA, 20 nt, Human
ucucacuguugcccaggcug

SEQ ID NO: 2733756 - RNA, 21 nt, Human
ucucacuguugcccaggcugg

SEQ ID NO: 2733757 - RNA, 18 nt, Human
ucucacucugucgcccag

SEQ ID NO: 2733758 - RNA, 22 nt, Human
ucucacucugucgcccagucug

SEQ ID NO: 2733759 - RNA, 16 nt, Human
ucucacucugucgccc

SEQ ID NO: 2733760 - RNA, 17 nt, Human
ucucacucugucgccca

SEQ ID NO: 2733761 - RNA, 21 nt, Human
ucucaaauuuggauugcuaau

SEQ ID NO: 2733762 - RNA, 22 nt, Human
ucucaaacucuugaccucaggu

SEQ ID NO: 2733763 - RNA, 13 nt, Human
ucucaaacucuug

SEQ ID NO: 2733764 - RNA, 21 nt, Human
ucucaaacucuugaccucagg

SEQ ID NO: 2733765 - RNA, 15 nt, Human
ucuaguaugaaauua

SEQ ID NO: 2733766 - RNA, 17 nt, Human
ucuaguaugaaauuaua

SEQ ID NO: 2733767 - RNA, 14 nt, Human
ugaacacaucagcu

SEQ ID NO: 2733768 - RNA, 18 nt, Human
ugaacucuucaaucucuu

SEQ ID NO: 2733769 - RNA, 20 nt, Human
ugaaccacaucuugcucugc

SEQ ID NO: 2733770 - RNA, 21 nt, Human
ugaaccacaucuugcucugcu

SEQ ID NO: 2733771 - RNA, 15 nt, Human
ugaacucuucaaucu

SEQ ID NO: 2733772 - RNA, 22 nt, Human
ugaaccacaucuugcucugcug

SEQ ID NO: 2733773 - RNA, 13 nt, Human
ugaacugauaaag

SEQ ID NO: 2733774 - RNA, 15 nt, Human
ugaacugauaaagau

SEQ ID NO: 2733775 - RNA, 22 nt, Human
ugaacuuguaaaggaauuuaaa

SEQ ID NO: 2733776 - RNA, 14 nt, Human
ugaagacagagcua

SEQ ID NO: 2733777 - RNA, 16 nt, Human
ugaagacagagcuaca

SEQ ID NO: 2733778 - RNA, 19 nt, Human
ugaacuggguacuugugga

SEQ ID NO: 2733779 - RNA, 14 nt, Human
ugaacuuggcgcug

SEQ ID NO: 2733780 - RNA, 12 nt, Human
ugaacuugguuc

SEQ ID NO: 2733781 - RNA, 14 nt, Human
ugaagacuuuucuu

SEQ ID NO: 2733782 - RNA, 17 nt, Human
ugaagacuuuucuuuca

SEQ ID NO: 2733783 - RNA, 22 nt, Human
ugaagacuuuucuuucagccaa

SEQ ID NO: 2733784 - RNA, 21 nt, Human
ugaaguccaagcauuuagaug

SEQ ID NO: 2733785 - RNA, 22 nt, Human
ugaaguccaagcauuuagaugu

SEQ ID NO: 2733786 - RNA, 21 nt, Human
ugaaggcucgagcaugccugg

SEQ ID NO: 2733787 - RNA, 20 nt, Human
ugaaggcucgagcaugccug

SEQ ID NO: 2733788 - RNA, 13 nt, Human
ugaaagauucaau

SEQ ID NO: 2733789 - RNA, 12 nt, Human
ugaaaggaaaga

SEQ ID NO: 2733790 - RNA, 17 nt, Human
ugaaaggaaagaggcuc

SEQ ID NO: 2733791 - RNA, 22 nt, Human
ugaaaagacuccaaagaaaugu

SEQ ID NO: 2733792 - RNA, 17 nt, Human
ugaaaucuuuuugcuuu

SEQ ID NO: 2733793 - RNA, 15 nt, Human
ugaaagggcccagag

SEQ ID NO: 2733794 - RNA, 16 nt, Human
ugaaagggcccagaga

SEQ ID NO: 2733795 - RNA, 17 nt, Human
ugaaagggcccagagag

SEQ ID NO: 2733796 - RNA, 18 nt, Human
ugaaagggcccagagagg

SEQ ID NO: 2733797 - RNA, 19 nt, Human
ugaaaugaggucagagccu

SEQ ID NO: 2733798 - RNA, 20 nt, Human
ugaaaugaggucagagccug

SEQ ID NO: 2733799 - RNA, 23 nt, Human
ugaaaugaggucagagccugcag

SEQ ID NO: 2733800 - RNA, 21 nt, Human
ugaaaugaggucagagccugc

SEQ ID NO: 2733801 - RNA, 22 nt, Human
ugaaaugaggucagagccugca

SEQ ID NO: 2733802 - RNA, 19 nt, Human
ugaaaagacuccaaagaaa

SEQ ID NO: 2733803 - RNA, 17 nt, Human
ugaaaagacuccaaaga

SEQ ID NO: 2733804 - RNA, 16 nt, Human
ugaaaagacuccaaag

SEQ ID NO: 2733805 - RNA, 15 nt, Human
ugaaaagacuccaaa

SEQ ID NO: 2733806 - RNA, 16 nt, Human
ucuuuuugcuuugcuu

SEQ ID NO: 2733807 - RNA, 19 nt, Human
ucuuuugccguuauuaaaa

SEQ ID NO: 2733808 - RNA, 17 nt, Human
ucuuuugccguuauuaa

SEQ ID NO: 2733809 - RNA, 20 nt, Human
ucuguuuuauaauuuuguga

SEQ ID NO: 2733810 - RNA, 22 nt, Human
ucuguuuuauaauuuugugaag

SEQ ID NO: 2733811 - RNA, 18 nt, Human
ucuuaaaaaguggaaaaa

SEQ ID NO: 2733812 - RNA, 19 nt, Human
ucuguccgagcuuugaaaa

SEQ ID NO: 2733813 - RNA, 22 nt, Human
ucuguggguuucuaaagcugcc

SEQ ID NO: 2733814 - RNA, 17 nt, Human
ucuguacgucugacagg

SEQ ID NO: 2733815 - RNA, 23 nt, Human
ucuguggguuucuaaagcugcca

SEQ ID NO: 2733816 - RNA, 22 nt, Human
ucugugucagguggggcagcuu

SEQ ID NO: 2733817 - RNA, 14 nt, Human
ucuggcuaugcauu

SEQ ID NO: 2733818 - RNA, 23 nt, Human
ucuguacagagcccacgccccca

SEQ ID NO: 2733819 - RNA, 17 nt, Human
ucuggcucuuccaggcu

SEQ ID NO: 2733820 - RNA, 15 nt, Human
ucuggcucuuccagg

SEQ ID NO: 2733821 - RNA, 16 nt, Human
ucuggcucuuccaggc

SEQ ID NO: 2733822 - RNA, 13 nt, Human
ucugggacacagu

SEQ ID NO: 2733823 - RNA, 12 nt, Human
ucugggacacag

SEQ ID NO: 2733824 - RNA, 13 nt, Human
ucuuaaaaagugg

SEQ ID NO: 2733825 - RNA, 16 nt, Human
ucuuaguggauguucu

SEQ ID NO: 2733826 - RNA, 14 nt, Human
ucuuagugugugca

SEQ ID NO: 2733827 - RNA, 14 nt, Human
ucuuauacauuuga

SEQ ID NO: 2733828 - RNA, 15 nt, Human
ucuuauacauuugau

SEQ ID NO: 2733829 - RNA, 15 nt, Human
ucuucaguaagccgu

SEQ ID NO: 2733830 - RNA, 13 nt, Human
ucuuaugggcugg

SEQ ID NO: 2733831 - RNA, 19 nt, Human
ucuucuccacuuucuagcc

SEQ ID NO: 2733832 - RNA, 21 nt, Human
ucuucuccacuuucuagccag

SEQ ID NO: 2733833 - RNA, 14 nt, Human
ucuuccaggcuggg

SEQ ID NO: 2733834 - RNA, 16 nt, Human
ucuucaguaagccgug

SEQ ID NO: 2733835 - RNA, 21 nt, Human
ucuuccacaagagcccaggcc

SEQ ID NO: 2733836 - RNA, 19 nt, Human
ucuugucucagauuuuauu

SEQ ID NO: 2733837 - RNA, 19 nt, Human
ucuuuaaaaaaaaaauugg

SEQ ID NO: 2733838 - RNA, 18 nt, Human
ucuuuaaaaaaaaaauug

SEQ ID NO: 2733839 - RNA, 12 nt, Human
ucuugcucugcu

SEQ ID NO: 2733840 - RNA, 13 nt, Human
ucuugcucugcug

SEQ ID NO: 2733841 - RNA, 11 nt, Human
ucuugcucugc

SEQ ID NO: 2733842 - RNA, 21 nt, Human
ucuugaauuguaaggaaugau

SEQ ID NO: 2733843 - RNA, 15 nt, Human
ucuucuccaggcugu

SEQ ID NO: 2733844 - RNA, 16 nt, Human
ucuugaacuccuggcc

SEQ ID NO: 2733845 - RNA, 17 nt, Human
ucuugaacuccuggccu

SEQ ID NO: 2733846 - RNA, 18 nt, Human
ucuugaacuccuggccuc

SEQ ID NO: 2733847 - RNA, 13 nt, Human
ucuucuccaggcu

SEQ ID NO: 2733848 - RNA, 14 nt, Human
ucuucuccaggcug

SEQ ID NO: 2733849 - RNA, 12 nt, Human
ucuucuccaggc

SEQ ID NO: 2733850 - RNA, 18 nt, Human
ugccuccccuccucugcu

SEQ ID NO: 2733851 - RNA, 19 nt, Human
ugccuccccuccucugcuu

SEQ ID NO: 2733852 - RNA, 22 nt, Human
ugccuccccuccucugcuugcc

SEQ ID NO: 2733853 - RNA, 23 nt, Human
ugccuccccuccucugcuugcca

SEQ ID NO: 2733854 - RNA, 23 nt, Human
ugccuaaggacuucuuuaauuuu

SEQ ID NO: 2733855 - RNA, 23 nt, Human
ugcccaggcuggcgugcaguggu

SEQ ID NO: 2733856 - RNA, 11 nt, Human
ugcccagcccc

SEQ ID NO: 2733857 - RNA, 14 nt, Human
ugccucugggacug

SEQ ID NO: 2733858 - RNA, 16 nt, Human
ugccuccuuugugagg

SEQ ID NO: 2733859 - RNA, 17 nt, Human
ugccuccuuugugagga

SEQ ID NO: 2733860 - RNA, 18 nt, Human
ugccuccuuugugaggaa

SEQ ID NO: 2733861 - RNA, 22 nt, Human
ugccugaagucacacagugagu

SEQ ID NO: 2733862 - RNA, 18 nt, Human
ugccugaagucacacagu

SEQ ID NO: 2733863 - RNA, 17 nt, Human
ugccugaagucacacag

SEQ ID NO: 2733864 - RNA, 22 nt, Human
ugccuucucaacuccaaacuga

SEQ ID NO: 2733865 - RNA, 17 nt, Human
ugccuucucaacuccaa

SEQ ID NO: 2733866 - RNA, 13 nt, Human
ugcgccuacagga

SEQ ID NO: 2733867 - RNA, 23 nt, Human
ugcggugcuaucucccccagccc

SEQ ID NO: 2733868 - RNA, 18 nt, Human
ugccuuauggaacacucu

SEQ ID NO: 2733869 - RNA, 20 nt, Human
ugccuuauggaacacucuga

SEQ ID NO: 2733870 - RNA, 21 nt, Human
ugccuuauggaacacucugag

SEQ ID NO: 2733871 - RNA, 22 nt, Human
ugccuuauggaacacucugaga

SEQ ID NO: 2733872 - RNA, 15 nt, Human
ugcgugcauaccacu

SEQ ID NO: 2733873 - RNA, 16 nt, Human
ugcuaggaacacuccu

SEQ ID NO: 2733874 - RNA, 17 nt, Human
ugcuaggaacacuccuu

SEQ ID NO: 2733875 - RNA, 19 nt, Human
ugcuaggaacacuccuuca

SEQ ID NO: 2733876 - RNA, 18 nt, Human
ugcuccucuccccagcaa

SEQ ID NO: 2733877 - RNA, 19 nt, Human
ugcuccucuccccagcaag

SEQ ID NO: 2733878 - RNA, 16 nt, Human
ugcuagguuaauucca

SEQ ID NO: 2733879 - RNA, 23 nt, Human
ugcuagguuaauuccaauuauau

SEQ ID NO: 2733880 - RNA, 18 nt, Human
ugcugaauacagaggcaa

SEQ ID NO: 2733881 - RNA, 23 nt, Human
ugcugaauacagaggcaacugca

SEQ ID NO: 2733882 - RNA, 21 nt, Human
ugcugaaggcucgagcaugcc

SEQ ID NO: 2733883 - RNA, 22 nt, Human
ugcugaaugguuuucaaaauaa

SEQ ID NO: 2733884 - RNA, 18 nt, Human
ugcugaaugguuuucaaa

SEQ ID NO: 2733885 - RNA, 17 nt, Human
ugcugaaugguuuucaa

SEQ ID NO: 2733886 - RNA, 19 nt, Human
ugcuccuggcccacugcau

SEQ ID NO: 2733887 - RNA, 15 nt, Human
ugcugcaguugccag

SEQ ID NO: 2733888 - RNA, 16 nt, Human
ugcugcaguugccagu

SEQ ID NO: 2733889 - RNA, 20 nt, Human
ugcugauggugcaaugaccu

SEQ ID NO: 2733890 - RNA, 23 nt, Human
ugcugauggugcaaugaccuuuc

SEQ ID NO: 2733891 - RNA, 15 nt, Human
ugcugacagacacag

SEQ ID NO: 2733892 - RNA, 16 nt, Human
ugcugacagacacagg

SEQ ID NO: 2733893 - RNA, 19 nt, Human
ugcugacagacacaggccc

SEQ ID NO: 2733894 - RNA, 17 nt, Human
ugcugaguuugugcugg

SEQ ID NO: 2733895 - RNA, 15 nt, Human
ugcugaguuugugcu

SEQ ID NO: 2733896 - RNA, 15 nt, Human
ugcacuuuguucugg

SEQ ID NO: 2733897 - RNA, 18 nt, Human
ugcacuuuguucuggcuc

SEQ ID NO: 2733898 - RNA, 19 nt, Human
ugcacuuuguucuggcucu

SEQ ID NO: 2733899 - RNA, 20 nt, Human
ugcacuuuguucuggcucuu

SEQ ID NO: 2733900 - RNA, 21 nt, Human
ugcacuugcagacucuacaga

SEQ ID NO: 2733901 - RNA, 16 nt, Human
ugcacuugcagacucu

SEQ ID NO: 2733902 - RNA, 19 nt, Human
ugcacggugaauggcuuug

SEQ ID NO: 2733903 - RNA, 23 nt, Human
ugcacggugaauggcuuuguaua

SEQ ID NO: 2733904 - RNA, 22 nt, Human
ugcacggugaauggcuuuguau

SEQ ID NO: 2733905 - RNA, 16 nt, Human
ugcacguacacacaca

SEQ ID NO: 2733906 - RNA, 18 nt, Human
ugcaggaccucaggugag

SEQ ID NO: 2733907 - RNA, 15 nt, Human
ugcaggaccucaggu

SEQ ID NO: 2733908 - RNA, 16 nt, Human
ugcaggaccucaggug

SEQ ID NO: 2733909 - RNA, 14 nt, Human
ugcaggaccucagg

SEQ ID NO: 2733910 - RNA, 16 nt, Human
ugcagcaauaaagcag

SEQ ID NO: 2733911 - RNA, 15 nt, Human
ugcagcaauaaagca

SEQ ID NO: 2733912 - RNA, 14 nt, Human
ugcagcaauaaagc

SEQ ID NO: 2733913 - RNA, 15 nt, Human
ugcacaucaaaauau

SEQ ID NO: 2733914 - RNA, 23 nt, Human
ugcacagcuaacauggaaguacu

SEQ ID NO: 2733915 - RNA, 18 nt, Human
ugcacagcuaacauggaa

SEQ ID NO: 2733916 - RNA, 20 nt, Human
ugcacagcuaacauggaagu

SEQ ID NO: 2733917 - RNA, 17 nt, Human
ugcacagcuaacaugga

SEQ ID NO: 2733918 - RNA, 23 nt, Human
ugcacagaguuguuacauuuuua

SEQ ID NO: 2733919 - RNA, 22 nt, Human
ugcacagaguuguuacauuuuu

SEQ ID NO: 2733920 - RNA, 21 nt, Human
ugcacagaguuguuacauuuu

SEQ ID NO: 2733921 - RNA, 22 nt, Human
ugaagucuuuguacagacaaca

SEQ ID NO: 2733922 - RNA, 17 nt, Human
ugaagucuuuguacaga

SEQ ID NO: 2733923 - RNA, 20 nt, Human
ugaagucuuuguacagacaa

SEQ ID NO: 2733924 - RNA, 21 nt, Human
ugccaucccucccuccaccuc

SEQ ID NO: 2733925 - RNA, 22 nt, Human
ugccaucccucccuccaccucc

SEQ ID NO: 2733926 - RNA, 15 nt, Human
ugccaucccucccuc

SEQ ID NO: 2733927 - RNA, 19 nt, Human
ugccaucccucccuccacc

SEQ ID NO: 2733928 - RNA, 20 nt, Human
ugccaucccucccuccaccu

SEQ ID NO: 2733929 - RNA, 24 nt, Human
ugccagguuuuuggucugacccac

SEQ ID NO: 2733930 - RNA, 14 nt, Human
ugccagucaccccg

SEQ ID NO: 2733931 - RNA, 11 nt, Human
ugccagggaca

SEQ ID NO: 2733932 - RNA, 22 nt, Human
ugccagggacagaggggguggc

SEQ ID NO: 2733933 - RNA, 15 nt, Human
ugcccaccuggccuc

SEQ ID NO: 2733934 - RNA, 17 nt, Human
ugcccaccuggccucug

SEQ ID NO: 2733935 - RNA, 10 nt, Human
ugcccagccc

SEQ ID NO: 2733936 - RNA, 14 nt, Human
ugcccaccuggccu

SEQ ID NO: 2733937 - RNA, 18 nt, Human
ugcccaccuggccucugc

SEQ ID NO: 2733938 - RNA, 22 nt, Human
ugcaucagcugcugaaacaaca

SEQ ID NO: 2733939 - RNA, 19 nt, Human
ugcaucagcugcugaaaca

SEQ ID NO: 2733940 - RNA, 19 nt, Human
ugcaggcagccaggccaca

SEQ ID NO: 2733941 - RNA, 17 nt, Human
ugcaggcagccaggcca

SEQ ID NO: 2733942 - RNA, 18 nt, Human
ugcaggcagccaggccac

SEQ ID NO: 2733943 - RNA, 16 nt, Human
ugcaggcagccaggcc

SEQ ID NO: 2733944 - RNA, 15 nt, Human
ugcaucguuucaucu

SEQ ID NO: 2733945 - RNA, 14 nt, Human
ugcauuauauuuau

SEQ ID NO: 2733946 - RNA, 20 nt, Human
ugcauuauauuuauuacugu

SEQ ID NO: 2733947 - RNA, 15 nt, Human
ugcauuauauuuauu

SEQ ID NO: 2733948 - RNA, 19 nt, Human
ugcauguuacauaagauaa

SEQ ID NO: 2733949 - RNA, 11 nt, Human
uggaagacagc

SEQ ID NO: 2733950 - RNA, 12 nt, Human
uggaagacagcu

SEQ ID NO: 2733951 - RNA, 16 nt, Human
uggaaaauaaauuauu

SEQ ID NO: 2733952 - RNA, 15 nt, Human
uggaaaauaaauuau

SEQ ID NO: 2733953 - RNA, 22 nt, Human
uggaaaaguauguuagugcaaa

SEQ ID NO: 2733954 - RNA, 16 nt, Human
uggaauaucuccguca

SEQ ID NO: 2733955 - RNA, 16 nt, Human
uggaauacucuuauau

SEQ ID NO: 2733956 - RNA, 14 nt, Human
uggaagacagcucu

SEQ ID NO: 2733957 - RNA, 14 nt, Human
ugcuucuguuuuau

SEQ ID NO: 2733958 - RNA, 16 nt, Human
ugcuucuucagagacu

SEQ ID NO: 2733959 - RNA, 18 nt, Human
ugcuuccagugaggcucu

SEQ ID NO: 2733960 - RNA, 19 nt, Human
ugcuuccagugaggcucug

SEQ ID NO: 2733961 - RNA, 20 nt, Human
ugcuuccagugaggcucugc

SEQ ID NO: 2733962 - RNA, 12 nt, Human
ugcuuucagaua

SEQ ID NO: 2733963 - RNA, 21 nt, Human
ugcuuucagauacuggauugu

SEQ ID NO: 2733964 - RNA, 20 nt, Human
ugcuuucagauacuggauug

SEQ ID NO: 2733965 - RNA, 17 nt, Human
ugcuuucagauacugga

SEQ ID NO: 2733966 - RNA, 16 nt, Human
ugcuuucagauacugg

SEQ ID NO: 2733967 - RNA, 12 nt, Human
uggacaggcaug

SEQ ID NO: 2733968 - RNA, 16 nt, Human
uggacaggcauguucu

SEQ ID NO: 2733969 - RNA, 15 nt, Human
uggagcaaagcugau

SEQ ID NO: 2733970 - RNA, 22 nt, Human
uggaggcaugugaugagaggaa

SEQ ID NO: 2733971 - RNA, 15 nt, Human
uggcauaacauaaau

SEQ ID NO: 2733972 - RNA, 20 nt, Human
uggcagugggagcugccugu

SEQ ID NO: 2733973 - RNA, 13 nt, Human
uggcagugggagc

SEQ ID NO: 2733974 - RNA, 14 nt, Human
uggcagugggagcu

SEQ ID NO: 2733975 - RNA, 15 nt, Human
uggcagugggagcug

SEQ ID NO: 2733976 - RNA, 16 nt, Human
uggcagugggagcugc

SEQ ID NO: 2733977 - RNA, 19 nt, Human
uggcagugggagcugccug

SEQ ID NO: 2733978 - RNA, 14 nt, Human
uggaugccuggugg

SEQ ID NO: 2733979 - RNA, 18 nt, Human
uggcacugcuuccaguga

SEQ ID NO: 2733980 - RNA, 14 nt, Human
uggcacugcuucca

SEQ ID NO: 2733981 - RNA, 16 nt, Human
uggcacugcuuccagu

SEQ ID NO: 2733982 - RNA, 23 nt, Human
uggcagcugcgguccacccagga

SEQ ID NO: 2733983 - RNA, 21 nt, Human
uggcagcugcgguccacccag

SEQ ID NO: 2733984 - RNA, 22 nt, Human
uggcagcugcgguccacccagg

SEQ ID NO: 2733985 - RNA, 17 nt, Human
uggguagacacacauga

SEQ ID NO: 2733986 - RNA, 16 nt, Human
uggguagacacacaug

SEQ ID NO: 2733987 - RNA, 17 nt, Human
ugggguggggaccucag

SEQ ID NO: 2733988 - RNA, 14 nt, Human
uggguguggcgcag

SEQ ID NO: 2733989 - RNA, 23 nt, Human
uggguucaagcgauucuucugcu

SEQ ID NO: 2733990 - RNA, 16 nt, Human
uggguucacugcaacc

SEQ ID NO: 2733991 - RNA, 21 nt, Human
ugggugucaagagggucugag

SEQ ID NO: 2733992 - RNA, 23 nt, Human
ugggugucaagagggucugagga

SEQ ID NO: 2733993 - RNA, 16 nt, Human
ugggagcuuuuguaga

SEQ ID NO: 2733994 - RNA, 24 nt, Human
ugggagcugccuguucagcuccag

SEQ ID NO: 2733995 - RNA, 14 nt, Human
ugggccuccugugu

SEQ ID NO: 2733996 - RNA, 16 nt, Human
ugggccuccugugugu

SEQ ID NO: 2733997 - RNA, 22 nt, Human
ugggccuccugugugugcgccu

SEQ ID NO: 2733998 - RNA, 19 nt, Human
ugggcuuggggaccagagc

SEQ ID NO: 2733999 - RNA, 20 nt, Human
ugggcuucaguggcagcugc

SEQ ID NO: 2734000 - RNA, 16 nt, Human
uggggcagcuugaggg

SEQ ID NO: 2734001 - RNA, 21 nt, Human
ugggcuuggggaccagagcug

SEQ ID NO: 2734002 - RNA, 18 nt, Human
ugggcuucaguggcagcu

SEQ ID NO: 2734003 - RNA, 19 nt, Human
ugggcuucaguggcagcug

SEQ ID NO: 2734004 - RNA, 18 nt, Human
ugggacagucaccucaug

SEQ ID NO: 2734005 - RNA, 20 nt, Human
ugggacagucaccucaugga

SEQ ID NO: 2734006 - RNA, 21 nt, Human
ugggacagucaccucauggaa

SEQ ID NO: 2734007 - RNA, 22 nt, Human
ugggaaugaaugucagugugac

SEQ ID NO: 2734008 - RNA, 22 nt, Human
uggcuuuguauagaaccucuuu

SEQ ID NO: 2734009 - RNA, 14 nt, Human
uggcuuuguauaga

SEQ ID NO: 2734010 - RNA, 15 nt, Human
uggcuguacccagga

SEQ ID NO: 2734011 - RNA, 14 nt, Human
uggcugggggccuc

SEQ ID NO: 2734012 - RNA, 22 nt, Human
uggcugguuagagguucccuuu

SEQ ID NO: 2734013 - RNA, 19 nt, Human
ugggacauuugcucaugga

SEQ ID NO: 2734014 - RNA, 20 nt, Human
ugggacauuugcucauggaa

SEQ ID NO: 2734015 - RNA, 16 nt, Human
ugggacaugggaaagg

SEQ ID NO: 2734016 - RNA, 23 nt, Human
ugggagcugccuguucagcucca

SEQ ID NO: 2734017 - RNA, 15 nt, Human
uggccagaugcacca

SEQ ID NO: 2734018 - RNA, 22 nt, Human
uggcgugcaguggugcgaucug

SEQ ID NO: 2734019 - RNA, 15 nt, Human
uggcgcugccccugg

SEQ ID NO: 2734020 - RNA, 14 nt, Human
uggcgcugccccug

SEQ ID NO: 2734021 - RNA, 16 nt, Human
uggcucuuccaggcug

SEQ ID NO: 2734022 - RNA, 12 nt, Human
uggcugggggcc

SEQ ID NO: 2734023 - RNA, 13 nt, Human
uggcucuuccagg

SEQ ID NO: 2734024 - RNA, 15 nt, Human
uggcucuuccaggcu

SEQ ID NO: 2734025 - RNA, 22 nt, Human
uggcucagguggggucacucug

SEQ ID NO: 2734026 - RNA, 20 nt, Human
uggcucagguggggucacuc

SEQ ID NO: 2734027 - RNA, 19 nt, Human
uuaaaagaaugauuaugaa

SEQ ID NO: 2734028 - RNA, 13 nt, Human
uuaaaagaaugau

SEQ ID NO: 2734029 - RNA, 18 nt, Human
uuaaacuuaaucuaaaug

SEQ ID NO: 2734030 - RNA, 16 nt, Human
uuaaacuuaaucuaaa

SEQ ID NO: 2734031 - RNA, 20 nt, Human
uuaaagcuuauuaaaacuca

SEQ ID NO: 2734032 - RNA, 20 nt, Human
uuaaacuuaaucuaaaugga

SEQ ID NO: 2734033 - RNA, 19 nt, Human
uuaaauagcuuuuuucucu

SEQ ID NO: 2734034 - RNA, 20 nt, Human
uuaaagcuuccauuguuguc

SEQ ID NO: 2734035 - RNA, 15 nt, Human
uuaaagcuuccauug

SEQ ID NO: 2734036 - RNA, 16 nt, Human
uuaaaugcaccuggaa

SEQ ID NO: 2734037 - RNA, 18 nt, Human
uuaaaugcaccuggaaua

SEQ ID NO: 2734038 - RNA, 17 nt, Human
uuaaaugcaccuggaau

SEQ ID NO: 2734039 - RNA, 17 nt, Human
uuaaaugcccagccccu

SEQ ID NO: 2734040 - RNA, 18 nt, Human
uuaaaugcccagccccuu

SEQ ID NO: 2734041 - RNA, 12 nt, Human
uuaacauguuaa

SEQ ID NO: 2734042 - RNA, 19 nt, Human
uuaacauguuaaaccaugg

SEQ ID NO: 2734043 - RNA, 18 nt, Human
uuaacauguuaaaccaug

SEQ ID NO: 2734044 - RNA, 20 nt, Human
uguuuccuggcacugcuucc

SEQ ID NO: 2734045 - RNA, 21 nt, Human
uguuuccuggcacugcuucca

SEQ ID NO: 2734046 - RNA, 22 nt, Human
uguuuccuggcacugcuuccag

SEQ ID NO: 2734047 - RNA, 12 nt, Human
uguuuguuuagu

SEQ ID NO: 2734048 - RNA, 17 nt, Human
uguuuguugucagcuga

SEQ ID NO: 2734049 - RNA, 16 nt, Human
uguuuguugucagcug

SEQ ID NO: 2734050 - RNA, 12 nt, Human
uguuuuaaaaaa

SEQ ID NO: 2734051 - RNA, 21 nt, Human
uguuuguuuagucuugucuca

SEQ ID NO: 2734052 - RNA, 13 nt, Human
uguuuuugucuua

SEQ ID NO: 2734053 - RNA, 18 nt, Human
uuaauaauguuucaaaca

SEQ ID NO: 2734054 - RNA, 18 nt, Human
uuaauaauuauaugcuau

SEQ ID NO: 2734055 - RNA, 16 nt, Human
uuaauagguuuggaca

SEQ ID NO: 2734056 - RNA, 23 nt, Human
uuaauaauuauaugcuauuucua

SEQ ID NO: 2734057 - RNA, 20 nt, Human
uuaauaauuauaugcuauuu

SEQ ID NO: 2734058 - RNA, 16 nt, Human
uuaauaauguuucaaa

SEQ ID NO: 2734059 - RNA, 22 nt, Human
uuaaggaugcuuguacauaaug

SEQ ID NO: 2734060 - RNA, 21 nt, Human
uuaaggaagacaaugugaaaa

SEQ ID NO: 2734061 - RNA, 20 nt, Human
uuaaggaugcuuguacauaa

SEQ ID NO: 2734062 - RNA, 19 nt, Human
uuaaggaugcuuguacaua

SEQ ID NO: 2734063 - RNA, 18 nt, Human
uuaaggaugcuuguacau

SEQ ID NO: 2734064 - RNA, 17 nt, Human
uuaaggaugcuuguaca

SEQ ID NO: 2734065 - RNA, 22 nt, Human
uuaaugucaauucuugccaaau

SEQ ID NO: 2734066 - RNA, 17 nt, Human
uuaaugucacaggcagg

SEQ ID NO: 2734067 - RNA, 18 nt, Human
uuaaugucacaggcaggu

SEQ ID NO: 2734068 - RNA, 21 nt, Human
uuaauagguuuggacaaaaug

SEQ ID NO: 2734069 - RNA, 14 nt, Human
uuacauuuguauaa

SEQ ID NO: 2734070 - RNA, 15 nt, Human
uuacauuuguauaaa

SEQ ID NO: 2734071 - RNA, 22 nt, Human
uuacauggcuggagcuagaauu

SEQ ID NO: 2734072 - RNA, 23 nt, Human
uuacauggcuggagcuagaauuu

SEQ ID NO: 2734073 - RNA, 21 nt, Human
uuaccacuuguguuuugcaag

SEQ ID NO: 2734074 - RNA, 14 nt, Human
uuaccagcagagca

SEQ ID NO: 2734075 - RNA, 23 nt, Human
uuacauuuuuaagugcugcauuu

SEQ ID NO: 2734076 - RNA, 22 nt, Human
uuacauuuuuaagugcugcauu

SEQ ID NO: 2734077 - RNA, 21 nt, Human
uuacauuuuuaagugcugcau

SEQ ID NO: 2734078 - RNA, 20 nt, Human
uuacauuuuuaagugcugca

SEQ ID NO: 2734079 - RNA, 16 nt, Human
uuacggaacucaaaua

SEQ ID NO: 2734080 - RNA, 20 nt, Human
uuacgguuuuccagguuuaa

SEQ ID NO: 2734081 - RNA, 22 nt, Human
uuaccuuuuuuauacauaaaca

SEQ ID NO: 2734082 - RNA, 20 nt, Human
uuaccuuuuuuauacauaaa

SEQ ID NO: 2734083 - RNA, 19 nt, Human
uuaccuuuuuuauacauaa

SEQ ID NO: 2734084 - RNA, 13 nt, Human
uguguuuauuguc

SEQ ID NO: 2734085 - RNA, 16 nt, Human
uguguagggcgggagg

SEQ ID NO: 2734086 - RNA, 17 nt, Human
ugugugaagugagugag

SEQ ID NO: 2734087 - RNA, 16 nt, Human
uguucacagccagacu

SEQ ID NO: 2734088 - RNA, 14 nt, Human
uguucagcuccagc

SEQ ID NO: 2734089 - RNA, 11 nt, Human
uguucagcugg

SEQ ID NO: 2734090 - RNA, 15 nt, Human
uguucagcuccagcu

SEQ ID NO: 2734091 - RNA, 16 nt, Human
uguucagcuccagcuc

SEQ ID NO: 2734092 - RNA, 14 nt, Human
uguuagugcaaauu

SEQ ID NO: 2734093 - RNA, 16 nt, Human
uguuagaucuaguuca

SEQ ID NO: 2734094 - RNA, 12 nt, Human
uguuauaaucuu

SEQ ID NO: 2734095 - RNA, 13 nt, Human
uguuacauuuuua

SEQ ID NO: 2734096 - RNA, 22 nt, Human
uguuacauuuuuaagugcugca

SEQ ID NO: 2734097 - RNA, 15 nt, Human
uguuacugucuucag

SEQ ID NO: 2734098 - RNA, 16 nt, Human
uguuacugucuucagu

SEQ ID NO: 2734099 - RNA, 23 nt, Human
uguuaaaccaugggauaaaugcc

SEQ ID NO: 2734100 - RNA, 16 nt, Human
uguuaaaccaugggau

SEQ ID NO: 2734101 - RNA, 18 nt, Human
uguuaaaccaugggauaa

SEQ ID NO: 2734102 - RNA, 21 nt, Human
uguuaaaccaugggauaaaug

SEQ ID NO: 2734103 - RNA, 20 nt, Human
uguuaaaccaugggauaaau

SEQ ID NO: 2734104 - RNA, 13 nt, Human
uguuuaaaaucau

SEQ ID NO: 2734105 - RNA, 14 nt, Human
uguuguuuguuuag

SEQ ID NO: 2734106 - RNA, 14 nt, Human
uguuggccaggcug

SEQ ID NO: 2734107 - RNA, 21 nt, Human
uguuggagaagaacugaaauc

SEQ ID NO: 2734108 - RNA, 11 nt, Human
uguuggccagg

SEQ ID NO: 2734109 - RNA, 19 nt, Human
uguugaagagguuuuaaag

SEQ ID NO: 2734110 - RNA, 13 nt, Human
uguucucugagga

SEQ ID NO: 2734111 - RNA, 16 nt, Human
uguucucugaggacac

SEQ ID NO: 2734112 - RNA, 18 nt, Human
uguucucugaggacacua

SEQ ID NO: 2734113 - RNA, 12 nt, Human
uguucucugccc

SEQ ID NO: 2734114 - RNA, 20 nt, Human
uguucaugaaagauucaaug

SEQ ID NO: 2734115 - RNA, 20 nt, Human
uguucuuuccaaaguacacu

SEQ ID NO: 2734116 - RNA, 20 nt, Human
uguugaaacggaugauuucu

SEQ ID NO: 2734117 - RNA, 22 nt, Human
uguucuuucuggcuaugcauuu

SEQ ID NO: 2734118 - RNA, 20 nt, Human
uguucuuucuggcuaugcau

SEQ ID NO: 2734119 - RNA, 11 nt, Human
uguugaaagau

SEQ ID NO: 2734120 - RNA, 23 nt, Human
uguugaaacggaugauuucuaug

SEQ ID NO: 2734121 - RNA, 22 nt, Human
uguugaaacggaugauuucuau

SEQ ID NO: 2734122 - RNA, 21 nt, Human
uguugaaacggaugauuucua

SEQ ID NO: 2734123 - RNA, 14 nt, Human
uguucuuucuggcu

SEQ ID NO: 2734124 - RNA, 18 nt, Human
uguucugacccugcuuca

SEQ ID NO: 2734125 - RNA, 15 nt, Human
uguucugacccugcu

SEQ ID NO: 2734126 - RNA, 19 nt, Human
uguucucugcccuccaaga

SEQ ID NO: 2734127 - RNA, 16 nt, Human
uguaugauucccagcc

SEQ ID NO: 2734128 - RNA, 16 nt, Human
uguauagaaccucuuu

SEQ ID NO: 2734129 - RNA, 16 nt, Human
uguaucccaugagccu

SEQ ID NO: 2734130 - RNA, 19 nt, Human
uguaucccaugagccucag

SEQ ID NO: 2734131 - RNA, 23 nt, Human
uguaucccaugagccucagcauc

SEQ ID NO: 2734132 - RNA, 16 nt, Human
uguagcacugacagau

SEQ ID NO: 2734133 - RNA, 17 nt, Human
uguagcacugacagauu

SEQ ID NO: 2734134 - RNA, 22 nt, Human
uguagcacugacagauuuccau

SEQ ID NO: 2734135 - RNA, 12 nt, Human
ugucagugugac

SEQ ID NO: 2734136 - RNA, 20 nt, Human
ugucagugugacugaucucu

SEQ ID NO: 2734137 - RNA, 23 nt, Human
ugucccaaaaagaaaggagggga

SEQ ID NO: 2734138 - RNA, 13 nt, Human
uguaaauuaacuu

SEQ ID NO: 2734139 - RNA, 17 nt, Human
uguaaauuaacuuuuau

SEQ ID NO: 2734140 - RNA, 16 nt, Human
uguaaauuaacuuuua

SEQ ID NO: 2734141 - RNA, 15 nt, Human
uguaaauuaacuuuu

SEQ ID NO: 2734142 - RNA, 14 nt, Human
uguaaauuaacuuu

SEQ ID NO: 2734143 - RNA, 20 nt, Human
uguaaaaugugaagugaaug

SEQ ID NO: 2734144 - RNA, 17 nt, Human
uguagauaauacaguuc

SEQ ID NO: 2734145 - RNA, 17 nt, Human
uguacgucugacaggca

SEQ ID NO: 2734146 - RNA, 16 nt, Human
uguacgucugacaggc

SEQ ID NO: 2734147 - RNA, 13 nt, Human
uguacucaauuuu

SEQ ID NO: 2734148 - RNA, 23 nt, Human
uguaccucuugagccuugaacuu

SEQ ID NO: 2734149 - RNA, 14 nt, Human
uguaccucuugagc

SEQ ID NO: 2734150 - RNA, 22 nt, Human
uguaccucuugagccuugaacu

SEQ ID NO: 2734151 - RNA, 20 nt, Human
ugugcgugcauguguguuca

SEQ ID NO: 2734152 - RNA, 23 nt, Human
ugugcgcuaaacuuuucugauag

SEQ ID NO: 2734153 - RNA, 22 nt, Human
ugugcgcuaaacuuuucugaua

SEQ ID NO: 2734154 - RNA, 19 nt, Human
ugugcgcuaaacuuuucug

SEQ ID NO: 2734155 - RNA, 14 nt, Human
ugugcgcuaaacuu

SEQ ID NO: 2734156 - RNA, 17 nt, Human
ugugccucugggacugg

SEQ ID NO: 2734157 - RNA, 16 nt, Human
ugugcacaugcacgug

SEQ ID NO: 2734158 - RNA, 22 nt, Human
ugugcacaugcacgugugugca

SEQ ID NO: 2734159 - RNA, 16 nt, Human
ugugccucugggacug

SEQ ID NO: 2734160 - RNA, 15 nt, Human
ugugccucugggacu

SEQ ID NO: 2734161 - RNA, 13 nt, Human
ugugccucuggga

SEQ ID NO: 2734162 - RNA, 15 nt, Human
uguggacacagcucu

SEQ ID NO: 2734163 - RNA, 16 nt, Human
uguggacacagcucuu

SEQ ID NO: 2734164 - RNA, 12 nt, Human
uguggagaagcg

SEQ ID NO: 2734165 - RNA, 21 nt, Human
uguggagaagcggcuggcagc

SEQ ID NO: 2734166 - RNA, 14 nt, Human
uguggacacagcuc

SEQ ID NO: 2734167 - RNA, 13 nt, Human
uguggacacagcu

SEQ ID NO: 2734168 - RNA, 12 nt, Human
ugugggaagggg

SEQ ID NO: 2734169 - RNA, 13 nt, Human
ugugaaaggaaag

SEQ ID NO: 2734170 - RNA, 14 nt, Human
ugugaaaggaaaga

SEQ ID NO: 2734171 - RNA, 20 nt, Human
ugugaaguuuacauuguaaa

SEQ ID NO: 2734172 - RNA, 14 nt, Human
ugugaaguuuacau

SEQ ID NO: 2734173 - RNA, 17 nt, Human
ugucuuuggacccugag

SEQ ID NO: 2734174 - RNA, 18 nt, Human
ugucuuuggacccugagg

SEQ ID NO: 2734175 - RNA, 16 nt, Human
ugucuuuuuucacuac

SEQ ID NO: 2734176 - RNA, 19 nt, Human
ugucuuuggacccugaggc

SEQ ID NO: 2734177 - RNA, 22 nt, Human
ugucuuuggacccugaggccca

SEQ ID NO: 2734178 - RNA, 21 nt, Human
ugugacaaggauugcuacugu

SEQ ID NO: 2734179 - RNA, 18 nt, Human
ugugaguacuacaguccu

SEQ ID NO: 2734180 - RNA, 23 nt, Human
ugugaguacuacaguccucccau

SEQ ID NO: 2734181 - RNA, 19 nt, Human
ugugaguacuacaguccuc

SEQ ID NO: 2734182 - RNA, 20 nt, Human
ugugaguacuacaguccucc

SEQ ID NO: 2734183 - RNA, 21 nt, Human
ugugauacaaugcugugcccu

SEQ ID NO: 2734184 - RNA, 16 nt, Human
uugggaggccauuugu

SEQ ID NO: 2734185 - RNA, 22 nt, Human
uuggcuuuggguugcaggaccu

SEQ ID NO: 2734186 - RNA, 15 nt, Human
uuggcuuuucugauc

SEQ ID NO: 2734187 - RNA, 22 nt, Human
uuggcuuuucugauccaguuuu

SEQ ID NO: 2734188 - RNA, 19 nt, Human
uuggcuuuucugauccagu

SEQ ID NO: 2734189 - RNA, 16 nt, Human
uuggguggaugccugg

SEQ ID NO: 2734190 - RNA, 21 nt, Human
uuggcugggggccucagugcc

SEQ ID NO: 2734191 - RNA, 22 nt, Human
uuggcugggggccucagugcca

SEQ ID NO: 2734192 - RNA, 18 nt, Human
uuggcugggggccucagu

SEQ ID NO: 2734193 - RNA, 16 nt, Human
uuggcugcugaaggcu

SEQ ID NO: 2734194 - RNA, 13 nt, Human
uuggcauucccca

SEQ ID NO: 2734195 - RNA, 14 nt, Human
uuggccaggcuggu

SEQ ID NO: 2734196 - RNA, 24 nt, Human
uuggccaaagccaaagcuaggccu

SEQ ID NO: 2734197 - RNA, 14 nt, Human
uuguauuacaaauc

SEQ ID NO: 2734198 - RNA, 21 nt, Human
uuguauucucuccuguaccuc

SEQ ID NO: 2734199 - RNA, 19 nt, Human
uuguaucacaaaucuuaac

SEQ ID NO: 2734200 - RNA, 14 nt, Human
uuguagagccaggg

SEQ ID NO: 2734201 - RNA, 15 nt, Human
uuguagagccagggu

SEQ ID NO: 2734202 - RNA, 18 nt, Human
uuguaaaugugcuuuuaa

SEQ ID NO: 2734203 - RNA, 14 nt, Human
uuguaaaugugcuu

SEQ ID NO: 2734204 - RNA, 11 nt, Human
uuguaaaugug

SEQ ID NO: 2734205 - RNA, 12 nt, Human
uuguacagacaa

SEQ ID NO: 2734206 - RNA, 13 nt, Human
uuguacagacaac

SEQ ID NO: 2734207 - RNA, 16 nt, Human
uuguaaaggaauuuaa

SEQ ID NO: 2734208 - RNA, 12 nt, Human
uugguccugcug

SEQ ID NO: 2734209 - RNA, 22 nt, Human
uuggucccccuuccauggacuu

SEQ ID NO: 2734210 - RNA, 16 nt, Human
uuggucccccuuccau

SEQ ID NO: 2734211 - RNA, 12 nt, Human
uuggaaaucuuu

SEQ ID NO: 2734212 - RNA, 15 nt, Human
uuggaaaucuuuaaa

SEQ ID NO: 2734213 - RNA, 23 nt, Human
uuggaaagaguaggaagacuuug

SEQ ID NO: 2734214 - RNA, 17 nt, Human
uuggcaaaaaggcagga

SEQ ID NO: 2734215 - RNA, 14 nt, Human
uuggauuguccccg

SEQ ID NO: 2734216 - RNA, 19 nt, Human
uuggaaggaacguccccug

SEQ ID NO: 2734217 - RNA, 11 nt, Human
uuggaaggaac

SEQ ID NO: 2734218 - RNA, 21 nt, Human
uuggaccaaaaaccaguauug

SEQ ID NO: 2734219 - RNA, 23 nt, Human
uugcccacgcuggagugcaguga

SEQ ID NO: 2734220 - RNA, 11 nt, Human
uugcccaggca

SEQ ID NO: 2734221 - RNA, 13 nt, Human
uugccagucaccc

SEQ ID NO: 2734222 - RNA, 18 nt, Human
uugccagucaccccggcc

SEQ ID NO: 2734223 - RNA, 11 nt, Human
uugccucugcc

SEQ ID NO: 2734224 - RNA, 14 nt, Human
uugccucugccucu

SEQ ID NO: 2734225 - RNA, 16 nt, Human
uugccucugccucuga

SEQ ID NO: 2734226 - RNA, 18 nt, Human
uugccucugccucugaca

SEQ ID NO: 2734227 - RNA, 22 nt, Human
uugcugauggugcaaugaccuu

SEQ ID NO: 2734228 - RNA, 19 nt, Human
uugcugauggugcaaugac

SEQ ID NO: 2734229 - RNA, 20 nt, Human
uugcugauggugcaaugacc

SEQ ID NO: 2734230 - RNA, 14 nt, Human
uucugagcauuuaa

SEQ ID NO: 2734231 - RNA, 15 nt, Human
uucugagaaagacua

SEQ ID NO: 2734232 - RNA, 17 nt, Human
uucuguccgagcuuuga

SEQ ID NO: 2734233 - RNA, 21 nt, Human
uucuguccgagcuuugaaaau

SEQ ID NO: 2734234 - RNA, 17 nt, Human
uucuguccuacucugug

SEQ ID NO: 2734235 - RNA, 23 nt, Human
uucuguggguuucuaaagcugcc

SEQ ID NO: 2734236 - RNA, 15 nt, Human
uucuuauuucauuuc

SEQ ID NO: 2734237 - RNA, 23 nt, Human
uucuuauuuaaugaaagacugua

SEQ ID NO: 2734238 - RNA, 19 nt, Human
uucuuauuuaaugaaagac

SEQ ID NO: 2734239 - RNA, 16 nt, Human
uucuugguuuguaaau

SEQ ID NO: 2734240 - RNA, 13 nt, Human
uucuugguuugua

SEQ ID NO: 2734241 - RNA, 23 nt, Human
uucuugguuuguaaauuaacuuu

SEQ ID NO: 2734242 - RNA, 18 nt, Human
uucuugguuuguaaauua

SEQ ID NO: 2734243 - RNA, 17 nt, Human
uucuugguuuguaaauu

SEQ ID NO: 2734244 - RNA, 23 nt, Human
uugaaaagacuccaaagaaaugu

SEQ ID NO: 2734245 - RNA, 22 nt, Human
uugaaaagacuccaaagaaaug

SEQ ID NO: 2734246 - RNA, 18 nt, Human
uugaaaagacuccaaaga

SEQ ID NO: 2734247 - RNA, 16 nt, Human
uugaaaagacuccaaa

SEQ ID NO: 2734248 - RNA, 23 nt, Human
uugaaacugagaugugaacacau

SEQ ID NO: 2734249 - RNA, 21 nt, Human
uugaaacggaugauuucuaug

SEQ ID NO: 2734250 - RNA, 20 nt, Human
uugaaacggaugauuucuau

SEQ ID NO: 2734251 - RNA, 22 nt, Human
uugaaacggaugauuucuaugc

SEQ ID NO: 2734252 - RNA, 18 nt, Human
uucuuuauaauucuacuu

SEQ ID NO: 2734253 - RNA, 19 nt, Human
uugaaaacacuguucucug

SEQ ID NO: 2734254 - RNA, 21 nt, Human
uugaaaacacuguucucugcc

SEQ ID NO: 2734255 - RNA, 20 nt, Human
uugaacuuugaccucugcag

SEQ ID NO: 2734256 - RNA, 22 nt, Human
uugaacuuugaccucugcagca

SEQ ID NO: 2734257 - RNA, 19 nt, Human
uugaacucuucaaucucuu

SEQ ID NO: 2734258 - RNA, 16 nt, Human
uugaacugauaaagau

SEQ ID NO: 2734259 - RNA, 21 nt, Human
uugaaucucauaauuuauaca

SEQ ID NO: 2734260 - RNA, 15 nt, Human
uugaaucucauaauu

SEQ ID NO: 2734261 - RNA, 19 nt, Human
uugaagacuuuucuuucag

SEQ ID NO: 2734262 - RNA, 17 nt, Human
uugaagacagagcuaca

SEQ ID NO: 2734263 - RNA, 15 nt, Human
uugaggacacugaua

SEQ ID NO: 2734264 - RNA, 14 nt, Human
uugaggacacugau

SEQ ID NO: 2734265 - RNA, 19 nt, Human
uugauagcacagacccugc

SEQ ID NO: 2734266 - RNA, 20 nt, Human
uugauagcacagacccugcc

SEQ ID NO: 2734267 - RNA, 20 nt, Human
uugacgccaucccagcccca

SEQ ID NO: 2734268 - RNA, 22 nt, Human
uugaccugaggcccuucucucc

SEQ ID NO: 2734269 - RNA, 12 nt, Human
uugaccugaggc

SEQ ID NO: 2734270 - RNA, 19 nt, Human
uugaccugaggcccuucuc

SEQ ID NO: 2734271 - RNA, 15 nt, Human
uugacgccaucccag

SEQ ID NO: 2734272 - RNA, 22 nt, Human
uugacgccaucccagccccaau

SEQ ID NO: 2734273 - RNA, 14 nt, Human
uugacgccauccca

SEQ ID NO: 2734274 - RNA, 15 nt, Human
uugaccucaggugau

SEQ ID NO: 2734275 - RNA, 20 nt, Human
uugaccgugaggccagagac

SEQ ID NO: 2734276 - RNA, 21 nt, Human
uugaccgugaggccagagaca

SEQ ID NO: 2734277 - RNA, 18 nt, Human
uugcauagauucccugag

SEQ ID NO: 2734278 - RNA, 16 nt, Human
uugcagacaggcaagc

SEQ ID NO: 2734279 - RNA, 22 nt, Human
uugcagacaggcaagcaccucc

SEQ ID NO: 2734280 - RNA, 12 nt, Human
uugaugaagaag

SEQ ID NO: 2734281 - RNA, 21 nt, Human
uugauagcacagacccugccc

SEQ ID NO: 2734282 - RNA, 14 nt, Human
uugcaacaggcugg

SEQ ID NO: 2734283 - RNA, 17 nt, Human
uugcaacaggcugggcu

SEQ ID NO: 2734284 - RNA, 18 nt, Human
uugauuuccguuaaaaua

SEQ ID NO: 2734285 - RNA, 21 nt, Human
uucagagcugcccucuccugg

SEQ ID NO: 2734286 - RNA, 22 nt, Human
uucagagcugcccucuccuggg

SEQ ID NO: 2734287 - RNA, 23 nt, Human
uucagagcugcccucuccugggc

SEQ ID NO: 2734288 - RNA, 11 nt, Human
uucacugauuu

SEQ ID NO: 2734289 - RNA, 15 nt, Human
uucagagacuccugc

SEQ ID NO: 2734290 - RNA, 14 nt, Human
uucacucuccuugg

SEQ ID NO: 2734291 - RNA, 17 nt, Human
uucagcucugcaagaau

SEQ ID NO: 2734292 - RNA, 24 nt, Human
uucagcucugcaagaauugaagca

SEQ ID NO: 2734293 - RNA, 23 nt, Human
uucagcuccagcucaccagcccc

SEQ ID NO: 2734294 - RNA, 17 nt, Human
uucagcugacuuuucug

SEQ ID NO: 2734295 - RNA, 16 nt, Human
uucaggaagcucaggg

SEQ ID NO: 2734296 - RNA, 15 nt, Human
uucaggaagcucagg

SEQ ID NO: 2734297 - RNA, 20 nt, Human
uucaggaagcucagggccug

SEQ ID NO: 2734298 - RNA, 17 nt, Human
uucaggaagcucagggc

SEQ ID NO: 2734299 - RNA, 19 nt, Human
uucaggaagcucagggccu

SEQ ID NO: 2734300 - RNA, 18 nt, Human
uucaauucucauuuguca

SEQ ID NO: 2734301 - RNA, 19 nt, Human
uucaaugccccugaauuua

SEQ ID NO: 2734302 - RNA, 13 nt, Human
uucaaagauauuu

SEQ ID NO: 2734303 - RNA, 18 nt, Human
uuacuaaaauggacugug

SEQ ID NO: 2734304 - RNA, 17 nt, Human
uuacuaaaauggacugu

SEQ ID NO: 2734305 - RNA, 16 nt, Human
uuacuaaaauggacug

SEQ ID NO: 2734306 - RNA, 15 nt, Human
uuacuaaaauggacu

SEQ ID NO: 2734307 - RNA, 13 nt, Human
uuacgugaguccu

SEQ ID NO: 2734308 - RNA, 14 nt, Human
uuacgugaguccug

SEQ ID NO: 2734309 - RNA, 21 nt, Human
uuccauccuagucacuaccuu

SEQ ID NO: 2734310 - RNA, 17 nt, Human
uuccaugaguccccugu

SEQ ID NO: 2734311 - RNA, 19 nt, Human
uucagugccuuauggaaca

SEQ ID NO: 2734312 - RNA, 21 nt, Human
uucagugccuuauggaacacu

SEQ ID NO: 2734313 - RNA, 13 nt, Human
uucauaaugacuu

SEQ ID NO: 2734314 - RNA, 23 nt, Human
uucauaaugacuuaagcacacuu

SEQ ID NO: 2734315 - RNA, 19 nt, Human
uucauuuaggugaggaagc

SEQ ID NO: 2734316 - RNA, 20 nt, Human
uucaucuuccaacucaaacu

SEQ ID NO: 2734317 - RNA, 11 nt, Human
uucaucuugaa

SEQ ID NO: 2734318 - RNA, 17 nt, Human
uucaucugacuaugaca

SEQ ID NO: 2734319 - RNA, 18 nt, Human
uucaugaaagauucaaug

SEQ ID NO: 2734320 - RNA, 12 nt, Human
uucaucuugaau

SEQ ID NO: 2734321 - RNA, 20 nt, Human
uucaucugacuaugacauaa

SEQ ID NO: 2734322 - RNA, 18 nt, Human
uucuaaaggcuaccuuug

SEQ ID NO: 2734323 - RNA, 17 nt, Human
uucuaaaggcuaccuuu

SEQ ID NO: 2734324 - RNA, 16 nt, Human
uucuaaaggcuaccuu

SEQ ID NO: 2734325 - RNA, 19 nt, Human
uuccuucauucaacccacc

SEQ ID NO: 2734326 - RNA, 23 nt, Human
uuccuucagugccuuauggaaca

SEQ ID NO: 2734327 - RNA, 16 nt, Human
uuccuucagugccuua

SEQ ID NO: 2734328 - RNA, 19 nt, Human
uuccuucagugccuuaugg

SEQ ID NO: 2734329 - RNA, 15 nt, Human
uuccuucagugccuu

SEQ ID NO: 2734330 - RNA, 17 nt, Human
uuccuucugugaaagua

SEQ ID NO: 2734331 - RNA, 20 nt, Human
uuccuucugugaaaguacau

SEQ ID NO: 2734332 - RNA, 12 nt, Human
uuccuagugaaa

SEQ ID NO: 2734333 - RNA, 23 nt, Human
uuccucauaguaugguggcuggg

SEQ ID NO: 2734334 - RNA, 21 nt, Human
uuccucccucccucuuucccu

SEQ ID NO: 2734335 - RNA, 19 nt, Human
uuccucccucccucuuucc

SEQ ID NO: 2734336 - RNA, 12 nt, Human
uuccucccuccc

SEQ ID NO: 2734337 - RNA, 22 nt, Human
uuccucccucccucuuucccuc

SEQ ID NO: 2734338 - RNA, 18 nt, Human
uucccuugaugaagaagu

SEQ ID NO: 2734339 - RNA, 19 nt, Human
uucccuuugacgccauccc

SEQ ID NO: 2734340 - RNA, 22 nt, Human
uuccccacuugagaauuacccu

SEQ ID NO: 2734341 - RNA, 23 nt, Human
uucucuccucuccccaugauguu

SEQ ID NO: 2734342 - RNA, 22 nt, Human
uucucuccuguaccucuugagc

SEQ ID NO: 2734343 - RNA, 18 nt, Human
uucucuccagccccugga

SEQ ID NO: 2734344 - RNA, 11 nt, Human
uucuccaggcu

SEQ ID NO: 2734345 - RNA, 13 nt, Human
uucuccacccugc

SEQ ID NO: 2734346 - RNA, 16 nt, Human
uucuccaagcaggaca

SEQ ID NO: 2734347 - RNA, 21 nt, Human
uucugacccaugcugcccugu

SEQ ID NO: 2734348 - RNA, 16 nt, Human
uucugacccaugcugc

SEQ ID NO: 2734349 - RNA, 18 nt, Human
uucugacccaugcugccc

SEQ ID NO: 2734350 - RNA, 20 nt, Human
uucugacccaugcugcccug

SEQ ID NO: 2734351 - RNA, 17 nt, Human
uucucugauacagaaaa

SEQ ID NO: 2734352 - RNA, 14 nt, Human
uucucugauacaga

SEQ ID NO: 2734353 - RNA, 16 nt, Human
uucucugauacagaaa

SEQ ID NO: 2734354 - RNA, 15 nt, Human
uucucugauacagaa

SEQ ID NO: 2734355 - RNA, 17 nt, Human
uucuaugcugaguuugu

SEQ ID NO: 2734356 - RNA, 14 nt, Human
uucuauauuuucau

SEQ ID NO: 2734357 - RNA, 11 nt, Human
uucuauauuuu

SEQ ID NO: 2734358 - RNA, 17 nt, Human
uucuaugacacaugcaa

SEQ ID NO: 2734359 - RNA, 16 nt, Human
uucuaugacacaugca

SEQ ID NO: 2734360 - RNA, 21 nt, Human
uucuauauuuucauucuccua

SEQ ID NO: 2734361 - RNA, 18 nt, Human
uucuauauuuucauucuc

SEQ ID NO: 2734362 - RNA, 16 nt, Human
uucuauauuuucauuc

SEQ ID NO: 2734363 - RNA, 15 nt, Human
uucuauauuuucauu

SEQ ID NO: 2734364 - RNA, 14 nt, Human
uucuauuguuucuu

SEQ ID NO: 2734365 - RNA, 21 nt, Human
uuucagauaaucacaauacau

SEQ ID NO: 2734366 - RNA, 15 nt, Human
uuucagcagcugcag

SEQ ID NO: 2734367 - RNA, 15 nt, Human
uuucagauaaucaca

SEQ ID NO: 2734368 - RNA, 19 nt, Human
uuucaauaggaaaaacuga

SEQ ID NO: 2734369 - RNA, 20 nt, Human
uuucaauaggaaaaacugau

SEQ ID NO: 2734370 - RNA, 22 nt, Human
uuucaauaggaaaaacugauuu

SEQ ID NO: 2734371 - RNA, 13 nt, Human
uuuccaggaaggc

SEQ ID NO: 2734372 - RNA, 14 nt, Human
uuuccaaaauaauu

SEQ ID NO: 2734373 - RNA, 15 nt, Human
uuuccaaaguacacu

SEQ ID NO: 2734374 - RNA, 12 nt, Human
uuuccaaaguac

SEQ ID NO: 2734375 - RNA, 22 nt, Human
uuucauugcugggcuugucugu

SEQ ID NO: 2734376 - RNA, 15 nt, Human
uuucagccaagaauu

SEQ ID NO: 2734377 - RNA, 15 nt, Human
uuucugagaaagacu

SEQ ID NO: 2734378 - RNA, 14 nt, Human
uuucucuuucguua

SEQ ID NO: 2734379 - RNA, 22 nt, Human
uuucugagaaagacuauucaaa

SEQ ID NO: 2734380 - RNA, 15 nt, Human
uuucuagccagagga

SEQ ID NO: 2734381 - RNA, 16 nt, Human
uuucuaggacugaauu

SEQ ID NO: 2734382 - RNA, 21 nt, Human
uuuccucuuuggucuacacug

SEQ ID NO: 2734383 - RNA, 14 nt, Human
uuucuaaaggcuac

SEQ ID NO: 2734384 - RNA, 14 nt, Human
uuucuaaagcugcc

SEQ ID NO: 2734385 - RNA, 17 nt, Human
uuucuaaagcugccagc

SEQ ID NO: 2734386 - RNA, 12 nt, Human
uuuagaaacaca

SEQ ID NO: 2734387 - RNA, 20 nt, Human
uuuacauuguaaauaguauu

SEQ ID NO: 2734388 - RNA, 15 nt, Human
uuuacauuguaaaua

SEQ ID NO: 2734389 - RNA, 15 nt, Human
uuuacuuuguguuca

SEQ ID NO: 2734390 - RNA, 22 nt, Human
uuuacauggcuggagcuagaau

SEQ ID NO: 2734391 - RNA, 13 nt, Human
uuuacauuguaaa

SEQ ID NO: 2734392 - RNA, 20 nt, Human
uuuagaaacacaacuauauu

SEQ ID NO: 2734393 - RNA, 17 nt, Human
uuuacauggcuggagcu

SEQ ID NO: 2734394 - RNA, 19 nt, Human
uuuauuuaguuccuugagu

SEQ ID NO: 2734395 - RNA, 14 nt, Human
uuuauugucaaagu

SEQ ID NO: 2734396 - RNA, 16 nt, Human
uuuauugucaaagugg

SEQ ID NO: 2734397 - RNA, 21 nt, Human
uuuauuggcuuuucugaucca

SEQ ID NO: 2734398 - RNA, 17 nt, Human
uuuauuggcuuuucuga

SEQ ID NO: 2734399 - RNA, 13 nt, Human
uuuaugauccagc

SEQ ID NO: 2734400 - RNA, 21 nt, Human
uuuaucgucacugcuuaacuu

SEQ ID NO: 2734401 - RNA, 16 nt, Human
uuuauaaacuuuaccu

SEQ ID NO: 2734402 - RNA, 16 nt, Human
uuuaucgucacugcuu

SEQ ID NO: 2734403 - RNA, 14 nt, Human
uuuauaaacuuuac

SEQ ID NO: 2734404 - RNA, 21 nt, Human
uuuguauaaaauaauuuuuau

SEQ ID NO: 2734405 - RNA, 22 nt, Human
uuuguaaauuaacuuuuauaaa

SEQ ID NO: 2734406 - RNA, 11 nt, Human
uuuguauagaa

SEQ ID NO: 2734407 - RNA, 19 nt, Human
uuuggugguuucagaaaug

SEQ ID NO: 2734408 - RNA, 15 nt, Human
uuuguaaauuaacuu

SEQ ID NO: 2734409 - RNA, 17 nt, Human
uuuguaaauuaacuuuu

SEQ ID NO: 2734410 - RNA, 16 nt, Human
uuuguaaauuaacuuu

SEQ ID NO: 2734411 - RNA, 13 nt, Human
uuuguccccaccg

SEQ ID NO: 2734412 - RNA, 21 nt, Human
uuuguccccaccgcagacagg

SEQ ID NO: 2734413 - RNA, 12 nt, Human
uuuguguuagag

SEQ ID NO: 2734414 - RNA, 16 nt, Human
uuuguugucagcugaa

SEQ ID NO: 2734415 - RNA, 14 nt, Human
uuuguuguuuguuu

SEQ ID NO: 2734416 - RNA, 12 nt, Human
uuuguuguuugu

SEQ ID NO: 2734417 - RNA, 13 nt, Human
uuuguucauacau

SEQ ID NO: 2734418 - RNA, 16 nt, Human
uuuguucauacauauu

SEQ ID NO: 2734419 - RNA, 21 nt, Human
uuugcauagauucccugagca

SEQ ID NO: 2734420 - RNA, 23 nt, Human
uuuggaacaagaugguucuagca

SEQ ID NO: 2734421 - RNA, 18 nt, Human
uuugccauguuggccagg

SEQ ID NO: 2734422 - RNA, 16 nt, Human
uuuggaaaucuuuaaa

SEQ ID NO: 2734423 - RNA, 14 nt, Human
uuugcagacaggca

SEQ ID NO: 2734424 - RNA, 22 nt, Human
uuugaggucuguucuuuccaaa

SEQ ID NO: 2734425 - RNA, 17 nt, Human
uuugaggucuguucuuu

SEQ ID NO: 2734426 - RNA, 15 nt, Human
uuugagcagggcuca

SEQ ID NO: 2734427 - RNA, 10 nt, Human
uuuuauauuu

SEQ ID NO: 2734428 - RNA, 18 nt, Human
uuuuaucgucacugcuua

SEQ ID NO: 2734429 - RNA, 15 nt, Human
uuuuauaugcuucug

SEQ ID NO: 2734430 - RNA, 20 nt, Human
uuuuauaugcuucuguuuua

SEQ ID NO: 2734431 - RNA, 19 nt, Human
uuuguuguuuguuuagucu

SEQ ID NO: 2734432 - RNA, 22 nt, Human
uuuuacauaaauuuaguauuuu

SEQ ID NO: 2734433 - RNA, 17 nt, Human
uuuuaauuugguuuuca

SEQ ID NO: 2734434 - RNA, 21 nt, Human
uuuuaauuugguuuucacauu

SEQ ID NO: 2734435 - RNA, 13 nt, Human
uuuuccugaaaac

SEQ ID NO: 2734436 - RNA, 16 nt, Human
uuuucagaaaauauua

SEQ ID NO: 2734437 - RNA, 18 nt, Human
uuuuccaugaguccccug

SEQ ID NO: 2734438 - RNA, 19 nt, Human
uuuuccaugaguccccugu

SEQ ID NO: 2734439 - RNA, 15 nt, Human
uuuuccuucagugcc

SEQ ID NO: 2734440 - RNA, 17 nt, Human
uuuucuugcaugaggcu

SEQ ID NO: 2734441 - RNA, 14 nt, Human
uuuucuucucccuc

SEQ ID NO: 2734442 - RNA, 15 nt, Human
uuuuaugauccagca

SEQ ID NO: 2734443 - RNA, 13 nt, Human
uuuuaugauccag

SEQ ID NO: 2734444 - RNA, 15 nt, Human
uuuucagaaaauauu

SEQ ID NO: 2734445 - RNA, 13 nt, Human
uuuucacauaucu

SEQ ID NO: 2734446 - RNA, 16 nt, Human
uuuucacauaucuagu

SEQ ID NO: 2734447 - RNA, 15 nt, Human
uuuucacaguucucu

SEQ ID NO: 2734448 - RNA, 12 nt, Human
uuuuuucugaaa

SEQ ID NO: 2734449 - RNA, 17 nt, Human
uuuuuuccuucagugcc

SEQ ID NO: 2734450 - RNA, 12 nt, Human
uuuuuuacuaau

SEQ ID NO: 2734451 - RNA, 13 nt, Human
auaauguuucaaa

SEQ ID NO: 2734452 - RNA, 18 nt, Human
auaaggguaucuggugac

SEQ ID NO: 2734453 - RNA, 18 nt, Human
auaauguuucaaacauau

SEQ ID NO: 2734454 - RNA, 22 nt, Human
auacacuuacacuuuaugcaca

SEQ ID NO: 2734455 - RNA, 13 nt, Human
auacacuuacacu

SEQ ID NO: 2734456 - RNA, 17 nt, Human
auacaaugcugugcccu

SEQ ID NO: 2734457 - RNA, 14 nt, Human
auacaaugcugugc

SEQ ID NO: 2734458 - RNA, 13 nt, Human
auacccaccccca

SEQ ID NO: 2734459 - RNA, 14 nt, Human
auacccacccccac

SEQ ID NO: 2734460 - RNA, 16 nt, Human
auacccacccccaccc

SEQ ID NO: 2734461 - RNA, 17 nt, Human
auacccacccccaccca

SEQ ID NO: 2734462 - RNA, 13 nt, Human
auacagaaaaguu

SEQ ID NO: 2734463 - RNA, 17 nt, Human
auacccagaaaguuauu

SEQ ID NO: 2734464 - RNA, 13 nt, Human
auaccuguccccc

SEQ ID NO: 2734465 - RNA, 14 nt, Human
auaccugucccccu

SEQ ID NO: 2734466 - RNA, 15 nt, Human
auaccugucccccug

SEQ ID NO: 2734467 - RNA, 16 nt, Human
auaccugucccccuga

SEQ ID NO: 2734468 - RNA, 14 nt, Human
auaacaaugaaagu

SEQ ID NO: 2734469 - RNA, 15 nt, Human
auaacaaugcuguau

SEQ ID NO: 2734470 - RNA, 17 nt, Human
auaacaaugcuguauuu

SEQ ID NO: 2734471 - RNA, 19 nt, Human
auaacaaugcuguauuuua

SEQ ID NO: 2734472 - RNA, 20 nt, Human
auaacaaugcuguauuuuaa

SEQ ID NO: 2734473 - RNA, 21 nt, Human
auaacaaugcuguauuuuaaa

SEQ ID NO: 2734474 - RNA, 18 nt, Human
auaacauguaauuaagua

SEQ ID NO: 2734475 - RNA, 13 nt, Human
auaacauguaauu

SEQ ID NO: 2734476 - RNA, 12 nt, Human
auaacauguaau

SEQ ID NO: 2734477 - RNA, 20 nt, Human
auaacauguaauuaaguacu

SEQ ID NO: 2734478 - RNA, 20 nt, Human
aguuugagaucagccugggc

SEQ ID NO: 2734479 - RNA, 16 nt, Human
aguuugauuaaauucu

SEQ ID NO: 2734480 - RNA, 18 nt, Human
aguuugagaucagccugg

SEQ ID NO: 2734481 - RNA, 19 nt, Human
aguuugagaucagccuggg

SEQ ID NO: 2734482 - RNA, 22 nt, Human
aguuugauuaaauucuugcaaa

SEQ ID NO: 2734483 - RNA, 20 nt, Human
aguuugauuaaauucuugca

SEQ ID NO: 2734484 - RNA, 18 nt, Human
aguuugauuaaauucuug

SEQ ID NO: 2734485 - RNA, 17 nt, Human
aguuugauuaaauucuu

SEQ ID NO: 2734486 - RNA, 22 nt, Human
aguuguuacauuuuuaagugcu

SEQ ID NO: 2734487 - RNA, 20 nt, Human
aguuguuacauuuuuaagug

SEQ ID NO: 2734488 - RNA, 19 nt, Human
aguuguuacauuuuuaagu

SEQ ID NO: 2734489 - RNA, 22 nt, Human
auaaaaagccugcaauuucaua

SEQ ID NO: 2734490 - RNA, 23 nt, Human
aguuugauuaaauucuugcaaag

SEQ ID NO: 2734491 - RNA, 20 nt, Human
auaaaaagccugcaauuuca

SEQ ID NO: 2734492 - RNA, 13 nt, Human
auauuauguuaaa

SEQ ID NO: 2734493 - RNA, 17 nt, Human
auauuauguguuuccau

SEQ ID NO: 2734494 - RNA, 20 nt, Human
auaugcucugcauguuacau

SEQ ID NO: 2734495 - RNA, 22 nt, Human
auaugcacacauuuuuuaaaug

SEQ ID NO: 2734496 - RNA, 17 nt, Human
auaugcucugcauguua

SEQ ID NO: 2734497 - RNA, 16 nt, Human
auaugcucugcauguu

SEQ ID NO: 2734498 - RNA, 14 nt, Human
auauuauguuaaaa

SEQ ID NO: 2734499 - RNA, 17 nt, Human
auauucaggaagcucag

SEQ ID NO: 2734500 - RNA, 19 nt, Human
auauucaggaagcucaggg

SEQ ID NO: 2734501 - RNA, 18 nt, Human
auauauuuuuuucugaaa

SEQ ID NO: 2734502 - RNA, 20 nt, Human
auauauuuuuauauuuacua

SEQ ID NO: 2734503 - RNA, 19 nt, Human
auauauuuuuauauuuacu

SEQ ID NO: 2734504 - RNA, 18 nt, Human
auauauuuuuauauuuac

SEQ ID NO: 2734505 - RNA, 15 nt, Human
auagcacagacccug

SEQ ID NO: 2734506 - RNA, 17 nt, Human
auagcacagacccugcc

SEQ ID NO: 2734507 - RNA, 18 nt, Human
auagcacagacccugccc

SEQ ID NO: 2734508 - RNA, 18 nt, Human
auagguuuggacaaaaug

SEQ ID NO: 2734509 - RNA, 24 nt, Human
auagguuuggacaaaauggaauac

SEQ ID NO: 2734510 - RNA, 15 nt, Human
auagccuaggugaca

SEQ ID NO: 2734511 - RNA, 17 nt, Human
auagccuaggugacaga

SEQ ID NO: 2734512 - RNA, 11 nt, Human
aguccaagcau

SEQ ID NO: 2734513 - RNA, 19 nt, Human
aguccucuuuucugagagg

SEQ ID NO: 2734514 - RNA, 22 nt, Human
aguccucuuuucugagaggacu

SEQ ID NO: 2734515 - RNA, 20 nt, Human
aguccuuaccagcagagcac

SEQ ID NO: 2734516 - RNA, 20 nt, Human
agugaauucuugaaggaaaa

SEQ ID NO: 2734517 - RNA, 17 nt, Human
agucugaaggcuggguu

SEQ ID NO: 2734518 - RNA, 19 nt, Human
aguccuuaccagcagagca

SEQ ID NO: 2734519 - RNA, 21 nt, Human
aguaugaggcauuuguuugaa

SEQ ID NO: 2734520 - RNA, 20 nt, Human
aguaugaggcauuuguuuga

SEQ ID NO: 2734521 - RNA, 18 nt, Human
aguauuuuugacagaaua

SEQ ID NO: 2734522 - RNA, 16 nt, Human
aguauuuuugacagaa

SEQ ID NO: 2734523 - RNA, 17 nt, Human
aguauuuuugacagaau

SEQ ID NO: 2734524 - RNA, 13 nt, Human
aguauuuuugaca

SEQ ID NO: 2734525 - RNA, 17 nt, Human
aguauuuuguuucagug

SEQ ID NO: 2734526 - RNA, 17 nt, Human
aguaugaggcauuuguu

SEQ ID NO: 2734527 - RNA, 14 nt, Human
aguauuuuguuuca

SEQ ID NO: 2734528 - RNA, 23 nt, Human
aguaugaggcauuuguuugaacu

SEQ ID NO: 2734529 - RNA, 22 nt, Human
agucacacaguauuacuucugc

SEQ ID NO: 2734530 - RNA, 18 nt, Human
aguacguugugcauuugg

SEQ ID NO: 2734531 - RNA, 17 nt, Human
aguacguugugcauuug

SEQ ID NO: 2734532 - RNA, 16 nt, Human
aguacguugugcauuu

SEQ ID NO: 2734533 - RNA, 14 nt, Human
aguacuauaauuua

SEQ ID NO: 2734534 - RNA, 19 nt, Human
aguacuacaguccucccau

SEQ ID NO: 2734535 - RNA, 22 nt, Human
aguacuacaguccucccaucuc

SEQ ID NO: 2734536 - RNA, 14 nt, Human
aguacuauguauca

SEQ ID NO: 2734537 - RNA, 12 nt, Human
aguacuauguau

SEQ ID NO: 2734538 - RNA, 17 nt, Human
aguacuucuccacccug

SEQ ID NO: 2734539 - RNA, 12 nt, Human
aguacuucuuuu

SEQ ID NO: 2734540 - RNA, 22 nt, Human
aguacuucuccacccugcucuc

SEQ ID NO: 2734541 - RNA, 14 nt, Human
aguacguugugcau

SEQ ID NO: 2734542 - RNA, 15 nt, Human
aguacguugugcauu

SEQ ID NO: 2734543 - RNA, 16 nt, Human
aggucuguucuuucca

SEQ ID NO: 2734544 - RNA, 15 nt, Human
aggucuguucuuucc

SEQ ID NO: 2734545 - RNA, 13 nt, Human
aggucuguucuuu

SEQ ID NO: 2734546 - RNA, 19 nt, Human
aguaacaaugaagauaaaa

SEQ ID NO: 2734547 - RNA, 23 nt, Human
aguaaaugcuagguuaauuccaa

SEQ ID NO: 2734548 - RNA, 11 nt, Human
aguaaaugcua

SEQ ID NO: 2734549 - RNA, 22 nt, Human
aguaaaugcuagguuaauucca

SEQ ID NO: 2734550 - RNA, 14 nt, Human
agugauucuccugc

SEQ ID NO: 2734551 - RNA, 18 nt, Human
agugccuuacacaauggu

SEQ ID NO: 2734552 - RNA, 15 nt, Human
agugauucuccugcc

SEQ ID NO: 2734553 - RNA, 17 nt, Human
agugauucuccugccuc

SEQ ID NO: 2734554 - RNA, 14 nt, Human
agugauccucccac

SEQ ID NO: 2734555 - RNA, 15 nt, Human
agugauccucccacc

SEQ ID NO: 2734556 - RNA, 18 nt, Human
agugauccucccaccuca

SEQ ID NO: 2734557 - RNA, 23 nt, Human
agugauccucccaccucagccuc

SEQ ID NO: 2734558 - RNA, 24 nt, Human
agugauccucccaccucagccucc

SEQ ID NO: 2734559 - RNA, 16 nt, Human
agugccuuauggaaca

SEQ ID NO: 2734560 - RNA, 10 nt, Human
agugccuuau

SEQ ID NO: 2734561 - RNA, 13 nt, Human
agugccuuaugga

SEQ ID NO: 2734562 - RNA, 14 nt, Human
agugccuuauggaa

SEQ ID NO: 2734563 - RNA, 15 nt, Human
agugccuuauggaac

SEQ ID NO: 2734564 - RNA, 23 nt, Human
aguucagagcugcccucuccugg

SEQ ID NO: 2734565 - RNA, 21 nt, Human
aguucagagcugcccucuccu

SEQ ID NO: 2734566 - RNA, 22 nt, Human
aguucagagcugcccucuccug

SEQ ID NO: 2734567 - RNA, 20 nt, Human
aguucagagcugcccucucc

SEQ ID NO: 2734568 - RNA, 19 nt, Human
aguucagagcugcccucuc

SEQ ID NO: 2734569 - RNA, 18 nt, Human
aguucagguaacaggcag

SEQ ID NO: 2734570 - RNA, 13 nt, Human
aguucaucuugaa

SEQ ID NO: 2734571 - RNA, 15 nt, Human
aguucaucuugaauu

SEQ ID NO: 2734572 - RNA, 19 nt, Human
aguucaucuugaauuguaa

SEQ ID NO: 2734573 - RNA, 18 nt, Human
aguugaaaagacuccaaa

SEQ ID NO: 2734574 - RNA, 14 nt, Human
aguugaaaagacuc

SEQ ID NO: 2734575 - RNA, 20 nt, Human
aguugaaaagacuccaaaga

SEQ ID NO: 2734576 - RNA, 19 nt, Human
aguugaaaagacuccaaag

SEQ ID NO: 2734577 - RNA, 16 nt, Human
aguugauacuacaguu

SEQ ID NO: 2734578 - RNA, 20 nt, Human
augaaguccaagcauuuaga

SEQ ID NO: 2734579 - RNA, 23 nt, Human
augaaguccaagcauuuagaugu

SEQ ID NO: 2734580 - RNA, 22 nt, Human
augaggcauuuguuugaacuga

SEQ ID NO: 2734581 - RNA, 21 nt, Human
augaggcauuuguuugaacug

SEQ ID NO: 2734582 - RNA, 14 nt, Human
augaggcauuuguu

SEQ ID NO: 2734583 - RNA, 13 nt, Human
augaggcauuugu

SEQ ID NO: 2734584 - RNA, 16 nt, Human
augaaaacacauuuuu

SEQ ID NO: 2734585 - RNA, 15 nt, Human
augaaaacacauuuu

SEQ ID NO: 2734586 - RNA, 14 nt, Human
augaaaacacauuu

SEQ ID NO: 2734587 - RNA, 14 nt, Human
aucuaguaugaaau

SEQ ID NO: 2734588 - RNA, 19 nt, Human
aucuaguaugaaauuauau

SEQ ID NO: 2734589 - RNA, 15 nt, Human
aucuaguaugaaauu

SEQ ID NO: 2734590 - RNA, 16 nt, Human
aucuaguaugaaauua

SEQ ID NO: 2734591 - RNA, 17 nt, Human
aucuaguaugaaauuau

SEQ ID NO: 2734592 - RNA, 18 nt, Human
aucuaguaugaaauuaua

SEQ ID NO: 2734593 - RNA, 20 nt, Human
aucuccgucaacucauauuu

SEQ ID NO: 2734594 - RNA, 19 nt, Human
auccucaguuuuugugaaa

SEQ ID NO: 2734595 - RNA, 19 nt, Human
aucccaugagccucagcau

SEQ ID NO: 2734596 - RNA, 20 nt, Human
aucccauuauucaaaguugc

SEQ ID NO: 2734597 - RNA, 15 nt, Human
aucccauuauucaaa

SEQ ID NO: 2734598 - RNA, 14 nt, Human
aucccauuauucaa

SEQ ID NO: 2734599 - RNA, 19 nt, Human
auccagacccggcugcgug

SEQ ID NO: 2734600 - RNA, 17 nt, Human
auccucauacccacccc

SEQ ID NO: 2734601 - RNA, 14 nt, Human
aucaaauaugcaaa

SEQ ID NO: 2734602 - RNA, 13 nt, Human
aucacagccucug

SEQ ID NO: 2734603 - RNA, 13 nt, Human
aucaccagacagg

SEQ ID NO: 2734604 - RNA, 20 nt, Human
aucaccaacgucugugccau

SEQ ID NO: 2734605 - RNA, 20 nt, Human
aucaaagagguuuuaaaaaa

SEQ ID NO: 2734606 - RNA, 23 nt, Human
aucaaagagguuuuaaaaaaauc

SEQ ID NO: 2734607 - RNA, 17 nt, Human
aucaugaauuaguuuua

SEQ ID NO: 2734608 - RNA, 14 nt, Human
aucaugucuggcua

SEQ ID NO: 2734609 - RNA, 13 nt, Human
aucagcuuauugu

SEQ ID NO: 2734610 - RNA, 22 nt, Human
aucagcuugcccuguuaaaaga

SEQ ID NO: 2734611 - RNA, 17 nt, Human
auguuccuagugaaaga

SEQ ID NO: 2734612 - RNA, 16 nt, Human
auguucucucuucucc

SEQ ID NO: 2734613 - RNA, 17 nt, Human
auguucucucuucucca

SEQ ID NO: 2734614 - RNA, 13 nt, Human
auguucucugagg

SEQ ID NO: 2734615 - RNA, 15 nt, Human
auguucugggacaca

SEQ ID NO: 2734616 - RNA, 17 nt, Human
auguucucugaggacac

SEQ ID NO: 2734617 - RNA, 14 nt, Human
auguucugggacac

SEQ ID NO: 2734618 - RNA, 14 nt, Human
auguuugccucugc

SEQ ID NO: 2734619 - RNA, 15 nt, Human
auguuugccucugcc

SEQ ID NO: 2734620 - RNA, 17 nt, Human
auguuugccucugccuc

SEQ ID NO: 2734621 - RNA, 16 nt, Human
auguuccuagugaaag

SEQ ID NO: 2734622 - RNA, 15 nt, Human
auguuccuagugaaa

SEQ ID NO: 2734623 - RNA, 13 nt, Human
auguguaaguauu

SEQ ID NO: 2734624 - RNA, 15 nt, Human
auguguaaaauguga

SEQ ID NO: 2734625 - RNA, 17 nt, Human
auguguaagacaaaaag

SEQ ID NO: 2734626 - RNA, 19 nt, Human
auguguaagacaaaaagcu

SEQ ID NO: 2734627 - RNA, 15 nt, Human
augugaacacaucag

SEQ ID NO: 2734628 - RNA, 19 nt, Human
augucacaggcagguccag

SEQ ID NO: 2734629 - RNA, 16 nt, Human
augucaaucagccuag

SEQ ID NO: 2734630 - RNA, 21 nt, Human
augucaaucagccuaguugau

SEQ ID NO: 2734631 - RNA, 13 nt, Human
augucacaggcag

SEQ ID NO: 2734632 - RNA, 18 nt, Human
augguccgugcuaaggac

SEQ ID NO: 2734633 - RNA, 15 nt, Human
augguccgugcuaag

SEQ ID NO: 2734634 - RNA, 23 nt, Human
auguaauuaaguacuauguauca

SEQ ID NO: 2734635 - RNA, 20 nt, Human
augggugcuuggaggaagga

SEQ ID NO: 2734636 - RNA, 21 nt, Human
augggugcuuggaggaaggaa

SEQ ID NO: 2734637 - RNA, 23 nt, Human
augggugcuuggaggaaggaaac

SEQ ID NO: 2734638 - RNA, 16 nt, Human
augaucuuuaaaauac

SEQ ID NO: 2734639 - RNA, 17 nt, Human
augaucuuugcagacag

SEQ ID NO: 2734640 - RNA, 18 nt, Human
augaucuuugcagacagg

SEQ ID NO: 2734641 - RNA, 19 nt, Human
augaucuuugcagacaggc

SEQ ID NO: 2734642 - RNA, 21 nt, Human
augaucuuugcagacaggcaa

SEQ ID NO: 2734643 - RNA, 21 nt, Human
augaugaucuuuaaaauacac

SEQ ID NO: 2734644 - RNA, 18 nt, Human
augaugaucuuuaaaaua

SEQ ID NO: 2734645 - RNA, 15 nt, Human
augaugauccuaggc

SEQ ID NO: 2734646 - RNA, 18 nt, Human
augaugaaaugaggucag

SEQ ID NO: 2734647 - RNA, 23 nt, Human
augaugaaaugaggucagagccu

SEQ ID NO: 2734648 - RNA, 18 nt, Human
augcacaaacagaggccg

SEQ ID NO: 2734649 - RNA, 22 nt, Human
augcacagaguuguuacauuuu

SEQ ID NO: 2734650 - RNA, 21 nt, Human
augcacagaguuguuacauuu

SEQ ID NO: 2734651 - RNA, 19 nt, Human
augcacagaguuguuacau

SEQ ID NO: 2734652 - RNA, 15 nt, Human
augcacacauuuuuu

SEQ ID NO: 2734653 - RNA, 14 nt, Human
augcacacauuuuu

SEQ ID NO: 2734654 - RNA, 13 nt, Human
augcacacauuuu

SEQ ID NO: 2734655 - RNA, 20 nt, Human
augccuggauggggcugcac

SEQ ID NO: 2734656 - RNA, 19 nt, Human
augccuggauggggcugca

SEQ ID NO: 2734657 - RNA, 20 nt, Human
augcugaguuugugcuggug

SEQ ID NO: 2734658 - RNA, 16 nt, Human
augcugcccugugagu

SEQ ID NO: 2734659 - RNA, 13 nt, Human
augcugcccugug

SEQ ID NO: 2734660 - RNA, 12 nt, Human
augcugcccugu

SEQ ID NO: 2734661 - RNA, 14 nt, Human
augcugcccuguga

SEQ ID NO: 2734662 - RNA, 15 nt, Human
augcugcccugugag

SEQ ID NO: 2734663 - RNA, 15 nt, Human
augcuuguacauaau

SEQ ID NO: 2734664 - RNA, 16 nt, Human
augcuuguacauaaug

SEQ ID NO: 2734665 - RNA, 18 nt, Human
auggcuuuguauagaacc

SEQ ID NO: 2734666 - RNA, 18 nt, Human
auggcuggagcuagaauu

SEQ ID NO: 2734667 - RNA, 17 nt, Human
auggcuuuugugcauua

SEQ ID NO: 2734668 - RNA, 16 nt, Human
auggcuuuugugcauu

SEQ ID NO: 2734669 - RNA, 18 nt, Human
auggcuuuugugcauuau

SEQ ID NO: 2734670 - RNA, 19 nt, Human
auggcuuuguauagaaccu

SEQ ID NO: 2734671 - RNA, 19 nt, Human
agcgagcccugguggcagu

SEQ ID NO: 2734672 - RNA, 13 nt, Human
agcgagcccuggu

SEQ ID NO: 2734673 - RNA, 12 nt, Human
agccugggaggu

SEQ ID NO: 2734674 - RNA, 12 nt, Human
agcucagagagg

SEQ ID NO: 2734675 - RNA, 14 nt, Human
agcucagagagggu

SEQ ID NO: 2734676 - RNA, 18 nt, Human
agcucagagaggguggga

SEQ ID NO: 2734677 - RNA, 19 nt, Human
agcucaccagccccagugc

SEQ ID NO: 2734678 - RNA, 20 nt, Human
agcucaccagccccagugcc

SEQ ID NO: 2734679 - RNA, 12 nt, Human
agcucaccucuc

SEQ ID NO: 2734680 - RNA, 15 nt, Human
agcucaccagcccca

SEQ ID NO: 2734681 - RNA, 15 nt, Human
agcucaccucucccu

SEQ ID NO: 2734682 - RNA, 18 nt, Human
agcucaccucucccuugg

SEQ ID NO: 2734683 - RNA, 19 nt, Human
agcucaccucucccuugga

SEQ ID NO: 2734684 - RNA, 16 nt, Human
agcucaccagccccag

SEQ ID NO: 2734685 - RNA, 23 nt, Human
agcuaauguaauaacugugaagu

SEQ ID NO: 2734686 - RNA, 19 nt, Human
agcuccccucggagaagag

SEQ ID NO: 2734687 - RNA, 17 nt, Human
agcuccccucggagaag

SEQ ID NO: 2734688 - RNA, 20 nt, Human
agcuccccucggagaagagc

SEQ ID NO: 2734689 - RNA, 15 nt, Human
agcugaaccugggua

SEQ ID NO: 2734690 - RNA, 16 nt, Human
agcugguugagguuuc

SEQ ID NO: 2734691 - RNA, 22 nt, Human
agcugguuuuuagcggagacgg

SEQ ID NO: 2734692 - RNA, 18 nt, Human
agcuggucccacucaguc

SEQ ID NO: 2734693 - RNA, 13 nt, Human
agcugcugacagu

SEQ ID NO: 2734694 - RNA, 14 nt, Human
agcugcugacagug

SEQ ID NO: 2734695 - RNA, 16 nt, Human
agcuggucccacucag

SEQ ID NO: 2734696 - RNA, 17 nt, Human
agcuggucccacucagu

SEQ ID NO: 2734697 - RNA, 12 nt, Human
agcugcugacag

SEQ ID NO: 2734698 - RNA, 19 nt, Human
agcugcgguccacccagga

SEQ ID NO: 2734699 - RNA, 20 nt, Human
agcugcgguccacccaggag

SEQ ID NO: 2734700 - RNA, 13 nt, Human
agcugcgguccac

SEQ ID NO: 2734701 - RNA, 16 nt, Human
agcugcgguccaccca

SEQ ID NO: 2734702 - RNA, 17 nt, Human
agcugcgguccacccag

SEQ ID NO: 2734703 - RNA, 18 nt, Human
agcugcgguccacccagg

SEQ ID NO: 2734704 - RNA, 18 nt, Human
agcuucauuuccuguguc

SEQ ID NO: 2734705 - RNA, 23 nt, Human
agcuuuguuuguugucagcugaa

SEQ ID NO: 2734706 - RNA, 22 nt, Human
agcuuuguuuguugucagcuga

SEQ ID NO: 2734707 - RNA, 19 nt, Human
agcuucauuuccugugucu

SEQ ID NO: 2734708 - RNA, 22 nt, Human
aggaauaccugucccccugaca

SEQ ID NO: 2734709 - RNA, 15 nt, Human
aggaauaccuguccc

SEQ ID NO: 2734710 - RNA, 18 nt, Human
aggaauaccugucccccu

SEQ ID NO: 2734711 - RNA, 20 nt, Human
aggaacaaggcaaggcuguc

SEQ ID NO: 2734712 - RNA, 21 nt, Human
aggaacuuaaauaaugugaaa

SEQ ID NO: 2734713 - RNA, 12 nt, Human
aggaacaaggca

SEQ ID NO: 2734714 - RNA, 13 nt, Human
aggaacaaggcaa

SEQ ID NO: 2734715 - RNA, 16 nt, Human
aggaacaaggcaaggc

SEQ ID NO: 2734716 - RNA, 17 nt, Human
aggaacaaggcaaggcu

SEQ ID NO: 2734717 - RNA, 19 nt, Human
aggaacaaggcaaggcugu

SEQ ID NO: 2734718 - RNA, 15 nt, Human
aggagaggagagggg

SEQ ID NO: 2734719 - RNA, 15 nt, Human
agggauuagggagag

SEQ ID NO: 2734720 - RNA, 14 nt, Human
agggccugcaaggg

SEQ ID NO: 2734721 - RNA, 15 nt, Human
agggccugcaaggga

SEQ ID NO: 2734722 - RNA, 12 nt, Human
agggccuggccu

SEQ ID NO: 2734723 - RNA, 13 nt, Human
agggccuggccug

SEQ ID NO: 2734724 - RNA, 16 nt, Human
agggauacccauccca

SEQ ID NO: 2734725 - RNA, 22 nt, Human
aggggcccaaauucuuucagug

SEQ ID NO: 2734726 - RNA, 14 nt, Human
agggccuggccuga

SEQ ID NO: 2734727 - RNA, 16 nt, Human
agggucccugguggca

SEQ ID NO: 2734728 - RNA, 17 nt, Human
agggucccugguggcag

SEQ ID NO: 2734729 - RNA, 20 nt, Human
agggucccugguggcagcuc

SEQ ID NO: 2734730 - RNA, 22 nt, Human
agggucccugguggcagcucac

SEQ ID NO: 2734731 - RNA, 13 nt, Human
aggguauuccaga

SEQ ID NO: 2734732 - RNA, 21 nt, Human
aggguaucuggugacuuuccu

SEQ ID NO: 2734733 - RNA, 12 nt, Human
agggucccuggu

SEQ ID NO: 2734734 - RNA, 14 nt, Human
agggucccuggugg

SEQ ID NO: 2734735 - RNA, 14 nt, Human
agguacucuccugg

SEQ ID NO: 2734736 - RNA, 13 nt, Human
agguacucuccug

SEQ ID NO: 2734737 - RNA, 22 nt, Human
agguacgaaaagaggggaagag

SEQ ID NO: 2734738 - RNA, 16 nt, Human
agguaacaggcagaua

SEQ ID NO: 2734739 - RNA, 13 nt, Human
agguaacaggcag

SEQ ID NO: 2734740 - RNA, 14 nt, Human
agguaacaggcaga

SEQ ID NO: 2734741 - RNA, 22 nt, Human
aggguuuugccauguuggccag

SEQ ID NO: 2734742 - RNA, 23 nt, Human
aggguuuugccauguuggccagg

SEQ ID NO: 2734743 - RNA, 20 nt, Human
agggucucacuauguugccc

SEQ ID NO: 2734744 - RNA, 15 nt, Human
agggacccuccacca

SEQ ID NO: 2734745 - RNA, 18 nt, Human
aggcuuagucacugagac

SEQ ID NO: 2734746 - RNA, 22 nt, Human
aggcuguaucccaugagccuca

SEQ ID NO: 2734747 - RNA, 17 nt, Human
aggcuuagucacugaga

SEQ ID NO: 2734748 - RNA, 20 nt, Human
aggcuguaucccaugagccu

SEQ ID NO: 2734749 - RNA, 21 nt, Human
aggcuguaucccaugagccuc

SEQ ID NO: 2734750 - RNA, 18 nt, Human
aggcuggguucugauccu

SEQ ID NO: 2734751 - RNA, 15 nt, Human
aggcuaccuuuguau

SEQ ID NO: 2734752 - RNA, 14 nt, Human
aggcuaccuuugua

SEQ ID NO: 2734753 - RNA, 13 nt, Human
aggcuaccuuugu

SEQ ID NO: 2734754 - RNA, 21 nt, Human
aggccaugggcacugugggua

SEQ ID NO: 2734755 - RNA, 21 nt, Human
aggcccucugcccacucccug

SEQ ID NO: 2734756 - RNA, 22 nt, Human
aggcccucugcccacucccugc

SEQ ID NO: 2734757 - RNA, 23 nt, Human
aggcccucugcccacucccugca

SEQ ID NO: 2734758 - RNA, 12 nt, Human
aggcccuucucu

SEQ ID NO: 2734759 - RNA, 15 nt, Human
aggcccuucucucca

SEQ ID NO: 2734760 - RNA, 19 nt, Human
aggcccuucucuccagccc

SEQ ID NO: 2734761 - RNA, 15 nt, Human
aggccaggcccucug

SEQ ID NO: 2734762 - RNA, 13 nt, Human
aggccaggcccuc

SEQ ID NO: 2734763 - RNA, 14 nt, Human
aggccaggcccucu

SEQ ID NO: 2734764 - RNA, 23 nt, Human
aggccagcugcuugggcuucauc

SEQ ID NO: 2734765 - RNA, 19 nt, Human
aggcauuccccaggaggcc

SEQ ID NO: 2734766 - RNA, 20 nt, Human
aggcauuccccaggaggcca

SEQ ID NO: 2734767 - RNA, 15 nt, Human
aggcaugguggccca

SEQ ID NO: 2734768 - RNA, 17 nt, Human
aggcaugugaugagagg

SEQ ID NO: 2734769 - RNA, 17 nt, Human
aggcauguucucugagg

SEQ ID NO: 2734770 - RNA, 21 nt, Human
aggcaugugaugagaggaaau

SEQ ID NO: 2734771 - RNA, 19 nt, Human
aggcaugugaugagaggaa

SEQ ID NO: 2734772 - RNA, 20 nt, Human
aggcaugugaugagaggaaa

SEQ ID NO: 2734773 - RNA, 18 nt, Human
aggcauguucucugagga

SEQ ID NO: 2734774 - RNA, 19 nt, Human
aggcauguucucugaggac

SEQ ID NO: 2734775 - RNA, 18 nt, Human
aggcauuccccaggaggc

SEQ ID NO: 2734776 - RNA, 17 nt, Human
aggcauuccccaggagg

SEQ ID NO: 2734777 - RNA, 23 nt, Human
agaggacuuuucuuuguggcuuc

SEQ ID NO: 2734778 - RNA, 14 nt, Human
agaggacuuuucuu

SEQ ID NO: 2734779 - RNA, 21 nt, Human
agaggacuuuucuuuguggcu

SEQ ID NO: 2734780 - RNA, 22 nt, Human
agaggacuuuucuuuguggcuu

SEQ ID NO: 2734781 - RNA, 17 nt, Human
agaggggguggccuccc

SEQ ID NO: 2734782 - RNA, 19 nt, Human
agaggggguggccucccaa

SEQ ID NO: 2734783 - RNA, 13 nt, Human
agagggccugcaa

SEQ ID NO: 2734784 - RNA, 16 nt, Human
agagggccugcaaggg

SEQ ID NO: 2734785 - RNA, 20 nt, Human
agacugaguacguugugcau

SEQ ID NO: 2734786 - RNA, 22 nt, Human
agacugaguacguugugcauuu

SEQ ID NO: 2734787 - RNA, 18 nt, Human
agacucugucucaaaaaa

SEQ ID NO: 2734788 - RNA, 13 nt, Human
agacucugucuca

SEQ ID NO: 2734789 - RNA, 16 nt, Human
agacgcugugcugccc

SEQ ID NO: 2734790 - RNA, 16 nt, Human
agagagaccacuuuuc

SEQ ID NO: 2734791 - RNA, 13 nt, Human
agagcccaccuug

SEQ ID NO: 2734792 - RNA, 13 nt, Human
agagccagggucu

SEQ ID NO: 2734793 - RNA, 15 nt, Human
agaccacguuucuaa

SEQ ID NO: 2734794 - RNA, 21 nt, Human
agacagagucucacuguugcc

SEQ ID NO: 2734795 - RNA, 20 nt, Human
agacaaugacuuacuguaca

SEQ ID NO: 2734796 - RNA, 13 nt, Human
agacagagcuaca

SEQ ID NO: 2734797 - RNA, 11 nt, Human
agacagagucu

SEQ ID NO: 2734798 - RNA, 19 nt, Human
agacagagucucacuguug

SEQ ID NO: 2734799 - RNA, 20 nt, Human
agacagagucucacuguugc

SEQ ID NO: 2734800 - RNA, 15 nt, Human
agacagagcuacaca

SEQ ID NO: 2734801 - RNA, 22 nt, Human
agacaaugacuuacuguacaug

SEQ ID NO: 2734802 - RNA, 21 nt, Human
agacaaugacuuacuguacau

SEQ ID NO: 2734803 - RNA, 17 nt, Human
agaaugagagacacacu

SEQ ID NO: 2734804 - RNA, 22 nt, Human
agaaugagagacacacugaaga

SEQ ID NO: 2734805 - RNA, 17 nt, Human
agaaugauuaugaauua

SEQ ID NO: 2734806 - RNA, 19 nt, Human
agaaugcacaaacagaggc

SEQ ID NO: 2734807 - RNA, 22 nt, Human
agaaugcacaaacagaggccgc

SEQ ID NO: 2734808 - RNA, 22 nt, Human
agaagucacauuccugaacagg

SEQ ID NO: 2734809 - RNA, 18 nt, Human
agaaugaaagggcccaga

SEQ ID NO: 2734810 - RNA, 18 nt, Human
agaagacugcauuauauu

SEQ ID NO: 2734811 - RNA, 21 nt, Human
agaagagcuguucacagccag

SEQ ID NO: 2734812 - RNA, 22 nt, Human
agaagagcuguucacagccaga

SEQ ID NO: 2734813 - RNA, 21 nt, Human
agaagagauugugguuucauu

SEQ ID NO: 2734814 - RNA, 21 nt, Human
acuuuccucuuuggucuacac

SEQ ID NO: 2734815 - RNA, 13 nt, Human
agaagacacugau

SEQ ID NO: 2734816 - RNA, 21 nt, Human
agaagacacugaugggcaacc

SEQ ID NO: 2734817 - RNA, 18 nt, Human
agaagucacauuccugaa

SEQ ID NO: 2734818 - RNA, 21 nt, Human
agaagucacauuccugaacag

SEQ ID NO: 2734819 - RNA, 20 nt, Human
agaagucacauuccugaaca

SEQ ID NO: 2734820 - RNA, 14 nt, Human
agaaguaacuuacu

SEQ ID NO: 2734821 - RNA, 14 nt, Human
agaugguucuagca

SEQ ID NO: 2734822 - RNA, 14 nt, Human
agaugagugagcau

SEQ ID NO: 2734823 - RNA, 19 nt, Human
agaucugccuaaggacuuc

SEQ ID NO: 2734824 - RNA, 24 nt, Human
agcaaaauuuuuucucuaggaaau

SEQ ID NO: 2734825 - RNA, 18 nt, Human
agcaaaagaugcuucuca

SEQ ID NO: 2734826 - RNA, 19 nt, Human
agauucuuuccugaggcug

SEQ ID NO: 2734827 - RNA, 21 nt, Human
agauucuuuccugaggcuggg

SEQ ID NO: 2734828 - RNA, 23 nt, Human
agauugcaacaggcugggcuuca

SEQ ID NO: 2734829 - RNA, 20 nt, Human
agauugcaacaggcugggcu

SEQ ID NO: 2734830 - RNA, 21 nt, Human
agauugcaacaggcugggcuu

SEQ ID NO: 2734831 - RNA, 23 nt, Human
agcaaagcugaugacaacuuccc

SEQ ID NO: 2734832 - RNA, 21 nt, Human
agcaaagcugaugacaacuuc

SEQ ID NO: 2734833 - RNA, 20 nt, Human
agcaaaggagauuggaagga

SEQ ID NO: 2734834 - RNA, 21 nt, Human
agcacgauuucuguuuagaua

SEQ ID NO: 2734835 - RNA, 19 nt, Human
agcacgauuucuguuuaga

SEQ ID NO: 2734836 - RNA, 17 nt, Human
agcacgauuucuguuua

SEQ ID NO: 2734837 - RNA, 16 nt, Human
agcacagacccugccc

SEQ ID NO: 2734838 - RNA, 12 nt, Human
agcacagacccu

SEQ ID NO: 2734839 - RNA, 14 nt, Human
agcacagacccugc

SEQ ID NO: 2734840 - RNA, 15 nt, Human
agcacagacccugcc

SEQ ID NO: 2734841 - RNA, 14 nt, Human
agcauccuggcacc

SEQ ID NO: 2734842 - RNA, 17 nt, Human
agcauccuggcacccgg

SEQ ID NO: 2734843 - RNA, 16 nt, Human
agccaaagcuaggccu

SEQ ID NO: 2734844 - RNA, 18 nt, Human
agccaaagcuaggccugg

SEQ ID NO: 2734845 - RNA, 14 nt, Human
agccagcaggcucu

SEQ ID NO: 2734846 - RNA, 17 nt, Human
agccagaggagagagga

SEQ ID NO: 2734847 - RNA, 18 nt, Human
agccagaggagagaggac

SEQ ID NO: 2734848 - RNA, 13 nt, Human
agccagaggagag

SEQ ID NO: 2734849 - RNA, 15 nt, Human
agccagaggagagag

SEQ ID NO: 2734850 - RNA, 15 nt, Human
agcccaccccucaac

SEQ ID NO: 2734851 - RNA, 16 nt, Human
agcccaccuuggcuca

SEQ ID NO: 2734852 - RNA, 14 nt, Human
agcccaccuuggcu

SEQ ID NO: 2734853 - RNA, 16 nt, Human
agccagcaggcucuca

SEQ ID NO: 2734854 - RNA, 23 nt, Human
agcccacgcccccacuggugaca

SEQ ID NO: 2734855 - RNA, 14 nt, Human
agcccacgccccca

SEQ ID NO: 2734856 - RNA, 20 nt, Human
agcccacgcccccacuggug

SEQ ID NO: 2734857 - RNA, 15 nt, Human
agcccacgcccccac

SEQ ID NO: 2734858 - RNA, 13 nt, Human
agcauccuggcac

SEQ ID NO: 2734859 - RNA, 17 nt, Human
agcccgggcucugccuc

SEQ ID NO: 2734860 - RNA, 18 nt, Human
agcccgggcucugccucc

SEQ ID NO: 2734861 - RNA, 20 nt, Human
agcccgggcucugccuccca

SEQ ID NO: 2734862 - RNA, 21 nt, Human
agcccgggcucugccucccau

SEQ ID NO: 2734863 - RNA, 15 nt, Human
agccccauccucugu

SEQ ID NO: 2734864 - RNA, 17 nt, Human
agccccauccucuguac

SEQ ID NO: 2734865 - RNA, 23 nt, Human
agccccauccucuguacagagcc

SEQ ID NO: 2734866 - RNA, 17 nt, Human
agccccauucugccugc

SEQ ID NO: 2734867 - RNA, 18 nt, Human
agccccauucugccugcc

SEQ ID NO: 2734868 - RNA, 19 nt, Human
agccccauucugccugccc

SEQ ID NO: 2734869 - RNA, 17 nt, Human
aagggauggcaagaugu

SEQ ID NO: 2734870 - RNA, 14 nt, Human
aagggauggcaaga

SEQ ID NO: 2734871 - RNA, 20 nt, Human
aagggacuuggaagcuccgc

SEQ ID NO: 2734872 - RNA, 18 nt, Human
aagggacgcuacccggga

SEQ ID NO: 2734873 - RNA, 19 nt, Human
aagccagauuuuccugaaa

SEQ ID NO: 2734874 - RNA, 21 nt, Human
aagccaccaacauacucccau

SEQ ID NO: 2734875 - RNA, 15 nt, Human
aagccagcaggcucu

SEQ ID NO: 2734876 - RNA, 18 nt, Human
aagccagcaggcucucag

SEQ ID NO: 2734877 - RNA, 15 nt, Human
aagcgauucuucugc

SEQ ID NO: 2734878 - RNA, 14 nt, Human
aagcgauucuucug

SEQ ID NO: 2734879 - RNA, 16 nt, Human
aagcgugagccacugc

SEQ ID NO: 2734880 - RNA, 16 nt, Human
aagcgauucuucugcu

SEQ ID NO: 2734881 - RNA, 23 nt, Human
aaggaaugauuaauuaaaacaca

SEQ ID NO: 2734882 - RNA, 16 nt, Human
aagcugcugacagugu

SEQ ID NO: 2734883 - RNA, 21 nt, Human
aagcgugagccacugcaccgg

SEQ ID NO: 2734884 - RNA, 17 nt, Human
aagcgugagccacugca

SEQ ID NO: 2734885 - RNA, 20 nt, Human
aagcgugagccacugcaccg

SEQ ID NO: 2734886 - RNA, 14 nt, Human
aagcugcugacagu

SEQ ID NO: 2734887 - RNA, 22 nt, Human
aagcugccagccgagauagcca

SEQ ID NO: 2734888 - RNA, 11 nt, Human
aagcugccagc

SEQ ID NO: 2734889 - RNA, 12 nt, Human
aagcugccagcc

SEQ ID NO: 2734890 - RNA, 23 nt, Human
aagacagugaaagaaaauaacaa

SEQ ID NO: 2734891 - RNA, 16 nt, Human
aagacuuuggaaagag

SEQ ID NO: 2734892 - RNA, 21 nt, Human
aagacauucuuccaaaaagau

SEQ ID NO: 2734893 - RNA, 15 nt, Human
aagagaacuuccaga

SEQ ID NO: 2734894 - RNA, 21 nt, Human
aagcagaggaaggagaggaga

SEQ ID NO: 2734895 - RNA, 19 nt, Human
aagccaccaacauacuccc

SEQ ID NO: 2734896 - RNA, 13 nt, Human
aagauuuucagaa

SEQ ID NO: 2734897 - RNA, 19 nt, Human
aagauuuugaaauuuuuau

SEQ ID NO: 2734898 - RNA, 20 nt, Human
aagauacugaaauaaacguc

SEQ ID NO: 2734899 - RNA, 16 nt, Human
aagauacugaaauaaa

SEQ ID NO: 2734900 - RNA, 14 nt, Human
aagauacugaaaua

SEQ ID NO: 2734901 - RNA, 20 nt, Human
aagauucauauuuacuucuu

SEQ ID NO: 2734902 - RNA, 21 nt, Human
aagauucaaugccccugaauu

SEQ ID NO: 2734903 - RNA, 20 nt, Human
aagauucaaugccccugaau

SEQ ID NO: 2734904 - RNA, 22 nt, Human
aaguugauaugccuuuucccaa

SEQ ID NO: 2734905 - RNA, 13 nt, Human
aagugcugcauuu

SEQ ID NO: 2734906 - RNA, 14 nt, Human
aagugcugcauuua

SEQ ID NO: 2734907 - RNA, 17 nt, Human
aauaaaccucaaaaugu

SEQ ID NO: 2734908 - RNA, 20 nt, Human
aauaaaccucaaaaugucua

SEQ ID NO: 2734909 - RNA, 15 nt, Human
aauaaacgucuuaaa

SEQ ID NO: 2734910 - RNA, 14 nt, Human
aauaauaaauauuu

SEQ ID NO: 2734911 - RNA, 14 nt, Human
aauaauguuucaaa

SEQ ID NO: 2734912 - RNA, 19 nt, Human
aauaauguuucaaacauau

SEQ ID NO: 2734913 - RNA, 12 nt, Human
aauaauguuuca

SEQ ID NO: 2734914 - RNA, 16 nt, Human
aauauaggaacuuaaa

SEQ ID NO: 2734915 - RNA, 12 nt, Human
aauauuaaagcc

SEQ ID NO: 2734916 - RNA, 13 nt, Human
aauauuaaagcca

SEQ ID NO: 2734917 - RNA, 15 nt, Human
aauauuaaagccaug

SEQ ID NO: 2734918 - RNA, 14 nt, Human
aauauuaaagccau

SEQ ID NO: 2734919 - RNA, 20 nt, Human
aauauuaaagccauguuuau

SEQ ID NO: 2734920 - RNA, 19 nt, Human
aauauuaaagccauguuua

SEQ ID NO: 2734921 - RNA, 18 nt, Human
aauauuaaagccauguuu

SEQ ID NO: 2734922 - RNA, 16 nt, Human
aauauuaaagccaugu

SEQ ID NO: 2734923 - RNA, 21 nt, Human
aauaccugucccccugacaac

SEQ ID NO: 2734924 - RNA, 20 nt, Human
aauacgugggcauucaaaug

SEQ ID NO: 2734925 - RNA, 19 nt, Human
aauacgugggcauucaaau

SEQ ID NO: 2734926 - RNA, 22 nt, Human
aaucaaauaugcaaagcacuga

SEQ ID NO: 2734927 - RNA, 16 nt, Human
aaucaaauaugcaaag

SEQ ID NO: 2734928 - RNA, 15 nt, Human
aaucaaauaugcaaa

SEQ ID NO: 2734929 - RNA, 22 nt, Human
aaucauuucugcaucagcugcu

SEQ ID NO: 2734930 - RNA, 14 nt, Human
aaugauaacuggaa

SEQ ID NO: 2734931 - RNA, 15 nt, Human
aaugauaacuggaaa

SEQ ID NO: 2734932 - RNA, 16 nt, Human
aaugauaacuggaaac

SEQ ID NO: 2734933 - RNA, 15 nt, Human
aaugauagcuacugu

SEQ ID NO: 2734934 - RNA, 12 nt, Human
aaugauuaauua

SEQ ID NO: 2734935 - RNA, 13 nt, Human
aaugauuaauuaa

SEQ ID NO: 2734936 - RNA, 17 nt, Human
aauccauacauuugugu

SEQ ID NO: 2734937 - RNA, 16 nt, Human
aauccauacauuugug

SEQ ID NO: 2734938 - RNA, 15 nt, Human
aauccaaugaaauga

SEQ ID NO: 2734939 - RNA, 18 nt, Human
aaucuccaaaauaaaacu

SEQ ID NO: 2734940 - RNA, 23 nt, Human
aaugcgugcauaccacuuuuguu

SEQ ID NO: 2734941 - RNA, 21 nt, Human
aaugcgugcauaccacuuuug

SEQ ID NO: 2734942 - RNA, 17 nt, Human
aaugggggugcauuuga

SEQ ID NO: 2734943 - RNA, 15 nt, Human
aaugggggugcauuu

SEQ ID NO: 2734944 - RNA, 15 nt, Human
aaugucacaggcagg

SEQ ID NO: 2734945 - RNA, 20 nt, Human
aaugguccgugcuaaggacu

SEQ ID NO: 2734946 - RNA, 13 nt, Human
aaugggacacuaa

SEQ ID NO: 2734947 - RNA, 14 nt, Human
aaugggagcucaug

SEQ ID NO: 2734948 - RNA, 23 nt, Human
aaugcucuuuacuucauggacuu

SEQ ID NO: 2734949 - RNA, 23 nt, Human
aacugagaugugaacacaucagc

SEQ ID NO: 2734950 - RNA, 18 nt, Human
aacucauauuuucaugcu

SEQ ID NO: 2734951 - RNA, 16 nt, Human
aacucauauuuucaug

SEQ ID NO: 2734952 - RNA, 15 nt, Human
aacucauauuuucau

SEQ ID NO: 2734953 - RNA, 17 nt, Human
aacucaaacucuuaaaa

SEQ ID NO: 2734954 - RNA, 15 nt, Human
aacucaccccagccc

SEQ ID NO: 2734955 - RNA, 18 nt, Human
aacucaccccagccccaa

SEQ ID NO: 2734956 - RNA, 16 nt, Human
aacucaccccagcccc

SEQ ID NO: 2734957 - RNA, 17 nt, Human
aacucaccccagcccca

SEQ ID NO: 2734958 - RNA, 17 nt, Human
aacgcguugaaauugua

SEQ ID NO: 2734959 - RNA, 15 nt, Human
aacgcguugaaauug

SEQ ID NO: 2734960 - RNA, 14 nt, Human
aacgcguugaaauu

SEQ ID NO: 2734961 - RNA, 13 nt, Human
aacgcguugaaau

SEQ ID NO: 2734962 - RNA, 16 nt, Human
aacagcuaaugggaca

SEQ ID NO: 2734963 - RNA, 13 nt, Human
aacccuucagugc

SEQ ID NO: 2734964 - RNA, 19 nt, Human
aaccaguguuguggauuua

SEQ ID NO: 2734965 - RNA, 17 nt, Human
aaccaguguuguggauu

SEQ ID NO: 2734966 - RNA, 14 nt, Human
aaccaguauuguac

SEQ ID NO: 2734967 - RNA, 13 nt, Human
aaccaguauugua

SEQ ID NO: 2734968 - RNA, 11 nt, Human
aaccaguauug

SEQ ID NO: 2734969 - RNA, 22 nt, Human
aacaugcuacacacugcauguu

SEQ ID NO: 2734970 - RNA, 15 nt, Human
aacauggaaguacua

SEQ ID NO: 2734971 - RNA, 14 nt, Human
aaaucuuaacuuga

SEQ ID NO: 2734972 - RNA, 20 nt, Human
aaaugcuagguuaauuccaa

SEQ ID NO: 2734973 - RNA, 18 nt, Human
aaaucugcuuuuuaaaga

SEQ ID NO: 2734974 - RNA, 21 nt, Human
aaaucugugaacuugaaauuu

SEQ ID NO: 2734975 - RNA, 19 nt, Human
aaaucugugaacuugaaau

SEQ ID NO: 2734976 - RNA, 20 nt, Human
aaaucugugaacuugaaauu

SEQ ID NO: 2734977 - RNA, 19 nt, Human
aaaucuccaaaauaaaacu

SEQ ID NO: 2734978 - RNA, 22 nt, Human
aaaucuccaaaauaaaacuuuu

SEQ ID NO: 2734979 - RNA, 14 nt, Human
aaauggacguguua

SEQ ID NO: 2734980 - RNA, 17 nt, Human
aaauggaauacucuuau

SEQ ID NO: 2734981 - RNA, 15 nt, Human
aaauggacguguuau

SEQ ID NO: 2734982 - RNA, 17 nt, Human
aaauggacguguuauga

SEQ ID NO: 2734983 - RNA, 14 nt, Human
aaauuaacuuuuau

SEQ ID NO: 2734984 - RNA, 13 nt, Human
aaauuaacuuuua

SEQ ID NO: 2734985 - RNA, 12 nt, Human
aaauuaacuuuu

SEQ ID NO: 2734986 - RNA, 23 nt, Human
aaauuggggauucuuaaaguuga

SEQ ID NO: 2734987 - RNA, 14 nt, Human
aaauugauguguuu

SEQ ID NO: 2734988 - RNA, 17 nt, Human
aaauuggggauucuuaa

SEQ ID NO: 2734989 - RNA, 22 nt, Human
aaauuggggauucuuaaaguug

SEQ ID NO: 2734990 - RNA, 20 nt, Human
aaauuggggauucuuaaagu

SEQ ID NO: 2734991 - RNA, 19 nt, Human
aaauuggggauucuuaaag

SEQ ID NO: 2734992 - RNA, 18 nt, Human
aaauuggggauucuuaaa

SEQ ID NO: 2734993 - RNA, 12 nt, Human
aacacaucagcu

SEQ ID NO: 2734994 - RNA, 19 nt, Human
aacaccucugcacaagcug

SEQ ID NO: 2734995 - RNA, 22 nt, Human
aacaaaccuguuucugcagcca

SEQ ID NO: 2734996 - RNA, 21 nt, Human
aacacauacaggaagguagaa

SEQ ID NO: 2734997 - RNA, 19 nt, Human
aaaauccauacauuugugu

SEQ ID NO: 2734998 - RNA, 15 nt, Human
aaaauuagccaagug

SEQ ID NO: 2734999 - RNA, 23 nt, Human
aaaaguuuaauauuaaagccaug

SEQ ID NO: 2735000 - RNA, 22 nt, Human
aaaaguuuaauauuaaagccau

SEQ ID NO: 2735001 - RNA, 21 nt, Human
aaaaguuuaauauuaaagcca

SEQ ID NO: 2735002 - RNA, 20 nt, Human
aaaaguuuaauauuaaagcc

SEQ ID NO: 2735003 - RNA, 17 nt, Human
aaacagcuaaugggaca

SEQ ID NO: 2735004 - RNA, 20 nt, Human
aaaauuauuuuguucauaca

SEQ ID NO: 2735005 - RNA, 16 nt, Human
aaaauuauuuuguuca

SEQ ID NO: 2735006 - RNA, 18 nt, Human
aaaauuauuuuguucaua

SEQ ID NO: 2735007 - RNA, 13 nt, Human
aaagaaacauuug

SEQ ID NO: 2735008 - RNA, 13 nt, Human
aaacugauuuuuu

SEQ ID NO: 2735009 - RNA, 19 nt, Human
aaacugauuuuuuuuuccu

SEQ ID NO: 2735010 - RNA, 20 nt, Human
aaacugauuuuuuuuuccuu

SEQ ID NO: 2735011 - RNA, 19 nt, Human
aaacccuugccaugugcua

SEQ ID NO: 2735012 - RNA, 14 nt, Human
aaacccuucagugc

SEQ ID NO: 2735013 - RNA, 17 nt, Human
aaaccucaaaaugucua

SEQ ID NO: 2735014 - RNA, 22 nt, Human
aaaccucaaaaugucuaagaua

SEQ ID NO: 2735015 - RNA, 17 nt, Human
aaacucuugaccucagg

SEQ ID NO: 2735016 - RNA, 17 nt, Human
aaaccccaucucuacaa

SEQ ID NO: 2735017 - RNA, 18 nt, Human
aaacccagcucuggucca

SEQ ID NO: 2735018 - RNA, 15 nt, Human
aaagauacaguuacu

SEQ ID NO: 2735019 - RNA, 20 nt, Human
aaagcauuguaaaugugcuu

SEQ ID NO: 2735020 - RNA, 19 nt, Human
aaagcauuguaaaugugcu

SEQ ID NO: 2735021 - RNA, 15 nt, Human
aaagccaaagcuagg

SEQ ID NO: 2735022 - RNA, 21 nt, Human
aaaggcuccaggagcagccac

SEQ ID NO: 2735023 - RNA, 22 nt, Human
aaaggcuccaggagcagccaca

SEQ ID NO: 2735024 - RNA, 14 nt, Human
aaaggcuccaggag

SEQ ID NO: 2735025 - RNA, 14 nt, Human
aaaggcuaccuuug

SEQ ID NO: 2735026 - RNA, 17 nt, Human
aaaggcuaccuuuguau

SEQ ID NO: 2735027 - RNA, 11 nt, Human
aaauaaauuau

SEQ ID NO: 2735028 - RNA, 19 nt, Human
aaauaaaccucaaaauguc

SEQ ID NO: 2735029 - RNA, 16 nt, Human
aaauaaacgucuuaaa

SEQ ID NO: 2735030 - RNA, 15 nt, Human
aaauaaacgucuuaa

SEQ ID NO: 2735031 - RNA, 20 nt, Human
aaauaaaaauauuguguugu

SEQ ID NO: 2735032 - RNA, 16 nt, Human
acagaagcuccaggua

SEQ ID NO: 2735033 - RNA, 14 nt, Human
acagacaaagcgug

SEQ ID NO: 2735034 - RNA, 13 nt, Human
acagaggcagccc

SEQ ID NO: 2735035 - RNA, 23 nt, Human
acagaggcagccccauucugccu

SEQ ID NO: 2735036 - RNA, 17 nt, Human
acagaggccaugggccu

SEQ ID NO: 2735037 - RNA, 21 nt, Human
acagaggccaugggccuccug

SEQ ID NO: 2735038 - RNA, 23 nt, Human
acagaggccaugggccuccugug

SEQ ID NO: 2735039 - RNA, 17 nt, Human
acacugugcugagucug

SEQ ID NO: 2735040 - RNA, 22 nt, Human
acacugugcugagucugaaggc

SEQ ID NO: 2735041 - RNA, 13 nt, Human
acaauuuauuaug

SEQ ID NO: 2735042 - RNA, 14 nt, Human
acaauuuauuaugg

SEQ ID NO: 2735043 - RNA, 18 nt, Human
acaauuuuguuucuguac

SEQ ID NO: 2735044 - RNA, 20 nt, Human
acaauuuuguuucuguacuu

SEQ ID NO: 2735045 - RNA, 16 nt, Human
acaaggauugcuacug

SEQ ID NO: 2735046 - RNA, 20 nt, Human
acaaggaugaucuaggaaga

SEQ ID NO: 2735047 - RNA, 19 nt, Human
acacagcucuucuccaggc

SEQ ID NO: 2735048 - RNA, 19 nt, Human
acacaaaaguuucucuuuu

SEQ ID NO: 2735049 - RNA, 14 nt, Human
acacauuuuuuaaa

SEQ ID NO: 2735050 - RNA, 20 nt, Human
acacagcucuucuccaggcu

SEQ ID NO: 2735051 - RNA, 21 nt, Human
acacagcucuucuccaggcug

SEQ ID NO: 2735052 - RNA, 20 nt, Human
acaccacuacauucuguuaa

SEQ ID NO: 2735053 - RNA, 17 nt, Human
acaccacuacauucugu

SEQ ID NO: 2735054 - RNA, 12 nt, Human
acacgaauauug

SEQ ID NO: 2735055 - RNA, 14 nt, Human
acacgaauauugcu

SEQ ID NO: 2735056 - RNA, 15 nt, Human
acaccacuacauucu

SEQ ID NO: 2735057 - RNA, 19 nt, Human
acacauuuuuuaaaugcac

SEQ ID NO: 2735058 - RNA, 14 nt, Human
acaccacuacauuc

SEQ ID NO: 2735059 - RNA, 18 nt, Human
acacauuuuuuaaaugca

SEQ ID NO: 2735060 - RNA, 16 nt, Human
acacauuuuuuaaaug

SEQ ID NO: 2735061 - RNA, 15 nt, Human
acacgaauauugcug

SEQ ID NO: 2735062 - RNA, 21 nt, Human
acacgaauauugcugauggug

SEQ ID NO: 2735063 - RNA, 21 nt, Human
acaaggaugaauuaaguuuuu

SEQ ID NO: 2735064 - RNA, 13 nt, Human
acaaaauggaaua

SEQ ID NO: 2735065 - RNA, 14 nt, Human
acaaaauggaauac

SEQ ID NO: 2735066 - RNA, 13 nt, Human
acaaaaugaaacg

SEQ ID NO: 2735067 - RNA, 22 nt, Human
acaaaaugaaacgcaaccacca

SEQ ID NO: 2735068 - RNA, 13 nt, Human
aauuuugugaagc

SEQ ID NO: 2735069 - RNA, 17 nt, Human
aauuuugugaagcaaaa

SEQ ID NO: 2735070 - RNA, 18 nt, Human
aauuuugugaagcaaaau

SEQ ID NO: 2735071 - RNA, 16 nt, Human
aauuuugugcccccau

SEQ ID NO: 2735072 - RNA, 12 nt, Human
aauuuuggaauu

SEQ ID NO: 2735073 - RNA, 11 nt, Human
aauuuuggaau

SEQ ID NO: 2735074 - RNA, 14 nt, Human
aauuuugauguuuu

SEQ ID NO: 2735075 - RNA, 17 nt, Human
aauuuccugggagcuuu

SEQ ID NO: 2735076 - RNA, 21 nt, Human
aauuuccugggagcuuuugua

SEQ ID NO: 2735077 - RNA, 18 nt, Human
aauuuccugggagcuuuu

SEQ ID NO: 2735078 - RNA, 23 nt, Human
aauuuauuggcuuuucugaucca

SEQ ID NO: 2735079 - RNA, 20 nt, Human
aauuuauuuaugggauccug

SEQ ID NO: 2735080 - RNA, 21 nt, Human
aauuuauuggcuuuucugauc

SEQ ID NO: 2735081 - RNA, 20 nt, Human
aauuuauuggcuuuucugau

SEQ ID NO: 2735082 - RNA, 19 nt, Human
aauuuauuggcuuuucuga

SEQ ID NO: 2735083 - RNA, 17 nt, Human
aauuuauuggcuuuucu

SEQ ID NO: 2735084 - RNA, 17 nt, Human
aauuuauuauggcacau

SEQ ID NO: 2735085 - RNA, 12 nt, Human
aauuguaaggaa

SEQ ID NO: 2735086 - RNA, 16 nt, Human
aauuguaaggaaugau

SEQ ID NO: 2735087 - RNA, 20 nt, Human
aauuggggauucuuaaaguu

SEQ ID NO: 2735088 - RNA, 17 nt, Human
aauuggggauucuuaaa

SEQ ID NO: 2735089 - RNA, 21 nt, Human
aaugguccgugcuaaggacuu

SEQ ID NO: 2735090 - RNA, 15 nt, Human
aauuggggauucuua

SEQ ID NO: 2735091 - RNA, 16 nt, Human
aauuggggauucuuaa

SEQ ID NO: 2735092 - RNA, 16 nt, Human
aaugucacaggcaggu

SEQ ID NO: 2735093 - RNA, 19 nt, Human
aaugucacaggcaggucca

SEQ ID NO: 2735094 - RNA, 23 nt, Human
acagugagucgaggacagggagg

SEQ ID NO: 2735095 - RNA, 19 nt, Human
acaguggggaaugaagaua

SEQ ID NO: 2735096 - RNA, 15 nt, Human
acaguggggaaugaa

SEQ ID NO: 2735097 - RNA, 20 nt, Human
acaggcaagcaccuccugcc

SEQ ID NO: 2735098 - RNA, 23 nt, Human
acaggcaagcaccuccugccucg

SEQ ID NO: 2735099 - RNA, 13 nt, Human
acagcucuguccu

SEQ ID NO: 2735100 - RNA, 16 nt, Human
acagcucuguccuggg

SEQ ID NO: 2735101 - RNA, 17 nt, Human
acagcucuguccuggga

SEQ ID NO: 2735102 - RNA, 15 nt, Human
acagcuccuucuguc

SEQ ID NO: 2735103 - RNA, 19 nt, Human
acagaggggguggccuccc

SEQ ID NO: 2735104 - RNA, 17 nt, Human
acagaggggguggccuc

SEQ ID NO: 2735105 - RNA, 18 nt, Human
acagaggggguggccucc

SEQ ID NO: 2735106 - RNA, 16 nt, Human
acagcuccuucugucc

SEQ ID NO: 2735107 - RNA, 18 nt, Human
acagcuccuucuguccua

SEQ ID NO: 2735108 - RNA, 23 nt, Human
acagcuccuucuguccuacucug

SEQ ID NO: 2735109 - RNA, 14 nt, Human
acagcucuguccug

SEQ ID NO: 2735110 - RNA, 14 nt, Human
acaggcaaugcugg

SEQ ID NO: 2735111 - RNA, 19 nt, Human
acaggcaagcaccuccugc

SEQ ID NO: 2735112 - RNA, 22 nt, Human
acagugagucgaggacagggag

SEQ ID NO: 2735113 - RNA, 19 nt, Human
acaggugugaaccaccaca

SEQ ID NO: 2735114 - RNA, 22 nt, Human
acaggugugagucaccaagccc

SEQ ID NO: 2735115 - RNA, 23 nt, Human
acaggugugagucaccaagccca

SEQ ID NO: 2735116 - RNA, 20 nt, Human
acaucccuuaccugggaaag

SEQ ID NO: 2735117 - RNA, 16 nt, Human
acaugcaaggucauuu

SEQ ID NO: 2735118 - RNA, 17 nt, Human
acaugcaaggucauuuu

SEQ ID NO: 2735119 - RNA, 18 nt, Human
acaugcaaggucauuuuu

SEQ ID NO: 2735120 - RNA, 15 nt, Human
acaugccucucucag

SEQ ID NO: 2735121 - RNA, 16 nt, Human
acaugccucucucagg

SEQ ID NO: 2735122 - RNA, 17 nt, Human
acaugccucucucaggc

SEQ ID NO: 2735123 - RNA, 18 nt, Human
acaugccucucucaggcc

SEQ ID NO: 2735124 - RNA, 15 nt, Human
acauaagauaaaugu

SEQ ID NO: 2735125 - RNA, 15 nt, Human
acauaaguaauucaa

SEQ ID NO: 2735126 - RNA, 19 nt, Human
acauaauuaaauuuugagu

SEQ ID NO: 2735127 - RNA, 16 nt, Human
acauaagauaaaugug

SEQ ID NO: 2735128 - RNA, 20 nt, Human
accagccccagugcccacag

SEQ ID NO: 2735129 - RNA, 18 nt, Human
accagccccagugcccac

SEQ ID NO: 2735130 - RNA, 19 nt, Human
accagccccagugcccaca

SEQ ID NO: 2735131 - RNA, 16 nt, Human
accagccccagugccc

SEQ ID NO: 2735132 - RNA, 17 nt, Human
accagccccagugccca

SEQ ID NO: 2735133 - RNA, 14 nt, Human
accagcagaaaugc

SEQ ID NO: 2735134 - RNA, 12 nt, Human
accagcagagca

SEQ ID NO: 2735135 - RNA, 13 nt, Human
accagcagagcac

SEQ ID NO: 2735136 - RNA, 23 nt, Human
acaugucuuuucuugcaugaggc

SEQ ID NO: 2735137 - RNA, 19 nt, Human
acaugccucucucaggcca

SEQ ID NO: 2735138 - RNA, 15 nt, Human
accaucaagccacca

SEQ ID NO: 2735139 - RNA, 12 nt, Human
accaucauugaa

SEQ ID NO: 2735140 - RNA, 15 nt, Human
accaucauugaaauc

SEQ ID NO: 2735141 - RNA, 23 nt, Human
accaucauugaaaucuuuuugcu

SEQ ID NO: 2735142 - RNA, 14 nt, Human
accaucaagccacc

SEQ ID NO: 2735143 - RNA, 13 nt, Human
acccaugcugccc

SEQ ID NO: 2735144 - RNA, 15 nt, Human
acccacccuccuuuc

SEQ ID NO: 2735145 - RNA, 15 nt, Human
acccacccccaccca

SEQ ID NO: 2735146 - RNA, 17 nt, Human
acccacccccacccaag

SEQ ID NO: 2735147 - RNA, 19 nt, Human
acggacacucaaaagcugg

SEQ ID NO: 2735148 - RNA, 15 nt, Human
acggaauaguuggcu

SEQ ID NO: 2735149 - RNA, 15 nt, Human
acggaagagccuugc

SEQ ID NO: 2735150 - RNA, 16 nt, Human
acggaagagccuugcg

SEQ ID NO: 2735151 - RNA, 19 nt, Human
acgcuggagugcagugagc

SEQ ID NO: 2735152 - RNA, 18 nt, Human
acgcuggagugcagugag

SEQ ID NO: 2735153 - RNA, 15 nt, Human
acuaauagacaauuu

SEQ ID NO: 2735154 - RNA, 15 nt, Human
acgucugacaggcaa

SEQ ID NO: 2735155 - RNA, 23 nt, Human
acgucugacaggcaaugcuggcu

SEQ ID NO: 2735156 - RNA, 11 nt, Human
accugugucuc

SEQ ID NO: 2735157 - RNA, 19 nt, Human
acuaguauuucuaugaaau

SEQ ID NO: 2735158 - RNA, 18 nt, Human
acuaguauuucuaugaaa

SEQ ID NO: 2735159 - RNA, 16 nt, Human
acuauuguuagucucu

SEQ ID NO: 2735160 - RNA, 17 nt, Human
acuagggaagauaauau

SEQ ID NO: 2735161 - RNA, 17 nt, Human
accucugccucagaaaa

SEQ ID NO: 2735162 - RNA, 18 nt, Human
accucugccucagaaaac

SEQ ID NO: 2735163 - RNA, 21 nt, Human
accucuugagccuugaacuuu

SEQ ID NO: 2735164 - RNA, 20 nt, Human
accucuugagccuugaacuu

SEQ ID NO: 2735165 - RNA, 19 nt, Human
accucuugagccuugaacu

SEQ ID NO: 2735166 - RNA, 17 nt, Human
accucuugagccuugaa

SEQ ID NO: 2735167 - RNA, 22 nt, Human
accugucuugccuuuuucauua

SEQ ID NO: 2735168 - RNA, 21 nt, Human
accugucuugccuuuuucauu

SEQ ID NO: 2735169 - RNA, 19 nt, Human
accugucuugccuuuuuca

SEQ ID NO: 2735170 - RNA, 18 nt, Human
accugccagggacagagg

SEQ ID NO: 2735171 - RNA, 15 nt, Human
accugccagggacag

SEQ ID NO: 2735172 - RNA, 16 nt, Human
accugccagggacaga

SEQ ID NO: 2735173 - RNA, 11 nt, Human
accugccaggg

SEQ ID NO: 2735174 - RNA, 12 nt, Human
accugccaggga

SEQ ID NO: 2735175 - RNA, 13 nt, Human
accugccagggac

SEQ ID NO: 2735176 - RNA, 15 nt, Human
accgggccacagaga

SEQ ID NO: 2735177 - RNA, 19 nt, Human
accgggccacagagaaagu

SEQ ID NO: 2735178 - RNA, 14 nt, Human
accgugaggccaga

SEQ ID NO: 2735179 - RNA, 14 nt, Human
accggcuggccugg

SEQ ID NO: 2735180 - RNA, 15 nt, Human
accggcuggccuggc

SEQ ID NO: 2735181 - RNA, 20 nt, Human
accgggcacucagaagacac

SEQ ID NO: 2735182 - RNA, 19 nt, Human
accggcuggccuggccccu

SEQ ID NO: 2735183 - RNA, 17 nt, Human
accggcuggccuggccc

SEQ ID NO: 2735184 - RNA, 18 nt, Human
accggcuggccuggcccc

SEQ ID NO: 2735185 - RNA, 17 nt, Human
acccuguuaccauuuug

SEQ ID NO: 2735186 - RNA, 14 nt, Human
acccaugcugcccu

SEQ ID NO: 2735187 - RNA, 15 nt, Human
acccaugcugcccug

SEQ ID NO: 2735188 - RNA, 16 nt, Human
accccacacacgccag

SEQ ID NO: 2735189 - RNA, 22 nt, Human
acccugugauggggcccugccu

SEQ ID NO: 2735190 - RNA, 18 nt, Human
accucaggugagaagcag

SEQ ID NO: 2735191 - RNA, 14 nt, Human
accucaggccuggg

SEQ ID NO: 2735192 - RNA, 22 nt, Human
accucaggccugggggcugggc

SEQ ID NO: 2735193 - RNA, 16 nt, Human
accgugaggccagaga

SEQ ID NO: 2735194 - RNA, 17 nt, Human
accgugaggccagagac

SEQ ID NO: 2735195 - RNA, 12 nt, Human
accucaggccug

SEQ ID NO: 2735196 - RNA, 13 nt, Human
accucaggccugg

SEQ ID NO: 2735197 - RNA, 14 nt, Human
acucuuaagaagac

SEQ ID NO: 2735198 - RNA, 15 nt, Human
acucuuaagaagacu

SEQ ID NO: 2735199 - RNA, 20 nt, Human
acucuuaagaagacugcauu

SEQ ID NO: 2735200 - RNA, 21 nt, Human
acucugugucagguggggcag

SEQ ID NO: 2735201 - RNA, 19 nt, Human
acucugugucagguggggc

SEQ ID NO: 2735202 - RNA, 19 nt, Human
acucugucucaaaaaaaca

SEQ ID NO: 2735203 - RNA, 22 nt, Human
acugauggcuaauguacugcau

SEQ ID NO: 2735204 - RNA, 12 nt, Human
acugaugggcaa

SEQ ID NO: 2735205 - RNA, 22 nt, Human
acugaugggcaacccccagccu

SEQ ID NO: 2735206 - RNA, 13 nt, Human
acugaucucucgu

SEQ ID NO: 2735207 - RNA, 22 nt, Human
acugacauuguuggccaaagcc

SEQ ID NO: 2735208 - RNA, 23 nt, Human
acugacauuguuggccaaagcca

SEQ ID NO: 2735209 - RNA, 23 nt, Human
acugauuuuuuuuuccuucagug

SEQ ID NO: 2735210 - RNA, 21 nt, Human
acugauuuuuuuuuccuucag

SEQ ID NO: 2735211 - RNA, 22 nt, Human
acugauuuuuuuuuccuucagu

SEQ ID NO: 2735212 - RNA, 22 nt, Human
acugauucuucagcaaaaauau

SEQ ID NO: 2735213 - RNA, 15 nt, Human
acugauucuucagca

SEQ ID NO: 2735214 - RNA, 13 nt, Human
acugauucuucag

SEQ ID NO: 2735215 - RNA, 12 nt, Human
acugauucuuca

SEQ ID NO: 2735216 - RNA, 22 nt, Human
acugcccggcaggguccuagaa

SEQ ID NO: 2735217 - RNA, 14 nt, Human
acugcuuuuggucu

SEQ ID NO: 2735218 - RNA, 15 nt, Human
acugcuuuuggucug

SEQ ID NO: 2735219 - RNA, 16 nt, Human
acugcuuuuggucugu

SEQ ID NO: 2735220 - RNA, 20 nt, Human
acugcuuuuggucuguguga

SEQ ID NO: 2735221 - RNA, 15 nt, Human
acugcccggcagggu

SEQ ID NO: 2735222 - RNA, 19 nt, Human
acuucaaauccuugaagau

SEQ ID NO: 2735223 - RNA, 14 nt, Human
acuuaaauaaugug

SEQ ID NO: 2735224 - RNA, 20 nt, Human
acuucaaauccuugaagauu

SEQ ID NO: 2735225 - RNA, 17 nt, Human
acuucagcgguuuauau

SEQ ID NO: 2735226 - RNA, 18 nt, Human
acuucagcgguuuauaua

SEQ ID NO: 2735227 - RNA, 19 nt, Human
acuucagcgguuuauauaa

SEQ ID NO: 2735228 - RNA, 20 nt, Human
acuucugccauauucuguug

SEQ ID NO: 2735229 - RNA, 18 nt, Human
acuucuuauacauuugau

SEQ ID NO: 2735230 - RNA, 17 nt, Human
acuucuuauacauuuga

SEQ ID NO: 2735231 - RNA, 15 nt, Human
gcugaggugggagga

SEQ ID NO: 2735232 - RNA, 16 nt, Human
gcugcacccucaggca

SEQ ID NO: 2735233 - RNA, 13 nt, Human
gcugcacccucag

SEQ ID NO: 2735234 - RNA, 15 nt, Human
gcugcacccucaggc

SEQ ID NO: 2735235 - RNA, 12 nt, Human
gcugccauccag

SEQ ID NO: 2735236 - RNA, 13 nt, Human
gcugccauccagg

SEQ ID NO: 2735237 - RNA, 18 nt, Human
gcugcugaaggcucgagc

SEQ ID NO: 2735238 - RNA, 12 nt, Human
gcugcugacagu

SEQ ID NO: 2735239 - RNA, 17 nt, Human
gcugccauccagguuca

SEQ ID NO: 2735240 - RNA, 13 nt, Human
gcugccccuggca

SEQ ID NO: 2735241 - RNA, 15 nt, Human
gcugccccuggcagc

SEQ ID NO: 2735242 - RNA, 16 nt, Human
gcugccccuggcagcc

SEQ ID NO: 2735243 - RNA, 20 nt, Human
gcucucaggccagcugcuug

SEQ ID NO: 2735244 - RNA, 19 nt, Human
gcucucaggccagcugcuu

SEQ ID NO: 2735245 - RNA, 17 nt, Human
gcucucaggccagcugc

SEQ ID NO: 2735246 - RNA, 18 nt, Human
gcucucaggccagcugcu

SEQ ID NO: 2735247 - RNA, 19 nt, Human
gcucuacugaggugcuaug

SEQ ID NO: 2735248 - RNA, 16 nt, Human
gcuccucuccccagca

SEQ ID NO: 2735249 - RNA, 19 nt, Human
gcuccucuccccagcaagu

SEQ ID NO: 2735250 - RNA, 18 nt, Human
gcucucaaguuaucaggg

SEQ ID NO: 2735251 - RNA, 9 nt, Human
gcuccagac

SEQ ID NO: 2735252 - RNA, 23 nt, Human
gcuccagacacauguccaagaag

SEQ ID NO: 2735253 - RNA, 18 nt, Human
gcuccagacacaugucca

SEQ ID NO: 2735254 - RNA, 21 nt, Human
gcuccagacacauguccaaga

SEQ ID NO: 2735255 - RNA, 13 nt, Human
gcuccagcucacc

SEQ ID NO: 2735256 - RNA, 14 nt, Human
gcuccagcucacca

SEQ ID NO: 2735257 - RNA, 17 nt, Human
gcuccagcucaccagcc

SEQ ID NO: 2735258 - RNA, 23 nt, Human
gcucccaggcauuccccaggagg

SEQ ID NO: 2735259 - RNA, 15 nt, Human
gcuccucuccccagc

SEQ ID NO: 2735260 - RNA, 20 nt, Human
gcucugaucauccacugugc

SEQ ID NO: 2735261 - RNA, 21 nt, Human
gcucugaucauccacugugcc

SEQ ID NO: 2735262 - RNA, 22 nt, Human
gcucugaucauccacugugcca

SEQ ID NO: 2735263 - RNA, 16 nt, Human
gcugaaacaacaaaua

SEQ ID NO: 2735264 - RNA, 23 nt, Human
gcucugguccauagagagcaaga

SEQ ID NO: 2735265 - RNA, 13 nt, Human
gcugacagacaca

SEQ ID NO: 2735266 - RNA, 23 nt, Human
gcugaaggcucgagcaugccugg

SEQ ID NO: 2735267 - RNA, 17 nt, Human
gcugaauacagaggcaa

SEQ ID NO: 2735268 - RNA, 17 nt, Human
ggaagacuucaucccuc

SEQ ID NO: 2735269 - RNA, 20 nt, Human
ggaagacuucaucccucugg

SEQ ID NO: 2735270 - RNA, 14 nt, Human
ggaaaugggcagag

SEQ ID NO: 2735271 - RNA, 13 nt, Human
ggaaaucuuuaaa

SEQ ID NO: 2735272 - RNA, 16 nt, Human
ggaaaugggcagagca

SEQ ID NO: 2735273 - RNA, 17 nt, Human
ggaaaugggcagagcag

SEQ ID NO: 2735274 - RNA, 18 nt, Human
ggaaaugggcagagcaga

SEQ ID NO: 2735275 - RNA, 22 nt, Human
ggaaaugggcagagcagagacc

SEQ ID NO: 2735276 - RNA, 15 nt, Human
ggaacaaggcaaggc

SEQ ID NO: 2735277 - RNA, 17 nt, Human
ggaacaaggcaaggcug

SEQ ID NO: 2735278 - RNA, 21 nt, Human
ggaacaaggcaaggcugucaa

SEQ ID NO: 2735279 - RNA, 23 nt, Human
ggaacaaggcaaggcugucaauu

SEQ ID NO: 2735280 - RNA, 19 nt, Human
ggaacacuccuucacagau

SEQ ID NO: 2735281 - RNA, 15 nt, Human
ggaacacuccuucac

SEQ ID NO: 2735282 - RNA, 14 nt, Human
ggaagacaauguga

SEQ ID NO: 2735283 - RNA, 16 nt, Human
ggaagacaaugugaaa

SEQ ID NO: 2735284 - RNA, 14 nt, Human
gcuuugaucccuuc

SEQ ID NO: 2735285 - RNA, 17 nt, Human
gcuuugaucccuucuua

SEQ ID NO: 2735286 - RNA, 11 nt, Human
gcuuuucugau

SEQ ID NO: 2735287 - RNA, 16 nt, Human
gcuuuucugauccagu

SEQ ID NO: 2735288 - RNA, 15 nt, Human
gcuuuucugauccag

SEQ ID NO: 2735289 - RNA, 12 nt, Human
gcuuuucugauc

SEQ ID NO: 2735290 - RNA, 15 nt, Human
gcuuuuggucugugu

SEQ ID NO: 2735291 - RNA, 18 nt, Human
gcuuuugucuaugggacu

SEQ ID NO: 2735292 - RNA, 12 nt, Human
gcuuuugugcau

SEQ ID NO: 2735293 - RNA, 22 nt, Human
gcuuuuuucucugauacagaaa

SEQ ID NO: 2735294 - RNA, 18 nt, Human
ggaaaauuuuaaaaauac

SEQ ID NO: 2735295 - RNA, 16 nt, Human
ggaaacccagcucugg

SEQ ID NO: 2735296 - RNA, 13 nt, Human
gcuguauuuuaaa

SEQ ID NO: 2735297 - RNA, 12 nt, Human
gcuguauuuuaa

SEQ ID NO: 2735298 - RNA, 23 nt, Human
gcugguucaggguuggccccugc

SEQ ID NO: 2735299 - RNA, 14 nt, Human
gcuguuggcugggg

SEQ ID NO: 2735300 - RNA, 13 nt, Human
gcuguuggcuggg

SEQ ID NO: 2735301 - RNA, 15 nt, Human
gcuucaguggcagcu

SEQ ID NO: 2735302 - RNA, 14 nt, Human
gcuucaguggcagc

SEQ ID NO: 2735303 - RNA, 14 nt, Human
gcuucaaggauccu

SEQ ID NO: 2735304 - RNA, 22 nt, Human
gcuuccagugaggcucugcccu

SEQ ID NO: 2735305 - RNA, 19 nt, Human
gcuuccuggcaauagucaa

SEQ ID NO: 2735306 - RNA, 23 nt, Human
gcuuccagugaggcucugcccuu

SEQ ID NO: 2735307 - RNA, 20 nt, Human
gcuugaccgugaggccagag

SEQ ID NO: 2735308 - RNA, 12 nt, Human
gcuucuucagag

SEQ ID NO: 2735309 - RNA, 15 nt, Human
gcuucuucagagacu

SEQ ID NO: 2735310 - RNA, 18 nt, Human
gcuuguaaauagcucagg

SEQ ID NO: 2735311 - RNA, 19 nt, Human
gcuuguaaauagcucaggu

SEQ ID NO: 2735312 - RNA, 17 nt, Human
gcuuguaaauagcucag

SEQ ID NO: 2735313 - RNA, 22 nt, Human
gcuugaccuuuaagagaaauga

SEQ ID NO: 2735314 - RNA, 23 nt, Human
gcuugaccgugaggccagagaca

SEQ ID NO: 2735315 - RNA, 18 nt, Human
gcuugaccuuuaagagaa

SEQ ID NO: 2735316 - RNA, 13 nt, Human
gccugcuccagcu

SEQ ID NO: 2735317 - RNA, 17 nt, Human
gccugcuaauuccccag

SEQ ID NO: 2735318 - RNA, 23 nt, Human
gccugcuaauuccccagauugca

SEQ ID NO: 2735319 - RNA, 19 nt, Human
gccuccuuugugaggaagc

SEQ ID NO: 2735320 - RNA, 20 nt, Human
gccuccuuugugaggaagcc

SEQ ID NO: 2735321 - RNA, 21 nt, Human
gccuccuuugugaggaagccg

SEQ ID NO: 2735322 - RNA, 13 nt, Human
gcgauucuucugc

SEQ ID NO: 2735323 - RNA, 14 nt, Human
gcgauucuucugcu

SEQ ID NO: 2735324 - RNA, 18 nt, Human
gcguugaaauuguaauua

SEQ ID NO: 2735325 - RNA, 20 nt, Human
gcgugguggacaugcacagc

SEQ ID NO: 2735326 - RNA, 14 nt, Human
gcgugcacacacca

SEQ ID NO: 2735327 - RNA, 18 nt, Human
gcgugcacacaccagagc

SEQ ID NO: 2735328 - RNA, 17 nt, Human
gcuacaaaaacacagca

SEQ ID NO: 2735329 - RNA, 19 nt, Human
gcuacaaaaacacagcaag

SEQ ID NO: 2735330 - RNA, 18 nt, Human
gcuacaaaaacacagcaa

SEQ ID NO: 2735331 - RNA, 16 nt, Human
gcuaauuuuucauuuu

SEQ ID NO: 2735332 - RNA, 24 nt, Human
gcguugaaauuguaauuauaucug

SEQ ID NO: 2735333 - RNA, 23 nt, Human
gcguugaaauuguaauuauaucu

SEQ ID NO: 2735334 - RNA, 17 nt, Human
gcguuucuaugacacau

SEQ ID NO: 2735335 - RNA, 15 nt, Human
gcuacugucagcucc

SEQ ID NO: 2735336 - RNA, 19 nt, Human
gcuacuguccuacccaccc

SEQ ID NO: 2735337 - RNA, 20 nt, Human
gcuacuguccuacccacccu

SEQ ID NO: 2735338 - RNA, 17 nt, Human
gcccaggccccugccac

SEQ ID NO: 2735339 - RNA, 22 nt, Human
gccaugugcuaguaauuggaaa

SEQ ID NO: 2735340 - RNA, 14 nt, Human
gccaugugccaggu

SEQ ID NO: 2735341 - RNA, 24 nt, Human
gccaucaauaaaaaauuaugacau

SEQ ID NO: 2735342 - RNA, 13 nt, Human
gcccaggcagguc

SEQ ID NO: 2735343 - RNA, 12 nt, Human
gcccaggcaggu

SEQ ID NO: 2735344 - RNA, 14 nt, Human
gcccaggcaggucu

SEQ ID NO: 2735345 - RNA, 16 nt, Human
gcccaggcaggucuug

SEQ ID NO: 2735346 - RNA, 15 nt, Human
gcccaggccccugcc

SEQ ID NO: 2735347 - RNA, 13 nt, Human
gcccaggccccug

SEQ ID NO: 2735348 - RNA, 15 nt, Human
gccccuggaugcagc

SEQ ID NO: 2735349 - RNA, 15 nt, Human
gccccugcccggcug

SEQ ID NO: 2735350 - RNA, 21 nt, Human
gccccugcugguucaggguug

SEQ ID NO: 2735351 - RNA, 22 nt, Human
gccccugcugguucaggguugg

SEQ ID NO: 2735352 - RNA, 22 nt, Human
gccaguuauggcuauaggugcu

SEQ ID NO: 2735353 - RNA, 13 nt, Human
gccaguugguccc

SEQ ID NO: 2735354 - RNA, 13 nt, Human
gccagugugacaa

SEQ ID NO: 2735355 - RNA, 22 nt, Human
gccaguuggucccccuuccaug

SEQ ID NO: 2735356 - RNA, 23 nt, Human
gccaguuggucccccuuccaugg

SEQ ID NO: 2735357 - RNA, 16 nt, Human
gccaguuggucccccu

SEQ ID NO: 2735358 - RNA, 18 nt, Human
gccaguuggucccccuuc

SEQ ID NO: 2735359 - RNA, 20 nt, Human
gccaguuggucccccuucca

SEQ ID NO: 2735360 - RNA, 21 nt, Human
gccaguuggucccccuuccau

SEQ ID NO: 2735361 - RNA, 13 nt, Human
gccagcaguucag

SEQ ID NO: 2735362 - RNA, 14 nt, Human
gccagcaguucaga

SEQ ID NO: 2735363 - RNA, 19 nt, Human
gccagcaguucagagcugc

SEQ ID NO: 2735364 - RNA, 20 nt, Human
gccagcaguucagagcugcc

SEQ ID NO: 2735365 - RNA, 21 nt, Human
gccagcaguucagagcugccc

SEQ ID NO: 2735366 - RNA, 13 nt, Human
gccaggcccucug

SEQ ID NO: 2735367 - RNA, 14 nt, Human
gccaggcccucugc

SEQ ID NO: 2735368 - RNA, 13 nt, Human
gccaggccacaag

SEQ ID NO: 2735369 - RNA, 18 nt, Human
gccaggccacaagacccu

SEQ ID NO: 2735370 - RNA, 22 nt, Human
gccaggccagagggagugacag

SEQ ID NO: 2735371 - RNA, 15 nt, Human
gccaggccagaggga

SEQ ID NO: 2735372 - RNA, 21 nt, Human
gccaggccacaagacccuugu

SEQ ID NO: 2735373 - RNA, 14 nt, Human
ggaggugaccccag

SEQ ID NO: 2735374 - RNA, 20 nt, Human
ggaggucaaggcugcaguga

SEQ ID NO: 2735375 - RNA, 16 nt, Human
ggaggggggagguggg

SEQ ID NO: 2735376 - RNA, 21 nt, Human
ggagcugccuguucagcucca

SEQ ID NO: 2735377 - RNA, 12 nt, Human
ggagcugccugu

SEQ ID NO: 2735378 - RNA, 16 nt, Human
ggagccccgaggccuu

SEQ ID NO: 2735379 - RNA, 22 nt, Human
ggagccccgaggccuucucuga

SEQ ID NO: 2735380 - RNA, 19 nt, Human
ggaggaaggaaacccagcu

SEQ ID NO: 2735381 - RNA, 20 nt, Human
ggaggaaggaaacccagcuc

SEQ ID NO: 2735382 - RNA, 23 nt, Human
ggaggaaggaaacccagcucugg

SEQ ID NO: 2735383 - RNA, 12 nt, Human
ggaggccagccu

SEQ ID NO: 2735384 - RNA, 11 nt, Human
ggaggccagcc

SEQ ID NO: 2735385 - RNA, 20 nt, Human
ggaggccaaggugggaggau

SEQ ID NO: 2735386 - RNA, 24 nt, Human
ggcacagaaaauggaagacagcuc

SEQ ID NO: 2735387 - RNA, 16 nt, Human
ggauguucugggacac

SEQ ID NO: 2735388 - RNA, 13 nt, Human
ggauguucuggga

SEQ ID NO: 2735389 - RNA, 15 nt, Human
ggauguucugggaca

SEQ ID NO: 2735390 - RNA, 15 nt, Human
ggagugcagugagcc

SEQ ID NO: 2735391 - RNA, 12 nt, Human
ggauggcaagau

SEQ ID NO: 2735392 - RNA, 18 nt, Human
ggauggauuuccagccaa

SEQ ID NO: 2735393 - RNA, 16 nt, Human
ggauggggcugcaccg

SEQ ID NO: 2735394 - RNA, 22 nt, Human
ggaucuucaucugacuaugaca

SEQ ID NO: 2735395 - RNA, 15 nt, Human
ggauccuccaggugc

SEQ ID NO: 2735396 - RNA, 14 nt, Human
ggauccuccaggug

SEQ ID NO: 2735397 - RNA, 13 nt, Human
ggauccugagcca

SEQ ID NO: 2735398 - RNA, 14 nt, Human
ggauccugagccag

SEQ ID NO: 2735399 - RNA, 15 nt, Human
ggaguucugguuccu

SEQ ID NO: 2735400 - RNA, 14 nt, Human
ggaguggccacaga

SEQ ID NO: 2735401 - RNA, 12 nt, Human
ggauaaaugcca

SEQ ID NO: 2735402 - RNA, 22 nt, Human
ggauaauaaggaaaaguuuaau

SEQ ID NO: 2735403 - RNA, 18 nt, Human
ggcccuucucuccagccc

SEQ ID NO: 2735404 - RNA, 14 nt, Human
ggcccuuccuuuuc

SEQ ID NO: 2735405 - RNA, 16 nt, Human
ggcccuucucuccagc

SEQ ID NO: 2735406 - RNA, 17 nt, Human
ggcccuucucuccagcc

SEQ ID NO: 2735407 - RNA, 16 nt, Human
ggccagugugacaagg

SEQ ID NO: 2735408 - RNA, 21 nt, Human
ggccaaacucaccugccccuc

SEQ ID NO: 2735409 - RNA, 17 nt, Human
ggccaaacucaccugcc

SEQ ID NO: 2735410 - RNA, 16 nt, Human
ggccaggcuggucuca

SEQ ID NO: 2735411 - RNA, 18 nt, Human
ggccaggcuggucucaaa

SEQ ID NO: 2735412 - RNA, 12 nt, Human
ggccaggcuggu

SEQ ID NO: 2735413 - RNA, 14 nt, Human
ggccaggcuggucu

SEQ ID NO: 2735414 - RNA, 18 nt, Human
ggcagugggagcugccug

SEQ ID NO: 2735415 - RNA, 19 nt, Human
ggcagugggagcugccugu

SEQ ID NO: 2735416 - RNA, 15 nt, Human
ggcauauuuuucaca

SEQ ID NO: 2735417 - RNA, 17 nt, Human
ggcauauuuuucacaua

SEQ ID NO: 2735418 - RNA, 18 nt, Human
ggcauccaguaucuugaa

SEQ ID NO: 2735419 - RNA, 15 nt, Human
ggcaccagcagccug

SEQ ID NO: 2735420 - RNA, 16 nt, Human
ggcaccagcagccugg

SEQ ID NO: 2735421 - RNA, 22 nt, Human
ggcacugcuuccagugaggcuc

SEQ ID NO: 2735422 - RNA, 24 nt, Human
ggcacugcuuccagugaggcucug

SEQ ID NO: 2735423 - RNA, 17 nt, Human
ggcagugggagcugccu

SEQ ID NO: 2735424 - RNA, 23 nt, Human
ggcucagcggggacagcuccuuc

SEQ ID NO: 2735425 - RNA, 21 nt, Human
ggcucagcggggacagcuccu

SEQ ID NO: 2735426 - RNA, 22 nt, Human
ggcucagcggggacagcuccuu

SEQ ID NO: 2735427 - RNA, 23 nt, Human
ggcucagcaaaagaugcuucuca

SEQ ID NO: 2735428 - RNA, 19 nt, Human
ggcucagcaaaagaugcuu

SEQ ID NO: 2735429 - RNA, 19 nt, Human
ggcgugcaguggugcgauc

SEQ ID NO: 2735430 - RNA, 14 nt, Human
ggcgugcaguggug

SEQ ID NO: 2735431 - RNA, 16 nt, Human
ggcucacugcagccuc

SEQ ID NO: 2735432 - RNA, 17 nt, Human
ggcucacugcagccuca

SEQ ID NO: 2735433 - RNA, 12 nt, Human
ggccugagcugg

SEQ ID NO: 2735434 - RNA, 15 nt, Human
ggccugagcugggau

SEQ ID NO: 2735435 - RNA, 12 nt, Human
ggccuucucuga

SEQ ID NO: 2735436 - RNA, 21 nt, Human
ggccugugucuaguuguuuga

SEQ ID NO: 2735437 - RNA, 21 nt, Human
ggccuggccagaugcaccagc

SEQ ID NO: 2735438 - RNA, 15 nt, Human
ggccuucucugaagg

SEQ ID NO: 2735439 - RNA, 16 nt, Human
ggccuucucugaagga

SEQ ID NO: 2735440 - RNA, 13 nt, Human
ggccuuuggcuuc

SEQ ID NO: 2735441 - RNA, 14 nt, Human
ggccuuuggcuuca

SEQ ID NO: 2735442 - RNA, 20 nt, Human
gggacauuugcucauggaau

SEQ ID NO: 2735443 - RNA, 21 nt, Human
gggacauuugcucauggaauu

SEQ ID NO: 2735444 - RNA, 19 nt, Human
gggacauuugcucauggaa

SEQ ID NO: 2735445 - RNA, 21 nt, Human
gggacagcuccuucuguccua

SEQ ID NO: 2735446 - RNA, 19 nt, Human
aaaaauauauuuaaugaua

SEQ ID NO: 2735447 - RNA, 13 nt, Human
aaaaauauauuua

SEQ ID NO: 2735448 - RNA, 15 nt, Human
aaaaauauauuuaau

SEQ ID NO: 2735449 - RNA, 14 nt, Human
aaaaauauuuuaug

SEQ ID NO: 2735450 - RNA, 13 nt, Human
gggaaggauacaa

SEQ ID NO: 2735451 - RNA, 16 nt, Human
gggacagcuccuucug

SEQ ID NO: 2735452 - RNA, 23 nt, Human
gggacagaggggguggccuccca

SEQ ID NO: 2735453 - RNA, 13 nt, Human
gggacagaggggg

SEQ ID NO: 2735454 - RNA, 22 nt, Human
gggacagaggggguggccuccc

SEQ ID NO: 2735455 - RNA, 12 nt, Human
aaaaccacagca

SEQ ID NO: 2735456 - RNA, 21 nt, Human
aaaaccaauguucucucuucu

SEQ ID NO: 2735457 - RNA, 15 nt, Human
aaaacaugcuacaca

SEQ ID NO: 2735458 - RNA, 22 nt, Human
aaaaauggaacauaaaauacaa

SEQ ID NO: 2735459 - RNA, 14 nt, Human
aaaaaucucaaauu

SEQ ID NO: 2735460 - RNA, 13 nt, Human
aaaacucauuuuu

SEQ ID NO: 2735461 - RNA, 20 nt, Human
aaaacugcugacuguuuucu

SEQ ID NO: 2735462 - RNA, 22 nt, Human
aaaacugcugacuguuuucucu

SEQ ID NO: 2735463 - RNA, 17 nt, Human
aaaagaugaaaauauuu

SEQ ID NO: 2735464 - RNA, 13 nt, Human
aaaagaugcuucu

SEQ ID NO: 2735465 - RNA, 23 nt, Human
aaaacugcugacuguuuucucuu

SEQ ID NO: 2735466 - RNA, 14 nt, Human
aaaaccacagcagu

SEQ ID NO: 2735467 - RNA, 13 nt, Human
aaaaccacagcag

SEQ ID NO: 2735468 - RNA, 15 nt, Human
gggauuacaggugug

SEQ ID NO: 2735469 - RNA, 16 nt, Human
gggcaacccccagccu

SEQ ID NO: 2735470 - RNA, 18 nt, Human
gggcaacccccagccugc

SEQ ID NO: 2735471 - RNA, 16 nt, Human
gggcagagcagagacc

SEQ ID NO: 2735472 - RNA, 12 nt, Human
gggcagagcaga

SEQ ID NO: 2735473 - RNA, 17 nt, Human
gggcagagcagagacca

SEQ ID NO: 2735474 - RNA, 22 nt, Human
gggcagagcagagaccaucccu

SEQ ID NO: 2735475 - RNA, 14 nt, Human
gggcagaggaaagc

SEQ ID NO: 2735476 - RNA, 19 nt, Human
aaaagguaugcaaucaaau

SEQ ID NO: 2735477 - RNA, 17 nt, Human
gggaggucgaggcagga

SEQ ID NO: 2735478 - RNA, 18 nt, Human
gggagggcuccagacaca

SEQ ID NO: 2735479 - RNA, 18 nt, Human
gggaggucgaggcaggag

SEQ ID NO: 2735480 - RNA, 19 nt, Human
gggaggucgaggcaggagg

SEQ ID NO: 2735481 - RNA, 14 nt, Human
gggagggcuccaga

SEQ ID NO: 2735482 - RNA, 15 nt, Human
gggagggcuccagac

SEQ ID NO: 2735483 - RNA, 17 nt, Human
gggagggcuccagacac

SEQ ID NO: 2735484 - RNA, 15 nt, Human
gggaggucgaggcag

SEQ ID NO: 2735485 - RNA, 19 nt, Human
gggaggccaaggugggagg

SEQ ID NO: 2735486 - RNA, 19 nt, Human
aaaaguauguuagugcaaa

SEQ ID NO: 2735487 - RNA, 14 nt, Human
aaaaugagccuggc

SEQ ID NO: 2735488 - RNA, 21 nt, Human
aaaaugagccuggcaagaaug

SEQ ID NO: 2735489 - RNA, 11 nt, Human
gggccaggagc

SEQ ID NO: 2735490 - RNA, 15 nt, Human
gggcgggaggauguu

SEQ ID NO: 2735491 - RNA, 15 nt, Human
gggccuccugugugu

SEQ ID NO: 2735492 - RNA, 13 nt, Human
gggccuccugugu

SEQ ID NO: 2735493 - RNA, 19 nt, Human
gggccucuuaugggcuggg

SEQ ID NO: 2735494 - RNA, 20 nt, Human
gggccucuuaugggcugggu

SEQ ID NO: 2735495 - RNA, 14 nt, Human
gggccaguuggucc

SEQ ID NO: 2735496 - RNA, 18 nt, Human
gggccaguuggucccccu

SEQ ID NO: 2735497 - RNA, 22 nt, Human
gggccaguuggucccccuucca

SEQ ID NO: 2735498 - RNA, 23 nt, Human
gggccaguuggucccccuuccau

SEQ ID NO: 2735499 - RNA, 20 nt, Human
aaacagucucaggaaaucaa

SEQ ID NO: 2735500 - RNA, 20 nt, Human
aaacaagcacuaaacaaaga

SEQ ID NO: 2735501 - RNA, 12 nt, Human
aaacacauuuuu

SEQ ID NO: 2735502 - RNA, 16 nt, Human
aaacacauuuuucuua

SEQ ID NO: 2735503 - RNA, 18 nt, Human
aaacaagaccacguuucu

SEQ ID NO: 2735504 - RNA, 20 nt, Human
aaacaagaccacguuucuaa

SEQ ID NO: 2735505 - RNA, 12 nt, Human
ggggacagcucc

SEQ ID NO: 2735506 - RNA, 14 nt, Human
ggggacagcuccuu

SEQ ID NO: 2735507 - RNA, 20 nt, Human
ggggacagcuccuucugucc

SEQ ID NO: 2735508 - RNA, 22 nt, Human
aaaauuuuuucucuaggaaaua

SEQ ID NO: 2735509 - RNA, 12 nt, Human
aaaaugugaagu

SEQ ID NO: 2735510 - RNA, 22 nt, Human
gggcuggguucuacccaggugc

SEQ ID NO: 2735511 - RNA, 18 nt, Human
gggcugcaugcgggcuuc

SEQ ID NO: 2735512 - RNA, 21 nt, Human
gggcugcaugcgggcuuccuc

SEQ ID NO: 2735513 - RNA, 10 nt, Human
gggcucagca

SEQ ID NO: 2735514 - RNA, 18 nt, Human
gggcucagcaaaagaugc

SEQ ID NO: 2735515 - RNA, 22 nt, Human
gggcugcaccggcuggccuggc

SEQ ID NO: 2735516 - RNA, 20 nt, Human
gggcuggguucuacccaggu

SEQ ID NO: 2735517 - RNA, 15 nt, Human
aaauaauuuuuauau

SEQ ID NO: 2735518 - RNA, 13 nt, Human
aaauaaugugaaa

SEQ ID NO: 2735519 - RNA, 18 nt, Human
aaauaauuuuuauauuug

SEQ ID NO: 2735520 - RNA, 20 nt, Human
aaauaauuuuuauauuugaa

SEQ ID NO: 2735521 - RNA, 12 nt, Human
aaauaaugugaa

SEQ ID NO: 2735522 - RNA, 12 nt, Human
guaaaaugugaa

SEQ ID NO: 2735523 - RNA, 19 nt, Human
guaaaaugugaagugaaug

SEQ ID NO: 2735524 - RNA, 20 nt, Human
guaaaaugugaagugaauga

SEQ ID NO: 2735525 - RNA, 22 nt, Human
guaaaaugugaagugaaugaaa

SEQ ID NO: 2735526 - RNA, 17 nt, Human
guaacaaugaagauaaa

SEQ ID NO: 2735527 - RNA, 21 nt, Human
aaaguuucucuuuucaaaaca

SEQ ID NO: 2735528 - RNA, 23 nt, Human
aaaguuucucuuuucaaaacauu

SEQ ID NO: 2735529 - RNA, 13 nt, Human
aaaguugaauuua

SEQ ID NO: 2735530 - RNA, 12 nt, Human
aaaguugaauuu

SEQ ID NO: 2735531 - RNA, 16 nt, Human
aaaguugaauuuuaca

SEQ ID NO: 2735532 - RNA, 22 nt, Human
aaaguugaauuuauuggcuuuu

SEQ ID NO: 2735533 - RNA, 16 nt, Human
aaaguugaauuuauug

SEQ ID NO: 2735534 - RNA, 19 nt, Human
aaaguuuaauauuaaagcc

SEQ ID NO: 2735535 - RNA, 16 nt, Human
aaaguuuaauauuaaa

SEQ ID NO: 2735536 - RNA, 22 nt, Human
aaaguuuaauauuaaagccaug

SEQ ID NO: 2735537 - RNA, 21 nt, Human
aaaguuuaauauuaaagccau

SEQ ID NO: 2735538 - RNA, 20 nt, Human
aaaguuuaauauuaaagcca

SEQ ID NO: 2735539 - RNA, 20 nt, Human
gguuuggacaaaauggaaua

SEQ ID NO: 2735540 - RNA, 12 nt, Human
aaaguggugaga

SEQ ID NO: 2735541 - RNA, 23 nt, Human
aaaguuauugauaaguucauaca

SEQ ID NO: 2735542 - RNA, 14 nt, Human
gguuucagaaaugu

SEQ ID NO: 2735543 - RNA, 13 nt, Human
gguuucagaaaug

SEQ ID NO: 2735544 - RNA, 12 nt, Human
gguuucagaaau

SEQ ID NO: 2735545 - RNA, 21 nt, Human
gguucccuuugacgccauccc

SEQ ID NO: 2735546 - RNA, 22 nt, Human
gguucccuuugacgccauccca

SEQ ID NO: 2735547 - RNA, 22 nt, Human
gguucaggguuggccccugccc

SEQ ID NO: 2735548 - RNA, 18 nt, Human
gguucaggguuggccccu

SEQ ID NO: 2735549 - RNA, 21 nt, Human
gguucaggguuggccccugcc

SEQ ID NO: 2735550 - RNA, 12 nt, Human
gguucagcuugu

SEQ ID NO: 2735551 - RNA, 12 nt, Human
gguguggaagag

SEQ ID NO: 2735552 - RNA, 21 nt, Human
ggugugcggccuuuggcuuca

SEQ ID NO: 2735553 - RNA, 13 nt, Human
ggugugcucugau

SEQ ID NO: 2735554 - RNA, 16 nt, Human
ggugugacugaauuuc

SEQ ID NO: 2735555 - RNA, 18 nt, Human
ggugugagucaccaagcc

SEQ ID NO: 2735556 - RNA, 13 nt, Human
ggugucgggcaug

SEQ ID NO: 2735557 - RNA, 16 nt, Human
ggugucgggcaugaca

SEQ ID NO: 2735558 - RNA, 15 nt, Human
gguggggucacucug

SEQ ID NO: 2735559 - RNA, 23 nt, Human
gguggggucacucuggcagcuca

SEQ ID NO: 2735560 - RNA, 20 nt, Human
ggugggaggauugcuugagc

SEQ ID NO: 2735561 - RNA, 14 nt, Human
ggugggauccucca

SEQ ID NO: 2735562 - RNA, 15 nt, Human
ggugggauccuccag

SEQ ID NO: 2735563 - RNA, 13 nt, Human
gguggggcagcuu

SEQ ID NO: 2735564 - RNA, 17 nt, Human
gguggggcagcuugagg

SEQ ID NO: 2735565 - RNA, 19 nt, Human
ggugggauccuccaggugc

SEQ ID NO: 2735566 - RNA, 15 nt, Human
aaagcagcguuucua

SEQ ID NO: 2735567 - RNA, 21 nt, Human
gguggaugccugguggcagcu

SEQ ID NO: 2735568 - RNA, 14 nt, Human
gguggaugccuggu

SEQ ID NO: 2735569 - RNA, 22 nt, Human
aaagcagcguuucuaugacaca

SEQ ID NO: 2735570 - RNA, 18 nt, Human
aaagcagcguuucuauga

SEQ ID NO: 2735571 - RNA, 16 nt, Human
aaagcagcguuucuau

SEQ ID NO: 2735572 - RNA, 21 nt, Human
ggugcauuugaggucuguucu

SEQ ID NO: 2735573 - RNA, 18 nt, Human
ggugcaaugaccuuucaa

SEQ ID NO: 2735574 - RNA, 19 nt, Human
ggugcaaugaccuuucaau

SEQ ID NO: 2735575 - RNA, 20 nt, Human
ggugcaaugaccuuucaaua

SEQ ID NO: 2735576 - RNA, 15 nt, Human
aaagacuauucaaac

SEQ ID NO: 2735577 - RNA, 13 nt, Human
aaagauuuucaga

SEQ ID NO: 2735578 - RNA, 13 nt, Human
aaagcaaaggaga

SEQ ID NO: 2735579 - RNA, 21 nt, Human
gguccugcugcaguugccagu

SEQ ID NO: 2735580 - RNA, 23 nt, Human
gguccugcugcaguugccaguca

SEQ ID NO: 2735581 - RNA, 13 nt, Human
ggucggaaaacau

SEQ ID NO: 2735582 - RNA, 14 nt, Human
gguccugcugcagu

SEQ ID NO: 2735583 - RNA, 14 nt, Human
ggucggaaaacaug

SEQ ID NO: 2735584 - RNA, 17 nt, Human
ggucuacacugugcuga

SEQ ID NO: 2735585 - RNA, 14 nt, Human
aaagacuauucaaa

SEQ ID NO: 2735586 - RNA, 17 nt, Human
aaagacuaucuaaaugu

SEQ ID NO: 2735587 - RNA, 12 nt, Human
aaacuuuacuau

SEQ ID NO: 2735588 - RNA, 15 nt, Human
gguccauagagagca

SEQ ID NO: 2735589 - RNA, 22 nt, Human
aaacuuuaccuuuuuuauacau

SEQ ID NO: 2735590 - RNA, 17 nt, Human
aaacuuuaccuuuuuua

SEQ ID NO: 2735591 - RNA, 14 nt, Human
gguaugcaaucaaa

SEQ ID NO: 2735592 - RNA, 22 nt, Human
gguaugaucacggcucacugca

SEQ ID NO: 2735593 - RNA, 17 nt, Human
gguccacccaggagccc

SEQ ID NO: 2735594 - RNA, 12 nt, Human
gguccacccagg

SEQ ID NO: 2735595 - RNA, 13 nt, Human
gguccacccagga

SEQ ID NO: 2735596 - RNA, 15 nt, Human
gguccacccaggagc

SEQ ID NO: 2735597 - RNA, 16 nt, Human
gguccacccaggagcc

SEQ ID NO: 2735598 - RNA, 13 nt, Human
gguaacaggcaga

SEQ ID NO: 2735599 - RNA, 14 nt, Human
gguaacaggcagau

SEQ ID NO: 2735600 - RNA, 20 nt, Human
gguaacaggcagauacagga

SEQ ID NO: 2735601 - RNA, 17 nt, Human
ggguuucuaaagcugcc

SEQ ID NO: 2735602 - RNA, 15 nt, Human
ggguggcaccagcag

SEQ ID NO: 2735603 - RNA, 17 nt, Human
ggguggaugccuggugg

SEQ ID NO: 2735604 - RNA, 13 nt, Human
ggguggaugccug

SEQ ID NO: 2735605 - RNA, 20 nt, Human
ggguggggaccucaggccug

SEQ ID NO: 2735606 - RNA, 19 nt, Human
gggugggacacccugugau

SEQ ID NO: 2735607 - RNA, 17 nt, Human
ggguguggcgcagcaua

SEQ ID NO: 2735608 - RNA, 12 nt, Human
ggguggugaccu

SEQ ID NO: 2735609 - RNA, 14 nt, Human
gaagcucagggccu

SEQ ID NO: 2735610 - RNA, 15 nt, Human
gaagcucagggccug

SEQ ID NO: 2735611 - RNA, 23 nt, Human
gaagcucagggccuggcucaggu

SEQ ID NO: 2735612 - RNA, 20 nt, Human
gaagcucagggccuggcuca

SEQ ID NO: 2735613 - RNA, 21 nt, Human
gaagcucagggccuggcucag

SEQ ID NO: 2735614 - RNA, 16 nt, Human
gaagcucagggccugg

SEQ ID NO: 2735615 - RNA, 17 nt, Human
gaagcucagggccuggc

SEQ ID NO: 2735616 - RNA, 18 nt, Human
gaagcucagggccuggcu

SEQ ID NO: 2735617 - RNA, 19 nt, Human
gaagcucagggccuggcuc

SEQ ID NO: 2735618 - RNA, 16 nt, Human
gaaggcucgagcaugc

SEQ ID NO: 2735619 - RNA, 17 nt, Human
gaaggcucgagcaugcc

SEQ ID NO: 2735620 - RNA, 18 nt, Human
gaagucuuuguacagaca

SEQ ID NO: 2735621 - RNA, 19 nt, Human
gaagucuuuguacagacaa

SEQ ID NO: 2735622 - RNA, 20 nt, Human
gaagucuuuguacagacaac

SEQ ID NO: 2735623 - RNA, 22 nt, Human
gaaugagagacacacugaagaa

SEQ ID NO: 2735624 - RNA, 23 nt, Human
gaaugagagacacacugaagaag

SEQ ID NO: 2735625 - RNA, 20 nt, Human
gaaugagagacacacugaag

SEQ ID NO: 2735626 - RNA, 11 nt, Human
gaaugaauguc

SEQ ID NO: 2735627 - RNA, 14 nt, Human
gaaugaaugucagu

SEQ ID NO: 2735628 - RNA, 18 nt, Human
gaaugaaugucaguguga

SEQ ID NO: 2735629 - RNA, 22 nt, Human
gaaugaaugucagugugacuga

SEQ ID NO: 2735630 - RNA, 13 nt, Human
gacacacugaaga

SEQ ID NO: 2735631 - RNA, 12 nt, Human
gacacacaugaa

SEQ ID NO: 2735632 - RNA, 21 nt, Human
gacacacagcucuguccuggg

SEQ ID NO: 2735633 - RNA, 11 nt, Human
gaauuaguuuu

SEQ ID NO: 2735634 - RNA, 12 nt, Human
gaauuaugaaac

SEQ ID NO: 2735635 - RNA, 19 nt, Human
gaauuuuggcugugucucc

SEQ ID NO: 2735636 - RNA, 13 nt, Human
gaauuuuguguua

SEQ ID NO: 2735637 - RNA, 21 nt, Human
gaauuuugugcccccauguaa

SEQ ID NO: 2735638 - RNA, 20 nt, Human
gaauuuugugcccccaugua

SEQ ID NO: 2735639 - RNA, 23 nt, Human
gaauuuuggcugugucucccuuc

SEQ ID NO: 2735640 - RNA, 14 nt, Human
gacaaaaagcuacu

SEQ ID NO: 2735641 - RNA, 22 nt, Human
gaauuuuguguuagagauuuuu

SEQ ID NO: 2735642 - RNA, 16 nt, Human
gaauuuuguguuagag

SEQ ID NO: 2735643 - RNA, 15 nt, Human
gacaaaauggaauac

SEQ ID NO: 2735644 - RNA, 14 nt, Human
gacacacagcucug

SEQ ID NO: 2735645 - RNA, 13 nt, Human
gacacacagcucu

SEQ ID NO: 2735646 - RNA, 15 nt, Human
gacacacagcucugu

SEQ ID NO: 2735647 - RNA, 17 nt, Human
gacacacagcucugucc

SEQ ID NO: 2735648 - RNA, 18 nt, Human
gacacacagcucuguccu

SEQ ID NO: 2735649 - RNA, 19 nt, Human
gacacacagcucuguccug

SEQ ID NO: 2735650 - RNA, 13 nt, Human
gacacugaugggc

SEQ ID NO: 2735651 - RNA, 15 nt, Human
gacacugaugggcaa

SEQ ID NO: 2735652 - RNA, 16 nt, Human
gacagaauauguuuca

SEQ ID NO: 2735653 - RNA, 12 nt, Human
gacagacacagg

SEQ ID NO: 2735654 - RNA, 21 nt, Human
gacagcccgggcucugccucc

SEQ ID NO: 2735655 - RNA, 22 nt, Human
gacagcccgggcucugccuccc

SEQ ID NO: 2735656 - RNA, 23 nt, Human
gacagcccgggcucugccuccca

SEQ ID NO: 2735657 - RNA, 17 nt, Human
gacagucaccucaugga

SEQ ID NO: 2735658 - RNA, 14 nt, Human
gacagugaaagaaa

SEQ ID NO: 2735659 - RNA, 20 nt, Human
gacaggguuuugccauguug

SEQ ID NO: 2735660 - RNA, 22 nt, Human
gacaggguuuugccauguuggc

SEQ ID NO: 2735661 - RNA, 11 nt, Human
gacagcuccuu

SEQ ID NO: 2735662 - RNA, 14 nt, Human
gagcagggcucagc

SEQ ID NO: 2735663 - RNA, 12 nt, Human
gagcaucaggcc

SEQ ID NO: 2735664 - RNA, 22 nt, Human
gagcaugccuggauggggcugc

SEQ ID NO: 2735665 - RNA, 18 nt, Human
gagcugggugucaagagg

SEQ ID NO: 2735666 - RNA, 18 nt, Human
gagcggagaaaggaaggg

SEQ ID NO: 2735667 - RNA, 21 nt, Human
gagcggagaaaggaagggcug

SEQ ID NO: 2735668 - RNA, 20 nt, Human
gagcugccuguucagcucca

SEQ ID NO: 2735669 - RNA, 21 nt, Human
gagcugccuguucagcuccag

SEQ ID NO: 2735670 - RNA, 22 nt, Human
gagcugccuguucagcuccagc

SEQ ID NO: 2735671 - RNA, 19 nt, Human
gagccuugaacuuugaccu

SEQ ID NO: 2735672 - RNA, 22 nt, Human
gagccuugaacuuugaccucug

SEQ ID NO: 2735673 - RNA, 14 nt, Human
gagccuuccagggg

SEQ ID NO: 2735674 - RNA, 15 nt, Human
gagccuuccaggggu

SEQ ID NO: 2735675 - RNA, 16 nt, Human
gagccuuccaggggug

SEQ ID NO: 2735676 - RNA, 17 nt, Human
gagccuuccaggggugg

SEQ ID NO: 2735677 - RNA, 13 nt, Human
gagauuuacaacu

SEQ ID NO: 2735678 - RNA, 18 nt, Human
gagauugcaccacugcac

SEQ ID NO: 2735679 - RNA, 22 nt, Human
gagaggcauccaguaucuugaa

SEQ ID NO: 2735680 - RNA, 21 nt, Human
gagaugaugccaugggcccuc

SEQ ID NO: 2735681 - RNA, 14 nt, Human
gagaggcauccagu

SEQ ID NO: 2735682 - RNA, 17 nt, Human
gagacuccugcaggcag

SEQ ID NO: 2735683 - RNA, 15 nt, Human
gagacuccugcaggc

SEQ ID NO: 2735684 - RNA, 16 nt, Human
gagacuccugcaggca

SEQ ID NO: 2735685 - RNA, 22 nt, Human
gacuauucaaacagucucagga

SEQ ID NO: 2735686 - RNA, 13 nt, Human
gacuaugacauaa

SEQ ID NO: 2735687 - RNA, 22 nt, Human
gacuaucuaaauguugaaagau

SEQ ID NO: 2735688 - RNA, 17 nt, Human
gacucuuaagaagacug

SEQ ID NO: 2735689 - RNA, 15 nt, Human
gacucuuaagaagac

SEQ ID NO: 2735690 - RNA, 16 nt, Human
gacucuuaagaagacu

SEQ ID NO: 2735691 - RNA, 12 nt, Human
gacucugucuca

SEQ ID NO: 2735692 - RNA, 21 nt, Human
gacuuuucuuuguggcuuccu

SEQ ID NO: 2735693 - RNA, 23 nt, Human
gacuuuucuuucagccaagaauu

SEQ ID NO: 2735694 - RNA, 18 nt, Human
gacuggugacugauucuu

SEQ ID NO: 2735695 - RNA, 15 nt, Human
gacuggugacugauu

SEQ ID NO: 2735696 - RNA, 12 nt, Human
gacuggugacug

SEQ ID NO: 2735697 - RNA, 16 nt, Human
gagaagcggcuggcag

SEQ ID NO: 2735698 - RNA, 13 nt, Human
gagaagcggcugg

SEQ ID NO: 2735699 - RNA, 15 nt, Human
gagaagcggcuggca

SEQ ID NO: 2735700 - RNA, 12 nt, Human
gagaaggaagcc

SEQ ID NO: 2735701 - RNA, 22 nt, Human
gagacguuuuuggaagaguagu

SEQ ID NO: 2735702 - RNA, 12 nt, Human
gcacugacauug

SEQ ID NO: 2735703 - RNA, 12 nt, Human
gcacugacagau

SEQ ID NO: 2735704 - RNA, 17 nt, Human
gcacugacagauuucca

SEQ ID NO: 2735705 - RNA, 19 nt, Human
gcagagcagagaccauccc

SEQ ID NO: 2735706 - RNA, 20 nt, Human
gcagagcagagaccaucccu

SEQ ID NO: 2735707 - RNA, 24 nt, Human
gcagagcaccuuagacagucccug

SEQ ID NO: 2735708 - RNA, 12 nt, Human
gcagagcagaga

SEQ ID NO: 2735709 - RNA, 14 nt, Human
gcagagcagagacc

SEQ ID NO: 2735710 - RNA, 15 nt, Human
gcagagcagagacca

SEQ ID NO: 2735711 - RNA, 19 nt, Human
gcagagcaccuuagacagu

SEQ ID NO: 2735712 - RNA, 22 nt, Human
gcagagcaccuuagacaguccc

SEQ ID NO: 2735713 - RNA, 23 nt, Human
gcagagcaccuuagacagucccu

SEQ ID NO: 2735714 - RNA, 14 nt, Human
gcacaagcugcacc

SEQ ID NO: 2735715 - RNA, 23 nt, Human
gcacaagcuccaagcucccaggc

SEQ ID NO: 2735716 - RNA, 21 nt, Human
gcacaagcuccaagcucccag

SEQ ID NO: 2735717 - RNA, 22 nt, Human
gcacaagcuccaagcucccagg

SEQ ID NO: 2735718 - RNA, 21 nt, Human
gcaauaaagcagcguuucuau

SEQ ID NO: 2735719 - RNA, 13 nt, Human
gcaagugagagcu

SEQ ID NO: 2735720 - RNA, 18 nt, Human
gcacaguuuucugagaaa

SEQ ID NO: 2735721 - RNA, 17 nt, Human
gcacaguuuucugagaa

SEQ ID NO: 2735722 - RNA, 14 nt, Human
gcacaguuuucuga

SEQ ID NO: 2735723 - RNA, 13 nt, Human
gcacaugccucuc

SEQ ID NO: 2735724 - RNA, 21 nt, Human
gcacaucagcacgauuucugu

SEQ ID NO: 2735725 - RNA, 20 nt, Human
gcacaucagcacgauuucug

SEQ ID NO: 2735726 - RNA, 19 nt, Human
gcacaucagcacgauuucu

SEQ ID NO: 2735727 - RNA, 18 nt, Human
gcaccggcuggccuggcc

SEQ ID NO: 2735728 - RNA, 21 nt, Human
gcaccggcuggccuggccccu

SEQ ID NO: 2735729 - RNA, 23 nt, Human
gcaccggcuggccuggccccuca

SEQ ID NO: 2735730 - RNA, 19 nt, Human
gcaccggcuggccuggccc

SEQ ID NO: 2735731 - RNA, 20 nt, Human
gcacaugccucucucaggcc

SEQ ID NO: 2735732 - RNA, 21 nt, Human
gcacaugccucucucaggcca

SEQ ID NO: 2735733 - RNA, 14 nt, Human
gcacaugccucucu

SEQ ID NO: 2735734 - RNA, 17 nt, Human
gcacaugccucucucag

SEQ ID NO: 2735735 - RNA, 18 nt, Human
gcacaugccucucucagg

SEQ ID NO: 2735736 - RNA, 19 nt, Human
gcacaugccucucucaggc

SEQ ID NO: 2735737 - RNA, 16 nt, Human
gcagccaggccacaag

SEQ ID NO: 2735738 - RNA, 13 nt, Human
gcagccaggccac

SEQ ID NO: 2735739 - RNA, 14 nt, Human
gcagccaggccaca

SEQ ID NO: 2735740 - RNA, 16 nt, Human
gcagccacauuccuga

SEQ ID NO: 2735741 - RNA, 12 nt, Human
gcagccaggcca

SEQ ID NO: 2735742 - RNA, 14 nt, Human
gcagccacuauugu

SEQ ID NO: 2735743 - RNA, 11 nt, Human
gcagcugccuc

SEQ ID NO: 2735744 - RNA, 12 nt, Human
gcagcugccucc

SEQ ID NO: 2735745 - RNA, 13 nt, Human
gcagcugccuccc

SEQ ID NO: 2735746 - RNA, 15 nt, Human
gcagcugccuccccu

SEQ ID NO: 2735747 - RNA, 16 nt, Human
gcagcugccuccccuc

SEQ ID NO: 2735748 - RNA, 17 nt, Human
gcagcugccuccccucc

SEQ ID NO: 2735749 - RNA, 18 nt, Human
gcagcugccuccccuccu

SEQ ID NO: 2735750 - RNA, 22 nt, Human
gcagcugccuccccuccucugc

SEQ ID NO: 2735751 - RNA, 17 nt, Human
gcagcugcgguccaccc

SEQ ID NO: 2735752 - RNA, 19 nt, Human
gcagcugcgguccacccag

SEQ ID NO: 2735753 - RNA, 20 nt, Human
gcaggcucucaggccagcug

SEQ ID NO: 2735754 - RNA, 22 nt, Human
gcaggcucucaggccagcugcu

SEQ ID NO: 2735755 - RNA, 18 nt, Human
gcaggcucucaggccagc

SEQ ID NO: 2735756 - RNA, 23 nt, Human
gcaggcucucaggccagcugcuu

SEQ ID NO: 2735757 - RNA, 13 nt, Human
gcagggaaacagc

SEQ ID NO: 2735758 - RNA, 14 nt, Human
gcauacguacacau

SEQ ID NO: 2735759 - RNA, 15 nt, Human
gcauaacauaaaucu

SEQ ID NO: 2735760 - RNA, 23 nt, Human
gcauaacauaaaucugugaacuu

SEQ ID NO: 2735761 - RNA, 21 nt, Human
gcauaacauaaaucugugaac

SEQ ID NO: 2735762 - RNA, 20 nt, Human
gcauaccacuuuuguucuug

SEQ ID NO: 2735763 - RNA, 17 nt, Human
gcauaccacuuuuguuc

SEQ ID NO: 2735764 - RNA, 17 nt, Human
gaucucuugagccuggg

SEQ ID NO: 2735765 - RNA, 12 nt, Human
gaucucuugagc

SEQ ID NO: 2735766 - RNA, 16 nt, Human
gaucucuugagccugg

SEQ ID NO: 2735767 - RNA, 15 nt, Human
gauauuuuuuucuuu

SEQ ID NO: 2735768 - RNA, 15 nt, Human
gauauuuugcuuugu

SEQ ID NO: 2735769 - RNA, 16 nt, Human
gauauuuugcuuugug

SEQ ID NO: 2735770 - RNA, 22 nt, Human
gauccaguuuuguuuggaccaa

SEQ ID NO: 2735771 - RNA, 17 nt, Human
gauccaguuuuguuugg

SEQ ID NO: 2735772 - RNA, 11 nt, Human
gauccaguuuu

SEQ ID NO: 2735773 - RNA, 16 nt, Human
gaugagaggaaaucac

SEQ ID NO: 2735774 - RNA, 20 nt, Human
gaugaucuuugcagacaggc

SEQ ID NO: 2735775 - RNA, 21 nt, Human
gaugaucuuugcagacaggca

SEQ ID NO: 2735776 - RNA, 14 nt, Human
gaugaucuuugcag

SEQ ID NO: 2735777 - RNA, 14 nt, Human
gauuagaauucugu

SEQ ID NO: 2735778 - RNA, 23 nt, Human
gauuagaauucuguauagauuag

SEQ ID NO: 2735779 - RNA, 15 nt, Human
gauuagaauucugua

SEQ ID NO: 2735780 - RNA, 16 nt, Human
gaugugaacacaucag

SEQ ID NO: 2735781 - RNA, 14 nt, Human
gaugugaacacauc

SEQ ID NO: 2735782 - RNA, 20 nt, Human
gauuacaggugugaaccacc

SEQ ID NO: 2735783 - RNA, 17 nt, Human
gauuagggagagaagau

SEQ ID NO: 2735784 - RNA, 18 nt, Human
gauuagagaguguugaaa

SEQ ID NO: 2735785 - RNA, 14 nt, Human
gauuagagaguguu

SEQ ID NO: 2735786 - RNA, 16 nt, Human
gauuauucacugauuu

SEQ ID NO: 2735787 - RNA, 15 nt, Human
gauuauucacugauu

SEQ ID NO: 2735788 - RNA, 13 nt, Human
gauuauucacuga

SEQ ID NO: 2735789 - RNA, 13 nt, Human
gauacccauccca

SEQ ID NO: 2735790 - RNA, 14 nt, Human
gauacccaucccau

SEQ ID NO: 2735791 - RNA, 16 nt, Human
gauacuacaguuuguu

SEQ ID NO: 2735792 - RNA, 11 nt, Human
gauacuacagu

SEQ ID NO: 2735793 - RNA, 14 nt, Human
gauaugugaacagu

SEQ ID NO: 2735794 - RNA, 13 nt, Human
gauaugugaacag

SEQ ID NO: 2735795 - RNA, 20 nt, Human
gaguuugggguaugggagag

SEQ ID NO: 2735796 - RNA, 18 nt, Human
gagugccuuacacaaugg

SEQ ID NO: 2735797 - RNA, 20 nt, Human
gaguuguuacauuuuuaagu

SEQ ID NO: 2735798 - RNA, 16 nt, Human
gaguuguuacauuuuu

SEQ ID NO: 2735799 - RNA, 16 nt, Human
gaguuuagcuggaaaa

SEQ ID NO: 2735800 - RNA, 13 nt, Human
gagucaccaagcc

SEQ ID NO: 2735801 - RNA, 14 nt, Human
gagucaccaagccc

SEQ ID NO: 2735802 - RNA, 16 nt, Human
gagucccaccuuggcu

SEQ ID NO: 2735803 - RNA, 20 nt, Human
gagucccaccuuggcugcag

SEQ ID NO: 2735804 - RNA, 11 nt, Human
gagugcaguga

SEQ ID NO: 2735805 - RNA, 12 nt, Human
gagugcagugag

SEQ ID NO: 2735806 - RNA, 24 nt, Human
gagugagcacuaaggugugcucug

SEQ ID NO: 2735807 - RNA, 21 nt, Human
gagucccaccuuggcugcagg

SEQ ID NO: 2735808 - RNA, 13 nt, Human
gagucccaccuug

SEQ ID NO: 2735809 - RNA, 12 nt, Human
gagugagcuggu

SEQ ID NO: 2735810 - RNA, 11 nt, Human
gaggugggagg

SEQ ID NO: 2735811 - RNA, 12 nt, Human
gaggugggaucc

SEQ ID NO: 2735812 - RNA, 14 nt, Human
gaggucuguucuuu

SEQ ID NO: 2735813 - RNA, 13 nt, Human
gaggucuguucuu

SEQ ID NO: 2735814 - RNA, 23 nt, Human
cuuucagccaagaauucuuaaau

SEQ ID NO: 2735815 - RNA, 20 nt, Human
cuuucagccaagaauucuua

SEQ ID NO: 2735816 - RNA, 23 nt, Human
cuuucaauaggaaaaacugauuu

SEQ ID NO: 2735817 - RNA, 22 nt, Human
cuuuccugaggcugggcucccu

SEQ ID NO: 2735818 - RNA, 13 nt, Human
cuuuuauaaacuu

SEQ ID NO: 2735819 - RNA, 20 nt, Human
cuuuguauagaaccucuuug

SEQ ID NO: 2735820 - RNA, 11 nt, Human
cuuuguauaga

SEQ ID NO: 2735821 - RNA, 17 nt, Human
cuuugggccuggcuccc

SEQ ID NO: 2735822 - RNA, 16 nt, Human
cuuucuagccagagga

SEQ ID NO: 2735823 - RNA, 17 nt, Human
cuuucuacccagcgagc

SEQ ID NO: 2735824 - RNA, 15 nt, Human
cuuucuagccagagg

SEQ ID NO: 2735825 - RNA, 18 nt, Human
gaaaagaaaaaugagccu

SEQ ID NO: 2735826 - RNA, 21 nt, Human
gaaaauggaagacagcucuua

SEQ ID NO: 2735827 - RNA, 14 nt, Human
gaaaaacugauuuu

SEQ ID NO: 2735828 - RNA, 15 nt, Human
gaaaauguaugugua

SEQ ID NO: 2735829 - RNA, 19 nt, Human
gaaaauggacguguuauga

SEQ ID NO: 2735830 - RNA, 23 nt, Human
gaaaauggacguguuaugacucc

SEQ ID NO: 2735831 - RNA, 18 nt, Human
cuuuugucuaugggacuc

SEQ ID NO: 2735832 - RNA, 18 nt, Human
cuuuuggaagguauuuaa

SEQ ID NO: 2735833 - RNA, 23 nt, Human
cuuuugcccacacuugggagcaa

SEQ ID NO: 2735834 - RNA, 23 nt, Human
cuuuuuuggcugcugaaggcucg

SEQ ID NO: 2735835 - RNA, 13 nt, Human
cuuuugugcauua

SEQ ID NO: 2735836 - RNA, 12 nt, Human
cuuuugugcauu

SEQ ID NO: 2735837 - RNA, 17 nt, Human
gaaagacuauucaaaca

SEQ ID NO: 2735838 - RNA, 21 nt, Human
gaaaggcuccaggagcagcca

SEQ ID NO: 2735839 - RNA, 20 nt, Human
gaaaggcuccaggagcagcc

SEQ ID NO: 2735840 - RNA, 22 nt, Human
gaaaggcuccaggagcagccac

SEQ ID NO: 2735841 - RNA, 15 nt, Human
gaaagacuauucaaa

SEQ ID NO: 2735842 - RNA, 14 nt, Human
gaaagacuauucaa

SEQ ID NO: 2735843 - RNA, 20 nt, Human
gaaagacuaucuaaauguug

SEQ ID NO: 2735844 - RNA, 15 nt, Human
gaaacuuuuggaagg

SEQ ID NO: 2735845 - RNA, 13 nt, Human
gaaacuuuuggaa

SEQ ID NO: 2735846 - RNA, 17 nt, Human
gaaauauuuauuuuaau

SEQ ID NO: 2735847 - RNA, 19 nt, Human
gaaagggacuuggaagcuc

SEQ ID NO: 2735848 - RNA, 20 nt, Human
gaaagggacgcuacccggga

SEQ ID NO: 2735849 - RNA, 22 nt, Human
gaaagggacuuggaagcuccgc

SEQ ID NO: 2735850 - RNA, 17 nt, Human
gaaaucaaauaugcaaa

SEQ ID NO: 2735851 - RNA, 18 nt, Human
gaaaucaaauaugcaaag

SEQ ID NO: 2735852 - RNA, 18 nt, Human
gaaauauuuauuuuaaua

SEQ ID NO: 2735853 - RNA, 22 nt, Human
gaaauauuuauuuuaauaaugu

SEQ ID NO: 2735854 - RNA, 20 nt, Human
gaaaucaaauaugcaaagca

SEQ ID NO: 2735855 - RNA, 19 nt, Human
gaaaucaaauaugcaaagc

SEQ ID NO: 2735856 - RNA, 19 nt, Human
gaaaucaccgaaaacgugg

SEQ ID NO: 2735857 - RNA, 12 nt, Human
cugugcugaguc

SEQ ID NO: 2735858 - RNA, 14 nt, Human
cugugcugagucug

SEQ ID NO: 2735859 - RNA, 19 nt, Human
cugugcugagucugaaggc

SEQ ID NO: 2735860 - RNA, 13 nt, Human
cuuauggaacacu

SEQ ID NO: 2735861 - RNA, 16 nt, Human
cuuauggaacacucug

SEQ ID NO: 2735862 - RNA, 17 nt, Human
cuuauggaacacucuga

SEQ ID NO: 2735863 - RNA, 19 nt, Human
cuuauggaacacucugaga

SEQ ID NO: 2735864 - RNA, 20 nt, Human
cuuauggaacacucugagac

SEQ ID NO: 2735865 - RNA, 15 nt, Human
cuucacggaagagcc

SEQ ID NO: 2735866 - RNA, 19 nt, Human
cuucacggaagagccuugc

SEQ ID NO: 2735867 - RNA, 20 nt, Human
cuuauuguagcauccuggaa

SEQ ID NO: 2735868 - RNA, 22 nt, Human
cuucaccuuuguccccaccgca

SEQ ID NO: 2735869 - RNA, 21 nt, Human
cuucaccuuuguccccaccgc

SEQ ID NO: 2735870 - RNA, 23 nt, Human
cuuauuguagcauccuggaauau

SEQ ID NO: 2735871 - RNA, 21 nt, Human
cuucccaccucucucacuccu

SEQ ID NO: 2735872 - RNA, 23 nt, Human
cuucccaccucucucacuccuug

SEQ ID NO: 2735873 - RNA, 11 nt, Human
cuucccaccuc

SEQ ID NO: 2735874 - RNA, 15 nt, Human
cuucacuguaaaaua

SEQ ID NO: 2735875 - RNA, 17 nt, Human
cuucagagacuccugca

SEQ ID NO: 2735876 - RNA, 20 nt, Human
cuucagagacuccugcaggc

SEQ ID NO: 2735877 - RNA, 18 nt, Human
cuucagagacuccugcag

SEQ ID NO: 2735878 - RNA, 19 nt, Human
cuucagagacuccugcagg

SEQ ID NO: 2735879 - RNA, 19 nt, Human
cuucaucugacuaugacau

SEQ ID NO: 2735880 - RNA, 21 nt, Human
cuucaucugacuaugacauaa

SEQ ID NO: 2735881 - RNA, 20 nt, Human
cuucaugcauagguuuagca

SEQ ID NO: 2735882 - RNA, 21 nt, Human
cuuccagugaggcucugcccu

SEQ ID NO: 2735883 - RNA, 22 nt, Human
cuuccagugaggcucugcccuu

SEQ ID NO: 2735884 - RNA, 23 nt, Human
cuuccagugaggcucugcccuug

SEQ ID NO: 2735885 - RNA, 23 nt, Human
cuucugacccaugcugcccugug

SEQ ID NO: 2735886 - RNA, 20 nt, Human
cuucugacccaugcugcccu

SEQ ID NO: 2735887 - RNA, 21 nt, Human
cuucugacccaugcugcccug

SEQ ID NO: 2735888 - RNA, 22 nt, Human
cuucugacccaugcugcccugu

SEQ ID NO: 2735889 - RNA, 23 nt, Human
cuucuucagagacuccugcaggc

SEQ ID NO: 2735890 - RNA, 18 nt, Human
cuuccucccucccucuuu

SEQ ID NO: 2735891 - RNA, 23 nt, Human
cuucuaaguaaaaccacagcagu

SEQ ID NO: 2735892 - RNA, 22 nt, Human
cuucuaaguaaaaccacagcag

SEQ ID NO: 2735893 - RNA, 17 nt, Human
cuuccugcaacaccuug

SEQ ID NO: 2735894 - RNA, 16 nt, Human
cuugaagacuuuucuu

SEQ ID NO: 2735895 - RNA, 12 nt, Human
cuugaugaagaa

SEQ ID NO: 2735896 - RNA, 18 nt, Human
cuugaauuguaaggaaug

SEQ ID NO: 2735897 - RNA, 19 nt, Human
cuugaauuguaaggaauga

SEQ ID NO: 2735898 - RNA, 14 nt, Human
cuugacagggcaca

SEQ ID NO: 2735899 - RNA, 15 nt, Human
cuugacagggcacac

SEQ ID NO: 2735900 - RNA, 13 nt, Human
cuugacagggcac

SEQ ID NO: 2735901 - RNA, 20 nt, Human
cuuggcgcugccccuggcag

SEQ ID NO: 2735902 - RNA, 12 nt, Human
cuuggcgcugcc

SEQ ID NO: 2735903 - RNA, 14 nt, Human
cuuggcgcugcccc

SEQ ID NO: 2735904 - RNA, 17 nt, Human
cuuggcgcugccccugg

SEQ ID NO: 2735905 - RNA, 13 nt, Human
cuugaugaagaag

SEQ ID NO: 2735906 - RNA, 23 nt, Human
cuugccuuuuucauuauuuuauu

SEQ ID NO: 2735907 - RNA, 22 nt, Human
cuugccuuuuucauuauuuuau

SEQ ID NO: 2735908 - RNA, 20 nt, Human
cuugccuuuuucauuauuuu

SEQ ID NO: 2735909 - RNA, 15 nt, Human
cuugccuuuuucauu

SEQ ID NO: 2735910 - RNA, 14 nt, Human
cuugccuuuuucau

SEQ ID NO: 2735911 - RNA, 10 nt, Human
cugggacagg

SEQ ID NO: 2735912 - RNA, 12 nt, Human
cugggacacagu

SEQ ID NO: 2735913 - RNA, 13 nt, Human
cugggacacaguu

SEQ ID NO: 2735914 - RNA, 17 nt, Human
cuggccccucagggucc

SEQ ID NO: 2735915 - RNA, 18 nt, Human
cuggccccucaggguccc

SEQ ID NO: 2735916 - RNA, 20 nt, Human
cuggccccucagggucccug

SEQ ID NO: 2735917 - RNA, 21 nt, Human
cuggccccucagggucccugg

SEQ ID NO: 2735918 - RNA, 13 nt, Human
cuggccccucagg

SEQ ID NO: 2735919 - RNA, 15 nt, Human
cuggcagcucagaga

SEQ ID NO: 2735920 - RNA, 12 nt, Human
cuggcagcucag

SEQ ID NO: 2735921 - RNA, 13 nt, Human
cuggcagcucaga

SEQ ID NO: 2735922 - RNA, 14 nt, Human
cuggcagcucagag

SEQ ID NO: 2735923 - RNA, 23 nt, Human
cuggugacuuuccucuuuggucu

SEQ ID NO: 2735924 - RNA, 23 nt, Human
cuggguggcaccagcagccugga

SEQ ID NO: 2735925 - RNA, 22 nt, Human
cuggguggcaccagcagccugg

SEQ ID NO: 2735926 - RNA, 16 nt, Human
cuggguguggcgcagc

SEQ ID NO: 2735927 - RNA, 17 nt, Human
cuggguguggcgcagca

SEQ ID NO: 2735928 - RNA, 14 nt, Human
cuggguucacugca

SEQ ID NO: 2735929 - RNA, 15 nt, Human
cuggugacuuuccuc

SEQ ID NO: 2735930 - RNA, 20 nt, Human
cuggugacuuuccucuuugg

SEQ ID NO: 2735931 - RNA, 21 nt, Human
cuggugacuuuccucuuuggu

SEQ ID NO: 2735932 - RNA, 17 nt, Human
cugggcagaaggaagac

SEQ ID NO: 2735933 - RNA, 16 nt, Human
cugggcagcugccucc

SEQ ID NO: 2735934 - RNA, 19 nt, Human
cugggcagcugccuccccu

SEQ ID NO: 2735935 - RNA, 16 nt, Human
cugggcagaaggaaga

SEQ ID NO: 2735936 - RNA, 18 nt, Human
cugggcagaaggaagacu

SEQ ID NO: 2735937 - RNA, 20 nt, Human
cugggcagcugccuccccuc

SEQ ID NO: 2735938 - RNA, 21 nt, Human
cugggcagcugccuccccucc

SEQ ID NO: 2735939 - RNA, 22 nt, Human
cugggcagcugccuccccuccu

SEQ ID NO: 2735940 - RNA, 23 nt, Human
cugucagcuccccucggagaaga

SEQ ID NO: 2735941 - RNA, 16 nt, Human
cugucauuugagcagg

SEQ ID NO: 2735942 - RNA, 17 nt, Human
cugucauuugagcaggg

SEQ ID NO: 2735943 - RNA, 18 nt, Human
cugucauuugagcagggc

SEQ ID NO: 2735944 - RNA, 21 nt, Human
cugucagcuccccucggagaa

SEQ ID NO: 2735945 - RNA, 18 nt, Human
cugucagccauuccuguu

SEQ ID NO: 2735946 - RNA, 18 nt, Human
cuguaggaagguuaaugu

SEQ ID NO: 2735947 - RNA, 21 nt, Human
cuguaggaagguuaauguuca

SEQ ID NO: 2735948 - RNA, 15 nt, Human
cuguacuuuuuggca

SEQ ID NO: 2735949 - RNA, 14 nt, Human
cuguacuuuuuggc

SEQ ID NO: 2735950 - RNA, 13 nt, Human
cugucgcccaguc

SEQ ID NO: 2735951 - RNA, 14 nt, Human
cugugcucuggaca

SEQ ID NO: 2735952 - RNA, 15 nt, Human
cugugaagagaacca

SEQ ID NO: 2735953 - RNA, 18 nt, Human
cugugaacuugaaauuug

SEQ ID NO: 2735954 - RNA, 15 nt, Human
cugccucgaacuggc

SEQ ID NO: 2735955 - RNA, 17 nt, Human
cugccucgaacuggcug

SEQ ID NO: 2735956 - RNA, 18 nt, Human
cugccucgaacuggcugc

SEQ ID NO: 2735957 - RNA, 22 nt, Human
cugccugggaucccucauccuc

SEQ ID NO: 2735958 - RNA, 23 nt, Human
cugccugggaucccucauccuca

SEQ ID NO: 2735959 - RNA, 14 nt, Human
cugccuguucagcu

SEQ ID NO: 2735960 - RNA, 15 nt, Human
cugccuguucagcuc

SEQ ID NO: 2735961 - RNA, 15 nt, Human
cugcuacagagcaga

SEQ ID NO: 2735962 - RNA, 16 nt, Human
cugcuaauuccccaga

SEQ ID NO: 2735963 - RNA, 16 nt, Human
cugccuguugggccag

SEQ ID NO: 2735964 - RNA, 14 nt, Human
cugccuguugggcc

SEQ ID NO: 2735965 - RNA, 18 nt, Human
cugccuguugggccagga

SEQ ID NO: 2735966 - RNA, 19 nt, Human
cugccuguugggccaggag

SEQ ID NO: 2735967 - RNA, 14 nt, Human
cugcccugugggcc

SEQ ID NO: 2735968 - RNA, 21 nt, Human
cugcugacagacacaggcccg

SEQ ID NO: 2735969 - RNA, 23 nt, Human
cugcugacagacacaggcccggc

SEQ ID NO: 2735970 - RNA, 15 nt, Human
cugcugacagacaca

SEQ ID NO: 2735971 - RNA, 18 nt, Human
cugcugacagacacaggc

SEQ ID NO: 2735972 - RNA, 19 nt, Human
cugcugacagacacaggcc

SEQ ID NO: 2735973 - RNA, 20 nt, Human
cugcugacagacacaggccc

SEQ ID NO: 2735974 - RNA, 13 nt, Human
cugcuuaacuuca

SEQ ID NO: 2735975 - RNA, 13 nt, Human
cugcuucagccuc

SEQ ID NO: 2735976 - RNA, 17 nt, Human
cugcuuaacuucacaua

SEQ ID NO: 2735977 - RNA, 15 nt, Human
cugcuuaacuucaca

SEQ ID NO: 2735978 - RNA, 22 nt, Human
cugcuuuuuaaagaaugcucuu

SEQ ID NO: 2735979 - RNA, 14 nt, Human
cugcuucagccucc

SEQ ID NO: 2735980 - RNA, 16 nt, Human
cugcuucagccucccg

SEQ ID NO: 2735981 - RNA, 21 nt, Human
cuggaaaucaggguuaguauu

SEQ ID NO: 2735982 - RNA, 16 nt, Human
cuggaaauauuaagaa

SEQ ID NO: 2735983 - RNA, 17 nt, Human
cuggaacacuaaugagg

SEQ ID NO: 2735984 - RNA, 17 nt, Human
cugagacucgcgacaau

SEQ ID NO: 2735985 - RNA, 19 nt, Human
cugagacucgcgacaaugc

SEQ ID NO: 2735986 - RNA, 20 nt, Human
cugagacucgcgacaaugca

SEQ ID NO: 2735987 - RNA, 12 nt, Human
cugccauccagg

SEQ ID NO: 2735988 - RNA, 11 nt, Human
cugccagggac

SEQ ID NO: 2735989 - RNA, 12 nt, Human
cugccagggaca

SEQ ID NO: 2735990 - RNA, 15 nt, Human
cugccagggacagag

SEQ ID NO: 2735991 - RNA, 20 nt, Human
cugccauauucuguuggcca

SEQ ID NO: 2735992 - RNA, 21 nt, Human
cugccauauucuguuggccag

SEQ ID NO: 2735993 - RNA, 22 nt, Human
cugccauauucuguuggccagu

SEQ ID NO: 2735994 - RNA, 23 nt, Human
cugccauauucuguuggccagug

SEQ ID NO: 2735995 - RNA, 12 nt, Human
cugcccugugag

SEQ ID NO: 2735996 - RNA, 13 nt, Human
cugcccugugagu

SEQ ID NO: 2735997 - RNA, 15 nt, Human
cugcccugugggccc

SEQ ID NO: 2735998 - RNA, 16 nt, Human
cugcccugugggcccc

SEQ ID NO: 2735999 - RNA, 18 nt, Human
cugcccugugggccccca

SEQ ID NO: 2736000 - RNA, 14 nt, Human
cugccccucaacuc

SEQ ID NO: 2736001 - RNA, 22 nt, Human
cugccccucaacucuccuccag

SEQ ID NO: 2736002 - RNA, 15 nt, Human
cugccaaugggagcu

SEQ ID NO: 2736003 - RNA, 17 nt, Human
cugccaaugggagcuca

SEQ ID NO: 2736004 - RNA, 22 nt, Human
cugcauuuaaaagauacaguua

SEQ ID NO: 2736005 - RNA, 20 nt, Human
cugcauuuaaaagauacagu

SEQ ID NO: 2736006 - RNA, 13 nt, Human
cugcauguuacau

SEQ ID NO: 2736007 - RNA, 15 nt, Human
cugcauguuugugau

SEQ ID NO: 2736008 - RNA, 23 nt, Human
caacacgagcaggcuacugucag

SEQ ID NO: 2736009 - RNA, 20 nt, Human
caacaccucugcacaagcug

SEQ ID NO: 2736010 - RNA, 20 nt, Human
caaauggaaaugggcagagc

SEQ ID NO: 2736011 - RNA, 21 nt, Human
caaauggaaaugggcagagca

SEQ ID NO: 2736012 - RNA, 22 nt, Human
caaagcacugacuucuaaguaa

SEQ ID NO: 2736013 - RNA, 20 nt, Human
caaagcacugacuucuaagu

SEQ ID NO: 2736014 - RNA, 23 nt, Human
caaagauauuuugcuuugugauu

SEQ ID NO: 2736015 - RNA, 22 nt, Human
caaagauauuuugcuuugugau

SEQ ID NO: 2736016 - RNA, 21 nt, Human
caaaguagaagucuuagaugu

SEQ ID NO: 2736017 - RNA, 14 nt, Human
caaaguagaagucu

SEQ ID NO: 2736018 - RNA, 15 nt, Human
caaagcagugcaugc

SEQ ID NO: 2736019 - RNA, 17 nt, Human
caaagcagugcaugcug

SEQ ID NO: 2736020 - RNA, 22 nt, Human
caaaguacacuguuucaaacuu

SEQ ID NO: 2736021 - RNA, 16 nt, Human
caaaagaugcuucuca

SEQ ID NO: 2736022 - RNA, 18 nt, Human
caaaagaugcuucucacu

SEQ ID NO: 2736023 - RNA, 23 nt, Human
auuuuuuuuuccuucagugccuu

SEQ ID NO: 2736024 - RNA, 21 nt, Human
caaaccaucauugaaaucuuu

SEQ ID NO: 2736025 - RNA, 19 nt, Human
caaaccaucauugaaaucu

SEQ ID NO: 2736026 - RNA, 20 nt, Human
caaagauauuuugcuuugug

SEQ ID NO: 2736027 - RNA, 18 nt, Human
caaagauauuuugcuuug

SEQ ID NO: 2736028 - RNA, 14 nt, Human
auuugcucauggaa

SEQ ID NO: 2736029 - RNA, 17 nt, Human
auuugcucauggaauug

SEQ ID NO: 2736030 - RNA, 13 nt, Human
auuugcuccuuuc

SEQ ID NO: 2736031 - RNA, 20 nt, Human
auuugugauacaaugcugug

SEQ ID NO: 2736032 - RNA, 13 nt, Human
auuuggaaaucuu

SEQ ID NO: 2736033 - RNA, 17 nt, Human
auuugugauacaaugcu

SEQ ID NO: 2736034 - RNA, 15 nt, Human
auuugugauacaaug

SEQ ID NO: 2736035 - RNA, 12 nt, Human
auuuggaaaucu

SEQ ID NO: 2736036 - RNA, 11 nt, Human
auuuggaaauc

SEQ ID NO: 2736037 - RNA, 19 nt, Human
auuuuauagcuacuaauuu

SEQ ID NO: 2736038 - RNA, 20 nt, Human
auuuguuugaacugauaaag

SEQ ID NO: 2736039 - RNA, 17 nt, Human
auuuuauagcuacuaau

SEQ ID NO: 2736040 - RNA, 14 nt, Human
auuuuaugauccag

SEQ ID NO: 2736041 - RNA, 16 nt, Human
auuuuaugauccagca

SEQ ID NO: 2736042 - RNA, 15 nt, Human
auuuuaugauccagc

SEQ ID NO: 2736043 - RNA, 23 nt, Human
auuuguuugaacugauaaagaug

SEQ ID NO: 2736044 - RNA, 22 nt, Human
auuuguuugaacugauaaagau

SEQ ID NO: 2736045 - RNA, 14 nt, Human
auuaugaauuacau

SEQ ID NO: 2736046 - RNA, 17 nt, Human
auuaugaauuacauuug

SEQ ID NO: 2736047 - RNA, 18 nt, Human
auuaugaaacuuuuggaa

SEQ ID NO: 2736048 - RNA, 21 nt, Human
auuaugaaacuuguguaaaua

SEQ ID NO: 2736049 - RNA, 20 nt, Human
auuaugaaacuuguguaaau

SEQ ID NO: 2736050 - RNA, 18 nt, Human
auuaugaaacuuguguaa

SEQ ID NO: 2736051 - RNA, 21 nt, Human
auuaggugugacugaauuucu

SEQ ID NO: 2736052 - RNA, 15 nt, Human
auuaugaaacuugug

SEQ ID NO: 2736053 - RNA, 14 nt, Human
auuaugaaacuugu

SEQ ID NO: 2736054 - RNA, 16 nt, Human
auuagggagagaagau

SEQ ID NO: 2736055 - RNA, 18 nt, Human
auuaggugugacugaauu

SEQ ID NO: 2736056 - RNA, 16 nt, Human
auuaggugugacugaa

SEQ ID NO: 2736057 - RNA, 16 nt, Human
auucaaauguauuaca

SEQ ID NO: 2736058 - RNA, 20 nt, Human
auucaaugccccugaauuua

SEQ ID NO: 2736059 - RNA, 18 nt, Human
auucaaugccccugaauu

SEQ ID NO: 2736060 - RNA, 18 nt, Human
auuaugaauuacauuugu

SEQ ID NO: 2736061 - RNA, 17 nt, Human
auucaaaguugccuaaa

SEQ ID NO: 2736062 - RNA, 23 nt, Human
auuaugcaugaaguaauaugcac

SEQ ID NO: 2736063 - RNA, 22 nt, Human
auucaaaguugccuaaauccau

SEQ ID NO: 2736064 - RNA, 21 nt, Human
auucaaaguugccuaaaucca

SEQ ID NO: 2736065 - RNA, 20 nt, Human
auucaaaguugccuaaaucc

SEQ ID NO: 2736066 - RNA, 18 nt, Human
auucaaaguugccuaaau

SEQ ID NO: 2736067 - RNA, 19 nt, Human
auucauaaugacuuaagca

SEQ ID NO: 2736068 - RNA, 14 nt, Human
auucauaaugacuu

SEQ ID NO: 2736069 - RNA, 15 nt, Human
auucauaaugacuua

SEQ ID NO: 2736070 - RNA, 19 nt, Human
auuacaguggggaaugaag

SEQ ID NO: 2736071 - RNA, 16 nt, Human
auuacaguauaauuaa

SEQ ID NO: 2736072 - RNA, 15 nt, Human
auuacaguauaauua

SEQ ID NO: 2736073 - RNA, 14 nt, Human
auuacaguauaauu

SEQ ID NO: 2736074 - RNA, 12 nt, Human
auuacaguauaa

SEQ ID NO: 2736075 - RNA, 17 nt, Human
auuacaggaaguacugg

SEQ ID NO: 2736076 - RNA, 16 nt, Human
auuacaggugugaacc

SEQ ID NO: 2736077 - RNA, 23 nt, Human
auuguaauaggcguaacuaauuu

SEQ ID NO: 2736078 - RNA, 14 nt, Human
auuguaaauaguau

SEQ ID NO: 2736079 - RNA, 13 nt, Human
auuguaauuauau

SEQ ID NO: 2736080 - RNA, 18 nt, Human
auugcuugagcucaggag

SEQ ID NO: 2736081 - RNA, 14 nt, Human
auuguaauuauauc

SEQ ID NO: 2736082 - RNA, 21 nt, Human
auugugucucuugguccugcu

SEQ ID NO: 2736083 - RNA, 23 nt, Human
auugugucucuugguccugcugc

SEQ ID NO: 2736084 - RNA, 16 nt, Human
auuguuagucucuuga

SEQ ID NO: 2736085 - RNA, 23 nt, Human
auugcugauggugcaaugaccuu

SEQ ID NO: 2736086 - RNA, 12 nt, Human
auugcugcuuga

SEQ ID NO: 2736087 - RNA, 14 nt, Human
auugcuugagcuca

SEQ ID NO: 2736088 - RNA, 15 nt, Human
auugcugauggugca

SEQ ID NO: 2736089 - RNA, 16 nt, Human
auugcugauggugcaa

SEQ ID NO: 2736090 - RNA, 18 nt, Human
auugcugauggugcaaug

SEQ ID NO: 2736091 - RNA, 19 nt, Human
auugcugauggugcaauga

SEQ ID NO: 2736092 - RNA, 11 nt, Human
auucuucugcu

SEQ ID NO: 2736093 - RNA, 12 nt, Human
auucuucugcuu

SEQ ID NO: 2736094 - RNA, 14 nt, Human
auucuucugcuuca

SEQ ID NO: 2736095 - RNA, 15 nt, Human
auucuugaaggaaaa

SEQ ID NO: 2736096 - RNA, 18 nt, Human
auucuugaaggaaaauga

SEQ ID NO: 2736097 - RNA, 11 nt, Human
auucuuuccug

SEQ ID NO: 2736098 - RNA, 13 nt, Human
auucuuuccugag

SEQ ID NO: 2736099 - RNA, 17 nt, Human
auugauaugcuuauaca

SEQ ID NO: 2736100 - RNA, 15 nt, Human
auugcuacuguccua

SEQ ID NO: 2736101 - RNA, 20 nt, Human
auugcuacuguccuacccac

SEQ ID NO: 2736102 - RNA, 22 nt, Human
auugcuacuguccuacccaccc

SEQ ID NO: 2736103 - RNA, 22 nt, Human
auugauaaguucauacauugua

SEQ ID NO: 2736104 - RNA, 21 nt, Human
auugauaagaaccuuuugagu

SEQ ID NO: 2736105 - RNA, 17 nt, Human
cacagccucuuagaugc

SEQ ID NO: 2736106 - RNA, 21 nt, Human
cacagccucuuagaugcaguu

SEQ ID NO: 2736107 - RNA, 19 nt, Human
cacaggggaaaagaggagu

SEQ ID NO: 2736108 - RNA, 17 nt, Human
cacaggggaaaagagga

SEQ ID NO: 2736109 - RNA, 18 nt, Human
cacaggggaaaagaggag

SEQ ID NO: 2736110 - RNA, 20 nt, Human
cacaguauuacuucugcuac

SEQ ID NO: 2736111 - RNA, 21 nt, Human
cacaguauuacuucugcuaca

SEQ ID NO: 2736112 - RNA, 17 nt, Human
cacacaugaaguccaag

SEQ ID NO: 2736113 - RNA, 22 nt, Human
cacacaugaaguccaagcauuu

SEQ ID NO: 2736114 - RNA, 20 nt, Human
cacacaugagcaucaggcca

SEQ ID NO: 2736115 - RNA, 15 nt, Human
cacacauacacacac

SEQ ID NO: 2736116 - RNA, 21 nt, Human
cacacagugagucgaggacag

SEQ ID NO: 2736117 - RNA, 23 nt, Human
cacacagugagucgaggacaggg

SEQ ID NO: 2736118 - RNA, 16 nt, Human
cacacagcucuguccu

SEQ ID NO: 2736119 - RNA, 18 nt, Human
cacacagugagucgagga

SEQ ID NO: 2736120 - RNA, 20 nt, Human
cacacaguauuacuucugcu

SEQ ID NO: 2736121 - RNA, 23 nt, Human
cacacaguauuacuucugcuaca

SEQ ID NO: 2736122 - RNA, 11 nt, Human
cacagccucug

SEQ ID NO: 2736123 - RNA, 13 nt, Human
cacagacccugcc

SEQ ID NO: 2736124 - RNA, 21 nt, Human
cacagacauacuaaccagcag

SEQ ID NO: 2736125 - RNA, 19 nt, Human
cacagacauacuaaccagc

SEQ ID NO: 2736126 - RNA, 18 nt, Human
cacagacauacuaaccag

SEQ ID NO: 2736127 - RNA, 23 nt, Human
cacagaaaauggaagacagcucu

SEQ ID NO: 2736128 - RNA, 19 nt, Human
cacagaaaauucuucucca

SEQ ID NO: 2736129 - RNA, 21 nt, Human
cacacaugagcaucaggccag

SEQ ID NO: 2736130 - RNA, 22 nt, Human
cacacaugagcaucaggccagg

SEQ ID NO: 2736131 - RNA, 18 nt, Human
cacagaaaauggaagaca

SEQ ID NO: 2736132 - RNA, 19 nt, Human
cacagaaaauggaagacag

SEQ ID NO: 2736133 - RNA, 20 nt, Human
cacagaaaauggaagacagc

SEQ ID NO: 2736134 - RNA, 22 nt, Human
cacagaaaauggaagacagcuc

SEQ ID NO: 2736135 - RNA, 18 nt, Human
cacaagacugcacaucaa

SEQ ID NO: 2736136 - RNA, 14 nt, Human
cacaagagcccagg

SEQ ID NO: 2736137 - RNA, 16 nt, Human
cacaagagcccaggcc

SEQ ID NO: 2736138 - RNA, 13 nt, Human
cacaagcuccaag

SEQ ID NO: 2736139 - RNA, 14 nt, Human
cacaagcuccaagc

SEQ ID NO: 2736140 - RNA, 15 nt, Human
cacaagcuccaagcu

SEQ ID NO: 2736141 - RNA, 17 nt, Human
cacaagcugcacccuca

SEQ ID NO: 2736142 - RNA, 23 nt, Human
cacaagcugcacccucaggcagg

SEQ ID NO: 2736143 - RNA, 17 nt, Human
cacaagcuccaagcucc

SEQ ID NO: 2736144 - RNA, 23 nt, Human
cacaagcuccaagcucccaggca

SEQ ID NO: 2736145 - RNA, 15 nt, Human
caaugcuguauuuua

SEQ ID NO: 2736146 - RNA, 16 nt, Human
caaugcuguauuuuaa

SEQ ID NO: 2736147 - RNA, 17 nt, Human
caaugcuguauuuuaaa

SEQ ID NO: 2736148 - RNA, 15 nt, Human
caauucuugccaaau

SEQ ID NO: 2736149 - RNA, 11 nt, Human
caauggcagcc

SEQ ID NO: 2736150 - RNA, 12 nt, Human
caauggcagccu

SEQ ID NO: 2736151 - RNA, 17 nt, Human
cacacagcucuguccug

SEQ ID NO: 2736152 - RNA, 20 nt, Human
cacacagcucuguccuggga

SEQ ID NO: 2736153 - RNA, 14 nt, Human
caaguccaagcaua

SEQ ID NO: 2736154 - RNA, 13 nt, Human
caagucaagugaa

SEQ ID NO: 2736155 - RNA, 17 nt, Human
caagucaagugaaaaag

SEQ ID NO: 2736156 - RNA, 17 nt, Human
caaggccaaaggaagca

SEQ ID NO: 2736157 - RNA, 18 nt, Human
caaggccaaaggaagcac

SEQ ID NO: 2736158 - RNA, 15 nt, Human
caaggccaaaggaag

SEQ ID NO: 2736159 - RNA, 16 nt, Human
caaggccaaaggaagc

SEQ ID NO: 2736160 - RNA, 13 nt, Human
caagcucugcucc

SEQ ID NO: 2736161 - RNA, 12 nt, Human
caagcuccaagc

SEQ ID NO: 2736162 - RNA, 13 nt, Human
caagcugcacccu

SEQ ID NO: 2736163 - RNA, 14 nt, Human
caagcucugcuccu

SEQ ID NO: 2736164 - RNA, 14 nt, Human
caagcugcacccuc

SEQ ID NO: 2736165 - RNA, 18 nt, Human
caagcugcacccucaggc

SEQ ID NO: 2736166 - RNA, 20 nt, Human
caagcugcacccucaggcag

SEQ ID NO: 2736167 - RNA, 19 nt, Human
caauaaagcagcguuucua

SEQ ID NO: 2736168 - RNA, 21 nt, Human
cacuagggcagggacaggaua

SEQ ID NO: 2736169 - RNA, 20 nt, Human
cacuagggcagggacaggau

SEQ ID NO: 2736170 - RNA, 16 nt, Human
cacuccagccugggug

SEQ ID NO: 2736171 - RNA, 14 nt, Human
cacuccccugcugg

SEQ ID NO: 2736172 - RNA, 12 nt, Human
cacuccccugcu

SEQ ID NO: 2736173 - RNA, 13 nt, Human
cacuccccugcug

SEQ ID NO: 2736174 - RNA, 11 nt, Human
cacugacagau

SEQ ID NO: 2736175 - RNA, 12 nt, Human
cacugcagccuc

SEQ ID NO: 2736176 - RNA, 20 nt, Human
cacugcacuccagccugggu

SEQ ID NO: 2736177 - RNA, 15 nt, Human
cacugcacuccagcc

SEQ ID NO: 2736178 - RNA, 16 nt, Human
cacugcacuccagccu

SEQ ID NO: 2736179 - RNA, 18 nt, Human
cacugcacuccagccugg

SEQ ID NO: 2736180 - RNA, 19 nt, Human
cacugcacuccagccuggg

SEQ ID NO: 2736181 - RNA, 19 nt, Human
cacugcacuauagccuagg

SEQ ID NO: 2736182 - RNA, 13 nt, Human
cacugcagccuca

SEQ ID NO: 2736183 - RNA, 16 nt, Human
cacugcauguuuguga

SEQ ID NO: 2736184 - RNA, 22 nt, Human
cacuuguguuuugcaagccaga

SEQ ID NO: 2736185 - RNA, 19 nt, Human
cacuuguguuuugcaagcc

SEQ ID NO: 2736186 - RNA, 16 nt, Human
cacuugucaauaaaau

SEQ ID NO: 2736187 - RNA, 18 nt, Human
cacuuacacuuuaugcac

SEQ ID NO: 2736188 - RNA, 16 nt, Human
cacuuacacuuuaugc

SEQ ID NO: 2736189 - RNA, 17 nt, Human
caccugccuguugggcc

SEQ ID NO: 2736190 - RNA, 19 nt, Human
caccugccuguugggccag

SEQ ID NO: 2736191 - RNA, 24 nt, Human
caccugccuguugggccaggagcc

SEQ ID NO: 2736192 - RNA, 14 nt, Human
caccuuggcugcag

SEQ ID NO: 2736193 - RNA, 14 nt, Human
caccuuggcucaag

SEQ ID NO: 2736194 - RNA, 15 nt, Human
caccuuggcucaagu

SEQ ID NO: 2736195 - RNA, 13 nt, Human
caccuuggcugca

SEQ ID NO: 2736196 - RNA, 14 nt, Human
caccucagccuccc

SEQ ID NO: 2736197 - RNA, 13 nt, Human
caccucagccucc

SEQ ID NO: 2736198 - RNA, 14 nt, Human
caccugccccucaa

SEQ ID NO: 2736199 - RNA, 15 nt, Human
caccugccccucaac

SEQ ID NO: 2736200 - RNA, 16 nt, Human
caccugccccucaacu

SEQ ID NO: 2736201 - RNA, 17 nt, Human
cacccugaaagcccuga

SEQ ID NO: 2736202 - RNA, 15 nt, Human
cacccuggggagaaa

SEQ ID NO: 2736203 - RNA, 16 nt, Human
cacccuggggagaaag

SEQ ID NO: 2736204 - RNA, 14 nt, Human
cacccucaggcagg

SEQ ID NO: 2736205 - RNA, 11 nt, Human
caccccagccc

SEQ ID NO: 2736206 - RNA, 16 nt, Human
caugaauuaguuuuau

SEQ ID NO: 2736207 - RNA, 14 nt, Human
caugacacgaauau

SEQ ID NO: 2736208 - RNA, 17 nt, Human
caugacacgaauauugc

SEQ ID NO: 2736209 - RNA, 18 nt, Human
caugacacgaauauugcu

SEQ ID NO: 2736210 - RNA, 22 nt, Human
caugcaaggucauuuuuuuuaa

SEQ ID NO: 2736211 - RNA, 18 nt, Human
caugcaaggucauuuuuu

SEQ ID NO: 2736212 - RNA, 17 nt, Human
caugcaaggucauuuuu

SEQ ID NO: 2736213 - RNA, 16 nt, Human
caugcugcccugugag

SEQ ID NO: 2736214 - RNA, 18 nt, Human
caugcugcccugugagua

SEQ ID NO: 2736215 - RNA, 20 nt, Human
caucagcuugcccuguuaaa

SEQ ID NO: 2736216 - RNA, 13 nt, Human
caucaggccaggc

SEQ ID NO: 2736217 - RNA, 13 nt, Human
caucagcugcuga

SEQ ID NO: 2736218 - RNA, 15 nt, Human
caucagcugcugaaa

SEQ ID NO: 2736219 - RNA, 18 nt, Human
caucagcugcugaaacaa

SEQ ID NO: 2736220 - RNA, 17 nt, Human
caucagcugcugaaaca

SEQ ID NO: 2736221 - RNA, 18 nt, Human
caucagcacgauuucugu

SEQ ID NO: 2736222 - RNA, 17 nt, Human
caucagcacgauuucug

SEQ ID NO: 2736223 - RNA, 23 nt, Human
cauccuggcacccggccccugcu

SEQ ID NO: 2736224 - RNA, 16 nt, Human
caucccagccccaaug

SEQ ID NO: 2736225 - RNA, 13 nt, Human
caucccagcccca

SEQ ID NO: 2736226 - RNA, 14 nt, Human
caucccagccccaa

SEQ ID NO: 2736227 - RNA, 20 nt, Human
caucaggccaggcccucugc

SEQ ID NO: 2736228 - RNA, 21 nt, Human
caucaggccaggcccucugcc

SEQ ID NO: 2736229 - RNA, 22 nt, Human
caucaggccaggcccucugccc

SEQ ID NO: 2736230 - RNA, 23 nt, Human
caucaggccaggcccucugccca

SEQ ID NO: 2736231 - RNA, 21 nt, Human
caucuuagguuggcaaaaagg

SEQ ID NO: 2736232 - RNA, 22 nt, Human
caucuuagguuggcaaaaaggc

SEQ ID NO: 2736233 - RNA, 18 nt, Human
caucugugaaaggaaaga

SEQ ID NO: 2736234 - RNA, 19 nt, Human
caucugugaaaggaaagag

SEQ ID NO: 2736235 - RNA, 18 nt, Human
cauagauucccugagcag

SEQ ID NO: 2736236 - RNA, 17 nt, Human
cauagauucccugagca

SEQ ID NO: 2736237 - RNA, 21 nt, Human
cauaaugcgugcauaccacuu

SEQ ID NO: 2736238 - RNA, 15 nt, Human
cauacaauuccaaac

SEQ ID NO: 2736239 - RNA, 16 nt, Human
cauauuaccacagaca

SEQ ID NO: 2736240 - RNA, 17 nt, Human
cauauuaccacagacau

SEQ ID NO: 2736241 - RNA, 21 nt, Human
cauauuaccacagacauacua

SEQ ID NO: 2736242 - RNA, 20 nt, Human
cauauuaccacagacauacu

SEQ ID NO: 2736243 - RNA, 17 nt, Human
cauaaugcgugcauacc

SEQ ID NO: 2736244 - RNA, 14 nt, Human
cauaaugcgugcau

SEQ ID NO: 2736245 - RNA, 18 nt, Human
cagucaccccggccaccu

SEQ ID NO: 2736246 - RNA, 12 nt, Human
cauuaucuagau

SEQ ID NO: 2736247 - RNA, 17 nt, Human
cauuaucuagauacugu

SEQ ID NO: 2736248 - RNA, 16 nt, Human
cauuaucuagauacug

SEQ ID NO: 2736249 - RNA, 15 nt, Human
cauguucucugagga

SEQ ID NO: 2736250 - RNA, 22 nt, Human
cauggccucuucagaucucuaa

SEQ ID NO: 2736251 - RNA, 17 nt, Human
cauggcugccaauggga

SEQ ID NO: 2736252 - RNA, 22 nt, Human
cauggcuggagcuagaauuuga

SEQ ID NO: 2736253 - RNA, 22 nt, Human
cauggcugccaaugggagcuca

SEQ ID NO: 2736254 - RNA, 16 nt, Human
cauucuccuuguguua

SEQ ID NO: 2736255 - RNA, 21 nt, Human
cauucuccuaucaccugucuu

SEQ ID NO: 2736256 - RNA, 18 nt, Human
cauuaucuagauacugua

SEQ ID NO: 2736257 - RNA, 21 nt, Human
cauuuggugguuucagaaaug

SEQ ID NO: 2736258 - RNA, 23 nt, Human
cauuuggugguuucagaaaugug

SEQ ID NO: 2736259 - RNA, 22 nt, Human
cauuuggugguuucagaaaugu

SEQ ID NO: 2736260 - RNA, 23 nt, Human
cauuuuucuuagggaaggauaca

SEQ ID NO: 2736261 - RNA, 17 nt, Human
ccaaaacucuccucugc

SEQ ID NO: 2736262 - RNA, 19 nt, Human
ccaaaaagauuuucagaaa

SEQ ID NO: 2736263 - RNA, 17 nt, Human
ccaaaaaaugcuugcuu

SEQ ID NO: 2736264 - RNA, 20 nt, Human
ccaaaaaccaguauuguaca

SEQ ID NO: 2736265 - RNA, 19 nt, Human
ccaaaaaccaguauuguac

SEQ ID NO: 2736266 - RNA, 16 nt, Human
ccaaaaaccaguauug

SEQ ID NO: 2736267 - RNA, 16 nt, Human
cauuuauucugcucac

SEQ ID NO: 2736268 - RNA, 18 nt, Human
cauugcugggcuugucug

SEQ ID NO: 2736269 - RNA, 14 nt, Human
cauugcggacagcc

SEQ ID NO: 2736270 - RNA, 15 nt, Human
cauugcggacagcca

SEQ ID NO: 2736271 - RNA, 17 nt, Human
cauugcggacagccacg

SEQ ID NO: 2736272 - RNA, 21 nt, Human
cauugcggacagccacggcca

SEQ ID NO: 2736273 - RNA, 12 nt, Human
ccaaauuaagag

SEQ ID NO: 2736274 - RNA, 16 nt, Human
ccaacgucugugccau

SEQ ID NO: 2736275 - RNA, 20 nt, Human
ccaauguucucucuucucca

SEQ ID NO: 2736276 - RNA, 20 nt, Human
ccaagcuggucccacucagu

SEQ ID NO: 2736277 - RNA, 23 nt, Human
ccaaugcacuuuguucuggcucu

SEQ ID NO: 2736278 - RNA, 20 nt, Human
ccaaugcacuuuguucuggc

SEQ ID NO: 2736279 - RNA, 22 nt, Human
ccaaugcacuuuguucuggcuc

SEQ ID NO: 2736280 - RNA, 16 nt, Human
ccaccaucaagccacc

SEQ ID NO: 2736281 - RNA, 17 nt, Human
ccaccaucaagccacca

SEQ ID NO: 2736282 - RNA, 13 nt, Human
ccaccuuggcuca

SEQ ID NO: 2736283 - RNA, 14 nt, Human
ccaccuuggcucaa

SEQ ID NO: 2736284 - RNA, 15 nt, Human
ccaccuuggcucaag

SEQ ID NO: 2736285 - RNA, 18 nt, Human
ccaccgcagacaggacca

SEQ ID NO: 2736286 - RNA, 13 nt, Human
ccacccugcucuc

SEQ ID NO: 2736287 - RNA, 20 nt, Human
ccaccaucaagccaccaaca

SEQ ID NO: 2736288 - RNA, 14 nt, Human
ccaccgcagacagg

SEQ ID NO: 2736289 - RNA, 17 nt, Human
ccaccgcagacaggacc

SEQ ID NO: 2736290 - RNA, 23 nt, Human
caggacagcccuucuuuccacag

SEQ ID NO: 2736291 - RNA, 24 nt, Human
caggacagcccuucuuuccacaga

SEQ ID NO: 2736292 - RNA, 13 nt, Human
caggaccucaggu

SEQ ID NO: 2736293 - RNA, 13 nt, Human
caggaccagggau

SEQ ID NO: 2736294 - RNA, 13 nt, Human
caggccagcugcu

SEQ ID NO: 2736295 - RNA, 15 nt, Human
caggccagcugcuug

SEQ ID NO: 2736296 - RNA, 21 nt, Human
caggcaaugcuggcuguuggc

SEQ ID NO: 2736297 - RNA, 19 nt, Human
caggcaaugcuggcuguug

SEQ ID NO: 2736298 - RNA, 20 nt, Human
caggcaaugcuggcuguugg

SEQ ID NO: 2736299 - RNA, 12 nt, Human
caggaggccagc

SEQ ID NO: 2736300 - RNA, 13 nt, Human
caggaggccagcc

SEQ ID NO: 2736301 - RNA, 13 nt, Human
caggccaggcccu

SEQ ID NO: 2736302 - RNA, 14 nt, Human
caggccaggcccuc

SEQ ID NO: 2736303 - RNA, 15 nt, Human
caggccaggcccucu

SEQ ID NO: 2736304 - RNA, 16 nt, Human
caggccaggcccucug

SEQ ID NO: 2736305 - RNA, 21 nt, Human
caggaaaucaaauaugcaaag

SEQ ID NO: 2736306 - RNA, 19 nt, Human
caggaaaucaaauaugcaa

SEQ ID NO: 2736307 - RNA, 15 nt, Human
cagcuguucagcugg

SEQ ID NO: 2736308 - RNA, 16 nt, Human
cagcuguucagcuggu

SEQ ID NO: 2736309 - RNA, 23 nt, Human
caggaaaggcuccaggagcagcc

SEQ ID NO: 2736310 - RNA, 21 nt, Human
caggaaaggcuccaggagcag

SEQ ID NO: 2736311 - RNA, 22 nt, Human
caggaaaggcuccaggagcagc

SEQ ID NO: 2736312 - RNA, 19 nt, Human
caggaaaagcugcugacag

SEQ ID NO: 2736313 - RNA, 20 nt, Human
caggaaaagcugcugacagu

SEQ ID NO: 2736314 - RNA, 14 nt, Human
caggcugggcuuca

SEQ ID NO: 2736315 - RNA, 16 nt, Human
cagggagggcuucugc

SEQ ID NO: 2736316 - RNA, 20 nt, Human
cagggcucagcggggacagc

SEQ ID NO: 2736317 - RNA, 12 nt, Human
cagggcucagcg

SEQ ID NO: 2736318 - RNA, 15 nt, Human
cagggcucagcgggg

SEQ ID NO: 2736319 - RNA, 19 nt, Human
caggcugggagagccuucc

SEQ ID NO: 2736320 - RNA, 16 nt, Human
caggcugggagagccu

SEQ ID NO: 2736321 - RNA, 18 nt, Human
caggcugggagagccuuc

SEQ ID NO: 2736322 - RNA, 17 nt, Human
caggcuggcgugcagug

SEQ ID NO: 2736323 - RNA, 23 nt, Human
caggccugggggcugggcagagg

SEQ ID NO: 2736324 - RNA, 18 nt, Human
caggcuggcgugcagugg

SEQ ID NO: 2736325 - RNA, 19 nt, Human
caggcuggcgugcaguggu

SEQ ID NO: 2736326 - RNA, 20 nt, Human
caggccugggggcugggcag

SEQ ID NO: 2736327 - RNA, 22 nt, Human
caggccugggggcugggcagag

SEQ ID NO: 2736328 - RNA, 15 nt, Human
caggguuggccccug

SEQ ID NO: 2736329 - RNA, 16 nt, Human
caggguuggccccugc

SEQ ID NO: 2736330 - RNA, 21 nt, Human
cagggucucuaccauccccug

SEQ ID NO: 2736331 - RNA, 23 nt, Human
cagggucucacucugucgcccag

SEQ ID NO: 2736332 - RNA, 19 nt, Human
caguaaaugggggugcauu

SEQ ID NO: 2736333 - RNA, 19 nt, Human
caguauuacuucugcuaca

SEQ ID NO: 2736334 - RNA, 18 nt, Human
caguaaaugggggugcau

SEQ ID NO: 2736335 - RNA, 22 nt, Human
caguauuguacaaaguauuaag

SEQ ID NO: 2736336 - RNA, 14 nt, Human
cagucaccccggcc

SEQ ID NO: 2736337 - RNA, 16 nt, Human
cagucaccccggccac

SEQ ID NO: 2736338 - RNA, 17 nt, Human
cagucaccccggccacc

SEQ ID NO: 2736339 - RNA, 23 nt, Human
cagguuuuuggucugacccacug

SEQ ID NO: 2736340 - RNA, 13 nt, Human
caggugcugccau

SEQ ID NO: 2736341 - RNA, 14 nt, Human
caggugcugccauc

SEQ ID NO: 2736342 - RNA, 14 nt, Human
caggguuggccccu

SEQ ID NO: 2736343 - RNA, 17 nt, Human
caggguuggccccugcc

SEQ ID NO: 2736344 - RNA, 21 nt, Human
caggguuggccccugcccggc

SEQ ID NO: 2736345 - RNA, 23 nt, Human
cagccgccaugcuccuggcccac

SEQ ID NO: 2736346 - RNA, 13 nt, Human
cagcccuuagcag

SEQ ID NO: 2736347 - RNA, 14 nt, Human
cagcguuucuauga

SEQ ID NO: 2736348 - RNA, 16 nt, Human
cagcguuucuaugaca

SEQ ID NO: 2736349 - RNA, 23 nt, Human
cagccccauucugccugcccagg

SEQ ID NO: 2736350 - RNA, 24 nt, Human
cagccccauucugccugcccaggc

SEQ ID NO: 2736351 - RNA, 19 nt, Human
cagccccauucugccugcc

SEQ ID NO: 2736352 - RNA, 20 nt, Human
cagccccauucugccugccc

SEQ ID NO: 2736353 - RNA, 22 nt, Human
cagccccauucugccugcccag

SEQ ID NO: 2736354 - RNA, 18 nt, Human
cagcaguucagagcugcc

SEQ ID NO: 2736355 - RNA, 19 nt, Human
cagcaguucagagcugccc

SEQ ID NO: 2736356 - RNA, 20 nt, Human
cagcaguucagagcugcccu

SEQ ID NO: 2736357 - RNA, 21 nt, Human
cagcaguucagagcugcccuc

SEQ ID NO: 2736358 - RNA, 22 nt, Human
cagcaguucagagcugcccucu

SEQ ID NO: 2736359 - RNA, 17 nt, Human
cagcauagaaguaacuu

SEQ ID NO: 2736360 - RNA, 20 nt, Human
cagccagacuggcacaguuu

SEQ ID NO: 2736361 - RNA, 18 nt, Human
cagcauauucaggaagcu

SEQ ID NO: 2736362 - RNA, 16 nt, Human
cagcauauucaggaag

SEQ ID NO: 2736363 - RNA, 17 nt, Human
cagcauauucaggaagc

SEQ ID NO: 2736364 - RNA, 21 nt, Human
cagauugcaacaggcugggcu

SEQ ID NO: 2736365 - RNA, 13 nt, Human
cagauuucacucu

SEQ ID NO: 2736366 - RNA, 15 nt, Human
cagauuucacucucc

SEQ ID NO: 2736367 - RNA, 16 nt, Human
cagauuucacucuccu

SEQ ID NO: 2736368 - RNA, 19 nt, Human
cagauuugaacucuucaau

SEQ ID NO: 2736369 - RNA, 18 nt, Human
cagauuucacucuccuug

SEQ ID NO: 2736370 - RNA, 23 nt, Human
cagauacaggaaaagcugcugac

SEQ ID NO: 2736371 - RNA, 13 nt, Human
cagauacuggauu

SEQ ID NO: 2736372 - RNA, 21 nt, Human
cagagacuccugcaggcagcc

SEQ ID NO: 2736373 - RNA, 22 nt, Human
cagagacuccugcaggcagcca

SEQ ID NO: 2736374 - RNA, 20 nt, Human
cagagacuccugcaggcagc

SEQ ID NO: 2736375 - RNA, 13 nt, Human
cagagaggguggg

SEQ ID NO: 2736376 - RNA, 16 nt, Human
cagagagggugggagu

SEQ ID NO: 2736377 - RNA, 14 nt, Human
cagagccugcaguu

SEQ ID NO: 2736378 - RNA, 20 nt, Human
cagagagggugggagugggc

SEQ ID NO: 2736379 - RNA, 22 nt, Human
cagagagggugggagugggccc

SEQ ID NO: 2736380 - RNA, 17 nt, Human
cagagcuacacagggga

SEQ ID NO: 2736381 - RNA, 22 nt, Human
cagagcuacacaggggaaaaga

SEQ ID NO: 2736382 - RNA, 13 nt, Human
cccaggcuggcgu

SEQ ID NO: 2736383 - RNA, 17 nt, Human
cccaggcuggcgugcag

SEQ ID NO: 2736384 - RNA, 13 nt, Human
cccauccucugua

SEQ ID NO: 2736385 - RNA, 16 nt, Human
cccagccagcaguuca

SEQ ID NO: 2736386 - RNA, 17 nt, Human
cccagccagcaguucag

SEQ ID NO: 2736387 - RNA, 20 nt, Human
cccagccagcaguucagagc

SEQ ID NO: 2736388 - RNA, 23 nt, Human
cccagcucugguccauagagagc

SEQ ID NO: 2736389 - RNA, 22 nt, Human
cccagcuuaaaggggcuagagu

SEQ ID NO: 2736390 - RNA, 17 nt, Human
cccacccccacccaagg

SEQ ID NO: 2736391 - RNA, 18 nt, Human
cccacccaagggccuggc

SEQ ID NO: 2736392 - RNA, 12 nt, Human
cccacccccacc

SEQ ID NO: 2736393 - RNA, 15 nt, Human
cccacccccacccaa

SEQ ID NO: 2736394 - RNA, 18 nt, Human
cccacccugaaagcccug

SEQ ID NO: 2736395 - RNA, 20 nt, Human
cccacccaagggccuggccu

SEQ ID NO: 2736396 - RNA, 21 nt, Human
cccacccaagggccuggccug

SEQ ID NO: 2736397 - RNA, 22 nt, Human
cccacccaagggccuggccuga

SEQ ID NO: 2736398 - RNA, 19 nt, Human
cccacugcuuuuggucugu

SEQ ID NO: 2736399 - RNA, 12 nt, Human
cccacugcucug

SEQ ID NO: 2736400 - RNA, 13 nt, Human
cccacugcucugg

SEQ ID NO: 2736401 - RNA, 22 nt, Human
ccccaaaacucuccucugcugc

SEQ ID NO: 2736402 - RNA, 21 nt, Human
ccccaaaacucuccucugcug

SEQ ID NO: 2736403 - RNA, 23 nt, Human
ccccaaaacucuccucugcugcu

SEQ ID NO: 2736404 - RNA, 23 nt, Human
ccccgacccuugccgucuaccug

SEQ ID NO: 2736405 - RNA, 22 nt, Human
cccccaaauggaaaugggcaga

SEQ ID NO: 2736406 - RNA, 22 nt, Human
ccccagcaagugagagcugggu

SEQ ID NO: 2736407 - RNA, 21 nt, Human
ccccagcaagugagagcuggg

SEQ ID NO: 2736408 - RNA, 23 nt, Human
ccccgaggccuucucugaaggac

SEQ ID NO: 2736409 - RNA, 18 nt, Human
cccuauuagagaagagau

SEQ ID NO: 2736410 - RNA, 17 nt, Human
cccggccaccugcggug

SEQ ID NO: 2736411 - RNA, 22 nt, Human
cccgggaagggggcugggacau

SEQ ID NO: 2736412 - RNA, 11 nt, Human
cccggcuccag

SEQ ID NO: 2736413 - RNA, 12 nt, Human
cccggcuccagg

SEQ ID NO: 2736414 - RNA, 13 nt, Human
cccggccaccugc

SEQ ID NO: 2736415 - RNA, 14 nt, Human
cccggccaccugcg

SEQ ID NO: 2736416 - RNA, 13 nt, Human
cccggcuccaggc

SEQ ID NO: 2736417 - RNA, 14 nt, Human
cccggcuccaggcu

SEQ ID NO: 2736418 - RNA, 15 nt, Human
cccggcuccaggcuc

SEQ ID NO: 2736419 - RNA, 16 nt, Human
cccggcuccaggcucc

SEQ ID NO: 2736420 - RNA, 14 nt, Human
cccgaauagcuggg

SEQ ID NO: 2736421 - RNA, 15 nt, Human
ccagauccuggaaau

SEQ ID NO: 2736422 - RNA, 20 nt, Human
ccagagggccugcaagggag

SEQ ID NO: 2736423 - RNA, 16 nt, Human
ccaccuuggcucaagu

SEQ ID NO: 2736424 - RNA, 17 nt, Human
ccagagggccugcaagg

SEQ ID NO: 2736425 - RNA, 18 nt, Human
ccagagggccugcaaggg

SEQ ID NO: 2736426 - RNA, 19 nt, Human
ccagagggccugcaaggga

SEQ ID NO: 2736427 - RNA, 18 nt, Human
ccagaugcaccagcccuu

SEQ ID NO: 2736428 - RNA, 17 nt, Human
ccagaugcaccagcccu

SEQ ID NO: 2736429 - RNA, 15 nt, Human
ccagaugcaccagcc

SEQ ID NO: 2736430 - RNA, 16 nt, Human
ccagcagauuauucac

SEQ ID NO: 2736431 - RNA, 22 nt, Human
ccagcagauuauucacugauuu

SEQ ID NO: 2736432 - RNA, 21 nt, Human
ccagcagauuauucacugauu

SEQ ID NO: 2736433 - RNA, 13 nt, Human
ccagcaggcucuc

SEQ ID NO: 2736434 - RNA, 15 nt, Human
ccagcaggcucucag

SEQ ID NO: 2736435 - RNA, 16 nt, Human
ccaggaaaggcuccag

SEQ ID NO: 2736436 - RNA, 14 nt, Human
ccaggaaaggcucc

SEQ ID NO: 2736437 - RNA, 15 nt, Human
ccaggaaaggcucca

SEQ ID NO: 2736438 - RNA, 12 nt, Human
ccaggaagccag

SEQ ID NO: 2736439 - RNA, 13 nt, Human
ccaggaagccagc

SEQ ID NO: 2736440 - RNA, 19 nt, Human
ccagcuuaaaggggcuaga

SEQ ID NO: 2736441 - RNA, 17 nt, Human
ccagcuguucagcuggu

SEQ ID NO: 2736442 - RNA, 16 nt, Human
ccagcuguucagcugg

SEQ ID NO: 2736443 - RNA, 22 nt, Human
ccagcucaccagccccagugcc

SEQ ID NO: 2736444 - RNA, 15 nt, Human
ccagcucaccagccc

SEQ ID NO: 2736445 - RNA, 16 nt, Human
ccagcucaccagcccc

SEQ ID NO: 2736446 - RNA, 11 nt, Human
ccagccccugg

SEQ ID NO: 2736447 - RNA, 12 nt, Human
ccagccccugga

SEQ ID NO: 2736448 - RNA, 19 nt, Human
ccaggcuggcgugcagugg

SEQ ID NO: 2736449 - RNA, 17 nt, Human
ccaggcuggcgugcagu

SEQ ID NO: 2736450 - RNA, 18 nt, Human
ccaggcuggcgugcagug

SEQ ID NO: 2736451 - RNA, 16 nt, Human
ccaggcuggcgugcag

SEQ ID NO: 2736452 - RNA, 20 nt, Human
ccaggcuccuuuagcgccca

SEQ ID NO: 2736453 - RNA, 21 nt, Human
ccaggcuccuuuagcgcccag

SEQ ID NO: 2736454 - RNA, 23 nt, Human
ccaggggugggacacccugugau

SEQ ID NO: 2736455 - RNA, 19 nt, Human
ccaggggugggacacccug

SEQ ID NO: 2736456 - RNA, 14 nt, Human
ccaggggugggaca

SEQ ID NO: 2736457 - RNA, 17 nt, Human
ccaggggugggacaccc

SEQ ID NO: 2736458 - RNA, 20 nt, Human
ccaggggaaaaucagccugc

SEQ ID NO: 2736459 - RNA, 13 nt, Human
ccaggggugggac

SEQ ID NO: 2736460 - RNA, 19 nt, Human
ccaggggaaaaucagccug

SEQ ID NO: 2736461 - RNA, 17 nt, Human
ccaguuggguggaugcc

SEQ ID NO: 2736462 - RNA, 19 nt, Human
ccaguuggguggaugccug

SEQ ID NO: 2736463 - RNA, 20 nt, Human
ccaguuggguggaugccugg

SEQ ID NO: 2736464 - RNA, 20 nt, Human
ccauggucggaaaacaugcu

SEQ ID NO: 2736465 - RNA, 21 nt, Human
ccaugagccucagcauccugg

SEQ ID NO: 2736466 - RNA, 23 nt, Human
ccaugagccucagcauccuggca

SEQ ID NO: 2736467 - RNA, 14 nt, Human
ccaucccugaaggc

SEQ ID NO: 2736468 - RNA, 15 nt, Human
ccaucccugaaggcc

SEQ ID NO: 2736469 - RNA, 17 nt, Human
ccaucccugaaggcccc

SEQ ID NO: 2736470 - RNA, 20 nt, Human
ccaucccugaaggccccgcc

SEQ ID NO: 2736471 - RNA, 14 nt, Human
ccaucccagcccca

SEQ ID NO: 2736472 - RNA, 13 nt, Human
ccaucccagcccc

SEQ ID NO: 2736473 - RNA, 15 nt, Human
ccaucccagccccaa

SEQ ID NO: 2736474 - RNA, 23 nt, Human
ccaguuggucccccuuccaugga

SEQ ID NO: 2736475 - RNA, 13 nt, Human
ccucugcuugcca

SEQ ID NO: 2736476 - RNA, 22 nt, Human
ccucugccugaagucacacagu

SEQ ID NO: 2736477 - RNA, 13 nt, Human
ccucugcugcugg

SEQ ID NO: 2736478 - RNA, 14 nt, Human
ccucugcugcuggc

SEQ ID NO: 2736479 - RNA, 15 nt, Human
ccucugcugcuggcu

SEQ ID NO: 2736480 - RNA, 16 nt, Human
ccucugcugcuggcug

SEQ ID NO: 2736481 - RNA, 17 nt, Human
ccucugcugcuggcugg

SEQ ID NO: 2736482 - RNA, 18 nt, Human
ccucugcugcuggcuggu

SEQ ID NO: 2736483 - RNA, 14 nt, Human
ccucucucaggcca

SEQ ID NO: 2736484 - RNA, 13 nt, Human
ccucucucacucc

SEQ ID NO: 2736485 - RNA, 14 nt, Human
ccucucucacuccu

SEQ ID NO: 2736486 - RNA, 15 nt, Human
ccucucucacuccuu

SEQ ID NO: 2736487 - RNA, 17 nt, Human
ccucucucacuccuuga

SEQ ID NO: 2736488 - RNA, 12 nt, Human
ccucucucaggc

SEQ ID NO: 2736489 - RNA, 19 nt, Human
ccugcacuugcagacucua

SEQ ID NO: 2736490 - RNA, 22 nt, Human
ccugcacuugcagacucuacag

SEQ ID NO: 2736491 - RNA, 19 nt, Human
ccucuugagccuugaacuu

SEQ ID NO: 2736492 - RNA, 13 nt, Human
ccucuugagccuu

SEQ ID NO: 2736493 - RNA, 13 nt, Human
ccucuuggguuca

SEQ ID NO: 2736494 - RNA, 15 nt, Human
ccuggaguucugguu

SEQ ID NO: 2736495 - RNA, 16 nt, Human
ccuggaguucugguuc

SEQ ID NO: 2736496 - RNA, 17 nt, Human
ccuggaguucugguucc

SEQ ID NO: 2736497 - RNA, 13 nt, Human
ccuggaugcagcc

SEQ ID NO: 2736498 - RNA, 19 nt, Human
ccuggaugcagccucacag

SEQ ID NO: 2736499 - RNA, 14 nt, Human
ccuggaugcagccu

SEQ ID NO: 2736500 - RNA, 17 nt, Human
ccuggaugcagccucac

SEQ ID NO: 2736501 - RNA, 14 nt, Human
ccugcugggugugg

SEQ ID NO: 2736502 - RNA, 20 nt, Human
ccugcuggguguggcgcagc

SEQ ID NO: 2736503 - RNA, 12 nt, Human
ccugcugggugu

SEQ ID NO: 2736504 - RNA, 14 nt, Human
ccugcccaggcccc

SEQ ID NO: 2736505 - RNA, 15 nt, Human
ccugcccaggccccu

SEQ ID NO: 2736506 - RNA, 16 nt, Human
ccugcccaggccccug

SEQ ID NO: 2736507 - RNA, 12 nt, Human
ccuggccucugc

SEQ ID NO: 2736508 - RNA, 16 nt, Human
ccuggccucugcacuc

SEQ ID NO: 2736509 - RNA, 13 nt, Human
ccuggccugagcu

SEQ ID NO: 2736510 - RNA, 14 nt, Human
ccuggccucugcac

SEQ ID NO: 2736511 - RNA, 15 nt, Human
ccuggccucugcacu

SEQ ID NO: 2736512 - RNA, 23 nt, Human
ccucagccucccaaagugcuggg

SEQ ID NO: 2736513 - RNA, 22 nt, Human
ccucagccucccgaauagcugg

SEQ ID NO: 2736514 - RNA, 13 nt, Human
ccucauguucuua

SEQ ID NO: 2736515 - RNA, 19 nt, Human
ccucauguucuuaauucuu

SEQ ID NO: 2736516 - RNA, 18 nt, Human
ccucauuagcauuuugcu

SEQ ID NO: 2736517 - RNA, 22 nt, Human
ccucccaaggggcccaaauucu

SEQ ID NO: 2736518 - RNA, 16 nt, Human
ccucaaccuccugggc

SEQ ID NO: 2736519 - RNA, 11 nt, Human
ccucagccucc

SEQ ID NO: 2736520 - RNA, 22 nt, Human
ccucagccucccaaagugcugg

SEQ ID NO: 2736521 - RNA, 15 nt, Human
ccucaacucuccucc

SEQ ID NO: 2736522 - RNA, 15 nt, Human
ccucaagagaaggca

SEQ ID NO: 2736523 - RNA, 16 nt, Human
ccguagguuauuuuca

SEQ ID NO: 2736524 - RNA, 21 nt, Human
cccuucugacccaugcugccc

SEQ ID NO: 2736525 - RNA, 22 nt, Human
cccuucugacccaugcugcccu

SEQ ID NO: 2736526 - RNA, 23 nt, Human
cccuucugacccaugcugcccug

SEQ ID NO: 2736527 - RNA, 16 nt, Human
cccuucuaccuuccug

SEQ ID NO: 2736528 - RNA, 16 nt, Human
cccuucgcuccugugu

SEQ ID NO: 2736529 - RNA, 18 nt, Human
cccuucgcuccugugucu

SEQ ID NO: 2736530 - RNA, 17 nt, Human
cccuucuuuccacagaa

SEQ ID NO: 2736531 - RNA, 20 nt, Human
ccgaauagcugggacuacag

SEQ ID NO: 2736532 - RNA, 16 nt, Human
ccgacccuugccgucu

SEQ ID NO: 2736533 - RNA, 17 nt, Human
ccgccaaggcuggggga

SEQ ID NO: 2736534 - RNA, 16 nt, Human
ccgccaugcuccuggc

SEQ ID NO: 2736535 - RNA, 20 nt, Human
ccgcccaggcuuagucacug

SEQ ID NO: 2736536 - RNA, 13 nt, Human
cccugcccugugg

SEQ ID NO: 2736537 - RNA, 12 nt, Human
cccugcccugug

SEQ ID NO: 2736538 - RNA, 11 nt, Human
cccugcccugu

SEQ ID NO: 2736539 - RNA, 14 nt, Human
cccugcccuguggg

SEQ ID NO: 2736540 - RNA, 15 nt, Human
cccugcccugugggc

SEQ ID NO: 2736541 - RNA, 16 nt, Human
cccugcccugugggcc

SEQ ID NO: 2736542 - RNA, 20 nt, Human
cccugcccugugggccccca

SEQ ID NO: 2736543 - RNA, 21 nt, Human
cccugcccugugggcccccaa

SEQ ID NO: 2736544 - RNA, 12 nt, Human
cccuggcagccc

SEQ ID NO: 2736545 - RNA, 13 nt, Human
cccuggcagcccc

SEQ ID NO: 2736546 - RNA, 14 nt, Human
cccuggcagccccu

SEQ ID NO: 2736547 - RNA, 16 nt, Human
cccuggcagccccugu

SEQ ID NO: 2736548 - RNA, 18 nt, Human
ccuuuuuuauacauaaac

SEQ ID NO: 2736549 - RNA, 17 nt, Human
ccuuuuuuauacauaaa

SEQ ID NO: 2736550 - RNA, 23 nt, Human
cgaccagacaccuugacagggca

SEQ ID NO: 2736551 - RNA, 12 nt, Human
ccuuuuuuauac

SEQ ID NO: 2736552 - RNA, 17 nt, Human
ccuuuuucauuauuuua

SEQ ID NO: 2736553 - RNA, 15 nt, Human
ccuuuuucauuauuu

SEQ ID NO: 2736554 - RNA, 14 nt, Human
ccuuuagcgcccag

SEQ ID NO: 2736555 - RNA, 20 nt, Human
ccuuuagcgcccaguugggu

SEQ ID NO: 2736556 - RNA, 20 nt, Human
ccuuuucgcaggauucuucc

SEQ ID NO: 2736557 - RNA, 20 nt, Human
ccuugccgucuaccugaggg

SEQ ID NO: 2736558 - RNA, 17 nt, Human
ccuugccgucuaccuga

SEQ ID NO: 2736559 - RNA, 20 nt, Human
ccuggccugagcugggauga

SEQ ID NO: 2736560 - RNA, 14 nt, Human
ccuggccugagcug

SEQ ID NO: 2736561 - RNA, 15 nt, Human
ccuggccugagcugg

SEQ ID NO: 2736562 - RNA, 12 nt, Human
ccuucugaccca

SEQ ID NO: 2736563 - RNA, 16 nt, Human
ccuucugacccaugcu

SEQ ID NO: 2736564 - RNA, 17 nt, Human
ccuucugacccaugcug

SEQ ID NO: 2736565 - RNA, 20 nt, Human
ccuucugacccaugcugccc

SEQ ID NO: 2736566 - RNA, 22 nt, Human
ccuucuggaauaaggagaauga

SEQ ID NO: 2736567 - RNA, 23 nt, Human
ccuucugacccaugcugcccugu

SEQ ID NO: 2736568 - RNA, 21 nt, Human
ccuucugacccaugcugcccu

SEQ ID NO: 2736569 - RNA, 22 nt, Human
ccuucugacccaugcugcccug

SEQ ID NO: 2736570 - RNA, 14 nt, Human
cggagucccaccuu

SEQ ID NO: 2736571 - RNA, 19 nt, Human
cggcucacugcagccucaa

SEQ ID NO: 2736572 - RNA, 18 nt, Human
cggcucacugcagccuca

SEQ ID NO: 2736573 - RNA, 14 nt, Human
cgccuacaggagug

SEQ ID NO: 2736574 - RNA, 12 nt, Human
cgccaaggcugg

SEQ ID NO: 2736575 - RNA, 13 nt, Human
cgccaaggcuggg

SEQ ID NO: 2736576 - RNA, 16 nt, Human
cgccaaggcuggggga

SEQ ID NO: 2736577 - RNA, 17 nt, Human
cgaguuacagacaaagc

SEQ ID NO: 2736578 - RNA, 18 nt, Human
cgaguuacagacaaagcg

SEQ ID NO: 2736579 - RNA, 13 nt, Human
cgaguagcuggga

SEQ ID NO: 2736580 - RNA, 14 nt, Human
cgaguagcugggac

SEQ ID NO: 2736581 - RNA, 15 nt, Human
cgaguagcugggacu

SEQ ID NO: 2736582 - RNA, 16 nt, Human
cgaguagcugggacua

SEQ ID NO: 2736583 - RNA, 22 nt, Human
cuacauaaguaauucaagaaaa

SEQ ID NO: 2736584 - RNA, 18 nt, Human
cuacauacaauuccaaac

SEQ ID NO: 2736585 - RNA, 23 nt, Human
cuacauaaguaauucaagaaaac

SEQ ID NO: 2736586 - RNA, 13 nt, Human
cuacaguugaaaa

SEQ ID NO: 2736587 - RNA, 15 nt, Human
cuacaguccucccau

SEQ ID NO: 2736588 - RNA, 16 nt, Human
cuacaguccucccauc

SEQ ID NO: 2736589 - RNA, 17 nt, Human
cuacaguccucccaucu

SEQ ID NO: 2736590 - RNA, 18 nt, Human
cuacaguccucccaucuc

SEQ ID NO: 2736591 - RNA, 18 nt, Human
cuaagugaggaugaaaaa

SEQ ID NO: 2736592 - RNA, 20 nt, Human
cuaagugauccucccaccuc

SEQ ID NO: 2736593 - RNA, 22 nt, Human
cuaagugauccucccaccucag

SEQ ID NO: 2736594 - RNA, 13 nt, Human
cuaaacuuuucug

SEQ ID NO: 2736595 - RNA, 16 nt, Human
cuaacuucaccauauu

SEQ ID NO: 2736596 - RNA, 16 nt, Human
cuaacuuuccuucauu

SEQ ID NO: 2736597 - RNA, 15 nt, Human
cuaacuucaccauau

SEQ ID NO: 2736598 - RNA, 12 nt, Human
cuagcagcaggg

SEQ ID NO: 2736599 - RNA, 22 nt, Human
cuagcagcagggagggcuucug

SEQ ID NO: 2736600 - RNA, 17 nt, Human
cuagcauggcugccaau

SEQ ID NO: 2736601 - RNA, 23 nt, Human
cuagcagcagggagggcuucugc

SEQ ID NO: 2736602 - RNA, 19 nt, Human
cuagaaauuccccacccug

SEQ ID NO: 2736603 - RNA, 11 nt, Human
cuaccugaggg

SEQ ID NO: 2736604 - RNA, 14 nt, Human
cuaccugaggggcc

SEQ ID NO: 2736605 - RNA, 23 nt, Human
cuaguugaucagcuuauugucua

SEQ ID NO: 2736606 - RNA, 22 nt, Human
cuaguuccaccaucaagccacc

SEQ ID NO: 2736607 - RNA, 14 nt, Human
cuaguuccaccauc

SEQ ID NO: 2736608 - RNA, 18 nt, Human
cuaguuccaccaucaagc

SEQ ID NO: 2736609 - RNA, 20 nt, Human
cuaguuccaccaucaagcca

SEQ ID NO: 2736610 - RNA, 21 nt, Human
cuagggaaaaaccagcgugug

SEQ ID NO: 2736611 - RNA, 19 nt, Human
cuagggaaaaaccagcgug

SEQ ID NO: 2736612 - RNA, 12 nt, Human
cucccaccucag

SEQ ID NO: 2736613 - RNA, 14 nt, Human
cucccugcaauaaa

SEQ ID NO: 2736614 - RNA, 16 nt, Human
cucccugcaauaaaau

SEQ ID NO: 2736615 - RNA, 19 nt, Human
cuccgcuuucuacccagcg

SEQ ID NO: 2736616 - RNA, 11 nt, Human
cuccaggugca

SEQ ID NO: 2736617 - RNA, 22 nt, Human
cuccacuuucuagccagaggag

SEQ ID NO: 2736618 - RNA, 20 nt, Human
cuccacuuucuagccagagg

SEQ ID NO: 2736619 - RNA, 16 nt, Human
cuccaagaccuucucc

SEQ ID NO: 2736620 - RNA, 17 nt, Human
cuccaagaccuucuccu

SEQ ID NO: 2736621 - RNA, 18 nt, Human
cuccaagaccuucuccuu

SEQ ID NO: 2736622 - RNA, 15 nt, Human
cuccagaauuuccca

SEQ ID NO: 2736623 - RNA, 18 nt, Human
cuccagaauuucccaaag

SEQ ID NO: 2736624 - RNA, 19 nt, Human
cuccagacacauguccaag

SEQ ID NO: 2736625 - RNA, 17 nt, Human
cuccagacacaugucca

SEQ ID NO: 2736626 - RNA, 13 nt, Human
cucagugccacua

SEQ ID NO: 2736627 - RNA, 18 nt, Human
cucagucuggcccuuccu

SEQ ID NO: 2736628 - RNA, 17 nt, Human
cucagucuggcccuucc

SEQ ID NO: 2736629 - RNA, 19 nt, Human
cucauguucuuaauucuua

SEQ ID NO: 2736630 - RNA, 18 nt, Human
cucauguucuuaauucuu

SEQ ID NO: 2736631 - RNA, 14 nt, Human
cucauguucuuaau

SEQ ID NO: 2736632 - RNA, 12 nt, Human
cucauguucuua

SEQ ID NO: 2736633 - RNA, 13 nt, Human
cucaggccagcug

SEQ ID NO: 2736634 - RNA, 14 nt, Human
cucaggccagcugc

SEQ ID NO: 2736635 - RNA, 20 nt, Human
cucaggccagcugcuugggc

SEQ ID NO: 2736636 - RNA, 21 nt, Human
cucaggccagcugcuugggcu

SEQ ID NO: 2736637 - RNA, 22 nt, Human
cucaggccagcugcuugggcuu

SEQ ID NO: 2736638 - RNA, 23 nt, Human
cucagccucccgaauagcuggga

SEQ ID NO: 2736639 - RNA, 22 nt, Human
cucagccucccaaagugcuggg

SEQ ID NO: 2736640 - RNA, 13 nt, Human
cucagccucccga

SEQ ID NO: 2736641 - RNA, 21 nt, Human
cucagccucccaaagugcugg

SEQ ID NO: 2736642 - RNA, 14 nt, Human
cucagccucccaaa

SEQ ID NO: 2736643 - RNA, 16 nt, Human
cucagccucccaaagu

SEQ ID NO: 2736644 - RNA, 13 nt, Human
cucagccucccaa

SEQ ID NO: 2736645 - RNA, 13 nt, Human
cucaggccugggg

SEQ ID NO: 2736646 - RNA, 14 nt, Human
cucaggccuggggg

SEQ ID NO: 2736647 - RNA, 20 nt, Human
cucaggccugggggcugggc

SEQ ID NO: 2736648 - RNA, 21 nt, Human
cucaggccugggggcugggca

SEQ ID NO: 2736649 - RNA, 15 nt, Human
cucugaaggacauug

SEQ ID NO: 2736650 - RNA, 21 nt, Human
cucuccgaccagacaccuuga

SEQ ID NO: 2736651 - RNA, 12 nt, Human
cucucacuccuu

SEQ ID NO: 2736652 - RNA, 14 nt, Human
cucucacuccuuga

SEQ ID NO: 2736653 - RNA, 19 nt, Human
cucucagauuguaccauug

SEQ ID NO: 2736654 - RNA, 21 nt, Human
cucucacuuguuuuauuuaac

SEQ ID NO: 2736655 - RNA, 15 nt, Human
cucucacuccuugaa

SEQ ID NO: 2736656 - RNA, 15 nt, Human
cucuuagaugcaguu

SEQ ID NO: 2736657 - RNA, 17 nt, Human
cucuguacagagcccac

SEQ ID NO: 2736658 - RNA, 21 nt, Human
cucuguacagagcccacgccc

SEQ ID NO: 2736659 - RNA, 15 nt, Human
cucugguuaucuaau

SEQ ID NO: 2736660 - RNA, 19 nt, Human
cucugguccauagagagca

SEQ ID NO: 2736661 - RNA, 16 nt, Human
cucugguccauagaga

SEQ ID NO: 2736662 - RNA, 18 nt, Human
cucugguccauagagagc

SEQ ID NO: 2736663 - RNA, 17 nt, Human
cucugcugacagacaca

SEQ ID NO: 2736664 - RNA, 18 nt, Human
cucugcugacagacacag

SEQ ID NO: 2736665 - RNA, 19 nt, Human
cucugcugacagacacagg

SEQ ID NO: 2736666 - RNA, 15 nt, Human
cucugguccauagag

SEQ ID NO: 2736667 - RNA, 23 nt, Human
cucugcagcaauaaagcagcguu

SEQ ID NO: 2736668 - RNA, 19 nt, Human
cucugcagcaauaaagcag

SEQ ID NO: 2736669 - RNA, 18 nt, Human
cucugcagcaauaaagca

SEQ ID NO: 2736670 - RNA, 13 nt, Human
cucugcagcaaua

SEQ ID NO: 2736671 - RNA, 20 nt, Human
cucuuagaugcaguucugaa

SEQ ID NO: 2736672 - RNA, 16 nt, Human
cugaaaauguaugugu

SEQ ID NO: 2736673 - RNA, 19 nt, Human
cugaaggacauugcggaca

SEQ ID NO: 2736674 - RNA, 20 nt, Human
cugaaggacauugcggacag

SEQ ID NO: 2736675 - RNA, 21 nt, Human
cugaaggacauugcggacagc

SEQ ID NO: 2736676 - RNA, 13 nt, Human
cugaaggccccgc

SEQ ID NO: 2736677 - RNA, 14 nt, Human
cugaaggccccgcc

SEQ ID NO: 2736678 - RNA, 17 nt, Human
cugaaggccccgcccag

SEQ ID NO: 2736679 - RNA, 15 nt, Human
cugacagacacaggc

SEQ ID NO: 2736680 - RNA, 12 nt, Human
cugacagacaca

SEQ ID NO: 2736681 - RNA, 14 nt, Human
cugacagacacagg

SEQ ID NO: 2736682 - RNA, 23 nt, Human
cugacccugcuucaaauauuucc

SEQ ID NO: 2736683 - RNA, 18 nt, Human
cugacccaugcugcccug

SEQ ID NO: 2736684 - RNA, 17 nt, Human
cugacccaugcugcccu

SEQ ID NO: 2736685 - RNA, 19 nt, Human
cugacccaugcugcccugu

SEQ ID NO: 2736686 - RNA, 20 nt, Human
cugacccaugcugcccugug

SEQ ID NO: 2736687 - RNA, 12 nt, Human
aacuccuggccu

SEQ ID NO: 2736688 - RNA, 16 nt, Human
aacucuccucugcugc

SEQ ID NO: 2736689 - RNA, 15 nt, Human
aacucuccuccagag

SEQ ID NO: 2736690 - RNA, 18 nt, Human
aacucuccuccagaguca

SEQ ID NO: 2736691 - RNA, 22 nt, Human
gugaaccaccacacccagccca

SEQ ID NO: 2736692 - RNA, 23 nt, Human
gugaaccaccacacccagcccac

SEQ ID NO: 2736693 - RNA, 21 nt, Human
aacuagaguuuagcuggaaaa

SEQ ID NO: 2736694 - RNA, 23 nt, Human
aacuaucucauuuccaagcaagu

SEQ ID NO: 2736695 - RNA, 12 nt, Human
aaccugugucuc

SEQ ID NO: 2736696 - RNA, 16 nt, Human
gucuuucacauuuaaa

SEQ ID NO: 2736697 - RNA, 18 nt, Human
gucuuuggacccugaggc

SEQ ID NO: 2736698 - RNA, 14 nt, Human
gucuggcccuuccu

SEQ ID NO: 2736699 - RNA, 16 nt, Human
aaccucuuugucuaca

SEQ ID NO: 2736700 - RNA, 12 nt, Human
aaccucuaaauu

SEQ ID NO: 2736701 - RNA, 10 nt, Human
aacccagcuc

SEQ ID NO: 2736702 - RNA, 18 nt, Human
aacccaaguccaagcaua

SEQ ID NO: 2736703 - RNA, 12 nt, Human
aaccaucauuga

SEQ ID NO: 2736704 - RNA, 21 nt, Human
aaccaccacacccagcccacu

SEQ ID NO: 2736705 - RNA, 17 nt, Human
aaccaucauugaaaucu

SEQ ID NO: 2736706 - RNA, 18 nt, Human
aaccaucauugaaaucuu

SEQ ID NO: 2736707 - RNA, 15 nt, Human
aaccaagucaaguga

SEQ ID NO: 2736708 - RNA, 19 nt, Human
aaccaccacacccagccca

SEQ ID NO: 2736709 - RNA, 21 nt, Human
aacuucagcgguuuauauaag

SEQ ID NO: 2736710 - RNA, 18 nt, Human
aacuuccagauccuggaa

SEQ ID NO: 2736711 - RNA, 18 nt, Human
aacuucccagugaauucu

SEQ ID NO: 2736712 - RNA, 13 nt, Human
aacuuccaauuua

SEQ ID NO: 2736713 - RNA, 17 nt, Human
gugaugggaaagcauug

SEQ ID NO: 2736714 - RNA, 22 nt, Human
gugaugcgcaugucacggaggg

SEQ ID NO: 2736715 - RNA, 14 nt, Human
gugauggggcccug

SEQ ID NO: 2736716 - RNA, 16 nt, Human
gugauggggcccugcc

SEQ ID NO: 2736717 - RNA, 17 nt, Human
gugauggggcccugccu

SEQ ID NO: 2736718 - RNA, 18 nt, Human
gugauggggcccugccuc

SEQ ID NO: 2736719 - RNA, 16 nt, Human
gugaugagaggaaauc

SEQ ID NO: 2736720 - RNA, 14 nt, Human
gugaugagaggaaa

SEQ ID NO: 2736721 - RNA, 22 nt, Human
gugcaugcugucccuuacguga

SEQ ID NO: 2736722 - RNA, 21 nt, Human
gugcacacaccagagcccacc

SEQ ID NO: 2736723 - RNA, 19 nt, Human
gugauggggcccugccucc

SEQ ID NO: 2736724 - RNA, 22 nt, Human
gugcaaugaccuuucaauagga

SEQ ID NO: 2736725 - RNA, 23 nt, Human
gugcauuaucuagauacuguauc

SEQ ID NO: 2736726 - RNA, 19 nt, Human
gugcauguguguucaugca

SEQ ID NO: 2736727 - RNA, 19 nt, Human
gugcauuaucuagauacug

SEQ ID NO: 2736728 - RNA, 15 nt, Human
gugcauuaucuagau

SEQ ID NO: 2736729 - RNA, 17 nt, Human
aacugggacaggggaga

SEQ ID NO: 2736730 - RNA, 16 nt, Human
aacuggguacuugugg

SEQ ID NO: 2736731 - RNA, 21 nt, Human
aacuggguacuuguggacaca

SEQ ID NO: 2736732 - RNA, 22 nt, Human
aacugggggagggugaagugaa

SEQ ID NO: 2736733 - RNA, 21 nt, Human
aacugggggagggugaaguga

SEQ ID NO: 2736734 - RNA, 19 nt, Human
aacuggacugguucaaaug

SEQ ID NO: 2736735 - RNA, 15 nt, Human
aacuggauuaaacuu

SEQ ID NO: 2736736 - RNA, 16 nt, Human
aacuggauuaaacuua

SEQ ID NO: 2736737 - RNA, 11 nt, Human
aacuggcugca

SEQ ID NO: 2736738 - RNA, 19 nt, Human
aacugcacugucaagauga

SEQ ID NO: 2736739 - RNA, 15 nt, Human
aacugcugacuguuu

SEQ ID NO: 2736740 - RNA, 23 nt, Human
aacugcugacuguuuucucuuga

SEQ ID NO: 2736741 - RNA, 20 nt, Human
aacugcugacuguuuucucu

SEQ ID NO: 2736742 - RNA, 21 nt, Human
aacugcugacuguuuucucuu

SEQ ID NO: 2736743 - RNA, 12 nt, Human
aacugaaaucau

SEQ ID NO: 2736744 - RNA, 21 nt, Human
aacucuucaaucucuugcacu

SEQ ID NO: 2736745 - RNA, 15 nt, Human
gugagucgaggacag

SEQ ID NO: 2736746 - RNA, 22 nt, Human
gugagucgaggacagggaggug

SEQ ID NO: 2736747 - RNA, 17 nt, Human
gugaacuugggccacug

SEQ ID NO: 2736748 - RNA, 19 nt, Human
gugaacuugggccacugug

SEQ ID NO: 2736749 - RNA, 15 nt, Human
gugaacuugaaauuu

SEQ ID NO: 2736750 - RNA, 14 nt, Human
gugaacuugaaauu

SEQ ID NO: 2736751 - RNA, 17 nt, Human
gugaggccagagacaca

SEQ ID NO: 2736752 - RNA, 22 nt, Human
gugaggccagagacacaagccu

SEQ ID NO: 2736753 - RNA, 20 nt, Human
aaauuuuuucucuaggaaau

SEQ ID NO: 2736754 - RNA, 23 nt, Human
aaauuuugauguuuuaaggaugc

SEQ ID NO: 2736755 - RNA, 18 nt, Human
aaauuuugauguuuuaag

SEQ ID NO: 2736756 - RNA, 20 nt, Human
aacaagaccacguuucuaaa

SEQ ID NO: 2736757 - RNA, 19 nt, Human
aacaagaugguucuagcau

SEQ ID NO: 2736758 - RNA, 15 nt, Human
aacaaggcaaggcug

SEQ ID NO: 2736759 - RNA, 16 nt, Human
aacaaggcaaggcugu

SEQ ID NO: 2736760 - RNA, 12 nt, Human
aacaauaaaaga

SEQ ID NO: 2736761 - RNA, 14 nt, Human
aacaaugcuguauu

SEQ ID NO: 2736762 - RNA, 15 nt, Human
aacaaugcuguauuu

SEQ ID NO: 2736763 - RNA, 18 nt, Human
aacaaggcaaggcuguca

SEQ ID NO: 2736764 - RNA, 21 nt, Human
aacaaggcaaggcugucaauu

SEQ ID NO: 2736765 - RNA, 15 nt, Human
aacacaacuauauug

SEQ ID NO: 2736766 - RNA, 16 nt, Human
aacacaacuauauugu

SEQ ID NO: 2736767 - RNA, 17 nt, Human
aacaaugcuguauuuua

SEQ ID NO: 2736768 - RNA, 22 nt, Human
aacaaugcuguauuuuaaaaga

SEQ ID NO: 2736769 - RNA, 15 nt, Human
gucagugugacugau

SEQ ID NO: 2736770 - RNA, 18 nt, Human
aaauuuguuauaaugaau

SEQ ID NO: 2736771 - RNA, 22 nt, Human
gucacacaguauuacuucugcu

SEQ ID NO: 2736772 - RNA, 21 nt, Human
gucacacaguauuacuucugc

SEQ ID NO: 2736773 - RNA, 23 nt, Human
gucagaaguuucugccgcagccc

SEQ ID NO: 2736774 - RNA, 15 nt, Human
aacacagcaagggug

SEQ ID NO: 2736775 - RNA, 21 nt, Human
gucauuuuuuuuaagaaaaag

SEQ ID NO: 2736776 - RNA, 19 nt, Human
gucauuuuuuuuaagaaaa

SEQ ID NO: 2736777 - RNA, 13 nt, Human
guccaagaagccc

SEQ ID NO: 2736778 - RNA, 15 nt, Human
guccaagaagcccag

SEQ ID NO: 2736779 - RNA, 16 nt, Human
guccaagaagcccagg

SEQ ID NO: 2736780 - RNA, 20 nt, Human
guccaagaagcccaggaaag

SEQ ID NO: 2736781 - RNA, 17 nt, Human
guccaagaagcccagga

SEQ ID NO: 2736782 - RNA, 18 nt, Human
guccaagaagcccaggaa

SEQ ID NO: 2736783 - RNA, 13 nt, Human
guccauagagagc

SEQ ID NO: 2736784 - RNA, 14 nt, Human
guccauagagagca

SEQ ID NO: 2736785 - RNA, 21 nt, Human
gucccaccccacacacgccag

SEQ ID NO: 2736786 - RNA, 14 nt, Human
gucccaccuuggcu

SEQ ID NO: 2736787 - RNA, 15 nt, Human
gucccaccuuggcug

SEQ ID NO: 2736788 - RNA, 16 nt, Human
gucccaccuuggcugc

SEQ ID NO: 2736789 - RNA, 13 nt, Human
aacagauaaucag

SEQ ID NO: 2736790 - RNA, 11 nt, Human
aacagaaaugu

SEQ ID NO: 2736791 - RNA, 14 nt, Human
gucccccuuccaug

SEQ ID NO: 2736792 - RNA, 18 nt, Human
gucccccugacaacacuc

SEQ ID NO: 2736793 - RNA, 16 nt, Human
gucccccuuccaugga

SEQ ID NO: 2736794 - RNA, 18 nt, Human
gucccccuuccauggacu

SEQ ID NO: 2736795 - RNA, 16 nt, Human
guccuacccacccucc

SEQ ID NO: 2736796 - RNA, 15 nt, Human
guccuacccacccuc

SEQ ID NO: 2736797 - RNA, 12 nt, Human
guccuacucugu

SEQ ID NO: 2736798 - RNA, 14 nt, Human
aacagaaauguaca

SEQ ID NO: 2736799 - RNA, 13 nt, Human
aacagaaauguac

SEQ ID NO: 2736800 - RNA, 12 nt, Human
aacagaaaugua

SEQ ID NO: 2736801 - RNA, 18 nt, Human
guauguacuucaugcugu

SEQ ID NO: 2736802 - RNA, 15 nt, Human
aaauguauuacagug

SEQ ID NO: 2736803 - RNA, 24 nt, Human
aaaugucuaguuguaacaccauga

SEQ ID NO: 2736804 - RNA, 19 nt, Human
aaaugucuaguuguaacac

SEQ ID NO: 2736805 - RNA, 16 nt, Human
gucaaauugugugaaa

SEQ ID NO: 2736806 - RNA, 22 nt, Human
guauuuuguuuuugucuuaaaa

SEQ ID NO: 2736807 - RNA, 16 nt, Human
guauuuuugacagaau

SEQ ID NO: 2736808 - RNA, 12 nt, Human
guauuuuugaca

SEQ ID NO: 2736809 - RNA, 15 nt, Human
guauuuuugacagaa

SEQ ID NO: 2736810 - RNA, 14 nt, Human
aaauuguaauuaua

SEQ ID NO: 2736811 - RNA, 15 nt, Human
aaauuguaauuauau

SEQ ID NO: 2736812 - RNA, 14 nt, Human
aaauggguuuuacu

SEQ ID NO: 2736813 - RNA, 15 nt, Human
aaauggguuuuacug

SEQ ID NO: 2736814 - RNA, 22 nt, Human
guaacaggaaaauuuuaaaaau

SEQ ID NO: 2736815 - RNA, 12 nt, Human
guaacaggcaga

SEQ ID NO: 2736816 - RNA, 19 nt, Human
aaaugggggugcauuugag

SEQ ID NO: 2736817 - RNA, 20 nt, Human
guaguguuggagaagaacug

SEQ ID NO: 2736818 - RNA, 17 nt, Human
guaguguuggagaagaa

SEQ ID NO: 2736819 - RNA, 16 nt, Human
aaauguaagggaaacu

SEQ ID NO: 2736820 - RNA, 16 nt, Human
guaucaggugcugcca

SEQ ID NO: 2736821 - RNA, 18 nt, Human
guaucaggugcugccauc

SEQ ID NO: 2736822 - RNA, 15 nt, Human
guauaaaauaauuuu

SEQ ID NO: 2736823 - RNA, 21 nt, Human
guauaaaauaauuuuuauauu

SEQ ID NO: 2736824 - RNA, 19 nt, Human
guaucccaugagccucagc

SEQ ID NO: 2736825 - RNA, 22 nt, Human
guaucaggugcugccauccagg

SEQ ID NO: 2736826 - RNA, 15 nt, Human
guaugguggcugggu

SEQ ID NO: 2736827 - RNA, 16 nt, Human
guaugguggcuggguu

SEQ ID NO: 2736828 - RNA, 14 nt, Human
guaugguggcuggg

SEQ ID NO: 2736829 - RNA, 13 nt, Human
aagguacuucaaa

SEQ ID NO: 2736830 - RNA, 16 nt, Human
aagggugaaaauuauu

SEQ ID NO: 2736831 - RNA, 19 nt, Human
aagggugaugggaaagcau

SEQ ID NO: 2736832 - RNA, 15 nt, Human
aagggugaaaauuau

SEQ ID NO: 2736833 - RNA, 14 nt, Human
aagguacuucaaau

SEQ ID NO: 2736834 - RNA, 20 nt, Human
aagguagaaauaucugaaaa

SEQ ID NO: 2736835 - RNA, 22 nt, Human
aaggggcccaaauucuuucagu

SEQ ID NO: 2736836 - RNA, 17 nt, Human
aaggggcaguggugguu

SEQ ID NO: 2736837 - RNA, 12 nt, Human
aaggucauuuuu

SEQ ID NO: 2736838 - RNA, 18 nt, Human
aagguauuuaauagguuu

SEQ ID NO: 2736839 - RNA, 22 nt, Human
guuucuaugacacaugcaaggu

SEQ ID NO: 2736840 - RNA, 19 nt, Human
guuucuauguguagggcgg

SEQ ID NO: 2736841 - RNA, 18 nt, Human
guuucugaaagggacgcu

SEQ ID NO: 2736842 - RNA, 22 nt, Human
aaggcucgagcaugccuggaug

SEQ ID NO: 2736843 - RNA, 19 nt, Human
aaggcucgagcaugccugg

SEQ ID NO: 2736844 - RNA, 20 nt, Human
aaggcucgagcaugccugga

SEQ ID NO: 2736845 - RNA, 19 nt, Human
aaggcuccaggagcagcca

SEQ ID NO: 2736846 - RNA, 22 nt, Human
aaggcuccaggagcagccacau

SEQ ID NO: 2736847 - RNA, 16 nt, Human
aaggcucgagcaugcc

SEQ ID NO: 2736848 - RNA, 18 nt, Human
aaggcucgagcaugccug

SEQ ID NO: 2736849 - RNA, 13 nt, Human
guuucaaacuuua

SEQ ID NO: 2736850 - RNA, 16 nt, Human
guuucaaacuuuacua

SEQ ID NO: 2736851 - RNA, 14 nt, Human
guuucaaacuuuac

SEQ ID NO: 2736852 - RNA, 16 nt, Human
aaggcuccaggagcag

SEQ ID NO: 2736853 - RNA, 18 nt, Human
aaggcuccaggagcagcc

SEQ ID NO: 2736854 - RNA, 15 nt, Human
aaggcuccaggagca

SEQ ID NO: 2736855 - RNA, 12 nt, Human
guuucaaacuuu

SEQ ID NO: 2736856 - RNA, 19 nt, Human
guuuaauauuaaagccaug

SEQ ID NO: 2736857 - RNA, 20 nt, Human
guuuaauauuaaagccaugu

SEQ ID NO: 2736858 - RNA, 15 nt, Human
guugggcugguguca

SEQ ID NO: 2736859 - RNA, 13 nt, Human
guugggcuggugu

SEQ ID NO: 2736860 - RNA, 15 nt, Human
guugggccaggagcc

SEQ ID NO: 2736861 - RNA, 17 nt, Human
guugggccaggagccuc

SEQ ID NO: 2736862 - RNA, 13 nt, Human
guuuauugucaaa

SEQ ID NO: 2736863 - RNA, 15 nt, Human
aaggaaagagggagg

SEQ ID NO: 2736864 - RNA, 16 nt, Human
aaggaagcacaugccu

SEQ ID NO: 2736865 - RNA, 17 nt, Human
aaggaauaccugucccc

SEQ ID NO: 2736866 - RNA, 14 nt, Human
aaggaagacuucau

SEQ ID NO: 2736867 - RNA, 15 nt, Human
aaggaagacuucauc

SEQ ID NO: 2736868 - RNA, 13 nt, Human
aaggaagcacaug

SEQ ID NO: 2736869 - RNA, 18 nt, Human
aaggaggaagagaaaaaa

SEQ ID NO: 2736870 - RNA, 20 nt, Human
aaggaggggauagagagaga

SEQ ID NO: 2736871 - RNA, 18 nt, Human
aaggaauaccuguccccc

SEQ ID NO: 2736872 - RNA, 11 nt, Human
aaggagagcua

SEQ ID NO: 2736873 - RNA, 14 nt, Human
aaggagauuuacaa

SEQ ID NO: 2736874 - RNA, 21 nt, Human
aaggauacaaaagcaugugag

SEQ ID NO: 2736875 - RNA, 13 nt, Human
aaggauacaaaag

SEQ ID NO: 2736876 - RNA, 16 nt, Human
aaggccaaaggaagca

SEQ ID NO: 2736877 - RNA, 22 nt, Human
guugccuaaauccauuuggaaa

SEQ ID NO: 2736878 - RNA, 17 nt, Human
guugccuaaauccauuu

SEQ ID NO: 2736879 - RNA, 23 nt, Human
guugcccaggcaggucuugaacu

SEQ ID NO: 2736880 - RNA, 12 nt, Human
guugcccaggcu

SEQ ID NO: 2736881 - RNA, 13 nt, Human
guugcccaggcug

SEQ ID NO: 2736882 - RNA, 22 nt, Human
aagucuuauauauuguagauaa

SEQ ID NO: 2736883 - RNA, 16 nt, Human
aagucuuucacauuua

SEQ ID NO: 2736884 - RNA, 21 nt, Human
aagugaaaaaggaggaagaga

SEQ ID NO: 2736885 - RNA, 19 nt, Human
aagugaagacaaugacuua

SEQ ID NO: 2736886 - RNA, 17 nt, Human
aagugaagacaaugacu

SEQ ID NO: 2736887 - RNA, 15 nt, Human
aagugagagcugggu

SEQ ID NO: 2736888 - RNA, 14 nt, Human
aagugagagcuggg

SEQ ID NO: 2736889 - RNA, 12 nt, Human
aagugagagagg

SEQ ID NO: 2736890 - RNA, 13 nt, Human
aaguauuagaaua

SEQ ID NO: 2736891 - RNA, 17 nt, Human
aaguauuaagcauauau

SEQ ID NO: 2736892 - RNA, 16 nt, Human
aaguauuaagcauaua

SEQ ID NO: 2736893 - RNA, 18 nt, Human
aaguauuaagcauauauu

SEQ ID NO: 2736894 - RNA, 15 nt, Human
aaguauuaagcauau

SEQ ID NO: 2736895 - RNA, 14 nt, Human
aaguauuaagcaua

SEQ ID NO: 2736896 - RNA, 23 nt, Human
aaguacacuguuucaaacuuuac

SEQ ID NO: 2736897 - RNA, 20 nt, Human
aaguacacuguuucaaacuu

SEQ ID NO: 2736898 - RNA, 19 nt, Human
aaguacacuguuucaaacu

SEQ ID NO: 2736899 - RNA, 14 nt, Human
aaguaaugauaacu

SEQ ID NO: 2736900 - RNA, 19 nt, Human
aaguaaugauaacuggaaa

SEQ ID NO: 2736901 - RNA, 18 nt, Human
aaguacacuguuucaaac

SEQ ID NO: 2736902 - RNA, 13 nt, Human
aaguacacuguuu

SEQ ID NO: 2736903 - RNA, 14 nt, Human
guuucugccgcagc

SEQ ID NO: 2736904 - RNA, 15 nt, Human
guuucugccgcagcc

SEQ ID NO: 2736905 - RNA, 16 nt, Human
guuuugccauguuggc

SEQ ID NO: 2736906 - RNA, 20 nt, Human
guuuugccauguuggccagg

SEQ ID NO: 2736907 - RNA, 21 nt, Human
guuuugccauguuggccaggc

SEQ ID NO: 2736908 - RNA, 22 nt, Human
guuuugccauguuggccaggcu

SEQ ID NO: 2736909 - RNA, 12 nt, Human
uaaaagaaugau

SEQ ID NO: 2736910 - RNA, 23 nt, Human
uaaaagaauauuuuaacuuccuu

SEQ ID NO: 2736911 - RNA, 16 nt, Human
uaaaagaauauuuuaa

SEQ ID NO: 2736912 - RNA, 22 nt, Human
uaaaacuugauguguuaucucu

SEQ ID NO: 2736913 - RNA, 20 nt, Human
uaaaacuugauguguuaucu

SEQ ID NO: 2736914 - RNA, 21 nt, Human
uaaaaaucucaaauuucuaaa

SEQ ID NO: 2736915 - RNA, 20 nt, Human
uaaaaaucucaaauuucuaa

SEQ ID NO: 2736916 - RNA, 19 nt, Human
uaaaaaucucaaauuucua

SEQ ID NO: 2736917 - RNA, 15 nt, Human
uaaaaaucucaaauu

SEQ ID NO: 2736918 - RNA, 17 nt, Human
uaaaaaucucaaauuuc

SEQ ID NO: 2736919 - RNA, 16 nt, Human
uaaaaaucucaaauuu

SEQ ID NO: 2736920 - RNA, 15 nt, Human
uaaaaaguggaaaaa

SEQ ID NO: 2736921 - RNA, 15 nt, Human
guuuuucuucucccu

SEQ ID NO: 2736922 - RNA, 20 nt, Human
uaaaagacagugaaagaaaa

SEQ ID NO: 2736923 - RNA, 20 nt, Human
uaaaauaauuuuuauauuug

SEQ ID NO: 2736924 - RNA, 22 nt, Human
uaaaauaccagccaguaaaugg

SEQ ID NO: 2736925 - RNA, 21 nt, Human
uaaaauaccagccaguaaaug

SEQ ID NO: 2736926 - RNA, 16 nt, Human
aagugaggaugaaaaa

SEQ ID NO: 2736927 - RNA, 19 nt, Human
aagugauucuccugccuca

SEQ ID NO: 2736928 - RNA, 15 nt, Human
aagugauucuccugc

SEQ ID NO: 2736929 - RNA, 16 nt, Human
aagugauucuccugcc

SEQ ID NO: 2736930 - RNA, 17 nt, Human
aagugauucuccugccu

SEQ ID NO: 2736931 - RNA, 18 nt, Human
aagugauucuccugccuc

SEQ ID NO: 2736932 - RNA, 16 nt, Human
gugucagcauagaagu

SEQ ID NO: 2736933 - RNA, 20 nt, Human
gugucaagagggucugagga

SEQ ID NO: 2736934 - RNA, 23 nt, Human
guguauuuuuuuacuaauagaca

SEQ ID NO: 2736935 - RNA, 17 nt, Human
guguauuuuuuuacuaa

SEQ ID NO: 2736936 - RNA, 22 nt, Human
gugugacaaggauugcuacugu

SEQ ID NO: 2736937 - RNA, 20 nt, Human
gugucagguggggcagcuug

SEQ ID NO: 2736938 - RNA, 16 nt, Human
gugugguagagugugc

SEQ ID NO: 2736939 - RNA, 14 nt, Human
aagaugaaaauauu

SEQ ID NO: 2736940 - RNA, 13 nt, Human
aagaugaaaauau

SEQ ID NO: 2736941 - RNA, 13 nt, Human
aagaguaggaaga

SEQ ID NO: 2736942 - RNA, 14 nt, Human
aagaguaggaagac

SEQ ID NO: 2736943 - RNA, 19 nt, Human
aagaugcuucucacugcca

SEQ ID NO: 2736944 - RNA, 17 nt, Human
aagaugcuucucacugc

SEQ ID NO: 2736945 - RNA, 16 nt, Human
aagaugcuucucacug

SEQ ID NO: 2736946 - RNA, 17 nt, Human
guggggucacucuggca

SEQ ID NO: 2736947 - RNA, 20 nt, Human
guggggucacucuggcagcu

SEQ ID NO: 2736948 - RNA, 21 nt, Human
guggggucacucuggcagcuc

SEQ ID NO: 2736949 - RNA, 22 nt, Human
guggggucacucuggcagcuca

SEQ ID NO: 2736950 - RNA, 12 nt, Human
aagaguaggaag

SEQ ID NO: 2736951 - RNA, 23 nt, Human
aagagggagggagggcuccagac

SEQ ID NO: 2736952 - RNA, 16 nt, Human
aagacugcacaucaaa

SEQ ID NO: 2736953 - RNA, 17 nt, Human
aagacugcauuauauuu

SEQ ID NO: 2736954 - RNA, 22 nt, Human
aagacugaguacguugugcauu

SEQ ID NO: 2736955 - RNA, 23 nt, Human
aagacugaguacguugugcauuu

SEQ ID NO: 2736956 - RNA, 16 nt, Human
aagacuuuggaaagac

SEQ ID NO: 2736957 - RNA, 13 nt, Human
aagacgcugugcu

SEQ ID NO: 2736958 - RNA, 21 nt, Human
aagaccuuuggagcaaagcug

SEQ ID NO: 2736959 - RNA, 23 nt, Human
aagaccuugcuuaugauugcaga

SEQ ID NO: 2736960 - RNA, 15 nt, Human
aagacgcugugcugc

SEQ ID NO: 2736961 - RNA, 17 nt, Human
aagacgcugugcugccc

SEQ ID NO: 2736962 - RNA, 18 nt, Human
aagacgcugugcugcccu

SEQ ID NO: 2736963 - RNA, 19 nt, Human
aagacgcugugcugcccug

SEQ ID NO: 2736964 - RNA, 15 nt, Human
aagaccuucuccuuc

SEQ ID NO: 2736965 - RNA, 18 nt, Human
aagaccuucuccuucacc

SEQ ID NO: 2736966 - RNA, 19 nt, Human
aagaccuucuccuucaccu

SEQ ID NO: 2736967 - RNA, 21 nt, Human
guggccucccaacucacccca

SEQ ID NO: 2736968 - RNA, 22 nt, Human
guggccucccaacucaccccag

SEQ ID NO: 2736969 - RNA, 15 nt, Human
gugggagcugccugu

SEQ ID NO: 2736970 - RNA, 18 nt, Human
gugggagcugccuguuca

SEQ ID NO: 2736971 - RNA, 15 nt, Human
guggggucacucugg

SEQ ID NO: 2736972 - RNA, 13 nt, Human
gugggacacccug

SEQ ID NO: 2736973 - RNA, 14 nt, Human
gugggagcugccug

SEQ ID NO: 2736974 - RNA, 15 nt, Human
gugggacacccugug

SEQ ID NO: 2736975 - RNA, 20 nt, Human
guuauuauauuuacaaaugg

SEQ ID NO: 2736976 - RNA, 23 nt, Human
guuauuuuuauuuauuuaaauuu

SEQ ID NO: 2736977 - RNA, 18 nt, Human
guuauugauaaguucaua

SEQ ID NO: 2736978 - RNA, 18 nt, Human
guucaagcgauucuucug

SEQ ID NO: 2736979 - RNA, 20 nt, Human
guucaaagauauuuugcuuu

SEQ ID NO: 2736980 - RNA, 22 nt, Human
guucaaagauauuuugcuuugu

SEQ ID NO: 2736981 - RNA, 21 nt, Human
guucaaagauauuuugcuuug

SEQ ID NO: 2736982 - RNA, 18 nt, Human
guuaagagaaaugagcuu

SEQ ID NO: 2736983 - RNA, 11 nt, Human
guuaagagaaa

SEQ ID NO: 2736984 - RNA, 12 nt, Human
guuaagagaaau

SEQ ID NO: 2736985 - RNA, 19 nt, Human
guuaggcauugugggaagg

SEQ ID NO: 2736986 - RNA, 20 nt, Human
guuaggcauugugggaaggg

SEQ ID NO: 2736987 - RNA, 13 nt, Human
aagcuccagguag

SEQ ID NO: 2736988 - RNA, 14 nt, Human
aagcuccagguaga

SEQ ID NO: 2736989 - RNA, 17 nt, Human
aagcuccaagcucccag

SEQ ID NO: 2736990 - RNA, 18 nt, Human
aagcuccaagcucccagg

SEQ ID NO: 2736991 - RNA, 20 nt, Human
aagcucagggccuggcucag

SEQ ID NO: 2736992 - RNA, 18 nt, Human
aagcucagggccuggcuc

SEQ ID NO: 2736993 - RNA, 19 nt, Human
aagcucagggccuggcuca

SEQ ID NO: 2736994 - RNA, 20 nt, Human
aagcucacagaccuuugaac

SEQ ID NO: 2736995 - RNA, 12 nt, Human
aagcucagggcc

SEQ ID NO: 2736996 - RNA, 13 nt, Human
aagcucagggccu

SEQ ID NO: 2736997 - RNA, 16 nt, Human
aagcucagggccuggc

SEQ ID NO: 2736998 - RNA, 17 nt, Human
aagcucagggccuggcu

SEQ ID NO: 2736999 - RNA, 13 nt, Human
guucagcuccagc

SEQ ID NO: 2737000 - RNA, 22 nt, Human
aagcuagacgagcaggcuucuu

SEQ ID NO: 2737001 - RNA, 17 nt, Human
aagccugcaauuucaua

SEQ ID NO: 2737002 - RNA, 22 nt, Human
aagccugcaauuucauaugcug

SEQ ID NO: 2737003 - RNA, 12 nt, Human
aagcuaggccug

SEQ ID NO: 2737004 - RNA, 16 nt, Human
aagcauuuagauguau

SEQ ID NO: 2737005 - RNA, 16 nt, Human
aagcauuuacuuugug

SEQ ID NO: 2737006 - RNA, 13 nt, Human
aagcauuguaaau

SEQ ID NO: 2737007 - RNA, 20 nt, Human
aagcagugcaugcugucccu

SEQ ID NO: 2737008 - RNA, 14 nt, Human
aagcagugcaugcu

SEQ ID NO: 2737009 - RNA, 15 nt, Human
aagcagugcaugcug

SEQ ID NO: 2737010 - RNA, 12 nt, Human
aagcagugcaug

SEQ ID NO: 2737011 - RNA, 21 nt, Human
gugugugcgccuacaggagug

SEQ ID NO: 2737012 - RNA, 22 nt, Human
aagccaaagcuaggccuggcca

SEQ ID NO: 2737013 - RNA, 14 nt, Human
aagcccaggaaagg

SEQ ID NO: 2737014 - RNA, 17 nt, Human
aagcccaggaaaggcuc

SEQ ID NO: 2737015 - RNA, 19 nt, Human
aagcccaggaaaggcucca

SEQ ID NO: 2737016 - RNA, 22 nt, Human
aagcccaggaaaggcuccagga

SEQ ID NO: 2737017 - RNA, 19 nt, Human
aagcccugagcuuucugcu

SEQ ID NO: 2737018 - RNA, 20 nt, Human
aagccgcuggggccaguugg

SEQ ID NO: 2737019 - RNA, 16 nt, Human
uaaaugugcuuuuaaa

SEQ ID NO: 2737020 - RNA, 20 nt, Human
uaaauuaacuuuuauaaacu

SEQ ID NO: 2737021 - RNA, 19 nt, Human
uaaauuaacuuuuauaaac

SEQ ID NO: 2737022 - RNA, 18 nt, Human
uaaaugaaaaucgugaca

SEQ ID NO: 2737023 - RNA, 21 nt, Human
aaguguauuuuuuuacuaaua

SEQ ID NO: 2737024 - RNA, 18 nt, Human
aaguguauuuuuuuacua

SEQ ID NO: 2737025 - RNA, 21 nt, Human
aauacaccacuacauucuguu

SEQ ID NO: 2737026 - RNA, 13 nt, Human
aauacagaggcaa

SEQ ID NO: 2737027 - RNA, 17 nt, Human
uaacaaugaagauaaaa

SEQ ID NO: 2737028 - RNA, 21 nt, Human
uaaauuaacuuuuauaaacuu

SEQ ID NO: 2737029 - RNA, 23 nt, Human
aauacaucccuuaccugggaaag

SEQ ID NO: 2737030 - RNA, 23 nt, Human
aauaccacaggaaccacaagacu

SEQ ID NO: 2737031 - RNA, 18 nt, Human
aauaccaugccauuuaaa

SEQ ID NO: 2737032 - RNA, 19 nt, Human
aauaccagccaguaaaugg

SEQ ID NO: 2737033 - RNA, 17 nt, Human
aauaccagccaguaaau

SEQ ID NO: 2737034 - RNA, 19 nt, Human
aauaccugucccccugaca

SEQ ID NO: 2737035 - RNA, 15 nt, Human
aauaccugucccccu

SEQ ID NO: 2737036 - RNA, 18 nt, Human
aauaccugucccccugac

SEQ ID NO: 2737037 - RNA, 20 nt, Human
aauagagcaaaauugaugug

SEQ ID NO: 2737038 - RNA, 22 nt, Human
aauagagcaaaauugauguguu

SEQ ID NO: 2737039 - RNA, 19 nt, Human
aauagucaaauugugugaa

SEQ ID NO: 2737040 - RNA, 21 nt, Human
aauagcuagacuggugacuga

SEQ ID NO: 2737041 - RNA, 20 nt, Human
aauagcuagacuggugacug

SEQ ID NO: 2737042 - RNA, 14 nt, Human
aauagcuagacugg

SEQ ID NO: 2737043 - RNA, 14 nt, Human
aauauauuuaauga

SEQ ID NO: 2737044 - RNA, 21 nt, Human
aauaguucagguaacaggcag

SEQ ID NO: 2737045 - RNA, 15 nt, Human
uaacauguuaaacca

SEQ ID NO: 2737046 - RNA, 12 nt, Human
uaacauguuaaa

SEQ ID NO: 2737047 - RNA, 17 nt, Human
uaacauguaauuaagua

SEQ ID NO: 2737048 - RNA, 19 nt, Human
uaacauguaauuaaguacu

SEQ ID NO: 2737049 - RNA, 21 nt, Human
uaacuuccuuggacucauuuu

SEQ ID NO: 2737050 - RNA, 16 nt, Human
uaacuugucuuuggac

SEQ ID NO: 2737051 - RNA, 20 nt, Human
uaacuugucuuuggacccug

SEQ ID NO: 2737052 - RNA, 23 nt, Human
uaagacaaaaagcuacuuauugu

SEQ ID NO: 2737053 - RNA, 20 nt, Human
aauccucaguuuuugugaaa

SEQ ID NO: 2737054 - RNA, 21 nt, Human
aaucccauuauucaaaguugc

SEQ ID NO: 2737055 - RNA, 14 nt, Human
aaucagugugucua

SEQ ID NO: 2737056 - RNA, 17 nt, Human
aaucagugugucuaaau

SEQ ID NO: 2737057 - RNA, 18 nt, Human
aaucagugugucuaaauu

SEQ ID NO: 2737058 - RNA, 22 nt, Human
aaucagugugucuaaauuugaa

SEQ ID NO: 2737059 - RNA, 17 nt, Human
aaucccauuuaaaaaaa

SEQ ID NO: 2737060 - RNA, 16 nt, Human
aaucccauuauucaaa

SEQ ID NO: 2737061 - RNA, 14 nt, Human
aaucccauuauuca

SEQ ID NO: 2737062 - RNA, 20 nt, Human
uaaguaaugauaacuggaaa

SEQ ID NO: 2737063 - RNA, 16 nt, Human
uaaguaauucaagaaa

SEQ ID NO: 2737064 - RNA, 19 nt, Human
uaaguaaaaccacagcagu

SEQ ID NO: 2737065 - RNA, 18 nt, Human
uaaguaaaaccacagcag

SEQ ID NO: 2737066 - RNA, 17 nt, Human
uaaguaaaaccacagca

SEQ ID NO: 2737067 - RNA, 16 nt, Human
uaaguaaaaccacagc

SEQ ID NO: 2737068 - RNA, 15 nt, Human
uaaguaaaaccacag

SEQ ID NO: 2737069 - RNA, 13 nt, Human
uaaguaaaaccac

SEQ ID NO: 2737070 - RNA, 18 nt, Human
uaagguuaccuuuguucc

SEQ ID NO: 2737071 - RNA, 19 nt, Human
uaaggacuuguuagaucua

SEQ ID NO: 2737072 - RNA, 16 nt, Human
uaaggacuuguuagau

SEQ ID NO: 2737073 - RNA, 15 nt, Human
uaaggacuuguuaga

SEQ ID NO: 2737074 - RNA, 13 nt, Human
uaaggacuuguua

SEQ ID NO: 2737075 - RNA, 21 nt, Human
uaaguauucuuauuuaaugaa

SEQ ID NO: 2737076 - RNA, 14 nt, Human
uaagauucauauuu

SEQ ID NO: 2737077 - RNA, 21 nt, Human
uaagcuauucaguaauaacuc

SEQ ID NO: 2737078 - RNA, 13 nt, Human
uaagcauauauuu

SEQ ID NO: 2737079 - RNA, 14 nt, Human
uaagcuauucagua

SEQ ID NO: 2737080 - RNA, 22 nt, Human
uaagcagauggaaugcuguguu

SEQ ID NO: 2737081 - RNA, 22 nt, Human
uaaggacuucuuuaauuuugga

SEQ ID NO: 2737082 - RNA, 16 nt, Human
uaaggacuucuuuaau

SEQ ID NO: 2737083 - RNA, 15 nt, Human
uaaggacuucuuuaa

SEQ ID NO: 2737084 - RNA, 14 nt, Human
uaaggacuucuuua

SEQ ID NO: 2737085 - RNA, 17 nt, Human
uaaggaauaccuguccc

SEQ ID NO: 2737086 - RNA, 18 nt, Human
uaaggaauaccugucccc

SEQ ID NO: 2737087 - RNA, 13 nt, Human
uaaggaagacaau

SEQ ID NO: 2737088 - RNA, 9 nt, Human
uaaggaaua

SEQ ID NO: 2737089 - RNA, 19 nt, Human
uaaggaaaaguuuaauauu

SEQ ID NO: 2737090 - RNA, 17 nt, Human
uaaggaaaaguuuaaua

SEQ ID NO: 2737091 - RNA, 21 nt, Human
uaaggaaaaguuuaauauuaa

SEQ ID NO: 2737092 - RNA, 16 nt, Human
aaucagccuaguugau

SEQ ID NO: 2737093 - RNA, 11 nt, Human
aaucagccugc

SEQ ID NO: 2737094 - RNA, 19 nt, Human
aaucagccugcuccagcug

SEQ ID NO: 2737095 - RNA, 13 nt, Human
aaucagccugcuc

SEQ ID NO: 2737096 - RNA, 18 nt, Human
aaucagccugcuccagcu

SEQ ID NO: 2737097 - RNA, 15 nt, Human
aauauuuauuuuaau

SEQ ID NO: 2737098 - RNA, 18 nt, Human
uaauuuuuuugagacaga

SEQ ID NO: 2737099 - RNA, 16 nt, Human
uacaaugcugugcccu

SEQ ID NO: 2737100 - RNA, 14 nt, Human
uacaaugcugugcc

SEQ ID NO: 2737101 - RNA, 13 nt, Human
uacaaugcugugc

SEQ ID NO: 2737102 - RNA, 22 nt, Human
aaugcuguauuuuaaaagaaug

SEQ ID NO: 2737103 - RNA, 13 nt, Human
aauggaagacagc

SEQ ID NO: 2737104 - RNA, 20 nt, Human
aaugcuguauuuuaaaagaa

SEQ ID NO: 2737105 - RNA, 21 nt, Human
aaugcuguauuuuaaaagaau

SEQ ID NO: 2737106 - RNA, 22 nt, Human
aaugcuggcuguuggcuggggg

SEQ ID NO: 2737107 - RNA, 21 nt, Human
aaugcuggcuguuggcugggg

SEQ ID NO: 2737108 - RNA, 20 nt, Human
aauguaagggaaacugccag

SEQ ID NO: 2737109 - RNA, 16 nt, Human
aaugguuuucaaaaua

SEQ ID NO: 2737110 - RNA, 16 nt, Human
aaugguuuucuugugu

SEQ ID NO: 2737111 - RNA, 14 nt, Human
aaugguuuucaaaa

SEQ ID NO: 2737112 - RNA, 16 nt, Human
aauggaagacagcucu

SEQ ID NO: 2737113 - RNA, 23 nt, Human
uacagagcagacaguuaagagaa

SEQ ID NO: 2737114 - RNA, 19 nt, Human
uacagagcccacgccccca

SEQ ID NO: 2737115 - RNA, 22 nt, Human
uacagagcccacgcccccacug

SEQ ID NO: 2737116 - RNA, 14 nt, Human
uacaccauuaugug

SEQ ID NO: 2737117 - RNA, 13 nt, Human
uacagacaaagcg

SEQ ID NO: 2737118 - RNA, 14 nt, Human
uacagacaaagcgu

SEQ ID NO: 2737119 - RNA, 15 nt, Human
uacagacaaagcgug

SEQ ID NO: 2737120 - RNA, 22 nt, Human
uaauuccguagguuauuuucag

SEQ ID NO: 2737121 - RNA, 18 nt, Human
uaauuuuuauauuugaaa

SEQ ID NO: 2737122 - RNA, 16 nt, Human
uaauuuauacagguca

SEQ ID NO: 2737123 - RNA, 19 nt, Human
uaauuuuuauauuugaaau

SEQ ID NO: 2737124 - RNA, 21 nt, Human
uaauuuuuauauuugaaauau

SEQ ID NO: 2737125 - RNA, 11 nt, Human
aaugcaaacca

SEQ ID NO: 2737126 - RNA, 12 nt, Human
aaugcaaaccau

SEQ ID NO: 2737127 - RNA, 13 nt, Human
aaugcaccuggaa

SEQ ID NO: 2737128 - RNA, 23 nt, Human
uaauuauaucugaggaauucugu

SEQ ID NO: 2737129 - RNA, 22 nt, Human
uaauuauaucugaggaauucug

SEQ ID NO: 2737130 - RNA, 21 nt, Human
uaauuauaucugaggaauucu

SEQ ID NO: 2737131 - RNA, 19 nt, Human
uaauuauaucugaggaauu

SEQ ID NO: 2737132 - RNA, 19 nt, Human
uaauuauaugcuauuucua

SEQ ID NO: 2737133 - RNA, 18 nt, Human
uaauuauaugcuauuucu

SEQ ID NO: 2737134 - RNA, 14 nt, Human
uaauuauaugcuau

SEQ ID NO: 2737135 - RNA, 22 nt, Human
aaugagagacacacugaagaag

SEQ ID NO: 2737136 - RNA, 11 nt, Human
aaugagccugg

SEQ ID NO: 2737137 - RNA, 20 nt, Human
aaugacucagaauauugcuu

SEQ ID NO: 2737138 - RNA, 21 nt, Human
aaugaccuuucaauaggaaaa

SEQ ID NO: 2737139 - RNA, 20 nt, Human
aaugaccuuucaauaggaaa

SEQ ID NO: 2737140 - RNA, 23 nt, Human
aaugauuaugaauuacauuugua

SEQ ID NO: 2737141 - RNA, 12 nt, Human
aaugagccuggc

SEQ ID NO: 2737142 - RNA, 13 nt, Human
aaugagccuggca

SEQ ID NO: 2737143 - RNA, 16 nt, Human
aaugaggucagagccu

SEQ ID NO: 2737144 - RNA, 18 nt, Human
aaugaggucagagccugc

SEQ ID NO: 2737145 - RNA, 13 nt, Human
aauuaacuuuuau

SEQ ID NO: 2737146 - RNA, 12 nt, Human
aauuaacuuuua

SEQ ID NO: 2737147 - RNA, 17 nt, Human
aauuaaguacuauguau

SEQ ID NO: 2737148 - RNA, 16 nt, Human
aauuaaguacuaugua

SEQ ID NO: 2737149 - RNA, 16 nt, Human
aauuaacuuuuauaaa

SEQ ID NO: 2737150 - RNA, 15 nt, Human
aauuaacuuuuauaa

SEQ ID NO: 2737151 - RNA, 21 nt, Human
aaugugcugaaugguuuucaa

SEQ ID NO: 2737152 - RNA, 16 nt, Human
uaccaugccauuuaaa

SEQ ID NO: 2737153 - RNA, 12 nt, Human
uaccagcagagc

SEQ ID NO: 2737154 - RNA, 18 nt, Human
uaccagccaguaaauggg

SEQ ID NO: 2737155 - RNA, 22 nt, Human
uaccagcagagcaccuuagaca

SEQ ID NO: 2737156 - RNA, 13 nt, Human
uaccagcagagca

SEQ ID NO: 2737157 - RNA, 14 nt, Human
uaccagcagagcac

SEQ ID NO: 2737158 - RNA, 12 nt, Human
uacauucuguua

SEQ ID NO: 2737159 - RNA, 14 nt, Human
aauuacauuuguau

SEQ ID NO: 2737160 - RNA, 13 nt, Human
aauuacauuugua

SEQ ID NO: 2737161 - RNA, 17 nt, Human
aauuacaggaaguacug

SEQ ID NO: 2737162 - RNA, 19 nt, Human
aauuacaggaaguacugga

SEQ ID NO: 2737163 - RNA, 20 nt, Human
aauuacaggaaguacuggag

SEQ ID NO: 2737164 - RNA, 16 nt, Human
uaccugccaggaagcc

SEQ ID NO: 2737165 - RNA, 16 nt, Human
uaccugaggggccucu

SEQ ID NO: 2737166 - RNA, 23 nt, Human
uacccgggaagggggcugggaca

SEQ ID NO: 2737167 - RNA, 22 nt, Human
uaccucuugagccuugaacuuu

SEQ ID NO: 2737168 - RNA, 23 nt, Human
uaccucuugagccuugaacuuug

SEQ ID NO: 2737169 - RNA, 13 nt, Human
uaccugaagucuu

SEQ ID NO: 2737170 - RNA, 14 nt, Human
uaccugaagucuuu

SEQ ID NO: 2737171 - RNA, 16 nt, Human
uaccugaagucuuugu

SEQ ID NO: 2737172 - RNA, 13 nt, Human
uaccugaggggcc

SEQ ID NO: 2737173 - RNA, 15 nt, Human
uaccugaggggccuc

SEQ ID NO: 2737174 - RNA, 21 nt, Human
aauuauuuauuaaaugcccag

SEQ ID NO: 2737175 - RNA, 17 nt, Human
aauucaguuguuagugu

SEQ ID NO: 2737176 - RNA, 22 nt, Human
aauucaguuguuagugugucuu

SEQ ID NO: 2737177 - RNA, 11 nt, Human
aauucaguugu

SEQ ID NO: 2737178 - RNA, 21 nt, Human
aauucagaaggaucuucaucu

SEQ ID NO: 2737179 - RNA, 12 nt, Human
aauucaagaaaa

SEQ ID NO: 2737180 - RNA, 20 nt, Human
aauucaagaaaacaacuuca

SEQ ID NO: 2737181 - RNA, 22 nt, Human
aauuauuuauuaaaugcccagc

SEQ ID NO: 2737182 - RNA, 17 nt, Human
acacucaaaucaagaaa

SEQ ID NO: 2737183 - RNA, 18 nt, Human
acacucaaaucaagaaac

SEQ ID NO: 2737184 - RNA, 13 nt, Human
acacucaaaucaa

SEQ ID NO: 2737185 - RNA, 21 nt, Human
acacucaaaagcugggcaggu

SEQ ID NO: 2737186 - RNA, 15 nt, Human
acacuaaugaggaaa

SEQ ID NO: 2737187 - RNA, 22 nt, Human
acacuaaugaggaaacugcacu

SEQ ID NO: 2737188 - RNA, 17 nt, Human
uagucacugagacagcc

SEQ ID NO: 2737189 - RNA, 20 nt, Human
uagucacugagacagcccgg

SEQ ID NO: 2737190 - RNA, 16 nt, Human
uauacaggucauauua

SEQ ID NO: 2737191 - RNA, 21 nt, Human
uauacaggucauauuaauaua

SEQ ID NO: 2737192 - RNA, 15 nt, Human
uauacaggucauauu

SEQ ID NO: 2737193 - RNA, 22 nt, Human
uauacacuuacacuuuaugcac

SEQ ID NO: 2737194 - RNA, 21 nt, Human
uauacacuuacacuuuaugca

SEQ ID NO: 2737195 - RNA, 18 nt, Human
uauaauuuaccugaaguc

SEQ ID NO: 2737196 - RNA, 16 nt, Human
uauaggugcuacaaaa

SEQ ID NO: 2737197 - RNA, 23 nt, Human
uauaggaacuuaaauaaugugaa

SEQ ID NO: 2737198 - RNA, 18 nt, Human
uauagauuagaauucugu

SEQ ID NO: 2737199 - RNA, 18 nt, Human
uauagccuaggugacaga

SEQ ID NO: 2737200 - RNA, 16 nt, Human
acacucaguuguucaa

SEQ ID NO: 2737201 - RNA, 16 nt, Human
acacucauugaccuga

SEQ ID NO: 2737202 - RNA, 17 nt, Human
uauauccuuucuaacaa

SEQ ID NO: 2737203 - RNA, 20 nt, Human
uauauccuuucuaacaaaaa

SEQ ID NO: 2737204 - RNA, 19 nt, Human
uauauauuuuuuucugaaa

SEQ ID NO: 2737205 - RNA, 19 nt, Human
acagacauacuaaccagca

SEQ ID NO: 2737206 - RNA, 18 nt, Human
acagacauacuaaccagc

SEQ ID NO: 2737207 - RNA, 21 nt, Human
acacuuacacuuuaugcacaa

SEQ ID NO: 2737208 - RNA, 18 nt, Human
acacuuacacuuuaugca

SEQ ID NO: 2737209 - RNA, 16 nt, Human
acacuuacacuuuaug

SEQ ID NO: 2737210 - RNA, 20 nt, Human
acacuguuucaaacuuuacu

SEQ ID NO: 2737211 - RNA, 18 nt, Human
acacuguuucaaacuuua

SEQ ID NO: 2737212 - RNA, 17 nt, Human
acacuguuucaaacuuu

SEQ ID NO: 2737213 - RNA, 16 nt, Human
acacuguuucaaacuu

SEQ ID NO: 2737214 - RNA, 17 nt, Human
acacucauugaccugag

SEQ ID NO: 2737215 - RNA, 14 nt, Human
acagaccuuugaac

SEQ ID NO: 2737216 - RNA, 22 nt, Human
uaucaaagggugaaaauuauuu

SEQ ID NO: 2737217 - RNA, 18 nt, Human
uaucaaagggugaaaauu

SEQ ID NO: 2737218 - RNA, 19 nt, Human
uaucaaagggugaaaauua

SEQ ID NO: 2737219 - RNA, 20 nt, Human
uaucacaaaucuuaacuuga

SEQ ID NO: 2737220 - RNA, 16 nt, Human
uaucacaaaucuuaac

SEQ ID NO: 2737221 - RNA, 14 nt, Human
uaucacaaaucuua

SEQ ID NO: 2737222 - RNA, 22 nt, Human
uaucacccagaagaaaauagug

SEQ ID NO: 2737223 - RNA, 19 nt, Human
uaucacccagaagaaaaua

SEQ ID NO: 2737224 - RNA, 19 nt, Human
uauccaacaucaacaucuu

SEQ ID NO: 2737225 - RNA, 17 nt, Human
uaucagaauucucagaa

SEQ ID NO: 2737226 - RNA, 14 nt, Human
acagcuguaugauu

SEQ ID NO: 2737227 - RNA, 19 nt, Human
acagcuguaugauucccag

SEQ ID NO: 2737228 - RNA, 20 nt, Human
acagcuguaugauucccagc

SEQ ID NO: 2737229 - RNA, 23 nt, Human
acagcuguaugauucccagccag

SEQ ID NO: 2737230 - RNA, 15 nt, Human
acagcuaaugggaca

SEQ ID NO: 2737231 - RNA, 16 nt, Human
acagcuaaugggacac

SEQ ID NO: 2737232 - RNA, 17 nt, Human
acagcuaaugggacacu

SEQ ID NO: 2737233 - RNA, 19 nt, Human
acagcuaaugggacacuaa

SEQ ID NO: 2737234 - RNA, 22 nt, Human
acagcuugaccgugaggccaga

SEQ ID NO: 2737235 - RNA, 23 nt, Human
acagcuugaccgugaggccagag

SEQ ID NO: 2737236 - RNA, 18 nt, Human
acaggaaaagcugcugac

SEQ ID NO: 2737237 - RNA, 19 nt, Human
acaggaaaagcugcugaca

SEQ ID NO: 2737238 - RNA, 20 nt, Human
acaggaaaagcugcugacag

SEQ ID NO: 2737239 - RNA, 21 nt, Human
acaggaaaagcugcugacagu

SEQ ID NO: 2737240 - RNA, 17 nt, Human
acagcuugaccgugagg

SEQ ID NO: 2737241 - RNA, 20 nt, Human
acagcuugaccgugaggcca

SEQ ID NO: 2737242 - RNA, 21 nt, Human
acagcuugaccgugaggccag

SEQ ID NO: 2737243 - RNA, 17 nt, Human
acagcuucauuuccugu

SEQ ID NO: 2737244 - RNA, 19 nt, Human
acagcuucauuuccugugu

SEQ ID NO: 2737245 - RNA, 21 nt, Human
acagcuucauuuccugugucu

SEQ ID NO: 2737246 - RNA, 20 nt, Human
acaggaaaauuuuaaaaaua

SEQ ID NO: 2737247 - RNA, 15 nt, Human
acaggcagauacagg

SEQ ID NO: 2737248 - RNA, 16 nt, Human
acaggcccggcuccag

SEQ ID NO: 2737249 - RNA, 17 nt, Human
acaggcccggcuccagg

SEQ ID NO: 2737250 - RNA, 18 nt, Human
acaggcccggcuccaggc

SEQ ID NO: 2737251 - RNA, 20 nt, Human
acaggcccggcuccaggcuc

SEQ ID NO: 2737252 - RNA, 21 nt, Human
acaggcccggcuccaggcucc

SEQ ID NO: 2737253 - RNA, 22 nt, Human
acaggcccggcuccaggcuccu

SEQ ID NO: 2737254 - RNA, 19 nt, Human
acagcccuucuuuccacag

SEQ ID NO: 2737255 - RNA, 21 nt, Human
uaugaaacuuguguaaauaca

SEQ ID NO: 2737256 - RNA, 19 nt, Human
uaugaaacuuguguaaaua

SEQ ID NO: 2737257 - RNA, 14 nt, Human
uaugaaacuugugu

SEQ ID NO: 2737258 - RNA, 21 nt, Human
uaugaggcauuuguuugaacu

SEQ ID NO: 2737259 - RNA, 15 nt, Human
uaugaggcauuuguu

SEQ ID NO: 2737260 - RNA, 14 nt, Human
uaugaggcauuugu

SEQ ID NO: 2737261 - RNA, 18 nt, Human
acagcaagggugauggga

SEQ ID NO: 2737262 - RNA, 15 nt, Human
acagcccgggcucug

SEQ ID NO: 2737263 - RNA, 16 nt, Human
acagcccgggcucugc

SEQ ID NO: 2737264 - RNA, 23 nt, Human
uaugcuauuucuauauuuucauu

SEQ ID NO: 2737265 - RNA, 22 nt, Human
uaugcuauuucuauauuuucau

SEQ ID NO: 2737266 - RNA, 18 nt, Human
uaugcuauuucuauauuu

SEQ ID NO: 2737267 - RNA, 16 nt, Human
uaugcuauuucuauau

SEQ ID NO: 2737268 - RNA, 15 nt, Human
uaugcuauuucuaua

SEQ ID NO: 2737269 - RNA, 14 nt, Human
uaugcuauuucuau

SEQ ID NO: 2737270 - RNA, 22 nt, Human
uaugcaugaaguaauaugcaca

SEQ ID NO: 2737271 - RNA, 16 nt, Human
uaugggacucaaugca

SEQ ID NO: 2737272 - RNA, 23 nt, Human
uaugggacucaaugcacugacau

SEQ ID NO: 2737273 - RNA, 20 nt, Human
uauggcccuggccuagcaua

SEQ ID NO: 2737274 - RNA, 21 nt, Human
uauggcccuggccuagcauac

SEQ ID NO: 2737275 - RNA, 23 nt, Human
uauggcuuuugugcauuaucuag

SEQ ID NO: 2737276 - RNA, 15 nt, Human
uagaaacacaacuau

SEQ ID NO: 2737277 - RNA, 17 nt, Human
aauuccaauuauaugag

SEQ ID NO: 2737278 - RNA, 13 nt, Human
uagacacacauga

SEQ ID NO: 2737279 - RNA, 18 nt, Human
uagacaauuuauuauggc

SEQ ID NO: 2737280 - RNA, 10 nt, Human
uagacagagu

SEQ ID NO: 2737281 - RNA, 16 nt, Human
uagacagucccugcca

SEQ ID NO: 2737282 - RNA, 22 nt, Human
uagaauuugauaugugaacagu

SEQ ID NO: 2737283 - RNA, 19 nt, Human
uagaauuugauaugugaac

SEQ ID NO: 2737284 - RNA, 20 nt, Human
uagaauuugauaugugaaca

SEQ ID NO: 2737285 - RNA, 17 nt, Human
uagacagucccugccaa

SEQ ID NO: 2737286 - RNA, 21 nt, Human
uagacagucccugccaaugga

SEQ ID NO: 2737287 - RNA, 16 nt, Human
aauuuggauugcuaau

SEQ ID NO: 2737288 - RNA, 18 nt, Human
aauuugggggaaaauuua

SEQ ID NO: 2737289 - RNA, 14 nt, Human
aauuugugauacaa

SEQ ID NO: 2737290 - RNA, 18 nt, Human
aauuugugauacaaugcu

SEQ ID NO: 2737291 - RNA, 17 nt, Human
aauuugugauacaaugc

SEQ ID NO: 2737292 - RNA, 13 nt, Human
acaaaaacacagc

SEQ ID NO: 2737293 - RNA, 20 nt, Human
aauuuuacauggcuggagcu

SEQ ID NO: 2737294 - RNA, 15 nt, Human
acaaaaacacagcaa

SEQ ID NO: 2737295 - RNA, 14 nt, Human
acaaaaacacagca

SEQ ID NO: 2737296 - RNA, 16 nt, Human
acaaaaagcuacuuau

SEQ ID NO: 2737297 - RNA, 18 nt, Human
acaaaguauuaagcauau

SEQ ID NO: 2737298 - RNA, 13 nt, Human
acaaaguauuaag

SEQ ID NO: 2737299 - RNA, 16 nt, Human
acaaaguauuaagcau

SEQ ID NO: 2737300 - RNA, 15 nt, Human
acaaaguauuaagca

SEQ ID NO: 2737301 - RNA, 22 nt, Human
uagagcggagaaaggaagggcu

SEQ ID NO: 2737302 - RNA, 14 nt, Human
uagagccagggucu

SEQ ID NO: 2737303 - RNA, 14 nt, Human
uagaggguguguaa

SEQ ID NO: 2737304 - RNA, 14 nt, Human
uagcacagacccug

SEQ ID NO: 2737305 - RNA, 15 nt, Human
uagcacagacccugc

SEQ ID NO: 2737306 - RNA, 20 nt, Human
uagcacagacccugcccugu

SEQ ID NO: 2737307 - RNA, 21 nt, Human
uagcacagacccugcccugug

SEQ ID NO: 2737308 - RNA, 12 nt, Human
uagccaaggcca

SEQ ID NO: 2737309 - RNA, 19 nt, Human
uagcacugacagauuucca

SEQ ID NO: 2737310 - RNA, 14 nt, Human
uagcacugacagau

SEQ ID NO: 2737311 - RNA, 24 nt, Human
uagcacagacccugcccugugggc

SEQ ID NO: 2737312 - RNA, 22 nt, Human
uagcacagacccugcccugugg

SEQ ID NO: 2737313 - RNA, 13 nt, Human
uagccaaggccaa

SEQ ID NO: 2737314 - RNA, 16 nt, Human
uaggaaaaacugauuu

SEQ ID NO: 2737315 - RNA, 17 nt, Human
uaggaaaaacugauuuu

SEQ ID NO: 2737316 - RNA, 13 nt, Human
uagggaagauaau

SEQ ID NO: 2737317 - RNA, 23 nt, Human
uagcuuuuuucucugauacagaa

SEQ ID NO: 2737318 - RNA, 13 nt, Human
uagcuuuuuucuc

SEQ ID NO: 2737319 - RNA, 13 nt, Human
uaggaaaaacuga

SEQ ID NO: 2737320 - RNA, 14 nt, Human
uaggaaaaacugau

SEQ ID NO: 2737321 - RNA, 17 nt, Human
uagcgcccaguugggug

SEQ ID NO: 2737322 - RNA, 14 nt, Human
uagcgcccaguugg

SEQ ID NO: 2737323 - RNA, 21 nt, Human
uagccuuagaagucacacagu

SEQ ID NO: 2737324 - RNA, 20 nt, Human
uagccuuagaagucacacag

SEQ ID NO: 2737325 - RNA, 13 nt, Human
acacaacuauauu

SEQ ID NO: 2737326 - RNA, 23 nt, Human
acaaugcaaaccaucauugaaau

SEQ ID NO: 2737327 - RNA, 19 nt, Human
acaaugcaaaccaucauug

SEQ ID NO: 2737328 - RNA, 21 nt, Human
acaaugcaaaccaucauugaa

SEQ ID NO: 2737329 - RNA, 22 nt, Human
acaaugacuuacuguacaugaa

SEQ ID NO: 2737330 - RNA, 19 nt, Human
acaaugacuuacuguacau

SEQ ID NO: 2737331 - RNA, 20 nt, Human
acaaugacuuacuguacaug

SEQ ID NO: 2737332 - RNA, 11 nt, Human
acaaugcaaac

SEQ ID NO: 2737333 - RNA, 16 nt, Human
acaaugcaaaccauca

SEQ ID NO: 2737334 - RNA, 17 nt, Human
acaaugcaaaccaucau

SEQ ID NO: 2737335 - RNA, 18 nt, Human
acaaugcaaaccaucauu

SEQ ID NO: 2737336 - RNA, 19 nt, Human
uaggguaagugagagaggg

SEQ ID NO: 2737337 - RNA, 17 nt, Human
uaggguuauaauaaugu

SEQ ID NO: 2737338 - RNA, 15 nt, Human
uaggguuauaauaau

SEQ ID NO: 2737339 - RNA, 14 nt, Human
uagucacugagaca

SEQ ID NO: 2737340 - RNA, 15 nt, Human
uaguagagacagggu

SEQ ID NO: 2737341 - RNA, 22 nt, Human
uaguagagacaggguuuugcca

SEQ ID NO: 2737342 - RNA, 14 nt, Human
uaguagagacaggg

SEQ ID NO: 2737343 - RNA, 22 nt, Human
uagguuuggacaaaauggaaua

SEQ ID NO: 2737344 - RNA, 23 nt, Human
acacaggcccggcuccaggcucc

SEQ ID NO: 2737345 - RNA, 24 nt, Human
acacaggcccggcuccaggcuccu

SEQ ID NO: 2737346 - RNA, 19 nt, Human
acacaggcccggcuccagg

SEQ ID NO: 2737347 - RNA, 20 nt, Human
acacaggcccggcuccaggc

SEQ ID NO: 2737348 - RNA, 21 nt, Human
acacaggcccggcuccaggcu

SEQ ID NO: 2737349 - RNA, 22 nt, Human
acacaggcccggcuccaggcuc

SEQ ID NO: 2737350 - RNA, 16 nt, Human
acacaggcccggcucc

SEQ ID NO: 2737351 - RNA, 17 nt, Human
acacaggcccggcucca

SEQ ID NO: 2737352 - RNA, 18 nt, Human
acacaggcccggcuccag

SEQ ID NO: 2737353 - RNA, 18 nt, Human
acuauucaaacagucuca

SEQ ID NO: 2737354 - RNA, 16 nt, Human
acuauucaaacagucu

SEQ ID NO: 2737355 - RNA, 14 nt, Human
acuauucaaacagu

SEQ ID NO: 2737356 - RNA, 13 nt, Human
acuauucaaacag

SEQ ID NO: 2737357 - RNA, 12 nt, Human
acuauguaucaa

SEQ ID NO: 2737358 - RNA, 22 nt, Human
acuaugacauaaaaacaacuuu

SEQ ID NO: 2737359 - RNA, 14 nt, Human
acuauaauguaagc

SEQ ID NO: 2737360 - RNA, 13 nt, Human
acuauaauguaag

SEQ ID NO: 2737361 - RNA, 12 nt, Human
acuauaauguaa

SEQ ID NO: 2737362 - RNA, 14 nt, Human
uccccuccucugcu

SEQ ID NO: 2737363 - RNA, 15 nt, Human
uccccuccucugcuu

SEQ ID NO: 2737364 - RNA, 18 nt, Human
uccccuccucugcuugcc

SEQ ID NO: 2737365 - RNA, 24 nt, Human
uccccuccucugcuugccaucccu

SEQ ID NO: 2737366 - RNA, 19 nt, Human
acucacauuuauucugcuc

SEQ ID NO: 2737367 - RNA, 20 nt, Human
acucacauuuauucugcuca

SEQ ID NO: 2737368 - RNA, 14 nt, Human
acucaaugcacuga

SEQ ID NO: 2737369 - RNA, 20 nt, Human
acuagaguuuagcuggaaaa

SEQ ID NO: 2737370 - RNA, 18 nt, Human
acuacggaauaguuggcu

SEQ ID NO: 2737371 - RNA, 13 nt, Human
acguacacacaca

SEQ ID NO: 2737372 - RNA, 12 nt, Human
acguacacauuu

SEQ ID NO: 2737373 - RNA, 14 nt, Human
acguacacauuuua

SEQ ID NO: 2737374 - RNA, 13 nt, Human
acguacacauuuu

SEQ ID NO: 2737375 - RNA, 21 nt, Human
acuccaaacugacucuuaaga

SEQ ID NO: 2737376 - RNA, 18 nt, Human
acucauugaccugaggcc

SEQ ID NO: 2737377 - RNA, 22 nt, Human
acucauugaccugaggcccuuc

SEQ ID NO: 2737378 - RNA, 12 nt, Human
acucaucuuagg

SEQ ID NO: 2737379 - RNA, 16 nt, Human
acucauugaccugagg

SEQ ID NO: 2737380 - RNA, 17 nt, Human
acucauugaccugaggc

SEQ ID NO: 2737381 - RNA, 21 nt, Human
acucaccugccccucaacucu

SEQ ID NO: 2737382 - RNA, 14 nt, Human
acucaccugccccu

SEQ ID NO: 2737383 - RNA, 19 nt, Human
acucaccugccccucaacu

SEQ ID NO: 2737384 - RNA, 14 nt, Human
acucagaagacacu

SEQ ID NO: 2737385 - RNA, 15 nt, Human
acucagaagacacug

SEQ ID NO: 2737386 - RNA, 16 nt, Human
acucagaagacacuga

SEQ ID NO: 2737387 - RNA, 17 nt, Human
acucagaagacacugau

SEQ ID NO: 2737388 - RNA, 14 nt, Human
acucagaauauugc

SEQ ID NO: 2737389 - RNA, 14 nt, Human
acucagaauucucu

SEQ ID NO: 2737390 - RNA, 22 nt, Human
acucagaauucucuaguuugau

SEQ ID NO: 2737391 - RNA, 21 nt, Human
acucagaauucucuaguuuga

SEQ ID NO: 2737392 - RNA, 18 nt, Human
acucagaagacacugaug

SEQ ID NO: 2737393 - RNA, 19 nt, Human
ucccuccaccucccugcaa

SEQ ID NO: 2737394 - RNA, 13 nt, Human
ucccucuuucccu

SEQ ID NO: 2737395 - RNA, 11 nt, Human
ucccucuuucc

SEQ ID NO: 2737396 - RNA, 15 nt, Human
ucccuccaccucccu

SEQ ID NO: 2737397 - RNA, 17 nt, Human
ucccuccaccucccugc

SEQ ID NO: 2737398 - RNA, 14 nt, Human
ucccuccaccuccc

SEQ ID NO: 2737399 - RNA, 20 nt, Human
ucccucagucuggcccuucc

SEQ ID NO: 2737400 - RNA, 18 nt, Human
ucccucagucuggcccuu

SEQ ID NO: 2737401 - RNA, 23 nt, Human
ucccugaaggccccgcccaggcu

SEQ ID NO: 2737402 - RNA, 17 nt, Human
acucaccccagccccaa

SEQ ID NO: 2737403 - RNA, 17 nt, Human
ucccugaaggccccgcc

SEQ ID NO: 2737404 - RNA, 18 nt, Human
ucccugaaggccccgccc

SEQ ID NO: 2737405 - RNA, 21 nt, Human
ucccugaaggccccgcccagg

SEQ ID NO: 2737406 - RNA, 22 nt, Human
ucccugaaggccccgcccaggc

SEQ ID NO: 2737407 - RNA, 14 nt, Human
acuccagaaaguga

SEQ ID NO: 2737408 - RNA, 16 nt, Human
uccgugcuaaggacuu

SEQ ID NO: 2737409 - RNA, 18 nt, Human
uccgugcuaaggacuugu

SEQ ID NO: 2737410 - RNA, 17 nt, Human
uccgugcuaaggacuug

SEQ ID NO: 2737411 - RNA, 23 nt, Human
uccgugcuaaggacuuguuagau

SEQ ID NO: 2737412 - RNA, 13 nt, Human
uccguuaaaauac

SEQ ID NO: 2737413 - RNA, 15 nt, Human
uccguuaaaauacca

SEQ ID NO: 2737414 - RNA, 16 nt, Human
acucgaguuacagaca

SEQ ID NO: 2737415 - RNA, 12 nt, Human
uccuacucugug

SEQ ID NO: 2737416 - RNA, 21 nt, Human
uccuagccugugccucuggga

SEQ ID NO: 2737417 - RNA, 15 nt, Human
acucgcgacaaugca

SEQ ID NO: 2737418 - RNA, 16 nt, Human
acucgcgacaaugcaa

SEQ ID NO: 2737419 - RNA, 16 nt, Human
acucuggcagcucaga

SEQ ID NO: 2737420 - RNA, 17 nt, Human
acucuggcagcucagag

SEQ ID NO: 2737421 - RNA, 21 nt, Human
acucuuauugcccacgcugga

SEQ ID NO: 2737422 - RNA, 19 nt, Human
acucuggcagcucagagag

SEQ ID NO: 2737423 - RNA, 20 nt, Human
acucuggcagcucagagagg

SEQ ID NO: 2737424 - RNA, 21 nt, Human
uccugaaaacccuugccaugu

SEQ ID NO: 2737425 - RNA, 22 nt, Human
uccugaaaacccuugccaugug

SEQ ID NO: 2737426 - RNA, 23 nt, Human
uccucuuuggucuacacugugcu

SEQ ID NO: 2737427 - RNA, 15 nt, Human
uccugaagaauugaa

SEQ ID NO: 2737428 - RNA, 19 nt, Human
acucuuucuauuguuucuu

SEQ ID NO: 2737429 - RNA, 13 nt, Human
acugaaacuuccc

SEQ ID NO: 2737430 - RNA, 17 nt, Human
uccucuccccaugaugu

SEQ ID NO: 2737431 - RNA, 21 nt, Human
uccucccaccucagccucccg

SEQ ID NO: 2737432 - RNA, 13 nt, Human
uccucccaccuca

SEQ ID NO: 2737433 - RNA, 14 nt, Human
uccucccaccucag

SEQ ID NO: 2737434 - RNA, 15 nt, Human
uccucccaccucagc

SEQ ID NO: 2737435 - RNA, 16 nt, Human
uccucccaccucagcc

SEQ ID NO: 2737436 - RNA, 18 nt, Human
uccucccaccucagccuc

SEQ ID NO: 2737437 - RNA, 20 nt, Human
uccucccaccucagccuccc

SEQ ID NO: 2737438 - RNA, 16 nt, Human
ucauaauaaguugcau

SEQ ID NO: 2737439 - RNA, 12 nt, Human
ucauaaugacuu

SEQ ID NO: 2737440 - RNA, 18 nt, Human
accugaagacucauucuu

SEQ ID NO: 2737441 - RNA, 19 nt, Human
accugaauuuuggcugugu

SEQ ID NO: 2737442 - RNA, 23 nt, Human
accugaggcccuucucuccagcc

SEQ ID NO: 2737443 - RNA, 14 nt, Human
accugaggggccuc

SEQ ID NO: 2737444 - RNA, 16 nt, Human
accugaggggccucuu

SEQ ID NO: 2737445 - RNA, 16 nt, Human
accugccaggaagcca

SEQ ID NO: 2737446 - RNA, 17 nt, Human
accugccaggaagccag

SEQ ID NO: 2737447 - RNA, 18 nt, Human
accugccaggaagccagc

SEQ ID NO: 2737448 - RNA, 16 nt, Human
ucauuugucacacacu

SEQ ID NO: 2737449 - RNA, 14 nt, Human
ucauuugucacaca

SEQ ID NO: 2737450 - RNA, 19 nt, Human
ucauuuuuaguagagacag

SEQ ID NO: 2737451 - RNA, 18 nt, Human
ucauuuuuuuuaagaaaa

SEQ ID NO: 2737452 - RNA, 17 nt, Human
ucauuuuuuuuaagaaa

SEQ ID NO: 2737453 - RNA, 19 nt, Human
uccaaaaagauuuucagaa

SEQ ID NO: 2737454 - RNA, 21 nt, Human
accugcgucucauacucaccu

SEQ ID NO: 2737455 - RNA, 16 nt, Human
accugcggugcuaucu

SEQ ID NO: 2737456 - RNA, 23 nt, Human
accugccuguugggccaggagcc

SEQ ID NO: 2737457 - RNA, 20 nt, Human
accuggaauauauaaccagu

SEQ ID NO: 2737458 - RNA, 20 nt, Human
uccaaaaagauuuucagaaa

SEQ ID NO: 2737459 - RNA, 20 nt, Human
uccacccaggagccccgagg

SEQ ID NO: 2737460 - RNA, 12 nt, Human
uccacccaccuc

SEQ ID NO: 2737461 - RNA, 18 nt, Human
uccaccaucaagccacca

SEQ ID NO: 2737462 - RNA, 13 nt, Human
uccacccaccuca

SEQ ID NO: 2737463 - RNA, 17 nt, Human
uccacccaggagccccg

SEQ ID NO: 2737464 - RNA, 12 nt, Human
accuggccucug

SEQ ID NO: 2737465 - RNA, 13 nt, Human
accuggccucugc

SEQ ID NO: 2737466 - RNA, 21 nt, Human
accuggguaacuagggaagau

SEQ ID NO: 2737467 - RNA, 14 nt, Human
accuucuccuucac

SEQ ID NO: 2737468 - RNA, 22 nt, Human
accuucuccuucaccuuugucc

SEQ ID NO: 2737469 - RNA, 16 nt, Human
accuugacagggcaca

SEQ ID NO: 2737470 - RNA, 13 nt, Human
accuuugucccca

SEQ ID NO: 2737471 - RNA, 18 nt, Human
accuuuuuuauacauaaa

SEQ ID NO: 2737472 - RNA, 17 nt, Human
accuuuuuuauacauaa

SEQ ID NO: 2737473 - RNA, 16 nt, Human
accuuuuuuauacaua

SEQ ID NO: 2737474 - RNA, 14 nt, Human
accuuuguccccac

SEQ ID NO: 2737475 - RNA, 15 nt, Human
accuuuguccccacc

SEQ ID NO: 2737476 - RNA, 16 nt, Human
accuuuguccccaccg

SEQ ID NO: 2737477 - RNA, 14 nt, Human
accuuuuuuauaca

SEQ ID NO: 2737478 - RNA, 19 nt, Human
acggagucccaccuuggcu

SEQ ID NO: 2737479 - RNA, 13 nt, Human
acggccaggccag

SEQ ID NO: 2737480 - RNA, 16 nt, Human
acggccaggccagagg

SEQ ID NO: 2737481 - RNA, 21 nt, Human
acggagucccaccuuggcugc

SEQ ID NO: 2737482 - RNA, 14 nt, Human
acggaugauuucua

SEQ ID NO: 2737483 - RNA, 15 nt, Human
acggaugauuucuau

SEQ ID NO: 2737484 - RNA, 18 nt, Human
acgcuacccgggaagggg

SEQ ID NO: 2737485 - RNA, 13 nt, Human
acgcuacccggga

SEQ ID NO: 2737486 - RNA, 17 nt, Human
acgcuacccgggaaggg

SEQ ID NO: 2737487 - RNA, 20 nt, Human
acgcguugaaauuguaauua

SEQ ID NO: 2737488 - RNA, 18 nt, Human
acgcguugaaauuguaau

SEQ ID NO: 2737489 - RNA, 14 nt, Human
acgcguugaaauug

SEQ ID NO: 2737490 - RNA, 13 nt, Human
acgcguugaaauu

SEQ ID NO: 2737491 - RNA, 14 nt, Human
acgcccccacuggu

SEQ ID NO: 2737492 - RNA, 20 nt, Human
acgcgugcacacaccagagc

SEQ ID NO: 2737493 - RNA, 23 nt, Human
acgcgugcacacaccagagccca

SEQ ID NO: 2737494 - RNA, 15 nt, Human
acgacugcccggcag

SEQ ID NO: 2737495 - RNA, 18 nt, Human
acgccaggggaaaaucag

SEQ ID NO: 2737496 - RNA, 18 nt, Human
acgccaucccagccccaa

SEQ ID NO: 2737497 - RNA, 16 nt, Human
acgccaucccagcccc

SEQ ID NO: 2737498 - RNA, 17 nt, Human
acgccaucccagcccca

SEQ ID NO: 2737499 - RNA, 23 nt, Human
acgccaggggaaaaucagccugc

SEQ ID NO: 2737500 - RNA, 11 nt, Human
acgccauccca

SEQ ID NO: 2737501 - RNA, 14 nt, Human
acgccaucccagcc

SEQ ID NO: 2737502 - RNA, 15 nt, Human
acgccaucccagccc

SEQ ID NO: 2737503 - RNA, 18 nt, Human
uccaggcugggagagccu

SEQ ID NO: 2737504 - RNA, 14 nt, Human
uccaggcugggaga

SEQ ID NO: 2737505 - RNA, 17 nt, Human
uccaggcugggagagcc

SEQ ID NO: 2737506 - RNA, 22 nt, Human
acgaagaguauuuuugacagaa

SEQ ID NO: 2737507 - RNA, 20 nt, Human
acgaagaguauuuuugacag

SEQ ID NO: 2737508 - RNA, 17 nt, Human
uccagugaggcucugcc

SEQ ID NO: 2737509 - RNA, 18 nt, Human
uccagugaggcucugccc

SEQ ID NO: 2737510 - RNA, 19 nt, Human
uccagugaggcucugcccu

SEQ ID NO: 2737511 - RNA, 20 nt, Human
uccagugaggcucugcccuu

SEQ ID NO: 2737512 - RNA, 14 nt, Human
acggcucacugcag

SEQ ID NO: 2737513 - RNA, 15 nt, Human
acggcucacugcagc

SEQ ID NO: 2737514 - RNA, 15 nt, Human
uccaugaguccccug

SEQ ID NO: 2737515 - RNA, 16 nt, Human
uccaugaguccccugu

SEQ ID NO: 2737516 - RNA, 17 nt, Human
uccaugaguccccuguu

SEQ ID NO: 2737517 - RNA, 12 nt, Human
uccauuuaauaa

SEQ ID NO: 2737518 - RNA, 11 nt, Human
ucccaccccac

SEQ ID NO: 2737519 - RNA, 14 nt, Human
ucccaccccacaca

SEQ ID NO: 2737520 - RNA, 14 nt, Human
ucccacaaaggaga

SEQ ID NO: 2737521 - RNA, 15 nt, Human
ucccaaagugcuggg

SEQ ID NO: 2737522 - RNA, 16 nt, Human
ucccaaagugcuggga

SEQ ID NO: 2737523 - RNA, 20 nt, Human
uccauuuggaaaucuuuaaa

SEQ ID NO: 2737524 - RNA, 19 nt, Human
uccauuuggaaaucuuuaa

SEQ ID NO: 2737525 - RNA, 12 nt, Human
uccauuuggaaa

SEQ ID NO: 2737526 - RNA, 17 nt, Human
uccauuuaauaauuaua

SEQ ID NO: 2737527 - RNA, 23 nt, Human
ucaauauuucagauaaucacaau

SEQ ID NO: 2737528 - RNA, 22 nt, Human
ucaauaggaaaaacugauuuuu

SEQ ID NO: 2737529 - RNA, 16 nt, Human
ucaagugauucuccug

SEQ ID NO: 2737530 - RNA, 17 nt, Human
ucaagugauucuccugc

SEQ ID NO: 2737531 - RNA, 17 nt, Human
ucaauaggaaaaacuga

SEQ ID NO: 2737532 - RNA, 18 nt, Human
ucaauaggaaaaacugau

SEQ ID NO: 2737533 - RNA, 19 nt, Human
ucaauaggaaaaacugauu

SEQ ID NO: 2737534 - RNA, 23 nt, Human
ucaaggauccugagccagauuuc

SEQ ID NO: 2737535 - RNA, 17 nt, Human
ucaagagggucugagga

SEQ ID NO: 2737536 - RNA, 23 nt, Human
acauuuuucuuagggaaggauac

SEQ ID NO: 2737537 - RNA, 13 nt, Human
acauuuuucuuag

SEQ ID NO: 2737538 - RNA, 18 nt, Human
acauuuuuaagugcugca

SEQ ID NO: 2737539 - RNA, 15 nt, Human
acauuuuuaagugcu

SEQ ID NO: 2737540 - RNA, 21 nt, Human
acauugcggacagccacggcc

SEQ ID NO: 2737541 - RNA, 22 nt, Human
acauugcggacagccacggcca

SEQ ID NO: 2737542 - RNA, 16 nt, Human
acauuggaaacaaguc

SEQ ID NO: 2737543 - RNA, 19 nt, Human
acauuguacgaagaguauu

SEQ ID NO: 2737544 - RNA, 17 nt, Human
acauuguaaauaguauu

SEQ ID NO: 2737545 - RNA, 19 nt, Human
acauuguaaauaguauuug

SEQ ID NO: 2737546 - RNA, 21 nt, Human
acauuguaaauaguauuugag

SEQ ID NO: 2737547 - RNA, 23 nt, Human
acauugguguuguacucaauuuu

SEQ ID NO: 2737548 - RNA, 22 nt, Human
acauugguguuguacucaauuu

SEQ ID NO: 2737549 - RNA, 16 nt, Human
acauugguguuguacu

SEQ ID NO: 2737550 - RNA, 14 nt, Human
acauugguguugua

SEQ ID NO: 2737551 - RNA, 16 nt, Human
ucacagaccuuugaac

SEQ ID NO: 2737552 - RNA, 23 nt, Human
ucacagccagacuggcacaguuu

SEQ ID NO: 2737553 - RNA, 17 nt, Human
ucacagccagacuggca

SEQ ID NO: 2737554 - RNA, 19 nt, Human
ucacagcuccaagaauuuc

SEQ ID NO: 2737555 - RNA, 14 nt, Human
ucacagaugggugc

SEQ ID NO: 2737556 - RNA, 15 nt, Human
ucacagaugggugcu

SEQ ID NO: 2737557 - RNA, 16 nt, Human
ucacauauugauuucc

SEQ ID NO: 2737558 - RNA, 20 nt, Human
ucacauauugauuuccguua

SEQ ID NO: 2737559 - RNA, 18 nt, Human
ucacauauugauuuccgu

SEQ ID NO: 2737560 - RNA, 17 nt, Human
ucacauuccugaacagg

SEQ ID NO: 2737561 - RNA, 13 nt, Human
ucacauuccugaa

SEQ ID NO: 2737562 - RNA, 17 nt, Human
ucaccagccccagugcc

SEQ ID NO: 2737563 - RNA, 16 nt, Human
ucaccagccccagugc

SEQ ID NO: 2737564 - RNA, 16 nt, Human
accacaagacugcaca

SEQ ID NO: 2737565 - RNA, 17 nt, Human
accacacagaggcugcc

SEQ ID NO: 2737566 - RNA, 15 nt, Human
accacacccagccca

SEQ ID NO: 2737567 - RNA, 16 nt, Human
accacacccagcccac

SEQ ID NO: 2737568 - RNA, 20 nt, Human
accacacccagcccacuucu

SEQ ID NO: 2737569 - RNA, 21 nt, Human
accacacccagcccacuucug

SEQ ID NO: 2737570 - RNA, 23 nt, Human
accacacccagcccacuucugcc

SEQ ID NO: 2737571 - RNA, 19 nt, Human
accaacacgagcaggcuac

SEQ ID NO: 2737572 - RNA, 14 nt, Human
accaacacgagcag

SEQ ID NO: 2737573 - RNA, 16 nt, Human
accaacauacucccau

SEQ ID NO: 2737574 - RNA, 20 nt, Human
accaaccacugcgaccacaa

SEQ ID NO: 2737575 - RNA, 19 nt, Human
accaaaucagcugcuacua

SEQ ID NO: 2737576 - RNA, 16 nt, Human
accaaaucagcugcua

SEQ ID NO: 2737577 - RNA, 13 nt, Human
accaaaaaccagu

SEQ ID NO: 2737578 - RNA, 12 nt, Human
accaaaaaccag

SEQ ID NO: 2737579 - RNA, 16 nt, Human
accaaauaaaaauauu

SEQ ID NO: 2737580 - RNA, 18 nt, Human
accaaauaaaaauauugu

SEQ ID NO: 2737581 - RNA, 18 nt, Human
uauuuuaaaagaaugauu

SEQ ID NO: 2737582 - RNA, 14 nt, Human
uauuuuaaaagaau

SEQ ID NO: 2737583 - RNA, 15 nt, Human
acaugaaaacacauu

SEQ ID NO: 2737584 - RNA, 14 nt, Human
uauguguaaaaugu

SEQ ID NO: 2737585 - RNA, 17 nt, Human
uauguguaaaaugugaa

SEQ ID NO: 2737586 - RNA, 15 nt, Human
acaucuugcucugcu

SEQ ID NO: 2737587 - RNA, 16 nt, Human
acaucuugcucugcug

SEQ ID NO: 2737588 - RNA, 14 nt, Human
acaucuugcucugc

SEQ ID NO: 2737589 - RNA, 19 nt, Human
acaucuuggucagauuuga

SEQ ID NO: 2737590 - RNA, 22 nt, Human
acaucuugcucugcugacagac

SEQ ID NO: 2737591 - RNA, 17 nt, Human
acaucuugcucugcuga

SEQ ID NO: 2737592 - RNA, 19 nt, Human
uauuuuaauaauguuucaa

SEQ ID NO: 2737593 - RNA, 22 nt, Human
uauuuuaauaauguuucaaaca

SEQ ID NO: 2737594 - RNA, 13 nt, Human
uauuuuacauaaa

SEQ ID NO: 2737595 - RNA, 15 nt, Human
uauuuugcuuuguga

SEQ ID NO: 2737596 - RNA, 13 nt, Human
uauuuugcuuugu

SEQ ID NO: 2737597 - RNA, 20 nt, Human
uauuuugcuuugugauuuuu

SEQ ID NO: 2737598 - RNA, 13 nt, Human
uauuuuuguagca

SEQ ID NO: 2737599 - RNA, 17 nt, Human
uauuuuuguagagccag

SEQ ID NO: 2737600 - RNA, 12 nt, Human
uauuuuucacau

SEQ ID NO: 2737601 - RNA, 13 nt, Human
uauuuuucacaua

SEQ ID NO: 2737602 - RNA, 15 nt, Human
uauuuuguucauaca

SEQ ID NO: 2737603 - RNA, 16 nt, Human
uauuuuguucauacau

SEQ ID NO: 2737604 - RNA, 21 nt, Human
ucaaacagucucaggaaauca

SEQ ID NO: 2737605 - RNA, 20 nt, Human
ucaaacagucucaggaaauc

SEQ ID NO: 2737606 - RNA, 13 nt, Human
ucaaacagucuca

SEQ ID NO: 2737607 - RNA, 16 nt, Human
ucaaaagcugggcagg

SEQ ID NO: 2737608 - RNA, 15 nt, Human
uauuuuuguagcacu

SEQ ID NO: 2737609 - RNA, 19 nt, Human
uauuuuuguagcacugaca

SEQ ID NO: 2737610 - RNA, 22 nt, Human
ucaaagauauuuugcuuuguga

SEQ ID NO: 2737611 - RNA, 20 nt, Human
ucaaagauauuuugcuuugu

SEQ ID NO: 2737612 - RNA, 13 nt, Human
ucaaagauauuuu

SEQ ID NO: 2737613 - RNA, 23 nt, Human
ucaaauacgugggcauucaaaug

SEQ ID NO: 2737614 - RNA, 20 nt, Human
ucaaauacgugggcauucaa

SEQ ID NO: 2737615 - RNA, 15 nt, Human
ucaaaguugccuaaa

SEQ ID NO: 2737616 - RNA, 22 nt, Human
ucaaauacgugggcauucaaau

SEQ ID NO: 2737617 - RNA, 21 nt, Human
ucaaauacgugggcauucaaa

SEQ ID NO: 2737618 - RNA, 13 nt, Human
acaugagcaucag

SEQ ID NO: 2737619 - RNA, 22 nt, Human
acaugaaaacacauuuuucuua

SEQ ID NO: 2737620 - RNA, 23 nt, Human
acaugaaaacacauuuuucuuag

SEQ ID NO: 2737621 - RNA, 19 nt, Human
acauggaguauaugucaag

SEQ ID NO: 2737622 - RNA, 15 nt, Human
acauggaguauaugu

SEQ ID NO: 2737623 - RNA, 23 nt, Human
acaugagcaucaggccaggcccu

SEQ ID NO: 2737624 - RNA, 18 nt, Human
acauggaauaacauguaa

SEQ ID NO: 2737625 - RNA, 14 nt, Human
acauggaaguacua

SEQ ID NO: 2737626 - RNA, 20 nt, Human
acauggaauaacauguaauu

SEQ ID NO: 2737627 - RNA, 21 nt, Human
acaugucuuuucuugcaugag

SEQ ID NO: 2737628 - RNA, 19 nt, Human
ucagugccuuauggaacac

SEQ ID NO: 2737629 - RNA, 20 nt, Human
ucagugccuuauggaacacu

SEQ ID NO: 2737630 - RNA, 22 nt, Human
ucagugccuuauggaacacucu

SEQ ID NO: 2737631 - RNA, 23 nt, Human
ucagugccuuauggaacacucug

SEQ ID NO: 2737632 - RNA, 14 nt, Human
ucaguggcagcugc

SEQ ID NO: 2737633 - RNA, 15 nt, Human
ucaguggcagcugcu

SEQ ID NO: 2737634 - RNA, 17 nt, Human
ucaguuguuaguguguc

SEQ ID NO: 2737635 - RNA, 16 nt, Human
ucaguggcagcugcuu

SEQ ID NO: 2737636 - RNA, 13 nt, Human
ucaguggcagcug

SEQ ID NO: 2737637 - RNA, 19 nt, Human
ucaguuguuagugugucuu

SEQ ID NO: 2737638 - RNA, 22 nt, Human
ucaggugucccugcacuugcag

SEQ ID NO: 2737639 - RNA, 13 nt, Human
ucaguaagccgug

SEQ ID NO: 2737640 - RNA, 13 nt, Human
ucaguaauaacuc

SEQ ID NO: 2737641 - RNA, 20 nt, Human
acccuugccgucuaccugag

SEQ ID NO: 2737642 - RNA, 20 nt, Human
accgaaaacguggcugcuuc

SEQ ID NO: 2737643 - RNA, 15 nt, Human
ucaggugucccugca

SEQ ID NO: 2737644 - RNA, 23 nt, Human
ucagguggggucacucuggcagc

SEQ ID NO: 2737645 - RNA, 17 nt, Human
ucaggugucccugcacu

SEQ ID NO: 2737646 - RNA, 18 nt, Human
ucaggugucccugcacuu

SEQ ID NO: 2737647 - RNA, 22 nt, Human
ucagguggggucacucuggcag

SEQ ID NO: 2737648 - RNA, 21 nt, Human
accgaacugauguaaguaaac

SEQ ID NO: 2737649 - RNA, 21 nt, Human
accgaaaacguggcugcuuca

SEQ ID NO: 2737650 - RNA, 22 nt, Human
accgaaaacguggcugcuucaa

SEQ ID NO: 2737651 - RNA, 19 nt, Human
acccgcuaagagggaggga

SEQ ID NO: 2737652 - RNA, 18 nt, Human
ucaggguuggccccugcc

SEQ ID NO: 2737653 - RNA, 19 nt, Human
ucaggguuggccccugccc

SEQ ID NO: 2737654 - RNA, 12 nt, Human
ucaggggugugc

SEQ ID NO: 2737655 - RNA, 19 nt, Human
ucaggggugugcggccuuu

SEQ ID NO: 2737656 - RNA, 23 nt, Human
ucaggggugugcggccuuuggcu

SEQ ID NO: 2737657 - RNA, 17 nt, Human
ucaggguuggccccugc

SEQ ID NO: 2737658 - RNA, 19 nt, Human
ucaggccaggcccucugcc

SEQ ID NO: 2737659 - RNA, 17 nt, Human
ucaggccaggcccucug

SEQ ID NO: 2737660 - RNA, 18 nt, Human
ucaggccaggcccucugc

SEQ ID NO: 2737661 - RNA, 17 nt, Human
ucaggcaggugggaugg

SEQ ID NO: 2737662 - RNA, 18 nt, Human
ucaggcaggugggaugga

SEQ ID NO: 2737663 - RNA, 13 nt, Human
acccccagccugc

SEQ ID NO: 2737664 - RNA, 12 nt, Human
acccccagccug

SEQ ID NO: 2737665 - RNA, 13 nt, Human
ucaggccagcugc

SEQ ID NO: 2737666 - RNA, 12 nt, Human
ucaggccaggcc

SEQ ID NO: 2737667 - RNA, 13 nt, Human
ucaggccaggccc

SEQ ID NO: 2737668 - RNA, 14 nt, Human
ucaggccaggcccu

SEQ ID NO: 2737669 - RNA, 15 nt, Human
ucaggccaggcccuc

SEQ ID NO: 2737670 - RNA, 16 nt, Human
ucaggccaggcccucu

SEQ ID NO: 2737671 - RNA, 21 nt, Human
acccuccuuucaccacaugug

SEQ ID NO: 2737672 - RNA, 19 nt, Human
acccgggaagggggcuggg

SEQ ID NO: 2737673 - RNA, 20 nt, Human
acccgggaagggggcuggga

SEQ ID NO: 2737674 - RNA, 17 nt, Human
acccucauguucuuaau

SEQ ID NO: 2737675 - RNA, 15 nt, Human
acccucauguucuua

SEQ ID NO: 2737676 - RNA, 14 nt, Human
acccucauguucuu

SEQ ID NO: 2737677 - RNA, 22 nt, Human
acccgggaagggggcugggaca

SEQ ID NO: 2737678 - RNA, 11 nt, Human
acccugaggcc

SEQ ID NO: 2737679 - RNA, 17 nt, Human
acccugaggcccagagg

SEQ ID NO: 2737680 - RNA, 13 nt, Human
acccugaggccca

SEQ ID NO: 2737681 - RNA, 19 nt, Human
acccugaggcccagagggc

SEQ ID NO: 2737682 - RNA, 21 nt, Human
acccugaggcccagagggccu

SEQ ID NO: 2737683 - RNA, 23 nt, Human
acccugaggcccagagggccugc

SEQ ID NO: 2737684 - RNA, 17 nt, Human
ucagagcugcccucucc

SEQ ID NO: 2737685 - RNA, 15 nt, Human
ucagagcugcccucu

SEQ ID NO: 2737686 - RNA, 16 nt, Human
ucagagcugcccucuc

SEQ ID NO: 2737687 - RNA, 16 nt, Human
ucagaucucuaacuuc

SEQ ID NO: 2737688 - RNA, 15 nt, Human
ucagaucucuaacuu

SEQ ID NO: 2737689 - RNA, 13 nt, Human
ucagaucugccua

SEQ ID NO: 2737690 - RNA, 20 nt, Human
ucagaucugccuaaggacuu

SEQ ID NO: 2737691 - RNA, 18 nt, Human
ucagaucugccuaaggac

SEQ ID NO: 2737692 - RNA, 15 nt, Human
ucagaucugccuaag

SEQ ID NO: 2737693 - RNA, 13 nt, Human
ucagagcugcccu

SEQ ID NO: 2737694 - RNA, 14 nt, Human
ucagagcugcccuc

SEQ ID NO: 2737695 - RNA, 23 nt, Human
ucagagacuccugcaggcagcca

SEQ ID NO: 2737696 - RNA, 15 nt, Human
acccagcccacuucu

SEQ ID NO: 2737697 - RNA, 23 nt, Human
ucagaaguuucugccgcagcccu

SEQ ID NO: 2737698 - RNA, 22 nt, Human
ucagagacuccugcaggcagcc

SEQ ID NO: 2737699 - RNA, 20 nt, Human
ucagaauucucagaaucuca

SEQ ID NO: 2737700 - RNA, 12 nt, Human
ucagaauucuca

SEQ ID NO: 2737701 - RNA, 10 nt, Human
ucagaauucu

SEQ ID NO: 2737702 - RNA, 13 nt, Human
acccagcgagccc

SEQ ID NO: 2737703 - RNA, 16 nt, Human
acccagcgagcccugg

SEQ ID NO: 2737704 - RNA, 17 nt, Human
acccagcgagcccuggu

SEQ ID NO: 2737705 - RNA, 13 nt, Human
acccaggagcccc

SEQ ID NO: 2737706 - RNA, 15 nt, Human
acccaggagccccga

SEQ ID NO: 2737707 - RNA, 11 nt, Human
acccaggugcu

SEQ ID NO: 2737708 - RNA, 23 nt, Human
acccaggugcuaggaacacuccu

SEQ ID NO: 2737709 - RNA, 13 nt, Human
accccagguuucu

SEQ ID NO: 2737710 - RNA, 20 nt, Human
acccacugcuuuuggucugu

SEQ ID NO: 2737711 - RNA, 22 nt, Human
accauuuugcugucccuuuucc

SEQ ID NO: 2737712 - RNA, 21 nt, Human
accauuuugggguacccacug

SEQ ID NO: 2737713 - RNA, 23 nt, Human
accauuuugcugucccuuuuccu

SEQ ID NO: 2737714 - RNA, 19 nt, Human
accauucuccaccugccag

SEQ ID NO: 2737715 - RNA, 20 nt, Human
accauucuccaccugccagg

SEQ ID NO: 2737716 - RNA, 21 nt, Human
accauucuccaccugccaggg

SEQ ID NO: 2737717 - RNA, 18 nt, Human
accaugggauaaaugcca

SEQ ID NO: 2737718 - RNA, 17 nt, Human
accaugggauaaaugcc

SEQ ID NO: 2737719 - RNA, 18 nt, Human
ucacugcaaccuccgccu

SEQ ID NO: 2737720 - RNA, 14 nt, Human
ucacuguugcccag

SEQ ID NO: 2737721 - RNA, 15 nt, Human
ucacuguugcccagg

SEQ ID NO: 2737722 - RNA, 22 nt, Human
ucaccagccccagugcccacag

SEQ ID NO: 2737723 - RNA, 19 nt, Human
ucacauuccugaacaggau

SEQ ID NO: 2737724 - RNA, 21 nt, Human
ucacuauguugcccaggcagg

SEQ ID NO: 2737725 - RNA, 23 nt, Human
ucacugagacagcccgggcucug

SEQ ID NO: 2737726 - RNA, 13 nt, Human
acuguggguagac

SEQ ID NO: 2737727 - RNA, 21 nt, Human
acuguuaauaguucagguaac

SEQ ID NO: 2737728 - RNA, 17 nt, Human
acuguuaauaguucagg

SEQ ID NO: 2737729 - RNA, 23 nt, Human
ucgucacugcuuaacuucacaua

SEQ ID NO: 2737730 - RNA, 17 nt, Human
ucuaccaaaaaucucaa

SEQ ID NO: 2737731 - RNA, 21 nt, Human
ucuacccucuuagaaaaacca

SEQ ID NO: 2737732 - RNA, 21 nt, Human
ucuaagauaguaacaaugaag

SEQ ID NO: 2737733 - RNA, 17 nt, Human
ucuaaagcugccagccg

SEQ ID NO: 2737734 - RNA, 16 nt, Human
ucuaaaggcuaccuuu

SEQ ID NO: 2737735 - RNA, 13 nt, Human
ucuaaaggcuacc

SEQ ID NO: 2737736 - RNA, 23 nt, Human
acugucagcuccccucggagaag

SEQ ID NO: 2737737 - RNA, 22 nt, Human
acugucagcuccccucggagaa

SEQ ID NO: 2737738 - RNA, 20 nt, Human
acuguaucaugacaaagacu

SEQ ID NO: 2737739 - RNA, 16 nt, Human
acuguaucaugacaaa

SEQ ID NO: 2737740 - RNA, 16 nt, Human
acuguacaugaaaaca

SEQ ID NO: 2737741 - RNA, 19 nt, Human
acuguacaugaaaacacau

SEQ ID NO: 2737742 - RNA, 22 nt, Human
acuguacaaaguagaagucuua

SEQ ID NO: 2737743 - RNA, 16 nt, Human
acuguacaaaguagaa

SEQ ID NO: 2737744 - RNA, 17 nt, Human
acuggguacuuguggac

SEQ ID NO: 2737745 - RNA, 18 nt, Human
acuggguacuuguggaca

SEQ ID NO: 2737746 - RNA, 14 nt, Human
acuguaucaugaca

SEQ ID NO: 2737747 - RNA, 21 nt, Human
acuguacaugaaaacacauuu

SEQ ID NO: 2737748 - RNA, 20 nt, Human
acuguacaugaaaacacauu

SEQ ID NO: 2737749 - RNA, 22 nt, Human
acugaagaagcaccaaucauga

SEQ ID NO: 2737750 - RNA, 14 nt, Human
ucgcuccugugucu

SEQ ID NO: 2737751 - RNA, 21 nt, Human
acugggcuuggggaccagagc

SEQ ID NO: 2737752 - RNA, 15 nt, Human
acuggguacuugugg

SEQ ID NO: 2737753 - RNA, 23 nt, Human
ucgcugugucagcauagaaguaa

SEQ ID NO: 2737754 - RNA, 19 nt, Human
acuugagaauuacccuuuu

SEQ ID NO: 2737755 - RNA, 14 nt, Human
acuugucuuuggac

SEQ ID NO: 2737756 - RNA, 14 nt, Human
acuuggaagcuccg

SEQ ID NO: 2737757 - RNA, 17 nt, Human
ucucaaaacugcacugu

SEQ ID NO: 2737758 - RNA, 16 nt, Human
ucucaaaaaaagaaaa

SEQ ID NO: 2737759 - RNA, 16 nt, Human
ucuauuguuucuuuca

SEQ ID NO: 2737760 - RNA, 21 nt, Human
acuucuaaguaaaaccacagc

SEQ ID NO: 2737761 - RNA, 18 nt, Human
acuucuccacccugcucu

SEQ ID NO: 2737762 - RNA, 13 nt, Human
acuucuaaguaaa

SEQ ID NO: 2737763 - RNA, 19 nt, Human
acuucuaaguaaaaccaca

SEQ ID NO: 2737764 - RNA, 18 nt, Human
acuucuaaguaaaaccac

SEQ ID NO: 2737765 - RNA, 17 nt, Human
acuucgggaggucgagg

SEQ ID NO: 2737766 - RNA, 20 nt, Human
acuucgggaggucgaggcag

SEQ ID NO: 2737767 - RNA, 22 nt, Human
acuucccuuucugcuuguguua

SEQ ID NO: 2737768 - RNA, 14 nt, Human
acuucccuuucugc

SEQ ID NO: 2737769 - RNA, 17 nt, Human
ucuagcauggcauauuu

SEQ ID NO: 2737770 - RNA, 18 nt, Human
ucuagcauggcauauuuu

SEQ ID NO: 2737771 - RNA, 24 nt, Human
ucuagauacuguaucaugacaaag

SEQ ID NO: 2737772 - RNA, 17 nt, Human
acuucccagugaauucu

SEQ ID NO: 2737773 - RNA, 13 nt, Human
ucuauaauuuaaa

SEQ ID NO: 2737774 - RNA, 12 nt, Human
ucuaguucacuc

SEQ ID NO: 2737775 - RNA, 22 nt, Human
ucuaguuugauuaaauucuugc

SEQ ID NO: 2737776 - RNA, 23 nt, Human
ucuaguuugauuaaauucuugca

SEQ ID NO: 2737777 - RNA, 19 nt, Human
ucuaguucacucuccauuu

SEQ ID NO: 2737778 - RNA, 16 nt, Human
ucuaguucacucucca

SEQ ID NO: 2737779 - RNA, 20 nt, Human
acuuccagauccuggaaauc

SEQ ID NO: 2737780 - RNA, 18 nt, Human
acuuccaauuuacauacu

SEQ ID NO: 2737781 - RNA, 17 nt, Human
acuuccacugccauccu

SEQ ID NO: 2737782 - RNA, 12 nt, Human
ucuaccugaggg

SEQ ID NO: 2737783 - RNA, 19 nt, Human
ucuaccugaggggccucuu

SEQ ID NO: 2737784 - RNA, 20 nt, Human
acuuagagguggggagcaga

SEQ ID NO: 2737785 - RNA, 15 nt, Human
acuuacuguacauga

SEQ ID NO: 2737786 - RNA, 14 nt, Human
acuuacuguacaug

SEQ ID NO: 2737787 - RNA, 13 nt, Human
acuuacuguacau

SEQ ID NO: 2737788 - RNA, 16 nt, Human
agaaagacuauucaaa

SEQ ID NO: 2737789 - RNA, 22 nt, Human
agaaagacuaucuaaauguuga

SEQ ID NO: 2737790 - RNA, 20 nt, Human
agaaagacuaucuaaauguu

SEQ ID NO: 2737791 - RNA, 20 nt, Human
ucugaaggguaauuauauag

SEQ ID NO: 2737792 - RNA, 18 nt, Human
ucugaaggcuggguucug

SEQ ID NO: 2737793 - RNA, 22 nt, Human
ucugaaggacauugcggacagc

SEQ ID NO: 2737794 - RNA, 15 nt, Human
agaaaugccuuaccc

SEQ ID NO: 2737795 - RNA, 16 nt, Human
agaaacacaacuauau

SEQ ID NO: 2737796 - RNA, 23 nt, Human
agaaacuuaagguuaccuuuguu

SEQ ID NO: 2737797 - RNA, 19 nt, Human
agaaaaaauauuuucccua

SEQ ID NO: 2737798 - RNA, 17 nt, Human
agaaaaaauauuuuccu

SEQ ID NO: 2737799 - RNA, 23 nt, Human
agaaaaaauauuuuccugccagg

SEQ ID NO: 2737800 - RNA, 18 nt, Human
agaaaaaugagccuggca

SEQ ID NO: 2737801 - RNA, 16 nt, Human
ucucuugguccugcug

SEQ ID NO: 2737802 - RNA, 17 nt, Human
ucucuugguccugcugc

SEQ ID NO: 2737803 - RNA, 18 nt, Human
ucucuugguccugcugca

SEQ ID NO: 2737804 - RNA, 23 nt, Human
acuuuggaaagaguaggaagacu

SEQ ID NO: 2737805 - RNA, 23 nt, Human
acuuuggaaagacuuuuccaacc

SEQ ID NO: 2737806 - RNA, 13 nt, Human
acuuuggaaagag

SEQ ID NO: 2737807 - RNA, 14 nt, Human
acuuuggaaagagu

SEQ ID NO: 2737808 - RNA, 14 nt, Human
acuuguggacacag

SEQ ID NO: 2737809 - RNA, 16 nt, Human
acuuuaaaaggagcca

SEQ ID NO: 2737810 - RNA, 22 nt, Human
acuuguuuuauuuaaccucuaa

SEQ ID NO: 2737811 - RNA, 23 nt, Human
acuuuaccuuuuuuauacauaaa

SEQ ID NO: 2737812 - RNA, 21 nt, Human
ucucucacuuguuuuauuuaa

SEQ ID NO: 2737813 - RNA, 22 nt, Human
ucucucacuuguuuuauuuaac

SEQ ID NO: 2737814 - RNA, 12 nt, Human
ucucucaggcca

SEQ ID NO: 2737815 - RNA, 21 nt, Human
ucucucaggccaaacucaccu

SEQ ID NO: 2737816 - RNA, 18 nt, Human
acuuuguguucaccuugu

SEQ ID NO: 2737817 - RNA, 22 nt, Human
acuuugugcugggguuaucuga

SEQ ID NO: 2737818 - RNA, 16 nt, Human
acuuuguguucaccuu

SEQ ID NO: 2737819 - RNA, 19 nt, Human
ucuccuguaccucuugagc

SEQ ID NO: 2737820 - RNA, 21 nt, Human
ucuccuuggugucgggcauga

SEQ ID NO: 2737821 - RNA, 23 nt, Human
ucuccuuggugucgggcaugaca

SEQ ID NO: 2737822 - RNA, 19 nt, Human
agaagcaccaaucaugaau

SEQ ID NO: 2737823 - RNA, 16 nt, Human
agaagcagaggaagga

SEQ ID NO: 2737824 - RNA, 23 nt, Human
ucugcccacucccugcaaccuga

SEQ ID NO: 2737825 - RNA, 23 nt, Human
agaagcccaggaaaggcuccagg

SEQ ID NO: 2737826 - RNA, 21 nt, Human
agaagccccacccugccucac

SEQ ID NO: 2737827 - RNA, 12 nt, Human
ucugcccuuggu

SEQ ID NO: 2737828 - RNA, 23 nt, Human
ucugcccuugguuaggcauugug

SEQ ID NO: 2737829 - RNA, 23 nt, Human
agaaccuuuugagugccuuacac

SEQ ID NO: 2737830 - RNA, 19 nt, Human
agaaccuuuugagugccuu

SEQ ID NO: 2737831 - RNA, 13 nt, Human
agaaguugauaug

SEQ ID NO: 2737832 - RNA, 22 nt, Human
agaaguuugagaucagccuggg

SEQ ID NO: 2737833 - RNA, 16 nt, Human
agaaggaucuucaucu

SEQ ID NO: 2737834 - RNA, 14 nt, Human
agaagcuccaggua

SEQ ID NO: 2737835 - RNA, 18 nt, Human
ucuggcagcucagagagg

SEQ ID NO: 2737836 - RNA, 21 nt, Human
ucuggcagcucagagagggug

SEQ ID NO: 2737837 - RNA, 16 nt, Human
ucuggcagcucagaga

SEQ ID NO: 2737838 - RNA, 17 nt, Human
ucuggcagcucagagag

SEQ ID NO: 2737839 - RNA, 20 nt, Human
ucuggcagaguugaagacag

SEQ ID NO: 2737840 - RNA, 23 nt, Human
ucuggcagaguugaagacagagc

SEQ ID NO: 2737841 - RNA, 22 nt, Human
ucugcuuugggguuuaucagaa

SEQ ID NO: 2737842 - RNA, 15 nt, Human
ugaauacuuuauaaa

SEQ ID NO: 2737843 - RNA, 22 nt, Human
ugaaggguaauuauauaguuac

SEQ ID NO: 2737844 - RNA, 14 nt, Human
ugaagucacacagu

SEQ ID NO: 2737845 - RNA, 17 nt, Human
agaguauuuuugacaga

SEQ ID NO: 2737846 - RNA, 18 nt, Human
agaguauuuuugacagaa

SEQ ID NO: 2737847 - RNA, 22 nt, Human
ugaauggcuuuguauagaaccu

SEQ ID NO: 2737848 - RNA, 19 nt, Human
ugaauggcuuuguauagaa

SEQ ID NO: 2737849 - RNA, 18 nt, Human
ugaauggcuuuguauaga

SEQ ID NO: 2737850 - RNA, 17 nt, Human
ugaauggcuuuguauag

SEQ ID NO: 2737851 - RNA, 11 nt, Human
ugaauggcuuu

SEQ ID NO: 2737852 - RNA, 15 nt, Human
ugaauggcuuuguau

SEQ ID NO: 2737853 - RNA, 12 nt, Human
ugaauggcuuug

SEQ ID NO: 2737854 - RNA, 16 nt, Human
agagggagggagggcu

SEQ ID NO: 2737855 - RNA, 23 nt, Human
ugaaaguacauuuggagacacaa

SEQ ID NO: 2737856 - RNA, 14 nt, Human
ugaaaguacauuug

SEQ ID NO: 2737857 - RNA, 15 nt, Human
agagguuaagguggg

SEQ ID NO: 2737858 - RNA, 16 nt, Human
agagguggggagcaga

SEQ ID NO: 2737859 - RNA, 15 nt, Human
agaguauuuuugaca

SEQ ID NO: 2737860 - RNA, 14 nt, Human
agaguauuuuugac

SEQ ID NO: 2737861 - RNA, 22 nt, Human
agauacaguuacucagaauucu

SEQ ID NO: 2737862 - RNA, 11 nt, Human
agauacuguau

SEQ ID NO: 2737863 - RNA, 14 nt, Human
agauacuggauugu

SEQ ID NO: 2737864 - RNA, 17 nt, Human
agauacuggauuguacu

SEQ ID NO: 2737865 - RNA, 18 nt, Human
agauaauauuaaggaaga

SEQ ID NO: 2737866 - RNA, 22 nt, Human
agauaauauuaaggaagacaau

SEQ ID NO: 2737867 - RNA, 20 nt, Human
agauacaggaaaagcugcug

SEQ ID NO: 2737868 - RNA, 13 nt, Human
agauacaguuacu

SEQ ID NO: 2737869 - RNA, 18 nt, Human
agaucaaaagguuaauaa

SEQ ID NO: 2737870 - RNA, 21 nt, Human
agauauuuugcuuugugauuu

SEQ ID NO: 2737871 - RNA, 20 nt, Human
agauauuuugcuuugugauu

SEQ ID NO: 2737872 - RNA, 16 nt, Human
agauacuguaucauga

SEQ ID NO: 2737873 - RNA, 15 nt, Human
agauacuguaucaug

SEQ ID NO: 2737874 - RNA, 18 nt, Human
agauaauacaccacuaca

SEQ ID NO: 2737875 - RNA, 20 nt, Human
agaguuguuacauuuuuaag

SEQ ID NO: 2737876 - RNA, 19 nt, Human
agaguuguuacauuuuuaa

SEQ ID NO: 2737877 - RNA, 17 nt, Human
agaguuguuacauuuuu

SEQ ID NO: 2737878 - RNA, 16 nt, Human
agaguuguuacauuuu

SEQ ID NO: 2737879 - RNA, 15 nt, Human
agagucacuggaaca

SEQ ID NO: 2737880 - RNA, 20 nt, Human
agaguauuuuugacagaaua

SEQ ID NO: 2737881 - RNA, 17 nt, Human
ugaauuuuguguuagag

SEQ ID NO: 2737882 - RNA, 21 nt, Human
ugaauuuuguguuagagauuu

SEQ ID NO: 2737883 - RNA, 23 nt, Human
ugaauuucuuuugccguuauuaa

SEQ ID NO: 2737884 - RNA, 19 nt, Human
ugacacacagcucuguccu

SEQ ID NO: 2737885 - RNA, 19 nt, Human
ugacaaagacugaguacgu

SEQ ID NO: 2737886 - RNA, 16 nt, Human
ugacacacagcucugu

SEQ ID NO: 2737887 - RNA, 18 nt, Human
ugacacacagcucugucc

SEQ ID NO: 2737888 - RNA, 20 nt, Human
ugacacaugcaaggucauuu

SEQ ID NO: 2737889 - RNA, 12 nt, Human
ugacacaugcaa

SEQ ID NO: 2737890 - RNA, 23 nt, Human
agcaacgcaggcccccaggugcc

SEQ ID NO: 2737891 - RNA, 23 nt, Human
agauuuuuuuguuguuuguuuag

SEQ ID NO: 2737892 - RNA, 19 nt, Human
agauuuuuuuguuguuugu

SEQ ID NO: 2737893 - RNA, 18 nt, Human
agauuuuuuuguuguuug

SEQ ID NO: 2737894 - RNA, 16 nt, Human
agauuuuuuuguuguu

SEQ ID NO: 2737895 - RNA, 15 nt, Human
agauuuuuuuguugu

SEQ ID NO: 2737896 - RNA, 13 nt, Human
agcaagacgcugu

SEQ ID NO: 2737897 - RNA, 16 nt, Human
agcaagacgcugugcu

SEQ ID NO: 2737898 - RNA, 23 nt, Human
agcaagacgcugugcugcccugc

SEQ ID NO: 2737899 - RNA, 17 nt, Human
agcaagacgcugugcug

SEQ ID NO: 2737900 - RNA, 20 nt, Human
agcaagacgcugugcugccc

SEQ ID NO: 2737901 - RNA, 21 nt, Human
agcaagacgcugugcugcccu

SEQ ID NO: 2737902 - RNA, 22 nt, Human
agcaagacgcugugcugcccug

SEQ ID NO: 2737903 - RNA, 15 nt, Human
agauucccugagcag

SEQ ID NO: 2737904 - RNA, 13 nt, Human
agauuggaaggaa

SEQ ID NO: 2737905 - RNA, 15 nt, Human
ugacuucuaaguaaa

SEQ ID NO: 2737906 - RNA, 19 nt, Human
ugacuuacuguacaugaaa

SEQ ID NO: 2737907 - RNA, 23 nt, Human
ugacuucuaaguaaaaccacagc

SEQ ID NO: 2737908 - RNA, 22 nt, Human
ugacuucuaaguaaaaccacag

SEQ ID NO: 2737909 - RNA, 24 nt, Human
ugacuucuaaguaaaaccacagca

SEQ ID NO: 2737910 - RNA, 19 nt, Human
agauucauauuuacuucuu

SEQ ID NO: 2737911 - RNA, 22 nt, Human
agauucauauuuacuucuuaua

SEQ ID NO: 2737912 - RNA, 21 nt, Human
agauuuugaaauuuuuauuaa

SEQ ID NO: 2737913 - RNA, 19 nt, Human
agauuuuauuauguaaauc

SEQ ID NO: 2737914 - RNA, 17 nt, Human
agauuugaacucuucaa

SEQ ID NO: 2737915 - RNA, 14 nt, Human
agauuuuauuaugu

SEQ ID NO: 2737916 - RNA, 18 nt, Human
agauuuuauuauguaaau

SEQ ID NO: 2737917 - RNA, 17 nt, Human
agauuuuauuauguaaa

SEQ ID NO: 2737918 - RNA, 16 nt, Human
agauuuuauuauguaa

SEQ ID NO: 2737919 - RNA, 15 nt, Human
agauuuuauuaugua

SEQ ID NO: 2737920 - RNA, 16 nt, Human
agaugcaguucugaag

SEQ ID NO: 2737921 - RNA, 16 nt, Human
agaugccgcauuugga

SEQ ID NO: 2737922 - RNA, 21 nt, Human
ugacccaugcugcccugugag

SEQ ID NO: 2737923 - RNA, 12 nt, Human
ugacccaugcug

SEQ ID NO: 2737924 - RNA, 16 nt, Human
ugacccaugcugcccu

SEQ ID NO: 2737925 - RNA, 14 nt, Human
ugacccaugcugcc

SEQ ID NO: 2737926 - RNA, 15 nt, Human
ugacccaugcugccc

SEQ ID NO: 2737927 - RNA, 18 nt, Human
agauggaaugcuguguua

SEQ ID NO: 2737928 - RNA, 13 nt, Human
agauggaaugcug

SEQ ID NO: 2737929 - RNA, 15 nt, Human
agauggaaugcugug

SEQ ID NO: 2737930 - RNA, 18 nt, Human
ugaccugaggcccuucuc

SEQ ID NO: 2737931 - RNA, 19 nt, Human
ugaccugaggcccuucucu

SEQ ID NO: 2737932 - RNA, 13 nt, Human
ugacuuacuguac

SEQ ID NO: 2737933 - RNA, 16 nt, Human
ugacuuacuguacaug

SEQ ID NO: 2737934 - RNA, 15 nt, Human
ugacuuacuguacau

SEQ ID NO: 2737935 - RNA, 14 nt, Human
agacuauucaaaca

SEQ ID NO: 2737936 - RNA, 12 nt, Human
agacuauucaaa

SEQ ID NO: 2737937 - RNA, 15 nt, Human
agacuauucaaacag

SEQ ID NO: 2737938 - RNA, 21 nt, Human
agaccuucuccuucaccuuug

SEQ ID NO: 2737939 - RNA, 23 nt, Human
agaccuucuccuucaccuuuguc

SEQ ID NO: 2737940 - RNA, 11 nt, Human
agaccuucucc

SEQ ID NO: 2737941 - RNA, 15 nt, Human
agaccuucuccuuca

SEQ ID NO: 2737942 - RNA, 18 nt, Human
agaccuucuccuucaccu

SEQ ID NO: 2737943 - RNA, 13 nt, Human
ucuugagccuggg

SEQ ID NO: 2737944 - RNA, 16 nt, Human
ucuugagccugggagg

SEQ ID NO: 2737945 - RNA, 20 nt, Human
ucuugagccuugaacuuuga

SEQ ID NO: 2737946 - RNA, 16 nt, Human
ucuugagccuugaacu

SEQ ID NO: 2737947 - RNA, 13 nt, Human
ucuugauucauaa

SEQ ID NO: 2737948 - RNA, 17 nt, Human
ucuuggucagauuugaa

SEQ ID NO: 2737949 - RNA, 14 nt, Human
ucuugguccugcug

SEQ ID NO: 2737950 - RNA, 19 nt, Human
ucuugcaauggcagccuug

SEQ ID NO: 2737951 - RNA, 18 nt, Human
ucuugcaauggcagccuu

SEQ ID NO: 2737952 - RNA, 22 nt, Human
ucuugcaauggcagccuuggca

SEQ ID NO: 2737953 - RNA, 17 nt, Human
ucuuuccugaggcuggg

SEQ ID NO: 2737954 - RNA, 15 nt, Human
ucuuuaacucauaaa

SEQ ID NO: 2737955 - RNA, 15 nt, Human
ucuugguccugcugc

SEQ ID NO: 2737956 - RNA, 17 nt, Human
ucuugguccugcugcag

SEQ ID NO: 2737957 - RNA, 19 nt, Human
ucuugguccugcugcaguu

SEQ ID NO: 2737958 - RNA, 15 nt, Human
ucuucacaacagauu

SEQ ID NO: 2737959 - RNA, 12 nt, Human
ucuucagagacu

SEQ ID NO: 2737960 - RNA, 17 nt, Human
ucuucagagacuccugc

SEQ ID NO: 2737961 - RNA, 18 nt, Human
ucuucagagacuccugca

SEQ ID NO: 2737962 - RNA, 21 nt, Human
ucuuccaggcugggagagccu

SEQ ID NO: 2737963 - RNA, 20 nt, Human
ucuucagagacuccugcagg

SEQ ID NO: 2737964 - RNA, 15 nt, Human
ucuuccaggcuggga

SEQ ID NO: 2737965 - RNA, 17 nt, Human
ucuuccaggcugggaga

SEQ ID NO: 2737966 - RNA, 20 nt, Human
ucuuccaggcugggagagcc

SEQ ID NO: 2737967 - RNA, 19 nt, Human
ucuucccuacaguugaaaa

SEQ ID NO: 2737968 - RNA, 22 nt, Human
ucuucccuacaguugaaaaaca

SEQ ID NO: 2737969 - RNA, 14 nt, Human
ucuuccucccuccc

SEQ ID NO: 2737970 - RNA, 15 nt, Human
ucuuccucccucccu

SEQ ID NO: 2737971 - RNA, 19 nt, Human
agacauacuaaccagcaga

SEQ ID NO: 2737972 - RNA, 19 nt, Human
agacauucuuccaaaaaga

SEQ ID NO: 2737973 - RNA, 12 nt, Human
ucuucugcuuca

SEQ ID NO: 2737974 - RNA, 19 nt, Human
ucuucugcuucagccuccc

SEQ ID NO: 2737975 - RNA, 21 nt, Human
ucuucugaacuuggcgcugcc

SEQ ID NO: 2737976 - RNA, 15 nt, Human
ucuucuguacgucug

SEQ ID NO: 2737977 - RNA, 20 nt, Human
ucuucuguggguuucuaaag

SEQ ID NO: 2737978 - RNA, 23 nt, Human
agagcaccuuagacagucccugc

SEQ ID NO: 2737979 - RNA, 22 nt, Human
agagcaccuuagacagucccug

SEQ ID NO: 2737980 - RNA, 21 nt, Human
agagcaccuuagacagucccu

SEQ ID NO: 2737981 - RNA, 20 nt, Human
agagcuagcagcagggaggg

SEQ ID NO: 2737982 - RNA, 13 nt, Human
agagccuuccagg

SEQ ID NO: 2737983 - RNA, 15 nt, Human
agagccuuccagggg

SEQ ID NO: 2737984 - RNA, 17 nt, Human
agagccuuccaggggug

SEQ ID NO: 2737985 - RNA, 22 nt, Human
agagccuuccaggggugggaca

SEQ ID NO: 2737986 - RNA, 14 nt, Human
agagcugccaccug

SEQ ID NO: 2737987 - RNA, 12 nt, Human
ugaaacuuuugg

SEQ ID NO: 2737988 - RNA, 15 nt, Human
ugaaagacuguacaa

SEQ ID NO: 2737989 - RNA, 13 nt, Human
ugaaagacuguac

SEQ ID NO: 2737990 - RNA, 15 nt, Human
agagacuccugcagg

SEQ ID NO: 2737991 - RNA, 17 nt, Human
agagacuccugcaggca

SEQ ID NO: 2737992 - RNA, 18 nt, Human
agagacuccugcaggcag

SEQ ID NO: 2737993 - RNA, 19 nt, Human
agagacuccugcaggcagc

SEQ ID NO: 2737994 - RNA, 20 nt, Human
agagacuccugcaggcagcc

SEQ ID NO: 2737995 - RNA, 21 nt, Human
agagacuccugcaggcagcca

SEQ ID NO: 2737996 - RNA, 22 nt, Human
agagacuccugcaggcagccag

SEQ ID NO: 2737997 - RNA, 20 nt, Human
agagcaaaauugauguguuu

SEQ ID NO: 2737998 - RNA, 19 nt, Human
agagcaagacgcugugcug

SEQ ID NO: 2737999 - RNA, 23 nt, Human
agagcaagacgcugugcugcccu

SEQ ID NO: 2738000 - RNA, 22 nt, Human
agagaucaaccccuucgcuccu

SEQ ID NO: 2738001 - RNA, 23 nt, Human
agagacuccugcaggcagccagg

SEQ ID NO: 2738002 - RNA, 14 nt, Human
agagagaaaauaaa

SEQ ID NO: 2738003 - RNA, 20 nt, Human
ugaaaagcuccauuuuuagu

SEQ ID NO: 2738004 - RNA, 20 nt, Human
ugaaaaaggaggaagagaaa

SEQ ID NO: 2738005 - RNA, 22 nt, Human
ugaaaaaggaggaagagaaaaa

SEQ ID NO: 2738006 - RNA, 16 nt, Human
ugaaaaucgugacaac

SEQ ID NO: 2738007 - RNA, 22 nt, Human
ugaaacugagaugugaacacau

SEQ ID NO: 2738008 - RNA, 19 nt, Human
ugaaacucguuaauuugua

SEQ ID NO: 2738009 - RNA, 23 nt, Human
ugaaacuuguguaaauacaauuu

SEQ ID NO: 2738010 - RNA, 17 nt, Human
ugaaacuuguguaaaua

SEQ ID NO: 2738011 - RNA, 20 nt, Human
ugaaacggaugauuucuaug

SEQ ID NO: 2738012 - RNA, 19 nt, Human
ugaaacggaugauuucuau

SEQ ID NO: 2738013 - RNA, 18 nt, Human
ugaaacggaugauuucua

SEQ ID NO: 2738014 - RNA, 17 nt, Human
ugaaacggaugauuucu

SEQ ID NO: 2738015 - RNA, 16 nt, Human
ugaaacgcaaccacca

SEQ ID NO: 2738016 - RNA, 15 nt, Human
ugaaacggaugauuu

SEQ ID NO: 2738017 - RNA, 17 nt, Human
ugaaaauguauguguaa

SEQ ID NO: 2738018 - RNA, 19 nt, Human
ugaaaaucgugacaacacu

SEQ ID NO: 2738019 - RNA, 21 nt, Human
ucuuucuggcuaugcauuuga

SEQ ID NO: 2738020 - RNA, 20 nt, Human
ucuuucuggcuaugcauuug

SEQ ID NO: 2738021 - RNA, 22 nt, Human
ucuuuggucuacacugugcuga

SEQ ID NO: 2738022 - RNA, 16 nt, Human
ugaaaaaggaggaaga

SEQ ID NO: 2738023 - RNA, 22 nt, Human
ugaaaaagaccuuuggagcaaa

SEQ ID NO: 2738024 - RNA, 12 nt, Human
ugauaugggucu

SEQ ID NO: 2738025 - RNA, 16 nt, Human
ugauaugugaacaguu

SEQ ID NO: 2738026 - RNA, 15 nt, Human
ugauaugugaacagu

SEQ ID NO: 2738027 - RNA, 22 nt, Human
agcauauucaggaagcucaggg

SEQ ID NO: 2738028 - RNA, 20 nt, Human
ugaucacggcucacugcagc

SEQ ID NO: 2738029 - RNA, 21 nt, Human
ugaucacggcucacugcagcc

SEQ ID NO: 2738030 - RNA, 13 nt, Human
agcaucaggccag

SEQ ID NO: 2738031 - RNA, 12 nt, Human
agcaucaggcca

SEQ ID NO: 2738032 - RNA, 18 nt, Human
ugaucacggcucacugca

SEQ ID NO: 2738033 - RNA, 19 nt, Human
ugaucacggcucacugcag

SEQ ID NO: 2738034 - RNA, 20 nt, Human
agcaugucgucaaagcugaa

SEQ ID NO: 2738035 - RNA, 17 nt, Human
agcaugucgucaaagcu

SEQ ID NO: 2738036 - RNA, 12 nt, Human
agcauggcugcc

SEQ ID NO: 2738037 - RNA, 14 nt, Human
agcaucaggccagg

SEQ ID NO: 2738038 - RNA, 16 nt, Human
agcaucaggccaggcc

SEQ ID NO: 2738039 - RNA, 17 nt, Human
agcaucaggccaggccc

SEQ ID NO: 2738040 - RNA, 18 nt, Human
agcaucaggccaggcccu

SEQ ID NO: 2738041 - RNA, 19 nt, Human
agcaucaggccaggcccuc

SEQ ID NO: 2738042 - RNA, 20 nt, Human
agcaucaggccaggcccucu

SEQ ID NO: 2738043 - RNA, 18 nt, Human
agcauggcauauuuuuca

SEQ ID NO: 2738044 - RNA, 19 nt, Human
agcauggcauauuuuucac

SEQ ID NO: 2738045 - RNA, 21 nt, Human
agcauggcauauuuuucacau

SEQ ID NO: 2738046 - RNA, 22 nt, Human
agcauggcauauuuuucacaua

SEQ ID NO: 2738047 - RNA, 18 nt, Human
agcauuguaaaugugcuu

SEQ ID NO: 2738048 - RNA, 17 nt, Human
agcauuguaaaugugcu

SEQ ID NO: 2738049 - RNA, 22 nt, Human
ugaguaacugauuuguaacaag

SEQ ID NO: 2738050 - RNA, 15 nt, Human
ugaguacuacagucc

SEQ ID NO: 2738051 - RNA, 14 nt, Human
agcauauucaggaa

SEQ ID NO: 2738052 - RNA, 14 nt, Human
ugaguacuacaguc

SEQ ID NO: 2738053 - RNA, 17 nt, Human
ugaguacuacaguccuc

SEQ ID NO: 2738054 - RNA, 21 nt, Human
ugaguacuacaguccucccau

SEQ ID NO: 2738055 - RNA, 22 nt, Human
ugaguacuacaguccucccauc

SEQ ID NO: 2738056 - RNA, 23 nt, Human
ugaguacuacaguccucccaucu

SEQ ID NO: 2738057 - RNA, 23 nt, Human
agcauaaauguugacaugggaca

SEQ ID NO: 2738058 - RNA, 15 nt, Human
agcauacguacacau

SEQ ID NO: 2738059 - RNA, 12 nt, Human
ugagaauuaccc

SEQ ID NO: 2738060 - RNA, 21 nt, Human
agcauacguacacauuuuauu

SEQ ID NO: 2738061 - RNA, 20 nt, Human
agcauacguacacauuuuau

SEQ ID NO: 2738062 - RNA, 19 nt, Human
agcauacguacacauuuua

SEQ ID NO: 2738063 - RNA, 18 nt, Human
agcauacguacacauuuu

SEQ ID NO: 2738064 - RNA, 17 nt, Human
agcauacguacacauuu

SEQ ID NO: 2738065 - RNA, 16 nt, Human
agcauacguacacauu

SEQ ID NO: 2738066 - RNA, 18 nt, Human
ugagugucuuaauuaaaa

SEQ ID NO: 2738067 - RNA, 23 nt, Human
ugagugggggaucacagccucug

SEQ ID NO: 2738068 - RNA, 21 nt, Human
ugagugggugaauaauacagu

SEQ ID NO: 2738069 - RNA, 14 nt, Human
ugagucaccaagcc

SEQ ID NO: 2738070 - RNA, 16 nt, Human
ugagucaccaagccca

SEQ ID NO: 2738071 - RNA, 17 nt, Human
ugagucaccaagcccag

SEQ ID NO: 2738072 - RNA, 17 nt, Human
ugagugccuuacacaau

SEQ ID NO: 2738073 - RNA, 20 nt, Human
ugagugccuuacacaauggu

SEQ ID NO: 2738074 - RNA, 19 nt, Human
ugauacgcaacauaauuaa

SEQ ID NO: 2738075 - RNA, 17 nt, Human
ugauacuacaguuuguu

SEQ ID NO: 2738076 - RNA, 14 nt, Human
ugauacuacaguuu

SEQ ID NO: 2738077 - RNA, 21 nt, Human
ugauacaaugcugugcccuaa

SEQ ID NO: 2738078 - RNA, 12 nt, Human
ugauacagaaaa

SEQ ID NO: 2738079 - RNA, 20 nt, Human
ugauacaaugcugugcccua

SEQ ID NO: 2738080 - RNA, 18 nt, Human
ugauacaaugcugugccc

SEQ ID NO: 2738081 - RNA, 17 nt, Human
ugaguucauacccuguu

SEQ ID NO: 2738082 - RNA, 20 nt, Human
ugauaagaaccuuuugagug

SEQ ID NO: 2738083 - RNA, 12 nt, Human
ugauaaguaaau

SEQ ID NO: 2738084 - RNA, 17 nt, Human
ugaugaagaaguugaua

SEQ ID NO: 2738085 - RNA, 22 nt, Human
ugauccaguuuuguuuggacca

SEQ ID NO: 2738086 - RNA, 15 nt, Human
agccacggccaggcc

SEQ ID NO: 2738087 - RNA, 21 nt, Human
ugauccagcagauuauucacu

SEQ ID NO: 2738088 - RNA, 22 nt, Human
ugauccagcagauuauucacug

SEQ ID NO: 2738089 - RNA, 14 nt, Human
agccacggccaggc

SEQ ID NO: 2738090 - RNA, 14 nt, Human
agccacauuccuga

SEQ ID NO: 2738091 - RNA, 18 nt, Human
agccacauuccugaugcu

SEQ ID NO: 2738092 - RNA, 19 nt, Human
agccaccaacauacuccca

SEQ ID NO: 2738093 - RNA, 20 nt, Human
agccaccaacauacucccau

SEQ ID NO: 2738094 - RNA, 23 nt, Human
agccaccaacauacucccaucug

SEQ ID NO: 2738095 - RNA, 15 nt, Human
ugauuaauuaaaaca

SEQ ID NO: 2738096 - RNA, 20 nt, Human
agccacugcaccgggccaca

SEQ ID NO: 2738097 - RNA, 13 nt, Human
agccacugcaccg

SEQ ID NO: 2738098 - RNA, 21 nt, Human
agccacugcaccgggccacag

SEQ ID NO: 2738099 - RNA, 22 nt, Human
agccacugcaccgggccacaga

SEQ ID NO: 2738100 - RNA, 17 nt, Human
ugaugaucuuuaaaaua

SEQ ID NO: 2738101 - RNA, 16 nt, Human
ugauggugcaaugacc

SEQ ID NO: 2738102 - RNA, 17 nt, Human
ugauggugcaaugaccu

SEQ ID NO: 2738103 - RNA, 23 nt, Human
ugauggugcaaugaccuuucaau

SEQ ID NO: 2738104 - RNA, 14 nt, Human
ugaugaucuuuaaa

SEQ ID NO: 2738105 - RNA, 20 nt, Human
ugaugauccuaggcauuugc

SEQ ID NO: 2738106 - RNA, 14 nt, Human
ugaugauccuaggc

SEQ ID NO: 2738107 - RNA, 23 nt, Human
ugauguuuuccaugaguccccug

SEQ ID NO: 2738108 - RNA, 18 nt, Human
ugauguuuuaaggaugcu

SEQ ID NO: 2738109 - RNA, 17 nt, Human
ugauguuuuaaggaugc

SEQ ID NO: 2738110 - RNA, 14 nt, Human
agccagacuggcac

SEQ ID NO: 2738111 - RNA, 19 nt, Human
agccagacuggcacaguuu

SEQ ID NO: 2738112 - RNA, 12 nt, Human
agccaggccaca

SEQ ID NO: 2738113 - RNA, 14 nt, Human
agccaggccacaag

SEQ ID NO: 2738114 - RNA, 22 nt, Human
agccaguaaaugggggugcauu

SEQ ID NO: 2738115 - RNA, 23 nt, Human
agccaguaaaugggggugcauuu

SEQ ID NO: 2738116 - RNA, 12 nt, Human
agccagggucuc

SEQ ID NO: 2738117 - RNA, 21 nt, Human
agccaggccacaagacccuug

SEQ ID NO: 2738118 - RNA, 22 nt, Human
agccaggccacaagacccuugu

SEQ ID NO: 2738119 - RNA, 13 nt, Human
ugauucagcucug

SEQ ID NO: 2738120 - RNA, 14 nt, Human
ugauucagcucugc

SEQ ID NO: 2738121 - RNA, 18 nt, Human
agcccaggaaaggcucca

SEQ ID NO: 2738122 - RNA, 24 nt, Human
agcccaggaaaggcuccaggagca

SEQ ID NO: 2738123 - RNA, 22 nt, Human
agcccaggaaaggcuccaggag

SEQ ID NO: 2738124 - RNA, 23 nt, Human
agcccaggaaaggcuccaggagc

SEQ ID NO: 2738125 - RNA, 15 nt, Human
ugauucccaagcucu

SEQ ID NO: 2738126 - RNA, 16 nt, Human
ugauucccaagcucug

SEQ ID NO: 2738127 - RNA, 18 nt, Human
ugauucccaagcucugcu

SEQ ID NO: 2738128 - RNA, 19 nt, Human
ugauucccaagcucugcuc

SEQ ID NO: 2738129 - RNA, 21 nt, Human
ugauucccaagcucugcuccu

SEQ ID NO: 2738130 - RNA, 22 nt, Human
agcccacuucugccauauucug

SEQ ID NO: 2738131 - RNA, 16 nt, Human
agccauguuuauuaca

SEQ ID NO: 2738132 - RNA, 14 nt, Human
agccauguuuauua

SEQ ID NO: 2738133 - RNA, 13 nt, Human
agccauguuuauu

SEQ ID NO: 2738134 - RNA, 19 nt, Human
agcccaggaaaggcuccag

SEQ ID NO: 2738135 - RNA, 20 nt, Human
agcccaggaaaggcuccagg

SEQ ID NO: 2738136 - RNA, 21 nt, Human
agcccaggaaaggcuccagga

SEQ ID NO: 2738137 - RNA, 23 nt, Human
ugcagccucaaccuccugggcua

SEQ ID NO: 2738138 - RNA, 16 nt, Human
ugcagccucacagucc

SEQ ID NO: 2738139 - RNA, 13 nt, Human
ugcagccucacag

SEQ ID NO: 2738140 - RNA, 15 nt, Human
ugcagccucacaguc

SEQ ID NO: 2738141 - RNA, 17 nt, Human
ugcauaaguuaacuucc

SEQ ID NO: 2738142 - RNA, 14 nt, Human
ugcauaaguuaacu

SEQ ID NO: 2738143 - RNA, 22 nt, Human
agccucagcauccuggcacccg

SEQ ID NO: 2738144 - RNA, 23 nt, Human
agccucagcauccuggcacccgg

SEQ ID NO: 2738145 - RNA, 16 nt, Human
agccucccaaagugcu

SEQ ID NO: 2738146 - RNA, 16 nt, Human
agccucagcauccugg

SEQ ID NO: 2738147 - RNA, 17 nt, Human
agccucagcauccuggc

SEQ ID NO: 2738148 - RNA, 19 nt, Human
agccucagcauccuggcac

SEQ ID NO: 2738149 - RNA, 20 nt, Human
agccucagcauccuggcacc

SEQ ID NO: 2738150 - RNA, 21 nt, Human
agccucagcauccuggcaccc

SEQ ID NO: 2738151 - RNA, 23 nt, Human
ugcacuauagccuaggugacaga

SEQ ID NO: 2738152 - RNA, 23 nt, Human
agcccuucuaccuuccugcaaca

SEQ ID NO: 2738153 - RNA, 20 nt, Human
agccccaaaacucuccucug

SEQ ID NO: 2738154 - RNA, 21 nt, Human
agccccaaaacucuccucugc

SEQ ID NO: 2738155 - RNA, 22 nt, Human
agccccaaaacucuccucugcu

SEQ ID NO: 2738156 - RNA, 20 nt, Human
ugauucuccugccucagccu

SEQ ID NO: 2738157 - RNA, 19 nt, Human
ugauucuccugccucagcc

SEQ ID NO: 2738158 - RNA, 15 nt, Human
ugauucuccugccuc

SEQ ID NO: 2738159 - RNA, 19 nt, Human
agccccuggaugcagccuc

SEQ ID NO: 2738160 - RNA, 17 nt, Human
agccccuggaugcagcc

SEQ ID NO: 2738161 - RNA, 18 nt, Human
agccccuggaugcagccu

SEQ ID NO: 2738162 - RNA, 17 nt, Human
agccccgaggccuucuc

SEQ ID NO: 2738163 - RNA, 22 nt, Human
agccccgaggccuucucugaag

SEQ ID NO: 2738164 - RNA, 16 nt, Human
agccccgaggccuucu

SEQ ID NO: 2738165 - RNA, 24 nt, Human
agccccaaaacucuccucugcugc

SEQ ID NO: 2738166 - RNA, 23 nt, Human
agccccauucugccugcccaggc

SEQ ID NO: 2738167 - RNA, 15 nt, Human
ugcacaagcugcacc

SEQ ID NO: 2738168 - RNA, 22 nt, Human
agcccugguggcagugggagcu

SEQ ID NO: 2738169 - RNA, 23 nt, Human
agcccugguggcagugggagcug

SEQ ID NO: 2738170 - RNA, 18 nt, Human
ugcacaagcugcacccuc

SEQ ID NO: 2738171 - RNA, 21 nt, Human
ugcacaagcugcacccucagg

SEQ ID NO: 2738172 - RNA, 22 nt, Human
ugcacacaccagagcccaccuu

SEQ ID NO: 2738173 - RNA, 20 nt, Human
agccccuucugacccaugcu

SEQ ID NO: 2738174 - RNA, 24 nt, Human
agccccuucugacccaugcugccc

SEQ ID NO: 2738175 - RNA, 21 nt, Human
agcccugguggcagugggagc

SEQ ID NO: 2738176 - RNA, 16 nt, Human
ugcacccucaggcagg

SEQ ID NO: 2738177 - RNA, 17 nt, Human
ugcacccucaggcaggu

SEQ ID NO: 2738178 - RNA, 14 nt, Human
ugcacgugugugca

SEQ ID NO: 2738179 - RNA, 15 nt, Human
ugcacgugugugcac

SEQ ID NO: 2738180 - RNA, 20 nt, Human
ugcacacauuuuuuaaaugc

SEQ ID NO: 2738181 - RNA, 10 nt, Human
ugcacacauu

SEQ ID NO: 2738182 - RNA, 16 nt, Human
agcuagaauuugauau

SEQ ID NO: 2738183 - RNA, 13 nt, Human
agcuagaauuuga

SEQ ID NO: 2738184 - RNA, 18 nt, Human
agcuagacgagcaggcuu

SEQ ID NO: 2738185 - RNA, 13 nt, Human
agcuagacuggug

SEQ ID NO: 2738186 - RNA, 21 nt, Human
agcuagacuggugacugauuc

SEQ ID NO: 2738187 - RNA, 17 nt, Human
agcuagacuggugacug

SEQ ID NO: 2738188 - RNA, 16 nt, Human
agcuagacuggugacu

SEQ ID NO: 2738189 - RNA, 14 nt, Human
agcuagacugguga

SEQ ID NO: 2738190 - RNA, 19 nt, Human
agcgugagccacugcaccg

SEQ ID NO: 2738191 - RNA, 15 nt, Human
agcgugcauaaguua

SEQ ID NO: 2738192 - RNA, 22 nt, Human
agcgugagccacugcaccgggc

SEQ ID NO: 2738193 - RNA, 21 nt, Human
agcucauucuccuuguguuac

SEQ ID NO: 2738194 - RNA, 20 nt, Human
agcucauucuccuuguguua

SEQ ID NO: 2738195 - RNA, 20 nt, Human
ugcccacaggaucagucuga

SEQ ID NO: 2738196 - RNA, 19 nt, Human
ugcccacaggaucagucug

SEQ ID NO: 2738197 - RNA, 16 nt, Human
ugcccacaggaucagu

SEQ ID NO: 2738198 - RNA, 21 nt, Human
ugcccagccccuucugaccca

SEQ ID NO: 2738199 - RNA, 20 nt, Human
ugcccagccccuucugaccc

SEQ ID NO: 2738200 - RNA, 12 nt, Human
agcuaggccugg

SEQ ID NO: 2738201 - RNA, 16 nt, Human
agcuaggccuggccag

SEQ ID NO: 2738202 - RNA, 14 nt, Human
agcuaggccuggcc

SEQ ID NO: 2738203 - RNA, 15 nt, Human
agcuaggccuggcca

SEQ ID NO: 2738204 - RNA, 18 nt, Human
agcucaggugucccugca

SEQ ID NO: 2738205 - RNA, 22 nt, Human
agcucaggugucccugcacuug

SEQ ID NO: 2738206 - RNA, 20 nt, Human
agcucaggugucccugcacu

SEQ ID NO: 2738207 - RNA, 21 nt, Human
agcucaggugucccugcacuu

SEQ ID NO: 2738208 - RNA, 20 nt, Human
agccuuggggcugaugcagu

SEQ ID NO: 2738209 - RNA, 11 nt, Human
agccuuccagg

SEQ ID NO: 2738210 - RNA, 14 nt, Human
agccuuccaggggu

SEQ ID NO: 2738211 - RNA, 16 nt, Human
agccuuccaggggugg

SEQ ID NO: 2738212 - RNA, 17 nt, Human
agccuuccagggguggg

SEQ ID NO: 2738213 - RNA, 20 nt, Human
ugcauuaucuagauacugua

SEQ ID NO: 2738214 - RNA, 18 nt, Human
agcggagacggaguccca

SEQ ID NO: 2738215 - RNA, 20 nt, Human
agcggagaaaggaagggcug

SEQ ID NO: 2738216 - RNA, 16 nt, Human
agcggagaaaggaagg

SEQ ID NO: 2738217 - RNA, 18 nt, Human
ugcauuaucuagauacug

SEQ ID NO: 2738218 - RNA, 22 nt, Human
ugcauuaucuagauacuguauc

SEQ ID NO: 2738219 - RNA, 21 nt, Human
ugcauuaucuagauacuguau

SEQ ID NO: 2738220 - RNA, 18 nt, Human
ugccaaugggagcucaug

SEQ ID NO: 2738221 - RNA, 21 nt, Human
agccugugccucugggacugg

SEQ ID NO: 2738222 - RNA, 22 nt, Human
agccuuagaagucacacaguau

SEQ ID NO: 2738223 - RNA, 22 nt, Human
agccugggugacagagcaagug

SEQ ID NO: 2738224 - RNA, 19 nt, Human
agccugcuccagcuguuca

SEQ ID NO: 2738225 - RNA, 22 nt, Human
agccugcuccagcuguucagcu

SEQ ID NO: 2738226 - RNA, 14 nt, Human
agccugcuccagcu

SEQ ID NO: 2738227 - RNA, 15 nt, Human
agccugcuccagcug

SEQ ID NO: 2738228 - RNA, 16 nt, Human
agccugcuccagcugu

SEQ ID NO: 2738229 - RNA, 17 nt, Human
agccugcuccagcuguu

SEQ ID NO: 2738230 - RNA, 12 nt, Human
ugcauaccacuu

SEQ ID NO: 2738231 - RNA, 14 nt, Human
uggagcucguggaa

SEQ ID NO: 2738232 - RNA, 15 nt, Human
aggcacccaccauca

SEQ ID NO: 2738233 - RNA, 14 nt, Human
aggcaaugcuggcu

SEQ ID NO: 2738234 - RNA, 20 nt, Human
aggcacccaccaucaugucu

SEQ ID NO: 2738235 - RNA, 21 nt, Human
aggcacccaccaucaugucug

SEQ ID NO: 2738236 - RNA, 22 nt, Human
aggcacccaccaucaugucugg

SEQ ID NO: 2738237 - RNA, 13 nt, Human
uggagaagaacug

SEQ ID NO: 2738238 - RNA, 14 nt, Human
uggagaagaacuga

SEQ ID NO: 2738239 - RNA, 13 nt, Human
uggagaagcggcu

SEQ ID NO: 2738240 - RNA, 22 nt, Human
uggagaagcggcuggcagccca

SEQ ID NO: 2738241 - RNA, 15 nt, Human
uggacccugaggccc

SEQ ID NO: 2738242 - RNA, 20 nt, Human
uggaccuugaacuggguacu

SEQ ID NO: 2738243 - RNA, 16 nt, Human
uggacuguggugacuu

SEQ ID NO: 2738244 - RNA, 15 nt, Human
uggacuguggugacu

SEQ ID NO: 2738245 - RNA, 22 nt, Human
uggacuguggugacuuuggaua

SEQ ID NO: 2738246 - RNA, 21 nt, Human
uggacuguggugacuuuggau

SEQ ID NO: 2738247 - RNA, 19 nt, Human
uggacuguggugacuuugg

SEQ ID NO: 2738248 - RNA, 17 nt, Human
uggacuguggugacuuu

SEQ ID NO: 2738249 - RNA, 23 nt, Human
uggacccuguggaugauaaaaca

SEQ ID NO: 2738250 - RNA, 21 nt, Human
uggacccugaggcccagaggg

SEQ ID NO: 2738251 - RNA, 19 nt, Human
uggacccugaggcccagag

SEQ ID NO: 2738252 - RNA, 20 nt, Human
uggacccugaggcccagagg

SEQ ID NO: 2738253 - RNA, 23 nt, Human
uggacacagcucuucuccaggcu

SEQ ID NO: 2738254 - RNA, 16 nt, Human
uggacccugaggccca

SEQ ID NO: 2738255 - RNA, 18 nt, Human
uggacccugaggcccaga

SEQ ID NO: 2738256 - RNA, 12 nt, Human
aggaucucuuga

SEQ ID NO: 2738257 - RNA, 19 nt, Human
aggaucucuugagccuggg

SEQ ID NO: 2738258 - RNA, 17 nt, Human
aggaucucuugagccug

SEQ ID NO: 2738259 - RNA, 18 nt, Human
aggaucucuugagccugg

SEQ ID NO: 2738260 - RNA, 21 nt, Human
uggacacagcucuucuccagg

SEQ ID NO: 2738261 - RNA, 22 nt, Human
uggacacagcucuucuccaggc

SEQ ID NO: 2738262 - RNA, 13 nt, Human
uggacacagcucu

SEQ ID NO: 2738263 - RNA, 14 nt, Human
uggacacagcucuu

SEQ ID NO: 2738264 - RNA, 13 nt, Human
uggaaaggcagcu

SEQ ID NO: 2738265 - RNA, 14 nt, Human
ugcuuuuggucugu

SEQ ID NO: 2738266 - RNA, 17 nt, Human
ugcuuuuggucugugug

SEQ ID NO: 2738267 - RNA, 12 nt, Human
ugcuuugugauu

SEQ ID NO: 2738268 - RNA, 16 nt, Human
ugcuuugugauuuuug

SEQ ID NO: 2738269 - RNA, 14 nt, Human
ugcuuugugauuuu

SEQ ID NO: 2738270 - RNA, 22 nt, Human
ugcuuguacauaaugcgugcau

SEQ ID NO: 2738271 - RNA, 16 nt, Human
ugcuuguacauaaugc

SEQ ID NO: 2738272 - RNA, 14 nt, Human
ugcuuguacauaau

SEQ ID NO: 2738273 - RNA, 21 nt, Human
ugcuugaggcaacucaucuua

SEQ ID NO: 2738274 - RNA, 13 nt, Human
ugcuuguacauaa

SEQ ID NO: 2738275 - RNA, 12 nt, Human
ugcuuguacaua

SEQ ID NO: 2738276 - RNA, 14 nt, Human
ugcuuggaggaagg

SEQ ID NO: 2738277 - RNA, 15 nt, Human
ugcuuggaggaagga

SEQ ID NO: 2738278 - RNA, 16 nt, Human
ugcuuggaggaaggaa

SEQ ID NO: 2738279 - RNA, 15 nt, Human
uggaaaucuuuaaaa

SEQ ID NO: 2738280 - RNA, 14 nt, Human
uggaaaucuuuaaa

SEQ ID NO: 2738281 - RNA, 17 nt, Human
uggaaaugggcagagca

SEQ ID NO: 2738282 - RNA, 18 nt, Human
uggaaaugggcagagcag

SEQ ID NO: 2738283 - RNA, 16 nt, Human
uggaagcacagcuuca

SEQ ID NO: 2738284 - RNA, 17 nt, Human
uggaagguauuuaauag

SEQ ID NO: 2738285 - RNA, 13 nt, Human
uggaagguauuua

SEQ ID NO: 2738286 - RNA, 13 nt, Human
aggauccugagcc

SEQ ID NO: 2738287 - RNA, 14 nt, Human
aggauccugagcca

SEQ ID NO: 2738288 - RNA, 19 nt, Human
uggcacaguuuucugagaa

SEQ ID NO: 2738289 - RNA, 13 nt, Human
uggcagccuuggc

SEQ ID NO: 2738290 - RNA, 18 nt, Human
uggcacaguuuucugaga

SEQ ID NO: 2738291 - RNA, 17 nt, Human
uggcagccuuggcaaac

SEQ ID NO: 2738292 - RNA, 15 nt, Human
uggcagcucaccucu

SEQ ID NO: 2738293 - RNA, 16 nt, Human
aggccacaagacccuu

SEQ ID NO: 2738294 - RNA, 19 nt, Human
uggcagcucaccucucccu

SEQ ID NO: 2738295 - RNA, 14 nt, Human
aggccagagggagu

SEQ ID NO: 2738296 - RNA, 19 nt, Human
aggccacaagacccuugug

SEQ ID NO: 2738297 - RNA, 17 nt, Human
aggccacaagacccuug

SEQ ID NO: 2738298 - RNA, 18 nt, Human
aggccacaagacccuugu

SEQ ID NO: 2738299 - RNA, 16 nt, Human
aggccccgcccaggcu

SEQ ID NO: 2738300 - RNA, 21 nt, Human
aggcccagagggccugcaagg

SEQ ID NO: 2738301 - RNA, 20 nt, Human
aggccagagggagugacaga

SEQ ID NO: 2738302 - RNA, 14 nt, Human
uggaguauauguca

SEQ ID NO: 2738303 - RNA, 13 nt, Human
uggauuguccccg

SEQ ID NO: 2738304 - RNA, 16 nt, Human
aggccaaggugggagg

SEQ ID NO: 2738305 - RNA, 18 nt, Human
aggcagccaggccacaag

SEQ ID NO: 2738306 - RNA, 16 nt, Human
aggcagccccauucug

SEQ ID NO: 2738307 - RNA, 17 nt, Human
aggcagccccauucugc

SEQ ID NO: 2738308 - RNA, 16 nt, Human
aggccaaaggaagcac

SEQ ID NO: 2738309 - RNA, 18 nt, Human
aggccaaaggaagcacau

SEQ ID NO: 2738310 - RNA, 19 nt, Human
aggccaaaggaagcacaug

SEQ ID NO: 2738311 - RNA, 15 nt, Human
aggccaaaggaagca

SEQ ID NO: 2738312 - RNA, 12 nt, Human
aggccuggggac

SEQ ID NO: 2738313 - RNA, 18 nt, Human
aggccugggggcugggca

SEQ ID NO: 2738314 - RNA, 20 nt, Human
aggccugggggcugggcaga

SEQ ID NO: 2738315 - RNA, 12 nt, Human
uggccuggcccc

SEQ ID NO: 2738316 - RNA, 18 nt, Human
uggccuggccccucaggg

SEQ ID NO: 2738317 - RNA, 21 nt, Human
uggccuggccccucagggucc

SEQ ID NO: 2738318 - RNA, 13 nt, Human
uggcccacgcacu

SEQ ID NO: 2738319 - RNA, 23 nt, Human
uggccgggcgcgguggcucacgc

SEQ ID NO: 2738320 - RNA, 13 nt, Human
uggccucuucaga

SEQ ID NO: 2738321 - RNA, 17 nt, Human
uggcauaacauaaaucu

SEQ ID NO: 2738322 - RNA, 16 nt, Human
uggcauauuuuucaca

SEQ ID NO: 2738323 - RNA, 17 nt, Human
uggcauauuuuucacau

SEQ ID NO: 2738324 - RNA, 17 nt, Human
aggccccgcccaggcuu

SEQ ID NO: 2738325 - RNA, 12 nt, Human
aggccccugcca

SEQ ID NO: 2738326 - RNA, 22 nt, Human
uggcauaacauaaaucugugaa

SEQ ID NO: 2738327 - RNA, 21 nt, Human
uggcauaacauaaaucuguga

SEQ ID NO: 2738328 - RNA, 21 nt, Human
uggccaaagccaaagcuaggc

SEQ ID NO: 2738329 - RNA, 23 nt, Human
uggccaaagccaaagcuaggccu

SEQ ID NO: 2738330 - RNA, 23 nt, Human
uggccagugugacaaggauugcu

SEQ ID NO: 2738331 - RNA, 19 nt, Human
agcuguucacagccagacu

SEQ ID NO: 2738332 - RNA, 16 nt, Human
agcuguucacagccag

SEQ ID NO: 2738333 - RNA, 13 nt, Human
agcuguucagcug

SEQ ID NO: 2738334 - RNA, 17 nt, Human
ugccuguucagcuccag

SEQ ID NO: 2738335 - RNA, 18 nt, Human
ugccuguucagcuccagc

SEQ ID NO: 2738336 - RNA, 20 nt, Human
ugccuguucagcuccagcuc

SEQ ID NO: 2738337 - RNA, 20 nt, Human
ugccuguugggccaggagcc

SEQ ID NO: 2738338 - RNA, 21 nt, Human
ugccuguucagcuccagcuca

SEQ ID NO: 2738339 - RNA, 19 nt, Human
ugccuguugggccaggagc

SEQ ID NO: 2738340 - RNA, 15 nt, Human
ugccuuauggaacac

SEQ ID NO: 2738341 - RNA, 16 nt, Human
ugccuuauggaacacu

SEQ ID NO: 2738342 - RNA, 19 nt, Human
agcugugcucuggacaggc

SEQ ID NO: 2738343 - RNA, 20 nt, Human
agcugugcucuggacaggca

SEQ ID NO: 2738344 - RNA, 21 nt, Human
agcugugcucuggacaggcau

SEQ ID NO: 2738345 - RNA, 23 nt, Human
agcugugcucuggacaggcaugu

SEQ ID NO: 2738346 - RNA, 22 nt, Human
agcugcccucuccugggcagcu

SEQ ID NO: 2738347 - RNA, 15 nt, Human
agcugccuccccucc

SEQ ID NO: 2738348 - RNA, 16 nt, Human
agcugccuccccuccu

SEQ ID NO: 2738349 - RNA, 20 nt, Human
agcugccuguucagcuccag

SEQ ID NO: 2738350 - RNA, 15 nt, Human
ugccuggauggggcu

SEQ ID NO: 2738351 - RNA, 14 nt, Human
ugccuggauggggc

SEQ ID NO: 2738352 - RNA, 21 nt, Human
agcugcuuuugucuaugggac

SEQ ID NO: 2738353 - RNA, 19 nt, Human
agcugccuguucagcucca

SEQ ID NO: 2738354 - RNA, 21 nt, Human
agcugcuugggcuucauccuc

SEQ ID NO: 2738355 - RNA, 21 nt, Human
agcugccuguucagcuccagc

SEQ ID NO: 2738356 - RNA, 22 nt, Human
agcugccuguucagcuccagcu

SEQ ID NO: 2738357 - RNA, 14 nt, Human
ugccugcccaggcc

SEQ ID NO: 2738358 - RNA, 15 nt, Human
ugccugcccaggccc

SEQ ID NO: 2738359 - RNA, 24 nt, Human
ugccugcccaggccccugccaccc

SEQ ID NO: 2738360 - RNA, 16 nt, Human
ugccugcccaggcccc

SEQ ID NO: 2738361 - RNA, 12 nt, Human
ugcccaggcagg

SEQ ID NO: 2738362 - RNA, 13 nt, Human
ugcccaggcaggu

SEQ ID NO: 2738363 - RNA, 14 nt, Human
ugcccaggcagguc

SEQ ID NO: 2738364 - RNA, 13 nt, Human
ugccucugccucu

SEQ ID NO: 2738365 - RNA, 14 nt, Human
ugccucugccucug

SEQ ID NO: 2738366 - RNA, 13 nt, Human
ugccugcccaggc

SEQ ID NO: 2738367 - RNA, 15 nt, Human
ugccucugccucuga

SEQ ID NO: 2738368 - RNA, 19 nt, Human
ugcuacaaaaacacagcaa

SEQ ID NO: 2738369 - RNA, 18 nt, Human
ugcuacaaaaacacagca

SEQ ID NO: 2738370 - RNA, 17 nt, Human
ugcuacaaaaacacagc

SEQ ID NO: 2738371 - RNA, 16 nt, Human
ugcuacaaaaacacag

SEQ ID NO: 2738372 - RNA, 15 nt, Human
ugcuacaaaaacaca

SEQ ID NO: 2738373 - RNA, 22 nt, Human
ugcuaaggacuuguuagaucua

SEQ ID NO: 2738374 - RNA, 18 nt, Human
ugcuaaggacuuguuaga

SEQ ID NO: 2738375 - RNA, 13 nt, Human
ugcuaaggacuug

SEQ ID NO: 2738376 - RNA, 20 nt, Human
ugcuacaaaaacacagcaag

SEQ ID NO: 2738377 - RNA, 14 nt, Human
agcuguucagcugg

SEQ ID NO: 2738378 - RNA, 17 nt, Human
agcuugaaacugagaug

SEQ ID NO: 2738379 - RNA, 19 nt, Human
agcuugaccgugaggccag

SEQ ID NO: 2738380 - RNA, 18 nt, Human
agcuugaggguugggcug

SEQ ID NO: 2738381 - RNA, 14 nt, Human
agcuugaggguugg

SEQ ID NO: 2738382 - RNA, 17 nt, Human
ugcggccuuuggcuuca

SEQ ID NO: 2738383 - RNA, 19 nt, Human
ugcggccuuuggcuucacg

SEQ ID NO: 2738384 - RNA, 20 nt, Human
ugcgggcuuccuccuggugu

SEQ ID NO: 2738385 - RNA, 17 nt, Human
ugcgguccacccaggag

SEQ ID NO: 2738386 - RNA, 18 nt, Human
ugcgguccacccaggagc

SEQ ID NO: 2738387 - RNA, 17 nt, Human
ugcggugcuaucucccc

SEQ ID NO: 2738388 - RNA, 21 nt, Human
ugcggugcuaucucccccagc

SEQ ID NO: 2738389 - RNA, 12 nt, Human
ugcuaaggacuu

SEQ ID NO: 2738390 - RNA, 23 nt, Human
ugcggacagccacggccaggcca

SEQ ID NO: 2738391 - RNA, 22 nt, Human
ugcggacagccacggccaggcc

SEQ ID NO: 2738392 - RNA, 13 nt, Human
ugcuguauuuuaa

SEQ ID NO: 2738393 - RNA, 21 nt, Human
ugcuguauuuuaaaagaauga

SEQ ID NO: 2738394 - RNA, 22 nt, Human
ugcuguauuuuaaaagaaugau

SEQ ID NO: 2738395 - RNA, 21 nt, Human
ugcugggauuacaagcgugag

SEQ ID NO: 2738396 - RNA, 17 nt, Human
ugcugggauuacaggug

SEQ ID NO: 2738397 - RNA, 19 nt, Human
ugcugggauuacaagcgug

SEQ ID NO: 2738398 - RNA, 19 nt, Human
ugcuggcuguuggcugggg

SEQ ID NO: 2738399 - RNA, 21 nt, Human
ugcuggcuguuggcugggggc

SEQ ID NO: 2738400 - RNA, 11 nt, Human
ugcugcccugu

SEQ ID NO: 2738401 - RNA, 19 nt, Human
ugcugcccugcccaccugg

SEQ ID NO: 2738402 - RNA, 21 nt, Human
ugcugcccugcccaccuggcc

SEQ ID NO: 2738403 - RNA, 23 nt, Human
aggaauggagccugcacggugaa

SEQ ID NO: 2738404 - RNA, 13 nt, Human
ugcugcccugccc

SEQ ID NO: 2738405 - RNA, 16 nt, Human
ugcugcccugcccacc

SEQ ID NO: 2738406 - RNA, 17 nt, Human
ugcugcccugcccaccu

SEQ ID NO: 2738407 - RNA, 18 nt, Human
ugcugcccugcccaccug

SEQ ID NO: 2738408 - RNA, 17 nt, Human
aggacacugauaugggu

SEQ ID NO: 2738409 - RNA, 18 nt, Human
aggacacuaaccacgcug

SEQ ID NO: 2738410 - RNA, 16 nt, Human
ugcuuccagugaggcu

SEQ ID NO: 2738411 - RNA, 20 nt, Human
ugcuucaaggauccugagcc

SEQ ID NO: 2738412 - RNA, 21 nt, Human
ugcuucaaggauccugagcca

SEQ ID NO: 2738413 - RNA, 23 nt, Human
ugcuucaaggauccugagccaga

SEQ ID NO: 2738414 - RNA, 17 nt, Human
ugcugucccuuacguga

SEQ ID NO: 2738415 - RNA, 19 nt, Human
ugcugucccuuacgugagu

SEQ ID NO: 2738416 - RNA, 15 nt, Human
ugcugucccuuuucc

SEQ ID NO: 2738417 - RNA, 17 nt, Human
ugcugucccuuuuccuu

SEQ ID NO: 2738418 - RNA, 23 nt, Human
aggaaaucaaauaugcaaagcac

SEQ ID NO: 2738419 - RNA, 15 nt, Human
aggaaaucaccgaaa

SEQ ID NO: 2738420 - RNA, 19 nt, Human
aggaaaucaccgaaaacgu

SEQ ID NO: 2738421 - RNA, 11 nt, Human
aggaagcacau

SEQ ID NO: 2738422 - RNA, 16 nt, Human
aggaagcacaugccuc

SEQ ID NO: 2738423 - RNA, 17 nt, Human
aggaagcacaugccucu

SEQ ID NO: 2738424 - RNA, 12 nt, Human
aggaaauauuua

SEQ ID NO: 2738425 - RNA, 16 nt, Human
aggaaaggcuccagga

SEQ ID NO: 2738426 - RNA, 15 nt, Human
aggaaaggcuccagg

SEQ ID NO: 2738427 - RNA, 13 nt, Human
aggaaaggcucca

SEQ ID NO: 2738428 - RNA, 14 nt, Human
aggaaaggcuccag

SEQ ID NO: 2738429 - RNA, 18 nt, Human
aggaagccagcaggcucu

SEQ ID NO: 2738430 - RNA, 18 nt, Human
aggaagccgcuggggcca

SEQ ID NO: 2738431 - RNA, 19 nt, Human
aggaagccgcuggggccag

SEQ ID NO: 2738432 - RNA, 20 nt, Human
aggaagccgcuggggccagu

SEQ ID NO: 2738433 - RNA, 21 nt, Human
aggaagccagcaggcucucag

SEQ ID NO: 2738434 - RNA, 22 nt, Human
aggaagccagcaggcucucagg

SEQ ID NO: 2738435 - RNA, 23 nt, Human
aggaagccagcaggcucucaggc

SEQ ID NO: 2738436 - RNA, 18 nt, Human
aggaagccugauuaaaga

SEQ ID NO: 2738437 - RNA, 17 nt, Human
aggaagccugauuaaag

SEQ ID NO: 2738438 - RNA, 12 nt, Human
aggaagcucagg

SEQ ID NO: 2738439 - RNA, 21 nt, Human
aggaagccugauuaaagaaug

SEQ ID NO: 2738440 - RNA, 23 nt, Human
aggaaggaaacccagcucugguc

SEQ ID NO: 2738441 - RNA, 20 nt, Human
aggaaggaaacccagcucug

SEQ ID NO: 2738442 - RNA, 22 nt, Human
aggaaggaaacccagcucuggu

SEQ ID NO: 2738443 - RNA, 14 nt, Human
ugcucauggaauug

SEQ ID NO: 2738444 - RNA, 14 nt, Human
ugcucuggacaggc

SEQ ID NO: 2738445 - RNA, 15 nt, Human
ugcucuggacaggca

SEQ ID NO: 2738446 - RNA, 16 nt, Human
ugcucuggacaggcau

SEQ ID NO: 2738447 - RNA, 11 nt, Human
ugcucauggaa

SEQ ID NO: 2738448 - RNA, 20 nt, Human
ugcuaucucccccagcccca

SEQ ID NO: 2738449 - RNA, 19 nt, Human
ugcuaucucccccagcccc

SEQ ID NO: 2738450 - RNA, 23 nt, Human
agcuuuaucaaagggugaaaauu

SEQ ID NO: 2738451 - RNA, 19 nt, Human
aguagauaggccaugggca

SEQ ID NO: 2738452 - RNA, 18 nt, Human
uguaggaagguuaauguu

SEQ ID NO: 2738453 - RNA, 20 nt, Human
uguaggaagguuaauguuca

SEQ ID NO: 2738454 - RNA, 12 nt, Human
aguagagacagg

SEQ ID NO: 2738455 - RNA, 13 nt, Human
aguagaacagaua

SEQ ID NO: 2738456 - RNA, 19 nt, Human
aguagaacagauaaucagu

SEQ ID NO: 2738457 - RNA, 14 nt, Human
aguacacuguuuca

SEQ ID NO: 2738458 - RNA, 20 nt, Human
aguacacuguuucaaacuuu

SEQ ID NO: 2738459 - RNA, 16 nt, Human
aguacacuguuucaaa

SEQ ID NO: 2738460 - RNA, 15 nt, Human
aguaaaaccacagca

SEQ ID NO: 2738461 - RNA, 20 nt, Human
aguaagccgugauuuucauu

SEQ ID NO: 2738462 - RNA, 11 nt, Human
agguuuuccug

SEQ ID NO: 2738463 - RNA, 17 nt, Human
aguaauaugcacacauu

SEQ ID NO: 2738464 - RNA, 20 nt, Human
aguaauaugcacacauuuuu

SEQ ID NO: 2738465 - RNA, 19 nt, Human
aguaauaugcacacauuuu

SEQ ID NO: 2738466 - RNA, 18 nt, Human
aguaauaugcacacauuu

SEQ ID NO: 2738467 - RNA, 17 nt, Human
uguacuuuuuggcauaa

SEQ ID NO: 2738468 - RNA, 13 nt, Human
uguagagugggag

SEQ ID NO: 2738469 - RNA, 14 nt, Human
uguagagugggagc

SEQ ID NO: 2738470 - RNA, 12 nt, Human
uguacuuuuugg

SEQ ID NO: 2738471 - RNA, 16 nt, Human
uguacuuuuuggcaua

SEQ ID NO: 2738472 - RNA, 15 nt, Human
uguacuuuuuggcau

SEQ ID NO: 2738473 - RNA, 14 nt, Human
uguaauuugugaua

SEQ ID NO: 2738474 - RNA, 21 nt, Human
aggugcacaagcuccaagcuc

SEQ ID NO: 2738475 - RNA, 20 nt, Human
aggugggauccuccaggugc

SEQ ID NO: 2738476 - RNA, 22 nt, Human
uguaaaucccauuauucaaagu

SEQ ID NO: 2738477 - RNA, 20 nt, Human
uguaaaucccauuauucaaa

SEQ ID NO: 2738478 - RNA, 19 nt, Human
uguaaaucccauuauucaa

SEQ ID NO: 2738479 - RNA, 15 nt, Human
aggugcacaagcucc

SEQ ID NO: 2738480 - RNA, 16 nt, Human
aggugcacaagcucca

SEQ ID NO: 2738481 - RNA, 17 nt, Human
aggugcacaagcuccaa

SEQ ID NO: 2738482 - RNA, 18 nt, Human
aggugcacaagcuccaag

SEQ ID NO: 2738483 - RNA, 20 nt, Human
aggugcacaagcuccaagcu

SEQ ID NO: 2738484 - RNA, 13 nt, Human
uguaaaucccauu

SEQ ID NO: 2738485 - RNA, 18 nt, Human
uguaaaucccauuauuca

SEQ ID NO: 2738486 - RNA, 16 nt, Human
uguaaaucccauuauu

SEQ ID NO: 2738487 - RNA, 23 nt, Human
aggucuugaacuccuggccucaa

SEQ ID NO: 2738488 - RNA, 17 nt, Human
aggugguuauggagagg

SEQ ID NO: 2738489 - RNA, 14 nt, Human
agguuggugggggc

SEQ ID NO: 2738490 - RNA, 23 nt, Human
uguaauuaaguacuauguaucaa

SEQ ID NO: 2738491 - RNA, 13 nt, Human
uguaauuauaucu

SEQ ID NO: 2738492 - RNA, 15 nt, Human
uguaauuauaucuga

SEQ ID NO: 2738493 - RNA, 14 nt, Human
uguaauuauaucug

SEQ ID NO: 2738494 - RNA, 15 nt, Human
uguaaguaaacgguc

SEQ ID NO: 2738495 - RNA, 21 nt, Human
ugucaauaaaauccauacauu

SEQ ID NO: 2738496 - RNA, 15 nt, Human
ugucaagccauaauu

SEQ ID NO: 2738497 - RNA, 19 nt, Human
ugucaagagggucugagga

SEQ ID NO: 2738498 - RNA, 14 nt, Human
uguauuuuuuuacu

SEQ ID NO: 2738499 - RNA, 20 nt, Human
ugucaaucagccuaguugau

SEQ ID NO: 2738500 - RNA, 16 nt, Human
aguaggaagacuuugg

SEQ ID NO: 2738501 - RNA, 17 nt, Human
aguaggaagacuuugga

SEQ ID NO: 2738502 - RNA, 18 nt, Human
aguaggaagacuuuggaa

SEQ ID NO: 2738503 - RNA, 19 nt, Human
aguaggaagacuuuggaaa

SEQ ID NO: 2738504 - RNA, 22 nt, Human
aguaggaagacuuuggaaagac

SEQ ID NO: 2738505 - RNA, 22 nt, Human
aguauuucuaugaaauauuaug

SEQ ID NO: 2738506 - RNA, 16 nt, Human
aguauuugagaguucu

SEQ ID NO: 2738507 - RNA, 13 nt, Human
agucaccaagccc

SEQ ID NO: 2738508 - RNA, 14 nt, Human
agucaccaagccca

SEQ ID NO: 2738509 - RNA, 20 nt, Human
agucacauuccugaacagga

SEQ ID NO: 2738510 - RNA, 18 nt, Human
agucacauuccugaacag

SEQ ID NO: 2738511 - RNA, 19 nt, Human
agucacauuccugaacagg

SEQ ID NO: 2738512 - RNA, 13 nt, Human
aguauuucuauga

SEQ ID NO: 2738513 - RNA, 15 nt, Human
aguauuucuaugaaa

SEQ ID NO: 2738514 - RNA, 16 nt, Human
ugucagguggggcagc

SEQ ID NO: 2738515 - RNA, 19 nt, Human
ugucagcugaaccugggua

SEQ ID NO: 2738516 - RNA, 16 nt, Human
ugucagcugaaccugg

SEQ ID NO: 2738517 - RNA, 19 nt, Human
agucacugagacagcccgg

SEQ ID NO: 2738518 - RNA, 18 nt, Human
agucacugagacagcccg

SEQ ID NO: 2738519 - RNA, 16 nt, Human
agucaggaaagagaac

SEQ ID NO: 2738520 - RNA, 15 nt, Human
agucaggaaagagaa

SEQ ID NO: 2738521 - RNA, 22 nt, Human
agucagaaguuucugccgcagc

SEQ ID NO: 2738522 - RNA, 14 nt, Human
ugucgggcaugaca

SEQ ID NO: 2738523 - RNA, 15 nt, Human
ugucgggcaugacac

SEQ ID NO: 2738524 - RNA, 12 nt, Human
ugucgggcauga

SEQ ID NO: 2738525 - RNA, 14 nt, Human
ugucgcccagucug

SEQ ID NO: 2738526 - RNA, 15 nt, Human
ugucgcccagucugg

SEQ ID NO: 2738527 - RNA, 16 nt, Human
uguccuacccacccuc

SEQ ID NO: 2738528 - RNA, 13 nt, Human
uguccgagcuuug

SEQ ID NO: 2738529 - RNA, 14 nt, Human
uguccgagcuuuga

SEQ ID NO: 2738530 - RNA, 17 nt, Human
ugucccuuuuccuuuuu

SEQ ID NO: 2738531 - RNA, 16 nt, Human
agucucacuguugccc

SEQ ID NO: 2738532 - RNA, 17 nt, Human
agucucacuguugccca

SEQ ID NO: 2738533 - RNA, 23 nt, Human
aguccgaaagggacuuggaagcu

SEQ ID NO: 2738534 - RNA, 12 nt, Human
agucccugccaa

SEQ ID NO: 2738535 - RNA, 17 nt, Human
agggcagggacaggaua

SEQ ID NO: 2738536 - RNA, 23 nt, Human
agggcccagagaggguggugacc

SEQ ID NO: 2738537 - RNA, 18 nt, Human
agggcccagagagggugg

SEQ ID NO: 2738538 - RNA, 17 nt, Human
agggaggugaccccagg

SEQ ID NO: 2738539 - RNA, 17 nt, Human
agggagugacagaggca

SEQ ID NO: 2738540 - RNA, 18 nt, Human
agggagugacagaggcag

SEQ ID NO: 2738541 - RNA, 19 nt, Human
agggagugacagaggcagc

SEQ ID NO: 2738542 - RNA, 15 nt, Human
agggagggcuucugc

SEQ ID NO: 2738543 - RNA, 20 nt, Human
ugggcccaaugcacuuuguu

SEQ ID NO: 2738544 - RNA, 14 nt, Human
ugggccaggagccu

SEQ ID NO: 2738545 - RNA, 16 nt, Human
ugggccaggagccucc

SEQ ID NO: 2738546 - RNA, 13 nt, Human
ugggccaggagcc

SEQ ID NO: 2738547 - RNA, 17 nt, Human
ugggcaacccccagccu

SEQ ID NO: 2738548 - RNA, 20 nt, Human
ugggcaacccccagccugcu

SEQ ID NO: 2738549 - RNA, 18 nt, Human
ugggaggucaaggcugca

SEQ ID NO: 2738550 - RNA, 19 nt, Human
ugggaggucaaggcugcag

SEQ ID NO: 2738551 - RNA, 20 nt, Human
ugggaggucaaggcugcagu

SEQ ID NO: 2738552 - RNA, 23 nt, Human
ugggaggucaaggcugcagugag

SEQ ID NO: 2738553 - RNA, 17 nt, Human
ugggaggucaaggcugc

SEQ ID NO: 2738554 - RNA, 16 nt, Human
ugggcaacccccagcc

SEQ ID NO: 2738555 - RNA, 20 nt, Human
uggggcugcaccggcuggcc

SEQ ID NO: 2738556 - RNA, 14 nt, Human
ugggguacccacug

SEQ ID NO: 2738557 - RNA, 17 nt, Human
uggggucacucuggcag

SEQ ID NO: 2738558 - RNA, 18 nt, Human
uggggucacucuggcagc

SEQ ID NO: 2738559 - RNA, 15 nt, Human
ugggguacccacugc

SEQ ID NO: 2738560 - RNA, 16 nt, Human
ugggguacccacugcu

SEQ ID NO: 2738561 - RNA, 20 nt, Human
ugggguacccacugcucugg

SEQ ID NO: 2738562 - RNA, 15 nt, Human
uggggcccugccucc

SEQ ID NO: 2738563 - RNA, 16 nt, Human
uggggcccugccuccu

SEQ ID NO: 2738564 - RNA, 18 nt, Human
uggggcggugagagggga

SEQ ID NO: 2738565 - RNA, 23 nt, Human
uggggaccucaggccugggggcu

SEQ ID NO: 2738566 - RNA, 12 nt, Human
uggggagaaagu

SEQ ID NO: 2738567 - RNA, 14 nt, Human
uggggcccugccuc

SEQ ID NO: 2738568 - RNA, 18 nt, Human
ugggcucccuucccaccu

SEQ ID NO: 2738569 - RNA, 19 nt, Human
ugggcucccuucccaccuc

SEQ ID NO: 2738570 - RNA, 23 nt, Human
agggcuucugccauuucugagau

SEQ ID NO: 2738571 - RNA, 20 nt, Human
ugggcucccuucccaccucu

SEQ ID NO: 2738572 - RNA, 18 nt, Human
ugggcuggguucuaccca

SEQ ID NO: 2738573 - RNA, 19 nt, Human
ugggcuggguucuacccag

SEQ ID NO: 2738574 - RNA, 15 nt, Human
uggggaaugaagaua

SEQ ID NO: 2738575 - RNA, 14 nt, Human
uggggaaugaagau

SEQ ID NO: 2738576 - RNA, 14 nt, Human
uggggaccagagcu

SEQ ID NO: 2738577 - RNA, 15 nt, Human
uggggaccagagcug

SEQ ID NO: 2738578 - RNA, 13 nt, Human
uggggaccucagg

SEQ ID NO: 2738579 - RNA, 17 nt, Human
uggggaccagagcugcc

SEQ ID NO: 2738580 - RNA, 18 nt, Human
uggggaccagagcugcca

SEQ ID NO: 2738581 - RNA, 20 nt, Human
ugguaaggggaauugaggac

SEQ ID NO: 2738582 - RNA, 16 nt, Human
ugguacuaacuuuccu

SEQ ID NO: 2738583 - RNA, 22 nt, Human
agggucucacucugucgcccag

SEQ ID NO: 2738584 - RNA, 21 nt, Human
agggucucacucugucgccca

SEQ ID NO: 2738585 - RNA, 22 nt, Human
uggguggcaccagcagccugga

SEQ ID NO: 2738586 - RNA, 22 nt, Human
ugggugcuuggaggaaggaaac

SEQ ID NO: 2738587 - RNA, 15 nt, Human
ugggugcuuggagga

SEQ ID NO: 2738588 - RNA, 19 nt, Human
ugggugcuuggaggaagga

SEQ ID NO: 2738589 - RNA, 24 nt, Human
agggguucccuuuuuuggcugcug

SEQ ID NO: 2738590 - RNA, 21 nt, Human
agggucucacuauguugccca

SEQ ID NO: 2738591 - RNA, 22 nt, Human
agggucucacuauguugcccag

SEQ ID NO: 2738592 - RNA, 23 nt, Human
agggucucacuauguugcccagg

SEQ ID NO: 2738593 - RNA, 15 nt, Human
aggggguggccuccc

SEQ ID NO: 2738594 - RNA, 17 nt, Human
aggggguggccucccaa

SEQ ID NO: 2738595 - RNA, 18 nt, Human
aggggguggccucccaac

SEQ ID NO: 2738596 - RNA, 22 nt, Human
aggggugggacacccugugaug

SEQ ID NO: 2738597 - RNA, 20 nt, Human
aggggugggacacccuguga

SEQ ID NO: 2738598 - RNA, 20 nt, Human
uggggucacucuggcagcuc

SEQ ID NO: 2738599 - RNA, 19 nt, Human
uggggucacucuggcagcu

SEQ ID NO: 2738600 - RNA, 23 nt, Human
aggggagcaaaaucgaugcagug

SEQ ID NO: 2738601 - RNA, 13 nt, Human
aggguuauaauaa

SEQ ID NO: 2738602 - RNA, 22 nt, Human
aggguguccggucccuguccca

SEQ ID NO: 2738603 - RNA, 21 nt, Human
aggguggugaccucugccuga

SEQ ID NO: 2738604 - RNA, 16 nt, Human
uggucugacccacugc

SEQ ID NO: 2738605 - RNA, 17 nt, Human
uggucugacccacugcu

SEQ ID NO: 2738606 - RNA, 14 nt, Human
uggucccaccccac

SEQ ID NO: 2738607 - RNA, 15 nt, Human
uggucccaccccaca

SEQ ID NO: 2738608 - RNA, 20 nt, Human
uggucaccaaaucagcugcu

SEQ ID NO: 2738609 - RNA, 22 nt, Human
uggucagauuugaacucuucaa

SEQ ID NO: 2738610 - RNA, 18 nt, Human
uggucaccaaaucagcug

SEQ ID NO: 2738611 - RNA, 17 nt, Human
uggucucaaacucuuga

SEQ ID NO: 2738612 - RNA, 23 nt, Human
uggucucaaacucuugaccucag

SEQ ID NO: 2738613 - RNA, 16 nt, Human
uggucucaaacucuug

SEQ ID NO: 2738614 - RNA, 16 nt, Human
uggucccaccccacac

SEQ ID NO: 2738615 - RNA, 23 nt, Human
agguacuucaaauccuugaagau

SEQ ID NO: 2738616 - RNA, 19 nt, Human
agguagaaauaucugaaaa

SEQ ID NO: 2738617 - RNA, 17 nt, Human
agguagaaauaucugaa

SEQ ID NO: 2738618 - RNA, 18 nt, Human
aggguuggccccugcccg

SEQ ID NO: 2738619 - RNA, 23 nt, Human
aggguuggccccugcccggcugc

SEQ ID NO: 2738620 - RNA, 17 nt, Human
aggguuggccccugccc

SEQ ID NO: 2738621 - RNA, 23 nt, Human
agguagaaauaucugaaaaugua

SEQ ID NO: 2738622 - RNA, 21 nt, Human
agguaugcaaucaaaucugcu

SEQ ID NO: 2738623 - RNA, 18 nt, Human
aggucauauuaauauauu

SEQ ID NO: 2738624 - RNA, 19 nt, Human
aggucauauuaauauauuu

SEQ ID NO: 2738625 - RNA, 12 nt, Human
aggucagagccu

SEQ ID NO: 2738626 - RNA, 20 nt, Human
aggucauuuuuuuuaagaaa

SEQ ID NO: 2738627 - RNA, 17 nt, Human
aggucauuuuuuuuaag

SEQ ID NO: 2738628 - RNA, 15 nt, Human
agugccuuacacaau

SEQ ID NO: 2738629 - RNA, 20 nt, Human
agugcugcauuuaaaagaua

SEQ ID NO: 2738630 - RNA, 17 nt, Human
agugccuuacacaaugg

SEQ ID NO: 2738631 - RNA, 22 nt, Human
agugcugcauuuaaaagauaca

SEQ ID NO: 2738632 - RNA, 20 nt, Human
agugcugggauuacaagcgu

SEQ ID NO: 2738633 - RNA, 19 nt, Human
agugcugggauuacaggug

SEQ ID NO: 2738634 - RNA, 16 nt, Human
uguggucccaccccac

SEQ ID NO: 2738635 - RNA, 16 nt, Human
agugcuuccaaggaug

SEQ ID NO: 2738636 - RNA, 17 nt, Human
uguggugacuuuggaua

SEQ ID NO: 2738637 - RNA, 16 nt, Human
uguggugacuuuggau

SEQ ID NO: 2738638 - RNA, 19 nt, Human
ugugucagcauagaaguaa

SEQ ID NO: 2738639 - RNA, 12 nt, Human
ugugguuucauu

SEQ ID NO: 2738640 - RNA, 14 nt, Human
uguguuaugaagca

SEQ ID NO: 2738641 - RNA, 23 nt, Human
uguguuaucacccagaagaaaau

SEQ ID NO: 2738642 - RNA, 16 nt, Human
ugugucucuugguccu

SEQ ID NO: 2738643 - RNA, 13 nt, Human
ugugucucuuggu

SEQ ID NO: 2738644 - RNA, 17 nt, Human
ugugucagguggggcag

SEQ ID NO: 2738645 - RNA, 19 nt, Human
ugugucagguggggcagcu

SEQ ID NO: 2738646 - RNA, 13 nt, Human
uguguugugaaug

SEQ ID NO: 2738647 - RNA, 21 nt, Human
uguuaacauggacaugaucuu

SEQ ID NO: 2738648 - RNA, 11 nt, Human
aguggaaaaau

SEQ ID NO: 2738649 - RNA, 18 nt, Human
aguggaaaaauagccugc

SEQ ID NO: 2738650 - RNA, 19 nt, Human
aguggaaaaauagccugcc

SEQ ID NO: 2738651 - RNA, 19 nt, Human
uguuaaugauagcuacugu

SEQ ID NO: 2738652 - RNA, 22 nt, Human
agugcaaauugucacaggacag

SEQ ID NO: 2738653 - RNA, 18 nt, Human
agugcaaauugucacagg

SEQ ID NO: 2738654 - RNA, 21 nt, Human
agugcaaauugucacaggaca

SEQ ID NO: 2738655 - RNA, 16 nt, Human
agugagucgaggacag

SEQ ID NO: 2738656 - RNA, 22 nt, Human
agugauucuccugccucagccu

SEQ ID NO: 2738657 - RNA, 24 nt, Human
agugauucuccugccucagccucc

SEQ ID NO: 2738658 - RNA, 16 nt, Human
agugccaaaaacaaca

SEQ ID NO: 2738659 - RNA, 14 nt, Human
agugcccacaggau

SEQ ID NO: 2738660 - RNA, 15 nt, Human
ugugcugcccugccc

SEQ ID NO: 2738661 - RNA, 13 nt, Human
ugugcugcccugc

SEQ ID NO: 2738662 - RNA, 14 nt, Human
ugugcugcccugcc

SEQ ID NO: 2738663 - RNA, 12 nt, Human
ugugcugcccug

SEQ ID NO: 2738664 - RNA, 19 nt, Human
ugugcucuggacaggcaug

SEQ ID NO: 2738665 - RNA, 16 nt, Human
ugugcucuggacaggc

SEQ ID NO: 2738666 - RNA, 18 nt, Human
ugugcucuggacaggcau

SEQ ID NO: 2738667 - RNA, 22 nt, Human
ugugcucugaucauccacugug

SEQ ID NO: 2738668 - RNA, 12 nt, Human
ugugcucugauc

SEQ ID NO: 2738669 - RNA, 23 nt, Human
ugugcucugaucauccacugugc

SEQ ID NO: 2738670 - RNA, 15 nt, Human
ugugcucuggacagg

SEQ ID NO: 2738671 - RNA, 21 nt, Human
agucucacuguugcccaggcu

SEQ ID NO: 2738672 - RNA, 20 nt, Human
agucucacuguugcccaggc

SEQ ID NO: 2738673 - RNA, 18 nt, Human
agucucacuguugcccag

SEQ ID NO: 2738674 - RNA, 19 nt, Human
agucucacuguugcccagg

SEQ ID NO: 2738675 - RNA, 21 nt, Human
ugugcccuaaaguguauuuuu

SEQ ID NO: 2738676 - RNA, 20 nt, Human
ugugcccuaaaguguauuuu

SEQ ID NO: 2738677 - RNA, 17 nt, Human
aguguuggagaagaacu

SEQ ID NO: 2738678 - RNA, 18 nt, Human
aguguuggagaagaacug

SEQ ID NO: 2738679 - RNA, 14 nt, Human
aguguuggagaaga

SEQ ID NO: 2738680 - RNA, 16 nt, Human
aguguuggagaagaac

SEQ ID NO: 2738681 - RNA, 21 nt, Human
aguguugaaacggaugauuuc

SEQ ID NO: 2738682 - RNA, 15 nt, Human
uguugcccaggcugg

SEQ ID NO: 2738683 - RNA, 13 nt, Human
uguugcccaggcu

SEQ ID NO: 2738684 - RNA, 19 nt, Human
uguucuuucacccuuuucu

SEQ ID NO: 2738685 - RNA, 20 nt, Human
uguucuugguuuguaaauua

SEQ ID NO: 2738686 - RNA, 22 nt, Human
uguucuugguuuguaaauuaac

SEQ ID NO: 2738687 - RNA, 18 nt, Human
uguucuuaguuugcaguu

SEQ ID NO: 2738688 - RNA, 18 nt, Human
uguucuagcauggcugcc

SEQ ID NO: 2738689 - RNA, 19 nt, Human
aguucggugagcuacaaau

SEQ ID NO: 2738690 - RNA, 15 nt, Human
aguucuacauaagua

SEQ ID NO: 2738691 - RNA, 16 nt, Human
aguucaauucucauuu

SEQ ID NO: 2738692 - RNA, 23 nt, Human
aguuccucauuagcauuuugcua

SEQ ID NO: 2738693 - RNA, 24 nt, Human
aguucacucuccauuuaauaauua

SEQ ID NO: 2738694 - RNA, 22 nt, Human
aguucacucuccauuuaauaau

SEQ ID NO: 2738695 - RNA, 14 nt, Human
uguuuauugucaaa

SEQ ID NO: 2738696 - RNA, 18 nt, Human
uguuuauuacaguauaau

SEQ ID NO: 2738697 - RNA, 19 nt, Human
uguuuagucuugucucaga

SEQ ID NO: 2738698 - RNA, 18 nt, Human
uguuuagucuugucucag

SEQ ID NO: 2738699 - RNA, 17 nt, Human
uguuuagucuugucuca

SEQ ID NO: 2738700 - RNA, 13 nt, Human
uguuuagucuugu

SEQ ID NO: 2738701 - RNA, 16 nt, Human
uguugucugcaacucu

SEQ ID NO: 2738702 - RNA, 13 nt, Human
uguugucugcaac

SEQ ID NO: 2738703 - RNA, 12 nt, Human
uguugugaaugu

SEQ ID NO: 2738704 - RNA, 13 nt, Human
uguugugaauguu

SEQ ID NO: 2738705 - RNA, 14 nt, Human
uguugugauguauu

SEQ ID NO: 2738706 - RNA, 20 nt, Human
uguugugauguauucuagcu

SEQ ID NO: 2738707 - RNA, 20 nt, Human
uguuuagauaauacaccacu

SEQ ID NO: 2738708 - RNA, 23 nt, Human
aguuuucugagaaagacuauuca

SEQ ID NO: 2738709 - RNA, 18 nt, Human
aguuuucugagaaagacu

SEQ ID NO: 2738710 - RNA, 19 nt, Human
aguuuucugagaaagacua

SEQ ID NO: 2738711 - RNA, 23 nt, Human
aguuuuuauggcuuuugugcauu

SEQ ID NO: 2738712 - RNA, 22 nt, Human
auaaaauaauuuuuauauuuga

SEQ ID NO: 2738713 - RNA, 21 nt, Human
uuaagaaaaaggaugcacaga

SEQ ID NO: 2738714 - RNA, 19 nt, Human
uuaagaaaaaggaugcaca

SEQ ID NO: 2738715 - RNA, 20 nt, Human
uuaagaaaaaggaugcacag

SEQ ID NO: 2738716 - RNA, 12 nt, Human
auaaaauaauuu

SEQ ID NO: 2738717 - RNA, 9 nt, Human
uuaaggugg

SEQ ID NO: 2738718 - RNA, 22 nt, Human
uuaagaaagacuaucuaaaugu

SEQ ID NO: 2738719 - RNA, 14 nt, Human
uuaaguauguguaa

SEQ ID NO: 2738720 - RNA, 14 nt, Human
uuaagugcugcauu

SEQ ID NO: 2738721 - RNA, 19 nt, Human
uuaagugcugcauuuaaaa

SEQ ID NO: 2738722 - RNA, 16 nt, Human
uuaagugcugcauuua

SEQ ID NO: 2738723 - RNA, 15 nt, Human
uuaagugcugcauuu

SEQ ID NO: 2738724 - RNA, 22 nt, Human
uuaaucugguuuauuuuuguuc

SEQ ID NO: 2738725 - RNA, 18 nt, Human
uuaaugaaagacuguaca

SEQ ID NO: 2738726 - RNA, 19 nt, Human
uuaaugaaagacuguacaa

SEQ ID NO: 2738727 - RNA, 23 nt, Human
uuaaucauuaggugugacugaau

SEQ ID NO: 2738728 - RNA, 22 nt, Human
uuaaucauuaggugugacugaa

SEQ ID NO: 2738729 - RNA, 13 nt, Human
uuaaucauuaggu

SEQ ID NO: 2738730 - RNA, 13 nt, Human
uguuucaaacaua

SEQ ID NO: 2738731 - RNA, 23 nt, Human
aguugccagucaccccggccacc

SEQ ID NO: 2738732 - RNA, 17 nt, Human
aguugccuaaauccauu

SEQ ID NO: 2738733 - RNA, 11 nt, Human
aguugccuaaa

SEQ ID NO: 2738734 - RNA, 16 nt, Human
aguugccuaaauccau

SEQ ID NO: 2738735 - RNA, 15 nt, Human
aguugccuaaaucca

SEQ ID NO: 2738736 - RNA, 13 nt, Human
aguugggcuuccu

SEQ ID NO: 2738737 - RNA, 19 nt, Human
aguugggcuuccucauagu

SEQ ID NO: 2738738 - RNA, 14 nt, Human
aguuuaaauuguaa

SEQ ID NO: 2738739 - RNA, 17 nt, Human
aguuggucccccuucca

SEQ ID NO: 2738740 - RNA, 11 nt, Human
aguuggucccc

SEQ ID NO: 2738741 - RNA, 13 nt, Human
aguuggucccccu

SEQ ID NO: 2738742 - RNA, 13 nt, Human
uuaaaaaaaaucc

SEQ ID NO: 2738743 - RNA, 18 nt, Human
uuaaauaaugugaaacug

SEQ ID NO: 2738744 - RNA, 16 nt, Human
uuaaauaaugugaaac

SEQ ID NO: 2738745 - RNA, 13 nt, Human
uuaaauaauguga

SEQ ID NO: 2738746 - RNA, 20 nt, Human
uuaacagaaauguacagcaa

SEQ ID NO: 2738747 - RNA, 16 nt, Human
uuaacagaaauguaca

SEQ ID NO: 2738748 - RNA, 19 nt, Human
uuaacagaaauguacagca

SEQ ID NO: 2738749 - RNA, 15 nt, Human
uuaaauaaugugaaa

SEQ ID NO: 2738750 - RNA, 16 nt, Human
uuaaaaaucucaaauu

SEQ ID NO: 2738751 - RNA, 15 nt, Human
uuaaaaaucucaaau

SEQ ID NO: 2738752 - RNA, 14 nt, Human
uuaaaaaucucaaa

SEQ ID NO: 2738753 - RNA, 18 nt, Human
auaauccuaaacauauga

SEQ ID NO: 2738754 - RNA, 15 nt, Human
auaaugcgugcauac

SEQ ID NO: 2738755 - RNA, 15 nt, Human
auaaugaaugaaaca

SEQ ID NO: 2738756 - RNA, 22 nt, Human
auaauugacaggauuauuggaa

SEQ ID NO: 2738757 - RNA, 12 nt, Human
auaauacaccac

SEQ ID NO: 2738758 - RNA, 20 nt, Human
auaauacaccacuacauucu

SEQ ID NO: 2738759 - RNA, 18 nt, Human
auaauacaccacuacauu

SEQ ID NO: 2738760 - RNA, 15 nt, Human
uuaggugaggaagca

SEQ ID NO: 2738761 - RNA, 20 nt, Human
uuagggaaggauacaaaagc

SEQ ID NO: 2738762 - RNA, 18 nt, Human
uuagguuggcaaaaaggc

SEQ ID NO: 2738763 - RNA, 21 nt, Human
uuaggugugacugaauuucuu

SEQ ID NO: 2738764 - RNA, 16 nt, Human
uuaggugugacugaau

SEQ ID NO: 2738765 - RNA, 16 nt, Human
uuaggugaggaagcaa

SEQ ID NO: 2738766 - RNA, 22 nt, Human
uuaguuugcaguuacacuaaaa

SEQ ID NO: 2738767 - RNA, 15 nt, Human
uuaguuucuccaagc

SEQ ID NO: 2738768 - RNA, 18 nt, Human
uuagccaagugugguaga

SEQ ID NO: 2738769 - RNA, 14 nt, Human
uuagcggagacgga

SEQ ID NO: 2738770 - RNA, 18 nt, Human
uuagcaaauucuguuuuu

SEQ ID NO: 2738771 - RNA, 22 nt, Human
auaacgauaaaagacagugaaa

SEQ ID NO: 2738772 - RNA, 13 nt, Human
auaacugugaagu

SEQ ID NO: 2738773 - RNA, 11 nt, Human
auaaauuauuu

SEQ ID NO: 2738774 - RNA, 13 nt, Human
auaaauaaaaaua

SEQ ID NO: 2738775 - RNA, 14 nt, Human
auaaauaaaaauaa

SEQ ID NO: 2738776 - RNA, 22 nt, Human
auaaauagcuagacuggugacu

SEQ ID NO: 2738777 - RNA, 21 nt, Human
auaaauagcuagacuggugac

SEQ ID NO: 2738778 - RNA, 18 nt, Human
auaaauauuuuugccaua

SEQ ID NO: 2738779 - RNA, 19 nt, Human
uuacccucauguucuuaau

SEQ ID NO: 2738780 - RNA, 13 nt, Human
uuagacagagucu

SEQ ID NO: 2738781 - RNA, 20 nt, Human
uuagacagagucucacuguu

SEQ ID NO: 2738782 - RNA, 13 nt, Human
uuagacagucccu

SEQ ID NO: 2738783 - RNA, 13 nt, Human
uuugcucauggaa

SEQ ID NO: 2738784 - RNA, 14 nt, Human
uuuggggauauuuu

SEQ ID NO: 2738785 - RNA, 22 nt, Human
uuugggaggccaaggugggagg

SEQ ID NO: 2738786 - RNA, 13 nt, Human
uuuggggaagaac

SEQ ID NO: 2738787 - RNA, 15 nt, Human
auggcuauaggugcu

SEQ ID NO: 2738788 - RNA, 22 nt, Human
uuugccauguuggccaggcugg

SEQ ID NO: 2738789 - RNA, 11 nt, Human
uuugcucaugg

SEQ ID NO: 2738790 - RNA, 12 nt, Human
uuugcucaugga

SEQ ID NO: 2738791 - RNA, 22 nt, Human
augucuauaaaccgaacugaug

SEQ ID NO: 2738792 - RNA, 23 nt, Human
auguccaagaagcccaggaaagg

SEQ ID NO: 2738793 - RNA, 19 nt, Human
auguccaagaagcccagga

SEQ ID NO: 2738794 - RNA, 18 nt, Human
auguccaagaagcccagg

SEQ ID NO: 2738795 - RNA, 21 nt, Human
augucagugugacugaucucu

SEQ ID NO: 2738796 - RNA, 15 nt, Human
augucagugugacug

SEQ ID NO: 2738797 - RNA, 16 nt, Human
augucagugugacuga

SEQ ID NO: 2738798 - RNA, 12 nt, Human
auguauguguaa

SEQ ID NO: 2738799 - RNA, 15 nt, Human
auguaucugagcagg

SEQ ID NO: 2738800 - RNA, 15 nt, Human
auguaucaaugagua

SEQ ID NO: 2738801 - RNA, 22 nt, Human
uuugggggaaaauuuagaaaua

SEQ ID NO: 2738802 - RNA, 14 nt, Human
uuuuaaaagaauga

SEQ ID NO: 2738803 - RNA, 13 nt, Human
uuuuaaaaaagaa

SEQ ID NO: 2738804 - RNA, 18 nt, Human
uuuguuugaacugauaaa

SEQ ID NO: 2738805 - RNA, 21 nt, Human
uuuuaaaaaacugcugacugu

SEQ ID NO: 2738806 - RNA, 15 nt, Human
uuuuaagugcugcau

SEQ ID NO: 2738807 - RNA, 16 nt, Human
uuuuaagaggcagggu

SEQ ID NO: 2738808 - RNA, 15 nt, Human
uuuuaagaggcaggg

SEQ ID NO: 2738809 - RNA, 11 nt, Human
uuuuaagaaau

SEQ ID NO: 2738810 - RNA, 13 nt, Human
uuuguuucuguac

SEQ ID NO: 2738811 - RNA, 12 nt, Human
uuuguuucugua

SEQ ID NO: 2738812 - RNA, 18 nt, Human
uuugugaggaagccgcug

SEQ ID NO: 2738813 - RNA, 19 nt, Human
uuugugaggaagccgcugg

SEQ ID NO: 2738814 - RNA, 18 nt, Human
uuuguuucuguacuuuuu

SEQ ID NO: 2738815 - RNA, 12 nt, Human
uuuguuugaacu

SEQ ID NO: 2738816 - RNA, 14 nt, Human
uuuguuugaacuga

SEQ ID NO: 2738817 - RNA, 13 nt, Human
uuuguuugaacug

SEQ ID NO: 2738818 - RNA, 15 nt, Human
uuugucuacaccauu

SEQ ID NO: 2738819 - RNA, 19 nt, Human
uuuguagcacugacagauu

SEQ ID NO: 2738820 - RNA, 17 nt, Human
uuuguagaagucacauu

SEQ ID NO: 2738821 - RNA, 17 nt, Human
uuuguagcacugacaga

SEQ ID NO: 2738822 - RNA, 13 nt, Human
uuuguagagccag

SEQ ID NO: 2738823 - RNA, 21 nt, Human
auguuucaaacauauauaaca

SEQ ID NO: 2738824 - RNA, 14 nt, Human
auguuuuccaugag

SEQ ID NO: 2738825 - RNA, 18 nt, Human
auguuucaaacauauaua

SEQ ID NO: 2738826 - RNA, 15 nt, Human
auguugugauguauu

SEQ ID NO: 2738827 - RNA, 16 nt, Human
auuaaaagaauauuuu

SEQ ID NO: 2738828 - RNA, 15 nt, Human
auuaaaagaauauuu

SEQ ID NO: 2738829 - RNA, 20 nt, Human
auuaaaaaaucaguuguaca

SEQ ID NO: 2738830 - RNA, 18 nt, Human
auguuuuucuucucccuc

SEQ ID NO: 2738831 - RNA, 17 nt, Human
auguuuuucuucucccu

SEQ ID NO: 2738832 - RNA, 18 nt, Human
auuaaccacuucagcuga

SEQ ID NO: 2738833 - RNA, 20 nt, Human
auuaaccacuucagcugacu

SEQ ID NO: 2738834 - RNA, 17 nt, Human
auuaaccacuucagcug

SEQ ID NO: 2738835 - RNA, 19 nt, Human
auuaacauguuaaaccaug

SEQ ID NO: 2738836 - RNA, 17 nt, Human
auuaacauguuaaacca

SEQ ID NO: 2738837 - RNA, 15 nt, Human
auuaacauguuaaac

SEQ ID NO: 2738838 - RNA, 14 nt, Human
auuaacauguuaaa

SEQ ID NO: 2738839 - RNA, 13 nt, Human
auuaacauguuaa

SEQ ID NO: 2738840 - RNA, 11 nt, Human
auuaaagccau

SEQ ID NO: 2738841 - RNA, 21 nt, Human
auuaaagccauguuuauuaca

SEQ ID NO: 2738842 - RNA, 17 nt, Human
auuaaagccauguuuau

SEQ ID NO: 2738843 - RNA, 16 nt, Human
auuaaagccauguuua

SEQ ID NO: 2738844 - RNA, 12 nt, Human
auuaaagccaug

SEQ ID NO: 2738845 - RNA, 21 nt, Human
auuaaacuuaaucuaaaugga

SEQ ID NO: 2738846 - RNA, 19 nt, Human
auuaaacuuaaucuaaaug

SEQ ID NO: 2738847 - RNA, 16 nt, Human
auuaaacuuaaucuaa

SEQ ID NO: 2738848 - RNA, 17 nt, Human
auuaaacuuaaucuaaa

SEQ ID NO: 2738849 - RNA, 12 nt, Human
auuaacuuuuau

SEQ ID NO: 2738850 - RNA, 20 nt, Human
auuaacuuuuauaaacuuua

SEQ ID NO: 2738851 - RNA, 19 nt, Human
auuaacuuuuauaaacuuu

SEQ ID NO: 2738852 - RNA, 17 nt, Human
auuaacuuuuauaaacu

SEQ ID NO: 2738853 - RNA, 16 nt, Human
auuaacuuuuauaaac

SEQ ID NO: 2738854 - RNA, 23 nt, Human
auuaacuuuuauaaacuuuaccu

SEQ ID NO: 2738855 - RNA, 14 nt, Human
auuaagaaagacua

SEQ ID NO: 2738856 - RNA, 13 nt, Human
auuaagaaagacu

SEQ ID NO: 2738857 - RNA, 15 nt, Human
auguugacaugggac

SEQ ID NO: 2738858 - RNA, 21 nt, Human
auguucaucauccuaagcuau

SEQ ID NO: 2738859 - RNA, 21 nt, Human
uuuuaagugcugcauuuaaaa

SEQ ID NO: 2738860 - RNA, 17 nt, Human
uuuuaagugcugcauuu

SEQ ID NO: 2738861 - RNA, 16 nt, Human
uuuuaagugcugcauu

SEQ ID NO: 2738862 - RNA, 16 nt, Human
auguuggccaggcugg

SEQ ID NO: 2738863 - RNA, 13 nt, Human
auguuggccaggc

SEQ ID NO: 2738864 - RNA, 14 nt, Human
auguuggccaggcu

SEQ ID NO: 2738865 - RNA, 23 nt, Human
uuuuagaguugauacuacaguuu

SEQ ID NO: 2738866 - RNA, 13 nt, Human
uuuuauaaacuuu

SEQ ID NO: 2738867 - RNA, 12 nt, Human
uuuuauaaacuu

SEQ ID NO: 2738868 - RNA, 19 nt, Human
uuuuauggcacuaguauuu

SEQ ID NO: 2738869 - RNA, 23 nt, Human
uuuuauggaggcuuugcauagau

SEQ ID NO: 2738870 - RNA, 12 nt, Human
uuuuauuaugua

SEQ ID NO: 2738871 - RNA, 14 nt, Human
uuuuauaauuuugu

SEQ ID NO: 2738872 - RNA, 19 nt, Human
uuuuauaaacuuuaccuuu

SEQ ID NO: 2738873 - RNA, 17 nt, Human
uuuuauaaacuuuaccu

SEQ ID NO: 2738874 - RNA, 14 nt, Human
uuuuauaaacuuua

SEQ ID NO: 2738875 - RNA, 21 nt, Human
uuuucauuauuuuauuaugaa

SEQ ID NO: 2738876 - RNA, 22 nt, Human
uuuucauucuccuaucaccugu

SEQ ID NO: 2738877 - RNA, 15 nt, Human
uuuucauuauuuuau

SEQ ID NO: 2738878 - RNA, 19 nt, Human
uuuuccagguuuaagcugu

SEQ ID NO: 2738879 - RNA, 14 nt, Human
uuuuauuauguaaa

SEQ ID NO: 2738880 - RNA, 13 nt, Human
uuuuauuauguaa

SEQ ID NO: 2738881 - RNA, 17 nt, Human
auuauauuuacaaaugg

SEQ ID NO: 2738882 - RNA, 23 nt, Human
auuaucucaaaacugcacuguca

SEQ ID NO: 2738883 - RNA, 18 nt, Human
auuaucucaaaacugcac

SEQ ID NO: 2738884 - RNA, 20 nt, Human
auuauuaccuuacagaaguu

SEQ ID NO: 2738885 - RNA, 15 nt, Human
auuauuuuauuauga

SEQ ID NO: 2738886 - RNA, 23 nt, Human
auuauuuauuaaaugcccagccc

SEQ ID NO: 2738887 - RNA, 16 nt, Human
auuauauuuacaaaug

SEQ ID NO: 2738888 - RNA, 19 nt, Human
auuagagaguguugaaacg

SEQ ID NO: 2738889 - RNA, 18 nt, Human
auuagagaguguugaaac

SEQ ID NO: 2738890 - RNA, 17 nt, Human
auuagagaguguugaaa

SEQ ID NO: 2738891 - RNA, 16 nt, Human
auuagagaguguugaa

SEQ ID NO: 2738892 - RNA, 15 nt, Human
auuagagaguguuga

SEQ ID NO: 2738893 - RNA, 13 nt, Human
auuaaguaaugau

SEQ ID NO: 2738894 - RNA, 15 nt, Human
auuaaguaaugauaa

SEQ ID NO: 2738895 - RNA, 15 nt, Human
auuaauauauuucca

SEQ ID NO: 2738896 - RNA, 23 nt, Human
uuuuuuaaaaaagaaacauuugg

SEQ ID NO: 2738897 - RNA, 20 nt, Human
auuaagagagucuauuuacg

SEQ ID NO: 2738898 - RNA, 22 nt, Human
uuuuuguuccacaaguuaaaua

SEQ ID NO: 2738899 - RNA, 15 nt, Human
auuacauuuguauaa

SEQ ID NO: 2738900 - RNA, 20 nt, Human
auuacauuuguauaaaauaa

SEQ ID NO: 2738901 - RNA, 19 nt, Human
auuaccacagacauacuaa

SEQ ID NO: 2738902 - RNA, 13 nt, Human
auuacauuuguau

SEQ ID NO: 2738903 - RNA, 22 nt, Human
auuaccugaauuuuggcugugu

SEQ ID NO: 2738904 - RNA, 15 nt, Human
auucaaacagucuca

SEQ ID NO: 2738905 - RNA, 14 nt, Human
auucaaacagucuc

SEQ ID NO: 2738906 - RNA, 22 nt, Human
auuauuuuauuaugaaacuugu

SEQ ID NO: 2738907 - RNA, 21 nt, Human
auuauuuuauuaugaaacuug

SEQ ID NO: 2738908 - RNA, 21 nt, Human
auucaguuguuagugugucuu

SEQ ID NO: 2738909 - RNA, 23 nt, Human
auucaggaagcucagggccuggc

SEQ ID NO: 2738910 - RNA, 16 nt, Human
auucaguuguuagugu

SEQ ID NO: 2738911 - RNA, 14 nt, Human
auucagcucugcaa

SEQ ID NO: 2738912 - RNA, 18 nt, Human
auucagcucugcaagaau

SEQ ID NO: 2738913 - RNA, 21 nt, Human
auucaggaagcucagggccug

SEQ ID NO: 2738914 - RNA, 22 nt, Human
auucaggaagcucagggccugg

SEQ ID NO: 2738915 - RNA, 22 nt, Human
auuccccacccugaaagcccug

SEQ ID NO: 2738916 - RNA, 20 nt, Human
auuccccagauugcaacagg

SEQ ID NO: 2738917 - RNA, 16 nt, Human
auuccccaggaggcca

SEQ ID NO: 2738918 - RNA, 19 nt, Human
auuccccaggaggccagcc

SEQ ID NO: 2738919 - RNA, 16 nt, Human
auuuacaaaugggaaa

SEQ ID NO: 2738920 - RNA, 18 nt, Human
auuuaaccucuaaauucu

SEQ ID NO: 2738921 - RNA, 16 nt, Human
auuuaaccucuaaauu

SEQ ID NO: 2738922 - RNA, 19 nt, Human
auuuaauuuuuuugagaca

SEQ ID NO: 2738923 - RNA, 23 nt, Human
auuuaauuuuuuugagacagagu

SEQ ID NO: 2738924 - RNA, 19 nt, Human
auuuaaagcuuauuaaaac

SEQ ID NO: 2738925 - RNA, 20 nt, Human
auuuaacagaaauguacagc

SEQ ID NO: 2738926 - RNA, 19 nt, Human
auuuaacagaaauguacag

SEQ ID NO: 2738927 - RNA, 17 nt, Human
auuuaacagaaauguac

SEQ ID NO: 2738928 - RNA, 16 nt, Human
auuuaacagaaaugua

SEQ ID NO: 2738929 - RNA, 15 nt, Human
auuuaacagaaaugu

SEQ ID NO: 2738930 - RNA, 14 nt, Human
auuguauuacaaau

SEQ ID NO: 2738931 - RNA, 23 nt, Human
auugugcgcuaaacuuuucugau

SEQ ID NO: 2738932 - RNA, 23 nt, Human
auuggcuuuggguugcaggaccu

SEQ ID NO: 2738933 - RNA, 21 nt, Human
auugcuaaucaccaaaggcuc

SEQ ID NO: 2738934 - RNA, 16 nt, Human
auucuccaccugccag

SEQ ID NO: 2738935 - RNA, 17 nt, Human
auucuccaccugccagg

SEQ ID NO: 2738936 - RNA, 13 nt, Human
auucuccaccugc

SEQ ID NO: 2738937 - RNA, 20 nt, Human
auucucagaaucucaaauaa

SEQ ID NO: 2738938 - RNA, 18 nt, Human
auucucagaaucucaaau

SEQ ID NO: 2738939 - RNA, 14 nt, Human
auucucagaaucuc

SEQ ID NO: 2738940 - RNA, 19 nt, Human
auucucacagcuccaagaa

SEQ ID NO: 2738941 - RNA, 22 nt, Human
auucucacagcuccaagaauuu

SEQ ID NO: 2738942 - RNA, 21 nt, Human
auucucacagcuccaagaauu

SEQ ID NO: 2738943 - RNA, 16 nt, Human
auucuacuuugagugc

SEQ ID NO: 2738944 - RNA, 13 nt, Human
auucuacuuugag

SEQ ID NO: 2738945 - RNA, 18 nt, Human
auucuccaccugccaggg

SEQ ID NO: 2738946 - RNA, 18 nt, Human
auugacaggauuauugga

SEQ ID NO: 2738947 - RNA, 13 nt, Human
auugaccugaggc

SEQ ID NO: 2738948 - RNA, 15 nt, Human
auugcaacaggcugg

SEQ ID NO: 2738949 - RNA, 21 nt, Human
auugcaacaggcugggcuuca

SEQ ID NO: 2738950 - RNA, 23 nt, Human
auugccauuucuuccacaagagc

SEQ ID NO: 2738951 - RNA, 17 nt, Human
auugcccacgcuggagu

SEQ ID NO: 2738952 - RNA, 21 nt, Human
auugcccacgcuggagugcag

SEQ ID NO: 2738953 - RNA, 16 nt, Human
auugcggacagccacg

SEQ ID NO: 2738954 - RNA, 18 nt, Human
auugcggacagccacggc

SEQ ID NO: 2738955 - RNA, 19 nt, Human
auugcggacagccacggcc

SEQ ID NO: 2738956 - RNA, 14 nt, Human
auugcuacuguccu

SEQ ID NO: 2738957 - RNA, 14 nt, Human
auuuuaauaauguu

SEQ ID NO: 2738958 - RNA, 15 nt, Human
auuuuaauaauguuu

SEQ ID NO: 2738959 - RNA, 16 nt, Human
auuuuaauaauguuuc

SEQ ID NO: 2738960 - RNA, 21 nt, Human
auuuguauaaaauaauuuuua

SEQ ID NO: 2738961 - RNA, 15 nt, Human
auuuguaucacaaau

SEQ ID NO: 2738962 - RNA, 13 nt, Human
auuuuauuaugua

SEQ ID NO: 2738963 - RNA, 17 nt, Human
auuuuauuaugcaugaa

SEQ ID NO: 2738964 - RNA, 15 nt, Human
auuuuauuaugcaug

SEQ ID NO: 2738965 - RNA, 14 nt, Human
auuuuauuaugcau

SEQ ID NO: 2738966 - RNA, 14 nt, Human
auuuuauuauguaa

SEQ ID NO: 2738967 - RNA, 21 nt, Human
auuuuacuuuaaaaggagcca

SEQ ID NO: 2738968 - RNA, 13 nt, Human
auuuuauuaugca

SEQ ID NO: 2738969 - RNA, 21 nt, Human
auuuuauuaugaaacuugugu

SEQ ID NO: 2738970 - RNA, 18 nt, Human
auuuuauuaugaaacuug

SEQ ID NO: 2738971 - RNA, 12 nt, Human
auuuuauuauga

SEQ ID NO: 2738972 - RNA, 11 nt, Human
auuuuauuaug

SEQ ID NO: 2738973 - RNA, 14 nt, Human
auuuuauuaugaaa

SEQ ID NO: 2738974 - RNA, 13 nt, Human
auuuuauuaugaa

SEQ ID NO: 2738975 - RNA, 22 nt, Human
auuuauuacuguaagaaaauau

SEQ ID NO: 2738976 - RNA, 20 nt, Human
auuuauuaaaugcccagccc

SEQ ID NO: 2738977 - RNA, 13 nt, Human
auuuauuauggca

SEQ ID NO: 2738978 - RNA, 15 nt, Human
auuuacuaaaaugga

SEQ ID NO: 2738979 - RNA, 21 nt, Human
auuucuaaaucuccaaaauaa

SEQ ID NO: 2738980 - RNA, 13 nt, Human
auuucuaaaucuc

SEQ ID NO: 2738981 - RNA, 12 nt, Human
auuucuaaaucu

SEQ ID NO: 2738982 - RNA, 14 nt, Human
auuuccugugucuu

SEQ ID NO: 2738983 - RNA, 16 nt, Human
auuuauuauggcacau

SEQ ID NO: 2738984 - RNA, 22 nt, Human
auuuccugggagcuuuuguaga

SEQ ID NO: 2738985 - RNA, 23 nt, Human
auuuccugggagcuuuuguagaa

SEQ ID NO: 2738986 - RNA, 23 nt, Human
auuugguaaggggaauugaggac

SEQ ID NO: 2738987 - RNA, 17 nt, Human
auuuggugguuucagaa

SEQ ID NO: 2738988 - RNA, 20 nt, Human
auuuggagacacaacuauuu

SEQ ID NO: 2738989 - RNA, 21 nt, Human
auuuggagacacaacuauuuu

SEQ ID NO: 2738990 - RNA, 18 nt, Human
auuuguaguguuggagaa

SEQ ID NO: 2738991 - RNA, 20 nt, Human
auuuggugguuucagaaaug

SEQ ID NO: 2738992 - RNA, 18 nt, Human
auuuggugguuucagaaa

SEQ ID NO: 2738993 - RNA, 17 nt, Human
auuugguuuucacauug

SEQ ID NO: 2738994 - RNA, 15 nt, Human
auuugguuuucacau

SEQ ID NO: 2738995 - RNA, 22 nt, Human
auuugguuuucacauuggaaac

SEQ ID NO: 2738996 - RNA, 21 nt, Human
auuugguuuucacauuggaaa

SEQ ID NO: 2738997 - RNA, 20 nt, Human
auuucuuuugccguuauuaa

SEQ ID NO: 2738998 - RNA, 16 nt, Human
auuugagcagggcuca

SEQ ID NO: 2738999 - RNA, 23 nt, Human
auuugaggucuguucuuuccaaa

SEQ ID NO: 2739000 - RNA, 17 nt, Human
auuugagcagggcucag

SEQ ID NO: 2739001 - RNA, 20 nt, Human
auuuggaaaucuuuaaaaaa

SEQ ID NO: 2739002 - RNA, 17 nt, Human
auuuggaaaucuuuaaa

SEQ ID NO: 2739003 - RNA, 22 nt, Human
auuugaggucuguucuuuccaa

SEQ ID NO: 2739004 - RNA, 23 nt, Human
auuucuuuugccguuauuaaaaa

SEQ ID NO: 2739005 - RNA, 14 nt, Human
auauauaacaaugc

SEQ ID NO: 2739006 - RNA, 12 nt, Human
auauauaaccag

SEQ ID NO: 2739007 - RNA, 13 nt, Human
auauauaaccagu

SEQ ID NO: 2739008 - RNA, 17 nt, Human
auauaacaaugcuguau

SEQ ID NO: 2739009 - RNA, 21 nt, Human
auauauauuuuuuucugaaau

SEQ ID NO: 2739010 - RNA, 22 nt, Human
auaguuggcuaggaccccucca

SEQ ID NO: 2739011 - RNA, 22 nt, Human
auaguuaagcgugcauaaguua

SEQ ID NO: 2739012 - RNA, 13 nt, Human
auagucuuucagu

SEQ ID NO: 2739013 - RNA, 13 nt, Human
auagucuggcugu

SEQ ID NO: 2739014 - RNA, 15 nt, Human
auaguggugugauuu

SEQ ID NO: 2739015 - RNA, 17 nt, Human
auaguggcuuaaaacaa

SEQ ID NO: 2739016 - RNA, 13 nt, Human
uucacaguucucu

SEQ ID NO: 2739017 - RNA, 20 nt, Human
uucacagaugggugcuugga

SEQ ID NO: 2739018 - RNA, 15 nt, Human
uucacaguucucucc

SEQ ID NO: 2739019 - RNA, 20 nt, Human
uucacaguucucuccuucuu

SEQ ID NO: 2739020 - RNA, 17 nt, Human
auaggcguaacuaauuu

SEQ ID NO: 2739021 - RNA, 15 nt, Human
auagcuuuuuucucu

SEQ ID NO: 2739022 - RNA, 12 nt, Human
auaggaaaaacu

SEQ ID NO: 2739023 - RNA, 14 nt, Human
auaggaaaaacuga

SEQ ID NO: 2739024 - RNA, 16 nt, Human
auaggaaaaacugauu

SEQ ID NO: 2739025 - RNA, 17 nt, Human
auaggaaaaacugauuu

SEQ ID NO: 2739026 - RNA, 14 nt, Human
uucaaacauauaua

SEQ ID NO: 2739027 - RNA, 18 nt, Human
uucaaacagucucaggaa

SEQ ID NO: 2739028 - RNA, 21 nt, Human
uucaagcgauucuucugcuuc

SEQ ID NO: 2739029 - RNA, 17 nt, Human
uuauuuuguucauacau

SEQ ID NO: 2739030 - RNA, 18 nt, Human
uuauuuuuagacagaguc

SEQ ID NO: 2739031 - RNA, 17 nt, Human
uuauuuuuagacagagu

SEQ ID NO: 2739032 - RNA, 21 nt, Human
uuauuuuguucauacauauuu

SEQ ID NO: 2739033 - RNA, 18 nt, Human
uucccaacuccagaaagu

SEQ ID NO: 2739034 - RNA, 12 nt, Human
uucccaaauuuc

SEQ ID NO: 2739035 - RNA, 13 nt, Human
uucccaagcucug

SEQ ID NO: 2739036 - RNA, 14 nt, Human
uucccaagcucugc

SEQ ID NO: 2739037 - RNA, 15 nt, Human
uucccaagcucugcu

SEQ ID NO: 2739038 - RNA, 16 nt, Human
uucccaagcucugcuc

SEQ ID NO: 2739039 - RNA, 18 nt, Human
uucccaagcucugcuccu

SEQ ID NO: 2739040 - RNA, 22 nt, Human
uucccaccucucucacuccuug

SEQ ID NO: 2739041 - RNA, 12 nt, Human
uucccaccucuc

SEQ ID NO: 2739042 - RNA, 21 nt, Human
uuccaggggugggacacccug

SEQ ID NO: 2739043 - RNA, 17 nt, Human
uuccagugaggcucugc

SEQ ID NO: 2739044 - RNA, 19 nt, Human
uuccagugaggcucugccc

SEQ ID NO: 2739045 - RNA, 20 nt, Human
uuccagugaggcucugcccu

SEQ ID NO: 2739046 - RNA, 21 nt, Human
uuccagugaggcucugcccuu

SEQ ID NO: 2739047 - RNA, 22 nt, Human
uuccagugaggcucugcccuug

SEQ ID NO: 2739048 - RNA, 23 nt, Human
uucccaaagcagugcaugcuguc

SEQ ID NO: 2739049 - RNA, 17 nt, Human
uuccaggggugggacac

SEQ ID NO: 2739050 - RNA, 18 nt, Human
uuccaccaucaagccacc

SEQ ID NO: 2739051 - RNA, 22 nt, Human
uuccacaagagcccaggccucc

SEQ ID NO: 2739052 - RNA, 19 nt, Human
uuccaccaucaagccacca

SEQ ID NO: 2739053 - RNA, 18 nt, Human
uucauuuaggugaggaag

SEQ ID NO: 2739054 - RNA, 17 nt, Human
uuccaaggguacuaagg

SEQ ID NO: 2739055 - RNA, 15 nt, Human
uuccaaggguacuaa

SEQ ID NO: 2739056 - RNA, 16 nt, Human
auauguggaguucauc

SEQ ID NO: 2739057 - RNA, 15 nt, Human
auauguggaguucau

SEQ ID NO: 2739058 - RNA, 13 nt, Human
uucagaaaugugu

SEQ ID NO: 2739059 - RNA, 11 nt, Human
uucagaaaugu

SEQ ID NO: 2739060 - RNA, 16 nt, Human
uucagugccaaaaaca

SEQ ID NO: 2739061 - RNA, 12 nt, Human
uucagugccuua

SEQ ID NO: 2739062 - RNA, 13 nt, Human
uucagugccuuau

SEQ ID NO: 2739063 - RNA, 13 nt, Human
uucauaugcugua

SEQ ID NO: 2739064 - RNA, 13 nt, Human
uucauacauugua

SEQ ID NO: 2739065 - RNA, 19 nt, Human
uucauacauuguacgaaga

SEQ ID NO: 2739066 - RNA, 12 nt, Human
uucauacauauu

SEQ ID NO: 2739067 - RNA, 23 nt, Human
uucauacauauuuuuguagcacu

SEQ ID NO: 2739068 - RNA, 18 nt, Human
uucagugccuuauggaac

SEQ ID NO: 2739069 - RNA, 15 nt, Human
auauauuuaaugaua

SEQ ID NO: 2739070 - RNA, 13 nt, Human
auauauuuaauga

SEQ ID NO: 2739071 - RNA, 17 nt, Human
uucaucccucuggggcu

SEQ ID NO: 2739072 - RNA, 21 nt, Human
uucaucccucuggggcuguuc

SEQ ID NO: 2739073 - RNA, 17 nt, Human
auauguaacaagccacc

SEQ ID NO: 2739074 - RNA, 16 nt, Human
auauguaacaagccac

SEQ ID NO: 2739075 - RNA, 13 nt, Human
auaugcacacauu

SEQ ID NO: 2739076 - RNA, 16 nt, Human
auaugcacacauuuuu

SEQ ID NO: 2739077 - RNA, 15 nt, Human
auaugcacacauuuu

SEQ ID NO: 2739078 - RNA, 14 nt, Human
auaugcacacauuu

SEQ ID NO: 2739079 - RNA, 16 nt, Human
auaucugaaaauguau

SEQ ID NO: 2739080 - RNA, 20 nt, Human
auaucugaaaauguaugugu

SEQ ID NO: 2739081 - RNA, 17 nt, Human
auaucugaaaauguaug

SEQ ID NO: 2739082 - RNA, 13 nt, Human
auaucuuguagcu

SEQ ID NO: 2739083 - RNA, 19 nt, Human
auaucuccgucaacucaua

SEQ ID NO: 2739084 - RNA, 21 nt, Human
auaucuccgucaacucauauu

SEQ ID NO: 2739085 - RNA, 20 nt, Human
auaucuccgucaacucauau

SEQ ID NO: 2739086 - RNA, 14 nt, Human
auaucuaguaugaa

SEQ ID NO: 2739087 - RNA, 15 nt, Human
auaucuaguaugaaa

SEQ ID NO: 2739088 - RNA, 17 nt, Human
auaucuaguaugaaauu

SEQ ID NO: 2739089 - RNA, 20 nt, Human
aucaaauaugcaaagcacug

SEQ ID NO: 2739090 - RNA, 16 nt, Human
auauuuuuauauuuac

SEQ ID NO: 2739091 - RNA, 14 nt, Human
aucaaguuauuuuu

SEQ ID NO: 2739092 - RNA, 19 nt, Human
aucaaccccuucgcuccug

SEQ ID NO: 2739093 - RNA, 20 nt, Human
aucaaccccuucgcuccugu

SEQ ID NO: 2739094 - RNA, 22 nt, Human
aucaaccccuucgcuccugugu

SEQ ID NO: 2739095 - RNA, 13 nt, Human
auauuuucauucu

SEQ ID NO: 2739096 - RNA, 17 nt, Human
auauuuucauucuccua

SEQ ID NO: 2739097 - RNA, 18 nt, Human
uucccuuuuuuggcugcu

SEQ ID NO: 2739098 - RNA, 19 nt, Human
uucccuuuuuuggcugcug

SEQ ID NO: 2739099 - RNA, 20 nt, Human
uucccuuuuuuggcugcuga

SEQ ID NO: 2739100 - RNA, 20 nt, Human
auauuuuacauaaauuuagu

SEQ ID NO: 2739101 - RNA, 16 nt, Human
auauuuuacauaaauu

SEQ ID NO: 2739102 - RNA, 15 nt, Human
auauuuuacauaaau

SEQ ID NO: 2739103 - RNA, 17 nt, Human
uucuaaguaaaaccaca

SEQ ID NO: 2739104 - RNA, 20 nt, Human
uucuaaguaaaaccacagca

SEQ ID NO: 2739105 - RNA, 19 nt, Human
uucuaaguaaaaccacagc

SEQ ID NO: 2739106 - RNA, 19 nt, Human
uucuaacaaaaaaauauau

SEQ ID NO: 2739107 - RNA, 20 nt, Human
uucuaacaaaaaaauauauu

SEQ ID NO: 2739108 - RNA, 19 nt, Human
uucuaaaucuccaaaauaa

SEQ ID NO: 2739109 - RNA, 13 nt, Human
uucgcuccugugu

SEQ ID NO: 2739110 - RNA, 18 nt, Human
aucaauaaaaaauuauga

SEQ ID NO: 2739111 - RNA, 17 nt, Human
aucaauaaaaaauuaug

SEQ ID NO: 2739112 - RNA, 15 nt, Human
aucaauaaaaaauua

SEQ ID NO: 2739113 - RNA, 21 nt, Human
uucgcaggauucuuccucccu

SEQ ID NO: 2739114 - RNA, 21 nt, Human
uucuaaguaaaaccacagcag

SEQ ID NO: 2739115 - RNA, 14 nt, Human
uucuauaauuuaaa

SEQ ID NO: 2739116 - RNA, 13 nt, Human
uucuauaauuuaa

SEQ ID NO: 2739117 - RNA, 21 nt, Human
uucucacugccaugccagcuu

SEQ ID NO: 2739118 - RNA, 13 nt, Human
aucaggccaggcc

SEQ ID NO: 2739119 - RNA, 13 nt, Human
uucucagaaucuc

SEQ ID NO: 2739120 - RNA, 20 nt, Human
aucauuucugcaucagcugc

SEQ ID NO: 2739121 - RNA, 21 nt, Human
aucauugaaaucuuuuugcuu

SEQ ID NO: 2739122 - RNA, 21 nt, Human
aucaggccaggcccucugccc

SEQ ID NO: 2739123 - RNA, 22 nt, Human
aucaggccaggcccucugccca

SEQ ID NO: 2739124 - RNA, 23 nt, Human
aucaggccaggcccucugcccac

SEQ ID NO: 2739125 - RNA, 20 nt, Human
aucauugaaaucuuuuugcu

SEQ ID NO: 2739126 - RNA, 20 nt, Human
aucaggccaggcccucugcc

SEQ ID NO: 2739127 - RNA, 13 nt, Human
uucugccgcagcc

SEQ ID NO: 2739128 - RNA, 14 nt, Human
uucugacccaugcu

SEQ ID NO: 2739129 - RNA, 16 nt, Human
uucucuuuucaaaaca

SEQ ID NO: 2739130 - RNA, 17 nt, Human
uucucuacucuagggaa

SEQ ID NO: 2739131 - RNA, 14 nt, Human
auccauacauuugu

SEQ ID NO: 2739132 - RNA, 13 nt, Human
auccauuuggaaa

SEQ ID NO: 2739133 - RNA, 19 nt, Human
auccauuuggaaaucuuua

SEQ ID NO: 2739134 - RNA, 17 nt, Human
auccauuuggaaaucuu

SEQ ID NO: 2739135 - RNA, 17 nt, Human
auccaguuuuguuugga

SEQ ID NO: 2739136 - RNA, 18 nt, Human
auccaguuuuguuuggac

SEQ ID NO: 2739137 - RNA, 21 nt, Human
auccaguuuuguuuggaccaa

SEQ ID NO: 2739138 - RNA, 20 nt, Human
auccaguuuuguuuggacca

SEQ ID NO: 2739139 - RNA, 20 nt, Human
uucuggcuaugcauuugaaa

SEQ ID NO: 2739140 - RNA, 18 nt, Human
uucuggcuaugcauuuga

SEQ ID NO: 2739141 - RNA, 14 nt, Human
uucugccgcagccc

SEQ ID NO: 2739142 - RNA, 15 nt, Human
uucugccgcagcccu

SEQ ID NO: 2739143 - RNA, 13 nt, Human
uucuguacuuuuu

SEQ ID NO: 2739144 - RNA, 19 nt, Human
uucuguacuuuuuggcaua

SEQ ID NO: 2739145 - RNA, 18 nt, Human
uucuguacuuuuuggcau

SEQ ID NO: 2739146 - RNA, 19 nt, Human
uugaaauauugacuuuuua

SEQ ID NO: 2739147 - RNA, 20 nt, Human
uugaaauauaggaacuuaaa

SEQ ID NO: 2739148 - RNA, 11 nt, Human
uugaaaucuuu

SEQ ID NO: 2739149 - RNA, 21 nt, Human
uugaaauuuuuauuaaauuau

SEQ ID NO: 2739150 - RNA, 21 nt, Human
auccuaggcauuugcugaaua

SEQ ID NO: 2739151 - RNA, 13 nt, Human
auccuaguuccac

SEQ ID NO: 2739152 - RNA, 20 nt, Human
auccuagucacuaccuucau

SEQ ID NO: 2739153 - RNA, 21 nt, Human
auccuaagcuauucaguaaua

SEQ ID NO: 2739154 - RNA, 12 nt, Human
uucuugcaaagu

SEQ ID NO: 2739155 - RNA, 13 nt, Human
uucuugcaaagua

SEQ ID NO: 2739156 - RNA, 22 nt, Human
uucuuucuggcuaugcauuuga

SEQ ID NO: 2739157 - RNA, 20 nt, Human
uucuguuuuucuaggccugg

SEQ ID NO: 2739158 - RNA, 11 nt, Human
uucuguucuuu

SEQ ID NO: 2739159 - RNA, 18 nt, Human
uucuguucuuucuggcua

SEQ ID NO: 2739160 - RNA, 13 nt, Human
uucuuaauucuua

SEQ ID NO: 2739161 - RNA, 23 nt, Human
uucuuccucccucccucuuuccc

SEQ ID NO: 2739162 - RNA, 23 nt, Human
uugugugaaagguacuucaaauc

SEQ ID NO: 2739163 - RNA, 19 nt, Human
uuguguaaauacaauuuug

SEQ ID NO: 2739164 - RNA, 13 nt, Human
uugugguuaaucu

SEQ ID NO: 2739165 - RNA, 17 nt, Human
uuguguguuuauuguca

SEQ ID NO: 2739166 - RNA, 20 nt, Human
uuguguuaaguauguguaaa

SEQ ID NO: 2739167 - RNA, 19 nt, Human
uuguucuggcucuuccagg

SEQ ID NO: 2739168 - RNA, 20 nt, Human
uuguucuggcucuuccaggc

SEQ ID NO: 2739169 - RNA, 22 nt, Human
uuguucuggcucuuccaggcug

SEQ ID NO: 2739170 - RNA, 23 nt, Human
augagagacacacugaagaagca

SEQ ID NO: 2739171 - RNA, 20 nt, Human
augagagacacacugaagaa

SEQ ID NO: 2739172 - RNA, 21 nt, Human
augagagacacacugaagaag

SEQ ID NO: 2739173 - RNA, 21 nt, Human
uugugaggaagccgcuggggc

SEQ ID NO: 2739174 - RNA, 18 nt, Human
uugugauacaaugcugug

SEQ ID NO: 2739175 - RNA, 22 nt, Human
augauuaugaauuacauuugua

SEQ ID NO: 2739176 - RNA, 20 nt, Human
augauuaaccacuucagcug

SEQ ID NO: 2739177 - RNA, 21 nt, Human
augauuaaccacuucagcuga

SEQ ID NO: 2739178 - RNA, 19 nt, Human
augauuaaccacuucagcu

SEQ ID NO: 2739179 - RNA, 15 nt, Human
uuguugucugcaacu

SEQ ID NO: 2739180 - RNA, 12 nt, Human
augauucccagc

SEQ ID NO: 2739181 - RNA, 21 nt, Human
augauucaacagguuuuccug

SEQ ID NO: 2739182 - RNA, 21 nt, Human
augauucaaaugucuauaaac

SEQ ID NO: 2739183 - RNA, 15 nt, Human
augcaaagcacugac

SEQ ID NO: 2739184 - RNA, 16 nt, Human
augauuucuaugcuga

SEQ ID NO: 2739185 - RNA, 13 nt, Human
augauuucuaugc

SEQ ID NO: 2739186 - RNA, 12 nt, Human
augauuucuaug

SEQ ID NO: 2739187 - RNA, 14 nt, Human
augcaccagcccuu

SEQ ID NO: 2739188 - RNA, 12 nt, Human
augcacuuuguu

SEQ ID NO: 2739189 - RNA, 13 nt, Human
augcaccagcccu

SEQ ID NO: 2739190 - RNA, 14 nt, Human
uuguuuucauuauc

SEQ ID NO: 2739191 - RNA, 16 nt, Human
uuguuuucaguguaca

SEQ ID NO: 2739192 - RNA, 13 nt, Human
uuguuuucagugu

SEQ ID NO: 2739193 - RNA, 15 nt, Human
augcacuuuguucug

SEQ ID NO: 2739194 - RNA, 12 nt, Human
uuuaauucaguu

SEQ ID NO: 2739195 - RNA, 19 nt, Human
uuuaagugcugcauuuaaa

SEQ ID NO: 2739196 - RNA, 17 nt, Human
uuuaagugcugcauuua

SEQ ID NO: 2739197 - RNA, 16 nt, Human
uuuaagugcugcauuu

SEQ ID NO: 2739198 - RNA, 15 nt, Human
uuuaagugcugcauu

SEQ ID NO: 2739199 - RNA, 18 nt, Human
augcaguucugaagaaga

SEQ ID NO: 2739200 - RNA, 19 nt, Human
augcaguucugaagaagau

SEQ ID NO: 2739201 - RNA, 15 nt, Human
augcaguucugaaga

SEQ ID NO: 2739202 - RNA, 17 nt, Human
augcaguucugaagaag

SEQ ID NO: 2739203 - RNA, 17 nt, Human
uuuaauuuuggaauuuu

SEQ ID NO: 2739204 - RNA, 15 nt, Human
uuuaauuuuggaauu

SEQ ID NO: 2739205 - RNA, 14 nt, Human
uuuaauuuuggaau

SEQ ID NO: 2739206 - RNA, 13 nt, Human
augcagccucaca

SEQ ID NO: 2739207 - RNA, 17 nt, Human
augcagccucacagucc

SEQ ID NO: 2739208 - RNA, 14 nt, Human
augcagccucacag

SEQ ID NO: 2739209 - RNA, 15 nt, Human
augcagccucacagu

SEQ ID NO: 2739210 - RNA, 21 nt, Human
auggccgggcgcgguggcuca

SEQ ID NO: 2739211 - RNA, 23 nt, Human
auggcacaucagcacgauuucug

SEQ ID NO: 2739212 - RNA, 17 nt, Human
auggcacaucagcacga

SEQ ID NO: 2739213 - RNA, 18 nt, Human
auggauuuccagccaaag

SEQ ID NO: 2739214 - RNA, 23 nt, Human
auggacguguuaugacuccagaa

SEQ ID NO: 2739215 - RNA, 19 nt, Human
auggacguguuaugacucc

SEQ ID NO: 2739216 - RNA, 20 nt, Human
auggacguguuaugacucca

SEQ ID NO: 2739217 - RNA, 17 nt, Human
auggaauacucuuauau

SEQ ID NO: 2739218 - RNA, 16 nt, Human
auggaaugcuguguua

SEQ ID NO: 2739219 - RNA, 16 nt, Human
auggaauacucuuaua

SEQ ID NO: 2739220 - RNA, 16 nt, Human
auggaagacagcucuu

SEQ ID NO: 2739221 - RNA, 13 nt, Human
uuucagaaaugug

SEQ ID NO: 2739222 - RNA, 14 nt, Human
auggacaugaucuu

SEQ ID NO: 2739223 - RNA, 22 nt, Human
augcugucuacacuaagagaga

SEQ ID NO: 2739224 - RNA, 23 nt, Human
augcugucccuuacgugaguccu

SEQ ID NO: 2739225 - RNA, 19 nt, Human
augcugucccuuacgugag

SEQ ID NO: 2739226 - RNA, 23 nt, Human
auggaacgcguugaaauuguaau

SEQ ID NO: 2739227 - RNA, 16 nt, Human
auggaacacucugaga

SEQ ID NO: 2739228 - RNA, 15 nt, Human
auggaagacagcucu

SEQ ID NO: 2739229 - RNA, 11 nt, Human
auggaacacuc

SEQ ID NO: 2739230 - RNA, 14 nt, Human
auggaacacucuga

SEQ ID NO: 2739231 - RNA, 15 nt, Human
auggaacacucugag

SEQ ID NO: 2739232 - RNA, 23 nt, Human
uuuauuacaguauaauuaacaug

SEQ ID NO: 2739233 - RNA, 15 nt, Human
augcucugcauguua

SEQ ID NO: 2739234 - RNA, 13 nt, Human
uuuauauaagcuu

SEQ ID NO: 2739235 - RNA, 20 nt, Human
uuuauggcuuuugugcauua

SEQ ID NO: 2739236 - RNA, 24 nt, Human
uuuauggcuuuugugcauuaucua

SEQ ID NO: 2739237 - RNA, 22 nt, Human
uuuauuacaguauaauuaacau

SEQ ID NO: 2739238 - RNA, 20 nt, Human
uuuagcuggaaaaguauguu

SEQ ID NO: 2739239 - RNA, 22 nt, Human
uuuagcuggaaaaguauguuag

SEQ ID NO: 2739240 - RNA, 15 nt, Human
uuuaguagagacagg

SEQ ID NO: 2739241 - RNA, 14 nt, Human
uuuagucuugucuc

SEQ ID NO: 2739242 - RNA, 13 nt, Human
uugcccuguuaaa

SEQ ID NO: 2739243 - RNA, 13 nt, Human
uugccgucuaccu

SEQ ID NO: 2739244 - RNA, 22 nt, Human
uugccuaaauccauuuggaaau

SEQ ID NO: 2739245 - RNA, 13 nt, Human
uugccuaaaucca

SEQ ID NO: 2739246 - RNA, 15 nt, Human
uugccuaaauccauu

SEQ ID NO: 2739247 - RNA, 14 nt, Human
uugccuaaauccau

SEQ ID NO: 2739248 - RNA, 14 nt, Human
uugccguuauuaaa

SEQ ID NO: 2739249 - RNA, 19 nt, Human
uugccgucuaccugagggg

SEQ ID NO: 2739250 - RNA, 15 nt, Human
uugccgucuaccuga

SEQ ID NO: 2739251 - RNA, 18 nt, Human
uugccgucuaccugaggg

SEQ ID NO: 2739252 - RNA, 21 nt, Human
aucugaggaauucuguauaga

SEQ ID NO: 2739253 - RNA, 20 nt, Human
aucugaggaauucuguauag

SEQ ID NO: 2739254 - RNA, 18 nt, Human
aucugaggaauucuguau

SEQ ID NO: 2739255 - RNA, 17 nt, Human
aucugaggaauucugua

SEQ ID NO: 2739256 - RNA, 16 nt, Human
aucugaggaauucugu

SEQ ID NO: 2739257 - RNA, 15 nt, Human
aucugaggaauucug

SEQ ID NO: 2739258 - RNA, 18 nt, Human
aucuugaauuguaaggaa

SEQ ID NO: 2739259 - RNA, 17 nt, Human
aucuugcucugcugaca

SEQ ID NO: 2739260 - RNA, 19 nt, Human
aucuugcucugcugacaga

SEQ ID NO: 2739261 - RNA, 23 nt, Human
aucugugaaaggaaagagggagg

SEQ ID NO: 2739262 - RNA, 19 nt, Human
aucugugaacuugaaauuu

SEQ ID NO: 2739263 - RNA, 18 nt, Human
aucugugaacuugaaauu

SEQ ID NO: 2739264 - RNA, 17 nt, Human
aucugugaacuugaaau

SEQ ID NO: 2739265 - RNA, 13 nt, Human
aucugugaacuug

SEQ ID NO: 2739266 - RNA, 20 nt, Human
aucugccuaaggacuucuuu

SEQ ID NO: 2739267 - RNA, 19 nt, Human
aucuggguucacugcaacc

SEQ ID NO: 2739268 - RNA, 17 nt, Human
aucuggguucacugcaa

SEQ ID NO: 2739269 - RNA, 19 nt, Human
aucugccuaaggacuucuu

SEQ ID NO: 2739270 - RNA, 18 nt, Human
aucugccuaaggacuucu

SEQ ID NO: 2739271 - RNA, 13 nt, Human
aucugccuaagga

SEQ ID NO: 2739272 - RNA, 17 nt, Human
aucugccuaaggacuuc

SEQ ID NO: 2739273 - RNA, 16 nt, Human
aucugccuaaggacuu

SEQ ID NO: 2739274 - RNA, 15 nt, Human
aucugccuaaggacu

SEQ ID NO: 2739275 - RNA, 14 nt, Human
aucugccuaaggac

SEQ ID NO: 2739276 - RNA, 13 nt, Human
aucucaauauuuc

SEQ ID NO: 2739277 - RNA, 15 nt, Human
aucucacacaugagc

SEQ ID NO: 2739278 - RNA, 16 nt, Human
aucucacacaugagca

SEQ ID NO: 2739279 - RNA, 15 nt, Human
auccuaguuccacca

SEQ ID NO: 2739280 - RNA, 19 nt, Human
auccuaguuccaccaucaa

SEQ ID NO: 2739281 - RNA, 21 nt, Human
aucucauuuccaagcaaguau

SEQ ID NO: 2739282 - RNA, 18 nt, Human
aucucauaauuuauacag

SEQ ID NO: 2739283 - RNA, 17 nt, Human
aucucauaauuuauaca

SEQ ID NO: 2739284 - RNA, 23 nt, Human
aucucauuuccaagcaaguauua

SEQ ID NO: 2739285 - RNA, 12 nt, Human
aucucccccagc

SEQ ID NO: 2739286 - RNA, 13 nt, Human
aucucccccagcc

SEQ ID NO: 2739287 - RNA, 19 nt, Human
uugauggugguauguuuuc

SEQ ID NO: 2739288 - RNA, 11 nt, Human
uugauguguuu

SEQ ID NO: 2739289 - RNA, 14 nt, Human
uugauucagacagc

SEQ ID NO: 2739290 - RNA, 18 nt, Human
uugauggugguauguuuu

SEQ ID NO: 2739291 - RNA, 15 nt, Human
uugauucagacagcu

SEQ ID NO: 2739292 - RNA, 16 nt, Human
uugauucagacagcug

SEQ ID NO: 2739293 - RNA, 13 nt, Human
aucuuuuucuaac

SEQ ID NO: 2739294 - RNA, 12 nt, Human
augaaagauuca

SEQ ID NO: 2739295 - RNA, 18 nt, Human
aucuuugcagacaggcaa

SEQ ID NO: 2739296 - RNA, 18 nt, Human
uuggcuagagguucaaag

SEQ ID NO: 2739297 - RNA, 22 nt, Human
uuggcgcugccccuggcagccc

SEQ ID NO: 2739298 - RNA, 23 nt, Human
uuggcgcugccccuggcagcccc

SEQ ID NO: 2739299 - RNA, 15 nt, Human
uuggauaauaaggaa

SEQ ID NO: 2739300 - RNA, 21 nt, Human
uuggauaauaaggaaaaguuu

SEQ ID NO: 2739301 - RNA, 19 nt, Human
uuggauaauaaggaaaagu

SEQ ID NO: 2739302 - RNA, 18 nt, Human
augaaauauuauguuaaa

SEQ ID NO: 2739303 - RNA, 13 nt, Human
augaaauauuaug

SEQ ID NO: 2739304 - RNA, 17 nt, Human
augaaauauuauguuaa

SEQ ID NO: 2739305 - RNA, 15 nt, Human
augaagauacugaaa

SEQ ID NO: 2739306 - RNA, 17 nt, Human
augaagauacugaaaua

SEQ ID NO: 2739307 - RNA, 16 nt, Human
augaagauacugaaau

SEQ ID NO: 2739308 - RNA, 20 nt, Human
augaaugucagugugacuga

SEQ ID NO: 2739309 - RNA, 15 nt, Human
uuggggauucuuaaa

SEQ ID NO: 2739310 - RNA, 22 nt, Human
uuggggggcugaggugggagga

SEQ ID NO: 2739311 - RNA, 14 nt, Human
uuggggauauuuuu

SEQ ID NO: 2739312 - RNA, 13 nt, Human
uuggggauucuua

SEQ ID NO: 2739313 - RNA, 16 nt, Human
uuguauaaaauaauuu

SEQ ID NO: 2739314 - RNA, 15 nt, Human
uuguauaaaauaauu

SEQ ID NO: 2739315 - RNA, 22 nt, Human
uuguacaaaguauuaagcauau

SEQ ID NO: 2739316 - RNA, 21 nt, Human
uuguacaaaguauuaagcaua

SEQ ID NO: 2739317 - RNA, 20 nt, Human
uuguacaaaguauuaagcau

SEQ ID NO: 2739318 - RNA, 17 nt, Human
uuguacaaaguauuaag

SEQ ID NO: 2739319 - RNA, 15 nt, Human
uuguacaaaguauua

SEQ ID NO: 2739320 - RNA, 14 nt, Human
uuguacaaaguauu

SEQ ID NO: 2739321 - RNA, 13 nt, Human
uuguacaaaguau

SEQ ID NO: 2739322 - RNA, 16 nt, Human
uuguaucacaaaucuu

SEQ ID NO: 2739323 - RNA, 22 nt, Human
augacacaugcaaggucauuuu

SEQ ID NO: 2739324 - RNA, 14 nt, Human
augacacaugcaag

SEQ ID NO: 2739325 - RNA, 17 nt, Human
uuguauaaaauaauuuu

SEQ ID NO: 2739326 - RNA, 13 nt, Human
augagagacacac

SEQ ID NO: 2739327 - RNA, 14 nt, Human
augagagacacacu

SEQ ID NO: 2739328 - RNA, 17 nt, Human
augagagacacacugaa

SEQ ID NO: 2739329 - RNA, 19 nt, Human
augagagacacacugaaga

SEQ ID NO: 2739330 - RNA, 21 nt, Human
augagaaagguugaagcacca

SEQ ID NO: 2739331 - RNA, 22 nt, Human
augagaaagguugaagcaccaa

SEQ ID NO: 2739332 - RNA, 17 nt, Human
augacuuacuguacaug

SEQ ID NO: 2739333 - RNA, 16 nt, Human
augacuuacuguacau

SEQ ID NO: 2739334 - RNA, 18 nt, Human
augacacgaauauugcug

SEQ ID NO: 2739335 - RNA, 14 nt, Human
augacuuacuguac

SEQ ID NO: 2739336 - RNA, 22 nt, Human
augacuuaagcacacuugacau

SEQ ID NO: 2739337 - RNA, 22 nt, Human
caauuuuucuuauuucauuucu

SEQ ID NO: 2739338 - RNA, 13 nt, Human
cacaaacagaggc

SEQ ID NO: 2739339 - RNA, 14 nt, Human
cacaaacagaggcc

SEQ ID NO: 2739340 - RNA, 18 nt, Human
caauuacaggaaguacug

SEQ ID NO: 2739341 - RNA, 19 nt, Human
caaugugaaaagaaaaaug

SEQ ID NO: 2739342 - RNA, 22 nt, Human
caaugugaaaagaaaaaugagc

SEQ ID NO: 2739343 - RNA, 17 nt, Human
caauuacaggaaguacu

SEQ ID NO: 2739344 - RNA, 14 nt, Human
caauguucucucuu

SEQ ID NO: 2739345 - RNA, 13 nt, Human
cacaaaggagagc

SEQ ID NO: 2739346 - RNA, 17 nt, Human
cacacacgcgugcacac

SEQ ID NO: 2739347 - RNA, 18 nt, Human
cacagccagacuggcaca

SEQ ID NO: 2739348 - RNA, 17 nt, Human
cacagccagacuggcac

SEQ ID NO: 2739349 - RNA, 21 nt, Human
cacagcucuucuccaggcugu

SEQ ID NO: 2739350 - RNA, 19 nt, Human
cacagcaguugaaaagacu

SEQ ID NO: 2739351 - RNA, 21 nt, Human
cacagcaguugaaaagacucc

SEQ ID NO: 2739352 - RNA, 13 nt, Human
cacacugaagaag

SEQ ID NO: 2739353 - RNA, 12 nt, Human
cacagagaaagu

SEQ ID NO: 2739354 - RNA, 21 nt, Human
cacagagaaaguacuucucca

SEQ ID NO: 2739355 - RNA, 19 nt, Human
cacagagaaaguacuucuc

SEQ ID NO: 2739356 - RNA, 20 nt, Human
cacagagaaaguacuucucc

SEQ ID NO: 2739357 - RNA, 23 nt, Human
cacagaugggugcuuggaggaag

SEQ ID NO: 2739358 - RNA, 13 nt, Human
cacagaggcugcc

SEQ ID NO: 2739359 - RNA, 21 nt, Human
cacagaguuguuacauuuuua

SEQ ID NO: 2739360 - RNA, 22 nt, Human
cacagaguuguuacauuuuuaa

SEQ ID NO: 2739361 - RNA, 23 nt, Human
caagggugaugggaaagcauugu

SEQ ID NO: 2739362 - RNA, 21 nt, Human
caagggugaugggaaagcauu

SEQ ID NO: 2739363 - RNA, 18 nt, Human
caaggcugggggaagaag

SEQ ID NO: 2739364 - RNA, 17 nt, Human
caauagucaaauugugu

SEQ ID NO: 2739365 - RNA, 19 nt, Human
caauagucaaauuguguga

SEQ ID NO: 2739366 - RNA, 15 nt, Human
caauaggaaaaacug

SEQ ID NO: 2739367 - RNA, 16 nt, Human
caauaggaaaaacuga

SEQ ID NO: 2739368 - RNA, 17 nt, Human
caauaggaaaaacugau

SEQ ID NO: 2739369 - RNA, 19 nt, Human
caauaauaaauauuuuugc

SEQ ID NO: 2739370 - RNA, 18 nt, Human
caaggaaaaaauaacaau

SEQ ID NO: 2739371 - RNA, 22 nt, Human
caagcuggucccacucagucca

SEQ ID NO: 2739372 - RNA, 23 nt, Human
caagcuggucccacucaguccau

SEQ ID NO: 2739373 - RNA, 20 nt, Human
caaggaaaaaauaacaauga

SEQ ID NO: 2739374 - RNA, 17 nt, Human
caaggcugcagugagcc

SEQ ID NO: 2739375 - RNA, 22 nt, Human
caaggcugcagugagccgagau

SEQ ID NO: 2739376 - RNA, 20 nt, Human
caaggauccugagccagauu

SEQ ID NO: 2739377 - RNA, 16 nt, Human
caaggagauuuacaac

SEQ ID NO: 2739378 - RNA, 18 nt, Human
caaggauccugagccaga

SEQ ID NO: 2739379 - RNA, 19 nt, Human
caaggauccugagccagau

SEQ ID NO: 2739380 - RNA, 21 nt, Human
caagcugcacccucaggcagg

SEQ ID NO: 2739381 - RNA, 18 nt, Human
caagcgauucuucugcuu

SEQ ID NO: 2739382 - RNA, 15 nt, Human
caagcgauucuucug

SEQ ID NO: 2739383 - RNA, 17 nt, Human
caagcgauucuucugcu

SEQ ID NO: 2739384 - RNA, 22 nt, Human
caagcugcacccucaggcaggu

SEQ ID NO: 2739385 - RNA, 21 nt, Human
caagcuggucccacucagucc

SEQ ID NO: 2739386 - RNA, 18 nt, Human
caauaggaaaaacugauu

SEQ ID NO: 2739387 - RNA, 13 nt, Human
caaauaugcaaag

SEQ ID NO: 2739388 - RNA, 12 nt, Human
caaauaugcaaa

SEQ ID NO: 2739389 - RNA, 23 nt, Human
caaauggaaaugggcagagcaga

SEQ ID NO: 2739390 - RNA, 22 nt, Human
caaauggaaaugggcagagcag

SEQ ID NO: 2739391 - RNA, 23 nt, Human
caaagugcugggauuacaagcgu

SEQ ID NO: 2739392 - RNA, 15 nt, Human
caaauaaaaauauug

SEQ ID NO: 2739393 - RNA, 16 nt, Human
caaauaaaaauauugu

SEQ ID NO: 2739394 - RNA, 18 nt, Human
caaauaaaaauauugugu

SEQ ID NO: 2739395 - RNA, 16 nt, Human
caaagagagaaaauaa

SEQ ID NO: 2739396 - RNA, 19 nt, Human
caaagagagaaaauaaaga

SEQ ID NO: 2739397 - RNA, 13 nt, Human
caaagugcuggga

SEQ ID NO: 2739398 - RNA, 19 nt, Human
caaagugcugggauuacaa

SEQ ID NO: 2739399 - RNA, 22 nt, Human
caaauuucuaaaucuccaaaau

SEQ ID NO: 2739400 - RNA, 15 nt, Human
caaauuucuaaaucu

SEQ ID NO: 2739401 - RNA, 20 nt, Human
caacauacucccaucuguga

SEQ ID NO: 2739402 - RNA, 12 nt, Human
caacaggcuggg

SEQ ID NO: 2739403 - RNA, 17 nt, Human
caacauacucccaucug

SEQ ID NO: 2739404 - RNA, 19 nt, Human
caacauacucccaucugug

SEQ ID NO: 2739405 - RNA, 23 nt, Human
caacagcuggugcccugcuuuca

SEQ ID NO: 2739406 - RNA, 14 nt, Human
caagaagcccagga

SEQ ID NO: 2739407 - RNA, 13 nt, Human
caagaagcccagg

SEQ ID NO: 2739408 - RNA, 21 nt, Human
caagaccuucuccuucaccuu

SEQ ID NO: 2739409 - RNA, 23 nt, Human
caagaccuucuccuucaccuuug

SEQ ID NO: 2739410 - RNA, 13 nt, Human
caagacgcugugc

SEQ ID NO: 2739411 - RNA, 15 nt, Human
caagacgcugugcug

SEQ ID NO: 2739412 - RNA, 17 nt, Human
caaacugacucuuaaga

SEQ ID NO: 2739413 - RNA, 21 nt, Human
caaacugacucuuaagaagac

SEQ ID NO: 2739414 - RNA, 16 nt, Human
caaacugacucuuaag

SEQ ID NO: 2739415 - RNA, 21 nt, Human
caaacucuugaccucagguga

SEQ ID NO: 2739416 - RNA, 17 nt, Human
caaacucuugaccucag

SEQ ID NO: 2739417 - RNA, 19 nt, Human
caaacucuugaccucaggu

SEQ ID NO: 2739418 - RNA, 20 nt, Human
caaacucuugaccucaggug

SEQ ID NO: 2739419 - RNA, 11 nt, Human
caaaaugaaac

SEQ ID NO: 2739420 - RNA, 22 nt, Human
caaaaugaaacgcaaccaccac

SEQ ID NO: 2739421 - RNA, 15 nt, Human
caaacagaggccgcc

SEQ ID NO: 2739422 - RNA, 13 nt, Human
caaacagaggccg

SEQ ID NO: 2739423 - RNA, 18 nt, Human
caaaacugcacugucaag

SEQ ID NO: 2739424 - RNA, 17 nt, Human
caaaacugcacugucaa

SEQ ID NO: 2739425 - RNA, 14 nt, Human
caaaacugcacugu

SEQ ID NO: 2739426 - RNA, 19 nt, Human
caaaacucuccucugcugc

SEQ ID NO: 2739427 - RNA, 14 nt, Human
caaaaguuucucuu

SEQ ID NO: 2739428 - RNA, 23 nt, Human
caaaacucuccucugcugcuggc

SEQ ID NO: 2739429 - RNA, 18 nt, Human
auuuuauuuuauuaugca

SEQ ID NO: 2739430 - RNA, 15 nt, Human
caaaacgguuuuacu

SEQ ID NO: 2739431 - RNA, 21 nt, Human
caaaacgguuuuacugcagcu

SEQ ID NO: 2739432 - RNA, 15 nt, Human
caaaacucuccucug

SEQ ID NO: 2739433 - RNA, 16 nt, Human
caaaacucuccucugc

SEQ ID NO: 2739434 - RNA, 18 nt, Human
caaaauaauuuuaagaaa

SEQ ID NO: 2739435 - RNA, 22 nt, Human
caaaauaauuuuaagaaaucaa

SEQ ID NO: 2739436 - RNA, 14 nt, Human
caaaauaaaacuuu

SEQ ID NO: 2739437 - RNA, 16 nt, Human
caaaauaaaacuuuuu

SEQ ID NO: 2739438 - RNA, 20 nt, Human
caaaauaaaacuuuuuaaaa

SEQ ID NO: 2739439 - RNA, 21 nt, Human
caaaaucgaugcagugcuucc

SEQ ID NO: 2739440 - RNA, 13 nt, Human
caacaggcugggc

SEQ ID NO: 2739441 - RNA, 17 nt, Human
cacaguucaauucucau

SEQ ID NO: 2739442 - RNA, 16 nt, Human
caguguacauggaaua

SEQ ID NO: 2739443 - RNA, 23 nt, Human
caguguacauggaauaacaugua

SEQ ID NO: 2739444 - RNA, 20 nt, Human
caguguacauggaauaacau

SEQ ID NO: 2739445 - RNA, 14 nt, Human
cagugugucuaaau

SEQ ID NO: 2739446 - RNA, 23 nt, Human
cagugugucuaaauuugaauguu

SEQ ID NO: 2739447 - RNA, 14 nt, Human
cagugugacaagga

SEQ ID NO: 2739448 - RNA, 12 nt, Human
cagugugacuga

SEQ ID NO: 2739449 - RNA, 22 nt, Human
cagugguuccuaauccucuagg

SEQ ID NO: 2739450 - RNA, 12 nt, Human
caguggcagcug

SEQ ID NO: 2739451 - RNA, 13 nt, Human
caguggcagcugc

SEQ ID NO: 2739452 - RNA, 14 nt, Human
caguggcagcugcu

SEQ ID NO: 2739453 - RNA, 15 nt, Human
caguggcagcugcuu

SEQ ID NO: 2739454 - RNA, 16 nt, Human
caguggcagcugcuuu

SEQ ID NO: 2739455 - RNA, 22 nt, Human
caguguuguggauuuaacagaa

SEQ ID NO: 2739456 - RNA, 20 nt, Human
caguguuguggauuuaacag

SEQ ID NO: 2739457 - RNA, 19 nt, Human
caguguuguggauuuaaca

SEQ ID NO: 2739458 - RNA, 21 nt, Human
caguuaccucugccucagaaa

SEQ ID NO: 2739459 - RNA, 14 nt, Human
caguuacucagaau

SEQ ID NO: 2739460 - RNA, 13 nt, Human
caguuaagagaaa

SEQ ID NO: 2739461 - RNA, 14 nt, Human
caguuaagagaaau

SEQ ID NO: 2739462 - RNA, 12 nt, Human
caguucugaaga

SEQ ID NO: 2739463 - RNA, 22 nt, Human
caguucucuccuucuucccccc

SEQ ID NO: 2739464 - RNA, 13 nt, Human
caguucugaagaa

SEQ ID NO: 2739465 - RNA, 14 nt, Human
caguucugaagaag

SEQ ID NO: 2739466 - RNA, 22 nt, Human
caguucugaagaagaugguacc

SEQ ID NO: 2739467 - RNA, 15 nt, Human
caguucugaagaaga

SEQ ID NO: 2739468 - RNA, 16 nt, Human
caguucugaagaagau

SEQ ID NO: 2739469 - RNA, 22 nt, Human
caguucggugagcuacaaaugc

SEQ ID NO: 2739470 - RNA, 13 nt, Human
caguucucuccuu

SEQ ID NO: 2739471 - RNA, 14 nt, Human
caguucucuccuuc

SEQ ID NO: 2739472 - RNA, 15 nt, Human
caguucucuccuucu

SEQ ID NO: 2739473 - RNA, 12 nt, Human
caguugaaaaac

SEQ ID NO: 2739474 - RNA, 18 nt, Human
caguugaaaaacagcuga

SEQ ID NO: 2739475 - RNA, 19 nt, Human
caguugaaaaacagcugag

SEQ ID NO: 2739476 - RNA, 17 nt, Human
cauaccaacacgagcag

SEQ ID NO: 2739477 - RNA, 15 nt, Human
cauacauuguacgaa

SEQ ID NO: 2739478 - RNA, 12 nt, Human
cauacauauuuu

SEQ ID NO: 2739479 - RNA, 19 nt, Human
cauacauauuuuuguagca

SEQ ID NO: 2739480 - RNA, 11 nt, Human
cauacauauuu

SEQ ID NO: 2739481 - RNA, 19 nt, Human
cauaccacuuuuguucuug

SEQ ID NO: 2739482 - RNA, 11 nt, Human
cauacccaccc

SEQ ID NO: 2739483 - RNA, 12 nt, Human
cauacccacccc

SEQ ID NO: 2739484 - RNA, 18 nt, Human
cauaccacuuuuguucuu

SEQ ID NO: 2739485 - RNA, 15 nt, Human
cauaccacuuuuguu

SEQ ID NO: 2739486 - RNA, 14 nt, Human
cauaccacuuuugu

SEQ ID NO: 2739487 - RNA, 13 nt, Human
cauaccacuuuug

SEQ ID NO: 2739488 - RNA, 16 nt, Human
cauaaguaauucaaga

SEQ ID NO: 2739489 - RNA, 17 nt, Human
cauaaguaauucaagaa

SEQ ID NO: 2739490 - RNA, 18 nt, Human
cauaaguaauucaagaaa

SEQ ID NO: 2739491 - RNA, 22 nt, Human
cauaaguaauucaagaaaacaa

SEQ ID NO: 2739492 - RNA, 14 nt, Human
cauaagauaaaugu

SEQ ID NO: 2739493 - RNA, 21 nt, Human
cauaaaaauuagccaagugug

SEQ ID NO: 2739494 - RNA, 23 nt, Human
cauaaaaagccugcaauuucaua

SEQ ID NO: 2739495 - RNA, 17 nt, Human
cauaaaaacaacuuuau

SEQ ID NO: 2739496 - RNA, 20 nt, Human
cauaaaaacaacuuuauacc

SEQ ID NO: 2739497 - RNA, 21 nt, Human
cauaaaaacaacuuuauaccc

SEQ ID NO: 2739498 - RNA, 23 nt, Human
cauaaaaacaacuuuauacccag

SEQ ID NO: 2739499 - RNA, 21 nt, Human
cauaaacaagaccacguuucu

SEQ ID NO: 2739500 - RNA, 20 nt, Human
cauaaacaagaccacguuuc

SEQ ID NO: 2739501 - RNA, 22 nt, Human
cauaaacaagaccacguuucua

SEQ ID NO: 2739502 - RNA, 23 nt, Human
cauaaaucugugaacuugaaauu

SEQ ID NO: 2739503 - RNA, 22 nt, Human
cauaaaucugugaacuugaaau

SEQ ID NO: 2739504 - RNA, 18 nt, Human
cauaaaucugugaacuug

SEQ ID NO: 2739505 - RNA, 16 nt, Human
cauaaaucugugaacu

SEQ ID NO: 2739506 - RNA, 14 nt, Human
cauaaaucugugaa

SEQ ID NO: 2739507 - RNA, 19 nt, Human
cauaacauaaaucugugaa

SEQ ID NO: 2739508 - RNA, 12 nt, Human
cauaacauaaau

SEQ ID NO: 2739509 - RNA, 20 nt, Human
cauaaauuuaguauuuuguu

SEQ ID NO: 2739510 - RNA, 19 nt, Human
cauaaauuuaguauuuugu

SEQ ID NO: 2739511 - RNA, 21 nt, Human
cauaacauaaaucugugaacu

SEQ ID NO: 2739512 - RNA, 16 nt, Human
cauaaccuagccuuag

SEQ ID NO: 2739513 - RNA, 18 nt, Human
caguugaaaagacuccaa

SEQ ID NO: 2739514 - RNA, 14 nt, Human
caguugaaaagacu

SEQ ID NO: 2739515 - RNA, 23 nt, Human
caguugaaaagacuccaaagaaa

SEQ ID NO: 2739516 - RNA, 22 nt, Human
caguugaaaagacuccaaagaa

SEQ ID NO: 2739517 - RNA, 21 nt, Human
caguugaaaagacuccaaaga

SEQ ID NO: 2739518 - RNA, 20 nt, Human
caguuuucugagaaagacua

SEQ ID NO: 2739519 - RNA, 19 nt, Human
caguuuucugagaaagacu

SEQ ID NO: 2739520 - RNA, 21 nt, Human
caguuuuguuuggaccaaaaa

SEQ ID NO: 2739521 - RNA, 15 nt, Human
cauaaaaacaacuuu

SEQ ID NO: 2739522 - RNA, 15 nt, Human
caguuuucugagaaa

SEQ ID NO: 2739523 - RNA, 14 nt, Human
caguuuucugagaa

SEQ ID NO: 2739524 - RNA, 17 nt, Human
caguuguuagugugucu

SEQ ID NO: 2739525 - RNA, 16 nt, Human
caguuggguggaugcc

SEQ ID NO: 2739526 - RNA, 23 nt, Human
caguugccagucaccccggccac

SEQ ID NO: 2739527 - RNA, 18 nt, Human
caguuggguggaugccug

SEQ ID NO: 2739528 - RNA, 19 nt, Human
caguuggguggaugccugg

SEQ ID NO: 2739529 - RNA, 18 nt, Human
caguuggucccccuucca

SEQ ID NO: 2739530 - RNA, 19 nt, Human
caguuggucccccuuccau

SEQ ID NO: 2739531 - RNA, 20 nt, Human
caguuggucccccuuccaug

SEQ ID NO: 2739532 - RNA, 21 nt, Human
caguuggucccccuuccaugg

SEQ ID NO: 2739533 - RNA, 22 nt, Human
caguuggucccccuuccaugga

SEQ ID NO: 2739534 - RNA, 14 nt, Human
cauacccaccccca

SEQ ID NO: 2739535 - RNA, 17 nt, Human
cauacccacccccaccc

SEQ ID NO: 2739536 - RNA, 18 nt, Human
cauacccacccccaccca

SEQ ID NO: 2739537 - RNA, 21 nt, Human
cauacccacccccacccaagg

SEQ ID NO: 2739538 - RNA, 13 nt, Human
cauacguacacau

SEQ ID NO: 2739539 - RNA, 16 nt, Human
cauacguacacauuuu

SEQ ID NO: 2739540 - RNA, 15 nt, Human
cauacguacacauuu

SEQ ID NO: 2739541 - RNA, 21 nt, Human
cauacuaaccagcagaaaugc

SEQ ID NO: 2739542 - RNA, 14 nt, Human
cauacuaaccagca

SEQ ID NO: 2739543 - RNA, 18 nt, Human
cauacguacacauuuuau

SEQ ID NO: 2739544 - RNA, 17 nt, Human
cauacguacacauuuua

SEQ ID NO: 2739545 - RNA, 22 nt, Human
caucuagugagcagucaggaaa

SEQ ID NO: 2739546 - RNA, 16 nt, Human
caucucacacaugagc

SEQ ID NO: 2739547 - RNA, 17 nt, Human
caucucacacaugagca

SEQ ID NO: 2739548 - RNA, 20 nt, Human
caucucacacaugagcauca

SEQ ID NO: 2739549 - RNA, 14 nt, Human
caucuagugagcag

SEQ ID NO: 2739550 - RNA, 15 nt, Human
caucuacccuccgau

SEQ ID NO: 2739551 - RNA, 19 nt, Human
cauccucuguacagagccc

SEQ ID NO: 2739552 - RNA, 15 nt, Human
cauccucuguacaga

SEQ ID NO: 2739553 - RNA, 18 nt, Human
cauccucuguacagagcc

SEQ ID NO: 2739554 - RNA, 15 nt, Human
cauccucauacccac

SEQ ID NO: 2739555 - RNA, 16 nt, Human
cauccucauacccacc

SEQ ID NO: 2739556 - RNA, 11 nt, Human
cauccuccuca

SEQ ID NO: 2739557 - RNA, 12 nt, Human
cauccuccucag

SEQ ID NO: 2739558 - RNA, 15 nt, Human
cauccuccucagauc

SEQ ID NO: 2739559 - RNA, 16 nt, Human
cauccuccucagaucu

SEQ ID NO: 2739560 - RNA, 18 nt, Human
cauccuccucagaucuuc

SEQ ID NO: 2739561 - RNA, 19 nt, Human
cauccuccucagaucuucu

SEQ ID NO: 2739562 - RNA, 13 nt, Human
cauccucccaagg

SEQ ID NO: 2739563 - RNA, 17 nt, Human
cauccucauacccaccc

SEQ ID NO: 2739564 - RNA, 18 nt, Human
cauccucauacccacccc

SEQ ID NO: 2739565 - RNA, 21 nt, Human
cauccucauacccacccccac

SEQ ID NO: 2739566 - RNA, 22 nt, Human
cauccucauacccacccccacc

SEQ ID NO: 2739567 - RNA, 20 nt, Human
caucuugcucugcugacaga

SEQ ID NO: 2739568 - RNA, 13 nt, Human
caucuugcucugc

SEQ ID NO: 2739569 - RNA, 14 nt, Human
caucuugcucugcu

SEQ ID NO: 2739570 - RNA, 22 nt, Human
caucuuccaaggguacuaagga

SEQ ID NO: 2739571 - RNA, 14 nt, Human
caucccucccucca

SEQ ID NO: 2739572 - RNA, 19 nt, Human
caucccucuggggcuguuc

SEQ ID NO: 2739573 - RNA, 11 nt, Human
caucccugaag

SEQ ID NO: 2739574 - RNA, 13 nt, Human
caucccugaaggc

SEQ ID NO: 2739575 - RNA, 12 nt, Human
caucccucccuc

SEQ ID NO: 2739576 - RNA, 13 nt, Human
caucccucccucc

SEQ ID NO: 2739577 - RNA, 15 nt, Human
cauccagguucagcu

SEQ ID NO: 2739578 - RNA, 15 nt, Human
caucaccaacgucug

SEQ ID NO: 2739579 - RNA, 13 nt, Human
caucauugaaauc

SEQ ID NO: 2739580 - RNA, 14 nt, Human
caucauugaaaucu

SEQ ID NO: 2739581 - RNA, 15 nt, Human
caucauugaaaucuu

SEQ ID NO: 2739582 - RNA, 20 nt, Human
caucauugaaaucuuuuugc

SEQ ID NO: 2739583 - RNA, 21 nt, Human
caucauugaaaucuuuuugcu

SEQ ID NO: 2739584 - RNA, 17 nt, Human
caucccugaaggccccg

SEQ ID NO: 2739585 - RNA, 18 nt, Human
caucccugaaggccccgc

SEQ ID NO: 2739586 - RNA, 19 nt, Human
caucccugaaggccccgcc

SEQ ID NO: 2739587 - RNA, 21 nt, Human
caucccugaaggccccgccca

SEQ ID NO: 2739588 - RNA, 22 nt, Human
caucaagucuuucacauuuaaa

SEQ ID NO: 2739589 - RNA, 14 nt, Human
caucaagaugugac

SEQ ID NO: 2739590 - RNA, 12 nt, Human
cauauuuucaug

SEQ ID NO: 2739591 - RNA, 14 nt, Human
cauauuuuucacau

SEQ ID NO: 2739592 - RNA, 21 nt, Human
cauauuuuucacauaucuagu

SEQ ID NO: 2739593 - RNA, 17 nt, Human
cauauuuacuucuuaua

SEQ ID NO: 2739594 - RNA, 16 nt, Human
cauauuuacuucuuau

SEQ ID NO: 2739595 - RNA, 20 nt, Human
cauauuuacuucuuauacau

SEQ ID NO: 2739596 - RNA, 14 nt, Human
cauauuuacuucuu

SEQ ID NO: 2739597 - RNA, 13 nt, Human
cauaugccugggc

SEQ ID NO: 2739598 - RNA, 18 nt, Human
cauauuuuucacauaucu

SEQ ID NO: 2739599 - RNA, 20 nt, Human
cauauauaacaaugcuguau

SEQ ID NO: 2739600 - RNA, 22 nt, Human
cauauauuuuuauauuuacuaa

SEQ ID NO: 2739601 - RNA, 22 nt, Human
cauauauauguuuuaagaggca

SEQ ID NO: 2739602 - RNA, 20 nt, Human
cauaguaugguggcuggguu

SEQ ID NO: 2739603 - RNA, 18 nt, Human
cauaguaugguggcuggg

SEQ ID NO: 2739604 - RNA, 19 nt, Human
cauaguaugguggcugggu

SEQ ID NO: 2739605 - RNA, 22 nt, Human
cauaguggcuuaaaacaacacu

SEQ ID NO: 2739606 - RNA, 23 nt, Human
cauagagagcaagacgcugugcu

SEQ ID NO: 2739607 - RNA, 19 nt, Human
cauagagagcaagacgcug

SEQ ID NO: 2739608 - RNA, 21 nt, Human
cauagagagcaagacgcugug

SEQ ID NO: 2739609 - RNA, 11 nt, Human
cauacucugcu

SEQ ID NO: 2739610 - RNA, 16 nt, Human
cauacucccaucugug

SEQ ID NO: 2739611 - RNA, 15 nt, Human
cauacucccaucugu

SEQ ID NO: 2739612 - RNA, 18 nt, Human
cauacucccaucugugaa

SEQ ID NO: 2739613 - RNA, 20 nt, Human
cauacucccaucugugaaag

SEQ ID NO: 2739614 - RNA, 23 nt, Human
caugcugucuacacuaagagaga

SEQ ID NO: 2739615 - RNA, 22 nt, Human
caugcugucccuuacgugaguc

SEQ ID NO: 2739616 - RNA, 17 nt, Human
caugcugucccuuacgu

SEQ ID NO: 2739617 - RNA, 20 nt, Human
caugcuguucaugaaagauu

SEQ ID NO: 2739618 - RNA, 17 nt, Human
caugcgggcuuccuccu

SEQ ID NO: 2739619 - RNA, 23 nt, Human
caugccuggauggggcugcaccg

SEQ ID NO: 2739620 - RNA, 18 nt, Human
caugccuggauggggcug

SEQ ID NO: 2739621 - RNA, 21 nt, Human
caugccuggauggggcugcac

SEQ ID NO: 2739622 - RNA, 18 nt, Human
cauggaacgcguugaaau

SEQ ID NO: 2739623 - RNA, 23 nt, Human
cauggaacgcguugaaauuguaa

SEQ ID NO: 2739624 - RNA, 20 nt, Human
cauggaacgcguugaaauug

SEQ ID NO: 2739625 - RNA, 19 nt, Human
cauggaacgcguugaaauu

SEQ ID NO: 2739626 - RNA, 20 nt, Human
cauggaaguacuauaauuua

SEQ ID NO: 2739627 - RNA, 22 nt, Human
cauggaaguacuauaauuuacc

SEQ ID NO: 2739628 - RNA, 18 nt, Human
cauggacaugaucuucuu

SEQ ID NO: 2739629 - RNA, 16 nt, Human
cauggaauaacaugua

SEQ ID NO: 2739630 - RNA, 22 nt, Human
caugggaaugaaugucagugug

SEQ ID NO: 2739631 - RNA, 15 nt, Human
caugggccuccugug

SEQ ID NO: 2739632 - RNA, 16 nt, Human
caugggccuccugugu

SEQ ID NO: 2739633 - RNA, 17 nt, Human
caugggccuccugugug

SEQ ID NO: 2739634 - RNA, 17 nt, Human
cauggagguuugaagau

SEQ ID NO: 2739635 - RNA, 11 nt, Human
cauggacuuug

SEQ ID NO: 2739636 - RNA, 13 nt, Human
cauggacuuuguu

SEQ ID NO: 2739637 - RNA, 18 nt, Human
caugggaaugaaugucag

SEQ ID NO: 2739638 - RNA, 16 nt, Human
cauggaguauauguca

SEQ ID NO: 2739639 - RNA, 14 nt, Human
caugccucucucag

SEQ ID NO: 2739640 - RNA, 15 nt, Human
caugccucucucagg

SEQ ID NO: 2739641 - RNA, 13 nt, Human
caugccuggaugg

SEQ ID NO: 2739642 - RNA, 16 nt, Human
caugccucucucaggc

SEQ ID NO: 2739643 - RNA, 17 nt, Human
caugccucucucaggcc

SEQ ID NO: 2739644 - RNA, 18 nt, Human
caugccucucucaggcca

SEQ ID NO: 2739645 - RNA, 19 nt, Human
caugccucucucaggccaa

SEQ ID NO: 2739646 - RNA, 19 nt, Human
caugccagcuuaucucagg

SEQ ID NO: 2739647 - RNA, 20 nt, Human
caugccagcuuaucucaggg

SEQ ID NO: 2739648 - RNA, 13 nt, Human
caugccccugaac

SEQ ID NO: 2739649 - RNA, 16 nt, Human
cauggucggaaaacau

SEQ ID NO: 2739650 - RNA, 21 nt, Human
cauguaauuaaguacuaugua

SEQ ID NO: 2739651 - RNA, 18 nt, Human
cauguaauuaaguacuau

SEQ ID NO: 2739652 - RNA, 14 nt, Human
caugucuuuucuug

SEQ ID NO: 2739653 - RNA, 19 nt, Human
caugucuuuucuugcauga

SEQ ID NO: 2739654 - RNA, 21 nt, Human
caugucuuuucuugcaugagg

SEQ ID NO: 2739655 - RNA, 23 nt, Human
caugucuuuucuugcaugaggcu

SEQ ID NO: 2739656 - RNA, 12 nt, Human
cauguuuauuac

SEQ ID NO: 2739657 - RNA, 22 nt, Human
cauguuuauuacaguauaauua

SEQ ID NO: 2739658 - RNA, 20 nt, Human
cauguuuauuacaguauaau

SEQ ID NO: 2739659 - RNA, 19 nt, Human
cauguuuauuacaguauaa

SEQ ID NO: 2739660 - RNA, 18 nt, Human
cauguuuauuacaguaua

SEQ ID NO: 2739661 - RNA, 13 nt, Human
cauguuuauuaca

SEQ ID NO: 2739662 - RNA, 23 nt, Human
cauguuugauguaucugagcagg

SEQ ID NO: 2739663 - RNA, 15 nt, Human
cauguuugugauuga

SEQ ID NO: 2739664 - RNA, 21 nt, Human
caugugccagguuuuuggucu

SEQ ID NO: 2739665 - RNA, 15 nt, Human
caugugcacaugcac

SEQ ID NO: 2739666 - RNA, 11 nt, Human
cauuauuuuau

SEQ ID NO: 2739667 - RNA, 15 nt, Human
cauguuuuguuuacg

SEQ ID NO: 2739668 - RNA, 18 nt, Human
cauguuuuucuucucccu

SEQ ID NO: 2739669 - RNA, 21 nt, Human
ccaacacgagcaggcuacugu

SEQ ID NO: 2739670 - RNA, 14 nt, Human
ccaacauacuccca

SEQ ID NO: 2739671 - RNA, 16 nt, Human
ccaacaucaacaucuu

SEQ ID NO: 2739672 - RNA, 14 nt, Human
ccaacacgagcagg

SEQ ID NO: 2739673 - RNA, 22 nt, Human
ccaaauucuuucaguggcuacc

SEQ ID NO: 2739674 - RNA, 15 nt, Human
ccaaauucuuucagu

SEQ ID NO: 2739675 - RNA, 15 nt, Human
ccaagaccuucuccu

SEQ ID NO: 2739676 - RNA, 13 nt, Human
ccaacccucauca

SEQ ID NO: 2739677 - RNA, 15 nt, Human
ccaacccucaucacc

SEQ ID NO: 2739678 - RNA, 13 nt, Human
ccaaagaugcagc

SEQ ID NO: 2739679 - RNA, 14 nt, Human
ccaaagaugcagcc

SEQ ID NO: 2739680 - RNA, 16 nt, Human
ccacaagacccuugug

SEQ ID NO: 2739681 - RNA, 13 nt, Human
ccacaagagccca

SEQ ID NO: 2739682 - RNA, 18 nt, Human
ccacaaaggagagcuagc

SEQ ID NO: 2739683 - RNA, 18 nt, Human
ccaaggugggaggauugc

SEQ ID NO: 2739684 - RNA, 14 nt, Human
ccaaggcuggggga

SEQ ID NO: 2739685 - RNA, 12 nt, Human
ccaagcucccag

SEQ ID NO: 2739686 - RNA, 13 nt, Human
ccaagcucccagg

SEQ ID NO: 2739687 - RNA, 23 nt, Human
ccaagcagagguugggaggccau

SEQ ID NO: 2739688 - RNA, 14 nt, Human
ccaagcaggacaug

SEQ ID NO: 2739689 - RNA, 20 nt, Human
ccacaaguuaaauaaaucau

SEQ ID NO: 2739690 - RNA, 15 nt, Human
ccacaaguuaaauaa

SEQ ID NO: 2739691 - RNA, 20 nt, Human
ccacaagagcccaggccucc

SEQ ID NO: 2739692 - RNA, 21 nt, Human
ccacaagagcccaggccuccu

SEQ ID NO: 2739693 - RNA, 16 nt, Human
ccacaagagcccaggc

SEQ ID NO: 2739694 - RNA, 17 nt, Human
ccacaagagcccaggcc

SEQ ID NO: 2739695 - RNA, 18 nt, Human
ccacaagagcccaggccu

SEQ ID NO: 2739696 - RNA, 19 nt, Human
ccacaagagcccaggccuc

SEQ ID NO: 2739697 - RNA, 19 nt, Human
cauuuaaagcuuauuaaaa

SEQ ID NO: 2739698 - RNA, 17 nt, Human
cauuuacuuuguguuca

SEQ ID NO: 2739699 - RNA, 21 nt, Human
cauuuacuuuguguucaccuu

SEQ ID NO: 2739700 - RNA, 12 nt, Human
cauuuccaagca

SEQ ID NO: 2739701 - RNA, 21 nt, Human
cauuuaaaagauacaguuacu

SEQ ID NO: 2739702 - RNA, 23 nt, Human
cauuucugcaucagcugcugaaa

SEQ ID NO: 2739703 - RNA, 21 nt, Human
cauuucuuccacaagagccca

SEQ ID NO: 2739704 - RNA, 13 nt, Human
cauugaccugagg

SEQ ID NO: 2739705 - RNA, 22 nt, Human
cauugaccugaggcccuucucu

SEQ ID NO: 2739706 - RNA, 19 nt, Human
cauugaaaucuuuuugcuu

SEQ ID NO: 2739707 - RNA, 16 nt, Human
cauuauuuuauuauga

SEQ ID NO: 2739708 - RNA, 14 nt, Human
cauuauuuuauuau

SEQ ID NO: 2739709 - RNA, 12 nt, Human
cauuauuuuauu

SEQ ID NO: 2739710 - RNA, 17 nt, Human
ccaaagaaauguaaggg

SEQ ID NO: 2739711 - RNA, 20 nt, Human
cauuuuuaguagagacaggg

SEQ ID NO: 2739712 - RNA, 21 nt, Human
ccaaaauaaaacuuuuuaaaa

SEQ ID NO: 2739713 - RNA, 18 nt, Human
ccaaaauaaaacuuuuua

SEQ ID NO: 2739714 - RNA, 16 nt, Human
cauuugcucauggaau

SEQ ID NO: 2739715 - RNA, 22 nt, Human
cauuugaggucuguucuuucca

SEQ ID NO: 2739716 - RNA, 15 nt, Human
cauuugcucauggaa

SEQ ID NO: 2739717 - RNA, 14 nt, Human
cauuugcucaugga

SEQ ID NO: 2739718 - RNA, 21 nt, Human
cauuuuauuuuauuaugcaug

SEQ ID NO: 2739719 - RNA, 19 nt, Human
cauuuuauuuuauuaugca

SEQ ID NO: 2739720 - RNA, 18 nt, Human
cauuuugcuaaaugugaa

SEQ ID NO: 2739721 - RNA, 21 nt, Human
cauuuugcuaaaugugaauga

SEQ ID NO: 2739722 - RNA, 24 nt, Human
cauuuugcuaaaugugaaugauga

SEQ ID NO: 2739723 - RNA, 20 nt, Human
cauuuugggguacccacugc

SEQ ID NO: 2739724 - RNA, 21 nt, Human
cauuuugggguacccacugcu

SEQ ID NO: 2739725 - RNA, 22 nt, Human
cauuuugggguacccacugcuc

SEQ ID NO: 2739726 - RNA, 23 nt, Human
cauuuugggguacccacugcucu

SEQ ID NO: 2739727 - RNA, 19 nt, Human
cauuuuuaguagagacagg

SEQ ID NO: 2739728 - RNA, 18 nt, Human
cauuuuuaguagagacag

SEQ ID NO: 2739729 - RNA, 20 nt, Human
cauuuuuaagugcugcauuu

SEQ ID NO: 2739730 - RNA, 15 nt, Human
cauuuuuaagugcug

SEQ ID NO: 2739731 - RNA, 16 nt, Human
cauuugagcagggcuc

SEQ ID NO: 2739732 - RNA, 17 nt, Human
cauuugaggucuguucu

SEQ ID NO: 2739733 - RNA, 19 nt, Human
cauuugaggucuguucuuu

SEQ ID NO: 2739734 - RNA, 18 nt, Human
cauuugaggucuguucuu

SEQ ID NO: 2739735 - RNA, 14 nt, Human
cauuugagcagggc

SEQ ID NO: 2739736 - RNA, 23 nt, Human
cauuucuuccacaagagcccagg

SEQ ID NO: 2739737 - RNA, 14 nt, Human
cccaguuagcucuc

SEQ ID NO: 2739738 - RNA, 20 nt, Human
cccagugguuccuaauccuc

SEQ ID NO: 2739739 - RNA, 15 nt, Human
cccagugccgagaag

SEQ ID NO: 2739740 - RNA, 21 nt, Human
cccagugcccacaggaucagu

SEQ ID NO: 2739741 - RNA, 10 nt, Human
cccagucugg

SEQ ID NO: 2739742 - RNA, 18 nt, Human
cccagucuggaaugcagu

SEQ ID NO: 2739743 - RNA, 19 nt, Human
cccagucuggaaugcagug

SEQ ID NO: 2739744 - RNA, 17 nt, Human
cccaggcauuccccagg

SEQ ID NO: 2739745 - RNA, 23 nt, Human
cccaggcaggucuugaacuccug

SEQ ID NO: 2739746 - RNA, 15 nt, Human
cccaggcauucccca

SEQ ID NO: 2739747 - RNA, 15 nt, Human
cccaggaggccagcc

SEQ ID NO: 2739748 - RNA, 16 nt, Human
cccaggaggccagccu

SEQ ID NO: 2739749 - RNA, 13 nt, Human
cccagguuucuau

SEQ ID NO: 2739750 - RNA, 21 nt, Human
ccccaaauggaaaugggcaga

SEQ ID NO: 2739751 - RNA, 12 nt, Human
cccauuauucaa

SEQ ID NO: 2739752 - RNA, 20 nt, Human
cccaucugugaaaggaaaga

SEQ ID NO: 2739753 - RNA, 13 nt, Human
cccaucucacaca

SEQ ID NO: 2739754 - RNA, 18 nt, Human
cccaucucacacaugagc

SEQ ID NO: 2739755 - RNA, 14 nt, Human
cccaugcugcccug

SEQ ID NO: 2739756 - RNA, 12 nt, Human
cccaugcugccc

SEQ ID NO: 2739757 - RNA, 13 nt, Human
cccaugcugcccu

SEQ ID NO: 2739758 - RNA, 20 nt, Human
cccaugagccucagcauccu

SEQ ID NO: 2739759 - RNA, 15 nt, Human
cccaugagccucagc

SEQ ID NO: 2739760 - RNA, 16 nt, Human
cccaugagccucagca

SEQ ID NO: 2739761 - RNA, 13 nt, Human
ccaugugccaggu

SEQ ID NO: 2739762 - RNA, 13 nt, Human
ccauguuggccag

SEQ ID NO: 2739763 - RNA, 14 nt, Human
ccauguuggccagg

SEQ ID NO: 2739764 - RNA, 15 nt, Human
ccaugcugcccugug

SEQ ID NO: 2739765 - RNA, 15 nt, Human
ccaugcuccuggccc

SEQ ID NO: 2739766 - RNA, 18 nt, Human
ccaugcuccuggcccacu

SEQ ID NO: 2739767 - RNA, 16 nt, Human
ccaugcugcccuguga

SEQ ID NO: 2739768 - RNA, 17 nt, Human
ccaugcugcccugugag

SEQ ID NO: 2739769 - RNA, 13 nt, Human
ccaugcuccuggc

SEQ ID NO: 2739770 - RNA, 19 nt, Human
ccauguuggccaggcuggu

SEQ ID NO: 2739771 - RNA, 21 nt, Human
ccauguuggccaggcuggucu

SEQ ID NO: 2739772 - RNA, 18 nt, Human
ccauguuggccaggcugg

SEQ ID NO: 2739773 - RNA, 15 nt, Human
ccauguuggccaggc

SEQ ID NO: 2739774 - RNA, 12 nt, Human
cccaccuggccu

SEQ ID NO: 2739775 - RNA, 15 nt, Human
cccaccuggccucug

SEQ ID NO: 2739776 - RNA, 16 nt, Human
cccaccuuggcugcag

SEQ ID NO: 2739777 - RNA, 17 nt, Human
cccaccuuggcugcagg

SEQ ID NO: 2739778 - RNA, 19 nt, Human
cccaccuuggcugcaggga

SEQ ID NO: 2739779 - RNA, 20 nt, Human
cccaccuuggcugcagggag

SEQ ID NO: 2739780 - RNA, 15 nt, Human
cccacgcccccacug

SEQ ID NO: 2739781 - RNA, 13 nt, Human
cccacgcccccac

SEQ ID NO: 2739782 - RNA, 14 nt, Human
cccacgcccccacu

SEQ ID NO: 2739783 - RNA, 13 nt, Human
cccaggagccccg

SEQ ID NO: 2739784 - RNA, 14 nt, Human
cccaggagccccga

SEQ ID NO: 2739785 - RNA, 14 nt, Human
cccaggaggccagc

SEQ ID NO: 2739786 - RNA, 14 nt, Human
cccagcgagcccug

SEQ ID NO: 2739787 - RNA, 18 nt, Human
cccagcucugguccauag

SEQ ID NO: 2739788 - RNA, 15 nt, Human
cccagcucuggucca

SEQ ID NO: 2739789 - RNA, 16 nt, Human
cccagcucugguccau

SEQ ID NO: 2739790 - RNA, 12 nt, Human
cccagcucuggu

SEQ ID NO: 2739791 - RNA, 13 nt, Human
cccagcucugguc

SEQ ID NO: 2739792 - RNA, 14 nt, Human
cccagcucuggucc

SEQ ID NO: 2739793 - RNA, 18 nt, Human
cccagccccauccucugu

SEQ ID NO: 2739794 - RNA, 19 nt, Human
cccagccccauccucugua

SEQ ID NO: 2739795 - RNA, 13 nt, Human
cccagccccaucc

SEQ ID NO: 2739796 - RNA, 14 nt, Human
cccagccccauccc

SEQ ID NO: 2739797 - RNA, 14 nt, Human
cccagccccauccu

SEQ ID NO: 2739798 - RNA, 15 nt, Human
cccagccccauccuc

SEQ ID NO: 2739799 - RNA, 23 nt, Human
cccagauugcaacaggcugggcu

SEQ ID NO: 2739800 - RNA, 17 nt, Human
cccagccccaaugaaca

SEQ ID NO: 2739801 - RNA, 11 nt, Human
cccagccccau

SEQ ID NO: 2739802 - RNA, 12 nt, Human
cccagccccauc

SEQ ID NO: 2739803 - RNA, 13 nt, Human
cccagccccaaug

SEQ ID NO: 2739804 - RNA, 18 nt, Human
cccaggaggccagccuug

SEQ ID NO: 2739805 - RNA, 21 nt, Human
ccauccucuguacagagccca

SEQ ID NO: 2739806 - RNA, 14 nt, Human
ccaucaugucuggc

SEQ ID NO: 2739807 - RNA, 16 nt, Human
ccaucaugucuggcua

SEQ ID NO: 2739808 - RNA, 23 nt, Human
ccauagagagcaagacgcugugc

SEQ ID NO: 2739809 - RNA, 19 nt, Human
ccauauuaccacagacaua

SEQ ID NO: 2739810 - RNA, 15 nt, Human
ccauauucuguuggc

SEQ ID NO: 2739811 - RNA, 18 nt, Human
ccauauucuguuggccag

SEQ ID NO: 2739812 - RNA, 12 nt, Human
ccaucacccgcu

SEQ ID NO: 2739813 - RNA, 23 nt, Human
ccagggacagaggggguggccuc

SEQ ID NO: 2739814 - RNA, 16 nt, Human
ccaggcccucugccca

SEQ ID NO: 2739815 - RNA, 17 nt, Human
ccaggcccucugcccac

SEQ ID NO: 2739816 - RNA, 18 nt, Human
ccaggcccucugcccacu

SEQ ID NO: 2739817 - RNA, 19 nt, Human
ccaggcccucugcccacuc

SEQ ID NO: 2739818 - RNA, 13 nt, Human
ccaggccuccuac

SEQ ID NO: 2739819 - RNA, 18 nt, Human
ccaggccuccuacagcuu

SEQ ID NO: 2739820 - RNA, 19 nt, Human
ccaggccuccuacagcuug

SEQ ID NO: 2739821 - RNA, 19 nt, Human
ccaggccccugccacccug

SEQ ID NO: 2739822 - RNA, 21 nt, Human
ccaggccccugccacccuggg

SEQ ID NO: 2739823 - RNA, 23 nt, Human
ccaggccccugccacccugggga

SEQ ID NO: 2739824 - RNA, 14 nt, Human
ccaggccagaggga

SEQ ID NO: 2739825 - RNA, 21 nt, Human
ccaggccagagggagugacag

SEQ ID NO: 2739826 - RNA, 14 nt, Human
ccaggagcagccac

SEQ ID NO: 2739827 - RNA, 22 nt, Human
ccagcugugcucuggacaggca

SEQ ID NO: 2739828 - RNA, 23 nt, Human
ccagcugugcucuggacaggcau

SEQ ID NO: 2739829 - RNA, 14 nt, Human
ccaggaagccagca

SEQ ID NO: 2739830 - RNA, 15 nt, Human
ccaggaagccagcag

SEQ ID NO: 2739831 - RNA, 17 nt, Human
ccaggaagccagcaggc

SEQ ID NO: 2739832 - RNA, 19 nt, Human
ccaggaagccagcaggcuc

SEQ ID NO: 2739833 - RNA, 12 nt, Human
ccaggagcagcc

SEQ ID NO: 2739834 - RNA, 13 nt, Human
ccaggagcagcca

SEQ ID NO: 2739835 - RNA, 18 nt, Human
ccagcugugcucuggaca

SEQ ID NO: 2739836 - RNA, 20 nt, Human
ccagcugugcucuggacagg

SEQ ID NO: 2739837 - RNA, 21 nt, Human
ccagcugugcucuggacaggc

SEQ ID NO: 2739838 - RNA, 13 nt, Human
ccagcugcuuggg

SEQ ID NO: 2739839 - RNA, 15 nt, Human
ccagcugcuugggcu

SEQ ID NO: 2739840 - RNA, 16 nt, Human
ccagcugcuugggcuu

SEQ ID NO: 2739841 - RNA, 18 nt, Human
ccagcugcuugggcuuca

SEQ ID NO: 2739842 - RNA, 13 nt, Human
ccuaaacauauga

SEQ ID NO: 2739843 - RNA, 18 nt, Human
ccuaaauccauuuggaaa

SEQ ID NO: 2739844 - RNA, 19 nt, Human
ccuaaauccauuuggaaau

SEQ ID NO: 2739845 - RNA, 16 nt, Human
ccuaaaauucagugga

SEQ ID NO: 2739846 - RNA, 22 nt, Human
ccuacaguugaaaaacagcuga

SEQ ID NO: 2739847 - RNA, 19 nt, Human
ccuacagcuugaccgugag

SEQ ID NO: 2739848 - RNA, 21 nt, Human
ccuaaauccauuuggaaaucu

SEQ ID NO: 2739849 - RNA, 20 nt, Human
ccuaaauccauuuggaaauc

SEQ ID NO: 2739850 - RNA, 21 nt, Human
ccuagaaauuccccacccuga

SEQ ID NO: 2739851 - RNA, 13 nt, Human
ccuaggugacaga

SEQ ID NO: 2739852 - RNA, 13 nt, Human
ccuacccacccuc

SEQ ID NO: 2739853 - RNA, 18 nt, Human
ccuacccacccuccuuuc

SEQ ID NO: 2739854 - RNA, 19 nt, Human
ccuacuguaauuugugaua

SEQ ID NO: 2739855 - RNA, 12 nt, Human
ccguuauuaaaa

SEQ ID NO: 2739856 - RNA, 12 nt, Human
cccuucccaccu

SEQ ID NO: 2739857 - RNA, 13 nt, Human
cccuucccaccuc

SEQ ID NO: 2739858 - RNA, 17 nt, Human
cccuuggauuguccccg

SEQ ID NO: 2739859 - RNA, 20 nt, Human
cccuuguggucccaccccac

SEQ ID NO: 2739860 - RNA, 22 nt, Human
cccuuguggucccaccccacac

SEQ ID NO: 2739861 - RNA, 22 nt, Human
cccuugguuaggcauuguggga

SEQ ID NO: 2739862 - RNA, 23 nt, Human
cccuugguuaggcauugugggaa

SEQ ID NO: 2739863 - RNA, 17 nt, Human
ccgggaagggggcuggg

SEQ ID NO: 2739864 - RNA, 16 nt, Human
ccucagaucuucugug

SEQ ID NO: 2739865 - RNA, 23 nt, Human
ccucaggccugggggcugggcag

SEQ ID NO: 2739866 - RNA, 16 nt, Human
ccucagggucccuggu

SEQ ID NO: 2739867 - RNA, 17 nt, Human
ccucagggucccuggug

SEQ ID NO: 2739868 - RNA, 20 nt, Human
ccucagggucccugguggca

SEQ ID NO: 2739869 - RNA, 22 nt, Human
ccucagggucccugguggcagc

SEQ ID NO: 2739870 - RNA, 15 nt, Human
ccuaggugacagagu

SEQ ID NO: 2739871 - RNA, 16 nt, Human
ccuauuagagaagaga

SEQ ID NO: 2739872 - RNA, 17 nt, Human
ccuauuagagaagagau

SEQ ID NO: 2739873 - RNA, 23 nt, Human
ccucacaguccuuaccagcagag

SEQ ID NO: 2739874 - RNA, 24 nt, Human
ccucacaguccuuaccagcagagc

SEQ ID NO: 2739875 - RNA, 12 nt, Human
ccuccccuccuc

SEQ ID NO: 2739876 - RNA, 13 nt, Human
ccuccccuccucu

SEQ ID NO: 2739877 - RNA, 18 nt, Human
ccucccgaauagcuggga

SEQ ID NO: 2739878 - RNA, 15 nt, Human
ccucccaacucaccc

SEQ ID NO: 2739879 - RNA, 13 nt, Human
ccucccucuuucc

SEQ ID NO: 2739880 - RNA, 11 nt, Human
ccuccucagau

SEQ ID NO: 2739881 - RNA, 12 nt, Human
ccuccuccagcc

SEQ ID NO: 2739882 - RNA, 17 nt, Human
ccucccgaguagcuggg

SEQ ID NO: 2739883 - RNA, 18 nt, Human
ccucccgaguagcuggga

SEQ ID NO: 2739884 - RNA, 21 nt, Human
ccucccgaauagcugggacua

SEQ ID NO: 2739885 - RNA, 19 nt, Human
ccucccgaauagcugggac

SEQ ID NO: 2739886 - RNA, 20 nt, Human
ccucccgaauagcugggacu

SEQ ID NO: 2739887 - RNA, 12 nt, Human
ccuccauguggg

SEQ ID NO: 2739888 - RNA, 15 nt, Human
ccuccaugugggcua

SEQ ID NO: 2739889 - RNA, 17 nt, Human
ccucccaaagugcuggg

SEQ ID NO: 2739890 - RNA, 14 nt, Human
ccucccaacucacc

SEQ ID NO: 2739891 - RNA, 17 nt, Human
ccuccaggugcacaagc

SEQ ID NO: 2739892 - RNA, 11 nt, Human
ccuccaggugc

SEQ ID NO: 2739893 - RNA, 12 nt, Human
ccuccaggugca

SEQ ID NO: 2739894 - RNA, 17 nt, Human
ccucaggugagaagcag

SEQ ID NO: 2739895 - RNA, 18 nt, Human
ccucaggugagaagcaga

SEQ ID NO: 2739896 - RNA, 20 nt, Human
ccucaggugagaagcagagg

SEQ ID NO: 2739897 - RNA, 21 nt, Human
ccucugacacacagcucuguc

SEQ ID NO: 2739898 - RNA, 13 nt, Human
ccucugacacaca

SEQ ID NO: 2739899 - RNA, 14 nt, Human
ccucugacacacag

SEQ ID NO: 2739900 - RNA, 19 nt, Human
ccucugacacacagcucug

SEQ ID NO: 2739901 - RNA, 20 nt, Human
ccucugacacacagcucugu

SEQ ID NO: 2739902 - RNA, 15 nt, Human
ccucugcacuccccu

SEQ ID NO: 2739903 - RNA, 16 nt, Human
ccucugcacuccccug

SEQ ID NO: 2739904 - RNA, 17 nt, Human
ccucugcacuccccugc

SEQ ID NO: 2739905 - RNA, 19 nt, Human
ccucugcagcaauaaagca

SEQ ID NO: 2739906 - RNA, 13 nt, Human
ccucugcccacuc

SEQ ID NO: 2739907 - RNA, 16 nt, Human
ccucugcccacucccu

SEQ ID NO: 2739908 - RNA, 18 nt, Human
ccucugcagcaauaaagc

SEQ ID NO: 2739909 - RNA, 14 nt, Human
ccucugcagcaaua

SEQ ID NO: 2739910 - RNA, 23 nt, Human
ccucugcacuccccugcugggug

SEQ ID NO: 2739911 - RNA, 18 nt, Human
ccucugcacuccccugcu

SEQ ID NO: 2739912 - RNA, 21 nt, Human
ccuccuccagccgccaugcuc

SEQ ID NO: 2739913 - RNA, 15 nt, Human
ccucuccccagcaag

SEQ ID NO: 2739914 - RNA, 13 nt, Human
ccucucccuugga

SEQ ID NO: 2739915 - RNA, 22 nt, Human
ccucucccuuggauuguccccg

SEQ ID NO: 2739916 - RNA, 20 nt, Human
ccucuccccagcaagugaga

SEQ ID NO: 2739917 - RNA, 20 nt, Human
cccucccuccaccucccugc

SEQ ID NO: 2739918 - RNA, 13 nt, Human
cccucccucuuuc

SEQ ID NO: 2739919 - RNA, 13 nt, Human
cccucccuccacc

SEQ ID NO: 2739920 - RNA, 12 nt, Human
cccucccuccac

SEQ ID NO: 2739921 - RNA, 17 nt, Human
cccuccaugugggcuag

SEQ ID NO: 2739922 - RNA, 22 nt, Human
cccucauccucauacccacccc

SEQ ID NO: 2739923 - RNA, 21 nt, Human
cccuccaagaccuucuccuuc

SEQ ID NO: 2739924 - RNA, 20 nt, Human
cccucagucuggcccuuccu

SEQ ID NO: 2739925 - RNA, 21 nt, Human
cccucagggucccugguggca

SEQ ID NO: 2739926 - RNA, 22 nt, Human
cccucaucaccaacgucugugc

SEQ ID NO: 2739927 - RNA, 17 nt, Human
cccucauccucauaccc

SEQ ID NO: 2739928 - RNA, 20 nt, Human
cccucauccucauacccacc

SEQ ID NO: 2739929 - RNA, 15 nt, Human
cccucagggucccug

SEQ ID NO: 2739930 - RNA, 16 nt, Human
cccucagggucccugg

SEQ ID NO: 2739931 - RNA, 17 nt, Human
cccucagggucccuggu

SEQ ID NO: 2739932 - RNA, 18 nt, Human
cccucagggucccuggug

SEQ ID NO: 2739933 - RNA, 19 nt, Human
cccucagggucccuggugg

SEQ ID NO: 2739934 - RNA, 16 nt, Human
cccggcaggguccuag

SEQ ID NO: 2739935 - RNA, 22 nt, Human
cccuaaaguguauuuuuuuacu

SEQ ID NO: 2739936 - RNA, 17 nt, Human
cccuaaaguguauuuuu

SEQ ID NO: 2739937 - RNA, 14 nt, Human
ccccaggugccagu

SEQ ID NO: 2739938 - RNA, 22 nt, Human
ccccaggugguuauggagaggg

SEQ ID NO: 2739939 - RNA, 15 nt, Human
ccccuggcagccccu

SEQ ID NO: 2739940 - RNA, 12 nt, Human
ccccuggcagcc

SEQ ID NO: 2739941 - RNA, 14 nt, Human
ccccuggcagcccc

SEQ ID NO: 2739942 - RNA, 12 nt, Human
ccccaggaggcc

SEQ ID NO: 2739943 - RNA, 13 nt, Human
ccccagccugcua

SEQ ID NO: 2739944 - RNA, 15 nt, Human
ccccagccccauccu

SEQ ID NO: 2739945 - RNA, 16 nt, Human
ccccagccccauccca

SEQ ID NO: 2739946 - RNA, 22 nt, Human
ccccuguccccgcacugggcuu

SEQ ID NO: 2739947 - RNA, 20 nt, Human
ccccuguucuggcagaguug

SEQ ID NO: 2739948 - RNA, 22 nt, Human
cccgcuaagagggagggagggc

SEQ ID NO: 2739949 - RNA, 20 nt, Human
cccgaggccuucucugaagg

SEQ ID NO: 2739950 - RNA, 15 nt, Human
cccgaggccuucucu

SEQ ID NO: 2739951 - RNA, 14 nt, Human
cccugcaauaaaau

SEQ ID NO: 2739952 - RNA, 15 nt, Human
cccugcaauaaaaug

SEQ ID NO: 2739953 - RNA, 22 nt, Human
cccugcaaccugauugugucuc

SEQ ID NO: 2739954 - RNA, 16 nt, Human
cccugcaaccugauug

SEQ ID NO: 2739955 - RNA, 18 nt, Human
cccugcagagggcacaga

SEQ ID NO: 2739956 - RNA, 22 nt, Human
cccugcacuugcagacucuaca

SEQ ID NO: 2739957 - RNA, 12 nt, Human
cccugcagaggg

SEQ ID NO: 2739958 - RNA, 12 nt, Human
cccugccacccu

SEQ ID NO: 2739959 - RNA, 14 nt, Human
cccugccacccugg

SEQ ID NO: 2739960 - RNA, 15 nt, Human
cccugccacccuggg

SEQ ID NO: 2739961 - RNA, 17 nt, Human
cccugccacccugggga

SEQ ID NO: 2739962 - RNA, 18 nt, Human
cccugccacccuggggag

SEQ ID NO: 2739963 - RNA, 14 nt, Human
cccugccuccuuug

SEQ ID NO: 2739964 - RNA, 16 nt, Human
cccugccuccuuugug

SEQ ID NO: 2739965 - RNA, 23 nt, Human
cccugccuccuuugugaggaagc

SEQ ID NO: 2739966 - RNA, 19 nt, Human
cccugcugguucaggguug

SEQ ID NO: 2739967 - RNA, 20 nt, Human
cccugcugguucaggguugg

SEQ ID NO: 2739968 - RNA, 13 nt, Human
cccugcugguuca

SEQ ID NO: 2739969 - RNA, 22 nt, Human
cccugguggcagugggagcugc

SEQ ID NO: 2739970 - RNA, 14 nt, Human
cccugguggcagcu

SEQ ID NO: 2739971 - RNA, 16 nt, Human
cuaguaugaaauuaua

SEQ ID NO: 2739972 - RNA, 22 nt, Human
cuaguauuucuaugaaauauua

SEQ ID NO: 2739973 - RNA, 19 nt, Human
cuaguauuucuaugaaaua

SEQ ID NO: 2739974 - RNA, 20 nt, Human
cuaguauuucuaugaaauau

SEQ ID NO: 2739975 - RNA, 21 nt, Human
cuaggcauuugcugaauacag

SEQ ID NO: 2739976 - RNA, 19 nt, Human
cuagugugguguuuccugg

SEQ ID NO: 2739977 - RNA, 23 nt, Human
cuagugugguguuuccuggcacu

SEQ ID NO: 2739978 - RNA, 21 nt, Human
cuagugugguguuuccuggca

SEQ ID NO: 2739979 - RNA, 22 nt, Human
cuagugugguguuuccuggcac

SEQ ID NO: 2739980 - RNA, 22 nt, Human
cuaggaaauauuuauuuuaaua

SEQ ID NO: 2739981 - RNA, 21 nt, Human
cuaggaagacuuuggaaagag

SEQ ID NO: 2739982 - RNA, 13 nt, Human
cuaggaacacucc

SEQ ID NO: 2739983 - RNA, 15 nt, Human
cuaggaacacuccuu

SEQ ID NO: 2739984 - RNA, 22 nt, Human
cuaggaccccuccaugugggcu

SEQ ID NO: 2739985 - RNA, 22 nt, Human
cuaggacugaauuaugaaacuu

SEQ ID NO: 2739986 - RNA, 17 nt, Human
cuaggaggucucuaaga

SEQ ID NO: 2739987 - RNA, 19 nt, Human
cuauauuguuugcuaagca

SEQ ID NO: 2739988 - RNA, 22 nt, Human
cuauauuguuuucaguguacau

SEQ ID NO: 2739989 - RNA, 23 nt, Human
cuauauuguuuucaguguacaug

SEQ ID NO: 2739990 - RNA, 12 nt, Human
cuaguucacucu

SEQ ID NO: 2739991 - RNA, 13 nt, Human
cuaugaaauauua

SEQ ID NO: 2739992 - RNA, 18 nt, Human
cuaugaaauauuauguua

SEQ ID NO: 2739993 - RNA, 14 nt, Human
cuaugacacaugca

SEQ ID NO: 2739994 - RNA, 18 nt, Human
cuaugacauaaaaacaac

SEQ ID NO: 2739995 - RNA, 20 nt, Human
cuaucaaguauuauaccuuu

SEQ ID NO: 2739996 - RNA, 13 nt, Human
cucacauuuauau

SEQ ID NO: 2739997 - RNA, 19 nt, Human
cucaccagccccagugccc

SEQ ID NO: 2739998 - RNA, 20 nt, Human
cucaccagccccagugccca

SEQ ID NO: 2739999 - RNA, 21 nt, Human
cucaccagccccagugcccac

SEQ ID NO: 2740000 - RNA, 23 nt, Human
cucacaguccuuaccagcagagc

SEQ ID NO: 2740001 - RNA, 18 nt, Human
cucaagugauucuccugc

SEQ ID NO: 2740002 - RNA, 19 nt, Human
cucaagugauucuccugcc

SEQ ID NO: 2740003 - RNA, 20 nt, Human
cucaagugauucuccugccu

SEQ ID NO: 2740004 - RNA, 16 nt, Human
cucacuauguugccca

SEQ ID NO: 2740005 - RNA, 17 nt, Human
cucacuauguugcccag

SEQ ID NO: 2740006 - RNA, 14 nt, Human
cucaccccagcccc

SEQ ID NO: 2740007 - RNA, 12 nt, Human
cucaccccagcc

SEQ ID NO: 2740008 - RNA, 13 nt, Human
cucaccccagccc

SEQ ID NO: 2740009 - RNA, 14 nt, Human
cuaugcauuugaaa

SEQ ID NO: 2740010 - RNA, 20 nt, Human
cucaacucuccuccagaguc

SEQ ID NO: 2740011 - RNA, 21 nt, Human
cucaacucuccuccagaguca

SEQ ID NO: 2740012 - RNA, 19 nt, Human
cucaacucuccuccagagu

SEQ ID NO: 2740013 - RNA, 21 nt, Human
cuaugacauaaaaacaacuuu

SEQ ID NO: 2740014 - RNA, 12 nt, Human
cuaugcauuuga

SEQ ID NO: 2740015 - RNA, 11 nt, Human
cuaugcauuug

SEQ ID NO: 2740016 - RNA, 22 nt, Human
cuacuuauuguagcauccugga

SEQ ID NO: 2740017 - RNA, 13 nt, Human
cuacucuguguca

SEQ ID NO: 2740018 - RNA, 16 nt, Human
cuacucugugucaggu

SEQ ID NO: 2740019 - RNA, 21 nt, Human
cuacucugugucagguggggc

SEQ ID NO: 2740020 - RNA, 14 nt, Human
cuacccgggaaggg

SEQ ID NO: 2740021 - RNA, 15 nt, Human
cuacccgggaagggg

SEQ ID NO: 2740022 - RNA, 20 nt, Human
cuacccgggaagggggcugg

SEQ ID NO: 2740023 - RNA, 21 nt, Human
cuacccgggaagggggcuggg

SEQ ID NO: 2740024 - RNA, 14 nt, Human
cuacugaggugcua

SEQ ID NO: 2740025 - RNA, 17 nt, Human
cuacuguaauuugugau

SEQ ID NO: 2740026 - RNA, 16 nt, Human
cuacuguaauuuguga

SEQ ID NO: 2740027 - RNA, 17 nt, Human
cuagagugaacuugggc

SEQ ID NO: 2740028 - RNA, 21 nt, Human
cuagagugaacuugggccacu

SEQ ID NO: 2740029 - RNA, 20 nt, Human
cuagacgagcaggcuucuuc

SEQ ID NO: 2740030 - RNA, 21 nt, Human
cuagacgagcaggcuucuucc

SEQ ID NO: 2740031 - RNA, 17 nt, Human
cuagcacuuugggaggc

SEQ ID NO: 2740032 - RNA, 17 nt, Human
cuaaccagcagaaaugc

SEQ ID NO: 2740033 - RNA, 16 nt, Human
cuaaccagcagaaaug

SEQ ID NO: 2740034 - RNA, 17 nt, Human
cuaaccacgcuggaccu

SEQ ID NO: 2740035 - RNA, 22 nt, Human
cuaaggacuucuuuaauuuugg

SEQ ID NO: 2740036 - RNA, 15 nt, Human
cuaaggugugcucug

SEQ ID NO: 2740037 - RNA, 21 nt, Human
cuaagcuauucaguaauaacu

SEQ ID NO: 2740038 - RNA, 19 nt, Human
cuaagcuauucaguaauaa

SEQ ID NO: 2740039 - RNA, 11 nt, Human
cuaaggacuug

SEQ ID NO: 2740040 - RNA, 17 nt, Human
cuaaggacuuguuagau

SEQ ID NO: 2740041 - RNA, 16 nt, Human
cuaaggacuuguuaga

SEQ ID NO: 2740042 - RNA, 18 nt, Human
cuacacugugcugagucu

SEQ ID NO: 2740043 - RNA, 15 nt, Human
cuacacacugcaugu

SEQ ID NO: 2740044 - RNA, 13 nt, Human
cuacacacugcau

SEQ ID NO: 2740045 - RNA, 15 nt, Human
cuacagaggccaugg

SEQ ID NO: 2740046 - RNA, 20 nt, Human
cuacccagcgagcccuggug

SEQ ID NO: 2740047 - RNA, 19 nt, Human
cuacccagcgagcccuggu

SEQ ID NO: 2740048 - RNA, 17 nt, Human
cuacccacccuccuuuc

SEQ ID NO: 2740049 - RNA, 13 nt, Human
cuacccacccucc

SEQ ID NO: 2740050 - RNA, 22 nt, Human
cuacccacccuccuuucaccac

SEQ ID NO: 2740051 - RNA, 20 nt, Human
cuaauaaaauuuaaaagucu

SEQ ID NO: 2740052 - RNA, 16 nt, Human
cuaaggugugcucuga

SEQ ID NO: 2740053 - RNA, 21 nt, Human
cuaauaaaauuuaaaagucuu

SEQ ID NO: 2740054 - RNA, 19 nt, Human
cuaauguaauaacugugaa

SEQ ID NO: 2740055 - RNA, 14 nt, Human
cuaauguacugcau

SEQ ID NO: 2740056 - RNA, 16 nt, Human
cuaauguacugcauau

SEQ ID NO: 2740057 - RNA, 16 nt, Human
cuaaauguugaaagau

SEQ ID NO: 2740058 - RNA, 23 nt, Human
cuaaauuugaauguuaagcagau

SEQ ID NO: 2740059 - RNA, 15 nt, Human
cuaacauggaaguac

SEQ ID NO: 2740060 - RNA, 17 nt, Human
cuaacauggaaguacua

SEQ ID NO: 2740061 - RNA, 16 nt, Human
cuaaauccauuuggaa

SEQ ID NO: 2740062 - RNA, 20 nt, Human
cuaaauccauuuggaaaucu

SEQ ID NO: 2740063 - RNA, 19 nt, Human
cuaaauccauuuggaaauc

SEQ ID NO: 2740064 - RNA, 17 nt, Human
cuaaauccauuuggaaa

SEQ ID NO: 2740065 - RNA, 18 nt, Human
cuaaauggaaccacucua

SEQ ID NO: 2740066 - RNA, 17 nt, Human
cuaaauggaaccacucu

SEQ ID NO: 2740067 - RNA, 16 nt, Human
cuaaauggaaccacuc

SEQ ID NO: 2740068 - RNA, 15 nt, Human
cuaaauggaaccacu

SEQ ID NO: 2740069 - RNA, 20 nt, Human
cuaaaucuccaaaauaaaac

SEQ ID NO: 2740070 - RNA, 18 nt, Human
cgugcacacaccagagcc

SEQ ID NO: 2740071 - RNA, 19 nt, Human
cgugcacacaccagagccc

SEQ ID NO: 2740072 - RNA, 21 nt, Human
cgugcaguggugcgaucuggg

SEQ ID NO: 2740073 - RNA, 23 nt, Human
cgugcauaccacuuuuguucuug

SEQ ID NO: 2740074 - RNA, 16 nt, Human
cgugcacacaccagag

SEQ ID NO: 2740075 - RNA, 20 nt, Human
cgucugacaggcaaugcugg

SEQ ID NO: 2740076 - RNA, 21 nt, Human
cgucugacaggcaaugcuggc

SEQ ID NO: 2740077 - RNA, 22 nt, Human
cgucugacaggcaaugcuggcu

SEQ ID NO: 2740078 - RNA, 16 nt, Human
cgucucauacucaccu

SEQ ID NO: 2740079 - RNA, 16 nt, Human
cgucuaccugaggggc

SEQ ID NO: 2740080 - RNA, 18 nt, Human
cggugcuaucucccccag

SEQ ID NO: 2740081 - RNA, 20 nt, Human
cggugcuaucucccccagcc

SEQ ID NO: 2740082 - RNA, 21 nt, Human
cggugcuaucucccccagccc

SEQ ID NO: 2740083 - RNA, 22 nt, Human
cggugcuaucucccccagcccc

SEQ ID NO: 2740084 - RNA, 16 nt, Human
cgugcuaaggacuugu

SEQ ID NO: 2740085 - RNA, 15 nt, Human
cgugcuaaggacuug

SEQ ID NO: 2740086 - RNA, 14 nt, Human
cgugcuaaggacuu

SEQ ID NO: 2740087 - RNA, 13 nt, Human
cgugcuaaggacu

SEQ ID NO: 2740088 - RNA, 12 nt, Human
cgugcuaaggac

SEQ ID NO: 2740089 - RNA, 18 nt, Human
cguugaaauuguaauuau

SEQ ID NO: 2740090 - RNA, 23 nt, Human
cguugaaauuguaauuauaucug

SEQ ID NO: 2740091 - RNA, 22 nt, Human
cgcugucagccauuccuguucc

SEQ ID NO: 2740092 - RNA, 15 nt, Human
cgcugugcugcccug

SEQ ID NO: 2740093 - RNA, 16 nt, Human
cgcugugcugcccugc

SEQ ID NO: 2740094 - RNA, 17 nt, Human
cgcugugcugcccugcc

SEQ ID NO: 2740095 - RNA, 18 nt, Human
cgcugugcugcccugccc

SEQ ID NO: 2740096 - RNA, 20 nt, Human
cggaaaacaugcuacacacu

SEQ ID NO: 2740097 - RNA, 15 nt, Human
cggaaaacaugcuac

SEQ ID NO: 2740098 - RNA, 16 nt, Human
cgcuacccgggaaggg

SEQ ID NO: 2740099 - RNA, 22 nt, Human
cgcuaagagggagggagggcuc

SEQ ID NO: 2740100 - RNA, 22 nt, Human
cgccagauucuuuccugaggcu

SEQ ID NO: 2740101 - RNA, 20 nt, Human
ccucugcccacucccugcaa

SEQ ID NO: 2740102 - RNA, 17 nt, Human
ccucugcccacucccug

SEQ ID NO: 2740103 - RNA, 19 nt, Human
ccucugcccacucccugca

SEQ ID NO: 2740104 - RNA, 23 nt, Human
cgccaggggaaaaucagccugcu

SEQ ID NO: 2740105 - RNA, 14 nt, Human
cgccaucccagccc

SEQ ID NO: 2740106 - RNA, 16 nt, Human
cgccaucccagcccca

SEQ ID NO: 2740107 - RNA, 22 nt, Human
cgcccaggcuuagucacugaga

SEQ ID NO: 2740108 - RNA, 13 nt, Human
cggccccugcugg

SEQ ID NO: 2740109 - RNA, 18 nt, Human
cggccccugcugguucag

SEQ ID NO: 2740110 - RNA, 19 nt, Human
cggccccugcugguucagg

SEQ ID NO: 2740111 - RNA, 24 nt, Human
cggccaggccagagggagugacag

SEQ ID NO: 2740112 - RNA, 11 nt, Human
cggccaccugc

SEQ ID NO: 2740113 - RNA, 15 nt, Human
cggccaccugcggug

SEQ ID NO: 2740114 - RNA, 16 nt, Human
cggccaccugcggugc

SEQ ID NO: 2740115 - RNA, 17 nt, Human
cggccaccugcggugcu

SEQ ID NO: 2740116 - RNA, 13 nt, Human
cggaagagccuug

SEQ ID NO: 2740117 - RNA, 21 nt, Human
cggguuuuauuguuuaaaauc

SEQ ID NO: 2740118 - RNA, 14 nt, Human
cgguccacccagga

SEQ ID NO: 2740119 - RNA, 15 nt, Human
cgguccacccaggag

SEQ ID NO: 2740120 - RNA, 16 nt, Human
cgguccacccaggagc

SEQ ID NO: 2740121 - RNA, 20 nt, Human
cgguccacccaggagccccg

SEQ ID NO: 2740122 - RNA, 22 nt, Human
cggucggguuuuauuguuuaaa

SEQ ID NO: 2740123 - RNA, 16 nt, Human
cggugaauggcuuugu

SEQ ID NO: 2740124 - RNA, 15 nt, Human
cggugaauggcuuug

SEQ ID NO: 2740125 - RNA, 14 nt, Human
cggugaauggcuuu

SEQ ID NO: 2740126 - RNA, 13 nt, Human
cggugaauggcuu

SEQ ID NO: 2740127 - RNA, 17 nt, Human
cggugagcuacaaaugc

SEQ ID NO: 2740128 - RNA, 22 nt, Human
cggugaauggcuuuguauagaa

SEQ ID NO: 2740129 - RNA, 20 nt, Human
cggugaauggcuuuguauag

SEQ ID NO: 2740130 - RNA, 18 nt, Human
cggugaauggcuuuguau

SEQ ID NO: 2740131 - RNA, 20 nt, Human
cggugagaggggaacagacu

SEQ ID NO: 2740132 - RNA, 21 nt, Human
cggugagaggggaacagacug

SEQ ID NO: 2740133 - RNA, 23 nt, Human
cggggacagcuccuucuguccua

SEQ ID NO: 2740134 - RNA, 15 nt, Human
cgggggcagagaggg

SEQ ID NO: 2740135 - RNA, 18 nt, Human
cgggaggucgaggcagga

SEQ ID NO: 2740136 - RNA, 20 nt, Human
cgggaggucgaggcaggagg

SEQ ID NO: 2740137 - RNA, 22 nt, Human
cggggacagcuccuucuguccu

SEQ ID NO: 2740138 - RNA, 14 nt, Human
cgggcacucagaag

SEQ ID NO: 2740139 - RNA, 22 nt, Human
cgggcacucagaagacacugau

SEQ ID NO: 2740140 - RNA, 23 nt, Human
cggcuggccuggccccucagggu

SEQ ID NO: 2740141 - RNA, 22 nt, Human
cggcuggccuggccccucaggg

SEQ ID NO: 2740142 - RNA, 19 nt, Human
cggcuggccuggccccuca

SEQ ID NO: 2740143 - RNA, 20 nt, Human
cucuccugggcagcugccuc

SEQ ID NO: 2740144 - RNA, 15 nt, Human
cucuccugggcagcu

SEQ ID NO: 2740145 - RNA, 16 nt, Human
cucuccugggcagcug

SEQ ID NO: 2740146 - RNA, 18 nt, Human
cucuccugggcagcugcc

SEQ ID NO: 2740147 - RNA, 19 nt, Human
cucuccugggcagcugccu

SEQ ID NO: 2740148 - RNA, 12 nt, Human
cucuccugggca

SEQ ID NO: 2740149 - RNA, 13 nt, Human
cucucucaggcca

SEQ ID NO: 2740150 - RNA, 12 nt, Human
cucucucacucc

SEQ ID NO: 2740151 - RNA, 13 nt, Human
cucuccccagcaa

SEQ ID NO: 2740152 - RNA, 19 nt, Human
cucuccagccccuggaugc

SEQ ID NO: 2740153 - RNA, 14 nt, Human
cucuccccagcaag

SEQ ID NO: 2740154 - RNA, 22 nt, Human
cucuccccagcaagugagagcu

SEQ ID NO: 2740155 - RNA, 24 nt, Human
cucuccccagcaagugagagcugg

SEQ ID NO: 2740156 - RNA, 12 nt, Human
cucuccucugcu

SEQ ID NO: 2740157 - RNA, 21 nt, Human
cucuccugauagucuuucagu

SEQ ID NO: 2740158 - RNA, 13 nt, Human
cucuccucugcug

SEQ ID NO: 2740159 - RNA, 14 nt, Human
cucuccucugcugc

SEQ ID NO: 2740160 - RNA, 15 nt, Human
cucuccucugcugcu

SEQ ID NO: 2740161 - RNA, 18 nt, Human
cucuccucugcugcuggc

SEQ ID NO: 2740162 - RNA, 21 nt, Human
cucuaguuugauuaaauucuu

SEQ ID NO: 2740163 - RNA, 20 nt, Human
cucuaguuugauuaaauucu

SEQ ID NO: 2740164 - RNA, 19 nt, Human
cucuaguuugauuaaauuc

SEQ ID NO: 2740165 - RNA, 15 nt, Human
cucuaguuugauuaa

SEQ ID NO: 2740166 - RNA, 12 nt, Human
cucucaggccaa

SEQ ID NO: 2740167 - RNA, 20 nt, Human
cucucaggccaaacucaccu

SEQ ID NO: 2740168 - RNA, 21 nt, Human
cucucaggccaaacucaccug

SEQ ID NO: 2740169 - RNA, 22 nt, Human
cucucaggccaaacucaccugc

SEQ ID NO: 2740170 - RNA, 23 nt, Human
cucucaggccaaacucaccugcc

SEQ ID NO: 2740171 - RNA, 13 nt, Human
cucucaggccagc

SEQ ID NO: 2740172 - RNA, 15 nt, Human
cucucaggccagcug

SEQ ID NO: 2740173 - RNA, 14 nt, Human
cucuccagccccug

SEQ ID NO: 2740174 - RNA, 15 nt, Human
cucuccagccccugg

SEQ ID NO: 2740175 - RNA, 16 nt, Human
cucuccagccccugga

SEQ ID NO: 2740176 - RNA, 17 nt, Human
cucuccagccccuggau

SEQ ID NO: 2740177 - RNA, 18 nt, Human
cucuccagccccuggaug

SEQ ID NO: 2740178 - RNA, 17 nt, Human
cucucaggccagcugcu

SEQ ID NO: 2740179 - RNA, 18 nt, Human
cucucaggccagcugcuu

SEQ ID NO: 2740180 - RNA, 19 nt, Human
cucucaggccagcugcuug

SEQ ID NO: 2740181 - RNA, 21 nt, Human
cucucaggccagcugcuuggg

SEQ ID NO: 2740182 - RNA, 15 nt, Human
cucuaggaaauauuu

SEQ ID NO: 2740183 - RNA, 17 nt, Human
cucuaggaaauauuuau

SEQ ID NO: 2740184 - RNA, 23 nt, Human
cucuagggaaaaaccagcgugug

SEQ ID NO: 2740185 - RNA, 20 nt, Human
cucuaccauccccuguagag

SEQ ID NO: 2740186 - RNA, 13 nt, Human
cucuacccuggca

SEQ ID NO: 2740187 - RNA, 13 nt, Human
cuccuucaccuuu

SEQ ID NO: 2740188 - RNA, 19 nt, Human
cuccuucacagaugggugc

SEQ ID NO: 2740189 - RNA, 20 nt, Human
cuccugugugugcgccuaca

SEQ ID NO: 2740190 - RNA, 14 nt, Human
cuccugugugugcg

SEQ ID NO: 2740191 - RNA, 16 nt, Human
cuccuucacagauggg

SEQ ID NO: 2740192 - RNA, 17 nt, Human
cuccuucacagaugggu

SEQ ID NO: 2740193 - RNA, 13 nt, Human
cucuacaaaaagc

SEQ ID NO: 2740194 - RNA, 13 nt, Human
cucuacagaggcc

SEQ ID NO: 2740195 - RNA, 19 nt, Human
cucuacagaggccaugggc

SEQ ID NO: 2740196 - RNA, 14 nt, Human
cucuacagaggcca

SEQ ID NO: 2740197 - RNA, 16 nt, Human
cucuacagaggccaug

SEQ ID NO: 2740198 - RNA, 15 nt, Human
cucccuccaccuccc

SEQ ID NO: 2740199 - RNA, 17 nt, Human
cucccuccaccucccug

SEQ ID NO: 2740200 - RNA, 17 nt, Human
cucccuuucuucccuac

SEQ ID NO: 2740201 - RNA, 18 nt, Human
cucccucagucuggcccu

SEQ ID NO: 2740202 - RNA, 15 nt, Human
cuccgaccagacacc

SEQ ID NO: 2740203 - RNA, 22 nt, Human
cuccucuccccagcaagugaga

SEQ ID NO: 2740204 - RNA, 22 nt, Human
cuccuccagccgccaugcuccu

SEQ ID NO: 2740205 - RNA, 18 nt, Human
cuccugcaggcagccagg

SEQ ID NO: 2740206 - RNA, 20 nt, Human
cuccugcaggcagccaggcc

SEQ ID NO: 2740207 - RNA, 11 nt, Human
cuccugcccuu

SEQ ID NO: 2740208 - RNA, 13 nt, Human
cuccugccucagc

SEQ ID NO: 2740209 - RNA, 14 nt, Human
cuccugccucagcc

SEQ ID NO: 2740210 - RNA, 11 nt, Human
cuccugcaggc

SEQ ID NO: 2740211 - RNA, 16 nt, Human
cuccugcaggcagcca

SEQ ID NO: 2740212 - RNA, 17 nt, Human
cuccugcaggcagccag

SEQ ID NO: 2740213 - RNA, 16 nt, Human
cuccugugugugcgcc

SEQ ID NO: 2740214 - RNA, 19 nt, Human
cuccugugugugcgccuac

SEQ ID NO: 2740215 - RNA, 15 nt, Human
cuccugccucagccu

SEQ ID NO: 2740216 - RNA, 18 nt, Human
cucacuauguugcccagg

SEQ ID NO: 2740217 - RNA, 17 nt, Human
cucccaaagugcuggga

SEQ ID NO: 2740218 - RNA, 13 nt, Human
cuccaugugggcu

SEQ ID NO: 2740219 - RNA, 22 nt, Human
cucccaacucaccccagcccca

SEQ ID NO: 2740220 - RNA, 18 nt, Human
cucccaaagugcugggau

SEQ ID NO: 2740221 - RNA, 16 nt, Human
cucccaacucacccca

SEQ ID NO: 2740222 - RNA, 17 nt, Human
cucccaacucaccccag

SEQ ID NO: 2740223 - RNA, 21 nt, Human
cucccaucucacacaugagca

SEQ ID NO: 2740224 - RNA, 11 nt, Human
cucccaucugu

SEQ ID NO: 2740225 - RNA, 14 nt, Human
cucccaucugugaa

SEQ ID NO: 2740226 - RNA, 15 nt, Human
cucccaucugugaaa

SEQ ID NO: 2740227 - RNA, 18 nt, Human
cucccaucugugaaagga

SEQ ID NO: 2740228 - RNA, 23 nt, Human
cucccaucugugaaaggaaagag

SEQ ID NO: 2740229 - RNA, 17 nt, Human
cucccgaauagcuggga

SEQ ID NO: 2740230 - RNA, 16 nt, Human
cucccgaauagcuggg

SEQ ID NO: 2740231 - RNA, 13 nt, Human
cuccccugcuggg

SEQ ID NO: 2740232 - RNA, 15 nt, Human
cucccgaguagcugg

SEQ ID NO: 2740233 - RNA, 18 nt, Human
cucccgaauagcugggac

SEQ ID NO: 2740234 - RNA, 16 nt, Human
cucccgaguagcuggg

SEQ ID NO: 2740235 - RNA, 17 nt, Human
cucccgaguagcuggga

SEQ ID NO: 2740236 - RNA, 12 nt, Human
cuccccagcaag

SEQ ID NO: 2740237 - RNA, 20 nt, Human
cuccccagccccaucccaaa

SEQ ID NO: 2740238 - RNA, 20 nt, Human
cuccccagcaagugagagcu

SEQ ID NO: 2740239 - RNA, 12 nt, Human
cuccccugcugg

SEQ ID NO: 2740240 - RNA, 15 nt, Human
cugagccagauuuca

SEQ ID NO: 2740241 - RNA, 16 nt, Human
cugagacagcccgggc

SEQ ID NO: 2740242 - RNA, 17 nt, Human
cugagacagcccgggcu

SEQ ID NO: 2740243 - RNA, 18 nt, Human
cugagacagcccgggcuc

SEQ ID NO: 2740244 - RNA, 17 nt, Human
cugagccagauuucacu

SEQ ID NO: 2740245 - RNA, 18 nt, Human
cugagccagauuucacuc

SEQ ID NO: 2740246 - RNA, 19 nt, Human
cugagccagauuucacucu

SEQ ID NO: 2740247 - RNA, 20 nt, Human
cugagccagauuucacucuc

SEQ ID NO: 2740248 - RNA, 21 nt, Human
cugagccagauuucacucucc

SEQ ID NO: 2740249 - RNA, 12 nt, Human
cugaggcccaga

SEQ ID NO: 2740250 - RNA, 13 nt, Human
cugaggcccagag

SEQ ID NO: 2740251 - RNA, 14 nt, Human
cugaggcccagagg

SEQ ID NO: 2740252 - RNA, 15 nt, Human
cugaggcccagaggg

SEQ ID NO: 2740253 - RNA, 16 nt, Human
cugaggcccagagggc

SEQ ID NO: 2740254 - RNA, 17 nt, Human
cugaggcccagagggcc

SEQ ID NO: 2740255 - RNA, 18 nt, Human
cugaggcccagagggccu

SEQ ID NO: 2740256 - RNA, 19 nt, Human
cugaggcccagagggccug

SEQ ID NO: 2740257 - RNA, 21 nt, Human
cugaggcccagagggccugca

SEQ ID NO: 2740258 - RNA, 23 nt, Human
cugaggcccagagggccugcaag

SEQ ID NO: 2740259 - RNA, 14 nt, Human
cugaggcccuucuc

SEQ ID NO: 2740260 - RNA, 15 nt, Human
cugaggcccuucucu

SEQ ID NO: 2740261 - RNA, 18 nt, Human
cugaggcccuucucucca

SEQ ID NO: 2740262 - RNA, 19 nt, Human
cugaggcccuucucuccag

SEQ ID NO: 2740263 - RNA, 20 nt, Human
cugaggcccuucucuccagc

SEQ ID NO: 2740264 - RNA, 23 nt, Human
cugagaaagacuauucaaacagu

SEQ ID NO: 2740265 - RNA, 22 nt, Human
cugagaaagacuauucaaacag

SEQ ID NO: 2740266 - RNA, 14 nt, Human
cugagacagcccgg

SEQ ID NO: 2740267 - RNA, 15 nt, Human
cugagacagcccggg

SEQ ID NO: 2740268 - RNA, 15 nt, Human
cugacuucuaaguaa

SEQ ID NO: 2740269 - RNA, 13 nt, Human
cugacuucuaagu

SEQ ID NO: 2740270 - RNA, 18 nt, Human
cugacuguuuucucuuga

SEQ ID NO: 2740271 - RNA, 16 nt, Human
cugacuucuaaguaaa

SEQ ID NO: 2740272 - RNA, 17 nt, Human
cugacucuuaagaagac

SEQ ID NO: 2740273 - RNA, 16 nt, Human
cugacuguuuucucuu

SEQ ID NO: 2740274 - RNA, 15 nt, Human
cugacuaugacauaa

SEQ ID NO: 2740275 - RNA, 22 nt, Human
cugacauuguuggccaaagcca

SEQ ID NO: 2740276 - RNA, 12 nt, Human
cugacccacugc

SEQ ID NO: 2740277 - RNA, 16 nt, Human
cugacccaugcugccc

SEQ ID NO: 2740278 - RNA, 14 nt, Human
cugacccaugcugc

SEQ ID NO: 2740279 - RNA, 15 nt, Human
cugacccaugcugcc

SEQ ID NO: 2740280 - RNA, 13 nt, Human
cugacccaugcug

SEQ ID NO: 2740281 - RNA, 13 nt, Human
cugacccacugcu

SEQ ID NO: 2740282 - RNA, 14 nt, Human
cugacccacugcuu

SEQ ID NO: 2740283 - RNA, 11 nt, Human
cugacagauuu

SEQ ID NO: 2740284 - RNA, 15 nt, Human
cugacagauuuccau

SEQ ID NO: 2740285 - RNA, 21 nt, Human
cugacauuguuggccaaagcc

SEQ ID NO: 2740286 - RNA, 21 nt, Human
cugacaggcaaugcuggcugu

SEQ ID NO: 2740287 - RNA, 15 nt, Human
cucuggcagcucaga

SEQ ID NO: 2740288 - RNA, 16 nt, Human
cucuggcagcucagag

SEQ ID NO: 2740289 - RNA, 12 nt, Human
cucuggcagcuc

SEQ ID NO: 2740290 - RNA, 14 nt, Human
cucuggcagcucag

SEQ ID NO: 2740291 - RNA, 14 nt, Human
cucuggacaggcau

SEQ ID NO: 2740292 - RNA, 16 nt, Human
cucuggacaggcaugu

SEQ ID NO: 2740293 - RNA, 22 nt, Human
cucuggacaggcauguucucug

SEQ ID NO: 2740294 - RNA, 12 nt, Human
cucugcuugcca

SEQ ID NO: 2740295 - RNA, 14 nt, Human
cucugcuugccauc

SEQ ID NO: 2740296 - RNA, 17 nt, Human
cucugcuugccaucccu

SEQ ID NO: 2740297 - RNA, 20 nt, Human
cucugcuugccaucccuccc

SEQ ID NO: 2740298 - RNA, 15 nt, Human
cucuggacaggcaug

SEQ ID NO: 2740299 - RNA, 13 nt, Human
cucucuccucccu

SEQ ID NO: 2740300 - RNA, 22 nt, Human
cucugccugaagucacacagug

SEQ ID NO: 2740301 - RNA, 21 nt, Human
cucugccugaagucacacagu

SEQ ID NO: 2740302 - RNA, 13 nt, Human
cucuuccaggcug

SEQ ID NO: 2740303 - RNA, 14 nt, Human
cucuuccaggcugg

SEQ ID NO: 2740304 - RNA, 15 nt, Human
cucuuccaggcuggg

SEQ ID NO: 2740305 - RNA, 13 nt, Human
cucuuagaaaaac

SEQ ID NO: 2740306 - RNA, 15 nt, Human
cucuuagaaaaacca

SEQ ID NO: 2740307 - RNA, 15 nt, Human
cucugugucaggugg

SEQ ID NO: 2740308 - RNA, 22 nt, Human
cucuucuuuaaagggauggcaa

SEQ ID NO: 2740309 - RNA, 22 nt, Human
cucuugaaauauaggaacuuaa

SEQ ID NO: 2740310 - RNA, 21 nt, Human
cucuuggguucaagcgauucu

SEQ ID NO: 2740311 - RNA, 19 nt, Human
cucuuggguucaagcgauu

SEQ ID NO: 2740312 - RNA, 18 nt, Human
cucuuuaaugucacaggc

SEQ ID NO: 2740313 - RNA, 13 nt, Human
cucuugguccugc

SEQ ID NO: 2740314 - RNA, 15 nt, Human
cucuugguccugcug

SEQ ID NO: 2740315 - RNA, 16 nt, Human
cucuugguccugcugc

SEQ ID NO: 2740316 - RNA, 17 nt, Human
cucuugguccugcugca

SEQ ID NO: 2740317 - RNA, 20 nt, Human
cucuuuaaugucacaggcag

SEQ ID NO: 2740318 - RNA, 21 nt, Human
cucuuuaaugucacaggcagg

SEQ ID NO: 2740319 - RNA, 22 nt, Human
cucuuuaaugucacaggcaggu

SEQ ID NO: 2740320 - RNA, 23 nt, Human
cucuuuaaugucacaggcagguc

SEQ ID NO: 2740321 - RNA, 17 nt, Human
cucuuucccucccuucc

SEQ ID NO: 2740322 - RNA, 13 nt, Human
cucuuucccuccc

SEQ ID NO: 2740323 - RNA, 23 nt, Human
cugaagaagcaccaaucaugaau

SEQ ID NO: 2740324 - RNA, 19 nt, Human
cugaagaauugaaaaacca

SEQ ID NO: 2740325 - RNA, 13 nt, Human
cugaaauuuccug

SEQ ID NO: 2740326 - RNA, 23 nt, Human
cugaaauuuccugggagcuuuug

SEQ ID NO: 2740327 - RNA, 16 nt, Human
cugaaauuuccuggga

SEQ ID NO: 2740328 - RNA, 16 nt, Human
cugaaagcccugagcu

SEQ ID NO: 2740329 - RNA, 17 nt, Human
cugaaagcccugagcuu

SEQ ID NO: 2740330 - RNA, 18 nt, Human
cugaaagcccugagcuuu

SEQ ID NO: 2740331 - RNA, 19 nt, Human
cugaaagcccugagcuuuc

SEQ ID NO: 2740332 - RNA, 23 nt, Human
cugaaagcccugagcuuucugcu

SEQ ID NO: 2740333 - RNA, 21 nt, Human
cugaaauaaacgucuuaaaua

SEQ ID NO: 2740334 - RNA, 15 nt, Human
cugaaagcccugagc

SEQ ID NO: 2740335 - RNA, 12 nt, Human
cugcccucuccu

SEQ ID NO: 2740336 - RNA, 13 nt, Human
cugcccucuccug

SEQ ID NO: 2740337 - RNA, 14 nt, Human
cugcccucuccugg

SEQ ID NO: 2740338 - RNA, 20 nt, Human
cugcccugcccaccuggccu

SEQ ID NO: 2740339 - RNA, 17 nt, Human
cugcccugcccaccugg

SEQ ID NO: 2740340 - RNA, 15 nt, Human
cugcccucuccuggg

SEQ ID NO: 2740341 - RNA, 21 nt, Human
cugcccugcccaccuggccuc

SEQ ID NO: 2740342 - RNA, 18 nt, Human
cugccugaagucacacag

SEQ ID NO: 2740343 - RNA, 16 nt, Human
cugccugaagucacac

SEQ ID NO: 2740344 - RNA, 19 nt, Human
cugccugaagucacacagu

SEQ ID NO: 2740345 - RNA, 23 nt, Human
cugcgguccacccaggagccccg

SEQ ID NO: 2740346 - RNA, 18 nt, Human
cugcggugcuaucucccc

SEQ ID NO: 2740347 - RNA, 19 nt, Human
cugcggugcuaucuccccc

SEQ ID NO: 2740348 - RNA, 12 nt, Human
cugcucugguua

SEQ ID NO: 2740349 - RNA, 15 nt, Human
cugcugcaguugcca

SEQ ID NO: 2740350 - RNA, 14 nt, Human
cugcugcaguugcc

SEQ ID NO: 2740351 - RNA, 10 nt, Human
cugcugcagu

SEQ ID NO: 2740352 - RNA, 13 nt, Human
cugcugcaguugc

SEQ ID NO: 2740353 - RNA, 20 nt, Human
cugcggugcuaucuccccca

SEQ ID NO: 2740354 - RNA, 21 nt, Human
cugcggugcuaucucccccag

SEQ ID NO: 2740355 - RNA, 22 nt, Human
cugcggugcuaucucccccagc

SEQ ID NO: 2740356 - RNA, 23 nt, Human
cugcggugcuaucucccccagcc

SEQ ID NO: 2740357 - RNA, 15 nt, Human
cugcucuccgaccag

SEQ ID NO: 2740358 - RNA, 23 nt, Human
cugcuccucuccccagcaaguga

SEQ ID NO: 2740359 - RNA, 19 nt, Human
cugcuccucuccccagcaa

SEQ ID NO: 2740360 - RNA, 20 nt, Human
cugcuccucuccccagcaag

SEQ ID NO: 2740361 - RNA, 18 nt, Human
cugcuugccaucccuccc

SEQ ID NO: 2740362 - RNA, 19 nt, Human
cugcuugccaucccucccu

SEQ ID NO: 2740363 - RNA, 20 nt, Human
cugcuugccaucccucccuc

SEQ ID NO: 2740364 - RNA, 22 nt, Human
cugcuugccaucccucccucca

SEQ ID NO: 2740365 - RNA, 20 nt, Human
cugcuugcuugcuuuuuaau

SEQ ID NO: 2740366 - RNA, 16 nt, Human
cugcuugccaucccuc

SEQ ID NO: 2740367 - RNA, 15 nt, Human
cugcuugccaucccu

SEQ ID NO: 2740368 - RNA, 22 nt, Human
cugcuugaggcaacucaucuua

SEQ ID NO: 2740369 - RNA, 19 nt, Human
cugcuugugaaaggaaaga

SEQ ID NO: 2740370 - RNA, 19 nt, Human
cugcuugggcuucauccuc

SEQ ID NO: 2740371 - RNA, 13 nt, Human
cugcuugggcuuc

SEQ ID NO: 2740372 - RNA, 15 nt, Human
cugcuugggcuucau

SEQ ID NO: 2740373 - RNA, 17 nt, Human
cugcuugggcuucaucc

SEQ ID NO: 2740374 - RNA, 18 nt, Human
cugcuugggcuucauccu

SEQ ID NO: 2740375 - RNA, 15 nt, Human
cugcuuucagauacu

SEQ ID NO: 2740376 - RNA, 12 nt, Human
cugcuuucagau

SEQ ID NO: 2740377 - RNA, 15 nt, Human
cugcuuuuggucugu

SEQ ID NO: 2740378 - RNA, 17 nt, Human
cugcuuuuggucugugu

SEQ ID NO: 2740379 - RNA, 12 nt, Human
cugcugcuggcu

SEQ ID NO: 2740380 - RNA, 13 nt, Human
cugcugcuggcug

SEQ ID NO: 2740381 - RNA, 14 nt, Human
cugcuggguguggc

SEQ ID NO: 2740382 - RNA, 15 nt, Human
cugcuggguguggcg

SEQ ID NO: 2740383 - RNA, 17 nt, Human
cugcuggguguggcgca

SEQ ID NO: 2740384 - RNA, 13 nt, Human
cugcuugaggcaa

SEQ ID NO: 2740385 - RNA, 20 nt, Human
cugcuugaggcaacucaucu

SEQ ID NO: 2740386 - RNA, 21 nt, Human
cugcuugaggcaacucaucuu

SEQ ID NO: 2740387 - RNA, 12 nt, Human
cugcacugucaa

SEQ ID NO: 2740388 - RNA, 18 nt, Human
cugcacuccccugcuggg

SEQ ID NO: 2740389 - RNA, 21 nt, Human
cugcacuccccugcugggugu

SEQ ID NO: 2740390 - RNA, 13 nt, Human
cugcagagggcac

SEQ ID NO: 2740391 - RNA, 16 nt, Human
cugcagcaauaaagca

SEQ ID NO: 2740392 - RNA, 15 nt, Human
cugcagcaauaaagc

SEQ ID NO: 2740393 - RNA, 10 nt, Human
cugcagaggg

SEQ ID NO: 2740394 - RNA, 20 nt, Human
cugcacuccagccuggguga

SEQ ID NO: 2740395 - RNA, 18 nt, Human
cugcaccgggccacagag

SEQ ID NO: 2740396 - RNA, 13 nt, Human
cugcacuccccug

SEQ ID NO: 2740397 - RNA, 19 nt, Human
cugcacuccccugcugggu

SEQ ID NO: 2740398 - RNA, 20 nt, Human
cugcacuccccugcugggug

SEQ ID NO: 2740399 - RNA, 14 nt, Human
cugcaccgggccac

SEQ ID NO: 2740400 - RNA, 15 nt, Human
cugcaccgggccaca

SEQ ID NO: 2740401 - RNA, 15 nt, Human
cugcaccggcuggcc

SEQ ID NO: 2740402 - RNA, 16 nt, Human
cugcaccggcuggccu

SEQ ID NO: 2740403 - RNA, 22 nt, Human
cugaggcccuucucuccagccc

SEQ ID NO: 2740404 - RNA, 23 nt, Human
cugaggcccuucucuccagcccc

SEQ ID NO: 2740405 - RNA, 14 nt, Human
cugcaccggcuggc

SEQ ID NO: 2740406 - RNA, 13 nt, Human
cugcaguugccag

SEQ ID NO: 2740407 - RNA, 16 nt, Human
cugcaguugccaguca

SEQ ID NO: 2740408 - RNA, 17 nt, Human
cugcagcaauaaagcag

SEQ ID NO: 2740409 - RNA, 15 nt, Human
cugccagcaacgcag

SEQ ID NO: 2740410 - RNA, 13 nt, Human
cugccaggaagcc

SEQ ID NO: 2740411 - RNA, 14 nt, Human
cugccaggaagcca

SEQ ID NO: 2740412 - RNA, 20 nt, Human
cugccaggaagccagcaggc

SEQ ID NO: 2740413 - RNA, 21 nt, Human
cugccaggaagccagcaggcu

SEQ ID NO: 2740414 - RNA, 15 nt, Human
cugccauccucccaa

SEQ ID NO: 2740415 - RNA, 21 nt, Human
cugccauccagguucagcuug

SEQ ID NO: 2740416 - RNA, 22 nt, Human
cugccaggaagccagcaggcuc

SEQ ID NO: 2740417 - RNA, 21 nt, Human
cugccacccuggggagaaagu

SEQ ID NO: 2740418 - RNA, 12 nt, Human
cugccacccugg

SEQ ID NO: 2740419 - RNA, 15 nt, Human
cugcauaugaaagga

SEQ ID NO: 2740420 - RNA, 20 nt, Human
cugcaucaagaugugacaug

SEQ ID NO: 2740421 - RNA, 16 nt, Human
cugcccaggccccugc

SEQ ID NO: 2740422 - RNA, 18 nt, Human
cugcccaggccccugcca

SEQ ID NO: 2740423 - RNA, 19 nt, Human
cugcccaggccccugccac

SEQ ID NO: 2740424 - RNA, 20 nt, Human
cugcccaggccccugccacc

SEQ ID NO: 2740425 - RNA, 12 nt, Human
cugcccaccugg

SEQ ID NO: 2740426 - RNA, 14 nt, Human
cugcccaggccccu

SEQ ID NO: 2740427 - RNA, 15 nt, Human
cugcccaggccccug

SEQ ID NO: 2740428 - RNA, 15 nt, Human
cugccauuucugaga

SEQ ID NO: 2740429 - RNA, 13 nt, Human
cugcccggcaggg

SEQ ID NO: 2740430 - RNA, 20 nt, Human
cugcccggcaggguccuaga

SEQ ID NO: 2740431 - RNA, 19 nt, Human
cugccccuggcagccccug

SEQ ID NO: 2740432 - RNA, 18 nt, Human
cugccccuggcagccccu

SEQ ID NO: 2740433 - RNA, 17 nt, Human
cugggagagccuuccag

SEQ ID NO: 2740434 - RNA, 18 nt, Human
cugggagagccuuccagg

SEQ ID NO: 2740435 - RNA, 21 nt, Human
cugggagagccuuccaggggu

SEQ ID NO: 2740436 - RNA, 19 nt, Human
cugggagagccuuccaggg

SEQ ID NO: 2740437 - RNA, 20 nt, Human
cugggagagccuuccagggg

SEQ ID NO: 2740438 - RNA, 18 nt, Human
cuggcuguuggcuggggg

SEQ ID NO: 2740439 - RNA, 16 nt, Human
cuggcuguuggcuggg

SEQ ID NO: 2740440 - RNA, 17 nt, Human
cuggcuguuggcugggg

SEQ ID NO: 2740441 - RNA, 20 nt, Human
cuggcugguuagagguuccc

SEQ ID NO: 2740442 - RNA, 19 nt, Human
cugggaggucaaggcugca

SEQ ID NO: 2740443 - RNA, 21 nt, Human
cugggaggucaaggcugcagu

SEQ ID NO: 2740444 - RNA, 17 nt, Human
cugggauuacaggugug

SEQ ID NO: 2740445 - RNA, 20 nt, Human
cugggauuacaggugugaac

SEQ ID NO: 2740446 - RNA, 18 nt, Human
cugggaugauuggagggg

SEQ ID NO: 2740447 - RNA, 20 nt, Human
cugggaucccucauccucau

SEQ ID NO: 2740448 - RNA, 16 nt, Human
cuggccuggccccuca

SEQ ID NO: 2740449 - RNA, 17 nt, Human
cuggccuggccccucag

SEQ ID NO: 2740450 - RNA, 16 nt, Human
cuggccugagcuggga

SEQ ID NO: 2740451 - RNA, 13 nt, Human
cuggccucugcac

SEQ ID NO: 2740452 - RNA, 14 nt, Human
cuggccucugcacu

SEQ ID NO: 2740453 - RNA, 13 nt, Human
cuggccuggcccc

SEQ ID NO: 2740454 - RNA, 14 nt, Human
cuggccuggccccu

SEQ ID NO: 2740455 - RNA, 15 nt, Human
cuggccugagcuggg

SEQ ID NO: 2740456 - RNA, 18 nt, Human
cuggccugagcugggaug

SEQ ID NO: 2740457 - RNA, 23 nt, Human
cuggccucaagugauucuccugc

SEQ ID NO: 2740458 - RNA, 12 nt, Human
cuggccucugca

SEQ ID NO: 2740459 - RNA, 22 nt, Human
cuggccucaagugauucuccug

SEQ ID NO: 2740460 - RNA, 16 nt, Human
cuggcacccggccccu

SEQ ID NO: 2740461 - RNA, 17 nt, Human
cuggcacccggccccug

SEQ ID NO: 2740462 - RNA, 18 nt, Human
cuggcacccggccccugc

SEQ ID NO: 2740463 - RNA, 22 nt, Human
cuggcacccggccccugcuggu

SEQ ID NO: 2740464 - RNA, 18 nt, Human
cuggaauauauaaccagu

SEQ ID NO: 2740465 - RNA, 14 nt, Human
cuggcaagaaugug

SEQ ID NO: 2740466 - RNA, 22 nt, Human
cuggcacuauaauguaagcucu

SEQ ID NO: 2740467 - RNA, 16 nt, Human
cuggcacuauaaugua

SEQ ID NO: 2740468 - RNA, 15 nt, Human
cuggcacuauaaugu

SEQ ID NO: 2740469 - RNA, 16 nt, Human
cuggcaugggaaugaa

SEQ ID NO: 2740470 - RNA, 18 nt, Human
cuggcaugggaaugaaug

SEQ ID NO: 2740471 - RNA, 19 nt, Human
cuggcaugggaaugaaugu

SEQ ID NO: 2740472 - RNA, 22 nt, Human
cuggcaugggaaugaaugucag

SEQ ID NO: 2740473 - RNA, 24 nt, Human
cuggcaugggaaugaaugucagug

SEQ ID NO: 2740474 - RNA, 22 nt, Human
cuggccagaugcaccagcccuu

SEQ ID NO: 2740475 - RNA, 23 nt, Human
cuguacagagcccacgcccccac

SEQ ID NO: 2740476 - RNA, 22 nt, Human
cuguaauuugugauacaaugcu

SEQ ID NO: 2740477 - RNA, 21 nt, Human
cuguaauuugugauacaaugc

SEQ ID NO: 2740478 - RNA, 17 nt, Human
cuguaauuugugauaca

SEQ ID NO: 2740479 - RNA, 18 nt, Human
cuguaauuugugauacaa

SEQ ID NO: 2740480 - RNA, 21 nt, Human
cuguaccucuugagccuugaa

SEQ ID NO: 2740481 - RNA, 23 nt, Human
cuguacaugaaaacacauuuuuc

SEQ ID NO: 2740482 - RNA, 22 nt, Human
cuguacaugaaaacacauuuuu

SEQ ID NO: 2740483 - RNA, 12 nt, Human
cugguggcagcu

SEQ ID NO: 2740484 - RNA, 13 nt, Human
cugguggcagcuc

SEQ ID NO: 2740485 - RNA, 14 nt, Human
cugguggcagcuca

SEQ ID NO: 2740486 - RNA, 20 nt, Human
cugguucaggguuggccccu

SEQ ID NO: 2740487 - RNA, 15 nt, Human
cuggguuggagggug

SEQ ID NO: 2740488 - RNA, 19 nt, Human
cuggguacuuguggacaca

SEQ ID NO: 2740489 - RNA, 18 nt, Human
cuggguacuuguggacac

SEQ ID NO: 2740490 - RNA, 16 nt, Human
cuggguacuuguggac

SEQ ID NO: 2740491 - RNA, 14 nt, Human
cuggguacuugugg

SEQ ID NO: 2740492 - RNA, 19 nt, Human
cugggcucccuucccaccu

SEQ ID NO: 2740493 - RNA, 20 nt, Human
cugggcucccuucccaccuc

SEQ ID NO: 2740494 - RNA, 21 nt, Human
cugggcucccuucccaccucu

SEQ ID NO: 2740495 - RNA, 22 nt, Human
cugggcucccuucccaccucuc

SEQ ID NO: 2740496 - RNA, 21 nt, Human
cugguccauagagagcaagac

SEQ ID NO: 2740497 - RNA, 13 nt, Human
cuggucccacuca

SEQ ID NO: 2740498 - RNA, 23 nt, Human
cuggucucaaacucuugaccuca

SEQ ID NO: 2740499 - RNA, 14 nt, Human
cuggucccacucag

SEQ ID NO: 2740500 - RNA, 22 nt, Human
cugucucaaaaaaagaaaaaga

SEQ ID NO: 2740501 - RNA, 21 nt, Human
cuguccuacucugugucaggu

SEQ ID NO: 2740502 - RNA, 16 nt, Human
cuguccuacucugugu

SEQ ID NO: 2740503 - RNA, 17 nt, Human
cuguccuacucuguguc

SEQ ID NO: 2740504 - RNA, 18 nt, Human
cuguccuacucuguguca

SEQ ID NO: 2740505 - RNA, 20 nt, Human
cuguccuacucugugucagg

SEQ ID NO: 2740506 - RNA, 13 nt, Human
cugucccccugac

SEQ ID NO: 2740507 - RNA, 14 nt, Human
cugucccccugaca

SEQ ID NO: 2740508 - RNA, 13 nt, Human
cuguauuuuaaaa

SEQ ID NO: 2740509 - RNA, 16 nt, Human
cuguauuuuaaaagaa

SEQ ID NO: 2740510 - RNA, 22 nt, Human
cugucccagugccgagaaggaa

SEQ ID NO: 2740511 - RNA, 15 nt, Human
cuguaugauucccag

SEQ ID NO: 2740512 - RNA, 18 nt, Human
cuguaucccaugagccuc

SEQ ID NO: 2740513 - RNA, 14 nt, Human
cuguaucccaugag

SEQ ID NO: 2740514 - RNA, 15 nt, Human
cuguaucccaugagc

SEQ ID NO: 2740515 - RNA, 16 nt, Human
cuguauagauuagaga

SEQ ID NO: 2740516 - RNA, 20 nt, Human
cuguauagauuagaauucug

SEQ ID NO: 2740517 - RNA, 15 nt, Human
cuguauagauuagag

SEQ ID NO: 2740518 - RNA, 22 nt, Human
cuguaccucuugagccuugaac

SEQ ID NO: 2740519 - RNA, 14 nt, Human
gaaccacaagacug

SEQ ID NO: 2740520 - RNA, 15 nt, Human
gaaccacaagacugc

SEQ ID NO: 2740521 - RNA, 20 nt, Human
gaaccacaucuugcucugcu

SEQ ID NO: 2740522 - RNA, 18 nt, Human
gaaccacaucuugcucug

SEQ ID NO: 2740523 - RNA, 17 nt, Human
gaacuuaaauaauguga

SEQ ID NO: 2740524 - RNA, 14 nt, Human
gaacuuaaauaaug

SEQ ID NO: 2740525 - RNA, 17 nt, Human
gaacuuggcgcugcccc

SEQ ID NO: 2740526 - RNA, 22 nt, Human
gaacuugaaauuugaauuuugu

SEQ ID NO: 2740527 - RNA, 15 nt, Human
gaacuugaaauuuga

SEQ ID NO: 2740528 - RNA, 13 nt, Human
gaacuugaaauuu

SEQ ID NO: 2740529 - RNA, 12 nt, Human
gaacuugaaauu

SEQ ID NO: 2740530 - RNA, 22 nt, Human
gaacuuguaaaggaauuuaaaa

SEQ ID NO: 2740531 - RNA, 17 nt, Human
gaacuugggccacugug

SEQ ID NO: 2740532 - RNA, 18 nt, Human
gaacuuggcgcugccccu

SEQ ID NO: 2740533 - RNA, 17 nt, Human
gaacuuuccaggaaggc

SEQ ID NO: 2740534 - RNA, 14 nt, Human
gaagaagcucucuc

SEQ ID NO: 2740535 - RNA, 22 nt, Human
gaacuuugaccucugcagcaau

SEQ ID NO: 2740536 - RNA, 16 nt, Human
gaacuuugaccucugc

SEQ ID NO: 2740537 - RNA, 20 nt, Human
gaagagcuguucacagccag

SEQ ID NO: 2740538 - RNA, 15 nt, Human
gaagagcuguucaca

SEQ ID NO: 2740539 - RNA, 13 nt, Human
gaagagcuguuca

SEQ ID NO: 2740540 - RNA, 23 nt, Human
gaagagcuguucacagccagacu

SEQ ID NO: 2740541 - RNA, 20 nt, Human
gaagaguauuuuugacagaa

SEQ ID NO: 2740542 - RNA, 15 nt, Human
gaagacuucaucccu

SEQ ID NO: 2740543 - RNA, 16 nt, Human
gaagacuucaucccuc

SEQ ID NO: 2740544 - RNA, 12 nt, Human
gaagagccuugc

SEQ ID NO: 2740545 - RNA, 17 nt, Human
gaagacuucaucccucu

SEQ ID NO: 2740546 - RNA, 19 nt, Human
gaagacuucaucccucugg

SEQ ID NO: 2740547 - RNA, 18 nt, Human
gaagcauuuacuuugugu

SEQ ID NO: 2740548 - RNA, 23 nt, Human
gaaguccaagcauuuagauguau

SEQ ID NO: 2740549 - RNA, 18 nt, Human
gaagucuuagauguauau

SEQ ID NO: 2740550 - RNA, 14 nt, Human
gaagucagaucugc

SEQ ID NO: 2740551 - RNA, 23 nt, Human
gaagucagaucugccuaaggacu

SEQ ID NO: 2740552 - RNA, 22 nt, Human
gaagucagaucugccuaaggac

SEQ ID NO: 2740553 - RNA, 21 nt, Human
gaagucacauuccugaacagg

SEQ ID NO: 2740554 - RNA, 20 nt, Human
gaagucacauuccugaacag

SEQ ID NO: 2740555 - RNA, 16 nt, Human
gaagucacauuccuga

SEQ ID NO: 2740556 - RNA, 13 nt, Human
gaagucacacagu

SEQ ID NO: 2740557 - RNA, 21 nt, Human
gaaguaauaugcacacauuuu

SEQ ID NO: 2740558 - RNA, 20 nt, Human
gaaguaauaugcacacauuu

SEQ ID NO: 2740559 - RNA, 19 nt, Human
gaaguaauaugcacacauu

SEQ ID NO: 2740560 - RNA, 13 nt, Human
gaagggggcuggg

SEQ ID NO: 2740561 - RNA, 19 nt, Human
gaaggaagacuucaucccu

SEQ ID NO: 2740562 - RNA, 15 nt, Human
gaaggaacguccccu

SEQ ID NO: 2740563 - RNA, 21 nt, Human
gaaggaaacccagcucugguc

SEQ ID NO: 2740564 - RNA, 22 nt, Human
gaaggaaacccagcucuggucc

SEQ ID NO: 2740565 - RNA, 19 nt, Human
gaaggacauugcggacagc

SEQ ID NO: 2740566 - RNA, 20 nt, Human
gaaggacauugcggacagcc

SEQ ID NO: 2740567 - RNA, 21 nt, Human
gaaggacauugcggacagcca

SEQ ID NO: 2740568 - RNA, 19 nt, Human
gaaggaaacccagcucugg

SEQ ID NO: 2740569 - RNA, 20 nt, Human
gaaggaaacccagcucuggu

SEQ ID NO: 2740570 - RNA, 14 nt, Human
gaagccgcuggggc

SEQ ID NO: 2740571 - RNA, 18 nt, Human
gaagccgcuggggccagu

SEQ ID NO: 2740572 - RNA, 20 nt, Human
gaagccgcuggggccaguug

SEQ ID NO: 2740573 - RNA, 15 nt, Human
gaaauauuuauuuua

SEQ ID NO: 2740574 - RNA, 16 nt, Human
gaaauauuuauuuuaa

SEQ ID NO: 2740575 - RNA, 13 nt, Human
gaaauauuuauuu

SEQ ID NO: 2740576 - RNA, 19 nt, Human
gaaauaucugaaaauguau

SEQ ID NO: 2740577 - RNA, 18 nt, Human
gaaauaucugaaaaugua

SEQ ID NO: 2740578 - RNA, 17 nt, Human
gaaauauaggaacuuaa

SEQ ID NO: 2740579 - RNA, 21 nt, Human
gaaauaaacgucuuaaauauu

SEQ ID NO: 2740580 - RNA, 18 nt, Human
gaaauaaacgucuuaaau

SEQ ID NO: 2740581 - RNA, 14 nt, Human
gaaauaaacgucuu

SEQ ID NO: 2740582 - RNA, 17 nt, Human
gaaauaaacgucuuaaa

SEQ ID NO: 2740583 - RNA, 16 nt, Human
gaaauaaacgucuuaa

SEQ ID NO: 2740584 - RNA, 22 nt, Human
gaaauguaagggaaacugccag

SEQ ID NO: 2740585 - RNA, 17 nt, Human
gaaauguacagcaagga

SEQ ID NO: 2740586 - RNA, 17 nt, Human
gaaaugggcagagcaga

SEQ ID NO: 2740587 - RNA, 19 nt, Human
gaaaugggcagagcagaga

SEQ ID NO: 2740588 - RNA, 18 nt, Human
gaaaugaggucagagccu

SEQ ID NO: 2740589 - RNA, 11 nt, Human
gaaaugagcug

SEQ ID NO: 2740590 - RNA, 16 nt, Human
gaaaugggcagagcag

SEQ ID NO: 2740591 - RNA, 15 nt, Human
gaaaugggcagagca

SEQ ID NO: 2740592 - RNA, 24 nt, Human
gaacaguuaccucugccucagaaa

SEQ ID NO: 2740593 - RNA, 20 nt, Human
gaacaguuguguuugaagca

SEQ ID NO: 2740594 - RNA, 18 nt, Human
gaacagauaaucagugug

SEQ ID NO: 2740595 - RNA, 22 nt, Human
gaacagacuggaagcacagcuu

SEQ ID NO: 2740596 - RNA, 17 nt, Human
gaacaggauauucucac

SEQ ID NO: 2740597 - RNA, 22 nt, Human
gaacaguuguguuugaagcaca

SEQ ID NO: 2740598 - RNA, 17 nt, Human
gaaauuauauaaguauu

SEQ ID NO: 2740599 - RNA, 23 nt, Human
gaaauuauauaaguauucuaaau

SEQ ID NO: 2740600 - RNA, 17 nt, Human
gaacacuccuucacaga

SEQ ID NO: 2740601 - RNA, 20 nt, Human
gaacagacuggaagcacagc

SEQ ID NO: 2740602 - RNA, 19 nt, Human
gaacagacuggaagcacag

SEQ ID NO: 2740603 - RNA, 15 nt, Human
gaacacuccuucaca

SEQ ID NO: 2740604 - RNA, 16 nt, Human
gaacacuccuucacag

SEQ ID NO: 2740605 - RNA, 21 nt, Human
gaaauuuccugggagcuuuug

SEQ ID NO: 2740606 - RNA, 13 nt, Human
gaaauuugaauuu

SEQ ID NO: 2740607 - RNA, 24 nt, Human
gaaauuugaauuuuguguuagaga

SEQ ID NO: 2740608 - RNA, 16 nt, Human
gaaauuugaauuuugu

SEQ ID NO: 2740609 - RNA, 19 nt, Human
gaaagacuauucaaacagu

SEQ ID NO: 2740610 - RNA, 23 nt, Human
gaaagacuauucaaacagucuca

SEQ ID NO: 2740611 - RNA, 22 nt, Human
gaaagacuauucaaacagucuc

SEQ ID NO: 2740612 - RNA, 16 nt, Human
gaaagaucaaaagguu

SEQ ID NO: 2740613 - RNA, 15 nt, Human
gaaacugccagcaac

SEQ ID NO: 2740614 - RNA, 13 nt, Human
gaaacugccagca

SEQ ID NO: 2740615 - RNA, 16 nt, Human
gaaacggaugauuucu

SEQ ID NO: 2740616 - RNA, 16 nt, Human
gaaaaaugagccuggc

SEQ ID NO: 2740617 - RNA, 11 nt, Human
gaaaggaaaga

SEQ ID NO: 2740618 - RNA, 16 nt, Human
gaaaggaaagaggcuc

SEQ ID NO: 2740619 - RNA, 22 nt, Human
gaaaguacuucuccacccugcu

SEQ ID NO: 2740620 - RNA, 23 nt, Human
gaaaguuauugauaaguucauac

SEQ ID NO: 2740621 - RNA, 17 nt, Human
cuugccaaauauaaaua

SEQ ID NO: 2740622 - RNA, 13 nt, Human
cuugcuugcuuuu

SEQ ID NO: 2740623 - RNA, 12 nt, Human
cuuggcugcagg

SEQ ID NO: 2740624 - RNA, 13 nt, Human
cuuggcugcaggg

SEQ ID NO: 2740625 - RNA, 23 nt, Human
cuuggcucaaguccucuuuucug

SEQ ID NO: 2740626 - RNA, 14 nt, Human
cuuggauugucccc

SEQ ID NO: 2740627 - RNA, 13 nt, Human
cuuggauuguccc

SEQ ID NO: 2740628 - RNA, 18 nt, Human
cuuguaaaggaauuuaaa

SEQ ID NO: 2740629 - RNA, 21 nt, Human
cuuguaaauagcucagguguc

SEQ ID NO: 2740630 - RNA, 20 nt, Human
cuugguuuguaaauuaacuu

SEQ ID NO: 2740631 - RNA, 16 nt, Human
cuuggggaccagagcu

SEQ ID NO: 2740632 - RNA, 17 nt, Human
cuuggggaccagagcug

SEQ ID NO: 2740633 - RNA, 18 nt, Human
cuuggggaccagagcugc

SEQ ID NO: 2740634 - RNA, 19 nt, Human
cuuggggaccagagcugcc

SEQ ID NO: 2740635 - RNA, 16 nt, Human
cuuguggacacagcuc

SEQ ID NO: 2740636 - RNA, 17 nt, Human
cuuguggacacagcucu

SEQ ID NO: 2740637 - RNA, 18 nt, Human
cuuguggacacagcucuu

SEQ ID NO: 2740638 - RNA, 23 nt, Human
cuugcaucaauuuuucuuauuuc

SEQ ID NO: 2740639 - RNA, 21 nt, Human
cuugcaugaggcuaguguggu

SEQ ID NO: 2740640 - RNA, 18 nt, Human
cuugcagacucuacagag

SEQ ID NO: 2740641 - RNA, 22 nt, Human
cuugcaaaguaucccuacugua

SEQ ID NO: 2740642 - RNA, 14 nt, Human
cuugcaauggcagc

SEQ ID NO: 2740643 - RNA, 19 nt, Human
cuugagccuugaacuuuga

SEQ ID NO: 2740644 - RNA, 14 nt, Human
cuugagagggugga

SEQ ID NO: 2740645 - RNA, 21 nt, Human
cuugaccauucuccaccugcc

SEQ ID NO: 2740646 - RNA, 17 nt, Human
cuugaccauucuccacc

SEQ ID NO: 2740647 - RNA, 20 nt, Human
cuugaccauucuccaccugc

SEQ ID NO: 2740648 - RNA, 22 nt, Human
cuugagccuugaacuuugaccu

SEQ ID NO: 2740649 - RNA, 20 nt, Human
cuugagccuugaacuuugac

SEQ ID NO: 2740650 - RNA, 20 nt, Human
cuugaaauuugaauuuugug

SEQ ID NO: 2740651 - RNA, 19 nt, Human
cuugaaauuugaauuuugu

SEQ ID NO: 2740652 - RNA, 14 nt, Human
cuugaacuccuggc

SEQ ID NO: 2740653 - RNA, 15 nt, Human
cuugaacuccuggcc

SEQ ID NO: 2740654 - RNA, 17 nt, Human
cuugaacuccuggccuc

SEQ ID NO: 2740655 - RNA, 18 nt, Human
cuugaacuccuggccuca

SEQ ID NO: 2740656 - RNA, 15 nt, Human
cuugaacuuugaccu

SEQ ID NO: 2740657 - RNA, 18 nt, Human
cuugaacuggguacuugu

SEQ ID NO: 2740658 - RNA, 20 nt, Human
cuugaacuggguacuugugg

SEQ ID NO: 2740659 - RNA, 19 nt, Human
cuugaacuccuggccucaa

SEQ ID NO: 2740660 - RNA, 16 nt, Human
cuugaacuggguacuu

SEQ ID NO: 2740661 - RNA, 19 nt, Human
cuucuuuccacagaagcuc

SEQ ID NO: 2740662 - RNA, 13 nt, Human
cuucuuuccacag

SEQ ID NO: 2740663 - RNA, 22 nt, Human
cuucuuuauaauucuacuuuga

SEQ ID NO: 2740664 - RNA, 19 nt, Human
cuugaaauauaggaacuua

SEQ ID NO: 2740665 - RNA, 14 nt, Human
cuuugcagacaggc

SEQ ID NO: 2740666 - RNA, 15 nt, Human
cuuugcagacaggca

SEQ ID NO: 2740667 - RNA, 19 nt, Human
cuuuggaaagaguaggaag

SEQ ID NO: 2740668 - RNA, 23 nt, Human
cuuuggaaagaguaggaagacuu

SEQ ID NO: 2740669 - RNA, 17 nt, Human
cuuuccugaggcugggc

SEQ ID NO: 2740670 - RNA, 16 nt, Human
cuuuccugaggcuggg

SEQ ID NO: 2740671 - RNA, 20 nt, Human
cuuuccugaggcugggcucc

SEQ ID NO: 2740672 - RNA, 21 nt, Human
cuuuccugaggcugggcuccc

SEQ ID NO: 2740673 - RNA, 16 nt, Human
cuuuccaaaugcccag

SEQ ID NO: 2740674 - RNA, 22 nt, Human
cuuuccaaaguacacuguuuca

SEQ ID NO: 2740675 - RNA, 16 nt, Human
cuuuccaaaguacacu

SEQ ID NO: 2740676 - RNA, 14 nt, Human
cuuuccaggaaggc

SEQ ID NO: 2740677 - RNA, 21 nt, Human
cuuguggacacagcucuucuc

SEQ ID NO: 2740678 - RNA, 22 nt, Human
cuuuucauuuaggugaggaagc

SEQ ID NO: 2740679 - RNA, 13 nt, Human
cuuuuccaacccu

SEQ ID NO: 2740680 - RNA, 23 nt, Human
cuuuuccaacccucaucaccaac

SEQ ID NO: 2740681 - RNA, 21 nt, Human
cuuuucgcaggauucuuccuc

SEQ ID NO: 2740682 - RNA, 20 nt, Human
cuuuucgcaggauucuuccu

SEQ ID NO: 2740683 - RNA, 16 nt, Human
cuuuggaacaagaugg

SEQ ID NO: 2740684 - RNA, 22 nt, Human
cuuuuuaauauugauaugcuua

SEQ ID NO: 2740685 - RNA, 13 nt, Human
cuuuucuuuucuu

SEQ ID NO: 2740686 - RNA, 17 nt, Human
cuuuucuuucagccaag

SEQ ID NO: 2740687 - RNA, 15 nt, Human
cuuuuuuauacauaa

SEQ ID NO: 2740688 - RNA, 17 nt, Human
cuuuuuuauacauaaac

SEQ ID NO: 2740689 - RNA, 16 nt, Human
cuuuuuuauacauaaa

SEQ ID NO: 2740690 - RNA, 21 nt, Human
cuuuuucauuauuuuauuaug

SEQ ID NO: 2740691 - RNA, 11 nt, Human
gaaaaagaaaa

SEQ ID NO: 2740692 - RNA, 16 nt, Human
gaaaaagaaaaaauau

SEQ ID NO: 2740693 - RNA, 18 nt, Human
cuuuuuuauacauaaaca

SEQ ID NO: 2740694 - RNA, 23 nt, Human
gaccugauuucugagcauuuaau

SEQ ID NO: 2740695 - RNA, 18 nt, Human
gaccugaggcccuucucu

SEQ ID NO: 2740696 - RNA, 21 nt, Human
gaccugaggcccuucucucca

SEQ ID NO: 2740697 - RNA, 11 nt, Human
gaccucaggcc

SEQ ID NO: 2740698 - RNA, 12 nt, Human
gaccucaggccu

SEQ ID NO: 2740699 - RNA, 13 nt, Human
gaccucaggccug

SEQ ID NO: 2740700 - RNA, 15 nt, Human
gaccugaggcccuuc

SEQ ID NO: 2740701 - RNA, 14 nt, Human
gaccgugaggccag

SEQ ID NO: 2740702 - RNA, 19 nt, Human
gaccgugaggccagagaca

SEQ ID NO: 2740703 - RNA, 15 nt, Human
gaccgugaggccaga

SEQ ID NO: 2740704 - RNA, 13 nt, Human
gaccccuccaugu

SEQ ID NO: 2740705 - RNA, 18 nt, Human
gacccugaggcccagagg

SEQ ID NO: 2740706 - RNA, 23 nt, Human
gacccugucucaaaaaaagaaaa

SEQ ID NO: 2740707 - RNA, 16 nt, Human
gacccugcccuguggg

SEQ ID NO: 2740708 - RNA, 13 nt, Human
gacccugcccugu

SEQ ID NO: 2740709 - RNA, 15 nt, Human
gacccugcccugugg

SEQ ID NO: 2740710 - RNA, 19 nt, Human
gacccugaggcccagaggg

SEQ ID NO: 2740711 - RNA, 20 nt, Human
gacccugaggcccagagggc

SEQ ID NO: 2740712 - RNA, 12 nt, Human
gacccugcccug

SEQ ID NO: 2740713 - RNA, 21 nt, Human
gacccugaggcccagagggcc

SEQ ID NO: 2740714 - RNA, 13 nt, Human
gacccaugcugcc

SEQ ID NO: 2740715 - RNA, 16 nt, Human
gacccaugcugcccug

SEQ ID NO: 2740716 - RNA, 14 nt, Human
gacccaugcugccc

SEQ ID NO: 2740717 - RNA, 15 nt, Human
gacccaugcugcccu

SEQ ID NO: 2740718 - RNA, 11 nt, Human
gacccacugcu

SEQ ID NO: 2740719 - RNA, 12 nt, Human
gacccacugcuu

SEQ ID NO: 2740720 - RNA, 17 nt, Human
gacguguuaugacucca

SEQ ID NO: 2740721 - RNA, 20 nt, Human
gacguguuaugacuccagaa

SEQ ID NO: 2740722 - RNA, 14 nt, Human
gacggagucccacc

SEQ ID NO: 2740723 - RNA, 18 nt, Human
gacggagucccaccuugg

SEQ ID NO: 2740724 - RNA, 21 nt, Human
gacggagucccaccuuggcug

SEQ ID NO: 2740725 - RNA, 21 nt, Human
gaccuuucaauaggaaaaacu

SEQ ID NO: 2740726 - RNA, 23 nt, Human
gaccuugaacuggguacuugugg

SEQ ID NO: 2740727 - RNA, 17 nt, Human
gacuacucccccaggug

SEQ ID NO: 2740728 - RNA, 12 nt, Human
gacuacaggcac

SEQ ID NO: 2740729 - RNA, 22 nt, Human
gacguguuaugacuccagaauu

SEQ ID NO: 2740730 - RNA, 18 nt, Human
gacuccaaagaaauguaa

SEQ ID NO: 2740731 - RNA, 14 nt, Human
gacuccugcaggca

SEQ ID NO: 2740732 - RNA, 15 nt, Human
gacuccugcaggcag

SEQ ID NO: 2740733 - RNA, 16 nt, Human
gacuccugcaggcagc

SEQ ID NO: 2740734 - RNA, 17 nt, Human
gacaugggacauuugcu

SEQ ID NO: 2740735 - RNA, 22 nt, Human
gacaugggacauuugcucaugg

SEQ ID NO: 2740736 - RNA, 17 nt, Human
gacaugucuuuucuugc

SEQ ID NO: 2740737 - RNA, 21 nt, Human
gacaugucuuuucuugcauga

SEQ ID NO: 2740738 - RNA, 20 nt, Human
gaccaaaaaccaguauugua

SEQ ID NO: 2740739 - RNA, 19 nt, Human
gaccaaaaaccaguauugu

SEQ ID NO: 2740740 - RNA, 13 nt, Human
gaccaaaaaccag

SEQ ID NO: 2740741 - RNA, 16 nt, Human
gacauagucuggcugu

SEQ ID NO: 2740742 - RNA, 23 nt, Human
gacauacuaaccagcagaaaugc

SEQ ID NO: 2740743 - RNA, 16 nt, Human
gacauacuaaccagca

SEQ ID NO: 2740744 - RNA, 15 nt, Human
gacauacuaaccagc

SEQ ID NO: 2740745 - RNA, 13 nt, Human
gacagccacggcc

SEQ ID NO: 2740746 - RNA, 12 nt, Human
gacagcugccug

SEQ ID NO: 2740747 - RNA, 13 nt, Human
gacagcugccugg

SEQ ID NO: 2740748 - RNA, 14 nt, Human
gacagacacaggcc

SEQ ID NO: 2740749 - RNA, 20 nt, Human
gacacuaaccacgcuggacc

SEQ ID NO: 2740750 - RNA, 21 nt, Human
gacacuaaccacgcuggaccu

SEQ ID NO: 2740751 - RNA, 15 nt, Human
gacagacacaggccc

SEQ ID NO: 2740752 - RNA, 16 nt, Human
gacagacacaggcccg

SEQ ID NO: 2740753 - RNA, 14 nt, Human
gacagcugccuggg

SEQ ID NO: 2740754 - RNA, 15 nt, Human
gacagcugccuggga

SEQ ID NO: 2740755 - RNA, 14 nt, Human
gacaggcaaugcug

SEQ ID NO: 2740756 - RNA, 16 nt, Human
gacaggcaaugcuggc

SEQ ID NO: 2740757 - RNA, 24 nt, Human
gacaggcaaugcuggcuguuggcu

SEQ ID NO: 2740758 - RNA, 17 nt, Human
gacaggcaaugcuggcu

SEQ ID NO: 2740759 - RNA, 18 nt, Human
gacaggcauguucucuga

SEQ ID NO: 2740760 - RNA, 19 nt, Human
gacaggcauguucucugag

SEQ ID NO: 2740761 - RNA, 15 nt, Human
gacacgaauauugcu

SEQ ID NO: 2740762 - RNA, 18 nt, Human
gacaccuugacagggcac

SEQ ID NO: 2740763 - RNA, 20 nt, Human
gacaccuugacagggcacac

SEQ ID NO: 2740764 - RNA, 15 nt, Human
gacaccuugacaggg

SEQ ID NO: 2740765 - RNA, 17 nt, Human
gacaccuugacagggca

SEQ ID NO: 2740766 - RNA, 19 nt, Human
gacacgaauauugcugaug

SEQ ID NO: 2740767 - RNA, 17 nt, Human
gacacgaauauugcuga

SEQ ID NO: 2740768 - RNA, 18 nt, Human
gacacgaauauugcugau

SEQ ID NO: 2740769 - RNA, 15 nt, Human
gacacuaaccacgcu

SEQ ID NO: 2740770 - RNA, 16 nt, Human
gacacuaaccacgcug

SEQ ID NO: 2740771 - RNA, 17 nt, Human
gacacuaaccacgcugg

SEQ ID NO: 2740772 - RNA, 18 nt, Human
gacacuaaccacgcugga

SEQ ID NO: 2740773 - RNA, 22 nt, Human
gacacccugugauggggcccug

SEQ ID NO: 2740774 - RNA, 23 nt, Human
gacacccugugauggggcccugc

SEQ ID NO: 2740775 - RNA, 12 nt, Human
gacacccuguga

SEQ ID NO: 2740776 - RNA, 13 nt, Human
gacacccugugau

SEQ ID NO: 2740777 - RNA, 18 nt, Human
gacacaggcccggcucca

SEQ ID NO: 2740778 - RNA, 12 nt, Human
gacacaggcccg

SEQ ID NO: 2740779 - RNA, 15 nt, Human
gacacaggcccggcu

SEQ ID NO: 2740780 - RNA, 17 nt, Human
gacacaggcccggcucc

SEQ ID NO: 2740781 - RNA, 22 nt, Human
gacacaagccuucggcgccuua

SEQ ID NO: 2740782 - RNA, 19 nt, Human
gacaauuuauuauggcaca

SEQ ID NO: 2740783 - RNA, 13 nt, Human
gacaauuuauuau

SEQ ID NO: 2740784 - RNA, 12 nt, Human
gacaauuuauua

SEQ ID NO: 2740785 - RNA, 16 nt, Human
gacaaugcaaaccauc

SEQ ID NO: 2740786 - RNA, 18 nt, Human
gacaaugcaaaccaucau

SEQ ID NO: 2740787 - RNA, 21 nt, Human
gacaaugacuuacuguacaug

SEQ ID NO: 2740788 - RNA, 12 nt, Human
gacaaugcaaac

SEQ ID NO: 2740789 - RNA, 20 nt, Human
gacaaugacuuacuguacau

SEQ ID NO: 2740790 - RNA, 17 nt, Human
gacaaugacuuacugua

SEQ ID NO: 2740791 - RNA, 16 nt, Human
gacaaugacccagugg

SEQ ID NO: 2740792 - RNA, 16 nt, Human
gaagucuuuguacaga

SEQ ID NO: 2740793 - RNA, 14 nt, Human
gaagucuuuguaca

SEQ ID NO: 2740794 - RNA, 22 nt, Human
gacaaggauugcuacuguccua

SEQ ID NO: 2740795 - RNA, 18 nt, Human
gagcugcccucuccuggg

SEQ ID NO: 2740796 - RNA, 19 nt, Human
gagcugcccucuccugggc

SEQ ID NO: 2740797 - RNA, 21 nt, Human
gagcugcccucuccugggcag

SEQ ID NO: 2740798 - RNA, 23 nt, Human
gagcugcccucuccugggcagcu

SEQ ID NO: 2740799 - RNA, 20 nt, Human
gagcuuugaaaauucagugg

SEQ ID NO: 2740800 - RNA, 22 nt, Human
gagcuuucugcuaucaaagagg

SEQ ID NO: 2740801 - RNA, 16 nt, Human
gaggaaagcaaaggag

SEQ ID NO: 2740802 - RNA, 17 nt, Human
gaggaaagcaaaggaga

SEQ ID NO: 2740803 - RNA, 14 nt, Human
gagcuuuuguagaa

SEQ ID NO: 2740804 - RNA, 14 nt, Human
gaggaacaaggcaa

SEQ ID NO: 2740805 - RNA, 16 nt, Human
gaggaacaaggcaagg

SEQ ID NO: 2740806 - RNA, 17 nt, Human
gaggaagagaaaaaaua

SEQ ID NO: 2740807 - RNA, 13 nt, Human
gaggaagccgcug

SEQ ID NO: 2740808 - RNA, 14 nt, Human
gaggaagccgcugg

SEQ ID NO: 2740809 - RNA, 17 nt, Human
gaggaagccgcuggggc

SEQ ID NO: 2740810 - RNA, 18 nt, Human
gaggaagccgcuggggcc

SEQ ID NO: 2740811 - RNA, 19 nt, Human
gaggaagccugauuaaaga

SEQ ID NO: 2740812 - RNA, 18 nt, Human
gaggaagccugauuaaag

SEQ ID NO: 2740813 - RNA, 16 nt, Human
gagcucgugggacagu

SEQ ID NO: 2740814 - RNA, 15 nt, Human
gagcugaguggggga

SEQ ID NO: 2740815 - RNA, 17 nt, Human
gagcugcccucuccugg

SEQ ID NO: 2740816 - RNA, 15 nt, Human
gagccugcaguuauu

SEQ ID NO: 2740817 - RNA, 15 nt, Human
gagcuagcagcaggg

SEQ ID NO: 2740818 - RNA, 17 nt, Human
gagcuagcagcagggag

SEQ ID NO: 2740819 - RNA, 13 nt, Human
gagccagauuuca

SEQ ID NO: 2740820 - RNA, 13 nt, Human
gagcccaccuugg

SEQ ID NO: 2740821 - RNA, 15 nt, Human
gagcccaccuuggcu

SEQ ID NO: 2740822 - RNA, 17 nt, Human
gagcccaccuuggcuca

SEQ ID NO: 2740823 - RNA, 18 nt, Human
gagccacugcaccgggcc

SEQ ID NO: 2740824 - RNA, 19 nt, Human
gagccacugcaccgggcca

SEQ ID NO: 2740825 - RNA, 13 nt, Human
gagccacugcacc

SEQ ID NO: 2740826 - RNA, 20 nt, Human
gagccacugcaccgggccac

SEQ ID NO: 2740827 - RNA, 15 nt, Human
gagccagauuucacu

SEQ ID NO: 2740828 - RNA, 18 nt, Human
gagccagauuucacucuc

SEQ ID NO: 2740829 - RNA, 19 nt, Human
gagccagauuucacucucc

SEQ ID NO: 2740830 - RNA, 20 nt, Human
gagauagccaaggccaaagg

SEQ ID NO: 2740831 - RNA, 21 nt, Human
gagauagccaaggccaaagga

SEQ ID NO: 2740832 - RNA, 17 nt, Human
gagcagagaccaucccu

SEQ ID NO: 2740833 - RNA, 18 nt, Human
gagcagagaccaucccug

SEQ ID NO: 2740834 - RNA, 16 nt, Human
gagcagagaccauccc

SEQ ID NO: 2740835 - RNA, 19 nt, Human
gagauagccaaggccaaag

SEQ ID NO: 2740836 - RNA, 23 nt, Human
gagcagagaccaucccugaaggc

SEQ ID NO: 2740837 - RNA, 19 nt, Human
gagcagagaccaucccuga

SEQ ID NO: 2740838 - RNA, 21 nt, Human
gagcagagaccaucccugaag

SEQ ID NO: 2740839 - RNA, 21 nt, Human
gagcagccacauuccugaugc

SEQ ID NO: 2740840 - RNA, 22 nt, Human
gagcagccacauuccugaugcu

SEQ ID NO: 2740841 - RNA, 21 nt, Human
gagccgagaucacgccacugc

SEQ ID NO: 2740842 - RNA, 22 nt, Human
gagccgagaucacgccacugca

SEQ ID NO: 2740843 - RNA, 19 nt, Human
gagccgagaucacgccacu

SEQ ID NO: 2740844 - RNA, 20 nt, Human
gagccgagaucacgccacug

SEQ ID NO: 2740845 - RNA, 18 nt, Human
gagcccacgcccccacug

SEQ ID NO: 2740846 - RNA, 12 nt, Human
gagccugcaguu

SEQ ID NO: 2740847 - RNA, 13 nt, Human
gagccuccugccc

SEQ ID NO: 2740848 - RNA, 13 nt, Human
gagccucagcauc

SEQ ID NO: 2740849 - RNA, 17 nt, Human
gagccucagcauccugg

SEQ ID NO: 2740850 - RNA, 14 nt, Human
gagccucagcaucc

SEQ ID NO: 2740851 - RNA, 15 nt, Human
gagccucagcauccu

SEQ ID NO: 2740852 - RNA, 19 nt, Human
gagagacacacugaagaag

SEQ ID NO: 2740853 - RNA, 17 nt, Human
gagagaagagaaugcac

SEQ ID NO: 2740854 - RNA, 17 nt, Human
gagauacagaauuuuau

SEQ ID NO: 2740855 - RNA, 13 nt, Human
gagagccuuccag

SEQ ID NO: 2740856 - RNA, 14 nt, Human
gagagccuuccagg

SEQ ID NO: 2740857 - RNA, 13 nt, Human
gagaggggaacag

SEQ ID NO: 2740858 - RNA, 18 nt, Human
gagaggggaacagacugg

SEQ ID NO: 2740859 - RNA, 21 nt, Human
gagagggugggagugggccca

SEQ ID NO: 2740860 - RNA, 24 nt, Human
gagacagcccgggcucugccuccc

SEQ ID NO: 2740861 - RNA, 14 nt, Human
gagacagcccgggc

SEQ ID NO: 2740862 - RNA, 17 nt, Human
gagacagcccgggcucu

SEQ ID NO: 2740863 - RNA, 18 nt, Human
gagacagcccgggcucug

SEQ ID NO: 2740864 - RNA, 19 nt, Human
gagacagcccgggcucugc

SEQ ID NO: 2740865 - RNA, 20 nt, Human
gagacagcccgggcucugcc

SEQ ID NO: 2740866 - RNA, 21 nt, Human
gagacagcccgggcucugccu

SEQ ID NO: 2740867 - RNA, 22 nt, Human
gagacagcccgggcucugccuc

SEQ ID NO: 2740868 - RNA, 23 nt, Human
gagacagcccgggcucugccucc

SEQ ID NO: 2740869 - RNA, 14 nt, Human
gagacucugucuca

SEQ ID NO: 2740870 - RNA, 22 nt, Human
gagacuccugcaggcagccagg

SEQ ID NO: 2740871 - RNA, 16 nt, Human
gagacucgcgacaaug

SEQ ID NO: 2740872 - RNA, 18 nt, Human
gagacucgcgacaaugca

SEQ ID NO: 2740873 - RNA, 18 nt, Human
gagacacacugaagaagc

SEQ ID NO: 2740874 - RNA, 15 nt, Human
gagacacaagccuuc

SEQ ID NO: 2740875 - RNA, 17 nt, Human
gagacacaagccuucgg

SEQ ID NO: 2740876 - RNA, 19 nt, Human
gagacagaguuuucacucu

SEQ ID NO: 2740877 - RNA, 12 nt, Human
gagacagcccgg

SEQ ID NO: 2740878 - RNA, 13 nt, Human
gagaagagcuguu

SEQ ID NO: 2740879 - RNA, 22 nt, Human
gagaagagcuguucacagccag

SEQ ID NO: 2740880 - RNA, 15 nt, Human
gagaagagcuguuca

SEQ ID NO: 2740881 - RNA, 13 nt, Human
gagaagaacugaa

SEQ ID NO: 2740882 - RNA, 14 nt, Human
gagaagaacugaaa

SEQ ID NO: 2740883 - RNA, 16 nt, Human
gagaagaacugaaauc

SEQ ID NO: 2740884 - RNA, 22 nt, Human
gagaaugcacaaacagaggccg

SEQ ID NO: 2740885 - RNA, 20 nt, Human
gagaaugcacaaacagaggc

SEQ ID NO: 2740886 - RNA, 21 nt, Human
gagaaugcacaaacagaggcc

SEQ ID NO: 2740887 - RNA, 18 nt, Human
gagaaagacuauucaaac

SEQ ID NO: 2740888 - RNA, 17 nt, Human
gagaaagacuauucaaa

SEQ ID NO: 2740889 - RNA, 15 nt, Human
gagaaagacuauuca

SEQ ID NO: 2740890 - RNA, 13 nt, Human
gagaaagacuauu

SEQ ID NO: 2740891 - RNA, 23 nt, Human
gagaaaguacuucuccacccugc

SEQ ID NO: 2740892 - RNA, 22 nt, Human
gagaaaguacuucuccacccug

SEQ ID NO: 2740893 - RNA, 13 nt, Human
gacuuggaagcuc

SEQ ID NO: 2740894 - RNA, 12 nt, Human
gacuuguuagau

SEQ ID NO: 2740895 - RNA, 21 nt, Human
gagaaaauggacguguuauga

SEQ ID NO: 2740896 - RNA, 14 nt, Human
gacuuggaagcucc

SEQ ID NO: 2740897 - RNA, 15 nt, Human
gacuuggaagcuccg

SEQ ID NO: 2740898 - RNA, 16 nt, Human
gacuuggaagcuccgc

SEQ ID NO: 2740899 - RNA, 19 nt, Human
gacucgcgacaaugcaaac

SEQ ID NO: 2740900 - RNA, 17 nt, Human
gacuccugcaggcagcc

SEQ ID NO: 2740901 - RNA, 18 nt, Human
gacucgcgacaaugcaaa

SEQ ID NO: 2740902 - RNA, 13 nt, Human
gauccuggaaauc

SEQ ID NO: 2740903 - RNA, 21 nt, Human
gauccugagccagauuucacu

SEQ ID NO: 2740904 - RNA, 22 nt, Human
gauccugagccagauuucacuc

SEQ ID NO: 2740905 - RNA, 15 nt, Human
gaucccucauccuca

SEQ ID NO: 2740906 - RNA, 16 nt, Human
gaucccucauccucau

SEQ ID NO: 2740907 - RNA, 14 nt, Human
gaugaaaauauuug

SEQ ID NO: 2740908 - RNA, 18 nt, Human
gaucuuugcagacaggca

SEQ ID NO: 2740909 - RNA, 17 nt, Human
gaucuuugcagacaggc

SEQ ID NO: 2740910 - RNA, 13 nt, Human
gauggggcccugc

SEQ ID NO: 2740911 - RNA, 14 nt, Human
gauggggcccugcc

SEQ ID NO: 2740912 - RNA, 22 nt, Human
gauggggcccugccuccuuugu

SEQ ID NO: 2740913 - RNA, 20 nt, Human
gaugccugguggcagcugcg

SEQ ID NO: 2740914 - RNA, 18 nt, Human
gaugccugguggcagcug

SEQ ID NO: 2740915 - RNA, 19 nt, Human
gaugccugguggcagcugc

SEQ ID NO: 2740916 - RNA, 22 nt, Human
gauggauuuccagccaaagccu

SEQ ID NO: 2740917 - RNA, 12 nt, Human
gaugcagccuca

SEQ ID NO: 2740918 - RNA, 19 nt, Human
gaugcagccucacaguccu

SEQ ID NO: 2740919 - RNA, 14 nt, Human
gaugcagccucaca

SEQ ID NO: 2740920 - RNA, 13 nt, Human
gaugcaccagccc

SEQ ID NO: 2740921 - RNA, 22 nt, Human
gaugcacagaguuguuacauuu

SEQ ID NO: 2740922 - RNA, 21 nt, Human
gaugcacagaguuguuacauu

SEQ ID NO: 2740923 - RNA, 17 nt, Human
gaugacaacuucccagu

SEQ ID NO: 2740924 - RNA, 23 nt, Human
gauagauaggucagugcaaauac

SEQ ID NO: 2740925 - RNA, 11 nt, Human
gauacagaaaa

SEQ ID NO: 2740926 - RNA, 22 nt, Human
gauaauacaccacuacauucug

SEQ ID NO: 2740927 - RNA, 21 nt, Human
gauaauacaccacuacauucu

SEQ ID NO: 2740928 - RNA, 18 nt, Human
gauaauacaccacuacau

SEQ ID NO: 2740929 - RNA, 14 nt, Human
gauaauacaccacu

SEQ ID NO: 2740930 - RNA, 20 nt, Human
gauagcacagacccugcccu

SEQ ID NO: 2740931 - RNA, 21 nt, Human
gauagcacagacccugcccug

SEQ ID NO: 2740932 - RNA, 22 nt, Human
gauagcacagacccugcccugu

SEQ ID NO: 2740933 - RNA, 18 nt, Human
gauacaggaaaagcugcu

SEQ ID NO: 2740934 - RNA, 12 nt, Human
gauaaguucaua

SEQ ID NO: 2740935 - RNA, 14 nt, Human
gauaaguucauaca

SEQ ID NO: 2740936 - RNA, 16 nt, Human
gauaaguucauacauu

SEQ ID NO: 2740937 - RNA, 13 nt, Human
gaggaaggaaacc

SEQ ID NO: 2740938 - RNA, 19 nt, Human
gaggaaggaaacccagcuc

SEQ ID NO: 2740939 - RNA, 20 nt, Human
gaggaaggaaacccagcucu

SEQ ID NO: 2740940 - RNA, 21 nt, Human
gaggaaggaaacccagcucug

SEQ ID NO: 2740941 - RNA, 17 nt, Human
gaucauccacugugcca

SEQ ID NO: 2740942 - RNA, 19 nt, Human
gaucauccacugugccaug

SEQ ID NO: 2740943 - RNA, 16 nt, Human
gaucauccacugugcc

SEQ ID NO: 2740944 - RNA, 21 nt, Human
gaucauccacugugccaugug

SEQ ID NO: 2740945 - RNA, 12 nt, Human
gaucagccuggg

SEQ ID NO: 2740946 - RNA, 15 nt, Human
gaucagccugggcaa

SEQ ID NO: 2740947 - RNA, 22 nt, Human
gaucagucugauucccaagcuc

SEQ ID NO: 2740948 - RNA, 12 nt, Human
gaucacggcuca

SEQ ID NO: 2740949 - RNA, 21 nt, Human
gaucaaguuauuuuuaauuug

SEQ ID NO: 2740950 - RNA, 16 nt, Human
gaucacgccacugcac

SEQ ID NO: 2740951 - RNA, 18 nt, Human
gaucacgccacugcacua

SEQ ID NO: 2740952 - RNA, 22 nt, Human
gauagucuuucaguuaaggaga

SEQ ID NO: 2740953 - RNA, 15 nt, Human
gauaguaacaaugaa

SEQ ID NO: 2740954 - RNA, 14 nt, Human
gauagucuuucagu

SEQ ID NO: 2740955 - RNA, 14 nt, Human
gcaagggugauggg

SEQ ID NO: 2740956 - RNA, 11 nt, Human
gcaaggcuguc

SEQ ID NO: 2740957 - RNA, 10 nt, Human
gcaagccaga

SEQ ID NO: 2740958 - RNA, 18 nt, Human
gcaaggagauuuacaacu

SEQ ID NO: 2740959 - RNA, 17 nt, Human
gcaaucaaaucugcuuu

SEQ ID NO: 2740960 - RNA, 15 nt, Human
gcaaucaaaucugcu

SEQ ID NO: 2740961 - RNA, 15 nt, Human
gcaaugaccuuucaa

SEQ ID NO: 2740962 - RNA, 17 nt, Human
gcaaugaccuuucaaua

SEQ ID NO: 2740963 - RNA, 20 nt, Human
gcaaugaccuuucaauagga

SEQ ID NO: 2740964 - RNA, 22 nt, Human
gcaaugaccuuucaauaggaaa

SEQ ID NO: 2740965 - RNA, 23 nt, Human
gcaaugaccuuucaauaggaaaa

SEQ ID NO: 2740966 - RNA, 13 nt, Human
gcaaugcuggcug

SEQ ID NO: 2740967 - RNA, 14 nt, Human
gcaaugcuggcugu

SEQ ID NO: 2740968 - RNA, 22 nt, Human
gcaaugcuggcuguuggcuggg

SEQ ID NO: 2740969 - RNA, 23 nt, Human
gcaaugcuggcuguuggcugggg

SEQ ID NO: 2740970 - RNA, 23 nt, Human
gcaaagcacugacuucuaaguaa

SEQ ID NO: 2740971 - RNA, 17 nt, Human
gcaaaauugauguguuu

SEQ ID NO: 2740972 - RNA, 16 nt, Human
gcaaaguaucccuacu

SEQ ID NO: 2740973 - RNA, 23 nt, Human
gcaagacgcugugcugcccugcc

SEQ ID NO: 2740974 - RNA, 14 nt, Human
gcaagacgcugugc

SEQ ID NO: 2740975 - RNA, 20 nt, Human
gcaagacgcugugcugcccu

SEQ ID NO: 2740976 - RNA, 21 nt, Human
gcaagacgcugugcugcccug

SEQ ID NO: 2740977 - RNA, 22 nt, Human
gcaagacgcugugcugcccugc

SEQ ID NO: 2740978 - RNA, 17 nt, Human
gcaagaauugaagcagg

SEQ ID NO: 2740979 - RNA, 15 nt, Human
gauuuuccugaaaac

SEQ ID NO: 2740980 - RNA, 23 nt, Human
gauuuuauuauguaaaucccauu

SEQ ID NO: 2740981 - RNA, 20 nt, Human
gauuuuauuauguaaauccc

SEQ ID NO: 2740982 - RNA, 19 nt, Human
gauuuuauuauguaaaucc

SEQ ID NO: 2740983 - RNA, 18 nt, Human
gauuuuauuauguaaauc

SEQ ID NO: 2740984 - RNA, 15 nt, Human
gauuuuauuauguaa

SEQ ID NO: 2740985 - RNA, 13 nt, Human
gauuuuauuaugu

SEQ ID NO: 2740986 - RNA, 19 nt, Human
gauuucuguuuagauaaua

SEQ ID NO: 2740987 - RNA, 11 nt, Human
gauuucuguuu

SEQ ID NO: 2740988 - RNA, 18 nt, Human
gauuuccguuaaaauacc

SEQ ID NO: 2740989 - RNA, 15 nt, Human
gauuuccguuaaaau

SEQ ID NO: 2740990 - RNA, 16 nt, Human
gauugcaccacugcac

SEQ ID NO: 2740991 - RNA, 23 nt, Human
gauugcaccacugcacuccagcc

SEQ ID NO: 2740992 - RNA, 21 nt, Human
gauugcaacaggcugggcuuc

SEQ ID NO: 2740993 - RNA, 20 nt, Human
gauugcaacaggcugggcuu

SEQ ID NO: 2740994 - RNA, 18 nt, Human
gauucuuuccugaggcug

SEQ ID NO: 2740995 - RNA, 16 nt, Human
gauucuuuccugaggc

SEQ ID NO: 2740996 - RNA, 17 nt, Human
gauucuuuccugaggcu

SEQ ID NO: 2740997 - RNA, 12 nt, Human
gauucuuuccug

SEQ ID NO: 2740998 - RNA, 21 nt, Human
gauucccaagcucugcuccuc

SEQ ID NO: 2740999 - RNA, 19 nt, Human
gauucccaagcucugcucc

SEQ ID NO: 2741000 - RNA, 20 nt, Human
gauucccaagcucugcuccu

SEQ ID NO: 2741001 - RNA, 19 nt, Human
gauucagacagcugccugg

SEQ ID NO: 2741002 - RNA, 13 nt, Human
gauucagcucugc

SEQ ID NO: 2741003 - RNA, 15 nt, Human
gauucagcucugcaa

SEQ ID NO: 2741004 - RNA, 23 nt, Human
gauggggcugcaccggcuggccu

SEQ ID NO: 2741005 - RNA, 18 nt, Human
gauucccaagcucugcuc

SEQ ID NO: 2741006 - RNA, 19 nt, Human
gauucauauuuacuucuua

SEQ ID NO: 2741007 - RNA, 18 nt, Human
gauucauauuuacuucuu

SEQ ID NO: 2741008 - RNA, 17 nt, Human
gauucauauuuacuucu

SEQ ID NO: 2741009 - RNA, 16 nt, Human
gcaguucagagcugcc

SEQ ID NO: 2741010 - RNA, 17 nt, Human
gcaguuauuaacacuaa

SEQ ID NO: 2741011 - RNA, 15 nt, Human
gcaguucugaagaag

SEQ ID NO: 2741012 - RNA, 17 nt, Human
gcaguucagagcugccc

SEQ ID NO: 2741013 - RNA, 18 nt, Human
gcaguucagagcugcccu

SEQ ID NO: 2741014 - RNA, 14 nt, Human
gcaguucugaagaa

SEQ ID NO: 2741015 - RNA, 17 nt, Human
gcaguucugaagaagau

SEQ ID NO: 2741016 - RNA, 13 nt, Human
gcauagaaguaaa

SEQ ID NO: 2741017 - RNA, 23 nt, Human
gcaguggugguuuucuguucuuu

SEQ ID NO: 2741018 - RNA, 22 nt, Human
gcaguggugguuuucuguucuu

SEQ ID NO: 2741019 - RNA, 13 nt, Human
gcagugggagcug

SEQ ID NO: 2741020 - RNA, 12 nt, Human
gcagugggagcu

SEQ ID NO: 2741021 - RNA, 14 nt, Human
gcagugggagcugc

SEQ ID NO: 2741022 - RNA, 15 nt, Human
gcagugggagcugcc

SEQ ID NO: 2741023 - RNA, 17 nt, Human
gcauagguuuaauaauu

SEQ ID NO: 2741024 - RNA, 20 nt, Human
gcauauauuuuuauauuuac

SEQ ID NO: 2741025 - RNA, 20 nt, Human
gcauauuuuucacauaucua

SEQ ID NO: 2741026 - RNA, 14 nt, Human
gcauauuuuucaca

SEQ ID NO: 2741027 - RNA, 15 nt, Human
gcauauuuuucacau

SEQ ID NO: 2741028 - RNA, 16 nt, Human
gcauauuuuucacaua

SEQ ID NO: 2741029 - RNA, 19 nt, Human
gcauauuuuucacauaucu

SEQ ID NO: 2741030 - RNA, 17 nt, Human
gcagggucucacucugu

SEQ ID NO: 2741031 - RNA, 18 nt, Human
gcagggucucacucuguc

SEQ ID NO: 2741032 - RNA, 14 nt, Human
gcagggcucagcgg

SEQ ID NO: 2741033 - RNA, 22 nt, Human
gcagggcucagcggggacagcu

SEQ ID NO: 2741034 - RNA, 15 nt, Human
gcaggcagccaggcc

SEQ ID NO: 2741035 - RNA, 16 nt, Human
gcaggcagccaggcca

SEQ ID NO: 2741036 - RNA, 19 nt, Human
gcagggcucagcggggaca

SEQ ID NO: 2741037 - RNA, 21 nt, Human
gcagggcucagcggggacagc

SEQ ID NO: 2741038 - RNA, 15 nt, Human
gcagugcaugcuguc

SEQ ID NO: 2741039 - RNA, 16 nt, Human
gcagugcaugcugucc

SEQ ID NO: 2741040 - RNA, 19 nt, Human
gcaggucuugaacuccugg

SEQ ID NO: 2741041 - RNA, 20 nt, Human
gcaggucuugaacuccuggc

SEQ ID NO: 2741042 - RNA, 22 nt, Human
gcagguccaggguuugaguuca

SEQ ID NO: 2741043 - RNA, 13 nt, Human
gcauuauauuuau

SEQ ID NO: 2741044 - RNA, 22 nt, Human
gcauguucucugaggacacuaa

SEQ ID NO: 2741045 - RNA, 15 nt, Human
gcauguucucugagg

SEQ ID NO: 2741046 - RNA, 21 nt, Human
gcauguucucugaggacacua

SEQ ID NO: 2741047 - RNA, 14 nt, Human
gcauguucucugag

SEQ ID NO: 2741048 - RNA, 18 nt, Human
gcaugcgggcuuccuccu

SEQ ID NO: 2741049 - RNA, 12 nt, Human
gcaucagcugcu

SEQ ID NO: 2741050 - RNA, 18 nt, Human
gcaugaaguaauaugcac

SEQ ID NO: 2741051 - RNA, 13 nt, Human
gcauuugcugaau

SEQ ID NO: 2741052 - RNA, 21 nt, Human
gcauuugaggucuguucuuuc

SEQ ID NO: 2741053 - RNA, 14 nt, Human
gcauuugcugaaua

SEQ ID NO: 2741054 - RNA, 16 nt, Human
gcauuuguuugaacug

SEQ ID NO: 2741055 - RNA, 16 nt, Human
gcauuuguguugaaga

SEQ ID NO: 2741056 - RNA, 19 nt, Human
gcauucaaauguauuacag

SEQ ID NO: 2741057 - RNA, 17 nt, Human
gcauuaucuagauacug

SEQ ID NO: 2741058 - RNA, 16 nt, Human
gccaaagccuccucca

SEQ ID NO: 2741059 - RNA, 19 nt, Human
gccaaagccuccuccagcc

SEQ ID NO: 2741060 - RNA, 13 nt, Human
gccaaagccaaag

SEQ ID NO: 2741061 - RNA, 20 nt, Human
gccaaagccaaagcuaggcc

SEQ ID NO: 2741062 - RNA, 16 nt, Human
gccaaagcuaggccug

SEQ ID NO: 2741063 - RNA, 22 nt, Human
gccaaagcuaggccuggccaga

SEQ ID NO: 2741064 - RNA, 12 nt, Human
gccaaaggaagc

SEQ ID NO: 2741065 - RNA, 18 nt, Human
gcauuuguuugaacugau

SEQ ID NO: 2741066 - RNA, 14 nt, Human
gccaaacucaccug

SEQ ID NO: 2741067 - RNA, 16 nt, Human
gccaaacucaccugcc

SEQ ID NO: 2741068 - RNA, 20 nt, Human
gcagccccuguucuggcaga

SEQ ID NO: 2741069 - RNA, 21 nt, Human
gcagccccuguucuggcagag

SEQ ID NO: 2741070 - RNA, 13 nt, Human
gcagcccugcaga

SEQ ID NO: 2741071 - RNA, 17 nt, Human
gcagccccauucugccu

SEQ ID NO: 2741072 - RNA, 23 nt, Human
gcagcaauaaagcagcguuucua

SEQ ID NO: 2741073 - RNA, 16 nt, Human
gcagcaauaaagcagc

SEQ ID NO: 2741074 - RNA, 18 nt, Human
gcagccccauucugccug

SEQ ID NO: 2741075 - RNA, 19 nt, Human
gcagccccauucugccugc

SEQ ID NO: 2741076 - RNA, 21 nt, Human
gcagccccauucugccugccc

SEQ ID NO: 2741077 - RNA, 24 nt, Human
gcagccccauucugccugcccagg

SEQ ID NO: 2741078 - RNA, 20 nt, Human
gcagaguugaagacagagcu

SEQ ID NO: 2741079 - RNA, 21 nt, Human
gcagaguugaagacagagcua

SEQ ID NO: 2741080 - RNA, 17 nt, Human
gcagacaguuaagagaa

SEQ ID NO: 2741081 - RNA, 18 nt, Human
gcagauuauucacugauu

SEQ ID NO: 2741082 - RNA, 22 nt, Human
gcagauacaggaaaagcugcug

SEQ ID NO: 2741083 - RNA, 12 nt, Human
gcaggcagccag

SEQ ID NO: 2741084 - RNA, 13 nt, Human
gcaggcagccagg

SEQ ID NO: 2741085 - RNA, 14 nt, Human
gcaggcagccaggc

SEQ ID NO: 2741086 - RNA, 20 nt, Human
gcaggaggaucacuugaguc

SEQ ID NO: 2741087 - RNA, 23 nt, Human
gcaggaggaucacuugaguccag

SEQ ID NO: 2741088 - RNA, 14 nt, Human
gcagcucaccucuc

SEQ ID NO: 2741089 - RNA, 15 nt, Human
gcagccuuggcaaac

SEQ ID NO: 2741090 - RNA, 15 nt, Human
gcagcucaccucucc

SEQ ID NO: 2741091 - RNA, 14 nt, Human
gcagcccugcagag

SEQ ID NO: 2741092 - RNA, 15 nt, Human
gcagcccugcagagg

SEQ ID NO: 2741093 - RNA, 16 nt, Human
gcagcccugcagaggg

SEQ ID NO: 2741094 - RNA, 17 nt, Human
gcagcccugcagagggc

SEQ ID NO: 2741095 - RNA, 12 nt, Human
gcagacaggacc

SEQ ID NO: 2741096 - RNA, 13 nt, Human
gcagacaggacca

SEQ ID NO: 2741097 - RNA, 15 nt, Human
gcagacaggaccagg

SEQ ID NO: 2741098 - RNA, 23 nt, Human
gcagacaggcaagcaccuccugc

SEQ ID NO: 2741099 - RNA, 19 nt, Human
gcagacaggcaagcaccuc

SEQ ID NO: 2741100 - RNA, 16 nt, Human
gcacugcuuccaguga

SEQ ID NO: 2741101 - RNA, 18 nt, Human
gcacugcuuccagugagg

SEQ ID NO: 2741102 - RNA, 22 nt, Human
gcacugcuuccagugaggcucu

SEQ ID NO: 2741103 - RNA, 20 nt, Human
gcacugcuuccagugaggcu

SEQ ID NO: 2741104 - RNA, 22 nt, Human
gcaccuggaauauauaaccagu

SEQ ID NO: 2741105 - RNA, 14 nt, Human
gcaccuuagacagu

SEQ ID NO: 2741106 - RNA, 17 nt, Human
gcaccuuagacaguccc

SEQ ID NO: 2741107 - RNA, 15 nt, Human
gcacccucaggcagg

SEQ ID NO: 2741108 - RNA, 21 nt, Human
gcaccuggaauauauaaccag

SEQ ID NO: 2741109 - RNA, 18 nt, Human
gcaccuggaauauauaac

SEQ ID NO: 2741110 - RNA, 18 nt, Human
gcaccuuagacagucccu

SEQ ID NO: 2741111 - RNA, 18 nt, Human
gcacggugaauggcuuug

SEQ ID NO: 2741112 - RNA, 12 nt, Human
gcacgauuucug

SEQ ID NO: 2741113 - RNA, 20 nt, Human
gcaccacugcacuccagccu

SEQ ID NO: 2741114 - RNA, 14 nt, Human
gcaauggcagccuu

SEQ ID NO: 2741115 - RNA, 12 nt, Human
gcaauggcagcc

SEQ ID NO: 2741116 - RNA, 13 nt, Human
gcaauggcagccu

SEQ ID NO: 2741117 - RNA, 15 nt, Human
gcaccagcagccugg

SEQ ID NO: 2741118 - RNA, 14 nt, Human
gcaccagcagccug

SEQ ID NO: 2741119 - RNA, 21 nt, Human
gcaccacugcacuccagccug

SEQ ID NO: 2741120 - RNA, 22 nt, Human
gcaccacugcacuccagccugg

SEQ ID NO: 2741121 - RNA, 16 nt, Human
gcaccagcagccugga

SEQ ID NO: 2741122 - RNA, 22 nt, Human
gcacccaccaucaugucuggcu

SEQ ID NO: 2741123 - RNA, 18 nt, Human
gcacccggccccugcugg

SEQ ID NO: 2741124 - RNA, 19 nt, Human
gcacccggccccugcuggu

SEQ ID NO: 2741125 - RNA, 15 nt, Human
gcgccuacaggagug

SEQ ID NO: 2741126 - RNA, 11 nt, Human
gcggacagcca

SEQ ID NO: 2741127 - RNA, 13 nt, Human
gcggacagccacg

SEQ ID NO: 2741128 - RNA, 15 nt, Human
gcggacagccacggc

SEQ ID NO: 2741129 - RNA, 19 nt, Human
gcgucucauacucaccuca

SEQ ID NO: 2741130 - RNA, 20 nt, Human
gcuaccuuuguauucucucc

SEQ ID NO: 2741131 - RNA, 16 nt, Human
gcuaccuuuguauucu

SEQ ID NO: 2741132 - RNA, 13 nt, Human
gcuauaggugcua

SEQ ID NO: 2741133 - RNA, 15 nt, Human
gcuaggaacacuccu

SEQ ID NO: 2741134 - RNA, 13 nt, Human
gcuaaacuuuucu

SEQ ID NO: 2741135 - RNA, 17 nt, Human
gcuaaacuuuucugaua

SEQ ID NO: 2741136 - RNA, 15 nt, Human
gcuaaacuuuucuga

SEQ ID NO: 2741137 - RNA, 13 nt, Human
gcuaagagggagg

SEQ ID NO: 2741138 - RNA, 14 nt, Human
gcuacacaggggaa

SEQ ID NO: 2741139 - RNA, 20 nt, Human
gcuaagagggagggagggcu

SEQ ID NO: 2741140 - RNA, 20 nt, Human
gcuacacacugcauguuugu

SEQ ID NO: 2741141 - RNA, 13 nt, Human
gcuacacacugca

SEQ ID NO: 2741142 - RNA, 21 nt, Human
gccuuccaggggugggacacc

SEQ ID NO: 2741143 - RNA, 15 nt, Human
gccuuccaggggugg

SEQ ID NO: 2741144 - RNA, 16 nt, Human
gccuuccagggguggg

SEQ ID NO: 2741145 - RNA, 12 nt, Human
gccuuccagggg

SEQ ID NO: 2741146 - RNA, 16 nt, Human
gccuuauggaacacuc

SEQ ID NO: 2741147 - RNA, 18 nt, Human
gccuuauggaacacucug

SEQ ID NO: 2741148 - RNA, 19 nt, Human
gccuuauggaacacucuga

SEQ ID NO: 2741149 - RNA, 20 nt, Human
gccuuauggaacacucugag

SEQ ID NO: 2741150 - RNA, 13 nt, Human
gccuuuggcuuca

SEQ ID NO: 2741151 - RNA, 23 nt, Human
gccuuuuucauuauuuuauuaug

SEQ ID NO: 2741152 - RNA, 23 nt, Human
gcgacaaugcaaaccaucauuga

SEQ ID NO: 2741153 - RNA, 14 nt, Human
gccugguggcagcu

SEQ ID NO: 2741154 - RNA, 18 nt, Human
gccugguggcagcugcgg

SEQ ID NO: 2741155 - RNA, 19 nt, Human
gccugguggcagcugcggu

SEQ ID NO: 2741156 - RNA, 21 nt, Human
gccugguggcagcugcggucc

SEQ ID NO: 2741157 - RNA, 13 nt, Human
gccugguggcagc

SEQ ID NO: 2741158 - RNA, 15 nt, Human
gccugcaauuucaua

SEQ ID NO: 2741159 - RNA, 22 nt, Human
gccugggggcugggcagaggaa

SEQ ID NO: 2741160 - RNA, 10 nt, Human
gccuuaugga

SEQ ID NO: 2741161 - RNA, 14 nt, Human
gccuuauggaacac

SEQ ID NO: 2741162 - RNA, 19 nt, Human
gccuuagaagucacacagu

SEQ ID NO: 2741163 - RNA, 17 nt, Human
gccuuagaagucacaca

SEQ ID NO: 2741164 - RNA, 18 nt, Human
gccuuagaagucacacag

SEQ ID NO: 2741165 - RNA, 20 nt, Human
gccuuacacaaugguuuucu

SEQ ID NO: 2741166 - RNA, 18 nt, Human
gccuuacccucauguucu

SEQ ID NO: 2741167 - RNA, 21 nt, Human
gccuuacacaaugguuuucuu

SEQ ID NO: 2741168 - RNA, 21 nt, Human
gccuguugggccaggagccuc

SEQ ID NO: 2741169 - RNA, 20 nt, Human
gccguguaaccauggaccca

SEQ ID NO: 2741170 - RNA, 15 nt, Human
gccgucuaccugagg

SEQ ID NO: 2741171 - RNA, 16 nt, Human
gccgucuaccugaggg

SEQ ID NO: 2741172 - RNA, 17 nt, Human
gccgucuaccugagggg

SEQ ID NO: 2741173 - RNA, 21 nt, Human
gccuaaauccauuuggaaauc

SEQ ID NO: 2741174 - RNA, 19 nt, Human
gccuaaauccauuuggaaa

SEQ ID NO: 2741175 - RNA, 13 nt, Human
gccuaaauccauu

SEQ ID NO: 2741176 - RNA, 12 nt, Human
gccuaaauccau

SEQ ID NO: 2741177 - RNA, 23 nt, Human
gccuaaauccauuuggaaaucuu

SEQ ID NO: 2741178 - RNA, 22 nt, Human
gccuaaauccauuuggaaaucu

SEQ ID NO: 2741179 - RNA, 17 nt, Human
gccucaaccuccugggc

SEQ ID NO: 2741180 - RNA, 13 nt, Human
gccucacaguccu

SEQ ID NO: 2741181 - RNA, 17 nt, Human
gccucacaguccuuacc

SEQ ID NO: 2741182 - RNA, 18 nt, Human
gccucaaccuccugggcu

SEQ ID NO: 2741183 - RNA, 19 nt, Human
gccucaaccuccugggcua

SEQ ID NO: 2741184 - RNA, 21 nt, Human
gccgggcgcgguggcucacgc

SEQ ID NO: 2741185 - RNA, 11 nt, Human
gccgcagcccu

SEQ ID NO: 2741186 - RNA, 12 nt, Human
gccgcagcccug

SEQ ID NO: 2741187 - RNA, 22 nt, Human
gccgagaucacgccacugcacu

SEQ ID NO: 2741188 - RNA, 20 nt, Human
gccgagaucacgccacugca

SEQ ID NO: 2741189 - RNA, 21 nt, Human
gccgagaucacgccacugcac

SEQ ID NO: 2741190 - RNA, 16 nt, Human
gcccugcuuucagaua

SEQ ID NO: 2741191 - RNA, 14 nt, Human
gcccugcuuucaga

SEQ ID NO: 2741192 - RNA, 14 nt, Human
gcccuucucuccag

SEQ ID NO: 2741193 - RNA, 16 nt, Human
gcccuucucuccagcc

SEQ ID NO: 2741194 - RNA, 17 nt, Human
gcccuucucuccagccc

SEQ ID NO: 2741195 - RNA, 18 nt, Human
gcccuucucuccagcccc

SEQ ID NO: 2741196 - RNA, 17 nt, Human
gccuccccuccucugcu

SEQ ID NO: 2741197 - RNA, 19 nt, Human
gccuccccuccucugcuug

SEQ ID NO: 2741198 - RNA, 17 nt, Human
gccucccaucacccgcu

SEQ ID NO: 2741199 - RNA, 16 nt, Human
gccuccccuccucugc

SEQ ID NO: 2741200 - RNA, 23 nt, Human
gccuccccuccucugcuugccau

SEQ ID NO: 2741201 - RNA, 17 nt, Human
gccucccgaguagcugg

SEQ ID NO: 2741202 - RNA, 20 nt, Human
gccuccccuccucugcuugc

SEQ ID NO: 2741203 - RNA, 22 nt, Human
gccuccccuccucugcuugcca

SEQ ID NO: 2741204 - RNA, 20 nt, Human
gccucccgaguagcugggac

SEQ ID NO: 2741205 - RNA, 18 nt, Human
gccucccgaguagcuggg

SEQ ID NO: 2741206 - RNA, 19 nt, Human
gccucccgaguagcuggga

SEQ ID NO: 2741207 - RNA, 18 nt, Human
gccucacaguccuuacca

SEQ ID NO: 2741208 - RNA, 15 nt, Human
gccucagcauccugg

SEQ ID NO: 2741209 - RNA, 16 nt, Human
gccucagcauccuggc

SEQ ID NO: 2741210 - RNA, 18 nt, Human
gccucccaaagugcuggg

SEQ ID NO: 2741211 - RNA, 19 nt, Human
gccucccaaagugcuggga

SEQ ID NO: 2741212 - RNA, 13 nt, Human
gccucccaacuca

SEQ ID NO: 2741213 - RNA, 14 nt, Human
gccucccaucaccc

SEQ ID NO: 2741214 - RNA, 16 nt, Human
gccucccaucacccgc

SEQ ID NO: 2741215 - RNA, 16 nt, Human
gccucccaacucaccc

SEQ ID NO: 2741216 - RNA, 17 nt, Human
gccucccaacucacccc

SEQ ID NO: 2741217 - RNA, 18 nt, Human
gccucccaacucacccca

SEQ ID NO: 2741218 - RNA, 19 nt, Human
gccucccaacucaccccag

SEQ ID NO: 2741219 - RNA, 12 nt, Human
gccucugccucu

SEQ ID NO: 2741220 - RNA, 13 nt, Human
gccucugccucug

SEQ ID NO: 2741221 - RNA, 13 nt, Human
gccugcaagggag

SEQ ID NO: 2741222 - RNA, 15 nt, Human
gccugcaagggagug

SEQ ID NO: 2741223 - RNA, 13 nt, Human
gccucucucaggc

SEQ ID NO: 2741224 - RNA, 14 nt, Human
gccucucucaggcc

SEQ ID NO: 2741225 - RNA, 17 nt, Human
gccucugacacacagcu

SEQ ID NO: 2741226 - RNA, 18 nt, Human
gccucugacacacagcuc

SEQ ID NO: 2741227 - RNA, 16 nt, Human
gccucucucaggccaa

SEQ ID NO: 2741228 - RNA, 19 nt, Human
gccucugacacacagcucu

SEQ ID NO: 2741229 - RNA, 20 nt, Human
gccucugacacacagcucug

SEQ ID NO: 2741230 - RNA, 21 nt, Human
gccucugacacacagcucugu

SEQ ID NO: 2741231 - RNA, 14 nt, Human
gccucugcacuccc

SEQ ID NO: 2741232 - RNA, 19 nt, Human
gccaugggcacugugggua

SEQ ID NO: 2741233 - RNA, 24 nt, Human
gccaugcuccuggcccacugcauc

SEQ ID NO: 2741234 - RNA, 15 nt, Human
gccaugggccuccug

SEQ ID NO: 2741235 - RNA, 16 nt, Human
gccaugggccuccugu

SEQ ID NO: 2741236 - RNA, 14 nt, Human
gcccacuucugcca

SEQ ID NO: 2741237 - RNA, 13 nt, Human
gcccaccuuggcu

SEQ ID NO: 2741238 - RNA, 15 nt, Human
gcccaccuuggcuca

SEQ ID NO: 2741239 - RNA, 16 nt, Human
gcccaccuuggcucaa

SEQ ID NO: 2741240 - RNA, 17 nt, Human
gcccaccuuggcucaag

SEQ ID NO: 2741241 - RNA, 15 nt, Human
gcccaccuggccucu

SEQ ID NO: 2741242 - RNA, 16 nt, Human
gcccaccuggccucug

SEQ ID NO: 2741243 - RNA, 17 nt, Human
gcccaccuggccucugc

SEQ ID NO: 2741244 - RNA, 20 nt, Human
gcccaccuggccucugcacu

SEQ ID NO: 2741245 - RNA, 21 nt, Human
gcccaccuggccucugcacuc

SEQ ID NO: 2741246 - RNA, 24 nt, Human
gcccaccuggccucugcacucccc

SEQ ID NO: 2741247 - RNA, 18 nt, Human
gccaucccucccuccacc

SEQ ID NO: 2741248 - RNA, 23 nt, Human
gccaucccucccuccaccucccu

SEQ ID NO: 2741249 - RNA, 20 nt, Human
gccaugaggaacaaggcaag

SEQ ID NO: 2741250 - RNA, 14 nt, Human
gccaugcuccuggc

SEQ ID NO: 2741251 - RNA, 21 nt, Human
gccagucaccccggccaccug

SEQ ID NO: 2741252 - RNA, 13 nt, Human
gccaggcuggucu

SEQ ID NO: 2741253 - RNA, 15 nt, Human
gccaggcuggucuca

SEQ ID NO: 2741254 - RNA, 12 nt, Human
gccaguaaaugg

SEQ ID NO: 2741255 - RNA, 23 nt, Human
gccaguaaaugggggugcauuug

SEQ ID NO: 2741256 - RNA, 15 nt, Human
gccaggaagccagca

SEQ ID NO: 2741257 - RNA, 20 nt, Human
gccaggaagccagcaggcuc

SEQ ID NO: 2741258 - RNA, 14 nt, Human
gccaggagccuccu

SEQ ID NO: 2741259 - RNA, 16 nt, Human
gccaggagccuccugc

SEQ ID NO: 2741260 - RNA, 19 nt, Human
gccaggagccuccugcccu

SEQ ID NO: 2741261 - RNA, 20 nt, Human
gccaggagccuccugcccuu

SEQ ID NO: 2741262 - RNA, 16 nt, Human
gccagcugcuugggcu

SEQ ID NO: 2741263 - RNA, 17 nt, Human
gccagcugcuugggcuu

SEQ ID NO: 2741264 - RNA, 18 nt, Human
gccagcugcuugggcuuc

SEQ ID NO: 2741265 - RNA, 20 nt, Human
gccagcugcuugggcuucau

SEQ ID NO: 2741266 - RNA, 12 nt, Human
gccaggaagcca

SEQ ID NO: 2741267 - RNA, 13 nt, Human
gccaggaagccag

SEQ ID NO: 2741268 - RNA, 14 nt, Human
gccaggaagccagc

SEQ ID NO: 2741269 - RNA, 22 nt, Human
gccagccgagauagccaaggcc

SEQ ID NO: 2741270 - RNA, 19 nt, Human
gccagauucuuuccugagg

SEQ ID NO: 2741271 - RNA, 15 nt, Human
gccagaugcaccagc

SEQ ID NO: 2741272 - RNA, 20 nt, Human
gccagauucuuuccugaggc

SEQ ID NO: 2741273 - RNA, 24 nt, Human
gccagauucuuuccugaggcuggg

SEQ ID NO: 2741274 - RNA, 13 nt, Human
gccagauuucacu

SEQ ID NO: 2741275 - RNA, 17 nt, Human
gccagagggagugacag

SEQ ID NO: 2741276 - RNA, 14 nt, Human
gccagaugcaccag

SEQ ID NO: 2741277 - RNA, 20 nt, Human
gccacugcaccgggccacag

SEQ ID NO: 2741278 - RNA, 21 nt, Human
gccacugcaccgggccacaga

SEQ ID NO: 2741279 - RNA, 19 nt, Human
gccacugcaccgggccaca

SEQ ID NO: 2741280 - RNA, 22 nt, Human
gccagagacacaagccuucggc

SEQ ID NO: 2741281 - RNA, 22 nt, Human
gccacugcaccgggccacagag

SEQ ID NO: 2741282 - RNA, 21 nt, Human
gccagagacacaagccuucgg

SEQ ID NO: 2741283 - RNA, 20 nt, Human
gccaaggccaaaggaagcac

SEQ ID NO: 2741284 - RNA, 19 nt, Human
gccaaggccaaaggaagca

SEQ ID NO: 2741285 - RNA, 24 nt, Human
gccaaggccaaaggaagcacaugc

SEQ ID NO: 2741286 - RNA, 15 nt, Human
gcccugcagagggca

SEQ ID NO: 2741287 - RNA, 13 nt, Human
gcccugcagaggg

SEQ ID NO: 2741288 - RNA, 14 nt, Human
gcccugcagagggc

SEQ ID NO: 2741289 - RNA, 14 nt, Human
gcccugagcuuucu

SEQ ID NO: 2741290 - RNA, 13 nt, Human
gcccucugcccac

SEQ ID NO: 2741291 - RNA, 16 nt, Human
gcccucugcccacucc

SEQ ID NO: 2741292 - RNA, 18 nt, Human
gcccucugcccacucccu

SEQ ID NO: 2741293 - RNA, 19 nt, Human
gcccucugcccacucccug

SEQ ID NO: 2741294 - RNA, 19 nt, Human
gcccuccaagaccuucucc

SEQ ID NO: 2741295 - RNA, 21 nt, Human
gcccuccaagaccuucuccuu

SEQ ID NO: 2741296 - RNA, 22 nt, Human
gcccuccaagaccuucuccuuc

SEQ ID NO: 2741297 - RNA, 23 nt, Human
gcccuccaagaccuucuccuuca

SEQ ID NO: 2741298 - RNA, 15 nt, Human
gccccgaggccuucu

SEQ ID NO: 2741299 - RNA, 18 nt, Human
gccccgaggccuucucug

SEQ ID NO: 2741300 - RNA, 14 nt, Human
gccccucagggucc

SEQ ID NO: 2741301 - RNA, 16 nt, Human
gccccucagggucccu

SEQ ID NO: 2741302 - RNA, 18 nt, Human
gccccucagggucccugg

SEQ ID NO: 2741303 - RNA, 12 nt, Human
gccccagugccc

SEQ ID NO: 2741304 - RNA, 13 nt, Human
gccccagugccca

SEQ ID NO: 2741305 - RNA, 14 nt, Human
gccccagugcccac

SEQ ID NO: 2741306 - RNA, 18 nt, Human
gccccaucccaaacccuu

SEQ ID NO: 2741307 - RNA, 15 nt, Human
gccccauucugccug

SEQ ID NO: 2741308 - RNA, 14 nt, Human
gccccauucugccu

SEQ ID NO: 2741309 - RNA, 13 nt, Human
gccccauccucug

SEQ ID NO: 2741310 - RNA, 14 nt, Human
gccccauccucugu

SEQ ID NO: 2741311 - RNA, 22 nt, Human
gccccauccucuguacagagcc

SEQ ID NO: 2741312 - RNA, 12 nt, Human
gcccaggcuggc

SEQ ID NO: 2741313 - RNA, 15 nt, Human
gcccagagagggugg

SEQ ID NO: 2741314 - RNA, 21 nt, Human
gcccagagaggguggugaccu

SEQ ID NO: 2741315 - RNA, 23 nt, Human
gcccaggccccugccacccuggg

SEQ ID NO: 2741316 - RNA, 13 nt, Human
gcccaggccuccu

SEQ ID NO: 2741317 - RNA, 22 nt, Human
gcccaguuggguggaugccugg

SEQ ID NO: 2741318 - RNA, 20 nt, Human
uuuuaauaauguuucaaaca

SEQ ID NO: 2741319 - RNA, 12 nt, Human
uuuuaaaugcac

SEQ ID NO: 2741320 - RNA, 11 nt, Human
uuuuaaaugca

SEQ ID NO: 2741321 - RNA, 21 nt, Human
uuuuaaaugcaccuggaauau

SEQ ID NO: 2741322 - RNA, 21 nt, Human
uuuuaaaagaaugauuaugaa

SEQ ID NO: 2741323 - RNA, 15 nt, Human
uuuuaaaagaaugau

SEQ ID NO: 2741324 - RNA, 17 nt, Human
uuuuaaagaaugcucuu

SEQ ID NO: 2741325 - RNA, 21 nt, Human
uuuguucuggcucuuccaggc

SEQ ID NO: 2741326 - RNA, 13 nt, Human
uuuguauaaaaua

SEQ ID NO: 2741327 - RNA, 14 nt, Human
uuuguauaaaauaa

SEQ ID NO: 2741328 - RNA, 16 nt, Human
uuuguauaaaauaauu

SEQ ID NO: 2741329 - RNA, 19 nt, Human
uuugguuuucacauuggaa

SEQ ID NO: 2741330 - RNA, 21 nt, Human
uuuggaauuuugugcccccau

SEQ ID NO: 2741331 - RNA, 16 nt, Human
uuuggauaauaaggaa

SEQ ID NO: 2741332 - RNA, 16 nt, Human
uuugcuuugugauuuu

SEQ ID NO: 2741333 - RNA, 15 nt, Human
uuugcuuugugauuu

SEQ ID NO: 2741334 - RNA, 22 nt, Human
uuuggaauuuuccuccuuucuc

SEQ ID NO: 2741335 - RNA, 14 nt, Human
uuuggaauuuugug

SEQ ID NO: 2741336 - RNA, 13 nt, Human
uuucugagaaaga

SEQ ID NO: 2741337 - RNA, 20 nt, Human
uuucuguucuuucuggcuau

SEQ ID NO: 2741338 - RNA, 19 nt, Human
uuucugaaauuuccuggga

SEQ ID NO: 2741339 - RNA, 21 nt, Human
uuucugaaauuuccugggagc

SEQ ID NO: 2741340 - RNA, 18 nt, Human
uuucucugauacagaaaa

SEQ ID NO: 2741341 - RNA, 17 nt, Human
uuucucugauacagaaa

SEQ ID NO: 2741342 - RNA, 16 nt, Human
uuucucugauacagaa

SEQ ID NO: 2741343 - RNA, 15 nt, Human
uuucucugauacaga

SEQ ID NO: 2741344 - RNA, 23 nt, Human
uuucuacucgaguuacagacaaa

SEQ ID NO: 2741345 - RNA, 18 nt, Human
uuucuaaaggcuaccuuu

SEQ ID NO: 2741346 - RNA, 21 nt, Human
uuucuaaaggcuaccuuugua

SEQ ID NO: 2741347 - RNA, 20 nt, Human
uuucuaaaggcuaccuuugu

SEQ ID NO: 2741348 - RNA, 16 nt, Human
uuuccugaggcugggc

SEQ ID NO: 2741349 - RNA, 17 nt, Human
uuaccacagacauacua

SEQ ID NO: 2741350 - RNA, 14 nt, Human
uuaccacagacaua

SEQ ID NO: 2741351 - RNA, 18 nt, Human
uuugaaucaucaagucuu

SEQ ID NO: 2741352 - RNA, 22 nt, Human
uuugaagaugccgcauuuggau

SEQ ID NO: 2741353 - RNA, 16 nt, Human
uuugaaucucauaauu

SEQ ID NO: 2741354 - RNA, 19 nt, Human
uuugaaucucauaauuuau

SEQ ID NO: 2741355 - RNA, 20 nt, Human
uuugaaucucauaauuuaua

SEQ ID NO: 2741356 - RNA, 21 nt, Human
uuugaaucucauaauuuauac

SEQ ID NO: 2741357 - RNA, 22 nt, Human
uuugaaucucauaauuuauaca

SEQ ID NO: 2741358 - RNA, 19 nt, Human
uuugaacugauaaagauga

SEQ ID NO: 2741359 - RNA, 17 nt, Human
uuugaacugauaaagau

SEQ ID NO: 2741360 - RNA, 14 nt, Human
uuugaacucuucaa

SEQ ID NO: 2741361 - RNA, 15 nt, Human
uuugaacugauaaag

SEQ ID NO: 2741362 - RNA, 17 nt, Human
uuucuuauuucauuucu

SEQ ID NO: 2741363 - RNA, 23 nt, Human
uuucuuagggaaggauacaaaag

SEQ ID NO: 2741364 - RNA, 18 nt, Human
uuucuuagggaaggauac

SEQ ID NO: 2741365 - RNA, 13 nt, Human
uuucuucucccuc

SEQ ID NO: 2741366 - RNA, 12 nt, Human
uuucuucucccu

SEQ ID NO: 2741367 - RNA, 19 nt, Human
uuuuucucuaggaaauauu

SEQ ID NO: 2741368 - RNA, 23 nt, Human
uuuuucucugauacagaaaaguu

SEQ ID NO: 2741369 - RNA, 19 nt, Human
uuuuuccuucagugccuua

SEQ ID NO: 2741370 - RNA, 11 nt, Human
uuuuuccuuca

SEQ ID NO: 2741371 - RNA, 14 nt, Human
uuuuccugaaaacc

SEQ ID NO: 2741372 - RNA, 18 nt, Human
uuuuggucuggagggaag

SEQ ID NO: 2741373 - RNA, 15 nt, Human
uuuuggucuguguga

SEQ ID NO: 2741374 - RNA, 14 nt, Human
uuuuggcugcugaa

SEQ ID NO: 2741375 - RNA, 20 nt, Human
uuuugaaucucauaauuuau

SEQ ID NO: 2741376 - RNA, 20 nt, Human
uuuugacaaggggcaguggu

SEQ ID NO: 2741377 - RNA, 21 nt, Human
uuuuggcauaacauaaaucug

SEQ ID NO: 2741378 - RNA, 11 nt, Human
uuuugacagaa

SEQ ID NO: 2741379 - RNA, 18 nt, Human
uuuuuaaaaaagaaacau

SEQ ID NO: 2741380 - RNA, 16 nt, Human
uuuugucauauaagau

SEQ ID NO: 2741381 - RNA, 19 nt, Human
uuuuguagagccagggucu

SEQ ID NO: 2741382 - RNA, 19 nt, Human
uuuuguagcacugacagau

SEQ ID NO: 2741383 - RNA, 18 nt, Human
uuuuguagcacugacaga

SEQ ID NO: 2741384 - RNA, 22 nt, Human
gucagcuccccucggagaagag

SEQ ID NO: 2741385 - RNA, 21 nt, Human
gucagcuccccucggagaaga

SEQ ID NO: 2741386 - RNA, 23 nt, Human
gucagcuccccucggagaagagc

SEQ ID NO: 2741387 - RNA, 21 nt, Human
gucauucagauaugauucaaa

SEQ ID NO: 2741388 - RNA, 21 nt, Human
gucccaccuuggcugcaggga

SEQ ID NO: 2741389 - RNA, 23 nt, Human
guccacccaggagccccgaggcc

SEQ ID NO: 2741390 - RNA, 12 nt, Human
guccacccagga

SEQ ID NO: 2741391 - RNA, 17 nt, Human
guccccaccgcagacag

SEQ ID NO: 2741392 - RNA, 20 nt, Human
gucccaccuuggcugcaggg

SEQ ID NO: 2741393 - RNA, 23 nt, Human
gucccaccuuggcugcagggagu

SEQ ID NO: 2741394 - RNA, 16 nt, Human
gucccugcacuugcag

SEQ ID NO: 2741395 - RNA, 19 nt, Human
gucccugcacuugcagacu

SEQ ID NO: 2741396 - RNA, 21 nt, Human
gucccugcacuugcagacucu

SEQ ID NO: 2741397 - RNA, 23 nt, Human
gucaauaaaauccauacauuugu

SEQ ID NO: 2741398 - RNA, 22 nt, Human
gucaauaaaauccauacauuug

SEQ ID NO: 2741399 - RNA, 15 nt, Human
gucaagugaaaaagg

SEQ ID NO: 2741400 - RNA, 19 nt, Human
guauuuuguuuuugucuua

SEQ ID NO: 2741401 - RNA, 15 nt, Human
gucaccccggccacc

SEQ ID NO: 2741402 - RNA, 18 nt, Human
guauuuuaaaagaaugau

SEQ ID NO: 2741403 - RNA, 20 nt, Human
guauuuuaaaagaaugauua

SEQ ID NO: 2741404 - RNA, 21 nt, Human
guauuaagcauauauuuuuau

SEQ ID NO: 2741405 - RNA, 18 nt, Human
guauuaagcauauauuuu

SEQ ID NO: 2741406 - RNA, 15 nt, Human
guauuaagcauauau

SEQ ID NO: 2741407 - RNA, 17 nt, Human
guauuaagcauauauuu

SEQ ID NO: 2741408 - RNA, 16 nt, Human
guauuaagcauauauu

SEQ ID NO: 2741409 - RNA, 14 nt, Human
guauuuuacuaaua

SEQ ID NO: 2741410 - RNA, 19 nt, Human
gucagcuccccucggagaa

SEQ ID NO: 2741411 - RNA, 18 nt, Human
gucagaucugccuaagga

SEQ ID NO: 2741412 - RNA, 16 nt, Human
gucagaucugccuaag

SEQ ID NO: 2741413 - RNA, 21 nt, Human
gucagaucugccuaaggacuu

SEQ ID NO: 2741414 - RNA, 20 nt, Human
gucagaucugccuaaggacu

SEQ ID NO: 2741415 - RNA, 19 nt, Human
gucagaucugccuaaggac

SEQ ID NO: 2741416 - RNA, 14 nt, Human
gucagagccugcag

SEQ ID NO: 2741417 - RNA, 15 nt, Human
gucagagccugcagu

SEQ ID NO: 2741418 - RNA, 16 nt, Human
gucagagccugcaguu

SEQ ID NO: 2741419 - RNA, 22 nt, Human
gucaccccggccaccugcggug

SEQ ID NO: 2741420 - RNA, 17 nt, Human
gucaccccggccaccug

SEQ ID NO: 2741421 - RNA, 18 nt, Human
gucaccccggccaccugc

SEQ ID NO: 2741422 - RNA, 17 nt, Human
gucacucuggcagcuca

SEQ ID NO: 2741423 - RNA, 19 nt, Human
gucacucuggcagcucaga

SEQ ID NO: 2741424 - RNA, 12 nt, Human
gucacucuggca

SEQ ID NO: 2741425 - RNA, 13 nt, Human
gucacucuggcag

SEQ ID NO: 2741426 - RNA, 14 nt, Human
gucacucuggcagc

SEQ ID NO: 2741427 - RNA, 16 nt, Human
gucacucuggcagcuc

SEQ ID NO: 2741428 - RNA, 14 nt, Human
guaguguuggagaa

SEQ ID NO: 2741429 - RNA, 15 nt, Human
guaguguuggagaag

SEQ ID NO: 2741430 - RNA, 10 nt, Human
guauaauuaa

SEQ ID NO: 2741431 - RNA, 14 nt, Human
guauaauuaacaug

SEQ ID NO: 2741432 - RNA, 13 nt, Human
guauaauuaacau

SEQ ID NO: 2741433 - RNA, 23 nt, Human
guauaauuaacauguuaaaccau

SEQ ID NO: 2741434 - RNA, 22 nt, Human
guauaauuaacauguuaaacca

SEQ ID NO: 2741435 - RNA, 19 nt, Human
guauaauuaacauguuaaa

SEQ ID NO: 2741436 - RNA, 17 nt, Human
guauaauuaacauguua

SEQ ID NO: 2741437 - RNA, 15 nt, Human
guauaauuaacaugu

SEQ ID NO: 2741438 - RNA, 16 nt, Human
guaggguuauaauaau

SEQ ID NO: 2741439 - RNA, 14 nt, Human
guagucaggugccu

SEQ ID NO: 2741440 - RNA, 18 nt, Human
gcuauaggugcuacaaaa

SEQ ID NO: 2741441 - RNA, 15 nt, Human
guagagugugccuga

SEQ ID NO: 2741442 - RNA, 16 nt, Human
guagcauccuggaaua

SEQ ID NO: 2741443 - RNA, 14 nt, Human
guagcacugacaga

SEQ ID NO: 2741444 - RNA, 15 nt, Human
guagcacugacagau

SEQ ID NO: 2741445 - RNA, 16 nt, Human
guagggcgggaggaug

SEQ ID NO: 2741446 - RNA, 23 nt, Human
guagggcgggaggauguucuggg

SEQ ID NO: 2741447 - RNA, 21 nt, Human
guagggcgggaggauguucug

SEQ ID NO: 2741448 - RNA, 22 nt, Human
guagggcgggaggauguucugg

SEQ ID NO: 2741449 - RNA, 21 nt, Human
guagcauuuguguugaagagg

SEQ ID NO: 2741450 - RNA, 17 nt, Human
guauguuagugcaaauu

SEQ ID NO: 2741451 - RNA, 21 nt, Human
guaugaucacggcucacugca

SEQ ID NO: 2741452 - RNA, 21 nt, Human
guaugugugaagugagugagu

SEQ ID NO: 2741453 - RNA, 20 nt, Human
guaugaucacggcucacugc

SEQ ID NO: 2741454 - RNA, 20 nt, Human
guaugaggcauuuguuugaa

SEQ ID NO: 2741455 - RNA, 17 nt, Human
guaugaggcauuuguuu

SEQ ID NO: 2741456 - RNA, 19 nt, Human
guaucuggugacuuuccuc

SEQ ID NO: 2741457 - RNA, 12 nt, Human
guaucugagcag

SEQ ID NO: 2741458 - RNA, 12 nt, Human
guaucuggugac

SEQ ID NO: 2741459 - RNA, 15 nt, Human
guaugaggcauuugu

SEQ ID NO: 2741460 - RNA, 13 nt, Human
guaugaggcauuu

SEQ ID NO: 2741461 - RNA, 13 nt, Human
guaugaaauuaua

SEQ ID NO: 2741462 - RNA, 23 nt, Human
guaugaaauuauauaaguauucu

SEQ ID NO: 2741463 - RNA, 14 nt, Human
guauagauuagaau

SEQ ID NO: 2741464 - RNA, 19 nt, Human
guauagaaccucuuugucu

SEQ ID NO: 2741465 - RNA, 22 nt, Human
guauaugucaagccauaauugu

SEQ ID NO: 2741466 - RNA, 18 nt, Human
gucugugccauuuuguau

SEQ ID NO: 2741467 - RNA, 17 nt, Human
gucuguucuuuccaaag

SEQ ID NO: 2741468 - RNA, 14 nt, Human
gucuguucuuucca

SEQ ID NO: 2741469 - RNA, 15 nt, Human
gucuugucucagauu

SEQ ID NO: 2741470 - RNA, 16 nt, Human
gucuuuuuucacuaca

SEQ ID NO: 2741471 - RNA, 22 nt, Human
gucuugucucagauuuuauuau

SEQ ID NO: 2741472 - RNA, 20 nt, Human
gucuugucucagauuuuauu

SEQ ID NO: 2741473 - RNA, 20 nt, Human
gucuugccuuuuucauuauu

SEQ ID NO: 2741474 - RNA, 18 nt, Human
gucuugccuuuuucauua

SEQ ID NO: 2741475 - RNA, 17 nt, Human
gucuugccuuuuucauu

SEQ ID NO: 2741476 - RNA, 16 nt, Human
gucuugccuuuuucau

SEQ ID NO: 2741477 - RNA, 15 nt, Human
gucuugccuuuuuca

SEQ ID NO: 2741478 - RNA, 23 nt, Human
gucuugcaauggcagccuuggca

SEQ ID NO: 2741479 - RNA, 20 nt, Human
gucuugcaauggcagccuug

SEQ ID NO: 2741480 - RNA, 21 nt, Human
gucuugcaauggcagccuugg

SEQ ID NO: 2741481 - RNA, 21 nt, Human
gucuuaaaaaguggaaaaaua

SEQ ID NO: 2741482 - RNA, 16 nt, Human
gucuugaacuccuggc

SEQ ID NO: 2741483 - RNA, 17 nt, Human
gucuugaacuccuggcc

SEQ ID NO: 2741484 - RNA, 21 nt, Human
gucuugaacuccuggccucaa

SEQ ID NO: 2741485 - RNA, 18 nt, Human
gucuugaacuccuggccu

SEQ ID NO: 2741486 - RNA, 20 nt, Human
gucuugaacuccuggccuca

SEQ ID NO: 2741487 - RNA, 16 nt, Human
gucuugcaauggcagc

SEQ ID NO: 2741488 - RNA, 17 nt, Human
gucuugcaauggcagcc

SEQ ID NO: 2741489 - RNA, 18 nt, Human
gucuugcaauggcagccu

SEQ ID NO: 2741490 - RNA, 19 nt, Human
gucuugcaauggcagccuu

SEQ ID NO: 2741491 - RNA, 18 nt, Human
gucgucaaagcugaaaug

SEQ ID NO: 2741492 - RNA, 18 nt, Human
gucucacuauguugccca

SEQ ID NO: 2741493 - RNA, 11 nt, Human
gucucacucug

SEQ ID NO: 2741494 - RNA, 19 nt, Human
gucucacuauguugcccag

SEQ ID NO: 2741495 - RNA, 13 nt, Human
gucuaaauuugaa

SEQ ID NO: 2741496 - RNA, 21 nt, Human
gucuaagauaguaacaaugaa

SEQ ID NO: 2741497 - RNA, 21 nt, Human
gucggaaaacaugcuacacac

SEQ ID NO: 2741498 - RNA, 23 nt, Human
gucggguuuuauuguuuaaaauc

SEQ ID NO: 2741499 - RNA, 16 nt, Human
gucgggcaugacacga

SEQ ID NO: 2741500 - RNA, 15 nt, Human
gucccugccaaugga

SEQ ID NO: 2741501 - RNA, 11 nt, Human
gucccugccaa

SEQ ID NO: 2741502 - RNA, 14 nt, Human
gucccugccaaugg

SEQ ID NO: 2741503 - RNA, 21 nt, Human
guccuuaccagcagagcaccu

SEQ ID NO: 2741504 - RNA, 18 nt, Human
guccuuaccagcagagca

SEQ ID NO: 2741505 - RNA, 19 nt, Human
guccuuaccagcagagcac

SEQ ID NO: 2741506 - RNA, 13 nt, Human
gucugacuguuuc

SEQ ID NO: 2741507 - RNA, 21 nt, Human
gucucagauuuuauuauguaa

SEQ ID NO: 2741508 - RNA, 17 nt, Human
gucucagauuuuauuau

SEQ ID NO: 2741509 - RNA, 15 nt, Human
gucucacucugucgc

SEQ ID NO: 2741510 - RNA, 16 nt, Human
gucucacucugucgcc

SEQ ID NO: 2741511 - RNA, 18 nt, Human
gucucacucugucgccca

SEQ ID NO: 2741512 - RNA, 19 nt, Human
gucucacucugucgcccag

SEQ ID NO: 2741513 - RNA, 22 nt, Human
gucucacucugucgcccagucu

SEQ ID NO: 2741514 - RNA, 14 nt, Human
gucucagauuuuau

SEQ ID NO: 2741515 - RNA, 16 nt, Human
gucucagauuuuauua

SEQ ID NO: 2741516 - RNA, 15 nt, Human
gucucagauuuuauu

SEQ ID NO: 2741517 - RNA, 14 nt, Human
gugcggccuuuggc

SEQ ID NO: 2741518 - RNA, 14 nt, Human
gugcgccuacagga

SEQ ID NO: 2741519 - RNA, 21 nt, Human
gugcgcuaaacuuuucugaua

SEQ ID NO: 2741520 - RNA, 17 nt, Human
gugcgcuaaacuuuucu

SEQ ID NO: 2741521 - RNA, 20 nt, Human
gugcuaaggacuuguuagau

SEQ ID NO: 2741522 - RNA, 14 nt, Human
gugcuaaggacuug

SEQ ID NO: 2741523 - RNA, 13 nt, Human
gugcuaaggacuu

SEQ ID NO: 2741524 - RNA, 12 nt, Human
gugcuaaggacu

SEQ ID NO: 2741525 - RNA, 14 nt, Human
gugccaugugccag

SEQ ID NO: 2741526 - RNA, 16 nt, Human
gugccaugugccaggu

SEQ ID NO: 2741527 - RNA, 21 nt, Human
gugcgaucuggguucacugca

SEQ ID NO: 2741528 - RNA, 22 nt, Human
gugcacuaauguguaagacaaa

SEQ ID NO: 2741529 - RNA, 23 nt, Human
gugauccacccaccucagccucc

SEQ ID NO: 2741530 - RNA, 24 nt, Human
gugauccacccaccucagccuccc

SEQ ID NO: 2741531 - RNA, 18 nt, Human
gugauuuuuguaauuuuu

SEQ ID NO: 2741532 - RNA, 13 nt, Human
gugauuuuuguaa

SEQ ID NO: 2741533 - RNA, 22 nt, Human
gugcauaccacuuuuguucuug

SEQ ID NO: 2741534 - RNA, 20 nt, Human
gugcaguggugcgaucuggg

SEQ ID NO: 2741535 - RNA, 23 nt, Human
gugcaguggugcgaucuggguuc

SEQ ID NO: 2741536 - RNA, 13 nt, Human
gugaacacaucag

SEQ ID NO: 2741537 - RNA, 16 nt, Human
gugacaagcucacaga

SEQ ID NO: 2741538 - RNA, 20 nt, Human
gugacaaggauugcuacugu

SEQ ID NO: 2741539 - RNA, 22 nt, Human
gugaauucuugaaggaaaauga

SEQ ID NO: 2741540 - RNA, 21 nt, Human
gugaaugaugauccuaggcau

SEQ ID NO: 2741541 - RNA, 18 nt, Human
gugaauucuugaaggaaa

SEQ ID NO: 2741542 - RNA, 12 nt, Human
gugacagaggca

SEQ ID NO: 2741543 - RNA, 13 nt, Human
gugacagaggcag

SEQ ID NO: 2741544 - RNA, 14 nt, Human
gugacagaggcagc

SEQ ID NO: 2741545 - RNA, 15 nt, Human
gugaccucugccuga

SEQ ID NO: 2741546 - RNA, 12 nt, Human
gugaccucugcc

SEQ ID NO: 2741547 - RNA, 15 nt, Human
gugacagaggcagcc

SEQ ID NO: 2741548 - RNA, 13 nt, Human
gugaccucugccu

SEQ ID NO: 2741549 - RNA, 14 nt, Human
gugaccucugccug

SEQ ID NO: 2741550 - RNA, 17 nt, Human
gugaggaugaaaaaaua

SEQ ID NO: 2741551 - RNA, 19 nt, Human
gugagccgagaucacgcca

SEQ ID NO: 2741552 - RNA, 14 nt, Human
gugagccacugcac

SEQ ID NO: 2741553 - RNA, 15 nt, Human
gugagccacugcacc

SEQ ID NO: 2741554 - RNA, 20 nt, Human
gugagccacugcaccgggcc

SEQ ID NO: 2741555 - RNA, 15 nt, Human
gugauacaaugcugu

SEQ ID NO: 2741556 - RNA, 17 nt, Human
gugauacaaugcugugc

SEQ ID NO: 2741557 - RNA, 17 nt, Human
gugaguugauagcacag

SEQ ID NO: 2741558 - RNA, 22 nt, Human
gugauccacccaccucagccuc

SEQ ID NO: 2741559 - RNA, 14 nt, Human
guucugaagaagau

SEQ ID NO: 2741560 - RNA, 15 nt, Human
guucugaagaagaug

SEQ ID NO: 2741561 - RNA, 12 nt, Human
guucugaagaag

SEQ ID NO: 2741562 - RNA, 13 nt, Human
guucugaagaaga

SEQ ID NO: 2741563 - RNA, 19 nt, Human
guucugauccuaguuccac

SEQ ID NO: 2741564 - RNA, 23 nt, Human
guugaaaagacuccaaagaaaug

SEQ ID NO: 2741565 - RNA, 22 nt, Human
guugaaaagacuccaaagaaau

SEQ ID NO: 2741566 - RNA, 17 nt, Human
guugaaaagacuccaaa

SEQ ID NO: 2741567 - RNA, 17 nt, Human
guugaaaaacagcugag

SEQ ID NO: 2741568 - RNA, 20 nt, Human
guucuuuccaaaguacacug

SEQ ID NO: 2741569 - RNA, 18 nt, Human
guucuuuccaaaguacac

SEQ ID NO: 2741570 - RNA, 14 nt, Human
guucuuuccaaagu

SEQ ID NO: 2741571 - RNA, 13 nt, Human
guucuuuccaaag

SEQ ID NO: 2741572 - RNA, 12 nt, Human
guucuggcucuu

SEQ ID NO: 2741573 - RNA, 16 nt, Human
guucuggcucuuccag

SEQ ID NO: 2741574 - RNA, 20 nt, Human
guucuggcucuuccaggcug

SEQ ID NO: 2741575 - RNA, 23 nt, Human
guucuggcagaguugaagacaga

SEQ ID NO: 2741576 - RNA, 11 nt, Human
guucugggaca

SEQ ID NO: 2741577 - RNA, 12 nt, Human
guucugggacac

SEQ ID NO: 2741578 - RNA, 14 nt, Human
guucugggacacag

SEQ ID NO: 2741579 - RNA, 15 nt, Human
guucugggacacagu

SEQ ID NO: 2741580 - RNA, 16 nt, Human
guucugggacacaguu

SEQ ID NO: 2741581 - RNA, 18 nt, Human
guucuuucacccuuuucu

SEQ ID NO: 2741582 - RNA, 21 nt, Human
guugauggugguauguuuuca

SEQ ID NO: 2741583 - RNA, 20 nt, Human
guugauggugguauguuuuc

SEQ ID NO: 2741584 - RNA, 22 nt, Human
guugaauuuauuggcuuuucug

SEQ ID NO: 2741585 - RNA, 21 nt, Human
guugaauuuauuggcuuuucu

SEQ ID NO: 2741586 - RNA, 14 nt, Human
guugaauuuauugg

SEQ ID NO: 2741587 - RNA, 16 nt, Human
guugaagacagagcua

SEQ ID NO: 2741588 - RNA, 18 nt, Human
guugaagagguuuuaaag

SEQ ID NO: 2741589 - RNA, 22 nt, Human
guugaaacggaugauuucuaug

SEQ ID NO: 2741590 - RNA, 21 nt, Human
guugaaacggaugauuucuau

SEQ ID NO: 2741591 - RNA, 15 nt, Human
guugaaauuguaauu

SEQ ID NO: 2741592 - RNA, 20 nt, Human
guugaaauuguaauuauauc

SEQ ID NO: 2741593 - RNA, 16 nt, Human
guugaaauuguaauua

SEQ ID NO: 2741594 - RNA, 15 nt, Human
guugcaggaccucag

SEQ ID NO: 2741595 - RNA, 23 nt, Human
guuggccaaagccaaagcuaggc

SEQ ID NO: 2741596 - RNA, 18 nt, Human
guuggcaaaaaggcagga

SEQ ID NO: 2741597 - RNA, 14 nt, Human
guuggcaaaaaggc

SEQ ID NO: 2741598 - RNA, 13 nt, Human
guuggccaggcug

SEQ ID NO: 2741599 - RNA, 15 nt, Human
guuggccaggcuggu

SEQ ID NO: 2741600 - RNA, 14 nt, Human
guuggccaggcugg

SEQ ID NO: 2741601 - RNA, 17 nt, Human
guuggccaggcuggucu

SEQ ID NO: 2741602 - RNA, 19 nt, Human
guuggccaggcuggucuca

SEQ ID NO: 2741603 - RNA, 14 nt, Human
guuggccaguguga

SEQ ID NO: 2741604 - RNA, 13 nt, Human
guugccagucacc

SEQ ID NO: 2741605 - RNA, 14 nt, Human
guugccagucaccc

SEQ ID NO: 2741606 - RNA, 16 nt, Human
guugccagucaccccg

SEQ ID NO: 2741607 - RNA, 17 nt, Human
guugccagucaccccgg

SEQ ID NO: 2741608 - RNA, 18 nt, Human
guugccagucaccccggc

SEQ ID NO: 2741609 - RNA, 23 nt, Human
guugccagucaccccggccaccu

SEQ ID NO: 2741610 - RNA, 12 nt, Human
guugcccaggca

SEQ ID NO: 2741611 - RNA, 14 nt, Human
guugcccaggcagg

SEQ ID NO: 2741612 - RNA, 23 nt, Human
guuaccucugccucagaaaacaa

SEQ ID NO: 2741613 - RNA, 21 nt, Human
guuacauuuuuaagugcugca

SEQ ID NO: 2741614 - RNA, 23 nt, Human
guuaccauuuugggguacccacu

SEQ ID NO: 2741615 - RNA, 16 nt, Human
guuacccaaauuaaga

SEQ ID NO: 2741616 - RNA, 19 nt, Human
guuacauaagauaaaugug

SEQ ID NO: 2741617 - RNA, 18 nt, Human
guuacauaagauaaaugu

SEQ ID NO: 2741618 - RNA, 15 nt, Human
guuacagacaaagcg

SEQ ID NO: 2741619 - RNA, 17 nt, Human
guuacagacaaagcgug

SEQ ID NO: 2741620 - RNA, 22 nt, Human
guuaguuucuccaagcaggaca

SEQ ID NO: 2741621 - RNA, 16 nt, Human
guuaguuucuccaagc

SEQ ID NO: 2741622 - RNA, 19 nt, Human
guuaguuucuccaagcagg

SEQ ID NO: 2741623 - RNA, 22 nt, Human
guuacuaaguuuuuauggcuuu

SEQ ID NO: 2741624 - RNA, 15 nt, Human
guuacucagaauucu

SEQ ID NO: 2741625 - RNA, 21 nt, Human
guuaugacuccagaauuuccc

SEQ ID NO: 2741626 - RNA, 19 nt, Human
guuaucugaagucagaucu

SEQ ID NO: 2741627 - RNA, 19 nt, Human
guucaagcgauucuucugc

SEQ ID NO: 2741628 - RNA, 19 nt, Human
guuauuaaaaaucucaaau

SEQ ID NO: 2741629 - RNA, 18 nt, Human
guucaauaauaaauauuu

SEQ ID NO: 2741630 - RNA, 20 nt, Human
guucaagcgauucuucugcu

SEQ ID NO: 2741631 - RNA, 23 nt, Human
guucaauucucauuugucacaca

SEQ ID NO: 2741632 - RNA, 16 nt, Human
guucaauucucauuug

SEQ ID NO: 2741633 - RNA, 13 nt, Human
guucagagcugcc

SEQ ID NO: 2741634 - RNA, 14 nt, Human
guucagagcugccc

SEQ ID NO: 2741635 - RNA, 23 nt, Human
guucagagcugcccucuccuggg

SEQ ID NO: 2741636 - RNA, 20 nt, Human
guucagagcugcccucuccu

SEQ ID NO: 2741637 - RNA, 22 nt, Human
guucagagcugcccucuccugg

SEQ ID NO: 2741638 - RNA, 15 nt, Human
guucagagcugcccu

SEQ ID NO: 2741639 - RNA, 16 nt, Human
guucagagcugcccuc

SEQ ID NO: 2741640 - RNA, 17 nt, Human
guucagagcugcccucu

SEQ ID NO: 2741641 - RNA, 19 nt, Human
guucagagcugcccucucc

SEQ ID NO: 2741642 - RNA, 19 nt, Human
guucacugcaaccuccgcc

SEQ ID NO: 2741643 - RNA, 19 nt, Human
guucacucuccauuuaaua

SEQ ID NO: 2741644 - RNA, 17 nt, Human
guucaucauccuaagcu

SEQ ID NO: 2741645 - RNA, 23 nt, Human
guucauggaacgcguugaaauug

SEQ ID NO: 2741646 - RNA, 22 nt, Human
guucauggaacgcguugaaauu

SEQ ID NO: 2741647 - RNA, 12 nt, Human
guucaugaaaga

SEQ ID NO: 2741648 - RNA, 18 nt, Human
guucaucuugaauuguaa

SEQ ID NO: 2741649 - RNA, 12 nt, Human
guucaucuugaa

SEQ ID NO: 2741650 - RNA, 13 nt, Human
guucaucuugaau

SEQ ID NO: 2741651 - RNA, 17 nt, Human
guuccaccaucaagcca

SEQ ID NO: 2741652 - RNA, 20 nt, Human
guuccaccaucaagccacca

SEQ ID NO: 2741653 - RNA, 14 nt, Human
guuccuaauccucu

SEQ ID NO: 2741654 - RNA, 22 nt, Human
guuccucauuagcauuuugcua

SEQ ID NO: 2741655 - RNA, 16 nt, Human
guuaaaagaugaaaau

SEQ ID NO: 2741656 - RNA, 14 nt, Human
guuaaaagaugaaa

SEQ ID NO: 2741657 - RNA, 20 nt, Human
guuaaaagaugaaaauauuu

SEQ ID NO: 2741658 - RNA, 22 nt, Human
guuaaaauaccagccaguaaau

SEQ ID NO: 2741659 - RNA, 18 nt, Human
guuaaaccaugggauaaa

SEQ ID NO: 2741660 - RNA, 21 nt, Human
guuaaaccaugggauaaaugc

SEQ ID NO: 2741661 - RNA, 16 nt, Human
guuacacuaaaaggug

SEQ ID NO: 2741662 - RNA, 15 nt, Human
guuacacuaaaaggu

SEQ ID NO: 2741663 - RNA, 13 nt, Human
guuacagacaaag

SEQ ID NO: 2741664 - RNA, 13 nt, Human
guuacagaagccc

SEQ ID NO: 2741665 - RNA, 18 nt, Human
guguuaugacuccagaau

SEQ ID NO: 2741666 - RNA, 14 nt, Human
guguuacuaaguuu

SEQ ID NO: 2741667 - RNA, 12 nt, Human
guguuacuaagu

SEQ ID NO: 2741668 - RNA, 12 nt, Human
gugugcucugau

SEQ ID NO: 2741669 - RNA, 15 nt, Human
gugugcucugaucau

SEQ ID NO: 2741670 - RNA, 22 nt, Human
gugugcucugaucauccacugu

SEQ ID NO: 2741671 - RNA, 21 nt, Human
guguggagaagcggcuggcag

SEQ ID NO: 2741672 - RNA, 13 nt, Human
guguggagaagcg

SEQ ID NO: 2741673 - RNA, 20 nt, Human
gugugagucaccaagcccag

SEQ ID NO: 2741674 - RNA, 22 nt, Human
gugucucuugguccugcugcag

SEQ ID NO: 2741675 - RNA, 18 nt, Human
gugucucuugguccugcu

SEQ ID NO: 2741676 - RNA, 19 nt, Human
gugucucuugguccugcug

SEQ ID NO: 2741677 - RNA, 20 nt, Human
gugucucuugguccugcugc

SEQ ID NO: 2741678 - RNA, 21 nt, Human
gugucucuugguccugcugca

SEQ ID NO: 2741679 - RNA, 14 nt, Human
gugucucuuggucc

SEQ ID NO: 2741680 - RNA, 17 nt, Human
gugucucccuucauccu

SEQ ID NO: 2741681 - RNA, 14 nt, Human
guguccggucccug

SEQ ID NO: 2741682 - RNA, 23 nt, Human
gugucccugcacuugcagacucu

SEQ ID NO: 2741683 - RNA, 15 nt, Human
gugucgggcaugaca

SEQ ID NO: 2741684 - RNA, 21 nt, Human
guguaaguagauaggccaugg

SEQ ID NO: 2741685 - RNA, 21 nt, Human
guguaaguauucuuauuuaau

SEQ ID NO: 2741686 - RNA, 16 nt, Human
guggugacuuuggaua

SEQ ID NO: 2741687 - RNA, 17 nt, Human
guguaagacaaaaagcu

SEQ ID NO: 2741688 - RNA, 19 nt, Human
guggugcgaucuggguuca

SEQ ID NO: 2741689 - RNA, 14 nt, Human
guggugaccucugc

SEQ ID NO: 2741690 - RNA, 17 nt, Human
guggugaccucugccug

SEQ ID NO: 2741691 - RNA, 21 nt, Human
guggugagaggcauccaguau

SEQ ID NO: 2741692 - RNA, 15 nt, Human
guggugacuuuggau

SEQ ID NO: 2741693 - RNA, 13 nt, Human
guggugacuuugg

SEQ ID NO: 2741694 - RNA, 17 nt, Human
guggucccaccccacac

SEQ ID NO: 2741695 - RNA, 18 nt, Human
gugguccuaaucuucuga

SEQ ID NO: 2741696 - RNA, 14 nt, Human
guggucccacccca

SEQ ID NO: 2741697 - RNA, 15 nt, Human
guggucccaccccac

SEQ ID NO: 2741698 - RNA, 16 nt, Human
guggucccaccccaca

SEQ ID NO: 2741699 - RNA, 17 nt, Human
gugguagagugugccug

SEQ ID NO: 2741700 - RNA, 19 nt, Human
gugguaugaucacggcuca

SEQ ID NO: 2741701 - RNA, 13 nt, Human
gugucccugcacu

SEQ ID NO: 2741702 - RNA, 16 nt, Human
gugucccugcacuugc

SEQ ID NO: 2741703 - RNA, 18 nt, Human
gugucccugcacuugcag

SEQ ID NO: 2741704 - RNA, 17 nt, Human
guguacauggaauaaca

SEQ ID NO: 2741705 - RNA, 15 nt, Human
guguacuuaacuauu

SEQ ID NO: 2741706 - RNA, 22 nt, Human
guguacauggaauaacauguaa

SEQ ID NO: 2741707 - RNA, 20 nt, Human
gugcuacaaaaacacagcaa

SEQ ID NO: 2741708 - RNA, 15 nt, Human
gugcuacaaaaacac

SEQ ID NO: 2741709 - RNA, 14 nt, Human
guggcucacgccug

SEQ ID NO: 2741710 - RNA, 12 nt, Human
guggcugcuuca

SEQ ID NO: 2741711 - RNA, 14 nt, Human
guggcugcuucaag

SEQ ID NO: 2741712 - RNA, 23 nt, Human
guggcugcuucaaggauccugag

SEQ ID NO: 2741713 - RNA, 19 nt, Human
guggcuggguuggagggug

SEQ ID NO: 2741714 - RNA, 15 nt, Human
guggcugcuucaagg

SEQ ID NO: 2741715 - RNA, 16 nt, Human
guggcugcuucaagga

SEQ ID NO: 2741716 - RNA, 19 nt, Human
guggcugcuucaaggaucc

SEQ ID NO: 2741717 - RNA, 22 nt, Human
guggcugcuucaaggauccuga

SEQ ID NO: 2741718 - RNA, 22 nt, Human
guggcuuaaaacaacacucaca

SEQ ID NO: 2741719 - RNA, 17 nt, Human
gugggcccaaugcacuu

SEQ ID NO: 2741720 - RNA, 15 nt, Human
gugggcauucaaaug

SEQ ID NO: 2741721 - RNA, 15 nt, Human
gugggcuaguugggc

SEQ ID NO: 2741722 - RNA, 17 nt, Human
guggggcagcuugaggg

SEQ ID NO: 2741723 - RNA, 13 nt, Human
guggggcagcuug

SEQ ID NO: 2741724 - RNA, 23 nt, Human
guggguuucuaaagcugccagcc

SEQ ID NO: 2741725 - RNA, 15 nt, Human
guggggaccucaggc

SEQ ID NO: 2741726 - RNA, 18 nt, Human
guggggaccucaggccug

SEQ ID NO: 2741727 - RNA, 20 nt, Human
guuuagcuggaaaaguaugu

SEQ ID NO: 2741728 - RNA, 21 nt, Human
guuuagcuggaaaaguauguu

SEQ ID NO: 2741729 - RNA, 20 nt, Human
guuuauauaagcuuguauuc

SEQ ID NO: 2741730 - RNA, 15 nt, Human
guuuagauaauacac

SEQ ID NO: 2741731 - RNA, 14 nt, Human
guuuagauaauaca

SEQ ID NO: 2741732 - RNA, 15 nt, Human
guuguuacauuuuua

SEQ ID NO: 2741733 - RNA, 14 nt, Human
guuguuacauuuuu

SEQ ID NO: 2741734 - RNA, 14 nt, Human
guugugguuaaucu

SEQ ID NO: 2741735 - RNA, 22 nt, Human
guuguggauuuaacagaaaugu

SEQ ID NO: 2741736 - RNA, 14 nt, Human
guugugaauguugu

SEQ ID NO: 2741737 - RNA, 19 nt, Human
guugucugcaacucugaag

SEQ ID NO: 2741738 - RNA, 12 nt, Human
guugucagcuga

SEQ ID NO: 2741739 - RNA, 19 nt, Human
guuggcugggggccucagu

SEQ ID NO: 2741740 - RNA, 20 nt, Human
guuggccccugcccggcugc

SEQ ID NO: 2741741 - RNA, 13 nt, Human
guuggccccugcc

SEQ ID NO: 2741742 - RNA, 14 nt, Human
guuggccccugccc

SEQ ID NO: 2741743 - RNA, 12 nt, Human
guuggcuggggg

SEQ ID NO: 2741744 - RNA, 17 nt, Human
guuugagaucagccugg

SEQ ID NO: 2741745 - RNA, 23 nt, Human
guuugauuaaauucuugcaaagu

SEQ ID NO: 2741746 - RNA, 20 nt, Human
guuuguaaauuaacuuuuau

SEQ ID NO: 2741747 - RNA, 16 nt, Human
guuugauucagacagc

SEQ ID NO: 2741748 - RNA, 20 nt, Human
guuugauucagacagcugcc

SEQ ID NO: 2741749 - RNA, 21 nt, Human
guuugauucagacagcugccu

SEQ ID NO: 2741750 - RNA, 18 nt, Human
guuuguuucugaaaggga

SEQ ID NO: 2741751 - RNA, 11 nt, Human
guuuucacucu

SEQ ID NO: 2741752 - RNA, 12 nt, Human
guuuucacucuu

SEQ ID NO: 2741753 - RNA, 17 nt, Human
guuuucaaaauaaaaau

SEQ ID NO: 2741754 - RNA, 20 nt, Human
guuuguuucugaaagggacg

SEQ ID NO: 2741755 - RNA, 20 nt, Human
guuuuccagguuuaagcugu

SEQ ID NO: 2741756 - RNA, 19 nt, Human
guuuuccaugaguccccug

SEQ ID NO: 2741757 - RNA, 20 nt, Human
guuuuccaugaguccccugu

SEQ ID NO: 2741758 - RNA, 13 nt, Human
guuuuccugaaga

SEQ ID NO: 2741759 - RNA, 21 nt, Human
uaaaagauacaguuacucaga

SEQ ID NO: 2741760 - RNA, 20 nt, Human
uaaaagauacaguuacucag

SEQ ID NO: 2741761 - RNA, 17 nt, Human
uaaaagauacaguuacu

SEQ ID NO: 2741762 - RNA, 14 nt, Human
uaaaagauacaguu

SEQ ID NO: 2741763 - RNA, 13 nt, Human
uaaaaucauuucu

SEQ ID NO: 2741764 - RNA, 10 nt, Human
uaaaaucauu

SEQ ID NO: 2741765 - RNA, 12 nt, Human
uaaaaggugacc

SEQ ID NO: 2741766 - RNA, 15 nt, Human
uaaaauccauacauu

SEQ ID NO: 2741767 - RNA, 17 nt, Human
uaaaauccauacauuug

SEQ ID NO: 2741768 - RNA, 22 nt, Human
uaaaaucauuucugcaucagcu

SEQ ID NO: 2741769 - RNA, 18 nt, Human
uaaaaucauuucugcauc

SEQ ID NO: 2741770 - RNA, 21 nt, Human
uaaaagguaugcaaucaaauc

SEQ ID NO: 2741771 - RNA, 12 nt, Human
uaaaaggagcca

SEQ ID NO: 2741772 - RNA, 22 nt, Human
uaaaacaagcacuaaacaaaga

SEQ ID NO: 2741773 - RNA, 15 nt, Human
uaaaacaacacucac

SEQ ID NO: 2741774 - RNA, 17 nt, Human
uaaaacacaacaucuuu

SEQ ID NO: 2741775 - RNA, 22 nt, Human
uaaaacacaacaucuuuuucua

SEQ ID NO: 2741776 - RNA, 23 nt, Human
uaaaacacaacaucuuuuucuac

SEQ ID NO: 2741777 - RNA, 21 nt, Human
uaaaaagacauucuuccaaaa

SEQ ID NO: 2741778 - RNA, 13 nt, Human
uaaaaacaacuuu

SEQ ID NO: 2741779 - RNA, 18 nt, Human
uaaaaacaacuuuauacc

SEQ ID NO: 2741780 - RNA, 19 nt, Human
uaaaaacaacuuuauaccc

SEQ ID NO: 2741781 - RNA, 14 nt, Human
uaaaguguuugaaa

SEQ ID NO: 2741782 - RNA, 17 nt, Human
uaaaggcuaccuuugua

SEQ ID NO: 2741783 - RNA, 15 nt, Human
uaaaggcuaccuuug

SEQ ID NO: 2741784 - RNA, 13 nt, Human
uaaagccauguuu

SEQ ID NO: 2741785 - RNA, 11 nt, Human
uaaagccaugu

SEQ ID NO: 2741786 - RNA, 20 nt, Human
uaaagccauguuuauuacag

SEQ ID NO: 2741787 - RNA, 15 nt, Human
uaaagccauguuuau

SEQ ID NO: 2741788 - RNA, 19 nt, Human
uaaagcagcguuucuauga

SEQ ID NO: 2741789 - RNA, 17 nt, Human
uaaagcagcguuucuau

SEQ ID NO: 2741790 - RNA, 16 nt, Human
uaaagcagcguuucua

SEQ ID NO: 2741791 - RNA, 12 nt, Human
uaaagaaaacug

SEQ ID NO: 2741792 - RNA, 19 nt, Human
uaaacaagaccacguuucu

SEQ ID NO: 2741793 - RNA, 20 nt, Human
uaaacaagaccacguuucua

SEQ ID NO: 2741794 - RNA, 22 nt, Human
uaaacaagaccacguuucuaaa

SEQ ID NO: 2741795 - RNA, 21 nt, Human
uaaacaagaccacguuucuaa

SEQ ID NO: 2741796 - RNA, 22 nt, Human
uaaacuugguuuuuaaaaaacu

SEQ ID NO: 2741797 - RNA, 23 nt, Human
uaaugauaacuggaaacuucagc

SEQ ID NO: 2741798 - RNA, 15 nt, Human
uaaugcgugcauacc

SEQ ID NO: 2741799 - RNA, 17 nt, Human
uaaugauaacuggaaac

SEQ ID NO: 2741800 - RNA, 22 nt, Human
uaaugauaacuggaaacuucag

SEQ ID NO: 2741801 - RNA, 23 nt, Human
uaaugcgugcauaccacuuuugu

SEQ ID NO: 2741802 - RNA, 22 nt, Human
uaaugcgugcauaccacuuuug

SEQ ID NO: 2741803 - RNA, 19 nt, Human
uaaugcgugcauaccacuu

SEQ ID NO: 2741804 - RNA, 15 nt, Human
uaauggggcggugag

SEQ ID NO: 2741805 - RNA, 22 nt, Human
uaauguuucaaacauauauaac

SEQ ID NO: 2741806 - RNA, 21 nt, Human
uaauuaacauguuaaaccaug

SEQ ID NO: 2741807 - RNA, 20 nt, Human
uaauuaacauguuaaaccau

SEQ ID NO: 2741808 - RNA, 20 nt, Human
uaauuaaguacuauguauca

SEQ ID NO: 2741809 - RNA, 17 nt, Human
uaauuaaguacuaugua

SEQ ID NO: 2741810 - RNA, 14 nt, Human
uaauuaaguacuau

SEQ ID NO: 2741811 - RNA, 14 nt, Human
uaauaauguuucaa

SEQ ID NO: 2741812 - RNA, 19 nt, Human
uaauaugcacacauuuuuu

SEQ ID NO: 2741813 - RNA, 16 nt, Human
uaauauuaaagccaug

SEQ ID NO: 2741814 - RNA, 15 nt, Human
uaauauuaaagccau

SEQ ID NO: 2741815 - RNA, 18 nt, Human
uaauaugcacacauuuuu

SEQ ID NO: 2741816 - RNA, 17 nt, Human
uaauaugcacacauuuu

SEQ ID NO: 2741817 - RNA, 16 nt, Human
uaauaugcacacauuu

SEQ ID NO: 2741818 - RNA, 15 nt, Human
uaauaugcacacauu

SEQ ID NO: 2741819 - RNA, 20 nt, Human
uaauauuaaggaagacaaug

SEQ ID NO: 2741820 - RNA, 21 nt, Human
uaauauuaaagccauguuuau

SEQ ID NO: 2741821 - RNA, 20 nt, Human
uaauauuaaagccauguuua

SEQ ID NO: 2741822 - RNA, 17 nt, Human
uaauauuaaagccaugu

SEQ ID NO: 2741823 - RNA, 13 nt, Human
uaaucuaaaugga

SEQ ID NO: 2741824 - RNA, 12 nt, Human
uaaucuaaaugg

SEQ ID NO: 2741825 - RNA, 20 nt, Human
uaauccucuaggaggucucu

SEQ ID NO: 2741826 - RNA, 12 nt, Human
uaagugagagag

SEQ ID NO: 2741827 - RNA, 23 nt, Human
uaagugaggaugaaaaaauaaca

SEQ ID NO: 2741828 - RNA, 14 nt, Human
uaagugcugcauuu

SEQ ID NO: 2741829 - RNA, 19 nt, Human
uaauaaauauuuuugccau

SEQ ID NO: 2741830 - RNA, 21 nt, Human
uaauaacugugaaguuuacau

SEQ ID NO: 2741831 - RNA, 16 nt, Human
uaauaaggaaaaguuu

SEQ ID NO: 2741832 - RNA, 22 nt, Human
uaagugcugcauuuaaaagaua

SEQ ID NO: 2741833 - RNA, 18 nt, Human
uaagugcugcauuuaaaa

SEQ ID NO: 2741834 - RNA, 16 nt, Human
uaagugcugcauuuaa

SEQ ID NO: 2741835 - RNA, 15 nt, Human
uaagugcugcauuua

SEQ ID NO: 2741836 - RNA, 16 nt, Human
uaaggauguucuagca

SEQ ID NO: 2741837 - RNA, 12 nt, Human
uaagaggcaggg

SEQ ID NO: 2741838 - RNA, 15 nt, Human
uaagaggcagggucu

SEQ ID NO: 2741839 - RNA, 20 nt, Human
uaagguggguacgggagggu

SEQ ID NO: 2741840 - RNA, 15 nt, Human
uaaggugugcucuga

SEQ ID NO: 2741841 - RNA, 17 nt, Human
uaaggguaucuggugac

SEQ ID NO: 2741842 - RNA, 16 nt, Human
uaaaugugccuucauu

SEQ ID NO: 2741843 - RNA, 11 nt, Human
uaaauuauuuu

SEQ ID NO: 2741844 - RNA, 22 nt, Human
uaaauucuugcaaaguaucccu

SEQ ID NO: 2741845 - RNA, 18 nt, Human
uaaauucuugcaaaguau

SEQ ID NO: 2741846 - RNA, 17 nt, Human
uaaauucuugcaaagua

SEQ ID NO: 2741847 - RNA, 16 nt, Human
uaaauucuugcaaagu

SEQ ID NO: 2741848 - RNA, 13 nt, Human
uaaauucuuucau

SEQ ID NO: 2741849 - RNA, 22 nt, Human
uaaauuuaguauuuuguuucag

SEQ ID NO: 2741850 - RNA, 22 nt, Human
uaaauuugaauguuaagcagau

SEQ ID NO: 2741851 - RNA, 14 nt, Human
uaaauuugaauguu

SEQ ID NO: 2741852 - RNA, 18 nt, Human
uaacaccaugauuaacca

SEQ ID NO: 2741853 - RNA, 20 nt, Human
uaaauggcuuccuggcaaua

SEQ ID NO: 2741854 - RNA, 17 nt, Human
uaaaugggggugcauuu

SEQ ID NO: 2741855 - RNA, 14 nt, Human
uaaaugggggugca

SEQ ID NO: 2741856 - RNA, 19 nt, Human
uaaaugggggugcauuuga

SEQ ID NO: 2741857 - RNA, 18 nt, Human
uaaaugggggugcauuug

SEQ ID NO: 2741858 - RNA, 20 nt, Human
uaaaugucuaguuguaacac

SEQ ID NO: 2741859 - RNA, 22 nt, Human
uaaaugucucuuuaaugucaca

SEQ ID NO: 2741860 - RNA, 16 nt, Human
uaaauggaaccacucu

SEQ ID NO: 2741861 - RNA, 14 nt, Human
uaaaugcccagccc

SEQ ID NO: 2741862 - RNA, 15 nt, Human
uaaaugcccagcccc

SEQ ID NO: 2741863 - RNA, 16 nt, Human
uaaaugcccagccccu

SEQ ID NO: 2741864 - RNA, 17 nt, Human
uaaaugcccagccccuu

SEQ ID NO: 2741865 - RNA, 13 nt, Human
uaaaugcccagcc

SEQ ID NO: 2741866 - RNA, 23 nt, Human
uaaaugccaucaauaaaaaauua

SEQ ID NO: 2741867 - RNA, 16 nt, Human
uaaaugccaucaauaa

SEQ ID NO: 2741868 - RNA, 15 nt, Human
uaacuggaaacuuca

SEQ ID NO: 2741869 - RNA, 17 nt, Human
uaacugugaaguuuaca

SEQ ID NO: 2741870 - RNA, 18 nt, Human
uaacugugaaguuuacau

SEQ ID NO: 2741871 - RNA, 18 nt, Human
uaagaaaaaggaugcaca

SEQ ID NO: 2741872 - RNA, 16 nt, Human
uaagaaaaaggaugca

SEQ ID NO: 2741873 - RNA, 23 nt, Human
uaagaaaaaggaugcacagaguu

SEQ ID NO: 2741874 - RNA, 19 nt, Human
uaagaaaaaggaugcacag

SEQ ID NO: 2741875 - RNA, 13 nt, Human
uaagagagaauga

SEQ ID NO: 2741876 - RNA, 19 nt, Human
uaagaaccuuuugagugcc

SEQ ID NO: 2741877 - RNA, 14 nt, Human
uaagagagaaugag

SEQ ID NO: 2741878 - RNA, 21 nt, Human
uaagaaaauaucacuugucaa

SEQ ID NO: 2741879 - RNA, 19 nt, Human
uaagaaaucaaagagagaa

SEQ ID NO: 2741880 - RNA, 17 nt, Human
uaaccaggggccaugaa

SEQ ID NO: 2741881 - RNA, 23 nt, Human
uaaccaguguuguggauuuaaca

SEQ ID NO: 2741882 - RNA, 16 nt, Human
uaaccacuucagcuga

SEQ ID NO: 2741883 - RNA, 11 nt, Human
uaacagaaaug

SEQ ID NO: 2741884 - RNA, 14 nt, Human
uauaugcuucuguu

SEQ ID NO: 2741885 - RNA, 16 nt, Human
uauaugcuucuguuuu

SEQ ID NO: 2741886 - RNA, 20 nt, Human
uauauuugaaauauugacuu

SEQ ID NO: 2741887 - RNA, 20 nt, Human
uauauuuuuuucugaaauuu

SEQ ID NO: 2741888 - RNA, 19 nt, Human
uauauuuuuuucugaaauu

SEQ ID NO: 2741889 - RNA, 16 nt, Human
uauauuuuuuucugaa

SEQ ID NO: 2741890 - RNA, 16 nt, Human
uauauuuucauucucc

SEQ ID NO: 2741891 - RNA, 19 nt, Human
uaucaggugcugccaucca

SEQ ID NO: 2741892 - RNA, 20 nt, Human
uaucaggugcugccauccag

SEQ ID NO: 2741893 - RNA, 17 nt, Human
uaucaugacaaagacug

SEQ ID NO: 2741894 - RNA, 17 nt, Human
uauauaacaaugcugua

SEQ ID NO: 2741895 - RNA, 19 nt, Human
uauauaacaaugcuguauu

SEQ ID NO: 2741896 - RNA, 23 nt, Human
uauaucugaggaauucuguauag

SEQ ID NO: 2741897 - RNA, 14 nt, Human
uauaucuuguagcu

SEQ ID NO: 2741898 - RNA, 20 nt, Human
uauagaaccucuuugucuac

SEQ ID NO: 2741899 - RNA, 21 nt, Human
uauagaaccucuuugucuaca

SEQ ID NO: 2741900 - RNA, 17 nt, Human
uaguauuguccaggucu

SEQ ID NO: 2741901 - RNA, 16 nt, Human
uaguaugguggcuggg

SEQ ID NO: 2741902 - RNA, 15 nt, Human
uaguaugaggcauuu

SEQ ID NO: 2741903 - RNA, 20 nt, Human
uaguggcuuaaaacaacacu

SEQ ID NO: 2741904 - RNA, 20 nt, Human
uaguuguuugauucagacag

SEQ ID NO: 2741905 - RNA, 21 nt, Human
uaguuguuugauucagacagc

SEQ ID NO: 2741906 - RNA, 22 nt, Human
uaguuguuugauucagacagcu

SEQ ID NO: 2741907 - RNA, 17 nt, Human
uauaaacuuuaccuuuu

SEQ ID NO: 2741908 - RNA, 16 nt, Human
uauaaacuuuaccuuu

SEQ ID NO: 2741909 - RNA, 15 nt, Human
uauaaacuuuaccuu

SEQ ID NO: 2741910 - RNA, 11 nt, Human
uauaaacuuua

SEQ ID NO: 2741911 - RNA, 18 nt, Human
uauaaaccgaacugaugu

SEQ ID NO: 2741912 - RNA, 14 nt, Human
uauaaacuuuaccu

SEQ ID NO: 2741913 - RNA, 13 nt, Human
uauaaacuuuacc

SEQ ID NO: 2741914 - RNA, 15 nt, Human
uaguuugauuaaauu

SEQ ID NO: 2741915 - RNA, 21 nt, Human
uaguuugauuaaauucuugca

SEQ ID NO: 2741916 - RNA, 16 nt, Human
uaguuugauuaaauuc

SEQ ID NO: 2741917 - RNA, 18 nt, Human
uaggugcuacaaaaacac

SEQ ID NO: 2741918 - RNA, 23 nt, Human
uaggugcuacaaaaacacagcaa

SEQ ID NO: 2741919 - RNA, 22 nt, Human
uaggugcuacaaaaacacagca

SEQ ID NO: 2741920 - RNA, 20 nt, Human
uaggugcuacaaaaacacag

SEQ ID NO: 2741921 - RNA, 11 nt, Human
uaggugacaga

SEQ ID NO: 2741922 - RNA, 16 nt, Human
uaggugacagagugag

SEQ ID NO: 2741923 - RNA, 22 nt, Human
uagguuaauuccaauuauauga

SEQ ID NO: 2741924 - RNA, 13 nt, Human
uagguguggggga

SEQ ID NO: 2741925 - RNA, 17 nt, Human
uaggugugggggaagca

SEQ ID NO: 2741926 - RNA, 19 nt, Human
uaggugugacugaauuucu

SEQ ID NO: 2741927 - RNA, 23 nt, Human
uaggugugacugaauuucuuuug

SEQ ID NO: 2741928 - RNA, 21 nt, Human
uaggugugacugaauuucuuu

SEQ ID NO: 2741929 - RNA, 18 nt, Human
uaguaugaggcauuuguu

SEQ ID NO: 2741930 - RNA, 17 nt, Human
uaguaugaggcauuugu

SEQ ID NO: 2741931 - RNA, 14 nt, Human
uagauaggccaugg

SEQ ID NO: 2741932 - RNA, 16 nt, Human
uagauacuguaucaug

SEQ ID NO: 2741933 - RNA, 15 nt, Human
uagauuagaauucug

SEQ ID NO: 2741934 - RNA, 14 nt, Human
uagauuagaauucu

SEQ ID NO: 2741935 - RNA, 20 nt, Human
uagauuagaauucuguauag

SEQ ID NO: 2741936 - RNA, 19 nt, Human
uagauuagaauucuguaua

SEQ ID NO: 2741937 - RNA, 17 nt, Human
uagauuagaauucugua

SEQ ID NO: 2741938 - RNA, 16 nt, Human
uagauuagaauucugu

SEQ ID NO: 2741939 - RNA, 20 nt, Human
uagauuagagaguguugaaa

SEQ ID NO: 2741940 - RNA, 18 nt, Human
uagcauccuggaauaucu

SEQ ID NO: 2741941 - RNA, 16 nt, Human
uagcauccuggaauau

SEQ ID NO: 2741942 - RNA, 15 nt, Human
uagcauccuggaaua

SEQ ID NO: 2741943 - RNA, 13 nt, Human
uagcauccuggaa

SEQ ID NO: 2741944 - RNA, 11 nt, Human
uagcagggaaa

SEQ ID NO: 2741945 - RNA, 19 nt, Human
uagcauacguacacauuuu

SEQ ID NO: 2741946 - RNA, 18 nt, Human
uagcauacguacacauuu

SEQ ID NO: 2741947 - RNA, 17 nt, Human
uagcauacguacacauu

SEQ ID NO: 2741948 - RNA, 16 nt, Human
uagcauacguacacau

SEQ ID NO: 2741949 - RNA, 15 nt, Human
uagcauggcauauuu

SEQ ID NO: 2741950 - RNA, 17 nt, Human
uagcauggcauauuuuu

SEQ ID NO: 2741951 - RNA, 18 nt, Human
uagcauggcauauuuuuc

SEQ ID NO: 2741952 - RNA, 12 nt, Human
uagcugggacua

SEQ ID NO: 2741953 - RNA, 15 nt, Human
uagcugggacuacag

SEQ ID NO: 2741954 - RNA, 17 nt, Human
uagcugggacuacaggc

SEQ ID NO: 2741955 - RNA, 19 nt, Human
uagcugggacuacaggcac

SEQ ID NO: 2741956 - RNA, 20 nt, Human
uagccugugccucugggacu

SEQ ID NO: 2741957 - RNA, 18 nt, Human
uagccugugccucuggga

SEQ ID NO: 2741958 - RNA, 12 nt, Human
uagcucauucuc

SEQ ID NO: 2741959 - RNA, 20 nt, Human
uagcucaggugucccugcac

SEQ ID NO: 2741960 - RNA, 21 nt, Human
uagcucaggugucccugcacu

SEQ ID NO: 2741961 - RNA, 23 nt, Human
uagaauaccacaggaaccacaag

SEQ ID NO: 2741962 - RNA, 20 nt, Human
uagaagucuuagauguauau

SEQ ID NO: 2741963 - RNA, 12 nt, Human
uagagugggagc

SEQ ID NO: 2741964 - RNA, 17 nt, Human
uagaguugauacuacag

SEQ ID NO: 2741965 - RNA, 14 nt, Human
uagaguugauacua

SEQ ID NO: 2741966 - RNA, 15 nt, Human
uagagguucaaagau

SEQ ID NO: 2741967 - RNA, 14 nt, Human
uagagguucaaaga

SEQ ID NO: 2741968 - RNA, 13 nt, Human
uagaauucuguau

SEQ ID NO: 2741969 - RNA, 11 nt, Human
uagaauucugu

SEQ ID NO: 2741970 - RNA, 21 nt, Human
uagaauucuguauagauuaga

SEQ ID NO: 2741971 - RNA, 16 nt, Human
uagaauucuguauaga

SEQ ID NO: 2741972 - RNA, 15 nt, Human
uagaauucuguauag

SEQ ID NO: 2741973 - RNA, 14 nt, Human
uagaauucuguaua

SEQ ID NO: 2741974 - RNA, 20 nt, Human
uagacuggugacugauucuu

SEQ ID NO: 2741975 - RNA, 23 nt, Human
uagacuggugacugauucuucag

SEQ ID NO: 2741976 - RNA, 21 nt, Human
uagacuggugacugauucuuc

SEQ ID NO: 2741977 - RNA, 13 nt, Human
uaauuuugugaag

SEQ ID NO: 2741978 - RNA, 16 nt, Human
uaauuuuuauauuuga

SEQ ID NO: 2741979 - RNA, 17 nt, Human
uaauuuuuauauuugaa

SEQ ID NO: 2741980 - RNA, 18 nt, Human
uaauuuugugaagcaaaa

SEQ ID NO: 2741981 - RNA, 12 nt, Human
uaauuuuuauau

SEQ ID NO: 2741982 - RNA, 19 nt, Human
uacaaaguauuaagcauau

SEQ ID NO: 2741983 - RNA, 18 nt, Human
uacaaaguauuaagcaua

SEQ ID NO: 2741984 - RNA, 16 nt, Human
uacaaaguauuaagca

SEQ ID NO: 2741985 - RNA, 15 nt, Human
uacaaaguauuaagc

SEQ ID NO: 2741986 - RNA, 18 nt, Human
uacaaaguagaagucuua

SEQ ID NO: 2741987 - RNA, 14 nt, Human
uacaaaguagaagu

SEQ ID NO: 2741988 - RNA, 12 nt, Human
uacaaaguauua

SEQ ID NO: 2741989 - RNA, 14 nt, Human
uacaaaguauuaag

SEQ ID NO: 2741990 - RNA, 13 nt, Human
uacaaaguauuaa

SEQ ID NO: 2741991 - RNA, 16 nt, Human
uacacacucaaaucaa

SEQ ID NO: 2741992 - RNA, 17 nt, Human
uacacacucaaaucaag

SEQ ID NO: 2741993 - RNA, 15 nt, Human
uacacacugcauguu

SEQ ID NO: 2741994 - RNA, 21 nt, Human
uacacugugcugagucugaag

SEQ ID NO: 2741995 - RNA, 12 nt, Human
uacaauuuuguu

SEQ ID NO: 2741996 - RNA, 16 nt, Human
uacaauuuuguuucug

SEQ ID NO: 2741997 - RNA, 15 nt, Human
uacaauuuuguuucu

SEQ ID NO: 2741998 - RNA, 11 nt, Human
uacacacacac

SEQ ID NO: 2741999 - RNA, 17 nt, Human
uacaauuuuguuucugu

SEQ ID NO: 2742000 - RNA, 23 nt, Human
uacaguucggugagcuacaaaug

SEQ ID NO: 2742001 - RNA, 15 nt, Human
uacaggagugagcac

SEQ ID NO: 2742002 - RNA, 22 nt, Human
uacaggaaguacuggagaaaau

SEQ ID NO: 2742003 - RNA, 14 nt, Human
uacaggaaguacug

SEQ ID NO: 2742004 - RNA, 15 nt, Human
uacaggaaguacugg

SEQ ID NO: 2742005 - RNA, 20 nt, Human
uacaguugaaaaacagcuga

SEQ ID NO: 2742006 - RNA, 18 nt, Human
uacaguuuguuaguauga

SEQ ID NO: 2742007 - RNA, 17 nt, Human
uacaguugaaaaacagc

SEQ ID NO: 2742008 - RNA, 19 nt, Human
uacaguugaaaaacagcug

SEQ ID NO: 2742009 - RNA, 20 nt, Human
uacacuguuucaaacuuuac

SEQ ID NO: 2742010 - RNA, 22 nt, Human
uacacugugcugagucugaagg

SEQ ID NO: 2742011 - RNA, 23 nt, Human
uacacugugcugagucugaaggc

SEQ ID NO: 2742012 - RNA, 16 nt, Human
uacacuuacacuuuau

SEQ ID NO: 2742013 - RNA, 22 nt, Human
uacacuguuucaaacuuuacua

SEQ ID NO: 2742014 - RNA, 18 nt, Human
uacaggaagguagaaaua

SEQ ID NO: 2742015 - RNA, 13 nt, Human
uacaggaaguacu

SEQ ID NO: 2742016 - RNA, 20 nt, Human
uacagcuugaccgugaggcc

SEQ ID NO: 2742017 - RNA, 22 nt, Human
uacauggaauaacauguaauua

SEQ ID NO: 2742018 - RNA, 19 nt, Human
uacauggaauaacauguaa

SEQ ID NO: 2742019 - RNA, 18 nt, Human
uacauggaauaacaugua

SEQ ID NO: 2742020 - RNA, 14 nt, Human
uacauggaauaaca

SEQ ID NO: 2742021 - RNA, 14 nt, Human
uacauuuuuaagug

SEQ ID NO: 2742022 - RNA, 21 nt, Human
uacauggcuggagcuagaauu

SEQ ID NO: 2742023 - RNA, 22 nt, Human
uacauuuuuaagugcugcauuu

SEQ ID NO: 2742024 - RNA, 19 nt, Human
uacauuuuuaagugcugca

SEQ ID NO: 2742025 - RNA, 16 nt, Human
uacaugaaaacacauu

SEQ ID NO: 2742026 - RNA, 17 nt, Human
uacauaagauaaaugug

SEQ ID NO: 2742027 - RNA, 16 nt, Human
uacauaagauaaaugu

SEQ ID NO: 2742028 - RNA, 23 nt, Human
uacaugaaaacacauuuuucuua

SEQ ID NO: 2742029 - RNA, 19 nt, Human
uacaugaaaacacauuuuu

SEQ ID NO: 2742030 - RNA, 18 nt, Human
uacaugaaaacacauuuu

SEQ ID NO: 2742031 - RNA, 17 nt, Human
uacaugaaaacacauuu

SEQ ID NO: 2742032 - RNA, 16 nt, Human
uacauaaacaaguccu

SEQ ID NO: 2742033 - RNA, 21 nt, Human
uacaguuuguuaguaugaggc

SEQ ID NO: 2742034 - RNA, 19 nt, Human
uacaguuuguuaguaugag

SEQ ID NO: 2742035 - RNA, 23 nt, Human
uacugucagcuccccucggagaa

SEQ ID NO: 2742036 - RNA, 16 nt, Human
uacuguccuacccacc

SEQ ID NO: 2742037 - RNA, 21 nt, Human
uacugucuucaguaagccgug

SEQ ID NO: 2742038 - RNA, 13 nt, Human
uacuuaacuauuc

SEQ ID NO: 2742039 - RNA, 13 nt, Human
uacuuguggacac

SEQ ID NO: 2742040 - RNA, 22 nt, Human
uacucgaguuacagacaaagcg

SEQ ID NO: 2742041 - RNA, 18 nt, Human
uacucgaguuacagacaa

SEQ ID NO: 2742042 - RNA, 14 nt, Human
uacuacaguuuguu

SEQ ID NO: 2742043 - RNA, 13 nt, Human
uacuacaguuugu

SEQ ID NO: 2742044 - RNA, 22 nt, Human
uacuacaguccucccaucucac

SEQ ID NO: 2742045 - RNA, 23 nt, Human
uaccuuuguucccaaauuucaua

SEQ ID NO: 2742046 - RNA, 13 nt, Human
uaccuuuuuuaga

SEQ ID NO: 2742047 - RNA, 22 nt, Human
uaccuuuuuuagaguugauacu

SEQ ID NO: 2742048 - RNA, 19 nt, Human
uaccuuuuuuagaguugau

SEQ ID NO: 2742049 - RNA, 18 nt, Human
uaccucggugccuuccuc

SEQ ID NO: 2742050 - RNA, 21 nt, Human
uaccucuugagccuugaacuu

SEQ ID NO: 2742051 - RNA, 15 nt, Human
uacuaaaauggacug

SEQ ID NO: 2742052 - RNA, 17 nt, Human
uacuaaaauggacugug

SEQ ID NO: 2742053 - RNA, 18 nt, Human
uacgaaaagaggggaaga

SEQ ID NO: 2742054 - RNA, 21 nt, Human
uacgaaaagaggggaagagac

SEQ ID NO: 2742055 - RNA, 17 nt, Human
uaccuuuuuuauacaua

SEQ ID NO: 2742056 - RNA, 16 nt, Human
uaccuuuuuuauacau

SEQ ID NO: 2742057 - RNA, 13 nt, Human
uaccuuuuuuaua

SEQ ID NO: 2742058 - RNA, 23 nt, Human
uacuaaaauggacuguggugacu

SEQ ID NO: 2742059 - RNA, 13 nt, Human
uacuaacuuuccu

SEQ ID NO: 2742060 - RNA, 14 nt, Human
uacuaaggaaucuu

SEQ ID NO: 2742061 - RNA, 21 nt, Human
uacuaauagacaauuuauuau

SEQ ID NO: 2742062 - RNA, 20 nt, Human
uacuaauagacaauuuauua

SEQ ID NO: 2742063 - RNA, 22 nt, Human
uaccaaaaaucucaauauuuca

SEQ ID NO: 2742064 - RNA, 15 nt, Human
uacccacugcucugg

SEQ ID NO: 2742065 - RNA, 14 nt, Human
uacccagaaaguua

SEQ ID NO: 2742066 - RNA, 23 nt, Human
uacauuuuuaagugcugcauuua

SEQ ID NO: 2742067 - RNA, 16 nt, Human
uaccuaucaucuuaag

SEQ ID NO: 2742068 - RNA, 15 nt, Human
uaccuacauacaauu

SEQ ID NO: 2742069 - RNA, 14 nt, Human
ugaauuacauuugu

SEQ ID NO: 2742070 - RNA, 13 nt, Human
ugaauuguaagga

SEQ ID NO: 2742071 - RNA, 21 nt, Human
ugaauuguaaggaaugauuaa

SEQ ID NO: 2742072 - RNA, 13 nt, Human
ugaauuacauuug

SEQ ID NO: 2742073 - RNA, 14 nt, Human
ugaauuaaguuuuu

SEQ ID NO: 2742074 - RNA, 23 nt, Human
ugacaacacucauugaccugagg

SEQ ID NO: 2742075 - RNA, 16 nt, Human
ugaauuuaaauagcuu

SEQ ID NO: 2742076 - RNA, 13 nt, Human
ugacaacacucau

SEQ ID NO: 2742077 - RNA, 18 nt, Human
ugacagaauauguuucaa

SEQ ID NO: 2742078 - RNA, 15 nt, Human
ugacacacagcucug

SEQ ID NO: 2742079 - RNA, 14 nt, Human
ugacacacagcucu

SEQ ID NO: 2742080 - RNA, 14 nt, Human
ugacagacacaggc

SEQ ID NO: 2742081 - RNA, 16 nt, Human
ugacagacacaggccc

SEQ ID NO: 2742082 - RNA, 13 nt, Human
ugacagacacagg

SEQ ID NO: 2742083 - RNA, 21 nt, Human
ugacagaauauguuucaaacu

SEQ ID NO: 2742084 - RNA, 22 nt, Human
ugacagaauauguuucaaacuu

SEQ ID NO: 2742085 - RNA, 22 nt, Human
ugacaacuucccagugaauucu

SEQ ID NO: 2742086 - RNA, 23 nt, Human
ugacaaggauugcuacuguccua

SEQ ID NO: 2742087 - RNA, 20 nt, Human
ugaccagcaccaucucuccu

SEQ ID NO: 2742088 - RNA, 22 nt, Human
ugacagagcaagugagacccug

SEQ ID NO: 2742089 - RNA, 23 nt, Human
ugacaucaacugcaucaagaugu

SEQ ID NO: 2742090 - RNA, 23 nt, Human
ugacagaauauguuucaaacuuu

SEQ ID NO: 2742091 - RNA, 17 nt, Human
ugacagacacaggcccg

SEQ ID NO: 2742092 - RNA, 18 nt, Human
ugacagacacaggcccgg

SEQ ID NO: 2742093 - RNA, 23 nt, Human
ugaaugaugauccuaggcauuug

SEQ ID NO: 2742094 - RNA, 13 nt, Human
ugaaucucauaau

SEQ ID NO: 2742095 - RNA, 20 nt, Human
ugaaucucauaauuuauaca

SEQ ID NO: 2742096 - RNA, 16 nt, Human
ugaaguuuacauugua

SEQ ID NO: 2742097 - RNA, 20 nt, Human
ugaaguuuacauuguaaaua

SEQ ID NO: 2742098 - RNA, 14 nt, Human
ugaaguuuacauug

SEQ ID NO: 2742099 - RNA, 20 nt, Human
ugaaggcuggguucugaucc

SEQ ID NO: 2742100 - RNA, 21 nt, Human
ugaaggcuggguucugauccu

SEQ ID NO: 2742101 - RNA, 18 nt, Human
ugaacuugaaauuugaau

SEQ ID NO: 2742102 - RNA, 14 nt, Human
ugaacuugaaauuu

SEQ ID NO: 2742103 - RNA, 13 nt, Human
ugaacuugaaauu

SEQ ID NO: 2742104 - RNA, 19 nt, Human
ugaagacucauucuucugu

SEQ ID NO: 2742105 - RNA, 20 nt, Human
ugaagacucauucuucugua

SEQ ID NO: 2742106 - RNA, 23 nt, Human
ugaacuggguacuuguggacaca

SEQ ID NO: 2742107 - RNA, 15 nt, Human
ugaaggaaaaugaua

SEQ ID NO: 2742108 - RNA, 18 nt, Human
ugaaggccccgcccaggc

SEQ ID NO: 2742109 - RNA, 16 nt, Human
ugaaggcuggguucug

SEQ ID NO: 2742110 - RNA, 19 nt, Human
ugaaggccccgcccaggcu

SEQ ID NO: 2742111 - RNA, 20 nt, Human
ugaaggccccgcccaggcuu

SEQ ID NO: 2742112 - RNA, 19 nt, Human
ugaagagguuuuaaagcuu

SEQ ID NO: 2742113 - RNA, 21 nt, Human
ugaagagguuuuaaagcuucc

SEQ ID NO: 2742114 - RNA, 20 nt, Human
ugaagagguuuuaaagcuuc

SEQ ID NO: 2742115 - RNA, 14 nt, Human
ugacucuuaagaag

SEQ ID NO: 2742116 - RNA, 15 nt, Human
ugacucuuaagaaga

SEQ ID NO: 2742117 - RNA, 16 nt, Human
ugacucuuaagaagac

SEQ ID NO: 2742118 - RNA, 13 nt, Human
ugacucuuaagaa

SEQ ID NO: 2742119 - RNA, 13 nt, Human
ugaccauucucca

SEQ ID NO: 2742120 - RNA, 14 nt, Human
ugaccauucuccac

SEQ ID NO: 2742121 - RNA, 21 nt, Human
ugacucuuucuauuguuucuu

SEQ ID NO: 2742122 - RNA, 16 nt, Human
ugacuuuccucuuugg

SEQ ID NO: 2742123 - RNA, 22 nt, Human
ugacuuuggauaauaaggaaaa

SEQ ID NO: 2742124 - RNA, 20 nt, Human
ugacuuuggauaauaaggaa

SEQ ID NO: 2742125 - RNA, 16 nt, Human
ugacuuuggauaauaa

SEQ ID NO: 2742126 - RNA, 15 nt, Human
ugacuuuggauaaua

SEQ ID NO: 2742127 - RNA, 14 nt, Human
ugacuuuggauaau

SEQ ID NO: 2742128 - RNA, 13 nt, Human
ugacuuuggauaa

SEQ ID NO: 2742129 - RNA, 12 nt, Human
ugacuuuggaua

SEQ ID NO: 2742130 - RNA, 15 nt, Human
ugagaaagacuauuc

SEQ ID NO: 2742131 - RNA, 15 nt, Human
ugagaaauaaaguuu

SEQ ID NO: 2742132 - RNA, 22 nt, Human
ugacuuuucuguccgagcuuug

SEQ ID NO: 2742133 - RNA, 20 nt, Human
ugagcaggauuuuaaucuuu

SEQ ID NO: 2742134 - RNA, 15 nt, Human
ugagcaggauuuuaa

SEQ ID NO: 2742135 - RNA, 14 nt, Human
ugagaccaaccugg

SEQ ID NO: 2742136 - RNA, 18 nt, Human
ugagaggggaacagacug

SEQ ID NO: 2742137 - RNA, 14 nt, Human
ugagaggggaacag

SEQ ID NO: 2742138 - RNA, 15 nt, Human
ugaggcucugcccuu

SEQ ID NO: 2742139 - RNA, 16 nt, Human
ugaggcucugcccuug

SEQ ID NO: 2742140 - RNA, 18 nt, Human
ugaggcucugcccuuggu

SEQ ID NO: 2742141 - RNA, 15 nt, Human
ugaggcugggcuccc

SEQ ID NO: 2742142 - RNA, 16 nt, Human
ugaggcugggcucccu

SEQ ID NO: 2742143 - RNA, 21 nt, Human
ugaggugggaggaucucuuga

SEQ ID NO: 2742144 - RNA, 21 nt, Human
ugaggcugggcucccuuccca

SEQ ID NO: 2742145 - RNA, 18 nt, Human
ugaggucagagccugcag

SEQ ID NO: 2742146 - RNA, 19 nt, Human
ugaggucagagccugcagu

SEQ ID NO: 2742147 - RNA, 11 nt, Human
ugagcucagga

SEQ ID NO: 2742148 - RNA, 19 nt, Human
ugagcucaggaguuugaga

SEQ ID NO: 2742149 - RNA, 23 nt, Human
ugagccgagaucacgccacugca

SEQ ID NO: 2742150 - RNA, 20 nt, Human
ugagcagggcucagcgggga

SEQ ID NO: 2742151 - RNA, 22 nt, Human
ugagcagggcucagcggggaca

SEQ ID NO: 2742152 - RNA, 23 nt, Human
ugagcagggcucagcggggacag

SEQ ID NO: 2742153 - RNA, 22 nt, Human
ugagccgagaucacgccacugc

SEQ ID NO: 2742154 - RNA, 22 nt, Human
ugaggaugaaaaaauaacacug

SEQ ID NO: 2742155 - RNA, 13 nt, Human
ucugucuaggaau

SEQ ID NO: 2742156 - RNA, 20 nt, Human
ucuguccuacucugugucag

SEQ ID NO: 2742157 - RNA, 15 nt, Human
ucuguacagagccca

SEQ ID NO: 2742158 - RNA, 14 nt, Human
ucuguacagagccc

SEQ ID NO: 2742159 - RNA, 12 nt, Human
ucuguccuggga

SEQ ID NO: 2742160 - RNA, 17 nt, Human
ucugucgcccagucugg

SEQ ID NO: 2742161 - RNA, 16 nt, Human
ucuggugacuuuccuc

SEQ ID NO: 2742162 - RNA, 11 nt, Human
ucugcugcugg

SEQ ID NO: 2742163 - RNA, 13 nt, Human
ucugcugcuggcu

SEQ ID NO: 2742164 - RNA, 17 nt, Human
ucugccugcccaggccc

SEQ ID NO: 2742165 - RNA, 18 nt, Human
ucugccugcccaggcccc

SEQ ID NO: 2742166 - RNA, 20 nt, Human
ucugccugcccaggccccug

SEQ ID NO: 2742167 - RNA, 17 nt, Human
ucugcugcuggcugguu

SEQ ID NO: 2742168 - RNA, 14 nt, Human
ucugcugcuggcug

SEQ ID NO: 2742169 - RNA, 15 nt, Human
ucugcugcuggcugg

SEQ ID NO: 2742170 - RNA, 18 nt, Human
ucugccauauucuguugg

SEQ ID NO: 2742171 - RNA, 12 nt, Human
ucugcccacucc

SEQ ID NO: 2742172 - RNA, 22 nt, Human
ucugccauauucuguuggccag

SEQ ID NO: 2742173 - RNA, 23 nt, Human
ucugccauauucuguuggccagu

SEQ ID NO: 2742174 - RNA, 21 nt, Human
ucugccuaaggacuucuuuaa

SEQ ID NO: 2742175 - RNA, 20 nt, Human
ucugccuaaggacuucuuua

SEQ ID NO: 2742176 - RNA, 13 nt, Human
ucugcccacuccc

SEQ ID NO: 2742177 - RNA, 14 nt, Human
ucugcccacucccu

SEQ ID NO: 2742178 - RNA, 23 nt, Human
ucugccuaaggacuucuuuaauu

SEQ ID NO: 2742179 - RNA, 12 nt, Human
ucugccucccau

SEQ ID NO: 2742180 - RNA, 13 nt, Human
ucugccucccauc

SEQ ID NO: 2742181 - RNA, 15 nt, Human
ucugccucccaucac

SEQ ID NO: 2742182 - RNA, 15 nt, Human
ucugccucugacaca

SEQ ID NO: 2742183 - RNA, 18 nt, Human
ucugccucugacacacag

SEQ ID NO: 2742184 - RNA, 16 nt, Human
ucugccucccaucacc

SEQ ID NO: 2742185 - RNA, 17 nt, Human
ucugccucccaucaccc

SEQ ID NO: 2742186 - RNA, 20 nt, Human
ucugccucccaucacccgcu

SEQ ID NO: 2742187 - RNA, 21 nt, Human
ucugccucccaucacccgcua

SEQ ID NO: 2742188 - RNA, 23 nt, Human
ucugccucugacacacagcucug

SEQ ID NO: 2742189 - RNA, 21 nt, Human
ucugccucugacacacagcuc

SEQ ID NO: 2742190 - RNA, 22 nt, Human
ucugccucugacacacagcucu

SEQ ID NO: 2742191 - RNA, 19 nt, Human
ucugccugaagucacacag

SEQ ID NO: 2742192 - RNA, 20 nt, Human
ucugccugaagucacacagu

SEQ ID NO: 2742193 - RNA, 22 nt, Human
ucugaggaauccagacccggcu

SEQ ID NO: 2742194 - RNA, 18 nt, Human
ucugaggaauccagaccc

SEQ ID NO: 2742195 - RNA, 21 nt, Human
ucugaggaauccagacccggc

SEQ ID NO: 2742196 - RNA, 13 nt, Human
ucugcacuccccu

SEQ ID NO: 2742197 - RNA, 24 nt, Human
ucugagaucaaaacgguuuuacug

SEQ ID NO: 2742198 - RNA, 18 nt, Human
ucugagaggacuuuucuu

SEQ ID NO: 2742199 - RNA, 23 nt, Human
ucucauaauuuauacaggucaua

SEQ ID NO: 2742200 - RNA, 19 nt, Human
ucugacccaugcugcccug

SEQ ID NO: 2742201 - RNA, 20 nt, Human
ucugacccaugcugcccugu

SEQ ID NO: 2742202 - RNA, 22 nt, Human
ucugacccaugcugcccuguga

SEQ ID NO: 2742203 - RNA, 23 nt, Human
ucugacccaugcugcccugugag

SEQ ID NO: 2742204 - RNA, 17 nt, Human
ucuuuccacagaagcuc

SEQ ID NO: 2742205 - RNA, 17 nt, Human
ucuuuccaaaguacacu

SEQ ID NO: 2742206 - RNA, 12 nt, Human
ucuuucccuccc

SEQ ID NO: 2742207 - RNA, 23 nt, Human
ucuuucccucccuuccucuuucc

SEQ ID NO: 2742208 - RNA, 13 nt, Human
ucuuucccucccu

SEQ ID NO: 2742209 - RNA, 17 nt, Human
ucuugucucagauuuua

SEQ ID NO: 2742210 - RNA, 12 nt, Human
ucuugucucaga

SEQ ID NO: 2742211 - RNA, 15 nt, Human
ucuugucucagauuu

SEQ ID NO: 2742212 - RNA, 14 nt, Human
ucuugucucagauu

SEQ ID NO: 2742213 - RNA, 23 nt, Human
ucuuuccaaaguacacuguuuca

SEQ ID NO: 2742214 - RNA, 13 nt, Human
ucuuguguguuua

SEQ ID NO: 2742215 - RNA, 13 nt, Human
ucuuugcagacag

SEQ ID NO: 2742216 - RNA, 23 nt, Human
ucuuugagugaagcugggagaac

SEQ ID NO: 2742217 - RNA, 14 nt, Human
ucuuugcagacagg

SEQ ID NO: 2742218 - RNA, 17 nt, Human
ucuuugcagacaggcaa

SEQ ID NO: 2742219 - RNA, 13 nt, Human
ucuuuggacccug

SEQ ID NO: 2742220 - RNA, 16 nt, Human
ucuuuggacccugagg

SEQ ID NO: 2742221 - RNA, 14 nt, Human
ucuuuggacccuga

SEQ ID NO: 2742222 - RNA, 15 nt, Human
ucuuuggacccugag

SEQ ID NO: 2742223 - RNA, 19 nt, Human
ugaaaagaaaaaugagccu

SEQ ID NO: 2742224 - RNA, 15 nt, Human
ugaaaagaaaaauga

SEQ ID NO: 2742225 - RNA, 19 nt, Human
ugaaaauuauuuuguucau

SEQ ID NO: 2742226 - RNA, 20 nt, Human
ugaaaagaaaaaugagccug

SEQ ID NO: 2742227 - RNA, 22 nt, Human
ugaaaagaaaaaugagccuggc

SEQ ID NO: 2742228 - RNA, 12 nt, Human
ugaaaauuuuga

SEQ ID NO: 2742229 - RNA, 23 nt, Human
ugaaacacucaguuguucaauaa

SEQ ID NO: 2742230 - RNA, 14 nt, Human
ugaaaauucagugg

SEQ ID NO: 2742231 - RNA, 22 nt, Human
ugaaaauuauuuuguucauaca

SEQ ID NO: 2742232 - RNA, 23 nt, Human
ugaaaauuauuuuguucauacau

SEQ ID NO: 2742233 - RNA, 22 nt, Human
ugaaaacacuguucucugcccu

SEQ ID NO: 2742234 - RNA, 23 nt, Human
ugaaaacacuguucucugcccuc

SEQ ID NO: 2742235 - RNA, 17 nt, Human
ugaaaacacuguucucu

SEQ ID NO: 2742236 - RNA, 20 nt, Human
ugaaaacacuguucucugcc

SEQ ID NO: 2742237 - RNA, 21 nt, Human
ugaaaacacuguucucugccc

SEQ ID NO: 2742238 - RNA, 21 nt, Human
ugaaaacacauuuuucuuagg

SEQ ID NO: 2742239 - RNA, 14 nt, Human
ucuuauaauuuaaa

SEQ ID NO: 2742240 - RNA, 13 nt, Human
ucuuauaauuuaa

SEQ ID NO: 2742241 - RNA, 22 nt, Human
ucuuaggguuaugauuaaguaa

SEQ ID NO: 2742242 - RNA, 20 nt, Human
ucuuagguuggcaaaaaggc

SEQ ID NO: 2742243 - RNA, 23 nt, Human
ucuuagguuggcaaaaaggcagg

SEQ ID NO: 2742244 - RNA, 15 nt, Human
ucuuagauguauaua

SEQ ID NO: 2742245 - RNA, 14 nt, Human
ucuuagauguauau

SEQ ID NO: 2742246 - RNA, 17 nt, Human
ucugugucagguggggc

SEQ ID NO: 2742247 - RNA, 20 nt, Human
ucugugucagguggggcagc

SEQ ID NO: 2742248 - RNA, 14 nt, Human
ucuucagaucucua

SEQ ID NO: 2742249 - RNA, 21 nt, Human
ucuucagagacuccugcaggc

SEQ ID NO: 2742250 - RNA, 22 nt, Human
ucuuauccaacaucaacaucuu

SEQ ID NO: 2742251 - RNA, 19 nt, Human
ucuugccaaauauaaauaa

SEQ ID NO: 2742252 - RNA, 19 nt, Human
ucuugaaggaaaaugauac

SEQ ID NO: 2742253 - RNA, 14 nt, Human
ucuugcucugcuga

SEQ ID NO: 2742254 - RNA, 18 nt, Human
ucuuguagcuuuaucaaa

SEQ ID NO: 2742255 - RNA, 15 nt, Human
ucuugcucugcugac

SEQ ID NO: 2742256 - RNA, 23 nt, Human
ucuugcucugcugacagacacag

SEQ ID NO: 2742257 - RNA, 21 nt, Human
ucuugaaauauaggaacuuaa

SEQ ID NO: 2742258 - RNA, 20 nt, Human
ucuugaaauauaggaacuua

SEQ ID NO: 2742259 - RNA, 15 nt, Human
ucuugcaugaggcua

SEQ ID NO: 2742260 - RNA, 13 nt, Human
ucuugaagacuuu

SEQ ID NO: 2742261 - RNA, 22 nt, Human
ucuugaagacuuuucuuucagc

SEQ ID NO: 2742262 - RNA, 16 nt, Human
ucagcugcugaaacaa

SEQ ID NO: 2742263 - RNA, 15 nt, Human
ucagcugcuacuacu

SEQ ID NO: 2742264 - RNA, 22 nt, Human
ucaggagaguagaacagauaau

SEQ ID NO: 2742265 - RNA, 21 nt, Human
ucagcuccccucggagaagag

SEQ ID NO: 2742266 - RNA, 22 nt, Human
ucagcuccccucggagaagagc

SEQ ID NO: 2742267 - RNA, 15 nt, Human
ucagcuccagcucac

SEQ ID NO: 2742268 - RNA, 18 nt, Human
ucagcuccagcucaccag

SEQ ID NO: 2742269 - RNA, 21 nt, Human
ucagcuccagcucaccagccc

SEQ ID NO: 2742270 - RNA, 22 nt, Human
ucagcuccagcucaccagcccc

SEQ ID NO: 2742271 - RNA, 16 nt, Human
ucagccugcuccagcu

SEQ ID NO: 2742272 - RNA, 22 nt, Human
ucagccucccaaagugcuggga

SEQ ID NO: 2742273 - RNA, 12 nt, Human
ucagccucccga

SEQ ID NO: 2742274 - RNA, 20 nt, Human
ucagccucccgaauagcugg

SEQ ID NO: 2742275 - RNA, 15 nt, Human
ucagauacuggauug

SEQ ID NO: 2742276 - RNA, 14 nt, Human
ucagauacuggauu

SEQ ID NO: 2742277 - RNA, 18 nt, Human
ucagauaugauucaaaug

SEQ ID NO: 2742278 - RNA, 16 nt, Human
ucagauaugauucaaa

SEQ ID NO: 2742279 - RNA, 17 nt, Human
ucagauaugauucaaau

SEQ ID NO: 2742280 - RNA, 20 nt, Human
ucagauacuggauuguacuu

SEQ ID NO: 2742281 - RNA, 19 nt, Human
ucagauacuggauuguacu

SEQ ID NO: 2742282 - RNA, 16 nt, Human
ucagauacuggauugu

SEQ ID NO: 2742283 - RNA, 12 nt, Human
ucagccucccaa

SEQ ID NO: 2742284 - RNA, 13 nt, Human
ucagccucccaaa

SEQ ID NO: 2742285 - RNA, 15 nt, Human
ucagcauccuggcac

SEQ ID NO: 2742286 - RNA, 16 nt, Human
ucagcauccuggcacc

SEQ ID NO: 2742287 - RNA, 17 nt, Human
ucagcauccuggcaccc

SEQ ID NO: 2742288 - RNA, 18 nt, Human
ucagcauccuggcacccg

SEQ ID NO: 2742289 - RNA, 17 nt, Human
ucagcacgauuucuguu

SEQ ID NO: 2742290 - RNA, 16 nt, Human
ucagcacgauuucugu

SEQ ID NO: 2742291 - RNA, 15 nt, Human
ucagcacgauuucug

SEQ ID NO: 2742292 - RNA, 15 nt, Human
ucaguccauagcaga

SEQ ID NO: 2742293 - RNA, 21 nt, Human
ucagguggggucacucuggca

SEQ ID NO: 2742294 - RNA, 17 nt, Human
ucagguggggucacucu

SEQ ID NO: 2742295 - RNA, 20 nt, Human
ucagguggggucacucuggc

SEQ ID NO: 2742296 - RNA, 14 nt, Human
ucagguggggcagc

SEQ ID NO: 2742297 - RNA, 18 nt, Human
ucaggugcugccauccag

SEQ ID NO: 2742298 - RNA, 20 nt, Human
ucaggugcugccauccaggu

SEQ ID NO: 2742299 - RNA, 15 nt, Human
ucagguggggcagcu

SEQ ID NO: 2742300 - RNA, 16 nt, Human
ucagguggggcagcuu

SEQ ID NO: 2742301 - RNA, 21 nt, Human
ucagguggggcagcuugaggg

SEQ ID NO: 2742302 - RNA, 17 nt, Human
ucagguggggcagcuug

SEQ ID NO: 2742303 - RNA, 19 nt, Human
ucagugugucuaaauuuga

SEQ ID NO: 2742304 - RNA, 18 nt, Human
ucagugugacugaucucu

SEQ ID NO: 2742305 - RNA, 17 nt, Human
ucagucugauucccaag

SEQ ID NO: 2742306 - RNA, 19 nt, Human
ucagucugauucccaagcu

SEQ ID NO: 2742307 - RNA, 21 nt, Human
ucauggaauuggagcucgugg

SEQ ID NO: 2742308 - RNA, 15 nt, Human
ucaugaaagauucaa

SEQ ID NO: 2742309 - RNA, 19 nt, Human
ucauggaauuggagcucgu

SEQ ID NO: 2742310 - RNA, 13 nt, Human
ucaugaaagauuc

SEQ ID NO: 2742311 - RNA, 15 nt, Human
ucauacucaccucac

SEQ ID NO: 2742312 - RNA, 17 nt, Human
uccauagagagcaagac

SEQ ID NO: 2742313 - RNA, 20 nt, Human
uccauagagagcaagacgcu

SEQ ID NO: 2742314 - RNA, 17 nt, Human
ucccaacucaccccagc

SEQ ID NO: 2742315 - RNA, 18 nt, Human
ucccaacucaccccagcc

SEQ ID NO: 2742316 - RNA, 19 nt, Human
ucccaacucaccccagccc

SEQ ID NO: 2742317 - RNA, 21 nt, Human
ucccaacucaccccagcccca

SEQ ID NO: 2742318 - RNA, 18 nt, Human
ucccaccucagccucccg

SEQ ID NO: 2742319 - RNA, 16 nt, Human
ucccaccucagccucc

SEQ ID NO: 2742320 - RNA, 14 nt, Human
ucccaccucucuca

SEQ ID NO: 2742321 - RNA, 17 nt, Human
ucccaccucucucacuc

SEQ ID NO: 2742322 - RNA, 18 nt, Human
ucccaccucucucacucc

SEQ ID NO: 2742323 - RNA, 19 nt, Human
ucccaccuuggcugcaggg

SEQ ID NO: 2742324 - RNA, 21 nt, Human
ucccaccuuggcugcagggag

SEQ ID NO: 2742325 - RNA, 20 nt, Human
ucccaccucucucacuccuu

SEQ ID NO: 2742326 - RNA, 14 nt, Human
ucccacucagucca

SEQ ID NO: 2742327 - RNA, 17 nt, Human
ucccaggcauuccccag

SEQ ID NO: 2742328 - RNA, 18 nt, Human
ucccaggcauuccccagg

SEQ ID NO: 2742329 - RNA, 19 nt, Human
ucccaggcauuccccagga

SEQ ID NO: 2742330 - RNA, 15 nt, Human
ucccaugagccucag

SEQ ID NO: 2742331 - RNA, 16 nt, Human
ucccaugagccucagc

SEQ ID NO: 2742332 - RNA, 14 nt, Human
uccaagaagcccag

SEQ ID NO: 2742333 - RNA, 15 nt, Human
uccaagaagcccagg

SEQ ID NO: 2742334 - RNA, 16 nt, Human
uccaagaagcccagga

SEQ ID NO: 2742335 - RNA, 19 nt, Human
uccaagaagcccaggaaag

SEQ ID NO: 2742336 - RNA, 20 nt, Human
uccaagaccuucuccuucac

SEQ ID NO: 2742337 - RNA, 14 nt, Human
uccaagcaggacau

SEQ ID NO: 2742338 - RNA, 21 nt, Human
uccacaagagcccaggccucc

SEQ ID NO: 2742339 - RNA, 20 nt, Human
uccacaagagcccaggccuc

SEQ ID NO: 2742340 - RNA, 19 nt, Human
uccacaagagcccaggccu

SEQ ID NO: 2742341 - RNA, 21 nt, Human
uccacccugcucuccgaccag

SEQ ID NO: 2742342 - RNA, 13 nt, Human
uccacccugcucu

SEQ ID NO: 2742343 - RNA, 14 nt, Human
uccacccugcucuc

SEQ ID NO: 2742344 - RNA, 22 nt, Human
uccacugugccaugugccaggu

SEQ ID NO: 2742345 - RNA, 14 nt, Human
uccacuuucuagcc

SEQ ID NO: 2742346 - RNA, 18 nt, Human
ucuaggaggucucuaaga

SEQ ID NO: 2742347 - RNA, 18 nt, Human
ucuacucuagggaaaaac

SEQ ID NO: 2742348 - RNA, 20 nt, Human
ucuacucgaguuacagacaa

SEQ ID NO: 2742349 - RNA, 21 nt, Human
ucuacucgaguuacagacaaa

SEQ ID NO: 2742350 - RNA, 12 nt, Human
ucuagggaaaaa

SEQ ID NO: 2742351 - RNA, 13 nt, Human
ucuauauuuuaca

SEQ ID NO: 2742352 - RNA, 14 nt, Human
ucuauauuuucauu

SEQ ID NO: 2742353 - RNA, 13 nt, Human
ucuauauuuucau

SEQ ID NO: 2742354 - RNA, 13 nt, Human
ucucagauuuuau

SEQ ID NO: 2742355 - RNA, 15 nt, Human
ucucagauuuuauua

SEQ ID NO: 2742356 - RNA, 14 nt, Human
ucucagauuuuauu

SEQ ID NO: 2742357 - RNA, 19 nt, Human
ucucagauuuuauuaugua

SEQ ID NO: 2742358 - RNA, 18 nt, Human
ucucagauuuuauuaugu

SEQ ID NO: 2742359 - RNA, 17 nt, Human
ucucagauuuuauuaug

SEQ ID NO: 2742360 - RNA, 16 nt, Human
ucucagauuuuauuau

SEQ ID NO: 2742361 - RNA, 16 nt, Human
ucucauaauuuauaca

SEQ ID NO: 2742362 - RNA, 22 nt, Human
ucucauaauuuauacaggucau

SEQ ID NO: 2742363 - RNA, 14 nt, Human
ucucacuguugccc

SEQ ID NO: 2742364 - RNA, 15 nt, Human
ucucacuguugccca

SEQ ID NO: 2742365 - RNA, 19 nt, Human
ucuauauuuucauucuccu

SEQ ID NO: 2742366 - RNA, 16 nt, Human
ucuauauuuucauucu

SEQ ID NO: 2742367 - RNA, 15 nt, Human
ucuauauuuucauuc

SEQ ID NO: 2742368 - RNA, 16 nt, Human
ucucaaauuucuaaau

SEQ ID NO: 2742369 - RNA, 14 nt, Human
ucucaaauuucuaa

SEQ ID NO: 2742370 - RNA, 13 nt, Human
ucucaaauuucua

SEQ ID NO: 2742371 - RNA, 20 nt, Human
ucucacugccaugccagcuu

SEQ ID NO: 2742372 - RNA, 23 nt, Human
ucucacucugucgcccagucugg

SEQ ID NO: 2742373 - RNA, 21 nt, Human
ucucacacaugagcaucaggc

SEQ ID NO: 2742374 - RNA, 16 nt, Human
ucucacacaugagcau

SEQ ID NO: 2742375 - RNA, 18 nt, Human
ucucaaauuucuaaaucu

SEQ ID NO: 2742376 - RNA, 14 nt, Human
ucgcccagucugga

SEQ ID NO: 2742377 - RNA, 19 nt, Human
ucgcccagucuggaaugca

SEQ ID NO: 2742378 - RNA, 23 nt, Human
ucgcccagucuggaaugcagugg

SEQ ID NO: 2742379 - RNA, 18 nt, Human
ucggaaaacaugcuacac

SEQ ID NO: 2742380 - RNA, 15 nt, Human
ucggaaaacaugcua

SEQ ID NO: 2742381 - RNA, 22 nt, Human
uccuuuucgcaggauucuuccu

SEQ ID NO: 2742382 - RNA, 18 nt, Human
uccuuuucgcaggauucu

SEQ ID NO: 2742383 - RNA, 17 nt, Human
ucgcaggauucuuccuc

SEQ ID NO: 2742384 - RNA, 23 nt, Human
ucgcaggauucuuccucccuccc

SEQ ID NO: 2742385 - RNA, 21 nt, Human
ucgcaggauucuuccucccuc

SEQ ID NO: 2742386 - RNA, 17 nt, Human
uccuugcaucaauuuuu

SEQ ID NO: 2742387 - RNA, 18 nt, Human
uccuuggugucgggcaug

SEQ ID NO: 2742388 - RNA, 21 nt, Human
uccuuggugucgggcaugaca

SEQ ID NO: 2742389 - RNA, 17 nt, Human
uccuuugugaggaagcc

SEQ ID NO: 2742390 - RNA, 18 nt, Human
uccuuugugaggaagccg

SEQ ID NO: 2742391 - RNA, 22 nt, Human
uccuuugugaggaagccgcugg

SEQ ID NO: 2742392 - RNA, 22 nt, Human
uccuuggugucgggcaugacac

SEQ ID NO: 2742393 - RNA, 20 nt, Human
uccuuaccagcagagcaccu

SEQ ID NO: 2742394 - RNA, 21 nt, Human
uccuuaccagcagagcaccuu

SEQ ID NO: 2742395 - RNA, 22 nt, Human
uccuugaaaacacuguucucug

SEQ ID NO: 2742396 - RNA, 23 nt, Human
uccuugaaaacacuguucucugc

SEQ ID NO: 2742397 - RNA, 18 nt, Human
uccugagccagauuucac

SEQ ID NO: 2742398 - RNA, 19 nt, Human
uccugagccagauuucacu

SEQ ID NO: 2742399 - RNA, 19 nt, Human
uccucuguacagagcccac

SEQ ID NO: 2742400 - RNA, 23 nt, Human
uccucuguacagagcccacgccc

SEQ ID NO: 2742401 - RNA, 17 nt, Human
uccugagccagauuuca

SEQ ID NO: 2742402 - RNA, 12 nt, Human
uccugaggcugg

SEQ ID NO: 2742403 - RNA, 15 nt, Human
uccugaggcugggcu

SEQ ID NO: 2742404 - RNA, 16 nt, Human
uccugaggcugggcuc

SEQ ID NO: 2742405 - RNA, 17 nt, Human
uccugaggcugggcucc

SEQ ID NO: 2742406 - RNA, 19 nt, Human
uccugaggcugggcucccu

SEQ ID NO: 2742407 - RNA, 14 nt, Human
uccucugcuugcca

SEQ ID NO: 2742408 - RNA, 15 nt, Human
uccucugcuugccau

SEQ ID NO: 2742409 - RNA, 16 nt, Human
uccucugcuugccauc

SEQ ID NO: 2742410 - RNA, 17 nt, Human
uccucugcuugccaucc

SEQ ID NO: 2742411 - RNA, 17 nt, Human
uccucugcugcuggcug

SEQ ID NO: 2742412 - RNA, 15 nt, Human
uccucuggccugugu

SEQ ID NO: 2742413 - RNA, 13 nt, Human
uccucuguacaga

SEQ ID NO: 2742414 - RNA, 21 nt, Human
uccuccuuuucacaguucucu

SEQ ID NO: 2742415 - RNA, 17 nt, Human
uccucuaggaggucucu

SEQ ID NO: 2742416 - RNA, 21 nt, Human
uccucuaggaggucucuaaga

SEQ ID NO: 2742417 - RNA, 12 nt, Human
uccuccucagau

SEQ ID NO: 2742418 - RNA, 12 nt, Human
uccuccaggugc

SEQ ID NO: 2742419 - RNA, 13 nt, Human
uccuccaggugca

SEQ ID NO: 2742420 - RNA, 14 nt, Human
uccuccaggugcac

SEQ ID NO: 2742421 - RNA, 18 nt, Human
uccuccaggugcacaagc

SEQ ID NO: 2742422 - RNA, 20 nt, Human
uccuccaggugcacaagcuc

SEQ ID NO: 2742423 - RNA, 22 nt, Human
uccuccaggugcacaagcucca

SEQ ID NO: 2742424 - RNA, 21 nt, Human
uccuaguuccaccaucaagcc

SEQ ID NO: 2742425 - RNA, 16 nt, Human
uccuaagcuauucagu

SEQ ID NO: 2742426 - RNA, 18 nt, Human
uccuaagcuauucaguaa

SEQ ID NO: 2742427 - RNA, 12 nt, Human
uccuaguuccac

SEQ ID NO: 2742428 - RNA, 14 nt, Human
uccuaguuccacca

SEQ ID NO: 2742429 - RNA, 17 nt, Human
uccuaguuccaccauca

SEQ ID NO: 2742430 - RNA, 17 nt, Human
ucccaugagccucagca

SEQ ID NO: 2742431 - RNA, 22 nt, Human
ucccaugagccucagcauccug

SEQ ID NO: 2742432 - RNA, 18 nt, Human
ucccucccuuccucuuuc

SEQ ID NO: 2742433 - RNA, 14 nt, Human
ucccugccaaugga

SEQ ID NO: 2742434 - RNA, 16 nt, Human
ucccugccaauggacu

SEQ ID NO: 2742435 - RNA, 13 nt, Human
ucccucuggggcu

SEQ ID NO: 2742436 - RNA, 20 nt, Human
ucccugcacuugcagacucu

SEQ ID NO: 2742437 - RNA, 17 nt, Human
ucccucuggggcuguuc

SEQ ID NO: 2742438 - RNA, 14 nt, Human
ucccuucccaccuc

SEQ ID NO: 2742439 - RNA, 16 nt, Human
ucccuucccaccucuc

SEQ ID NO: 2742440 - RNA, 17 nt, Human
ucccuucccaccucucu

SEQ ID NO: 2742441 - RNA, 21 nt, Human
ucccuucccacuggaggcaug

SEQ ID NO: 2742442 - RNA, 21 nt, Human
uccgaaagggacuuggaagcu

SEQ ID NO: 2742443 - RNA, 22 nt, Human
uccgaaagggacuuggaagcuc

SEQ ID NO: 2742444 - RNA, 21 nt, Human
uccgcuuucuacccagcgagc

SEQ ID NO: 2742445 - RNA, 16 nt, Human
ugccugguggcagcug

SEQ ID NO: 2742446 - RNA, 14 nt, Human
ugccugguggcagc

SEQ ID NO: 2742447 - RNA, 15 nt, Human
ugccugguggcagcu

SEQ ID NO: 2742448 - RNA, 18 nt, Human
ugccugggcagaaggaag

SEQ ID NO: 2742449 - RNA, 21 nt, Human
ugccugggaucccucauccuc

SEQ ID NO: 2742450 - RNA, 18 nt, Human
ugccccuggcagccccug

SEQ ID NO: 2742451 - RNA, 20 nt, Human
ugccucgaacuggcugcaaa

SEQ ID NO: 2742452 - RNA, 18 nt, Human
ugccucgaacuggcugca

SEQ ID NO: 2742453 - RNA, 19 nt, Human
ugccucgaacuggcugcaa

SEQ ID NO: 2742454 - RNA, 15 nt, Human
ugccuucucaacucc

SEQ ID NO: 2742455 - RNA, 14 nt, Human
ugcgaucuggguuc

SEQ ID NO: 2742456 - RNA, 15 nt, Human
ugcgaucuggguuca

SEQ ID NO: 2742457 - RNA, 19 nt, Human
ugcgaucuggguucacugc

SEQ ID NO: 2742458 - RNA, 20 nt, Human
ugcgaucuggguucacugca

SEQ ID NO: 2742459 - RNA, 21 nt, Human
ugcgaucuggguucacugcaa

SEQ ID NO: 2742460 - RNA, 22 nt, Human
ugcgccuacaggagugagcacu

SEQ ID NO: 2742461 - RNA, 14 nt, Human
ugcgccuacaggag

SEQ ID NO: 2742462 - RNA, 16 nt, Human
ugcgccuacaggagug

SEQ ID NO: 2742463 - RNA, 15 nt, Human
ugcuaaaugugaaug

SEQ ID NO: 2742464 - RNA, 14 nt, Human
ugcuccucucccca

SEQ ID NO: 2742465 - RNA, 15 nt, Human
ugcuaagcauuccaa

SEQ ID NO: 2742466 - RNA, 19 nt, Human
ugcuaagcauuccaacuau

SEQ ID NO: 2742467 - RNA, 15 nt, Human
ugcucacauaucugu

SEQ ID NO: 2742468 - RNA, 16 nt, Human
ugcucacauaucuguc

SEQ ID NO: 2742469 - RNA, 17 nt, Human
ugcugaaacaacaaaua

SEQ ID NO: 2742470 - RNA, 18 nt, Human
ugcuccuuucuuguuuua

SEQ ID NO: 2742471 - RNA, 17 nt, Human
ugcuccucuccccagca

SEQ ID NO: 2742472 - RNA, 18 nt, Human
ugcugauggugcaaugac

SEQ ID NO: 2742473 - RNA, 13 nt, Human
ugcugauggugca

SEQ ID NO: 2742474 - RNA, 15 nt, Human
ugcugauggugcaau

SEQ ID NO: 2742475 - RNA, 17 nt, Human
ugcugauggugcaauga

SEQ ID NO: 2742476 - RNA, 22 nt, Human
ugcugacagacacaggcccggc

SEQ ID NO: 2742477 - RNA, 23 nt, Human
ugcugacagacacaggcccggcu

SEQ ID NO: 2742478 - RNA, 13 nt, Human
ugcugaaggcucg

SEQ ID NO: 2742479 - RNA, 12 nt, Human
ugcugaaggcuc

SEQ ID NO: 2742480 - RNA, 13 nt, Human
ugcugcuggcugg

SEQ ID NO: 2742481 - RNA, 23 nt, Human
ugcugcaguugccagucaccccg

SEQ ID NO: 2742482 - RNA, 18 nt, Human
ugcugcaguugccaguca

SEQ ID NO: 2742483 - RNA, 18 nt, Human
ugcacggugaauggcuuu

SEQ ID NO: 2742484 - RNA, 14 nt, Human
ugcacggugaaugg

SEQ ID NO: 2742485 - RNA, 17 nt, Human
ugcaccgggccacagag

SEQ ID NO: 2742486 - RNA, 22 nt, Human
ugcaccgggccacagagaaagu

SEQ ID NO: 2742487 - RNA, 20 nt, Human
ugaguccccuguuuguuucu

SEQ ID NO: 2742488 - RNA, 14 nt, Human
ugcaccgggccaca

SEQ ID NO: 2742489 - RNA, 15 nt, Human
ugcaccgggccacag

SEQ ID NO: 2742490 - RNA, 19 nt, Human
ugaguccccuguuuguuuc

SEQ ID NO: 2742491 - RNA, 23 nt, Human
ugcaccggcuggccuggccccuc

SEQ ID NO: 2742492 - RNA, 12 nt, Human
ugcacuuuguuc

SEQ ID NO: 2742493 - RNA, 14 nt, Human
ugcacuuuguucug

SEQ ID NO: 2742494 - RNA, 23 nt, Human
ugcagcaauaaagcagcguuucu

SEQ ID NO: 2742495 - RNA, 20 nt, Human
ugcagcaauaaagcagcguu

SEQ ID NO: 2742496 - RNA, 16 nt, Human
ugcagugcuuccaagg

SEQ ID NO: 2742497 - RNA, 15 nt, Human
ugcaggcagccaggc

SEQ ID NO: 2742498 - RNA, 13 nt, Human
ugcaggcagccag

SEQ ID NO: 2742499 - RNA, 14 nt, Human
ugcaggcagccagg

SEQ ID NO: 2742500 - RNA, 15 nt, Human
ugcaguucugaagaa

SEQ ID NO: 2742501 - RNA, 16 nt, Human
ugcaguucugaagaag

SEQ ID NO: 2742502 - RNA, 17 nt, Human
ugcaguucugaagaaga

SEQ ID NO: 2742503 - RNA, 18 nt, Human
ugcaguucugaagaagau

SEQ ID NO: 2742504 - RNA, 14 nt, Human
ugcaguucugaaga

SEQ ID NO: 2742505 - RNA, 22 nt, Human
ugcagugguaugaucacggcuc

SEQ ID NO: 2742506 - RNA, 19 nt, Human
ugcaguucugaagaagaug

SEQ ID NO: 2742507 - RNA, 22 nt, Human
ugcaguucugaagaagauggua

SEQ ID NO: 2742508 - RNA, 13 nt, Human
ugcaguugccagu

SEQ ID NO: 2742509 - RNA, 14 nt, Human
ugcaguugccaguc

SEQ ID NO: 2742510 - RNA, 15 nt, Human
ugcaguugccaguca

SEQ ID NO: 2742511 - RNA, 14 nt, Human
ugccaucccucccu

SEQ ID NO: 2742512 - RNA, 11 nt, Human
ugccaucccuc

SEQ ID NO: 2742513 - RNA, 12 nt, Human
ugccaucccucc

SEQ ID NO: 2742514 - RNA, 21 nt, Human
ugccauccagguucagcuugu

SEQ ID NO: 2742515 - RNA, 20 nt, Human
ugccauccagguucagcuug

SEQ ID NO: 2742516 - RNA, 13 nt, Human
ugcccaccuggcc

SEQ ID NO: 2742517 - RNA, 13 nt, Human
ugcccaggcuggc

SEQ ID NO: 2742518 - RNA, 11 nt, Human
ugcccaggcug

SEQ ID NO: 2742519 - RNA, 16 nt, Human
ugcccacucccugcaa

SEQ ID NO: 2742520 - RNA, 14 nt, Human
ugcccacucccugc

SEQ ID NO: 2742521 - RNA, 15 nt, Human
ugcccacucccugca

SEQ ID NO: 2742522 - RNA, 19 nt, Human
ugccccucaacucuccucc

SEQ ID NO: 2742523 - RNA, 17 nt, Human
ugccccuggcagccccu

SEQ ID NO: 2742524 - RNA, 23 nt, Human
ugccccucaacucuccuccagag

SEQ ID NO: 2742525 - RNA, 19 nt, Human
ugccacccuggggagaaag

SEQ ID NO: 2742526 - RNA, 22 nt, Human
ugccacuacggaauaguuggcu

SEQ ID NO: 2742527 - RNA, 18 nt, Human
ugccagguuuuuggucug

SEQ ID NO: 2742528 - RNA, 19 nt, Human
ugccagguuuuuggucuga

SEQ ID NO: 2742529 - RNA, 22 nt, Human
ugccagguuuuuggucugaccc

SEQ ID NO: 2742530 - RNA, 18 nt, Human
ugccaaauauaaauaaaa

SEQ ID NO: 2742531 - RNA, 17 nt, Human
ugccaaauauaaauaaa

SEQ ID NO: 2742532 - RNA, 22 nt, Human
ugccaaauauaaauaaaaauaa

SEQ ID NO: 2742533 - RNA, 19 nt, Human
ugccaaauauaaauaaaaa

SEQ ID NO: 2742534 - RNA, 19 nt, Human
ugcaucaagaugugacaug

SEQ ID NO: 2742535 - RNA, 14 nt, Human
ugcaucaagaugug

SEQ ID NO: 2742536 - RNA, 14 nt, Human
ugggaguacaaaag

SEQ ID NO: 2742537 - RNA, 22 nt, Human
ugggagcugccuguucagcucc

SEQ ID NO: 2742538 - RNA, 17 nt, Human
ugggagcugccuguuca

SEQ ID NO: 2742539 - RNA, 21 nt, Human
ugggagcugccuguucagcuc

SEQ ID NO: 2742540 - RNA, 15 nt, Human
ugggagugagcuggu

SEQ ID NO: 2742541 - RNA, 15 nt, Human
ugggauccuccaggu

SEQ ID NO: 2742542 - RNA, 15 nt, Human
ugggcagaggaaagc

SEQ ID NO: 2742543 - RNA, 16 nt, Human
ugggauuacaggugug

SEQ ID NO: 2742544 - RNA, 18 nt, Human
ugggauccuccaggugca

SEQ ID NO: 2742545 - RNA, 13 nt, Human
ugggauccuggag

SEQ ID NO: 2742546 - RNA, 13 nt, Human
ugggacacccugu

SEQ ID NO: 2742547 - RNA, 12 nt, Human
ugggacacccug

SEQ ID NO: 2742548 - RNA, 12 nt, Human
ugggagcugccu

SEQ ID NO: 2742549 - RNA, 13 nt, Human
ugggagcugccug

SEQ ID NO: 2742550 - RNA, 14 nt, Human
ugggagcugccugu

SEQ ID NO: 2742551 - RNA, 13 nt, Human
ugggagcaaaaga

SEQ ID NO: 2742552 - RNA, 21 nt, Human
uggcuugaguuuaaauuguaa

SEQ ID NO: 2742553 - RNA, 13 nt, Human
uggcuuuucugau

SEQ ID NO: 2742554 - RNA, 17 nt, Human
uggcuuuucugauccag

SEQ ID NO: 2742555 - RNA, 14 nt, Human
uggcuuuucugauc

SEQ ID NO: 2742556 - RNA, 14 nt, Human
uggcuuuugugcau

SEQ ID NO: 2742557 - RNA, 19 nt, Human
uggcuuuucugauccaguu

SEQ ID NO: 2742558 - RNA, 18 nt, Human
uggcuuuucugauccagu

SEQ ID NO: 2742559 - RNA, 16 nt, Human
uggcuuccuggcaaua

SEQ ID NO: 2742560 - RNA, 22 nt, Human
uggcuuccuaaaauucagugga

SEQ ID NO: 2742561 - RNA, 21 nt, Human
uggcugcuucaaggauccuga

SEQ ID NO: 2742562 - RNA, 16 nt, Human
uggcugcuucaaggau

SEQ ID NO: 2742563 - RNA, 21 nt, Human
uggcugggggccucagugcca

SEQ ID NO: 2742564 - RNA, 21 nt, Human
ugguauguuuucaggcuagau

SEQ ID NO: 2742565 - RNA, 23 nt, Human
ugguauuggcuagagguucaaag

SEQ ID NO: 2742566 - RNA, 18 nt, Human
ugguaugaucacggcuca

SEQ ID NO: 2742567 - RNA, 21 nt, Human
uggguuucuaaagcugccagc

SEQ ID NO: 2742568 - RNA, 17 nt, Human
uggguuucuaaagcugc

SEQ ID NO: 2742569 - RNA, 18 nt, Human
uggguuucuaaagcugcc

SEQ ID NO: 2742570 - RNA, 16 nt, Human
uggguaacuagggaag

SEQ ID NO: 2742571 - RNA, 19 nt, Human
ugggguuuaucagaauucu

SEQ ID NO: 2742572 - RNA, 22 nt, Human
uggguucuacccaggugcuagg

SEQ ID NO: 2742573 - RNA, 15 nt, Human
uggguucuacccagg

SEQ ID NO: 2742574 - RNA, 16 nt, Human
uggguucuacccaggu

SEQ ID NO: 2742575 - RNA, 17 nt, Human
ugggcuucaguggcagc

SEQ ID NO: 2742576 - RNA, 15 nt, Human
ugggcuucaguggca

SEQ ID NO: 2742577 - RNA, 16 nt, Human
ugggcuaguugggcuu

SEQ ID NO: 2742578 - RNA, 17 nt, Human
ugggcuggugucaccug

SEQ ID NO: 2742579 - RNA, 23 nt, Human
ugggcuggguucuacccaggugc

SEQ ID NO: 2742580 - RNA, 22 nt, Human
ugggcuaagugauccucccacc

SEQ ID NO: 2742581 - RNA, 16 nt, Human
ugggcagaggaaagca

SEQ ID NO: 2742582 - RNA, 17 nt, Human
ugggggcugggcagagg

SEQ ID NO: 2742583 - RNA, 18 nt, Human
ugggggcugggcagagga

SEQ ID NO: 2742584 - RNA, 15 nt, Human
ugggggugcauuuga

SEQ ID NO: 2742585 - RNA, 12 nt, Human
ugggggugcauu

SEQ ID NO: 2742586 - RNA, 19 nt, Human
ugggggcugggcagaggaa

SEQ ID NO: 2742587 - RNA, 12 nt, Human
uggggauucuua

SEQ ID NO: 2742588 - RNA, 16 nt, Human
uggggauucuuaaagu

SEQ ID NO: 2742589 - RNA, 13 nt, Human
uggggauucuuaa

SEQ ID NO: 2742590 - RNA, 20 nt, Human
ugggggaucacagccucuga

SEQ ID NO: 2742591 - RNA, 20 nt, Human
uggggauucuuaaaguugaa

SEQ ID NO: 2742592 - RNA, 18 nt, Human
uggggauucuuaaaguug

SEQ ID NO: 2742593 - RNA, 21 nt, Human
ugggggaucacagccucugaa

SEQ ID NO: 2742594 - RNA, 11 nt, Human
uggagggaagc

SEQ ID NO: 2742595 - RNA, 20 nt, Human
uggaggaaggaaacccagcu

SEQ ID NO: 2742596 - RNA, 12 nt, Human
uggaggaaggaa

SEQ ID NO: 2742597 - RNA, 18 nt, Human
uggaggaaggaaacccag

SEQ ID NO: 2742598 - RNA, 24 nt, Human
uggauuuaacagaaauguacagca

SEQ ID NO: 2742599 - RNA, 20 nt, Human
uggauuuaacagaaauguac

SEQ ID NO: 2742600 - RNA, 20 nt, Human
uggccagaugcaccagcccu

SEQ ID NO: 2742601 - RNA, 21 nt, Human
uggccagaugcaccagcccuu

SEQ ID NO: 2742602 - RNA, 21 nt, Human
uggcacccggccccugcuggu

SEQ ID NO: 2742603 - RNA, 13 nt, Human
uggcagcugcuuu

SEQ ID NO: 2742604 - RNA, 21 nt, Human
uggaacauaaaauacaauguu

SEQ ID NO: 2742605 - RNA, 20 nt, Human
uggaacauaaaauacaaugu

SEQ ID NO: 2742606 - RNA, 20 nt, Human
uggaaagaguaggaagacuu

SEQ ID NO: 2742607 - RNA, 23 nt, Human
uggaaacuucagcgguuuauaua

SEQ ID NO: 2742608 - RNA, 21 nt, Human
uggaaagacuuuuccaacccu

SEQ ID NO: 2742609 - RNA, 17 nt, Human
uggaaacaagucaguca

SEQ ID NO: 2742610 - RNA, 20 nt, Human
uggaaaaauagccugccucu

SEQ ID NO: 2742611 - RNA, 17 nt, Human
uggaaaaauagccugcc

SEQ ID NO: 2742612 - RNA, 22 nt, Human
uggaauaauccuaaacauauga

SEQ ID NO: 2742613 - RNA, 17 nt, Human
uggaauaaggagaauga

SEQ ID NO: 2742614 - RNA, 16 nt, Human
uggaauauauaaccag

SEQ ID NO: 2742615 - RNA, 15 nt, Human
uggaauauauaacca

SEQ ID NO: 2742616 - RNA, 14 nt, Human
uggaauaacaugua

SEQ ID NO: 2742617 - RNA, 19 nt, Human
uggaauaacauguaauuaa

SEQ ID NO: 2742618 - RNA, 15 nt, Human
uggaauaacauguaa

SEQ ID NO: 2742619 - RNA, 19 nt, Human
uggaacgcguugaaauugu

SEQ ID NO: 2742620 - RNA, 18 nt, Human
uggaacgcguugaaauug

SEQ ID NO: 2742621 - RNA, 13 nt, Human
uggacaugcacag

SEQ ID NO: 2742622 - RNA, 19 nt, Human
uggacaugcacagcuaaca

SEQ ID NO: 2742623 - RNA, 16 nt, Human
uggaaugcuguguuaa

SEQ ID NO: 2742624 - RNA, 19 nt, Human
ugugcuaguaauuggaaag

SEQ ID NO: 2742625 - RNA, 19 nt, Human
ugugcgccuacaggaguga

SEQ ID NO: 2742626 - RNA, 14 nt, Human
ugugcgccuacagg

SEQ ID NO: 2742627 - RNA, 23 nt, Human
ugugcauuaucuagauacuguau

SEQ ID NO: 2742628 - RNA, 21 nt, Human
ugugcauuaucuagauacugu

SEQ ID NO: 2742629 - RNA, 20 nt, Human
ugugcauuaucuagauacug

SEQ ID NO: 2742630 - RNA, 14 nt, Human
ugugcauuaucuag

SEQ ID NO: 2742631 - RNA, 19 nt, Human
ugugcauuaucuagauacu

SEQ ID NO: 2742632 - RNA, 16 nt, Human
ugugcauuaucuagau

SEQ ID NO: 2742633 - RNA, 14 nt, Human
ugugcacguacaca

SEQ ID NO: 2742634 - RNA, 18 nt, Human
uguggacacagcucuucu

SEQ ID NO: 2742635 - RNA, 19 nt, Human
uguggacacagcucuucuc

SEQ ID NO: 2742636 - RNA, 23 nt, Human
uguggcgcagcauauucaggaag

SEQ ID NO: 2742637 - RNA, 12 nt, Human
uguguagggcgg

SEQ ID NO: 2742638 - RNA, 22 nt, Human
ugugggcuaguugggcuuccuc

SEQ ID NO: 2742639 - RNA, 14 nt, Human
ugucuuuggacccu

SEQ ID NO: 2742640 - RNA, 16 nt, Human
ugucuuuggacccuga

SEQ ID NO: 2742641 - RNA, 21 nt, Human
ugucuuuucuugcaugaggcu

SEQ ID NO: 2742642 - RNA, 21 nt, Human
ugugaaaagaaaaaugagccu

SEQ ID NO: 2742643 - RNA, 23 nt, Human
ugugaaaagaaaaaugagccugg

SEQ ID NO: 2742644 - RNA, 23 nt, Human
ugucuuuucuugcaugaggcuag

SEQ ID NO: 2742645 - RNA, 19 nt, Human
ugugagucaccaagcccag

SEQ ID NO: 2742646 - RNA, 21 nt, Human
ugugagucaccaagcccaguu

SEQ ID NO: 2742647 - RNA, 15 nt, Human
ugugagucaccaagc

SEQ ID NO: 2742648 - RNA, 17 nt, Human
ugugagucaccaagccc

SEQ ID NO: 2742649 - RNA, 15 nt, Human
ugugacauguuuuau

SEQ ID NO: 2742650 - RNA, 21 nt, Human
ugugaauguugugauguauuc

SEQ ID NO: 2742651 - RNA, 18 nt, Human
ugugaagugaaugaaaca

SEQ ID NO: 2742652 - RNA, 12 nt, Human
ugugaggaagcc

SEQ ID NO: 2742653 - RNA, 20 nt, Human
ugugaggaagccgcuggggc

SEQ ID NO: 2742654 - RNA, 13 nt, Human
ugugaggaagccg

SEQ ID NO: 2742655 - RNA, 18 nt, Human
ugugaggaagccgcuggg

SEQ ID NO: 2742656 - RNA, 15 nt, Human
uguaugauucccagc

SEQ ID NO: 2742657 - RNA, 21 nt, Human
uguauugugcgcuaaacuuuu

SEQ ID NO: 2742658 - RNA, 22 nt, Human
uguauucucuccuguaccucuu

SEQ ID NO: 2742659 - RNA, 19 nt, Human
uguauuuuacuaauaaaau

SEQ ID NO: 2742660 - RNA, 17 nt, Human
ugucacacacuuuggcu

SEQ ID NO: 2742661 - RNA, 12 nt, Human
ugucacaggcag

SEQ ID NO: 2742662 - RNA, 16 nt, Human
ugucauuugagcaggg

SEQ ID NO: 2742663 - RNA, 19 nt, Human
ugucauuugagcagggcuc

SEQ ID NO: 2742664 - RNA, 13 nt, Human
ugucaccugaaga

SEQ ID NO: 2742665 - RNA, 13 nt, Human
uguccccaccgca

SEQ ID NO: 2742666 - RNA, 19 nt, Human
uguccccaccgcagacagg

SEQ ID NO: 2742667 - RNA, 22 nt, Human
uguccccaccgcagacaggacc

SEQ ID NO: 2742668 - RNA, 18 nt, Human
uguccccaccgcagacag

SEQ ID NO: 2742669 - RNA, 12 nt, Human
uguccuacucug

SEQ ID NO: 2742670 - RNA, 17 nt, Human
uguccuacucuguguca

SEQ ID NO: 2742671 - RNA, 16 nt, Human
uguccccgacccuugc

SEQ ID NO: 2742672 - RNA, 20 nt, Human
uguccuacccacccuccuuu

SEQ ID NO: 2742673 - RNA, 17 nt, Human
uguccccgacccuugcc

SEQ ID NO: 2742674 - RNA, 22 nt, Human
uguaguguuggagaagaacuga

SEQ ID NO: 2742675 - RNA, 18 nt, Human
uguagcauccuggaauau

SEQ ID NO: 2742676 - RNA, 17 nt, Human
uguagcauccuggaaua

SEQ ID NO: 2742677 - RNA, 16 nt, Human
uguagcauccuggaau

SEQ ID NO: 2742678 - RNA, 14 nt, Human
uguagcauccugga

SEQ ID NO: 2742679 - RNA, 22 nt, Human
uguacgaagaguauuuuugaca

SEQ ID NO: 2742680 - RNA, 15 nt, Human
uguacgucugacagg

SEQ ID NO: 2742681 - RNA, 14 nt, Human
uguacgaagaguau

SEQ ID NO: 2742682 - RNA, 19 nt, Human
uguacugcauaugaaagga

SEQ ID NO: 2742683 - RNA, 18 nt, Human
uguacagagcccacgccc

SEQ ID NO: 2742684 - RNA, 17 nt, Human
uguaauuaaguacuaug

SEQ ID NO: 2742685 - RNA, 13 nt, Human
uguacagagccca

SEQ ID NO: 2742686 - RNA, 16 nt, Human
uguacagagcccacgc

SEQ ID NO: 2742687 - RNA, 17 nt, Human
uguacagagcccacgcc

SEQ ID NO: 2742688 - RNA, 18 nt, Human
uuaaaauacacacucaaa

SEQ ID NO: 2742689 - RNA, 22 nt, Human
uuaaacuuaaucuaaauggaac

SEQ ID NO: 2742690 - RNA, 14 nt, Human
uuaaaacccaagug

SEQ ID NO: 2742691 - RNA, 14 nt, Human
uuaaagccauguuu

SEQ ID NO: 2742692 - RNA, 12 nt, Human
uuaaagccaugu

SEQ ID NO: 2742693 - RNA, 20 nt, Human
uuaaagccauguuuauuaca

SEQ ID NO: 2742694 - RNA, 18 nt, Human
uuaaagccauguuuauua

SEQ ID NO: 2742695 - RNA, 11 nt, Human
uuaaaugcacc

SEQ ID NO: 2742696 - RNA, 14 nt, Human
uuaaaugcccagcc

SEQ ID NO: 2742697 - RNA, 15 nt, Human
uuaaaugcccagccc

SEQ ID NO: 2742698 - RNA, 16 nt, Human
uuaaaugcccagcccc

SEQ ID NO: 2742699 - RNA, 15 nt, Human
uuaaaaaaaaaauug

SEQ ID NO: 2742700 - RNA, 17 nt, Human
uguuuuaagaggcaggg

SEQ ID NO: 2742701 - RNA, 19 nt, Human
uguuuuaaggaugcuugua

SEQ ID NO: 2742702 - RNA, 23 nt, Human
uguuuuaaggaugcuuguacaua

SEQ ID NO: 2742703 - RNA, 22 nt, Human
uguuuuaaggaugcuuguacau

SEQ ID NO: 2742704 - RNA, 19 nt, Human
uguuuccauauuuuauagg

SEQ ID NO: 2742705 - RNA, 15 nt, Human
uguuuccuggcacug

SEQ ID NO: 2742706 - RNA, 16 nt, Human
uguuuuaagaggcagg

SEQ ID NO: 2742707 - RNA, 23 nt, Human
uguuucuguacuuuuuggcauaa

SEQ ID NO: 2742708 - RNA, 22 nt, Human
uguuucuguacuuuuuggcaua

SEQ ID NO: 2742709 - RNA, 11 nt, Human
uguuucuguac

SEQ ID NO: 2742710 - RNA, 20 nt, Human
uuacauuuguauaaaauaau

SEQ ID NO: 2742711 - RNA, 17 nt, Human
uuacauuuuuaagugcu

SEQ ID NO: 2742712 - RNA, 12 nt, Human
uuacauuuuuaa

SEQ ID NO: 2742713 - RNA, 12 nt, Human
uuacauuguaaa

SEQ ID NO: 2742714 - RNA, 13 nt, Human
uuacauuguaaau

SEQ ID NO: 2742715 - RNA, 12 nt, Human
uuacagaagccc

SEQ ID NO: 2742716 - RNA, 20 nt, Human
uuacacuuuaugcacaaaau

SEQ ID NO: 2742717 - RNA, 13 nt, Human
uuacacuuuaugc

SEQ ID NO: 2742718 - RNA, 19 nt, Human
uuaauauuaaagccauguu

SEQ ID NO: 2742719 - RNA, 18 nt, Human
uuaauauuaaagccaugu

SEQ ID NO: 2742720 - RNA, 16 nt, Human
uuaaugauaaguaaau

SEQ ID NO: 2742721 - RNA, 22 nt, Human
uuaauuaaaacacaacaucuuu

SEQ ID NO: 2742722 - RNA, 13 nt, Human
uuaacuuuuauaa

SEQ ID NO: 2742723 - RNA, 12 nt, Human
uuaacuuuuaua

SEQ ID NO: 2742724 - RNA, 13 nt, Human
uuaaaugcccagc

SEQ ID NO: 2742725 - RNA, 14 nt, Human
uuaacuuuuauaaa

SEQ ID NO: 2742726 - RNA, 23 nt, Human
uuaagcauauauuuuuauauuua

SEQ ID NO: 2742727 - RNA, 11 nt, Human
uuaauauuaaa

SEQ ID NO: 2742728 - RNA, 17 nt, Human
uuaauauuaaagccaug

SEQ ID NO: 2742729 - RNA, 16 nt, Human
uuaauauuaaagccau

SEQ ID NO: 2742730 - RNA, 14 nt, Human
uuaauauuaaagcc

SEQ ID NO: 2742731 - RNA, 13 nt, Human
uuaauauuaaagc

SEQ ID NO: 2742732 - RNA, 20 nt, Human
uguugacaugggacauuugc

SEQ ID NO: 2742733 - RNA, 23 nt, Human
uguucuuucuggcuaugcauuug

SEQ ID NO: 2742734 - RNA, 21 nt, Human
uguucuggcucuuccaggcug

SEQ ID NO: 2742735 - RNA, 17 nt, Human
uguucuggcucuuccag

SEQ ID NO: 2742736 - RNA, 20 nt, Human
uguucuggcucuuccaggcu

SEQ ID NO: 2742737 - RNA, 15 nt, Human
uguucucucuucucc

SEQ ID NO: 2742738 - RNA, 16 nt, Human
uguucucucuucucca

SEQ ID NO: 2742739 - RNA, 14 nt, Human
uguucaugaaagau

SEQ ID NO: 2742740 - RNA, 13 nt, Human
uguucaugaaaga

SEQ ID NO: 2742741 - RNA, 19 nt, Human
uguucaucauccuaagcua

SEQ ID NO: 2742742 - RNA, 12 nt, Human
uguucuggcucu

SEQ ID NO: 2742743 - RNA, 13 nt, Human
uguucuggcucuu

SEQ ID NO: 2742744 - RNA, 16 nt, Human
uguucuggcucuucca

SEQ ID NO: 2742745 - RNA, 13 nt, Human
uguucucugcccu

SEQ ID NO: 2742746 - RNA, 14 nt, Human
uguucucugcccuc

SEQ ID NO: 2742747 - RNA, 15 nt, Human
uguucucugcccucc

SEQ ID NO: 2742748 - RNA, 16 nt, Human
uguucucugcccucca

SEQ ID NO: 2742749 - RNA, 16 nt, Human
uguuggagaagaacug

SEQ ID NO: 2742750 - RNA, 17 nt, Human
uguuggagaagaacuga

SEQ ID NO: 2742751 - RNA, 14 nt, Human
uguuggagaagaac

SEQ ID NO: 2742752 - RNA, 19 nt, Human
uguuggagaagaacugaaa

SEQ ID NO: 2742753 - RNA, 20 nt, Human
uguuggagaagaacugaaau

SEQ ID NO: 2742754 - RNA, 15 nt, Human
uguuggccaaagcca

SEQ ID NO: 2742755 - RNA, 15 nt, Human
uguuggccaggcugg

SEQ ID NO: 2742756 - RNA, 16 nt, Human
uguuggccaggcuggu

SEQ ID NO: 2742757 - RNA, 14 nt, Human
uguuuaaaaucauu

SEQ ID NO: 2742758 - RNA, 18 nt, Human
uguuuaaaaucauuucug

SEQ ID NO: 2742759 - RNA, 17 nt, Human
uguuuaaaaucauuucu

SEQ ID NO: 2742760 - RNA, 19 nt, Human
uguuggcugggggccucag

SEQ ID NO: 2742761 - RNA, 17 nt, Human
uguuggcugggggccuc

SEQ ID NO: 2742762 - RNA, 13 nt, Human
uguguuuugcaag

SEQ ID NO: 2742763 - RNA, 19 nt, Human
uguguuuugcaagccagau

SEQ ID NO: 2742764 - RNA, 13 nt, Human
uguguuugaagca

SEQ ID NO: 2742765 - RNA, 16 nt, Human
uguguuuauugucaaa

SEQ ID NO: 2742766 - RNA, 20 nt, Human
ugugugaaagguacuucaaa

SEQ ID NO: 2742767 - RNA, 21 nt, Human
ugugugaaagguacuucaaau

SEQ ID NO: 2742768 - RNA, 22 nt, Human
ugugugaaagguacuucaaauc

SEQ ID NO: 2742769 - RNA, 19 nt, Human
ugugugcacguacacacac

SEQ ID NO: 2742770 - RNA, 21 nt, Human
uguuaaaagaugaaaauauuu

SEQ ID NO: 2742771 - RNA, 14 nt, Human
uguuacuaaguuuu

SEQ ID NO: 2742772 - RNA, 14 nt, Human
uguucauacauauu

SEQ ID NO: 2742773 - RNA, 23 nt, Human
uguucauacauauuuuuguagca

SEQ ID NO: 2742774 - RNA, 18 nt, Human
uguucagcuccagcucac

SEQ ID NO: 2742775 - RNA, 12 nt, Human
uguucauacaua

SEQ ID NO: 2742776 - RNA, 20 nt, Human
uguucagcuccagcucacca

SEQ ID NO: 2742777 - RNA, 21 nt, Human
uguucagcuccagcucaccag

SEQ ID NO: 2742778 - RNA, 22 nt, Human
uguucagcuccagcucaccagc

SEQ ID NO: 2742779 - RNA, 17 nt, Human
uguuaguaugaggcauu

SEQ ID NO: 2742780 - RNA, 20 nt, Human
uguuaguaugaggcauuugu

SEQ ID NO: 2742781 - RNA, 19 nt, Human
uguuaguaugaggcauuug

SEQ ID NO: 2742782 - RNA, 11 nt, Human
guaaaagcauc

SEQ ID NO: 2742783 - RNA, 19 nt, Human
uggugaacuugguuuuaau

SEQ ID NO: 2742784 - RNA, 16 nt, Human
ugcugucccuuacgug

SEQ ID NO: 2742785 - RNA, 16 nt, Human
uacuguaauuugugau

SEQ ID NO: 2742786 - RNA, 15 nt, Human
uucuugguuuguaaa

SEQ ID NO: 2742787 - RNA, 22 nt, Human
uucugcuugcuugcuuuuuaau

SEQ ID NO: 2742788 - RNA, 21 nt, Human
uucuaaaggcuaccuuuguau

SEQ ID NO: 2742789 - RNA, 21 nt, Human
cugaaauggacuuuuguacau

SEQ ID NO: 2742790 - RNA, 13 nt, Human
uuuaaauuguaau

SEQ ID NO: 2742791 - RNA, 16 nt, Human
uugugauuuuuguaau

SEQ ID NO: 2742792 - RNA, 21 nt, Human
gcugaggugggaggaucucuu

SEQ ID NO: 2742793 - RNA, 15 nt, Human
ugguuuucuugugug

SEQ ID NO: 2742794 - RNA, 23 nt, Human
uuugaugcuacaggauuugaaau

SEQ ID NO: 2742795 - RNA, 14 nt, Human
uuuaauuuuggaau

SEQ ID NO: 2742796 - RNA, 13 nt, Human
uugaaauuguaau

SEQ ID NO: 2742797 - RNA, 13 nt, Human
uugaaauuugaau

SEQ ID NO: 2742798 - RNA, 16 nt, Human
uuuaauaauuuuuaau

SEQ ID NO: 2742799 - RNA, 15 nt, Human
uuggaaauuuguuau

SEQ ID NO: 2742800 - RNA, 15 nt, Human
uugugauuuugugau

SEQ ID NO: 2742801 - RNA, 15 nt, Human
acuaagagucucuau

SEQ ID NO: 2742802 - RNA, 15 nt, Human
aaaucucaauauuuc

SEQ ID NO: 2742803 - RNA, 16 nt, Human
aaaaucucaaauuugg

SEQ ID NO: 2742804 - RNA, 17 nt, Human
agugugucuaaauuuga

SEQ ID NO: 2742805 - RNA, 16 nt, Human
aguuaucaaucucuag

SEQ ID NO: 2742806 - RNA, 21 nt, Human
augaagaaguugauaugccuu

SEQ ID NO: 2742807 - RNA, 19 nt, Human
auaaaguguuugaaagcuu

SEQ ID NO: 2742808 - RNA, 20 nt, Human
acuguaagaaaauaucacuu

SEQ ID NO: 2742809 - RNA, 19 nt, Human
auauaagcuuguauuccuu

SEQ ID NO: 2742810 - RNA, 18 nt, Human
auaaaaccccaucucuac

SEQ ID NO: 2742811 - RNA, 23 nt, Human
acaaaugcauuucuaaagccauu

SEQ ID NO: 2742812 - RNA, 12 nt, Human
cugauuuguaac

SEQ ID NO: 2742813 - RNA, 17 nt, Human
cucuaggaaauauuuau

SEQ ID NO: 2742814 - RNA, 12 nt, Human
cauuauauuuau

SEQ ID NO: 2742815 - RNA, 23 nt, Human
ccaaauuaagagagucuauuuac

SEQ ID NO: 2742816 - RNA, 14 nt, Human
caacucauauuuuc

SEQ ID NO: 2742817 - RNA, 19 nt, Human
caaauccuugaagauuuac

SEQ ID NO: 2742818 - RNA, 21 nt, Human
augaauacuuuauaaaggauu

SEQ ID NO: 2742819 - RNA, 21 nt, Human
augaauuaguuuuauaugcuu

SEQ ID NO: 2742820 - RNA, 21 nt, Human
cugacacaugcugaacaucac

SEQ ID NO: 2742821 - RNA, 14 nt, Human
cugacacaccaggc

SEQ ID NO: 2742822 - RNA, 17 nt, Human
cugacacaccaggcgcu

SEQ ID NO: 2742823 - RNA, 19 nt, Human
cugacacaccaggcgcuaa

SEQ ID NO: 2742824 - RNA, 23 nt, Human
cugacacaccaggcgcuaauuca

SEQ ID NO: 2742825 - RNA, 17 nt, Human
cugaaagaggaaugaag

SEQ ID NO: 2742826 - RNA, 13 nt, Human
cugaaagaggaau

SEQ ID NO: 2742827 - RNA, 19 nt, Human
cucccagaggagccaccag

SEQ ID NO: 2742828 - RNA, 21 nt, Human
cucccagaggagccaccaguu

SEQ ID NO: 2742829 - RNA, 22 nt, Human
cucccagaggagccaccaguuc

SEQ ID NO: 2742830 - RNA, 23 nt, Human
cucccagaggagccaccaguucu

SEQ ID NO: 2742831 - RNA, 17 nt, Human
cucucuggccuucggcc

SEQ ID NO: 2742832 - RNA, 22 nt, Human
cucucuggccuucggccuccau

SEQ ID NO: 2742833 - RNA, 19 nt, Human
cucucuggccuucggccuc

SEQ ID NO: 2742834 - RNA, 14 nt, Human
cucgguggacccag

SEQ ID NO: 2742835 - RNA, 17 nt, Human
cuacuaauagaauaaag

SEQ ID NO: 2742836 - RNA, 18 nt, Human
cuacuaauagaauaaagg

SEQ ID NO: 2742837 - RNA, 13 nt, Human
cucaaaacugcac

SEQ ID NO: 2742838 - RNA, 16 nt, Human
cucaaagaaaguguau

SEQ ID NO: 2742839 - RNA, 17 nt, Human
cucaaagaaaguguauu

SEQ ID NO: 2742840 - RNA, 13 nt, Human
cucaaagaaagug

SEQ ID NO: 2742841 - RNA, 12 nt, Human
cucaccuggacu

SEQ ID NO: 2742842 - RNA, 13 nt, Human
cucaccuggacuu

SEQ ID NO: 2742843 - RNA, 23 nt, Human
cucagaaaacaaggaugaauuaa

SEQ ID NO: 2742844 - RNA, 19 nt, Human
cucagaaaacaaggaugaa

SEQ ID NO: 2742845 - RNA, 15 nt, Human
cuaaacuuuuuuucu

SEQ ID NO: 2742846 - RNA, 21 nt, Human
cuaaacuuuuuuucuguacca

SEQ ID NO: 2742847 - RNA, 17 nt, Human
cuaaacuuuuuuucugu

SEQ ID NO: 2742848 - RNA, 18 nt, Human
cuaaacuuuuuuucugua

SEQ ID NO: 2742849 - RNA, 14 nt, Human
cuaacuggacuggu

SEQ ID NO: 2742850 - RNA, 15 nt, Human
cgguuuauauaagcu

SEQ ID NO: 2742851 - RNA, 23 nt, Human
cggagaagagcuguucacagcca

SEQ ID NO: 2742852 - RNA, 24 nt, Human
cggagaagagcuguucacagccag

SEQ ID NO: 2742853 - RNA, 19 nt, Human
ccccauggagcugggcuaa

SEQ ID NO: 2742854 - RNA, 18 nt, Human
cccccuugccagacaugu

SEQ ID NO: 2742855 - RNA, 24 nt, Human
cccagccagcaguucagagcugcc

SEQ ID NO: 2742856 - RNA, 17 nt, Human
cccagcacuaaagcagu

SEQ ID NO: 2742857 - RNA, 16 nt, Human
cccagcacuaaagcag

SEQ ID NO: 2742858 - RNA, 13 nt, Human
ccccugcacucca

SEQ ID NO: 2742859 - RNA, 22 nt, Human
cccuccucugcuugccaucccu

SEQ ID NO: 2742860 - RNA, 13 nt, Human
cccuccucugcuu

SEQ ID NO: 2742861 - RNA, 15 nt, Human
ccaucccucccucca

SEQ ID NO: 2742862 - RNA, 14 nt, Human
ccaucccucccucc

SEQ ID NO: 2742863 - RNA, 13 nt, Human
ccaucccucccuc

SEQ ID NO: 2742864 - RNA, 13 nt, Human
cccaacuccagaa

SEQ ID NO: 2742865 - RNA, 23 nt, Human
ccucggagccucauccgaggcag

SEQ ID NO: 2742866 - RNA, 16 nt, Human
ccucggagccucaucc

SEQ ID NO: 2742867 - RNA, 14 nt, Human
ccucggagccucau

SEQ ID NO: 2742868 - RNA, 13 nt, Human
ccucggagccuca

SEQ ID NO: 2742869 - RNA, 17 nt, Human
ccugucucuacuaaaaa

SEQ ID NO: 2742870 - RNA, 14 nt, Human
ccuaauaaaaaggu

SEQ ID NO: 2742871 - RNA, 15 nt, Human
ccgucuucagccuag

SEQ ID NO: 2742872 - RNA, 14 nt, Human
ccgucuucagccua

SEQ ID NO: 2742873 - RNA, 15 nt, Human
ccuaauaaaaaggug

SEQ ID NO: 2742874 - RNA, 16 nt, Human
ccuaauaaaaagguga

SEQ ID NO: 2742875 - RNA, 20 nt, Human
ccuaauaaaaaggugaccau

SEQ ID NO: 2742876 - RNA, 16 nt, Human
ccucccuucucuucac

SEQ ID NO: 2742877 - RNA, 12 nt, Human
ccucggagaaga

SEQ ID NO: 2742878 - RNA, 14 nt, Human
ccucggagaagagc

SEQ ID NO: 2742879 - RNA, 23 nt, Human
cacuccagccugagcgacaguga

SEQ ID NO: 2742880 - RNA, 13 nt, Human
cacuccagccuga

SEQ ID NO: 2742881 - RNA, 12 nt, Human
cacuccagccug

SEQ ID NO: 2742882 - RNA, 20 nt, Human
cagaaauaaaguuggugaca

SEQ ID NO: 2742883 - RNA, 20 nt, Human
cagaacagccgcuccugucu

SEQ ID NO: 2742884 - RNA, 17 nt, Human
cagaacagccgcuccug

SEQ ID NO: 2742885 - RNA, 12 nt, Human
cagaacagccgc

SEQ ID NO: 2742886 - RNA, 18 nt, Human
cagaacagugauuaccag

SEQ ID NO: 2742887 - RNA, 11 nt, Human
cagaacaguga

SEQ ID NO: 2742888 - RNA, 17 nt, Human
cagaacagugauuacca

SEQ ID NO: 2742889 - RNA, 12 nt, Human
cagaacagugau

SEQ ID NO: 2742890 - RNA, 17 nt, Human
cacuuguguuuugcaag

SEQ ID NO: 2742891 - RNA, 15 nt, Human
cacuuaauguauguu

SEQ ID NO: 2742892 - RNA, 12 nt, Human
cacuuaauguau

SEQ ID NO: 2742893 - RNA, 14 nt, Human
cacuuaauguaugu

SEQ ID NO: 2742894 - RNA, 15 nt, Human
cacuuaaaaaugguu

SEQ ID NO: 2742895 - RNA, 20 nt, Human
cacugggguccuggggccuc

SEQ ID NO: 2742896 - RNA, 23 nt, Human
caauaaaauccauacauuugugu

SEQ ID NO: 2742897 - RNA, 20 nt, Human
caauaaaauccauacauuug

SEQ ID NO: 2742898 - RNA, 16 nt, Human
caaguuguuucauuga

SEQ ID NO: 2742899 - RNA, 15 nt, Human
caauaaaauggguuu

SEQ ID NO: 2742900 - RNA, 16 nt, Human
caaacagucucaggaa

SEQ ID NO: 2742901 - RNA, 17 nt, Human
caaacagucucaggaaa

SEQ ID NO: 2742902 - RNA, 15 nt, Human
caaacagucucagga

SEQ ID NO: 2742903 - RNA, 21 nt, Human
caaaaggauaaugaauacuuu

SEQ ID NO: 2742904 - RNA, 24 nt, Human
caaacccaguguuuuaggagcaug

SEQ ID NO: 2742905 - RNA, 15 nt, Human
auuuuuauauuugaa

SEQ ID NO: 2742906 - RNA, 21 nt, Human
auuuuauaucaauuuaaaaaa

SEQ ID NO: 2742907 - RNA, 13 nt, Human
auuuugaagugcu

SEQ ID NO: 2742908 - RNA, 19 nt, Human
auuuugaagugcuguuuau

SEQ ID NO: 2742909 - RNA, 22 nt, Human
auuuugaagugcuguuuauuaa

SEQ ID NO: 2742910 - RNA, 21 nt, Human
caacuacuaauagaauaaagg

SEQ ID NO: 2742911 - RNA, 13 nt, Human
caacuacuaauag

SEQ ID NO: 2742912 - RNA, 15 nt, Human
caacuacuaauagaa

SEQ ID NO: 2742913 - RNA, 19 nt, Human
caagacccaaaaggcagaa

SEQ ID NO: 2742914 - RNA, 21 nt, Human
caaaucuuaacuugaaggagu

SEQ ID NO: 2742915 - RNA, 21 nt, Human
auuccuuagcuuagaccucag

SEQ ID NO: 2742916 - RNA, 20 nt, Human
auuccuuagcuuagaccuca

SEQ ID NO: 2742917 - RNA, 23 nt, Human
auuccuuagcuuagaccucagcc

SEQ ID NO: 2742918 - RNA, 22 nt, Human
auuccuuagcuuagaccucagc

SEQ ID NO: 2742919 - RNA, 24 nt, Human
auuccuuagcuuagaccucagccu

SEQ ID NO: 2742920 - RNA, 14 nt, Human
auuaggcuguaacu

SEQ ID NO: 2742921 - RNA, 15 nt, Human
auuaggcuguaacua

SEQ ID NO: 2742922 - RNA, 17 nt, Human
auuaggcuguaacuacu

SEQ ID NO: 2742923 - RNA, 21 nt, Human
auuaggcuguaacuacuuuau

SEQ ID NO: 2742924 - RNA, 22 nt, Human
auuaugaauuacauuuguauaa

SEQ ID NO: 2742925 - RNA, 20 nt, Human
auuaugaauuacauuuguau

SEQ ID NO: 2742926 - RNA, 19 nt, Human
auuaugaauuacauuugua

SEQ ID NO: 2742927 - RNA, 22 nt, Human
auuaggcuguaacuacuuuaua

SEQ ID NO: 2742928 - RNA, 23 nt, Human
auuaggcuguaacuacuuuauaa

SEQ ID NO: 2742929 - RNA, 18 nt, Human
auuguguguuauuuaaau

SEQ ID NO: 2742930 - RNA, 16 nt, Human
auuguguguuauuuaa

SEQ ID NO: 2742931 - RNA, 15 nt, Human
auuguuuaaaaucau

SEQ ID NO: 2742932 - RNA, 20 nt, Human
auuucauaccuaucaucuua

SEQ ID NO: 2742933 - RNA, 14 nt, Human
auuucuaugaaaua

SEQ ID NO: 2742934 - RNA, 16 nt, Human
auuuaauaaaugugcc

SEQ ID NO: 2742935 - RNA, 18 nt, Human
ccacagaagcuccaggua

SEQ ID NO: 2742936 - RNA, 18 nt, Human
ccaccagucugacuguuu

SEQ ID NO: 2742937 - RNA, 16 nt, Human
ccacagaagcuccagg

SEQ ID NO: 2742938 - RNA, 20 nt, Human
cauagcucuggggugggcag

SEQ ID NO: 2742939 - RNA, 12 nt, Human
cauagcucuggg

SEQ ID NO: 2742940 - RNA, 13 nt, Human
cauagcucugggg

SEQ ID NO: 2742941 - RNA, 13 nt, Human
cauuaucucaaaa

SEQ ID NO: 2742942 - RNA, 12 nt, Human
cauuaucucaaa

SEQ ID NO: 2742943 - RNA, 15 nt, Human
caggcgcuaauucaa

SEQ ID NO: 2742944 - RNA, 18 nt, Human
cagggaggacgcucucug

SEQ ID NO: 2742945 - RNA, 17 nt, Human
cagggaggacgcucucu

SEQ ID NO: 2742946 - RNA, 15 nt, Human
cagucucaggaaauc

SEQ ID NO: 2742947 - RNA, 15 nt, Human
cagagcugcccucuc

SEQ ID NO: 2742948 - RNA, 13 nt, Human
cagagcugcccuc

SEQ ID NO: 2742949 - RNA, 17 nt, Human
cagagcugcccucuccu

SEQ ID NO: 2742950 - RNA, 22 nt, Human
cagcacagccucuuagaugcag

SEQ ID NO: 2742951 - RNA, 14 nt, Human
cagccagcaguuca

SEQ ID NO: 2742952 - RNA, 21 nt, Human
cagccagcagccagcucucag

SEQ ID NO: 2742953 - RNA, 19 nt, Human
cagccagcagccagcucuc

SEQ ID NO: 2742954 - RNA, 15 nt, Human
cagccagcagccagc

SEQ ID NO: 2742955 - RNA, 18 nt, Human
cagccagcagccagcucu

SEQ ID NO: 2742956 - RNA, 17 nt, Human
cagccagcagccagcuc

SEQ ID NO: 2742957 - RNA, 21 nt, Human
cagccagcaguucagagcugc

SEQ ID NO: 2742958 - RNA, 15 nt, Human
cagccagcaguucag

SEQ ID NO: 2742959 - RNA, 22 nt, Human
cagccagcaguucagagcugcc

SEQ ID NO: 2742960 - RNA, 20 nt, Human
cagcaguugaaaagacucca

SEQ ID NO: 2742961 - RNA, 21 nt, Human
cagcaguugaaaagacuccaa

SEQ ID NO: 2742962 - RNA, 17 nt, Human
cagcaguugaaaagacu

SEQ ID NO: 2742963 - RNA, 22 nt, Human
cagcaguugaaaagacuccaaa

SEQ ID NO: 2742964 - RNA, 18 nt, Human
cagccugagcgacaguga

SEQ ID NO: 2742965 - RNA, 19 nt, Human
cagccugagcgacagugag

SEQ ID NO: 2742966 - RNA, 20 nt, Human
cagcccuucuuuccacagaa

SEQ ID NO: 2742967 - RNA, 19 nt, Human
cagcccuucuuuccacaga

SEQ ID NO: 2742968 - RNA, 15 nt, Human
cagcccuucuuucca

SEQ ID NO: 2742969 - RNA, 23 nt, Human
cagcccuuaugcgguuaauuuug

SEQ ID NO: 2742970 - RNA, 22 nt, Human
cagcugccuccccuccucugcu

SEQ ID NO: 2742971 - RNA, 21 nt, Human
cagcugccuccccuccucugc

SEQ ID NO: 2742972 - RNA, 24 nt, Human
cagcugccuccccuccucugcuug

SEQ ID NO: 2742973 - RNA, 23 nt, Human
cagcugccuccccuccucugcuu

SEQ ID NO: 2742974 - RNA, 17 nt, Human
cagcuccccucggagaa

SEQ ID NO: 2742975 - RNA, 18 nt, Human
cagcuccccucggagaag

SEQ ID NO: 2742976 - RNA, 16 nt, Human
cagcuccccucggaga

SEQ ID NO: 2742977 - RNA, 22 nt, Human
cagcugcaagguacucugguga

SEQ ID NO: 2742978 - RNA, 19 nt, Human
cagcugcaagguacucugg

SEQ ID NO: 2742979 - RNA, 20 nt, Human
cagcugcaagguacucuggu

SEQ ID NO: 2742980 - RNA, 20 nt, Human
caggaaagagaacuuccaga

SEQ ID NO: 2742981 - RNA, 22 nt, Human
caggaaaucaaauaugcaaagc

SEQ ID NO: 2742982 - RNA, 23 nt, Human
caggaaaucaaauaugcaaagca

SEQ ID NO: 2742983 - RNA, 20 nt, Human
cuuagcuuagaccucagccu

SEQ ID NO: 2742984 - RNA, 19 nt, Human
cuuagcuuagaccucagcc

SEQ ID NO: 2742985 - RNA, 18 nt, Human
cuuagcuuagaccucagc

SEQ ID NO: 2742986 - RNA, 17 nt, Human
cuuagcuuagaccucag

SEQ ID NO: 2742987 - RNA, 16 nt, Human
cuuagcuuagaccuca

SEQ ID NO: 2742988 - RNA, 15 nt, Human
cuuagcuuagaccuc

SEQ ID NO: 2742989 - RNA, 14 nt, Human
cuuagcuuagaccu

SEQ ID NO: 2742990 - RNA, 22 nt, Human
cuuagcuuagaccucagccugu

SEQ ID NO: 2742991 - RNA, 21 nt, Human
cuuagcuuagaccucagccug

SEQ ID NO: 2742992 - RNA, 23 nt, Human
cuuagcuuagaccucagccugug

SEQ ID NO: 2742993 - RNA, 21 nt, Human
cuuaaaaaugguuuaaauggu

SEQ ID NO: 2742994 - RNA, 19 nt, Human
cuguuauaaucuuucacag

SEQ ID NO: 2742995 - RNA, 13 nt, Human
cuguuauaaucuu

SEQ ID NO: 2742996 - RNA, 16 nt, Human
cuguaacuacuuuaua

SEQ ID NO: 2742997 - RNA, 17 nt, Human
cuguaacuacuuuauaa

SEQ ID NO: 2742998 - RNA, 19 nt, Human
cuguaacuacuuuauaacu

SEQ ID NO: 2742999 - RNA, 22 nt, Human
cugucauccucaaagaaagugu

SEQ ID NO: 2743000 - RNA, 23 nt, Human
cugucauccucaaagaaagugua

SEQ ID NO: 2743001 - RNA, 20 nt, Human
cugucauccucaaagaaagu

SEQ ID NO: 2743002 - RNA, 21 nt, Human
cugucauccucaaagaaagug

SEQ ID NO: 2743003 - RNA, 17 nt, Human
cugucggagcccugucu

SEQ ID NO: 2743004 - RNA, 18 nt, Human
cuggauaguccgucucug

SEQ ID NO: 2743005 - RNA, 19 nt, Human
cuggauaguccgucucugc

SEQ ID NO: 2743006 - RNA, 21 nt, Human
cugccuccccuccucugcuug

SEQ ID NO: 2743007 - RNA, 22 nt, Human
cugcuagcacuuggagccaagg

SEQ ID NO: 2743008 - RNA, 13 nt, Human
cuucucacauuua

SEQ ID NO: 2743009 - RNA, 20 nt, Human
cuucucacauuuauauuuuu

SEQ ID NO: 2743010 - RNA, 21 nt, Human
cuucuaaguaaaaccacagca

SEQ ID NO: 2743011 - RNA, 13 nt, Human
cuucuaaguaaaa

SEQ ID NO: 2743012 - RNA, 17 nt, Human
cuucuaaguaaaaccac

SEQ ID NO: 2743013 - RNA, 20 nt, Human
cuugcuaccaguauuuagaa

SEQ ID NO: 2743014 - RNA, 17 nt, Human
cuugcuaccaguauuua

SEQ ID NO: 2743015 - RNA, 18 nt, Human
cuugcuaccaguauuuag

SEQ ID NO: 2743016 - RNA, 13 nt, Human
cuugcuaccagua

SEQ ID NO: 2743017 - RNA, 16 nt, Human
cuuggucugugagaug

SEQ ID NO: 2743018 - RNA, 19 nt, Human
cuuggucugugagaugcua

SEQ ID NO: 2743019 - RNA, 15 nt, Human
cuuggucuuauuuau

SEQ ID NO: 2743020 - RNA, 15 nt, Human
cuuggguaggcggga

SEQ ID NO: 2743021 - RNA, 16 nt, Human
gaacccaaguccaagc

SEQ ID NO: 2743022 - RNA, 17 nt, Human
gaacccaaguccaagca

SEQ ID NO: 2743023 - RNA, 17 nt, Human
gaacccgggaggcagag

SEQ ID NO: 2743024 - RNA, 16 nt, Human
gaaaagacuccaaaga

SEQ ID NO: 2743025 - RNA, 17 nt, Human
gaaaagacuccaaagaa

SEQ ID NO: 2743026 - RNA, 14 nt, Human
gaaaagacuccaaa

SEQ ID NO: 2743027 - RNA, 21 nt, Human
gaaaacuuuaugcuaagugaa

SEQ ID NO: 2743028 - RNA, 21 nt, Human
gaacaaguuguuucauugacu

SEQ ID NO: 2743029 - RNA, 19 nt, Human
gaacaaguuguuucauuga

SEQ ID NO: 2743030 - RNA, 18 nt, Human
gaaagaaaaucaggcugg

SEQ ID NO: 2743031 - RNA, 12 nt, Human
gaaagggauuuu

SEQ ID NO: 2743032 - RNA, 20 nt, Human
gaaagggauuuucagcccuc

SEQ ID NO: 2743033 - RNA, 21 nt, Human
gaugcugucuucguacuggga

SEQ ID NO: 2743034 - RNA, 16 nt, Human
gcaauaaaauggguuu

SEQ ID NO: 2743035 - RNA, 18 nt, Human
gcaauagucaaauugugu

SEQ ID NO: 2743036 - RNA, 17 nt, Human
gcacucccaccugacac

SEQ ID NO: 2743037 - RNA, 18 nt, Human
gcacucccaccugacaca

SEQ ID NO: 2743038 - RNA, 22 nt, Human
gcacucccaccugacacaccag

SEQ ID NO: 2743039 - RNA, 18 nt, Human
gccaacuaugauuauuaa

SEQ ID NO: 2743040 - RNA, 16 nt, Human
gcauuguaaaugugcu

SEQ ID NO: 2743041 - RNA, 15 nt, Human
gcagcuuauucacaa

SEQ ID NO: 2743042 - RNA, 22 nt, Human
gcaguugaaaagacuccaaaga

SEQ ID NO: 2743043 - RNA, 15 nt, Human
gagcgacagugagac

SEQ ID NO: 2743044 - RNA, 13 nt, Human
gagcgacagugag

SEQ ID NO: 2743045 - RNA, 15 nt, Human
gacuauucaaacagu

SEQ ID NO: 2743046 - RNA, 16 nt, Human
gacuauucaaacaguc

SEQ ID NO: 2743047 - RNA, 21 nt, Human
gacagcccuucuuuccacaga

SEQ ID NO: 2743048 - RNA, 20 nt, Human
gacagaaagcagaacaguga

SEQ ID NO: 2743049 - RNA, 14 nt, Human
gacagaaagcagaa

SEQ ID NO: 2743050 - RNA, 11 nt, Human
aaacacagcaa

SEQ ID NO: 2743051 - RNA, 12 nt, Human
aaacacagcaag

SEQ ID NO: 2743052 - RNA, 14 nt, Human
aaacacagcaaggg

SEQ ID NO: 2743053 - RNA, 19 nt, Human
ggggaauugaggacacuga

SEQ ID NO: 2743054 - RNA, 15 nt, Human
aaacagucucaggaa

SEQ ID NO: 2743055 - RNA, 14 nt, Human
aaacaguagugaua

SEQ ID NO: 2743056 - RNA, 12 nt, Human
aaaccacagcag

SEQ ID NO: 2743057 - RNA, 19 nt, Human
ggguccuuuugacacugcu

SEQ ID NO: 2743058 - RNA, 22 nt, Human
ggguccuuuugacacugcucua

SEQ ID NO: 2743059 - RNA, 15 nt, Human
aaacucguuaauuug

SEQ ID NO: 2743060 - RNA, 18 nt, Human
gguccuuuugacacugcu

SEQ ID NO: 2743061 - RNA, 16 nt, Human
gguccuuuugacacug

SEQ ID NO: 2743062 - RNA, 17 nt, Human
aaagcacugacuucuaa

SEQ ID NO: 2743063 - RNA, 21 nt, Human
aaagcacugacuucuaaguaa

SEQ ID NO: 2743064 - RNA, 14 nt, Human
aaagguacuucaaa

SEQ ID NO: 2743065 - RNA, 14 nt, Human
ggguggggcagugc

SEQ ID NO: 2743066 - RNA, 23 nt, Human
aaacuucagcgguuuauauaagc

SEQ ID NO: 2743067 - RNA, 19 nt, Human
aaacuucagacauagaauu

SEQ ID NO: 2743068 - RNA, 13 nt, Human
aaagacagugaaa

SEQ ID NO: 2743069 - RNA, 18 nt, Human
aaagacuauucaaacagu

SEQ ID NO: 2743070 - RNA, 19 nt, Human
aaagacuauucaaacaguc

SEQ ID NO: 2743071 - RNA, 17 nt, Human
aaagacuauucaaacag

SEQ ID NO: 2743072 - RNA, 21 nt, Human
aaagacuauucaaacagucuc

SEQ ID NO: 2743073 - RNA, 15 nt, Human
aaagacuccaaagaa

SEQ ID NO: 2743074 - RNA, 21 nt, Human
aaagacuccaaagaaauguaa

SEQ ID NO: 2743075 - RNA, 14 nt, Human
aaagacuccaaaga

SEQ ID NO: 2743076 - RNA, 15 nt, Human
aaagaggcagcuuga

SEQ ID NO: 2743077 - RNA, 15 nt, Human
aaagaggaaugaagu

SEQ ID NO: 2743078 - RNA, 16 nt, Human
aaaguuggugacagau

SEQ ID NO: 2743079 - RNA, 17 nt, Human
aaaguauguuagugcaa

SEQ ID NO: 2743080 - RNA, 23 nt, Human
aaaguucugcagauaaacaguag

SEQ ID NO: 2743081 - RNA, 20 nt, Human
aaagguauuuuaaucaccaa

SEQ ID NO: 2743082 - RNA, 18 nt, Human
aaaguauguuagugcaaa

SEQ ID NO: 2743083 - RNA, 19 nt, Human
aaauacacacucaaaucaa

SEQ ID NO: 2743084 - RNA, 23 nt, Human
aaauaauuuuuauauuugaaaua

SEQ ID NO: 2743085 - RNA, 22 nt, Human
aaauaauuuuuauauuugaaau

SEQ ID NO: 2743086 - RNA, 15 nt, Human
aaauacacacucaaa

SEQ ID NO: 2743087 - RNA, 21 nt, Human
aaauaauuuuuauauuugaaa

SEQ ID NO: 2743088 - RNA, 23 nt, Human
guacacugccuucucaacuccaa

SEQ ID NO: 2743089 - RNA, 20 nt, Human
guaauaggcguaacuaauuu

SEQ ID NO: 2743090 - RNA, 22 nt, Human
guaccaguuaauuuuuccaacu

SEQ ID NO: 2743091 - RNA, 23 nt, Human
guaccaguuaauuuuuccaacua

SEQ ID NO: 2743092 - RNA, 10 nt, Human
guaccaguua

SEQ ID NO: 2743093 - RNA, 11 nt, Human
guaccaguuaa

SEQ ID NO: 2743094 - RNA, 16 nt, Human
guaccaguuaauuuuu

SEQ ID NO: 2743095 - RNA, 20 nt, Human
guaccaguuaauuuuuccaa

SEQ ID NO: 2743096 - RNA, 18 nt, Human
aaauccauacauuugugu

SEQ ID NO: 2743097 - RNA, 15 nt, Human
aaauccauacauuug

SEQ ID NO: 2743098 - RNA, 12 nt, Human
aaaucagaaguc

SEQ ID NO: 2743099 - RNA, 18 nt, Human
aaaucagaagucaucuug

SEQ ID NO: 2743100 - RNA, 21 nt, Human
aaaucagaagucaucuugcua

SEQ ID NO: 2743101 - RNA, 17 nt, Human
aaauauuauguuaaaac

SEQ ID NO: 2743102 - RNA, 12 nt, Human
aaaucauuucug

SEQ ID NO: 2743103 - RNA, 11 nt, Human
aaaucauuucu

SEQ ID NO: 2743104 - RNA, 19 nt, Human
aaaucauuucugcaucagc

SEQ ID NO: 2743105 - RNA, 21 nt, Human
aaaucauuucugcaucagcug

SEQ ID NO: 2743106 - RNA, 22 nt, Human
aaaucauuucugcaucagcugc

SEQ ID NO: 2743107 - RNA, 23 nt, Human
aaaucauuucugcaucagcugcu

SEQ ID NO: 2743108 - RNA, 23 nt, Human
guacuguguacagaauucugcua

SEQ ID NO: 2743109 - RNA, 22 nt, Human
guacuucaaauccuugaagauu

SEQ ID NO: 2743110 - RNA, 21 nt, Human
guacuucaaauccuugaagau

SEQ ID NO: 2743111 - RNA, 15 nt, Human
guacuucaugcuguc

SEQ ID NO: 2743112 - RNA, 23 nt, Human
guagacgugcacgcacacugucu

SEQ ID NO: 2743113 - RNA, 20 nt, Human
guagacgugcacgcacacug

SEQ ID NO: 2743114 - RNA, 22 nt, Human
gggagggguaaaauuccuuagc

SEQ ID NO: 2743115 - RNA, 17 nt, Human
aaaaaugguuuaaaugg

SEQ ID NO: 2743116 - RNA, 15 nt, Human
aaaacuucagacaua

SEQ ID NO: 2743117 - RNA, 14 nt, Human
aaaaauaacaauga

SEQ ID NO: 2743118 - RNA, 18 nt, Human
aaaaauaaauauaucuac

SEQ ID NO: 2743119 - RNA, 24 nt, Human
aaaaauaaauauaucuaccccaga

SEQ ID NO: 2743120 - RNA, 20 nt, Human
gggaacccaaguccaagcau

SEQ ID NO: 2743121 - RNA, 22 nt, Human
gggacagucaccucauggaauu

SEQ ID NO: 2743122 - RNA, 21 nt, Human
gggacagucaccucauggaau

SEQ ID NO: 2743123 - RNA, 20 nt, Human
gggacagucaccucauggaa

SEQ ID NO: 2743124 - RNA, 20 nt, Human
ggcucagccuggugggccuc

SEQ ID NO: 2743125 - RNA, 13 nt, Human
ggcucagccuggu

SEQ ID NO: 2743126 - RNA, 14 nt, Human
ggcuccacuugguc

SEQ ID NO: 2743127 - RNA, 13 nt, Human
ggccuccauccug

SEQ ID NO: 2743128 - RNA, 15 nt, Human
ggccuccauccugag

SEQ ID NO: 2743129 - RNA, 14 nt, Human
ggccuccauccuga

SEQ ID NO: 2743130 - RNA, 20 nt, Human
ggcagacagcagcucaggca

SEQ ID NO: 2743131 - RNA, 19 nt, Human
ggcagacagcagcucaggc

SEQ ID NO: 2743132 - RNA, 18 nt, Human
ggcagacagcagcucagg

SEQ ID NO: 2743133 - RNA, 17 nt, Human
ggcagacagcagcucag

SEQ ID NO: 2743134 - RNA, 16 nt, Human
ggcagacagcagcuca

SEQ ID NO: 2743135 - RNA, 15 nt, Human
ggcagacagcagcuc

SEQ ID NO: 2743136 - RNA, 14 nt, Human
ggcagacagcagcu

SEQ ID NO: 2743137 - RNA, 13 nt, Human
ggcagacagcagc

SEQ ID NO: 2743138 - RNA, 21 nt, Human
ggcacaguuuucugagaaaga

SEQ ID NO: 2743139 - RNA, 10 nt, Human
ggcaguuuuu

SEQ ID NO: 2743140 - RNA, 13 nt, Human
ggagaaacuggaa

SEQ ID NO: 2743141 - RNA, 22 nt, Human
ggacucauuuuaaaaaauggaa

SEQ ID NO: 2743142 - RNA, 21 nt, Human
gcucuggggugggcaguuuuu

SEQ ID NO: 2743143 - RNA, 19 nt, Human
gcucuggggugggcaguuu

SEQ ID NO: 2743144 - RNA, 17 nt, Human
gcuaauucaaggaauuu

SEQ ID NO: 2743145 - RNA, 22 nt, Human
gcuaauucaaggaauuucuuaa

SEQ ID NO: 2743146 - RNA, 18 nt, Human
gcuagaacucccuuucaa

SEQ ID NO: 2743147 - RNA, 16 nt, Human
gcuagaacucccuuuc

SEQ ID NO: 2743148 - RNA, 15 nt, Human
gcuagaacucccuuu

SEQ ID NO: 2743149 - RNA, 14 nt, Human
gcuagaacucccuu

SEQ ID NO: 2743150 - RNA, 13 nt, Human
gcuagaacucccu

SEQ ID NO: 2743151 - RNA, 12 nt, Human
gcuagaacuccc

SEQ ID NO: 2743152 - RNA, 19 nt, Human
gcuccacuuggucugugag

SEQ ID NO: 2743153 - RNA, 18 nt, Human
gcuccacuuggucuguga

SEQ ID NO: 2743154 - RNA, 21 nt, Human
gcuccccucggagaagagcug

SEQ ID NO: 2743155 - RNA, 15 nt, Human
gcuccacuuggucug

SEQ ID NO: 2743156 - RNA, 19 nt, Human
gcuccaccuugcagcucuc

SEQ ID NO: 2743157 - RNA, 15 nt, Human
gcucuaacagcccuc

SEQ ID NO: 2743158 - RNA, 18 nt, Human
gcucgguggacccaggga

SEQ ID NO: 2743159 - RNA, 17 nt, Human
gcucgguggacccaggg

SEQ ID NO: 2743160 - RNA, 14 nt, Human
gcucgguggaccca

SEQ ID NO: 2743161 - RNA, 12 nt, Human
gcucgguggacc

SEQ ID NO: 2743162 - RNA, 20 nt, Human
gccuucggccuccauccuga

SEQ ID NO: 2743163 - RNA, 21 nt, Human
gccuucggccuccauccugag

SEQ ID NO: 2743164 - RNA, 15 nt, Human
gccucuuagaugcag

SEQ ID NO: 2743165 - RNA, 20 nt, Human
gccuagccgaccucagccuu

SEQ ID NO: 2743166 - RNA, 19 nt, Human
gccuagccgaccucagccu

SEQ ID NO: 2743167 - RNA, 18 nt, Human
gccuagccgaccucagcc

SEQ ID NO: 2743168 - RNA, 17 nt, Human
gccuagccgaccucagc

SEQ ID NO: 2743169 - RNA, 16 nt, Human
gccuagccgaccucag

SEQ ID NO: 2743170 - RNA, 15 nt, Human
gccuagccgaccuca

SEQ ID NO: 2743171 - RNA, 23 nt, Human
auucccguuuugucacuuuuucu

SEQ ID NO: 2743172 - RNA, 16 nt, Human
auucccguuuugucac

SEQ ID NO: 2743173 - RNA, 18 nt, Human
auucccguuuugucacuu

SEQ ID NO: 2743174 - RNA, 21 nt, Human
auucccguuuugucacuuuuu

SEQ ID NO: 2743175 - RNA, 18 nt, Human
auuauauuuauuacugua

SEQ ID NO: 2743176 - RNA, 15 nt, Human
auuauauuuauuacu

SEQ ID NO: 2743177 - RNA, 21 nt, Human
auuauguuaaaacugggacag

SEQ ID NO: 2743178 - RNA, 16 nt, Human
auucaaacagucucag

SEQ ID NO: 2743179 - RNA, 18 nt, Human
auucaaacagucucagga

SEQ ID NO: 2743180 - RNA, 19 nt, Human
auucaaacagucucaggaa

SEQ ID NO: 2743181 - RNA, 20 nt, Human
auucaaacagucucaggaaa

SEQ ID NO: 2743182 - RNA, 19 nt, Human
auucugcuaccucacuggg

SEQ ID NO: 2743183 - RNA, 15 nt, Human
auucugcuaccucac

SEQ ID NO: 2743184 - RNA, 19 nt, Human
auugacacuuaaaaauggu

SEQ ID NO: 2743185 - RNA, 21 nt, Human
auugacuaucaaacugaagcc

SEQ ID NO: 2743186 - RNA, 18 nt, Human
auugacuaucaaacugaa

SEQ ID NO: 2743187 - RNA, 17 nt, Human
auugacacuuaaaaaug

SEQ ID NO: 2743188 - RNA, 15 nt, Human
auugacacuuaaaaa

SEQ ID NO: 2743189 - RNA, 23 nt, Human
auuuuuucucuaggaaauauuua

SEQ ID NO: 2743190 - RNA, 20 nt, Human
auuuuuucucuaggaaauau

SEQ ID NO: 2743191 - RNA, 18 nt, Human
auuuuuuguuaaaugauu

SEQ ID NO: 2743192 - RNA, 14 nt, Human
auuuuuuguauaau

SEQ ID NO: 2743193 - RNA, 15 nt, Human
auuuuuuguauaauu

SEQ ID NO: 2743194 - RNA, 16 nt, Human
auuuuuuguauaauug

SEQ ID NO: 2743195 - RNA, 13 nt, Human
auuuuuuaaauuc

SEQ ID NO: 2743196 - RNA, 21 nt, Human
auuuuuguuuucauuaucuca

SEQ ID NO: 2743197 - RNA, 22 nt, Human
auuuuugugauuuugugauuga

SEQ ID NO: 2743198 - RNA, 13 nt, Human
auuuuuccaacua

SEQ ID NO: 2743199 - RNA, 21 nt, Human
auuuuuccaacuacuaauaga

SEQ ID NO: 2743200 - RNA, 19 nt, Human
auuuuucuuauuucauuuc

SEQ ID NO: 2743201 - RNA, 20 nt, Human
auuuuucuuauuucauuucu

SEQ ID NO: 2743202 - RNA, 15 nt, Human
auuuuucuuauuuca

SEQ ID NO: 2743203 - RNA, 15 nt, Human
auuuuguuggcauag

SEQ ID NO: 2743204 - RNA, 21 nt, Human
auuuuguuggcauagcucugg

SEQ ID NO: 2743205 - RNA, 14 nt, Human
auuuuccugaaaac

SEQ ID NO: 2743206 - RNA, 14 nt, Human
auuuucuauaauuu

SEQ ID NO: 2743207 - RNA, 15 nt, Human
auuuucuauaauuua

SEQ ID NO: 2743208 - RNA, 16 nt, Human
auuuuaaaagaaugau

SEQ ID NO: 2743209 - RNA, 23 nt, Human
auuuuaaaagaaugauuaugaau

SEQ ID NO: 2743210 - RNA, 14 nt, Human
auuuguauaaaaua

SEQ ID NO: 2743211 - RNA, 22 nt, Human
auuuguaguguuggagaagaac

SEQ ID NO: 2743212 - RNA, 19 nt, Human
auuuguaguguuggagaag

SEQ ID NO: 2743213 - RNA, 14 nt, Human
auuuauuuuaauaa

SEQ ID NO: 2743214 - RNA, 13 nt, Human
auugucuagugaa

SEQ ID NO: 2743215 - RNA, 23 nt, Human
auuggauuuccuaauacugucau

SEQ ID NO: 2743216 - RNA, 14 nt, Human
auuggauuuccuaa

SEQ ID NO: 2743217 - RNA, 15 nt, Human
auuggauuuccuaau

SEQ ID NO: 2743218 - RNA, 22 nt, Human
auuggauuuccuaauacuguca

SEQ ID NO: 2743219 - RNA, 17 nt, Human
auugguuuaaagaaagu

SEQ ID NO: 2743220 - RNA, 18 nt, Human
auugguuuaaagaaagug

SEQ ID NO: 2743221 - RNA, 15 nt, Human
auugguuuaaagaaa

SEQ ID NO: 2743222 - RNA, 13 nt, Human
auugacuuuuuau

SEQ ID NO: 2743223 - RNA, 19 nt, Human
auuggagcucgugggacag

SEQ ID NO: 2743224 - RNA, 19 nt, Human
auuggacaguaaaauccac

SEQ ID NO: 2743225 - RNA, 19 nt, Human
uuuauuaaucuuaguguau

SEQ ID NO: 2743226 - RNA, 13 nt, Human
uuuauuaaucuua

SEQ ID NO: 2743227 - RNA, 22 nt, Human
augcuagaacucccuuucaaca

SEQ ID NO: 2743228 - RNA, 19 nt, Human
augcuagaacucccuuuca

SEQ ID NO: 2743229 - RNA, 21 nt, Human
augcuagaacucccuuucaac

SEQ ID NO: 2743230 - RNA, 20 nt, Human
augcuagaacucccuuucaa

SEQ ID NO: 2743231 - RNA, 16 nt, Human
uuucaaacauauauaa

SEQ ID NO: 2743232 - RNA, 23 nt, Human
auggcuauaggugcuacaaaaac

SEQ ID NO: 2743233 - RNA, 19 nt, Human
auggcuaagcaaaauguga

SEQ ID NO: 2743234 - RNA, 16 nt, Human
auggcauaaccugucu

SEQ ID NO: 2743235 - RNA, 17 nt, Human
auggcauaaccugucuc

SEQ ID NO: 2743236 - RNA, 16 nt, Human
auggcacuaguauuuc

SEQ ID NO: 2743237 - RNA, 14 nt, Human
auggcacuaguauu

SEQ ID NO: 2743238 - RNA, 13 nt, Human
uuuaaagaaagug

SEQ ID NO: 2743239 - RNA, 14 nt, Human
uuuaaagaaagugu

SEQ ID NO: 2743240 - RNA, 16 nt, Human
uuuaaagaaaguguau

SEQ ID NO: 2743241 - RNA, 22 nt, Human
augauuacuggccuuuuucauu

SEQ ID NO: 2743242 - RNA, 15 nt, Human
augauuacuggccuu

SEQ ID NO: 2743243 - RNA, 19 nt, Human
augauuacuggccuuuuuc

SEQ ID NO: 2743244 - RNA, 15 nt, Human
augauaacuggaaac

SEQ ID NO: 2743245 - RNA, 14 nt, Human
augauuaaguaaug

SEQ ID NO: 2743246 - RNA, 18 nt, Human
augauuaaguaaugauaa

SEQ ID NO: 2743247 - RNA, 14 nt, Human
augauuacuggccu

SEQ ID NO: 2743248 - RNA, 19 nt, Human
augcgguuaauuuugaagu

SEQ ID NO: 2743249 - RNA, 17 nt, Human
augccauuuaaagcuua

SEQ ID NO: 2743250 - RNA, 21 nt, Human
augccauuuaaagcuuauuaa

SEQ ID NO: 2743251 - RNA, 13 nt, Human
augcaguucugaa

SEQ ID NO: 2743252 - RNA, 15 nt, Human
augcagcuguggcag

SEQ ID NO: 2743253 - RNA, 18 nt, Human
uuuaaauauaugcuaagu

SEQ ID NO: 2743254 - RNA, 15 nt, Human
uuugaaauauugacu

SEQ ID NO: 2743255 - RNA, 14 nt, Human
uuucuguaccaguu

SEQ ID NO: 2743256 - RNA, 15 nt, Human
uuucuguaccaguua

SEQ ID NO: 2743257 - RNA, 18 nt, Human
uuucucccagucauuuaa

SEQ ID NO: 2743258 - RNA, 17 nt, Human
uuucucccagucauuua

SEQ ID NO: 2743259 - RNA, 21 nt, Human
augguucccuugaugaagaag

SEQ ID NO: 2743260 - RNA, 14 nt, Human
uuugcaagccagau

SEQ ID NO: 2743261 - RNA, 16 nt, Human
auguacuucaugcugu

SEQ ID NO: 2743262 - RNA, 19 nt, Human
auguagaggagaaacugga

SEQ ID NO: 2743263 - RNA, 17 nt, Human
auguagaggagaaacug

SEQ ID NO: 2743264 - RNA, 13 nt, Human
auguagaggagaa

SEQ ID NO: 2743265 - RNA, 12 nt, Human
auguagaggaga

SEQ ID NO: 2743266 - RNA, 12 nt, Human
auguauguuacc

SEQ ID NO: 2743267 - RNA, 13 nt, Human
auguauguuacca

SEQ ID NO: 2743268 - RNA, 14 nt, Human
auguauguuaccaa

SEQ ID NO: 2743269 - RNA, 17 nt, Human
auguccacugguucuuc

SEQ ID NO: 2743270 - RNA, 16 nt, Human
auguccacugguucuu

SEQ ID NO: 2743271 - RNA, 16 nt, Human
auguccugccuauuau

SEQ ID NO: 2743272 - RNA, 20 nt, Human
auguccugccuauuaucugu

SEQ ID NO: 2743273 - RNA, 21 nt, Human
auguccugccuauuaucuguc

SEQ ID NO: 2743274 - RNA, 22 nt, Human
auguccugccuauuaucuguca

SEQ ID NO: 2743275 - RNA, 15 nt, Human
uuugugaauuaggcu

SEQ ID NO: 2743276 - RNA, 22 nt, Human
uuugugaauuaggcuguaacua

SEQ ID NO: 2743277 - RNA, 17 nt, Human
uuugugaagcaaaauuu

SEQ ID NO: 2743278 - RNA, 21 nt, Human
uuuguaguguuggagaagaac

SEQ ID NO: 2743279 - RNA, 19 nt, Human
uuuguaguguuggagaaga

SEQ ID NO: 2743280 - RNA, 14 nt, Human
uucggccuccaucc

SEQ ID NO: 2743281 - RNA, 18 nt, Human
uucggccccauguaucuc

SEQ ID NO: 2743282 - RNA, 17 nt, Human
uucggccccauguaucu

SEQ ID NO: 2743283 - RNA, 15 nt, Human
uucggccuccauccu

SEQ ID NO: 2743284 - RNA, 13 nt, Human
uucuaagaaguga

SEQ ID NO: 2743285 - RNA, 23 nt, Human
uucuaagaagugaaaaucuacac

SEQ ID NO: 2743286 - RNA, 15 nt, Human
uucuaaguaaaacca

SEQ ID NO: 2743287 - RNA, 16 nt, Human
uucuaaguaaaaccac

SEQ ID NO: 2743288 - RNA, 19 nt, Human
uucuagcaugaagacagag

SEQ ID NO: 2743289 - RNA, 17 nt, Human
aucaggguuaguauugu

SEQ ID NO: 2743290 - RNA, 19 nt, Human
aucagaagucaucuugcua

SEQ ID NO: 2743291 - RNA, 22 nt, Human
aucacuugucaauaaaauccau

SEQ ID NO: 2743292 - RNA, 18 nt, Human
aucagaagucaucuugcu

SEQ ID NO: 2743293 - RNA, 14 nt, Human
aucaacagauaaau

SEQ ID NO: 2743294 - RNA, 18 nt, Human
auauuuuuuguuaaauga

SEQ ID NO: 2743295 - RNA, 20 nt, Human
auauuuuuuguuaaaugauu

SEQ ID NO: 2743296 - RNA, 19 nt, Human
uuccguagguuauuuucag

SEQ ID NO: 2743297 - RNA, 19 nt, Human
uucccucccagaggagcca

SEQ ID NO: 2743298 - RNA, 12 nt, Human
uucucuaggaaa

SEQ ID NO: 2743299 - RNA, 17 nt, Human
uucuuaacuucuugcuu

SEQ ID NO: 2743300 - RNA, 13 nt, Human
uucuuaacuucuu

SEQ ID NO: 2743301 - RNA, 16 nt, Human
uucuuaacuucuugcu

SEQ ID NO: 2743302 - RNA, 13 nt, Human
auccgaggcaggg

SEQ ID NO: 2743303 - RNA, 17 nt, Human
uugaaauuguauuacaa

SEQ ID NO: 2743304 - RNA, 18 nt, Human
uugaacccgggaggcaga

SEQ ID NO: 2743305 - RNA, 19 nt, Human
uugaacccgggaggcagag

SEQ ID NO: 2743306 - RNA, 12 nt, Human
auccgaggcagg

SEQ ID NO: 2743307 - RNA, 13 nt, Human
uugcaucaauuuu

SEQ ID NO: 2743308 - RNA, 22 nt, Human
uugcaagccagauuuuccugaa

SEQ ID NO: 2743309 - RNA, 14 nt, Human
aucucauuuccaag

SEQ ID NO: 2743310 - RNA, 17 nt, Human
uugaagggaaauuucag

SEQ ID NO: 2743311 - RNA, 18 nt, Human
aucuacacuccagugaga

SEQ ID NO: 2743312 - RNA, 19 nt, Human
aucuacacuccagugagac

SEQ ID NO: 2743313 - RNA, 20 nt, Human
uugcuucuuucuagaaagag

SEQ ID NO: 2743314 - RNA, 12 nt, Human
uugcuucuuucu

SEQ ID NO: 2743315 - RNA, 17 nt, Human
uugcuucuuucuagaaa

SEQ ID NO: 2743316 - RNA, 13 nt, Human
aucuuaguguaug

SEQ ID NO: 2743317 - RNA, 14 nt, Human
aucuuaguguauga

SEQ ID NO: 2743318 - RNA, 19 nt, Human
aucuuaguguaugauuacu

SEQ ID NO: 2743319 - RNA, 15 nt, Human
aucuuaguguaugau

SEQ ID NO: 2743320 - RNA, 16 nt, Human
aucuuaguguaugauu

SEQ ID NO: 2743321 - RNA, 23 nt, Human
aucuugcuaccaguauuuagaag

SEQ ID NO: 2743322 - RNA, 14 nt, Human
aucuuauaauuuaa

SEQ ID NO: 2743323 - RNA, 14 nt, Human
aucuugcuaccagu

SEQ ID NO: 2743324 - RNA, 16 nt, Human
aucuugcuaccaguau

SEQ ID NO: 2743325 - RNA, 19 nt, Human
aucuugcuaccaguauuua

SEQ ID NO: 2743326 - RNA, 16 nt, Human
augaauuacauuugua

SEQ ID NO: 2743327 - RNA, 15 nt, Human
augaauuacauuugu

SEQ ID NO: 2743328 - RNA, 15 nt, Human
augaauuaaguuuuu

SEQ ID NO: 2743329 - RNA, 23 nt, Human
augaauggcuaagcaaaauguga

SEQ ID NO: 2743330 - RNA, 13 nt, Human
uuacuggccuuuu

SEQ ID NO: 2743331 - RNA, 16 nt, Human
uuacuggccuuuuuca

SEQ ID NO: 2743332 - RNA, 18 nt, Human
uuacuggccuuuuucauu

SEQ ID NO: 2743333 - RNA, 18 nt, Human
uuaauuuuuccaacuacu

SEQ ID NO: 2743334 - RNA, 22 nt, Human
uuacaaaucagaagucaucuug

SEQ ID NO: 2743335 - RNA, 16 nt, Human
uuacaaaucagaaguc

SEQ ID NO: 2743336 - RNA, 17 nt, Human
uuacaaaucagaaguca

SEQ ID NO: 2743337 - RNA, 22 nt, Human
uuacaguucugugguuucaugu

SEQ ID NO: 2743338 - RNA, 13 nt, Human
uuacaguucugug

SEQ ID NO: 2743339 - RNA, 14 nt, Human
uuacaguucugugg

SEQ ID NO: 2743340 - RNA, 11 nt, Human
uuacaguucug

SEQ ID NO: 2743341 - RNA, 12 nt, Human
uuacaguucugu

SEQ ID NO: 2743342 - RNA, 14 nt, Human
auaaucuuucacag

SEQ ID NO: 2743343 - RNA, 15 nt, Human
uuagggagagaagau

SEQ ID NO: 2743344 - RNA, 12 nt, Human
uuagggaggggu

SEQ ID NO: 2743345 - RNA, 14 nt, Human
uuagggagagaaga

SEQ ID NO: 2743346 - RNA, 16 nt, Human
uuaggguuaugauuaa

SEQ ID NO: 2743347 - RNA, 14 nt, Human
uuaggguuaugauu

SEQ ID NO: 2743348 - RNA, 22 nt, Human
uuaaaaucauuucugcaucagc

SEQ ID NO: 2743349 - RNA, 14 nt, Human
uuaaaaucauuucu

SEQ ID NO: 2743350 - RNA, 16 nt, Human
uuaaaaaauggaacau

SEQ ID NO: 2743351 - RNA, 19 nt, Human
uuaaaaaagaaacauuugg

SEQ ID NO: 2743352 - RNA, 15 nt, Human
aguuuagcuggaaaa

SEQ ID NO: 2743353 - RNA, 17 nt, Human
aguuuaaauuguaauag

SEQ ID NO: 2743354 - RNA, 20 nt, Human
aguuuaaauuguaauaggcg

SEQ ID NO: 2743355 - RNA, 20 nt, Human
uuaauuuugaagugcuguuu

SEQ ID NO: 2743356 - RNA, 23 nt, Human
uuaauuuugaagugcuguuuauu

SEQ ID NO: 2743357 - RNA, 19 nt, Human
uuaauuuugaagugcuguu

SEQ ID NO: 2743358 - RNA, 13 nt, Human
uuaauuuuuccaa

SEQ ID NO: 2743359 - RNA, 15 nt, Human
uuaauuuuuccaacu

SEQ ID NO: 2743360 - RNA, 19 nt, Human
uuaaucuuaguguaugauu

SEQ ID NO: 2743361 - RNA, 21 nt, Human
uuaaucuuaguguaugauuac

SEQ ID NO: 2743362 - RNA, 22 nt, Human
aguuuuuugaaaaugggcucaa

SEQ ID NO: 2743363 - RNA, 16 nt, Human
aguuuuauaugcuucu

SEQ ID NO: 2743364 - RNA, 15 nt, Human
uuauuauauuuacaa

SEQ ID NO: 2743365 - RNA, 14 nt, Human
uuauuauauuuaca

SEQ ID NO: 2743366 - RNA, 19 nt, Human
uuauguuaaaacugggaca

SEQ ID NO: 2743367 - RNA, 16 nt, Human
auacucauuaggaugg

SEQ ID NO: 2743368 - RNA, 18 nt, Human
auagauaggucagugcaa

SEQ ID NO: 2743369 - RNA, 17 nt, Human
auagaauuaacacauga

SEQ ID NO: 2743370 - RNA, 20 nt, Human
auagaauaaaggcaguuuuc

SEQ ID NO: 2743371 - RNA, 22 nt, Human
auagaauaaaggcaguuuucua

SEQ ID NO: 2743372 - RNA, 12 nt, Human
auagaauaaagg

SEQ ID NO: 2743373 - RNA, 17 nt, Human
auagaauaaaggcaguu

SEQ ID NO: 2743374 - RNA, 18 nt, Human
auagaauaaaggcaguuu

SEQ ID NO: 2743375 - RNA, 19 nt, Human
auagaauaaaggcaguuuu

SEQ ID NO: 2743376 - RNA, 13 nt, Human
auagaaguaaaaa

SEQ ID NO: 2743377 - RNA, 19 nt, Human
uuaugauuaaguaaugaua

SEQ ID NO: 2743378 - RNA, 21 nt, Human
uuaugaauuacauuuguauaa

SEQ ID NO: 2743379 - RNA, 17 nt, Human
uuaugaauuacauuugu

SEQ ID NO: 2743380 - RNA, 16 nt, Human
uuaugaauuacauuug

SEQ ID NO: 2743381 - RNA, 14 nt, Human
uuaugaauuacauu

SEQ ID NO: 2743382 - RNA, 19 nt, Human
uuauauuugaaauauugac

SEQ ID NO: 2743383 - RNA, 15 nt, Human
uuauauuugaaauau

SEQ ID NO: 2743384 - RNA, 17 nt, Human
auacuauggaauuucuc

SEQ ID NO: 2743385 - RNA, 20 nt, Human
ugugcugcccgucuucagcc

SEQ ID NO: 2743386 - RNA, 17 nt, Human
agugccacuuaauguau

SEQ ID NO: 2743387 - RNA, 21 nt, Human
agugccacuuaauguauguua

SEQ ID NO: 2743388 - RNA, 18 nt, Human
agugccacuuaauguaug

SEQ ID NO: 2743389 - RNA, 20 nt, Human
agugccacuuaauguauguu

SEQ ID NO: 2743390 - RNA, 14 nt, Human
agugcaaauuguca

SEQ ID NO: 2743391 - RNA, 22 nt, Human
agugcaaauugucacaggacag

SEQ ID NO: 2743392 - RNA, 23 nt, Human
agugaacaaauuuacagagacag

SEQ ID NO: 2743393 - RNA, 22 nt, Human
agugaacaaauuuacagagaca

SEQ ID NO: 2743394 - RNA, 16 nt, Human
agucuuucacauuuaa

SEQ ID NO: 2743395 - RNA, 21 nt, Human
agugaacaaauuuacagagac

SEQ ID NO: 2743396 - RNA, 22 nt, Human
uguugcccacagcuguaugauu

SEQ ID NO: 2743397 - RNA, 15 nt, Human
uguucuaagaaguga

SEQ ID NO: 2743398 - RNA, 23 nt, Human
aguguuggagaagaacugaaauc

SEQ ID NO: 2743399 - RNA, 22 nt, Human
aguaauuuauuguuuuuccuug

SEQ ID NO: 2743400 - RNA, 23 nt, Human
aguaauuuauuguuuuuccuugu

SEQ ID NO: 2743401 - RNA, 13 nt, Human
aguaauuuauugu

SEQ ID NO: 2743402 - RNA, 13 nt, Human
aguaauuggaaag

SEQ ID NO: 2743403 - RNA, 12 nt, Human
aguaauuggaaa

SEQ ID NO: 2743404 - RNA, 16 nt, Human
aguaaaaccacagcag

SEQ ID NO: 2743405 - RNA, 17 nt, Human
aguaaaaccacagcagu

SEQ ID NO: 2743406 - RNA, 19 nt, Human
aguaaaaccacagcaguug

SEQ ID NO: 2743407 - RNA, 20 nt, Human
aguaaaaccacagcaguuga

SEQ ID NO: 2743408 - RNA, 16 nt, Human
uguaguguuggagaag

SEQ ID NO: 2743409 - RNA, 18 nt, Human
uguaguguuggagaagaa

SEQ ID NO: 2743410 - RNA, 17 nt, Human
uguaguguuggagaaga

SEQ ID NO: 2743411 - RNA, 13 nt, Human
uguaagggaaacu

SEQ ID NO: 2743412 - RNA, 18 nt, Human
uguaagggaaacugccag

SEQ ID NO: 2743413 - RNA, 19 nt, Human
uguaagggaaacugccagc

SEQ ID NO: 2743414 - RNA, 14 nt, Human
agguugcagugagc

SEQ ID NO: 2743415 - RNA, 16 nt, Human
aggugcuacaaaaaca

SEQ ID NO: 2743416 - RNA, 13 nt, Human
agucucaggaaau

SEQ ID NO: 2743417 - RNA, 14 nt, Human
agucaggaaagaga

SEQ ID NO: 2743418 - RNA, 15 nt, Human
aguauuuagaagcca

SEQ ID NO: 2743419 - RNA, 19 nt, Human
aguauuuagaagccaacua

SEQ ID NO: 2743420 - RNA, 20 nt, Human
uguccagccccguagacgug

SEQ ID NO: 2743421 - RNA, 19 nt, Human
ugggaggcugagaugggag

SEQ ID NO: 2743422 - RNA, 13 nt, Human
agggagagaagau

SEQ ID NO: 2743423 - RNA, 14 nt, Human
agggagagaagaua

SEQ ID NO: 2743424 - RNA, 23 nt, Human
agggacuucugucuucacaacag

SEQ ID NO: 2743425 - RNA, 18 nt, Human
agggccccagcacuaaag

SEQ ID NO: 2743426 - RNA, 14 nt, Human
agggccccagcacu

SEQ ID NO: 2743427 - RNA, 12 nt, Human
agggccccagca

SEQ ID NO: 2743428 - RNA, 22 nt, Human
agggcuguuauaaucuuucaca

SEQ ID NO: 2743429 - RNA, 18 nt, Human
ugggcucaaccagaaaag

SEQ ID NO: 2743430 - RNA, 20 nt, Human
ugggaacccaaguccaagca

SEQ ID NO: 2743431 - RNA, 16 nt, Human
agggaaacugccagca

SEQ ID NO: 2743432 - RNA, 19 nt, Human
agggaaacugccagcaacg

SEQ ID NO: 2743433 - RNA, 21 nt, Human
agggaaacugccagcaacgca

SEQ ID NO: 2743434 - RNA, 23 nt, Human
agggaaacugccagcaacgcagg

SEQ ID NO: 2743435 - RNA, 14 nt, Human
agggaaacugccag

SEQ ID NO: 2743436 - RNA, 15 nt, Human
agggaaacugccagc

SEQ ID NO: 2743437 - RNA, 14 nt, Human
ugggaaagcauugu

SEQ ID NO: 2743438 - RNA, 16 nt, Human
ugggaaagcauuguaa

SEQ ID NO: 2743439 - RNA, 17 nt, Human
ugggaaagcauuguaaa

SEQ ID NO: 2743440 - RNA, 18 nt, Human
ugggaaagcauuguaaau

SEQ ID NO: 2743441 - RNA, 18 nt, Human
ugggaaacaaaaggauaa

SEQ ID NO: 2743442 - RNA, 23 nt, Human
uggcuauaggugcuacaaaaaca

SEQ ID NO: 2743443 - RNA, 18 nt, Human
uggcuaagcaaaauguga

SEQ ID NO: 2743444 - RNA, 15 nt, Human
uggcuauaggugcua

SEQ ID NO: 2743445 - RNA, 19 nt, Human
uggcuauaggugcuacaaa

SEQ ID NO: 2743446 - RNA, 12 nt, Human
uggcccaggagu

SEQ ID NO: 2743447 - RNA, 11 nt, Human
uggcccaggag

SEQ ID NO: 2743448 - RNA, 22 nt, Human
aggcuccacuuggucugugaga

SEQ ID NO: 2743449 - RNA, 21 nt, Human
aggcuccacuuggucugugag

SEQ ID NO: 2743450 - RNA, 17 nt, Human
aggcuccacuuggucug

SEQ ID NO: 2743451 - RNA, 11 nt, Human
aggcuccacuu

SEQ ID NO: 2743452 - RNA, 22 nt, Human
ugcugcccgucuucagccuagc

SEQ ID NO: 2743453 - RNA, 21 nt, Human
ugcugcccgucuucagccuag

SEQ ID NO: 2743454 - RNA, 20 nt, Human
ugcugcccgucuucagccua

SEQ ID NO: 2743455 - RNA, 17 nt, Human
ugcugcccgucuucagc

SEQ ID NO: 2743456 - RNA, 13 nt, Human
aggaguuuggcca

SEQ ID NO: 2743457 - RNA, 12 nt, Human
aggaguuuggcc

SEQ ID NO: 2743458 - RNA, 21 nt, Human
uggacaccaggagucccuggu

SEQ ID NO: 2743459 - RNA, 20 nt, Human
uggacaccaggagucccugg

SEQ ID NO: 2743460 - RNA, 21 nt, Human
uggagcucgugggacagucac

SEQ ID NO: 2743461 - RNA, 12 nt, Human
aggcaauuagac

SEQ ID NO: 2743462 - RNA, 21 nt, Human
aggcaauuagacacuuuggaa

SEQ ID NO: 2743463 - RNA, 16 nt, Human
uggagaagaacugaaa

SEQ ID NO: 2743464 - RNA, 13 nt, Human
aggaaauauuuau

SEQ ID NO: 2743465 - RNA, 18 nt, Human
aggaaauauuuauuuuaa

SEQ ID NO: 2743466 - RNA, 14 nt, Human
aggaaauauuuauu

SEQ ID NO: 2743467 - RNA, 23 nt, Human
ugcugccaauauccuaauaaaaa

SEQ ID NO: 2743468 - RNA, 19 nt, Human
aggaauugacccacaagaa

SEQ ID NO: 2743469 - RNA, 22 nt, Human
ugcuaccucacugggguccugg

SEQ ID NO: 2743470 - RNA, 16 nt, Human
ugcuaccucacugggg

SEQ ID NO: 2743471 - RNA, 15 nt, Human
ugcuaccucacuggg

SEQ ID NO: 2743472 - RNA, 14 nt, Human
ugcuaccucacugg

SEQ ID NO: 2743473 - RNA, 21 nt, Human
agcuuauugucuagugaaacu

SEQ ID NO: 2743474 - RNA, 20 nt, Human
agcuuauuaaaacucauuuu

SEQ ID NO: 2743475 - RNA, 15 nt, Human
agcuuauuaaaacuc

SEQ ID NO: 2743476 - RNA, 19 nt, Human
aggaaagagaacuuccaga

SEQ ID NO: 2743477 - RNA, 13 nt, Human
aggaaagagaacu

SEQ ID NO: 2743478 - RNA, 14 nt, Human
ugcuaguaauugga

SEQ ID NO: 2743479 - RNA, 16 nt, Human
ugcuaguaauuggaaa

SEQ ID NO: 2743480 - RNA, 13 nt, Human
agcucucagccaa

SEQ ID NO: 2743481 - RNA, 12 nt, Human
agcucucagcca

SEQ ID NO: 2743482 - RNA, 17 nt, Human
agcugggcuaaguaaau

SEQ ID NO: 2743483 - RNA, 23 nt, Human
agcugccuccccuccucugcuug

SEQ ID NO: 2743484 - RNA, 22 nt, Human
agcugccuccccuccucugcuu

SEQ ID NO: 2743485 - RNA, 21 nt, Human
agcugccuccccuccucugcu

SEQ ID NO: 2743486 - RNA, 20 nt, Human
agcugccuccccuccucugc

SEQ ID NO: 2743487 - RNA, 19 nt, Human
agcugccuccccuccucug

SEQ ID NO: 2743488 - RNA, 18 nt, Human
agcugccuccccuccucu

SEQ ID NO: 2743489 - RNA, 17 nt, Human
agcugccuccccuccuc

SEQ ID NO: 2743490 - RNA, 13 nt, Human
agcuggaaaagua

SEQ ID NO: 2743491 - RNA, 14 nt, Human
ugcagugagccgag

SEQ ID NO: 2743492 - RNA, 22 nt, Human
ugcagcuguggcagaguuacag

SEQ ID NO: 2743493 - RNA, 20 nt, Human
ugcagcuguggcagaguuac

SEQ ID NO: 2743494 - RNA, 18 nt, Human
agccugagcgacagugag

SEQ ID NO: 2743495 - RNA, 14 nt, Human
ugcacucccaccug

SEQ ID NO: 2743496 - RNA, 15 nt, Human
ugcacucccaccuga

SEQ ID NO: 2743497 - RNA, 17 nt, Human
ugcacucccaccugaca

SEQ ID NO: 2743498 - RNA, 19 nt, Human
ugcacucccaccugacaca

SEQ ID NO: 2743499 - RNA, 20 nt, Human
ugcagagacaggaccugacu

SEQ ID NO: 2743500 - RNA, 17 nt, Human
ugcagagacaggaccug

SEQ ID NO: 2743501 - RNA, 17 nt, Human
agcccuucuuuccacag

SEQ ID NO: 2743502 - RNA, 21 nt, Human
agcccuuaugcgguuaauuuu

SEQ ID NO: 2743503 - RNA, 22 nt, Human
agcccuuaugcgguuaauuuug

SEQ ID NO: 2743504 - RNA, 19 nt, Human
agcccuucuuuccacagaa

SEQ ID NO: 2743505 - RNA, 18 nt, Human
agcccuucuuuccacaga

SEQ ID NO: 2743506 - RNA, 23 nt, Human
ugccaauauccuaauaaaaaggu

SEQ ID NO: 2743507 - RNA, 19 nt, Human
ugccaauauccuaauaaaa

SEQ ID NO: 2743508 - RNA, 21 nt, Human
ugccaauauccuaauaaaaag

SEQ ID NO: 2743509 - RNA, 15 nt, Human
ugccaauauccuaau

SEQ ID NO: 2743510 - RNA, 16 nt, Human
ugccaauauccuaaua

SEQ ID NO: 2743511 - RNA, 17 nt, Human
ugccaauauccuaauaa

SEQ ID NO: 2743512 - RNA, 18 nt, Human
ugccaauauccuaauaaa

SEQ ID NO: 2743513 - RNA, 14 nt, Human
ugccacuuaaugua

SEQ ID NO: 2743514 - RNA, 17 nt, Human
ugccacuuaauguaugu

SEQ ID NO: 2743515 - RNA, 18 nt, Human
ugccacuuaauguauguu

SEQ ID NO: 2743516 - RNA, 20 nt, Human
ugccacuuaauguauguuac

SEQ ID NO: 2743517 - RNA, 23 nt, Human
ugccacuuaauguauguuaccaa

SEQ ID NO: 2743518 - RNA, 19 nt, Human
agcuacuaauuuuaaaaug

SEQ ID NO: 2743519 - RNA, 23 nt, Human
ugcccuagagcacacuguagcau

SEQ ID NO: 2743520 - RNA, 17 nt, Human
ugcccuagagcacacug

SEQ ID NO: 2743521 - RNA, 13 nt, Human
ucugucagcugca

SEQ ID NO: 2743522 - RNA, 14 nt, Human
ucugucagcugcaa

SEQ ID NO: 2743523 - RNA, 18 nt, Human
ucuguuuuauaauuuugu

SEQ ID NO: 2743524 - RNA, 18 nt, Human
ucuuaauuaaaagaauau

SEQ ID NO: 2743525 - RNA, 21 nt, Human
ucuuaauuaaaagaauauuuu

SEQ ID NO: 2743526 - RNA, 14 nt, Human
ucuuaauuaaaaga

SEQ ID NO: 2743527 - RNA, 18 nt, Human
agacuggcacaguuuucu

SEQ ID NO: 2743528 - RNA, 21 nt, Human
agacuggauaguccgucucug

SEQ ID NO: 2743529 - RNA, 14 nt, Human
agacuggcacaguu

SEQ ID NO: 2743530 - RNA, 15 nt, Human
agacuggcacaguuu

SEQ ID NO: 2743531 - RNA, 20 nt, Human
agacuguggcugcuagcacu

SEQ ID NO: 2743532 - RNA, 14 nt, Human
agacuguggcugcu

SEQ ID NO: 2743533 - RNA, 11 nt, Human
agacuguggcu

SEQ ID NO: 2743534 - RNA, 17 nt, Human
agagacacacugaagaa

SEQ ID NO: 2743535 - RNA, 15 nt, Human
agagaaugagagaca

SEQ ID NO: 2743536 - RNA, 20 nt, Human
agagacacacugaagaagca

SEQ ID NO: 2743537 - RNA, 18 nt, Human
agagacacacugaagaag

SEQ ID NO: 2743538 - RNA, 17 nt, Human
ucuuuaaaauacacacu

SEQ ID NO: 2743539 - RNA, 21 nt, Human
ucuuuaaagggauggcaagau

SEQ ID NO: 2743540 - RNA, 18 nt, Human
agacccucaugcugccaa

SEQ ID NO: 2743541 - RNA, 19 nt, Human
agacccucaugcugccaau

SEQ ID NO: 2743542 - RNA, 24 nt, Human
agacccucaugcugccaauauccu

SEQ ID NO: 2743543 - RNA, 20 nt, Human
agacccucaugcugccaaua

SEQ ID NO: 2743544 - RNA, 21 nt, Human
agacccucaugcugccaauau

SEQ ID NO: 2743545 - RNA, 17 nt, Human
agacauguggugggaca

SEQ ID NO: 2743546 - RNA, 16 nt, Human
agacuccaaagaaaug

SEQ ID NO: 2743547 - RNA, 19 nt, Human
agacuccaaagaaauguaa

SEQ ID NO: 2743548 - RNA, 16 nt, Human
agacuauucaaacagu

SEQ ID NO: 2743549 - RNA, 13 nt, Human
agacuccaaagaa

SEQ ID NO: 2743550 - RNA, 14 nt, Human
agacuccaaagaaa

SEQ ID NO: 2743551 - RNA, 12 nt, Human
agacuccaaaga

SEQ ID NO: 2743552 - RNA, 18 nt, Human
agacuauucaaacagucu

SEQ ID NO: 2743553 - RNA, 20 nt, Human
agacuauucaaacagucuca

SEQ ID NO: 2743554 - RNA, 21 nt, Human
agacuauucaaacagucucag

SEQ ID NO: 2743555 - RNA, 19 nt, Human
agaaagacuauucaaacag

SEQ ID NO: 2743556 - RNA, 18 nt, Human
agaaagacuauucaaaca

SEQ ID NO: 2743557 - RNA, 20 nt, Human
agaaagacuauucaaacagu

SEQ ID NO: 2743558 - RNA, 23 nt, Human
agaaagacuauucaaacagucuc

SEQ ID NO: 2743559 - RNA, 21 nt, Human
ucugacuguuuccaucaaggg

SEQ ID NO: 2743560 - RNA, 14 nt, Human
ucugagaaagacua

SEQ ID NO: 2743561 - RNA, 15 nt, Human
ucugagaaagacuau

SEQ ID NO: 2743562 - RNA, 19 nt, Human
ucugagaaagacuauucaa

SEQ ID NO: 2743563 - RNA, 20 nt, Human
ucugagaaagacuauucaaa

SEQ ID NO: 2743564 - RNA, 23 nt, Human
ucugagaaagacuauucaaacag

SEQ ID NO: 2743565 - RNA, 21 nt, Human
ucugagaaagacuauucaaac

SEQ ID NO: 2743566 - RNA, 22 nt, Human
ucugagaaagacuauucaaaca

SEQ ID NO: 2743567 - RNA, 14 nt, Human
agaacucccuuuca

SEQ ID NO: 2743568 - RNA, 21 nt, Human
agaagaacugaaaucauacuu

SEQ ID NO: 2743569 - RNA, 14 nt, Human
ucugcuaccucacu

SEQ ID NO: 2743570 - RNA, 17 nt, Human
ucugcuaccucacuggg

SEQ ID NO: 2743571 - RNA, 11 nt, Human
ucugcuugcca

SEQ ID NO: 2743572 - RNA, 16 nt, Human
ucuggcccaccagggu

SEQ ID NO: 2743573 - RNA, 14 nt, Human
ucuggcccaccagg

SEQ ID NO: 2743574 - RNA, 12 nt, Human
ucugcuugccau

SEQ ID NO: 2743575 - RNA, 15 nt, Human
ucucccagucauuua

SEQ ID NO: 2743576 - RNA, 15 nt, Human
ucuccucucucugua

SEQ ID NO: 2743577 - RNA, 22 nt, Human
acuuuuuauggcacuaguauuu

SEQ ID NO: 2743578 - RNA, 22 nt, Human
acuuuugugaauuaggcuguaa

SEQ ID NO: 2743579 - RNA, 11 nt, Human
acuuuuucuga

SEQ ID NO: 2743580 - RNA, 12 nt, Human
acuuuuucugau

SEQ ID NO: 2743581 - RNA, 23 nt, Human
acuuuuuuucuguaccaguuaau

SEQ ID NO: 2743582 - RNA, 20 nt, Human
acuuuuuuucuguaccaguu

SEQ ID NO: 2743583 - RNA, 21 nt, Human
acuuuuuuucuguaccaguua

SEQ ID NO: 2743584 - RNA, 16 nt, Human
agaaaacaaggaugaa

SEQ ID NO: 2743585 - RNA, 19 nt, Human
agaaaacaaggaugaauua

SEQ ID NO: 2743586 - RNA, 15 nt, Human
agaaacauuugguaa

SEQ ID NO: 2743587 - RNA, 14 nt, Human
agaaagaaaaucag

SEQ ID NO: 2743588 - RNA, 15 nt, Human
agaaacuggaacucu

SEQ ID NO: 2743589 - RNA, 13 nt, Human
agaaacuggaacu

SEQ ID NO: 2743590 - RNA, 13 nt, Human
ucucuucuuuaaa

SEQ ID NO: 2743591 - RNA, 12 nt, Human
ucucuucuuuaa

SEQ ID NO: 2743592 - RNA, 13 nt, Human
ucucuggccuucg

SEQ ID NO: 2743593 - RNA, 17 nt, Human
ucucuggccuucggccu

SEQ ID NO: 2743594 - RNA, 16 nt, Human
ucucuggccuucggcc

SEQ ID NO: 2743595 - RNA, 16 nt, Human
agauuuaccacuugug

SEQ ID NO: 2743596 - RNA, 16 nt, Human
agauugugccccugca

SEQ ID NO: 2743597 - RNA, 15 nt, Human
ugacuguuuccauca

SEQ ID NO: 2743598 - RNA, 14 nt, Human
agauccuggaaauc

SEQ ID NO: 2743599 - RNA, 19 nt, Human
agaugaugaugaucuuuaa

SEQ ID NO: 2743600 - RNA, 18 nt, Human
agauggaaaauucauuuu

SEQ ID NO: 2743601 - RNA, 22 nt, Human
agauggaaaauucauuuuuuaa

SEQ ID NO: 2743602 - RNA, 22 nt, Human
agaugcuagaacucccuuucaa

SEQ ID NO: 2743603 - RNA, 23 nt, Human
agaugcuagaacucccuuucaac

SEQ ID NO: 2743604 - RNA, 20 nt, Human
ugaagaagcaccaaucauga

SEQ ID NO: 2743605 - RNA, 14 nt, Human
ugaagaagauggua

SEQ ID NO: 2743606 - RNA, 17 nt, Human
ugaagauguagaggaga

SEQ ID NO: 2743607 - RNA, 18 nt, Human
ugaagauguagaggagaa

SEQ ID NO: 2743608 - RNA, 14 nt, Human
agagugaacaaauu

SEQ ID NO: 2743609 - RNA, 22 nt, Human
agagugaacaaauuuacagaga

SEQ ID NO: 2743610 - RNA, 16 nt, Human
ugagcuacaaaugcau

SEQ ID NO: 2743611 - RNA, 13 nt, Human
ugagcuacaaaug

SEQ ID NO: 2743612 - RNA, 14 nt, Human
ugagcuacaaaugc

SEQ ID NO: 2743613 - RNA, 15 nt, Human
ugaggacacugauau

SEQ ID NO: 2743614 - RNA, 17 nt, Human
ugagguacugagaguga

SEQ ID NO: 2743615 - RNA, 22 nt, Human
ugagguacugagagugaacaaa

SEQ ID NO: 2743616 - RNA, 20 nt, Human
ugagcgacagugagacucug

SEQ ID NO: 2743617 - RNA, 16 nt, Human
ugagcgacagugagac

SEQ ID NO: 2743618 - RNA, 14 nt, Human
ugagcgacagugag

SEQ ID NO: 2743619 - RNA, 13 nt, Human
ugagcgacaguga

SEQ ID NO: 2743620 - RNA, 23 nt, Human
agcacuuggagccaaggguucag

SEQ ID NO: 2743621 - RNA, 14 nt, Human
agcagaacagugau

SEQ ID NO: 2743622 - RNA, 14 nt, Human
agcaacgcaggccc

SEQ ID NO: 2743623 - RNA, 12 nt, Human
agcacagcccuu

SEQ ID NO: 2743624 - RNA, 22 nt, Human
agcacagccucuuagaugcagu

SEQ ID NO: 2743625 - RNA, 16 nt, Human
agcaccaaucaugaau

SEQ ID NO: 2743626 - RNA, 22 nt, Human
accaggagucccugguaauaag

SEQ ID NO: 2743627 - RNA, 17 nt, Human
accaggagucccuggua

SEQ ID NO: 2743628 - RNA, 23 nt, Human
accacuuguguuuugcaagccag

SEQ ID NO: 2743629 - RNA, 19 nt, Human
accacuuguguuuugcaag

SEQ ID NO: 2743630 - RNA, 13 nt, Human
accacugcagaag

SEQ ID NO: 2743631 - RNA, 19 nt, Human
accacugcagaagacagua

SEQ ID NO: 2743632 - RNA, 14 nt, Human
accacugcagaaga

SEQ ID NO: 2743633 - RNA, 11 nt, Human
accacagcagu

SEQ ID NO: 2743634 - RNA, 12 nt, Human
uauuucauuucu

SEQ ID NO: 2743635 - RNA, 16 nt, Human
accaguucucaugggu

SEQ ID NO: 2743636 - RNA, 14 nt, Human
accaguuaauuuuu

SEQ ID NO: 2743637 - RNA, 16 nt, Human
accaguuaauuuuucc

SEQ ID NO: 2743638 - RNA, 12 nt, Human
accaguuaauuu

SEQ ID NO: 2743639 - RNA, 13 nt, Human
accaguuaauuuu

SEQ ID NO: 2743640 - RNA, 21 nt, Human
accaguucucauggguggcac

SEQ ID NO: 2743641 - RNA, 22 nt, Human
ucaccuggacuuaagcaucugg

SEQ ID NO: 2743642 - RNA, 18 nt, Human
acccaaaaggcagaagca

SEQ ID NO: 2743643 - RNA, 21 nt, Human
acccaaauguucaucaaugaa

SEQ ID NO: 2743644 - RNA, 15 nt, Human
acccaaaaggcagaa

SEQ ID NO: 2743645 - RNA, 13 nt, Human
acccaaaaggcag

SEQ ID NO: 2743646 - RNA, 19 nt, Human
accccauggagcugggcua

SEQ ID NO: 2743647 - RNA, 18 nt, Human
ucagaugcacaugagcug

SEQ ID NO: 2743648 - RNA, 18 nt, Human
accguuggggauugggga

SEQ ID NO: 2743649 - RNA, 21 nt, Human
accuaagauuacaaaucagaa

SEQ ID NO: 2743650 - RNA, 23 nt, Human
accucacugggguccuggggccu

SEQ ID NO: 2743651 - RNA, 21 nt, Human
accucacugggguccuggggc

SEQ ID NO: 2743652 - RNA, 21 nt, Human
ucauugacuaucaaacugaag

SEQ ID NO: 2743653 - RNA, 20 nt, Human
ucauugacuaucaaacugaa

SEQ ID NO: 2743654 - RNA, 15 nt, Human
ucauguuaguuaccu

SEQ ID NO: 2743655 - RNA, 19 nt, Human
ucauguuaguuaccuuaua

SEQ ID NO: 2743656 - RNA, 23 nt, Human
ucauguuaguuaccuuauaguua

SEQ ID NO: 2743657 - RNA, 21 nt, Human
ucaugaauuaguuuuauaugc

SEQ ID NO: 2743658 - RNA, 22 nt, Human
ucaugaauuaguuuuauaugcu

SEQ ID NO: 2743659 - RNA, 20 nt, Human
uccaacuacuaauagaauaa

SEQ ID NO: 2743660 - RNA, 21 nt, Human
uccaacuacuaauagaauaaa

SEQ ID NO: 2743661 - RNA, 23 nt, Human
uccaacuacuaauagaauaaagg

SEQ ID NO: 2743662 - RNA, 22 nt, Human
accuuauaguuacuguguaauu

SEQ ID NO: 2743663 - RNA, 23 nt, Human
accuuauaguuacuguguaauua

SEQ ID NO: 2743664 - RNA, 12 nt, Human
accuuauaguua

SEQ ID NO: 2743665 - RNA, 14 nt, Human
accuuauaguuacu

SEQ ID NO: 2743666 - RNA, 18 nt, Human
accuuauaguuacugugu

SEQ ID NO: 2743667 - RNA, 19 nt, Human
accuuauaguuacugugua

SEQ ID NO: 2743668 - RNA, 20 nt, Human
accuuauaguuacuguguaa

SEQ ID NO: 2743669 - RNA, 21 nt, Human
uccagccugagcgacagugag

SEQ ID NO: 2743670 - RNA, 20 nt, Human
uccagccugagcgacaguga

SEQ ID NO: 2743671 - RNA, 22 nt, Human
acugaggggaggggagcauggg

SEQ ID NO: 2743672 - RNA, 17 nt, Human
acugaggggaggggagc

SEQ ID NO: 2743673 - RNA, 23 nt, Human
acugaggcagacagcagcucagg

SEQ ID NO: 2743674 - RNA, 22 nt, Human
acugaggcagacagcagcucag

SEQ ID NO: 2743675 - RNA, 19 nt, Human
acugaggcagacagcagcu

SEQ ID NO: 2743676 - RNA, 15 nt, Human
acugaggcagacagc

SEQ ID NO: 2743677 - RNA, 13 nt, Human
acugaggcagaca

SEQ ID NO: 2743678 - RNA, 17 nt, Human
uccugggcagcugccuc

SEQ ID NO: 2743679 - RNA, 16 nt, Human
uccugggcagcugccu

SEQ ID NO: 2743680 - RNA, 15 nt, Human
uccugggcagcugcc

SEQ ID NO: 2743681 - RNA, 14 nt, Human
uccugggcagcugc

SEQ ID NO: 2743682 - RNA, 23 nt, Human
uccugggcagcugccuccccucc

SEQ ID NO: 2743683 - RNA, 22 nt, Human
uccugggcagcugccuccccuc

SEQ ID NO: 2743684 - RNA, 19 nt, Human
uccugggcagcugccuccc

SEQ ID NO: 2743685 - RNA, 18 nt, Human
uccugggcagcugccucc

SEQ ID NO: 2743686 - RNA, 22 nt, Human
uccuggggccucggagccucau

SEQ ID NO: 2743687 - RNA, 21 nt, Human
uccuggggccucggagccuca

SEQ ID NO: 2743688 - RNA, 13 nt, Human
uccuggggccucg

SEQ ID NO: 2743689 - RNA, 22 nt, Human
uccugucugccagccagcagcc

SEQ ID NO: 2743690 - RNA, 22 nt, Human
acugccuucucaacuccaaacu

SEQ ID NO: 2743691 - RNA, 20 nt, Human
acugccuucucaacuccaaa

SEQ ID NO: 2743692 - RNA, 21 nt, Human
acuggcacaguuuucugagaa

SEQ ID NO: 2743693 - RNA, 22 nt, Human
acuggcacaguuuucugagaaa

SEQ ID NO: 2743694 - RNA, 18 nt, Human
acuggccuuuuucauuua

SEQ ID NO: 2743695 - RNA, 13 nt, Human
uccuucagccuga

SEQ ID NO: 2743696 - RNA, 20 nt, Human
acuaaagcaguggacaccag

SEQ ID NO: 2743697 - RNA, 13 nt, Human
acuaaaaauacaa

SEQ ID NO: 2743698 - RNA, 16 nt, Human
uccccuugcccagggc

SEQ ID NO: 2743699 - RNA, 15 nt, Human
uccccuugcccaggg

SEQ ID NO: 2743700 - RNA, 13 nt, Human
uccccuugcccag

SEQ ID NO: 2743701 - RNA, 12 nt, Human
uccccuccucug

SEQ ID NO: 2743702 - RNA, 14 nt, Human
uccucacuguaucc

SEQ ID NO: 2743703 - RNA, 20 nt, Human
uccucaaaacuucagacaua

SEQ ID NO: 2743704 - RNA, 15 nt, Human
uccucaaagaaagug

SEQ ID NO: 2743705 - RNA, 16 nt, Human
uccucaaagaaagugu

SEQ ID NO: 2743706 - RNA, 18 nt, Human
uccucaaagaaaguguau

SEQ ID NO: 2743707 - RNA, 19 nt, Human
uccucaaagaaaguguauu

SEQ ID NO: 2743708 - RNA, 17 nt, Human
acaccaggagucccugg

SEQ ID NO: 2743709 - RNA, 19 nt, Human
acaccaggagucccuggua

SEQ ID NO: 2743710 - RNA, 22 nt, Human
uauaaaauaauuuuuauauuug

SEQ ID NO: 2743711 - RNA, 21 nt, Human
uauaaaauaauuuuuauauuu

SEQ ID NO: 2743712 - RNA, 22 nt, Human
acacaucagcuugcccuguuaa

SEQ ID NO: 2743713 - RNA, 22 nt, Human
uagugagcagucaggaaagaga

SEQ ID NO: 2743714 - RNA, 17 nt, Human
uaguuacuguguaauua

SEQ ID NO: 2743715 - RNA, 18 nt, Human
uaguuacuguguaauuag

SEQ ID NO: 2743716 - RNA, 19 nt, Human
uaguuacuguguaauuagu

SEQ ID NO: 2743717 - RNA, 16 nt, Human
uaguuuuauaugcuuc

SEQ ID NO: 2743718 - RNA, 15 nt, Human
uaguuuuauaugcuu

SEQ ID NO: 2743719 - RNA, 14 nt, Human
uauaauuuugugaa

SEQ ID NO: 2743720 - RNA, 18 nt, Human
uauaacaaugcuguauuu

SEQ ID NO: 2743721 - RNA, 21 nt, Human
uauaggugcuacaaaaacaca

SEQ ID NO: 2743722 - RNA, 20 nt, Human
uauaggugcuacaaaaacac

SEQ ID NO: 2743723 - RNA, 23 nt, Human
uauaggugcuacaaaaacacagc

SEQ ID NO: 2743724 - RNA, 13 nt, Human
uauaggaauugac

SEQ ID NO: 2743725 - RNA, 14 nt, Human
uauaggaauugacc

SEQ ID NO: 2743726 - RNA, 17 nt, Human
acagcagcucaggcaca

SEQ ID NO: 2743727 - RNA, 16 nt, Human
acagcagcucaggcac

SEQ ID NO: 2743728 - RNA, 15 nt, Human
acagcagcucaggca

SEQ ID NO: 2743729 - RNA, 14 nt, Human
acagcagcucaggc

SEQ ID NO: 2743730 - RNA, 16 nt, Human
uauggcuauaggugcu

SEQ ID NO: 2743731 - RNA, 17 nt, Human
uauggcuauaggugcua

SEQ ID NO: 2743732 - RNA, 14 nt, Human
uauauuuacaaaug

SEQ ID NO: 2743733 - RNA, 15 nt, Human
uauauuuacaaaugg

SEQ ID NO: 2743734 - RNA, 21 nt, Human
acaguauggcagcuuuccuca

SEQ ID NO: 2743735 - RNA, 21 nt, Human
acaguuaccucugccucagaa

SEQ ID NO: 2743736 - RNA, 18 nt, Human
acagugagacucugucuc

SEQ ID NO: 2743737 - RNA, 14 nt, Human
acagugagacucug

SEQ ID NO: 2743738 - RNA, 17 nt, Human
acagucucaggaaauca

SEQ ID NO: 2743739 - RNA, 20 nt, Human
acagugaaagaaaauaacaa

SEQ ID NO: 2743740 - RNA, 13 nt, Human
acagucucaggaa

SEQ ID NO: 2743741 - RNA, 14 nt, Human
acagucucaggaaa

SEQ ID NO: 2743742 - RNA, 15 nt, Human
acagucucaggaaau

SEQ ID NO: 2743743 - RNA, 16 nt, Human
acagucucaggaaauc

SEQ ID NO: 2743744 - RNA, 12 nt, Human
uauuaaaacuca

SEQ ID NO: 2743745 - RNA, 15 nt, Human
uauuagaauaccaca

SEQ ID NO: 2743746 - RNA, 15 nt, Human
uauuaccccuuuucg

SEQ ID NO: 2743747 - RNA, 23 nt, Human
uauucauagcagcuuauucacaa

SEQ ID NO: 2743748 - RNA, 20 nt, Human
uauugguuuaaagaaagugu

SEQ ID NO: 2743749 - RNA, 12 nt, Human
acaguucugugg

SEQ ID NO: 2743750 - RNA, 22 nt, Human
acaguucugugguuucauguua

SEQ ID NO: 2743751 - RNA, 19 nt, Human
acaguucggugagcuacaa

SEQ ID NO: 2743752 - RNA, 22 nt, Human
acaguucggugagcuacaaaug

SEQ ID NO: 2743753 - RNA, 23 nt, Human
acaguucggugagcuacaaaugc

SEQ ID NO: 2743754 - RNA, 17 nt, Human
uauugucuagugaaacu

SEQ ID NO: 2743755 - RNA, 18 nt, Human
uauuuauuuuaauaaugu

SEQ ID NO: 2743756 - RNA, 16 nt, Human
uauuuauuuuaauaau

SEQ ID NO: 2743757 - RNA, 14 nt, Human
uauuuauuuuaaua

SEQ ID NO: 2743758 - RNA, 16 nt, Human
uagaugcaguucugaa

SEQ ID NO: 2743759 - RNA, 19 nt, Human
uagaugcaguucugaagaa

SEQ ID NO: 2743760 - RNA, 17 nt, Human
uagaugcaguucugaag

SEQ ID NO: 2743761 - RNA, 21 nt, Human
uagcaugucgucaaagcugaa

SEQ ID NO: 2743762 - RNA, 18 nt, Human
uagcaugucgucaaagcu

SEQ ID NO: 2743763 - RNA, 18 nt, Human
acaagcacuaaacaaaga

SEQ ID NO: 2743764 - RNA, 22 nt, Human
acaagaaaugaaagcagggacu

SEQ ID NO: 2743765 - RNA, 15 nt, Human
uagaacucccuuuca

SEQ ID NO: 2743766 - RNA, 21 nt, Human
uacuucaaauccuugaagauu

SEQ ID NO: 2743767 - RNA, 18 nt, Human
uagaacucccuuucaaca

SEQ ID NO: 2743768 - RNA, 19 nt, Human
aauuuuuauauuugaaaua

SEQ ID NO: 2743769 - RNA, 16 nt, Human
acaaaaacacagcaag

SEQ ID NO: 2743770 - RNA, 19 nt, Human
aauuuuuucucuaggaaau

SEQ ID NO: 2743771 - RNA, 20 nt, Human
aauuuuuccaacuacuaaua

SEQ ID NO: 2743772 - RNA, 14 nt, Human
aauuuuuccaacua

SEQ ID NO: 2743773 - RNA, 19 nt, Human
uacuucaaauccuugaaga

SEQ ID NO: 2743774 - RNA, 14 nt, Human
uacuucaaauccuu

SEQ ID NO: 2743775 - RNA, 18 nt, Human
aauuuaccuaagauuaca

SEQ ID NO: 2743776 - RNA, 21 nt, Human
aauuuaccuaagauuacaaau

SEQ ID NO: 2743777 - RNA, 13 nt, Human
aauuuaccuaaga

SEQ ID NO: 2743778 - RNA, 14 nt, Human
aauuuaccuaagau

SEQ ID NO: 2743779 - RNA, 16 nt, Human
aauuuaccuaagauua

SEQ ID NO: 2743780 - RNA, 17 nt, Human
aauuuaccuaagauuac

SEQ ID NO: 2743781 - RNA, 20 nt, Human
aauuucucccagucauuuaa

SEQ ID NO: 2743782 - RNA, 23 nt, Human
aauugugugaaagguacuucaaa

SEQ ID NO: 2743783 - RNA, 21 nt, Human
aauucuugccaaauauaaaua

SEQ ID NO: 2743784 - RNA, 19 nt, Human
aauugacccacaagaaaug

SEQ ID NO: 2743785 - RNA, 16 nt, Human
aauugacccacaagaa

SEQ ID NO: 2743786 - RNA, 13 nt, Human
aauugacccacaa

SEQ ID NO: 2743787 - RNA, 22 nt, Human
uaccccagacuagauguaguau

SEQ ID NO: 2743788 - RNA, 21 nt, Human
uaccccagacuagauguagua

SEQ ID NO: 2743789 - RNA, 20 nt, Human
uaccccauggagcugggcua

SEQ ID NO: 2743790 - RNA, 18 nt, Human
aauguugacaugggacau

SEQ ID NO: 2743791 - RNA, 16 nt, Human
aaugguuuaaaugguc

SEQ ID NO: 2743792 - RNA, 22 nt, Human
uaauucacagugcucuuuucuc

SEQ ID NO: 2743793 - RNA, 14 nt, Human
uaauucacagugcu

SEQ ID NO: 2743794 - RNA, 21 nt, Human
uaauucacagugcucuuuucu

SEQ ID NO: 2743795 - RNA, 21 nt, Human
uaauuuaccuaagauuacaaa

SEQ ID NO: 2743796 - RNA, 22 nt, Human
uaauuuaccuaagauuacaaau

SEQ ID NO: 2743797 - RNA, 16 nt, Human
uacaaaaacacagcaa

SEQ ID NO: 2743798 - RNA, 17 nt, Human
uacaaaaacacagcaag

SEQ ID NO: 2743799 - RNA, 18 nt, Human
uacaaaaacacagcaagg

SEQ ID NO: 2743800 - RNA, 20 nt, Human
uaauagaauaaaggcaguuu

SEQ ID NO: 2743801 - RNA, 22 nt, Human
uaauagaauaaaggcaguuuuc

SEQ ID NO: 2743802 - RNA, 14 nt, Human
uaauagaauaaagg

SEQ ID NO: 2743803 - RNA, 16 nt, Human
uaauagaauaaaggca

SEQ ID NO: 2743804 - RNA, 15 nt, Human
aaugaaugaaugaau

SEQ ID NO: 2743805 - RNA, 20 nt, Human
aacuaucucauuuccaagca

SEQ ID NO: 2743806 - RNA, 13 nt, Human
aacuauauuguuu

SEQ ID NO: 2743807 - RNA, 14 nt, Human
gugagucaccacuu

SEQ ID NO: 2743808 - RNA, 20 nt, Human
aacugaaaucauacuucuua

SEQ ID NO: 2743809 - RNA, 13 nt, Human
aacugaaaucaua

SEQ ID NO: 2743810 - RNA, 17 nt, Human
aacuacuuuauaacuaa

SEQ ID NO: 2743811 - RNA, 13 nt, Human
aacuacuuuauaa

SEQ ID NO: 2743812 - RNA, 15 nt, Human
aacuacuuuauaacu

SEQ ID NO: 2743813 - RNA, 11 nt, Human
aacuaacaugu

SEQ ID NO: 2743814 - RNA, 14 nt, Human
aacuaacauguccu

SEQ ID NO: 2743815 - RNA, 15 nt, Human
aacuaacauguccug

SEQ ID NO: 2743816 - RNA, 13 nt, Human
gucuucacaacag

SEQ ID NO: 2743817 - RNA, 12 nt, Human
gucuucagccua

SEQ ID NO: 2743818 - RNA, 15 nt, Human
gucuucagccuagcc

SEQ ID NO: 2743819 - RNA, 13 nt, Human
gucuucagccuag

SEQ ID NO: 2743820 - RNA, 23 nt, Human
gucuucagccuagccgaccucag

SEQ ID NO: 2743821 - RNA, 23 nt, Human
gucucaguccaugaagauguaga

SEQ ID NO: 2743822 - RNA, 16 nt, Human
aacauauauaacaaug

SEQ ID NO: 2743823 - RNA, 19 nt, Human
aacagauuauuaccuuaca

SEQ ID NO: 2743824 - RNA, 17 nt, Human
aacagucucaggaaauc

SEQ ID NO: 2743825 - RNA, 19 nt, Human
aacagucucaggaaaucaa

SEQ ID NO: 2743826 - RNA, 14 nt, Human
guggguagacacac

SEQ ID NO: 2743827 - RNA, 18 nt, Human
aagagcuguucacagcca

SEQ ID NO: 2743828 - RNA, 16 nt, Human
aagacuccaaagaaau

SEQ ID NO: 2743829 - RNA, 17 nt, Human
aagacuccaaagaaaug

SEQ ID NO: 2743830 - RNA, 14 nt, Human
aagacuccaaagaa

SEQ ID NO: 2743831 - RNA, 14 nt, Human
aagacuauucaaac

SEQ ID NO: 2743832 - RNA, 13 nt, Human
aagacuauucaaa

SEQ ID NO: 2743833 - RNA, 14 nt, Human
guguguuauuuaaa

SEQ ID NO: 2743834 - RNA, 16 nt, Human
aagcaaguauuagaau

SEQ ID NO: 2743835 - RNA, 19 nt, Human
aagcaaaauuuuuucucua

SEQ ID NO: 2743836 - RNA, 22 nt, Human
aagauguagaggagaaacugga

SEQ ID NO: 2743837 - RNA, 13 nt, Human
aagcaaaauguga

SEQ ID NO: 2743838 - RNA, 19 nt, Human
aagauguagaggagaaacu

SEQ ID NO: 2743839 - RNA, 22 nt, Human
aagaagcaccaaucaugaauua

SEQ ID NO: 2743840 - RNA, 13 nt, Human
aagaaaauaucac

SEQ ID NO: 2743841 - RNA, 18 nt, Human
aagaaaguguauuuggaa

SEQ ID NO: 2743842 - RNA, 12 nt, Human
aagaaaguguau

SEQ ID NO: 2743843 - RNA, 15 nt, Human
aagaaaguguauuug

SEQ ID NO: 2743844 - RNA, 15 nt, Human
guggacaccaggagu

SEQ ID NO: 2743845 - RNA, 22 nt, Human
guggacaccaggagucccuggu

SEQ ID NO: 2743846 - RNA, 21 nt, Human
guggacaccaggagucccugg

SEQ ID NO: 2743847 - RNA, 15 nt, Human
guggcagaguuacag

SEQ ID NO: 2743848 - RNA, 13 nt, Human
aagacccaaaagg

SEQ ID NO: 2743849 - RNA, 13 nt, Human
aagaauauuuuaa

SEQ ID NO: 2743850 - RNA, 11 nt, Human
guuuggccaga

SEQ ID NO: 2743851 - RNA, 23 nt, Human
guuuggccagaagucaaggcuua

SEQ ID NO: 2743852 - RNA, 12 nt, Human
guuuggccagaa

SEQ ID NO: 2743853 - RNA, 18 nt, Human
guuuggccagaagucaag

SEQ ID NO: 2743854 - RNA, 15 nt, Human
guuuucugagaaaga

SEQ ID NO: 2743855 - RNA, 22 nt, Human
guuuuauaauuuugugaagcaa

SEQ ID NO: 2743856 - RNA, 15 nt, Human
guuuuauaauuuugu

SEQ ID NO: 2743857 - RNA, 17 nt, Human
aaguaaaaccacagcag

SEQ ID NO: 2743858 - RNA, 18 nt, Human
aaguaaaaccacagcagu

SEQ ID NO: 2743859 - RNA, 21 nt, Human
guuucuagcaugaagacagag

SEQ ID NO: 2743860 - RNA, 14 nt, Human
aaguaaaaccacag

SEQ ID NO: 2743861 - RNA, 15 nt, Human
aaguaaaaccacagc

SEQ ID NO: 2743862 - RNA, 16 nt, Human
aaguaaaaccacagca

SEQ ID NO: 2743863 - RNA, 21 nt, Human
aagggugaugggaaagcauug

SEQ ID NO: 2743864 - RNA, 13 nt, Human
aagucaaggcuua

SEQ ID NO: 2743865 - RNA, 22 nt, Human
aagucaaggcuuagacccucau

SEQ ID NO: 2743866 - RNA, 16 nt, Human
guuuucugagaaagac

SEQ ID NO: 2743867 - RNA, 17 nt, Human
guuuucugagaaagacu

SEQ ID NO: 2743868 - RNA, 22 nt, Human
guuuucugagaaagacuauuca

SEQ ID NO: 2743869 - RNA, 21 nt, Human
aaguauguuagugcaaauugu

SEQ ID NO: 2743870 - RNA, 23 nt, Human
aaguauguuagugcaaauuguca

SEQ ID NO: 2743871 - RNA, 13 nt, Human
aagucaucuugcu

SEQ ID NO: 2743872 - RNA, 14 nt, Human
aagucaucuugcua

SEQ ID NO: 2743873 - RNA, 20 nt, Human
aagucaucuugcuaccagua

SEQ ID NO: 2743874 - RNA, 23 nt, Human
aagucaucuugcuaccaguauuu

SEQ ID NO: 2743875 - RNA, 23 nt, Human
guuuuuuuuuaaaaaagaaacau

SEQ ID NO: 2743876 - RNA, 13 nt, Human
aaggauaaugaau

SEQ ID NO: 2743877 - RNA, 21 nt, Human
guucugugguuucauguuagu

SEQ ID NO: 2743878 - RNA, 16 nt, Human
guucugugguuucaug

SEQ ID NO: 2743879 - RNA, 19 nt, Human
guucugugguuucauguua

SEQ ID NO: 2743880 - RNA, 19 nt, Human
guucucauggguggcacuc

SEQ ID NO: 2743881 - RNA, 16 nt, Human
aaggaaaaaauaacaa

SEQ ID NO: 2743882 - RNA, 19 nt, Human
aaggaaaaaauaacaauga

SEQ ID NO: 2743883 - RNA, 24 nt, Human
uaaagaaaguguauuuggaaauaa

SEQ ID NO: 2743884 - RNA, 20 nt, Human
uaaagaaaguguauuuggaa

SEQ ID NO: 2743885 - RNA, 23 nt, Human
uaaagaaaguguauuuggaaaua

SEQ ID NO: 2743886 - RNA, 12 nt, Human
uaaacucauuuc

SEQ ID NO: 2743887 - RNA, 17 nt, Human
uaaacucauuucuagca

SEQ ID NO: 2743888 - RNA, 11 nt, Human
uaaagaaagug

SEQ ID NO: 2743889 - RNA, 13 nt, Human
uaaagaaagugua

SEQ ID NO: 2743890 - RNA, 14 nt, Human
uaaagaaaguguau

SEQ ID NO: 2743891 - RNA, 15 nt, Human
uaaagaaaguguauu

SEQ ID NO: 2743892 - RNA, 16 nt, Human
uaaagaaaguguauuu

SEQ ID NO: 2743893 - RNA, 17 nt, Human
uaaagaaaguguauuug

SEQ ID NO: 2743894 - RNA, 19 nt, Human
uaaaccaaggcuagaacca

SEQ ID NO: 2743895 - RNA, 15 nt, Human
aauaaauauaucuac

SEQ ID NO: 2743896 - RNA, 23 nt, Human
aauaaauauaucuaccccagacu

SEQ ID NO: 2743897 - RNA, 12 nt, Human
aauaaaugugcc

SEQ ID NO: 2743898 - RNA, 21 nt, Human
aauaaaugugccuucauuuuu

SEQ ID NO: 2743899 - RNA, 15 nt, Human
aauaacaauaaaaga

SEQ ID NO: 2743900 - RNA, 15 nt, Human
aauaacgauaaaaga

SEQ ID NO: 2743901 - RNA, 15 nt, Human
uaaagucagauggaa

SEQ ID NO: 2743902 - RNA, 13 nt, Human
uaaagucagaugg

SEQ ID NO: 2743903 - RNA, 17 nt, Human
uaaagucagauggaaaa

SEQ ID NO: 2743904 - RNA, 15 nt, Human
aauaaaggcaguuuu

SEQ ID NO: 2743905 - RNA, 19 nt, Human
aauaaaggcaguuuucuaa

SEQ ID NO: 2743906 - RNA, 16 nt, Human
aauaaaggcaguuuuc

SEQ ID NO: 2743907 - RNA, 18 nt, Human
aauaaaggcaguuuucua

SEQ ID NO: 2743908 - RNA, 22 nt, Human
aauaaaauccauacauuugugu

SEQ ID NO: 2743909 - RNA, 12 nt, Human
aauaaaaauaau

SEQ ID NO: 2743910 - RNA, 15 nt, Human
uaaauguugacaugg

SEQ ID NO: 2743911 - RNA, 17 nt, Human
uaaaugauuucauucaa

SEQ ID NO: 2743912 - RNA, 13 nt, Human
uaacaaugcugua

SEQ ID NO: 2743913 - RNA, 17 nt, Human
uaacaaugcuguauuuu

SEQ ID NO: 2743914 - RNA, 15 nt, Human
uaacaaugcuguauu

SEQ ID NO: 2743915 - RNA, 14 nt, Human
aauacacacucaaa

SEQ ID NO: 2743916 - RNA, 12 nt, Human
aaaaacacagca

SEQ ID NO: 2743917 - RNA, 18 nt, Human
aaaaacacagcaagggug

SEQ ID NO: 2743918 - RNA, 13 nt, Human
aaaaacacagcaa

SEQ ID NO: 2743919 - RNA, 15 nt, Human
auccucaaagaaagu

SEQ ID NO: 2743920 - RNA, 16 nt, Human
auccucaaagaaagug

SEQ ID NO: 2743921 - RNA, 18 nt, Human
auccucaaagaaagugua

SEQ ID NO: 2743922 - RNA, 19 nt, Human
auccucaaagaaaguguau

SEQ ID NO: 2743923 - RNA, 20 nt, Human
auccucaaagaaaguguauu

SEQ ID NO: 2743924 - RNA, 21 nt, Human
auccucaaagaaaguguauug

SEQ ID NO: 2743925 - RNA, 21 nt, Human
aucagcugcugaaacaacaaa

SEQ ID NO: 2743926 - RNA, 15 nt, Human
auauuuauuuuaaua

SEQ ID NO: 2743927 - RNA, 14 nt, Human
auauuuauuuuaau

SEQ ID NO: 2743928 - RNA, 17 nt, Human
auauuuauuuuaauaau

SEQ ID NO: 2743929 - RNA, 22 nt, Human
aucagcugcugaaacaacaaau

SEQ ID NO: 2743930 - RNA, 23 nt, Human
aucagcugcugaaacaacaaaua

SEQ ID NO: 2743931 - RNA, 20 nt, Human
augcugccaauauccuaaua

SEQ ID NO: 2743932 - RNA, 21 nt, Human
augcugccaauauccuaauaa

SEQ ID NO: 2743933 - RNA, 22 nt, Human
augcugccaauauccuaauaaa

SEQ ID NO: 2743934 - RNA, 23 nt, Human
augcugccaauauccuaauaaaa

SEQ ID NO: 2743935 - RNA, 13 nt, Human
augcugccaauau

SEQ ID NO: 2743936 - RNA, 14 nt, Human
augcugccaauauc

SEQ ID NO: 2743937 - RNA, 17 nt, Human
augcugccaauauccua

SEQ ID NO: 2743938 - RNA, 18 nt, Human
augcugccaauauccuaa

SEQ ID NO: 2743939 - RNA, 19 nt, Human
augcugccaauauccuaau

SEQ ID NO: 2743940 - RNA, 20 nt, Human
auuaaauauguuagcaaaga

SEQ ID NO: 2743941 - RNA, 22 nt, Human
auuaaauauguuagcaaagagu

SEQ ID NO: 2743942 - RNA, 18 nt, Human
augugggcagugauguca

SEQ ID NO: 2743943 - RNA, 17 nt, Human
auguucuaagaagugaa

SEQ ID NO: 2743944 - RNA, 14 nt, Human
auguaagggaaacu

SEQ ID NO: 2743945 - RNA, 16 nt, Human
auguaagggaaacugc

SEQ ID NO: 2743946 - RNA, 19 nt, Human
auguaagggaaacugccag

SEQ ID NO: 2743947 - RNA, 12 nt, Human
aguccuguaaug

SEQ ID NO: 2743948 - RNA, 19 nt, Human
agucaaauugugugaaagg

SEQ ID NO: 2743949 - RNA, 23 nt, Human
agucaaauugugugaaagguacu

SEQ ID NO: 2743950 - RNA, 13 nt, Human
aguucaugcagcu

SEQ ID NO: 2743951 - RNA, 22 nt, Human
aguucaugcagcuguggcagag

SEQ ID NO: 2743952 - RNA, 22 nt, Human
aguugaaaaucuuauaauuuaa

SEQ ID NO: 2743953 - RNA, 21 nt, Human
aguugaaaagacuccaaagaa

SEQ ID NO: 2743954 - RNA, 15 nt, Human
aguuguuucauugac

SEQ ID NO: 2743955 - RNA, 13 nt, Human
aguuguuucauug

SEQ ID NO: 2743956 - RNA, 19 nt, Human
aguuguuucauugacuauc

SEQ ID NO: 2743957 - RNA, 16 nt, Human
aguuguuucauugacu

SEQ ID NO: 2743958 - RNA, 22 nt, Human
aguugaaaagacuccaaagaaa

SEQ ID NO: 2743959 - RNA, 23 nt, Human
aguugaaaaucuuauaauuuaaa

SEQ ID NO: 2743960 - RNA, 17 nt, Human
agugucuuaauuaaaag

SEQ ID NO: 2743961 - RNA, 18 nt, Human
agugucuuaauuaaaaga

SEQ ID NO: 2743962 - RNA, 19 nt, Human
aguguaugauuacuggccu

SEQ ID NO: 2743963 - RNA, 14 nt, Human
aguguaugauuacu

SEQ ID NO: 2743964 - RNA, 15 nt, Human
aguguaugauuacug

SEQ ID NO: 2743965 - RNA, 14 nt, Human
aguguauuuggaaa

SEQ ID NO: 2743966 - RNA, 23 nt, Human
aguguauuuggaaauaaagucag

SEQ ID NO: 2743967 - RNA, 15 nt, Human
agugucuuaauuaaa

SEQ ID NO: 2743968 - RNA, 23 nt, Human
auaauguuucaaacauauauaac

SEQ ID NO: 2743969 - RNA, 15 nt, Human
auaaugucccuucac

SEQ ID NO: 2743970 - RNA, 17 nt, Human
auacacacucaaaucaa

SEQ ID NO: 2743971 - RNA, 18 nt, Human
auacacacucaaaucaag

SEQ ID NO: 2743972 - RNA, 18 nt, Human
auaaaggauuaaugucaa

SEQ ID NO: 2743973 - RNA, 18 nt, Human
auaaaggcaguuuucuaa

SEQ ID NO: 2743974 - RNA, 16 nt, Human
auaaaggcaguuuucu

SEQ ID NO: 2743975 - RNA, 17 nt, Human
auaaaggcaguuuucua

SEQ ID NO: 2743976 - RNA, 13 nt, Human
auauuuauuuuaa

SEQ ID NO: 2743977 - RNA, 22 nt, Human
auauuuauuacuguaagaaaau

SEQ ID NO: 2743978 - RNA, 16 nt, Human
auauuauguuaaaacu

SEQ ID NO: 2743979 - RNA, 20 nt, Human
auauccuaauaaaaagguga

SEQ ID NO: 2743980 - RNA, 16 nt, Human
auauccuaauaaaaag

SEQ ID NO: 2743981 - RNA, 18 nt, Human
auauccuaauaaaaaggu

SEQ ID NO: 2743982 - RNA, 12 nt, Human
auauccuaauaa

SEQ ID NO: 2743983 - RNA, 13 nt, Human
auauccuaauaaa

SEQ ID NO: 2743984 - RNA, 14 nt, Human
auauccuaauaaaa

SEQ ID NO: 2743985 - RNA, 22 nt, Human
auaugcuucuguuuuauaauuu

SEQ ID NO: 2743986 - RNA, 20 nt, Human
auaugcuucuguuuuauaau

SEQ ID NO: 2743987 - RNA, 18 nt, Human
auagcagcuuauucacaa

SEQ ID NO: 2743988 - RNA, 15 nt, Human
auaggugcuacaaaa

SEQ ID NO: 2743989 - RNA, 21 nt, Human
auaggugcuacaaaaacacag

SEQ ID NO: 2743990 - RNA, 23 nt, Human
auaggugcuacaaaaacacagca

SEQ ID NO: 2743991 - RNA, 14 nt, Human
auaggugcuacaaa

SEQ ID NO: 2743992 - RNA, 15 nt, Human
auagguuuaauaauu

SEQ ID NO: 2743993 - RNA, 14 nt, Human
auagucaaauugug

SEQ ID NO: 2743994 - RNA, 15 nt, Human
aggcuguaacuacuu

SEQ ID NO: 2743995 - RNA, 12 nt, Human
aggcuguaacua

SEQ ID NO: 2743996 - RNA, 16 nt, Human
aggcuagauguaugua

SEQ ID NO: 2743997 - RNA, 15 nt, Human
aggcuagauguaugu

SEQ ID NO: 2743998 - RNA, 17 nt, Human
aggcuagauguauguac

SEQ ID NO: 2743999 - RNA, 17 nt, Human
aggcuacugucagcucc

SEQ ID NO: 2744000 - RNA, 21 nt, Human
aggcuagaaccaccugccuau

SEQ ID NO: 2744001 - RNA, 15 nt, Human
agggucaggagaggg

SEQ ID NO: 2744002 - RNA, 14 nt, Human
agggucaggagagg

SEQ ID NO: 2744003 - RNA, 18 nt, Human
agggucaggagaggggca

SEQ ID NO: 2744004 - RNA, 23 nt, Human
aggugcuacaaaaacacagcaag

SEQ ID NO: 2744005 - RNA, 24 nt, Human
aggugcuacaaaaacacagcaagg

SEQ ID NO: 2744006 - RNA, 20 nt, Human
agguaaaagcaucacaugaa

SEQ ID NO: 2744007 - RNA, 19 nt, Human
aggugcuacaaaaacacag

SEQ ID NO: 2744008 - RNA, 20 nt, Human
aggugcuacaaaaacacagc

SEQ ID NO: 2744009 - RNA, 21 nt, Human
aggugcuacaaaaacacagca

SEQ ID NO: 2744010 - RNA, 22 nt, Human
aggugcuacaaaaacacagcaa

SEQ ID NO: 2744011 - RNA, 18 nt, Human
aggugcuacaaaaacaca

SEQ ID NO: 2744012 - RNA, 22 nt, Human
agcuccccucggagaagagcug

SEQ ID NO: 2744013 - RNA, 12 nt, Human
aggagucccugg

SEQ ID NO: 2744014 - RNA, 17 nt, Human
aggauguugaaaaaguu

SEQ ID NO: 2744015 - RNA, 23 nt, Human
aggaugguucccuugaugaagaa

SEQ ID NO: 2744016 - RNA, 21 nt, Human
agauggcauaaccugucucac

SEQ ID NO: 2744017 - RNA, 17 nt, Human
agagaacuuccagaucc

SEQ ID NO: 2744018 - RNA, 21 nt, Human
agacugcauuauauuuauuac

SEQ ID NO: 2744019 - RNA, 21 nt, Human
agacgugcacgcacacugucu

SEQ ID NO: 2744020 - RNA, 22 nt, Human
agacgugcacgcacacugucug

SEQ ID NO: 2744021 - RNA, 17 nt, Human
agcccuccucugcacuc

SEQ ID NO: 2744022 - RNA, 21 nt, Human
agccgcuccugucugccagcc

SEQ ID NO: 2744023 - RNA, 19 nt, Human
agccgcuccugucugccag

SEQ ID NO: 2744024 - RNA, 17 nt, Human
agccgcuccugucugcc

SEQ ID NO: 2744025 - RNA, 16 nt, Human
agccgcuccugucugc

SEQ ID NO: 2744026 - RNA, 22 nt, Human
agccgcuccugucugccagcca

SEQ ID NO: 2744027 - RNA, 14 nt, Human
agccgcuccugucu

SEQ ID NO: 2744028 - RNA, 19 nt, Human
agcacacuguagcauuaca

SEQ ID NO: 2744029 - RNA, 14 nt, Human
agcacacuguagca

SEQ ID NO: 2744030 - RNA, 16 nt, Human
agcacugacuucuaag

SEQ ID NO: 2744031 - RNA, 15 nt, Human
agcaugaagacagag

SEQ ID NO: 2744032 - RNA, 20 nt, Human
agcaguucagagcugcccuc

SEQ ID NO: 2744033 - RNA, 23 nt, Human
agcaguucagagcugcccucucc

SEQ ID NO: 2744034 - RNA, 13 nt, Human
agcaguugaaaag

SEQ ID NO: 2744035 - RNA, 16 nt, Human
agcaguugaaaagacu

SEQ ID NO: 2744036 - RNA, 23 nt, Human
aauguuucaaacauauauaacaa

SEQ ID NO: 2744037 - RNA, 20 nt, Human
aauauaucuaccccagacua

SEQ ID NO: 2744038 - RNA, 15 nt, Human
aauagaauaaaggca

SEQ ID NO: 2744039 - RNA, 16 nt, Human
aauagaauaaaggcag

SEQ ID NO: 2744040 - RNA, 21 nt, Human
aaugauuaugaauuacauuug

SEQ ID NO: 2744041 - RNA, 15 nt, Human
aaugauuaugaauua

SEQ ID NO: 2744042 - RNA, 20 nt, Human
aagauuacaaaucagaaguc

SEQ ID NO: 2744043 - RNA, 21 nt, Human
aagauuacaaaucagaaguca

SEQ ID NO: 2744044 - RNA, 20 nt, Human
aaggcagcucuaaaugucaa

SEQ ID NO: 2744045 - RNA, 18 nt, Human
aaguccaagcauuuagau

SEQ ID NO: 2744046 - RNA, 17 nt, Human
aaguccaagcauaccaa

SEQ ID NO: 2744047 - RNA, 21 nt, Human
aaguagggacuucugucuuca

SEQ ID NO: 2744048 - RNA, 23 nt, Human
aagggaaacugccagcaacgcag

SEQ ID NO: 2744049 - RNA, 16 nt, Human
aagggaaacugccagc

SEQ ID NO: 2744050 - RNA, 17 nt, Human
aagggaaacugccagca

SEQ ID NO: 2744051 - RNA, 19 nt, Human
aaauugacacuuaaaaaug

SEQ ID NO: 2744052 - RNA, 17 nt, Human
aaaucuuauaauuuaaa

SEQ ID NO: 2744053 - RNA, 22 nt, Human
aaauguuguucucuucuuuaaa

SEQ ID NO: 2744054 - RNA, 16 nt, Human
aacacaucagcuugcc

SEQ ID NO: 2744055 - RNA, 18 nt, Human
aacaaauuuacagagaca

SEQ ID NO: 2744056 - RNA, 22 nt, Human
aaccacuggaaaguuuaugguu

SEQ ID NO: 2744057 - RNA, 15 nt, Human
aacccgucuggccca

SEQ ID NO: 2744058 - RNA, 17 nt, Human
aaccuagggugauauua

SEQ ID NO: 2744059 - RNA, 20 nt, Human
aacugaggcagacagcagcu

SEQ ID NO: 2744060 - RNA, 12 nt, Human
aacugaggcaga

SEQ ID NO: 2744061 - RNA, 18 nt, Human
aacugacucuuaagaaga

SEQ ID NO: 2744062 - RNA, 15 nt, Human
aacugacucuuaaga

SEQ ID NO: 2744063 - RNA, 20 nt, Human
aacugacucuuaagaagacu

SEQ ID NO: 2744064 - RNA, 19 nt, Human
aacugacucuuaagaagac

SEQ ID NO: 2744065 - RNA, 20 nt, Human
aacugagaugugaacacauc

SEQ ID NO: 2744066 - RNA, 20 nt, Human
aacuuuaugcuaagugaaau

SEQ ID NO: 2744067 - RNA, 21 nt, Human
aacuuuaugcuaagugaaaua

SEQ ID NO: 2744068 - RNA, 16 nt, Human
aaaaagaaacauuugg

SEQ ID NO: 2744069 - RNA, 18 nt, Human
aaaaguucugcagauaaa

SEQ ID NO: 2744070 - RNA, 21 nt, Human
aaaaucuacacuccagugaga

SEQ ID NO: 2744071 - RNA, 16 nt, Human
aaaaucucaauauuuc

SEQ ID NO: 2744072 - RNA, 21 nt, Human
aaacugagaugugaacacauc

SEQ ID NO: 2744073 - RNA, 23 nt, Human
aaacugagaugugaacacaucag

SEQ ID NO: 2744074 - RNA, 15 nt, Human
aaagaaauguaaggg

SEQ ID NO: 2744075 - RNA, 15 nt, Human
aaaucaaauaugcaa

SEQ ID NO: 2744076 - RNA, 12 nt, Human
aaaucaaauaug

SEQ ID NO: 2744077 - RNA, 14 nt, Human
aaaucaaauaugca

SEQ ID NO: 2744078 - RNA, 20 nt, Human
aaauauuuauuuuaauaaug

SEQ ID NO: 2744079 - RNA, 13 nt, Human
aaauauuuauuuu

SEQ ID NO: 2744080 - RNA, 15 nt, Human
aaauauuuauuuuaa

SEQ ID NO: 2744081 - RNA, 18 nt, Human
aaauaaaguuggugacag

SEQ ID NO: 2744082 - RNA, 14 nt, Human
aaaggcagaagcaa

SEQ ID NO: 2744083 - RNA, 14 nt, Human
acacgagcaggcua

SEQ ID NO: 2744084 - RNA, 19 nt, Human
acacgagcaggcuacuguc

SEQ ID NO: 2744085 - RNA, 21 nt, Human
acacgagcaggcuacugucag

SEQ ID NO: 2744086 - RNA, 19 nt, Human
acaggcaacugaggcagac

SEQ ID NO: 2744087 - RNA, 18 nt, Human
acaggcaacugaggcaga

SEQ ID NO: 2744088 - RNA, 16 nt, Human
acaggcaacugaggca

SEQ ID NO: 2744089 - RNA, 15 nt, Human
acagaauucugcuac

SEQ ID NO: 2744090 - RNA, 17 nt, Human
acagaauucugcuaccu

SEQ ID NO: 2744091 - RNA, 22 nt, Human
acagcaguugaaaagacuccaa

SEQ ID NO: 2744092 - RNA, 23 nt, Human
acagcaguugaaaagacuccaaa

SEQ ID NO: 2744093 - RNA, 21 nt, Human
acagcaguugaaaagacucca

SEQ ID NO: 2744094 - RNA, 22 nt, Human
acaggcaacugaggcagacagc

SEQ ID NO: 2744095 - RNA, 17 nt, Human
acccacaagaaaugaaa

SEQ ID NO: 2744096 - RNA, 21 nt, Human
acccacaagaaaugaaagcag

SEQ ID NO: 2744097 - RNA, 22 nt, Human
acccaguguuuuaggagcauga

SEQ ID NO: 2744098 - RNA, 19 nt, Human
acccaguguuuuaggagca

SEQ ID NO: 2744099 - RNA, 21 nt, Human
acuuggucugugagaugcuag

SEQ ID NO: 2744100 - RNA, 22 nt, Human
acuucugucuucacaacagauu

SEQ ID NO: 2744101 - RNA, 21 nt, Human
acuucugucuucacaacagau

SEQ ID NO: 2744102 - RNA, 12 nt, Human
acuucagacaua

SEQ ID NO: 2744103 - RNA, 13 nt, Human
acugccagcaacg

SEQ ID NO: 2744104 - RNA, 18 nt, Human
acucugucucaguccaug

SEQ ID NO: 2744105 - RNA, 20 nt, Human
acucugucucaguccaugaa

SEQ ID NO: 2744106 - RNA, 13 nt, Human
acuguaagaaaau

SEQ ID NO: 2744107 - RNA, 19 nt, Human
acuguaagaaaauaucacu

SEQ ID NO: 2744108 - RNA, 22 nt, Human
acuguaagaaaauaucacuugu

SEQ ID NO: 2744109 - RNA, 11 nt, Human
agaaaguguau

SEQ ID NO: 2744110 - RNA, 17 nt, Human
agaaaguguauuuggaa

SEQ ID NO: 2744111 - RNA, 13 nt, Human
agaaaguguauuu

SEQ ID NO: 2744112 - RNA, 16 nt, Human
agaaaguguauuugga

SEQ ID NO: 2744113 - RNA, 22 nt, Human
acuuuauuuucuauaauuuaaa

SEQ ID NO: 2744114 - RNA, 16 nt, Human
agaaaaucaggcuggc

SEQ ID NO: 2744115 - RNA, 14 nt, Human
agaaaauaacaaua

SEQ ID NO: 2744116 - RNA, 18 nt, Human
accugucucaccuggacu

SEQ ID NO: 2744117 - RNA, 13 nt, Human
acuaagagagaau

SEQ ID NO: 2744118 - RNA, 19 nt, Human
acgcaggcccccaggugcc

SEQ ID NO: 2744119 - RNA, 22 nt, Human
acgcaggcccccaggugccagu

SEQ ID NO: 2744120 - RNA, 17 nt, Human
acucagucucucuucuc

SEQ ID NO: 2744121 - RNA, 22 nt, Human
acucagggccccagcacuaaag

SEQ ID NO: 2744122 - RNA, 18 nt, Human
acucagggccccagcacu

SEQ ID NO: 2744123 - RNA, 15 nt, Human
acucagggccccagc

SEQ ID NO: 2744124 - RNA, 14 nt, Human
acucaaaucaagaa

SEQ ID NO: 2744125 - RNA, 21 nt, Human
acuauucaaacagucucagga

SEQ ID NO: 2744126 - RNA, 20 nt, Human
acuaguauuucuaugaaaua

SEQ ID NO: 2744127 - RNA, 16 nt, Human
acuagauguaguauuu

SEQ ID NO: 2744128 - RNA, 17 nt, Human
acuagauguaguauuuu

SEQ ID NO: 2744129 - RNA, 12 nt, Human
acuagauguagu

SEQ ID NO: 2744130 - RNA, 13 nt, Human
acuagauguagua

SEQ ID NO: 2744131 - RNA, 20 nt, Human
acucuggugagucaccacuu

SEQ ID NO: 2744132 - RNA, 17 nt, Human
acucuauguucuaagaa

SEQ ID NO: 2744133 - RNA, 17 nt, Human
caagcacuaaacaaaga

SEQ ID NO: 2744134 - RNA, 15 nt, Human
caaauuuacagagac

SEQ ID NO: 2744135 - RNA, 14 nt, Human
caaauuuacagaga

SEQ ID NO: 2744136 - RNA, 14 nt, Human
caaagaaaguguau

SEQ ID NO: 2744137 - RNA, 13 nt, Human
caaagaaagugua

SEQ ID NO: 2744138 - RNA, 14 nt, Human
caaauaugcaaagc

SEQ ID NO: 2744139 - RNA, 20 nt, Human
caaauguucaucaaugaaug

SEQ ID NO: 2744140 - RNA, 21 nt, Human
caaauguucaucaaugaauga

SEQ ID NO: 2744141 - RNA, 14 nt, Human
caaaucagaaguca

SEQ ID NO: 2744142 - RNA, 15 nt, Human
caaaucagaagucau

SEQ ID NO: 2744143 - RNA, 22 nt, Human
caaaucagaagucaucuugcua

SEQ ID NO: 2744144 - RNA, 18 nt, Human
caaauaugcaaagcacug

SEQ ID NO: 2744145 - RNA, 16 nt, Human
caaauaugcaaagcac

SEQ ID NO: 2744146 - RNA, 17 nt, Human
caaauaugcaaagcacu

SEQ ID NO: 2744147 - RNA, 15 nt, Human
cacaguuuucugaga

SEQ ID NO: 2744148 - RNA, 14 nt, Human
cacaguuuucugag

SEQ ID NO: 2744149 - RNA, 20 nt, Human
cacaggcaacugaggcagac

SEQ ID NO: 2744150 - RNA, 23 nt, Human
cacaggcaacugaggcagacagc

SEQ ID NO: 2744151 - RNA, 22 nt, Human
cacaggcaacugaggcagacag

SEQ ID NO: 2744152 - RNA, 19 nt, Human
cacaggaaccacaagacug

SEQ ID NO: 2744153 - RNA, 20 nt, Human
cacaggaaccacaagacugc

SEQ ID NO: 2744154 - RNA, 15 nt, Human
cacaggaaguagagg

SEQ ID NO: 2744155 - RNA, 22 nt, Human
cacagcaguugaaaagacucca

SEQ ID NO: 2744156 - RNA, 21 nt, Human
cacacacaggcaacugaggca

SEQ ID NO: 2744157 - RNA, 13 nt, Human
cacacacaggcaa

SEQ ID NO: 2744158 - RNA, 13 nt, Human
cacaacuauauug

SEQ ID NO: 2744159 - RNA, 14 nt, Human
cacacugaagaagc

SEQ ID NO: 2744160 - RNA, 19 nt, Human
cacacucaaaucaagaaac

SEQ ID NO: 2744161 - RNA, 23 nt, Human
cacacuguagcauuacagugggu

SEQ ID NO: 2744162 - RNA, 11 nt, Human
cacaacagauu

SEQ ID NO: 2744163 - RNA, 22 nt, Human
caaugaaugaaugaauggcuaa

SEQ ID NO: 2744164 - RNA, 12 nt, Human
uuggauuuccua

SEQ ID NO: 2744165 - RNA, 14 nt, Human
uuggauuuccuaau

SEQ ID NO: 2744166 - RNA, 21 nt, Human
uuggauuuccuaauacuguca

SEQ ID NO: 2744167 - RNA, 22 nt, Human
uuggaagauggcauaaccuguc

SEQ ID NO: 2744168 - RNA, 16 nt, Human
uugcuaagcauuccaa

SEQ ID NO: 2744169 - RNA, 18 nt, Human
uugcuaagcauuccaacu

SEQ ID NO: 2744170 - RNA, 16 nt, Human
uuguaccgcaauguga

SEQ ID NO: 2744171 - RNA, 20 nt, Human
uuguaaaauggugugaccac

SEQ ID NO: 2744172 - RNA, 16 nt, Human
uuggcauagcucuggg

SEQ ID NO: 2744173 - RNA, 20 nt, Human
uugguaaggggaauugagga

SEQ ID NO: 2744174 - RNA, 12 nt, Human
uugguaacuuuu

SEQ ID NO: 2744175 - RNA, 14 nt, Human
uugguaacuuuugu

SEQ ID NO: 2744176 - RNA, 15 nt, Human
uugguaacuuuugug

SEQ ID NO: 2744177 - RNA, 13 nt, Human
uuguaaaauggug

SEQ ID NO: 2744178 - RNA, 12 nt, Human
uuguaaaauggu

SEQ ID NO: 2744179 - RNA, 20 nt, Human
uugauaugccuuuucccaac

SEQ ID NO: 2744180 - RNA, 13 nt, Human
uugccaucccucc

SEQ ID NO: 2744181 - RNA, 22 nt, Human
uugccagacauguggugggaca

SEQ ID NO: 2744182 - RNA, 18 nt, Human
uugccaucccucccucca

SEQ ID NO: 2744183 - RNA, 17 nt, Human
uugccaucccucccucc

SEQ ID NO: 2744184 - RNA, 16 nt, Human
uugccaucccucccuc

SEQ ID NO: 2744185 - RNA, 14 nt, Human
uugccaucccuccc

SEQ ID NO: 2744186 - RNA, 23 nt, Human
uugccaucccucccuccaccucc

SEQ ID NO: 2744187 - RNA, 22 nt, Human
uugccaucccucccuccaccuc

SEQ ID NO: 2744188 - RNA, 14 nt, Human
uugcagagacagga

SEQ ID NO: 2744189 - RNA, 19 nt, Human
uugcagagacaggaccuga

SEQ ID NO: 2744190 - RNA, 18 nt, Human
uugcagauucauuuuucu

SEQ ID NO: 2744191 - RNA, 23 nt, Human
uugcagcucuccccuucucugua

SEQ ID NO: 2744192 - RNA, 24 nt, Human
uucuaaguaaaaccacagcaguug

SEQ ID NO: 2744193 - RNA, 19 nt, Human
uucuuaggguuaugauuaa

SEQ ID NO: 2744194 - RNA, 12 nt, Human
uucuuucuagaa

SEQ ID NO: 2744195 - RNA, 13 nt, Human
uucuuucuagaaa

SEQ ID NO: 2744196 - RNA, 18 nt, Human
uucuuuccacagaagcuc

SEQ ID NO: 2744197 - RNA, 21 nt, Human
uugaaaaucuuauaauuuaaa

SEQ ID NO: 2744198 - RNA, 20 nt, Human
uuucauuuaucuauaauuua

SEQ ID NO: 2744199 - RNA, 12 nt, Human
uuuccuaauacu

SEQ ID NO: 2744200 - RNA, 12 nt, Human
uuucucuaggaa

SEQ ID NO: 2744201 - RNA, 18 nt, Human
uuugguaaggggaauuga

SEQ ID NO: 2744202 - RNA, 20 nt, Human
uuugaagugcuguuuauuaa

SEQ ID NO: 2744203 - RNA, 15 nt, Human
uuugaagugcuguuu

SEQ ID NO: 2744204 - RNA, 16 nt, Human
uuugaagugcuguuua

SEQ ID NO: 2744205 - RNA, 13 nt, Human
uuucuuaacuucu

SEQ ID NO: 2744206 - RNA, 14 nt, Human
uuucuuaacuucuu

SEQ ID NO: 2744207 - RNA, 21 nt, Human
uuugaaauuguauuacaaauc

SEQ ID NO: 2744208 - RNA, 18 nt, Human
uuguuuaaaaucauuucu

SEQ ID NO: 2744209 - RNA, 17 nt, Human
uuguuuaaaaucauuuc

SEQ ID NO: 2744210 - RNA, 12 nt, Human
uuuaaaaugucu

SEQ ID NO: 2744211 - RNA, 17 nt, Human
uuuaaaagaaugauuau

SEQ ID NO: 2744212 - RNA, 14 nt, Human
uuuaaaagaaugau

SEQ ID NO: 2744213 - RNA, 16 nt, Human
uuuaaaaucauuucug

SEQ ID NO: 2744214 - RNA, 19 nt, Human
uuuaaaauacacacucaaa

SEQ ID NO: 2744215 - RNA, 14 nt, Human
uuuauaacuaacau

SEQ ID NO: 2744216 - RNA, 13 nt, Human
uuuacagagacag

SEQ ID NO: 2744217 - RNA, 19 nt, Human
uuuaauaauguuucaaaca

SEQ ID NO: 2744218 - RNA, 15 nt, Human
uuuaauaauguuuca

SEQ ID NO: 2744219 - RNA, 14 nt, Human
uuuaauaauguuuc

SEQ ID NO: 2744220 - RNA, 13 nt, Human
uuuaauaaaccau

SEQ ID NO: 2744221 - RNA, 22 nt, Human
uuaucuauaauuuaccuaagau

SEQ ID NO: 2744222 - RNA, 15 nt, Human
uuaucuauaauuuac

SEQ ID NO: 2744223 - RNA, 17 nt, Human
uuaucuauaauuuaccu

SEQ ID NO: 2744224 - RNA, 14 nt, Human
uuaucuauaauuua

SEQ ID NO: 2744225 - RNA, 16 nt, Human
uuaucugucagcugca

SEQ ID NO: 2744226 - RNA, 21 nt, Human
uuauggcacuaguauuucuau

SEQ ID NO: 2744227 - RNA, 19 nt, Human
uuaugcgguuaauuuugaa

SEQ ID NO: 2744228 - RNA, 16 nt, Human
uuaugcgguuaauuuu

SEQ ID NO: 2744229 - RNA, 17 nt, Human
uuauggcuauaggugcu

SEQ ID NO: 2744230 - RNA, 17 nt, Human
uuauuaaucuuagugua

SEQ ID NO: 2744231 - RNA, 16 nt, Human
uuauuacuguaagaaa

SEQ ID NO: 2744232 - RNA, 18 nt, Human
uuauuacuguaagaaaau

SEQ ID NO: 2744233 - RNA, 17 nt, Human
uuauuacuguaagaaaa

SEQ ID NO: 2744234 - RNA, 16 nt, Human
uucagacauagaauua

SEQ ID NO: 2744235 - RNA, 20 nt, Human
uucagacauagaauuaacac

SEQ ID NO: 2744236 - RNA, 14 nt, Human
uucagagcugcccu

SEQ ID NO: 2744237 - RNA, 13 nt, Human
uucagagcugccc

SEQ ID NO: 2744238 - RNA, 16 nt, Human
uuauuuuaauaauguu

SEQ ID NO: 2744239 - RNA, 15 nt, Human
uuauuuuaauaaugu

SEQ ID NO: 2744240 - RNA, 15 nt, Human
uuauugucuagugaa

SEQ ID NO: 2744241 - RNA, 17 nt, Human
uucaaauccuugaagau

SEQ ID NO: 2744242 - RNA, 13 nt, Human
uucaugcagcugu

SEQ ID NO: 2744243 - RNA, 14 nt, Human
uucaugcagcugug

SEQ ID NO: 2744244 - RNA, 15 nt, Human
uucaugcagcugugg

SEQ ID NO: 2744245 - RNA, 19 nt, Human
uuccagauccuggaaauca

SEQ ID NO: 2744246 - RNA, 22 nt, Human
uucggccuccauccugaggcuc

SEQ ID NO: 2744247 - RNA, 17 nt, Human
uuccuuggacucauuuu

SEQ ID NO: 2744248 - RNA, 20 nt, Human
uuccuuggacucauuuuaaa

SEQ ID NO: 2744249 - RNA, 17 nt, Human
uucccuugaugaagaag

SEQ ID NO: 2744250 - RNA, 16 nt, Human
uuacuguguaauuagu

SEQ ID NO: 2744251 - RNA, 20 nt, Human
uuacuguguaauuagugcca

SEQ ID NO: 2744252 - RNA, 13 nt, Human
uuacuguguaauu

SEQ ID NO: 2744253 - RNA, 17 nt, Human
uuacuaguuucccuugc

SEQ ID NO: 2744254 - RNA, 20 nt, Human
uuagacccucaugcugccaa

SEQ ID NO: 2744255 - RNA, 19 nt, Human
uuagacccucaugcugcca

SEQ ID NO: 2744256 - RNA, 11 nt, Human
uuagaccucag

SEQ ID NO: 2744257 - RNA, 13 nt, Human
uuagaccucagcc

SEQ ID NO: 2744258 - RNA, 12 nt, Human
uuagaccucagc

SEQ ID NO: 2744259 - RNA, 15 nt, Human
uuagaccucagccug

SEQ ID NO: 2744260 - RNA, 14 nt, Human
uuagaccucagccu

SEQ ID NO: 2744261 - RNA, 16 nt, Human
uuagaccucagccugu

SEQ ID NO: 2744262 - RNA, 19 nt, Human
uuagaaacacaacuauauu

SEQ ID NO: 2744263 - RNA, 13 nt, Human
uuagcuggaaaag

SEQ ID NO: 2744264 - RNA, 12 nt, Human
uuagcuggaaaa

SEQ ID NO: 2744265 - RNA, 21 nt, Human
uuagcuuagaccucagccugu

SEQ ID NO: 2744266 - RNA, 18 nt, Human
uuagcuuagaccucagcc

SEQ ID NO: 2744267 - RNA, 17 nt, Human
uuagcuuagaccucagc

SEQ ID NO: 2744268 - RNA, 16 nt, Human
uuagcuuagaccucag

SEQ ID NO: 2744269 - RNA, 21 nt, Human
uuagaugcaguucugaagaag

SEQ ID NO: 2744270 - RNA, 20 nt, Human
uuagaugcaguucugaagaa

SEQ ID NO: 2744271 - RNA, 21 nt, Human
uuaguuaccuuauaguuacug

SEQ ID NO: 2744272 - RNA, 22 nt, Human
uuaguuaccuuauaguuacugu

SEQ ID NO: 2744273 - RNA, 13 nt, Human
uuaguuaccuuau

SEQ ID NO: 2744274 - RNA, 16 nt, Human
uuaguuaccuuauagu

SEQ ID NO: 2744275 - RNA, 18 nt, Human
uuaguuaccuuauaguua

SEQ ID NO: 2744276 - RNA, 19 nt, Human
uuaguuaccuuauaguuac

SEQ ID NO: 2744277 - RNA, 20 nt, Human
uuaguuaccuuauaguuacu

SEQ ID NO: 2744278 - RNA, 17 nt, Human
uuaggcuguaacuacuu

SEQ ID NO: 2744279 - RNA, 20 nt, Human
uuaggcuguaacuacuuuau

SEQ ID NO: 2744280 - RNA, 14 nt, Human
uuaggcuguaacua

SEQ ID NO: 2744281 - RNA, 18 nt, Human
uuaggauguugaaaaagu

SEQ ID NO: 2744282 - RNA, 13 nt, Human
uuaauguauguua

SEQ ID NO: 2744283 - RNA, 15 nt, Human
uuaauguauguuacc

SEQ ID NO: 2744284 - RNA, 17 nt, Human
uuaauguauguuaccaa

SEQ ID NO: 2744285 - RNA, 18 nt, Human
uuaauguauguuaccaaa

SEQ ID NO: 2744286 - RNA, 21 nt, Human
uuaacuucuugcuucuuucua

SEQ ID NO: 2744287 - RNA, 14 nt, Human
uuaacuucuugcuu

SEQ ID NO: 2744288 - RNA, 17 nt, Human
uuaacuucuugcuucuu

SEQ ID NO: 2744289 - RNA, 14 nt, Human
uuaacgauguccaa

SEQ ID NO: 2744290 - RNA, 22 nt, Human
uguuucaaacauauauaacaau

SEQ ID NO: 2744291 - RNA, 21 nt, Human
uguuucaaacauauauaacaa

SEQ ID NO: 2744292 - RNA, 19 nt, Human
uguuucaaacauauauaac

SEQ ID NO: 2744293 - RNA, 21 nt, Human
uuaaaagaauauuuuaacuuc

SEQ ID NO: 2744294 - RNA, 22 nt, Human
uuaaaagaauauuuuaacuucc

SEQ ID NO: 2744295 - RNA, 15 nt, Human
uuaaaagaugaaaau

SEQ ID NO: 2744296 - RNA, 18 nt, Human
uuaaaagaugaaaauauu

SEQ ID NO: 2744297 - RNA, 19 nt, Human
uuaaaauacacacucaaau

SEQ ID NO: 2744298 - RNA, 12 nt, Human
uuaaagaaagug

SEQ ID NO: 2744299 - RNA, 17 nt, Human
uuaaagaaaguguauuu

SEQ ID NO: 2744300 - RNA, 15 nt, Human
ugggcagcugccucc

SEQ ID NO: 2744301 - RNA, 14 nt, Human
ugggcagcugccuc

SEQ ID NO: 2744302 - RNA, 13 nt, Human
ugggcagcugccu

SEQ ID NO: 2744303 - RNA, 12 nt, Human
ugggcagcugcc

SEQ ID NO: 2744304 - RNA, 19 nt, Human
ugggcagcugccuccccuc

SEQ ID NO: 2744305 - RNA, 17 nt, Human
ugggcagcugccucccc

SEQ ID NO: 2744306 - RNA, 16 nt, Human
uggugauuuagcagga

SEQ ID NO: 2744307 - RNA, 22 nt, Human
uggugauuuagcaggaagcugu

SEQ ID NO: 2744308 - RNA, 16 nt, Human
uggucccagccagcag

SEQ ID NO: 2744309 - RNA, 17 nt, Human
uggucacaggaaguaga

SEQ ID NO: 2744310 - RNA, 22 nt, Human
uggucacaggaaguagaggagg

SEQ ID NO: 2744311 - RNA, 13 nt, Human
ugguauguuuuca

SEQ ID NO: 2744312 - RNA, 12 nt, Human
uggcagaguuac

SEQ ID NO: 2744313 - RNA, 17 nt, Human
uggcagaguuacaguuc

SEQ ID NO: 2744314 - RNA, 19 nt, Human
uggcagaguuacaguucug

SEQ ID NO: 2744315 - RNA, 20 nt, Human
uggcagaguuacaguucugu

SEQ ID NO: 2744316 - RNA, 23 nt, Human
ugcuguuuauuaaucuuagugua

SEQ ID NO: 2744317 - RNA, 14 nt, Human
ugcuguuuauuaau

SEQ ID NO: 2744318 - RNA, 17 nt, Human
ugcuguuuauuaaucuu

SEQ ID NO: 2744319 - RNA, 20 nt, Human
uggcaauagucaaauugugu

SEQ ID NO: 2744320 - RNA, 15 nt, Human
uggcacuaguauuuc

SEQ ID NO: 2744321 - RNA, 21 nt, Human
ugccuauuaucugucagcugc

SEQ ID NO: 2744322 - RNA, 16 nt, Human
ugccacuaaauugaca

SEQ ID NO: 2744323 - RNA, 13 nt, Human
ugcaucagcugcu

SEQ ID NO: 2744324 - RNA, 12 nt, Human
ugcaguucugaa

SEQ ID NO: 2744325 - RNA, 22 nt, Human
ugcaucaauuuuucuuauuuca

SEQ ID NO: 2744326 - RNA, 15 nt, Human
ugcugccaauauccu

SEQ ID NO: 2744327 - RNA, 16 nt, Human
ugcugccaauauccua

SEQ ID NO: 2744328 - RNA, 17 nt, Human
ugcugccaauauccuaa

SEQ ID NO: 2744329 - RNA, 18 nt, Human
ugcugccaauauccuaau

SEQ ID NO: 2744330 - RNA, 19 nt, Human
ugcugccaauauccuaaua

SEQ ID NO: 2744331 - RNA, 22 nt, Human
ugcugccaauauccuaauaaaa

SEQ ID NO: 2744332 - RNA, 21 nt, Human
ugcugccaauauccuaauaaa

SEQ ID NO: 2744333 - RNA, 20 nt, Human
ugcugggggggauuguaaaa

SEQ ID NO: 2744334 - RNA, 16 nt, Human
ugcucuaacagcccuc

SEQ ID NO: 2744335 - RNA, 15 nt, Human
ugcucuaacagcccu

SEQ ID NO: 2744336 - RNA, 17 nt, Human
ugcuagaacucccuuuc

SEQ ID NO: 2744337 - RNA, 15 nt, Human
ugcuagaacucccuu

SEQ ID NO: 2744338 - RNA, 14 nt, Human
ugcuagaacucccu

SEQ ID NO: 2744339 - RNA, 13 nt, Human
ugcuagaacuccc

SEQ ID NO: 2744340 - RNA, 20 nt, Human
ugaggcuccacuuggucugu

SEQ ID NO: 2744341 - RNA, 18 nt, Human
ugaggcuccacuuggucu

SEQ ID NO: 2744342 - RNA, 16 nt, Human
ugauaacuggaaacuu

SEQ ID NO: 2744343 - RNA, 21 nt, Human
ugagcucgguggacccaggga

SEQ ID NO: 2744344 - RNA, 20 nt, Human
ugagcucgguggacccaggg

SEQ ID NO: 2744345 - RNA, 14 nt, Human
ugagcucgguggac

SEQ ID NO: 2744346 - RNA, 13 nt, Human
ugagccccaaaag

SEQ ID NO: 2744347 - RNA, 16 nt, Human
ugagagugaacaaauu

SEQ ID NO: 2744348 - RNA, 17 nt, Human
ugaucagcuuauugucu

SEQ ID NO: 2744349 - RNA, 24 nt, Human
ugaucagcuuauugucuagugaaa

SEQ ID NO: 2744350 - RNA, 14 nt, Human
ugaucuuuaaaaua

SEQ ID NO: 2744351 - RNA, 17 nt, Human
ugaucuuuaaaauacac

SEQ ID NO: 2744352 - RNA, 23 nt, Human
ugaugcuacaggauuugaaauug

SEQ ID NO: 2744353 - RNA, 20 nt, Human
ugaugcuacaggauuugaaa

SEQ ID NO: 2744354 - RNA, 15 nt, Human
ugauggugguauguu

SEQ ID NO: 2744355 - RNA, 22 nt, Human
ugauuaugaauuacauuuguau

SEQ ID NO: 2744356 - RNA, 21 nt, Human
ugauuaugaauuacauuugua

SEQ ID NO: 2744357 - RNA, 20 nt, Human
ugauuauuaacgauguccaa

SEQ ID NO: 2744358 - RNA, 19 nt, Human
ugauuaugaauuacauuug

SEQ ID NO: 2744359 - RNA, 17 nt, Human
ugauuaugaauuacauu

SEQ ID NO: 2744360 - RNA, 13 nt, Human
ugauuauauguca

SEQ ID NO: 2744361 - RNA, 23 nt, Human
ugauuacuggccuuuuucauuua

SEQ ID NO: 2744362 - RNA, 20 nt, Human
ugauuacuggccuuuuucau

SEQ ID NO: 2744363 - RNA, 21 nt, Human
ugauuacuggccuuuuucauu

SEQ ID NO: 2744364 - RNA, 22 nt, Human
ugauguuuagaaacacaacuau

SEQ ID NO: 2744365 - RNA, 16 nt, Human
ugauuaccagggacug

SEQ ID NO: 2744366 - RNA, 12 nt, Human
ucuuugccaagu

SEQ ID NO: 2744367 - RNA, 19 nt, Human
ucuuuccacagaagcucca

SEQ ID NO: 2744368 - RNA, 13 nt, Human
ucuugcuaccagu

SEQ ID NO: 2744369 - RNA, 11 nt, Human
ucuugcuucuu

SEQ ID NO: 2744370 - RNA, 14 nt, Human
ucuugcuaccagua

SEQ ID NO: 2744371 - RNA, 20 nt, Human
ucuugcuaccaguauuuaga

SEQ ID NO: 2744372 - RNA, 18 nt, Human
ucuugcuucuuucuagaa

SEQ ID NO: 2744373 - RNA, 16 nt, Human
ucuugcuucuuucuag

SEQ ID NO: 2744374 - RNA, 17 nt, Human
ucuugcuucuuucuaga

SEQ ID NO: 2744375 - RNA, 17 nt, Human
ucuuucacauuuaaaua

SEQ ID NO: 2744376 - RNA, 20 nt, Human
ugaacaaguuguuucauuga

SEQ ID NO: 2744377 - RNA, 19 nt, Human
ugaacaaguuguuucauug

SEQ ID NO: 2744378 - RNA, 22 nt, Human
ugaacaaguuguuucauugacu

SEQ ID NO: 2744379 - RNA, 16 nt, Human
ugaaauauugacuuuu

SEQ ID NO: 2744380 - RNA, 19 nt, Human
ugaaauggacuuuuguaca

SEQ ID NO: 2744381 - RNA, 22 nt, Human
ugaaacaacaaauaggaauugu

SEQ ID NO: 2744382 - RNA, 18 nt, Human
ugaaagaggcagcuugaa

SEQ ID NO: 2744383 - RNA, 16 nt, Human
ugaaagguacuucaaa

SEQ ID NO: 2744384 - RNA, 15 nt, Human
ugaaagguacuucaa

SEQ ID NO: 2744385 - RNA, 18 nt, Human
ugaauuacauuuguauaa

SEQ ID NO: 2744386 - RNA, 16 nt, Human
ugaauuacauuuguau

SEQ ID NO: 2744387 - RNA, 15 nt, Human
ugaauuacauuugua

SEQ ID NO: 2744388 - RNA, 17 nt, Human
ugaauuaggcuguaacu

SEQ ID NO: 2744389 - RNA, 20 nt, Human
ugaauuaggcuguaacuacu

SEQ ID NO: 2744390 - RNA, 21 nt, Human
ugaauuaggcuguaacuacuu

SEQ ID NO: 2744391 - RNA, 22 nt, Human
ugaauuaggcuguaacuacuuu

SEQ ID NO: 2744392 - RNA, 14 nt, Human
ugaauuacauuugu

SEQ ID NO: 2744393 - RNA, 20 nt, Human
ugaaugaauggcuaagcaaa

SEQ ID NO: 2744394 - RNA, 13 nt, Human
ugaaguccaagca

SEQ ID NO: 2744395 - RNA, 22 nt, Human
ugaagugcuguuuauuaaucuu

SEQ ID NO: 2744396 - RNA, 18 nt, Human
ugaagugcuguuuauuaa

SEQ ID NO: 2744397 - RNA, 11 nt, Human
ugaaguccaag

SEQ ID NO: 2744398 - RNA, 16 nt, Human
ugacaugucccuacac

SEQ ID NO: 2744399 - RNA, 18 nt, Human
ugacaugggacauuugcu

SEQ ID NO: 2744400 - RNA, 17 nt, Human
ugacaugggacauuugc

SEQ ID NO: 2744401 - RNA, 16 nt, Human
ugacaugggacauuug

SEQ ID NO: 2744402 - RNA, 20 nt, Human
ugaccacugcagaagacagu

SEQ ID NO: 2744403 - RNA, 20 nt, Human
ugacaagcucacagaccuuu

SEQ ID NO: 2744404 - RNA, 15 nt, Human
ugacaagcucacaga

SEQ ID NO: 2744405 - RNA, 12 nt, Human
ugacaagcucac

SEQ ID NO: 2744406 - RNA, 12 nt, Human
ucuccagcugac

SEQ ID NO: 2744407 - RNA, 14 nt, Human
ucuccagcugacua

SEQ ID NO: 2744408 - RNA, 15 nt, Human
ucuccagcugacuaa

SEQ ID NO: 2744409 - RNA, 23 nt, Human
ucucaguccaugaagauguagag

SEQ ID NO: 2744410 - RNA, 14 nt, Human
ucggagaagagcug

SEQ ID NO: 2744411 - RNA, 16 nt, Human
ucggagaagagcuguu

SEQ ID NO: 2744412 - RNA, 12 nt, Human
ucggagaagagc

SEQ ID NO: 2744413 - RNA, 22 nt, Human
uccuuagcuuagaccucagccu

SEQ ID NO: 2744414 - RNA, 21 nt, Human
uccuuagcuuagaccucagcc

SEQ ID NO: 2744415 - RNA, 21 nt, Human
uccugucugccagccagcagc

SEQ ID NO: 2744416 - RNA, 17 nt, Human
uccugucugccagccag

SEQ ID NO: 2744417 - RNA, 20 nt, Human
uccuuagcuuagaccucagc

SEQ ID NO: 2744418 - RNA, 19 nt, Human
uccuuagcuuagaccucag

SEQ ID NO: 2744419 - RNA, 18 nt, Human
uccuuagcuuagaccuca

SEQ ID NO: 2744420 - RNA, 18 nt, Human
ucuaugaaauauuauguu

SEQ ID NO: 2744421 - RNA, 16 nt, Human
uccugucugccagcca

SEQ ID NO: 2744422 - RNA, 14 nt, Human
uccugucugccagc

SEQ ID NO: 2744423 - RNA, 13 nt, Human
uccugucugccag

SEQ ID NO: 2744424 - RNA, 12 nt, Human
uccugucugcca

SEQ ID NO: 2744425 - RNA, 16 nt, Human
uccucuguccagggcc

SEQ ID NO: 2744426 - RNA, 14 nt, Human
uccucuguccaggg

SEQ ID NO: 2744427 - RNA, 23 nt, Human
uccucuguccagggcccugagcu

SEQ ID NO: 2744428 - RNA, 20 nt, Human
uccugaggcuccacuugguc

SEQ ID NO: 2744429 - RNA, 19 nt, Human
uccugaggcuccacuuggu

SEQ ID NO: 2744430 - RNA, 18 nt, Human
uccugccccugagcccau

SEQ ID NO: 2744431 - RNA, 17 nt, Human
uccugccccugagccca

SEQ ID NO: 2744432 - RNA, 20 nt, Human
ucccuucacaaacccagugu

SEQ ID NO: 2744433 - RNA, 14 nt, Human
uccuagugaaagag

SEQ ID NO: 2744434 - RNA, 23 nt, Human
uccuagugaaagaggcagcuuga

SEQ ID NO: 2744435 - RNA, 22 nt, Human
uccucauuuuuauaaugucccu

SEQ ID NO: 2744436 - RNA, 23 nt, Human
ucccaccugacacaccaggcgcu

SEQ ID NO: 2744437 - RNA, 13 nt, Human
ucccaccugacac

SEQ ID NO: 2744438 - RNA, 19 nt, Human
ucccaccugacacaccagg

SEQ ID NO: 2744439 - RNA, 12 nt, Human
uccauacauuug

SEQ ID NO: 2744440 - RNA, 19 nt, Human
uccagguagagggugugua

SEQ ID NO: 2744441 - RNA, 15 nt, Human
uccauacauuugugu

SEQ ID NO: 2744442 - RNA, 20 nt, Human
uccaugggccauaugaaaag

SEQ ID NO: 2744443 - RNA, 14 nt, Human
uccagcugacuaaa

SEQ ID NO: 2744444 - RNA, 21 nt, Human
uccagcugacuaaacuuuuuu

SEQ ID NO: 2744445 - RNA, 23 nt, Human
uccacuuggucugugagaugcua

SEQ ID NO: 2744446 - RNA, 17 nt, Human
uccacuuggucugugag

SEQ ID NO: 2744447 - RNA, 21 nt, Human
uccacuuggucugugagaugc

SEQ ID NO: 2744448 - RNA, 21 nt, Human
ucaucuugcuaccaguauuua

SEQ ID NO: 2744449 - RNA, 22 nt, Human
ucaucuugcuaccaguauuuag

SEQ ID NO: 2744450 - RNA, 11 nt, Human
ucaucuugcua

SEQ ID NO: 2744451 - RNA, 17 nt, Human
ucaucuugcuaccagua

SEQ ID NO: 2744452 - RNA, 18 nt, Human
ucaucuugcuaccaguau

SEQ ID NO: 2744453 - RNA, 17 nt, Human
ucaucaaugaaugaaug

SEQ ID NO: 2744454 - RNA, 12 nt, Human
ucauagcagcuu

SEQ ID NO: 2744455 - RNA, 11 nt, Human
ucauagcagcu

SEQ ID NO: 2744456 - RNA, 18 nt, Human
ucauuuaucuauaauuua

SEQ ID NO: 2744457 - RNA, 21 nt, Human
ucauuuaucuauaauuuaccu

SEQ ID NO: 2744458 - RNA, 12 nt, Human
ucauuuaucuau

SEQ ID NO: 2744459 - RNA, 16 nt, Human
ucauuuaucuauaauu

SEQ ID NO: 2744460 - RNA, 14 nt, Human
uccaaagaaaugua

SEQ ID NO: 2744461 - RNA, 17 nt, Human
uccaaagaaauguaagg

SEQ ID NO: 2744462 - RNA, 16 nt, Human
ucauuaggauggcuag

SEQ ID NO: 2744463 - RNA, 16 nt, Human
uaggucagugcaaaua

SEQ ID NO: 2744464 - RNA, 18 nt, Human
uaggccaugggacaggga

SEQ ID NO: 2744465 - RNA, 16 nt, Human
uaggccaugggacagg

SEQ ID NO: 2744466 - RNA, 12 nt, Human
uaggaauugacc

SEQ ID NO: 2744467 - RNA, 15 nt, Human
uagugcaaauuguca

SEQ ID NO: 2744468 - RNA, 14 nt, Human
uagugcaaauuguc

SEQ ID NO: 2744469 - RNA, 14 nt, Human
uagucaaauugugu

SEQ ID NO: 2744470 - RNA, 13 nt, Human
uagucaaauugug

SEQ ID NO: 2744471 - RNA, 19 nt, Human
uaguauuuuuuguauaauu

SEQ ID NO: 2744472 - RNA, 22 nt, Human
uagugccacuuaauguauguua

SEQ ID NO: 2744473 - RNA, 16 nt, Human
uaguauuucuaugaaa

SEQ ID NO: 2744474 - RNA, 19 nt, Human
uaguauuucuaugaaauau

SEQ ID NO: 2744475 - RNA, 18 nt, Human
uaguauuucuaugaaaua

SEQ ID NO: 2744476 - RNA, 18 nt, Human
uaguauuuuuuguauaau

SEQ ID NO: 2744477 - RNA, 13 nt, Human
uaguaucaaaaga

SEQ ID NO: 2744478 - RNA, 22 nt, Human
uauaauuggauuuccuaauacu

SEQ ID NO: 2744479 - RNA, 19 nt, Human
uauaauuggauuuccuaau

SEQ ID NO: 2744480 - RNA, 20 nt, Human
uauaauuggauuuccuaaua

SEQ ID NO: 2744481 - RNA, 17 nt, Human
uauaauuggauuuccua

SEQ ID NO: 2744482 - RNA, 18 nt, Human
uauaauuggauuuccuaa

SEQ ID NO: 2744483 - RNA, 13 nt, Human
uauauaacaaugc

SEQ ID NO: 2744484 - RNA, 13 nt, Human
uauaugcuucugu

SEQ ID NO: 2744485 - RNA, 22 nt, Human
uauaguuacuguguaauuagug

SEQ ID NO: 2744486 - RNA, 18 nt, Human
uauaguuacuguguaauu

SEQ ID NO: 2744487 - RNA, 20 nt, Human
uauaguuacuguguaauuag

SEQ ID NO: 2744488 - RNA, 13 nt, Human
uauaguuacugug

SEQ ID NO: 2744489 - RNA, 15 nt, Human
uauaguuacugugua

SEQ ID NO: 2744490 - RNA, 16 nt, Human
uauaguuacuguguaa

SEQ ID NO: 2744491 - RNA, 16 nt, Human
uaugcuucuguuuuau

SEQ ID NO: 2744492 - RNA, 15 nt, Human
uaugcuucuguuuua

SEQ ID NO: 2744493 - RNA, 22 nt, Human
uaugauuacuggccuuuuucau

SEQ ID NO: 2744494 - RNA, 12 nt, Human
uaugauuauuaa

SEQ ID NO: 2744495 - RNA, 21 nt, Human
uaugauuauuaacgaugucca

SEQ ID NO: 2744496 - RNA, 16 nt, Human
uaugauucccagccag

SEQ ID NO: 2744497 - RNA, 15 nt, Human
uaugauuacuggccu

SEQ ID NO: 2744498 - RNA, 15 nt, Human
uaugcaaagcacuga

SEQ ID NO: 2744499 - RNA, 13 nt, Human
uaugcaaagcacu

SEQ ID NO: 2744500 - RNA, 14 nt, Human
uaugcaaagcacug

SEQ ID NO: 2744501 - RNA, 12 nt, Human
uaugcaaagcac

SEQ ID NO: 2744502 - RNA, 15 nt, Human
uaucugucagcugca

SEQ ID NO: 2744503 - RNA, 17 nt, Human
uaugaauuacauuugua

SEQ ID NO: 2744504 - RNA, 23 nt, Human
uaugaauuacauuuguauaaaau

SEQ ID NO: 2744505 - RNA, 22 nt, Human
uaucuaccccagacuagaugua

SEQ ID NO: 2744506 - RNA, 14 nt, Human
uauccuucagccug

SEQ ID NO: 2744507 - RNA, 15 nt, Human
uauccuucagccuga

SEQ ID NO: 2744508 - RNA, 15 nt, Human
uauuaacgaugucca

SEQ ID NO: 2744509 - RNA, 17 nt, Human
uauguucuaagaaguga

SEQ ID NO: 2744510 - RNA, 19 nt, Human
uauggaggcuuugcauaga

SEQ ID NO: 2744511 - RNA, 12 nt, Human
uauguuaaaacu

SEQ ID NO: 2744512 - RNA, 19 nt, Human
uauguuagugcaaauuguc

SEQ ID NO: 2744513 - RNA, 17 nt, Human
uauuauauuuacaaaug

SEQ ID NO: 2744514 - RNA, 14 nt, Human
uauuaucugucagc

SEQ ID NO: 2744515 - RNA, 13 nt, Human
uauuaucugucag

SEQ ID NO: 2744516 - RNA, 15 nt, Human
uauuauuguguguua

SEQ ID NO: 2744517 - RNA, 16 nt, Human
uauuauguuaaaacug

SEQ ID NO: 2744518 - RNA, 20 nt, Human
uauuguuuaaaaucauuucu

SEQ ID NO: 2744519 - RNA, 22 nt, Human
uauuuaaauauuaaauauguua

SEQ ID NO: 2744520 - RNA, 15 nt, Human
uauuucuaugaaaua

SEQ ID NO: 2744521 - RNA, 14 nt, Human
uauuucuaugaaau

SEQ ID NO: 2744522 - RNA, 13 nt, Human
uauuuauuacugu

SEQ ID NO: 2744523 - RNA, 13 nt, Human
uauuucuaugaaa

SEQ ID NO: 2744524 - RNA, 14 nt, Human
uauuuauuacugua

SEQ ID NO: 2744525 - RNA, 19 nt, Human
uauuguguguuauuuaaau

SEQ ID NO: 2744526 - RNA, 17 nt, Human
uauuguguguuauuuaa

SEQ ID NO: 2744527 - RNA, 15 nt, Human
uauuguuuaaaauca

SEQ ID NO: 2744528 - RNA, 16 nt, Human
uauuguuuaaaaucau

SEQ ID NO: 2744529 - RNA, 17 nt, Human
uauuguuuaaaaucauu

SEQ ID NO: 2744530 - RNA, 14 nt, Human
ucaauaaaauccau

SEQ ID NO: 2744531 - RNA, 22 nt, Human
ucacaagacccaaaaggcagaa

SEQ ID NO: 2744532 - RNA, 21 nt, Human
ucacacacaggcaacugaggc

SEQ ID NO: 2744533 - RNA, 20 nt, Human
ucacacacaggcaacugagg

SEQ ID NO: 2744534 - RNA, 12 nt, Human
ucacauuuaaau

SEQ ID NO: 2744535 - RNA, 16 nt, Human
ucaaggaauuucuuaa

SEQ ID NO: 2744536 - RNA, 19 nt, Human
ucaaggaauuucuuaacuu

SEQ ID NO: 2744537 - RNA, 21 nt, Human
ucaaggaauuucuuaacuucu

SEQ ID NO: 2744538 - RNA, 23 nt, Human
ucaaggaauuucuuaacuucuug

SEQ ID NO: 2744539 - RNA, 22 nt, Human
ucaacuccaaacugacucuuaa

SEQ ID NO: 2744540 - RNA, 16 nt, Human
ucaaauaugcaaagca

SEQ ID NO: 2744541 - RNA, 17 nt, Human
ucaaauaugcaaagcac

SEQ ID NO: 2744542 - RNA, 18 nt, Human
ucaaauaugcaaagcacu

SEQ ID NO: 2744543 - RNA, 19 nt, Human
ucaaauaugcaaagcacug

SEQ ID NO: 2744544 - RNA, 15 nt, Human
ucaaauccuugaaga

SEQ ID NO: 2744545 - RNA, 16 nt, Human
ucaaauccuugaagau

SEQ ID NO: 2744546 - RNA, 22 nt, Human
ucaaacagucucaggaaaucaa

SEQ ID NO: 2744547 - RNA, 17 nt, Human
ucaaacauauauaacaa

SEQ ID NO: 2744548 - RNA, 20 nt, Human
gugcucuuuucuccucacug

SEQ ID NO: 2744549 - RNA, 14 nt, Human
gugcucuuuucucc

SEQ ID NO: 2744550 - RNA, 16 nt, Human
gugcucuuuucuccuc

SEQ ID NO: 2744551 - RNA, 19 nt, Human
gugcugcccgucuucagcc

SEQ ID NO: 2744552 - RNA, 18 nt, Human
gugcugcccgucuucagc

SEQ ID NO: 2744553 - RNA, 21 nt, Human
gugcugcccgucuucagccua

SEQ ID NO: 2744554 - RNA, 15 nt, Human
gugcuguuuauuaau

SEQ ID NO: 2744555 - RNA, 19 nt, Human
gugcuguuuauuaaucuua

SEQ ID NO: 2744556 - RNA, 13 nt, Human
gugcuuggcccag

SEQ ID NO: 2744557 - RNA, 14 nt, Human
gugcuuggcccagg

SEQ ID NO: 2744558 - RNA, 15 nt, Human
gugcuuggcccagga

SEQ ID NO: 2744559 - RNA, 16 nt, Human
gugcuuggcccaggag

SEQ ID NO: 2744560 - RNA, 17 nt, Human
gugcuuggcccaggagu

SEQ ID NO: 2744561 - RNA, 19 nt, Human
gugcuuggcccaggaguuu

SEQ ID NO: 2744562 - RNA, 24 nt, Human
gugcuuggcccaggaguuuggcca

SEQ ID NO: 2744563 - RNA, 14 nt, Human
gugagcuacaaaug

SEQ ID NO: 2744564 - RNA, 16 nt, Human
gugagcagucaggaaa

SEQ ID NO: 2744565 - RNA, 22 nt, Human
gugaauuaggcuguaacuacuu

SEQ ID NO: 2744566 - RNA, 18 nt, Human
gugaauuaggcuguaacu

SEQ ID NO: 2744567 - RNA, 21 nt, Human
gugaauuaggcuguaacuacu

SEQ ID NO: 2744568 - RNA, 15 nt, Human
gucugccagccagca

SEQ ID NO: 2744569 - RNA, 14 nt, Human
gucugccagccagc

SEQ ID NO: 2744570 - RNA, 19 nt, Human
gugaaagaaaauaacaaua

SEQ ID NO: 2744571 - RNA, 20 nt, Human
gugaaacucguuaauuugua

SEQ ID NO: 2744572 - RNA, 18 nt, Human
gugcaaauugucacagga

SEQ ID NO: 2744573 - RNA, 15 nt, Human
gucccugguaauaag

SEQ ID NO: 2744574 - RNA, 22 nt, Human
guccuggggccucggagccuca

SEQ ID NO: 2744575 - RNA, 14 nt, Human
guccuggggccucg

SEQ ID NO: 2744576 - RNA, 18 nt, Human
guccugucggagcccugu

SEQ ID NO: 2744577 - RNA, 20 nt, Human
guccugucggagcccugucu

SEQ ID NO: 2744578 - RNA, 21 nt, Human
guccugucggagcccugucuc

SEQ ID NO: 2744579 - RNA, 17 nt, Human
gucuacacuaagagaga

SEQ ID NO: 2744580 - RNA, 23 nt, Human
gucuacacuaagagagaaugaga

SEQ ID NO: 2744581 - RNA, 19 nt, Human
gucauccucaaagaaagug

SEQ ID NO: 2744582 - RNA, 22 nt, Human
gucauccucaaagaaaguguau

SEQ ID NO: 2744583 - RNA, 22 nt, Human
gucaucuugcuaccaguauuua

SEQ ID NO: 2744584 - RNA, 12 nt, Human
gucaucuugcua

SEQ ID NO: 2744585 - RNA, 14 nt, Human
gucaucuugcuacc

SEQ ID NO: 2744586 - RNA, 15 nt, Human
gucaucuugcuacca

SEQ ID NO: 2744587 - RNA, 18 nt, Human
gucaucuugcuaccagua

SEQ ID NO: 2744588 - RNA, 16 nt, Human
guccagggcccugagc

SEQ ID NO: 2744589 - RNA, 15 nt, Human
guccagggcccugag

SEQ ID NO: 2744590 - RNA, 14 nt, Human
guccagggcccuga

SEQ ID NO: 2744591 - RNA, 20 nt, Human
gucccagccagcaguucaga

SEQ ID NO: 2744592 - RNA, 21 nt, Human
gucaauaaaauccauacauuu

SEQ ID NO: 2744593 - RNA, 15 nt, Human
gucaauaaaauccau

SEQ ID NO: 2744594 - RNA, 14 nt, Human
gucaccucauggaa

SEQ ID NO: 2744595 - RNA, 13 nt, Human
gucaaggcuuaga

SEQ ID NO: 2744596 - RNA, 14 nt, Human
gucaaggcuuagac

SEQ ID NO: 2744597 - RNA, 17 nt, Human
guauuuuaaaagaauga

SEQ ID NO: 2744598 - RNA, 16 nt, Human
guauuuuaaaagaaug

SEQ ID NO: 2744599 - RNA, 21 nt, Human
guauuuggaaauaaagucaga

SEQ ID NO: 2744600 - RNA, 19 nt, Human
guauuuggaaauaaaguca

SEQ ID NO: 2744601 - RNA, 20 nt, Human
guauuuggaaauaaagucag

SEQ ID NO: 2744602 - RNA, 17 nt, Human
guauuucuaugaaauau

SEQ ID NO: 2744603 - RNA, 22 nt, Human
guauuucuaugaaauauuaugu

SEQ ID NO: 2744604 - RNA, 17 nt, Human
ggggcagaacagccgcu

SEQ ID NO: 2744605 - RNA, 23 nt, Human
ggguaccuugaacacugggggag

SEQ ID NO: 2744606 - RNA, 22 nt, Human
ggugccccccuugccagacaug

SEQ ID NO: 2744607 - RNA, 19 nt, Human
ggugcuacaaaaacacagc

SEQ ID NO: 2744608 - RNA, 21 nt, Human
ggguagccacuggacugacga

SEQ ID NO: 2744609 - RNA, 22 nt, Human
gguacuucaaauccuugaagau

SEQ ID NO: 2744610 - RNA, 12 nt, Human
gguaccuugaac

SEQ ID NO: 2744611 - RNA, 18 nt, Human
gguaccuugaacacuggg

SEQ ID NO: 2744612 - RNA, 22 nt, Human
gguagacacacaugaaguccaa

SEQ ID NO: 2744613 - RNA, 15 nt, Human
gguagacacacauga

SEQ ID NO: 2744614 - RNA, 16 nt, Human
gguucagagacucagg

SEQ ID NO: 2744615 - RNA, 18 nt, Human
gguuuaaagaaaguguau

SEQ ID NO: 2744616 - RNA, 23 nt, Human
guaaaaccacagcaguugaaaag

SEQ ID NO: 2744617 - RNA, 14 nt, Human
guaaaaccacagca

SEQ ID NO: 2744618 - RNA, 15 nt, Human
guaaaaccacagcag

SEQ ID NO: 2744619 - RNA, 16 nt, Human
guaaaaccacagcagu

SEQ ID NO: 2744620 - RNA, 18 nt, Human
guaaaaccacagcaguug

SEQ ID NO: 2744621 - RNA, 14 nt, Human
guaaauaggaauug

SEQ ID NO: 2744622 - RNA, 14 nt, Human
guaacuuuugugaa

SEQ ID NO: 2744623 - RNA, 17 nt, Human
guaagggaaacugccag

SEQ ID NO: 2744624 - RNA, 18 nt, Human
guaagggaaacugccagc

SEQ ID NO: 2744625 - RNA, 23 nt, Human
guacuuuauuuucuauaauuuaa

SEQ ID NO: 2744626 - RNA, 15 nt, Human
guagaggagaaacug

SEQ ID NO: 2744627 - RNA, 23 nt, Human
guaccuugaacacugggggaggg

SEQ ID NO: 2744628 - RNA, 18 nt, Human
guaccuugaacacugggg

SEQ ID NO: 2744629 - RNA, 14 nt, Human
guaccuugaacacu

SEQ ID NO: 2744630 - RNA, 15 nt, Human
guaccgcaaugugac

SEQ ID NO: 2744631 - RNA, 20 nt, Human
guacagaauucugcuaccuc

SEQ ID NO: 2744632 - RNA, 20 nt, Human
guaauuagugccacuuaaug

SEQ ID NO: 2744633 - RNA, 21 nt, Human
guaauuagugccacuuaaugu

SEQ ID NO: 2744634 - RNA, 15 nt, Human
guaauuggaaaggca

SEQ ID NO: 2744635 - RNA, 19 nt, Human
guaaugauaacuggaaacu

SEQ ID NO: 2744636 - RNA, 14 nt, Human
gcugccaauauccu

SEQ ID NO: 2744637 - RNA, 15 nt, Human
gcugccaauauccua

SEQ ID NO: 2744638 - RNA, 16 nt, Human
gcugccaauauccuaa

SEQ ID NO: 2744639 - RNA, 17 nt, Human
gcugccaauauccuaau

SEQ ID NO: 2744640 - RNA, 18 nt, Human
gcugccaauauccuaaua

SEQ ID NO: 2744641 - RNA, 19 nt, Human
gcugccaauauccuaauaa

SEQ ID NO: 2744642 - RNA, 20 nt, Human
gcucucuggccuucggccuc

SEQ ID NO: 2744643 - RNA, 19 nt, Human
gcucucuggccuucggccu

SEQ ID NO: 2744644 - RNA, 15 nt, Human
gcucucuggccuucg

SEQ ID NO: 2744645 - RNA, 14 nt, Human
gcucucuggccuuc

SEQ ID NO: 2744646 - RNA, 11 nt, Human
gcucucuggcc

SEQ ID NO: 2744647 - RNA, 13 nt, Human
gcucucuggccuu

SEQ ID NO: 2744648 - RNA, 12 nt, Human
gcucucuggccu

SEQ ID NO: 2744649 - RNA, 11 nt, Human
gcucagccugg

SEQ ID NO: 2744650 - RNA, 20 nt, Human
gcucagccuggugggccucc

SEQ ID NO: 2744651 - RNA, 19 nt, Human
gcucagccuggugggccuc

SEQ ID NO: 2744652 - RNA, 18 nt, Human
gcucagccuggugggccu

SEQ ID NO: 2744653 - RNA, 17 nt, Human
gcucagccuggugggcc

SEQ ID NO: 2744654 - RNA, 15 nt, Human
gcucagccugguggg

SEQ ID NO: 2744655 - RNA, 14 nt, Human
gcucagccuggugg

SEQ ID NO: 2744656 - RNA, 17 nt, Human
gcuaagcaaaaugugau

SEQ ID NO: 2744657 - RNA, 14 nt, Human
gcuaagcauuccaa

SEQ ID NO: 2744658 - RNA, 23 nt, Human
gcccucuccugggcagcugccuc

SEQ ID NO: 2744659 - RNA, 22 nt, Human
gcccucuccugggcagcugccu

SEQ ID NO: 2744660 - RNA, 13 nt, Human
gcccucuccuggg

SEQ ID NO: 2744661 - RNA, 12 nt, Human
gcccucuccugg

SEQ ID NO: 2744662 - RNA, 17 nt, Human
gccucauccgaggcagg

SEQ ID NO: 2744663 - RNA, 16 nt, Human
gccucauccgaggcag

SEQ ID NO: 2744664 - RNA, 19 nt, Human
gccucauccgaggcagggu

SEQ ID NO: 2744665 - RNA, 18 nt, Human
gccucauccgaggcaggg

SEQ ID NO: 2744666 - RNA, 23 nt, Human
gccucggagccucauccgaggca

SEQ ID NO: 2744667 - RNA, 17 nt, Human
gccucggagccucaucc

SEQ ID NO: 2744668 - RNA, 15 nt, Human
gccucggagccucau

SEQ ID NO: 2744669 - RNA, 14 nt, Human
gccucggagccuca

SEQ ID NO: 2744670 - RNA, 17 nt, Human
gccuaagugcagccccg

SEQ ID NO: 2744671 - RNA, 22 nt, Human
gccuauauuuuuuguuaaauga

SEQ ID NO: 2744672 - RNA, 23 nt, Human
gcuuagaccucagccugugcugc

SEQ ID NO: 2744673 - RNA, 19 nt, Human
gcuuagaccucagccugug

SEQ ID NO: 2744674 - RNA, 18 nt, Human
gcuuagaccucagccugu

SEQ ID NO: 2744675 - RNA, 20 nt, Human
gcugccaauauccuaauaaa

SEQ ID NO: 2744676 - RNA, 21 nt, Human
gcugccaauauccuaauaaaa

SEQ ID NO: 2744677 - RNA, 20 nt, Human
gcugucuacacuaagagaga

SEQ ID NO: 2744678 - RNA, 23 nt, Human
gcugccaauauccuaauaaaaag

SEQ ID NO: 2744679 - RNA, 16 nt, Human
ggaaaucaaauaugca

SEQ ID NO: 2744680 - RNA, 17 nt, Human
ggaaaucaaauaugcaa

SEQ ID NO: 2744681 - RNA, 15 nt, Human
ggaaaauucauuuuu

SEQ ID NO: 2744682 - RNA, 14 nt, Human
ggaaaauucauuuu

SEQ ID NO: 2744683 - RNA, 23 nt, Human
ggaaagggauuuucagcccucag

SEQ ID NO: 2744684 - RNA, 20 nt, Human
ggaagugacgguuuaauggg

SEQ ID NO: 2744685 - RNA, 22 nt, Human
ggaauuggagcucgugggacag

SEQ ID NO: 2744686 - RNA, 16 nt, Human
ggaauuggagcucgug

SEQ ID NO: 2744687 - RNA, 23 nt, Human
ggaauuucucccagucauuuaau

SEQ ID NO: 2744688 - RNA, 18 nt, Human
ggaauuucuuaacuucuu

SEQ ID NO: 2744689 - RNA, 22 nt, Human
ggaauuucuuaacuucuugcuu

SEQ ID NO: 2744690 - RNA, 19 nt, Human
ggagaaucacuugaacccg

SEQ ID NO: 2744691 - RNA, 15 nt, Human
ggagaaucacuugaa

SEQ ID NO: 2744692 - RNA, 14 nt, Human
ggacgcucucuggc

SEQ ID NO: 2744693 - RNA, 13 nt, Human
ggacgcucucugg

SEQ ID NO: 2744694 - RNA, 21 nt, Human
ggcccugagcucgguggaccc

SEQ ID NO: 2744695 - RNA, 19 nt, Human
ggcccugagcucgguggac

SEQ ID NO: 2744696 - RNA, 14 nt, Human
ggcccugagcucgg

SEQ ID NO: 2744697 - RNA, 22 nt, Human
ggccucggagccucauccgagg

SEQ ID NO: 2744698 - RNA, 19 nt, Human
ggccucggagccucauccg

SEQ ID NO: 2744699 - RNA, 15 nt, Human
ggccucggagccuca

SEQ ID NO: 2744700 - RNA, 13 nt, Human
ggccucggagccu

SEQ ID NO: 2744701 - RNA, 14 nt, Human
ggcauggcugggaa

SEQ ID NO: 2744702 - RNA, 12 nt, Human
ggauuggggaag

SEQ ID NO: 2744703 - RNA, 15 nt, Human
ggauuguaaaauggu

SEQ ID NO: 2744704 - RNA, 19 nt, Human
ggauuggggaagacugugg

SEQ ID NO: 2744705 - RNA, 18 nt, Human
ggauuggggaagacugug

SEQ ID NO: 2744706 - RNA, 20 nt, Human
gauuggggaagacuguggcu

SEQ ID NO: 2744707 - RNA, 13 nt, Human
gauuuccuaauac

SEQ ID NO: 2744708 - RNA, 16 nt, Human
gcaaauugucacagga

SEQ ID NO: 2744709 - RNA, 18 nt, Human
gaugcuagaacucccuuu

SEQ ID NO: 2744710 - RNA, 22 nt, Human
gaugcuagaacucccuuucaac

SEQ ID NO: 2744711 - RNA, 20 nt, Human
gaugcuagaacucccuuuca

SEQ ID NO: 2744712 - RNA, 13 nt, Human
gcacacugucugc

SEQ ID NO: 2744713 - RNA, 12 nt, Human
gcacacuguagc

SEQ ID NO: 2744714 - RNA, 21 nt, Human
gcagacagcagcucaggcaca

SEQ ID NO: 2744715 - RNA, 20 nt, Human
gcagacagcagcucaggcac

SEQ ID NO: 2744716 - RNA, 19 nt, Human
gcagacagcagcucaggca

SEQ ID NO: 2744717 - RNA, 18 nt, Human
gcagacagcagcucaggc

SEQ ID NO: 2744718 - RNA, 17 nt, Human
gcagacagcagcucagg

SEQ ID NO: 2744719 - RNA, 16 nt, Human
gcagacagcagcucag

SEQ ID NO: 2744720 - RNA, 14 nt, Human
gcagacagcagcuc

SEQ ID NO: 2744721 - RNA, 13 nt, Human
gcagacagcagcu

SEQ ID NO: 2744722 - RNA, 18 nt, Human
gcacugacuucuaaguaa

SEQ ID NO: 2744723 - RNA, 15 nt, Human
gcacugacuucuaag

SEQ ID NO: 2744724 - RNA, 16 nt, Human
gaguaauuuauuguuu

SEQ ID NO: 2744725 - RNA, 14 nt, Human
gaguaauuuauugu

SEQ ID NO: 2744726 - RNA, 13 nt, Human
gaguuacaguucu

SEQ ID NO: 2744727 - RNA, 14 nt, Human
gaguuacaguucug

SEQ ID NO: 2744728 - RNA, 15 nt, Human
gaguuacaguucugu

SEQ ID NO: 2744729 - RNA, 16 nt, Human
gaguuacaguucugug

SEQ ID NO: 2744730 - RNA, 22 nt, Human
gauaaauggcuuccuggcaaua

SEQ ID NO: 2744731 - RNA, 15 nt, Human
gaggguuagggaggg

SEQ ID NO: 2744732 - RNA, 22 nt, Human
gaggcagacagcagcucaggca

SEQ ID NO: 2744733 - RNA, 21 nt, Human
gaggcagacagcagcucaggc

SEQ ID NO: 2744734 - RNA, 20 nt, Human
gaggcagacagcagcucagg

SEQ ID NO: 2744735 - RNA, 19 nt, Human
gaggcagacagcagcucag

SEQ ID NO: 2744736 - RNA, 12 nt, Human
gagcccugucuc

SEQ ID NO: 2744737 - RNA, 13 nt, Human
gagccaccaguuc

SEQ ID NO: 2744738 - RNA, 19 nt, Human
gagccaaggguucagagac

SEQ ID NO: 2744739 - RNA, 23 nt, Human
gagccaaggguucagagacucag

SEQ ID NO: 2744740 - RNA, 12 nt, Human
gagccaccaguu

SEQ ID NO: 2744741 - RNA, 21 nt, Human
gagaaugagagacacacugaa

SEQ ID NO: 2744742 - RNA, 20 nt, Human
gagaaugagagacacacuga

SEQ ID NO: 2744743 - RNA, 20 nt, Human
gagacagcucugcauacuca

SEQ ID NO: 2744744 - RNA, 16 nt, Human
gagacaggaccugacu

SEQ ID NO: 2744745 - RNA, 22 nt, Human
gagaaccuagggugauauuaac

SEQ ID NO: 2744746 - RNA, 21 nt, Human
gagaaccuagggugauauuaa

SEQ ID NO: 2744747 - RNA, 23 nt, Human
gagaacuuccagauccuggaaau

SEQ ID NO: 2744748 - RNA, 22 nt, Human
gagaacuuccagauccuggaaa

SEQ ID NO: 2744749 - RNA, 17 nt, Human
gagaaugagagacacac

SEQ ID NO: 2744750 - RNA, 20 nt, Human
gacuuaagcaucuggcucua

SEQ ID NO: 2744751 - RNA, 22 nt, Human
gacuuaagcaucuggcucuaau

SEQ ID NO: 2744752 - RNA, 16 nt, Human
gacuucuaaguaaaac

SEQ ID NO: 2744753 - RNA, 17 nt, Human
gacuucuaaguaaaacc

SEQ ID NO: 2744754 - RNA, 18 nt, Human
gacuucuaaguaaaacca

SEQ ID NO: 2744755 - RNA, 20 nt, Human
gacuucugucuucacaacag

SEQ ID NO: 2744756 - RNA, 23 nt, Human
gacuucugucuucacaacagauu

SEQ ID NO: 2744757 - RNA, 19 nt, Human
gacuucuaaguaaaaccac

SEQ ID NO: 2744758 - RNA, 23 nt, Human
gacuucuaaguaaaaccacagca

SEQ ID NO: 2744759 - RNA, 24 nt, Human
gacuucuaaguaaaaccacagcag

SEQ ID NO: 2744760 - RNA, 17 nt, Human
gacuagauguaguauuu

SEQ ID NO: 2744761 - RNA, 18 nt, Human
gacuagauguaguauuuu

SEQ ID NO: 2744762 - RNA, 16 nt, Human
gacuccaaagaaaugu

SEQ ID NO: 2744763 - RNA, 21 nt, Human
gacucauuuuaaaaaauggaa

SEQ ID NO: 2744764 - RNA, 11 nt, Human
gacuccaaaga

SEQ ID NO: 2744765 - RNA, 12 nt, Human
gacuccaaagaa

SEQ ID NO: 2744766 - RNA, 15 nt, Human
gacuccaaagaaaug

SEQ ID NO: 2744767 - RNA, 16 nt, Human
gacugcauuauauuua

SEQ ID NO: 2744768 - RNA, 14 nt, Human
gacugcauuauauu

SEQ ID NO: 2744769 - RNA, 16 nt, Human
gacuggauaguccguc

SEQ ID NO: 2744770 - RNA, 20 nt, Human
gacaccaggagucccuggua

SEQ ID NO: 2744771 - RNA, 19 nt, Human
gacaccaggagucccuggu

SEQ ID NO: 2744772 - RNA, 19 nt, Human
gacagagccccacccucag

SEQ ID NO: 2744773 - RNA, 20 nt, Human
gacauagaauuaacacauga

SEQ ID NO: 2744774 - RNA, 17 nt, Human
gacagggaggacgcucu

SEQ ID NO: 2744775 - RNA, 19 nt, Human
gacagggacccacuucaca

SEQ ID NO: 2744776 - RNA, 13 nt, Human
gacagggacccac

SEQ ID NO: 2744777 - RNA, 18 nt, Human
gacagggaggacgcucuc

SEQ ID NO: 2744778 - RNA, 16 nt, Human
gacaugggacauuugc

SEQ ID NO: 2744779 - RNA, 21 nt, Human
gaccacugcagaagacaguau

SEQ ID NO: 2744780 - RNA, 15 nt, Human
gacccacaagaaaug

SEQ ID NO: 2744781 - RNA, 16 nt, Human
gacccaaaaggcagaa

SEQ ID NO: 2744782 - RNA, 16 nt, Human
gacaaggaaaaaauaa

SEQ ID NO: 2744783 - RNA, 13 nt, Human
gaauuucuuaacu

SEQ ID NO: 2744784 - RNA, 14 nt, Human
gaauuucuuaacuu

SEQ ID NO: 2744785 - RNA, 15 nt, Human
gaauuucuuaacuuc

SEQ ID NO: 2744786 - RNA, 16 nt, Human
gaauuucuuaacuucu

SEQ ID NO: 2744787 - RNA, 17 nt, Human
gaauuucuuaacuucuu

SEQ ID NO: 2744788 - RNA, 18 nt, Human
gaauuucuuaacuucuug

SEQ ID NO: 2744789 - RNA, 19 nt, Human
gaauuucuuaacuucuugc

SEQ ID NO: 2744790 - RNA, 21 nt, Human
gaauuucuuaacuucuugcuu

SEQ ID NO: 2744791 - RNA, 15 nt, Human
gacaagcucacagac

SEQ ID NO: 2744792 - RNA, 16 nt, Human
gaauuggagcucgugg

SEQ ID NO: 2744793 - RNA, 21 nt, Human
gaauugacccacaagaaauga

SEQ ID NO: 2744794 - RNA, 16 nt, Human
gaauugacccacaaga

SEQ ID NO: 2744795 - RNA, 14 nt, Human
cugucucaccugga

SEQ ID NO: 2744796 - RNA, 17 nt, Human
cugucucaccuggacuu

SEQ ID NO: 2744797 - RNA, 12 nt, Human
cugucucaccug

SEQ ID NO: 2744798 - RNA, 17 nt, Human
cuguggcagaguuacag

SEQ ID NO: 2744799 - RNA, 18 nt, Human
cuguggcagaguuacagu

SEQ ID NO: 2744800 - RNA, 23 nt, Human
cuguggcagaguuacaguucugu

SEQ ID NO: 2744801 - RNA, 19 nt, Human
cuguggcagaguuacaguu

SEQ ID NO: 2744802 - RNA, 22 nt, Human
cuguggcagaguuacaguucug

SEQ ID NO: 2744803 - RNA, 17 nt, Human
cuguggcugcuagcacu

SEQ ID NO: 2744804 - RNA, 21 nt, Human
cuguuaaaagaugaaaauauu

SEQ ID NO: 2744805 - RNA, 23 nt, Human
cuguuaaaagaugaaaauauuug

SEQ ID NO: 2744806 - RNA, 20 nt, Human
cuguuaaaagaugaaaauau

SEQ ID NO: 2744807 - RNA, 18 nt, Human
cugggguccuggggccuc

SEQ ID NO: 2744808 - RNA, 15 nt, Human
cugggguccuggggc

SEQ ID NO: 2744809 - RNA, 19 nt, Human
cugggguccuggggccucg

SEQ ID NO: 2744810 - RNA, 22 nt, Human
cugggggggauuguaaaauggu

SEQ ID NO: 2744811 - RNA, 23 nt, Human
cuguaaucacagcuacuugggag

SEQ ID NO: 2744812 - RNA, 18 nt, Human
cuguccagggcccugagc

SEQ ID NO: 2744813 - RNA, 23 nt, Human
cuguccagggcccugagcucggu

SEQ ID NO: 2744814 - RNA, 22 nt, Human
cuguccagggcccugagcucgg

SEQ ID NO: 2744815 - RNA, 20 nt, Human
cuguccagggcccugagcuc

SEQ ID NO: 2744816 - RNA, 19 nt, Human
cuguccagggcccugagcu

SEQ ID NO: 2744817 - RNA, 20 nt, Human
cugucuacacuaagagagaa

SEQ ID NO: 2744818 - RNA, 23 nt, Human
cuguauccagguucccucccaga

SEQ ID NO: 2744819 - RNA, 22 nt, Human
cuguauuuuaaaagaaugauua

SEQ ID NO: 2744820 - RNA, 19 nt, Human
cuguauuuuaaaagaauga

SEQ ID NO: 2744821 - RNA, 20 nt, Human
cuguauuuuaaaagaaugau

SEQ ID NO: 2744822 - RNA, 16 nt, Human
cuggagcucugcccau

SEQ ID NO: 2744823 - RNA, 13 nt, Human
cuggagcucugcc

SEQ ID NO: 2744824 - RNA, 12 nt, Human
cuggagcucugc

SEQ ID NO: 2744825 - RNA, 23 nt, Human
cuggccuucggccuccauccuga

SEQ ID NO: 2744826 - RNA, 22 nt, Human
cuggccuucggccuccauccug

SEQ ID NO: 2744827 - RNA, 21 nt, Human
cuggcacaguuuucugagaaa

SEQ ID NO: 2744828 - RNA, 22 nt, Human
cuggcacaguuuucugagaaag

SEQ ID NO: 2744829 - RNA, 20 nt, Human
cuggcacaguuuucugagaa

SEQ ID NO: 2744830 - RNA, 18 nt, Human
cugcugaaacaacaaaua

SEQ ID NO: 2744831 - RNA, 13 nt, Human
cugccuccccucc

SEQ ID NO: 2744832 - RNA, 21 nt, Human
cugcccuagagcacacuguag

SEQ ID NO: 2744833 - RNA, 19 nt, Human
cugcccuagagcacacugu

SEQ ID NO: 2744834 - RNA, 15 nt, Human
cugcccuagagcaca

SEQ ID NO: 2744835 - RNA, 19 nt, Human
cugcccucuccugggcagc

SEQ ID NO: 2744836 - RNA, 18 nt, Human
cugcccucuccugggcag

SEQ ID NO: 2744837 - RNA, 16 nt, Human
cugcccucuccugggc

SEQ ID NO: 2744838 - RNA, 21 nt, Human
cugcccucuccugggcagcug

SEQ ID NO: 2744839 - RNA, 20 nt, Human
cugcccucuccugggcagcu

SEQ ID NO: 2744840 - RNA, 16 nt, Human
cuugaacacuggggga

SEQ ID NO: 2744841 - RNA, 15 nt, Human
cuugaacacuggggg

SEQ ID NO: 2744842 - RNA, 13 nt, Human
cuugaacacuggg

SEQ ID NO: 2744843 - RNA, 20 nt, Human
cuucuuggucuuauuuauua

SEQ ID NO: 2744844 - RNA, 16 nt, Human
cuucuuggucuuauuu

SEQ ID NO: 2744845 - RNA, 20 nt, Human
cuucuugcuucuuucuagaa

SEQ ID NO: 2744846 - RNA, 21 nt, Human
cuucuugcuucuuucuagaaa

SEQ ID NO: 2744847 - RNA, 14 nt, Human
cuucucuccagcug

SEQ ID NO: 2744848 - RNA, 15 nt, Human
cuucucuccagcuga

SEQ ID NO: 2744849 - RNA, 16 nt, Human
cuucucuccagcugac

SEQ ID NO: 2744850 - RNA, 19 nt, Human
cuucucuccagcugacuaa

SEQ ID NO: 2744851 - RNA, 17 nt, Human
cuucucuccagcugacu

SEQ ID NO: 2744852 - RNA, 18 nt, Human
cuucucuccagcugacua

SEQ ID NO: 2744853 - RNA, 21 nt, Human
cuucugucuucacaacagauu

SEQ ID NO: 2744854 - RNA, 22 nt, Human
cuucugucuucacaacagauua

SEQ ID NO: 2744855 - RNA, 18 nt, Human
cuucugucuucacaacag

SEQ ID NO: 2744856 - RNA, 11 nt, Human
cuuaguguaug

SEQ ID NO: 2744857 - RNA, 15 nt, Human
cuuaguguaugauua

SEQ ID NO: 2744858 - RNA, 22 nt, Human
cuuagaugcaguucugaagaag

SEQ ID NO: 2744859 - RNA, 20 nt, Human
cuuagaugcaguucugaaga

SEQ ID NO: 2744860 - RNA, 22 nt, Human
cuucacacacaggcaacugagg

SEQ ID NO: 2744861 - RNA, 21 nt, Human
cuucacacacaggcaacugag

SEQ ID NO: 2744862 - RNA, 15 nt, Human
cuuauuucauuucuu

SEQ ID NO: 2744863 - RNA, 15 nt, Human
cuuauuuccucauuu

SEQ ID NO: 2744864 - RNA, 13 nt, Human
cuuauuuauuauu

SEQ ID NO: 2744865 - RNA, 14 nt, Human
cuuauuucauuucu

SEQ ID NO: 2744866 - RNA, 23 nt, Human
cuugucaauaaaauccauacauu

SEQ ID NO: 2744867 - RNA, 19 nt, Human
cuugaguuuaaauuguaau

SEQ ID NO: 2744868 - RNA, 18 nt, Human
gaaaauauuuguaucaca

SEQ ID NO: 2744869 - RNA, 22 nt, Human
gaaaaucuacacuccagugaga

SEQ ID NO: 2744870 - RNA, 18 nt, Human
gaaaaucuuauaauuuaa

SEQ ID NO: 2744871 - RNA, 14 nt, Human
gaaagcagggacuu

SEQ ID NO: 2744872 - RNA, 17 nt, Human
gaaagcagaacagugau

SEQ ID NO: 2744873 - RNA, 22 nt, Human
gaaagcagaacagugauuacca

SEQ ID NO: 2744874 - RNA, 20 nt, Human
gaaagaggcagcuugaaacu

SEQ ID NO: 2744875 - RNA, 21 nt, Human
gaaagaggaaugaaguacuca

SEQ ID NO: 2744876 - RNA, 18 nt, Human
gaaagagaaacaguuggu

SEQ ID NO: 2744877 - RNA, 17 nt, Human
gaaagagaacuuccaga

SEQ ID NO: 2744878 - RNA, 14 nt, Human
gaaacccugucucu

SEQ ID NO: 2744879 - RNA, 23 nt, Human
gaaacucguuaauuuguaguguu

SEQ ID NO: 2744880 - RNA, 11 nt, Human
gaaacauuugg

SEQ ID NO: 2744881 - RNA, 16 nt, Human
gaaacacaacuauauu

SEQ ID NO: 2744882 - RNA, 22 nt, Human
ccugagcucgguggacccaggg

SEQ ID NO: 2744883 - RNA, 21 nt, Human
ccugagcucgguggacccagg

SEQ ID NO: 2744884 - RNA, 20 nt, Human
ccugagcucgguggacccag

SEQ ID NO: 2744885 - RNA, 19 nt, Human
ccugagcucgguggaccca

SEQ ID NO: 2744886 - RNA, 18 nt, Human
ccugagcucgguggaccc

SEQ ID NO: 2744887 - RNA, 16 nt, Human
ccugagcucgguggac

SEQ ID NO: 2744888 - RNA, 15 nt, Human
ccugagcucggugga

SEQ ID NO: 2744889 - RNA, 14 nt, Human
ccugaggcuccacu

SEQ ID NO: 2744890 - RNA, 13 nt, Human
ccugaggcuccac

SEQ ID NO: 2744891 - RNA, 18 nt, Human
ccugcccuagagcacacu

SEQ ID NO: 2744892 - RNA, 24 nt, Human
ccugcccuagagcacacuguagca

SEQ ID NO: 2744893 - RNA, 22 nt, Human
ccugcccuagagcacacuguag

SEQ ID NO: 2744894 - RNA, 19 nt, Human
ccugcccuagagcacacug

SEQ ID NO: 2744895 - RNA, 17 nt, Human
ccugccccugagcccau

SEQ ID NO: 2744896 - RNA, 14 nt, Human
ccugggcagcugcc

SEQ ID NO: 2744897 - RNA, 13 nt, Human
ccugggcagcugc

SEQ ID NO: 2744898 - RNA, 22 nt, Human
cgaggcagggucaggagagggg

SEQ ID NO: 2744899 - RNA, 14 nt, Human
cgaggcagggucag

SEQ ID NO: 2744900 - RNA, 23 nt, Human
cgggaaggaggguuagggagggg

SEQ ID NO: 2744901 - RNA, 14 nt, Human
cgggaaggaggguu

SEQ ID NO: 2744902 - RNA, 12 nt, Human
cgggaaggaggg

SEQ ID NO: 2744903 - RNA, 14 nt, Human
cgcuccugucugcc

SEQ ID NO: 2744904 - RNA, 21 nt, Human
ccuuguauuuaaauauuaaau

SEQ ID NO: 2744905 - RNA, 16 nt, Human
ccuuguauuuaaauau

SEQ ID NO: 2744906 - RNA, 14 nt, Human
ccuuguauuuaaau

SEQ ID NO: 2744907 - RNA, 13 nt, Human
ccuuguauuuaaa

SEQ ID NO: 2744908 - RNA, 15 nt, Human
ccuuggacucauuuu

SEQ ID NO: 2744909 - RNA, 17 nt, Human
ccuucggccuccauccu

SEQ ID NO: 2744910 - RNA, 16 nt, Human
ccuucggccuccaucc

SEQ ID NO: 2744911 - RNA, 18 nt, Human
ccuucggccuccauccug

SEQ ID NO: 2744912 - RNA, 12 nt, Human
cuaacagcccuc

SEQ ID NO: 2744913 - RNA, 21 nt, Human
cuaacagcccuccucugcacu

SEQ ID NO: 2744914 - RNA, 22 nt, Human
cuaacagcccuccucugcacuc

SEQ ID NO: 2744915 - RNA, 19 nt, Human
cuaaauugacacuuaaaaa

SEQ ID NO: 2744916 - RNA, 15 nt, Human
cuaagagagaaugag

SEQ ID NO: 2744917 - RNA, 14 nt, Human
cuaagagagaauga

SEQ ID NO: 2744918 - RNA, 20 nt, Human
cgggaggcagagguugcagu

SEQ ID NO: 2744919 - RNA, 20 nt, Human
cuaauucaaggaauuucuua

SEQ ID NO: 2744920 - RNA, 16 nt, Human
cuaauucaaggaauuu

SEQ ID NO: 2744921 - RNA, 18 nt, Human
cuaauucaaggaauuucu

SEQ ID NO: 2744922 - RNA, 22 nt, Human
cuaauucacagugcucuuuucu

SEQ ID NO: 2744923 - RNA, 15 nt, Human
cuaauucacagugcu

SEQ ID NO: 2744924 - RNA, 16 nt, Human
cuaauucacagugcuc

SEQ ID NO: 2744925 - RNA, 14 nt, Human
cuacacuaagagag

SEQ ID NO: 2744926 - RNA, 23 nt, Human
cuacacgagauacagaauuuuau

SEQ ID NO: 2744927 - RNA, 22 nt, Human
cuacaccccuccccugcccuag

SEQ ID NO: 2744928 - RNA, 19 nt, Human
cuaagauuacaaaucagaa

SEQ ID NO: 2744929 - RNA, 21 nt, Human
cuaagauuacaaaucagaagu

SEQ ID NO: 2744930 - RNA, 22 nt, Human
cuaagauuacaaaucagaaguc

SEQ ID NO: 2744931 - RNA, 23 nt, Human
cuaagauuacaaaucagaaguca

SEQ ID NO: 2744932 - RNA, 21 nt, Human
cuaagcuucacuguaaaauaa

SEQ ID NO: 2744933 - RNA, 20 nt, Human
cuaauagaauaaaggcaguu

SEQ ID NO: 2744934 - RNA, 21 nt, Human
cuaauagaauaaaggcaguuu

SEQ ID NO: 2744935 - RNA, 23 nt, Human
cuaauagaauaaaggcaguuuuc

SEQ ID NO: 2744936 - RNA, 14 nt, Human
cuaaguaaaaccac

SEQ ID NO: 2744937 - RNA, 18 nt, Human
cuaaguaaaaccacagca

SEQ ID NO: 2744938 - RNA, 19 nt, Human
cuaaguaaaaccacagcag

SEQ ID NO: 2744939 - RNA, 20 nt, Human
cuaggaaauauuuauuuuaa

SEQ ID NO: 2744940 - RNA, 19 nt, Human
cuaggaaauauuuauuuua

SEQ ID NO: 2744941 - RNA, 15 nt, Human
cuaggaaauauuuau

SEQ ID NO: 2744942 - RNA, 14 nt, Human
cuaggaaauauuua

SEQ ID NO: 2744943 - RNA, 17 nt, Human
cuaccucacuggggucc

SEQ ID NO: 2744944 - RNA, 19 nt, Human
cuagaguuuagcuggaaaa

SEQ ID NO: 2744945 - RNA, 18 nt, Human
cuagaguuuagcuggaaa

SEQ ID NO: 2744946 - RNA, 19 nt, Human
cuauuaucugucagcugca

SEQ ID NO: 2744947 - RNA, 14 nt, Human
cuaugauuauuaac

SEQ ID NO: 2744948 - RNA, 19 nt, Human
cuaugaaauauuauguuaa

SEQ ID NO: 2744949 - RNA, 18 nt, Human
cuaugaaauauuauguua

SEQ ID NO: 2744950 - RNA, 12 nt, Human
cuauaauuuaaa

SEQ ID NO: 2744951 - RNA, 13 nt, Human
cuauaauuuaaau

SEQ ID NO: 2744952 - RNA, 22 nt, Human
cucacugggguccuggggccuc

SEQ ID NO: 2744953 - RNA, 20 nt, Human
cucacugggguccuggggcc

SEQ ID NO: 2744954 - RNA, 17 nt, Human
cucacugggguccuggg

SEQ ID NO: 2744955 - RNA, 21 nt, Human
cucagaugcacaugagcuggc

SEQ ID NO: 2744956 - RNA, 16 nt, Human
cucagggccccagcac

SEQ ID NO: 2744957 - RNA, 14 nt, Human
cucagggccccagc

SEQ ID NO: 2744958 - RNA, 18 nt, Human
cucagggccccagcacua

SEQ ID NO: 2744959 - RNA, 13 nt, Human
cucagggccccag

SEQ ID NO: 2744960 - RNA, 12 nt, Human
cucagggcccca

SEQ ID NO: 2744961 - RNA, 22 nt, Human
cucaggaaaucaaauaugcaaa

SEQ ID NO: 2744962 - RNA, 20 nt, Human
cuccagcugacuaaacuuuu

SEQ ID NO: 2744963 - RNA, 14 nt, Human
cuccccucggagaa

SEQ ID NO: 2744964 - RNA, 23 nt, Human
cucauuuuuauaaugucccuuca

SEQ ID NO: 2744965 - RNA, 12 nt, Human
cucauuuccaag

SEQ ID NO: 2744966 - RNA, 14 nt, Human
cucauuuccaagca

SEQ ID NO: 2744967 - RNA, 13 nt, Human
cucauuuccaagc

SEQ ID NO: 2744968 - RNA, 17 nt, Human
cucauuuccaagcaagu

SEQ ID NO: 2744969 - RNA, 15 nt, Human
ccccagacuagaugu

SEQ ID NO: 2744970 - RNA, 18 nt, Human
ccccagacuagauguagu

SEQ ID NO: 2744971 - RNA, 17 nt, Human
ccccuccucugcuugcc

SEQ ID NO: 2744972 - RNA, 14 nt, Human
ccccuccucugcuu

SEQ ID NO: 2744973 - RNA, 13 nt, Human
ccccuccucugcu

SEQ ID NO: 2744974 - RNA, 15 nt, Human
ccccucggagaagag

SEQ ID NO: 2744975 - RNA, 17 nt, Human
ccgcuccugucugccag

SEQ ID NO: 2744976 - RNA, 15 nt, Human
ccgcuccugucugcc

SEQ ID NO: 2744977 - RNA, 14 nt, Human
ccgcuccugucugc

SEQ ID NO: 2744978 - RNA, 15 nt, Human
ccuaacgaaguaucc

SEQ ID NO: 2744979 - RNA, 20 nt, Human
ccguuggggauuggggaaga

SEQ ID NO: 2744980 - RNA, 19 nt, Human
cccuuaugcgguuaauuuu

SEQ ID NO: 2744981 - RNA, 13 nt, Human
cccuugccagaca

SEQ ID NO: 2744982 - RNA, 15 nt, Human
cccuugccagacaug

SEQ ID NO: 2744983 - RNA, 12 nt, Human
cccuugcccagg

SEQ ID NO: 2744984 - RNA, 20 nt, Human
cccuugcccagggcucagcc

SEQ ID NO: 2744985 - RNA, 19 nt, Human
cccuugcccagggcucagc

SEQ ID NO: 2744986 - RNA, 15 nt, Human
cccuugcccagggcu

SEQ ID NO: 2744987 - RNA, 14 nt, Human
cccuugcccagggc

SEQ ID NO: 2744988 - RNA, 22 nt, Human
cccuugcccagggcucagccug

SEQ ID NO: 2744989 - RNA, 21 nt, Human
cccuugcccagggcucagccu

SEQ ID NO: 2744990 - RNA, 23 nt, Human
cccuugcccagggcucagccugg

SEQ ID NO: 2744991 - RNA, 16 nt, Human
cccuccccugcccuag

SEQ ID NO: 2744992 - RNA, 22 nt, Human
cccucuccugggcagcugccuc

SEQ ID NO: 2744993 - RNA, 21 nt, Human
cccucuccugggcagcugccu

SEQ ID NO: 2744994 - RNA, 20 nt, Human
cccucuccugggcagcugcc

SEQ ID NO: 2744995 - RNA, 23 nt, Human
cccucuccugggcagcugccucc

SEQ ID NO: 2744996 - RNA, 12 nt, Human
ccaggugccagu

SEQ ID NO: 2744997 - RNA, 13 nt, Human
ccaggugccaguu

SEQ ID NO: 2744998 - RNA, 18 nt, Human
ccauccugaggcuccacu

SEQ ID NO: 2744999 - RNA, 20 nt, Human
ccauccugaggcuccacuug

SEQ ID NO: 2745000 - RNA, 20 nt, Human
ccagguagaggguguguaag

SEQ ID NO: 2745001 - RNA, 18 nt, Human
ccagggcccugagcucgg

SEQ ID NO: 2745002 - RNA, 15 nt, Human
ccagggcccugagcu

SEQ ID NO: 2745003 - RNA, 19 nt, Human
ccagccugagcgacaguga

SEQ ID NO: 2745004 - RNA, 15 nt, Human
ccacugguucuucuu

SEQ ID NO: 2745005 - RNA, 14 nt, Human
ccagacaucaacag

SEQ ID NO: 2745006 - RNA, 23 nt, Human
ccagacauguggugggacaggga

SEQ ID NO: 2745007 - RNA, 19 nt, Human
ccagacauguggugggaca

SEQ ID NO: 2745008 - RNA, 15 nt, Human
ccaccucccugcaau

SEQ ID NO: 2745009 - RNA, 21 nt, Human
ccaccucccugcaauaaaaug

SEQ ID NO: 2745010 - RNA, 19 nt, Human
ccaccucccugcaauaaaa

SEQ ID NO: 2745011 - RNA, 17 nt, Human
aaaacaaggaugaauua

SEQ ID NO: 2745012 - RNA, 12 nt, Human
aaaacacagcaa

SEQ ID NO: 2745013 - RNA, 13 nt, Human
aaaacacagcaag

SEQ ID NO: 2745014 - RNA, 18 nt, Human
aaaacacagcaaggguga

SEQ ID NO: 2745015 - RNA, 14 nt, Human
aaaacaaggaugaa

SEQ ID NO: 2745016 - RNA, 12 nt, Human
agcaugaagaca

SEQ ID NO: 2745017 - RNA, 19 nt, Human
agccagauuuuccugaaaa

SEQ ID NO: 2745018 - RNA, 15 nt, Human
agccagauuuuccug

SEQ ID NO: 2745019 - RNA, 19 nt, Human
agcaguucagagcugcccu

SEQ ID NO: 2745020 - RNA, 23 nt, Human
agcacuaaagcaguggacaccag

SEQ ID NO: 2745021 - RNA, 20 nt, Human
agcacuaaagcaguggacac

SEQ ID NO: 2745022 - RNA, 17 nt, Human
agcacuaaagcagugga

SEQ ID NO: 2745023 - RNA, 16 nt, Human
agcacuaaagcagugg

SEQ ID NO: 2745024 - RNA, 14 nt, Human
agcacuaaagcagu

SEQ ID NO: 2745025 - RNA, 13 nt, Human
agcacuaaagcag

SEQ ID NO: 2745026 - RNA, 18 nt, Human
agcaguucagagcugccc

SEQ ID NO: 2745027 - RNA, 17 nt, Human
agcaguucagagcugcc

SEQ ID NO: 2745028 - RNA, 15 nt, Human
agcaguucagagcug

SEQ ID NO: 2745029 - RNA, 16 nt, Human
agcaguucagagcugc

SEQ ID NO: 2745030 - RNA, 23 nt, Human
agcaguugaaaagacuccaaaga

SEQ ID NO: 2745031 - RNA, 21 nt, Human
agcaguugaaaagacuccaaa

SEQ ID NO: 2745032 - RNA, 15 nt, Human
agcagccagcucuca

SEQ ID NO: 2745033 - RNA, 14 nt, Human
agcagccagcucuc

SEQ ID NO: 2745034 - RNA, 13 nt, Human
agcagccagcucu

SEQ ID NO: 2745035 - RNA, 23 nt, Human
agcagccagcucucagccaacga

SEQ ID NO: 2745036 - RNA, 19 nt, Human
agcagccagcucucagcca

SEQ ID NO: 2745037 - RNA, 18 nt, Human
agcagccagcucucagcc

SEQ ID NO: 2745038 - RNA, 17 nt, Human
agcagccagcucucagc

SEQ ID NO: 2745039 - RNA, 16 nt, Human
agcagccagcucucag

SEQ ID NO: 2745040 - RNA, 21 nt, Human
agaugggagaaucacuugaac

SEQ ID NO: 2745041 - RNA, 14 nt, Human
agauguagaggaga

SEQ ID NO: 2745042 - RNA, 19 nt, Human
agccccacccucagaugca

SEQ ID NO: 2745043 - RNA, 21 nt, Human
agcccaaguucaugcagcugu

SEQ ID NO: 2745044 - RNA, 23 nt, Human
agcccaaguucaugcagcugugg

SEQ ID NO: 2745045 - RNA, 21 nt, Human
agccgggcgugguggugagug

SEQ ID NO: 2745046 - RNA, 16 nt, Human
agaggggcagaacagc

SEQ ID NO: 2745047 - RNA, 15 nt, Human
agaggggcagaacag

SEQ ID NO: 2745048 - RNA, 15 nt, Human
agaguuacaguucug

SEQ ID NO: 2745049 - RNA, 16 nt, Human
agaguuacaguucugu

SEQ ID NO: 2745050 - RNA, 17 nt, Human
agaguuacaguucugug

SEQ ID NO: 2745051 - RNA, 22 nt, Human
agaguuacaguucugugguuuc

SEQ ID NO: 2745052 - RNA, 20 nt, Human
agaguuaauauauagaaggg

SEQ ID NO: 2745053 - RNA, 11 nt, Human
agaguuacagu

SEQ ID NO: 2745054 - RNA, 17 nt, Human
agaggagccaccaguuc

SEQ ID NO: 2745055 - RNA, 21 nt, Human
agauaggucagugcaaauacu

SEQ ID NO: 2745056 - RNA, 17 nt, Human
agacugcauuauauuua

SEQ ID NO: 2745057 - RNA, 14 nt, Human
aggggcagaacagc

SEQ ID NO: 2745058 - RNA, 21 nt, Human
aggcagacagcagcucaggca

SEQ ID NO: 2745059 - RNA, 20 nt, Human
aggcagacagcagcucaggc

SEQ ID NO: 2745060 - RNA, 19 nt, Human
aggcagacagcagcucagg

SEQ ID NO: 2745061 - RNA, 18 nt, Human
aggcagacagcagcucag

SEQ ID NO: 2745062 - RNA, 15 nt, Human
aggcagacagcagcu

SEQ ID NO: 2745063 - RNA, 14 nt, Human
aggcagacagcagc

SEQ ID NO: 2745064 - RNA, 13 nt, Human
aggcagacagcag

SEQ ID NO: 2745065 - RNA, 14 nt, Human
agguucccucccag

SEQ ID NO: 2745066 - RNA, 19 nt, Human
aggagaggggcagaacagc

SEQ ID NO: 2745067 - RNA, 18 nt, Human
aggagaggggcagaacag

SEQ ID NO: 2745068 - RNA, 13 nt, Human
aggagaggggcag

SEQ ID NO: 2745069 - RNA, 14 nt, Human
aggauguugaaaaa

SEQ ID NO: 2745070 - RNA, 18 nt, Human
agcuucacuguaaaauaa

SEQ ID NO: 2745071 - RNA, 14 nt, Human
auggagcugggcua

SEQ ID NO: 2745072 - RNA, 21 nt, Human
auguggugggacagggaccca

SEQ ID NO: 2745073 - RNA, 15 nt, Human
auguggugggacagg

SEQ ID NO: 2745074 - RNA, 21 nt, Human
auguaagggaaacugccagca

SEQ ID NO: 2745075 - RNA, 22 nt, Human
auguaagggaaacugccagcaa

SEQ ID NO: 2745076 - RNA, 20 nt, Human
auguaagggaaacugccagc

SEQ ID NO: 2745077 - RNA, 19 nt, Human
augucuuggguaggcggga

SEQ ID NO: 2745078 - RNA, 22 nt, Human
aucuuauaauuuaaaauaugcu

SEQ ID NO: 2745079 - RNA, 17 nt, Human
aucagcugcugaaacaa

SEQ ID NO: 2745080 - RNA, 21 nt, Human
aguccaagcauuuagauguau

SEQ ID NO: 2745081 - RNA, 16 nt, Human
aguccaagcauuuaga

SEQ ID NO: 2745082 - RNA, 16 nt, Human
agucaaggcuuagacc

SEQ ID NO: 2745083 - RNA, 14 nt, Human
agucaaggcuuaga

SEQ ID NO: 2745084 - RNA, 17 nt, Human
agucaaauugugugaaa

SEQ ID NO: 2745085 - RNA, 15 nt, Human
agucaaauuguguga

SEQ ID NO: 2745086 - RNA, 13 nt, Human
agucaaauugugu

SEQ ID NO: 2745087 - RNA, 21 nt, Human
agugucuuaauuaaaagaaua

SEQ ID NO: 2745088 - RNA, 15 nt, Human
agugauuaccaggga

SEQ ID NO: 2745089 - RNA, 18 nt, Human
agugauuaccagggacug

SEQ ID NO: 2745090 - RNA, 13 nt, Human
aguuacaguucug

SEQ ID NO: 2745091 - RNA, 14 nt, Human
aguuacaguucugu

SEQ ID NO: 2745092 - RNA, 15 nt, Human
aguuacaguucugug

SEQ ID NO: 2745093 - RNA, 16 nt, Human
aguuacaguucugugg

SEQ ID NO: 2745094 - RNA, 18 nt, Human
aguuguaccgcaauguga

SEQ ID NO: 2745095 - RNA, 19 nt, Human
aguuguaccgcaaugugac

SEQ ID NO: 2745096 - RNA, 19 nt, Human
auauuuauuacuguaagaa

SEQ ID NO: 2745097 - RNA, 14 nt, Human
auauuuauuacugu

SEQ ID NO: 2745098 - RNA, 18 nt, Human
auauuuauuuuaauaaug

SEQ ID NO: 2745099 - RNA, 23 nt, Human
auauuucagauaaucacaauaca

SEQ ID NO: 2745100 - RNA, 23 nt, Human
auaugcuucuguuuuauaauuuu

SEQ ID NO: 2745101 - RNA, 18 nt, Human
auaucacuugucaauaaa

SEQ ID NO: 2745102 - RNA, 23 nt, Human
auauccuaauaaaaaggugacca

SEQ ID NO: 2745103 - RNA, 15 nt, Human
auaucaauuuaaaaa

SEQ ID NO: 2745104 - RNA, 18 nt, Human
auaaguacuguguacaga

SEQ ID NO: 2745105 - RNA, 19 nt, Human
auaaguacuguguacagaa

SEQ ID NO: 2745106 - RNA, 14 nt, Human
auaauuacuauguc

SEQ ID NO: 2745107 - RNA, 16 nt, Human
acuaauagaauaaagg

SEQ ID NO: 2745108 - RNA, 17 nt, Human
acuaauagaauaaaggc

SEQ ID NO: 2745109 - RNA, 20 nt, Human
acuaauagaauaaaggcagu

SEQ ID NO: 2745110 - RNA, 16 nt, Human
acuaagagagaaugag

SEQ ID NO: 2745111 - RNA, 15 nt, Human
acuaagagagaauga

SEQ ID NO: 2745112 - RNA, 16 nt, Human
acgugcacgcacacug

SEQ ID NO: 2745113 - RNA, 13 nt, Human
acucccuuucaac

SEQ ID NO: 2745114 - RNA, 12 nt, Human
acucccuuucaa

SEQ ID NO: 2745115 - RNA, 14 nt, Human
acuagcuauggugu

SEQ ID NO: 2745116 - RNA, 14 nt, Human
acucagggccccag

SEQ ID NO: 2745117 - RNA, 13 nt, Human
acucagggcccca

SEQ ID NO: 2745118 - RNA, 19 nt, Human
acucagucucucuucucuc

SEQ ID NO: 2745119 - RNA, 23 nt, Human
acucagucucucuucucuccagc

SEQ ID NO: 2745120 - RNA, 21 nt, Human
agaaauaaaguuggugacaga

SEQ ID NO: 2745121 - RNA, 19 nt, Human
agaaauaaaguuggugaca

SEQ ID NO: 2745122 - RNA, 16 nt, Human
acuuuauaacuaacau

SEQ ID NO: 2745123 - RNA, 18 nt, Human
acuuuauaacuaacaugu

SEQ ID NO: 2745124 - RNA, 12 nt, Human
acuggaacucuc

SEQ ID NO: 2745125 - RNA, 16 nt, Human
acuucacacacaggca

SEQ ID NO: 2745126 - RNA, 19 nt, Human
acuucacacacaggcaacu

SEQ ID NO: 2745127 - RNA, 17 nt, Human
acuucacacacaggcaa

SEQ ID NO: 2745128 - RNA, 19 nt, Human
acuuguaaaggaauuuaaa

SEQ ID NO: 2745129 - RNA, 20 nt, Human
acuuguaaaggaauuuaaaa

SEQ ID NO: 2745130 - RNA, 18 nt, Human
acuuguaaaggaauuuaa

SEQ ID NO: 2745131 - RNA, 15 nt, Human
acuuggucugugaga

SEQ ID NO: 2745132 - RNA, 13 nt, Human
acuuggucuguga

SEQ ID NO: 2745133 - RNA, 14 nt, Human
acuuggucugugag

SEQ ID NO: 2745134 - RNA, 16 nt, Human
acccaaguccaagcau

SEQ ID NO: 2745135 - RNA, 15 nt, Human
acccacaagaaauga

SEQ ID NO: 2745136 - RNA, 14 nt, Human
acauuuguauaaaa

SEQ ID NO: 2745137 - RNA, 16 nt, Human
acauuugcucauggaa

SEQ ID NO: 2745138 - RNA, 18 nt, Human
acauuugcucauggaauu

SEQ ID NO: 2745139 - RNA, 13 nt, Human
acauguuacaaca

SEQ ID NO: 2745140 - RNA, 15 nt, Human
acagcaguugaaaag

SEQ ID NO: 2745141 - RNA, 18 nt, Human
acagcaguugaaaagacu

SEQ ID NO: 2745142 - RNA, 16 nt, Human
acagccagacuggcac

SEQ ID NO: 2745143 - RNA, 13 nt, Human
acagccagacugg

SEQ ID NO: 2745144 - RNA, 15 nt, Human
acagccagacuggca

SEQ ID NO: 2745145 - RNA, 20 nt, Human
acacugcucuaacagcccuc

SEQ ID NO: 2745146 - RNA, 17 nt, Human
acacugcucuaacagcc

SEQ ID NO: 2745147 - RNA, 19 nt, Human
acacugcucuaacagcccu

SEQ ID NO: 2745148 - RNA, 13 nt, Human
acacugcucuaac

SEQ ID NO: 2745149 - RNA, 14 nt, Human
acacugcucuaaca

SEQ ID NO: 2745150 - RNA, 20 nt, Human
acagcucugcauacucauua

SEQ ID NO: 2745151 - RNA, 14 nt, Human
aauuuugaagugcu

SEQ ID NO: 2745152 - RNA, 19 nt, Human
aauuuugaagugcuguuua

SEQ ID NO: 2745153 - RNA, 20 nt, Human
aauuuugaagugcuguuuau

SEQ ID NO: 2745154 - RNA, 13 nt, Human
acaacuauauugu

SEQ ID NO: 2745155 - RNA, 15 nt, Human
aacacgagcaggcua

SEQ ID NO: 2745156 - RNA, 23 nt, Human
aacugacacaugcugaacaucac

SEQ ID NO: 2745157 - RNA, 13 nt, Human
aacuuuugugaau

SEQ ID NO: 2745158 - RNA, 19 nt, Human
aacuuuugugaauuaggcu

SEQ ID NO: 2745159 - RNA, 13 nt, Human
aagaaauguaagg

SEQ ID NO: 2745160 - RNA, 14 nt, Human
aagaaauguaaggg

SEQ ID NO: 2745161 - RNA, 22 nt, Human
aacuuuuuuucuguaccaguua

SEQ ID NO: 2745162 - RNA, 21 nt, Human
aacuuuuuuucuguaccaguu

SEQ ID NO: 2745163 - RNA, 12 nt, Human
aaaauucauuuu

SEQ ID NO: 2745164 - RNA, 16 nt, Human
aaagaaaguguauuug

SEQ ID NO: 2745165 - RNA, 10 nt, Human
aaagaaagug

SEQ ID NO: 2745166 - RNA, 12 nt, Human
aaagaaagugua

SEQ ID NO: 2745167 - RNA, 13 nt, Human
aaagaaaguguau

SEQ ID NO: 2745168 - RNA, 16 nt, Human
aaacugacucuuaaga

SEQ ID NO: 2745169 - RNA, 14 nt, Human
aaacugaagccaga

SEQ ID NO: 2745170 - RNA, 14 nt, Human
aaacugccagcaac

SEQ ID NO: 2745171 - RNA, 15 nt, Human
aaacugccagcaacg

SEQ ID NO: 2745172 - RNA, 17 nt, Human
aaacugacucuuaagaa

SEQ ID NO: 2745173 - RNA, 19 nt, Human
aaacugccagcaacgcagg

SEQ ID NO: 2745174 - RNA, 17 nt, Human
aaagaugaaaauauuug

SEQ ID NO: 2745175 - RNA, 13 nt, Human
aaagaugaaaaua

SEQ ID NO: 2745176 - RNA, 16 nt, Human
aaagaugaaaauauuu

SEQ ID NO: 2745177 - RNA, 12 nt, Human
aaauaacaauga

SEQ ID NO: 2745178 - RNA, 18 nt, Human
aaauggcuuccuggcaau

SEQ ID NO: 2745179 - RNA, 16 nt, Human
aaaucaaauaugcaaa

SEQ ID NO: 2745180 - RNA, 18 nt, Human
aaaucaaauaugcaaagc

SEQ ID NO: 2745181 - RNA, 19 nt, Human
aaaucaaauaugcaaagca

SEQ ID NO: 2745182 - RNA, 16 nt, Human
aaugggcucaaccaga

SEQ ID NO: 2745183 - RNA, 20 nt, Human
aauuaguuuuauaugcuucu

SEQ ID NO: 2745184 - RNA, 17 nt, Human
aauuaguuuuauaugcu

SEQ ID NO: 2745185 - RNA, 14 nt, Human
aauuaguuuuauau

SEQ ID NO: 2745186 - RNA, 16 nt, Human
aauauuauguuaaaac

SEQ ID NO: 2745187 - RNA, 13 nt, Human
aaucacaauacau

SEQ ID NO: 2745188 - RNA, 15 nt, Human
aaucaagaaacuuaa

SEQ ID NO: 2745189 - RNA, 13 nt, Human
aauccauacauuu

SEQ ID NO: 2745190 - RNA, 17 nt, Human
aaugauaacuggaaacu

SEQ ID NO: 2745191 - RNA, 20 nt, Human
aaugauaacuggaaacuuca

SEQ ID NO: 2745192 - RNA, 14 nt, Human
aagugcuguuuauu

SEQ ID NO: 2745193 - RNA, 16 nt, Human
aagugcuguuuauuaa

SEQ ID NO: 2745194 - RNA, 17 nt, Human
aagugcuguuuauuaau

SEQ ID NO: 2745195 - RNA, 18 nt, Human
aagugcuguuuauuaauc

SEQ ID NO: 2745196 - RNA, 20 nt, Human
aagugcuguuuauuaaucuu

SEQ ID NO: 2745197 - RNA, 19 nt, Human
aauaaaauggguuuuacug

SEQ ID NO: 2745198 - RNA, 14 nt, Human
aauaaaauggguuu

SEQ ID NO: 2745199 - RNA, 15 nt, Human
aaguuguuucauuga

SEQ ID NO: 2745200 - RNA, 21 nt, Human
aagugcuguuuauuaaucuua

SEQ ID NO: 2745201 - RNA, 22 nt, Human
aagugcuguuuauuaaucuuag

SEQ ID NO: 2745202 - RNA, 21 nt, Human
aauaauccuaaacauaugaau

SEQ ID NO: 2745203 - RNA, 13 nt, Human
aagccagauuuuc

SEQ ID NO: 2745204 - RNA, 16 nt, Human
aagauuuaccacuugu

SEQ ID NO: 2745205 - RNA, 16 nt, Human
auuagugccacuuaau

SEQ ID NO: 2745206 - RNA, 18 nt, Human
auuagugccacuuaaugu

SEQ ID NO: 2745207 - RNA, 19 nt, Human
auuagugccacuuaaugua

SEQ ID NO: 2745208 - RNA, 20 nt, Human
auuagugccacuuaauguau

SEQ ID NO: 2745209 - RNA, 21 nt, Human
auuagugccacuuaauguaug

SEQ ID NO: 2745210 - RNA, 22 nt, Human
auuagugccacuuaauguaugu

SEQ ID NO: 2745211 - RNA, 23 nt, Human
auuaaguaaugauaacuggaaac

SEQ ID NO: 2745212 - RNA, 21 nt, Human
auuaaguaaugauaacuggaa

SEQ ID NO: 2745213 - RNA, 19 nt, Human
uuuuugugaaaagcuccau

SEQ ID NO: 2745214 - RNA, 15 nt, Human
auuacagugggugcc

SEQ ID NO: 2745215 - RNA, 17 nt, Human
auuacauuuguauaaaa

SEQ ID NO: 2745216 - RNA, 18 nt, Human
auuacauuuguauaaaau

SEQ ID NO: 2745217 - RNA, 16 nt, Human
auuacauuuguauaaa

SEQ ID NO: 2745218 - RNA, 12 nt, Human
auuaccagggac

SEQ ID NO: 2745219 - RNA, 17 nt, Human
uuuuuauauuugaaaua

SEQ ID NO: 2745220 - RNA, 19 nt, Human
uuuuuauauuugaaauauu

SEQ ID NO: 2745221 - RNA, 14 nt, Human
uuuuaauaauguuu

SEQ ID NO: 2745222 - RNA, 13 nt, Human
uuuuaauaauguu

SEQ ID NO: 2745223 - RNA, 12 nt, Human
uuuuaauaaugu

SEQ ID NO: 2745224 - RNA, 16 nt, Human
uuuuaauaauguuuca

SEQ ID NO: 2745225 - RNA, 19 nt, Human
augugcuaguaauuggaaa

SEQ ID NO: 2745226 - RNA, 15 nt, Human
auguuagcaaagagu

SEQ ID NO: 2745227 - RNA, 18 nt, Human
auguucaucaaugaauga

SEQ ID NO: 2745228 - RNA, 15 nt, Human
auguuuucaggcuag

SEQ ID NO: 2745229 - RNA, 21 nt, Human
auguuuucaggcuagauguau

SEQ ID NO: 2745230 - RNA, 17 nt, Human
auguuuucaggcuagau

SEQ ID NO: 2745231 - RNA, 14 nt, Human
uuuucuguaccagu

SEQ ID NO: 2745232 - RNA, 21 nt, Human
uuuucuguaccaguuaauuuu

SEQ ID NO: 2745233 - RNA, 21 nt, Human
uuuucuccucacuguauccag

SEQ ID NO: 2745234 - RNA, 13 nt, Human
uuuucauuuaucu

SEQ ID NO: 2745235 - RNA, 15 nt, Human
uuuucugagaaagac

SEQ ID NO: 2745236 - RNA, 18 nt, Human
uuuucugagaaagacuau

SEQ ID NO: 2745237 - RNA, 14 nt, Human
uuuucucuaggaaa

SEQ ID NO: 2745238 - RNA, 22 nt, Human
auuuucaguuauuauauuuaca

SEQ ID NO: 2745239 - RNA, 22 nt, Human
auuuuaaaagaaugauuaugaa

SEQ ID NO: 2745240 - RNA, 18 nt, Human
auuuuaaaagaaugauua

SEQ ID NO: 2745241 - RNA, 18 nt, Human
auuuguauaaaauaauuu

SEQ ID NO: 2745242 - RNA, 15 nt, Human
auuuguauaaaauaa

SEQ ID NO: 2745243 - RNA, 19 nt, Human
auuuguauaaaauaauuuu

SEQ ID NO: 2745244 - RNA, 17 nt, Human
auuuuaaaagaaugauu

SEQ ID NO: 2745245 - RNA, 15 nt, Human
auuguauuacaaauc

SEQ ID NO: 2745246 - RNA, 18 nt, Human
auugacccacaagaaaug

SEQ ID NO: 2745247 - RNA, 19 nt, Human
auuggggaagacuguggcu

SEQ ID NO: 2745248 - RNA, 14 nt, Human
auuugaaauauuga

SEQ ID NO: 2745249 - RNA, 20 nt, Human
auuuauuuuaauaauguuuc

SEQ ID NO: 2745250 - RNA, 19 nt, Human
auuuauuuuaauaauguuu

SEQ ID NO: 2745251 - RNA, 12 nt, Human
auuucauuucuu

SEQ ID NO: 2745252 - RNA, 17 nt, Human
auuuauuuuaauaaugu

SEQ ID NO: 2745253 - RNA, 12 nt, Human
auuuagaagcca

SEQ ID NO: 2745254 - RNA, 13 nt, Human
auuuagaagccaa

SEQ ID NO: 2745255 - RNA, 21 nt, Human
auuuagaagccaacuaugauu

SEQ ID NO: 2745256 - RNA, 22 nt, Human
auuuagaagccaacuaugauua

SEQ ID NO: 2745257 - RNA, 23 nt, Human
auuuagaagccaacuaugauuau

SEQ ID NO: 2745258 - RNA, 13 nt, Human
auuuagauguaua

SEQ ID NO: 2745259 - RNA, 20 nt, Human
augaaauauuauguuaaaac

SEQ ID NO: 2745260 - RNA, 21 nt, Human
augaaauauuauguuaaaacu

SEQ ID NO: 2745261 - RNA, 12 nt, Human
uugcuaccagua

SEQ ID NO: 2745262 - RNA, 15 nt, Human
uugcuaccaguauuu

SEQ ID NO: 2745263 - RNA, 16 nt, Human
uugcuaccaguauuua

SEQ ID NO: 2745264 - RNA, 20 nt, Human
uugcuaccaguauuuagaag

SEQ ID NO: 2745265 - RNA, 22 nt, Human
uugcuaccaguauuuagaagcc

SEQ ID NO: 2745266 - RNA, 23 nt, Human
uugcuaccaguauuuagaagcca

SEQ ID NO: 2745267 - RNA, 11 nt, Human
uugcucaugga

SEQ ID NO: 2745268 - RNA, 12 nt, Human
uugcucauggaa

SEQ ID NO: 2745269 - RNA, 23 nt, Human
augaauuaguuuuauaugcuucu

SEQ ID NO: 2745270 - RNA, 21 nt, Human
augaauuaguuuuauaugcuu

SEQ ID NO: 2745271 - RNA, 22 nt, Human
augaauuacauuuguauaaaau

SEQ ID NO: 2745272 - RNA, 23 nt, Human
uuguaguguuggagaagaacuga

SEQ ID NO: 2745273 - RNA, 13 nt, Human
uuguauaaaauaa

SEQ ID NO: 2745274 - RNA, 19 nt, Human
uuguauaaaauaauuuuua

SEQ ID NO: 2745275 - RNA, 21 nt, Human
uuguauaauuggauuuccuaa

SEQ ID NO: 2745276 - RNA, 11 nt, Human
uuguauaauug

SEQ ID NO: 2745277 - RNA, 12 nt, Human
uuguauaauugg

SEQ ID NO: 2745278 - RNA, 20 nt, Human
uuguauaauuggauuuccua

SEQ ID NO: 2745279 - RNA, 17 nt, Human
augaauuacauuuguau

SEQ ID NO: 2745280 - RNA, 19 nt, Human
augaauuacauuuguauaa

SEQ ID NO: 2745281 - RNA, 18 nt, Human
augaauuacauuuguaua

SEQ ID NO: 2745282 - RNA, 22 nt, Human
uuguuuuuccuuguauuuaaau

SEQ ID NO: 2745283 - RNA, 21 nt, Human
uuguuuuuccuuguauuuaaa

SEQ ID NO: 2745284 - RNA, 13 nt, Human
uuguuuuuccuug

SEQ ID NO: 2745285 - RNA, 20 nt, Human
uuuaaaaaagaaacauuugg

SEQ ID NO: 2745286 - RNA, 18 nt, Human
uugugaagcaaaauuuuu

SEQ ID NO: 2745287 - RNA, 14 nt, Human
augauaacuggaaa

SEQ ID NO: 2745288 - RNA, 16 nt, Human
auggaacauaaaauac

SEQ ID NO: 2745289 - RNA, 16 nt, Human
uuuauuuuaauaaugu

SEQ ID NO: 2745290 - RNA, 19 nt, Human
uuuauuacuguaagaaaau

SEQ ID NO: 2745291 - RNA, 23 nt, Human
augcugucuacacuaagagagaa

SEQ ID NO: 2745292 - RNA, 14 nt, Human
augcuguauuuuaa

SEQ ID NO: 2745293 - RNA, 23 nt, Human
auggaauuggagcucgugggaca

SEQ ID NO: 2745294 - RNA, 17 nt, Human
uuuauaugcuucuguuu

SEQ ID NO: 2745295 - RNA, 16 nt, Human
uuuauuacuguaagaa

SEQ ID NO: 2745296 - RNA, 24 nt, Human
uuuaaagcuuauuaaaacucauuu

SEQ ID NO: 2745297 - RNA, 12 nt, Human
uuuaaagaaagu

SEQ ID NO: 2745298 - RNA, 13 nt, Human
augcuaagugaaa

SEQ ID NO: 2745299 - RNA, 13 nt, Human
uuucuaugaaaua

SEQ ID NO: 2745300 - RNA, 20 nt, Human
uuucuaugaaauauuauguu

SEQ ID NO: 2745301 - RNA, 14 nt, Human
uuucuaugaaauau

SEQ ID NO: 2745302 - RNA, 14 nt, Human
uuucugcaucagcu

SEQ ID NO: 2745303 - RNA, 14 nt, Human
uuugaaauauugac

SEQ ID NO: 2745304 - RNA, 11 nt, Human
uuugaaaaugg

SEQ ID NO: 2745305 - RNA, 17 nt, Human
auggaauuucucccagu

SEQ ID NO: 2745306 - RNA, 16 nt, Human
auggcuauaggugcua

SEQ ID NO: 2745307 - RNA, 19 nt, Human
auggcuauaggugcuacaa

SEQ ID NO: 2745308 - RNA, 21 nt, Human
auggcuauaggugcuacaaaa

SEQ ID NO: 2745309 - RNA, 21 nt, Human
augggacauuugcucauggaa

SEQ ID NO: 2745310 - RNA, 22 nt, Human
augggacauuugcucauggaau

SEQ ID NO: 2745311 - RNA, 18 nt, Human
uuccaacuacuaauagaa

SEQ ID NO: 2745312 - RNA, 16 nt, Human
uucauugacuaucaaa

SEQ ID NO: 2745313 - RNA, 14 nt, Human
uucauuaucucaaa

SEQ ID NO: 2745314 - RNA, 13 nt, Human
auaugcaaagcac

SEQ ID NO: 2745315 - RNA, 14 nt, Human
auaugcaaagcacu

SEQ ID NO: 2745316 - RNA, 23 nt, Human
auauguaccuaacgaaguauccu

SEQ ID NO: 2745317 - RNA, 13 nt, Human
auauaugcuaagu

SEQ ID NO: 2745318 - RNA, 15 nt, Human
uucaucaaugaauga

SEQ ID NO: 2745319 - RNA, 17 nt, Human
uucagcgguuuauauaa

SEQ ID NO: 2745320 - RNA, 14 nt, Human
auauuguuugcuaa

SEQ ID NO: 2745321 - RNA, 13 nt, Human
auauuuacaaaug

SEQ ID NO: 2745322 - RNA, 15 nt, Human
aucaaauaugcaaag

SEQ ID NO: 2745323 - RNA, 16 nt, Human
aucaaggguacacugc

SEQ ID NO: 2745324 - RNA, 16 nt, Human
aucaaauaugcaaagc

SEQ ID NO: 2745325 - RNA, 17 nt, Human
aucaaauaugcaaagca

SEQ ID NO: 2745326 - RNA, 18 nt, Human
aucaaauaugcaaagcac

SEQ ID NO: 2745327 - RNA, 21 nt, Human
aucaaggguacacugccuucu

SEQ ID NO: 2745328 - RNA, 13 nt, Human
aucaauuuaaaaa

SEQ ID NO: 2745329 - RNA, 14 nt, Human
aucaauuuuucuua

SEQ ID NO: 2745330 - RNA, 18 nt, Human
uucuccucacuguaucca

SEQ ID NO: 2745331 - RNA, 23 nt, Human
aucacuugaacccgggaggcaga

SEQ ID NO: 2745332 - RNA, 17 nt, Human
uucuguuuuauaauuuu

SEQ ID NO: 2745333 - RNA, 16 nt, Human
uucuguuuuauaauuu

SEQ ID NO: 2745334 - RNA, 15 nt, Human
auccagguucccucc

SEQ ID NO: 2745335 - RNA, 19 nt, Human
auccagguucccucccaga

SEQ ID NO: 2745336 - RNA, 21 nt, Human
aucccucccuccaccucccug

SEQ ID NO: 2745337 - RNA, 20 nt, Human
aucccucccuccaccucccu

SEQ ID NO: 2745338 - RNA, 18 nt, Human
aucccucccuccaccucc

SEQ ID NO: 2745339 - RNA, 17 nt, Human
aucccucccuccaccuc

SEQ ID NO: 2745340 - RNA, 16 nt, Human
aucccucccuccaccu

SEQ ID NO: 2745341 - RNA, 14 nt, Human
aucccucccuccac

SEQ ID NO: 2745342 - RNA, 23 nt, Human
uugacacugcucuaacagcccuc

SEQ ID NO: 2745343 - RNA, 19 nt, Human
uugacacuuaaaaaugguu

SEQ ID NO: 2745344 - RNA, 21 nt, Human
uugaaggaugcugucuucgua

SEQ ID NO: 2745345 - RNA, 14 nt, Human
uugaaggaugcugu

SEQ ID NO: 2745346 - RNA, 16 nt, Human
uugaaggaugcugucu

SEQ ID NO: 2745347 - RNA, 17 nt, Human
uugacacuuaaaaaugg

SEQ ID NO: 2745348 - RNA, 14 nt, Human
uugacacugcucua

SEQ ID NO: 2745349 - RNA, 15 nt, Human
uugacacugcucuaa

SEQ ID NO: 2745350 - RNA, 16 nt, Human
uugacacugcucuaac

SEQ ID NO: 2745351 - RNA, 22 nt, Human
uugacacugcucuaacagcccu

SEQ ID NO: 2745352 - RNA, 18 nt, Human
auccugaggcuccacuug

SEQ ID NO: 2745353 - RNA, 16 nt, Human
auccugaggcuccacu

SEQ ID NO: 2745354 - RNA, 13 nt, Human
auccugaggcucc

SEQ ID NO: 2745355 - RNA, 11 nt, Human
auccugaggcu

SEQ ID NO: 2745356 - RNA, 13 nt, Human
auccugccccuga

SEQ ID NO: 2745357 - RNA, 22 nt, Human
auccugaggcuccacuuggucu

SEQ ID NO: 2745358 - RNA, 16 nt, Human
auccugcaauuccacu

SEQ ID NO: 2745359 - RNA, 22 nt, Human
uggcacaguuuucugagaaaga

SEQ ID NO: 2745360 - RNA, 20 nt, Human
uggcacaguuuucugagaaa

SEQ ID NO: 2745361 - RNA, 18 nt, Human
uggacgagaaaacaauaa

SEQ ID NO: 2745362 - RNA, 14 nt, Human
uggcugcuagcacu

SEQ ID NO: 2745363 - RNA, 13 nt, Human
uggcugcuagcac

SEQ ID NO: 2745364 - RNA, 15 nt, Human
uggcugcuagcacuu

SEQ ID NO: 2745365 - RNA, 20 nt, Human
ugggaaagggauuuucagcc

SEQ ID NO: 2745366 - RNA, 21 nt, Human
ugggaaagcauuguaaaugug

SEQ ID NO: 2745367 - RNA, 18 nt, Human
aggaagcugugagagcag

SEQ ID NO: 2745368 - RNA, 11 nt, Human
aggaauuuaaa

SEQ ID NO: 2745369 - RNA, 23 nt, Human
aggaauugacccacaagaaauga

SEQ ID NO: 2745370 - RNA, 13 nt, Human
aggaauuucuuaa

SEQ ID NO: 2745371 - RNA, 23 nt, Human
ugcuguauuuuaaaagaaugauu

SEQ ID NO: 2745372 - RNA, 23 nt, Human
aggaauuucuuaacuucuugcuu

SEQ ID NO: 2745373 - RNA, 15 nt, Human
aggaauuucuuaacu

SEQ ID NO: 2745374 - RNA, 19 nt, Human
aggaauuucuuaacuucuu

SEQ ID NO: 2745375 - RNA, 14 nt, Human
ugcuggagcucugc

SEQ ID NO: 2745376 - RNA, 13 nt, Human
ugcuggagcucug

SEQ ID NO: 2745377 - RNA, 23 nt, Human
aggacagcccuucuuuccacaga

SEQ ID NO: 2745378 - RNA, 14 nt, Human
aggacacugauaug

SEQ ID NO: 2745379 - RNA, 14 nt, Human
aggagccaccaguu

SEQ ID NO: 2745380 - RNA, 15 nt, Human
aggagccaccaguuc

SEQ ID NO: 2745381 - RNA, 17 nt, Human
aggagccaccaguucuc

SEQ ID NO: 2745382 - RNA, 11 nt, Human
aggagaaacug

SEQ ID NO: 2745383 - RNA, 18 nt, Human
ugcuuggcccaggaguuu

SEQ ID NO: 2745384 - RNA, 23 nt, Human
ugcuuggcccaggaguuuggcca

SEQ ID NO: 2745385 - RNA, 12 nt, Human
ugcuuggcccag

SEQ ID NO: 2745386 - RNA, 15 nt, Human
ugcuuggcccaggag

SEQ ID NO: 2745387 - RNA, 16 nt, Human
ugcuuggcccaggagu

SEQ ID NO: 2745388 - RNA, 15 nt, Human
ugcuugccaucccuc

SEQ ID NO: 2745389 - RNA, 16 nt, Human
ugcuugccaucccucc

SEQ ID NO: 2745390 - RNA, 14 nt, Human
aggaguuuggccag

SEQ ID NO: 2745391 - RNA, 15 nt, Human
aggaguuuggccaga

SEQ ID NO: 2745392 - RNA, 16 nt, Human
aggaguuuggccagaa

SEQ ID NO: 2745393 - RNA, 17 nt, Human
aggaguuuggccagaag

SEQ ID NO: 2745394 - RNA, 18 nt, Human
aggaguuuggccagaagu

SEQ ID NO: 2745395 - RNA, 20 nt, Human
uggacccagggaugacaugu

SEQ ID NO: 2745396 - RNA, 16 nt, Human
aggcaacugaggcaga

SEQ ID NO: 2745397 - RNA, 15 nt, Human
aggcaacugaggcag

SEQ ID NO: 2745398 - RNA, 14 nt, Human
aggcaacugaggca

SEQ ID NO: 2745399 - RNA, 22 nt, Human
uggaauuucucccagucauuua

SEQ ID NO: 2745400 - RNA, 18 nt, Human
uggaauuggagcucgugg

SEQ ID NO: 2745401 - RNA, 19 nt, Human
aggcaacugaggcagacag

SEQ ID NO: 2745402 - RNA, 17 nt, Human
aggcaacugaggcagac

SEQ ID NO: 2745403 - RNA, 21 nt, Human
agccagcaguucagagcugcc

SEQ ID NO: 2745404 - RNA, 20 nt, Human
agccagcaguucagagcugc

SEQ ID NO: 2745405 - RNA, 22 nt, Human
agccagcaguucagagcugccc

SEQ ID NO: 2745406 - RNA, 19 nt, Human
agccagcaguucagagcug

SEQ ID NO: 2745407 - RNA, 17 nt, Human
agccagcaguucagagc

SEQ ID NO: 2745408 - RNA, 15 nt, Human
agccagcaguucaga

SEQ ID NO: 2745409 - RNA, 18 nt, Human
ugauuaaguaaugauaac

SEQ ID NO: 2745410 - RNA, 23 nt, Human
ugauuaaguaaugauaacuggaa

SEQ ID NO: 2745411 - RNA, 12 nt, Human
ugaugaagaagu

SEQ ID NO: 2745412 - RNA, 11 nt, Human
ugaugaagaag

SEQ ID NO: 2745413 - RNA, 14 nt, Human
ugaugggaaagcau

SEQ ID NO: 2745414 - RNA, 19 nt, Human
ugaugggaaagcauuguaa

SEQ ID NO: 2745415 - RNA, 13 nt, Human
agccagcucucag

SEQ ID NO: 2745416 - RNA, 15 nt, Human
agccagcucucagcc

SEQ ID NO: 2745417 - RNA, 14 nt, Human
agccagcucucagc

SEQ ID NO: 2745418 - RNA, 16 nt, Human
agccagcucucagcca

SEQ ID NO: 2745419 - RNA, 17 nt, Human
ugauuuagcaggaagcu

SEQ ID NO: 2745420 - RNA, 20 nt, Human
ugauuuagcaggaagcugug

SEQ ID NO: 2745421 - RNA, 17 nt, Human
agccucauccgaggcag

SEQ ID NO: 2745422 - RNA, 14 nt, Human
agccucauccgagg

SEQ ID NO: 2745423 - RNA, 15 nt, Human
ugcagaagacaguau

SEQ ID NO: 2745424 - RNA, 14 nt, Human
ugcagaagacagua

SEQ ID NO: 2745425 - RNA, 11 nt, Human
agcccugucuc

SEQ ID NO: 2745426 - RNA, 18 nt, Human
agcccugucuccucucuc

SEQ ID NO: 2745427 - RNA, 12 nt, Human
ugccagccagca

SEQ ID NO: 2745428 - RNA, 11 nt, Human
ugccagccagc

SEQ ID NO: 2745429 - RNA, 22 nt, Human
agccuuccccuugcccagggcu

SEQ ID NO: 2745430 - RNA, 20 nt, Human
agccuuccccuugcccaggg

SEQ ID NO: 2745431 - RNA, 22 nt, Human
ugcagcucuccccuucucugua

SEQ ID NO: 2745432 - RNA, 20 nt, Human
ugcagcucuccccuucucug

SEQ ID NO: 2745433 - RNA, 16 nt, Human
ugccccauucaacauc

SEQ ID NO: 2745434 - RNA, 18 nt, Human
ugccccccuugccagaca

SEQ ID NO: 2745435 - RNA, 19 nt, Human
agcuauggugucauaggcu

SEQ ID NO: 2745436 - RNA, 22 nt, Human
ugccauuuaaagcuuauuaaaa

SEQ ID NO: 2745437 - RNA, 12 nt, Human
ugcccucuccug

SEQ ID NO: 2745438 - RNA, 15 nt, Human
ugcccucuccugggc

SEQ ID NO: 2745439 - RNA, 14 nt, Human
ugcccucuccuggg

SEQ ID NO: 2745440 - RNA, 13 nt, Human
ugcccucuccugg

SEQ ID NO: 2745441 - RNA, 20 nt, Human
ugcccucuccugggcagcug

SEQ ID NO: 2745442 - RNA, 18 nt, Human
ugcccucuccugggcagc

SEQ ID NO: 2745443 - RNA, 17 nt, Human
ugcccucuccugggcag

SEQ ID NO: 2745444 - RNA, 16 nt, Human
ugcccucuccugggca

SEQ ID NO: 2745445 - RNA, 23 nt, Human
ugcccucuccugggcagcugccu

SEQ ID NO: 2745446 - RNA, 22 nt, Human
ugcccucuccugggcagcugcc

SEQ ID NO: 2745447 - RNA, 23 nt, Human
agcucugcccauccugccccuga

SEQ ID NO: 2745448 - RNA, 18 nt, Human
agcugcccucuccugggc

SEQ ID NO: 2745449 - RNA, 17 nt, Human
agcugcccucuccuggg

SEQ ID NO: 2745450 - RNA, 20 nt, Human
agcugcccucuccugggcag

SEQ ID NO: 2745451 - RNA, 19 nt, Human
agcugcccucuccugggca

SEQ ID NO: 2745452 - RNA, 21 nt, Human
agcugcccucuccugggcagc

SEQ ID NO: 2745453 - RNA, 15 nt, Human
ugccucaccccuugc

SEQ ID NO: 2745454 - RNA, 11 nt, Human
ugccuccccuc

SEQ ID NO: 2745455 - RNA, 15 nt, Human
ugccuccccuccucu

SEQ ID NO: 2745456 - RNA, 14 nt, Human
ugccuccccuccuc

SEQ ID NO: 2745457 - RNA, 13 nt, Human
ugccuccccuccu

SEQ ID NO: 2745458 - RNA, 12 nt, Human
ugccuccccucc

SEQ ID NO: 2745459 - RNA, 16 nt, Human
ugccuccccuccucug

SEQ ID NO: 2745460 - RNA, 18 nt, Human
ugccucagaaaacaagga

SEQ ID NO: 2745461 - RNA, 19 nt, Human
uguuugcuaagcauuccaa

SEQ ID NO: 2745462 - RNA, 15 nt, Human
uguuugcuaagcauu

SEQ ID NO: 2745463 - RNA, 20 nt, Human
uguuuuauaauuuugugaag

SEQ ID NO: 2745464 - RNA, 13 nt, Human
uguuuuauaauuu

SEQ ID NO: 2745465 - RNA, 14 nt, Human
uguuuuaggagcau

SEQ ID NO: 2745466 - RNA, 21 nt, Human
aguugauaugccuuuucccaa

SEQ ID NO: 2745467 - RNA, 14 nt, Human
aguucugaagaaga

SEQ ID NO: 2745468 - RNA, 13 nt, Human
aguucugaagaag

SEQ ID NO: 2745469 - RNA, 15 nt, Human
aguucugaagaagau

SEQ ID NO: 2745470 - RNA, 23 nt, Human
aguucugugguuucauguuaguu

SEQ ID NO: 2745471 - RNA, 16 nt, Human
aguucugugguuucau

SEQ ID NO: 2745472 - RNA, 19 nt, Human
aguucugugguuucauguu

SEQ ID NO: 2745473 - RNA, 22 nt, Human
aguucugugguuucauguuagu

SEQ ID NO: 2745474 - RNA, 12 nt, Human
aguuuggccaga

SEQ ID NO: 2745475 - RNA, 19 nt, Human
uuaaauucccguuuuguca

SEQ ID NO: 2745476 - RNA, 22 nt, Human
uuaaauucccguuuugucacuu

SEQ ID NO: 2745477 - RNA, 16 nt, Human
aguuugguuucuagca

SEQ ID NO: 2745478 - RNA, 13 nt, Human
aguuuggccagaa

SEQ ID NO: 2745479 - RNA, 14 nt, Human
aguuuggccagaag

SEQ ID NO: 2745480 - RNA, 20 nt, Human
uuaaaaaugguuuaaauggu

SEQ ID NO: 2745481 - RNA, 22 nt, Human
aguugcauagguuuaauaauuu

SEQ ID NO: 2745482 - RNA, 18 nt, Human
uuaaaaaagaaacauuug

SEQ ID NO: 2745483 - RNA, 15 nt, Human
uuaaaaaagaaacau

SEQ ID NO: 2745484 - RNA, 22 nt, Human
aguuaccuuauaguuacugugu

SEQ ID NO: 2745485 - RNA, 16 nt, Human
aguuaccuuauaguua

SEQ ID NO: 2745486 - RNA, 17 nt, Human
aguuaccuuauaguuac

SEQ ID NO: 2745487 - RNA, 20 nt, Human
aguuaccuuauaguuacugu

SEQ ID NO: 2745488 - RNA, 21 nt, Human
aguuaccuuauaguuacugug

SEQ ID NO: 2745489 - RNA, 20 nt, Human
aguuauuauauuuacaaaug

SEQ ID NO: 2745490 - RNA, 19 nt, Human
aguuauggcuauaggugcu

SEQ ID NO: 2745491 - RNA, 18 nt, Human
aguucagagcugcccucu

SEQ ID NO: 2745492 - RNA, 17 nt, Human
aguucagagcugcccuc

SEQ ID NO: 2745493 - RNA, 16 nt, Human
aguucagagcugcccu

SEQ ID NO: 2745494 - RNA, 15 nt, Human
aguucagagcugccc

SEQ ID NO: 2745495 - RNA, 14 nt, Human
aguucagagcugcc

SEQ ID NO: 2745496 - RNA, 20 nt, Human
aguucggugagcuacaaaug

SEQ ID NO: 2745497 - RNA, 21 nt, Human
auacaguucggugagcuacaa

SEQ ID NO: 2745498 - RNA, 20 nt, Human
auacaucccuuaccugggaa

SEQ ID NO: 2745499 - RNA, 22 nt, Human
auaccacaggaaccacaagacu

SEQ ID NO: 2745500 - RNA, 22 nt, Human
auaauuuuuauauuugaaauau

SEQ ID NO: 2745501 - RNA, 21 nt, Human
auaauuuuuauauuugaaaua

SEQ ID NO: 2745502 - RNA, 22 nt, Human
auacaaaaaaaaaaaaaaauua

SEQ ID NO: 2745503 - RNA, 20 nt, Human
auaauuuugugaagcaaaau

SEQ ID NO: 2745504 - RNA, 15 nt, Human
auaauuuugugaagc

SEQ ID NO: 2745505 - RNA, 14 nt, Human
auaauuuugugaag

SEQ ID NO: 2745506 - RNA, 13 nt, Human
auaauuuugugaa

SEQ ID NO: 2745507 - RNA, 19 nt, Human
auaauuuuuauauuugaaa

SEQ ID NO: 2745508 - RNA, 16 nt, Human
auaauuuuuauauuug

SEQ ID NO: 2745509 - RNA, 14 nt, Human
auaauuuuuauauu

SEQ ID NO: 2745510 - RNA, 18 nt, Human
uuauauaagcuuguauuc

SEQ ID NO: 2745511 - RNA, 19 nt, Human
uuauaguuacuguguaauu

SEQ ID NO: 2745512 - RNA, 13 nt, Human
uuauaguuacugu

SEQ ID NO: 2745513 - RNA, 14 nt, Human
uuauaguuacugug

SEQ ID NO: 2745514 - RNA, 15 nt, Human
uuauaguuacugugu

SEQ ID NO: 2745515 - RNA, 19 nt, Human
uuauaacuaacauguccug

SEQ ID NO: 2745516 - RNA, 15 nt, Human
uuauaacuaacaugu

SEQ ID NO: 2745517 - RNA, 21 nt, Human
uuagccguggugauuuagcag

SEQ ID NO: 2745518 - RNA, 15 nt, Human
auaaacucauuucua

SEQ ID NO: 2745519 - RNA, 12 nt, Human
aguuuucugaga

SEQ ID NO: 2745520 - RNA, 13 nt, Human
aguuuucugagaa

SEQ ID NO: 2745521 - RNA, 14 nt, Human
aguuuucugagaaa

SEQ ID NO: 2745522 - RNA, 17 nt, Human
aguuuucugagaaagac

SEQ ID NO: 2745523 - RNA, 19 nt, Human
auaaaugugccuucauuuu

SEQ ID NO: 2745524 - RNA, 12 nt, Human
auaacuggaaac

SEQ ID NO: 2745525 - RNA, 18 nt, Human
uuaccuaagauuacaaau

SEQ ID NO: 2745526 - RNA, 14 nt, Human
uuaccuaagauuac

SEQ ID NO: 2745527 - RNA, 21 nt, Human
auaaucuuucacaggggacag

SEQ ID NO: 2745528 - RNA, 14 nt, Human
auaaugaauacuuu

SEQ ID NO: 2745529 - RNA, 22 nt, Human
uuagaugcaguucugaagaaga

SEQ ID NO: 2745530 - RNA, 23 nt, Human
uuagaugcaguucugaagaagau

SEQ ID NO: 2745531 - RNA, 16 nt, Human
auaauuggauuuccua

SEQ ID NO: 2745532 - RNA, 17 nt, Human
auaauuggauuuccuaa

SEQ ID NO: 2745533 - RNA, 18 nt, Human
auaauuggauuuccuaau

SEQ ID NO: 2745534 - RNA, 20 nt, Human
auaauuggauuuccuaauac

SEQ ID NO: 2745535 - RNA, 18 nt, Human
uuagcaggaagcugugag

SEQ ID NO: 2745536 - RNA, 23 nt, Human
agucaucuugcuaccaguauuua

SEQ ID NO: 2745537 - RNA, 11 nt, Human
agucaucuugc

SEQ ID NO: 2745538 - RNA, 13 nt, Human
agucaucuugcua

SEQ ID NO: 2745539 - RNA, 19 nt, Human
agucaucuugcuaccagua

SEQ ID NO: 2745540 - RNA, 20 nt, Human
agucagauggaaaauucauu

SEQ ID NO: 2745541 - RNA, 22 nt, Human
agucagauggaaaauucauuuu

SEQ ID NO: 2745542 - RNA, 23 nt, Human
agucagauggaaaauucauuuuu

SEQ ID NO: 2745543 - RNA, 20 nt, Human
ugucagcuccccucggagaa

SEQ ID NO: 2745544 - RNA, 21 nt, Human
ugucagcuccccucggagaag

SEQ ID NO: 2745545 - RNA, 23 nt, Human
ugucagcuccccucggagaagag

SEQ ID NO: 2745546 - RNA, 19 nt, Human
ugucccuacaccccucccc

SEQ ID NO: 2745547 - RNA, 12 nt, Human
ugucccuacacc

SEQ ID NO: 2745548 - RNA, 16 nt, Human
aguauuguccaggucu

SEQ ID NO: 2745549 - RNA, 15 nt, Human
aguauuguccagguc

SEQ ID NO: 2745550 - RNA, 20 nt, Human
agucacauuccaagccucau

SEQ ID NO: 2745551 - RNA, 21 nt, Human
aguauguuagugcaaauuguc

SEQ ID NO: 2745552 - RNA, 18 nt, Human
aguauguuagugcaaauu

SEQ ID NO: 2745553 - RNA, 21 nt, Human
aguauuagaauaccacaggaa

SEQ ID NO: 2745554 - RNA, 14 nt, Human
ugucuuaauuaaaa

SEQ ID NO: 2745555 - RNA, 15 nt, Human
ugucuccucucucug

SEQ ID NO: 2745556 - RNA, 17 nt, Human
ugucucuacuaaaaaua

SEQ ID NO: 2745557 - RNA, 14 nt, Human
ugucuucacaacag

SEQ ID NO: 2745558 - RNA, 16 nt, Human
agugagccgagauugu

SEQ ID NO: 2745559 - RNA, 21 nt, Human
agugagcagucaggaaagaga

SEQ ID NO: 2745560 - RNA, 22 nt, Human
agugaaagaggcagcuugaaac

SEQ ID NO: 2745561 - RNA, 14 nt, Human
agugagacagcucu

SEQ ID NO: 2745562 - RNA, 16 nt, Human
agugaaagaggcagcu

SEQ ID NO: 2745563 - RNA, 17 nt, Human
agugaaagaaaauaaca

SEQ ID NO: 2745564 - RNA, 14 nt, Human
ugugaagcaaaauu

SEQ ID NO: 2745565 - RNA, 22 nt, Human
ugugagaugcuagaacucccuu

SEQ ID NO: 2745566 - RNA, 21 nt, Human
agucucucuucucuccagcug

SEQ ID NO: 2745567 - RNA, 23 nt, Human
agucucucuucucuccagcugac

SEQ ID NO: 2745568 - RNA, 15 nt, Human
aggucagugcaaaua

SEQ ID NO: 2745569 - RNA, 20 nt, Human
aggguuuauguuuaggaugu

SEQ ID NO: 2745570 - RNA, 18 nt, Human
aggguucagagacucagg

SEQ ID NO: 2745571 - RNA, 16 nt, Human
aggguucagagacuca

SEQ ID NO: 2745572 - RNA, 17 nt, Human
aggguuaugauuaagua

SEQ ID NO: 2745573 - RNA, 22 nt, Human
uggucugugagaugcuagaacu

SEQ ID NO: 2745574 - RNA, 22 nt, Human
ugguccaugggccauaugaaaa

SEQ ID NO: 2745575 - RNA, 19 nt, Human
aggguaccuugaacacugg

SEQ ID NO: 2745576 - RNA, 23 nt, Human
aggguaccuugaacacuggggga

SEQ ID NO: 2745577 - RNA, 16 nt, Human
aggggaauugaggaca

SEQ ID NO: 2745578 - RNA, 21 nt, Human
agggugaugggaaagcauugu

SEQ ID NO: 2745579 - RNA, 22 nt, Human
agggugaugggaaagcauugua

SEQ ID NO: 2745580 - RNA, 15 nt, Human
ugguuuaaagaaagu

SEQ ID NO: 2745581 - RNA, 16 nt, Human
ugguuuaaagaaagug

SEQ ID NO: 2745582 - RNA, 17 nt, Human
ugguuuaaagaaagugu

SEQ ID NO: 2745583 - RNA, 19 nt, Human
ugguuuaaagaaaguguau

SEQ ID NO: 2745584 - RNA, 23 nt, Human
uggugugaccacugcagaagaca

SEQ ID NO: 2745585 - RNA, 21 nt, Human
ugguuuaaagaaaguguauuu

SEQ ID NO: 2745586 - RNA, 15 nt, Human
ugguuucuagcauga

SEQ ID NO: 2745587 - RNA, 12 nt, Human
ugguuucauguu

SEQ ID NO: 2745588 - RNA, 15 nt, Human
ugguuucauguuagu

SEQ ID NO: 2745589 - RNA, 18 nt, Human
uguaagaaaauaucacuu

SEQ ID NO: 2745590 - RNA, 17 nt, Human
uguaagaaaauaucacu

SEQ ID NO: 2745591 - RNA, 14 nt, Human
ugaaauaagccaga

SEQ ID NO: 2745592 - RNA, 20 nt, Human
agagcugcccucuccugggc

SEQ ID NO: 2745593 - RNA, 19 nt, Human
agagcugcccucuccuggg

SEQ ID NO: 2745594 - RNA, 18 nt, Human
agagcugcccucuccugg

SEQ ID NO: 2745595 - RNA, 17 nt, Human
agagcugcccucuccug

SEQ ID NO: 2745596 - RNA, 16 nt, Human
agagcugcccucuccu

SEQ ID NO: 2745597 - RNA, 13 nt, Human
ugaacaaauuuac

SEQ ID NO: 2745598 - RNA, 18 nt, Human
ugaacccgggaggcagag

SEQ ID NO: 2745599 - RNA, 22 nt, Human
ugaacccauauuuguacaccaa

SEQ ID NO: 2745600 - RNA, 22 nt, Human
ugaagaagcaccaaucaugaau

SEQ ID NO: 2745601 - RNA, 17 nt, Human
ugaaguacucauacaug

SEQ ID NO: 2745602 - RNA, 20 nt, Human
ugaagauuuaccacuugugu

SEQ ID NO: 2745603 - RNA, 17 nt, Human
ugaagauuuaccacuug

SEQ ID NO: 2745604 - RNA, 18 nt, Human
agagcuguucacagccag

SEQ ID NO: 2745605 - RNA, 23 nt, Human
agacuggcacaguuuucugagaa

SEQ ID NO: 2745606 - RNA, 20 nt, Human
agacuggcacaguuuucuga

SEQ ID NO: 2745607 - RNA, 21 nt, Human
agacuggcacaguuuucugag

SEQ ID NO: 2745608 - RNA, 18 nt, Human
agacaggaccugacuauu

SEQ ID NO: 2745609 - RNA, 22 nt, Human
agacuccaaagaaauguaaggg

SEQ ID NO: 2745610 - RNA, 16 nt, Human
agagacacacugaaga

SEQ ID NO: 2745611 - RNA, 14 nt, Human
agagacagaaagca

SEQ ID NO: 2745612 - RNA, 17 nt, Human
ugaaagaggaaugaagu

SEQ ID NO: 2745613 - RNA, 18 nt, Human
ugaaagaggaaugaagua

SEQ ID NO: 2745614 - RNA, 17 nt, Human
ugaaaauauuuguauca

SEQ ID NO: 2745615 - RNA, 20 nt, Human
ugaaaaucuuauaauuuaaa

SEQ ID NO: 2745616 - RNA, 21 nt, Human
ugaaaauauuuguaucacaaa

SEQ ID NO: 2745617 - RNA, 22 nt, Human
ugaaaauauuuguaucacaaau

SEQ ID NO: 2745618 - RNA, 16 nt, Human
ugaaaaugggcucaac

SEQ ID NO: 2745619 - RNA, 13 nt, Human
ugaaagaaaauaa

SEQ ID NO: 2745620 - RNA, 24 nt, Human
ugagaugugaacacaucagcuugc

SEQ ID NO: 2745621 - RNA, 18 nt, Human
ugagaugugaacacauca

SEQ ID NO: 2745622 - RNA, 19 nt, Human
ugagaugugaacacaucag

SEQ ID NO: 2745623 - RNA, 13 nt, Human
ugagaugugaaca

SEQ ID NO: 2745624 - RNA, 22 nt, Human
ugagagacacacugaagaagca

SEQ ID NO: 2745625 - RNA, 21 nt, Human
ugagagacacacugaagaagc

SEQ ID NO: 2745626 - RNA, 21 nt, Human
ugagagcaguuugguuucuag

SEQ ID NO: 2745627 - RNA, 23 nt, Human
ugagagcaguuugguuucuagca

SEQ ID NO: 2745628 - RNA, 20 nt, Human
ugagagacacacugaagaag

SEQ ID NO: 2745629 - RNA, 19 nt, Human
ugagagacacacugaagaa

SEQ ID NO: 2745630 - RNA, 17 nt, Human
ugagagacacacugaag

SEQ ID NO: 2745631 - RNA, 16 nt, Human
ugagagacacacugaa

SEQ ID NO: 2745632 - RNA, 12 nt, Human
ugagacagcucu

SEQ ID NO: 2745633 - RNA, 20 nt, Human
ugagacucugucucagucca

SEQ ID NO: 2745634 - RNA, 14 nt, Human
agauuuuccugaaa

SEQ ID NO: 2745635 - RNA, 15 nt, Human
agauuuuccugaaaa

SEQ ID NO: 2745636 - RNA, 16 nt, Human
agauuuuccugaaaac

SEQ ID NO: 2745637 - RNA, 20 nt, Human
agcaagggugaugggaaagc

SEQ ID NO: 2745638 - RNA, 22 nt, Human
agcaagggugaugggaaagcau

SEQ ID NO: 2745639 - RNA, 16 nt, Human
agcaagggugauggga

SEQ ID NO: 2745640 - RNA, 20 nt, Human
agauuacaaaucagaaguca

SEQ ID NO: 2745641 - RNA, 21 nt, Human
agauugugccccugcacucca

SEQ ID NO: 2745642 - RNA, 22 nt, Human
ugacuaucaaacugaagccaga

SEQ ID NO: 2745643 - RNA, 16 nt, Human
ugacuaucaaacugaa

SEQ ID NO: 2745644 - RNA, 20 nt, Human
ugacuauugaaguugcagau

SEQ ID NO: 2745645 - RNA, 22 nt, Human
agaugugaacacaucagcuugc

SEQ ID NO: 2745646 - RNA, 17 nt, Human
agaugugaacacaucag

SEQ ID NO: 2745647 - RNA, 22 nt, Human
agauguauguacuucaugcugu

SEQ ID NO: 2745648 - RNA, 13 nt, Human
ugacacugcucua

SEQ ID NO: 2745649 - RNA, 15 nt, Human
ugacacugcucuaac

SEQ ID NO: 2745650 - RNA, 16 nt, Human
ugacacugcucuaaca

SEQ ID NO: 2745651 - RNA, 22 nt, Human
ugacacugcucuaacagcccuc

SEQ ID NO: 2745652 - RNA, 19 nt, Human
ugacacugcucuaacagcc

SEQ ID NO: 2745653 - RNA, 21 nt, Human
ugacacugcucuaacagcccu

SEQ ID NO: 2745654 - RNA, 15 nt, Human
ugacacuuaaaaaug

SEQ ID NO: 2745655 - RNA, 20 nt, Human
agaugcaguucugaagaaga

SEQ ID NO: 2745656 - RNA, 16 nt, Human
agaugcacaugagcug

SEQ ID NO: 2745657 - RNA, 13 nt, Human
agaugcacaugag

SEQ ID NO: 2745658 - RNA, 21 nt, Human
agaugcaguucugaagaagau

SEQ ID NO: 2745659 - RNA, 19 nt, Human
agaugcuagaacucccuuu

SEQ ID NO: 2745660 - RNA, 21 nt, Human
agaugcuagaacucccuuuca

SEQ ID NO: 2745661 - RNA, 14 nt, Human
agauguaguauuuu

SEQ ID NO: 2745662 - RNA, 13 nt, Human
agauccuggaaau

SEQ ID NO: 2745663 - RNA, 14 nt, Human
ucugcuugccaucc

SEQ ID NO: 2745664 - RNA, 23 nt, Human
ucugcuugccaucccucccucca

SEQ ID NO: 2745665 - RNA, 20 nt, Human
ucugcuugccaucccucccu

SEQ ID NO: 2745666 - RNA, 17 nt, Human
ucugcuugccaucccuc

SEQ ID NO: 2745667 - RNA, 16 nt, Human
ucugcuugccaucccu

SEQ ID NO: 2745668 - RNA, 18 nt, Human
agaagccaacuaugauua

SEQ ID NO: 2745669 - RNA, 23 nt, Human
agaagccaacuaugauuauuaac

SEQ ID NO: 2745670 - RNA, 18 nt, Human
agaagaugguaccaccag

SEQ ID NO: 2745671 - RNA, 14 nt, Human
agaagaacugaaau

SEQ ID NO: 2745672 - RNA, 13 nt, Human
agaagaacugaaa

SEQ ID NO: 2745673 - RNA, 14 nt, Human
agaaaugaaagcag

SEQ ID NO: 2745674 - RNA, 15 nt, Human
ucugcagauaaacag

SEQ ID NO: 2745675 - RNA, 18 nt, Human
ucugcagauaaacaguag

SEQ ID NO: 2745676 - RNA, 15 nt, Human
agacacacaugaagu

SEQ ID NO: 2745677 - RNA, 12 nt, Human
agacacacauga

SEQ ID NO: 2745678 - RNA, 24 nt, Human
agacagagccccacccucagaugc

SEQ ID NO: 2745679 - RNA, 22 nt, Human
agacagagccccacccucagau

SEQ ID NO: 2745680 - RNA, 14 nt, Human
ucugugagaugcua

SEQ ID NO: 2745681 - RNA, 22 nt, Human
ucugugagaugcuagaacuccc

SEQ ID NO: 2745682 - RNA, 17 nt, Human
ucugugagaugcuagaa

SEQ ID NO: 2745683 - RNA, 23 nt, Human
ucugugagaugcuagaacucccu

SEQ ID NO: 2745684 - RNA, 23 nt, Human
agaauuaacacaugauccugcaa

SEQ ID NO: 2745685 - RNA, 15 nt, Human
agaauuaacacauga

SEQ ID NO: 2745686 - RNA, 16 nt, Human
acuuaauguauguuac

SEQ ID NO: 2745687 - RNA, 13 nt, Human
acuuaauguaugu

SEQ ID NO: 2745688 - RNA, 15 nt, Human
acuuaauguauguua

SEQ ID NO: 2745689 - RNA, 14 nt, Human
ucuaaguaaaacca

SEQ ID NO: 2745690 - RNA, 15 nt, Human
ucuaaguaaaaccac

SEQ ID NO: 2745691 - RNA, 19 nt, Human
ucuaaguaaaaccacagca

SEQ ID NO: 2745692 - RNA, 13 nt, Human
uccugggcagcug

SEQ ID NO: 2745693 - RNA, 12 nt, Human
uccugggcagcu

SEQ ID NO: 2745694 - RNA, 17 nt, Human
ucuaggaaauauuuauu

SEQ ID NO: 2745695 - RNA, 16 nt, Human
ucuaggaaauauuuau

SEQ ID NO: 2745696 - RNA, 15 nt, Human
ucuccucacuguauc

SEQ ID NO: 2745697 - RNA, 15 nt, Human
acuugucaauaaaau

SEQ ID NO: 2745698 - RNA, 17 nt, Human
ucucauggguggcacuc

SEQ ID NO: 2745699 - RNA, 15 nt, Human
ucucauuuccaagca

SEQ ID NO: 2745700 - RNA, 12 nt, Human
ucucaggaaauc

SEQ ID NO: 2745701 - RNA, 15 nt, Human
ucucagccaacgagu

SEQ ID NO: 2745702 - RNA, 14 nt, Human
ucucaggaaaucaa

SEQ ID NO: 2745703 - RNA, 21 nt, Human
ucucaggaaaucaaauaugca

SEQ ID NO: 2745704 - RNA, 23 nt, Human
ucucaggaaaucaaauaugcaaa

SEQ ID NO: 2745705 - RNA, 17 nt, Human
acuauauuguuugcuaa

SEQ ID NO: 2745706 - RNA, 22 nt, Human
acuauauuguuugcuaagcauu

SEQ ID NO: 2745707 - RNA, 15 nt, Human
acuaucucauuucca

SEQ ID NO: 2745708 - RNA, 19 nt, Human
acuaucaaacugaagccag

SEQ ID NO: 2745709 - RNA, 14 nt, Human
acuaucaaacugaa

SEQ ID NO: 2745710 - RNA, 17 nt, Human
acuaucucauuuccaag

SEQ ID NO: 2745711 - RNA, 16 nt, Human
acuaucucauuuccaa

SEQ ID NO: 2745712 - RNA, 23 nt, Human
ucccagaggagccaccaguucuc

SEQ ID NO: 2745713 - RNA, 16 nt, Human
ucccagaggagccacc

SEQ ID NO: 2745714 - RNA, 20 nt, Human
ucccagaggagccaccaguu

SEQ ID NO: 2745715 - RNA, 21 nt, Human
ucccagaggagccaccaguuc

SEQ ID NO: 2745716 - RNA, 17 nt, Human
acuaaacuuuuuuucug

SEQ ID NO: 2745717 - RNA, 18 nt, Human
acuaaacuuuuuuucugu

SEQ ID NO: 2745718 - RNA, 22 nt, Human
acuaaacuuuuuuucuguacca

SEQ ID NO: 2745719 - RNA, 19 nt, Human
acuaaacuuuuuuucugua

SEQ ID NO: 2745720 - RNA, 20 nt, Human
acuaaacuuuuuuucuguac

SEQ ID NO: 2745721 - RNA, 15 nt, Human
acuaauuuuaaaaug

SEQ ID NO: 2745722 - RNA, 15 nt, Human
uccauccugaggcuc

SEQ ID NO: 2745723 - RNA, 12 nt, Human
uccauccugagg

SEQ ID NO: 2745724 - RNA, 11 nt, Human
uccauccugag

SEQ ID NO: 2745725 - RNA, 18 nt, Human
uccagugagacagcucug

SEQ ID NO: 2745726 - RNA, 15 nt, Human
acgccugaggcaauu

SEQ ID NO: 2745727 - RNA, 19 nt, Human
acgccugaggcaauuagac

SEQ ID NO: 2745728 - RNA, 11 nt, Human
acgcucucugg

SEQ ID NO: 2745729 - RNA, 20 nt, Human
accuuuuggucuggagggaa

SEQ ID NO: 2745730 - RNA, 22 nt, Human
uccacugguucuucuuggucuc

SEQ ID NO: 2745731 - RNA, 19 nt, Human
accuugaaaacuuuaugcu

SEQ ID NO: 2745732 - RNA, 21 nt, Human
accuugaacacugggggaggg

SEQ ID NO: 2745733 - RNA, 18 nt, Human
accuugaacacuggggga

SEQ ID NO: 2745734 - RNA, 12 nt, Human
acugaagaagca

SEQ ID NO: 2745735 - RNA, 16 nt, Human
acugacucuuaagaag

SEQ ID NO: 2745736 - RNA, 15 nt, Human
acugacucuuaagaa

SEQ ID NO: 2745737 - RNA, 14 nt, Human
acugacucuuaaga

SEQ ID NO: 2745738 - RNA, 13 nt, Human
acugacucuuaag

SEQ ID NO: 2745739 - RNA, 20 nt, Human
acugacucuuaagaagacug

SEQ ID NO: 2745740 - RNA, 18 nt, Human
acugacucuuaagaagac

SEQ ID NO: 2745741 - RNA, 17 nt, Human
acugacucuuaagaaga

SEQ ID NO: 2745742 - RNA, 13 nt, Human
acugacuucuaag

SEQ ID NO: 2745743 - RNA, 15 nt, Human
acugacuucuaagua

SEQ ID NO: 2745744 - RNA, 16 nt, Human
acugacuucuaaguaa

SEQ ID NO: 2745745 - RNA, 22 nt, Human
acugacuucuaaguaaaaccac

SEQ ID NO: 2745746 - RNA, 18 nt, Human
acugagagugaacaaauu

SEQ ID NO: 2745747 - RNA, 22 nt, Human
acugagaugugaacacaucagc

SEQ ID NO: 2745748 - RNA, 17 nt, Human
acugagaugugaacaca

SEQ ID NO: 2745749 - RNA, 16 nt, Human
uccuggaaaucagggu

SEQ ID NO: 2745750 - RNA, 21 nt, Human
acucuuaagaagacugcauua

SEQ ID NO: 2745751 - RNA, 19 nt, Human
acuccagugagacagcucu

SEQ ID NO: 2745752 - RNA, 23 nt, Human
ucagccuuccccuugcccagggc

SEQ ID NO: 2745753 - RNA, 22 nt, Human
ucagccuuccccuugcccaggg

SEQ ID NO: 2745754 - RNA, 21 nt, Human
ucagccuuccccuugcccagg

SEQ ID NO: 2745755 - RNA, 16 nt, Human
ucagccugugcugccc

SEQ ID NO: 2745756 - RNA, 12 nt, Human
ucagccugugcu

SEQ ID NO: 2745757 - RNA, 14 nt, Human
ucagccuggugggc

SEQ ID NO: 2745758 - RNA, 17 nt, Human
ucagccugugcugcccg

SEQ ID NO: 2745759 - RNA, 19 nt, Human
ucagccuggugggccuccu

SEQ ID NO: 2745760 - RNA, 18 nt, Human
ucagccuggugggccucc

SEQ ID NO: 2745761 - RNA, 17 nt, Human
ucagccuggugggccuc

SEQ ID NO: 2745762 - RNA, 19 nt, Human
accccagacuagauguagu

SEQ ID NO: 2745763 - RNA, 14 nt, Human
ucagcccucagaau

SEQ ID NO: 2745764 - RNA, 17 nt, Human
acccgggaggcagaggu

SEQ ID NO: 2745765 - RNA, 15 nt, Human
acccgggaggcagag

SEQ ID NO: 2745766 - RNA, 12 nt, Human
ucaugcagcugu

SEQ ID NO: 2745767 - RNA, 14 nt, Human
ucaugcagcugugg

SEQ ID NO: 2745768 - RNA, 15 nt, Human
ucaguuuuugugaaa

SEQ ID NO: 2745769 - RNA, 17 nt, Human
ucaguuuuugugaaaag

SEQ ID NO: 2745770 - RNA, 14 nt, Human
acaugggacauuug

SEQ ID NO: 2745771 - RNA, 11 nt, Human
acaugggacau

SEQ ID NO: 2745772 - RNA, 20 nt, Human
acaugggacauuugcucaug

SEQ ID NO: 2745773 - RNA, 15 nt, Human
acaugggacauuugc

SEQ ID NO: 2745774 - RNA, 21 nt, Human
acaugggacauuugcucaugg

SEQ ID NO: 2745775 - RNA, 16 nt, Human
acaugaaguccaagca

SEQ ID NO: 2745776 - RNA, 20 nt, Human
acaugagguacugagaguga

SEQ ID NO: 2745777 - RNA, 16 nt, Human
acaugagguacugaga

SEQ ID NO: 2745778 - RNA, 23 nt, Human
acaugagguacugagagugaaca

SEQ ID NO: 2745779 - RNA, 15 nt, Human
ucaaauugugugaaa

SEQ ID NO: 2745780 - RNA, 18 nt, Human
ucaaauugugugaaaggu

SEQ ID NO: 2745781 - RNA, 23 nt, Human
accaaaaaucucaauauuucaga

SEQ ID NO: 2745782 - RNA, 19 nt, Human
ucaauauuucagauaauca

SEQ ID NO: 2745783 - RNA, 15 nt, Human
ucaauauuucagaua

SEQ ID NO: 2745784 - RNA, 23 nt, Human
ucaaugaaugaaugaauggcuaa

SEQ ID NO: 2745785 - RNA, 22 nt, Human
ucaauaucuuuuuuuuaauaaa

SEQ ID NO: 2745786 - RNA, 16 nt, Human
ucaauucuugccaaau

SEQ ID NO: 2745787 - RNA, 21 nt, Human
ucacaacagauuauuaccuua

SEQ ID NO: 2745788 - RNA, 14 nt, Human
ucaccucauggaau

SEQ ID NO: 2745789 - RNA, 13 nt, Human
ucaccucauggaa

SEQ ID NO: 2745790 - RNA, 12 nt, Human
ucaccucaugga

SEQ ID NO: 2745791 - RNA, 23 nt, Human
ucacuugaacccgggaggcagag

SEQ ID NO: 2745792 - RNA, 11 nt, Human
accaguauuua

SEQ ID NO: 2745793 - RNA, 19 nt, Human
accaguauuuagaagccaa

SEQ ID NO: 2745794 - RNA, 14 nt, Human
accaguauuuagaa

SEQ ID NO: 2745795 - RNA, 18 nt, Human
accaguauuuagaagcca

SEQ ID NO: 2745796 - RNA, 14 nt, Human
accagucugacugu

SEQ ID NO: 2745797 - RNA, 14 nt, Human
uaacuacuuuauaa

SEQ ID NO: 2745798 - RNA, 20 nt, Human
uaacgauaaaagacagugaa

SEQ ID NO: 2745799 - RNA, 16 nt, Human
uaacuacuuuauaacu

SEQ ID NO: 2745800 - RNA, 17 nt, Human
uaacuacuuuauaacua

SEQ ID NO: 2745801 - RNA, 23 nt, Human
uaacuacuuuauaacuaacaugu

SEQ ID NO: 2745802 - RNA, 18 nt, Human
uaagaagugaaaaucuac

SEQ ID NO: 2745803 - RNA, 12 nt, Human
uaacuucuugcu

SEQ ID NO: 2745804 - RNA, 13 nt, Human
uaacuucuugcuu

SEQ ID NO: 2745805 - RNA, 15 nt, Human
uaacuucuugcuucu

SEQ ID NO: 2745806 - RNA, 19 nt, Human
uaacuucuugcuucuuucu

SEQ ID NO: 2745807 - RNA, 20 nt, Human
uaacuucuugcuucuuucua

SEQ ID NO: 2745808 - RNA, 16 nt, Human
aauagucaaauugugu

SEQ ID NO: 2745809 - RNA, 22 nt, Human
aauaucacuugucaauaaaauc

SEQ ID NO: 2745810 - RNA, 20 nt, Human
aauaucacuugucaauaaaa

SEQ ID NO: 2745811 - RNA, 21 nt, Human
aaucaggguuaguauugucca

SEQ ID NO: 2745812 - RNA, 16 nt, Human
aaucaggguuaguauu

SEQ ID NO: 2745813 - RNA, 22 nt, Human
aaucaggguuaguauuguccag

SEQ ID NO: 2745814 - RNA, 24 nt, Human
aauaugccccauucaacaucuagu

SEQ ID NO: 2745815 - RNA, 21 nt, Human
aauaugccccauucaacaucu

SEQ ID NO: 2745816 - RNA, 19 nt, Human
aauauuuauuuuaauaaug

SEQ ID NO: 2745817 - RNA, 18 nt, Human
aauauuuauuuuaauaau

SEQ ID NO: 2745818 - RNA, 16 nt, Human
uaauguauguuaccaa

SEQ ID NO: 2745819 - RNA, 17 nt, Human
uaauguauguuaccaaa

SEQ ID NO: 2745820 - RNA, 22 nt, Human
aaugaauggcuaagcaaaaugu

SEQ ID NO: 2745821 - RNA, 18 nt, Human
aaucuuaguguaugauua

SEQ ID NO: 2745822 - RNA, 21 nt, Human
aaucuuaguguaugauuacug

SEQ ID NO: 2745823 - RNA, 13 nt, Human
uaaucuuucacag

SEQ ID NO: 2745824 - RNA, 15 nt, Human
aaucaugaauuaguu

SEQ ID NO: 2745825 - RNA, 12 nt, Human
aaucaugaauua

SEQ ID NO: 2745826 - RNA, 12 nt, Human
uaauaaacucau

SEQ ID NO: 2745827 - RNA, 16 nt, Human
uaagcuuguauuccuu

SEQ ID NO: 2745828 - RNA, 19 nt, Human
uaaguaaugauaacuggaa

SEQ ID NO: 2745829 - RNA, 19 nt, Human
aaucuacacuccagugaga

SEQ ID NO: 2745830 - RNA, 19 nt, Human
aaucuuauaauuuaaaaua

SEQ ID NO: 2745831 - RNA, 23 nt, Human
aaucgcuccaccuugcagcucuc

SEQ ID NO: 2745832 - RNA, 18 nt, Human
uaccaccagucugacugu

SEQ ID NO: 2745833 - RNA, 17 nt, Human
aauguauguuaccaaaa

SEQ ID NO: 2745834 - RNA, 21 nt, Human
aauguauguuaccaaaaauaa

SEQ ID NO: 2745835 - RNA, 13 nt, Human
aauguauguuacc

SEQ ID NO: 2745836 - RNA, 20 nt, Human
uacaucccuuaccugggaaa

SEQ ID NO: 2745837 - RNA, 14 nt, Human
uacacuaagagaga

SEQ ID NO: 2745838 - RNA, 16 nt, Human
aaugcuguauuuuaaa

SEQ ID NO: 2745839 - RNA, 15 nt, Human
aauuaggcuguaacu

SEQ ID NO: 2745840 - RNA, 16 nt, Human
aauuaggcuguaacua

SEQ ID NO: 2745841 - RNA, 17 nt, Human
aauuaggcuguaacuac

SEQ ID NO: 2745842 - RNA, 18 nt, Human
aauuaggcuguaacuacu

SEQ ID NO: 2745843 - RNA, 19 nt, Human
aauuaggcuguaacuacuu

SEQ ID NO: 2745844 - RNA, 21 nt, Human
aauuaggcuguaacuacuuua

SEQ ID NO: 2745845 - RNA, 22 nt, Human
aauuaggcuguaacuacuuuau

SEQ ID NO: 2745846 - RNA, 15 nt, Human
aauuagugccacuua

SEQ ID NO: 2745847 - RNA, 23 nt, Human
aauuaggcuguaacuacuuuaua

SEQ ID NO: 2745848 - RNA, 17 nt, Human
aauuagugccacuuaau

SEQ ID NO: 2745849 - RNA, 20 nt, Human
aauuagugccacuuaaugua

SEQ ID NO: 2745850 - RNA, 18 nt, Human
aauucauuuuuuaaauuc

SEQ ID NO: 2745851 - RNA, 18 nt, Human
aauuccaagugauugaaa

SEQ ID NO: 2745852 - RNA, 20 nt, Human
aauucacagugcucuuuucu

SEQ ID NO: 2745853 - RNA, 22 nt, Human
aauuccacuuauaggaauugac

SEQ ID NO: 2745854 - RNA, 20 nt, Human
aauucccguuuugucacuuu

SEQ ID NO: 2745855 - RNA, 21 nt, Human
aauucccguuuugucacuuuu

SEQ ID NO: 2745856 - RNA, 14 nt, Human
uacuguaagaaaau

SEQ ID NO: 2745857 - RNA, 13 nt, Human
uacuguaagaaaa

SEQ ID NO: 2745858 - RNA, 18 nt, Human
uacuggccuuuuucauuu

SEQ ID NO: 2745859 - RNA, 22 nt, Human
aauugacccacaagaaaugaaa

SEQ ID NO: 2745860 - RNA, 21 nt, Human
aauugacccacaagaaaugaa

SEQ ID NO: 2745861 - RNA, 16 nt, Human
uauuaaaacucauuuu

SEQ ID NO: 2745862 - RNA, 21 nt, Human
uauguuuucaggcuagaugua

SEQ ID NO: 2745863 - RNA, 22 nt, Human
acaggaaccacaagacugcaca

SEQ ID NO: 2745864 - RNA, 17 nt, Human
acaggaaguagaggagg

SEQ ID NO: 2745865 - RNA, 23 nt, Human
uauucaaacagucucaggaaauc

SEQ ID NO: 2745866 - RNA, 15 nt, Human
uauucaaacagucuc

SEQ ID NO: 2745867 - RNA, 14 nt, Human
uauuacuguaagaa

SEQ ID NO: 2745868 - RNA, 16 nt, Human
acagucaccucaugga

SEQ ID NO: 2745869 - RNA, 18 nt, Human
acagucaccucauggaau

SEQ ID NO: 2745870 - RNA, 17 nt, Human
acagucaccucauggaa

SEQ ID NO: 2745871 - RNA, 21 nt, Human
acagggaggacgcucucuggc

SEQ ID NO: 2745872 - RNA, 20 nt, Human
acagggaggacgcucucugg

SEQ ID NO: 2745873 - RNA, 12 nt, Human
acagggacccac

SEQ ID NO: 2745874 - RNA, 18 nt, Human
acagccgcuccugucugc

SEQ ID NO: 2745875 - RNA, 14 nt, Human
acagccgcuccugu

SEQ ID NO: 2745876 - RNA, 21 nt, Human
uaugaaauauuauguuaaaac

SEQ ID NO: 2745877 - RNA, 24 nt, Human
acagccgcuccugucugccagcca

SEQ ID NO: 2745878 - RNA, 23 nt, Human
acagccgcuccugucugccagcc

SEQ ID NO: 2745879 - RNA, 20 nt, Human
acagccgcuccugucugcca

SEQ ID NO: 2745880 - RNA, 19 nt, Human
acagccgcuccugucugcc

SEQ ID NO: 2745881 - RNA, 20 nt, Human
uaugauuaaguaaugauaac

SEQ ID NO: 2745882 - RNA, 16 nt, Human
uaugauuaaguaauga

SEQ ID NO: 2745883 - RNA, 21 nt, Human
uaugauuaaguaaugauaacu

SEQ ID NO: 2745884 - RNA, 13 nt, Human
uaugcgguuaauu

SEQ ID NO: 2745885 - RNA, 15 nt, Human
uaugccccauucaac

SEQ ID NO: 2745886 - RNA, 19 nt, Human
uaugccccauucaacaucu

SEQ ID NO: 2745887 - RNA, 16 nt, Human
acagccucuuagaugc

SEQ ID NO: 2745888 - RNA, 19 nt, Human
uauaauuuugugaagcaaa

SEQ ID NO: 2745889 - RNA, 15 nt, Human
uauauuguuugcuaa

SEQ ID NO: 2745890 - RNA, 22 nt, Human
uauccuaauaaaaaggugacca

SEQ ID NO: 2745891 - RNA, 19 nt, Human
uauccuaauaaaaagguga

SEQ ID NO: 2745892 - RNA, 15 nt, Human
uauccuaauaaaaag

SEQ ID NO: 2745893 - RNA, 18 nt, Human
uauccuaauaaaaaggug

SEQ ID NO: 2745894 - RNA, 12 nt, Human
uauccuaauaaa

SEQ ID NO: 2745895 - RNA, 19 nt, Human
uauccagguucccucccag

SEQ ID NO: 2745896 - RNA, 17 nt, Human
uaucucaaaacugcacu

SEQ ID NO: 2745897 - RNA, 22 nt, Human
uaguuaccuuauaguuacugug

SEQ ID NO: 2745898 - RNA, 23 nt, Human
uaguuaccuuauaguuacugugu

SEQ ID NO: 2745899 - RNA, 15 nt, Human
acacaucagcuugcc

SEQ ID NO: 2745900 - RNA, 15 nt, Human
acacaugaaguccaa

SEQ ID NO: 2745901 - RNA, 18 nt, Human
acacaugauccugcaauu

SEQ ID NO: 2745902 - RNA, 13 nt, Human
acacuaagagaga

SEQ ID NO: 2745903 - RNA, 14 nt, Human
acacuaagagagaa

SEQ ID NO: 2745904 - RNA, 19 nt, Human
acacucaaaucaagaaacu

SEQ ID NO: 2745905 - RNA, 22 nt, Human
acaaugcuguauuuuaaaagaa

SEQ ID NO: 2745906 - RNA, 18 nt, Human
acaaugcuguauuuuaaa

SEQ ID NO: 2745907 - RNA, 15 nt, Human
acacacucaaaucaa

SEQ ID NO: 2745908 - RNA, 23 nt, Human
uaguguuggagaagaacugaaau

SEQ ID NO: 2745909 - RNA, 12 nt, Human
uaguuaccuuau

SEQ ID NO: 2745910 - RNA, 14 nt, Human
uaguuaccuuauag

SEQ ID NO: 2745911 - RNA, 17 nt, Human
uaguuaccuuauaguua

SEQ ID NO: 2745912 - RNA, 18 nt, Human
uaguuaccuuauaguuac

SEQ ID NO: 2745913 - RNA, 19 nt, Human
uaguuaccuuauaguuacu

SEQ ID NO: 2745914 - RNA, 21 nt, Human
uaguuaccuuauaguuacugu

SEQ ID NO: 2745915 - RNA, 22 nt, Human
uagugaaacucguuaauuugua

SEQ ID NO: 2745916 - RNA, 19 nt, Human
acaaauuuacagagacaga

SEQ ID NO: 2745917 - RNA, 18 nt, Human
acaaauuuacagagacag

SEQ ID NO: 2745918 - RNA, 20 nt, Human
acaagacccaaaaggcagaa

SEQ ID NO: 2745919 - RNA, 15 nt, Human
uagaugcaguucuga

SEQ ID NO: 2745920 - RNA, 22 nt, Human
uagaggagaaacuggaacucuc

SEQ ID NO: 2745921 - RNA, 17 nt, Human
uagagcacacuguagca

SEQ ID NO: 2745922 - RNA, 16 nt, Human
uagagcacacuguagc

SEQ ID NO: 2745923 - RNA, 19 nt, Human
uagaggagaaacuggaacu

SEQ ID NO: 2745924 - RNA, 18 nt, Human
acaaaaggauaaugaaua

SEQ ID NO: 2745925 - RNA, 14 nt, Human
acaagacugcacau

SEQ ID NO: 2745926 - RNA, 13 nt, Human
acaagacugcaca

SEQ ID NO: 2745927 - RNA, 23 nt, Human
acaauacaucccuuaccugggaa

SEQ ID NO: 2745928 - RNA, 19 nt, Human
uaggaaauauuuauuuuaa

SEQ ID NO: 2745929 - RNA, 18 nt, Human
uaggaaauauuuauuuua

SEQ ID NO: 2745930 - RNA, 12 nt, Human
uaggagcaugag

SEQ ID NO: 2745931 - RNA, 14 nt, Human
uagggagagaagau

SEQ ID NO: 2745932 - RNA, 15 nt, Human
uagggagagaagaua

SEQ ID NO: 2745933 - RNA, 24 nt, Human
aacucauuuuuguuuucauuaucu

SEQ ID NO: 2745934 - RNA, 21 nt, Human
aacucauuuuuguuuucauua

SEQ ID NO: 2745935 - RNA, 14 nt, Human
gucuuauuuauuau

SEQ ID NO: 2745936 - RNA, 14 nt, Human
gucuuaauuaaaag

SEQ ID NO: 2745937 - RNA, 19 nt, Human
gucuuauauauuguagaua

SEQ ID NO: 2745938 - RNA, 11 nt, Human
aagaaacauuu

SEQ ID NO: 2745939 - RNA, 16 nt, Human
aagaaagaaaaucagg

SEQ ID NO: 2745940 - RNA, 13 nt, Human
aagaaagaaaauc

SEQ ID NO: 2745941 - RNA, 14 nt, Human
aagaaagaaaauca

SEQ ID NO: 2745942 - RNA, 21 nt, Human
gugcuacaaaaacacagcaag

SEQ ID NO: 2745943 - RNA, 22 nt, Human
gugcuacaaaaacacagcaagg

SEQ ID NO: 2745944 - RNA, 18 nt, Human
gugcacgcacacugucug

SEQ ID NO: 2745945 - RNA, 16 nt, Human
gugauuaccagggacu

SEQ ID NO: 2745946 - RNA, 11 nt, Human
gugauuaccag

SEQ ID NO: 2745947 - RNA, 17 nt, Human
gugauuaccagggacug

SEQ ID NO: 2745948 - RNA, 19 nt, Human
aacuucuugcuucuuucua

SEQ ID NO: 2745949 - RNA, 22 nt, Human
aacuucuugcuucuuucuagaa

SEQ ID NO: 2745950 - RNA, 23 nt, Human
aacuuccuuggacucauuuuaaa

SEQ ID NO: 2745951 - RNA, 20 nt, Human
aacuucgaaagcaucauuau

SEQ ID NO: 2745952 - RNA, 20 nt, Human
aacuucuugcuucuuucuag

SEQ ID NO: 2745953 - RNA, 22 nt, Human
aacuuccuuggacucauuuuaa

SEQ ID NO: 2745954 - RNA, 18 nt, Human
aacuucagcgguuuauau

SEQ ID NO: 2745955 - RNA, 13 nt, Human
aacuucagacaua

SEQ ID NO: 2745956 - RNA, 23 nt, Human
guccaugaagauguagaggagaa

SEQ ID NO: 2745957 - RNA, 22 nt, Human
guccaugaagauguagaggaga

SEQ ID NO: 2745958 - RNA, 16 nt, Human
aacacugggggagggg

SEQ ID NO: 2745959 - RNA, 17 nt, Human
aacacugggggagggga

SEQ ID NO: 2745960 - RNA, 17 nt, Human
aacacaacuauauuguu

SEQ ID NO: 2745961 - RNA, 20 nt, Human
aacacagcaagggugauggg

SEQ ID NO: 2745962 - RNA, 18 nt, Human
aacacagcaagggugaug

SEQ ID NO: 2745963 - RNA, 17 nt, Human
guccuuuugacacugcu

SEQ ID NO: 2745964 - RNA, 19 nt, Human
guccuuuugacacugcucu

SEQ ID NO: 2745965 - RNA, 20 nt, Human
guccuuuugacacugcucua

SEQ ID NO: 2745966 - RNA, 21 nt, Human
guccuuuugacacugcucuaa

SEQ ID NO: 2745967 - RNA, 15 nt, Human
guccuuuugacacug

SEQ ID NO: 2745968 - RNA, 16 nt, Human
guccuuuugacacugc

SEQ ID NO: 2745969 - RNA, 19 nt, Human
aacauguccugccuauuau

SEQ ID NO: 2745970 - RNA, 20 nt, Human
aacauguccugccuauuauc

SEQ ID NO: 2745971 - RNA, 12 nt, Human
aacauauauaac

SEQ ID NO: 2745972 - RNA, 14 nt, Human
aacagucucaggaa

SEQ ID NO: 2745973 - RNA, 14 nt, Human
aacauaaaauacaa

SEQ ID NO: 2745974 - RNA, 13 nt, Human
aacagucucagga

SEQ ID NO: 2745975 - RNA, 15 nt, Human
gucacaggaaguaga

SEQ ID NO: 2745976 - RNA, 13 nt, Human
gucacaggaagua

SEQ ID NO: 2745977 - RNA, 21 nt, Human
gucaauuuuguuauguauauu

SEQ ID NO: 2745978 - RNA, 20 nt, Human
gucacaggaaguagaggagg

SEQ ID NO: 2745979 - RNA, 13 nt, Human
gucaggaaagaga

SEQ ID NO: 2745980 - RNA, 14 nt, Human
gucaggaaagagaa

SEQ ID NO: 2745981 - RNA, 14 nt, Human
gucacuuuuucuga

SEQ ID NO: 2745982 - RNA, 14 nt, Human
guauuuagaagcca

SEQ ID NO: 2745983 - RNA, 17 nt, Human
aaauuccaagugauuga

SEQ ID NO: 2745984 - RNA, 22 nt, Human
aaauuccuuagcuuagaccuca

SEQ ID NO: 2745985 - RNA, 23 nt, Human
aaauuccuuagcuuagaccucag

SEQ ID NO: 2745986 - RNA, 17 nt, Human
aaauuguauuacaaauc

SEQ ID NO: 2745987 - RNA, 18 nt, Human
aaaugugccuucauuuuu

SEQ ID NO: 2745988 - RNA, 15 nt, Human
aaaugugcuuuuaaa

SEQ ID NO: 2745989 - RNA, 18 nt, Human
aagcuuauuaaaacucau

SEQ ID NO: 2745990 - RNA, 18 nt, Human
guucccuugaugaagaag

SEQ ID NO: 2745991 - RNA, 21 nt, Human
aagccuuggggcugaugcagu

SEQ ID NO: 2745992 - RNA, 20 nt, Human
guuaauuuuuccaacuacua

SEQ ID NO: 2745993 - RNA, 22 nt, Human
guuaauuuugaagugcuguuua

SEQ ID NO: 2745994 - RNA, 14 nt, Human
guuaauuuuuccaa

SEQ ID NO: 2745995 - RNA, 17 nt, Human
guuaauuuugaagugcu

SEQ ID NO: 2745996 - RNA, 17 nt, Human
guuauuauauuuacaaa

SEQ ID NO: 2745997 - RNA, 10 nt, Human
guuauuuaaa

SEQ ID NO: 2745998 - RNA, 19 nt, Human
guuauuauauuuacaaaug

SEQ ID NO: 2745999 - RNA, 13 nt, Human
guuacuguguaau

SEQ ID NO: 2746000 - RNA, 15 nt, Human
aagauagcagggcau

SEQ ID NO: 2746001 - RNA, 14 nt, Human
aagauagcagggca

SEQ ID NO: 2746002 - RNA, 22 nt, Human
gugucuuaauuaaaagaauauu

SEQ ID NO: 2746003 - RNA, 19 nt, Human
aagauggcauaaccugucu

SEQ ID NO: 2746004 - RNA, 17 nt, Human
aagcaacccaaauguuc

SEQ ID NO: 2746005 - RNA, 18 nt, Human
aagcauuguaaaugugcu

SEQ ID NO: 2746006 - RNA, 19 nt, Human
aagcacugacuucuaagua

SEQ ID NO: 2746007 - RNA, 20 nt, Human
aagcacugacuucuaaguaa

SEQ ID NO: 2746008 - RNA, 19 nt, Human
aagcauuguaaaugugcuu

SEQ ID NO: 2746009 - RNA, 13 nt, Human
aagcacagcccuu

SEQ ID NO: 2746010 - RNA, 16 nt, Human
aagcacugacuucuaa

SEQ ID NO: 2746011 - RNA, 17 nt, Human
aagcacugacuucuaag

SEQ ID NO: 2746012 - RNA, 16 nt, Human
aagcacuaaacaaaga

SEQ ID NO: 2746013 - RNA, 14 nt, Human
uaaaaccacagcag

SEQ ID NO: 2746014 - RNA, 13 nt, Human
uaaaaccacagca

SEQ ID NO: 2746015 - RNA, 15 nt, Human
uaaaaccacagcagu

SEQ ID NO: 2746016 - RNA, 13 nt, Human
uaaaaaggugacc

SEQ ID NO: 2746017 - RNA, 15 nt, Human
uaaaaaggugaccau

SEQ ID NO: 2746018 - RNA, 20 nt, Human
aagucagauggaaaauucau

SEQ ID NO: 2746019 - RNA, 23 nt, Human
aagucagauggaaaauucauuuu

SEQ ID NO: 2746020 - RNA, 21 nt, Human
uaaaaaaaaaccugagcccca

SEQ ID NO: 2746021 - RNA, 13 nt, Human
uaaaagaauauuu

SEQ ID NO: 2746022 - RNA, 21 nt, Human
uaaaauacacacucaaaucaa

SEQ ID NO: 2746023 - RNA, 22 nt, Human
uaaaauaauuuuuauauuugaa

SEQ ID NO: 2746024 - RNA, 9 nt, Human
uaaaauggu

SEQ ID NO: 2746025 - RNA, 16 nt, Human
aaguacuguguacaga

SEQ ID NO: 2746026 - RNA, 19 nt, Human
aaguauguuagugcaaauu

SEQ ID NO: 2746027 - RNA, 18 nt, Human
aaguauguuagugcaaau

SEQ ID NO: 2746028 - RNA, 18 nt, Human
guuuaaagaaaguguauu

SEQ ID NO: 2746029 - RNA, 21 nt, Human
guuuaaagaaaguguauuugg

SEQ ID NO: 2746030 - RNA, 14 nt, Human
guuuaaagaaagug

SEQ ID NO: 2746031 - RNA, 15 nt, Human
guuuaaagaaagugu

SEQ ID NO: 2746032 - RNA, 16 nt, Human
guuuaaagaaagugua

SEQ ID NO: 2746033 - RNA, 17 nt, Human
guuuaaagaaaguguau

SEQ ID NO: 2746034 - RNA, 23 nt, Human
guuuauuaaucuuaguguaugau

SEQ ID NO: 2746035 - RNA, 14 nt, Human
guuuaugauuccac

SEQ ID NO: 2746036 - RNA, 15 nt, Human
aagggcuguuauaau

SEQ ID NO: 2746037 - RNA, 17 nt, Human
aaggggaauugaggaca

SEQ ID NO: 2746038 - RNA, 17 nt, Human
aagggcuguuauaaucu

SEQ ID NO: 2746039 - RNA, 15 nt, Human
gggccucggagccuc

SEQ ID NO: 2746040 - RNA, 17 nt, Human
gggccucggagccucau

SEQ ID NO: 2746041 - RNA, 20 nt, Human
gggcucagccuggugggccu

SEQ ID NO: 2746042 - RNA, 16 nt, Human
gggcucagccuggugg

SEQ ID NO: 2746043 - RNA, 13 nt, Human
gggcucagccugg

SEQ ID NO: 2746044 - RNA, 12 nt, Human
gggcucagccug

SEQ ID NO: 2746045 - RNA, 11 nt, Human
gggcucagccu

SEQ ID NO: 2746046 - RNA, 16 nt, Human
aaaauggguuuuacug

SEQ ID NO: 2746047 - RNA, 18 nt, Human
aaaaugguuuaaaugguc

SEQ ID NO: 2746048 - RNA, 16 nt, Human
aaaaugguuuaaaugg

SEQ ID NO: 2746049 - RNA, 17 nt, Human
aaaaucucaauauuuca

SEQ ID NO: 2746050 - RNA, 11 nt, Human
aaaauaauuuu

SEQ ID NO: 2746051 - RNA, 17 nt, Human
aaaauaauuuuuauauu

SEQ ID NO: 2746052 - RNA, 16 nt, Human
aaaauaauuuuuauau

SEQ ID NO: 2746053 - RNA, 14 nt, Human
aaaauacacacuca

SEQ ID NO: 2746054 - RNA, 22 nt, Human
gggguaaaauuccuuagcuuag

SEQ ID NO: 2746055 - RNA, 24 nt, Human
gguaacuuuugugaauuaggcugu

SEQ ID NO: 2746056 - RNA, 14 nt, Human
ggucagugcaaaua

SEQ ID NO: 2746057 - RNA, 20 nt, Human
ggguuuuauuguuuaaaauc

SEQ ID NO: 2746058 - RNA, 20 nt, Human
aaauauguuagcaaagaguu

SEQ ID NO: 2746059 - RNA, 13 nt, Human
aaauaugcaaagc

SEQ ID NO: 2746060 - RNA, 15 nt, Human
aaauaugcaaagcac

SEQ ID NO: 2746061 - RNA, 16 nt, Human
aaauaugcaaagcacu

SEQ ID NO: 2746062 - RNA, 17 nt, Human
aaauaugcaaagcacug

SEQ ID NO: 2746063 - RNA, 21 nt, Human
aaauaccaugccauuuaaagc

SEQ ID NO: 2746064 - RNA, 18 nt, Human
aaauauaugcuaagucuu

SEQ ID NO: 2746065 - RNA, 22 nt, Human
aaauaucacuugucaauaaaau

SEQ ID NO: 2746066 - RNA, 13 nt, Human
guaauaaacucau

SEQ ID NO: 2746067 - RNA, 12 nt, Human
guaacuacuuua

SEQ ID NO: 2746068 - RNA, 14 nt, Human
guaacuacuuuaua

SEQ ID NO: 2746069 - RNA, 14 nt, Human
gguggacccaggga

SEQ ID NO: 2746070 - RNA, 16 nt, Human
aaagcagaacagugau

SEQ ID NO: 2746071 - RNA, 19 nt, Human
aaacuuuaugcuaagugaa

SEQ ID NO: 2746072 - RNA, 12 nt, Human
aaacuuuaugcu

SEQ ID NO: 2746073 - RNA, 12 nt, Human
gguggacccagg

SEQ ID NO: 2746074 - RNA, 22 nt, Human
aaagggcuguuauaaucuuuca

SEQ ID NO: 2746075 - RNA, 20 nt, Human
aaagggcuguuauaaucuuu

SEQ ID NO: 2746076 - RNA, 20 nt, Human
aaagggauggcaagaugugg

SEQ ID NO: 2746077 - RNA, 16 nt, Human
gguuucauguuaguua

SEQ ID NO: 2746078 - RNA, 19 nt, Human
gguuuuauuguuuaaaauc

SEQ ID NO: 2746079 - RNA, 20 nt, Human
ggcuaagcuucacuguaaaa

SEQ ID NO: 2746080 - RNA, 16 nt, Human
ggccuucggccuccau

SEQ ID NO: 2746081 - RNA, 18 nt, Human
ggccuucggccuccaucc

SEQ ID NO: 2746082 - RNA, 21 nt, Human
ggccccagcacuaaagcagug

SEQ ID NO: 2746083 - RNA, 16 nt, Human
ggccccagcacuaaag

SEQ ID NO: 2746084 - RNA, 13 nt, Human
ggccccagcacua

SEQ ID NO: 2746085 - RNA, 13 nt, Human
aaaaauacaaaaa

SEQ ID NO: 2746086 - RNA, 19 nt, Human
ggcucuaauucacagugcu

SEQ ID NO: 2746087 - RNA, 17 nt, Human
ggcucuaauucacagug

SEQ ID NO: 2746088 - RNA, 15 nt, Human
gccugugcugcccgu

SEQ ID NO: 2746089 - RNA, 14 nt, Human
gccugugcugcccg

SEQ ID NO: 2746090 - RNA, 23 nt, Human
gccugugcugcccgucuucagcc

SEQ ID NO: 2746091 - RNA, 16 nt, Human
gccugugcugcccguc

SEQ ID NO: 2746092 - RNA, 23 nt, Human
gccuucggccuccauccugaggc

SEQ ID NO: 2746093 - RNA, 14 nt, Human
gcgggaaggagggu

SEQ ID NO: 2746094 - RNA, 13 nt, Human
gcgggaaggaggg

SEQ ID NO: 2746095 - RNA, 12 nt, Human
gccuccauccug

SEQ ID NO: 2746096 - RNA, 16 nt, Human
gccuccucuguccagg

SEQ ID NO: 2746097 - RNA, 13 nt, Human
gccuccucugucc

SEQ ID NO: 2746098 - RNA, 14 nt, Human
gccuccauccugag

SEQ ID NO: 2746099 - RNA, 13 nt, Human
gccuccauccuga

SEQ ID NO: 2746100 - RNA, 22 nt, Human
gccucauguccacugguucuuc

SEQ ID NO: 2746101 - RNA, 22 nt, Human
gccucauccgaggcagggucag

SEQ ID NO: 2746102 - RNA, 19 nt, Human
gccgcuccugucugccagc

SEQ ID NO: 2746103 - RNA, 15 nt, Human
gccgcuccugucugc

SEQ ID NO: 2746104 - RNA, 21 nt, Human
gccgcuccugucugccagcca

SEQ ID NO: 2746105 - RNA, 20 nt, Human
gccgcuccugucugccagcc

SEQ ID NO: 2746106 - RNA, 22 nt, Human
gccgcuccugucugccagccag

SEQ ID NO: 2746107 - RNA, 18 nt, Human
gcccgucuucagccuagc

SEQ ID NO: 2746108 - RNA, 17 nt, Human
gcccgucuucagccuag

SEQ ID NO: 2746109 - RNA, 16 nt, Human
gcccgucuucagccua

SEQ ID NO: 2746110 - RNA, 15 nt, Human
gcccgucuucagccu

SEQ ID NO: 2746111 - RNA, 14 nt, Human
gcccgucuucagcc

SEQ ID NO: 2746112 - RNA, 13 nt, Human
gcauuuagaugua

SEQ ID NO: 2746113 - RNA, 19 nt, Human
gcauuuaggccaugggaca

SEQ ID NO: 2746114 - RNA, 12 nt, Human
gcauuuagaugu

SEQ ID NO: 2746115 - RNA, 19 nt, Human
gcccaggaguuuggccaga

SEQ ID NO: 2746116 - RNA, 20 nt, Human
gcccaggaguuuggccagaa

SEQ ID NO: 2746117 - RNA, 11 nt, Human
gccccaaaagg

SEQ ID NO: 2746118 - RNA, 13 nt, Human
ggaaacugccagc

SEQ ID NO: 2746119 - RNA, 16 nt, Human
ggaaaaaauaacaaug

SEQ ID NO: 2746120 - RNA, 16 nt, Human
gcuguuuauuaaucuu

SEQ ID NO: 2746121 - RNA, 13 nt, Human
ggacaccaggagu

SEQ ID NO: 2746122 - RNA, 21 nt, Human
ggacagucaccucauggaauu

SEQ ID NO: 2746123 - RNA, 18 nt, Human
ggacagucaccucaugga

SEQ ID NO: 2746124 - RNA, 17 nt, Human
ggacagucaccucaugg

SEQ ID NO: 2746125 - RNA, 19 nt, Human
ggaaaucaggguuaguauu

SEQ ID NO: 2746126 - RNA, 20 nt, Human
gcugcccgucuucagccuag

SEQ ID NO: 2746127 - RNA, 19 nt, Human
gcugcccgucuucagccua

SEQ ID NO: 2746128 - RNA, 16 nt, Human
gcugcccgucuucagc

SEQ ID NO: 2746129 - RNA, 21 nt, Human
gcugcccgucuucagccuagc

SEQ ID NO: 2746130 - RNA, 14 nt, Human
gcugccuccccucc

SEQ ID NO: 2746131 - RNA, 12 nt, Human
gcugcaagguac

SEQ ID NO: 2746132 - RNA, 20 nt, Human
gcugcaagguacucugguga

SEQ ID NO: 2746133 - RNA, 18 nt, Human
gcugcaagcacagcccuu

SEQ ID NO: 2746134 - RNA, 18 nt, Human
gcuguauuuuaaaagaau

SEQ ID NO: 2746135 - RNA, 20 nt, Human
gcuguauuuuaaaagaauga

SEQ ID NO: 2746136 - RNA, 21 nt, Human
gcuguauuuuaaaagaaugau

SEQ ID NO: 2746137 - RNA, 13 nt, Human
gcugcugaaacaa

SEQ ID NO: 2746138 - RNA, 13 nt, Human
gcagccagcucuc

SEQ ID NO: 2746139 - RNA, 18 nt, Human
gcagccagcucucagcca

SEQ ID NO: 2746140 - RNA, 17 nt, Human
gcagccagcucucagcc

SEQ ID NO: 2746141 - RNA, 16 nt, Human
gcagccagcucucagc

SEQ ID NO: 2746142 - RNA, 15 nt, Human
gcagccagcucucag

SEQ ID NO: 2746143 - RNA, 15 nt, Human
gcagcucuccccuuc

SEQ ID NO: 2746144 - RNA, 22 nt, Human
gcagaacagugauuaccaggga

SEQ ID NO: 2746145 - RNA, 18 nt, Human
gcagaacagugauuacca

SEQ ID NO: 2746146 - RNA, 23 nt, Human
gcagaacagccgcuccugucugc

SEQ ID NO: 2746147 - RNA, 13 nt, Human
gcagaacagugau

SEQ ID NO: 2746148 - RNA, 12 nt, Human
gcagaacaguga

SEQ ID NO: 2746149 - RNA, 22 nt, Human
gcaguuguugcccacagcugua

SEQ ID NO: 2746150 - RNA, 13 nt, Human
gcagugaugucac

SEQ ID NO: 2746151 - RNA, 17 nt, Human
gauggaaaauucauuuu

SEQ ID NO: 2746152 - RNA, 12 nt, Human
gaggcuccacuu

SEQ ID NO: 2746153 - RNA, 15 nt, Human
gaggcuccacuuggu

SEQ ID NO: 2746154 - RNA, 18 nt, Human
gaggcugagaugggagaa

SEQ ID NO: 2746155 - RNA, 17 nt, Human
gaggcuccacuuggucu

SEQ ID NO: 2746156 - RNA, 18 nt, Human
gaggggcagaacagccgc

SEQ ID NO: 2746157 - RNA, 14 nt, Human
gaggagaaacugga

SEQ ID NO: 2746158 - RNA, 12 nt, Human
gaggagaaacug

SEQ ID NO: 2746159 - RNA, 20 nt, Human
gaggacgcucucuggccuuc

SEQ ID NO: 2746160 - RNA, 21 nt, Human
gaggacgcucucuggccuucg

SEQ ID NO: 2746161 - RNA, 14 nt, Human
gagcagucaggaaa

SEQ ID NO: 2746162 - RNA, 17 nt, Human
gagccccacccucagau

SEQ ID NO: 2746163 - RNA, 16 nt, Human
gagccccacccucaga

SEQ ID NO: 2746164 - RNA, 17 nt, Human
gagcuguucacagccag

SEQ ID NO: 2746165 - RNA, 20 nt, Human
gagcuguucacagccagacu

SEQ ID NO: 2746166 - RNA, 22 nt, Human
gagcuguucacagccagacugg

SEQ ID NO: 2746167 - RNA, 17 nt, Human
gagacucagggccccag

SEQ ID NO: 2746168 - RNA, 21 nt, Human
gagacucagggccccagcacu

SEQ ID NO: 2746169 - RNA, 21 nt, Human
gagauugugccccugcacucc

SEQ ID NO: 2746170 - RNA, 20 nt, Human
gagaugcuagaacucccuuu

SEQ ID NO: 2746171 - RNA, 16 nt, Human
gagaugcuagaacucc

SEQ ID NO: 2746172 - RNA, 22 nt, Human
gacuuuuuauggcacuaguauu

SEQ ID NO: 2746173 - RNA, 20 nt, Human
gaauuacauuuguauaaaau

SEQ ID NO: 2746174 - RNA, 18 nt, Human
gaauuacauuuguauaaa

SEQ ID NO: 2746175 - RNA, 15 nt, Human
gaauuacauuuguau

SEQ ID NO: 2746176 - RNA, 13 nt, Human
gaauuacauuugu

SEQ ID NO: 2746177 - RNA, 15 nt, Human
gaauuaacacaugau

SEQ ID NO: 2746178 - RNA, 14 nt, Human
gaauuaacacauga

SEQ ID NO: 2746179 - RNA, 22 nt, Human
gaaugauuaugaauuacauuug

SEQ ID NO: 2746180 - RNA, 14 nt, Human
gaaugauuaugaau

SEQ ID NO: 2746181 - RNA, 20 nt, Human
gaaugaauggcuaagcaaaa

SEQ ID NO: 2746182 - RNA, 15 nt, Human
gaaugaauggcuaag

SEQ ID NO: 2746183 - RNA, 19 nt, Human
gaauuaggcuguaacuacu

SEQ ID NO: 2746184 - RNA, 23 nt, Human
gaauuaggcuguaacuacuuuau

SEQ ID NO: 2746185 - RNA, 15 nt, Human
gaauuaggcuguaac

SEQ ID NO: 2746186 - RNA, 16 nt, Human
gaauuaggcuguaacu

SEQ ID NO: 2746187 - RNA, 17 nt, Human
gaauuaggcuguaacua

SEQ ID NO: 2746188 - RNA, 18 nt, Human
gaauuaggcuguaacuac

SEQ ID NO: 2746189 - RNA, 14 nt, Human
gaaugaauggcuaa

SEQ ID NO: 2746190 - RNA, 14 nt, Human
gacacugcucuaac

SEQ ID NO: 2746191 - RNA, 20 nt, Human
gacacugcucuaacagcccu

SEQ ID NO: 2746192 - RNA, 21 nt, Human
gacacugcucuaacagcccuc

SEQ ID NO: 2746193 - RNA, 22 nt, Human
gacauguggugggacagggacc

SEQ ID NO: 2746194 - RNA, 16 nt, Human
gacauguggugggaca

SEQ ID NO: 2746195 - RNA, 14 nt, Human
gacaugugguggga

SEQ ID NO: 2746196 - RNA, 18 nt, Human
gacagucaccucauggaa

SEQ ID NO: 2746197 - RNA, 12 nt, Human
gacagcucugca

SEQ ID NO: 2746198 - RNA, 18 nt, Human
gacccucaugcugccaau

SEQ ID NO: 2746199 - RNA, 21 nt, Human
gacccucaugcugccaauauc

SEQ ID NO: 2746200 - RNA, 22 nt, Human
gacccucaugcugccaauaucc

SEQ ID NO: 2746201 - RNA, 23 nt, Human
gacccucaugcugccaauauccu

SEQ ID NO: 2746202 - RNA, 12 nt, Human
gacccucaugcu

SEQ ID NO: 2746203 - RNA, 14 nt, Human
gacccucaugcugc

SEQ ID NO: 2746204 - RNA, 16 nt, Human
gacccucaugcugcca

SEQ ID NO: 2746205 - RNA, 17 nt, Human
gacccucaugcugccaa

SEQ ID NO: 2746206 - RNA, 14 nt, Human
gacgcucucuggcc

SEQ ID NO: 2746207 - RNA, 12 nt, Human
cugucagcugca

SEQ ID NO: 2746208 - RNA, 17 nt, Human
cuguagcauuacagugg

SEQ ID NO: 2746209 - RNA, 18 nt, Human
cuguagcauuacaguggg

SEQ ID NO: 2746210 - RNA, 23 nt, Human
cugucggagcccugucuccucuc

SEQ ID NO: 2746211 - RNA, 20 nt, Human
cuguaagaaaauaucacuug

SEQ ID NO: 2746212 - RNA, 23 nt, Human
cugugagaugcuagaacucccuu

SEQ ID NO: 2746213 - RNA, 21 nt, Human
cugugagaugcuagaacuccc

SEQ ID NO: 2746214 - RNA, 22 nt, Human
cuguucacagccagacuggcac

SEQ ID NO: 2746215 - RNA, 12 nt, Human
cuguucacagcc

SEQ ID NO: 2746216 - RNA, 19 nt, Human
cuguucacagccagacugg

SEQ ID NO: 2746217 - RNA, 12 nt, Human
cuuaaaaauggu

SEQ ID NO: 2746218 - RNA, 20 nt, Human
cuuaaaaaugguuuaaaugg

SEQ ID NO: 2746219 - RNA, 13 nt, Human
cuuaaaaaugguu

SEQ ID NO: 2746220 - RNA, 23 nt, Human
cuggaaaaguauguuagugcaaa

SEQ ID NO: 2746221 - RNA, 20 nt, Human
cugccuccccuccucugcuu

SEQ ID NO: 2746222 - RNA, 19 nt, Human
cugccuccccuccucugcu

SEQ ID NO: 2746223 - RNA, 14 nt, Human
cugccuccccuccu

SEQ ID NO: 2746224 - RNA, 18 nt, Human
cugccuccccuccucugc

SEQ ID NO: 2746225 - RNA, 17 nt, Human
cugccuccccuccucug

SEQ ID NO: 2746226 - RNA, 17 nt, Human
cugcuaccucacugggg

SEQ ID NO: 2746227 - RNA, 18 nt, Human
cugcuaccucacuggggu

SEQ ID NO: 2746228 - RNA, 21 nt, Human
cugcuagcacuuggagccaag

SEQ ID NO: 2746229 - RNA, 14 nt, Human
cugcuagcacuugg

SEQ ID NO: 2746230 - RNA, 23 nt, Human
cuuggucucagugucaaugcagc

SEQ ID NO: 2746231 - RNA, 15 nt, Human
cuuggcccaggaguu

SEQ ID NO: 2746232 - RNA, 16 nt, Human
cuuggcccaggaguuu

SEQ ID NO: 2746233 - RNA, 20 nt, Human
cuuggcccaggaguuuggcc

SEQ ID NO: 2746234 - RNA, 22 nt, Human
cuuggcccaggaguuuggccag

SEQ ID NO: 2746235 - RNA, 23 nt, Human
cuuggcccaggaguuuggccaga

SEQ ID NO: 2746236 - RNA, 22 nt, Human
cuucucuguauuccuagaaacu

SEQ ID NO: 2746237 - RNA, 23 nt, Human
gaacaaauuuacagagacagaaa

SEQ ID NO: 2746238 - RNA, 18 nt, Human
gaacaaauuuacagagac

SEQ ID NO: 2746239 - RNA, 17 nt, Human
gaacaaauuuacagaga

SEQ ID NO: 2746240 - RNA, 18 nt, Human
gaaaugaaagcagggacu

SEQ ID NO: 2746241 - RNA, 23 nt, Human
gaaaucaaauaugcaaagcacug

SEQ ID NO: 2746242 - RNA, 17 nt, Human
gaaaugaaagcagggac

SEQ ID NO: 2746243 - RNA, 21 nt, Human
gaaaucaaauaugcaaagcac

SEQ ID NO: 2746244 - RNA, 16 nt, Human
gaaaucaaauaugcaa

SEQ ID NO: 2746245 - RNA, 23 nt, Human
gaaacuucagcgguuuauauaag

SEQ ID NO: 2746246 - RNA, 20 nt, Human
cuuuuuuucuguaccaguua

SEQ ID NO: 2746247 - RNA, 21 nt, Human
gaaaagacuccaaagaaaugu

SEQ ID NO: 2746248 - RNA, 20 nt, Human
gaaaagacuccaaagaaaug

SEQ ID NO: 2746249 - RNA, 18 nt, Human
gaaaagacuccaaagaaa

SEQ ID NO: 2746250 - RNA, 23 nt, Human
caccaggcgcuaauucaaggaau

SEQ ID NO: 2746251 - RNA, 17 nt, Human
caccaggcgcuaauuca

SEQ ID NO: 2746252 - RNA, 16 nt, Human
cacaagacugcacauc

SEQ ID NO: 2746253 - RNA, 12 nt, Human
caauuuaaaaaa

SEQ ID NO: 2746254 - RNA, 23 nt, Human
caaugcuguauuuuaaaagaaug

SEQ ID NO: 2746255 - RNA, 14 nt, Human
caaugcuguauuuu

SEQ ID NO: 2746256 - RNA, 20 nt, Human
caauauuucagauaaucaca

SEQ ID NO: 2746257 - RNA, 12 nt, Human
caauauuucaga

SEQ ID NO: 2746258 - RNA, 20 nt, Human
caaguauuagaauaccacag

SEQ ID NO: 2746259 - RNA, 14 nt, Human
caaguauuagaaua

SEQ ID NO: 2746260 - RNA, 17 nt, Human
cacucccaccugacaca

SEQ ID NO: 2746261 - RNA, 22 nt, Human
cacucccaccugacacaccagg

SEQ ID NO: 2746262 - RNA, 23 nt, Human
cacucccaccugacacaccaggc

SEQ ID NO: 2746263 - RNA, 22 nt, Human
caccuugcagcucuccccuucu

SEQ ID NO: 2746264 - RNA, 13 nt, Human
caccuugcagcuc

SEQ ID NO: 2746265 - RNA, 15 nt, Human
caccuugcagcucuc

SEQ ID NO: 2746266 - RNA, 23 nt, Human
caccucaaaauaccaugccauuu

SEQ ID NO: 2746267 - RNA, 21 nt, Human
caccuacaugagguacugaga

SEQ ID NO: 2746268 - RNA, 21 nt, Human
caccguuggggauuggggaag

SEQ ID NO: 2746269 - RNA, 20 nt, Human
cacuuggucugugagaugcu

SEQ ID NO: 2746270 - RNA, 17 nt, Human
cacuuggucugugagau

SEQ ID NO: 2746271 - RNA, 21 nt, Human
caacuaucucauuuccaagca

SEQ ID NO: 2746272 - RNA, 19 nt, Human
caacccaaauguucaucaa

SEQ ID NO: 2746273 - RNA, 15 nt, Human
caacacgagcaggcu

SEQ ID NO: 2746274 - RNA, 15 nt, Human
caaauccuugaagau

SEQ ID NO: 2746275 - RNA, 17 nt, Human
auucuugccaaauauaa

SEQ ID NO: 2746276 - RNA, 18 nt, Human
auugacuuuuuauggcac

SEQ ID NO: 2746277 - RNA, 17 nt, Human
auucauuuuuuaaauuc

SEQ ID NO: 2746278 - RNA, 16 nt, Human
auucaaggaauuucuu

SEQ ID NO: 2746279 - RNA, 18 nt, Human
auucacaagacccaaaag

SEQ ID NO: 2746280 - RNA, 20 nt, Human
auucaaggaauuucuuaacu

SEQ ID NO: 2746281 - RNA, 19 nt, Human
auucaaggaauuucuuaac

SEQ ID NO: 2746282 - RNA, 17 nt, Human
auucaaggaauuucuua

SEQ ID NO: 2746283 - RNA, 18 nt, Human
auucaaggaauuucuuaa

SEQ ID NO: 2746284 - RNA, 14 nt, Human
auuguaaaugugcu

SEQ ID NO: 2746285 - RNA, 15 nt, Human
auuguaaaugugcuu

SEQ ID NO: 2746286 - RNA, 17 nt, Human
auuguaaaugugcuuuu

SEQ ID NO: 2746287 - RNA, 19 nt, Human
auuguuuaaaaucauuucu

SEQ ID NO: 2746288 - RNA, 18 nt, Human
auuucuaugaaauauuau

SEQ ID NO: 2746289 - RNA, 15 nt, Human
auuucuaugaaauau

SEQ ID NO: 2746290 - RNA, 20 nt, Human
auuucuaugaaauauuaugu

SEQ ID NO: 2746291 - RNA, 15 nt, Human
caggcacacuucuuc

SEQ ID NO: 2746292 - RNA, 19 nt, Human
caggugccaguuauggcua

SEQ ID NO: 2746293 - RNA, 16 nt, Human
cagucaccucauggaa

SEQ ID NO: 2746294 - RNA, 15 nt, Human
cagucacauuccaag

SEQ ID NO: 2746295 - RNA, 15 nt, Human
cagucaccucaugga

SEQ ID NO: 2746296 - RNA, 19 nt, Human
cagucaccucauggaauug

SEQ ID NO: 2746297 - RNA, 20 nt, Human
cagucugacuguuuccauca

SEQ ID NO: 2746298 - RNA, 16 nt, Human
cagccagcucucagcc

SEQ ID NO: 2746299 - RNA, 15 nt, Human
cagccagcucucagc

SEQ ID NO: 2746300 - RNA, 12 nt, Human
cagccagcucuc

SEQ ID NO: 2746301 - RNA, 18 nt, Human
cagccagcucucagccaa

SEQ ID NO: 2746302 - RNA, 17 nt, Human
cagccagcucucagcca

SEQ ID NO: 2746303 - RNA, 21 nt, Human
cagccagcucucagccaacga

SEQ ID NO: 2746304 - RNA, 13 nt, Human
cagcaguucagag

SEQ ID NO: 2746305 - RNA, 16 nt, Human
cagagguugcagugag

SEQ ID NO: 2746306 - RNA, 17 nt, Human
cagagguugcagugagc

SEQ ID NO: 2746307 - RNA, 12 nt, Human
cagauccuggaa

SEQ ID NO: 2746308 - RNA, 19 nt, Human
cagccgcuccugucugcca

SEQ ID NO: 2746309 - RNA, 18 nt, Human
cagccgcuccugucugcc

SEQ ID NO: 2746310 - RNA, 17 nt, Human
cagccgcuccugucugc

SEQ ID NO: 2746311 - RNA, 16 nt, Human
cagccgcuccugucug

SEQ ID NO: 2746312 - RNA, 14 nt, Human
cagccgcuccuguc

SEQ ID NO: 2746313 - RNA, 23 nt, Human
cagccgcuccugucugccagcca

SEQ ID NO: 2746314 - RNA, 22 nt, Human
cagccgcuccugucugccagcc

SEQ ID NO: 2746315 - RNA, 21 nt, Human
cagccgcuccugucugccagc

SEQ ID NO: 2746316 - RNA, 20 nt, Human
cagccgcuccugucugccag

SEQ ID NO: 2746317 - RNA, 12 nt, Human
cagcuguggcag

SEQ ID NO: 2746318 - RNA, 16 nt, Human
cagcuguggcagaguu

SEQ ID NO: 2746319 - RNA, 21 nt, Human
cagcuccccucggagaagagc

SEQ ID NO: 2746320 - RNA, 22 nt, Human
cagcuccccucggagaagagcu

SEQ ID NO: 2746321 - RNA, 20 nt, Human
cagcuccccucggagaagag

SEQ ID NO: 2746322 - RNA, 14 nt, Human
cauguuaguuaccu

SEQ ID NO: 2746323 - RNA, 21 nt, Human
cauguuaguuaccuuauaguu

SEQ ID NO: 2746324 - RNA, 22 nt, Human
cauguuaguuaccuuauaguua

SEQ ID NO: 2746325 - RNA, 24 nt, Human
cauguuaguuaccuuauaguuacu

SEQ ID NO: 2746326 - RNA, 17 nt, Human
caugucccuacaccccu

SEQ ID NO: 2746327 - RNA, 13 nt, Human
cauguccugccua

SEQ ID NO: 2746328 - RNA, 22 nt, Human
cauguccugccuauuaucuguc

SEQ ID NO: 2746329 - RNA, 14 nt, Human
caugauguuuagaa

SEQ ID NO: 2746330 - RNA, 12 nt, Human
ccaccaguucuc

SEQ ID NO: 2746331 - RNA, 23 nt, Human
ccacagcaguugaaaagacucca

SEQ ID NO: 2746332 - RNA, 17 nt, Human
ccacagcaguugaaaag

SEQ ID NO: 2746333 - RNA, 18 nt, Human
ccacagcaguugaaaaga

SEQ ID NO: 2746334 - RNA, 12 nt, Human
ccacagcaguug

SEQ ID NO: 2746335 - RNA, 17 nt, Human
cauuuguauaaaauaau

SEQ ID NO: 2746336 - RNA, 20 nt, Human
cauuuguauaaaauaauuuu

SEQ ID NO: 2746337 - RNA, 19 nt, Human
cauuuguauaaaauaauuu

SEQ ID NO: 2746338 - RNA, 17 nt, Human
ccaaauguucaucaaug

SEQ ID NO: 2746339 - RNA, 20 nt, Human
cccagggcucagccuggugg

SEQ ID NO: 2746340 - RNA, 18 nt, Human
cccagggcucagccuggu

SEQ ID NO: 2746341 - RNA, 17 nt, Human
cccagggcucagccugg

SEQ ID NO: 2746342 - RNA, 16 nt, Human
cccagggcucagccug

SEQ ID NO: 2746343 - RNA, 15 nt, Human
cccagggcucagccu

SEQ ID NO: 2746344 - RNA, 14 nt, Human
cccagggcucagcc

SEQ ID NO: 2746345 - RNA, 18 nt, Human
ccccugcacuccagccug

SEQ ID NO: 2746346 - RNA, 17 nt, Human
ccaguauuuagaagcca

SEQ ID NO: 2746347 - RNA, 18 nt, Human
ccaguauuuagaagccaa

SEQ ID NO: 2746348 - RNA, 14 nt, Human
ccauacauuugugu

SEQ ID NO: 2746349 - RNA, 13 nt, Human
ccauacauuugug

SEQ ID NO: 2746350 - RNA, 22 nt, Human
ccauuuaaagcuuauuaaaacu

SEQ ID NO: 2746351 - RNA, 19 nt, Human
cccugucuccucucucugu

SEQ ID NO: 2746352 - RNA, 21 nt, Human
ccucauuuuuauaaugucccu

SEQ ID NO: 2746353 - RNA, 23 nt, Human
ccucauggaauuggagcucgugg

SEQ ID NO: 2746354 - RNA, 20 nt, Human
ccucaugcugccaauauccu

SEQ ID NO: 2746355 - RNA, 21 nt, Human
ccucaugcugccaauauccua

SEQ ID NO: 2746356 - RNA, 14 nt, Human
ccucaaagaaagug

SEQ ID NO: 2746357 - RNA, 16 nt, Human
ccucaaagaaagugua

SEQ ID NO: 2746358 - RNA, 16 nt, Human
ccucagccugugcugc

SEQ ID NO: 2746359 - RNA, 22 nt, Human
ccucagccuuccccuugcccag

SEQ ID NO: 2746360 - RNA, 12 nt, Human
ccucagccugug

SEQ ID NO: 2746361 - RNA, 11 nt, Human
ccucagccugu

SEQ ID NO: 2746362 - RNA, 22 nt, Human
ccuggggccucggagccucauc

SEQ ID NO: 2746363 - RNA, 12 nt, Human
ccuggggccucg

SEQ ID NO: 2746364 - RNA, 16 nt, Human
ccugucggagcccugu

SEQ ID NO: 2746365 - RNA, 17 nt, Human
ccugucggagcccuguc

SEQ ID NO: 2746366 - RNA, 21 nt, Human
ccugucggagcccugucuccu

SEQ ID NO: 2746367 - RNA, 15 nt, Human
ccuguaaucacagcu

SEQ ID NO: 2746368 - RNA, 20 nt, Human
ccuggugggccuccucuguc

SEQ ID NO: 2746369 - RNA, 18 nt, Human
ccuggugggccuccucug

SEQ ID NO: 2746370 - RNA, 14 nt, Human
ccuggugggccucc

SEQ ID NO: 2746371 - RNA, 23 nt, Human
ccugucugccagccagcagccag

SEQ ID NO: 2746372 - RNA, 21 nt, Human
ccugucugccagccagcagcc

SEQ ID NO: 2746373 - RNA, 15 nt, Human
ccugucucaccugga

SEQ ID NO: 2746374 - RNA, 22 nt, Human
ccugucggagcccugucuccuc

SEQ ID NO: 2746375 - RNA, 20 nt, Human
ccugucugccagccagcagc

SEQ ID NO: 2746376 - RNA, 19 nt, Human
ccugucugccagccagcag

SEQ ID NO: 2746377 - RNA, 17 nt, Human
ccugucugccagccagc

SEQ ID NO: 2746378 - RNA, 16 nt, Human
ccugucugccagccag

SEQ ID NO: 2746379 - RNA, 15 nt, Human
ccugucugccagcca

SEQ ID NO: 2746380 - RNA, 14 nt, Human
ccugucugccagcc

SEQ ID NO: 2746381 - RNA, 13 nt, Human
cuagaacucccuu

SEQ ID NO: 2746382 - RNA, 12 nt, Human
cuagaacucccu

SEQ ID NO: 2746383 - RNA, 11 nt, Human
cuaauaaaaag

SEQ ID NO: 2746384 - RNA, 15 nt, Human
cuaauaaaaagguga

SEQ ID NO: 2746385 - RNA, 14 nt, Human
cuaauaaaaaggug

SEQ ID NO: 2746386 - RNA, 13 nt, Human
cuaauaaaaaggu

SEQ ID NO: 2746387 - RNA, 17 nt, Human
cuaaguaaauaggaauu

SEQ ID NO: 2746388 - RNA, 22 nt, Human
cuaaguaaaaccacagcaguug

SEQ ID NO: 2746389 - RNA, 23 nt, Human
cuaaguaaaaccacagcaguuga

SEQ ID NO: 2746390 - RNA, 20 nt, Human
cuaaguaaaaccacagcagu

SEQ ID NO: 2746391 - RNA, 20 nt, Human
cgugugugugcguccugucg

SEQ ID NO: 2746392 - RNA, 18 nt, Human
cuacaugagguacugaga

SEQ ID NO: 2746393 - RNA, 20 nt, Human
cuacaugagguacugagagu

SEQ ID NO: 2746394 - RNA, 18 nt, Human
cuacauacuauggaauuu

SEQ ID NO: 2746395 - RNA, 16 nt, Human
cuacaaaaacacagca

SEQ ID NO: 2746396 - RNA, 17 nt, Human
cuacaaaaacacagcaa

SEQ ID NO: 2746397 - RNA, 18 nt, Human
cuacaaaaacacagcaag

SEQ ID NO: 2746398 - RNA, 15 nt, Human
cuacaaaaacacagc

SEQ ID NO: 2746399 - RNA, 23 nt, Human
cucaaaauaccaugccauuuaaa

SEQ ID NO: 2746400 - RNA, 17 nt, Human
cucaaaacugcacuguc

SEQ ID NO: 2746401 - RNA, 18 nt, Human
ccuuuugacacugcucua

SEQ ID NO: 2746402 - RNA, 13 nt, Human
ccuuuugacacug

SEQ ID NO: 2746403 - RNA, 15 nt, Human
ccuuuugacacugcu

SEQ ID NO: 2746404 - RNA, 22 nt, Human
ccuugcugcaagcacagcccuu

SEQ ID NO: 2746405 - RNA, 21 nt, Human
ccuugcccagggcucagccug

SEQ ID NO: 2746406 - RNA, 22 nt, Human
ccuugcccagggcucagccugg

SEQ ID NO: 2746407 - RNA, 17 nt, Human
cgccugaggcaauuaga

SEQ ID NO: 2746408 - RNA, 18 nt, Human
cgcaggcccccaggugcc

SEQ ID NO: 2746409 - RNA, 22 nt, Human
cguggugauuuagcaggaagcu

SEQ ID NO: 2746410 - RNA, 15 nt, Human
cguggugauuuagca

SEQ ID NO: 2746411 - RNA, 15 nt, Human
cugaaacaacaaaua

SEQ ID NO: 2746412 - RNA, 15 nt, Human
cucuggggugggcag

SEQ ID NO: 2746413 - RNA, 23 nt, Human
cucuggugagucaccacuucagg

SEQ ID NO: 2746414 - RNA, 20 nt, Human
cucuguccagggcccugagc

SEQ ID NO: 2746415 - RNA, 14 nt, Human
cucuguccagggcc

SEQ ID NO: 2746416 - RNA, 16 nt, Human
cucuccccuucucugu

SEQ ID NO: 2746417 - RNA, 21 nt, Human
cucuuagaugcaguucugaag

SEQ ID NO: 2746418 - RNA, 21 nt, Human
cucuguccagggcccugagcu

SEQ ID NO: 2746419 - RNA, 22 nt, Human
cucuuagaugcaguucugaaga

SEQ ID NO: 2746420 - RNA, 15 nt, Human
cuccacuuggucugu

SEQ ID NO: 2746421 - RNA, 13 nt, Human
cuccacuuggucu

SEQ ID NO: 2746422 - RNA, 22 nt, Human
cuccacuuggucugugagaugc

SEQ ID NO: 2746423 - RNA, 21 nt, Human
cuccacuuggucugugagaug

SEQ ID NO: 2746424 - RNA, 17 nt, Human
cuccacuuggucuguga

SEQ ID NO: 2746425 - RNA, 16 nt, Human
cuccacuuggucugug

SEQ ID NO: 2746426 - RNA, 18 nt, Human
cucaguagucagacugga

SEQ ID NO: 2746427 - RNA, 13 nt, Human
cucaguaccccau

SEQ ID NO: 2746428 - RNA, 19 nt, Human
cuccccaugauguuuagaa

SEQ ID NO: 2746429 - RNA, 14 nt, Human
cucccaccugacac

SEQ ID NO: 2746430 - RNA, 15 nt, Human
cucccaccugacaca

SEQ ID NO: 2746431 - RNA, 20 nt, Human
cucccaccugacacaccagg

SEQ ID NO: 2746432 - RNA, 21 nt, Human
cucccaccugacacaccaggc

SEQ ID NO: 2746433 - RNA, 23 nt, Human
cuccacuuggucugugagaugcu

SEQ ID NO: 2746434 - RNA, 14 nt, Human
cucguuaauuugua

SEQ ID NO: 2746435 - RNA, 12 nt, Human
cuccugggcagc

SEQ ID NO: 2746436 - RNA, 17 nt, Human
cuccugggcagcugccu

SEQ ID NO: 2746437 - RNA, 16 nt, Human
cuccugggcagcugcc

SEQ ID NO: 2746438 - RNA, 15 nt, Human
cuccugggcagcugc

SEQ ID NO: 2746439 - RNA, 14 nt, Human
cuccugggcagcug

SEQ ID NO: 2746440 - RNA, 19 nt, Human
cuccugggcagcugccucc

SEQ ID NO: 2746441 - RNA, 18 nt, Human
cuccugggcagcugccuc

SEQ ID NO: 2746442 - RNA, 22 nt, Human
cuccugggcagcugccuccccu

SEQ ID NO: 2746443 - RNA, 20 nt, Human
cuccucugcuugccaucccu

SEQ ID NO: 2746444 - RNA, 17 nt, Human
cuccucugcuugccauc

SEQ ID NO: 2746445 - RNA, 16 nt, Human
cuccucugcuugccau

SEQ ID NO: 2746446 - RNA, 15 nt, Human
cuccucugcuugcca

SEQ ID NO: 2746447 - RNA, 21 nt, Human
cuccucugcuugccaucccuc

SEQ ID NO: 2746448 - RNA, 14 nt, Human
cuccucugcuugcc

SEQ ID NO: 2746449 - RNA, 12 nt, Human
cuccucugcuug

SEQ ID NO: 2746450 - RNA, 16 nt, Human
cacaguuuucugagaa

SEQ ID NO: 2746451 - RNA, 17 nt, Human
cacaguuuucugagaaa

SEQ ID NO: 2746452 - RNA, 19 nt, Human
cacaguuuucugagaaaga

SEQ ID NO: 2746453 - RNA, 22 nt, Human
caaaauuuuuucucuaggaaau

SEQ ID NO: 2746454 - RNA, 21 nt, Human
caaaauuuuuucucuaggaaa

SEQ ID NO: 2746455 - RNA, 16 nt, Human
caaaauuuuuucucua

SEQ ID NO: 2746456 - RNA, 15 nt, Human
caaauugugugaaag

SEQ ID NO: 2746457 - RNA, 19 nt, Human
caaauaugcaaagcacuga

SEQ ID NO: 2746458 - RNA, 21 nt, Human
caaauaugcaaagcacugacu

SEQ ID NO: 2746459 - RNA, 13 nt, Human
caaaaacacagca

SEQ ID NO: 2746460 - RNA, 14 nt, Human
caaaaacacagcaa

SEQ ID NO: 2746461 - RNA, 15 nt, Human
caaaaacacagcaag

SEQ ID NO: 2746462 - RNA, 17 nt, Human
caaaaacacagcaaggg

SEQ ID NO: 2746463 - RNA, 13 nt, Human
auuuuccugaaaa

SEQ ID NO: 2746464 - RNA, 19 nt, Human
caaaaaucucaauauuuca

SEQ ID NO: 2746465 - RNA, 23 nt, Human
caaaacuucagacauagaauuaa

SEQ ID NO: 2746466 - RNA, 23 nt, Human
caauacaucccuuaccugggaaa

SEQ ID NO: 2746467 - RNA, 22 nt, Human
caaugugacuuaaugccacuaa

SEQ ID NO: 2746468 - RNA, 22 nt, Human
caacugaggcagacagcagcuc

SEQ ID NO: 2746469 - RNA, 21 nt, Human
caacugaggcagacagcagcu

SEQ ID NO: 2746470 - RNA, 20 nt, Human
caacugaggcagacagcagc

SEQ ID NO: 2746471 - RNA, 17 nt, Human
caacugaggcagacagc

SEQ ID NO: 2746472 - RNA, 16 nt, Human
caacugaggcagacag

SEQ ID NO: 2746473 - RNA, 14 nt, Human
caacugaggcagac

SEQ ID NO: 2746474 - RNA, 13 nt, Human
caacugaggcaga

SEQ ID NO: 2746475 - RNA, 20 nt, Human
caacccgucuggcccaccag

SEQ ID NO: 2746476 - RNA, 21 nt, Human
caacccgucuggcccaccagg

SEQ ID NO: 2746477 - RNA, 22 nt, Human
caacccgucuggcccaccaggg

SEQ ID NO: 2746478 - RNA, 15 nt, Human
caaggcuuagacccu

SEQ ID NO: 2746479 - RNA, 14 nt, Human
caaggcuuagaccc

SEQ ID NO: 2746480 - RNA, 18 nt, Human
caaggcuuagacccucau

SEQ ID NO: 2746481 - RNA, 21 nt, Human
caagccagauuuuccugaaaa

SEQ ID NO: 2746482 - RNA, 12 nt, Human
caaggaauuucu

SEQ ID NO: 2746483 - RNA, 15 nt, Human
caaggaauuucuuaa

SEQ ID NO: 2746484 - RNA, 16 nt, Human
caaggaauuucuuaac

SEQ ID NO: 2746485 - RNA, 18 nt, Human
caaggaauuucuuaacuu

SEQ ID NO: 2746486 - RNA, 21 nt, Human
caaggaauuucuuaacuucuu

SEQ ID NO: 2746487 - RNA, 23 nt, Human
caaggaauuucuuaacuucuugc

SEQ ID NO: 2746488 - RNA, 17 nt, Human
caaggcugauuaaacca

SEQ ID NO: 2746489 - RNA, 17 nt, Human
uucugucuucacaacag

SEQ ID NO: 2746490 - RNA, 18 nt, Human
uucugugguuucauguua

SEQ ID NO: 2746491 - RNA, 22 nt, Human
uucugugguuucauguuaguua

SEQ ID NO: 2746492 - RNA, 14 nt, Human
uugaugaagaaguu

SEQ ID NO: 2746493 - RNA, 13 nt, Human
uugaugaagaagu

SEQ ID NO: 2746494 - RNA, 23 nt, Human
uugaugaagaaguugauaugccu

SEQ ID NO: 2746495 - RNA, 17 nt, Human
uugacccacaagaaaug

SEQ ID NO: 2746496 - RNA, 14 nt, Human
uugacccacaagaa

SEQ ID NO: 2746497 - RNA, 14 nt, Human
uucuaugaaauauu

SEQ ID NO: 2746498 - RNA, 21 nt, Human
uucuaugaaauauuauguuaa

SEQ ID NO: 2746499 - RNA, 15 nt, Human
uucugcuaccucacu

SEQ ID NO: 2746500 - RNA, 21 nt, Human
uucugcuaccucacugggguc

SEQ ID NO: 2746501 - RNA, 16 nt, Human
uucugcuaccucacug

SEQ ID NO: 2746502 - RNA, 19 nt, Human
uucugauaaaagauggcca

SEQ ID NO: 2746503 - RNA, 18 nt, Human
uucugauaaaagauggcc

SEQ ID NO: 2746504 - RNA, 16 nt, Human
uucugagaaagacuau

SEQ ID NO: 2746505 - RNA, 21 nt, Human
uucugagaaagacuauucaaa

SEQ ID NO: 2746506 - RNA, 15 nt, Human
uucuacauacuaugg

SEQ ID NO: 2746507 - RNA, 18 nt, Human
uucggugagcuacaaaug

SEQ ID NO: 2746508 - RNA, 18 nt, Human
uuccuuguauuuaaauau

SEQ ID NO: 2746509 - RNA, 15 nt, Human
uuccuuguauuuaaa

SEQ ID NO: 2746510 - RNA, 23 nt, Human
uucaguuauuauauuuacaaaug

SEQ ID NO: 2746511 - RNA, 18 nt, Human
uuccagauccuggaaauc

SEQ ID NO: 2746512 - RNA, 19 nt, Human
uuauuuuaauaauguuuca

SEQ ID NO: 2746513 - RNA, 17 nt, Human
uuauuuuaauaauguuu

SEQ ID NO: 2746514 - RNA, 20 nt, Human
uuauuuuaauaauguuucaa

SEQ ID NO: 2746515 - RNA, 18 nt, Human
uuauuugcagagacagga

SEQ ID NO: 2746516 - RNA, 15 nt, Human
uuauuugcagagaca

SEQ ID NO: 2746517 - RNA, 19 nt, Human
uucacgccugaggcaauua

SEQ ID NO: 2746518 - RNA, 20 nt, Human
uucagauaaucacaauacau

SEQ ID NO: 2746519 - RNA, 20 nt, Human
uucagagcugcccucuccug

SEQ ID NO: 2746520 - RNA, 19 nt, Human
uucagagcugcccucuccu

SEQ ID NO: 2746521 - RNA, 18 nt, Human
uucagagcugcccucucc

SEQ ID NO: 2746522 - RNA, 17 nt, Human
uucagagcugcccucuc

SEQ ID NO: 2746523 - RNA, 15 nt, Human
uucagagcugcccuc

SEQ ID NO: 2746524 - RNA, 18 nt, Human
uuauaauuuugugaagca

SEQ ID NO: 2746525 - RNA, 17 nt, Human
uuauaauuuugugaagc

SEQ ID NO: 2746526 - RNA, 16 nt, Human
uuauaauuuugugaag

SEQ ID NO: 2746527 - RNA, 18 nt, Human
uuagugccacuuaaugua

SEQ ID NO: 2746528 - RNA, 19 nt, Human
uuagugccacuuaauguau

SEQ ID NO: 2746529 - RNA, 18 nt, Human
uuaguguaugauuacugg

SEQ ID NO: 2746530 - RNA, 12 nt, Human
uuauaauuuaaa

SEQ ID NO: 2746531 - RNA, 15 nt, Human
uuauaauuuugugaa

SEQ ID NO: 2746532 - RNA, 14 nt, Human
uuauaauuuuguga

SEQ ID NO: 2746533 - RNA, 11 nt, Human
uuauaaucuuu

SEQ ID NO: 2746534 - RNA, 13 nt, Human
uuauauuugaaau

SEQ ID NO: 2746535 - RNA, 12 nt, Human
uuauauuugaaa

SEQ ID NO: 2746536 - RNA, 20 nt, Human
uuauauuuauuacuguaaga

SEQ ID NO: 2746537 - RNA, 16 nt, Human
uuauauuuacaaaugg

SEQ ID NO: 2746538 - RNA, 11 nt, Human
uuaucucaaaa

SEQ ID NO: 2746539 - RNA, 22 nt, Human
uuaugauuaaguaaugauaacu

SEQ ID NO: 2746540 - RNA, 21 nt, Human
uuauuaacgauguccaacccg

SEQ ID NO: 2746541 - RNA, 18 nt, Human
uuauggcuauaggugcua

SEQ ID NO: 2746542 - RNA, 16 nt, Human
uuggucugugagaugc

SEQ ID NO: 2746543 - RNA, 19 nt, Human
uuggucuuauuuauuauug

SEQ ID NO: 2746544 - RNA, 15 nt, Human
uuggucuuauuuauu

SEQ ID NO: 2746545 - RNA, 15 nt, Human
uuggucugugagaug

SEQ ID NO: 2746546 - RNA, 15 nt, Human
uugucuagugaaacu

SEQ ID NO: 2746547 - RNA, 12 nt, Human
uugugccccugc

SEQ ID NO: 2746548 - RNA, 18 nt, Human
uuguguuuugcaagccag

SEQ ID NO: 2746549 - RNA, 14 nt, Human
uuguuuaaaaucau

SEQ ID NO: 2746550 - RNA, 20 nt, Human
uuguuucauugacuaucaaa

SEQ ID NO: 2746551 - RNA, 14 nt, Human
uuucauuuaucuau

SEQ ID NO: 2746552 - RNA, 18 nt, Human
uuuccaacuacuaauaga

SEQ ID NO: 2746553 - RNA, 19 nt, Human
uuuccaacuacuaauagaa

SEQ ID NO: 2746554 - RNA, 17 nt, Human
uuucauuuaucuauaau

SEQ ID NO: 2746555 - RNA, 12 nt, Human
uuuccaacuacu

SEQ ID NO: 2746556 - RNA, 22 nt, Human
uuuauuguuuaaaaucauuucu

SEQ ID NO: 2746557 - RNA, 22 nt, Human
uuuauaauuuugugaagcaaaa

SEQ ID NO: 2746558 - RNA, 17 nt, Human
uuuauggcacuaguauu

SEQ ID NO: 2746559 - RNA, 13 nt, Human
uuuaccacuugug

SEQ ID NO: 2746560 - RNA, 13 nt, Human
uuuaauaauguuu

SEQ ID NO: 2746561 - RNA, 19 nt, Human
uuuaacucuauaauguguu

SEQ ID NO: 2746562 - RNA, 21 nt, Human
uuuuuccaacuacuaauagaa

SEQ ID NO: 2746563 - RNA, 23 nt, Human
uuuuuccaacuacuaauagaaua

SEQ ID NO: 2746564 - RNA, 19 nt, Human
uuuguauaaaauaauuuuu

SEQ ID NO: 2746565 - RNA, 18 nt, Human
uuuguauaaaauaauuuu

SEQ ID NO: 2746566 - RNA, 17 nt, Human
uuuguauaaaauaauuu

SEQ ID NO: 2746567 - RNA, 15 nt, Human
uuuccacagaagcuc

SEQ ID NO: 2746568 - RNA, 23 nt, Human
uuuuauaauuuugugaagcaaaa

SEQ ID NO: 2746569 - RNA, 21 nt, Human
uuuuauaauuuugugaagcaa

SEQ ID NO: 2746570 - RNA, 21 nt, Human
uuuuaaaguaacccuacaaaa

SEQ ID NO: 2746571 - RNA, 18 nt, Human
uuuuauauuugaaauauu

SEQ ID NO: 2746572 - RNA, 13 nt, Human
uuuuauauuugaa

SEQ ID NO: 2746573 - RNA, 13 nt, Human
uuuucuuauuuca

SEQ ID NO: 2746574 - RNA, 16 nt, Human
ugcacugucaagauga

SEQ ID NO: 2746575 - RNA, 17 nt, Human
ugcacgcacacugucug

SEQ ID NO: 2746576 - RNA, 16 nt, Human
ugcacgcacacugucu

SEQ ID NO: 2746577 - RNA, 19 nt, Human
ugcccgucuucagccuagc

SEQ ID NO: 2746578 - RNA, 18 nt, Human
ugcccgucuucagccuag

SEQ ID NO: 2746579 - RNA, 17 nt, Human
ugcccgucuucagccua

SEQ ID NO: 2746580 - RNA, 16 nt, Human
ugcccgucuucagccu

SEQ ID NO: 2746581 - RNA, 13 nt, Human
ugcccgucuucag

SEQ ID NO: 2746582 - RNA, 17 nt, Human
ugcaugguuuagaaagc

SEQ ID NO: 2746583 - RNA, 19 nt, Human
ugcagauaaacaguaguga

SEQ ID NO: 2746584 - RNA, 17 nt, Human
ugcagauaaacaguagu

SEQ ID NO: 2746585 - RNA, 13 nt, Human
ugcagauucauuu

SEQ ID NO: 2746586 - RNA, 21 nt, Human
ugcauuauauuuauuacugua

SEQ ID NO: 2746587 - RNA, 24 nt, Human
ugauaguuguaccgcaaugugacu

SEQ ID NO: 2746588 - RNA, 15 nt, Human
ugagcagucaggaaa

SEQ ID NO: 2746589 - RNA, 17 nt, Human
ugagcagucaggaaaga

SEQ ID NO: 2746590 - RNA, 20 nt, Human
ugagcagucaggaaagagaa

SEQ ID NO: 2746591 - RNA, 20 nt, Human
ugagaugcuagaacucccuu

SEQ ID NO: 2746592 - RNA, 16 nt, Human
ugagaugcuagaacuc

SEQ ID NO: 2746593 - RNA, 14 nt, Human
ugagaugcuagaac

SEQ ID NO: 2746594 - RNA, 16 nt, Human
ugagacagcucugcau

SEQ ID NO: 2746595 - RNA, 14 nt, Human
ugagacagcucugc

SEQ ID NO: 2746596 - RNA, 18 nt, Human
ugagaaagacuauucaaa

SEQ ID NO: 2746597 - RNA, 20 nt, Human
ugagaaagacuauucaaaca

SEQ ID NO: 2746598 - RNA, 16 nt, Human
ugagaaagacuauuca

SEQ ID NO: 2746599 - RNA, 17 nt, Human
ugagaaagacuauucaa

SEQ ID NO: 2746600 - RNA, 12 nt, Human
ugacucuuaaga

SEQ ID NO: 2746601 - RNA, 23 nt, Human
ugggcagcugccuccccuccucu

SEQ ID NO: 2746602 - RNA, 22 nt, Human
ugggcagcugccuccccuccuc

SEQ ID NO: 2746603 - RNA, 20 nt, Human
ugggcagcugccuccccucc

SEQ ID NO: 2746604 - RNA, 14 nt, Human
ugggacagggagga

SEQ ID NO: 2746605 - RNA, 23 nt, Human
uggccuucggccuccauccugag

SEQ ID NO: 2746606 - RNA, 20 nt, Human
uggccuucggccuccauccu

SEQ ID NO: 2746607 - RNA, 22 nt, Human
uggccuucggccuccauccuga

SEQ ID NO: 2746608 - RNA, 22 nt, Human
ugcuucuguuuuauaauuuugu

SEQ ID NO: 2746609 - RNA, 17 nt, Human
ugcuucuguuuuauaau

SEQ ID NO: 2746610 - RNA, 16 nt, Human
ugucauccucaaagaa

SEQ ID NO: 2746611 - RNA, 19 nt, Human
uguauuuuaaaagaaugau

SEQ ID NO: 2746612 - RNA, 18 nt, Human
uguauuuuaaaagaauga

SEQ ID NO: 2746613 - RNA, 14 nt, Human
uguauaaaauaauu

SEQ ID NO: 2746614 - RNA, 13 nt, Human
uguauaaaauaau

SEQ ID NO: 2746615 - RNA, 21 nt, Human
uguaguguuggagaagaacug

SEQ ID NO: 2746616 - RNA, 20 nt, Human
uguaguguuggagaagaacu

SEQ ID NO: 2746617 - RNA, 19 nt, Human
uguaguguuggagaagaac

SEQ ID NO: 2746618 - RNA, 16 nt, Human
ugucucaccuggacuu

SEQ ID NO: 2746619 - RNA, 12 nt, Human
ugucuuaauuaa

SEQ ID NO: 2746620 - RNA, 23 nt, Human
ugucauccucaaagaaaguguau

SEQ ID NO: 2746621 - RNA, 19 nt, Human
ugucauccucaaagaaagu

SEQ ID NO: 2746622 - RNA, 20 nt, Human
ugucauccucaaagaaagug

SEQ ID NO: 2746623 - RNA, 21 nt, Human
ugucauccucaaagaaagugu

SEQ ID NO: 2746624 - RNA, 22 nt, Human
ugucauccucaaagaaagugua

SEQ ID NO: 2746625 - RNA, 24 nt, Human
uguccugccuauuaucugucagcu

SEQ ID NO: 2746626 - RNA, 17 nt, Human
uguccugccuauuaucu

SEQ ID NO: 2746627 - RNA, 17 nt, Human
ugucuacacuaagagag

SEQ ID NO: 2746628 - RNA, 22 nt, Human
ugucuacacuaagagagaauga

SEQ ID NO: 2746629 - RNA, 14 nt, Human
uggguagacacaca

SEQ ID NO: 2746630 - RNA, 20 nt, Human
ugguucccuugaugaagaag

SEQ ID NO: 2746631 - RNA, 17 nt, Human
ugguucccuugaugaag

SEQ ID NO: 2746632 - RNA, 16 nt, Human
ugguucccuugaugaa

SEQ ID NO: 2746633 - RNA, 21 nt, Human
uguacagaauucugcuaccuc

SEQ ID NO: 2746634 - RNA, 18 nt, Human
uguacagaauucugcuac

SEQ ID NO: 2746635 - RNA, 12 nt, Human
uguaaaauggug

SEQ ID NO: 2746636 - RNA, 11 nt, Human
uguaaaauggu

SEQ ID NO: 2746637 - RNA, 15 nt, Human
ucugccagccagcag

SEQ ID NO: 2746638 - RNA, 13 nt, Human
ucugccagccagc

SEQ ID NO: 2746639 - RNA, 17 nt, Human
ucugccagccagcagcc

SEQ ID NO: 2746640 - RNA, 16 nt, Human
ucugccagccagcagc

SEQ ID NO: 2746641 - RNA, 19 nt, Human
ucugccagccagcagccag

SEQ ID NO: 2746642 - RNA, 17 nt, Human
ucuggugagucaccacu

SEQ ID NO: 2746643 - RNA, 20 nt, Human
ucuggugagucaccacuuca

SEQ ID NO: 2746644 - RNA, 16 nt, Human
ucuggcucuaauucac

SEQ ID NO: 2746645 - RNA, 12 nt, Human
ucuggcucuaau

SEQ ID NO: 2746646 - RNA, 15 nt, Human
ucuggcucuaauuca

SEQ ID NO: 2746647 - RNA, 10 nt, Human
ucuggccuuc

SEQ ID NO: 2746648 - RNA, 18 nt, Human
ucuggccuucggccucca

SEQ ID NO: 2746649 - RNA, 17 nt, Human
ucuggccuucggccucc

SEQ ID NO: 2746650 - RNA, 12 nt, Human
ucuucagccuag

SEQ ID NO: 2746651 - RNA, 11 nt, Human
ucuucagccua

SEQ ID NO: 2746652 - RNA, 22 nt, Human
ucuucagccuagccgaccucag

SEQ ID NO: 2746653 - RNA, 21 nt, Human
ucuucagccuagccgaccuca

SEQ ID NO: 2746654 - RNA, 23 nt, Human
ucuucagccuagccgaccucagc

SEQ ID NO: 2746655 - RNA, 12 nt, Human
ucuuaagaagac

SEQ ID NO: 2746656 - RNA, 16 nt, Human
ucuuaacuucuugcuu

SEQ ID NO: 2746657 - RNA, 23 nt, Human
ucuuaacuucuugcuucuuucua

SEQ ID NO: 2746658 - RNA, 12 nt, Human
ucuuaacuucuu

SEQ ID NO: 2746659 - RNA, 18 nt, Human
ucuuaagaagacugcauu

SEQ ID NO: 2746660 - RNA, 15 nt, Human
ucugucuucacaaca

SEQ ID NO: 2746661 - RNA, 19 nt, Human
ucugcaucagcugcugaaa

SEQ ID NO: 2746662 - RNA, 21 nt, Human
ucugcaucagcugcugaaaca

SEQ ID NO: 2746663 - RNA, 14 nt, Human
ucugcaucagcugc

SEQ ID NO: 2746664 - RNA, 18 nt, Human
ucucuguaauaaacucau

SEQ ID NO: 2746665 - RNA, 22 nt, Human
ucucuguaauaaacucauuucu

SEQ ID NO: 2746666 - RNA, 17 nt, Human
uccagguucccucccag

SEQ ID NO: 2746667 - RNA, 18 nt, Human
uccagguucccucccaga

SEQ ID NO: 2746668 - RNA, 20 nt, Human
uccagguucccucccagagg

SEQ ID NO: 2746669 - RNA, 16 nt, Human
ucccugcaauaaaaug

SEQ ID NO: 2746670 - RNA, 16 nt, Human
ucccuugaugaagaag

SEQ ID NO: 2746671 - RNA, 15 nt, Human
ucccuugaugaagaa

SEQ ID NO: 2746672 - RNA, 14 nt, Human
uccuaauacuguca

SEQ ID NO: 2746673 - RNA, 15 nt, Human
uccuaauacugucau

SEQ ID NO: 2746674 - RNA, 18 nt, Human
uccuaauaaaaaggugac

SEQ ID NO: 2746675 - RNA, 16 nt, Human
uccuaauaaaaaggug

SEQ ID NO: 2746676 - RNA, 17 nt, Human
uccuaauaaaaagguga

SEQ ID NO: 2746677 - RNA, 12 nt, Human
uccuaauaaaaa

SEQ ID NO: 2746678 - RNA, 13 nt, Human
uccuaauaaaaag

SEQ ID NO: 2746679 - RNA, 14 nt, Human
uccuaauaaaaagg

SEQ ID NO: 2746680 - RNA, 15 nt, Human
uccuaauaaaaaggu

SEQ ID NO: 2746681 - RNA, 22 nt, Human
uccucugcuugccaucccuccc

SEQ ID NO: 2746682 - RNA, 21 nt, Human
uccucugcuugccaucccucc

SEQ ID NO: 2746683 - RNA, 19 nt, Human
uccucugcuugccaucccu

SEQ ID NO: 2746684 - RNA, 20 nt, Human
uccucugcuugccaucccuc

SEQ ID NO: 2746685 - RNA, 16 nt, Human
ucuaauucacagugcu

SEQ ID NO: 2746686 - RNA, 19 nt, Human
ucuagaaagagaaacaguu

SEQ ID NO: 2746687 - RNA, 22 nt, Human
ucuagugagcagucaggaaaga

SEQ ID NO: 2746688 - RNA, 19 nt, Human
ucuagugagcagucaggaa

SEQ ID NO: 2746689 - RNA, 15 nt, Human
ucucaacuccaaacu

SEQ ID NO: 2746690 - RNA, 17 nt, Human
ucuaugaaauauuaugu

SEQ ID NO: 2746691 - RNA, 14 nt, Human
ucuaugaaauauua

SEQ ID NO: 2746692 - RNA, 13 nt, Human
ucuaugaaauauu

SEQ ID NO: 2746693 - RNA, 22 nt, Human
ucgugggacagucaccucaugg

SEQ ID NO: 2746694 - RNA, 21 nt, Human
ucguggaacaguuaccucugc

SEQ ID NO: 2746695 - RNA, 17 nt, Human
ucggccuccauccugag

SEQ ID NO: 2746696 - RNA, 18 nt, Human
ucggccuccauccugagg

SEQ ID NO: 2746697 - RNA, 13 nt, Human
ucguuaauuugua

SEQ ID NO: 2746698 - RNA, 23 nt, Human
ucuaacagcccuccucugcacuc

SEQ ID NO: 2746699 - RNA, 13 nt, Human
ucuaacagcccuc

SEQ ID NO: 2746700 - RNA, 20 nt, Human
ucuaacagcccuccucugca

SEQ ID NO: 2746701 - RNA, 21 nt, Human
ucuaacagcccuccucugcac

SEQ ID NO: 2746702 - RNA, 22 nt, Human
ucuaacagcccuccucugcacu

SEQ ID NO: 2746703 - RNA, 12 nt, Human
ucuaacagcccu

SEQ ID NO: 2746704 - RNA, 17 nt, Human
uccuggcaauagucaaa

SEQ ID NO: 2746705 - RNA, 20 nt, Human
uccugccuaagugcagcccc

SEQ ID NO: 2746706 - RNA, 19 nt, Human
uccugccuauuaucuguca

SEQ ID NO: 2746707 - RNA, 22 nt, Human
uccugucggagcccugucuccu

SEQ ID NO: 2746708 - RNA, 19 nt, Human
uccugucggagcccugucu

SEQ ID NO: 2746709 - RNA, 16 nt, Human
uccuuggacucauuuu

SEQ ID NO: 2746710 - RNA, 18 nt, Human
ucacagugcucuuuucuc

SEQ ID NO: 2746711 - RNA, 20 nt, Human
ucacagugcucuuuucuccu

SEQ ID NO: 2746712 - RNA, 17 nt, Human
ucacagugcucuuuucu

SEQ ID NO: 2746713 - RNA, 14 nt, Human
ucaccaaggcugau

SEQ ID NO: 2746714 - RNA, 16 nt, Human
ucacagucacauucca

SEQ ID NO: 2746715 - RNA, 13 nt, Human
ucacaagacccaa

SEQ ID NO: 2746716 - RNA, 18 nt, Human
ucacaagacccaaaaggc

SEQ ID NO: 2746717 - RNA, 17 nt, Human
ucacaagacccaaaagg

SEQ ID NO: 2746718 - RNA, 13 nt, Human
ucaaugcagcccc

SEQ ID NO: 2746719 - RNA, 21 nt, Human
ucaauaaaauccauacauuug

SEQ ID NO: 2746720 - RNA, 14 nt, Human
uauuuuuuguauaa

SEQ ID NO: 2746721 - RNA, 16 nt, Human
uauuuuuuguauaauu

SEQ ID NO: 2746722 - RNA, 17 nt, Human
uauuuuuuguauaauug

SEQ ID NO: 2746723 - RNA, 14 nt, Human
ucaaauaugcaaag

SEQ ID NO: 2746724 - RNA, 20 nt, Human
ucaaaucaagaaacuuaagg

SEQ ID NO: 2746725 - RNA, 14 nt, Human
ucaaauugugugaa

SEQ ID NO: 2746726 - RNA, 22 nt, Human
uauuguuuuuccuuguauuuaa

SEQ ID NO: 2746727 - RNA, 16 nt, Human
uauuauucccauucua

SEQ ID NO: 2746728 - RNA, 14 nt, Human
uauuaaucuuagug

SEQ ID NO: 2746729 - RNA, 17 nt, Human
uauuaaucuuaguguau

SEQ ID NO: 2746730 - RNA, 18 nt, Human
uauuaaucuuaguguaug

SEQ ID NO: 2746731 - RNA, 17 nt, Human
uauguacuucaugcugu

SEQ ID NO: 2746732 - RNA, 13 nt, Human
uauguacuucaug

SEQ ID NO: 2746733 - RNA, 16 nt, Human
ucauuuccaagcaagu

SEQ ID NO: 2746734 - RNA, 13 nt, Human
ucauuuccaagca

SEQ ID NO: 2746735 - RNA, 19 nt, Human
ucauuaucucaaaacugca

SEQ ID NO: 2746736 - RNA, 20 nt, Human
ucauuaucucaaaacugcac

SEQ ID NO: 2746737 - RNA, 13 nt, Human
ucauuaucucaaa

SEQ ID NO: 2746738 - RNA, 21 nt, Human
ucaugcugccaauauccuaau

SEQ ID NO: 2746739 - RNA, 23 nt, Human
ucaugcugccaauauccuaauaa

SEQ ID NO: 2746740 - RNA, 13 nt, Human
ucaugcugccaau

SEQ ID NO: 2746741 - RNA, 17 nt, Human
ucaugcugccaauaucc

SEQ ID NO: 2746742 - RNA, 19 nt, Human
ucaugcugccaauauccua

SEQ ID NO: 2746743 - RNA, 20 nt, Human
ucaugcugccaauauccuaa

SEQ ID NO: 2746744 - RNA, 18 nt, Human
ucauaccuaucaucuuaa

SEQ ID NO: 2746745 - RNA, 14 nt, Human
uccacuuggucugu

SEQ ID NO: 2746746 - RNA, 16 nt, Human
uccacuuggucuguga

SEQ ID NO: 2746747 - RNA, 15 nt, Human
uccacuuggucugug

SEQ ID NO: 2746748 - RNA, 17 nt, Human
uccaccucccugcaaua

SEQ ID NO: 2746749 - RNA, 16 nt, Human
uccaccucccugcaau

SEQ ID NO: 2746750 - RNA, 15 nt, Human
uccaccucccugcaa

SEQ ID NO: 2746751 - RNA, 14 nt, Human
uccaccucccugca

SEQ ID NO: 2746752 - RNA, 13 nt, Human
uccaccucccugc

SEQ ID NO: 2746753 - RNA, 12 nt, Human
uccaccucccug

SEQ ID NO: 2746754 - RNA, 19 nt, Human
uccacagaagcuccaggua

SEQ ID NO: 2746755 - RNA, 23 nt, Human
ucagggccccagcacuaaagcag

SEQ ID NO: 2746756 - RNA, 16 nt, Human
ucagggccccagcacu

SEQ ID NO: 2746757 - RNA, 14 nt, Human
ucagggccccagca

SEQ ID NO: 2746758 - RNA, 17 nt, Human
ucaggcuagauguaugu

SEQ ID NO: 2746759 - RNA, 13 nt, Human
ucaggcuagaugu

SEQ ID NO: 2746760 - RNA, 21 nt, Human
ucagcugcaagguacucuggu

SEQ ID NO: 2746761 - RNA, 22 nt, Human
ucagcugcaagguacucuggug

SEQ ID NO: 2746762 - RNA, 20 nt, Human
ucagcugcaagguacucugg

SEQ ID NO: 2746763 - RNA, 18 nt, Human
ucagcuccccucggagaa

SEQ ID NO: 2746764 - RNA, 17 nt, Human
ucagcuccccucggaga

SEQ ID NO: 2746765 - RNA, 21 nt, Human
ucacugggguccuggggccuc

SEQ ID NO: 2746766 - RNA, 20 nt, Human
ucacugggguccuggggccu

SEQ ID NO: 2746767 - RNA, 19 nt, Human
ucacugggguccuggggcc

SEQ ID NO: 2746768 - RNA, 17 nt, Human
ucacugggguccugggg

SEQ ID NO: 2746769 - RNA, 16 nt, Human
ucacugggguccuggg

SEQ ID NO: 2746770 - RNA, 22 nt, Human
ucagagcugcccucuccugggc

SEQ ID NO: 2746771 - RNA, 21 nt, Human
ucagagcugcccucuccuggg

SEQ ID NO: 2746772 - RNA, 20 nt, Human
ucagagcugcccucuccugg

SEQ ID NO: 2746773 - RNA, 19 nt, Human
ucagagcugcccucuccug

SEQ ID NO: 2746774 - RNA, 18 nt, Human
ucagagcugcccucuccu

SEQ ID NO: 2746775 - RNA, 21 nt, Human
ggagccucauccgaggcaggg

SEQ ID NO: 2746776 - RNA, 20 nt, Human
ggagccucauccgaggcagg

SEQ ID NO: 2746777 - RNA, 19 nt, Human
ggagccucauccgaggcag

SEQ ID NO: 2746778 - RNA, 18 nt, Human
ggagcccugucuccucuc

SEQ ID NO: 2746779 - RNA, 23 nt, Human
ggagcccugucuccucucucugu

SEQ ID NO: 2746780 - RNA, 16 nt, Human
ggaggacgcucucugg

SEQ ID NO: 2746781 - RNA, 19 nt, Human
ggaggggagcaugggaagu

SEQ ID NO: 2746782 - RNA, 19 nt, Human
ggacgcucucuggccuucg

SEQ ID NO: 2746783 - RNA, 16 nt, Human
ggacgcucucuggccu

SEQ ID NO: 2746784 - RNA, 15 nt, Human
ggacgcucucuggcc

SEQ ID NO: 2746785 - RNA, 23 nt, Human
ggagaagagcuguucacagccag

SEQ ID NO: 2746786 - RNA, 14 nt, Human
ggagaagaacugaa

SEQ ID NO: 2746787 - RNA, 11 nt, Human
ggagaagaacu

SEQ ID NO: 2746788 - RNA, 15 nt, Human
ggagaagagcuguuc

SEQ ID NO: 2746789 - RNA, 20 nt, Human
ggacauuugcucauggaauu

SEQ ID NO: 2746790 - RNA, 17 nt, Human
ggacauuugcucaugga

SEQ ID NO: 2746791 - RNA, 16 nt, Human
ggacauuugcucaugg

SEQ ID NO: 2746792 - RNA, 14 nt, Human
ggcccaccaggguc

SEQ ID NO: 2746793 - RNA, 15 nt, Human
ggcccaccagggucc

SEQ ID NO: 2746794 - RNA, 20 nt, Human
ggcagugcuuggcccaggag

SEQ ID NO: 2746795 - RNA, 21 nt, Human
ggcagugcuuggcccaggagu

SEQ ID NO: 2746796 - RNA, 22 nt, Human
ggcagugcuuggcccaggaguu

SEQ ID NO: 2746797 - RNA, 23 nt, Human
ggcagugcuuggcccaggaguuu

SEQ ID NO: 2746798 - RNA, 17 nt, Human
ggcagugcuuggcccag

SEQ ID NO: 2746799 - RNA, 18 nt, Human
ggcagugcuuggcccagg

SEQ ID NO: 2746800 - RNA, 19 nt, Human
ggcagugcuuggcccagga

SEQ ID NO: 2746801 - RNA, 17 nt, Human
ggcagggucaggagagg

SEQ ID NO: 2746802 - RNA, 15 nt, Human
ggcagggucaggaga

SEQ ID NO: 2746803 - RNA, 16 nt, Human
ggcagcugccuccccu

SEQ ID NO: 2746804 - RNA, 19 nt, Human
ggcagaguuacaguucugu

SEQ ID NO: 2746805 - RNA, 13 nt, Human
ggcagaguuacag

SEQ ID NO: 2746806 - RNA, 18 nt, Human
ggcagaguuacaguucug

SEQ ID NO: 2746807 - RNA, 13 nt, Human
ggcagcugccucc

SEQ ID NO: 2746808 - RNA, 12 nt, Human
ggcagcugccuc

SEQ ID NO: 2746809 - RNA, 11 nt, Human
ggcagcugccu

SEQ ID NO: 2746810 - RNA, 17 nt, Human
ggauuagggagagaaga

SEQ ID NO: 2746811 - RNA, 21 nt, Human
ggcagagguugcagugagccg

SEQ ID NO: 2746812 - RNA, 19 nt, Human
ggauugaaggaugcugucu

SEQ ID NO: 2746813 - RNA, 20 nt, Human
ggcuuagacccucaugcugc

SEQ ID NO: 2746814 - RNA, 22 nt, Human
ggcuuagacccucaugcugcca

SEQ ID NO: 2746815 - RNA, 23 nt, Human
ggcuuagacccucaugcugccaa

SEQ ID NO: 2746816 - RNA, 20 nt, Human
gggaggacgcucucuggccu

SEQ ID NO: 2746817 - RNA, 17 nt, Human
gggaggacgcucucugg

SEQ ID NO: 2746818 - RNA, 21 nt, Human
gggacugaggggaggggagca

SEQ ID NO: 2746819 - RNA, 18 nt, Human
ggccuccucuguccaggg

SEQ ID NO: 2746820 - RNA, 19 nt, Human
ggccuccucuguccagggc

SEQ ID NO: 2746821 - RNA, 23 nt, Human
ggcuauaggugcuacaaaaacac

SEQ ID NO: 2746822 - RNA, 20 nt, Human
ggcuaguaucaaaagaaaga

SEQ ID NO: 2746823 - RNA, 16 nt, Human
ggcuccacuuggucug

SEQ ID NO: 2746824 - RNA, 18 nt, Human
gccuuccccuugcccagg

SEQ ID NO: 2746825 - RNA, 16 nt, Human
gccuuccccuugccca

SEQ ID NO: 2746826 - RNA, 18 nt, Human
gccuuggggcugaugcag

SEQ ID NO: 2746827 - RNA, 20 nt, Human
gccugagcgacagugagacu

SEQ ID NO: 2746828 - RNA, 17 nt, Human
gccugagcgacagugag

SEQ ID NO: 2746829 - RNA, 14 nt, Human
gcuagauguaugua

SEQ ID NO: 2746830 - RNA, 13 nt, Human
gcuagauguaugu

SEQ ID NO: 2746831 - RNA, 21 nt, Human
gcuauaggugcuacaaaaaca

SEQ ID NO: 2746832 - RNA, 19 nt, Human
gcuauaggugcuacaaaaa

SEQ ID NO: 2746833 - RNA, 21 nt, Human
gcuccugucugccagccagca

SEQ ID NO: 2746834 - RNA, 20 nt, Human
gcuccugucugccagccagc

SEQ ID NO: 2746835 - RNA, 19 nt, Human
gcuccugucugccagccag

SEQ ID NO: 2746836 - RNA, 18 nt, Human
gcuccugucugccagcca

SEQ ID NO: 2746837 - RNA, 17 nt, Human
gcuccugucugccagcc

SEQ ID NO: 2746838 - RNA, 16 nt, Human
gcuccugucugccagc

SEQ ID NO: 2746839 - RNA, 14 nt, Human
gcuccugucugcca

SEQ ID NO: 2746840 - RNA, 20 nt, Human
gcuccauuuuuagugaaaua

SEQ ID NO: 2746841 - RNA, 21 nt, Human
gcuggaaaaguauguuagugc

SEQ ID NO: 2746842 - RNA, 23 nt, Human
gcuggaaaaguauguuagugcaa

SEQ ID NO: 2746843 - RNA, 23 nt, Human
gcugcccucuccugggcagcugc

SEQ ID NO: 2746844 - RNA, 22 nt, Human
gcugcccucuccugggcagcug

SEQ ID NO: 2746845 - RNA, 20 nt, Human
gcugcccucuccugggcagc

SEQ ID NO: 2746846 - RNA, 18 nt, Human
gcugcccucuccugggca

SEQ ID NO: 2746847 - RNA, 17 nt, Human
gcugcccucuccugggc

SEQ ID NO: 2746848 - RNA, 16 nt, Human
gcugcccucuccuggg

SEQ ID NO: 2746849 - RNA, 15 nt, Human
gcugcccucuccugg

SEQ ID NO: 2746850 - RNA, 14 nt, Human
gcugcccucuccug

SEQ ID NO: 2746851 - RNA, 13 nt, Human
gcugcccucuccu

SEQ ID NO: 2746852 - RNA, 20 nt, Human
gcugacuaaacuuuuuuucu

SEQ ID NO: 2746853 - RNA, 21 nt, Human
gcugauuaaaccaaggcuaga

SEQ ID NO: 2746854 - RNA, 12 nt, Human
gcugcccucucc

SEQ ID NO: 2746855 - RNA, 23 nt, Human
gcuggucccagccagcaguucag

SEQ ID NO: 2746856 - RNA, 17 nt, Human
gcuuagaccucagccug

SEQ ID NO: 2746857 - RNA, 16 nt, Human
gcuuagaccucagccu

SEQ ID NO: 2746858 - RNA, 15 nt, Human
gcuuagaccucagcc

SEQ ID NO: 2746859 - RNA, 14 nt, Human
gcuuagaccucagc

SEQ ID NO: 2746860 - RNA, 13 nt, Human
gcuuagaccucag

SEQ ID NO: 2746861 - RNA, 16 nt, Human
gcuuagacccucaugc

SEQ ID NO: 2746862 - RNA, 21 nt, Human
gcuuagacccucaugcugcca

SEQ ID NO: 2746863 - RNA, 19 nt, Human
gcuucuguuuuauaauuuu

SEQ ID NO: 2746864 - RNA, 18 nt, Human
gcuugcccuguuaaaaga

SEQ ID NO: 2746865 - RNA, 16 nt, Human
gcagggucaggagagg

SEQ ID NO: 2746866 - RNA, 15 nt, Human
gcagggucaggagag

SEQ ID NO: 2746867 - RNA, 14 nt, Human
gcagggucaggaga

SEQ ID NO: 2746868 - RNA, 17 nt, Human
gcagggucaggagaggg

SEQ ID NO: 2746869 - RNA, 23 nt, Human
gcaguucagagcugcccucuccu

SEQ ID NO: 2746870 - RNA, 22 nt, Human
gcaguucagagcugcccucucc

SEQ ID NO: 2746871 - RNA, 20 nt, Human
gcaguucagagcugcccucu

SEQ ID NO: 2746872 - RNA, 19 nt, Human
gcaguucagagcugcccuc

SEQ ID NO: 2746873 - RNA, 21 nt, Human
gcaguugaaaagacuccaaag

SEQ ID NO: 2746874 - RNA, 16 nt, Human
gcaguugaaaagacuc

SEQ ID NO: 2746875 - RNA, 19 nt, Human
gcaguugaaaagacuccaa

SEQ ID NO: 2746876 - RNA, 15 nt, Human
gcaguugaaaagacu

SEQ ID NO: 2746877 - RNA, 20 nt, Human
gcaucuagcaugucgucaaa

SEQ ID NO: 2746878 - RNA, 22 nt, Human
gcaucauuauuugcagagacag

SEQ ID NO: 2746879 - RNA, 22 nt, Human
gcaucagcugcugaaacaacaa

SEQ ID NO: 2746880 - RNA, 23 nt, Human
gcaucagcugcugaaacaacaaa

SEQ ID NO: 2746881 - RNA, 20 nt, Human
gcacuaaagcaguggacacc

SEQ ID NO: 2746882 - RNA, 14 nt, Human
gcacuaaagcagug

SEQ ID NO: 2746883 - RNA, 15 nt, Human
gcacgcacacugucu

SEQ ID NO: 2746884 - RNA, 16 nt, Human
gcacgcacacugucug

SEQ ID NO: 2746885 - RNA, 19 nt, Human
gcacuguggguagacacac

SEQ ID NO: 2746886 - RNA, 11 nt, Human
gcacagcccuu

SEQ ID NO: 2746887 - RNA, 18 nt, Human
gcacagccucuuagaugc

SEQ ID NO: 2746888 - RNA, 15 nt, Human
gcacagccucuuaga

SEQ ID NO: 2746889 - RNA, 23 nt, Human
gcagagguugcagugagccgaga

SEQ ID NO: 2746890 - RNA, 18 nt, Human
gcagagguugcagugagc

SEQ ID NO: 2746891 - RNA, 16 nt, Human
gcaggaagcugugaga

SEQ ID NO: 2746892 - RNA, 13 nt, Human
gccaauauccuaa

SEQ ID NO: 2746893 - RNA, 14 nt, Human
gccaauauccuaau

SEQ ID NO: 2746894 - RNA, 15 nt, Human
gccaauauccuaaua

SEQ ID NO: 2746895 - RNA, 16 nt, Human
gccaauauccuaauaa

SEQ ID NO: 2746896 - RNA, 17 nt, Human
gccaauauccuaauaaa

SEQ ID NO: 2746897 - RNA, 23 nt, Human
gccaauauccuaauaaaaaggug

SEQ ID NO: 2746898 - RNA, 18 nt, Human
gccaauauccuaauaaaa

SEQ ID NO: 2746899 - RNA, 19 nt, Human
gccaauauccuaauaaaaa

SEQ ID NO: 2746900 - RNA, 20 nt, Human
gccaauauccuaauaaaaag

SEQ ID NO: 2746901 - RNA, 22 nt, Human
gccaauauccuaauaaaaaggu

SEQ ID NO: 2746902 - RNA, 19 nt, Human
gccagacuggcacaguuuu

SEQ ID NO: 2746903 - RNA, 15 nt, Human
gccagacuggcacag

SEQ ID NO: 2746904 - RNA, 18 nt, Human
gccagacuggcacaguuu

SEQ ID NO: 2746905 - RNA, 23 nt, Human
gccaugggacagggaggacgcuc

SEQ ID NO: 2746906 - RNA, 22 nt, Human
gccaugggacagggaggacgcu

SEQ ID NO: 2746907 - RNA, 19 nt, Human
gcccaaguucaugcagcug

SEQ ID NO: 2746908 - RNA, 20 nt, Human
gcccaaguucaugcagcugu

SEQ ID NO: 2746909 - RNA, 13 nt, Human
gauagcagggcau

SEQ ID NO: 2746910 - RNA, 19 nt, Human
gagugucuuaauuaaaaga

SEQ ID NO: 2746911 - RNA, 23 nt, Human
gagugaacaaauuuacagagaca

SEQ ID NO: 2746912 - RNA, 22 nt, Human
gagugaacaaauuuacagagac

SEQ ID NO: 2746913 - RNA, 19 nt, Human
gagugaacaaauuuacaga

SEQ ID NO: 2746914 - RNA, 17 nt, Human
gaguuacaguucugugg

SEQ ID NO: 2746915 - RNA, 21 nt, Human
gaguugaaaaucuuauaauuu

SEQ ID NO: 2746916 - RNA, 13 nt, Human
gauugugccccug

SEQ ID NO: 2746917 - RNA, 19 nt, Human
gauguugaaaaaguucugc

SEQ ID NO: 2746918 - RNA, 18 nt, Human
gaugcaguucugaagaag

SEQ ID NO: 2746919 - RNA, 16 nt, Human
gaugggaaagcauugu

SEQ ID NO: 2746920 - RNA, 13 nt, Human
gaucuuuaaaaua

SEQ ID NO: 2746921 - RNA, 14 nt, Human
gaucuuuaaaauac

SEQ ID NO: 2746922 - RNA, 16 nt, Human
gaggagccaccaguuc

SEQ ID NO: 2746923 - RNA, 18 nt, Human
gaggagccaccaguucuc

SEQ ID NO: 2746924 - RNA, 19 nt, Human
gaggcagagguugcaguga

SEQ ID NO: 2746925 - RNA, 16 nt, Human
gaggcagacagcagcu

SEQ ID NO: 2746926 - RNA, 15 nt, Human
gaggcagacagcagc

SEQ ID NO: 2746927 - RNA, 12 nt, Human
gaggcagacagc

SEQ ID NO: 2746928 - RNA, 21 nt, Human
gaggcaauuagacacuuugga

SEQ ID NO: 2746929 - RNA, 13 nt, Human
gagcacacuguag

SEQ ID NO: 2746930 - RNA, 15 nt, Human
gagcacacuguagca

SEQ ID NO: 2746931 - RNA, 21 nt, Human
gagcaggcuacugucagcucc

SEQ ID NO: 2746932 - RNA, 14 nt, Human
gagccaccaguucu

SEQ ID NO: 2746933 - RNA, 12 nt, Human
gagcuacaaaug

SEQ ID NO: 2746934 - RNA, 13 nt, Human
gagcuacaaaugc

SEQ ID NO: 2746935 - RNA, 14 nt, Human
gagcuacaaaugca

SEQ ID NO: 2746936 - RNA, 16 nt, Human
gagcugcccucuccug

SEQ ID NO: 2746937 - RNA, 15 nt, Human
gagcugcccucuccu

SEQ ID NO: 2746938 - RNA, 14 nt, Human
gagcugcccucucc

SEQ ID NO: 2746939 - RNA, 19 nt, Human
cucuuaagaagacugcauu

SEQ ID NO: 2746940 - RNA, 13 nt, Human
cucuuaagaagac

SEQ ID NO: 2746941 - RNA, 21 nt, Human
cucuggccuucggccuccauc

SEQ ID NO: 2746942 - RNA, 22 nt, Human
cucuggccuucggccuccaucc

SEQ ID NO: 2746943 - RNA, 16 nt, Human
cugagcaggauuuuaa

SEQ ID NO: 2746944 - RNA, 16 nt, Human
cugagaugugaacaca

SEQ ID NO: 2746945 - RNA, 20 nt, Human
cugagaugugaacacaucag

SEQ ID NO: 2746946 - RNA, 19 nt, Human
cugagaaagacuauucaaa

SEQ ID NO: 2746947 - RNA, 20 nt, Human
cugagaaagacuauucaaac

SEQ ID NO: 2746948 - RNA, 21 nt, Human
cugagaugugaacacaucagc

SEQ ID NO: 2746949 - RNA, 12 nt, Human
cugagaaagacu

SEQ ID NO: 2746950 - RNA, 13 nt, Human
cugagaaagacua

SEQ ID NO: 2746951 - RNA, 15 nt, Human
cugagaaagacuauu

SEQ ID NO: 2746952 - RNA, 18 nt, Human
cugagaaagacuauucaa

SEQ ID NO: 2746953 - RNA, 14 nt, Human
cugacuaaacuuuu

SEQ ID NO: 2746954 - RNA, 15 nt, Human
cugacuaaacuuuuu

SEQ ID NO: 2746955 - RNA, 19 nt, Human
cugacuaaacuuuuuuucu

SEQ ID NO: 2746956 - RNA, 22 nt, Human
cugacuaaacuuuuuuucugua

SEQ ID NO: 2746957 - RNA, 23 nt, Human
cugacgacuugagugcucaguag

SEQ ID NO: 2746958 - RNA, 14 nt, Human
cugaagaagauggu

SEQ ID NO: 2746959 - RNA, 23 nt, Human
cugccuauuaucugucagcugca

SEQ ID NO: 2746960 - RNA, 17 nt, Human
cugccuauuaucuguca

SEQ ID NO: 2746961 - RNA, 20 nt, Human
cugcaucagcugcugaaaca

SEQ ID NO: 2746962 - RNA, 15 nt, Human
cugaggcuccacuug

SEQ ID NO: 2746963 - RNA, 21 nt, Human
cugaggcuccacuuggucugu

SEQ ID NO: 2746964 - RNA, 22 nt, Human
cugcaauaaaauggguuuuacu

SEQ ID NO: 2746965 - RNA, 15 nt, Human
cugcaauaaaauggg

SEQ ID NO: 2746966 - RNA, 16 nt, Human
cuaguaauuggaaagg

SEQ ID NO: 2746967 - RNA, 20 nt, Human
cuagugaaacucguuaauuu

SEQ ID NO: 2746968 - RNA, 18 nt, Human
cuagugaaagaggcagcu

SEQ ID NO: 2746969 - RNA, 19 nt, Human
cuagugaaagaggcagcuu

SEQ ID NO: 2746970 - RNA, 21 nt, Human
cuagugagcagucaggaaaga

SEQ ID NO: 2746971 - RNA, 23 nt, Human
cuauucaaacagucucaggaaau

SEQ ID NO: 2746972 - RNA, 18 nt, Human
cuauucaaacagucucag

SEQ ID NO: 2746973 - RNA, 16 nt, Human
cuauucaaacagucuc

SEQ ID NO: 2746974 - RNA, 22 nt, Human
cuauaauuuaccuaagauuaca

SEQ ID NO: 2746975 - RNA, 21 nt, Human
cuauaggugcuacaaaaacac

SEQ ID NO: 2746976 - RNA, 22 nt, Human
cuauaggugcuacaaaaacaca

SEQ ID NO: 2746977 - RNA, 20 nt, Human
cuauaggugcuacaaaaaca

SEQ ID NO: 2746978 - RNA, 18 nt, Human
cuauauuguuugcuaagc

SEQ ID NO: 2746979 - RNA, 15 nt, Human
cuauaggugcuacaa

SEQ ID NO: 2746980 - RNA, 17 nt, Human
cucauccgaggcagggu

SEQ ID NO: 2746981 - RNA, 15 nt, Human
cucauccgaggcagg

SEQ ID NO: 2746982 - RNA, 14 nt, Human
cucauccgaggcag

SEQ ID NO: 2746983 - RNA, 21 nt, Human
cucauuuccaagcaaguauua

SEQ ID NO: 2746984 - RNA, 14 nt, Human
cucauuucuagcag

SEQ ID NO: 2746985 - RNA, 13 nt, Human
cuccaaagaaaug

SEQ ID NO: 2746986 - RNA, 12 nt, Human
cuccaaagaaau

SEQ ID NO: 2746987 - RNA, 21 nt, Human
cuccaaacugacucuuaagaa

SEQ ID NO: 2746988 - RNA, 23 nt, Human
cuccaccucccugcaauaaaaug

SEQ ID NO: 2746989 - RNA, 17 nt, Human
cuccaccuugcagcucu

SEQ ID NO: 2746990 - RNA, 11 nt, Human
cuccauccuga

SEQ ID NO: 2746991 - RNA, 12 nt, Human
cuccauccugag

SEQ ID NO: 2746992 - RNA, 13 nt, Human
cuccccuccucug

SEQ ID NO: 2746993 - RNA, 11 nt, Human
cuccccuccuc

SEQ ID NO: 2746994 - RNA, 13 nt, Human
cuccauccugagg

SEQ ID NO: 2746995 - RNA, 20 nt, Human
cuccccuccucugcuugcca

SEQ ID NO: 2746996 - RNA, 21 nt, Human
cuugccaucccucccuccacc

SEQ ID NO: 2746997 - RNA, 16 nt, Human
cuugccagacaugugg

SEQ ID NO: 2746998 - RNA, 22 nt, Human
cuugccaucccucccuccaccu

SEQ ID NO: 2746999 - RNA, 19 nt, Human
cuuguaaaggaauuuaaaa

SEQ ID NO: 2747000 - RNA, 13 nt, Human
cuuuccacagaag

SEQ ID NO: 2747001 - RNA, 21 nt, Human
cuuuauuuucuauaauuuaaa

SEQ ID NO: 2747002 - RNA, 18 nt, Human
cuuuauaacuaacauguc

SEQ ID NO: 2747003 - RNA, 18 nt, Human
cuuuaaagggauggcaag

SEQ ID NO: 2747004 - RNA, 17 nt, Human
cuuuucuccucacugua

SEQ ID NO: 2747005 - RNA, 18 nt, Human
cuuuugacacugcucuaa

SEQ ID NO: 2747006 - RNA, 12 nt, Human
cuuuugacacug

SEQ ID NO: 2747007 - RNA, 17 nt, Human
cuuuugacacugcucua

SEQ ID NO: 2747008 - RNA, 22 nt, Human
gaaaacaauaacgauaaaagac

SEQ ID NO: 2747009 - RNA, 12 nt, Human
gaaaauaucacu

SEQ ID NO: 2747010 - RNA, 19 nt, Human
gaaaaucuuauaauuuaaa

SEQ ID NO: 2747011 - RNA, 19 nt, Human
gaaaauaacgauaaaagac

SEQ ID NO: 2747012 - RNA, 20 nt, Human
gaaaaucuuauaauuuaaaa

SEQ ID NO: 2747013 - RNA, 19 nt, Human
gaauaaaggcaguuuucua

SEQ ID NO: 2747014 - RNA, 20 nt, Human
gaauaaaggcaguuuucuaa

SEQ ID NO: 2747015 - RNA, 15 nt, Human
gaauaaaggcaguuu

SEQ ID NO: 2747016 - RNA, 16 nt, Human
gaauaaaggcaguuuu

SEQ ID NO: 2747017 - RNA, 17 nt, Human
gaauaaaggcaguuuuc

SEQ ID NO: 2747018 - RNA, 20 nt, Human
gaauaauccuaaacauauga

SEQ ID NO: 2747019 - RNA, 14 nt, Human
gaauacuuuauaaa

SEQ ID NO: 2747020 - RNA, 21 nt, Human
gaagccuuggggcugaugcag

SEQ ID NO: 2747021 - RNA, 18 nt, Human
gaaauaaaguuggugaca

SEQ ID NO: 2747022 - RNA, 19 nt, Human
gaaauaaagucagauggaa

SEQ ID NO: 2747023 - RNA, 14 nt, Human
gaaauaaagucaga

SEQ ID NO: 2747024 - RNA, 18 nt, Human
gaaacaguugguaacuuu

SEQ ID NO: 2747025 - RNA, 19 nt, Human
gaaacaguugguaacuuuu

SEQ ID NO: 2747026 - RNA, 20 nt, Human
gaaacaguugguaacuuuug

SEQ ID NO: 2747027 - RNA, 21 nt, Human
gaaacaguugguaacuuuugu

SEQ ID NO: 2747028 - RNA, 23 nt, Human
gaaacaguugguaacuuuuguga

SEQ ID NO: 2747029 - RNA, 17 nt, Human
gaacacugggggagggg

SEQ ID NO: 2747030 - RNA, 16 nt, Human
gaacacugggggaggg

SEQ ID NO: 2747031 - RNA, 18 nt, Human
gaaauuguauuacaaauc

SEQ ID NO: 2747032 - RNA, 16 nt, Human
gaaauauuauguuaaa

SEQ ID NO: 2747033 - RNA, 13 nt, Human
gaaauauuauguu

SEQ ID NO: 2747034 - RNA, 21 nt, Human
gaagaagcaccaaucaugaau

SEQ ID NO: 2747035 - RNA, 21 nt, Human
gaacuuguaaaggaauuuaaa

SEQ ID NO: 2747036 - RNA, 22 nt, Human
gaacuuccagauccuggaaauc

SEQ ID NO: 2747037 - RNA, 14 nt, Human
gaacucccuuucaa

SEQ ID NO: 2747038 - RNA, 20 nt, Human
gaacacugggggaggggaca

SEQ ID NO: 2747039 - RNA, 18 nt, Human
gaacacugggggagggga

SEQ ID NO: 2747040 - RNA, 22 nt, Human
gaacuagaguuuagcuggaaaa

SEQ ID NO: 2747041 - RNA, 21 nt, Human
gaacuagaguuuagcuggaaa

SEQ ID NO: 2747042 - RNA, 23 nt, Human
cugggguggguggggcagugcuu

SEQ ID NO: 2747043 - RNA, 14 nt, Human
cugucugccagcca

SEQ ID NO: 2747044 - RNA, 21 nt, Human
cugucugccagccagcagcca

SEQ ID NO: 2747045 - RNA, 20 nt, Human
cugucugccagccagcagcc

SEQ ID NO: 2747046 - RNA, 17 nt, Human
cugucugccagccagca

SEQ ID NO: 2747047 - RNA, 16 nt, Human
cugucugccagccagc

SEQ ID NO: 2747048 - RNA, 15 nt, Human
cugucugccagccag

SEQ ID NO: 2747049 - RNA, 18 nt, Human
cugucuucacaacagauu

SEQ ID NO: 2747050 - RNA, 15 nt, Human
cugugguuucauguu

SEQ ID NO: 2747051 - RNA, 16 nt, Human
cugugguuucauguua

SEQ ID NO: 2747052 - RNA, 17 nt, Human
cugugguuucauguuag

SEQ ID NO: 2747053 - RNA, 18 nt, Human
cugugguuucauguuagu

SEQ ID NO: 2747054 - RNA, 19 nt, Human
cuguuaaaagaugaaaaua

SEQ ID NO: 2747055 - RNA, 15 nt, Human
cuguuaaaagaugaa

SEQ ID NO: 2747056 - RNA, 16 nt, Human
cuguuaaaagaugaaa

SEQ ID NO: 2747057 - RNA, 18 nt, Human
cuuagaccucagccugug

SEQ ID NO: 2747058 - RNA, 17 nt, Human
cuuagaccucagccugu

SEQ ID NO: 2747059 - RNA, 20 nt, Human
cuuagaccucagccugugcu

SEQ ID NO: 2747060 - RNA, 16 nt, Human
cuuagaccucagccug

SEQ ID NO: 2747061 - RNA, 15 nt, Human
cuuagaccucagccu

SEQ ID NO: 2747062 - RNA, 14 nt, Human
cuuagaccucagcc

SEQ ID NO: 2747063 - RNA, 13 nt, Human
cuuagaccucagc

SEQ ID NO: 2747064 - RNA, 12 nt, Human
cuuagaccucag

SEQ ID NO: 2747065 - RNA, 23 nt, Human
cuuagacccucaugcugccaaua

SEQ ID NO: 2747066 - RNA, 19 nt, Human
cuuagacccucaugcugcc

SEQ ID NO: 2747067 - RNA, 20 nt, Human
cuuagacccucaugcugcca

SEQ ID NO: 2747068 - RNA, 21 nt, Human
cuuagacccucaugcugccaa

SEQ ID NO: 2747069 - RNA, 22 nt, Human
cuuagacccucaugcugccaau

SEQ ID NO: 2747070 - RNA, 23 nt, Human
cuuaagaagacugcauuauauuu

SEQ ID NO: 2747071 - RNA, 21 nt, Human
cuuaagaagacugcauuauau

SEQ ID NO: 2747072 - RNA, 19 nt, Human
cuuaauuaaaagaauauuu

SEQ ID NO: 2747073 - RNA, 20 nt, Human
cuuaauuaaaagaauauuuu

SEQ ID NO: 2747074 - RNA, 16 nt, Human
cuuaauuaaaagaaua

SEQ ID NO: 2747075 - RNA, 17 nt, Human
cuuaauuaaaagaauau

SEQ ID NO: 2747076 - RNA, 14 nt, Human
cuguuuuauaauuu

SEQ ID NO: 2747077 - RNA, 15 nt, Human
cuguuuuauaauuuu

SEQ ID NO: 2747078 - RNA, 12 nt, Human
cuucacaacaga

SEQ ID NO: 2747079 - RNA, 14 nt, Human
cuucacaacagauu

SEQ ID NO: 2747080 - RNA, 17 nt, Human
cuucacacacaggcaac

SEQ ID NO: 2747081 - RNA, 16 nt, Human
cuucacacacaggcaa

SEQ ID NO: 2747082 - RNA, 17 nt, Human
cuucaaauccuugaaga

SEQ ID NO: 2747083 - RNA, 15 nt, Human
cuucagccugaaaga

SEQ ID NO: 2747084 - RNA, 20 nt, Human
cuuccuuggacucauuuuaa

SEQ ID NO: 2747085 - RNA, 20 nt, Human
cuucggccuccauccugagg

SEQ ID NO: 2747086 - RNA, 19 nt, Human
cuucggccuccauccugag

SEQ ID NO: 2747087 - RNA, 17 nt, Human
ccucccuccaccucccu

SEQ ID NO: 2747088 - RNA, 20 nt, Human
ccucccuccaccucccugca

SEQ ID NO: 2747089 - RNA, 18 nt, Human
ccuccucugcuugccauc

SEQ ID NO: 2747090 - RNA, 13 nt, Human
ccuccucugcuug

SEQ ID NO: 2747091 - RNA, 16 nt, Human
ccuccucugcuugcca

SEQ ID NO: 2747092 - RNA, 12 nt, Human
ccuccucugucc

SEQ ID NO: 2747093 - RNA, 16 nt, Human
ccuccucuguccaggg

SEQ ID NO: 2747094 - RNA, 15 nt, Human
ccuccucuguccagg

SEQ ID NO: 2747095 - RNA, 18 nt, Human
ccuccucuguccagggcc

SEQ ID NO: 2747096 - RNA, 20 nt, Human
ccucauccgaggcaggguca

SEQ ID NO: 2747097 - RNA, 17 nt, Human
ccucauccgaggcaggg

SEQ ID NO: 2747098 - RNA, 15 nt, Human
ccucauccgaggcag

SEQ ID NO: 2747099 - RNA, 14 nt, Human
ccucauccgaggca

SEQ ID NO: 2747100 - RNA, 14 nt, Human
ccuccauccugagg

SEQ ID NO: 2747101 - RNA, 22 nt, Human
ccuccaccucccugcaauaaaa

SEQ ID NO: 2747102 - RNA, 17 nt, Human
ccuccaccucccugcaa

SEQ ID NO: 2747103 - RNA, 15 nt, Human
ccuccaccucccugc

SEQ ID NO: 2747104 - RNA, 14 nt, Human
ccuccaccucccug

SEQ ID NO: 2747105 - RNA, 13 nt, Human
ccuccaccucccu

SEQ ID NO: 2747106 - RNA, 13 nt, Human
ccuacaccauucc

SEQ ID NO: 2747107 - RNA, 20 nt, Human
ccgaggcagggucaggagag

SEQ ID NO: 2747108 - RNA, 14 nt, Human
ccgaggcaggguca

SEQ ID NO: 2747109 - RNA, 16 nt, Human
ccgggcguggugguga

SEQ ID NO: 2747110 - RNA, 13 nt, Human
cccaccagggucc

SEQ ID NO: 2747111 - RNA, 18 nt, Human
cccaccugacacaccagg

SEQ ID NO: 2747112 - RNA, 13 nt, Human
cccacaagaaaug

SEQ ID NO: 2747113 - RNA, 20 nt, Human
cccacaagaaaugaaagcag

SEQ ID NO: 2747114 - RNA, 23 nt, Human
cccugguaauaaguacuguguac

SEQ ID NO: 2747115 - RNA, 12 nt, Human
cccuccaccucc

SEQ ID NO: 2747116 - RNA, 14 nt, Human
cccuccaccucccu

SEQ ID NO: 2747117 - RNA, 17 nt, Human
cccuccaccucccugca

SEQ ID NO: 2747118 - RNA, 15 nt, Human
cccuccaccucccug

SEQ ID NO: 2747119 - RNA, 19 nt, Human
cccuccaccucccugcaau

SEQ ID NO: 2747120 - RNA, 15 nt, Human
cccucuccugggcag

SEQ ID NO: 2747121 - RNA, 14 nt, Human
cccucuccugggca

SEQ ID NO: 2747122 - RNA, 13 nt, Human
cccucuccugggc

SEQ ID NO: 2747123 - RNA, 12 nt, Human
cccucuccuggg

SEQ ID NO: 2747124 - RNA, 11 nt, Human
cccucuccugg

SEQ ID NO: 2747125 - RNA, 18 nt, Human
cccuacaccccuccccug

SEQ ID NO: 2747126 - RNA, 15 nt, Human
cccgugggguuccuc

SEQ ID NO: 2747127 - RNA, 17 nt, Human
cccgucuggcccaccag

SEQ ID NO: 2747128 - RNA, 22 nt, Human
ccugggcagcugccuccccucc

SEQ ID NO: 2747129 - RNA, 19 nt, Human
ccugccuauuaucugucag

SEQ ID NO: 2747130 - RNA, 23 nt, Human
ccuggaaaucaggguuaguauug

SEQ ID NO: 2747131 - RNA, 14 nt, Human
ccugacacaccagg

SEQ ID NO: 2747132 - RNA, 15 nt, Human
ccugacacaccaggc

SEQ ID NO: 2747133 - RNA, 17 nt, Human
ccugacacaccaggcgc

SEQ ID NO: 2747134 - RNA, 18 nt, Human
ccugacacaccaggcgcu

SEQ ID NO: 2747135 - RNA, 11 nt, Human
ccugagcccca

SEQ ID NO: 2747136 - RNA, 16 nt, Human
ccugcaauaaaauggg

SEQ ID NO: 2747137 - RNA, 18 nt, Human
cgagcaggcuacugucag

SEQ ID NO: 2747138 - RNA, 20 nt, Human
ccuguuaaaagaugaaaaua

SEQ ID NO: 2747139 - RNA, 21 nt, Human
ccuguuaaaagaugaaaauau

SEQ ID NO: 2747140 - RNA, 20 nt, Human
ccuucggccuccauccugag

SEQ ID NO: 2747141 - RNA, 19 nt, Human
ccuucggccuccauccuga

SEQ ID NO: 2747142 - RNA, 14 nt, Human
ccuucggccuccau

SEQ ID NO: 2747143 - RNA, 20 nt, Human
ccuugaacacugggggaggg

SEQ ID NO: 2747144 - RNA, 20 nt, Human
ccuugaaaacuuuaugcuaa

SEQ ID NO: 2747145 - RNA, 13 nt, Human
ccuugaacacugg

SEQ ID NO: 2747146 - RNA, 14 nt, Human
ccuugaugaagaag

SEQ ID NO: 2747147 - RNA, 19 nt, Human
ccuuggggcugaugcaguu

SEQ ID NO: 2747148 - RNA, 16 nt, Human
ccaggcgcuaauucaa

SEQ ID NO: 2747149 - RNA, 19 nt, Human
ccaguguuuuaggagcaug

SEQ ID NO: 2747150 - RNA, 14 nt, Human
ccaguuauggcuau

SEQ ID NO: 2747151 - RNA, 16 nt, Human
ccaguuaauuuuucca

SEQ ID NO: 2747152 - RNA, 18 nt, Human
ccaguuaauuuuuccaac

SEQ ID NO: 2747153 - RNA, 21 nt, Human
ccaguuauggcuauaggugcu

SEQ ID NO: 2747154 - RNA, 19 nt, Human
ccaugggacagggaggacg

SEQ ID NO: 2747155 - RNA, 16 nt, Human
ccaugggacagggagg

SEQ ID NO: 2747156 - RNA, 16 nt, Human
ccagaggagccaccag

SEQ ID NO: 2747157 - RNA, 17 nt, Human
ccagaggagccaccagu

SEQ ID NO: 2747158 - RNA, 19 nt, Human
ccagaggagccaccaguuc

SEQ ID NO: 2747159 - RNA, 21 nt, Human
ccagaggagccaccaguucuc

SEQ ID NO: 2747160 - RNA, 18 nt, Human
ccagcacuaaagcagugg

SEQ ID NO: 2747161 - RNA, 17 nt, Human
ccagcacuaaagcagug

SEQ ID NO: 2747162 - RNA, 22 nt, Human
ccagccagcaguucagagcugc

SEQ ID NO: 2747163 - RNA, 23 nt, Human
ccagccagcagccagcucucagc

SEQ ID NO: 2747164 - RNA, 19 nt, Human
ccagccagcagccagcucu

SEQ ID NO: 2747165 - RNA, 16 nt, Human
ccagccagcagccagc

SEQ ID NO: 2747166 - RNA, 15 nt, Human
ccagccagcagccag

SEQ ID NO: 2747167 - RNA, 13 nt, Human
ccagccagcagcc

SEQ ID NO: 2747168 - RNA, 23 nt, Human
ccagcaguucagagcugcccucu

SEQ ID NO: 2747169 - RNA, 22 nt, Human
ccagcaguucagagcugcccuc

SEQ ID NO: 2747170 - RNA, 21 nt, Human
ccagcaguucagagcugcccu

SEQ ID NO: 2747171 - RNA, 20 nt, Human
ccagcaguucagagcugccc

SEQ ID NO: 2747172 - RNA, 19 nt, Human
ccagcaguucagagcugcc

SEQ ID NO: 2747173 - RNA, 18 nt, Human
ccagcaguucagagcugc

SEQ ID NO: 2747174 - RNA, 13 nt, Human
ccagcaguucaga

SEQ ID NO: 2747175 - RNA, 24 nt, Human
ccagcacuaaagcaguggacacca

SEQ ID NO: 2747176 - RNA, 14 nt, Human
ccaccucccugcaa

SEQ ID NO: 2747177 - RNA, 20 nt, Human
ccaccugacacaccaggcgc

SEQ ID NO: 2747178 - RNA, 23 nt, Human
ccaccugacacaccaggcgcuaa

SEQ ID NO: 2747179 - RNA, 16 nt, Human
ccaccugacacaccag

SEQ ID NO: 2747180 - RNA, 17 nt, Human
ccaccugacacaccagg

SEQ ID NO: 2747181 - RNA, 19 nt, Human
caugagguacugagaguga

SEQ ID NO: 2747182 - RNA, 16 nt, Human
caugagguacugagag

SEQ ID NO: 2747183 - RNA, 18 nt, Human
caugaagauguagaggag

SEQ ID NO: 2747184 - RNA, 19 nt, Human
caugaagauguagaggaga

SEQ ID NO: 2747185 - RNA, 12 nt, Human
cagugcuuggcc

SEQ ID NO: 2747186 - RNA, 14 nt, Human
cagugcucuuuucu

SEQ ID NO: 2747187 - RNA, 23 nt, Human
cagugcucuuuucuccucacugu

SEQ ID NO: 2747188 - RNA, 15 nt, Human
cauauauaacaaugc

SEQ ID NO: 2747189 - RNA, 13 nt, Human
cauauauaacaau

SEQ ID NO: 2747190 - RNA, 23 nt, Human
caucccucccuccaccucccugc

SEQ ID NO: 2747191 - RNA, 22 nt, Human
caucccucccuccaccucccug

SEQ ID NO: 2747192 - RNA, 18 nt, Human
caucccuuaccugggaaa

SEQ ID NO: 2747193 - RNA, 22 nt, Human
cauccgaggcagggucaggaga

SEQ ID NO: 2747194 - RNA, 16 nt, Human
cauccgaggcaggguc

SEQ ID NO: 2747195 - RNA, 23 nt, Human
cauccgaggcagggucaggagag

SEQ ID NO: 2747196 - RNA, 15 nt, Human
cauccgaggcagggu

SEQ ID NO: 2747197 - RNA, 14 nt, Human
cauccgaggcaggg

SEQ ID NO: 2747198 - RNA, 13 nt, Human
cauccgaggcagg

SEQ ID NO: 2747199 - RNA, 21 nt, Human
caucauuauuugcagagacag

SEQ ID NO: 2747200 - RNA, 20 nt, Human
caucccucccuccaccuccc

SEQ ID NO: 2747201 - RNA, 23 nt, Human
caugggacagggaggacgcucuc

SEQ ID NO: 2747202 - RNA, 15 nt, Human
cauggagcugggcua

SEQ ID NO: 2747203 - RNA, 20 nt, Human
cauggaauuggagcucgugg

SEQ ID NO: 2747204 - RNA, 20 nt, Human
caugugcuaguaauuggaaa

SEQ ID NO: 2747205 - RNA, 21 nt, Human
cauuguaaaugugcuuuuaaa

SEQ ID NO: 2747206 - RNA, 13 nt, Human
cauucuggaauaa

SEQ ID NO: 2747207 - RNA, 21 nt, Human
cauuacagugggugccccccu

SEQ ID NO: 2747208 - RNA, 22 nt, Human
cauuccaacuaucucauuucca

SEQ ID NO: 2747209 - RNA, 15 nt, Human
cagguucccucccag

SEQ ID NO: 2747210 - RNA, 23 nt, Human
cagguucccucccagaggagcca

SEQ ID NO: 2747211 - RNA, 16 nt, Human
cagguucccucccaga

SEQ ID NO: 2747212 - RNA, 18 nt, Human
cagguucccucccagagg

SEQ ID NO: 2747213 - RNA, 17 nt, Human
caguaccccauggagcu

SEQ ID NO: 2747214 - RNA, 23 nt, Human
caguaccccauggagcugggcua

SEQ ID NO: 2747215 - RNA, 14 nt, Human
cagggucaggagag

SEQ ID NO: 2747216 - RNA, 22 nt, Human
caggguccuuuugacacugcuc

SEQ ID NO: 2747217 - RNA, 23 nt, Human
caggguccuuuugacacugcucu

SEQ ID NO: 2747218 - RNA, 14 nt, Human
caggguccuuuuga

SEQ ID NO: 2747219 - RNA, 19 nt, Human
caggguccuuuugacacug

SEQ ID NO: 2747220 - RNA, 21 nt, Human
caggguccuuuugacacugcu

SEQ ID NO: 2747221 - RNA, 13 nt, Human
caguccaugaaga

SEQ ID NO: 2747222 - RNA, 18 nt, Human
cagucaggaaagagaacu

SEQ ID NO: 2747223 - RNA, 15 nt, Human
cagucaggaaagaga

SEQ ID NO: 2747224 - RNA, 22 nt, Human
cagucaggaaagagaacuucca

SEQ ID NO: 2747225 - RNA, 12 nt, Human
caguagugauag

SEQ ID NO: 2747226 - RNA, 12 nt, Human
caguauggcagc

SEQ ID NO: 2747227 - RNA, 15 nt, Human
cagugagacagcucu

SEQ ID NO: 2747228 - RNA, 16 nt, Human
cagugaaagaaaauaa

SEQ ID NO: 2747229 - RNA, 20 nt, Human
cagugaaagaaaauaacaau

SEQ ID NO: 2747230 - RNA, 17 nt, Human
cagugauuaccagggac

SEQ ID NO: 2747231 - RNA, 18 nt, Human
cagugauuaccagggacu

SEQ ID NO: 2747232 - RNA, 17 nt, Human
caggagaggggcagaac

SEQ ID NO: 2747233 - RNA, 15 nt, Human
caggagaggggcaga

SEQ ID NO: 2747234 - RNA, 15 nt, Human
caggagucccuggua

SEQ ID NO: 2747235 - RNA, 14 nt, Human
caggagucccuggu

SEQ ID NO: 2747236 - RNA, 13 nt, Human
caggagucccugg

SEQ ID NO: 2747237 - RNA, 13 nt, Human
caggaguuuggcc

SEQ ID NO: 2747238 - RNA, 14 nt, Human
caggaguuuggcca

SEQ ID NO: 2747239 - RNA, 17 nt, Human
caggaguuuggccagaa

SEQ ID NO: 2747240 - RNA, 15 nt, Human
caggaguuuggccag

SEQ ID NO: 2747241 - RNA, 16 nt, Human
caggaguuuggccaga

SEQ ID NO: 2747242 - RNA, 23 nt, Human
caggaugguucccuugaugaaga

SEQ ID NO: 2747243 - RNA, 21 nt, Human
caggaugguucccuugaugaa

SEQ ID NO: 2747244 - RNA, 22 nt, Human
caggcaacugaggcagacagca

SEQ ID NO: 2747245 - RNA, 20 nt, Human
caggcaacugaggcagacag

SEQ ID NO: 2747246 - RNA, 16 nt, Human
caggauuuuaaucuuu

SEQ ID NO: 2747247 - RNA, 19 nt, Human
caggcaacugaggcagaca

SEQ ID NO: 2747248 - RNA, 18 nt, Human
caggcaacugaggcagac

SEQ ID NO: 2747249 - RNA, 17 nt, Human
caggcaacugaggcaga

SEQ ID NO: 2747250 - RNA, 16 nt, Human
caggcaacugaggcag

SEQ ID NO: 2747251 - RNA, 15 nt, Human
caggcaacugaggca

SEQ ID NO: 2747252 - RNA, 20 nt, Human
caggcccccaggugccaguu

SEQ ID NO: 2747253 - RNA, 14 nt, Human
caggcccccaggug

SEQ ID NO: 2747254 - RNA, 19 nt, Human
caggcccccaggugccagu

SEQ ID NO: 2747255 - RNA, 18 nt, Human
cagggacaggauaagagg

SEQ ID NO: 2747256 - RNA, 22 nt, Human
cagggacccacuucacacacag

SEQ ID NO: 2747257 - RNA, 17 nt, Human
cagggcauggcugggaa

SEQ ID NO: 2747258 - RNA, 15 nt, Human
cagggccccagcacu

SEQ ID NO: 2747259 - RNA, 14 nt, Human
cagggccccagcac

SEQ ID NO: 2747260 - RNA, 22 nt, Human
cagggccccagcacuaaagcag

SEQ ID NO: 2747261 - RNA, 16 nt, Human
cagggccccagcacua

SEQ ID NO: 2747262 - RNA, 21 nt, Human
cagggcccugagcucggugga

SEQ ID NO: 2747263 - RNA, 15 nt, Human
cagggcccugagcuc

SEQ ID NO: 2747264 - RNA, 16 nt, Human
caggggacaggauggu

SEQ ID NO: 2747265 - RNA, 11 nt, Human
caggggacagg

SEQ ID NO: 2747266 - RNA, 14 nt, Human
caggcuacugucag

SEQ ID NO: 2747267 - RNA, 19 nt, Human
caggcuagauguauguacu

SEQ ID NO: 2747268 - RNA, 13 nt, Human
caggcuagaugua

SEQ ID NO: 2747269 - RNA, 21 nt, Human
cagccaacgaguaauuuauug

SEQ ID NO: 2747270 - RNA, 13 nt, Human
cagcagcucaggc

SEQ ID NO: 2747271 - RNA, 12 nt, Human
cagcagcucagg

SEQ ID NO: 2747272 - RNA, 16 nt, Human
cagcagcucaggcaca

SEQ ID NO: 2747273 - RNA, 15 nt, Human
cagcagcucaggcac

SEQ ID NO: 2747274 - RNA, 14 nt, Human
cagcagcucaggca

SEQ ID NO: 2747275 - RNA, 19 nt, Human
cagcagccagcucucagcc

SEQ ID NO: 2747276 - RNA, 18 nt, Human
cagcagccagcucucagc

SEQ ID NO: 2747277 - RNA, 17 nt, Human
cagcagccagcucucag

SEQ ID NO: 2747278 - RNA, 15 nt, Human
cagcagccagcucuc

SEQ ID NO: 2747279 - RNA, 14 nt, Human
cagcagccagcucu

SEQ ID NO: 2747280 - RNA, 13 nt, Human
cagcagccagcuc

SEQ ID NO: 2747281 - RNA, 21 nt, Human
cagcagccagcucucagccaa

SEQ ID NO: 2747282 - RNA, 20 nt, Human
cagcagccagcucucagcca

SEQ ID NO: 2747283 - RNA, 19 nt, Human
cagcaagggugaugggaaa

SEQ ID NO: 2747284 - RNA, 22 nt, Human
cagcaagggugaugggaaagca

SEQ ID NO: 2747285 - RNA, 23 nt, Human
cagcaagggugaugggaaagcau

SEQ ID NO: 2747286 - RNA, 15 nt, Human
cagauucauuuuucu

SEQ ID NO: 2747287 - RNA, 19 nt, Human
cagauggaaaauucauuuu

SEQ ID NO: 2747288 - RNA, 21 nt, Human
cagauggaaaauucauuuuuu

SEQ ID NO: 2747289 - RNA, 23 nt, Human
cagauuuuguuggcauagcucug

SEQ ID NO: 2747290 - RNA, 15 nt, Human
cagauuuuccugaaa

SEQ ID NO: 2747291 - RNA, 14 nt, Human
cagauuuuccugaa

SEQ ID NO: 2747292 - RNA, 23 nt, Human
cagcaacgcaggcccccaggugc

SEQ ID NO: 2747293 - RNA, 23 nt, Human
cagccuggugggccuccucuguc

SEQ ID NO: 2747294 - RNA, 16 nt, Human
cagccugugcugcccg

SEQ ID NO: 2747295 - RNA, 14 nt, Human
cagccugugcugcc

SEQ ID NO: 2747296 - RNA, 18 nt, Human
cagccuggugggccuccu

SEQ ID NO: 2747297 - RNA, 17 nt, Human
cagccuggugggccucc

SEQ ID NO: 2747298 - RNA, 16 nt, Human
cagccuggugggccuc

SEQ ID NO: 2747299 - RNA, 15 nt, Human
cagccuggugggccu

SEQ ID NO: 2747300 - RNA, 21 nt, Human
cagccuuccccuugcccaggg

SEQ ID NO: 2747301 - RNA, 16 nt, Human
cagccuuccccuugcc

SEQ ID NO: 2747302 - RNA, 23 nt, Human
cagccuuccccuugcccagggcu

SEQ ID NO: 2747303 - RNA, 19 nt, Human
cagcuacuugggaggcuga

SEQ ID NO: 2747304 - RNA, 17 nt, Human
cagcccuccucugcacu

SEQ ID NO: 2747305 - RNA, 18 nt, Human
cagcccuccucugcacuc

SEQ ID NO: 2747306 - RNA, 15 nt, Human
cagccuagccgaccu

SEQ ID NO: 2747307 - RNA, 18 nt, Human
cagccuagccgaccucag

SEQ ID NO: 2747308 - RNA, 17 nt, Human
cagccuagccgaccuca

SEQ ID NO: 2747309 - RNA, 22 nt, Human
cagccuagccgaccucagccuu

SEQ ID NO: 2747310 - RNA, 21 nt, Human
cagccuagccgaccucagccu

SEQ ID NO: 2747311 - RNA, 20 nt, Human
cagccuagccgaccucagcc

SEQ ID NO: 2747312 - RNA, 19 nt, Human
cagccuagccgaccucagc

SEQ ID NO: 2747313 - RNA, 16 nt, Human
cagccuaguugaucag

SEQ ID NO: 2747314 - RNA, 13 nt, Human
cagcccucagaau

SEQ ID NO: 2747315 - RNA, 21 nt, Human
cagcucaggcacacuucuucu

SEQ ID NO: 2747316 - RNA, 12 nt, Human
cagcucaggcac

SEQ ID NO: 2747317 - RNA, 23 nt, Human
cagcucaggcacacuucuucuug

SEQ ID NO: 2747318 - RNA, 20 nt, Human
cagcucugcauacucauuag

SEQ ID NO: 2747319 - RNA, 16 nt, Human
cagcucuccccuucuc

SEQ ID NO: 2747320 - RNA, 12 nt, Human
cagcucucagcc

SEQ ID NO: 2747321 - RNA, 13 nt, Human
cagcucucagcca

SEQ ID NO: 2747322 - RNA, 13 nt, Human
cagcugacuaaac

SEQ ID NO: 2747323 - RNA, 18 nt, Human
cagcugacuaaacuuuuu

SEQ ID NO: 2747324 - RNA, 20 nt, Human
cagcugcugaaacaacaaau

SEQ ID NO: 2747325 - RNA, 21 nt, Human
cagcugcugaaacaacaaaua

SEQ ID NO: 2747326 - RNA, 18 nt, Human
cagcuguaugauucccag

SEQ ID NO: 2747327 - RNA, 18 nt, Human
caggaaccacaagacugc

SEQ ID NO: 2747328 - RNA, 23 nt, Human
cagcuuuccucaaaacuucagac

SEQ ID NO: 2747329 - RNA, 18 nt, Human
cagcuugaaacugagaug

SEQ ID NO: 2747330 - RNA, 22 nt, Human
caggaagcugugagagcaguuu

SEQ ID NO: 2747331 - RNA, 13 nt, Human
caggaagcuguga

SEQ ID NO: 2747332 - RNA, 14 nt, Human
caggaagcugugag

SEQ ID NO: 2747333 - RNA, 13 nt, Human
caggaccugacua

SEQ ID NO: 2747334 - RNA, 15 nt, Human
caggaaguagaggag

SEQ ID NO: 2747335 - RNA, 16 nt, Human
caggaaguagaggagg

SEQ ID NO: 2747336 - RNA, 17 nt, Human
cagaugcacaugagcug

SEQ ID NO: 2747337 - RNA, 13 nt, Human
cagauccuggaaa

SEQ ID NO: 2747338 - RNA, 14 nt, Human
cagauccuggaaau

SEQ ID NO: 2747339 - RNA, 12 nt, Human
cagaguuacagu

SEQ ID NO: 2747340 - RNA, 13 nt, Human
cagaguuacaguu

SEQ ID NO: 2747341 - RNA, 18 nt, Human
cagaguuacaguucugug

SEQ ID NO: 2747342 - RNA, 19 nt, Human
cagaguuacaguucugugg

SEQ ID NO: 2747343 - RNA, 14 nt, Human
cagaguuacaguuc

SEQ ID NO: 2747344 - RNA, 15 nt, Human
cagaguuacaguucu

SEQ ID NO: 2747345 - RNA, 16 nt, Human
cagaguuacaguucug

SEQ ID NO: 2747346 - RNA, 17 nt, Human
cagaguuacaguucugu

SEQ ID NO: 2747347 - RNA, 23 nt, Human
cagauaaauaguuuaugauucca

SEQ ID NO: 2747348 - RNA, 14 nt, Human
cagauaaacaguag

SEQ ID NO: 2747349 - RNA, 14 nt, Human
cagauaaucacaau

SEQ ID NO: 2747350 - RNA, 19 nt, Human
cagagacucagggccccag

SEQ ID NO: 2747351 - RNA, 23 nt, Human
cagagacucagggccccagcacu

SEQ ID NO: 2747352 - RNA, 22 nt, Human
cagagacucagggccccagcac

SEQ ID NO: 2747353 - RNA, 21 nt, Human
cagagacucagggccccagca

SEQ ID NO: 2747354 - RNA, 20 nt, Human
cagagacucagggccccagc

SEQ ID NO: 2747355 - RNA, 20 nt, Human
cagaggagccaccaguucuc

SEQ ID NO: 2747356 - RNA, 18 nt, Human
cagaggagccaccaguuc

SEQ ID NO: 2747357 - RNA, 19 nt, Human
cagaggagccaccaguucu

SEQ ID NO: 2747358 - RNA, 20 nt, Human
cagagccccacccucagaug

SEQ ID NO: 2747359 - RNA, 19 nt, Human
cagaaagcagaacagugau

SEQ ID NO: 2747360 - RNA, 23 nt, Human
cagaacagugauuaccagggacu

SEQ ID NO: 2747361 - RNA, 18 nt, Human
cagaaagcagaacaguga

SEQ ID NO: 2747362 - RNA, 21 nt, Human
cagaaucgcuccaccuugcag

SEQ ID NO: 2747363 - RNA, 23 nt, Human
cagaaucgcuccaccuugcagcu

SEQ ID NO: 2747364 - RNA, 14 nt, Human
cagaagucaucuug

SEQ ID NO: 2747365 - RNA, 18 nt, Human
cagaagucaaggcuuaga

SEQ ID NO: 2747366 - RNA, 16 nt, Human
cagaagucaucuugcu

SEQ ID NO: 2747367 - RNA, 17 nt, Human
cagaagucaucuugcua

SEQ ID NO: 2747368 - RNA, 20 nt, Human
cagaagucaucuugcuacca

SEQ ID NO: 2747369 - RNA, 22 nt, Human
cagaagucaucuugcuaccagu

SEQ ID NO: 2747370 - RNA, 16 nt, Human
cagaagucaaggcuua

SEQ ID NO: 2747371 - RNA, 17 nt, Human
cagaagucaaggcuuag

SEQ ID NO: 2747372 - RNA, 20 nt, Human
cagaagcaacccaaauguuc

SEQ ID NO: 2747373 - RNA, 19 nt, Human
cagaagcaacccaaauguu

SEQ ID NO: 2747374 - RNA, 20 nt, Human
cagacuagauguaguauuuu

SEQ ID NO: 2747375 - RNA, 21 nt, Human
cagacuagauguaguauuuuu

SEQ ID NO: 2747376 - RNA, 14 nt, Human
cagacuagauguag

SEQ ID NO: 2747377 - RNA, 15 nt, Human
cagacuagauguagu

SEQ ID NO: 2747378 - RNA, 19 nt, Human
cagacuagauguaguauuu

SEQ ID NO: 2747379 - RNA, 14 nt, Human
cagaauucugcuac

SEQ ID NO: 2747380 - RNA, 13 nt, Human
cagaauucugcua

SEQ ID NO: 2747381 - RNA, 23 nt, Human
cagaauucugcuaccucacuggg

SEQ ID NO: 2747382 - RNA, 21 nt, Human
cagaauucugcuaccucacug

SEQ ID NO: 2747383 - RNA, 19 nt, Human
cagacauagaauuaacaca

SEQ ID NO: 2747384 - RNA, 17 nt, Human
cagacauagaauuaaca

SEQ ID NO: 2747385 - RNA, 22 nt, Human
cagacauguggugggacaggga

SEQ ID NO: 2747386 - RNA, 18 nt, Human
cagacauguggugggaca

SEQ ID NO: 2747387 - RNA, 15 nt, Human
caccccuccccugcc

SEQ ID NO: 2747388 - RNA, 22 nt, Human
caccccuccccugcccuagagc

SEQ ID NO: 2747389 - RNA, 20 nt, Human
cacccucagaugcacaugag

SEQ ID NO: 2747390 - RNA, 20 nt, Human
caccugacacaccaggcgcu

SEQ ID NO: 2747391 - RNA, 16 nt, Human
caccugacacaccagg

SEQ ID NO: 2747392 - RNA, 17 nt, Human
caccugacacaccaggc

SEQ ID NO: 2747393 - RNA, 14 nt, Human
caccucauggaauu

SEQ ID NO: 2747394 - RNA, 12 nt, Human
caccucauggaa

SEQ ID NO: 2747395 - RNA, 11 nt, Human
caccucaugga

SEQ ID NO: 2747396 - RNA, 10 nt, Human
caccucccug

SEQ ID NO: 2747397 - RNA, 14 nt, Human
caccucccugcaau

SEQ ID NO: 2747398 - RNA, 13 nt, Human
caccucccugcaa

SEQ ID NO: 2747399 - RNA, 18 nt, Human
cacucagucucucuucuc

SEQ ID NO: 2747400 - RNA, 19 nt, Human
cacuaguauuucuaugaaa

SEQ ID NO: 2747401 - RNA, 14 nt, Human
cacuaguauuucua

SEQ ID NO: 2747402 - RNA, 17 nt, Human
cacuaagagagaaugag

SEQ ID NO: 2747403 - RNA, 21 nt, Human
cacuaaauugacacuuaaaaa

SEQ ID NO: 2747404 - RNA, 13 nt, Human
cacuaaagcagug

SEQ ID NO: 2747405 - RNA, 16 nt, Human
cacucaaaucaagaaa

SEQ ID NO: 2747406 - RNA, 15 nt, Human
cacgcacacugucug

SEQ ID NO: 2747407 - RNA, 22 nt, Human
cacgagcaggcuacugucagcu

SEQ ID NO: 2747408 - RNA, 17 nt, Human
cacgagcaggcuacugu

SEQ ID NO: 2747409 - RNA, 19 nt, Human
cacgagcaggcuacuguca

SEQ ID NO: 2747410 - RNA, 20 nt, Human
cacgagcaggcuacugucag

SEQ ID NO: 2747411 - RNA, 13 nt, Human
cacuaaacaaaga

SEQ ID NO: 2747412 - RNA, 22 nt, Human
cacguucuuacuaguuucccuu

SEQ ID NO: 2747413 - RNA, 19 nt, Human
cacugcucuaacagcccuc

SEQ ID NO: 2747414 - RNA, 15 nt, Human
cacugcucuaacagc

SEQ ID NO: 2747415 - RNA, 18 nt, Human
cacugcucuaacagcccu

SEQ ID NO: 2747416 - RNA, 20 nt, Human
cacugccuucucaacuccaa

SEQ ID NO: 2747417 - RNA, 21 nt, Human
cacugacuucuaaguaaaacc

SEQ ID NO: 2747418 - RNA, 14 nt, Human
cacugacuucuaag

SEQ ID NO: 2747419 - RNA, 15 nt, Human
cacugacuucuaagu

SEQ ID NO: 2747420 - RNA, 16 nt, Human
cacugacuucuaagua

SEQ ID NO: 2747421 - RNA, 20 nt, Human
cacugacuucuaaguaaaac

SEQ ID NO: 2747422 - RNA, 14 nt, Human
cacugucaagauga

SEQ ID NO: 2747423 - RNA, 21 nt, Human
cacuguagcauuacagugggu

SEQ ID NO: 2747424 - RNA, 14 nt, Human
cacuguauccaggu

SEQ ID NO: 2747425 - RNA, 24 nt, Human
cacuguggguagacacacaugaag

SEQ ID NO: 2747426 - RNA, 22 nt, Human
cacuguggguagacacacauga

SEQ ID NO: 2747427 - RNA, 19 nt, Human
cacuguggguagacacaca

SEQ ID NO: 2747428 - RNA, 19 nt, Human
cacuucagggcuuuacucc

SEQ ID NO: 2747429 - RNA, 18 nt, Human
cacuucacacacaggcaa

SEQ ID NO: 2747430 - RNA, 15 nt, Human
cacuuggucugugag

SEQ ID NO: 2747431 - RNA, 12 nt, Human
cacuuggagcca

SEQ ID NO: 2747432 - RNA, 23 nt, Human
cacuugaacccgggaggcagagg

SEQ ID NO: 2747433 - RNA, 21 nt, Human
cacuugaacccgggaggcaga

SEQ ID NO: 2747434 - RNA, 20 nt, Human
cacuugaacccgggaggcag

SEQ ID NO: 2747435 - RNA, 23 nt, Human
cacuucuucuuggucuuauuuau

SEQ ID NO: 2747436 - RNA, 22 nt, Human
agccaaggguucagagacucag

SEQ ID NO: 2747437 - RNA, 18 nt, Human
agccaaggguucagagac

SEQ ID NO: 2747438 - RNA, 20 nt, Human
agccaacuaugauuauuaac

SEQ ID NO: 2747439 - RNA, 17 nt, Human
agccaacuaugauuauu

SEQ ID NO: 2747440 - RNA, 13 nt, Human
agcaucuggcucu

SEQ ID NO: 2747441 - RNA, 16 nt, Human
agcaucuggcucuaau

SEQ ID NO: 2747442 - RNA, 18 nt, Human
agcaucuggcucuaauuc

SEQ ID NO: 2747443 - RNA, 14 nt, Human
agccagcaguucag

SEQ ID NO: 2747444 - RNA, 21 nt, Human
agcagcucaggcacacuucuu

SEQ ID NO: 2747445 - RNA, 19 nt, Human
agcaguggacaccaggagu

SEQ ID NO: 2747446 - RNA, 15 nt, Human
agcaguggacaccag

SEQ ID NO: 2747447 - RNA, 12 nt, Human
agcaguggacac

SEQ ID NO: 2747448 - RNA, 14 nt, Human
agcagcucaggcac

SEQ ID NO: 2747449 - RNA, 13 nt, Human
agcagcucaggca

SEQ ID NO: 2747450 - RNA, 12 nt, Human
agcagcucaggc

SEQ ID NO: 2747451 - RNA, 17 nt, Human
agcacugacuucuaagu

SEQ ID NO: 2747452 - RNA, 19 nt, Human
agcacugacuucuaaguaa

SEQ ID NO: 2747453 - RNA, 20 nt, Human
agauagauaggucagugcaa

SEQ ID NO: 2747454 - RNA, 23 nt, Human
agcaaaauuuuuucucuaggaaa

SEQ ID NO: 2747455 - RNA, 18 nt, Human
agaagucaaggcuuagac

SEQ ID NO: 2747456 - RNA, 19 nt, Human
agaagucaaggcuuagacc

SEQ ID NO: 2747457 - RNA, 16 nt, Human
agaagucaaggcuuag

SEQ ID NO: 2747458 - RNA, 17 nt, Human
agaagucaaggcuuaga

SEQ ID NO: 2747459 - RNA, 21 nt, Human
agaagacugcauuauauuuau

SEQ ID NO: 2747460 - RNA, 20 nt, Human
agaagagcuguucacagcca

SEQ ID NO: 2747461 - RNA, 13 nt, Human
agaagauagcagg

SEQ ID NO: 2747462 - RNA, 13 nt, Human
agaagagcuguuc

SEQ ID NO: 2747463 - RNA, 22 nt, Human
agaacagugauuaccagggacu

SEQ ID NO: 2747464 - RNA, 20 nt, Human
agaacagccgcuccugucug

SEQ ID NO: 2747465 - RNA, 19 nt, Human
agaacagccgcuccugucu

SEQ ID NO: 2747466 - RNA, 18 nt, Human
agaacagccgcuccuguc

SEQ ID NO: 2747467 - RNA, 23 nt, Human
agaacagccgcuccugucugcca

SEQ ID NO: 2747468 - RNA, 22 nt, Human
agaacagccgcuccugucugcc

SEQ ID NO: 2747469 - RNA, 13 nt, Human
agagaaacaguug

SEQ ID NO: 2747470 - RNA, 16 nt, Human
agagaaacaguuggua

SEQ ID NO: 2747471 - RNA, 12 nt, Human
agacuagaugua

SEQ ID NO: 2747472 - RNA, 13 nt, Human
agacuagauguag

SEQ ID NO: 2747473 - RNA, 14 nt, Human
agacuagauguagu

SEQ ID NO: 2747474 - RNA, 23 nt, Human
agacuagauguaguauuuuuugu

SEQ ID NO: 2747475 - RNA, 16 nt, Human
agacuagauguaguau

SEQ ID NO: 2747476 - RNA, 19 nt, Human
agacuagauguaguauuuu

SEQ ID NO: 2747477 - RNA, 19 nt, Human
agacaaggaaaaaauaaca

SEQ ID NO: 2747478 - RNA, 18 nt, Human
aggaaaaaauaacaauga

SEQ ID NO: 2747479 - RNA, 18 nt, Human
agcuguaugauucccagc

SEQ ID NO: 2747480 - RNA, 17 nt, Human
agcuguaugauucccag

SEQ ID NO: 2747481 - RNA, 23 nt, Human
agcugacuaaacuuuuuuucugu

SEQ ID NO: 2747482 - RNA, 14 nt, Human
agcuguaugauucc

SEQ ID NO: 2747483 - RNA, 14 nt, Human
agcugcugaaacaa

SEQ ID NO: 2747484 - RNA, 15 nt, Human
agcugcugaaacaac

SEQ ID NO: 2747485 - RNA, 16 nt, Human
agcugcugaaacaaca

SEQ ID NO: 2747486 - RNA, 20 nt, Human
agcugcugaaacaacaaaua

SEQ ID NO: 2747487 - RNA, 15 nt, Human
agcgacagugagacu

SEQ ID NO: 2747488 - RNA, 13 nt, Human
agcgacagugaga

SEQ ID NO: 2747489 - RNA, 12 nt, Human
agcuacaaaugc

SEQ ID NO: 2747490 - RNA, 13 nt, Human
agcuacaaaugca

SEQ ID NO: 2747491 - RNA, 18 nt, Human
aggaggguuagggagggg

SEQ ID NO: 2747492 - RNA, 20 nt, Human
aggcagagguugcagugagc

SEQ ID NO: 2747493 - RNA, 23 nt, Human
aggccaugggcacuguggguaga

SEQ ID NO: 2747494 - RNA, 17 nt, Human
agggacaggauaagagg

SEQ ID NO: 2747495 - RNA, 12 nt, Human
aggcuuagaccc

SEQ ID NO: 2747496 - RNA, 23 nt, Human
aggcuuagacccucaugcugcca

SEQ ID NO: 2747497 - RNA, 22 nt, Human
aggcuuagacccucaugcugcc

SEQ ID NO: 2747498 - RNA, 14 nt, Human
aggcuuagacccuc

SEQ ID NO: 2747499 - RNA, 21 nt, Human
aggcuuagacccucaugcugc

SEQ ID NO: 2747500 - RNA, 20 nt, Human
agggauuagggagagaagau

SEQ ID NO: 2747501 - RNA, 20 nt, Human
augggacauuugcucaugga

SEQ ID NO: 2747502 - RNA, 15 nt, Human
augggacagggagga

SEQ ID NO: 2747503 - RNA, 14 nt, Human
augggaaagcauug

SEQ ID NO: 2747504 - RNA, 20 nt, Human
augggaaagcauuguaaaug

SEQ ID NO: 2747505 - RNA, 23 nt, Human
auggcuuccuggcaauagucaaa

SEQ ID NO: 2747506 - RNA, 14 nt, Human
aucaaacugaagcc

SEQ ID NO: 2747507 - RNA, 16 nt, Human
aucaaacugaagccag

SEQ ID NO: 2747508 - RNA, 15 nt, Human
aucaaacugaagcca

SEQ ID NO: 2747509 - RNA, 17 nt, Human
aucaaacugaagccaga

SEQ ID NO: 2747510 - RNA, 14 nt, Human
aucaaaagaaagaa

SEQ ID NO: 2747511 - RNA, 12 nt, Human
auccuugaagau

SEQ ID NO: 2747512 - RNA, 21 nt, Human
aucaugaauuaguuuuauaug

SEQ ID NO: 2747513 - RNA, 13 nt, Human
agucauuuaauaa

SEQ ID NO: 2747514 - RNA, 19 nt, Human
agugaugucacuagggcag

SEQ ID NO: 2747515 - RNA, 13 nt, Human
agugauuaccagg

SEQ ID NO: 2747516 - RNA, 13 nt, Human
aguacucauacau

SEQ ID NO: 2747517 - RNA, 20 nt, Human
auacacacucaaaucaagaa

SEQ ID NO: 2747518 - RNA, 16 nt, Human
auaaguacuguguaca

SEQ ID NO: 2747519 - RNA, 13 nt, Human
auaaguacugugu

SEQ ID NO: 2747520 - RNA, 15 nt, Human
aguuaauuuuuccaa

SEQ ID NO: 2747521 - RNA, 17 nt, Human
aguuaauuuuuccaacu

SEQ ID NO: 2747522 - RNA, 23 nt, Human
aguuaauuuuuccaacuacuaau

SEQ ID NO: 2747523 - RNA, 16 nt, Human
auaaaagacagugaaa

SEQ ID NO: 2747524 - RNA, 15 nt, Human
auaaaagacagugaa

SEQ ID NO: 2747525 - RNA, 19 nt, Human
acugauaugggucuugaua

SEQ ID NO: 2747526 - RNA, 13 nt, Human
acugacacaugcu

SEQ ID NO: 2747527 - RNA, 19 nt, Human
acucguuaauuuguagugu

SEQ ID NO: 2747528 - RNA, 14 nt, Human
acucguuaauuugu

SEQ ID NO: 2747529 - RNA, 16 nt, Human
acucccaccugacaca

SEQ ID NO: 2747530 - RNA, 14 nt, Human
acucccaccugaca

SEQ ID NO: 2747531 - RNA, 14 nt, Human
acucccuuucaaca

SEQ ID NO: 2747532 - RNA, 19 nt, Human
acuccguaacagauuuugu

SEQ ID NO: 2747533 - RNA, 20 nt, Human
acuucuugcuucuuucuaga

SEQ ID NO: 2747534 - RNA, 11 nt, Human
acuucuugcuu

SEQ ID NO: 2747535 - RNA, 18 nt, Human
acuucuugcuucuuucua

SEQ ID NO: 2747536 - RNA, 19 nt, Human
acuucuugcuucuuucuag

SEQ ID NO: 2747537 - RNA, 21 nt, Human
acuucagacauagaauuaaca

SEQ ID NO: 2747538 - RNA, 17 nt, Human
acuucaaauccuugaag

SEQ ID NO: 2747539 - RNA, 18 nt, Human
acuucaaauccuugaaga

SEQ ID NO: 2747540 - RNA, 22 nt, Human
acuuaaaaaugguuuaaauggu

SEQ ID NO: 2747541 - RNA, 21 nt, Human
acuuaaaaaugguuuaaaugg

SEQ ID NO: 2747542 - RNA, 17 nt, Human
acuguaaaauaauaacu

SEQ ID NO: 2747543 - RNA, 11 nt, Human
accucagccug

SEQ ID NO: 2747544 - RNA, 20 nt, Human
accucagccuuccccuugcc

SEQ ID NO: 2747545 - RNA, 19 nt, Human
accucagccugugcugccc

SEQ ID NO: 2747546 - RNA, 18 nt, Human
accucagccugugcugcc

SEQ ID NO: 2747547 - RNA, 17 nt, Human
accucagccugugcugc

SEQ ID NO: 2747548 - RNA, 16 nt, Human
accucagccugugcug

SEQ ID NO: 2747549 - RNA, 12 nt, Human
accucagccugu

SEQ ID NO: 2747550 - RNA, 21 nt, Human
acccugucucuacuaaaaaua

SEQ ID NO: 2747551 - RNA, 14 nt, Human
acccucaugcugcc

SEQ ID NO: 2747552 - RNA, 16 nt, Human
acccucaugcugccaa

SEQ ID NO: 2747553 - RNA, 22 nt, Human
acccucaugcugccaauauccu

SEQ ID NO: 2747554 - RNA, 20 nt, Human
acccucagaugcacaugagc

SEQ ID NO: 2747555 - RNA, 22 nt, Human
accuugcugcaagcacagcccu

SEQ ID NO: 2747556 - RNA, 23 nt, Human
accuugcugcaagcacagcccuu

SEQ ID NO: 2747557 - RNA, 20 nt, Human
accucugccucagaaaacaa

SEQ ID NO: 2747558 - RNA, 14 nt, Human
acgcacacugucug

SEQ ID NO: 2747559 - RNA, 23 nt, Human
acauguggugggacagggaccca

SEQ ID NO: 2747560 - RNA, 15 nt, Human
acauguggugggaca

SEQ ID NO: 2747561 - RNA, 21 nt, Human
acauuuguauaaaauaauuuu

SEQ ID NO: 2747562 - RNA, 19 nt, Human
acauuuguauaaaauaauu

SEQ ID NO: 2747563 - RNA, 16 nt, Human
acauuuguauaaaaua

SEQ ID NO: 2747564 - RNA, 15 nt, Human
acauuugcucaugga

SEQ ID NO: 2747565 - RNA, 19 nt, Human
acagugauuaccagggacu

SEQ ID NO: 2747566 - RNA, 21 nt, Human
acagugcucuuuucuccucac

SEQ ID NO: 2747567 - RNA, 15 nt, Human
acagugcucuuuucu

SEQ ID NO: 2747568 - RNA, 16 nt, Human
acagugcucuuuucuc

SEQ ID NO: 2747569 - RNA, 17 nt, Human
acagugcucuuuucucc

SEQ ID NO: 2747570 - RNA, 22 nt, Human
acaggaugguucccuugaugaa

SEQ ID NO: 2747571 - RNA, 24 nt, Human
acaggaugguucccuugaugaaga

SEQ ID NO: 2747572 - RNA, 15 nt, Human
acaccaauauucaua

SEQ ID NO: 2747573 - RNA, 22 nt, Human
aauuucauaccuaucaucuuaa

SEQ ID NO: 2747574 - RNA, 11 nt, Human
aauuguaauag

SEQ ID NO: 2747575 - RNA, 23 nt, Human
aauuccuuagcuuagaccucagc

SEQ ID NO: 2747576 - RNA, 13 nt, Human
aauuccuuagcuu

SEQ ID NO: 2747577 - RNA, 16 nt, Human
aauucugcuaccucac

SEQ ID NO: 2747578 - RNA, 15 nt, Human
aauucugcuaccuca

SEQ ID NO: 2747579 - RNA, 19 nt, Human
aauucugcuaccucacugg

SEQ ID NO: 2747580 - RNA, 17 nt, Human
aauuggauuuccuaaua

SEQ ID NO: 2747581 - RNA, 11 nt, Human
aauuggauuuc

SEQ ID NO: 2747582 - RNA, 15 nt, Human
aauuggauuuccuaa

SEQ ID NO: 2747583 - RNA, 15 nt, Human
aauuggagcucgugg

SEQ ID NO: 2747584 - RNA, 15 nt, Human
aaggcaguuuucuaa

SEQ ID NO: 2747585 - RNA, 20 nt, Human
aagagaaacaguugguaacu

SEQ ID NO: 2747586 - RNA, 22 nt, Human
aagacagagccccacccucaga

SEQ ID NO: 2747587 - RNA, 15 nt, Human
aagaacugaaaucau

SEQ ID NO: 2747588 - RNA, 11 nt, Human
aagaacugaaa

SEQ ID NO: 2747589 - RNA, 13 nt, Human
aagaacugaaauc

SEQ ID NO: 2747590 - RNA, 12 nt, Human
aagaacugaaau

SEQ ID NO: 2747591 - RNA, 20 nt, Human
aacgcaggcccccaggugcc

SEQ ID NO: 2747592 - RNA, 15 nt, Human
aagaagacugcauua

SEQ ID NO: 2747593 - RNA, 20 nt, Human
aagaagacugcauuauauuu

SEQ ID NO: 2747594 - RNA, 21 nt, Human
aagacaaggaaaaaauaacaa

SEQ ID NO: 2747595 - RNA, 16 nt, Human
aauauguuagcaaaga

SEQ ID NO: 2747596 - RNA, 16 nt, Human
aaucucaauauuucag

SEQ ID NO: 2747597 - RNA, 20 nt, Human
aaugaauacuuuauaaagga

SEQ ID NO: 2747598 - RNA, 21 nt, Human
aacagccgcuccugucugcca

SEQ ID NO: 2747599 - RNA, 20 nt, Human
aacagccgcuccugucugcc

SEQ ID NO: 2747600 - RNA, 17 nt, Human
aacagcccuccucugca

SEQ ID NO: 2747601 - RNA, 19 nt, Human
aacagcccuccucugcacu

SEQ ID NO: 2747602 - RNA, 23 nt, Human
aaauguugacaugggacauuugc

SEQ ID NO: 2747603 - RNA, 22 nt, Human
aaauguugacaugggacauuug

SEQ ID NO: 2747604 - RNA, 13 nt, Human
aaauguucaucaa

SEQ ID NO: 2747605 - RNA, 18 nt, Human
aaaucucaauauuucaga

SEQ ID NO: 2747606 - RNA, 21 nt, Human
aaauauuuauuuuaauaaugu

SEQ ID NO: 2747607 - RNA, 19 nt, Human
aaacccuugccaugugcua

SEQ ID NO: 2747608 - RNA, 15 nt, Human
aaacugcacugucaa

SEQ ID NO: 2747609 - RNA, 23 nt, Human
aaacuuuuuuucuguaccaguua

SEQ ID NO: 2747610 - RNA, 22 nt, Human
aaacuuuuuuucuguaccaguu

SEQ ID NO: 2747611 - RNA, 21 nt, Human
aaaaucauuucugcaucagcu

SEQ ID NO: 2747612 - RNA, 15 nt, Human
aaagcauuguaaaug

SEQ ID NO: 2747613 - RNA, 17 nt, Human
aaagcauuguaaaugug

SEQ ID NO: 2747614 - RNA, 11 nt, Human
aaaaucauuuc

SEQ ID NO: 2747615 - RNA, 12 nt, Human
aaaaucauuucu

SEQ ID NO: 2747616 - RNA, 10 nt, Human
aaaaucauuu

SEQ ID NO: 2747617 - RNA, 13 nt, Human
aaaagacuccaaa

SEQ ID NO: 2747618 - RNA, 11 nt, Human
aaaagaaugau

SEQ ID NO: 2747619 - RNA, 13 nt, Human
aaaagaauauuuu

SEQ ID NO: 2747620 - RNA, 20 nt, Human
aaaagacaaggaaaaaauaa

SEQ ID NO: 2747621 - RNA, 12 nt, Human
aaaagaauauuu

SEQ ID NO: 2747622 - RNA, 17 nt, Human
aaaagaaagaaaaucag

SEQ ID NO: 2747623 - RNA, 19 nt, Human
cugcaagguacucugguga

SEQ ID NO: 2747624 - RNA, 17 nt, Human
cugcaagguacucuggu

SEQ ID NO: 2747625 - RNA, 18 nt, Human
cugcaagguacucuggug

SEQ ID NO: 2747626 - RNA, 16 nt, Human
cugcaagguacucugg

SEQ ID NO: 2747627 - RNA, 14 nt, Human
cugcaagcacagcc

SEQ ID NO: 2747628 - RNA, 17 nt, Human
cugcaagcacagcccuu

SEQ ID NO: 2747629 - RNA, 16 nt, Human
cugcacuccagccuga

SEQ ID NO: 2747630 - RNA, 20 nt, Human
cugcacuccagccugagcga

SEQ ID NO: 2747631 - RNA, 17 nt, Human
cugcacuccagccugag

SEQ ID NO: 2747632 - RNA, 20 nt, Human
cuggggccucggagccucau

SEQ ID NO: 2747633 - RNA, 23 nt, Human
cuggggccucggagccucauccg

SEQ ID NO: 2747634 - RNA, 15 nt, Human
cugggcagcugccuc

SEQ ID NO: 2747635 - RNA, 14 nt, Human
cugggcagcugccu

SEQ ID NO: 2747636 - RNA, 13 nt, Human
cugggcagcugcc

SEQ ID NO: 2747637 - RNA, 12 nt, Human
cuggugccucac

SEQ ID NO: 2747638 - RNA, 21 nt, Human
cuggugccucaccccuugcca

SEQ ID NO: 2747639 - RNA, 15 nt, Human
cuggcucuaauucac

SEQ ID NO: 2747640 - RNA, 19 nt, Human
cuggcucuaauucacagug

SEQ ID NO: 2747641 - RNA, 23 nt, Human
cuggcucuaauucacagugcucu

SEQ ID NO: 2747642 - RNA, 20 nt, Human
cuggcucuaauucacagugc

SEQ ID NO: 2747643 - RNA, 22 nt, Human
cuggcucuaauucacagugcuc

SEQ ID NO: 2747644 - RNA, 20 nt, Human
cugcuuauccguuagccgug

SEQ ID NO: 2747645 - RNA, 18 nt, Human
cuggacuuaagcaucugg

SEQ ID NO: 2747646 - RNA, 22 nt, Human
cuggacuuaagcaucuggcucu

SEQ ID NO: 2747647 - RNA, 23 nt, Human
cuggacuuaagcaucuggcucua

SEQ ID NO: 2747648 - RNA, 21 nt, Human
cuuugagugucuuaauuaaaa

SEQ ID NO: 2747649 - RNA, 20 nt, Human
cuuuaaagggauggcaagau

SEQ ID NO: 2747650 - RNA, 20 nt, Human
cuucuguuuuauaauuuugu

SEQ ID NO: 2747651 - RNA, 15 nt, Human
cuucuguuuuauaau

SEQ ID NO: 2747652 - RNA, 14 nt, Human
cuuggcccaggagu

SEQ ID NO: 2747653 - RNA, 13 nt, Human
cuuggcccaggag

SEQ ID NO: 2747654 - RNA, 11 nt, Human
cuucagacaua

SEQ ID NO: 2747655 - RNA, 23 nt, Human
cuucaugcugucuacacuaagag

SEQ ID NO: 2747656 - RNA, 22 nt, Human
cugugcugcccgucuucagccu

SEQ ID NO: 2747657 - RNA, 20 nt, Human
cugugcugcccgucuucagc

SEQ ID NO: 2747658 - RNA, 21 nt, Human
cuguguacagaauucugcuac

SEQ ID NO: 2747659 - RNA, 18 nt, Human
cuguguaauuagugccac

SEQ ID NO: 2747660 - RNA, 16 nt, Human
gaguuuaaauuguaau

SEQ ID NO: 2747661 - RNA, 13 nt, Human
gaggcagggucag

SEQ ID NO: 2747662 - RNA, 15 nt, Human
gaggacgcucucugg

SEQ ID NO: 2747663 - RNA, 18 nt, Human
gaggcuccacuuggucug

SEQ ID NO: 2747664 - RNA, 19 nt, Human
gaggcuccacuuggucugu

SEQ ID NO: 2747665 - RNA, 23 nt, Human
gaggcuccacuuggucugugaga

SEQ ID NO: 2747666 - RNA, 16 nt, Human
gauuuaccacuugugu

SEQ ID NO: 2747667 - RNA, 15 nt, Human
gauuuaccacuugug

SEQ ID NO: 2747668 - RNA, 13 nt, Human
gauguaguauuuu

SEQ ID NO: 2747669 - RNA, 22 nt, Human
gaugguucccuugaugaagaag

SEQ ID NO: 2747670 - RNA, 18 nt, Human
gauguagaggagaaacug

SEQ ID NO: 2747671 - RNA, 17 nt, Human
gauguagaggagaaacu

SEQ ID NO: 2747672 - RNA, 16 nt, Human
gaugaucuuuaaaaua

SEQ ID NO: 2747673 - RNA, 23 nt, Human
gcacaguuuucugagaaagacua

SEQ ID NO: 2747674 - RNA, 20 nt, Human
gcacaguuuucugagaaaga

SEQ ID NO: 2747675 - RNA, 22 nt, Human
gcacaguuuucugagaaagacu

SEQ ID NO: 2747676 - RNA, 22 nt, Human
gcaauagucaaauugugugaaa

SEQ ID NO: 2747677 - RNA, 20 nt, Human
gcaaguauuagaauaccaca

SEQ ID NO: 2747678 - RNA, 13 nt, Human
gaacugaaaucau

SEQ ID NO: 2747679 - RNA, 14 nt, Human
gaacugaaaucaua

SEQ ID NO: 2747680 - RNA, 19 nt, Human
gaacccgggaggcagaggu

SEQ ID NO: 2747681 - RNA, 23 nt, Human
gaagcaacccaaauguucaucaa

SEQ ID NO: 2747682 - RNA, 14 nt, Human
gaagcaaaauuuuu

SEQ ID NO: 2747683 - RNA, 15 nt, Human
gaccugacuauugaa

SEQ ID NO: 2747684 - RNA, 15 nt, Human
gacgcucucuggccu

SEQ ID NO: 2747685 - RNA, 17 nt, Human
gacgcucucuggccuuc

SEQ ID NO: 2747686 - RNA, 16 nt, Human
gacgcucucuggccuu

SEQ ID NO: 2747687 - RNA, 12 nt, Human
gacuguggcugc

SEQ ID NO: 2747688 - RNA, 15 nt, Human
gacuguggcugcuag

SEQ ID NO: 2747689 - RNA, 14 nt, Human
gacuguggcugcua

SEQ ID NO: 2747690 - RNA, 21 nt, Human
gacucuuaagaagacugcauu

SEQ ID NO: 2747691 - RNA, 18 nt, Human
gacucuuaagaagacugc

SEQ ID NO: 2747692 - RNA, 14 nt, Human
gacucuuaagaaga

SEQ ID NO: 2747693 - RNA, 21 nt, Human
gacagugagacucugucucag

SEQ ID NO: 2747694 - RNA, 17 nt, Human
gacauuugcucauggaa

SEQ ID NO: 2747695 - RNA, 16 nt, Human
gacauuugcucaugga

SEQ ID NO: 2747696 - RNA, 14 nt, Human
gacacacugaagaa

SEQ ID NO: 2747697 - RNA, 16 nt, Human
gacacacugaagaagc

SEQ ID NO: 2747698 - RNA, 15 nt, Human
gacacacugaagaag

SEQ ID NO: 2747699 - RNA, 21 nt, Human
gacagaaagcagaacagugau

SEQ ID NO: 2747700 - RNA, 20 nt, Human
aaagaggcagcuugaaacug

SEQ ID NO: 2747701 - RNA, 19 nt, Human
aaagagaaacaguugguaa

SEQ ID NO: 2747702 - RNA, 22 nt, Human
aaagagaaacaguugguaacuu

SEQ ID NO: 2747703 - RNA, 18 nt, Human
aaagagaacuuccagauc

SEQ ID NO: 2747704 - RNA, 22 nt, Human
aaagacuauucaaacagucuca

SEQ ID NO: 2747705 - RNA, 13 nt, Human
aaagacuccaaag

SEQ ID NO: 2747706 - RNA, 23 nt, Human
aaagacuauucaaacagucucag

SEQ ID NO: 2747707 - RNA, 16 nt, Human
aaagaaugauuaugaa

SEQ ID NO: 2747708 - RNA, 15 nt, Human
aaacuuuuuuucugu

SEQ ID NO: 2747709 - RNA, 19 nt, Human
aaacuuuuuuucuguacca

SEQ ID NO: 2747710 - RNA, 13 nt, Human
aaagcuuauuaaa

SEQ ID NO: 2747711 - RNA, 13 nt, Human
aaaggaauuuaaa

SEQ ID NO: 2747712 - RNA, 15 nt, Human
ggugccaguuauggc

SEQ ID NO: 2747713 - RNA, 20 nt, Human
ggugauuuagcaggaagcug

SEQ ID NO: 2747714 - RNA, 24 nt, Human
ggucugugagaugcuagaacuccc

SEQ ID NO: 2747715 - RNA, 14 nt, Human
ggucugugagaugc

SEQ ID NO: 2747716 - RNA, 14 nt, Human
gggucaggagaggg

SEQ ID NO: 2747717 - RNA, 16 nt, Human
ggguaggcgggaagga

SEQ ID NO: 2747718 - RNA, 12 nt, Human
ggguaggcggga

SEQ ID NO: 2747719 - RNA, 16 nt, Human
aaaccacagcaguuga

SEQ ID NO: 2747720 - RNA, 15 nt, Human
aaaccacagcaguug

SEQ ID NO: 2747721 - RNA, 16 nt, Human
aaacucauuucuagca

SEQ ID NO: 2747722 - RNA, 19 nt, Human
aaaauuuuuucucuaggaa

SEQ ID NO: 2747723 - RNA, 17 nt, Human
aaacaaggaugaauuaa

SEQ ID NO: 2747724 - RNA, 14 nt, Human
aaacacaacuauau

SEQ ID NO: 2747725 - RNA, 22 nt, Human
aaacaguugguaacuuuuguga

SEQ ID NO: 2747726 - RNA, 16 nt, Human
aaacaguugguaacuu

SEQ ID NO: 2747727 - RNA, 18 nt, Human
aaacaguugguaacuuuu

SEQ ID NO: 2747728 - RNA, 19 nt, Human
aaacaguugguaacuuuug

SEQ ID NO: 2747729 - RNA, 13 nt, Human
aaacauauauaac

SEQ ID NO: 2747730 - RNA, 19 nt, Human
aaacauauauaacaaugcu

SEQ ID NO: 2747731 - RNA, 16 nt, Human
aaacauauauaacaau

SEQ ID NO: 2747732 - RNA, 21 nt, Human
aaacauauauaacaaugcugu

SEQ ID NO: 2747733 - RNA, 23 nt, Human
aaaauaauuuuuauauuugaaau

SEQ ID NO: 2747734 - RNA, 21 nt, Human
aaaauaauuuuuauauuugaa

SEQ ID NO: 2747735 - RNA, 20 nt, Human
aaaauaauuuuuauauuuga

SEQ ID NO: 2747736 - RNA, 17 nt, Human
aaaauaaauauaucuac

SEQ ID NO: 2747737 - RNA, 14 nt, Human
aaaauaaauauauc

SEQ ID NO: 2747738 - RNA, 21 nt, Human
gggauuuucagcccucagaau

SEQ ID NO: 2747739 - RNA, 17 nt, Human
gggauugaaggaugcug

SEQ ID NO: 2747740 - RNA, 23 nt, Human
gggcagcugccuccccuccucug

SEQ ID NO: 2747741 - RNA, 20 nt, Human
gggcagcugccuccccuccu

SEQ ID NO: 2747742 - RNA, 19 nt, Human
gggcagcugccuccccucc

SEQ ID NO: 2747743 - RNA, 14 nt, Human
gggcagcugccucc

SEQ ID NO: 2747744 - RNA, 13 nt, Human
gggcagcugccuc

SEQ ID NO: 2747745 - RNA, 12 nt, Human
gggcagcugccu

SEQ ID NO: 2747746 - RNA, 22 nt, Human
aaaaaugucuuggguaggcggg

SEQ ID NO: 2747747 - RNA, 20 nt, Human
gggaggcagagguugcagug

SEQ ID NO: 2747748 - RNA, 11 nt, Human
gggaggcagag

SEQ ID NO: 2747749 - RNA, 22 nt, Human
aaaagcuccauuuuuagugaaa

SEQ ID NO: 2747750 - RNA, 21 nt, Human
aaaacuuuaugcuaagugaaa

SEQ ID NO: 2747751 - RNA, 16 nt, Human
ggccuccauccugagg

SEQ ID NO: 2747752 - RNA, 22 nt, Human
ggcccaggaguuuggccagaag

SEQ ID NO: 2747753 - RNA, 23 nt, Human
ggcccaggaguuuggccagaagu

SEQ ID NO: 2747754 - RNA, 21 nt, Human
ggcccaggaguuuggccagaa

SEQ ID NO: 2747755 - RNA, 12 nt, Human
ggauuuucagcc

SEQ ID NO: 2747756 - RNA, 15 nt, Human
ggaugacaugucccu

SEQ ID NO: 2747757 - RNA, 20 nt, Human
ggaugacaugucccuacacc

SEQ ID NO: 2747758 - RNA, 16 nt, Human
ggaugacaugucccua

SEQ ID NO: 2747759 - RNA, 23 nt, Human
ggaugguucccuugaugaagaag

SEQ ID NO: 2747760 - RNA, 22 nt, Human
ggaugguucccuugaugaagaa

SEQ ID NO: 2747761 - RNA, 22 nt, Human
ggauguugaaaaaguucugcag

SEQ ID NO: 2747762 - RNA, 20 nt, Human
ggcagaacagccgcuccugu

SEQ ID NO: 2747763 - RNA, 18 nt, Human
ggcagaacagccgcuccu

SEQ ID NO: 2747764 - RNA, 14 nt, Human
ggcagaacagccgc

SEQ ID NO: 2747765 - RNA, 19 nt, Human
ggaggcugagaugggagaa

SEQ ID NO: 2747766 - RNA, 15 nt, Human
ggaggcugagauggg

SEQ ID NO: 2747767 - RNA, 23 nt, Human
ggacuuaagcaucuggcucuaau

SEQ ID NO: 2747768 - RNA, 20 nt, Human
gcugccuccccuccucugcu

SEQ ID NO: 2747769 - RNA, 17 nt, Human
gcugccuccccuccucu

SEQ ID NO: 2747770 - RNA, 16 nt, Human
gcugccuccccuccuc

SEQ ID NO: 2747771 - RNA, 22 nt, Human
gcugccuccccuccucugcuug

SEQ ID NO: 2747772 - RNA, 21 nt, Human
gcugccuccccuccucugcuu

SEQ ID NO: 2747773 - RNA, 17 nt, Human
gcuggagcucugcccau

SEQ ID NO: 2747774 - RNA, 14 nt, Human
gcuggagcucugcc

SEQ ID NO: 2747775 - RNA, 12 nt, Human
gcuucuuucuag

SEQ ID NO: 2747776 - RNA, 15 nt, Human
gcuucuuucuagaaa

SEQ ID NO: 2747777 - RNA, 21 nt, Human
gcuucuuucuagaaagagaaa

SEQ ID NO: 2747778 - RNA, 21 nt, Human
gcuguaacuacuuuauaacua

SEQ ID NO: 2747779 - RNA, 21 nt, Human
gcuaguaauuggaaaggcagc

SEQ ID NO: 2747780 - RNA, 16 nt, Human
gcuaguaucaaaagaa

SEQ ID NO: 2747781 - RNA, 15 nt, Human
gcuccccucggagaa

SEQ ID NO: 2747782 - RNA, 18 nt, Human
gcuccccucggagaagag

SEQ ID NO: 2747783 - RNA, 15 nt, Human
gcucuaauucacagu

SEQ ID NO: 2747784 - RNA, 16 nt, Human
gcucuaauucacagug

SEQ ID NO: 2747785 - RNA, 18 nt, Human
gcucuaauucacagugcu

SEQ ID NO: 2747786 - RNA, 19 nt, Human
gcucuaauucacagugcuc

SEQ ID NO: 2747787 - RNA, 23 nt, Human
gccagcagccagcucucagccaa

SEQ ID NO: 2747788 - RNA, 22 nt, Human
gccagcagccagcucucagcca

SEQ ID NO: 2747789 - RNA, 21 nt, Human
gccagcagccagcucucagcc

SEQ ID NO: 2747790 - RNA, 20 nt, Human
gccagcagccagcucucagc

SEQ ID NO: 2747791 - RNA, 19 nt, Human
gccagcagccagcucucag

SEQ ID NO: 2747792 - RNA, 18 nt, Human
gccagcagccagcucuca

SEQ ID NO: 2747793 - RNA, 17 nt, Human
gccagcagccagcucuc

SEQ ID NO: 2747794 - RNA, 16 nt, Human
gccagcagccagcucu

SEQ ID NO: 2747795 - RNA, 12 nt, Human
gccagcagccag

SEQ ID NO: 2747796 - RNA, 15 nt, Human
gccagcagccagcuc

SEQ ID NO: 2747797 - RNA, 13 nt, Human
gccagcagccagc

SEQ ID NO: 2747798 - RNA, 23 nt, Human
gccagcaguucagagcugcccuc

SEQ ID NO: 2747799 - RNA, 22 nt, Human
gccagcaguucagagcugcccu

SEQ ID NO: 2747800 - RNA, 19 nt, Human
gccagauuuuccugaaaac

SEQ ID NO: 2747801 - RNA, 22 nt, Human
gccagacaucaacagauaaaua

SEQ ID NO: 2747802 - RNA, 14 nt, Human
gccagacauguggu

SEQ ID NO: 2747803 - RNA, 23 nt, Human
gccagaagucaaggcuuagaccc

SEQ ID NO: 2747804 - RNA, 16 nt, Human
gccagaagucaaggcu

SEQ ID NO: 2747805 - RNA, 20 nt, Human
gccagaagucaaggcuuaga

SEQ ID NO: 2747806 - RNA, 22 nt, Human
gccagaagucaaggcuuagacc

SEQ ID NO: 2747807 - RNA, 14 nt, Human
gccagccagcagcc

SEQ ID NO: 2747808 - RNA, 13 nt, Human
gccagccagcagc

SEQ ID NO: 2747809 - RNA, 12 nt, Human
gccagccagcag

SEQ ID NO: 2747810 - RNA, 16 nt, Human
gccauaugaaaaggcu

SEQ ID NO: 2747811 - RNA, 12 nt, Human
gccagaaauaaa

SEQ ID NO: 2747812 - RNA, 18 nt, Human
gccacuuaauguauguua

SEQ ID NO: 2747813 - RNA, 19 nt, Human
gccacuuaauguauguuac

SEQ ID NO: 2747814 - RNA, 13 nt, Human
gccacuuaaugua

SEQ ID NO: 2747815 - RNA, 16 nt, Human
gccacuuaauguaugu

SEQ ID NO: 2747816 - RNA, 19 nt, Human
gccaccaguucucaugggu

SEQ ID NO: 2747817 - RNA, 11 nt, Human
gccaccaguuc

SEQ ID NO: 2747818 - RNA, 13 nt, Human
gccaccaguucuc

SEQ ID NO: 2747819 - RNA, 22 nt, Human
gcacuuggagccaaggguucag

SEQ ID NO: 2747820 - RNA, 16 nt, Human
gcacuuggagccaagg

SEQ ID NO: 2747821 - RNA, 13 nt, Human
gcacuuggagcca

SEQ ID NO: 2747822 - RNA, 16 nt, Human
gcccccaggugccagu

SEQ ID NO: 2747823 - RNA, 17 nt, Human
gcccuagagcacacugu

SEQ ID NO: 2747824 - RNA, 13 nt, Human
gcccuagagcaca

SEQ ID NO: 2747825 - RNA, 19 nt, Human
gcccuagagcacacuguag

SEQ ID NO: 2747826 - RNA, 23 nt, Human
gccgcuccugucugccagccagc

SEQ ID NO: 2747827 - RNA, 14 nt, Human
gcccuguuaaaaga

SEQ ID NO: 2747828 - RNA, 17 nt, Human
gcccuguuaaaagauga

SEQ ID NO: 2747829 - RNA, 13 nt, Human
gcccuguuaaaag

SEQ ID NO: 2747830 - RNA, 21 nt, Human
ccagcagccagcucucagcca

SEQ ID NO: 2747831 - RNA, 15 nt, Human
ccaggggccaugaau

SEQ ID NO: 2747832 - RNA, 18 nt, Human
ccaggaguuuggccagaa

SEQ ID NO: 2747833 - RNA, 14 nt, Human
ccaggaguuuggcc

SEQ ID NO: 2747834 - RNA, 15 nt, Human
ccaggaguuuggcca

SEQ ID NO: 2747835 - RNA, 16 nt, Human
ccaggaguuuggccag

SEQ ID NO: 2747836 - RNA, 17 nt, Human
ccaggaguuuggccaga

SEQ ID NO: 2747837 - RNA, 18 nt, Human
ccagacuagauguaguau

SEQ ID NO: 2747838 - RNA, 22 nt, Human
ccagacuagauguaguauuuuu

SEQ ID NO: 2747839 - RNA, 19 nt, Human
ccacuuggucugugagaug

SEQ ID NO: 2747840 - RNA, 17 nt, Human
ccacuuggucugugaga

SEQ ID NO: 2747841 - RNA, 16 nt, Human
ccacuuggucugugag

SEQ ID NO: 2747842 - RNA, 15 nt, Human
ccacuuggucuguga

SEQ ID NO: 2747843 - RNA, 22 nt, Human
ccacuuggucugugagaugcua

SEQ ID NO: 2747844 - RNA, 20 nt, Human
ccacuuggucugugagaugc

SEQ ID NO: 2747845 - RNA, 12 nt, Human
ccacuuggucug

SEQ ID NO: 2747846 - RNA, 13 nt, Human
ccauuuaaagcuu

SEQ ID NO: 2747847 - RNA, 22 nt, Human
ccauuguggucacaggaaguag

SEQ ID NO: 2747848 - RNA, 18 nt, Human
ccaugggcacugugggua

SEQ ID NO: 2747849 - RNA, 15 nt, Human
ccccauuguggucac

SEQ ID NO: 2747850 - RNA, 13 nt, Human
ccucaugcugcca

SEQ ID NO: 2747851 - RNA, 15 nt, Human
ccucaugcugccaau

SEQ ID NO: 2747852 - RNA, 23 nt, Human
ccucccagaggagccaccaguuc

SEQ ID NO: 2747853 - RNA, 20 nt, Human
ccucccagaggagccaccag

SEQ ID NO: 2747854 - RNA, 21 nt, Human
ccucccagaggagccaccagu

SEQ ID NO: 2747855 - RNA, 16 nt, Human
ccucaugcugccaaua

SEQ ID NO: 2747856 - RNA, 22 nt, Human
ccucuccugggcagcugccucc

SEQ ID NO: 2747857 - RNA, 21 nt, Human
ccucuccugggcagcugccuc

SEQ ID NO: 2747858 - RNA, 16 nt, Human
ccucuccugggcagcu

SEQ ID NO: 2747859 - RNA, 15 nt, Human
ccucuccugggcagc

SEQ ID NO: 2747860 - RNA, 14 nt, Human
ccucuccugggcag

SEQ ID NO: 2747861 - RNA, 20 nt, Human
ccucuccugggcagcugccu

SEQ ID NO: 2747862 - RNA, 19 nt, Human
ccucuccugggcagcugcc

SEQ ID NO: 2747863 - RNA, 18 nt, Human
ccucuccugggcagcugc

SEQ ID NO: 2747864 - RNA, 17 nt, Human
ccucuccugggcagcug

SEQ ID NO: 2747865 - RNA, 13 nt, Human
cccucggagaaga

SEQ ID NO: 2747866 - RNA, 22 nt, Human
cccugagcucgguggacccagg

SEQ ID NO: 2747867 - RNA, 14 nt, Human
cccugagcaggauu

SEQ ID NO: 2747868 - RNA, 12 nt, Human
cccugagcucgg

SEQ ID NO: 2747869 - RNA, 20 nt, Human
ccuagccgaccucagccuuc

SEQ ID NO: 2747870 - RNA, 19 nt, Human
ccuagccgaccucagccuu

SEQ ID NO: 2747871 - RNA, 18 nt, Human
ccuagccgaccucagccu

SEQ ID NO: 2747872 - RNA, 17 nt, Human
ccuagccgaccucagcc

SEQ ID NO: 2747873 - RNA, 16 nt, Human
ccuagccgaccucagc

SEQ ID NO: 2747874 - RNA, 15 nt, Human
ccuagccgaccucag

SEQ ID NO: 2747875 - RNA, 14 nt, Human
ccuagccgaccuca

SEQ ID NO: 2747876 - RNA, 20 nt, Human
ccuaacgaaguauccuucag

SEQ ID NO: 2747877 - RNA, 22 nt, Human
cucuguccagggcccugagcuc

SEQ ID NO: 2747878 - RNA, 18 nt, Human
cucgguggacccagggau

SEQ ID NO: 2747879 - RNA, 15 nt, Human
cucuccccaugaugu

SEQ ID NO: 2747880 - RNA, 16 nt, Human
cucuccccaugauguu

SEQ ID NO: 2747881 - RNA, 19 nt, Human
cucuauguucuaagaagug

SEQ ID NO: 2747882 - RNA, 13 nt, Human
cucucuggccuuc

SEQ ID NO: 2747883 - RNA, 16 nt, Human
cucucuggccuucggc

SEQ ID NO: 2747884 - RNA, 14 nt, Human
cucucuggccuucg

SEQ ID NO: 2747885 - RNA, 16 nt, Human
cucucuguaauaaacu

SEQ ID NO: 2747886 - RNA, 21 nt, Human
cucucuguaauaaacucauuu

SEQ ID NO: 2747887 - RNA, 16 nt, Human
cucucuucucuccagc

SEQ ID NO: 2747888 - RNA, 13 nt, Human
cuccucugcacuc

SEQ ID NO: 2747889 - RNA, 12 nt, Human
cuccucugcacu

SEQ ID NO: 2747890 - RNA, 22 nt, Human
cuccucugcuugccaucccucc

SEQ ID NO: 2747891 - RNA, 18 nt, Human
cuccucuguccagggccc

SEQ ID NO: 2747892 - RNA, 17 nt, Human
cuccucuguccagggcc

SEQ ID NO: 2747893 - RNA, 14 nt, Human
cuccucuguccagg

SEQ ID NO: 2747894 - RNA, 16 nt, Human
cuccucuguccagggc

SEQ ID NO: 2747895 - RNA, 15 nt, Human
cuccucuguccaggg

SEQ ID NO: 2747896 - RNA, 15 nt, Human
cuccugucugccagc

SEQ ID NO: 2747897 - RNA, 14 nt, Human
cuccugucugccag

SEQ ID NO: 2747898 - RNA, 16 nt, Human
cuccugucugccagcc

SEQ ID NO: 2747899 - RNA, 13 nt, Human
cuccugucugcca

SEQ ID NO: 2747900 - RNA, 15 nt, Human
cucccagaggagcca

SEQ ID NO: 2747901 - RNA, 23 nt, Human
cucauggguggcacucagucucu

SEQ ID NO: 2747902 - RNA, 15 nt, Human
cucauggguggcacu

SEQ ID NO: 2747903 - RNA, 19 nt, Human
cucauggguggcacucagu

SEQ ID NO: 2747904 - RNA, 14 nt, Human
cucauggguggcac

SEQ ID NO: 2747905 - RNA, 22 nt, Human
cucccuccaccucccugcaaua

SEQ ID NO: 2747906 - RNA, 21 nt, Human
cucccuccaccucccugcaau

SEQ ID NO: 2747907 - RNA, 20 nt, Human
cucccuccaccucccugcaa

SEQ ID NO: 2747908 - RNA, 19 nt, Human
cucccuccaccucccugca

SEQ ID NO: 2747909 - RNA, 16 nt, Human
cucaguccaugaagau

SEQ ID NO: 2747910 - RNA, 23 nt, Human
cuaugucauuugcuggagcucug

SEQ ID NO: 2747911 - RNA, 18 nt, Human
cuaucucauuuccaagca

SEQ ID NO: 2747912 - RNA, 18 nt, Human
cuauguucuaagaaguga

SEQ ID NO: 2747913 - RNA, 18 nt, Human
ccuuagcuuagaccucag

SEQ ID NO: 2747914 - RNA, 17 nt, Human
ccuuagcuuagaccuca

SEQ ID NO: 2747915 - RNA, 14 nt, Human
ccuuauaguuacug

SEQ ID NO: 2747916 - RNA, 21 nt, Human
ccuuauaguuacuguguaauu

SEQ ID NO: 2747917 - RNA, 22 nt, Human
ccuuagcuuagaccucagccug

SEQ ID NO: 2747918 - RNA, 21 nt, Human
ccuuagcuuagaccucagccu

SEQ ID NO: 2747919 - RNA, 20 nt, Human
ccuuagcuuagaccucagcc

SEQ ID NO: 2747920 - RNA, 19 nt, Human
ccuuagcuuagaccucagc

SEQ ID NO: 2747921 - RNA, 23 nt, Human
ccuuagcuuagaccucagccugu

SEQ ID NO: 2747922 - RNA, 13 nt, Human
ccuugccagacau

SEQ ID NO: 2747923 - RNA, 22 nt, Human
ccuuccccuugcccagggcuca

SEQ ID NO: 2747924 - RNA, 20 nt, Human
ccuuccccuugcccagggcu

SEQ ID NO: 2747925 - RNA, 18 nt, Human
ccuuccccuugcccaggg

SEQ ID NO: 2747926 - RNA, 17 nt, Human
ccuucucuucacaguca

SEQ ID NO: 2747927 - RNA, 18 nt, Human
cuaaagcaguggacacca

SEQ ID NO: 2747928 - RNA, 11 nt, Human
cuaaagcagug

SEQ ID NO: 2747929 - RNA, 20 nt, Human
cuaacgaaguauccuucagc

SEQ ID NO: 2747930 - RNA, 19 nt, Human
cuaauaaaaaggugaccau

SEQ ID NO: 2747931 - RNA, 20 nt, Human
cuacaaaaacacagcaaggg

SEQ ID NO: 2747932 - RNA, 12 nt, Human
ccuuuucccaac

SEQ ID NO: 2747933 - RNA, 22 nt, Human
auucaaggaauuucuuaacuuc

SEQ ID NO: 2747934 - RNA, 22 nt, Human
auugaggacacugauauggguc

SEQ ID NO: 2747935 - RNA, 16 nt, Human
auuucagcagcugcag

SEQ ID NO: 2747936 - RNA, 15 nt, Human
auuuaucuauaauuu

SEQ ID NO: 2747937 - RNA, 10 nt, Human
auuuaucuau

SEQ ID NO: 2747938 - RNA, 11 nt, Human
auuuaucuaua

SEQ ID NO: 2747939 - RNA, 16 nt, Human
auuuuuauauuugaaa

SEQ ID NO: 2747940 - RNA, 19 nt, Human
auuuuuauauuugaaauau

SEQ ID NO: 2747941 - RNA, 17 nt, Human
caaacauauauaacaau

SEQ ID NO: 2747942 - RNA, 21 nt, Human
caaaagguauuuuaaucacca

SEQ ID NO: 2747943 - RNA, 15 nt, Human
auuugcagagacagg

SEQ ID NO: 2747944 - RNA, 22 nt, Human
auuugcagagacaggaccugac

SEQ ID NO: 2747945 - RNA, 19 nt, Human
auuugcagagacaggaccu

SEQ ID NO: 2747946 - RNA, 19 nt, Human
auuuucuauaauuuaaaua

SEQ ID NO: 2747947 - RNA, 17 nt, Human
auuuucuauaauuuaaa

SEQ ID NO: 2747948 - RNA, 18 nt, Human
auuuucuauaauuuaaau

SEQ ID NO: 2747949 - RNA, 17 nt, Human
caccaggagucccuggu

SEQ ID NO: 2747950 - RNA, 13 nt, Human
cacaucagcuugc

SEQ ID NO: 2747951 - RNA, 23 nt, Human
cacaucagcuugcccuguuaaaa

SEQ ID NO: 2747952 - RNA, 23 nt, Human
cacugaagaagcaccaaucauga

SEQ ID NO: 2747953 - RNA, 11 nt, Human
cacugaagaag

SEQ ID NO: 2747954 - RNA, 21 nt, Human
cacuccagugagacagcucug

SEQ ID NO: 2747955 - RNA, 16 nt, Human
cacuccagugagacag

SEQ ID NO: 2747956 - RNA, 14 nt, Human
caagcacagcccuu

SEQ ID NO: 2747957 - RNA, 14 nt, Human
caagcaaguauuag

SEQ ID NO: 2747958 - RNA, 12 nt, Human
caacuccagaaa

SEQ ID NO: 2747959 - RNA, 19 nt, Human
caacuaucucauuuccaag

SEQ ID NO: 2747960 - RNA, 19 nt, Human
caacuauauuguuugcuaa

SEQ ID NO: 2747961 - RNA, 17 nt, Human
caaguucaugcagcugu

SEQ ID NO: 2747962 - RNA, 17 nt, Human
caaucagccuaguugau

SEQ ID NO: 2747963 - RNA, 21 nt, Human
caauauuucagauaaucacaa

SEQ ID NO: 2747964 - RNA, 19 nt, Human
cagcuguaugauucccagc

SEQ ID NO: 2747965 - RNA, 20 nt, Human
cagcugccuccccuccucug

SEQ ID NO: 2747966 - RNA, 19 nt, Human
cagcugccuccccuccucu

SEQ ID NO: 2747967 - RNA, 18 nt, Human
cagcugccuccccuccuc

SEQ ID NO: 2747968 - RNA, 17 nt, Human
cagcugccuccccuccu

SEQ ID NO: 2747969 - RNA, 16 nt, Human
cagcugccuccccucc

SEQ ID NO: 2747970 - RNA, 15 nt, Human
cagcugccuccccuc

SEQ ID NO: 2747971 - RNA, 14 nt, Human
cagcugccuccccu

SEQ ID NO: 2747972 - RNA, 9 nt, Human
cagcugccu

SEQ ID NO: 2747973 - RNA, 10 nt, Human
cagcugccuc

SEQ ID NO: 2747974 - RNA, 11 nt, Human
cagcugccucc

SEQ ID NO: 2747975 - RNA, 20 nt, Human
cagcuuauugucuagugaaa

SEQ ID NO: 2747976 - RNA, 17 nt, Human
cagcuuauucacaagac

SEQ ID NO: 2747977 - RNA, 20 nt, Human
cagcuguaugauucccagcc

SEQ ID NO: 2747978 - RNA, 14 nt, Human
cagcuuauugucua

SEQ ID NO: 2747979 - RNA, 16 nt, Human
caggaaagagaacuuc

SEQ ID NO: 2747980 - RNA, 14 nt, Human
cagggcucagccug

SEQ ID NO: 2747981 - RNA, 13 nt, Human
cagggcucagccu

SEQ ID NO: 2747982 - RNA, 12 nt, Human
cagggcucagcc

SEQ ID NO: 2747983 - RNA, 22 nt, Human
cagggcuuuacuccguaacaga

SEQ ID NO: 2747984 - RNA, 11 nt, Human
caggcuacugu

SEQ ID NO: 2747985 - RNA, 23 nt, Human
cagagcugcccucuccugggcag

SEQ ID NO: 2747986 - RNA, 21 nt, Human
cagagcugcccucuccugggc

SEQ ID NO: 2747987 - RNA, 20 nt, Human
cagagcugcccucuccuggg

SEQ ID NO: 2747988 - RNA, 19 nt, Human
cagagcugcccucuccugg

SEQ ID NO: 2747989 - RNA, 18 nt, Human
cagagcugcccucuccug

SEQ ID NO: 2747990 - RNA, 14 nt, Human
cagccagacuggca

SEQ ID NO: 2747991 - RNA, 19 nt, Human
cagcacuaaagcaguggac

SEQ ID NO: 2747992 - RNA, 17 nt, Human
cagcacuaaagcagugg

SEQ ID NO: 2747993 - RNA, 14 nt, Human
cagcacuaaagcag

SEQ ID NO: 2747994 - RNA, 20 nt, Human
cagcacuaaagcaguggaca

SEQ ID NO: 2747995 - RNA, 15 nt, Human
cagccagacuggcac

SEQ ID NO: 2747996 - RNA, 18 nt, Human
cagccagacuggcacagu

SEQ ID NO: 2747997 - RNA, 23 nt, Human
cagccagcaguucagagcugccc

SEQ ID NO: 2747998 - RNA, 19 nt, Human
cagacagcagcucaggcac

SEQ ID NO: 2747999 - RNA, 18 nt, Human
cagacagcagcucaggca

SEQ ID NO: 2748000 - RNA, 17 nt, Human
cagacagcagcucaggc

SEQ ID NO: 2748001 - RNA, 16 nt, Human
cagacagcagcucagg

SEQ ID NO: 2748002 - RNA, 15 nt, Human
cagacagcagcucag

SEQ ID NO: 2748003 - RNA, 13 nt, Human
cagacagcagcuc

SEQ ID NO: 2748004 - RNA, 22 nt, Human
cagacuggcacaguuuucugag

SEQ ID NO: 2748005 - RNA, 23 nt, Human
cagacuggcacaguuuucugaga

SEQ ID NO: 2748006 - RNA, 19 nt, Human
cagacuggauaguccgucu

SEQ ID NO: 2748007 - RNA, 17 nt, Human
cagacuggcacaguuuu

SEQ ID NO: 2748008 - RNA, 18 nt, Human
cagacuggcacaguuuuc

SEQ ID NO: 2748009 - RNA, 22 nt, Human
caguucagagcugcccucuccu

SEQ ID NO: 2748010 - RNA, 21 nt, Human
caguucagagcugcccucucc

SEQ ID NO: 2748011 - RNA, 19 nt, Human
caguucagagcugcccucu

SEQ ID NO: 2748012 - RNA, 18 nt, Human
caguucagagcugcccuc

SEQ ID NO: 2748013 - RNA, 24 nt, Human
caguucagagcugcccucuccugg

SEQ ID NO: 2748014 - RNA, 23 nt, Human
caguucagagcugcccucuccug

SEQ ID NO: 2748015 - RNA, 22 nt, Human
caguuauuauauuuacaaaugg

SEQ ID NO: 2748016 - RNA, 17 nt, Human
caguucagagcugcccu

SEQ ID NO: 2748017 - RNA, 16 nt, Human
caguucagagcugccc

SEQ ID NO: 2748018 - RNA, 15 nt, Human
caguucagagcugcc

SEQ ID NO: 2748019 - RNA, 14 nt, Human
cagucucucuucuc

SEQ ID NO: 2748020 - RNA, 17 nt, Human
cagucucucuucucucc

SEQ ID NO: 2748021 - RNA, 13 nt, Human
cagugggugcccc

SEQ ID NO: 2748022 - RNA, 22 nt, Human
cagugauuaccagggacugagg

SEQ ID NO: 2748023 - RNA, 22 nt, Human
cagucucucuucucuccagcug

SEQ ID NO: 2748024 - RNA, 13 nt, Human
caguuauggcuau

SEQ ID NO: 2748025 - RNA, 19 nt, Human
caguuauggcuauaggugc

SEQ ID NO: 2748026 - RNA, 20 nt, Human
caguuauggcuauaggugcu

SEQ ID NO: 2748027 - RNA, 17 nt, Human
caguuauuauauuuaca

SEQ ID NO: 2748028 - RNA, 21 nt, Human
caguuauuauauuuacaaaug

SEQ ID NO: 2748029 - RNA, 16 nt, Human
cauagguuuaauaauu

SEQ ID NO: 2748030 - RNA, 19 nt, Human
cauagcagcuuauucacaa

SEQ ID NO: 2748031 - RNA, 19 nt, Human
cauccugaggcuccacuug

SEQ ID NO: 2748032 - RNA, 18 nt, Human
cauccugaggcuccacuu

SEQ ID NO: 2748033 - RNA, 14 nt, Human
caucuggcucuaau

SEQ ID NO: 2748034 - RNA, 18 nt, Human
caucuggcucuaauucac

SEQ ID NO: 2748035 - RNA, 19 nt, Human
cauuauauuuauuacugua

SEQ ID NO: 2748036 - RNA, 21 nt, Human
ccaacuccagaaagugacaag

SEQ ID NO: 2748037 - RNA, 16 nt, Human
cauuuguauaaaauaa

SEQ ID NO: 2748038 - RNA, 14 nt, Human
cauuuguauaaaau

SEQ ID NO: 2748039 - RNA, 14 nt, Human
cauuuaucuauaau

SEQ ID NO: 2748040 - RNA, 16 nt, Human
cauuuaucuauaauuu

SEQ ID NO: 2748041 - RNA, 21 nt, Human
cauuuaucuauaauuuaccua

SEQ ID NO: 2748042 - RNA, 22 nt, Human
cauuuaucuauaauuuaccuaa

SEQ ID NO: 2748043 - RNA, 14 nt, Human
ccaaaaggcagaag

SEQ ID NO: 2748044 - RNA, 16 nt, Human
auuuaaauauuaaaua

SEQ ID NO: 2748045 - RNA, 22 nt, Human
auuuaccacuuguguuuugcaa

SEQ ID NO: 2748046 - RNA, 15 nt, Human
auuuaccacuugugu

SEQ ID NO: 2748047 - RNA, 16 nt, Human
auuguaguccuguaau

SEQ ID NO: 2748048 - RNA, 17 nt, Human
auuuaaaaaaaaaccug

SEQ ID NO: 2748049 - RNA, 20 nt, Human
auuuauuacuguaagaaaau

SEQ ID NO: 2748050 - RNA, 19 nt, Human
auuuauuacuguaagaaaa

SEQ ID NO: 2748051 - RNA, 17 nt, Human
auuuccuaauacuguca

SEQ ID NO: 2748052 - RNA, 21 nt, Human
auuuccuaauacugucauccu

SEQ ID NO: 2748053 - RNA, 17 nt, Human
auuucuuaacuucuugc

SEQ ID NO: 2748054 - RNA, 14 nt, Human
auuucuuaacuucu

SEQ ID NO: 2748055 - RNA, 19 nt, Human
auuucuuaacuucuugcuu

SEQ ID NO: 2748056 - RNA, 21 nt, Human
auuuauuuuaauaauguuuca

SEQ ID NO: 2748057 - RNA, 20 nt, Human
auuucuugagguaaaagcau

SEQ ID NO: 2748058 - RNA, 17 nt, Human
auuggagcucgugggac

SEQ ID NO: 2748059 - RNA, 16 nt, Human
auuggagcucguggaa

SEQ ID NO: 2748060 - RNA, 24 nt, Human
auuccuagaaacugacacaugcug

SEQ ID NO: 2748061 - RNA, 22 nt, Human
auugaacaaguuguuucauuga

SEQ ID NO: 2748062 - RNA, 17 nt, Human
auugaaggaugcugucu

SEQ ID NO: 2748063 - RNA, 16 nt, Human
uuuucucuaggaaaua

SEQ ID NO: 2748064 - RNA, 16 nt, Human
uuuucuauaauuuaaa

SEQ ID NO: 2748065 - RNA, 20 nt, Human
uuuucaggcuagauguaugu

SEQ ID NO: 2748066 - RNA, 14 nt, Human
uuuuccaacuacua

SEQ ID NO: 2748067 - RNA, 18 nt, Human
uuuuccaacuacuaauag

SEQ ID NO: 2748068 - RNA, 22 nt, Human
uuuuauggcacuaguauuucua

SEQ ID NO: 2748069 - RNA, 20 nt, Human
augugcuaguaauuggaaag

SEQ ID NO: 2748070 - RNA, 21 nt, Human
augugcuaguaauuggaaagg

SEQ ID NO: 2748071 - RNA, 16 nt, Human
auguccaacccgucug

SEQ ID NO: 2748072 - RNA, 19 nt, Human
auguauauuuuauaucaau

SEQ ID NO: 2748073 - RNA, 23 nt, Human
augucgucaaagcugaaauggac

SEQ ID NO: 2748074 - RNA, 17 nt, Human
uuuguaguguuggagaa

SEQ ID NO: 2748075 - RNA, 15 nt, Human
uuugacacugcucua

SEQ ID NO: 2748076 - RNA, 19 nt, Human
uuugcuaagcauuccaacu

SEQ ID NO: 2748077 - RNA, 20 nt, Human
uuugcuggagcucugcccau

SEQ ID NO: 2748078 - RNA, 22 nt, Human
auucaaacagucucaggaaauc

SEQ ID NO: 2748079 - RNA, 23 nt, Human
auuauuguguguuauuuaaauga

SEQ ID NO: 2748080 - RNA, 20 nt, Human
auuauauggcuugaguuuaa

SEQ ID NO: 2748081 - RNA, 17 nt, Human
auuccaagugauugaaa

SEQ ID NO: 2748082 - RNA, 15 nt, Human
uuuuugaagcuguau

SEQ ID NO: 2748083 - RNA, 15 nt, Human
uuuuguuuucauuau

SEQ ID NO: 2748084 - RNA, 21 nt, Human
uuuuguuggcauagcucuggg

SEQ ID NO: 2748085 - RNA, 13 nt, Human
uuuuguuggcaua

SEQ ID NO: 2748086 - RNA, 14 nt, Human
uuuugugaagcaaa

SEQ ID NO: 2748087 - RNA, 14 nt, Human
uuuugugaauuagg

SEQ ID NO: 2748088 - RNA, 18 nt, Human
auuagacacuuuggaaga

SEQ ID NO: 2748089 - RNA, 16 nt, Human
auuacuguaagaaaau

SEQ ID NO: 2748090 - RNA, 15 nt, Human
auuacuguaagaaaa

SEQ ID NO: 2748091 - RNA, 23 nt, Human
uugugaauuaggcuguaacuacu

SEQ ID NO: 2748092 - RNA, 18 nt, Human
uugugaauuaggcuguaa

SEQ ID NO: 2748093 - RNA, 19 nt, Human
uugugaauuaggcuguaac

SEQ ID NO: 2748094 - RNA, 14 nt, Human
uugucacuuuuucu

SEQ ID NO: 2748095 - RNA, 16 nt, Human
uugucacuuuuucuga

SEQ ID NO: 2748096 - RNA, 20 nt, Human
uugucaauaaaauccauaca

SEQ ID NO: 2748097 - RNA, 15 nt, Human
augagguacugagag

SEQ ID NO: 2748098 - RNA, 18 nt, Human
augagguacugagaguga

SEQ ID NO: 2748099 - RNA, 17 nt, Human
augagguacugagagug

SEQ ID NO: 2748100 - RNA, 13 nt, Human
augauuucauuca

SEQ ID NO: 2748101 - RNA, 18 nt, Human
uuuaaaaaaauuccaagu

SEQ ID NO: 2748102 - RNA, 12 nt, Human
augcaaagcacu

SEQ ID NO: 2748103 - RNA, 13 nt, Human
augcaaagcacug

SEQ ID NO: 2748104 - RNA, 14 nt, Human
augcaaagcacuga

SEQ ID NO: 2748105 - RNA, 21 nt, Human
uuuaaauauaugcuaagucuu

SEQ ID NO: 2748106 - RNA, 20 nt, Human
uuucacgccugaggcaauua

SEQ ID NO: 2748107 - RNA, 17 nt, Human
uuucaaacauauauaac

SEQ ID NO: 2748108 - RNA, 19 nt, Human
uuucaaacauauauaacaa

SEQ ID NO: 2748109 - RNA, 21 nt, Human
augcuucuguuuuauaauuuu

SEQ ID NO: 2748110 - RNA, 22 nt, Human
augcuguauuuuaaaagaauga

SEQ ID NO: 2748111 - RNA, 19 nt, Human
augcuguauuuuaaaagaa

SEQ ID NO: 2748112 - RNA, 23 nt, Human
augcuguauuuuaaaagaaugau

SEQ ID NO: 2748113 - RNA, 18 nt, Human
augcuacaggauuugaaa

SEQ ID NO: 2748114 - RNA, 22 nt, Human
augccuuuucccaacuccagaa

SEQ ID NO: 2748115 - RNA, 20 nt, Human
augccuuuucccaacuccag

SEQ ID NO: 2748116 - RNA, 14 nt, Human
augccuuuucccaa

SEQ ID NO: 2748117 - RNA, 15 nt, Human
uuuaccuaagauuac

SEQ ID NO: 2748118 - RNA, 17 nt, Human
uuuacuccguaacagau

SEQ ID NO: 2748119 - RNA, 19 nt, Human
uuuauaugcuucuguuuua

SEQ ID NO: 2748120 - RNA, 21 nt, Human
uuuauaugcuucuguuuuaua

SEQ ID NO: 2748121 - RNA, 20 nt, Human
uugcccagggcucagccugg

SEQ ID NO: 2748122 - RNA, 19 nt, Human
uugcccagggcucagccug

SEQ ID NO: 2748123 - RNA, 18 nt, Human
uugcccagggcucagccu

SEQ ID NO: 2748124 - RNA, 17 nt, Human
uugcccagggcucagcc

SEQ ID NO: 2748125 - RNA, 12 nt, Human
uugacuuuuuau

SEQ ID NO: 2748126 - RNA, 13 nt, Human
uugacaugggaca

SEQ ID NO: 2748127 - RNA, 14 nt, Human
aucuaccccagacu

SEQ ID NO: 2748128 - RNA, 20 nt, Human
aucuaccccagacuagaugu

SEQ ID NO: 2748129 - RNA, 21 nt, Human
aucuaccccagacuagaugua

SEQ ID NO: 2748130 - RNA, 22 nt, Human
aucuaccccagacuagauguag

SEQ ID NO: 2748131 - RNA, 19 nt, Human
aucucaaaacugcacuguc

SEQ ID NO: 2748132 - RNA, 20 nt, Human
aucucaaaacugcacuguca

SEQ ID NO: 2748133 - RNA, 15 nt, Human
aucucaaaacugcac

SEQ ID NO: 2748134 - RNA, 15 nt, Human
uuggagaagaacuga

SEQ ID NO: 2748135 - RNA, 22 nt, Human
uuggagaagaacugaaaucaua

SEQ ID NO: 2748136 - RNA, 17 nt, Human
uuggagaagaacugaaa

SEQ ID NO: 2748137 - RNA, 12 nt, Human
aucuuuaaaaua

SEQ ID NO: 2748138 - RNA, 15 nt, Human
aucuuuaaaauacac

SEQ ID NO: 2748139 - RNA, 16 nt, Human
aucuuauaauuuaaaa

SEQ ID NO: 2748140 - RNA, 15 nt, Human
aucuuauaauuuaaa

SEQ ID NO: 2748141 - RNA, 14 nt, Human
uuggguaggcggga

SEQ ID NO: 2748142 - RNA, 15 nt, Human
uuggcccaggaguuu

SEQ ID NO: 2748143 - RNA, 20 nt, Human
uuggcccaggaguuuggcca

SEQ ID NO: 2748144 - RNA, 21 nt, Human
uuggcccaggaguuuggccag

SEQ ID NO: 2748145 - RNA, 22 nt, Human
uuggcccaggaguuuggccaga

SEQ ID NO: 2748146 - RNA, 13 nt, Human
uuggcccaggagu

SEQ ID NO: 2748147 - RNA, 14 nt, Human
uuggcccaggaguu

SEQ ID NO: 2748148 - RNA, 18 nt, Human
augaacuuguaaaggaau

SEQ ID NO: 2748149 - RNA, 23 nt, Human
auaucuaccccagacuagaugua

SEQ ID NO: 2748150 - RNA, 21 nt, Human
auaucuaccccagacuagaug

SEQ ID NO: 2748151 - RNA, 23 nt, Human
uucagccuagccgaccucagccu

SEQ ID NO: 2748152 - RNA, 22 nt, Human
uucagccuagccgaccucagcc

SEQ ID NO: 2748153 - RNA, 21 nt, Human
uucagccuagccgaccucagc

SEQ ID NO: 2748154 - RNA, 20 nt, Human
uucagccuagccgaccucag

SEQ ID NO: 2748155 - RNA, 23 nt, Human
auaugcaaagcacugacuucuaa

SEQ ID NO: 2748156 - RNA, 16 nt, Human
auaugcaaagcacuga

SEQ ID NO: 2748157 - RNA, 15 nt, Human
auaugcaaagcacug

SEQ ID NO: 2748158 - RNA, 15 nt, Human
uucagcccucagaau

SEQ ID NO: 2748159 - RNA, 15 nt, Human
auauaacaaugcugu

SEQ ID NO: 2748160 - RNA, 12 nt, Human
auauaacaaugc

SEQ ID NO: 2748161 - RNA, 19 nt, Human
auauaagcuuguauuccuu

SEQ ID NO: 2748162 - RNA, 18 nt, Human
auauauaacaaugcugua

SEQ ID NO: 2748163 - RNA, 17 nt, Human
auauauaacaaugcugu

SEQ ID NO: 2748164 - RNA, 14 nt, Human
auauauaacaaugc

SEQ ID NO: 2748165 - RNA, 18 nt, Human
auagucaaauugugugaa

SEQ ID NO: 2748166 - RNA, 17 nt, Human
auagucaaauuguguga

SEQ ID NO: 2748167 - RNA, 17 nt, Human
uucaaggaauuucuuaa

SEQ ID NO: 2748168 - RNA, 19 nt, Human
uucaaggaauuucuuaacu

SEQ ID NO: 2748169 - RNA, 15 nt, Human
uucaaacauauauaa

SEQ ID NO: 2748170 - RNA, 15 nt, Human
uucacagugcucuuu

SEQ ID NO: 2748171 - RNA, 21 nt, Human
auaggaauugacccacaagaa

SEQ ID NO: 2748172 - RNA, 14 nt, Human
auagcuacuaauuu

SEQ ID NO: 2748173 - RNA, 17 nt, Human
auagcuacuaauuuuaa

SEQ ID NO: 2748174 - RNA, 19 nt, Human
auagcucuggggugggcag

SEQ ID NO: 2748175 - RNA, 22 nt, Human
auagcucuggggugggcaguuu

SEQ ID NO: 2748176 - RNA, 12 nt, Human
auagcucugggg

SEQ ID NO: 2748177 - RNA, 13 nt, Human
auagcucuggggu

SEQ ID NO: 2748178 - RNA, 18 nt, Human
auagcuacuaauuuuaaa

SEQ ID NO: 2748179 - RNA, 12 nt, Human
uuauuuaaauga

SEQ ID NO: 2748180 - RNA, 17 nt, Human
uuauuguuuaaaaucau

SEQ ID NO: 2748181 - RNA, 18 nt, Human
uucucaacuccaaacuga

SEQ ID NO: 2748182 - RNA, 14 nt, Human
uucucaacuccaaa

SEQ ID NO: 2748183 - RNA, 21 nt, Human
uucuguaccaguuaauuuuuc

SEQ ID NO: 2748184 - RNA, 20 nt, Human
aucauuucugcaucagcugc

SEQ ID NO: 2748185 - RNA, 23 nt, Human
aucccucccuccaccucccugca

SEQ ID NO: 2748186 - RNA, 13 nt, Human
aucccucccucca

SEQ ID NO: 2748187 - RNA, 11 nt, Human
aucccucccuc

SEQ ID NO: 2748188 - RNA, 11 nt, Human
uucuguaccag

SEQ ID NO: 2748189 - RNA, 12 nt, Human
uucuguaccagu

SEQ ID NO: 2748190 - RNA, 13 nt, Human
uucuguaccaguu

SEQ ID NO: 2748191 - RNA, 14 nt, Human
uucuguaccaguua

SEQ ID NO: 2748192 - RNA, 16 nt, Human
uucugcaucagcugcu

SEQ ID NO: 2748193 - RNA, 23 nt, Human
uucugcaucagcugcugaaacaa

SEQ ID NO: 2748194 - RNA, 14 nt, Human
uucugaagaagaug

SEQ ID NO: 2748195 - RNA, 13 nt, Human
uucugaagaagau

SEQ ID NO: 2748196 - RNA, 12 nt, Human
uucugaagaaga

SEQ ID NO: 2748197 - RNA, 13 nt, Human
uucauguuaguua

SEQ ID NO: 2748198 - RNA, 16 nt, Human
uucauguuaguuaccu

SEQ ID NO: 2748199 - RNA, 18 nt, Human
uucauguuaguuaccuua

SEQ ID NO: 2748200 - RNA, 22 nt, Human
uucauguuaguuaccuuauagu

SEQ ID NO: 2748201 - RNA, 23 nt, Human
auauuaaauauguuagcaaagag

SEQ ID NO: 2748202 - RNA, 19 nt, Human
auauuugaaauauugacuu

SEQ ID NO: 2748203 - RNA, 14 nt, Human
auauuugaaauauu

SEQ ID NO: 2748204 - RNA, 23 nt, Human
auauuugaaauauugacuuuuua

SEQ ID NO: 2748205 - RNA, 12 nt, Human
auauuuuaacuu

SEQ ID NO: 2748206 - RNA, 22 nt, Human
auauuuguaucacaaaucuuaa

SEQ ID NO: 2748207 - RNA, 13 nt, Human
auauuugaaauau

SEQ ID NO: 2748208 - RNA, 19 nt, Human
aucaauuuuucuuauuuca

SEQ ID NO: 2748209 - RNA, 22 nt, Human
aguggacaccaggagucccugg

SEQ ID NO: 2748210 - RNA, 20 nt, Human
aguggacaccaggagucccu

SEQ ID NO: 2748211 - RNA, 14 nt, Human
uguuccuagugaaa

SEQ ID NO: 2748212 - RNA, 18 nt, Human
uguuccuagugaaagagg

SEQ ID NO: 2748213 - RNA, 15 nt, Human
uguuauaaucuuuca

SEQ ID NO: 2748214 - RNA, 13 nt, Human
uguguaaguagau

SEQ ID NO: 2748215 - RNA, 20 nt, Human
uguggucacaggaaguagag

SEQ ID NO: 2748216 - RNA, 20 nt, Human
agugcuguuuauuaaucuua

SEQ ID NO: 2748217 - RNA, 21 nt, Human
agugcuguuuauuaaucuuag

SEQ ID NO: 2748218 - RNA, 22 nt, Human
agugcuguuuauuaaucuuagu

SEQ ID NO: 2748219 - RNA, 21 nt, Human
uguggcagaguuacaguucug

SEQ ID NO: 2748220 - RNA, 15 nt, Human
agugaaagaaaauaa

SEQ ID NO: 2748221 - RNA, 20 nt, Human
agugaacaaauuuacagaga

SEQ ID NO: 2748222 - RNA, 16 nt, Human
agugaacaaauuuaca

SEQ ID NO: 2748223 - RNA, 16 nt, Human
ugucacuuuuucugau

SEQ ID NO: 2748224 - RNA, 16 nt, Human
agucucaggaaaucaa

SEQ ID NO: 2748225 - RNA, 22 nt, Human
agucucaggaaaucaaauaugc

SEQ ID NO: 2748226 - RNA, 19 nt, Human
ugugagaugcuagaacucc

SEQ ID NO: 2748227 - RNA, 15 nt, Human
ugugagaugcuagaa

SEQ ID NO: 2748228 - RNA, 14 nt, Human
agucucucuucucu

SEQ ID NO: 2748229 - RNA, 18 nt, Human
agucucucuucucuccag

SEQ ID NO: 2748230 - RNA, 15 nt, Human
agucucucuucucuc

SEQ ID NO: 2748231 - RNA, 16 nt, Human
agucucucuucucucc

SEQ ID NO: 2748232 - RNA, 20 nt, Human
agugaaacucguuaauuugu

SEQ ID NO: 2748233 - RNA, 18 nt, Human
agucuuucacauuuaaau

SEQ ID NO: 2748234 - RNA, 19 nt, Human
auaaaauccauacauuugu

SEQ ID NO: 2748235 - RNA, 18 nt, Human
auaaaauccauacauuug

SEQ ID NO: 2748236 - RNA, 21 nt, Human
auaaaauaauuuuuauauuug

SEQ ID NO: 2748237 - RNA, 16 nt, Human
auaaaauaauuuuuau

SEQ ID NO: 2748238 - RNA, 15 nt, Human
auaaaauaauuuuua

SEQ ID NO: 2748239 - RNA, 18 nt, Human
uuaaguaaugauaacugg

SEQ ID NO: 2748240 - RNA, 22 nt, Human
uuaagaagacugcauuauauuu

SEQ ID NO: 2748241 - RNA, 20 nt, Human
uuaagaagacugcauuauau

SEQ ID NO: 2748242 - RNA, 15 nt, Human
auaacuaacaugucc

SEQ ID NO: 2748243 - RNA, 13 nt, Human
auaaauauaucua

SEQ ID NO: 2748244 - RNA, 21 nt, Human
auaaauauaucuaccccagac

SEQ ID NO: 2748245 - RNA, 18 nt, Human
auaaaguuggugacagau

SEQ ID NO: 2748246 - RNA, 16 nt, Human
auaaaguuggugacag

SEQ ID NO: 2748247 - RNA, 17 nt, Human
auaaaguuggugacaga

SEQ ID NO: 2748248 - RNA, 15 nt, Human
uuacuguaagaaaau

SEQ ID NO: 2748249 - RNA, 20 nt, Human
uuacuggccuuuuucauuua

SEQ ID NO: 2748250 - RNA, 12 nt, Human
uuaccugggaaa

SEQ ID NO: 2748251 - RNA, 14 nt, Human
uuaccuuacagaag

SEQ ID NO: 2748252 - RNA, 16 nt, Human
aguugcagauucauuu

SEQ ID NO: 2748253 - RNA, 13 nt, Human
aguuggugacaga

SEQ ID NO: 2748254 - RNA, 16 nt, Human
aguuuagcuggaaaag

SEQ ID NO: 2748255 - RNA, 14 nt, Human
uguuuauuaaucuu

SEQ ID NO: 2748256 - RNA, 15 nt, Human
uguuuauuaaucuua

SEQ ID NO: 2748257 - RNA, 17 nt, Human
uguuuauuaaucuuagu

SEQ ID NO: 2748258 - RNA, 19 nt, Human
uguuuucauuaucucaaaa

SEQ ID NO: 2748259 - RNA, 14 nt, Human
uguuuugcaagcca

SEQ ID NO: 2748260 - RNA, 16 nt, Human
aguucugaagaagaug

SEQ ID NO: 2748261 - RNA, 21 nt, Human
aguucugcagauaaacaguag

SEQ ID NO: 2748262 - RNA, 16 nt, Human
aguucugcagauaaac

SEQ ID NO: 2748263 - RNA, 16 nt, Human
ugggguccuggggccu

SEQ ID NO: 2748264 - RNA, 15 nt, Human
agggcucagccuggu

SEQ ID NO: 2748265 - RNA, 14 nt, Human
agggcucagccugg

SEQ ID NO: 2748266 - RNA, 23 nt, Human
ugggugccccccuugccagacau

SEQ ID NO: 2748267 - RNA, 14 nt, Human
ugguaacuuuugug

SEQ ID NO: 2748268 - RNA, 16 nt, Human
ugguaacuuuugugaa

SEQ ID NO: 2748269 - RNA, 24 nt, Human
ugguaacuuuugugaauuaggcug

SEQ ID NO: 2748270 - RNA, 18 nt, Human
aggggagcaugggaagug

SEQ ID NO: 2748271 - RNA, 13 nt, Human
agggcucagccug

SEQ ID NO: 2748272 - RNA, 12 nt, Human
agggcucagccu

SEQ ID NO: 2748273 - RNA, 16 nt, Human
agggcccugagcucgg

SEQ ID NO: 2748274 - RNA, 23 nt, Human
agggaggacgcucucuggccuuc

SEQ ID NO: 2748275 - RNA, 22 nt, Human
agggaggacgcucucuggccuu

SEQ ID NO: 2748276 - RNA, 21 nt, Human
agggaggacgcucucuggccu

SEQ ID NO: 2748277 - RNA, 13 nt, Human
agggaaauuucag

SEQ ID NO: 2748278 - RNA, 18 nt, Human
uguaguauuuuuuguaua

SEQ ID NO: 2748279 - RNA, 19 nt, Human
uguaguauuuuuuguauaa

SEQ ID NO: 2748280 - RNA, 20 nt, Human
uguaguauuuuuuguauaau

SEQ ID NO: 2748281 - RNA, 13 nt, Human
aguaaaauccaca

SEQ ID NO: 2748282 - RNA, 20 nt, Human
aguaaugauaacuggaaacu

SEQ ID NO: 2748283 - RNA, 18 nt, Human
aguaaugauaacuggaaa

SEQ ID NO: 2748284 - RNA, 17 nt, Human
aguaaugauaacuggaa

SEQ ID NO: 2748285 - RNA, 13 nt, Human
aguaaugauaacu

SEQ ID NO: 2748286 - RNA, 16 nt, Human
aguauuucuaugaaau

SEQ ID NO: 2748287 - RNA, 17 nt, Human
aguauuucuaugaaaua

SEQ ID NO: 2748288 - RNA, 18 nt, Human
aguauuucuaugaaauau

SEQ ID NO: 2748289 - RNA, 17 nt, Human
agucaccucauggaauu

SEQ ID NO: 2748290 - RNA, 15 nt, Human
agucaccucauggaa

SEQ ID NO: 2748291 - RNA, 14 nt, Human
agucaccucaugga

SEQ ID NO: 2748292 - RNA, 18 nt, Human
aguauuagaauaccacag

SEQ ID NO: 2748293 - RNA, 13 nt, Human
aguagucagacug

SEQ ID NO: 2748294 - RNA, 23 nt, Human
ugucaaaaaugucuuggguaggc

SEQ ID NO: 2748295 - RNA, 13 nt, Human
uguauuacaaauc

SEQ ID NO: 2748296 - RNA, 22 nt, Human
uguauuacaaauccaaugaaau

SEQ ID NO: 2748297 - RNA, 15 nt, Human
uguaucacaaaucuu

SEQ ID NO: 2748298 - RNA, 18 nt, Human
uguaucacaaaucuuaac

SEQ ID NO: 2748299 - RNA, 15 nt, Human
uguaguguuggagaa

SEQ ID NO: 2748300 - RNA, 14 nt, Human
uguaguguuggaga

SEQ ID NO: 2748301 - RNA, 16 nt, Human
uguaaaggaauuuaaa

SEQ ID NO: 2748302 - RNA, 21 nt, Human
agcuguggcagaguuacaguu

SEQ ID NO: 2748303 - RNA, 22 nt, Human
agcuguggcagaguuacaguuc

SEQ ID NO: 2748304 - RNA, 18 nt, Human
agcuguggcagaguuaca

SEQ ID NO: 2748305 - RNA, 14 nt, Human
agcuguucacagcc

SEQ ID NO: 2748306 - RNA, 12 nt, Human
agcucgguggac

SEQ ID NO: 2748307 - RNA, 15 nt, Human
agcucgguggaccca

SEQ ID NO: 2748308 - RNA, 14 nt, Human
agcucgguggaccc

SEQ ID NO: 2748309 - RNA, 19 nt, Human
agcucgguggacccaggga

SEQ ID NO: 2748310 - RNA, 18 nt, Human
agcucgguggacccaggg

SEQ ID NO: 2748311 - RNA, 17 nt, Human
agcucgguggacccagg

SEQ ID NO: 2748312 - RNA, 16 nt, Human
agcucgguggacccag

SEQ ID NO: 2748313 - RNA, 20 nt, Human
agcucgguggacccagggau

SEQ ID NO: 2748314 - RNA, 19 nt, Human
agcucuggggugggcaguu

SEQ ID NO: 2748315 - RNA, 20 nt, Human
agcucuggggugggcaguuu

SEQ ID NO: 2748316 - RNA, 21 nt, Human
agcucuggggugggcaguuuu

SEQ ID NO: 2748317 - RNA, 22 nt, Human
agcucuggggugggcaguuuuu

SEQ ID NO: 2748318 - RNA, 14 nt, Human
agcucugggguggg

SEQ ID NO: 2748319 - RNA, 21 nt, Human
agcugcaagguacucugguga

SEQ ID NO: 2748320 - RNA, 23 nt, Human
agcugcaagguacucuggugagu

SEQ ID NO: 2748321 - RNA, 16 nt, Human
agcugcccucuccugg

SEQ ID NO: 2748322 - RNA, 15 nt, Human
agcugcccucuccug

SEQ ID NO: 2748323 - RNA, 14 nt, Human
agcugcccucuccu

SEQ ID NO: 2748324 - RNA, 13 nt, Human
agcugcccucucc

SEQ ID NO: 2748325 - RNA, 19 nt, Human
ugcccuguuaaaagaugaa

SEQ ID NO: 2748326 - RNA, 20 nt, Human
ugcccuguuaaaagaugaaa

SEQ ID NO: 2748327 - RNA, 20 nt, Human
agcuugcccuggugccucac

SEQ ID NO: 2748328 - RNA, 16 nt, Human
agcuugcccuguuaaa

SEQ ID NO: 2748329 - RNA, 18 nt, Human
agcuugcccuguuaaaag

SEQ ID NO: 2748330 - RNA, 19 nt, Human
agcuugcccuguuaaaaga

SEQ ID NO: 2748331 - RNA, 22 nt, Human
ugcuaccaguauuuagaagcca

SEQ ID NO: 2748332 - RNA, 15 nt, Human
ugcuaccaguauuua

SEQ ID NO: 2748333 - RNA, 18 nt, Human
ugcuaccaguauuuagaa

SEQ ID NO: 2748334 - RNA, 14 nt, Human
ugcuacaaaaacac

SEQ ID NO: 2748335 - RNA, 19 nt, Human
ugccuuuucccaacuccag

SEQ ID NO: 2748336 - RNA, 17 nt, Human
ugccuuuucccaacucc

SEQ ID NO: 2748337 - RNA, 19 nt, Human
aggaaaucaaauaugcaaa

SEQ ID NO: 2748338 - RNA, 20 nt, Human
aggaaaucaaauaugcaaag

SEQ ID NO: 2748339 - RNA, 21 nt, Human
aggaaaucaaauaugcaaagc

SEQ ID NO: 2748340 - RNA, 22 nt, Human
aggaaaucaaauaugcaaagca

SEQ ID NO: 2748341 - RNA, 15 nt, Human
aggcccccaggugcc

SEQ ID NO: 2748342 - RNA, 14 nt, Human
uggaguugaaaauc

SEQ ID NO: 2748343 - RNA, 15 nt, Human
aggcagcuugaaacu

SEQ ID NO: 2748344 - RNA, 20 nt, Human
aggcacacuucuucuugguc

SEQ ID NO: 2748345 - RNA, 16 nt, Human
aggcacacuucuucuu

SEQ ID NO: 2748346 - RNA, 15 nt, Human
aggcacacuucuucu

SEQ ID NO: 2748347 - RNA, 12 nt, Human
aggcacacuucu

SEQ ID NO: 2748348 - RNA, 20 nt, Human
aggcagcucuaaaugucaau

SEQ ID NO: 2748349 - RNA, 23 nt, Human
aggcagggucaggagaggggcag

SEQ ID NO: 2748350 - RNA, 20 nt, Human
aggcagggucaggagagggg

SEQ ID NO: 2748351 - RNA, 14 nt, Human
aggcagggucagga

SEQ ID NO: 2748352 - RNA, 19 nt, Human
aggcagggucaggagaggg

SEQ ID NO: 2748353 - RNA, 17 nt, Human
aggcagggucaggagag

SEQ ID NO: 2748354 - RNA, 12 nt, Human
aggcaguuuucu

SEQ ID NO: 2748355 - RNA, 13 nt, Human
aggcaguuuucua

SEQ ID NO: 2748356 - RNA, 14 nt, Human
aggcaguuuucuaa

SEQ ID NO: 2748357 - RNA, 20 nt, Human
aggcauuuaggccaugggac

SEQ ID NO: 2748358 - RNA, 19 nt, Human
uggacuuaagcaucuggcu

SEQ ID NO: 2748359 - RNA, 14 nt, Human
uggagcucguggaa

SEQ ID NO: 2748360 - RNA, 21 nt, Human
uggagcucguggaacaguuac

SEQ ID NO: 2748361 - RNA, 17 nt, Human
uggagcucguggaacag

SEQ ID NO: 2748362 - RNA, 17 nt, Human
uggagccaaggguucag

SEQ ID NO: 2748363 - RNA, 16 nt, Human
uggaaauaaagucaga

SEQ ID NO: 2748364 - RNA, 12 nt, Human
uggaaauaaagu

SEQ ID NO: 2748365 - RNA, 14 nt, Human
uggaaauaaaguca

SEQ ID NO: 2748366 - RNA, 17 nt, Human
ugcuuuuaaaaaaaaau

SEQ ID NO: 2748367 - RNA, 17 nt, Human
aggagaaacuggaacuc

SEQ ID NO: 2748368 - RNA, 19 nt, Human
aggagaaacuggaacucuc

SEQ ID NO: 2748369 - RNA, 18 nt, Human
aggagaaacuggaacucu

SEQ ID NO: 2748370 - RNA, 20 nt, Human
aggacgcucucuggccuucg

SEQ ID NO: 2748371 - RNA, 19 nt, Human
aggacgcucucuggccuuc

SEQ ID NO: 2748372 - RNA, 17 nt, Human
aggacgcucucuggccu

SEQ ID NO: 2748373 - RNA, 16 nt, Human
aggacgcucucuggcc

SEQ ID NO: 2748374 - RNA, 14 nt, Human
aggacgcucucugg

SEQ ID NO: 2748375 - RNA, 13 nt, Human
aggacgcucucug

SEQ ID NO: 2748376 - RNA, 15 nt, Human
ugcacuccagccuga

SEQ ID NO: 2748377 - RNA, 17 nt, Human
ugcacuccagccugagc

SEQ ID NO: 2748378 - RNA, 22 nt, Human
ugcagaagacaguauggcagcu

SEQ ID NO: 2748379 - RNA, 13 nt, Human
ugauuucauucaa

SEQ ID NO: 2748380 - RNA, 20 nt, Human
ugcaaagcacugacuucuaa

SEQ ID NO: 2748381 - RNA, 22 nt, Human
ugcaaagcacugacuucuaagu

SEQ ID NO: 2748382 - RNA, 18 nt, Human
ugcaaagcacugacuucu

SEQ ID NO: 2748383 - RNA, 21 nt, Human
ugcaagccagauuuuccugaa

SEQ ID NO: 2748384 - RNA, 15 nt, Human
ugcaagccagauuuu

SEQ ID NO: 2748385 - RNA, 16 nt, Human
ugcaagcacagcccuu

SEQ ID NO: 2748386 - RNA, 15 nt, Human
ugcaagcacagcccu

SEQ ID NO: 2748387 - RNA, 16 nt, Human
ugcaagguacucuggu

SEQ ID NO: 2748388 - RNA, 18 nt, Human
ugcaagguacucugguga

SEQ ID NO: 2748389 - RNA, 21 nt, Human
ugcaauaaaauggguuuuacu

SEQ ID NO: 2748390 - RNA, 17 nt, Human
ugcaauaaaauggguuu

SEQ ID NO: 2748391 - RNA, 20 nt, Human
ugcauagauucccugagcag

SEQ ID NO: 2748392 - RNA, 13 nt, Human
ugcauacucauua

SEQ ID NO: 2748393 - RNA, 19 nt, Human
ugcauacucauuaggaugg

SEQ ID NO: 2748394 - RNA, 19 nt, Human
agccugagcgacagugaga

SEQ ID NO: 2748395 - RNA, 23 nt, Human
ugccagccagcagccagcucuca

SEQ ID NO: 2748396 - RNA, 22 nt, Human
ugccagccagcagccagcucuc

SEQ ID NO: 2748397 - RNA, 17 nt, Human
ugccagccagcagccag

SEQ ID NO: 2748398 - RNA, 16 nt, Human
ugccagccagcagcca

SEQ ID NO: 2748399 - RNA, 15 nt, Human
ugccagccagcagcc

SEQ ID NO: 2748400 - RNA, 17 nt, Human
ugccaguuauggcuaua

SEQ ID NO: 2748401 - RNA, 13 nt, Human
ugccauaauuacu

SEQ ID NO: 2748402 - RNA, 18 nt, Human
ugagugucuuaauuaaaa

SEQ ID NO: 2748403 - RNA, 18 nt, Human
agcagucaggaaagagaa

SEQ ID NO: 2748404 - RNA, 17 nt, Human
agcagucaggaaagaga

SEQ ID NO: 2748405 - RNA, 22 nt, Human
agcaguuugguuucuagcauga

SEQ ID NO: 2748406 - RNA, 23 nt, Human
agcaguuugguuucuagcaugaa

SEQ ID NO: 2748407 - RNA, 20 nt, Human
agcaguuugguuucuagcau

SEQ ID NO: 2748408 - RNA, 19 nt, Human
agcagucaggaaagagaac

SEQ ID NO: 2748409 - RNA, 13 nt, Human
agcauaccaacac

SEQ ID NO: 2748410 - RNA, 19 nt, Human
agcauaccaacacgagcag

SEQ ID NO: 2748411 - RNA, 22 nt, Human
agcauaccaacacgagcaggcu

SEQ ID NO: 2748412 - RNA, 19 nt, Human
agcagggcauggcugggaa

SEQ ID NO: 2748413 - RNA, 20 nt, Human
agcaggaagcugugagagca

SEQ ID NO: 2748414 - RNA, 16 nt, Human
agcaggcuacugucag

SEQ ID NO: 2748415 - RNA, 17 nt, Human
agcaggcuacugucagc

SEQ ID NO: 2748416 - RNA, 19 nt, Human
agcaggcuacugucagcuc

SEQ ID NO: 2748417 - RNA, 20 nt, Human
agcaggcuacugucagcucc

SEQ ID NO: 2748418 - RNA, 14 nt, Human
agcaggcuacuguc

SEQ ID NO: 2748419 - RNA, 12 nt, Human
agccaccaguuc

SEQ ID NO: 2748420 - RNA, 14 nt, Human
agccaccaguucuc

SEQ ID NO: 2748421 - RNA, 15 nt, Human
ugauuaaguaaugau

SEQ ID NO: 2748422 - RNA, 16 nt, Human
ugauuaaguaaugaua

SEQ ID NO: 2748423 - RNA, 22 nt, Human
agcauuuagauguauagguuga

SEQ ID NO: 2748424 - RNA, 21 nt, Human
agcaucauuauuugcagagac

SEQ ID NO: 2748425 - RNA, 20 nt, Human
agcaucacaugaacuuguaa

SEQ ID NO: 2748426 - RNA, 14 nt, Human
agagcacacuguag

SEQ ID NO: 2748427 - RNA, 14 nt, Human
agagcugcccucuc

SEQ ID NO: 2748428 - RNA, 13 nt, Human
agagcugcccucu

SEQ ID NO: 2748429 - RNA, 15 nt, Human
agagcugcccucucc

SEQ ID NO: 2748430 - RNA, 23 nt, Human
ugaaauaagccagacaucaacag

SEQ ID NO: 2748431 - RNA, 20 nt, Human
ugaaauaagccagacaucaa

SEQ ID NO: 2748432 - RNA, 18 nt, Human
ugaaauaagccagacauc

SEQ ID NO: 2748433 - RNA, 17 nt, Human
ugaaauaagccagacau

SEQ ID NO: 2748434 - RNA, 15 nt, Human
ugaaauuguauuaca

SEQ ID NO: 2748435 - RNA, 18 nt, Human
ugaaauauuauguuaaaa

SEQ ID NO: 2748436 - RNA, 18 nt, Human
ugaacaaauuuacagaga

SEQ ID NO: 2748437 - RNA, 20 nt, Human
ugaacaaauuuacagagaca

SEQ ID NO: 2748438 - RNA, 19 nt, Human
ugaacaaauuuacagagac

SEQ ID NO: 2748439 - RNA, 23 nt, Human
ugaacuagaguuuagcuggaaaa

SEQ ID NO: 2748440 - RNA, 22 nt, Human
agagcugcccucuccugggcag

SEQ ID NO: 2748441 - RNA, 19 nt, Human
agagcuguucacagccaga

SEQ ID NO: 2748442 - RNA, 21 nt, Human
agagcuguucacagccagacu

SEQ ID NO: 2748443 - RNA, 15 nt, Human
agagguugcagugag

SEQ ID NO: 2748444 - RNA, 23 nt, Human
ugacacaccaggcgcuaauucaa

SEQ ID NO: 2748445 - RNA, 16 nt, Human
ugacacaccaggcgcu

SEQ ID NO: 2748446 - RNA, 22 nt, Human
ugacacaccaggcgcuaauuca

SEQ ID NO: 2748447 - RNA, 17 nt, Human
ugacccacaagaaauga

SEQ ID NO: 2748448 - RNA, 17 nt, Human
agaugcaguucugaaga

SEQ ID NO: 2748449 - RNA, 19 nt, Human
agaugcaguucugaagaag

SEQ ID NO: 2748450 - RNA, 18 nt, Human
agaugcaguucugaagaa

SEQ ID NO: 2748451 - RNA, 15 nt, Human
agaugcuagaacucc

SEQ ID NO: 2748452 - RNA, 14 nt, Human
agaugcuagaacuc

SEQ ID NO: 2748453 - RNA, 17 nt, Human
agaguuuagcuggaaaa

SEQ ID NO: 2748454 - RNA, 16 nt, Human
agaguuuagcuggaaa

SEQ ID NO: 2748455 - RNA, 17 nt, Human
agacccucaugcugcca

SEQ ID NO: 2748456 - RNA, 11 nt, Human
agaccucagcc

SEQ ID NO: 2748457 - RNA, 19 nt, Human
agaccucagccugugcugc

SEQ ID NO: 2748458 - RNA, 17 nt, Human
agaccucagccugugcu

SEQ ID NO: 2748459 - RNA, 16 nt, Human
agaccucagccugugc

SEQ ID NO: 2748460 - RNA, 15 nt, Human
agaccucagccugug

SEQ ID NO: 2748461 - RNA, 14 nt, Human
agaccucagccugu

SEQ ID NO: 2748462 - RNA, 13 nt, Human
agaccucagccug

SEQ ID NO: 2748463 - RNA, 12 nt, Human
agaccucagccu

SEQ ID NO: 2748464 - RNA, 20 nt, Human
agaccucagccugugcugcc

SEQ ID NO: 2748465 - RNA, 23 nt, Human
agacuauucaaacagucucagga

SEQ ID NO: 2748466 - RNA, 16 nt, Human
ucuuauuucauuucuu

SEQ ID NO: 2748467 - RNA, 15 nt, Human
ucuuauuucauuucu

SEQ ID NO: 2748468 - RNA, 13 nt, Human
ucuuauuuauuau

SEQ ID NO: 2748469 - RNA, 15 nt, Human
agagacagaaagcag

SEQ ID NO: 2748470 - RNA, 24 nt, Human
agagacagaaagcagaacagugau

SEQ ID NO: 2748471 - RNA, 17 nt, Human
ucuggggugggcaguuu

SEQ ID NO: 2748472 - RNA, 20 nt, Human
ucuguccagggcccugagcu

SEQ ID NO: 2748473 - RNA, 19 nt, Human
ucuguccagggcccugagc

SEQ ID NO: 2748474 - RNA, 17 nt, Human
ucuguccagggcccuga

SEQ ID NO: 2748475 - RNA, 13 nt, Human
ucuguccagggcc

SEQ ID NO: 2748476 - RNA, 22 nt, Human
ucuuagaugcaguucugaagaa

SEQ ID NO: 2748477 - RNA, 23 nt, Human
ucuuagaugcaguucugaagaag

SEQ ID NO: 2748478 - RNA, 13 nt, Human
agacacuuuggaa

SEQ ID NO: 2748479 - RNA, 22 nt, Human
agaauucugcuaccucacuggg

SEQ ID NO: 2748480 - RNA, 20 nt, Human
agaauucugcuaccucacug

SEQ ID NO: 2748481 - RNA, 13 nt, Human
agaauucugcuac

SEQ ID NO: 2748482 - RNA, 17 nt, Human
agacacacugaagaagc

SEQ ID NO: 2748483 - RNA, 16 nt, Human
agacacacugaagaag

SEQ ID NO: 2748484 - RNA, 16 nt, Human
acuuguguuuugcaag

SEQ ID NO: 2748485 - RNA, 13 nt, Human
ucucaccuggacu

SEQ ID NO: 2748486 - RNA, 24 nt, Human
ucucaccuggacuuaagcaucugg

SEQ ID NO: 2748487 - RNA, 23 nt, Human
acuucuaaguaaaaccacagcag

SEQ ID NO: 2748488 - RNA, 16 nt, Human
acuugucaauaaaauc

SEQ ID NO: 2748489 - RNA, 20 nt, Human
acuugaacccgggaggcaga

SEQ ID NO: 2748490 - RNA, 19 nt, Human
acuugaacccgggaggcag

SEQ ID NO: 2748491 - RNA, 21 nt, Human
acuugaacccauauuuguaca

SEQ ID NO: 2748492 - RNA, 12 nt, Human
ucucuggccuuc

SEQ ID NO: 2748493 - RNA, 19 nt, Human
agaaacaguugguaacuuu

SEQ ID NO: 2748494 - RNA, 17 nt, Human
agaaacaguugguaacu

SEQ ID NO: 2748495 - RNA, 18 nt, Human
agaaacaguugguaacuu

SEQ ID NO: 2748496 - RNA, 23 nt, Human
ucucuggccuucggccuccaucc

SEQ ID NO: 2748497 - RNA, 22 nt, Human
ucucuggccuucggccuccauc

SEQ ID NO: 2748498 - RNA, 21 nt, Human
ucucuggccuucggccuccau

SEQ ID NO: 2748499 - RNA, 12 nt, Human
ucugaagaagau

SEQ ID NO: 2748500 - RNA, 22 nt, Human
ucggguuuuauuguuuaaaauc

SEQ ID NO: 2748501 - RNA, 13 nt, Human
acuguguaauuag

SEQ ID NO: 2748502 - RNA, 18 nt, Human
acuguggguagacacaca

SEQ ID NO: 2748503 - RNA, 21 nt, Human
acugucagcuccccucggaga

SEQ ID NO: 2748504 - RNA, 18 nt, Human
acugggacaggggagaac

SEQ ID NO: 2748505 - RNA, 17 nt, Human
acuuaagcaucuggcuc

SEQ ID NO: 2748506 - RNA, 20 nt, Human
acuuaagcaucuggcucuaa

SEQ ID NO: 2748507 - RNA, 21 nt, Human
acuuaagcaucuggcucuaau

SEQ ID NO: 2748508 - RNA, 23 nt, Human
ucuaaguaaaaccacagcaguug

SEQ ID NO: 2748509 - RNA, 16 nt, Human
ucuacauacuauggaa

SEQ ID NO: 2748510 - RNA, 20 nt, Human
ucuaaguaaaaccacagcag

SEQ ID NO: 2748511 - RNA, 21 nt, Human
ucuaaguaaaaccacagcagu

SEQ ID NO: 2748512 - RNA, 22 nt, Human
ucuaaguaaaaccacagcaguu

SEQ ID NO: 2748513 - RNA, 20 nt, Human
ucuaaagccauuguaguccu

SEQ ID NO: 2748514 - RNA, 13 nt, Human
acuggcacaguuu

SEQ ID NO: 2748515 - RNA, 19 nt, Human
acuggcacaguuuucugag

SEQ ID NO: 2748516 - RNA, 20 nt, Human
acuggcacaguuuucugaga

SEQ ID NO: 2748517 - RNA, 18 nt, Human
acugcucuaacagcccuc

SEQ ID NO: 2748518 - RNA, 19 nt, Human
acugccuucucaacuccaa

SEQ ID NO: 2748519 - RNA, 13 nt, Human
acugccuucucaa

SEQ ID NO: 2748520 - RNA, 15 nt, Human
acugcauuauauuua

SEQ ID NO: 2748521 - RNA, 14 nt, Human
acugcauuauauuu

SEQ ID NO: 2748522 - RNA, 15 nt, Human
uccuuguauuuaaau

SEQ ID NO: 2748523 - RNA, 18 nt, Human
ucgcuccaccuugcagcu

SEQ ID NO: 2748524 - RNA, 22 nt, Human
uccaacccgucuggcccaccag

SEQ ID NO: 2748525 - RNA, 23 nt, Human
uccaacccgucuggcccaccagg

SEQ ID NO: 2748526 - RNA, 21 nt, Human
uccaacuaucucauuuccaag

SEQ ID NO: 2748527 - RNA, 19 nt, Human
acgagcaggcuacugucag

SEQ ID NO: 2748528 - RNA, 20 nt, Human
acgagcaggcuacugucagc

SEQ ID NO: 2748529 - RNA, 14 nt, Human
acgagaaaacaaua

SEQ ID NO: 2748530 - RNA, 14 nt, Human
ucauccucaaagaa

SEQ ID NO: 2748531 - RNA, 15 nt, Human
ucauccgaggcaggg

SEQ ID NO: 2748532 - RNA, 14 nt, Human
ucauccgaggcagg

SEQ ID NO: 2748533 - RNA, 13 nt, Human
accucccugcaau

SEQ ID NO: 2748534 - RNA, 12 nt, Human
accucccugcaa

SEQ ID NO: 2748535 - RNA, 17 nt, Human
ucauccucaaagaaagu

SEQ ID NO: 2748536 - RNA, 18 nt, Human
ucauccucaaagaaagug

SEQ ID NO: 2748537 - RNA, 21 nt, Human
ucauccucaaagaaaguguau

SEQ ID NO: 2748538 - RNA, 22 nt, Human
ucauccucaaagaaaguguauu

SEQ ID NO: 2748539 - RNA, 23 nt, Human
ucauccucaaagaaaguguauug

SEQ ID NO: 2748540 - RNA, 16 nt, Human
ucaugaauuaguuuua

SEQ ID NO: 2748541 - RNA, 22 nt, Human
ucaggaaaucaaauaugcaaag

SEQ ID NO: 2748542 - RNA, 23 nt, Human
ucaggaaaucaaauaugcaaagc

SEQ ID NO: 2748543 - RNA, 16 nt, Human
accuagggugauauua

SEQ ID NO: 2748544 - RNA, 21 nt, Human
accuagggugauauuaaccag

SEQ ID NO: 2748545 - RNA, 20 nt, Human
accugacuauugaaguugca

SEQ ID NO: 2748546 - RNA, 21 nt, Human
ucccugguaauaaguacugug

SEQ ID NO: 2748547 - RNA, 18 nt, Human
acuccagaaagugacaag

SEQ ID NO: 2748548 - RNA, 21 nt, Human
acuccaaagaaauguaaggga

SEQ ID NO: 2748549 - RNA, 15 nt, Human
acuccaaagaaaugu

SEQ ID NO: 2748550 - RNA, 18 nt, Human
acuccaaagaaauguaag

SEQ ID NO: 2748551 - RNA, 14 nt, Human
acuccaaagaaaug

SEQ ID NO: 2748552 - RNA, 11 nt, Human
ucccugagcag

SEQ ID NO: 2748553 - RNA, 16 nt, Human
ucccucccuccaccuc

SEQ ID NO: 2748554 - RNA, 15 nt, Human
ucccucccuccaccu

SEQ ID NO: 2748555 - RNA, 23 nt, Human
ucccuccaccucccugcaauaaa

SEQ ID NO: 2748556 - RNA, 21 nt, Human
ucccuccaccucccugcaaua

SEQ ID NO: 2748557 - RNA, 14 nt, Human
ucccucccuccacc

SEQ ID NO: 2748558 - RNA, 13 nt, Human
ucccucccuccac

SEQ ID NO: 2748559 - RNA, 17 nt, Human
uccccucggagaagagc

SEQ ID NO: 2748560 - RNA, 16 nt, Human
uccccucggagaagag

SEQ ID NO: 2748561 - RNA, 17 nt, Human
uccccuugcccagggcu

SEQ ID NO: 2748562 - RNA, 24 nt, Human
uccccuugcccagggcucagccug

SEQ ID NO: 2748563 - RNA, 22 nt, Human
uccccuugcccagggcucagcc

SEQ ID NO: 2748564 - RNA, 20 nt, Human
uccccuugcccagggcucag

SEQ ID NO: 2748565 - RNA, 17 nt, Human
acuaacauguccugccu

SEQ ID NO: 2748566 - RNA, 18 nt, Human
ucccagccagcaguucag

SEQ ID NO: 2748567 - RNA, 17 nt, Human
ucccagccagcaguuca

SEQ ID NO: 2748568 - RNA, 14 nt, Human
ucccagucauuuaa

SEQ ID NO: 2748569 - RNA, 22 nt, Human
ucccagucauuuaauaaaugug

SEQ ID NO: 2748570 - RNA, 13 nt, Human
uccaugaagaugu

SEQ ID NO: 2748571 - RNA, 21 nt, Human
uccaugaagauguagaggaga

SEQ ID NO: 2748572 - RNA, 21 nt, Human
uccauccugaggcuccacuug

SEQ ID NO: 2748573 - RNA, 20 nt, Human
uccauccugaggcuccacuu

SEQ ID NO: 2748574 - RNA, 19 nt, Human
uccauccugaggcuccacu

SEQ ID NO: 2748575 - RNA, 20 nt, Human
ucaggaaaucaaauaugcaa

SEQ ID NO: 2748576 - RNA, 21 nt, Human
ucaggaaaucaaauaugcaaa

SEQ ID NO: 2748577 - RNA, 19 nt, Human
ucaggaaagagaacuucca

SEQ ID NO: 2748578 - RNA, 13 nt, Human
ucaggaaagagaa

SEQ ID NO: 2748579 - RNA, 21 nt, Human
ucagccuagccgaccucagcc

SEQ ID NO: 2748580 - RNA, 20 nt, Human
ucagccuagccgaccucagc

SEQ ID NO: 2748581 - RNA, 19 nt, Human
ucagccuagccgaccucag

SEQ ID NO: 2748582 - RNA, 18 nt, Human
ucagccuagccgaccuca

SEQ ID NO: 2748583 - RNA, 12 nt, Human
ucagagcugccc

SEQ ID NO: 2748584 - RNA, 21 nt, Human
ucagccaacgaguaauuuauu

SEQ ID NO: 2748585 - RNA, 18 nt, Human
ucagaagucaucuugcua

SEQ ID NO: 2748586 - RNA, 22 nt, Human
ucagaagucaucuugcuaccag

SEQ ID NO: 2748587 - RNA, 15 nt, Human
ucagaagucaucuug

SEQ ID NO: 2748588 - RNA, 23 nt, Human
accauuucuugagguaaaagcau

SEQ ID NO: 2748589 - RNA, 15 nt, Human
accaaucaugaauua

SEQ ID NO: 2748590 - RNA, 13 nt, Human
accaaucaugaau

SEQ ID NO: 2748591 - RNA, 20 nt, Human
ucaauuuuucuuauuucauu

SEQ ID NO: 2748592 - RNA, 23 nt, Human
ucaauuuuucuuauuucauuucu

SEQ ID NO: 2748593 - RNA, 15 nt, Human
ucaauucuugccaaa

SEQ ID NO: 2748594 - RNA, 17 nt, Human
accagaaaagcccaagu

SEQ ID NO: 2748595 - RNA, 18 nt, Human
accacuuguguuuugcaa

SEQ ID NO: 2748596 - RNA, 15 nt, Human
accacuucagggcuu

SEQ ID NO: 2748597 - RNA, 14 nt, Human
accagggacugagg

SEQ ID NO: 2748598 - RNA, 19 nt, Human
acauauauaacaaugcugu

SEQ ID NO: 2748599 - RNA, 18 nt, Human
acauagaauuaacacaug

SEQ ID NO: 2748600 - RNA, 14 nt, Human
acauagaauuaaca

SEQ ID NO: 2748601 - RNA, 13 nt, Human
acaucaacagaua

SEQ ID NO: 2748602 - RNA, 24 nt, Human
acaguugguaacuuuugugaauua

SEQ ID NO: 2748603 - RNA, 15 nt, Human
acaguugguaacuuu

SEQ ID NO: 2748604 - RNA, 16 nt, Human
acaguugguaacuuuu

SEQ ID NO: 2748605 - RNA, 14 nt, Human
acaguugguaacuu

SEQ ID NO: 2748606 - RNA, 13 nt, Human
uauuucauuucuu

SEQ ID NO: 2748607 - RNA, 18 nt, Human
acaguuuucugagaaaga

SEQ ID NO: 2748608 - RNA, 19 nt, Human
acaguuuucugagaaagac

SEQ ID NO: 2748609 - RNA, 20 nt, Human
acaguuuucugagaaagacu

SEQ ID NO: 2748610 - RNA, 21 nt, Human
acaguuuucugagaaagacua

SEQ ID NO: 2748611 - RNA, 16 nt, Human
acaguuuucugagaaa

SEQ ID NO: 2748612 - RNA, 17 nt, Human
acaguuuucugagaaag

SEQ ID NO: 2748613 - RNA, 15 nt, Human
acaguuuucugagaa

SEQ ID NO: 2748614 - RNA, 22 nt, Human
ucaagaugaugaugaucuuuaa

SEQ ID NO: 2748615 - RNA, 14 nt, Human
ucaaggcuuagacc

SEQ ID NO: 2748616 - RNA, 14 nt, Human
acaugcugaacauc

SEQ ID NO: 2748617 - RNA, 21 nt, Human
acaugcugaacaucacagcuu

SEQ ID NO: 2748618 - RNA, 23 nt, Human
acauguccugccuauuaucuguc

SEQ ID NO: 2748619 - RNA, 15 nt, Human
acaugucccuacacc

SEQ ID NO: 2748620 - RNA, 21 nt, Human
ucaaaauaugccccauucaac

SEQ ID NO: 2748621 - RNA, 23 nt, Human
ucaaaauaccaugccauuuaaag

SEQ ID NO: 2748622 - RNA, 21 nt, Human
ucaaaauaccaugccauuuaa

SEQ ID NO: 2748623 - RNA, 18 nt, Human
ucaaaagaaagaaaauca

SEQ ID NO: 2748624 - RNA, 14 nt, Human
ucaaagcugaaaug

SEQ ID NO: 2748625 - RNA, 19 nt, Human
acaugauccugcaauucca

SEQ ID NO: 2748626 - RNA, 15 nt, Human
uauauuuauuacugu

SEQ ID NO: 2748627 - RNA, 19 nt, Human
uauauuuauuacuguaaga

SEQ ID NO: 2748628 - RNA, 21 nt, Human
acagcccuucuuuccacagaa

SEQ ID NO: 2748629 - RNA, 20 nt, Human
acagcccuucuuuccacaga

SEQ ID NO: 2748630 - RNA, 15 nt, Human
acacuuaaaaauggu

SEQ ID NO: 2748631 - RNA, 13 nt, Human
acacuuaaaaaug

SEQ ID NO: 2748632 - RNA, 12 nt, Human
uauauuuacaaa

SEQ ID NO: 2748633 - RNA, 14 nt, Human
acacugaagaagca

SEQ ID NO: 2748634 - RNA, 12 nt, Human
acacugaagaag

SEQ ID NO: 2748635 - RNA, 14 nt, Human
acacuccagugaga

SEQ ID NO: 2748636 - RNA, 23 nt, Human
uauaaaauaauuuuuauauuuga

SEQ ID NO: 2748637 - RNA, 18 nt, Human
acacaugcugaacaucac

SEQ ID NO: 2748638 - RNA, 16 nt, Human
acaccccuccccugcc

SEQ ID NO: 2748639 - RNA, 23 nt, Human
acaccccuccccugcccuagagc

SEQ ID NO: 2748640 - RNA, 14 nt, Human
uauaacuaacaugu

SEQ ID NO: 2748641 - RNA, 19 nt, Human
acacuaagagagaaugaga

SEQ ID NO: 2748642 - RNA, 18 nt, Human
acacuaagagagaaugag

SEQ ID NO: 2748643 - RNA, 17 nt, Human
acacuaagagagaauga

SEQ ID NO: 2748644 - RNA, 12 nt, Human
uaguguuggaga

SEQ ID NO: 2748645 - RNA, 17 nt, Human
uaguguuggagaagaac

SEQ ID NO: 2748646 - RNA, 16 nt, Human
uaguguuggagaagaa

SEQ ID NO: 2748647 - RNA, 20 nt, Human
acacaggcaacugaggcaga

SEQ ID NO: 2748648 - RNA, 19 nt, Human
acacaggcaacugaggcag

SEQ ID NO: 2748649 - RNA, 16 nt, Human
acacaggcaacugagg

SEQ ID NO: 2748650 - RNA, 15 nt, Human
acacaggcaacugag

SEQ ID NO: 2748651 - RNA, 14 nt, Human
acacacugaagaag

SEQ ID NO: 2748652 - RNA, 17 nt, Human
acaaugcuguauuuuaa

SEQ ID NO: 2748653 - RNA, 14 nt, Human
acaaugcuguauuu

SEQ ID NO: 2748654 - RNA, 19 nt, Human
uagcuuagaccucagccug

SEQ ID NO: 2748655 - RNA, 18 nt, Human
uagcuuagaccucagccu

SEQ ID NO: 2748656 - RNA, 17 nt, Human
uagcuuagaccucagcc

SEQ ID NO: 2748657 - RNA, 16 nt, Human
uagcuuagaccucagc

SEQ ID NO: 2748658 - RNA, 23 nt, Human
uagcuuagaccucagccugugcu

SEQ ID NO: 2748659 - RNA, 20 nt, Human
uagcuuagaccucagccugu

SEQ ID NO: 2748660 - RNA, 17 nt, Human
acacaacuauauuguuu

SEQ ID NO: 2748661 - RNA, 14 nt, Human
acacaacuauauug

SEQ ID NO: 2748662 - RNA, 17 nt, Human
acacacaggcaacugag

SEQ ID NO: 2748663 - RNA, 20 nt, Human
acacacucaaaucaagaaac

SEQ ID NO: 2748664 - RNA, 13 nt, Human
acacacugaagaa

SEQ ID NO: 2748665 - RNA, 17 nt, Human
acacaccaggcgcuaau

SEQ ID NO: 2748666 - RNA, 14 nt, Human
acacaccaggcgcu

SEQ ID NO: 2748667 - RNA, 14 nt, Human
uacuaaaaauacaa

SEQ ID NO: 2748668 - RNA, 18 nt, Human
uacuaaaaauacaaaaaa

SEQ ID NO: 2748669 - RNA, 23 nt, Human
uacugggaaagggauuuucagcc

SEQ ID NO: 2748670 - RNA, 17 nt, Human
uacugagagugaacaaa

SEQ ID NO: 2748671 - RNA, 18 nt, Human
aauugaggacacugauau

SEQ ID NO: 2748672 - RNA, 19 nt, Human
aauuucucccagucauuua

SEQ ID NO: 2748673 - RNA, 12 nt, Human
aauuucuuaacu

SEQ ID NO: 2748674 - RNA, 15 nt, Human
aauuucuuaacuucu

SEQ ID NO: 2748675 - RNA, 16 nt, Human
aauuucuuaacuucuu

SEQ ID NO: 2748676 - RNA, 20 nt, Human
aauuucuuaacuucuugcuu

SEQ ID NO: 2748677 - RNA, 18 nt, Human
aauuuacagagacagaaa

SEQ ID NO: 2748678 - RNA, 17 nt, Human
aauuuacagagacagaa

SEQ ID NO: 2748679 - RNA, 19 nt, Human
uacuucuuaggguuaugau

SEQ ID NO: 2748680 - RNA, 16 nt, Human
uacuucaugcugucua

SEQ ID NO: 2748681 - RNA, 17 nt, Human
uagauaggccaugggca

SEQ ID NO: 2748682 - RNA, 22 nt, Human
uagauaggucagugcaaauacu

SEQ ID NO: 2748683 - RNA, 20 nt, Human
uagaugcaguucugaagaag

SEQ ID NO: 2748684 - RNA, 21 nt, Human
uagaugcaguucugaagaaga

SEQ ID NO: 2748685 - RNA, 21 nt, Human
aauuuuucuuauuucauuucu

SEQ ID NO: 2748686 - RNA, 22 nt, Human
aauuuuuucucuaggaaauauu

SEQ ID NO: 2748687 - RNA, 22 nt, Human
acaagcucacagaccuuugaac

SEQ ID NO: 2748688 - RNA, 17 nt, Human
acaaauuuacagagaca

SEQ ID NO: 2748689 - RNA, 15 nt, Human
uagcuuagaccucag

SEQ ID NO: 2748690 - RNA, 16 nt, Human
uagcuacuaauuuuaa

SEQ ID NO: 2748691 - RNA, 18 nt, Human
aauaggcguaacuaauuu

SEQ ID NO: 2748692 - RNA, 16 nt, Human
aauaggaauugguuuc

SEQ ID NO: 2748693 - RNA, 18 nt, Human
uaaccugucucaccugga

SEQ ID NO: 2748694 - RNA, 21 nt, Human
aauauccuaauaaaaagguga

SEQ ID NO: 2748695 - RNA, 15 nt, Human
aauauccuaauaaaa

SEQ ID NO: 2748696 - RNA, 19 nt, Human
aauauccuaauaaaaaggu

SEQ ID NO: 2748697 - RNA, 12 nt, Human
aauaucacuugu

SEQ ID NO: 2748698 - RNA, 15 nt, Human
aauaucacuugucaa

SEQ ID NO: 2748699 - RNA, 12 nt, Human
aauauccuaaua

SEQ ID NO: 2748700 - RNA, 13 nt, Human
aauauccuaauaa

SEQ ID NO: 2748701 - RNA, 14 nt, Human
aauauccuaauaaa

SEQ ID NO: 2748702 - RNA, 15 nt, Human
aauaugcaaagcacu

SEQ ID NO: 2748703 - RNA, 17 nt, Human
aauaugcaaagcacuga

SEQ ID NO: 2748704 - RNA, 24 nt, Human
aauaugcaaagcacugacuucuaa

SEQ ID NO: 2748705 - RNA, 20 nt, Human
aaucagaagucaucuugcua

SEQ ID NO: 2748706 - RNA, 24 nt, Human
aaucagaagucaucuugcuaccag

SEQ ID NO: 2748707 - RNA, 14 nt, Human
aauauuucagauaa

SEQ ID NO: 2748708 - RNA, 15 nt, Human
aauauuucagauaau

SEQ ID NO: 2748709 - RNA, 16 nt, Human
uaacuaacauguccug

SEQ ID NO: 2748710 - RNA, 13 nt, Human
uaacuacuuuaua

SEQ ID NO: 2748711 - RNA, 19 nt, Human
aauaucuuuuuuuuaauaa

SEQ ID NO: 2748712 - RNA, 12 nt, Human
aauaaaaaggug

SEQ ID NO: 2748713 - RNA, 13 nt, Human
aauaaaaagguga

SEQ ID NO: 2748714 - RNA, 16 nt, Human
aauaaaaaggugacca

SEQ ID NO: 2748715 - RNA, 17 nt, Human
aauaaagucagauggaa

SEQ ID NO: 2748716 - RNA, 21 nt, Human
aauaacaaugaaaguugauaa

SEQ ID NO: 2748717 - RNA, 16 nt, Human
aauaauuuuuauauuu

SEQ ID NO: 2748718 - RNA, 19 nt, Human
aauaauuuuuauauuugaa

SEQ ID NO: 2748719 - RNA, 17 nt, Human
aauaauuuuuauauuug

SEQ ID NO: 2748720 - RNA, 20 nt, Human
aauaauuuuuauauuugaaa

SEQ ID NO: 2748721 - RNA, 11 nt, Human
aaugugauaug

SEQ ID NO: 2748722 - RNA, 19 nt, Human
aauggacuuuuguacauag

SEQ ID NO: 2748723 - RNA, 19 nt, Human
uacacuaagagagaaugag

SEQ ID NO: 2748724 - RNA, 18 nt, Human
uacacuaagagagaauga

SEQ ID NO: 2748725 - RNA, 18 nt, Human
uaauucaaggaauuucuu

SEQ ID NO: 2748726 - RNA, 20 nt, Human
uaauucaaggaauuucuuaa

SEQ ID NO: 2748727 - RNA, 22 nt, Human
uaauucaaggaauuucuuaacu

SEQ ID NO: 2748728 - RNA, 13 nt, Human
uacaaaaacacag

SEQ ID NO: 2748729 - RNA, 14 nt, Human
uacaaaaacacagc

SEQ ID NO: 2748730 - RNA, 20 nt, Human
uaauuuauuguuuuuccuug

SEQ ID NO: 2748731 - RNA, 15 nt, Human
uacaaaaacacagca

SEQ ID NO: 2748732 - RNA, 23 nt, Human
aaucuuaguguaugauuacuggc

SEQ ID NO: 2748733 - RNA, 14 nt, Human
aaucuuauaauuua

SEQ ID NO: 2748734 - RNA, 16 nt, Human
aaucuuauaauuuaaa

SEQ ID NO: 2748735 - RNA, 13 nt, Human
aauccuugaagau

SEQ ID NO: 2748736 - RNA, 15 nt, Human
aaucaucaagucuuu

SEQ ID NO: 2748737 - RNA, 17 nt, Human
aaucaugaauuaguuuu

SEQ ID NO: 2748738 - RNA, 19 nt, Human
aaucaugaauuaguuuuau

SEQ ID NO: 2748739 - RNA, 23 nt, Human
aaucaugaauuaguuuuauaugc

SEQ ID NO: 2748740 - RNA, 14 nt, Human
uaaguacuguguac

SEQ ID NO: 2748741 - RNA, 16 nt, Human
uaaugauaacuggaaa

SEQ ID NO: 2748742 - RNA, 21 nt, Human
aaugagagacacacugaagaa

SEQ ID NO: 2748743 - RNA, 22 nt, Human
guggacccagggaugacauguc

SEQ ID NO: 2748744 - RNA, 18 nt, Human
aagaaugauuaugaauua

SEQ ID NO: 2748745 - RNA, 22 nt, Human
guggcacucagucucucuucuc

SEQ ID NO: 2748746 - RNA, 16 nt, Human
aagaaugauuaugaau

SEQ ID NO: 2748747 - RNA, 18 nt, Human
gugcuaguaauuggaaag

SEQ ID NO: 2748748 - RNA, 22 nt, Human
aagaagugaaaaucuacacucc

SEQ ID NO: 2748749 - RNA, 16 nt, Human
aagaagugaaaaucua

SEQ ID NO: 2748750 - RNA, 18 nt, Human
guggugggacagggaccc

SEQ ID NO: 2748751 - RNA, 15 nt, Human
guggguggggcagug

SEQ ID NO: 2748752 - RNA, 21 nt, Human
gugggacagucaccucaugga

SEQ ID NO: 2748753 - RNA, 15 nt, Human
aagacuguggcugcu

SEQ ID NO: 2748754 - RNA, 12 nt, Human
aagacuguggcu

SEQ ID NO: 2748755 - RNA, 19 nt, Human
aagagcuguucacagccag

SEQ ID NO: 2748756 - RNA, 18 nt, Human
aagacuguggcugcuagc

SEQ ID NO: 2748757 - RNA, 14 nt, Human
gugguuucauguua

SEQ ID NO: 2748758 - RNA, 21 nt, Human
gugugaccacugcagaagaca

SEQ ID NO: 2748759 - RNA, 13 nt, Human
guuagggaggggu

SEQ ID NO: 2748760 - RNA, 11 nt, Human
guuagggaggg

SEQ ID NO: 2748761 - RNA, 17 nt, Human
guuaguuaccuuauagu

SEQ ID NO: 2748762 - RNA, 22 nt, Human
guuaguuaccuuauaguuacug

SEQ ID NO: 2748763 - RNA, 23 nt, Human
guuaguuaccuuauaguuacugu

SEQ ID NO: 2748764 - RNA, 13 nt, Human
guuauuuaaauga

SEQ ID NO: 2748765 - RNA, 11 nt, Human
guuauuuaaau

SEQ ID NO: 2748766 - RNA, 15 nt, Human
guuauuuaaaugagu

SEQ ID NO: 2748767 - RNA, 13 nt, Human
guugacaugggac

SEQ ID NO: 2748768 - RNA, 18 nt, Human
guugacaugggacauuug

SEQ ID NO: 2748769 - RNA, 14 nt, Human
guugacaugggaca

SEQ ID NO: 2748770 - RNA, 13 nt, Human
guucccucccaga

SEQ ID NO: 2748771 - RNA, 23 nt, Human
aagcuuguauuccuuuuucucuc

SEQ ID NO: 2748772 - RNA, 23 nt, Human
guuuucugagaaagacuauucaa

SEQ ID NO: 2748773 - RNA, 21 nt, Human
guuucaaacauauauaacaau

SEQ ID NO: 2748774 - RNA, 10 nt, Human
guuuaaaauc

SEQ ID NO: 2748775 - RNA, 16 nt, Human
guuuaaaaucauuucu

SEQ ID NO: 2748776 - RNA, 13 nt, Human
guuuaaagaaagu

SEQ ID NO: 2748777 - RNA, 22 nt, Human
guuuauuaaucuuaguguauga

SEQ ID NO: 2748778 - RNA, 20 nt, Human
guuuauuaaucuuaguguau

SEQ ID NO: 2748779 - RNA, 21 nt, Human
guuuauuaaucuuaguguaug

SEQ ID NO: 2748780 - RNA, 14 nt, Human
guuuauuaaucuua

SEQ ID NO: 2748781 - RNA, 18 nt, Human
guuuauuaaucuuagugu

SEQ ID NO: 2748782 - RNA, 18 nt, Human
guuguaccgcaaugugac

SEQ ID NO: 2748783 - RNA, 20 nt, Human
aacccauauuuguacaccaa

SEQ ID NO: 2748784 - RNA, 13 nt, Human
aacccaaauguuc

SEQ ID NO: 2748785 - RNA, 18 nt, Human
aacccaaauguucaucaa

SEQ ID NO: 2748786 - RNA, 20 nt, Human
aaccuagggugauauuaacc

SEQ ID NO: 2748787 - RNA, 12 nt, Human
aaccacagcagu

SEQ ID NO: 2748788 - RNA, 22 nt, Human
gucuuaauuaaaagaauauuuu

SEQ ID NO: 2748789 - RNA, 19 nt, Human
gucuuaauuaaaagaauau

SEQ ID NO: 2748790 - RNA, 21 nt, Human
gucuuaauuaaaagaauauuu

SEQ ID NO: 2748791 - RNA, 15 nt, Human
gugaacacaucagcu

SEQ ID NO: 2748792 - RNA, 18 nt, Human
aacucguuaauuuguagu

SEQ ID NO: 2748793 - RNA, 14 nt, Human
aacucccuuucaac

SEQ ID NO: 2748794 - RNA, 13 nt, Human
aacucccuuucaa

SEQ ID NO: 2748795 - RNA, 21 nt, Human
aacuccagaaagugacaagcu

SEQ ID NO: 2748796 - RNA, 14 nt, Human
aacuccagaaagug

SEQ ID NO: 2748797 - RNA, 24 nt, Human
guccaagcauaccaacacgagcag

SEQ ID NO: 2748798 - RNA, 21 nt, Human
guccaagcauuuagauguaua

SEQ ID NO: 2748799 - RNA, 15 nt, Human
aacaaggaugaauua

SEQ ID NO: 2748800 - RNA, 21 nt, Human
aacaagccuccuuuuaaagua

SEQ ID NO: 2748801 - RNA, 22 nt, Human
aacaguugguaacuuuugugaa

SEQ ID NO: 2748802 - RNA, 21 nt, Human
aacaguugguaacuuuuguga

SEQ ID NO: 2748803 - RNA, 22 nt, Human
aacaguagugauaguuguaccg

SEQ ID NO: 2748804 - RNA, 18 nt, Human
aacauuugguaaggggaa

SEQ ID NO: 2748805 - RNA, 19 nt, Human
aaauggcuuccuggcaaua

SEQ ID NO: 2748806 - RNA, 14 nt, Human
aaaugcauuucuaa

SEQ ID NO: 2748807 - RNA, 18 nt, Human
aaaugaguguguuuguca

SEQ ID NO: 2748808 - RNA, 12 nt, Human
aaaugagugugu

SEQ ID NO: 2748809 - RNA, 22 nt, Human
aaaugaaagcagggacuugaac

SEQ ID NO: 2748810 - RNA, 21 nt, Human
aaaugaaagcagggacuugaa

SEQ ID NO: 2748811 - RNA, 14 nt, Human
aaauccuugaagau

SEQ ID NO: 2748812 - RNA, 19 nt, Human
aaaucuacacuccagugag

SEQ ID NO: 2748813 - RNA, 14 nt, Human
guaugauucccagc

SEQ ID NO: 2748814 - RNA, 21 nt, Human
guaugauuacuggccuuuuuc

SEQ ID NO: 2748815 - RNA, 22 nt, Human
aaauguaagggaaacugccagc

SEQ ID NO: 2748816 - RNA, 17 nt, Human
aaauucccguuuuguca

SEQ ID NO: 2748817 - RNA, 13 nt, Human
aaauucauuuuuu

SEQ ID NO: 2748818 - RNA, 19 nt, Human
aaauucauuuuuuaaauuc

SEQ ID NO: 2748819 - RNA, 17 nt, Human
aaauuucagcagcugca

SEQ ID NO: 2748820 - RNA, 18 nt, Human
aaauuucagcagcugcag

SEQ ID NO: 2748821 - RNA, 11 nt, Human
caccaguucuc

SEQ ID NO: 2748822 - RNA, 20 nt, Human
caccaguucucauggguggc

SEQ ID NO: 2748823 - RNA, 22 nt, Human
caccaggguccuuuugacacug

SEQ ID NO: 2748824 - RNA, 19 nt, Human
cacaggcaacugaggcaga

SEQ ID NO: 2748825 - RNA, 18 nt, Human
cacaggcaacugaggcag

SEQ ID NO: 2748826 - RNA, 17 nt, Human
cacaggcaacugaggca

SEQ ID NO: 2748827 - RNA, 14 nt, Human
cacaggcaacugag

SEQ ID NO: 2748828 - RNA, 13 nt, Human
cacaggcaacuga

SEQ ID NO: 2748829 - RNA, 21 nt, Human
cacaguuuucugagaaagacu

SEQ ID NO: 2748830 - RNA, 22 nt, Human
cacaguuuucugagaaagacua

SEQ ID NO: 2748831 - RNA, 20 nt, Human
cacaguuuucugagaaagac

SEQ ID NO: 2748832 - RNA, 16 nt, Human
cacaugaaguccaagc

SEQ ID NO: 2748833 - RNA, 20 nt, Human
cacaugaaguccaagcauuu

SEQ ID NO: 2748834 - RNA, 17 nt, Human
cacaugaaguccaagca

SEQ ID NO: 2748835 - RNA, 21 nt, Human
caauauccuaauaaaaaggug

SEQ ID NO: 2748836 - RNA, 20 nt, Human
caauauccuaauaaaaaggu

SEQ ID NO: 2748837 - RNA, 15 nt, Human
caauauccuaauaaa

SEQ ID NO: 2748838 - RNA, 16 nt, Human
caauauccuaauaaaa

SEQ ID NO: 2748839 - RNA, 18 nt, Human
caauauccuaauaaaaag

SEQ ID NO: 2748840 - RNA, 19 nt, Human
caauauccuaauaaaaagg

SEQ ID NO: 2748841 - RNA, 12 nt, Human
caauauccuaau

SEQ ID NO: 2748842 - RNA, 13 nt, Human
caauauccuaaua

SEQ ID NO: 2748843 - RNA, 14 nt, Human
caauauccuaauaa

SEQ ID NO: 2748844 - RNA, 18 nt, Human
cacaccaggcgcuaauuc

SEQ ID NO: 2748845 - RNA, 15 nt, Human
cacaagaaaugaaag

SEQ ID NO: 2748846 - RNA, 13 nt, Human
cacaagaaaugaa

SEQ ID NO: 2748847 - RNA, 23 nt, Human
cacaagacccaaaaggcagaagc

SEQ ID NO: 2748848 - RNA, 23 nt, Human
cacaagaaaugaaagcagggacu

SEQ ID NO: 2748849 - RNA, 23 nt, Human
caacugggguggguggggcagug

SEQ ID NO: 2748850 - RNA, 23 nt, Human
caaauuuacagagacagaaagca

SEQ ID NO: 2748851 - RNA, 17 nt, Human
caaauuuacagagacag

SEQ ID NO: 2748852 - RNA, 16 nt, Human
caaauuuacagagaca

SEQ ID NO: 2748853 - RNA, 20 nt, Human
caaggguucagagacucagg

SEQ ID NO: 2748854 - RNA, 19 nt, Human
caaggguucagagacucag

SEQ ID NO: 2748855 - RNA, 14 nt, Human
caagguacucuggu

SEQ ID NO: 2748856 - RNA, 16 nt, Human
caagguacucugguga

SEQ ID NO: 2748857 - RNA, 19 nt, Human
caagcauuuagauguauag

SEQ ID NO: 2748858 - RNA, 16 nt, Human
caagcauuuagaugua

SEQ ID NO: 2748859 - RNA, 21 nt, Human
caagcauaccaacacgagcag

SEQ ID NO: 2748860 - RNA, 16 nt, Human
caagcauaccaacacg

SEQ ID NO: 2748861 - RNA, 13 nt, Human
caagaaaugaaag

SEQ ID NO: 2748862 - RNA, 19 nt, Human
caagacugcacaucaaaau

SEQ ID NO: 2748863 - RNA, 16 nt, Human
caaagaguuaauauau

SEQ ID NO: 2748864 - RNA, 14 nt, Human
caaagaaauguaag

SEQ ID NO: 2748865 - RNA, 16 nt, Human
caaagaaaguguauug

SEQ ID NO: 2748866 - RNA, 19 nt, Human
auuuuaauaauguuucaaa

SEQ ID NO: 2748867 - RNA, 18 nt, Human
auuuuaauaauguuucaa

SEQ ID NO: 2748868 - RNA, 14 nt, Human
uuuuucuguaccag

SEQ ID NO: 2748869 - RNA, 16 nt, Human
uuuuucuguaccaguu

SEQ ID NO: 2748870 - RNA, 19 nt, Human
uuuucggccccauguaucu

SEQ ID NO: 2748871 - RNA, 13 nt, Human
uuuuccugaaaac

SEQ ID NO: 2748872 - RNA, 20 nt, Human
uuuuauaugcuucuguuuua

SEQ ID NO: 2748873 - RNA, 15 nt, Human
uuuuauaugcuucug

SEQ ID NO: 2748874 - RNA, 20 nt, Human
uuuuauaucaauuuaaaaaa

SEQ ID NO: 2748875 - RNA, 10 nt, Human
uuuuauauuu

SEQ ID NO: 2748876 - RNA, 17 nt, Human
uuucuuaacuucuugcu

SEQ ID NO: 2748877 - RNA, 18 nt, Human
uuucuuaacuucuugcuu

SEQ ID NO: 2748878 - RNA, 21 nt, Human
uuucuuaacuucuugcuucuu

SEQ ID NO: 2748879 - RNA, 21 nt, Human
uuugcauagauucccugagca

SEQ ID NO: 2748880 - RNA, 14 nt, Human
uuugucacuuuuuc

SEQ ID NO: 2748881 - RNA, 15 nt, Human
uuugucacuuuuucu

SEQ ID NO: 2748882 - RNA, 21 nt, Human
uuuguauaaaauaauuuuuau

SEQ ID NO: 2748883 - RNA, 13 nt, Human
uuuguauaauugg

SEQ ID NO: 2748884 - RNA, 21 nt, Human
uuuguauaauuggauuuccua

SEQ ID NO: 2748885 - RNA, 20 nt, Human
uuuaucuauaauuuaccuaa

SEQ ID NO: 2748886 - RNA, 14 nt, Human
uuuaucuauaauuu

SEQ ID NO: 2748887 - RNA, 19 nt, Human
uuuaucuauaauuuaccua

SEQ ID NO: 2748888 - RNA, 20 nt, Human
uuuagaaacacaacuauauu

SEQ ID NO: 2748889 - RNA, 14 nt, Human
uuuagaagccaacu

SEQ ID NO: 2748890 - RNA, 22 nt, Human
uuuagaagccaacuaugauuau

SEQ ID NO: 2748891 - RNA, 12 nt, Human
uuuagaaacaca

SEQ ID NO: 2748892 - RNA, 22 nt, Human
uuucugagaaagacuauucaaa

SEQ ID NO: 2748893 - RNA, 15 nt, Human
uuucugagaaagacu

SEQ ID NO: 2748894 - RNA, 22 nt, Human
uuucauugacuaucaaacugaa

SEQ ID NO: 2748895 - RNA, 15 nt, Human
uuucagauaaucaca

SEQ ID NO: 2748896 - RNA, 15 nt, Human
uuucagcagcugcag

SEQ ID NO: 2748897 - RNA, 21 nt, Human
uuucagauaaucacaauacau

SEQ ID NO: 2748898 - RNA, 12 nt, Human
uucucuccagcu

SEQ ID NO: 2748899 - RNA, 23 nt, Human
uucucuccucuccccaugauguu

SEQ ID NO: 2748900 - RNA, 19 nt, Human
uucucuccagcugacuaaa

SEQ ID NO: 2748901 - RNA, 18 nt, Human
uucccuugaugaagaagu

SEQ ID NO: 2748902 - RNA, 12 nt, Human
uuccuagugaaa

SEQ ID NO: 2748903 - RNA, 19 nt, Human
uucggccuccauccugagg

SEQ ID NO: 2748904 - RNA, 18 nt, Human
uucggccuccauccugag

SEQ ID NO: 2748905 - RNA, 17 nt, Human
uucauuuaucuauaauu

SEQ ID NO: 2748906 - RNA, 18 nt, Human
uucauuuaucuauaauuu

SEQ ID NO: 2748907 - RNA, 19 nt, Human
uuccacuuauaggaauuga

SEQ ID NO: 2748908 - RNA, 20 nt, Human
uucagagacucagggcccca

SEQ ID NO: 2748909 - RNA, 15 nt, Human
uucagagacucaggg

SEQ ID NO: 2748910 - RNA, 23 nt, Human
uucagagcugcccucuccugggc

SEQ ID NO: 2748911 - RNA, 22 nt, Human
uucagagcugcccucuccuggg

SEQ ID NO: 2748912 - RNA, 21 nt, Human
uucagagcugcccucuccugg

SEQ ID NO: 2748913 - RNA, 21 nt, Human
uucagagacucagggccccag

SEQ ID NO: 2748914 - RNA, 12 nt, Human
uugaugaagaag

SEQ ID NO: 2748915 - RNA, 18 nt, Human
uugcauagauucccugag

SEQ ID NO: 2748916 - RNA, 17 nt, Human
uugacuaucaaacugaa

SEQ ID NO: 2748917 - RNA, 14 nt, Human
uugaggacacugau

SEQ ID NO: 2748918 - RNA, 15 nt, Human
uugaggacacugaua

SEQ ID NO: 2748919 - RNA, 23 nt, Human
uugaaacugagaugugaacacau

SEQ ID NO: 2748920 - RNA, 16 nt, Human
uugaaaagacuccaaa

SEQ ID NO: 2748921 - RNA, 18 nt, Human
uugaaaagacuccaaaga

SEQ ID NO: 2748922 - RNA, 22 nt, Human
uugaaaagacuccaaagaaaug

SEQ ID NO: 2748923 - RNA, 23 nt, Human
uugaaaagacuccaaagaaaugu

SEQ ID NO: 2748924 - RNA, 15 nt, Human
uucuuauuucauuuc

SEQ ID NO: 2748925 - RNA, 15 nt, Human
uucugagaaagacua

SEQ ID NO: 2748926 - RNA, 14 nt, Human
uucugagcauuuaa

SEQ ID NO: 2748927 - RNA, 20 nt, Human
uugcugcaagcacagcccuu

SEQ ID NO: 2748928 - RNA, 13 nt, Human
uuggaaauaaagu

SEQ ID NO: 2748929 - RNA, 21 nt, Human
uuggaaauaaagucagaugga

SEQ ID NO: 2748930 - RNA, 16 nt, Human
uuguaaaggaauuuaa

SEQ ID NO: 2748931 - RNA, 11 nt, Human
uuguaaaugug

SEQ ID NO: 2748932 - RNA, 14 nt, Human
uuguaaaugugcuu

SEQ ID NO: 2748933 - RNA, 18 nt, Human
uuguaaaugugcuuuuaa

SEQ ID NO: 2748934 - RNA, 19 nt, Human
uuguaucacaaaucuuaac

SEQ ID NO: 2748935 - RNA, 14 nt, Human
uuguauuacaaauc

SEQ ID NO: 2748936 - RNA, 20 nt, Human
uuggccagaagucaaggcuu

SEQ ID NO: 2748937 - RNA, 12 nt, Human
uugggaggcuga

SEQ ID NO: 2748938 - RNA, 22 nt, Human
ugugaccacugcagaagacagu

SEQ ID NO: 2748939 - RNA, 22 nt, Human
ugucucaguccaugaagaugua

SEQ ID NO: 2748940 - RNA, 21 nt, Human
ugucucaguccaugaagaugu

SEQ ID NO: 2748941 - RNA, 16 nt, Human
ugucugccagccagca

SEQ ID NO: 2748942 - RNA, 15 nt, Human
ugucugccagccagc

SEQ ID NO: 2748943 - RNA, 19 nt, Human
ugucugccagccagcagcc

SEQ ID NO: 2748944 - RNA, 18 nt, Human
ugucugccagccagcagc

SEQ ID NO: 2748945 - RNA, 14 nt, Human
uguggcugcuagca

SEQ ID NO: 2748946 - RNA, 14 nt, Human
ugugcguccugucg

SEQ ID NO: 2748947 - RNA, 17 nt, Human
uguagauaauacaguuc

SEQ ID NO: 2748948 - RNA, 14 nt, Human
uguaaucacagcua

SEQ ID NO: 2748949 - RNA, 15 nt, Human
uguaaucacagcuac

SEQ ID NO: 2748950 - RNA, 16 nt, Human
uguaacuacuuuauaa

SEQ ID NO: 2748951 - RNA, 17 nt, Human
uguaacuacuuuauaac

SEQ ID NO: 2748952 - RNA, 18 nt, Human
uguaacuacuuuauaacu

SEQ ID NO: 2748953 - RNA, 12 nt, Human
uguauuuggaaa

SEQ ID NO: 2748954 - RNA, 13 nt, Human
uguauuuggaaau

SEQ ID NO: 2748955 - RNA, 21 nt, Human
uguauuuggaaauaaagucag

SEQ ID NO: 2748956 - RNA, 14 nt, Human
uguauaauuggauu

SEQ ID NO: 2748957 - RNA, 18 nt, Human
uguauaauuggauuuccu

SEQ ID NO: 2748958 - RNA, 19 nt, Human
uguauaauuggauuuccua

SEQ ID NO: 2748959 - RNA, 21 nt, Human
uguauaauuggauuuccuaau

SEQ ID NO: 2748960 - RNA, 16 nt, Human
uguaugauucccagcc

SEQ ID NO: 2748961 - RNA, 21 nt, Human
uguuggagaagaacugaaauc

SEQ ID NO: 2748962 - RNA, 13 nt, Human
uguuuaaaaucau

SEQ ID NO: 2748963 - RNA, 19 nt, Human
uguuaccaaaaauaaauau

SEQ ID NO: 2748964 - RNA, 23 nt, Human
uguuaccaaaaauaaauauaucu

SEQ ID NO: 2748965 - RNA, 12 nt, Human
uguuauaaucuu

SEQ ID NO: 2748966 - RNA, 20 nt, Human
uguuaguuaccuuauaguua

SEQ ID NO: 2748967 - RNA, 23 nt, Human
uguuaguuaccuuauaguuacug

SEQ ID NO: 2748968 - RNA, 14 nt, Human
uguuagugcaaauu

SEQ ID NO: 2748969 - RNA, 16 nt, Human
uguucacagccagacu

SEQ ID NO: 2748970 - RNA, 19 nt, Human
ugugugcguccugucggag

SEQ ID NO: 2748971 - RNA, 21 nt, Human
uuaccacuuguguuuugcaag

SEQ ID NO: 2748972 - RNA, 15 nt, Human
uuacauuuguauaaa

SEQ ID NO: 2748973 - RNA, 14 nt, Human
uuacauuuguauaa

SEQ ID NO: 2748974 - RNA, 20 nt, Human
uuacagagacagaaagcaga

SEQ ID NO: 2748975 - RNA, 22 nt, Human
uuaaugucaauucuugccaaau

SEQ ID NO: 2748976 - RNA, 16 nt, Human
uuaauaauguuucaaa

SEQ ID NO: 2748977 - RNA, 18 nt, Human
uuaauaauguuucaaaca

SEQ ID NO: 2748978 - RNA, 20 nt, Human
uguuuuuccuuguauuuaaa

SEQ ID NO: 2748979 - RNA, 20 nt, Human
uuaaagcuuauuaaaacuca

SEQ ID NO: 2748980 - RNA, 13 nt, Human
uuaaaagaaugau

SEQ ID NO: 2748981 - RNA, 19 nt, Human
uuaaaagaaugauuaugaa

SEQ ID NO: 2748982 - RNA, 19 nt, Human
uggcucuaauucacagugc

SEQ ID NO: 2748983 - RNA, 22 nt, Human
uggccuuuuucauuuaucuaua

SEQ ID NO: 2748984 - RNA, 16 nt, Human
uggccuuuuucauuua

SEQ ID NO: 2748985 - RNA, 19 nt, Human
uggccuuuuucauuuaucu

SEQ ID NO: 2748986 - RNA, 20 nt, Human
uggccuuuuucauuuaucua

SEQ ID NO: 2748987 - RNA, 18 nt, Human
uggccuucggccuccauc

SEQ ID NO: 2748988 - RNA, 17 nt, Human
uggccuucggccuccau

SEQ ID NO: 2748989 - RNA, 14 nt, Human
uggccuucggccuc

SEQ ID NO: 2748990 - RNA, 20 nt, Human
ugggacauuugcucauggaa

SEQ ID NO: 2748991 - RNA, 19 nt, Human
ugggacauuugcucaugga

SEQ ID NO: 2748992 - RNA, 21 nt, Human
ugggacagucaccucauggaa

SEQ ID NO: 2748993 - RNA, 20 nt, Human
ugggacagucaccucaugga

SEQ ID NO: 2748994 - RNA, 18 nt, Human
ugggacagucaccucaug

SEQ ID NO: 2748995 - RNA, 20 nt, Human
ugggccuccucuguccaggg

SEQ ID NO: 2748996 - RNA, 18 nt, Human
ugggccuccucuguccag

SEQ ID NO: 2748997 - RNA, 15 nt, Human
ugggcaguuuuuuga

SEQ ID NO: 2748998 - RNA, 16 nt, Human
ugggcaguuuuuugaa

SEQ ID NO: 2748999 - RNA, 23 nt, Human
uggggcagugcuuggcccaggag

SEQ ID NO: 2749000 - RNA, 20 nt, Human
uggggcagugcuuggcccag

SEQ ID NO: 2749001 - RNA, 22 nt, Human
uggggcagugcuuggcccagga

SEQ ID NO: 2749002 - RNA, 18 nt, Human
uggggcagugcuuggccc

SEQ ID NO: 2749003 - RNA, 16 nt, Human
uggguagacacacaug

SEQ ID NO: 2749004 - RNA, 17 nt, Human
uggguagacacacauga

SEQ ID NO: 2749005 - RNA, 17 nt, Human
uggccagaagucaaggc

SEQ ID NO: 2749006 - RNA, 15 nt, Human
ugcuucuuucuagaa

SEQ ID NO: 2749007 - RNA, 14 nt, Human
ugcuucuuucuaga

SEQ ID NO: 2749008 - RNA, 14 nt, Human
ugcuucuguuuuau

SEQ ID NO: 2749009 - RNA, 22 nt, Human
uggaaaaguauguuagugcaaa

SEQ ID NO: 2749010 - RNA, 14 nt, Human
uggaacucucgagc

SEQ ID NO: 2749011 - RNA, 15 nt, Human
ugcauuauauuuauu

SEQ ID NO: 2749012 - RNA, 20 nt, Human
ugcauuauauuuauuacugu

SEQ ID NO: 2749013 - RNA, 14 nt, Human
ugcauuauauuuau

SEQ ID NO: 2749014 - RNA, 19 nt, Human
ugcaucagcugcugaaaca

SEQ ID NO: 2749015 - RNA, 22 nt, Human
ugcaucagcugcugaaacaaca

SEQ ID NO: 2749016 - RNA, 20 nt, Human
ugccaucccucccuccaccu

SEQ ID NO: 2749017 - RNA, 19 nt, Human
ugccaucccucccuccacc

SEQ ID NO: 2749018 - RNA, 15 nt, Human
ugccaucccucccuc

SEQ ID NO: 2749019 - RNA, 22 nt, Human
ugccaucccucccuccaccucc

SEQ ID NO: 2749020 - RNA, 21 nt, Human
ugccaucccucccuccaccuc

SEQ ID NO: 2749021 - RNA, 15 nt, Human
ugcacaucaaaauau

SEQ ID NO: 2749022 - RNA, 16 nt, Human
ugcagauaaacaguag

SEQ ID NO: 2749023 - RNA, 13 nt, Human
ugcucuuuucucc

SEQ ID NO: 2749024 - RNA, 15 nt, Human
ugcucuuuucuccuc

SEQ ID NO: 2749025 - RNA, 21 nt, Human
ugcucuuuucuccucacugua

SEQ ID NO: 2749026 - RNA, 23 nt, Human
ugcucuuuucuccucacuguauc

SEQ ID NO: 2749027 - RNA, 20 nt, Human
ugcuagcacuuggagccaag

SEQ ID NO: 2749028 - RNA, 21 nt, Human
ugcuagaacucccuuucaaca

SEQ ID NO: 2749029 - RNA, 20 nt, Human
ugcuagaacucccuuucaac

SEQ ID NO: 2749030 - RNA, 18 nt, Human
ugcuagcacuuggagcca

SEQ ID NO: 2749031 - RNA, 18 nt, Human
ugcuagaacucccuuuca

SEQ ID NO: 2749032 - RNA, 19 nt, Human
ugcuagaacucccuuucaa

SEQ ID NO: 2749033 - RNA, 16 nt, Human
ugcgguuaauuuugaa

SEQ ID NO: 2749034 - RNA, 21 nt, Human
ugcgguuaauuuugaagugcu

SEQ ID NO: 2749035 - RNA, 17 nt, Human
ugccuucucaacuccaa

SEQ ID NO: 2749036 - RNA, 22 nt, Human
ugccuucucaacuccaaacuga

SEQ ID NO: 2749037 - RNA, 18 nt, Human
ugcccagggcucagccug

SEQ ID NO: 2749038 - RNA, 17 nt, Human
ugcccagggcucagccu

SEQ ID NO: 2749039 - RNA, 16 nt, Human
ugcccagggcucagcc

SEQ ID NO: 2749040 - RNA, 15 nt, Human
ugcccagggcucagc

SEQ ID NO: 2749041 - RNA, 14 nt, Human
ugcccagggcucag

SEQ ID NO: 2749042 - RNA, 11 nt, Human
ugcccagggcu

SEQ ID NO: 2749043 - RNA, 19 nt, Human
ugcccagggcucagccugg

SEQ ID NO: 2749044 - RNA, 23 nt, Human
ugccuccccuccucugcuugcca

SEQ ID NO: 2749045 - RNA, 22 nt, Human
ugccuccccuccucugcuugcc

SEQ ID NO: 2749046 - RNA, 19 nt, Human
ugccuccccuccucugcuu

SEQ ID NO: 2749047 - RNA, 18 nt, Human
ugccuccccuccucugcu

SEQ ID NO: 2749048 - RNA, 14 nt, Human
ucuuaguguaugau

SEQ ID NO: 2749049 - RNA, 19 nt, Human
ucuguaauaaacucauuuc

SEQ ID NO: 2749050 - RNA, 23 nt, Human
ucuguaauaaacucauuucuagc

SEQ ID NO: 2749051 - RNA, 24 nt, Human
ucuguaauaaacucauuucuagca

SEQ ID NO: 2749052 - RNA, 22 nt, Human
ucuggcucuaauucacagugcu

SEQ ID NO: 2749053 - RNA, 20 nt, Human
ucuggcucuaauucacagug

SEQ ID NO: 2749054 - RNA, 23 nt, Human
ucuggccuucggccuccauccug

SEQ ID NO: 2749055 - RNA, 12 nt, Human
ucuguaccaguu

SEQ ID NO: 2749056 - RNA, 13 nt, Human
ucuguaccaguua

SEQ ID NO: 2749057 - RNA, 22 nt, Human
ucuguaccaguuaauuuuucca

SEQ ID NO: 2749058 - RNA, 22 nt, Human
ucuguuuuauaauuuugugaag

SEQ ID NO: 2749059 - RNA, 20 nt, Human
ucuguuuuauaauuuuguga

SEQ ID NO: 2749060 - RNA, 15 nt, Human
ugaaaagacuccaaa

SEQ ID NO: 2749061 - RNA, 16 nt, Human
ugaaaagacuccaaag

SEQ ID NO: 2749062 - RNA, 17 nt, Human
ugaaaagacuccaaaga

SEQ ID NO: 2749063 - RNA, 19 nt, Human
ugaaaagacuccaaagaaa

SEQ ID NO: 2749064 - RNA, 19 nt, Human
ugaaaacuuuaugcuaagu

SEQ ID NO: 2749065 - RNA, 22 nt, Human
ugaaaagacuccaaagaaaugu

SEQ ID NO: 2749066 - RNA, 18 nt, Human
ugaaacccugucucuacu

SEQ ID NO: 2749067 - RNA, 23 nt, Human
ugaaagcagggacuugaacccau

SEQ ID NO: 2749068 - RNA, 19 nt, Human
ugaaagcagggacuugaac

SEQ ID NO: 2749069 - RNA, 18 nt, Human
ugaaagcagggacuugaa

SEQ ID NO: 2749070 - RNA, 22 nt, Human
ugaaguccaagcauuuagaugu

SEQ ID NO: 2749071 - RNA, 21 nt, Human
ugaaguccaagcauuuagaug

SEQ ID NO: 2749072 - RNA, 22 nt, Human
ugaacuuguaaaggaauuuaaa

SEQ ID NO: 2749073 - RNA, 14 nt, Human
ugaacacaucagcu

SEQ ID NO: 2749074 - RNA, 22 nt, Human
ugaacacugggggaggggacau

SEQ ID NO: 2749075 - RNA, 17 nt, Human
ugaacacugggggaggg

SEQ ID NO: 2749076 - RNA, 16 nt, Human
ugaacacugggggagg

SEQ ID NO: 2749077 - RNA, 14 nt, Human
ugaacacuggggga

SEQ ID NO: 2749078 - RNA, 17 nt, Human
ucuacacuaagagagaa

SEQ ID NO: 2749079 - RNA, 17 nt, Human
ucuacacuccagugaga

SEQ ID NO: 2749080 - RNA, 21 nt, Human
ucuacacuaagagagaaugag

SEQ ID NO: 2749081 - RNA, 23 nt, Human
uccugguccccucagcucugccu

SEQ ID NO: 2749082 - RNA, 15 nt, Human
uccuugcaucaauuu

SEQ ID NO: 2749083 - RNA, 18 nt, Human
ucuccugggcagcugccu

SEQ ID NO: 2749084 - RNA, 17 nt, Human
ucuccugggcagcugcc

SEQ ID NO: 2749085 - RNA, 16 nt, Human
ucuccugggcagcugc

SEQ ID NO: 2749086 - RNA, 15 nt, Human
ucuccugggcagcug

SEQ ID NO: 2749087 - RNA, 13 nt, Human
ucuccugggcagc

SEQ ID NO: 2749088 - RNA, 14 nt, Human
ucuccugggcagcu

SEQ ID NO: 2749089 - RNA, 21 nt, Human
ucucagugucaaugcagcccc

SEQ ID NO: 2749090 - RNA, 20 nt, Human
ucucaguaccccauggagcu

SEQ ID NO: 2749091 - RNA, 12 nt, Human
ucucucuucucu

SEQ ID NO: 2749092 - RNA, 20 nt, Human
ucuccugggcagcugccucc

SEQ ID NO: 2749093 - RNA, 19 nt, Human
ucuccugggcagcugccuc

SEQ ID NO: 2749094 - RNA, 21 nt, Human
ucuccugggcagcugccuccc

SEQ ID NO: 2749095 - RNA, 19 nt, Human
ucucuaggaaauauuuauu

SEQ ID NO: 2749096 - RNA, 13 nt, Human
ucucuaggaaaua

SEQ ID NO: 2749097 - RNA, 18 nt, Human
ucucuucacagucacauu

SEQ ID NO: 2749098 - RNA, 23 nt, Human
ucucuucucuccagcugacuaaa

SEQ ID NO: 2749099 - RNA, 12 nt, Human
ucucuucucucc

SEQ ID NO: 2749100 - RNA, 14 nt, Human
ucucuucucuccag

SEQ ID NO: 2749101 - RNA, 15 nt, Human
ucucuucucuccagc

SEQ ID NO: 2749102 - RNA, 16 nt, Human
ucucuucucuccagcu

SEQ ID NO: 2749103 - RNA, 16 nt, Human
ucauuauuugcagaga

SEQ ID NO: 2749104 - RNA, 13 nt, Human
uccacuuggucug

SEQ ID NO: 2749105 - RNA, 12 nt, Human
uccacuuggucu

SEQ ID NO: 2749106 - RNA, 17 nt, Human
uccagauccuggaaauc

SEQ ID NO: 2749107 - RNA, 16 nt, Human
uccagauccuggaaau

SEQ ID NO: 2749108 - RNA, 14 nt, Human
uccagauccuggaa

SEQ ID NO: 2749109 - RNA, 20 nt, Human
uccaagcauuuagauguaua

SEQ ID NO: 2749110 - RNA, 23 nt, Human
uccaccucccugcaauaaaaugg

SEQ ID NO: 2749111 - RNA, 14 nt, Human
uccaccuacaugag

SEQ ID NO: 2749112 - RNA, 23 nt, Human
uccaaacugacucuuaagaagac

SEQ ID NO: 2749113 - RNA, 12 nt, Human
uccaaagaaaug

SEQ ID NO: 2749114 - RNA, 16 nt, Human
ucauuucugcaucagc

SEQ ID NO: 2749115 - RNA, 22 nt, Human
ucauuucugcaucagcugcuga

SEQ ID NO: 2749116 - RNA, 14 nt, Human
ucauuucuuugagu

SEQ ID NO: 2749117 - RNA, 23 nt, Human
uccaagcauaccaacacgagcag

SEQ ID NO: 2749118 - RNA, 17 nt, Human
uccaagcauuuagaugu

SEQ ID NO: 2749119 - RNA, 17 nt, Human
ucccucccuccaccucc

SEQ ID NO: 2749120 - RNA, 16 nt, Human
ucccaaauuucauacc

SEQ ID NO: 2749121 - RNA, 17 nt, Human
ucacuuuuucugauaaa

SEQ ID NO: 2749122 - RNA, 13 nt, Human
ucacuuuuucuga

SEQ ID NO: 2749123 - RNA, 14 nt, Human
ucacuuuuucugau

SEQ ID NO: 2749124 - RNA, 16 nt, Human
ucacuuuuucugauaa

SEQ ID NO: 2749125 - RNA, 17 nt, Human
ucacuugucaauaaaau

SEQ ID NO: 2749126 - RNA, 19 nt, Human
ucagacauagaauuaacac

SEQ ID NO: 2749127 - RNA, 22 nt, Human
ucagacauagaauuaacacaug

SEQ ID NO: 2749128 - RNA, 23 nt, Human
ucagagcugcccucuccugggca

SEQ ID NO: 2749129 - RNA, 23 nt, Human
ucacaggacagcccuucuuucca

SEQ ID NO: 2749130 - RNA, 19 nt, Human
ucacaggaaguagaggagg

SEQ ID NO: 2749131 - RNA, 14 nt, Human
ucacaggaaguaga

SEQ ID NO: 2749132 - RNA, 16 nt, Human
ucaaacugaagccaga

SEQ ID NO: 2749133 - RNA, 12 nt, Human
ucaaagaaagug

SEQ ID NO: 2749134 - RNA, 14 nt, Human
ucaaagaaagugua

SEQ ID NO: 2749135 - RNA, 15 nt, Human
ucaaagaaaguguau

SEQ ID NO: 2749136 - RNA, 16 nt, Human
ucaaagaaaguguauu

SEQ ID NO: 2749137 - RNA, 19 nt, Human
ucaacuccaaacugacucu

SEQ ID NO: 2749138 - RNA, 13 nt, Human
ucaaaacugcacu

SEQ ID NO: 2749139 - RNA, 16 nt, Human
uauuuggaaauaaagu

SEQ ID NO: 2749140 - RNA, 17 nt, Human
uauuuggaaauaaaguc

SEQ ID NO: 2749141 - RNA, 19 nt, Human
uauuuggaaauaaagucag

SEQ ID NO: 2749142 - RNA, 22 nt, Human
uauuucuaugaaauauuauguu

SEQ ID NO: 2749143 - RNA, 21 nt, Human
uauuucuaugaaauauuaugu

SEQ ID NO: 2749144 - RNA, 18 nt, Human
uaaauauguuagcaaaga

SEQ ID NO: 2749145 - RNA, 21 nt, Human
uaaauauguuagcaaagaguu

SEQ ID NO: 2749146 - RNA, 14 nt, Human
uaaauauaucuacc

SEQ ID NO: 2749147 - RNA, 18 nt, Human
uaaauauaucuaccccag

SEQ ID NO: 2749148 - RNA, 20 nt, Human
uaaauauaucuaccccagac

SEQ ID NO: 2749149 - RNA, 18 nt, Human
uaaauauaugcuaagucu

SEQ ID NO: 2749150 - RNA, 17 nt, Human
uaaauaaaaauaauccu

SEQ ID NO: 2749151 - RNA, 19 nt, Human
uaaagcaguggacaccagg

SEQ ID NO: 2749152 - RNA, 18 nt, Human
uaaacuuuuuuucuguac

SEQ ID NO: 2749153 - RNA, 13 nt, Human
uaaagcaguggac

SEQ ID NO: 2749154 - RNA, 16 nt, Human
uaaacuuuuuuucugu

SEQ ID NO: 2749155 - RNA, 14 nt, Human
uaaaggaauuuaaa

SEQ ID NO: 2749156 - RNA, 17 nt, Human
uaaaauggguuuuacug

SEQ ID NO: 2749157 - RNA, 18 nt, Human
uaaaauccauacauuugu

SEQ ID NO: 2749158 - RNA, 19 nt, Human
uaaaauccauacauuugug

SEQ ID NO: 2749159 - RNA, 14 nt, Human
uaaaagaugaaaau

SEQ ID NO: 2749160 - RNA, 16 nt, Human
guuuucauuaucucaa

SEQ ID NO: 2749161 - RNA, 18 nt, Human
guuuucaggcuagaugua

SEQ ID NO: 2749162 - RNA, 16 nt, Human
uaaaaaagaaacauuu

SEQ ID NO: 2749163 - RNA, 11 nt, Human
guuucauugac

SEQ ID NO: 2749164 - RNA, 17 nt, Human
guuuagaaagcuugccc

SEQ ID NO: 2749165 - RNA, 13 nt, Human
guuuagaaagcuu

SEQ ID NO: 2749166 - RNA, 20 nt, Human
guuuaggauguugaaaaagu

SEQ ID NO: 2749167 - RNA, 21 nt, Human
uaagccagacaucaacagaua

SEQ ID NO: 2749168 - RNA, 20 nt, Human
uaagccagacaucaacagau

SEQ ID NO: 2749169 - RNA, 18 nt, Human
uaagcaucuggcucuaau

SEQ ID NO: 2749170 - RNA, 18 nt, Human
uaagcauuccaacuaucu

SEQ ID NO: 2749171 - RNA, 16 nt, Human
uaagcauuccaacuau

SEQ ID NO: 2749172 - RNA, 20 nt, Human
uaagcauuccaacuaucuca

SEQ ID NO: 2749173 - RNA, 13 nt, Human
uaagccagacauc

SEQ ID NO: 2749174 - RNA, 23 nt, Human
uaagagagaaugagagacacacu

SEQ ID NO: 2749175 - RNA, 23 nt, Human
uaagagggauuagggagagaaga

SEQ ID NO: 2749176 - RNA, 18 nt, Human
uaacagcccuccucugca

SEQ ID NO: 2749177 - RNA, 20 nt, Human
uaacagcccuccucugcacu

SEQ ID NO: 2749178 - RNA, 11 nt, Human
uaacagcccuc

SEQ ID NO: 2749179 - RNA, 17 nt, Human
uaacagcccuccucugc

SEQ ID NO: 2749180 - RNA, 23 nt, Human
uaaauugacacuuaaaaaugguu

SEQ ID NO: 2749181 - RNA, 19 nt, Human
uaacaaugcuguauuuuaa

SEQ ID NO: 2749182 - RNA, 14 nt, Human
uaauguuucaaaca

SEQ ID NO: 2749183 - RNA, 15 nt, Human
uaauguuucaaacau

SEQ ID NO: 2749184 - RNA, 20 nt, Human
uaauuaaaagaauauuuuaa

SEQ ID NO: 2749185 - RNA, 22 nt, Human
uaauuggaaaggcagcucuaaa

SEQ ID NO: 2749186 - RNA, 15 nt, Human
uaauuggauuuccua

SEQ ID NO: 2749187 - RNA, 16 nt, Human
uaauuggauuuccuaa

SEQ ID NO: 2749188 - RNA, 17 nt, Human
uaauuggauuuccuaau

SEQ ID NO: 2749189 - RNA, 23 nt, Human
uaauuggauuuccuaauacuguc

SEQ ID NO: 2749190 - RNA, 23 nt, Human
uaauuuguaguguuggagaagaa

SEQ ID NO: 2749191 - RNA, 20 nt, Human
uaauuuguaguguuggagaa

SEQ ID NO: 2749192 - RNA, 15 nt, Human
uaauaauguuucaaa

SEQ ID NO: 2749193 - RNA, 18 nt, Human
uaaucuuaguguaugauu

SEQ ID NO: 2749194 - RNA, 13 nt, Human
uaaucuuagugua

SEQ ID NO: 2749195 - RNA, 15 nt, Human
uaaucuuaguguaug

SEQ ID NO: 2749196 - RNA, 19 nt, Human
uaaugccacuaaauugaca

SEQ ID NO: 2749197 - RNA, 18 nt, Human
uaauuuugaagugcuguu

SEQ ID NO: 2749198 - RNA, 22 nt, Human
uaauuuugaagugcuguuuauu

SEQ ID NO: 2749199 - RNA, 14 nt, Human
uacaggauuugaaa

SEQ ID NO: 2749200 - RNA, 13 nt, Human
uacagaauuuuau

SEQ ID NO: 2749201 - RNA, 18 nt, Human
uacagaauucugcuaccu

SEQ ID NO: 2749202 - RNA, 21 nt, Human
uacagaauucugcuaccucac

SEQ ID NO: 2749203 - RNA, 16 nt, Human
uaccaacacgagcagg

SEQ ID NO: 2749204 - RNA, 16 nt, Human
uacauuuguauaaaau

SEQ ID NO: 2749205 - RNA, 11 nt, Human
uacauuugugu

SEQ ID NO: 2749206 - RNA, 17 nt, Human
uacauuuguauaaaaua

SEQ ID NO: 2749207 - RNA, 22 nt, Human
uacaugagguacugagagugaa

SEQ ID NO: 2749208 - RNA, 21 nt, Human
uacaugagguacugagaguga

SEQ ID NO: 2749209 - RNA, 23 nt, Human
uaccacaggaaccacaagacugc

SEQ ID NO: 2749210 - RNA, 23 nt, Human
uacuuuauaacuaacauguccug

SEQ ID NO: 2749211 - RNA, 19 nt, Human
uacuuuauaacuaacaugu

SEQ ID NO: 2749212 - RNA, 20 nt, Human
uacuuuauaacuaacauguc

SEQ ID NO: 2749213 - RNA, 16 nt, Human
uagaaagagaaacagu

SEQ ID NO: 2749214 - RNA, 13 nt, Human
uacuguguaauua

SEQ ID NO: 2749215 - RNA, 23 nt, Human
uacuguguacagaauucugcuac

SEQ ID NO: 2749216 - RNA, 22 nt, Human
uacuguguacagaauucugcua

SEQ ID NO: 2749217 - RNA, 14 nt, Human
uacuguguaauuag

SEQ ID NO: 2749218 - RNA, 18 nt, Human
uaccuugaacacuggggg

SEQ ID NO: 2749219 - RNA, 20 nt, Human
uacuaauagaauaaaggcag

SEQ ID NO: 2749220 - RNA, 23 nt, Human
uacuaauagaauaaaggcaguuu

SEQ ID NO: 2749221 - RNA, 23 nt, Human
uacugauguuccuagugaaagag

SEQ ID NO: 2749222 - RNA, 19 nt, Human
uacugagagugaacaaauu

SEQ ID NO: 2749223 - RNA, 20 nt, Human
uagcagggcauggcugggaa

SEQ ID NO: 2749224 - RNA, 16 nt, Human
uagauguauguacuuc

SEQ ID NO: 2749225 - RNA, 15 nt, Human
uagauguaguauuuu

SEQ ID NO: 2749226 - RNA, 17 nt, Human
uagauguaguauuuuuu

SEQ ID NO: 2749227 - RNA, 20 nt, Human
uagauguauguacuucaugc

SEQ ID NO: 2749228 - RNA, 13 nt, Human
uagaccucagccu

SEQ ID NO: 2749229 - RNA, 12 nt, Human
uagaccucagcc

SEQ ID NO: 2749230 - RNA, 11 nt, Human
uagaccucagc

SEQ ID NO: 2749231 - RNA, 20 nt, Human
uagaccucagccugugcugc

SEQ ID NO: 2749232 - RNA, 16 nt, Human
uagaccucagccugug

SEQ ID NO: 2749233 - RNA, 15 nt, Human
uagaccucagccugu

SEQ ID NO: 2749234 - RNA, 14 nt, Human
uagaccucagccug

SEQ ID NO: 2749235 - RNA, 22 nt, Human
uagaccucagccugugcugccc

SEQ ID NO: 2749236 - RNA, 21 nt, Human
uagaccucagccugugcugcc

SEQ ID NO: 2749237 - RNA, 18 nt, Human
uagaguuuagcuggaaaa

SEQ ID NO: 2749238 - RNA, 17 nt, Human
uagaguuuagcuggaaa

SEQ ID NO: 2749239 - RNA, 23 nt, Human
uagcucuggggugggcaguuuuu

SEQ ID NO: 2749240 - RNA, 11 nt, Human
uagcucugggg

SEQ ID NO: 2749241 - RNA, 22 nt, Human
uagcucuggggugggcaguuuu

SEQ ID NO: 2749242 - RNA, 14 nt, Human
uagccgaccucagc

SEQ ID NO: 2749243 - RNA, 13 nt, Human
uagccgaccucag

SEQ ID NO: 2749244 - RNA, 13 nt, Human
uaggccaugggac

SEQ ID NO: 2749245 - RNA, 20 nt, Human
uaggaauugacccacaagaa

SEQ ID NO: 2749246 - RNA, 23 nt, Human
uaggaauugacccacaagaaaug

SEQ ID NO: 2749247 - RNA, 15 nt, Human
uaguguaugauuacu

SEQ ID NO: 2749248 - RNA, 19 nt, Human
uaguguaugauuacuggcc

SEQ ID NO: 2749249 - RNA, 21 nt, Human
uaguuguaccgcaaugugacu

SEQ ID NO: 2749250 - RNA, 18 nt, Human
uagucaaauugugugaaa

SEQ ID NO: 2749251 - RNA, 16 nt, Human
uaggcgggaaggaggg

SEQ ID NO: 2749252 - RNA, 13 nt, Human
uauauuugaaaua

SEQ ID NO: 2749253 - RNA, 14 nt, Human
uauauuugaaauau

SEQ ID NO: 2749254 - RNA, 23 nt, Human
uauauuuauuacuguaagaaaau

SEQ ID NO: 2749255 - RNA, 20 nt, Human
uauauuuauuacuguaagaa

SEQ ID NO: 2749256 - RNA, 19 nt, Human
uauauuuuuuguuaaauga

SEQ ID NO: 2749257 - RNA, 13 nt, Human
ggggcagaacagc

SEQ ID NO: 2749258 - RNA, 21 nt, Human
ggggcagugcuuggcccagga

SEQ ID NO: 2749259 - RNA, 23 nt, Human
ggggcagugcuuggcccaggagu

SEQ ID NO: 2749260 - RNA, 22 nt, Human
ggguaaaauuccuuagcuuaga

SEQ ID NO: 2749261 - RNA, 19 nt, Human
ggguucagagacucagggc

SEQ ID NO: 2749262 - RNA, 21 nt, Human
gggugccccccuugccagaca

SEQ ID NO: 2749263 - RNA, 22 nt, Human
ggucaggagaggggcagaacag

SEQ ID NO: 2749264 - RNA, 15 nt, Human
gguuagggaggggua

SEQ ID NO: 2749265 - RNA, 13 nt, Human
gguuagggagggg

SEQ ID NO: 2749266 - RNA, 21 nt, Human
ggugcuacaaaaacacagcaa

SEQ ID NO: 2749267 - RNA, 23 nt, Human
ggugcuacaaaaacacagcaagg

SEQ ID NO: 2749268 - RNA, 22 nt, Human
gggcagaacagccgcuccuguc

SEQ ID NO: 2749269 - RNA, 23 nt, Human
gggcagugcuuggcccaggaguu

SEQ ID NO: 2749270 - RNA, 18 nt, Human
gggcagugcuuggcccag

SEQ ID NO: 2749271 - RNA, 19 nt, Human
gggcagugcuuggcccagg

SEQ ID NO: 2749272 - RNA, 20 nt, Human
gggcagugcuuggcccagga

SEQ ID NO: 2749273 - RNA, 22 nt, Human
gggcagugcuuggcccaggagu

SEQ ID NO: 2749274 - RNA, 12 nt, Human
gggcccugagcu

SEQ ID NO: 2749275 - RNA, 22 nt, Human
gggcccugagcucgguggaccc

SEQ ID NO: 2749276 - RNA, 13 nt, Human
gggcccugagcuc

SEQ ID NO: 2749277 - RNA, 14 nt, Human
gggaauugaggaca

SEQ ID NO: 2749278 - RNA, 18 nt, Human
ggcuuagacccucaugcu

SEQ ID NO: 2749279 - RNA, 16 nt, Human
ggcuuagacccucaug

SEQ ID NO: 2749280 - RNA, 22 nt, Human
ggcuugaguuuaaauuguaaua

SEQ ID NO: 2749281 - RNA, 19 nt, Human
gcuuuacuccguaacagau

SEQ ID NO: 2749282 - RNA, 23 nt, Human
gcuuggcccaggaguuuggccag

SEQ ID NO: 2749283 - RNA, 13 nt, Human
gcuuggcccagga

SEQ ID NO: 2749284 - RNA, 14 nt, Human
gcuuggcccaggag

SEQ ID NO: 2749285 - RNA, 15 nt, Human
gcuuggcccaggagu

SEQ ID NO: 2749286 - RNA, 16 nt, Human
gcuuggcccaggaguu

SEQ ID NO: 2749287 - RNA, 22 nt, Human
gcuuggcccaggaguuuggcca

SEQ ID NO: 2749288 - RNA, 20 nt, Human
ggaaaaaauaacaaugaaag

SEQ ID NO: 2749289 - RNA, 17 nt, Human
gcuuuuaaaaaaaaaua

SEQ ID NO: 2749290 - RNA, 16 nt, Human
gcuugccaucccuccc

SEQ ID NO: 2749291 - RNA, 21 nt, Human
gcuugccaucccucccuccac

SEQ ID NO: 2749292 - RNA, 18 nt, Human
gcuugccaucccucccuc

SEQ ID NO: 2749293 - RNA, 19 nt, Human
gcuugcccuggugccucac

SEQ ID NO: 2749294 - RNA, 17 nt, Human
gcuugcccuggugccuc

SEQ ID NO: 2749295 - RNA, 15 nt, Human
gcuguucacagccag

SEQ ID NO: 2749296 - RNA, 16 nt, Human
gcuguucacagccaga

SEQ ID NO: 2749297 - RNA, 23 nt, Human
gcuguucacagccagacuggcac

SEQ ID NO: 2749298 - RNA, 18 nt, Human
ggaaauauuuauuuuaau

SEQ ID NO: 2749299 - RNA, 17 nt, Human
ggaaauauuuauuuuaa

SEQ ID NO: 2749300 - RNA, 12 nt, Human
ggaaauauuuau

SEQ ID NO: 2749301 - RNA, 15 nt, Human
ggaaauauuuauuuu

SEQ ID NO: 2749302 - RNA, 13 nt, Human
ggaaauauuuauu

SEQ ID NO: 2749303 - RNA, 19 nt, Human
gcugcuagcacuuggagcc

SEQ ID NO: 2749304 - RNA, 23 nt, Human
gcugcuagcacuuggagccaagg

SEQ ID NO: 2749305 - RNA, 20 nt, Human
gcugcuagcacuuggagcca

SEQ ID NO: 2749306 - RNA, 17 nt, Human
gcuagcacuuggagcca

SEQ ID NO: 2749307 - RNA, 16 nt, Human
gcuagauguauguacu

SEQ ID NO: 2749308 - RNA, 18 nt, Human
gcuagauguauguacuuc

SEQ ID NO: 2749309 - RNA, 22 nt, Human
gcuguauuuuaaaagaaugauu

SEQ ID NO: 2749310 - RNA, 14 nt, Human
ggagaggggcagaa

SEQ ID NO: 2749311 - RNA, 20 nt, Human
ggaaggaggguuagggaggg

SEQ ID NO: 2749312 - RNA, 14 nt, Human
ggacccagggauga

SEQ ID NO: 2749313 - RNA, 21 nt, Human
ggaggacgcucucuggccuuc

SEQ ID NO: 2749314 - RNA, 20 nt, Human
ggaggacgcucucuggccuu

SEQ ID NO: 2749315 - RNA, 19 nt, Human
ggaggacgcucucuggccu

SEQ ID NO: 2749316 - RNA, 16 nt, Human
ggcagugcuuggccca

SEQ ID NO: 2749317 - RNA, 22 nt, Human
ggccaugggacagggaggacgc

SEQ ID NO: 2749318 - RNA, 23 nt, Human
ggcaacugaggcagacagcagcu

SEQ ID NO: 2749319 - RNA, 20 nt, Human
ggcaacugaggcagacagca

SEQ ID NO: 2749320 - RNA, 19 nt, Human
ggcaacugaggcagacagc

SEQ ID NO: 2749321 - RNA, 15 nt, Human
ggcaacugaggcaga

SEQ ID NO: 2749322 - RNA, 14 nt, Human
ggcaacugaggcag

SEQ ID NO: 2749323 - RNA, 13 nt, Human
ggcaacugaggca

SEQ ID NO: 2749324 - RNA, 21 nt, Human
ggcagcugccuccccuccucu

SEQ ID NO: 2749325 - RNA, 18 nt, Human
ggcagcugccuccccucc

SEQ ID NO: 2749326 - RNA, 22 nt, Human
ggcagcugccuccccuccucug

SEQ ID NO: 2749327 - RNA, 17 nt, Human
gccgaccucagccuucc

SEQ ID NO: 2749328 - RNA, 15 nt, Human
gccgaccucagccuu

SEQ ID NO: 2749329 - RNA, 14 nt, Human
gccgaccucagccu

SEQ ID NO: 2749330 - RNA, 13 nt, Human
gccgaccucagcc

SEQ ID NO: 2749331 - RNA, 12 nt, Human
gccgaccucagc

SEQ ID NO: 2749332 - RNA, 19 nt, Human
gcccuucuuuccacagaag

SEQ ID NO: 2749333 - RNA, 14 nt, Human
gccuccccuccucu

SEQ ID NO: 2749334 - RNA, 13 nt, Human
gccuccccuccuc

SEQ ID NO: 2749335 - RNA, 12 nt, Human
gccuccccuccu

SEQ ID NO: 2749336 - RNA, 11 nt, Human
gccuccccucc

SEQ ID NO: 2749337 - RNA, 19 nt, Human
gcguccugucggagcccug

SEQ ID NO: 2749338 - RNA, 13 nt, Human
gcuaccaguauuu

SEQ ID NO: 2749339 - RNA, 14 nt, Human
gcuaccaguauuua

SEQ ID NO: 2749340 - RNA, 15 nt, Human
gcuaccaguauuuag

SEQ ID NO: 2749341 - RNA, 18 nt, Human
gcuaccaguauuuagaag

SEQ ID NO: 2749342 - RNA, 19 nt, Human
gcuaccaguauuuagaagc

SEQ ID NO: 2749343 - RNA, 21 nt, Human
gcuaccaguauuuagaagcca

SEQ ID NO: 2749344 - RNA, 22 nt, Human
gcuaccaguauuuagaagccaa

SEQ ID NO: 2749345 - RNA, 22 nt, Human
gcguccugucggagcccugucu

SEQ ID NO: 2749346 - RNA, 18 nt, Human
gccuguaaucacagcuac

SEQ ID NO: 2749347 - RNA, 15 nt, Human
gccuggugggccucc

SEQ ID NO: 2749348 - RNA, 22 nt, Human
gcgacagugagacucugucuca

SEQ ID NO: 2749349 - RNA, 18 nt, Human
gccuucggccuccauccu

SEQ ID NO: 2749350 - RNA, 19 nt, Human
gccuucggccuccauccug

SEQ ID NO: 2749351 - RNA, 14 nt, Human
gccagcucucagcc

SEQ ID NO: 2749352 - RNA, 13 nt, Human
gccagcucucagc

SEQ ID NO: 2749353 - RNA, 15 nt, Human
gccagcucucagcca

SEQ ID NO: 2749354 - RNA, 22 nt, Human
gccacguucuuacuaguuuccc

SEQ ID NO: 2749355 - RNA, 14 nt, Human
gccaucccucccuc

SEQ ID NO: 2749356 - RNA, 13 nt, Human
gccaucccucccu

SEQ ID NO: 2749357 - RNA, 11 nt, Human
gccaucccucc

SEQ ID NO: 2749358 - RNA, 16 nt, Human
gccaucccucccucca

SEQ ID NO: 2749359 - RNA, 15 nt, Human
gccaucccucccucc

SEQ ID NO: 2749360 - RNA, 19 nt, Human
gccaugggacagggaggac

SEQ ID NO: 2749361 - RNA, 14 nt, Human
gccaugggacaggg

SEQ ID NO: 2749362 - RNA, 22 nt, Human
gccauuuaaagcuuauuaaaac

SEQ ID NO: 2749363 - RNA, 16 nt, Human
gcccacagcuguauga

SEQ ID NO: 2749364 - RNA, 17 nt, Human
gcccagggcucagccug

SEQ ID NO: 2749365 - RNA, 16 nt, Human
gcccagggcucagccu

SEQ ID NO: 2749366 - RNA, 15 nt, Human
gcccagggcucagcc

SEQ ID NO: 2749367 - RNA, 14 nt, Human
gcccagggcucagc

SEQ ID NO: 2749368 - RNA, 13 nt, Human
gcccagggcucag

SEQ ID NO: 2749369 - RNA, 12 nt, Human
gcccagggcuca

SEQ ID NO: 2749370 - RNA, 17 nt, Human
gccccgugggguuccuc

SEQ ID NO: 2749371 - RNA, 19 nt, Human
gccccugcacuccagccug

SEQ ID NO: 2749372 - RNA, 16 nt, Human
gcccucuccugggcag

SEQ ID NO: 2749373 - RNA, 15 nt, Human
gcccucuccugggca

SEQ ID NO: 2749374 - RNA, 14 nt, Human
gcccucuccugggc

SEQ ID NO: 2749375 - RNA, 16 nt, Human
gcccuccucugcacuc

SEQ ID NO: 2749376 - RNA, 21 nt, Human
gcccucuccugggcagcugcc

SEQ ID NO: 2749377 - RNA, 19 nt, Human
gcccucuccugggcagcug

SEQ ID NO: 2749378 - RNA, 18 nt, Human
gcccucuccugggcagcu

SEQ ID NO: 2749379 - RNA, 18 nt, Human
gcauagauucccugagca

SEQ ID NO: 2749380 - RNA, 13 nt, Human
gcaguucugaaga

SEQ ID NO: 2749381 - RNA, 15 nt, Human
gcauagcucuggggu

SEQ ID NO: 2749382 - RNA, 14 nt, Human
gcauagcucugggg

SEQ ID NO: 2749383 - RNA, 16 nt, Human
gcagugcuuggcccag

SEQ ID NO: 2749384 - RNA, 17 nt, Human
gcagugcuuggcccagg

SEQ ID NO: 2749385 - RNA, 15 nt, Human
gcaggcuacugucag

SEQ ID NO: 2749386 - RNA, 17 nt, Human
gcagaguuacaguucug

SEQ ID NO: 2749387 - RNA, 18 nt, Human
gcagaguuacaguucugu

SEQ ID NO: 2749388 - RNA, 20 nt, Human
gcagaguuacaguucugugg

SEQ ID NO: 2749389 - RNA, 17 nt, Human
gcagagacaggaccuga

SEQ ID NO: 2749390 - RNA, 21 nt, Human
gcagaguuacaguucuguggu

SEQ ID NO: 2749391 - RNA, 20 nt, Human
gcacagccucuuagaugcag

SEQ ID NO: 2749392 - RNA, 15 nt, Human
gcacugucaagauga

SEQ ID NO: 2749393 - RNA, 14 nt, Human
gcagaagacaguau

SEQ ID NO: 2749394 - RNA, 16 nt, Human
gauuacaaaucagaag

SEQ ID NO: 2749395 - RNA, 17 nt, Human
gauuacaaaucagaagu

SEQ ID NO: 2749396 - RNA, 19 nt, Human
gauuacaaaucagaaguca

SEQ ID NO: 2749397 - RNA, 20 nt, Human
gauuacaaaucagaagucau

SEQ ID NO: 2749398 - RNA, 21 nt, Human
gauuacaaaucagaagucauc

SEQ ID NO: 2749399 - RNA, 23 nt, Human
gauuacaaaucagaagucaucuu

SEQ ID NO: 2749400 - RNA, 14 nt, Human
gauuaaguaaugau

SEQ ID NO: 2749401 - RNA, 22 nt, Human
gauuaaguaaugauaacuggaa

SEQ ID NO: 2749402 - RNA, 16 nt, Human
gaugcuagaacucccu

SEQ ID NO: 2749403 - RNA, 22 nt, Human
gcaacugaggcagacagcagcu

SEQ ID NO: 2749404 - RNA, 21 nt, Human
gcaacugaggcagacagcagc

SEQ ID NO: 2749405 - RNA, 19 nt, Human
gcaacugaggcagacagca

SEQ ID NO: 2749406 - RNA, 15 nt, Human
gcaacugaggcagac

SEQ ID NO: 2749407 - RNA, 14 nt, Human
gcaacugaggcaga

SEQ ID NO: 2749408 - RNA, 13 nt, Human
gcaacugaggcag

SEQ ID NO: 2749409 - RNA, 15 nt, Human
gcaagcacagcccuu

SEQ ID NO: 2749410 - RNA, 12 nt, Human
gcaagauguggg

SEQ ID NO: 2749411 - RNA, 16 nt, Human
gcaagaugugggcagu

SEQ ID NO: 2749412 - RNA, 17 nt, Human
gauaggucagugcaaau

SEQ ID NO: 2749413 - RNA, 23 nt, Human
gaucagcuuauugucuagugaaa

SEQ ID NO: 2749414 - RNA, 17 nt, Human
gaguguguuugucaccg

SEQ ID NO: 2749415 - RNA, 13 nt, Human
gauaaacaguagu

SEQ ID NO: 2749416 - RNA, 16 nt, Human
gauaaaagauggccau

SEQ ID NO: 2749417 - RNA, 13 nt, Human
gauaaaagauggc

SEQ ID NO: 2749418 - RNA, 14 nt, Human
gauccuggaaauca

SEQ ID NO: 2749419 - RNA, 15 nt, Human
gaacauaaaauacaa

SEQ ID NO: 2749420 - RNA, 14 nt, Human
gaacaucacagcuu

SEQ ID NO: 2749421 - RNA, 20 nt, Human
gaacagugauuaccagggac

SEQ ID NO: 2749422 - RNA, 16 nt, Human
gaacagugauuaccag

SEQ ID NO: 2749423 - RNA, 18 nt, Human
gaacagccgcuccugucu

SEQ ID NO: 2749424 - RNA, 16 nt, Human
gaaauuguauuacaaa

SEQ ID NO: 2749425 - RNA, 13 nt, Human
gaagacuguggcu

SEQ ID NO: 2749426 - RNA, 17 nt, Human
gaagacugcauuauauu

SEQ ID NO: 2749427 - RNA, 12 nt, Human
gaagacuguggc

SEQ ID NO: 2749428 - RNA, 11 nt, Human
gaagacugugg

SEQ ID NO: 2749429 - RNA, 19 nt, Human
gaagacugcauuauauuua

SEQ ID NO: 2749430 - RNA, 12 nt, Human
gaagaacugaaa

SEQ ID NO: 2749431 - RNA, 18 nt, Human
gaagauguagaggagaaa

SEQ ID NO: 2749432 - RNA, 17 nt, Human
gaagauguagaggagaa

SEQ ID NO: 2749433 - RNA, 18 nt, Human
gaauucugcuaccucacu

SEQ ID NO: 2749434 - RNA, 19 nt, Human
gaauucugcuaccucacug

SEQ ID NO: 2749435 - RNA, 16 nt, Human
gaauauuuuaacuucc

SEQ ID NO: 2749436 - RNA, 22 nt, Human
gaaguccaagcauuuagaugua

SEQ ID NO: 2749437 - RNA, 12 nt, Human
gaaguccaagca

SEQ ID NO: 2749438 - RNA, 14 nt, Human
gaaguauccuucag

SEQ ID NO: 2749439 - RNA, 16 nt, Human
gaaguauccuucagcc

SEQ ID NO: 2749440 - RNA, 18 nt, Human
gaagucaucuugcuacca

SEQ ID NO: 2749441 - RNA, 15 nt, Human
gaagucaucuugcua

SEQ ID NO: 2749442 - RNA, 21 nt, Human
gacagagccccacccucagau

SEQ ID NO: 2749443 - RNA, 14 nt, Human
gacaucaacagaua

SEQ ID NO: 2749444 - RNA, 23 nt, Human
gacaggaugguucccuugaugaa

SEQ ID NO: 2749445 - RNA, 20 nt, Human
gacagcagcucaggcacacu

SEQ ID NO: 2749446 - RNA, 18 nt, Human
gacagcagcucaggcaca

SEQ ID NO: 2749447 - RNA, 16 nt, Human
gacagcagcucaggca

SEQ ID NO: 2749448 - RNA, 15 nt, Human
gacagcagcucaggc

SEQ ID NO: 2749449 - RNA, 14 nt, Human
gacagcagcucagg

SEQ ID NO: 2749450 - RNA, 13 nt, Human
gacagcagcucag

SEQ ID NO: 2749451 - RNA, 20 nt, Human
gacccaaaaggcagaagcaa

SEQ ID NO: 2749452 - RNA, 23 nt, Human
gacccacuucacacacaggcaac

SEQ ID NO: 2749453 - RNA, 19 nt, Human
gacccaaaaggcagaagca

SEQ ID NO: 2749454 - RNA, 18 nt, Human
gacccaaaaggcagaagc

SEQ ID NO: 2749455 - RNA, 18 nt, Human
gaccacugcagaagacag

SEQ ID NO: 2749456 - RNA, 16 nt, Human
gaccacugcagaagac

SEQ ID NO: 2749457 - RNA, 22 nt, Human
gacuaaacuuuuuuucuguacc

SEQ ID NO: 2749458 - RNA, 18 nt, Human
gacuaaacuuuuuuucug

SEQ ID NO: 2749459 - RNA, 19 nt, Human
gacuaaacuuuuuuucugu

SEQ ID NO: 2749460 - RNA, 20 nt, Human
gacuaaacuuuuuuucugua

SEQ ID NO: 2749461 - RNA, 22 nt, Human
gacuggauaguccgucucugcu

SEQ ID NO: 2749462 - RNA, 18 nt, Human
gacuggcacaguuuucug

SEQ ID NO: 2749463 - RNA, 22 nt, Human
gacuggcacaguuuucugagaa

SEQ ID NO: 2749464 - RNA, 14 nt, Human
gacuggcacaguuu

SEQ ID NO: 2749465 - RNA, 17 nt, Human
gacuggauaguccgucu

SEQ ID NO: 2749466 - RNA, 16 nt, Human
gacugaggggagggga

SEQ ID NO: 2749467 - RNA, 24 nt, Human
gacugcauuauauuuauuacugua

SEQ ID NO: 2749468 - RNA, 22 nt, Human
cuugcagcucuccccuucucug

SEQ ID NO: 2749469 - RNA, 14 nt, Human
cuugcccuguuaaa

SEQ ID NO: 2749470 - RNA, 18 nt, Human
cuugcccuggugccucac

SEQ ID NO: 2749471 - RNA, 23 nt, Human
cuugcccagggcucagccuggug

SEQ ID NO: 2749472 - RNA, 21 nt, Human
cuugcccagggcucagccugg

SEQ ID NO: 2749473 - RNA, 20 nt, Human
cuugcccagggcucagccug

SEQ ID NO: 2749474 - RNA, 19 nt, Human
cuugccaucccucccucca

SEQ ID NO: 2749475 - RNA, 16 nt, Human
cuugccaucccucccu

SEQ ID NO: 2749476 - RNA, 15 nt, Human
cuugccaucccuccc

SEQ ID NO: 2749477 - RNA, 17 nt, Human
cuugccaucccucccuc

SEQ ID NO: 2749478 - RNA, 14 nt, Human
cuugcccagggcuc

SEQ ID NO: 2749479 - RNA, 13 nt, Human
cuugcccagggcu

SEQ ID NO: 2749480 - RNA, 19 nt, Human
cuugcccagggcucagccu

SEQ ID NO: 2749481 - RNA, 18 nt, Human
cuugcccagggcucagcc

SEQ ID NO: 2749482 - RNA, 16 nt, Human
cuugcccagggcucag

SEQ ID NO: 2749483 - RNA, 15 nt, Human
cuugcccagggcuca

SEQ ID NO: 2749484 - RNA, 14 nt, Human
cuugccaucccucc

SEQ ID NO: 2749485 - RNA, 20 nt, Human
cuugcuugauuguauggugg

SEQ ID NO: 2749486 - RNA, 14 nt, Human
cuugcuucuuucua

SEQ ID NO: 2749487 - RNA, 15 nt, Human
cuugcuucuuucuag

SEQ ID NO: 2749488 - RNA, 18 nt, Human
cuugcuucuuucuagaaa

SEQ ID NO: 2749489 - RNA, 19 nt, Human
cuugcuucuuucuagaaag

SEQ ID NO: 2749490 - RNA, 20 nt, Human
cuugcugcaagcacagcccu

SEQ ID NO: 2749491 - RNA, 21 nt, Human
cuugcugcaagcacagcccuu

SEQ ID NO: 2749492 - RNA, 22 nt, Human
cuugcccuguuaaaagaugaaa

SEQ ID NO: 2749493 - RNA, 16 nt, Human
cuuggacucauuuuaa

SEQ ID NO: 2749494 - RNA, 16 nt, Human
cuuggggcugaugcag

SEQ ID NO: 2749495 - RNA, 18 nt, Human
cuuggggcugaugcaguu

SEQ ID NO: 2749496 - RNA, 17 nt, Human
cuuguacuuuauuuucu

SEQ ID NO: 2749497 - RNA, 19 nt, Human
cuuuccucaaaacuucaga

SEQ ID NO: 2749498 - RNA, 14 nt, Human
gaaaacaaggauga

SEQ ID NO: 2749499 - RNA, 14 nt, Human
gaaaaguauguuag

SEQ ID NO: 2749500 - RNA, 20 nt, Human
gaaaaguauguuagugcaaa

SEQ ID NO: 2749501 - RNA, 19 nt, Human
gaaaauaacaauaaaagac

SEQ ID NO: 2749502 - RNA, 18 nt, Human
cuuaaugccacuaaauug

SEQ ID NO: 2749503 - RNA, 15 nt, Human
cuuaagcaucuggcu

SEQ ID NO: 2749504 - RNA, 17 nt, Human
cuuaagcaucuggcucu

SEQ ID NO: 2749505 - RNA, 18 nt, Human
cuuaagcaucuggcucua

SEQ ID NO: 2749506 - RNA, 23 nt, Human
cuuaagcaucuggcucuaauuca

SEQ ID NO: 2749507 - RNA, 22 nt, Human
cuuaacuucuugcuucuuucua

SEQ ID NO: 2749508 - RNA, 14 nt, Human
cuuaacuucuugcu

SEQ ID NO: 2749509 - RNA, 15 nt, Human
cuuaacuucuugcuu

SEQ ID NO: 2749510 - RNA, 18 nt, Human
cuuaacuucuugcuucuu

SEQ ID NO: 2749511 - RNA, 21 nt, Human
cuuaacuucuugcuucuuucu

SEQ ID NO: 2749512 - RNA, 18 nt, Human
cuguuuauuaaucuuagu

SEQ ID NO: 2749513 - RNA, 14 nt, Human
cuguuuauuaaucu

SEQ ID NO: 2749514 - RNA, 16 nt, Human
cuguuuauuaaucuua

SEQ ID NO: 2749515 - RNA, 19 nt, Human
cuguuuuauaauuuuguga

SEQ ID NO: 2749516 - RNA, 19 nt, Human
cuuacuaguuucccuugca

SEQ ID NO: 2749517 - RNA, 17 nt, Human
cuuaauguauguuacca

SEQ ID NO: 2749518 - RNA, 14 nt, Human
cuuaauguauguua

SEQ ID NO: 2749519 - RNA, 21 nt, Human
cuuaauguauguuaccaaaaa

SEQ ID NO: 2749520 - RNA, 19 nt, Human
cuuagaugcaguucugaag

SEQ ID NO: 2749521 - RNA, 14 nt, Human
cuuagacccucaug

SEQ ID NO: 2749522 - RNA, 18 nt, Human
cuuagacccucaugcugc

SEQ ID NO: 2749523 - RNA, 14 nt, Human
cuuauaauuuaaaa

SEQ ID NO: 2749524 - RNA, 19 nt, Human
cuuauaggaauugacccac

SEQ ID NO: 2749525 - RNA, 14 nt, Human
cuuauaguuacugu

SEQ ID NO: 2749526 - RNA, 15 nt, Human
cuuauaguuacugug

SEQ ID NO: 2749527 - RNA, 16 nt, Human
cuuauaguuacugugu

SEQ ID NO: 2749528 - RNA, 18 nt, Human
cuuauaguuacuguguaa

SEQ ID NO: 2749529 - RNA, 19 nt, Human
cuuauaguuacuguguaau

SEQ ID NO: 2749530 - RNA, 21 nt, Human
cuuauaguuacuguguaauua

SEQ ID NO: 2749531 - RNA, 21 nt, Human
cuuaggguuaugauuaaguaa

SEQ ID NO: 2749532 - RNA, 13 nt, Human
cuuauaauuuaaa

SEQ ID NO: 2749533 - RNA, 19 nt, Human
cuuccagauccuggaaauc

SEQ ID NO: 2749534 - RNA, 23 nt, Human
cuuccccuugcccagggcucagc

SEQ ID NO: 2749535 - RNA, 19 nt, Human
cuuccccuugcccagggcu

SEQ ID NO: 2749536 - RNA, 16 nt, Human
cuuccccuugcccagg

SEQ ID NO: 2749537 - RNA, 23 nt, Human
cuucagccuagccgaccucagcc

SEQ ID NO: 2749538 - RNA, 16 nt, Human
cuucagcgguuuauau

SEQ ID NO: 2749539 - RNA, 18 nt, Human
cuucagcgguuuauauaa

SEQ ID NO: 2749540 - RNA, 22 nt, Human
cuucagccuagccgaccucagc

SEQ ID NO: 2749541 - RNA, 21 nt, Human
cuucagccuagccgaccucag

SEQ ID NO: 2749542 - RNA, 20 nt, Human
cuucagccuagccgaccuca

SEQ ID NO: 2749543 - RNA, 13 nt, Human
cuucagccuagcc

SEQ ID NO: 2749544 - RNA, 19 nt, Human
cuuccuuggacucauuuua

SEQ ID NO: 2749545 - RNA, 20 nt, Human
cuucgaaagcaucauuauuu

SEQ ID NO: 2749546 - RNA, 17 nt, Human
cuucggccuccauccug

SEQ ID NO: 2749547 - RNA, 18 nt, Human
cuucggccuccauccuga

SEQ ID NO: 2749548 - RNA, 19 nt, Human
cuccucacuguauccaggu

SEQ ID NO: 2749549 - RNA, 14 nt, Human
cuccucacuguauc

SEQ ID NO: 2749550 - RNA, 16 nt, Human
cuccucacuguaucca

SEQ ID NO: 2749551 - RNA, 16 nt, Human
cucccuucucuucaca

SEQ ID NO: 2749552 - RNA, 12 nt, Human
cucccuuucaac

SEQ ID NO: 2749553 - RNA, 13 nt, Human
cucccuuucaaca

SEQ ID NO: 2749554 - RNA, 14 nt, Human
cucuaacagcccuc

SEQ ID NO: 2749555 - RNA, 12 nt, Human
cucggagccuca

SEQ ID NO: 2749556 - RNA, 13 nt, Human
cucggagaagagc

SEQ ID NO: 2749557 - RNA, 20 nt, Human
cucggagaagagcuguucac

SEQ ID NO: 2749558 - RNA, 12 nt, Human
cucggagaagag

SEQ ID NO: 2749559 - RNA, 18 nt, Human
cucauuaggauggcuagu

SEQ ID NO: 2749560 - RNA, 17 nt, Human
cucauuaggauggcuag

SEQ ID NO: 2749561 - RNA, 20 nt, Human
cuccauccugaggcuccacu

SEQ ID NO: 2749562 - RNA, 21 nt, Human
cuccauccugaggcuccacuu

SEQ ID NO: 2749563 - RNA, 23 nt, Human
cuccauccugaggcuccacuugg

SEQ ID NO: 2749564 - RNA, 17 nt, Human
cucccagucauuuaaua

SEQ ID NO: 2749565 - RNA, 17 nt, Human
cuccaccucccugcaau

SEQ ID NO: 2749566 - RNA, 16 nt, Human
cuccaccucccugcaa

SEQ ID NO: 2749567 - RNA, 15 nt, Human
cuccaccucccugca

SEQ ID NO: 2749568 - RNA, 14 nt, Human
cuccaccucccugc

SEQ ID NO: 2749569 - RNA, 23 nt, Human
cucugcauacucauuaggauggc

SEQ ID NO: 2749570 - RNA, 18 nt, Human
cucuccagcugacuaaac

SEQ ID NO: 2749571 - RNA, 17 nt, Human
cucuaauucacagugcu

SEQ ID NO: 2749572 - RNA, 15 nt, Human
cucuaauucacagug

SEQ ID NO: 2749573 - RNA, 16 nt, Human
cucuaauucacagugc

SEQ ID NO: 2749574 - RNA, 21 nt, Human
cucuccugggcagcugccucc

SEQ ID NO: 2749575 - RNA, 19 nt, Human
cucuucucuccagcugacu

SEQ ID NO: 2749576 - RNA, 22 nt, Human
cucuucucuccagcugacuaaa

SEQ ID NO: 2749577 - RNA, 13 nt, Human
cucuucucuccag

SEQ ID NO: 2749578 - RNA, 14 nt, Human
cucuucucuccagc

SEQ ID NO: 2749579 - RNA, 15 nt, Human
cucuucucuccagcu

SEQ ID NO: 2749580 - RNA, 18 nt, Human
cugauaaaagauggccau

SEQ ID NO: 2749581 - RNA, 13 nt, Human
cugauguuccuag

SEQ ID NO: 2749582 - RNA, 18 nt, Human
cugauguuccuagugaaa

SEQ ID NO: 2749583 - RNA, 20 nt, Human
cugauguuccuagugaaaga

SEQ ID NO: 2749584 - RNA, 21 nt, Human
cugauguuccuagugaaagag

SEQ ID NO: 2749585 - RNA, 13 nt, Human
cugcagaagacag

SEQ ID NO: 2749586 - RNA, 23 nt, Human
cugcagaagacaguauggcagcu

SEQ ID NO: 2749587 - RNA, 19 nt, Human
cugccagccagcagccagc

SEQ ID NO: 2749588 - RNA, 18 nt, Human
cugccagccagcagccag

SEQ ID NO: 2749589 - RNA, 16 nt, Human
cugccagccagcagcc

SEQ ID NO: 2749590 - RNA, 15 nt, Human
cugccagccagcagc

SEQ ID NO: 2749591 - RNA, 14 nt, Human
cugccagccagcag

SEQ ID NO: 2749592 - RNA, 13 nt, Human
cugccagccagca

SEQ ID NO: 2749593 - RNA, 12 nt, Human
cugccagccagc

SEQ ID NO: 2749594 - RNA, 23 nt, Human
cugccagccagcagccagcucuc

SEQ ID NO: 2749595 - RNA, 20 nt, Human
cugccagccagcagccagcu

SEQ ID NO: 2749596 - RNA, 15 nt, Human
cugccuaagugcagc

SEQ ID NO: 2749597 - RNA, 13 nt, Human
cugcugaaacaac

SEQ ID NO: 2749598 - RNA, 23 nt, Human
cuggaauaauccuaaacauauga

SEQ ID NO: 2749599 - RNA, 13 nt, Human
cuggcccaccagg

SEQ ID NO: 2749600 - RNA, 14 nt, Human
cuggcccaccaggg

SEQ ID NO: 2749601 - RNA, 16 nt, Human
cuggccaacgggguga

SEQ ID NO: 2749602 - RNA, 18 nt, Human
cuggcacaguuuucugag

SEQ ID NO: 2749603 - RNA, 19 nt, Human
cuggcacaguuuucugaga

SEQ ID NO: 2749604 - RNA, 22 nt, Human
cugggaacccaaguccaagcau

SEQ ID NO: 2749605 - RNA, 16 nt, Human
cuggggugggcaguuu

SEQ ID NO: 2749606 - RNA, 18 nt, Human
cuggggugggcaguuuuu

SEQ ID NO: 2749607 - RNA, 17 nt, Human
cuggugggccuccucug

SEQ ID NO: 2749608 - RNA, 12 nt, Human
cuggugggccuc

SEQ ID NO: 2749609 - RNA, 21 nt, Human
cuggucccagccagcaguuca

SEQ ID NO: 2749610 - RNA, 15 nt, Human
ccuagagcacacugu

SEQ ID NO: 2749611 - RNA, 14 nt, Human
ccguuuugucacuu

SEQ ID NO: 2749612 - RNA, 19 nt, Human
ccguuuugucacuuuuucu

SEQ ID NO: 2749613 - RNA, 22 nt, Human
ccgggaggcagagguugcagug

SEQ ID NO: 2749614 - RNA, 16 nt, Human
cccuugaugaagaagu

SEQ ID NO: 2749615 - RNA, 15 nt, Human
cccuugaugaagaag

SEQ ID NO: 2749616 - RNA, 15 nt, Human
ccucuguccagggcc

SEQ ID NO: 2749617 - RNA, 14 nt, Human
ccucuguccagggc

SEQ ID NO: 2749618 - RNA, 23 nt, Human
ccucuguccagggcccugagcuc

SEQ ID NO: 2749619 - RNA, 21 nt, Human
ccucuguccagggcccugagc

SEQ ID NO: 2749620 - RNA, 20 nt, Human
ccucuguccagggcccugag

SEQ ID NO: 2749621 - RNA, 18 nt, Human
ccucuguccagggcccug

SEQ ID NO: 2749622 - RNA, 23 nt, Human
ccucuuagaugcaguucugaaga

SEQ ID NO: 2749623 - RNA, 13 nt, Human
ccugaaagaggaa

SEQ ID NO: 2749624 - RNA, 18 nt, Human
ccugaaagaggaaugaag

SEQ ID NO: 2749625 - RNA, 23 nt, Human
ccugaaagaggaaugaaguacuc

SEQ ID NO: 2749626 - RNA, 20 nt, Human
ccugaggcuccacuuggucu

SEQ ID NO: 2749627 - RNA, 18 nt, Human
ccugaggcuccacuuggu

SEQ ID NO: 2749628 - RNA, 17 nt, Human
ccugaggcuccacuugg

SEQ ID NO: 2749629 - RNA, 13 nt, Human
ccucuccugggca

SEQ ID NO: 2749630 - RNA, 12 nt, Human
ccucuccugggc

SEQ ID NO: 2749631 - RNA, 11 nt, Human
ccucuccuggg

SEQ ID NO: 2749632 - RNA, 16 nt, Human
ccucugcacucccacc

SEQ ID NO: 2749633 - RNA, 21 nt, Human
ccucugcuugccaucccuccc

SEQ ID NO: 2749634 - RNA, 20 nt, Human
ccucugcuugccaucccucc

SEQ ID NO: 2749635 - RNA, 17 nt, Human
ccucugcuugccauccc

SEQ ID NO: 2749636 - RNA, 20 nt, Human
ccucagaaaacaaggaugaa

SEQ ID NO: 2749637 - RNA, 14 nt, Human
ccuccccuccucug

SEQ ID NO: 2749638 - RNA, 15 nt, Human
ccuccccuccucugc

SEQ ID NO: 2749639 - RNA, 11 nt, Human
ccuccucugcu

SEQ ID NO: 2749640 - RNA, 21 nt, Human
ccuccucugcacucccaccug

SEQ ID NO: 2749641 - RNA, 16 nt, Human
ccucccugcaauaaaa

SEQ ID NO: 2749642 - RNA, 12 nt, Human
ccucccugcaau

SEQ ID NO: 2749643 - RNA, 18 nt, Human
ccuccccuccucugcuug

SEQ ID NO: 2749644 - RNA, 17 nt, Human
ccuccccuccucugcuu

SEQ ID NO: 2749645 - RNA, 23 nt, Human
ccugugcugcccgucuucagccu

SEQ ID NO: 2749646 - RNA, 21 nt, Human
ccugugcugcccgucuucagc

SEQ ID NO: 2749647 - RNA, 12 nt, Human
ccuucagccuga

SEQ ID NO: 2749648 - RNA, 20 nt, Human
ccuggacuuaagcaucuggc

SEQ ID NO: 2749649 - RNA, 24 nt, Human
ccuggacuuaagcaucuggcucua

SEQ ID NO: 2749650 - RNA, 18 nt, Human
ccugggcagcugccuccc

SEQ ID NO: 2749651 - RNA, 17 nt, Human
ccugggcagcugccucc

SEQ ID NO: 2749652 - RNA, 16 nt, Human
ccugggcagcugccuc

SEQ ID NO: 2749653 - RNA, 15 nt, Human
ccugggcagcugccu

SEQ ID NO: 2749654 - RNA, 22 nt, Human
ccugugcugcccgucuucagcc

SEQ ID NO: 2749655 - RNA, 20 nt, Human
ccugggcagcugccuccccu

SEQ ID NO: 2749656 - RNA, 11 nt, Human
cguuuugucac

SEQ ID NO: 2749657 - RNA, 17 nt, Human
cgucuggcccaccaggg

SEQ ID NO: 2749658 - RNA, 11 nt, Human
cgcaaugugac

SEQ ID NO: 2749659 - RNA, 20 nt, Human
cgcuccugucugccagccag

SEQ ID NO: 2749660 - RNA, 17 nt, Human
cgcuccugucugccagc

SEQ ID NO: 2749661 - RNA, 21 nt, Human
cgcuccugucugccagccagc

SEQ ID NO: 2749662 - RNA, 16 nt, Human
cgcuccugucugccag

SEQ ID NO: 2749663 - RNA, 17 nt, Human
cggccuccauccugagg

SEQ ID NO: 2749664 - RNA, 16 nt, Human
cggccuccauccugag

SEQ ID NO: 2749665 - RNA, 14 nt, Human
cggccuccauccug

SEQ ID NO: 2749666 - RNA, 18 nt, Human
cauuugcucauggaauug

SEQ ID NO: 2749667 - RNA, 13 nt, Human
cauuugcucaugg

SEQ ID NO: 2749668 - RNA, 17 nt, Human
cauuuaggccaugggac

SEQ ID NO: 2749669 - RNA, 23 nt, Human
ccaaggguucagagacucagggc

SEQ ID NO: 2749670 - RNA, 20 nt, Human
ccaaggguucagagacucag

SEQ ID NO: 2749671 - RNA, 22 nt, Human
ccaagcauaccaacacgagcag

SEQ ID NO: 2749672 - RNA, 17 nt, Human
ccaagcauuuagaugua

SEQ ID NO: 2749673 - RNA, 14 nt, Human
ccaagcaaguauua

SEQ ID NO: 2749674 - RNA, 22 nt, Human
ccaacccgucuggcccaccagg

SEQ ID NO: 2749675 - RNA, 23 nt, Human
ccaaauuucauaccuaucaucuu

SEQ ID NO: 2749676 - RNA, 22 nt, Human
ccaaacugacucuuaagaagac

SEQ ID NO: 2749677 - RNA, 20 nt, Human
ccacaggaaccacaagacug

SEQ ID NO: 2749678 - RNA, 16 nt, Human
ccaauauucauagcag

SEQ ID NO: 2749679 - RNA, 12 nt, Human
ccaauauccuaa

SEQ ID NO: 2749680 - RNA, 13 nt, Human
ccaauauccuaau

SEQ ID NO: 2749681 - RNA, 14 nt, Human
ccaauauccuaaua

SEQ ID NO: 2749682 - RNA, 15 nt, Human
ccaauauccuaauaa

SEQ ID NO: 2749683 - RNA, 16 nt, Human
ccaauauccuaauaaa

SEQ ID NO: 2749684 - RNA, 17 nt, Human
ccaauauccuaauaaaa

SEQ ID NO: 2749685 - RNA, 18 nt, Human
ccaauauccuaauaaaaa

SEQ ID NO: 2749686 - RNA, 19 nt, Human
ccaauauccuaauaaaaag

SEQ ID NO: 2749687 - RNA, 18 nt, Human
ccagaagucaaggcuuag

SEQ ID NO: 2749688 - RNA, 23 nt, Human
ccagaaauaaaguuggugacaga

SEQ ID NO: 2749689 - RNA, 21 nt, Human
ccagaaauaaaguuggugaca

SEQ ID NO: 2749690 - RNA, 20 nt, Human
ccacuuaauguauguuacca

SEQ ID NO: 2749691 - RNA, 15 nt, Human
ccacuuaauguaugu

SEQ ID NO: 2749692 - RNA, 17 nt, Human
ccacuuaauguauguua

SEQ ID NO: 2749693 - RNA, 18 nt, Human
ccacugcagaagacagua

SEQ ID NO: 2749694 - RNA, 13 nt, Human
ccacugcagaaga

SEQ ID NO: 2749695 - RNA, 17 nt, Human
ccaggugccaguuaugg

SEQ ID NO: 2749696 - RNA, 11 nt, Human
ccagggcucag

SEQ ID NO: 2749697 - RNA, 15 nt, Human
ccagggcucagccug

SEQ ID NO: 2749698 - RNA, 14 nt, Human
ccagggcucagccu

SEQ ID NO: 2749699 - RNA, 13 nt, Human
ccagggcucagcc

SEQ ID NO: 2749700 - RNA, 12 nt, Human
ccagggcucagc

SEQ ID NO: 2749701 - RNA, 20 nt, Human
ccagggcucagccugguggg

SEQ ID NO: 2749702 - RNA, 16 nt, Human
ccagggcucagccugg

SEQ ID NO: 2749703 - RNA, 13 nt, Human
cccaaaaggcaga

SEQ ID NO: 2749704 - RNA, 18 nt, Human
cccaaaaggcagaagcaa

SEQ ID NO: 2749705 - RNA, 16 nt, Human
ccaugauguuuagaaa

SEQ ID NO: 2749706 - RNA, 14 nt, Human
ccaugaagauguag

SEQ ID NO: 2749707 - RNA, 18 nt, Human
ccaucaaggguacacugc

SEQ ID NO: 2749708 - RNA, 19 nt, Human
cccaaguucaugcagcugu

SEQ ID NO: 2749709 - RNA, 15 nt, Human
cccaggaguuuggcc

SEQ ID NO: 2749710 - RNA, 16 nt, Human
cccaggaguuuggcca

SEQ ID NO: 2749711 - RNA, 17 nt, Human
cccaggaguuuggccag

SEQ ID NO: 2749712 - RNA, 18 nt, Human
cccaggaguuuggccaga

SEQ ID NO: 2749713 - RNA, 19 nt, Human
cccaggaguuuggccagaa

SEQ ID NO: 2749714 - RNA, 20 nt, Human
cccaggaguuuggccagaag

SEQ ID NO: 2749715 - RNA, 13 nt, Human
cccaggugccagu

SEQ ID NO: 2749716 - RNA, 18 nt, Human
cugccaauauccuaauaa

SEQ ID NO: 2749717 - RNA, 19 nt, Human
cugccaauauccuaauaaa

SEQ ID NO: 2749718 - RNA, 20 nt, Human
cugccaauauccuaauaaaa

SEQ ID NO: 2749719 - RNA, 22 nt, Human
cugccaauauccuaauaaaaag

SEQ ID NO: 2749720 - RNA, 13 nt, Human
cugccaauauccu

SEQ ID NO: 2749721 - RNA, 14 nt, Human
cugccaauauccua

SEQ ID NO: 2749722 - RNA, 16 nt, Human
cugccaauauccuaau

SEQ ID NO: 2749723 - RNA, 17 nt, Human
cugccaauauccuaaua

SEQ ID NO: 2749724 - RNA, 21 nt, Human
cuggaaaucaggguuaguauu

SEQ ID NO: 2749725 - RNA, 12 nt, Human
cugcuaccucac

SEQ ID NO: 2749726 - RNA, 14 nt, Human
cugcuaccucacug

SEQ ID NO: 2749727 - RNA, 13 nt, Human
cugcuaccucacu

SEQ ID NO: 2749728 - RNA, 15 nt, Human
cugcuaccucacugg

SEQ ID NO: 2749729 - RNA, 16 nt, Human
cugugagaugcuagaa

SEQ ID NO: 2749730 - RNA, 21 nt, Human
cugucagcuccccucggagaa

SEQ ID NO: 2749731 - RNA, 23 nt, Human
cugucagcuccccucggagaaga

SEQ ID NO: 2749732 - RNA, 22 nt, Human
cugggcagcugccuccccuccu

SEQ ID NO: 2749733 - RNA, 21 nt, Human
cugggcagcugccuccccucc

SEQ ID NO: 2749734 - RNA, 20 nt, Human
cugggcagcugccuccccuc

SEQ ID NO: 2749735 - RNA, 19 nt, Human
cugggcagcugccuccccu

SEQ ID NO: 2749736 - RNA, 16 nt, Human
cugggcagcugccucc

SEQ ID NO: 2749737 - RNA, 19 nt, Human
cuggggccucggagccuca

SEQ ID NO: 2749738 - RNA, 24 nt, Human
cuggugagucaccacuucagggcu

SEQ ID NO: 2749739 - RNA, 10 nt, Human
cugggacagg

SEQ ID NO: 2749740 - RNA, 13 nt, Human
cuugaugaagaag

SEQ ID NO: 2749741 - RNA, 12 nt, Human
cuugaugaagaa

SEQ ID NO: 2749742 - RNA, 22 nt, Human
cuucuaaguaaaaccacagcag

SEQ ID NO: 2749743 - RNA, 23 nt, Human
cuucuaaguaaaaccacagcagu

SEQ ID NO: 2749744 - RNA, 15 nt, Human
cuucacuguaaaaua

SEQ ID NO: 2749745 - RNA, 18 nt, Human
cuuaugcgguuaauuuug

SEQ ID NO: 2749746 - RNA, 16 nt, Human
cuuaugcgguuaauuu

SEQ ID NO: 2749747 - RNA, 17 nt, Human
cuuaugcgguuaauuuu

SEQ ID NO: 2749748 - RNA, 19 nt, Human
gaaaucaaauaugcaaagc

SEQ ID NO: 2749749 - RNA, 20 nt, Human
gaaaucaaauaugcaaagca

SEQ ID NO: 2749750 - RNA, 22 nt, Human
gaaauauuuauuuuaauaaugu

SEQ ID NO: 2749751 - RNA, 18 nt, Human
gaaauauuuauuuuaaua

SEQ ID NO: 2749752 - RNA, 18 nt, Human
gaaaucaaauaugcaaag

SEQ ID NO: 2749753 - RNA, 17 nt, Human
gaaaucaaauaugcaaa

SEQ ID NO: 2749754 - RNA, 17 nt, Human
gaaauauuuauuuuaau

SEQ ID NO: 2749755 - RNA, 14 nt, Human
gaaagacuauucaa

SEQ ID NO: 2749756 - RNA, 15 nt, Human
gaaagacuauucaaa

SEQ ID NO: 2749757 - RNA, 17 nt, Human
gaaagacuauucaaaca

SEQ ID NO: 2749758 - RNA, 14 nt, Human
cuuuuuuucuguac

SEQ ID NO: 2749759 - RNA, 16 nt, Human
cuuuuuuucuguacca

SEQ ID NO: 2749760 - RNA, 19 nt, Human
cuuuuuuucuguaccaguu

SEQ ID NO: 2749761 - RNA, 13 nt, Human
cuuuugugaauua

SEQ ID NO: 2749762 - RNA, 13 nt, Human
gaaaauucauuuu

SEQ ID NO: 2749763 - RNA, 14 nt, Human
gaaaauucauuuuu

SEQ ID NO: 2749764 - RNA, 22 nt, Human
cuuucuagaaagagaaacaguu

SEQ ID NO: 2749765 - RNA, 16 nt, Human
gaguuuagcuggaaaa

SEQ ID NO: 2749766 - RNA, 21 nt, Human
gagugcucaguagucagacug

SEQ ID NO: 2749767 - RNA, 12 nt, Human
gaguuuggccag

SEQ ID NO: 2749768 - RNA, 13 nt, Human
gaguuuggccaga

SEQ ID NO: 2749769 - RNA, 14 nt, Human
gaguuuggccagaa

SEQ ID NO: 2749770 - RNA, 20 nt, Human
gauauguaccuaacgaagua

SEQ ID NO: 2749771 - RNA, 17 nt, Human
gauuagggagagaagau

SEQ ID NO: 2749772 - RNA, 19 nt, Human
gauuauuaacgauguccaa

SEQ ID NO: 2749773 - RNA, 14 nt, Human
gaugugaacacauc

SEQ ID NO: 2749774 - RNA, 16 nt, Human
gaugugaacacaucag

SEQ ID NO: 2749775 - RNA, 22 nt, Human
gauuacuggccuuuuucauuua

SEQ ID NO: 2749776 - RNA, 14 nt, Human
gauuaccagggacu

SEQ ID NO: 2749777 - RNA, 19 nt, Human
gcauaaccugucucaccug

SEQ ID NO: 2749778 - RNA, 14 nt, Human
gcauaaccugucuc

SEQ ID NO: 2749779 - RNA, 12 nt, Human
gcaguuuuuuga

SEQ ID NO: 2749780 - RNA, 18 nt, Human
gcaguuuuuugaaaaugg

SEQ ID NO: 2749781 - RNA, 19 nt, Human
gcagggacuugaacccaua

SEQ ID NO: 2749782 - RNA, 22 nt, Human
gcagcugccuccccuccucugc

SEQ ID NO: 2749783 - RNA, 18 nt, Human
gcagcugccuccccuccu

SEQ ID NO: 2749784 - RNA, 17 nt, Human
gcagcugccuccccucc

SEQ ID NO: 2749785 - RNA, 16 nt, Human
gcagcugccuccccuc

SEQ ID NO: 2749786 - RNA, 15 nt, Human
gcagcugccuccccu

SEQ ID NO: 2749787 - RNA, 13 nt, Human
gcagcugccuccc

SEQ ID NO: 2749788 - RNA, 12 nt, Human
gcagcugccucc

SEQ ID NO: 2749789 - RNA, 11 nt, Human
gcagcugccuc

SEQ ID NO: 2749790 - RNA, 21 nt, Human
gcacaugagcuggcgggauug

SEQ ID NO: 2749791 - RNA, 14 nt, Human
gcacaguuuucuga

SEQ ID NO: 2749792 - RNA, 17 nt, Human
gcacaguuuucugagaa

SEQ ID NO: 2749793 - RNA, 18 nt, Human
gcacaguuuucugagaaa

SEQ ID NO: 2749794 - RNA, 21 nt, Human
gcagaacagccgcuccugucu

SEQ ID NO: 2749795 - RNA, 18 nt, Human
gcagaacagccgcuccug

SEQ ID NO: 2749796 - RNA, 15 nt, Human
gagaaucacuugaac

SEQ ID NO: 2749797 - RNA, 14 nt, Human
gagaaucacuugaa

SEQ ID NO: 2749798 - RNA, 16 nt, Human
gacucuuaagaagacu

SEQ ID NO: 2749799 - RNA, 15 nt, Human
gacucuuaagaagac

SEQ ID NO: 2749800 - RNA, 17 nt, Human
gacucuuaagaagacug

SEQ ID NO: 2749801 - RNA, 22 nt, Human
gacuaucaaacugaagccagaa

SEQ ID NO: 2749802 - RNA, 18 nt, Human
gacuaucaaacugaagcc

SEQ ID NO: 2749803 - RNA, 22 nt, Human
gacuauucaaacagucucagga

SEQ ID NO: 2749804 - RNA, 14 nt, Human
gacagugaaagaaa

SEQ ID NO: 2749805 - RNA, 17 nt, Human
gacagucaccucaugga

SEQ ID NO: 2749806 - RNA, 20 nt, Human
gacaguauggcagcuuuccu

SEQ ID NO: 2749807 - RNA, 16 nt, Human
gacacuuaaaaauggu

SEQ ID NO: 2749808 - RNA, 11 nt, Human
gaauuaguuuu

SEQ ID NO: 2749809 - RNA, 12 nt, Human
gacacacaugaa

SEQ ID NO: 2749810 - RNA, 13 nt, Human
gacacacugaaga

SEQ ID NO: 2749811 - RNA, 18 nt, Human
gacacaccaggcgcuaau

SEQ ID NO: 2749812 - RNA, 15 nt, Human
gacacaccaggcgcu

SEQ ID NO: 2749813 - RNA, 20 nt, Human
gaaugagagacacacugaag

SEQ ID NO: 2749814 - RNA, 23 nt, Human
gaaugagagacacacugaagaag

SEQ ID NO: 2749815 - RNA, 22 nt, Human
gaaugagagacacacugaagaa

SEQ ID NO: 2749816 - RNA, 18 nt, Human
gaagugcuguuuauuaau

SEQ ID NO: 2749817 - RNA, 20 nt, Human
gaagugcuguuuauuaaucu

SEQ ID NO: 2749818 - RNA, 15 nt, Human
gggugggcaguuuuu

SEQ ID NO: 2749819 - RNA, 19 nt, Human
gguaauaaguacuguguac

SEQ ID NO: 2749820 - RNA, 14 nt, Human
aaagacuauucaaa

SEQ ID NO: 2749821 - RNA, 14 nt, Human
gguccuggggccuc

SEQ ID NO: 2749822 - RNA, 12 nt, Human
gguccuggggcc

SEQ ID NO: 2749823 - RNA, 15 nt, Human
aaagacuauucaaac

SEQ ID NO: 2749824 - RNA, 17 nt, Human
aaagcagggacuugaac

SEQ ID NO: 2749825 - RNA, 18 nt, Human
gguggggcagugcuuggc

SEQ ID NO: 2749826 - RNA, 16 nt, Human
ggugugaccacugcag

SEQ ID NO: 2749827 - RNA, 12 nt, Human
gguuucuagcau

SEQ ID NO: 2749828 - RNA, 16 nt, Human
gguuuagaaagcuugc

SEQ ID NO: 2749829 - RNA, 23 nt, Human
aaaguguauuuggaaauaaaguc

SEQ ID NO: 2749830 - RNA, 22 nt, Human
aaaguguauuuggaaauaaagu

SEQ ID NO: 2749831 - RNA, 10 nt, Human
aaaguguauu

SEQ ID NO: 2749832 - RNA, 14 nt, Human
aaaguguauuugga

SEQ ID NO: 2749833 - RNA, 15 nt, Human
aaaguguauuuggaa

SEQ ID NO: 2749834 - RNA, 20 nt, Human
aaauaauuuuuauauuugaa

SEQ ID NO: 2749835 - RNA, 18 nt, Human
aaauaauuuuuauauuug

SEQ ID NO: 2749836 - RNA, 15 nt, Human
aaauaauuuuuauau

SEQ ID NO: 2749837 - RNA, 15 nt, Human
aaaaugugauaugua

SEQ ID NO: 2749838 - RNA, 22 nt, Human
aaaauuuuuucucuaggaaaua

SEQ ID NO: 2749839 - RNA, 20 nt, Human
aaacaagcacuaaacaaaga

SEQ ID NO: 2749840 - RNA, 20 nt, Human
aaacagucucaggaaaucaa

SEQ ID NO: 2749841 - RNA, 21 nt, Human
gggccuccucuguccagggcc

SEQ ID NO: 2749842 - RNA, 15 nt, Human
gggcgugguggugag

SEQ ID NO: 2749843 - RNA, 19 nt, Human
aaaaguauguuagugcaaa

SEQ ID NO: 2749844 - RNA, 17 nt, Human
gggauuguaaaauggug

SEQ ID NO: 2749845 - RNA, 16 nt, Human
gggauuguaaaauggu

SEQ ID NO: 2749846 - RNA, 13 nt, Human
aaaaccacagcag

SEQ ID NO: 2749847 - RNA, 14 nt, Human
aaaaccacagcagu

SEQ ID NO: 2749848 - RNA, 17 nt, Human
aaaagaugaaaauauuu

SEQ ID NO: 2749849 - RNA, 13 nt, Human
aaaacucauuuuu

SEQ ID NO: 2749850 - RNA, 22 nt, Human
aaaaauggaacauaaaauacaa

SEQ ID NO: 2749851 - RNA, 12 nt, Human
aaaaccacagca

SEQ ID NO: 2749852 - RNA, 20 nt, Human
gggaaggaggguuagggagg

SEQ ID NO: 2749853 - RNA, 19 nt, Human
gggacauuugcucauggaa

SEQ ID NO: 2749854 - RNA, 21 nt, Human
gggacauuugcucauggaauu

SEQ ID NO: 2749855 - RNA, 20 nt, Human
gggacauuugcucauggaau

SEQ ID NO: 2749856 - RNA, 15 nt, Human
ggccuuuuucauuua

SEQ ID NO: 2749857 - RNA, 23 nt, Human
ggccuucggccuccauccugagg

SEQ ID NO: 2749858 - RNA, 22 nt, Human
ggccuucggccuccauccugag

SEQ ID NO: 2749859 - RNA, 12 nt, Human
ggcucagccugg

SEQ ID NO: 2749860 - RNA, 10 nt, Human
ggcucagccu

SEQ ID NO: 2749861 - RNA, 11 nt, Human
ggcucagccug

SEQ ID NO: 2749862 - RNA, 13 nt, Human
ggcauagcucugg

SEQ ID NO: 2749863 - RNA, 15 nt, Human
ggcauagcucugggg

SEQ ID NO: 2749864 - RNA, 11 nt, Human
ggcccaggagu

SEQ ID NO: 2749865 - RNA, 13 nt, Human
ggcccaggaguuu

SEQ ID NO: 2749866 - RNA, 18 nt, Human
ggcccaggaguuuggcca

SEQ ID NO: 2749867 - RNA, 19 nt, Human
ggcccaggaguuuggccag

SEQ ID NO: 2749868 - RNA, 20 nt, Human
ggcccaggaguuuggccaga

SEQ ID NO: 2749869 - RNA, 13 nt, Human
ggaguuuggccag

SEQ ID NO: 2749870 - RNA, 14 nt, Human
ggaguuuggccaga

SEQ ID NO: 2749871 - RNA, 15 nt, Human
ggaguuuggccagaa

SEQ ID NO: 2749872 - RNA, 12 nt, Human
ggauggcaagau

SEQ ID NO: 2749873 - RNA, 14 nt, Human
ggagccaccaguuc

SEQ ID NO: 2749874 - RNA, 15 nt, Human
ggagccaccaguucu

SEQ ID NO: 2749875 - RNA, 23 nt, Human
ggagccaaggguucagagacuca

SEQ ID NO: 2749876 - RNA, 21 nt, Human
gccagcaguucagagcugccc

SEQ ID NO: 2749877 - RNA, 20 nt, Human
gccagcaguucagagcugcc

SEQ ID NO: 2749878 - RNA, 19 nt, Human
gccagccagcagccagcuc

SEQ ID NO: 2749879 - RNA, 16 nt, Human
gccagccagcagccag

SEQ ID NO: 2749880 - RNA, 19 nt, Human
gccagcaguucagagcugc

SEQ ID NO: 2749881 - RNA, 14 nt, Human
gccagcaguucaga

SEQ ID NO: 2749882 - RNA, 13 nt, Human
gccagcaguucag

SEQ ID NO: 2749883 - RNA, 22 nt, Human
gccaguuauggcuauaggugcu

SEQ ID NO: 2749884 - RNA, 15 nt, Human
gccccacccucagau

SEQ ID NO: 2749885 - RNA, 18 nt, Human
gccccacccucagaugca

SEQ ID NO: 2749886 - RNA, 21 nt, Human
gcccuagagcacacuguagca

SEQ ID NO: 2749887 - RNA, 13 nt, Human
gcccaggaguuug

SEQ ID NO: 2749888 - RNA, 15 nt, Human
gcccaggaguuuggc

SEQ ID NO: 2749889 - RNA, 16 nt, Human
gcccaggaguuuggcc

SEQ ID NO: 2749890 - RNA, 22 nt, Human
gccaugugcuaguaauuggaaa

SEQ ID NO: 2749891 - RNA, 17 nt, Human
gcccaggaguuuggcca

SEQ ID NO: 2749892 - RNA, 18 nt, Human
gcccaggaguuuggccag

SEQ ID NO: 2749893 - RNA, 15 nt, Human
gcuacugucagcucc

SEQ ID NO: 2749894 - RNA, 17 nt, Human
gcuacuugggaggcuga

SEQ ID NO: 2749895 - RNA, 18 nt, Human
gcuacaaaaacacagcaa

SEQ ID NO: 2749896 - RNA, 19 nt, Human
gcuacaaaaacacagcaag

SEQ ID NO: 2749897 - RNA, 17 nt, Human
gcuacaaaaacacagca

SEQ ID NO: 2749898 - RNA, 20 nt, Human
gccuccauccugaggcucca

SEQ ID NO: 2749899 - RNA, 16 nt, Human
gccuccauccugaggc

SEQ ID NO: 2749900 - RNA, 15 nt, Human
gccuccauccugagg

SEQ ID NO: 2749901 - RNA, 19 nt, Human
gcuuccuggcaauagucaa

SEQ ID NO: 2749902 - RNA, 17 nt, Human
gcuuauuuccucauuuu

SEQ ID NO: 2749903 - RNA, 12 nt, Human
gcuguauuuuaa

SEQ ID NO: 2749904 - RNA, 13 nt, Human
gcuguauuuuaaa

SEQ ID NO: 2749905 - RNA, 16 nt, Human
gcugaaacaacaaaua

SEQ ID NO: 2749906 - RNA, 12 nt, Human
gcugaacaucac

SEQ ID NO: 2749907 - RNA, 15 nt, Human
gcucugcccauccug

SEQ ID NO: 2749908 - RNA, 21 nt, Human
gcucugcccauccugccccug

SEQ ID NO: 2749909 - RNA, 20 nt, Human
gcuccacuuggucugugaga

SEQ ID NO: 2749910 - RNA, 17 nt, Human
gcucucagccaacgagu

SEQ ID NO: 2749911 - RNA, 11 nt, Human
gcucucagcca

SEQ ID NO: 2749912 - RNA, 10 nt, Human
gcucucagcc

SEQ ID NO: 2749913 - RNA, 20 nt, Human
cucuuagaugcaguucugaa

SEQ ID NO: 2749914 - RNA, 19 nt, Human
cucugcacucccaccugac

SEQ ID NO: 2749915 - RNA, 20 nt, Human
cucugcacucccaccugaca

SEQ ID NO: 2749916 - RNA, 23 nt, Human
cucugcacucccaccugacacac

SEQ ID NO: 2749917 - RNA, 15 nt, Human
cucuuagaugcaguu

SEQ ID NO: 2749918 - RNA, 23 nt, Human
cucucagccaacgaguaauuuau

SEQ ID NO: 2749919 - RNA, 11 nt, Human
cucucagccaa

SEQ ID NO: 2749920 - RNA, 11 nt, Human
cucucuggccu

SEQ ID NO: 2749921 - RNA, 12 nt, Human
cucucuggccuu

SEQ ID NO: 2749922 - RNA, 18 nt, Human
cucagccugugcugcccg

SEQ ID NO: 2749923 - RNA, 16 nt, Human
cucagccugugcugcc

SEQ ID NO: 2749924 - RNA, 22 nt, Human
cucagccuuccccuugcccagg

SEQ ID NO: 2749925 - RNA, 23 nt, Human
cucagccuuccccuugcccaggg

SEQ ID NO: 2749926 - RNA, 14 nt, Human
cucagccugugcug

SEQ ID NO: 2749927 - RNA, 13 nt, Human
cucagccugugcu

SEQ ID NO: 2749928 - RNA, 20 nt, Human
cucagccuggugggccuccu

SEQ ID NO: 2749929 - RNA, 19 nt, Human
cucagccuggugggccucc

SEQ ID NO: 2749930 - RNA, 18 nt, Human
cucagccuggugggccuc

SEQ ID NO: 2749931 - RNA, 16 nt, Human
cucagccuggugggcc

SEQ ID NO: 2749932 - RNA, 12 nt, Human
cucagccuggug

SEQ ID NO: 2749933 - RNA, 14 nt, Human
cucaugcugccaau

SEQ ID NO: 2749934 - RNA, 22 nt, Human
cucaugcugccaauauccuaau

SEQ ID NO: 2749935 - RNA, 12 nt, Human
cucaugcugcca

SEQ ID NO: 2749936 - RNA, 19 nt, Human
cucagucucucuucucucc

SEQ ID NO: 2749937 - RNA, 12 nt, Human
cucagucucucu

SEQ ID NO: 2749938 - RNA, 17 nt, Human
cucagucucucuucucu

SEQ ID NO: 2749939 - RNA, 16 nt, Human
cucccugcaauaaaau

SEQ ID NO: 2749940 - RNA, 14 nt, Human
cucccugcaauaaa

SEQ ID NO: 2749941 - RNA, 21 nt, Human
cuccagugagacagcucugca

SEQ ID NO: 2749942 - RNA, 20 nt, Human
cuagccgaccucagccuucc

SEQ ID NO: 2749943 - RNA, 19 nt, Human
cuagccgaccucagccuuc

SEQ ID NO: 2749944 - RNA, 18 nt, Human
cuagccgaccucagccuu

SEQ ID NO: 2749945 - RNA, 17 nt, Human
cuagccgaccucagccu

SEQ ID NO: 2749946 - RNA, 16 nt, Human
cuagccgaccucagcc

SEQ ID NO: 2749947 - RNA, 15 nt, Human
cuagccgaccucagc

SEQ ID NO: 2749948 - RNA, 14 nt, Human
cuagccgaccucag

SEQ ID NO: 2749949 - RNA, 13 nt, Human
cuagccgaccuca

SEQ ID NO: 2749950 - RNA, 23 nt, Human
cuaguugaucagcuuauugucua

SEQ ID NO: 2749951 - RNA, 16 nt, Human
cuagcaugaagacaga

SEQ ID NO: 2749952 - RNA, 19 nt, Human
cuagaacucccuuucaaca

SEQ ID NO: 2749953 - RNA, 18 nt, Human
cuagaacucccuuucaac

SEQ ID NO: 2749954 - RNA, 17 nt, Human
cuagaacucccuuucaa

SEQ ID NO: 2749955 - RNA, 16 nt, Human
cuagaacucccuuuca

SEQ ID NO: 2749956 - RNA, 15 nt, Human
cuacaugagguacug

SEQ ID NO: 2749957 - RNA, 23 nt, Human
cuaagugaaauaagccagacauc

SEQ ID NO: 2749958 - RNA, 20 nt, Human
cuaagugaaauaagccagac

SEQ ID NO: 2749959 - RNA, 15 nt, Human
cgaccucagccuucc

SEQ ID NO: 2749960 - RNA, 14 nt, Human
cgaccucagccuuc

SEQ ID NO: 2749961 - RNA, 13 nt, Human
cgaccucagccuu

SEQ ID NO: 2749962 - RNA, 12 nt, Human
cgaccucagccu

SEQ ID NO: 2749963 - RNA, 21 nt, Human
cggagccucauccgaggcagg

SEQ ID NO: 2749964 - RNA, 20 nt, Human
cggagccucauccgaggcag

SEQ ID NO: 2749965 - RNA, 22 nt, Human
cggagccucauccgaggcaggg

SEQ ID NO: 2749966 - RNA, 18 nt, Human
ccuugcccagggcucagc

SEQ ID NO: 2749967 - RNA, 17 nt, Human
ccuugcccagggcucag

SEQ ID NO: 2749968 - RNA, 16 nt, Human
ccuugcccagggcuca

SEQ ID NO: 2749969 - RNA, 15 nt, Human
ccuugcccagggcuc

SEQ ID NO: 2749970 - RNA, 13 nt, Human
ccuugcccagggc

SEQ ID NO: 2749971 - RNA, 20 nt, Human
ccuugcccagggcucagccu

SEQ ID NO: 2749972 - RNA, 13 nt, Human
ccuuuuucauuua

SEQ ID NO: 2749973 - RNA, 16 nt, Human
cgacagugagacucug

SEQ ID NO: 2749974 - RNA, 15 nt, Human
cgacagugagacucu

SEQ ID NO: 2749975 - RNA, 15 nt, Human
ccgaccucagccuuc

SEQ ID NO: 2749976 - RNA, 14 nt, Human
ccgaccucagccuu

SEQ ID NO: 2749977 - RNA, 13 nt, Human
ccgaccucagccu

SEQ ID NO: 2749978 - RNA, 12 nt, Human
ccgaccucagcc

SEQ ID NO: 2749979 - RNA, 13 nt, Human
cccuucucuguau

SEQ ID NO: 2749980 - RNA, 16 nt, Human
ccguagguuauuuuca

SEQ ID NO: 2749981 - RNA, 24 nt, Human
ccguagacgugcacgcacacuguc

SEQ ID NO: 2749982 - RNA, 17 nt, Human
ccgucuggcccaccagg

SEQ ID NO: 2749983 - RNA, 18 nt, Human
ccgucuggcccaccaggg

SEQ ID NO: 2749984 - RNA, 16 nt, Human
ccgucuggcccaccag

SEQ ID NO: 2749985 - RNA, 20 nt, Human
ccucauguccacugguucuu

SEQ ID NO: 2749986 - RNA, 15 nt, Human
ccucauguccacugg

SEQ ID NO: 2749987 - RNA, 13 nt, Human
ccucugcuugcca

SEQ ID NO: 2749988 - RNA, 15 nt, Human
ccagcagccagcucu

SEQ ID NO: 2749989 - RNA, 20 nt, Human
ccagcagccagcucucagcc

SEQ ID NO: 2749990 - RNA, 19 nt, Human
ccagcagccagcucucagc

SEQ ID NO: 2749991 - RNA, 18 nt, Human
ccagcagccagcucucag

SEQ ID NO: 2749992 - RNA, 16 nt, Human
ccagcagccagcucuc

SEQ ID NO: 2749993 - RNA, 15 nt, Human
ccagauccuggaaau

SEQ ID NO: 2749994 - RNA, 22 nt, Human
ccccuuuucggccccauguauc

SEQ ID NO: 2749995 - RNA, 21 nt, Human
ccccuugcccagggcucagcc

SEQ ID NO: 2749996 - RNA, 20 nt, Human
ccccuugcccagggcucagc

SEQ ID NO: 2749997 - RNA, 17 nt, Human
ccccuugcccagggcuc

SEQ ID NO: 2749998 - RNA, 23 nt, Human
ccccuugcccagggcucagccug

SEQ ID NO: 2749999 - RNA, 23 nt, Human
cccgggaggcagagguugcagug

SEQ ID NO: 2750000 - RNA, 19 nt, Human
ccccagcacuaaagcagug

SEQ ID NO: 2750001 - RNA, 11 nt, Human
ccccagcacua

SEQ ID NO: 2750002 - RNA, 23 nt, Human
cccauuguggucacaggaaguag

SEQ ID NO: 2750003 - RNA, 22 nt, Human
cccauuguggucacaggaagua

SEQ ID NO: 2750004 - RNA, 20 nt, Human
cccagccagcaguucagagc

SEQ ID NO: 2750005 - RNA, 17 nt, Human
cccagccagcaguucag

SEQ ID NO: 2750006 - RNA, 16 nt, Human
cccagccagcaguuca

SEQ ID NO: 2750007 - RNA, 20 nt, Human
cccauauuuguacaccaaua

SEQ ID NO: 2750008 - RNA, 20 nt, Human
cagccagacuggcacaguuu

SEQ ID NO: 2750009 - RNA, 22 nt, Human
cagcaguucagagcugcccucu

SEQ ID NO: 2750010 - RNA, 21 nt, Human
cagcaguucagagcugcccuc

SEQ ID NO: 2750011 - RNA, 20 nt, Human
cagcaguucagagcugcccu

SEQ ID NO: 2750012 - RNA, 19 nt, Human
cagcaguucagagcugccc

SEQ ID NO: 2750013 - RNA, 18 nt, Human
cagcaguucagagcugcc

SEQ ID NO: 2750014 - RNA, 11 nt, Human
cagccagcagc

SEQ ID NO: 2750015 - RNA, 12 nt, Human
cagccagcagcc

SEQ ID NO: 2750016 - RNA, 14 nt, Human
cagccagcagccag

SEQ ID NO: 2750017 - RNA, 19 nt, Human
cagccccgugggguuccuc

SEQ ID NO: 2750018 - RNA, 12 nt, Human
cagccgcuccug

SEQ ID NO: 2750019 - RNA, 23 nt, Human
cagccugagcgacagugagacuc

SEQ ID NO: 2750020 - RNA, 22 nt, Human
cagccugagcgacagugagacu

SEQ ID NO: 2750021 - RNA, 16 nt, Human
caguauuuagaagcca

SEQ ID NO: 2750022 - RNA, 17 nt, Human
caguauuuagaagccaa

SEQ ID NO: 2750023 - RNA, 19 nt, Human
cagggcucagccugguggg

SEQ ID NO: 2750024 - RNA, 16 nt, Human
cagggcucagccuggu

SEQ ID NO: 2750025 - RNA, 15 nt, Human
cagggcucagccugg

SEQ ID NO: 2750026 - RNA, 19 nt, Human
cagggaggacgcucucugg

SEQ ID NO: 2750027 - RNA, 22 nt, Human
cagggaggacgcucucuggccu

SEQ ID NO: 2750028 - RNA, 19 nt, Human
cagcuguggcagaguuaca

SEQ ID NO: 2750029 - RNA, 23 nt, Human
cagcuguggcagaguuacaguuc

SEQ ID NO: 2750030 - RNA, 17 nt, Human
cagcuguggcagaguua

SEQ ID NO: 2750031 - RNA, 16 nt, Human
cagcuuauucacaaga

SEQ ID NO: 2750032 - RNA, 19 nt, Human
caggaaaucaaauaugcaa

SEQ ID NO: 2750033 - RNA, 21 nt, Human
caggaaaucaaauaugcaaag

SEQ ID NO: 2750034 - RNA, 24 nt, Human
caggacagcccuucuuuccacaga

SEQ ID NO: 2750035 - RNA, 23 nt, Human
caggacagcccuucuuuccacag

SEQ ID NO: 2750036 - RNA, 14 nt, Human
ccaacuacuaauag

SEQ ID NO: 2750037 - RNA, 22 nt, Human
ccaacuacuaauagaauaaagg

SEQ ID NO: 2750038 - RNA, 14 nt, Human
ccaacuaugauuau

SEQ ID NO: 2750039 - RNA, 18 nt, Human
ccaaauguucaucaauga

SEQ ID NO: 2750040 - RNA, 16 nt, Human
ccaaaaauaaauauau

SEQ ID NO: 2750041 - RNA, 15 nt, Human
cauuaggauggcuag

SEQ ID NO: 2750042 - RNA, 17 nt, Human
cauagauucccugagca

SEQ ID NO: 2750043 - RNA, 18 nt, Human
cauagauucccugagcag

SEQ ID NO: 2750044 - RNA, 20 nt, Human
cauagcagcuuauucacaag

SEQ ID NO: 2750045 - RNA, 17 nt, Human
caucagcugcugaaaca

SEQ ID NO: 2750046 - RNA, 18 nt, Human
caucagcugcugaaacaa

SEQ ID NO: 2750047 - RNA, 15 nt, Human
caucagcugcugaaa

SEQ ID NO: 2750048 - RNA, 13 nt, Human
caucagcugcuga

SEQ ID NO: 2750049 - RNA, 20 nt, Human
caucagcuugcccuguuaaa

SEQ ID NO: 2750050 - RNA, 15 nt, Human
caugcugccaauauc

SEQ ID NO: 2750051 - RNA, 17 nt, Human
caugcugccaauauccu

SEQ ID NO: 2750052 - RNA, 19 nt, Human
caugcugccaauauccuaa

SEQ ID NO: 2750053 - RNA, 21 nt, Human
caugcugccaauauccuaaua

SEQ ID NO: 2750054 - RNA, 22 nt, Human
caugcugccaauauccuaauaa

SEQ ID NO: 2750055 - RNA, 16 nt, Human
caugaauuaguuuuau

SEQ ID NO: 2750056 - RNA, 22 nt, Human
cacugguucuucuuggucucag

SEQ ID NO: 2750057 - RNA, 15 nt, Human
cacugggguccuggg

SEQ ID NO: 2750058 - RNA, 19 nt, Human
cacugggguccuggggccu

SEQ ID NO: 2750059 - RNA, 18 nt, Human
cacugggguccuggggcc

SEQ ID NO: 2750060 - RNA, 16 nt, Human
cacuugucaauaaaau

SEQ ID NO: 2750061 - RNA, 19 nt, Human
cacuuguguuuugcaagcc

SEQ ID NO: 2750062 - RNA, 22 nt, Human
cacuuguguuuugcaagccaga

SEQ ID NO: 2750063 - RNA, 21 nt, Human
cacugggggaggggacauuga

SEQ ID NO: 2750064 - RNA, 18 nt, Human
cacugggggaggggacau

SEQ ID NO: 2750065 - RNA, 15 nt, Human
cacugggggagggga

SEQ ID NO: 2750066 - RNA, 14 nt, Human
cacugggggagggg

SEQ ID NO: 2750067 - RNA, 21 nt, Human
cacugcagaagacaguauggc

SEQ ID NO: 2750068 - RNA, 20 nt, Human
cacuagggcagggacaggau

SEQ ID NO: 2750069 - RNA, 21 nt, Human
cacuagggcagggacaggaua

SEQ ID NO: 2750070 - RNA, 14 nt, Human
caaguccaagcaua

SEQ ID NO: 2750071 - RNA, 15 nt, Human
caauucuugccaaau

SEQ ID NO: 2750072 - RNA, 17 nt, Human
caaugcuguauuuuaaa

SEQ ID NO: 2750073 - RNA, 16 nt, Human
caaugcuguauuuuaa

SEQ ID NO: 2750074 - RNA, 15 nt, Human
caaugcuguauuuua

SEQ ID NO: 2750075 - RNA, 18 nt, Human
cacaagacugcacaucaa

SEQ ID NO: 2750076 - RNA, 13 nt, Human
cacacaggcaacu

SEQ ID NO: 2750077 - RNA, 19 nt, Human
cacacaggcaacugaggca

SEQ ID NO: 2750078 - RNA, 16 nt, Human
cacacaggcaacugag

SEQ ID NO: 2750079 - RNA, 20 nt, Human
cacacaggcaacugaggcag

SEQ ID NO: 2750080 - RNA, 22 nt, Human
cacacaugaaguccaagcauuu

SEQ ID NO: 2750081 - RNA, 17 nt, Human
cacacaugaaguccaag

SEQ ID NO: 2750082 - RNA, 21 nt, Human
cacagccucuuagaugcaguu

SEQ ID NO: 2750083 - RNA, 17 nt, Human
cacagccucuuagaugc

SEQ ID NO: 2750084 - RNA, 14 nt, Human
auuguaaaauggug

SEQ ID NO: 2750085 - RNA, 13 nt, Human
auuguaaaauggu

SEQ ID NO: 2750086 - RNA, 23 nt, Human
auuguaauaggcguaacuaauuu

SEQ ID NO: 2750087 - RNA, 23 nt, Human
auuacaaaucagaagucaucuug

SEQ ID NO: 2750088 - RNA, 21 nt, Human
auuacaaaucagaagucaucu

SEQ ID NO: 2750089 - RNA, 22 nt, Human
auuacaaaucagaagucaucuu

SEQ ID NO: 2750090 - RNA, 14 nt, Human
auuacaaaucagaa

SEQ ID NO: 2750091 - RNA, 16 nt, Human
auuacaaaucagaagu

SEQ ID NO: 2750092 - RNA, 18 nt, Human
auuacaaaucagaaguca

SEQ ID NO: 2750093 - RNA, 19 nt, Human
auuacaaaucagaagucau

SEQ ID NO: 2750094 - RNA, 22 nt, Human
auucauagcagcuuauucacaa

SEQ ID NO: 2750095 - RNA, 19 nt, Human
auucauagcagcuuauuca

SEQ ID NO: 2750096 - RNA, 21 nt, Human
auucacagugcucuuuucucc

SEQ ID NO: 2750097 - RNA, 19 nt, Human
auucacagugcucuuuucu

SEQ ID NO: 2750098 - RNA, 20 nt, Human
auucacagugcucuuuucuc

SEQ ID NO: 2750099 - RNA, 18 nt, Human
auuaugaauuacauuugu

SEQ ID NO: 2750100 - RNA, 19 nt, Human
auucacaagacccaaaagg

SEQ ID NO: 2750101 - RNA, 16 nt, Human
auuagggagagaagau

SEQ ID NO: 2750102 - RNA, 17 nt, Human
auuaugaauuacauuug

SEQ ID NO: 2750103 - RNA, 14 nt, Human
auuaugaauuacau

SEQ ID NO: 2750104 - RNA, 17 nt, Human
auuuuauagcuacuaau

SEQ ID NO: 2750105 - RNA, 19 nt, Human
auuuuauagcuacuaauuu

SEQ ID NO: 2750106 - RNA, 15 nt, Human
auuuggaaauaaagu

SEQ ID NO: 2750107 - RNA, 17 nt, Human
auuuggaaauaaaguca

SEQ ID NO: 2750108 - RNA, 22 nt, Human
auuuggaaauaaagucagaugg

SEQ ID NO: 2750109 - RNA, 17 nt, Human
auuugcucauggaauug

SEQ ID NO: 2750110 - RNA, 14 nt, Human
auuugcucauggaa

SEQ ID NO: 2750111 - RNA, 13 nt, Human
caaacccaguguu

SEQ ID NO: 2750112 - RNA, 15 nt, Human
caaaaggcagaagca

SEQ ID NO: 2750113 - RNA, 20 nt, Human
caaaaaaaaaaaaaaauuag

SEQ ID NO: 2750114 - RNA, 20 nt, Human
caaagcacugacuucuaagu

SEQ ID NO: 2750115 - RNA, 22 nt, Human
caaagcacugacuucuaaguaa

SEQ ID NO: 2750116 - RNA, 23 nt, Human
caacacgagcaggcuacugucag

SEQ ID NO: 2750117 - RNA, 19 nt, Human
augagagacacacugaaga

SEQ ID NO: 2750118 - RNA, 17 nt, Human
augagagacacacugaa

SEQ ID NO: 2750119 - RNA, 14 nt, Human
augagagacacacu

SEQ ID NO: 2750120 - RNA, 13 nt, Human
augagagacacac

SEQ ID NO: 2750121 - RNA, 17 nt, Human
uuguauaaaauaauuuu

SEQ ID NO: 2750122 - RNA, 16 nt, Human
uuguaucacaaaucuu

SEQ ID NO: 2750123 - RNA, 23 nt, Human
uugguuuaaagaaaguguauuug

SEQ ID NO: 2750124 - RNA, 17 nt, Human
uugguuuaaagaaagug

SEQ ID NO: 2750125 - RNA, 18 nt, Human
uugguuuaaagaaagugu

SEQ ID NO: 2750126 - RNA, 22 nt, Human
uugguuuaaagaaaguguauuu

SEQ ID NO: 2750127 - RNA, 15 nt, Human
uuguauaaaauaauu

SEQ ID NO: 2750128 - RNA, 16 nt, Human
uuguauaaaauaauuu

SEQ ID NO: 2750129 - RNA, 13 nt, Human
augaaugaauggc

SEQ ID NO: 2750130 - RNA, 18 nt, Human
augaagauguagaggaga

SEQ ID NO: 2750131 - RNA, 17 nt, Human
augaaauauuauguuaa

SEQ ID NO: 2750132 - RNA, 13 nt, Human
augaaauauuaug

SEQ ID NO: 2750133 - RNA, 18 nt, Human
augaaauauuauguuaaa

SEQ ID NO: 2750134 - RNA, 15 nt, Human
augaaagcagggacu

SEQ ID NO: 2750135 - RNA, 13 nt, Human
aucuuuuucuaac

SEQ ID NO: 2750136 - RNA, 18 nt, Human
uugauggugguauguuuu

SEQ ID NO: 2750137 - RNA, 19 nt, Human
uugauggugguauguuuuc

SEQ ID NO: 2750138 - RNA, 23 nt, Human
aucucauuuccaagcaaguauua

SEQ ID NO: 2750139 - RNA, 21 nt, Human
aucucauuuccaagcaaguau

SEQ ID NO: 2750140 - RNA, 13 nt, Human
aucucaauauuuc

SEQ ID NO: 2750141 - RNA, 13 nt, Human
uugcccuguuaaa

SEQ ID NO: 2750142 - RNA, 22 nt, Human
uuuagcuggaaaaguauguuag

SEQ ID NO: 2750143 - RNA, 20 nt, Human
uuuagcuggaaaaguauguu

SEQ ID NO: 2750144 - RNA, 13 nt, Human
uuuauauaagcuu

SEQ ID NO: 2750145 - RNA, 15 nt, Human
augcuagaacucccu

SEQ ID NO: 2750146 - RNA, 16 nt, Human
augcuagaacucccuu

SEQ ID NO: 2750147 - RNA, 22 nt, Human
augcugucuacacuaagagaga

SEQ ID NO: 2750148 - RNA, 19 nt, Human
uuucauguuaguuaccuua

SEQ ID NO: 2750149 - RNA, 20 nt, Human
auggcuaguaucaaaagaaa

SEQ ID NO: 2750150 - RNA, 17 nt, Human
augcaguucugaagaag

SEQ ID NO: 2750151 - RNA, 15 nt, Human
augcaguucugaaga

SEQ ID NO: 2750152 - RNA, 19 nt, Human
augcaguucugaagaagau

SEQ ID NO: 2750153 - RNA, 18 nt, Human
augcaguucugaagaaga

SEQ ID NO: 2750154 - RNA, 17 nt, Human
augccacuaaauugaca

SEQ ID NO: 2750155 - RNA, 15 nt, Human
augccacuaaauuga

SEQ ID NO: 2750156 - RNA, 14 nt, Human
uuguuuucauuauc

SEQ ID NO: 2750157 - RNA, 15 nt, Human
augcaaagcacugac

SEQ ID NO: 2750158 - RNA, 12 nt, Human
augauucccagc

SEQ ID NO: 2750159 - RNA, 22 nt, Human
augauuaugaauuacauuugua

SEQ ID NO: 2750160 - RNA, 21 nt, Human
augagagacacacugaagaag

SEQ ID NO: 2750161 - RNA, 20 nt, Human
augagagacacacugaagaa

SEQ ID NO: 2750162 - RNA, 23 nt, Human
augagagacacacugaagaagca

SEQ ID NO: 2750163 - RNA, 16 nt, Human
uuguuggcauagcucu

SEQ ID NO: 2750164 - RNA, 21 nt, Human
uuguguguuauuuaaaugagu

SEQ ID NO: 2750165 - RNA, 20 nt, Human
uuguguguuauuuaaaugag

SEQ ID NO: 2750166 - RNA, 23 nt, Human
uugugugaaagguacuucaaauc

SEQ ID NO: 2750167 - RNA, 16 nt, Human
uuguguguuauuuaaa

SEQ ID NO: 2750168 - RNA, 15 nt, Human
uuguguguuauuuaa

SEQ ID NO: 2750169 - RNA, 17 nt, Human
uucuugcuucuuucuag

SEQ ID NO: 2750170 - RNA, 19 nt, Human
uucuugcuucuuucuagaa

SEQ ID NO: 2750171 - RNA, 12 nt, Human
auccuaauaaaa

SEQ ID NO: 2750172 - RNA, 14 nt, Human
auccuaauaaaaag

SEQ ID NO: 2750173 - RNA, 15 nt, Human
auccuaauaaaaagg

SEQ ID NO: 2750174 - RNA, 16 nt, Human
auccuaauaaaaaggu

SEQ ID NO: 2750175 - RNA, 17 nt, Human
auccuaauaaaaaggug

SEQ ID NO: 2750176 - RNA, 13 nt, Human
uugaacacugggg

SEQ ID NO: 2750177 - RNA, 18 nt, Human
auccuaauaaaaagguga

SEQ ID NO: 2750178 - RNA, 22 nt, Human
auccuaauaaaaaggugaccau

SEQ ID NO: 2750179 - RNA, 20 nt, Human
uugaacaaguuguuucauug

SEQ ID NO: 2750180 - RNA, 19 nt, Human
uugaaauauugacuuuuua

SEQ ID NO: 2750181 - RNA, 14 nt, Human
auccauacauuugu

SEQ ID NO: 2750182 - RNA, 13 nt, Human
uucuauaauuuaa

SEQ ID NO: 2750183 - RNA, 14 nt, Human
uucuauaauuuaaa

SEQ ID NO: 2750184 - RNA, 21 nt, Human
uucuaaguaaaaccacagcag

SEQ ID NO: 2750185 - RNA, 19 nt, Human
uucuagaaagagaaacagu

SEQ ID NO: 2750186 - RNA, 22 nt, Human
uucuagaaagagaaacaguugg

SEQ ID NO: 2750187 - RNA, 19 nt, Human
uucuaaguaaaaccacagc

SEQ ID NO: 2750188 - RNA, 20 nt, Human
uucuaaguaaaaccacagca

SEQ ID NO: 2750189 - RNA, 17 nt, Human
uucuaaguaaaaccaca

SEQ ID NO: 2750190 - RNA, 22 nt, Human
uuccccuugcccagggcucagc

SEQ ID NO: 2750191 - RNA, 23 nt, Human
uuccccuugcccagggcucagcc

SEQ ID NO: 2750192 - RNA, 21 nt, Human
uuccuuagcuuagaccucagc

SEQ ID NO: 2750193 - RNA, 20 nt, Human
uuccuuagcuuagaccucag

SEQ ID NO: 2750194 - RNA, 23 nt, Human
uuccuuagcuuagaccucagccu

SEQ ID NO: 2750195 - RNA, 22 nt, Human
uuccuuagcuuagaccucagcc

SEQ ID NO: 2750196 - RNA, 20 nt, Human
aucaaauaugcaaagcacug

SEQ ID NO: 2750197 - RNA, 12 nt, Human
uucccaaauuuc

SEQ ID NO: 2750198 - RNA, 18 nt, Human
uucccaacuccagaaagu

SEQ ID NO: 2750199 - RNA, 16 nt, Human
uucaaggaauuucuua

SEQ ID NO: 2750200 - RNA, 18 nt, Human
uucaaacagucucaggaa

SEQ ID NO: 2750201 - RNA, 14 nt, Human
uucaaacauauaua

SEQ ID NO: 2750202 - RNA, 17 nt, Human
auaggcguaacuaauuu

SEQ ID NO: 2750203 - RNA, 22 nt, Human
auaggaauugacccacaagaaa

SEQ ID NO: 2750204 - RNA, 23 nt, Human
uucacaagacccaaaaggcagaa

SEQ ID NO: 2750205 - RNA, 22 nt, Human
uucacaagacccaaaaggcaga

SEQ ID NO: 2750206 - RNA, 21 nt, Human
uucacacacaggcaacugagg

SEQ ID NO: 2750207 - RNA, 17 nt, Human
auaguuacuguguaauu

SEQ ID NO: 2750208 - RNA, 13 nt, Human
auaguuacugugu

SEQ ID NO: 2750209 - RNA, 14 nt, Human
auaguuacugugua

SEQ ID NO: 2750210 - RNA, 18 nt, Human
auaguuacuguguaauua

SEQ ID NO: 2750211 - RNA, 20 nt, Human
auaguuacuguguaauuagu

SEQ ID NO: 2750212 - RNA, 20 nt, Human
auaguuguaccgcaauguga

SEQ ID NO: 2750213 - RNA, 24 nt, Human
auauaucuaccccagacuagaugu

SEQ ID NO: 2750214 - RNA, 17 nt, Human
auauaacaaugcuguau

SEQ ID NO: 2750215 - RNA, 19 nt, Human
auauauaacaaugcuguau

SEQ ID NO: 2750216 - RNA, 18 nt, Human
auuuguaguguuggagaa

SEQ ID NO: 2750217 - RNA, 23 nt, Human
auuugguaaggggaauugaggac

SEQ ID NO: 2750218 - RNA, 22 nt, Human
auuuauuacuguaagaaaauau

SEQ ID NO: 2750219 - RNA, 15 nt, Human
auuuguaucacaaau

SEQ ID NO: 2750220 - RNA, 21 nt, Human
auuuguauaaaauaauuuuua

SEQ ID NO: 2750221 - RNA, 16 nt, Human
auuuuaauaauguuuc

SEQ ID NO: 2750222 - RNA, 15 nt, Human
auuuuaauaauguuu

SEQ ID NO: 2750223 - RNA, 14 nt, Human
auuuuaauaauguu

SEQ ID NO: 2750224 - RNA, 12 nt, Human
auuuuaauaaug

SEQ ID NO: 2750225 - RNA, 21 nt, Human
auugacccacaagaaaugaaa

SEQ ID NO: 2750226 - RNA, 20 nt, Human
auugacacuuaaaaaugguu

SEQ ID NO: 2750227 - RNA, 14 nt, Human
auuguauuacaaau

SEQ ID NO: 2750228 - RNA, 13 nt, Human
auugugccccugc

SEQ ID NO: 2750229 - RNA, 19 nt, Human
auuuaaagcuuauuaaaac

SEQ ID NO: 2750230 - RNA, 16 nt, Human
auuuacaaaugggaaa

SEQ ID NO: 2750231 - RNA, 14 nt, Human
auuuaccuaagauu

SEQ ID NO: 2750232 - RNA, 15 nt, Human
auuuaccuaagauua

SEQ ID NO: 2750233 - RNA, 17 nt, Human
auuuaccuaagauuaca

SEQ ID NO: 2750234 - RNA, 18 nt, Human
auuuaccuaagauuacaa

SEQ ID NO: 2750235 - RNA, 20 nt, Human
auuccacuuauaggaauuga

SEQ ID NO: 2750236 - RNA, 14 nt, Human
auucaaacagucuc

SEQ ID NO: 2750237 - RNA, 15 nt, Human
auucaaacagucuca

SEQ ID NO: 2750238 - RNA, 13 nt, Human
auuacauuuguau

SEQ ID NO: 2750239 - RNA, 20 nt, Human
auuacauuuguauaaaauaa

SEQ ID NO: 2750240 - RNA, 15 nt, Human
auuacauuuguauaa

SEQ ID NO: 2750241 - RNA, 23 nt, Human
uuuuuuaaaaaagaaacauuugg

SEQ ID NO: 2750242 - RNA, 15 nt, Human
auuaaguaaugauaa

SEQ ID NO: 2750243 - RNA, 13 nt, Human
auuaaguaaugau

SEQ ID NO: 2750244 - RNA, 16 nt, Human
auuaaucuuaguguau

SEQ ID NO: 2750245 - RNA, 17 nt, Human
auuaaucuuaguguaug

SEQ ID NO: 2750246 - RNA, 19 nt, Human
auuaaucuuaguguaugau

SEQ ID NO: 2750247 - RNA, 22 nt, Human
auuaaucuuaguguaugauuac

SEQ ID NO: 2750248 - RNA, 20 nt, Human
auuaaucuuaguguaugauu

SEQ ID NO: 2750249 - RNA, 21 nt, Human
auuaaucuuaguguaugauua

SEQ ID NO: 2750250 - RNA, 22 nt, Human
auuacuggccuuuuucauuuau

SEQ ID NO: 2750251 - RNA, 17 nt, Human
auuacuggccuuuuuca

SEQ ID NO: 2750252 - RNA, 21 nt, Human
auuacuggccuuuuucauuua

SEQ ID NO: 2750253 - RNA, 16 nt, Human
auuauauuuacaaaug

SEQ ID NO: 2750254 - RNA, 20 nt, Human
auuauuaccuuacagaaguu

SEQ ID NO: 2750255 - RNA, 18 nt, Human
auuaucucaaaacugcac

SEQ ID NO: 2750256 - RNA, 23 nt, Human
auuaucucaaaacugcacuguca

SEQ ID NO: 2750257 - RNA, 17 nt, Human
auuauauuuacaaaugg

SEQ ID NO: 2750258 - RNA, 15 nt, Human
auuauauuuacaaau

SEQ ID NO: 2750259 - RNA, 14 nt, Human
uuuuauaauuuugu

SEQ ID NO: 2750260 - RNA, 23 nt, Human
uuuuauggaggcuuugcauagau

SEQ ID NO: 2750261 - RNA, 19 nt, Human
uuuuauggcacuaguauuu

SEQ ID NO: 2750262 - RNA, 20 nt, Human
auguuaguuaccuuauaguu

SEQ ID NO: 2750263 - RNA, 21 nt, Human
auguuaguuaccuuauaguua

SEQ ID NO: 2750264 - RNA, 22 nt, Human
auguuaguuaccuuauaguuac

SEQ ID NO: 2750265 - RNA, 23 nt, Human
auguuaguuaccuuauaguuacu

SEQ ID NO: 2750266 - RNA, 19 nt, Human
auguucaucaaugaaugaa

SEQ ID NO: 2750267 - RNA, 15 nt, Human
auguugacaugggac

SEQ ID NO: 2750268 - RNA, 15 nt, Human
auuaacgauguccaa

SEQ ID NO: 2750269 - RNA, 15 nt, Human
auuaaaagaauauuu

SEQ ID NO: 2750270 - RNA, 16 nt, Human
auuaaaagaauauuuu

SEQ ID NO: 2750271 - RNA, 18 nt, Human
auguuucaaacauauaua

SEQ ID NO: 2750272 - RNA, 21 nt, Human
auguuucaaacauauauaaca

SEQ ID NO: 2750273 - RNA, 13 nt, Human
uuuuaaaaaagaa

SEQ ID NO: 2750274 - RNA, 14 nt, Human
uuuuaaaagaauga

SEQ ID NO: 2750275 - RNA, 12 nt, Human
auguaguauuuu

SEQ ID NO: 2750276 - RNA, 21 nt, Human
auguaguauuuuuuguauaau

SEQ ID NO: 2750277 - RNA, 22 nt, Human
auguaguauuuuuuguauaauu

SEQ ID NO: 2750278 - RNA, 23 nt, Human
auguaguauuuuuuguauaauug

SEQ ID NO: 2750279 - RNA, 21 nt, Human
augucccuacaccccuccccu

SEQ ID NO: 2750280 - RNA, 12 nt, Human
uuugcucaugga

SEQ ID NO: 2750281 - RNA, 11 nt, Human
uuugcucaugg

SEQ ID NO: 2750282 - RNA, 15 nt, Human
auggcuauaggugcu

SEQ ID NO: 2750283 - RNA, 13 nt, Human
uuugcucauggaa

SEQ ID NO: 2750284 - RNA, 12 nt, Human
uuuggccagaag

SEQ ID NO: 2750285 - RNA, 14 nt, Human
uuuggccagaaguc

SEQ ID NO: 2750286 - RNA, 10 nt, Human
uuuggccaga

SEQ ID NO: 2750287 - RNA, 18 nt, Human
uuaccuuauaguuacugu

SEQ ID NO: 2750288 - RNA, 15 nt, Human
auaaauaguuuauga

SEQ ID NO: 2750289 - RNA, 14 nt, Human
auaaauaaaaauaa

SEQ ID NO: 2750290 - RNA, 13 nt, Human
auaaauaaaaaua

SEQ ID NO: 2750291 - RNA, 22 nt, Human
auaacgauaaaagacagugaaa

SEQ ID NO: 2750292 - RNA, 22 nt, Human
auaaccugucucaccuggacuu

SEQ ID NO: 2750293 - RNA, 19 nt, Human
uuagcaaagaguuaauaua

SEQ ID NO: 2750294 - RNA, 13 nt, Human
uuagcaaagaguu

SEQ ID NO: 2750295 - RNA, 20 nt, Human
uuagcaaagaguuaauauau

SEQ ID NO: 2750296 - RNA, 23 nt, Human
auaauuuaccuaagauuacaaau

SEQ ID NO: 2750297 - RNA, 13 nt, Human
auaauuuaccuaa

SEQ ID NO: 2750298 - RNA, 16 nt, Human
auaauuuaccuaagau

SEQ ID NO: 2750299 - RNA, 18 nt, Human
auaauccuaaacauauga

SEQ ID NO: 2750300 - RNA, 16 nt, Human
aguugguaacuuuugu

SEQ ID NO: 2750301 - RNA, 20 nt, Human
aguugguaacuuuugugaau

SEQ ID NO: 2750302 - RNA, 14 nt, Human
aguuuaaauuguaa

SEQ ID NO: 2750303 - RNA, 15 nt, Human
aguugguaacuuuug

SEQ ID NO: 2750304 - RNA, 13 nt, Human
aguugguaacuuu

SEQ ID NO: 2750305 - RNA, 13 nt, Human
uguuucaaacaua

SEQ ID NO: 2750306 - RNA, 14 nt, Human
uuaaucuuagugua

SEQ ID NO: 2750307 - RNA, 16 nt, Human
uuaaucuuaguguaug

SEQ ID NO: 2750308 - RNA, 12 nt, Human
auaaaauaauuu

SEQ ID NO: 2750309 - RNA, 22 nt, Human
auaaaauaauuuuuauauuuga

SEQ ID NO: 2750310 - RNA, 19 nt, Human
aguuuucugagaaagacua

SEQ ID NO: 2750311 - RNA, 18 nt, Human
aguuuucugagaaagacu

SEQ ID NO: 2750312 - RNA, 23 nt, Human
aguuuucugagaaagacuauuca

SEQ ID NO: 2750313 - RNA, 19 nt, Human
aguucggugagcuacaaau

SEQ ID NO: 2750314 - RNA, 15 nt, Human
uguuauuuaaaugag

SEQ ID NO: 2750315 - RNA, 16 nt, Human
aguguuggagaagaac

SEQ ID NO: 2750316 - RNA, 14 nt, Human
aguguuggagaaga

SEQ ID NO: 2750317 - RNA, 18 nt, Human
aguguuggagaagaacug

SEQ ID NO: 2750318 - RNA, 17 nt, Human
aguguuggagaagaacu

SEQ ID NO: 2750319 - RNA, 11 nt, Human
aguuacugugu

SEQ ID NO: 2750320 - RNA, 19 nt, Human
aguuacuguguaauuagug

SEQ ID NO: 2750321 - RNA, 14 nt, Human
aguuacuguguaau

SEQ ID NO: 2750322 - RNA, 15 nt, Human
aguuacuguguaauu

SEQ ID NO: 2750323 - RNA, 16 nt, Human
aguuacuguguaauua

SEQ ID NO: 2750324 - RNA, 18 nt, Human
aguuacuguguaauuagu

SEQ ID NO: 2750325 - RNA, 14 nt, Human
uguggcagaguuac

SEQ ID NO: 2750326 - RNA, 15 nt, Human
uguggcagaguuaca

SEQ ID NO: 2750327 - RNA, 19 nt, Human
uguggcagaguuacaguuc

SEQ ID NO: 2750328 - RNA, 20 nt, Human
uguggcagaguuacaguucu

SEQ ID NO: 2750329 - RNA, 14 nt, Human
agugccacuuaaug

SEQ ID NO: 2750330 - RNA, 16 nt, Human
agugccacuuaaugua

SEQ ID NO: 2750331 - RNA, 21 nt, Human
agugcaaauugucacaggaca

SEQ ID NO: 2750332 - RNA, 18 nt, Human
agugcaaauugucacagg

SEQ ID NO: 2750333 - RNA, 17 nt, Human
ugugguuucauguuagu

SEQ ID NO: 2750334 - RNA, 22 nt, Human
ugugguuucauguuaguuaccu

SEQ ID NO: 2750335 - RNA, 16 nt, Human
uguguuauuuaaauga

SEQ ID NO: 2750336 - RNA, 14 nt, Human
uguguuauuuaaau

SEQ ID NO: 2750337 - RNA, 13 nt, Human
uguguuauuuaaa

SEQ ID NO: 2750338 - RNA, 20 nt, Human
agugcuuggcccaggaguuu

SEQ ID NO: 2750339 - RNA, 18 nt, Human
agugcuuggcccaggagu

SEQ ID NO: 2750340 - RNA, 19 nt, Human
agugcuuggcccaggaguu

SEQ ID NO: 2750341 - RNA, 12 nt, Human
agugcuuggccc

SEQ ID NO: 2750342 - RNA, 14 nt, Human
agugcuuggcccag

SEQ ID NO: 2750343 - RNA, 15 nt, Human
agugcuuggcccagg

SEQ ID NO: 2750344 - RNA, 16 nt, Human
agugcuuggcccagga

SEQ ID NO: 2750345 - RNA, 21 nt, Human
agugccuguaaucacagcuac

SEQ ID NO: 2750346 - RNA, 23 nt, Human
agguacuucaaauccuugaagau

SEQ ID NO: 2750347 - RNA, 16 nt, Human
aggguuagggaggggu

SEQ ID NO: 2750348 - RNA, 15 nt, Human
aggguuagggagggg

SEQ ID NO: 2750349 - RNA, 13 nt, Human
aggguuagggagg

SEQ ID NO: 2750350 - RNA, 20 nt, Human
ugguaaggggaauugaggac

SEQ ID NO: 2750351 - RNA, 17 nt, Human
uggggaagacuguggcu

SEQ ID NO: 2750352 - RNA, 16 nt, Human
uggggaagacuguggc

SEQ ID NO: 2750353 - RNA, 24 nt, Human
uggggaagacuguggcugcuagca

SEQ ID NO: 2750354 - RNA, 14 nt, Human
uggggaagacugug

SEQ ID NO: 2750355 - RNA, 17 nt, Human
agggcagggacaggaua

SEQ ID NO: 2750356 - RNA, 15 nt, Human
agucaggaaagagaa

SEQ ID NO: 2750357 - RNA, 16 nt, Human
agucaggaaagagaac

SEQ ID NO: 2750358 - RNA, 23 nt, Human
agucagacuggauaguccgucuc

SEQ ID NO: 2750359 - RNA, 22 nt, Human
ugucagcugcaagguacucugg

SEQ ID NO: 2750360 - RNA, 23 nt, Human
ugucagcugcaagguacucuggu

SEQ ID NO: 2750361 - RNA, 23 nt, Human
ugucauuugcuggagcucugccc

SEQ ID NO: 2750362 - RNA, 15 nt, Human
aguauuucuaugaaa

SEQ ID NO: 2750363 - RNA, 13 nt, Human
aguauuucuauga

SEQ ID NO: 2750364 - RNA, 22 nt, Human
aguauuucuaugaaauauuaug

SEQ ID NO: 2750365 - RNA, 20 nt, Human
ugucaaucagccuaguugau

SEQ ID NO: 2750366 - RNA, 21 nt, Human
ugucaauaaaauccauacauu

SEQ ID NO: 2750367 - RNA, 21 nt, Human
uguaauuagugccacuuaaug

SEQ ID NO: 2750368 - RNA, 23 nt, Human
uguaauuagugccacuuaaugua

SEQ ID NO: 2750369 - RNA, 23 nt, Human
uguaccaguuaauuuuuccaacu

SEQ ID NO: 2750370 - RNA, 21 nt, Human
uguaccaguuaauuuuuccaa

SEQ ID NO: 2750371 - RNA, 22 nt, Human
uguaccaguuaauuuuuccaac

SEQ ID NO: 2750372 - RNA, 11 nt, Human
uguaccaguua

SEQ ID NO: 2750373 - RNA, 12 nt, Human
uguaccaguuaa

SEQ ID NO: 2750374 - RNA, 14 nt, Human
uguaccaguuaauu

SEQ ID NO: 2750375 - RNA, 15 nt, Human
uguaccaguuaauuu

SEQ ID NO: 2750376 - RNA, 16 nt, Human
uguagaggagaaacug

SEQ ID NO: 2750377 - RNA, 18 nt, Human
uguagaggagaaacugga

SEQ ID NO: 2750378 - RNA, 15 nt, Human
aguaaaaccacagca

SEQ ID NO: 2750379 - RNA, 19 nt, Human
aguagauaggccaugggca

SEQ ID NO: 2750380 - RNA, 11 nt, Human
ugcucauggaa

SEQ ID NO: 2750381 - RNA, 14 nt, Human
ugcucauggaauug

SEQ ID NO: 2750382 - RNA, 12 nt, Human
aggaaauauuua

SEQ ID NO: 2750383 - RNA, 23 nt, Human
aggaaaucaaauaugcaaagcac

SEQ ID NO: 2750384 - RNA, 17 nt, Human
aggacacugauaugggu

SEQ ID NO: 2750385 - RNA, 22 nt, Human
ugcuguauuuuaaaagaaugau

SEQ ID NO: 2750386 - RNA, 21 nt, Human
ugcuguauuuuaaaagaauga

SEQ ID NO: 2750387 - RNA, 13 nt, Human
ugcuguauuuuaa

SEQ ID NO: 2750388 - RNA, 17 nt, Human
agcuugaaacugagaug

SEQ ID NO: 2750389 - RNA, 15 nt, Human
agcuuagaccucagc

SEQ ID NO: 2750390 - RNA, 14 nt, Human
agcuuagaccucag

SEQ ID NO: 2750391 - RNA, 19 nt, Human
agcuuagaccucagccugu

SEQ ID NO: 2750392 - RNA, 18 nt, Human
agcuuagaccucagccug

SEQ ID NO: 2750393 - RNA, 17 nt, Human
agcuuagaccucagccu

SEQ ID NO: 2750394 - RNA, 16 nt, Human
agcuuagaccucagcc

SEQ ID NO: 2750395 - RNA, 20 nt, Human
agcuuagaccucagccugug

SEQ ID NO: 2750396 - RNA, 20 nt, Human
ugcuacaaaaacacagcaag

SEQ ID NO: 2750397 - RNA, 15 nt, Human
ugcuacaaaaacaca

SEQ ID NO: 2750398 - RNA, 16 nt, Human
ugcuacaaaaacacag

SEQ ID NO: 2750399 - RNA, 17 nt, Human
ugcuacaaaaacacagc

SEQ ID NO: 2750400 - RNA, 18 nt, Human
ugcuacaaaaacacagca

SEQ ID NO: 2750401 - RNA, 19 nt, Human
ugcuacaaaaacacagcaa

SEQ ID NO: 2750402 - RNA, 16 nt, Human
agcugccuccccuccu

SEQ ID NO: 2750403 - RNA, 15 nt, Human
agcugccuccccucc

SEQ ID NO: 2750404 - RNA, 22 nt, Human
agcugcccucuccugggcagcu

SEQ ID NO: 2750405 - RNA, 16 nt, Human
agcuguucacagccag

SEQ ID NO: 2750406 - RNA, 19 nt, Human
agcuguucacagccagacu

SEQ ID NO: 2750407 - RNA, 16 nt, Human
uggcauagcucugggg

SEQ ID NO: 2750408 - RNA, 14 nt, Human
uggcauagcucugg

SEQ ID NO: 2750409 - RNA, 15 nt, Human
uggcauagcucuggg

SEQ ID NO: 2750410 - RNA, 18 nt, Human
uggcacaguuuucugaga

SEQ ID NO: 2750411 - RNA, 19 nt, Human
uggcacaguuuucugagaa

SEQ ID NO: 2750412 - RNA, 13 nt, Human
uggaaaggcagcu

SEQ ID NO: 2750413 - RNA, 18 nt, Human
uggacaccaggagucccu

SEQ ID NO: 2750414 - RNA, 14 nt, Human
uggagaagaacuga

SEQ ID NO: 2750415 - RNA, 13 nt, Human
uggagaagaacug

SEQ ID NO: 2750416 - RNA, 18 nt, Human
agccuggugggccuccuc

SEQ ID NO: 2750417 - RNA, 16 nt, Human
agccuggugggccucc

SEQ ID NO: 2750418 - RNA, 14 nt, Human
agccuggugggccu

SEQ ID NO: 2750419 - RNA, 11 nt, Human
agccugguggg

SEQ ID NO: 2750420 - RNA, 22 nt, Human
agccuggugggccuccucuguc

SEQ ID NO: 2750421 - RNA, 21 nt, Human
agccuggugggccuccucugu

SEQ ID NO: 2750422 - RNA, 14 nt, Human
ugccaauauccuaa

SEQ ID NO: 2750423 - RNA, 20 nt, Human
agccuuggggcugaugcagu

SEQ ID NO: 2750424 - RNA, 13 nt, Human
ugccagacaugug

SEQ ID NO: 2750425 - RNA, 12 nt, Human
ugccagacaugu

SEQ ID NO: 2750426 - RNA, 18 nt, Human
agcuacuugggaggcuga

SEQ ID NO: 2750427 - RNA, 17 nt, Human
agcuacuugggaggcug

SEQ ID NO: 2750428 - RNA, 18 nt, Human
agccccgugggguuccuc

SEQ ID NO: 2750429 - RNA, 18 nt, Human
agcccauggcacucuaug

SEQ ID NO: 2750430 - RNA, 15 nt, Human
agccgaccucagccu

SEQ ID NO: 2750431 - RNA, 14 nt, Human
agccgaccucagcc

SEQ ID NO: 2750432 - RNA, 16 nt, Human
agccgaccucagccuu

SEQ ID NO: 2750433 - RNA, 13 nt, Human
agccgaccucagc

SEQ ID NO: 2750434 - RNA, 12 nt, Human
agccgaccucag

SEQ ID NO: 2750435 - RNA, 21 nt, Human
agccuagccgaccucagccuu

SEQ ID NO: 2750436 - RNA, 20 nt, Human
agccuagccgaccucagccu

SEQ ID NO: 2750437 - RNA, 19 nt, Human
agccuagccgaccucagcc

SEQ ID NO: 2750438 - RNA, 18 nt, Human
agccuagccgaccucagc

SEQ ID NO: 2750439 - RNA, 17 nt, Human
agccuagccgaccucag

SEQ ID NO: 2750440 - RNA, 20 nt, Human
agccucauccgaggcagggu

SEQ ID NO: 2750441 - RNA, 20 nt, Human
agccucauguccacugguuc

SEQ ID NO: 2750442 - RNA, 15 nt, Human
agccucauguccacu

SEQ ID NO: 2750443 - RNA, 18 nt, Human
agccucauccgaggcagg

SEQ ID NO: 2750444 - RNA, 19 nt, Human
agccucauccgaggcaggg

SEQ ID NO: 2750445 - RNA, 22 nt, Human
agccugaaagaggaaugaagua

SEQ ID NO: 2750446 - RNA, 19 nt, Human
agccagacuggcacaguuu

SEQ ID NO: 2750447 - RNA, 14 nt, Human
agccagacuggcac

SEQ ID NO: 2750448 - RNA, 14 nt, Human
ugaugaucuuuaaa

SEQ ID NO: 2750449 - RNA, 17 nt, Human
ugaugaucuuuaaaaua

SEQ ID NO: 2750450 - RNA, 23 nt, Human
agccagaaauaaaguuggugaca

SEQ ID NO: 2750451 - RNA, 19 nt, Human
agccagaaauaaaguuggu

SEQ ID NO: 2750452 - RNA, 12 nt, Human
ugauuaaaccaa

SEQ ID NO: 2750453 - RNA, 14 nt, Human
ugauuaccagggac

SEQ ID NO: 2750454 - RNA, 17 nt, Human
ugaugaagaaguugaua

SEQ ID NO: 2750455 - RNA, 23 nt, Human
agcauaaauguugacaugggaca

SEQ ID NO: 2750456 - RNA, 22 nt, Human
ugaguaacugauuuguaacaag

SEQ ID NO: 2750457 - RNA, 17 nt, Human
agcauuguaaaugugcu

SEQ ID NO: 2750458 - RNA, 18 nt, Human
agcauuguaaaugugcuu

SEQ ID NO: 2750459 - RNA, 17 nt, Human
agcaugucgucaaagcu

SEQ ID NO: 2750460 - RNA, 20 nt, Human
agcaugucgucaaagcugaa

SEQ ID NO: 2750461 - RNA, 12 nt, Human
ugauaugggucu

SEQ ID NO: 2750462 - RNA, 16 nt, Human
ucuuucugaugucaaa

SEQ ID NO: 2750463 - RNA, 19 nt, Human
ugaaacucguuaauuugua

SEQ ID NO: 2750464 - RNA, 22 nt, Human
ugaaacugagaugugaacacau

SEQ ID NO: 2750465 - RNA, 22 nt, Human
ugaaaaaguucugcagauaaac

SEQ ID NO: 2750466 - RNA, 20 nt, Human
ugaaaagcuccauuuuuagu

SEQ ID NO: 2750467 - RNA, 20 nt, Human
agagacucagggccccagca

SEQ ID NO: 2750468 - RNA, 19 nt, Human
agagacucagggccccagc

SEQ ID NO: 2750469 - RNA, 21 nt, Human
agagcaguuugguuucuagca

SEQ ID NO: 2750470 - RNA, 23 nt, Human
agagcaguuugguuucuagcaug

SEQ ID NO: 2750471 - RNA, 21 nt, Human
agacauagaauuaacacauga

SEQ ID NO: 2750472 - RNA, 14 nt, Human
agacauagaauuaa

SEQ ID NO: 2750473 - RNA, 18 nt, Human
agacaucaacagauaaau

SEQ ID NO: 2750474 - RNA, 17 nt, Human
agacaucaacagauaaa

SEQ ID NO: 2750475 - RNA, 14 nt, Human
ucuucucuccagcu

SEQ ID NO: 2750476 - RNA, 18 nt, Human
ucuucucuccagcugacu

SEQ ID NO: 2750477 - RNA, 15 nt, Human
ucuucacaacagauu

SEQ ID NO: 2750478 - RNA, 14 nt, Human
agaaucacuugaac

SEQ ID NO: 2750479 - RNA, 16 nt, Human
ucuuggguaggcggga

SEQ ID NO: 2750480 - RNA, 17 nt, Human
agacucagggccccagc

SEQ ID NO: 2750481 - RNA, 16 nt, Human
agacucagggccccag

SEQ ID NO: 2750482 - RNA, 12 nt, Human
agacucagggcc

SEQ ID NO: 2750483 - RNA, 20 nt, Human
agacucagggccccagcacu

SEQ ID NO: 2750484 - RNA, 18 nt, Human
agacucagggccccagca

SEQ ID NO: 2750485 - RNA, 21 nt, Human
agacucagggccccagcacua

SEQ ID NO: 2750486 - RNA, 15 nt, Human
agacuauucaaacag

SEQ ID NO: 2750487 - RNA, 12 nt, Human
agacuauucaaa

SEQ ID NO: 2750488 - RNA, 14 nt, Human
agacuauucaaaca

SEQ ID NO: 2750489 - RNA, 16 nt, Human
agaugcaguucugaag

SEQ ID NO: 2750490 - RNA, 16 nt, Human
ugacacuuaaaaaugg

SEQ ID NO: 2750491 - RNA, 17 nt, Human
ugacacuuaaaaauggu

SEQ ID NO: 2750492 - RNA, 24 nt, Human
ugacuucuaaguaaaaccacagca

SEQ ID NO: 2750493 - RNA, 12 nt, Human
agauucauuuuu

SEQ ID NO: 2750494 - RNA, 22 nt, Human
ugacuucuaaguaaaaccacag

SEQ ID NO: 2750495 - RNA, 23 nt, Human
ugacuucuaaguaaaaccacagc

SEQ ID NO: 2750496 - RNA, 15 nt, Human
ugacuucuaaguaaa

SEQ ID NO: 2750497 - RNA, 15 nt, Human
agauucccugagcag

SEQ ID NO: 2750498 - RNA, 17 nt, Human
agauucauuuuucuuuc

SEQ ID NO: 2750499 - RNA, 23 nt, Human
agcaacgcaggcccccaggugcc

SEQ ID NO: 2750500 - RNA, 15 nt, Human
ugaauacuuuauaaa

SEQ ID NO: 2750501 - RNA, 14 nt, Human
agaagcuccaggua

SEQ ID NO: 2750502 - RNA, 13 nt, Human
agaaguugauaug

SEQ ID NO: 2750503 - RNA, 21 nt, Human
agaauaaaggcaguuuucuaa

SEQ ID NO: 2750504 - RNA, 13 nt, Human
agaauaaaggcag

SEQ ID NO: 2750505 - RNA, 14 nt, Human
agaauaaaggcagu

SEQ ID NO: 2750506 - RNA, 15 nt, Human
agaauaaaggcaguu

SEQ ID NO: 2750507 - RNA, 18 nt, Human
agaauaaaggcaguuuuc

SEQ ID NO: 2750508 - RNA, 20 nt, Human
agaauaaaggcaguuuucua

SEQ ID NO: 2750509 - RNA, 16 nt, Human
agaacucccuuucaac

SEQ ID NO: 2750510 - RNA, 15 nt, Human
agaacucccuuucaa

SEQ ID NO: 2750511 - RNA, 17 nt, Human
agaacucccuuucaaca

SEQ ID NO: 2750512 - RNA, 20 nt, Human
ucugcccauccugccccuga

SEQ ID NO: 2750513 - RNA, 19 nt, Human
agaagcaccaaucaugaau

SEQ ID NO: 2750514 - RNA, 19 nt, Human
agaagcaacccaaauguuc

SEQ ID NO: 2750515 - RNA, 15 nt, Human
ucucuccagcugacu

SEQ ID NO: 2750516 - RNA, 18 nt, Human
ucucuccagcugacuaaa

SEQ ID NO: 2750517 - RNA, 19 nt, Human
ucucuccagcugacuaaac

SEQ ID NO: 2750518 - RNA, 23 nt, Human
agaaacuuaagguuaccuuuguu

SEQ ID NO: 2750519 - RNA, 21 nt, Human
agaaacaguugguaacuuuug

SEQ ID NO: 2750520 - RNA, 22 nt, Human
agaaacaguugguaacuuuugu

SEQ ID NO: 2750521 - RNA, 16 nt, Human
agaaacacaacuauau

SEQ ID NO: 2750522 - RNA, 16 nt, Human
agaaagacuauucaaa

SEQ ID NO: 2750523 - RNA, 17 nt, Human
agaaagagaaacaguug

SEQ ID NO: 2750524 - RNA, 18 nt, Human
agaaagcagaacagugau

SEQ ID NO: 2750525 - RNA, 17 nt, Human
agaaagcagaacaguga

SEQ ID NO: 2750526 - RNA, 20 nt, Human
agaaagcagaacagugauua

SEQ ID NO: 2750527 - RNA, 20 nt, Human
acuuccagauccuggaaauc

SEQ ID NO: 2750528 - RNA, 13 nt, Human
ucuauaauuuaaa

SEQ ID NO: 2750529 - RNA, 12 nt, Human
ucuauaauuuac

SEQ ID NO: 2750530 - RNA, 16 nt, Human
ucuauaauuuaccuaa

SEQ ID NO: 2750531 - RNA, 12 nt, Human
ucuagcaugaag

SEQ ID NO: 2750532 - RNA, 18 nt, Human
acuucuaaguaaaaccac

SEQ ID NO: 2750533 - RNA, 19 nt, Human
acuucuaaguaaaaccaca

SEQ ID NO: 2750534 - RNA, 13 nt, Human
acuucuaaguaaa

SEQ ID NO: 2750535 - RNA, 21 nt, Human
acuucuaaguaaaaccacagc

SEQ ID NO: 2750536 - RNA, 17 nt, Human
ucucaaaacugcacugu

SEQ ID NO: 2750537 - RNA, 11 nt, Human
acuuggagcca

SEQ ID NO: 2750538 - RNA, 19 nt, Human
acuuggagccaaggguuca

SEQ ID NO: 2750539 - RNA, 14 nt, Human
acuuggagccaagg

SEQ ID NO: 2750540 - RNA, 21 nt, Human
acuugaacccgggaggcagag

SEQ ID NO: 2750541 - RNA, 23 nt, Human
acuugaacccgggaggcagaggu

SEQ ID NO: 2750542 - RNA, 20 nt, Human
acugggguccuggggccucg

SEQ ID NO: 2750543 - RNA, 18 nt, Human
acugggguccuggggccu

SEQ ID NO: 2750544 - RNA, 13 nt, Human
acugggggagggg

SEQ ID NO: 2750545 - RNA, 22 nt, Human
acugaagaagcaccaaucauga

SEQ ID NO: 2750546 - RNA, 18 nt, Human
acugaagccagaaauaaa

SEQ ID NO: 2750547 - RNA, 22 nt, Human
acugucagcuccccucggagaa

SEQ ID NO: 2750548 - RNA, 23 nt, Human
acugucagcuccccucggagaag

SEQ ID NO: 2750549 - RNA, 21 nt, Human
acugucauccucaaagaaagu

SEQ ID NO: 2750550 - RNA, 22 nt, Human
acugucauccucaaagaaagug

SEQ ID NO: 2750551 - RNA, 16 nt, Human
ucuaccccagacuaga

SEQ ID NO: 2750552 - RNA, 18 nt, Human
ucuaccccagacuagaug

SEQ ID NO: 2750553 - RNA, 21 nt, Human
ucuaccccagacuagauguag

SEQ ID NO: 2750554 - RNA, 23 nt, Human
ucuaccccagacuagauguagua

SEQ ID NO: 2750555 - RNA, 17 nt, Human
ucuaccaaaaaucucaa

SEQ ID NO: 2750556 - RNA, 13 nt, Human
acuguggguagac

SEQ ID NO: 2750557 - RNA, 19 nt, Human
acuguggcugcuagcacuu

SEQ ID NO: 2750558 - RNA, 12 nt, Human
acuguggcugcu

SEQ ID NO: 2750559 - RNA, 21 nt, Human
accaggguccuuuugacacug

SEQ ID NO: 2750560 - RNA, 20 nt, Human
acccaaauguucaucaauga

SEQ ID NO: 2750561 - RNA, 16 nt, Human
acccaaauguucauca

SEQ ID NO: 2750562 - RNA, 13 nt, Human
ucagcccucagaa

SEQ ID NO: 2750563 - RNA, 12 nt, Human
ucagcccucaga

SEQ ID NO: 2750564 - RNA, 20 nt, Human
ucagauggaaaauucauuuu

SEQ ID NO: 2750565 - RNA, 12 nt, Human
ucagauggaaaa

SEQ ID NO: 2750566 - RNA, 19 nt, Human
ucagauggaaaauucauuu

SEQ ID NO: 2750567 - RNA, 20 nt, Human
ucagagacucagggccccag

SEQ ID NO: 2750568 - RNA, 19 nt, Human
ucagagacucagggcccca

SEQ ID NO: 2750569 - RNA, 17 nt, Human
ucagagacucagggccc

SEQ ID NO: 2750570 - RNA, 14 nt, Human
ucagagacucaggg

SEQ ID NO: 2750571 - RNA, 14 nt, Human
ucagagcugcccuc

SEQ ID NO: 2750572 - RNA, 13 nt, Human
ucagagcugcccu

SEQ ID NO: 2750573 - RNA, 16 nt, Human
ucagagcugcccucuc

SEQ ID NO: 2750574 - RNA, 15 nt, Human
ucagagcugcccucu

SEQ ID NO: 2750575 - RNA, 17 nt, Human
ucagagcugcccucucc

SEQ ID NO: 2750576 - RNA, 13 nt, Human
ucaguagucagac

SEQ ID NO: 2750577 - RNA, 13 nt, Human
ucaaacagucuca

SEQ ID NO: 2750578 - RNA, 20 nt, Human
ucaaacagucucaggaaauc

SEQ ID NO: 2750579 - RNA, 21 nt, Human
ucaaacagucucaggaaauca

SEQ ID NO: 2750580 - RNA, 22 nt, Human
uauuuuaauaauguuucaaaca

SEQ ID NO: 2750581 - RNA, 19 nt, Human
uauuuuaauaauguuucaa

SEQ ID NO: 2750582 - RNA, 14 nt, Human
uauuuuaaaagaau

SEQ ID NO: 2750583 - RNA, 18 nt, Human
uauuuuaaaagaaugauu

SEQ ID NO: 2750584 - RNA, 14 nt, Human
accaacacgagcag

SEQ ID NO: 2750585 - RNA, 19 nt, Human
accaacacgagcaggcuac

SEQ ID NO: 2750586 - RNA, 16 nt, Human
accacaagacugcaca

SEQ ID NO: 2750587 - RNA, 22 nt, Human
ucacagcuuauuuccucauuuu

SEQ ID NO: 2750588 - RNA, 17 nt, Human
ucacagccagacuggca

SEQ ID NO: 2750589 - RNA, 23 nt, Human
ucacagccagacuggcacaguuu

SEQ ID NO: 2750590 - RNA, 16 nt, Human
ucacagaccuuugaac

SEQ ID NO: 2750591 - RNA, 13 nt, Human
ucaauuuaaaaaa

SEQ ID NO: 2750592 - RNA, 12 nt, Human
ucaauuuaaaaa

SEQ ID NO: 2750593 - RNA, 23 nt, Human
ucaauauuucagauaaucacaau

SEQ ID NO: 2750594 - RNA, 22 nt, Human
uccaugaagauguagaggagaa

SEQ ID NO: 2750595 - RNA, 14 nt, Human
uccagugagacagc

SEQ ID NO: 2750596 - RNA, 16 nt, Human
acgaguaauuuauugu

SEQ ID NO: 2750597 - RNA, 14 nt, Human
acgcucucuggccu

SEQ ID NO: 2750598 - RNA, 16 nt, Human
acgcucucuggccuuc

SEQ ID NO: 2750599 - RNA, 15 nt, Human
acgcucucuggccuu

SEQ ID NO: 2750600 - RNA, 17 nt, Human
acgcucucuggccuucg

SEQ ID NO: 2750601 - RNA, 22 nt, Human
accuggacuuaagcaucuggcu

SEQ ID NO: 2750602 - RNA, 17 nt, Human
accugagccccaaaagg

SEQ ID NO: 2750603 - RNA, 12 nt, Human
accugagcccca

SEQ ID NO: 2750604 - RNA, 19 nt, Human
accugacacaccaggcgcu

SEQ ID NO: 2750605 - RNA, 21 nt, Human
accugacacaccaggcgcuaa

SEQ ID NO: 2750606 - RNA, 16 nt, Human
ucauaauaaguugcau

SEQ ID NO: 2750607 - RNA, 17 nt, Human
uccucuccccaugaugu

SEQ ID NO: 2750608 - RNA, 22 nt, Human
uccugaaaacccuugccaugug

SEQ ID NO: 2750609 - RNA, 21 nt, Human
uccugaaaacccuugccaugu

SEQ ID NO: 2750610 - RNA, 12 nt, Human
uccucugcacuc

SEQ ID NO: 2750611 - RNA, 16 nt, Human
uccucugcacucccac

SEQ ID NO: 2750612 - RNA, 14 nt, Human
acuccagaaaguga

SEQ ID NO: 2750613 - RNA, 14 nt, Human
ucccuccaccuccc

SEQ ID NO: 2750614 - RNA, 17 nt, Human
ucccuccaccucccugc

SEQ ID NO: 2750615 - RNA, 15 nt, Human
ucccuccaccucccu

SEQ ID NO: 2750616 - RNA, 19 nt, Human
ucccuccaccucccugcaa

SEQ ID NO: 2750617 - RNA, 22 nt, Human
ucccucccagaggagccaccag

SEQ ID NO: 2750618 - RNA, 23 nt, Human
ucccucccagaggagccaccagu

SEQ ID NO: 2750619 - RNA, 20 nt, Human
acucauuuuaaaaaauggaa

SEQ ID NO: 2750620 - RNA, 21 nt, Human
acuccaaacugacucuuaaga

SEQ ID NO: 2750621 - RNA, 19 nt, Human
acuacuaauagaauaaagg

SEQ ID NO: 2750622 - RNA, 12 nt, Human
acuacuuuauaa

SEQ ID NO: 2750623 - RNA, 20 nt, Human
acuagaguuuagcuggaaaa

SEQ ID NO: 2750624 - RNA, 24 nt, Human
uccccuccucugcuugccaucccu

SEQ ID NO: 2750625 - RNA, 18 nt, Human
uccccuccucugcuugcc

SEQ ID NO: 2750626 - RNA, 15 nt, Human
uccccuccucugcuu

SEQ ID NO: 2750627 - RNA, 14 nt, Human
uccccuccucugcu

SEQ ID NO: 2750628 - RNA, 15 nt, Human
acuaugauuauuaac

SEQ ID NO: 2750629 - RNA, 13 nt, Human
acuauucaaacag

SEQ ID NO: 2750630 - RNA, 14 nt, Human
acuauucaaacagu

SEQ ID NO: 2750631 - RNA, 16 nt, Human
acuauucaaacagucu

SEQ ID NO: 2750632 - RNA, 18 nt, Human
acuauucaaacagucuca

SEQ ID NO: 2750633 - RNA, 21 nt, Human
acacaggcaacugaggcagac

SEQ ID NO: 2750634 - RNA, 13 nt, Human
acacaacuauauu

SEQ ID NO: 2750635 - RNA, 20 nt, Human
acaaaucagaagucaucuug

SEQ ID NO: 2750636 - RNA, 13 nt, Human
uaggauguugaaa

SEQ ID NO: 2750637 - RNA, 14 nt, Human
acaaaucagaaguc

SEQ ID NO: 2750638 - RNA, 15 nt, Human
acaaaucagaaguca

SEQ ID NO: 2750639 - RNA, 16 nt, Human
acaaaucagaagucau

SEQ ID NO: 2750640 - RNA, 23 nt, Human
acaaaucagaagucaucuugcua

SEQ ID NO: 2750641 - RNA, 14 nt, Human
uagaggguguguaa

SEQ ID NO: 2750642 - RNA, 14 nt, Human
acaaaaacacagca

SEQ ID NO: 2750643 - RNA, 15 nt, Human
acaaaaacacagcaa

SEQ ID NO: 2750644 - RNA, 13 nt, Human
acaaaaacacagc

SEQ ID NO: 2750645 - RNA, 15 nt, Human
uagacacuuuggaag

SEQ ID NO: 2750646 - RNA, 13 nt, Human
uagacacacauga

SEQ ID NO: 2750647 - RNA, 15 nt, Human
uagaaacacaacuau

SEQ ID NO: 2750648 - RNA, 16 nt, Human
uagaacucccuuucaa

SEQ ID NO: 2750649 - RNA, 17 nt, Human
uagaacucccuuucaac

SEQ ID NO: 2750650 - RNA, 18 nt, Human
acagcaagggugauggga

SEQ ID NO: 2750651 - RNA, 19 nt, Human
acagcccuucuuuccacag

SEQ ID NO: 2750652 - RNA, 22 nt, Human
acagcccuuaugcgguuaauuu

SEQ ID NO: 2750653 - RNA, 23 nt, Human
acagcccuuaugcgguuaauuuu

SEQ ID NO: 2750654 - RNA, 23 nt, Human
acagcuguaugauucccagccag

SEQ ID NO: 2750655 - RNA, 20 nt, Human
acagcuguaugauucccagc

SEQ ID NO: 2750656 - RNA, 19 nt, Human
acagcuguaugauucccag

SEQ ID NO: 2750657 - RNA, 14 nt, Human
acagcuguaugauu

SEQ ID NO: 2750658 - RNA, 13 nt, Human
uaucuauaauuua

SEQ ID NO: 2750659 - RNA, 14 nt, Human
uaucuauaauuuac

SEQ ID NO: 2750660 - RNA, 16 nt, Human
uaucuauaauuuaccu

SEQ ID NO: 2750661 - RNA, 19 nt, Human
uaucuauaauuuaccuaag

SEQ ID NO: 2750662 - RNA, 14 nt, Human
uaucacaaaucuua

SEQ ID NO: 2750663 - RNA, 16 nt, Human
uaucacaaaucuuaac

SEQ ID NO: 2750664 - RNA, 20 nt, Human
uaucacaaaucuuaacuuga

SEQ ID NO: 2750665 - RNA, 14 nt, Human
acagaccuuugaac

SEQ ID NO: 2750666 - RNA, 19 nt, Human
acagaaagcagaacaguga

SEQ ID NO: 2750667 - RNA, 22 nt, Human
acacuucuucuuggucuuauuu

SEQ ID NO: 2750668 - RNA, 21 nt, Human
uauaucuaccccagacuagau

SEQ ID NO: 2750669 - RNA, 12 nt, Human
uauaggaauuga

SEQ ID NO: 2750670 - RNA, 19 nt, Human
uauaggaauugacccacaa

SEQ ID NO: 2750671 - RNA, 16 nt, Human
uauaggugcuacaaaa

SEQ ID NO: 2750672 - RNA, 14 nt, Human
uauaauuuaccuaa

SEQ ID NO: 2750673 - RNA, 16 nt, Human
uauaauuuaccuaaga

SEQ ID NO: 2750674 - RNA, 20 nt, Human
uauaauuuaccuaagauuac

SEQ ID NO: 2750675 - RNA, 17 nt, Human
uauaauuuaccuaagau

SEQ ID NO: 2750676 - RNA, 18 nt, Human
uauaauuuaccuaagauu

SEQ ID NO: 2750677 - RNA, 13 nt, Human
acacucaaaucaa

SEQ ID NO: 2750678 - RNA, 18 nt, Human
acacucaaaucaagaaac

SEQ ID NO: 2750679 - RNA, 17 nt, Human
acacucaaaucaagaaa

SEQ ID NO: 2750680 - RNA, 16 nt, Human
aauucaaggaauuucu

SEQ ID NO: 2750681 - RNA, 17 nt, Human
aauucaaggaauuucuu

SEQ ID NO: 2750682 - RNA, 23 nt, Human
aauucaaggaauuucuuaacuuc

SEQ ID NO: 2750683 - RNA, 16 nt, Human
aauuagacacuuugga

SEQ ID NO: 2750684 - RNA, 17 nt, Human
aauuagacacuuuggaa

SEQ ID NO: 2750685 - RNA, 13 nt, Human
aauuacauuugua

SEQ ID NO: 2750686 - RNA, 14 nt, Human
aauuacauuuguau

SEQ ID NO: 2750687 - RNA, 16 nt, Human
uaccaugccauuuaaa

SEQ ID NO: 2750688 - RNA, 18 nt, Human
uaccaguuaauuuuucca

SEQ ID NO: 2750689 - RNA, 19 nt, Human
uaccaguuaauuuuuccaa

SEQ ID NO: 2750690 - RNA, 19 nt, Human
uaccagggacugaggggag

SEQ ID NO: 2750691 - RNA, 20 nt, Human
uaccaguauuuagaagccaa

SEQ ID NO: 2750692 - RNA, 12 nt, Human
uaccaguauuua

SEQ ID NO: 2750693 - RNA, 15 nt, Human
uaccaguauuuagaa

SEQ ID NO: 2750694 - RNA, 18 nt, Human
uaccaguauuuagaagcc

SEQ ID NO: 2750695 - RNA, 19 nt, Human
uaccaguauuuagaagcca

SEQ ID NO: 2750696 - RNA, 13 nt, Human
aauguucaucaau

SEQ ID NO: 2750697 - RNA, 20 nt, Human
aauguucaucaaugaaugaa

SEQ ID NO: 2750698 - RNA, 16 nt, Human
aauguucaucaaugaa

SEQ ID NO: 2750699 - RNA, 23 nt, Human
aaugauuaugaauuacauuugua

SEQ ID NO: 2750700 - RNA, 22 nt, Human
aaugagagacacacugaagaag

SEQ ID NO: 2750701 - RNA, 16 nt, Human
aaugauuucauucaau

SEQ ID NO: 2750702 - RNA, 21 nt, Human
uaauuuuuauauuugaaauau

SEQ ID NO: 2750703 - RNA, 19 nt, Human
uaauuuuuauauuugaaau

SEQ ID NO: 2750704 - RNA, 18 nt, Human
uaauuuuuauauuugaaa

SEQ ID NO: 2750705 - RNA, 22 nt, Human
uaauuccguagguuauuuucag

SEQ ID NO: 2750706 - RNA, 17 nt, Human
uacagagacagaaagca

SEQ ID NO: 2750707 - RNA, 20 nt, Human
aauguaagggaaacugccag

SEQ ID NO: 2750708 - RNA, 21 nt, Human
aaugcuguauuuuaaaagaau

SEQ ID NO: 2750709 - RNA, 20 nt, Human
aaugcuguauuuuaaaagaa

SEQ ID NO: 2750710 - RNA, 22 nt, Human
aaugcuguauuuuaaaagaaug

SEQ ID NO: 2750711 - RNA, 21 nt, Human
uacaaaaaaaaaaaaaaauua

SEQ ID NO: 2750712 - RNA, 13 nt, Human
uaauuuuuccaac

SEQ ID NO: 2750713 - RNA, 14 nt, Human
uaauuuuuccaacu

SEQ ID NO: 2750714 - RNA, 15 nt, Human
aauauuuauuuuaau

SEQ ID NO: 2750715 - RNA, 16 nt, Human
aaucagccuaguugau

SEQ ID NO: 2750716 - RNA, 14 nt, Human
uaagcaaaauguga

SEQ ID NO: 2750717 - RNA, 21 nt, Human
uaagcaaaaugugauauguac

SEQ ID NO: 2750718 - RNA, 15 nt, Human
uaagcaaaaugugau

SEQ ID NO: 2750719 - RNA, 22 nt, Human
uaagauuacaaaucagaaguca

SEQ ID NO: 2750720 - RNA, 19 nt, Human
uaagauuacaaaucagaag

SEQ ID NO: 2750721 - RNA, 18 nt, Human
uaaguuuuuuuuuaaaaa

SEQ ID NO: 2750722 - RNA, 12 nt, Human
uaauaaaaaggu

SEQ ID NO: 2750723 - RNA, 14 nt, Human
uaauaaaaagguga

SEQ ID NO: 2750724 - RNA, 15 nt, Human
uaauaaaaaggugac

SEQ ID NO: 2750725 - RNA, 18 nt, Human
uaagguuaccuuuguucc

SEQ ID NO: 2750726 - RNA, 13 nt, Human
uaaguaaaaccac

SEQ ID NO: 2750727 - RNA, 15 nt, Human
uaaguaaaaccacag

SEQ ID NO: 2750728 - RNA, 16 nt, Human
uaaguaaaaccacagc

SEQ ID NO: 2750729 - RNA, 17 nt, Human
uaaguaaaaccacagca

SEQ ID NO: 2750730 - RNA, 18 nt, Human
uaaguaaaaccacagcag

SEQ ID NO: 2750731 - RNA, 19 nt, Human
uaaguaaaaccacagcagu

SEQ ID NO: 2750732 - RNA, 20 nt, Human
uaaguaaugauaacuggaaa

SEQ ID NO: 2750733 - RNA, 20 nt, Human
aauccucaguuuuugugaaa

SEQ ID NO: 2750734 - RNA, 13 nt, Human
uaagaagugaaaa

SEQ ID NO: 2750735 - RNA, 21 nt, Human
uaacuuccuuggacucauuuu

SEQ ID NO: 2750736 - RNA, 22 nt, Human
uaacauguccugccuauuaucu

SEQ ID NO: 2750737 - RNA, 19 nt, Human
aauagucaaauugugugaa

SEQ ID NO: 2750738 - RNA, 18 nt, Human
aauaccaugccauuuaaa

SEQ ID NO: 2750739 - RNA, 23 nt, Human
aauaccacaggaaccacaagacu

SEQ ID NO: 2750740 - RNA, 23 nt, Human
aauacaucccuuaccugggaaag

SEQ ID NO: 2750741 - RNA, 13 nt, Human
aaguguauuugga

SEQ ID NO: 2750742 - RNA, 15 nt, Human
aaguguauuuggaaa

SEQ ID NO: 2750743 - RNA, 21 nt, Human
aaguguauuuggaaauaaagu

SEQ ID NO: 2750744 - RNA, 16 nt, Human
uaaaugugcuuuuaaa

SEQ ID NO: 2750745 - RNA, 22 nt, Human
aagcaucauuauuugcagagac

SEQ ID NO: 2750746 - RNA, 17 nt, Human
aagcaguggacaccagg

SEQ ID NO: 2750747 - RNA, 13 nt, Human
aagcauuguaaau

SEQ ID NO: 2750748 - RNA, 16 nt, Human
aagcauuuagauguau

SEQ ID NO: 2750749 - RNA, 19 nt, Human
aagcaucuggcucuaauuc

SEQ ID NO: 2750750 - RNA, 13 nt, Human
aagcaucuggcuc

SEQ ID NO: 2750751 - RNA, 17 nt, Human
aagcaucuggcucuaau

SEQ ID NO: 2750752 - RNA, 20 nt, Human
aagcucacagaccuuugaac

SEQ ID NO: 2750753 - RNA, 14 nt, Human
aagcuccagguaga

SEQ ID NO: 2750754 - RNA, 13 nt, Human
aagcuccagguag

SEQ ID NO: 2750755 - RNA, 20 nt, Human
guuauuauauuuacaaaugg

SEQ ID NO: 2750756 - RNA, 23 nt, Human
aagaggaaugaaguacucauaca

SEQ ID NO: 2750757 - RNA, 17 nt, Human
aagacugcauuauauuu

SEQ ID NO: 2750758 - RNA, 16 nt, Human
aagacugcacaucaaa

SEQ ID NO: 2750759 - RNA, 13 nt, Human
aagaugaaaauau

SEQ ID NO: 2750760 - RNA, 14 nt, Human
aagaugaaaauauu

SEQ ID NO: 2750761 - RNA, 21 nt, Human
guguauuuggaaauaaaguca

SEQ ID NO: 2750762 - RNA, 13 nt, Human
aagauguagagga

SEQ ID NO: 2750763 - RNA, 19 nt, Human
guguauuuggaaauaaagu

SEQ ID NO: 2750764 - RNA, 20 nt, Human
uaaaauaauuuuuauauuug

SEQ ID NO: 2750765 - RNA, 20 nt, Human
uaaaagacagugaaagaaaa

SEQ ID NO: 2750766 - RNA, 16 nt, Human
uaaaagaauauuuuaa

SEQ ID NO: 2750767 - RNA, 23 nt, Human
uaaaagaauauuuuaacuuccuu

SEQ ID NO: 2750768 - RNA, 12 nt, Human
uaaaagaaugau

SEQ ID NO: 2750769 - RNA, 19 nt, Human
aaguaaugauaacuggaaa

SEQ ID NO: 2750770 - RNA, 14 nt, Human
aaguaaugauaacu

SEQ ID NO: 2750771 - RNA, 13 nt, Human
aaguauuagaaua

SEQ ID NO: 2750772 - RNA, 19 nt, Human
guuuuuccuuguauuuaaa

SEQ ID NO: 2750773 - RNA, 16 nt, Human
aagucuuucacauuua

SEQ ID NO: 2750774 - RNA, 22 nt, Human
aagucuuauauauuguagauaa

SEQ ID NO: 2750775 - RNA, 19 nt, Human
aaggaggguuagggagggg

SEQ ID NO: 2750776 - RNA, 18 nt, Human
aaggaggguuagggaggg

SEQ ID NO: 2750777 - RNA, 14 nt, Human
aagguacuucaaau

SEQ ID NO: 2750778 - RNA, 19 nt, Human
aagggugaugggaaagcau

SEQ ID NO: 2750779 - RNA, 13 nt, Human
aagguacuucaaa

SEQ ID NO: 2750780 - RNA, 20 nt, Human
guauccagguucccucccag

SEQ ID NO: 2750781 - RNA, 21 nt, Human
guauaaaauaauuuuuauauu

SEQ ID NO: 2750782 - RNA, 15 nt, Human
guauaaaauaauuuu

SEQ ID NO: 2750783 - RNA, 16 nt, Human
guauauuuuauaucaa

SEQ ID NO: 2750784 - RNA, 16 nt, Human
aaauguaagggaaacu

SEQ ID NO: 2750785 - RNA, 17 nt, Human
guaguguuggagaagaa

SEQ ID NO: 2750786 - RNA, 20 nt, Human
guaguguuggagaagaacug

SEQ ID NO: 2750787 - RNA, 15 nt, Human
aaauggguuuuacug

SEQ ID NO: 2750788 - RNA, 14 nt, Human
aaauggguuuuacu

SEQ ID NO: 2750789 - RNA, 16 nt, Human
gucaaauugugugaaa

SEQ ID NO: 2750790 - RNA, 18 nt, Human
guauguacuucaugcugu

SEQ ID NO: 2750791 - RNA, 16 nt, Human
aacagauaaauaguuu

SEQ ID NO: 2750792 - RNA, 22 nt, Human
aacagugauuaccagggacuga

SEQ ID NO: 2750793 - RNA, 15 nt, Human
aacagugauuaccag

SEQ ID NO: 2750794 - RNA, 15 nt, Human
aacacagcaagggug

SEQ ID NO: 2750795 - RNA, 22 nt, Human
aacaaugcuguauuuuaaaaga

SEQ ID NO: 2750796 - RNA, 17 nt, Human
aacaaugcuguauuuua

SEQ ID NO: 2750797 - RNA, 16 nt, Human
aacacaacuauauugu

SEQ ID NO: 2750798 - RNA, 15 nt, Human
aacacaacuauauug

SEQ ID NO: 2750799 - RNA, 15 nt, Human
aacaaugcuguauuu

SEQ ID NO: 2750800 - RNA, 14 nt, Human
aacaaugcuguauu

SEQ ID NO: 2750801 - RNA, 12 nt, Human
aacaauaaaaga

SEQ ID NO: 2750802 - RNA, 20 nt, Human
aaauuuuuucucuaggaaau

SEQ ID NO: 2750803 - RNA, 21 nt, Human
gugagaugcuagaacucccuu

SEQ ID NO: 2750804 - RNA, 12 nt, Human
aacugaaaucau

SEQ ID NO: 2750805 - RNA, 19 nt, Human
aacugcacugucaagauga

SEQ ID NO: 2750806 - RNA, 19 nt, Human
aacuggacugguucaaaug

SEQ ID NO: 2750807 - RNA, 17 nt, Human
aacugggacaggggaga

SEQ ID NO: 2750808 - RNA, 15 nt, Human
gugccacuuaaugua

SEQ ID NO: 2750809 - RNA, 18 nt, Human
gugccacuuaauguaugu

SEQ ID NO: 2750810 - RNA, 12 nt, Human
aacuucuugcuu

SEQ ID NO: 2750811 - RNA, 18 nt, Human
aacuucuugcuucuuucu

SEQ ID NO: 2750812 - RNA, 17 nt, Human
gugaugggaaagcauug

SEQ ID NO: 2750813 - RNA, 18 nt, Human
aacuuccagauccuggaa

SEQ ID NO: 2750814 - RNA, 21 nt, Human
aacuucagcgguuuauauaag

SEQ ID NO: 2750815 - RNA, 17 nt, Human
aacaguugguaacuuuu

SEQ ID NO: 2750816 - RNA, 14 nt, Human
aacaguugguaacu

SEQ ID NO: 2750817 - RNA, 18 nt, Human
aacccaaguccaagcaua

SEQ ID NO: 2750818 - RNA, 23 nt, Human
aacccaaauguucaucaaugaau

SEQ ID NO: 2750819 - RNA, 18 nt, Human
aaccugagccccaaaagg

SEQ ID NO: 2750820 - RNA, 16 nt, Human
aacccgggaggcagag

SEQ ID NO: 2750821 - RNA, 15 nt, Human
gucuggcccaccagg

SEQ ID NO: 2750822 - RNA, 20 nt, Human
aaccugagccccaaaaggua

SEQ ID NO: 2750823 - RNA, 16 nt, Human
gucuuucacauuuaaa

SEQ ID NO: 2750824 - RNA, 18 nt, Human
aaccuugaaaacuuuaug

SEQ ID NO: 2750825 - RNA, 17 nt, Human
aacuacuaauagaauaa

SEQ ID NO: 2750826 - RNA, 23 nt, Human
aacuaucucauuuccaagcaagu

SEQ ID NO: 2750827 - RNA, 16 nt, Human
aacuaugauuauuaac

SEQ ID NO: 2750828 - RNA, 21 nt, Human
aacuagaguuuagcuggaaaa

SEQ ID NO: 2750829 - RNA, 12 nt, Human
aacucauuucua

SEQ ID NO: 2750830 - RNA, 19 nt, Human
acuucagcgguuuauauaa

SEQ ID NO: 2750831 - RNA, 18 nt, Human
acuucagcgguuuauaua

SEQ ID NO: 2750832 - RNA, 17 nt, Human
acuucagcgguuuauau

SEQ ID NO: 2750833 - RNA, 20 nt, Human
acuucaaauccuugaagauu

SEQ ID NO: 2750834 - RNA, 19 nt, Human
acuucaaauccuugaagau

SEQ ID NO: 2750835 - RNA, 14 nt, Human
acuuaaaaaugguu

SEQ ID NO: 2750836 - RNA, 13 nt, Human
acuuaaaaauggu

SEQ ID NO: 2750837 - RNA, 17 nt, Human
acuuuaugcuaagugaa

SEQ ID NO: 2750838 - RNA, 12 nt, Human
acuuuaugcuaa

SEQ ID NO: 2750839 - RNA, 22 nt, Human
acuugggaggcugagaugggag

SEQ ID NO: 2750840 - RNA, 17 nt, Human
acucugucucaguccau

SEQ ID NO: 2750841 - RNA, 15 nt, Human
acucugucucagucc

SEQ ID NO: 2750842 - RNA, 20 nt, Human
acucuuaagaagacugcauu

SEQ ID NO: 2750843 - RNA, 15 nt, Human
acucuuaagaagacu

SEQ ID NO: 2750844 - RNA, 14 nt, Human
acucuuaagaagac

SEQ ID NO: 2750845 - RNA, 18 nt, Human
accucugccucagaaaac

SEQ ID NO: 2750846 - RNA, 17 nt, Human
accucugccucagaaaa

SEQ ID NO: 2750847 - RNA, 18 nt, Human
acuauugaaguugcagau

SEQ ID NO: 2750848 - RNA, 18 nt, Human
acuaguauuucuaugaaa

SEQ ID NO: 2750849 - RNA, 19 nt, Human
acuaguauuucuaugaaau

SEQ ID NO: 2750850 - RNA, 19 nt, Human
acggacgaaccuugaaaac

SEQ ID NO: 2750851 - RNA, 20 nt, Human
accaaggcugauuaaaccaa

SEQ ID NO: 2750852 - RNA, 19 nt, Human
accaaggcugauuaaacca

SEQ ID NO: 2750853 - RNA, 20 nt, Human
acaucccuuaccugggaaag

SEQ ID NO: 2750854 - RNA, 21 nt, Human
acagugggugccccccuugcc

SEQ ID NO: 2750855 - RNA, 14 nt, Human
acagugggugcccc

SEQ ID NO: 2750856 - RNA, 20 nt, Human
acagugauuaccagggacug

SEQ ID NO: 2750857 - RNA, 21 nt, Human
acagugauuaccagggacuga

SEQ ID NO: 2750858 - RNA, 18 nt, Human
aauuuugugaagcaaaau

SEQ ID NO: 2750859 - RNA, 17 nt, Human
aauuuugugaagcaaaa

SEQ ID NO: 2750860 - RNA, 13 nt, Human
aauuuugugaagc

SEQ ID NO: 2750861 - RNA, 21 nt, Human
acaaggaugaauuaaguuuuu

SEQ ID NO: 2750862 - RNA, 16 nt, Human
acaagaaaugaaagca

SEQ ID NO: 2750863 - RNA, 15 nt, Human
acaagaaaugaaagc

SEQ ID NO: 2750864 - RNA, 13 nt, Human
acaagaaaugaaa

SEQ ID NO: 2750865 - RNA, 16 nt, Human
acacugggggagggga

SEQ ID NO: 2750866 - RNA, 15 nt, Human
acacugggggagggg

SEQ ID NO: 2750867 - RNA, 16 nt, Human
acagaagcuccaggua

SEQ ID NO: 2750868 - RNA, 19 nt, Human
aaaggcagaagcaacccaa

SEQ ID NO: 2750869 - RNA, 13 nt, Human
aaaggcaguuuuc

SEQ ID NO: 2750870 - RNA, 14 nt, Human
aaaggcaguuuucu

SEQ ID NO: 2750871 - RNA, 16 nt, Human
aaaggcaguuuucuaa

SEQ ID NO: 2750872 - RNA, 19 nt, Human
aaagcauuguaaaugugcu

SEQ ID NO: 2750873 - RNA, 20 nt, Human
aaagcauuguaaaugugcuu

SEQ ID NO: 2750874 - RNA, 21 nt, Human
aaacccugucucuacuaaaaa

SEQ ID NO: 2750875 - RNA, 13 nt, Human
aaagaaacauuug

SEQ ID NO: 2750876 - RNA, 13 nt, Human
aaaauucauuuuu

SEQ ID NO: 2750877 - RNA, 19 nt, Human
aaaauccauacauuugugu

SEQ ID NO: 2750878 - RNA, 12 nt, Human
aacacaucagcu

SEQ ID NO: 2750879 - RNA, 22 nt, Human
aaauugacacuuaaaaaugguu

SEQ ID NO: 2750880 - RNA, 20 nt, Human
aaauguucaucaaugaauga

SEQ ID NO: 2750881 - RNA, 17 nt, Human
aaauguucaucaaugaa

SEQ ID NO: 2750882 - RNA, 14 nt, Human
aaaucuuaacuuga

SEQ ID NO: 2750883 - RNA, 13 nt, Human
aacugaagccaga

SEQ ID NO: 2750884 - RNA, 23 nt, Human
aacugagaugugaacacaucagc

SEQ ID NO: 2750885 - RNA, 15 nt, Human
aauccaaugaaauga

SEQ ID NO: 2750886 - RNA, 16 nt, Human
aauccauacauuugug

SEQ ID NO: 2750887 - RNA, 17 nt, Human
aauccauacauuugugu

SEQ ID NO: 2750888 - RNA, 14 nt, Human
aauccauacauuug

SEQ ID NO: 2750889 - RNA, 16 nt, Human
aaugauaacuggaaac

SEQ ID NO: 2750890 - RNA, 15 nt, Human
aaugauaacuggaaa

SEQ ID NO: 2750891 - RNA, 14 nt, Human
aaugauaacuggaa

SEQ ID NO: 2750892 - RNA, 22 nt, Human
aaucauuucugcaucagcugcu

SEQ ID NO: 2750893 - RNA, 15 nt, Human
aaucaaauaugcaaa

SEQ ID NO: 2750894 - RNA, 16 nt, Human
aaucaaauaugcaaag

SEQ ID NO: 2750895 - RNA, 22 nt, Human
aaucaaauaugcaaagcacuga

SEQ ID NO: 2750896 - RNA, 12 nt, Human
aauaauguuuca

SEQ ID NO: 2750897 - RNA, 19 nt, Human
aauaauguuucaaacauau

SEQ ID NO: 2750898 - RNA, 14 nt, Human
aauaauguuucaaa

SEQ ID NO: 2750899 - RNA, 10 nt, Human
aauaaaccau

SEQ ID NO: 2750900 - RNA, 22 nt, Human
aaguugauaugccuuuucccaa

SEQ ID NO: 2750901 - RNA, 17 nt, Human
aaguucugcagauaaac

SEQ ID NO: 2750902 - RNA, 15 nt, Human
aagcagggacuugaa

SEQ ID NO: 2750903 - RNA, 15 nt, Human
aagagaacuuccaga

SEQ ID NO: 2750904 - RNA, 23 nt, Human
aagacagugaaagaaaauaacaa

SEQ ID NO: 2750905 - RNA, 14 nt, Human
aaggaauuucuuaa

SEQ ID NO: 2750906 - RNA, 23 nt, Human
aaggaauuucuuaacuucuugcu

SEQ ID NO: 2750907 - RNA, 16 nt, Human
aaggaauuucuuaacu

SEQ ID NO: 2750908 - RNA, 17 nt, Human
aaggaauuucuuaacuu

SEQ ID NO: 2750909 - RNA, 19 nt, Human
aaggaauuucuuaacuucu

SEQ ID NO: 2750910 - RNA, 20 nt, Human
aaggaauuucuuaacuucuu

SEQ ID NO: 2750911 - RNA, 19 nt, Human
aagccagauuuuccugaaa

SEQ ID NO: 2750912 - RNA, 14 nt, Human
aagggauggcaaga

SEQ ID NO: 2750913 - RNA, 17 nt, Human
aagggauggcaagaugu

SEQ ID NO: 2750914 - RNA, 15 nt, Human
aagggauuuucagcc

SEQ ID NO: 2750915 - RNA, 21 nt, Human
aagggauuuucagcccucaga

SEQ ID NO: 2750916 - RNA, 23 nt, Human
aagggauuuucagcccucagaau

SEQ ID NO: 2750917 - RNA, 12 nt, Human
aaguagaggagg

SEQ ID NO: 2750918 - RNA, 16 nt, Human
agccagcagccagcuc

SEQ ID NO: 2750919 - RNA, 14 nt, Human
agccagcagccagc

SEQ ID NO: 2750920 - RNA, 20 nt, Human
agccagcagccagcucucag

SEQ ID NO: 2750921 - RNA, 13 nt, Human
agccagcagccag

SEQ ID NO: 2750922 - RNA, 11 nt, Human
agccagcagcc

SEQ ID NO: 2750923 - RNA, 17 nt, Human
agcacuuggagccaagg

SEQ ID NO: 2750924 - RNA, 14 nt, Human
agcacuuggagcca

SEQ ID NO: 2750925 - RNA, 24 nt, Human
agcaaaauuuuuucucuaggaaau

SEQ ID NO: 2750926 - RNA, 19 nt, Human
agauguagaggagaaacug

SEQ ID NO: 2750927 - RNA, 16 nt, Human
agauguagaggagaaa

SEQ ID NO: 2750928 - RNA, 22 nt, Human
agaagagcuguucacagccaga

SEQ ID NO: 2750929 - RNA, 21 nt, Human
agaagagcuguucacagccag

SEQ ID NO: 2750930 - RNA, 18 nt, Human
agaagacugcauuauauu

SEQ ID NO: 2750931 - RNA, 22 nt, Human
agaagucaucuugcuaccagua

SEQ ID NO: 2750932 - RNA, 15 nt, Human
agaagucaucuugcu

SEQ ID NO: 2750933 - RNA, 16 nt, Human
agaagucaucuugcua

SEQ ID NO: 2750934 - RNA, 21 nt, Human
agaagugaaaaucuacacucc

SEQ ID NO: 2750935 - RNA, 17 nt, Human
agaaugauuaugaauua

SEQ ID NO: 2750936 - RNA, 22 nt, Human
agaaugagagacacacugaaga

SEQ ID NO: 2750937 - RNA, 17 nt, Human
agaaugagagacacacu

SEQ ID NO: 2750938 - RNA, 14 nt, Human
agacagcagcucag

SEQ ID NO: 2750939 - RNA, 12 nt, Human
agacagcagcuc

SEQ ID NO: 2750940 - RNA, 16 nt, Human
agacagcagcucaggc

SEQ ID NO: 2750941 - RNA, 19 nt, Human
agacccaaaaggcagaagc

SEQ ID NO: 2750942 - RNA, 17 nt, Human
agacccaaaaggcagaa

SEQ ID NO: 2750943 - RNA, 16 nt, Human
agacuggauaguccgu

SEQ ID NO: 2750944 - RNA, 20 nt, Human
agacuggauaguccgucucu

SEQ ID NO: 2750945 - RNA, 18 nt, Human
agacucugucucagucca

SEQ ID NO: 2750946 - RNA, 13 nt, Human
agaggaaugaagu

SEQ ID NO: 2750947 - RNA, 21 nt, Human
aggccaugggcacugugggua

SEQ ID NO: 2750948 - RNA, 24 nt, Human
aggcuuagacccucaugcugccaa

SEQ ID NO: 2750949 - RNA, 15 nt, Human
agggacugaggggag

SEQ ID NO: 2750950 - RNA, 15 nt, Human
aggcgggaaggaggg

SEQ ID NO: 2750951 - RNA, 14 nt, Human
aggcgggaaggagg

SEQ ID NO: 2750952 - RNA, 17 nt, Human
aggguccuuuugacacu

SEQ ID NO: 2750953 - RNA, 22 nt, Human
aggguccuuuugacacugcucu

SEQ ID NO: 2750954 - RNA, 15 nt, Human
agggauuagggagag

SEQ ID NO: 2750955 - RNA, 17 nt, Human
agggauuuucagcccuc

SEQ ID NO: 2750956 - RNA, 22 nt, Human
agggauuuucagcccucagaau

SEQ ID NO: 2750957 - RNA, 13 nt, Human
aggaaguagagga

SEQ ID NO: 2750958 - RNA, 20 nt, Human
agcuuauuuccucauuuuua

SEQ ID NO: 2750959 - RNA, 20 nt, Human
agcuccccucggagaagagc

SEQ ID NO: 2750960 - RNA, 17 nt, Human
agcuccccucggagaag

SEQ ID NO: 2750961 - RNA, 19 nt, Human
agcuccccucggagaagag

SEQ ID NO: 2750962 - RNA, 17 nt, Human
agcgacagugagacucu

SEQ ID NO: 2750963 - RNA, 18 nt, Human
augaugaucuuuaaaaua

SEQ ID NO: 2750964 - RNA, 21 nt, Human
augaugaucuuuaaaauacac

SEQ ID NO: 2750965 - RNA, 16 nt, Human
augaucuuuaaaauac

SEQ ID NO: 2750966 - RNA, 21 nt, Human
augucaaucagccuaguugau

SEQ ID NO: 2750967 - RNA, 16 nt, Human
augucaaucagccuag

SEQ ID NO: 2750968 - RNA, 15 nt, Human
augugaacacaucag

SEQ ID NO: 2750969 - RNA, 15 nt, Human
auguuccuagugaaa

SEQ ID NO: 2750970 - RNA, 16 nt, Human
auguuccuagugaaag

SEQ ID NO: 2750971 - RNA, 17 nt, Human
auguuccuagugaaaga

SEQ ID NO: 2750972 - RNA, 22 nt, Human
aucagcuugcccuguuaaaaga

SEQ ID NO: 2750973 - RNA, 13 nt, Human
aucagcuuauugu

SEQ ID NO: 2750974 - RNA, 17 nt, Human
aucaugaauuaguuuua

SEQ ID NO: 2750975 - RNA, 14 nt, Human
aucaaauaugcaaa

SEQ ID NO: 2750976 - RNA, 17 nt, Human
aucgcuccaccuugcag

SEQ ID NO: 2750977 - RNA, 21 nt, Human
aucgcuccaccuugcagcucu

SEQ ID NO: 2750978 - RNA, 19 nt, Human
auccucaguuuuugugaaa

SEQ ID NO: 2750979 - RNA, 16 nt, Human
aucuauaauuuaccua

SEQ ID NO: 2750980 - RNA, 23 nt, Human
aucuauaauuuaccuaagauuac

SEQ ID NO: 2750981 - RNA, 11 nt, Human
aucuauaauuu

SEQ ID NO: 2750982 - RNA, 13 nt, Human
aucuauaauuuac

SEQ ID NO: 2750983 - RNA, 23 nt, Human
augaaguccaagcauuuagaugu

SEQ ID NO: 2750984 - RNA, 20 nt, Human
augaaguccaagcauuuaga

SEQ ID NO: 2750985 - RNA, 21 nt, Human
augaaguacucauacauguua

SEQ ID NO: 2750986 - RNA, 13 nt, Human
augaaguacucau

SEQ ID NO: 2750987 - RNA, 19 nt, Human
aguugaaaagacuccaaag

SEQ ID NO: 2750988 - RNA, 20 nt, Human
aguugaaaagacuccaaaga

SEQ ID NO: 2750989 - RNA, 14 nt, Human
aguugaaaagacuc

SEQ ID NO: 2750990 - RNA, 18 nt, Human
aguugaaaagacuccaaa

SEQ ID NO: 2750991 - RNA, 19 nt, Human
aguucagagcugcccucuc

SEQ ID NO: 2750992 - RNA, 20 nt, Human
aguucagagcugcccucucc

SEQ ID NO: 2750993 - RNA, 22 nt, Human
aguucagagcugcccucuccug

SEQ ID NO: 2750994 - RNA, 21 nt, Human
aguucagagcugcccucuccu

SEQ ID NO: 2750995 - RNA, 23 nt, Human
aguucagagcugcccucuccugg

SEQ ID NO: 2750996 - RNA, 14 nt, Human
agugcucuuuucuc

SEQ ID NO: 2750997 - RNA, 17 nt, Human
agugcucuuuucuccuc

SEQ ID NO: 2750998 - RNA, 19 nt, Human
agugucaaugcagccccca

SEQ ID NO: 2750999 - RNA, 16 nt, Human
aguacuguguacagaa

SEQ ID NO: 2751000 - RNA, 22 nt, Human
aguauuuuuuguauaauuggau

SEQ ID NO: 2751001 - RNA, 13 nt, Human
aguauuuuuugua

SEQ ID NO: 2751002 - RNA, 19 nt, Human
aguauuuuuuguauaauug

SEQ ID NO: 2751003 - RNA, 20 nt, Human
aguauuuuuuguauaauugg

SEQ ID NO: 2751004 - RNA, 11 nt, Human
aguccaagcau

SEQ ID NO: 2751005 - RNA, 15 nt, Human
auagcagcuuauuca

SEQ ID NO: 2751006 - RNA, 14 nt, Human
auauuauguuaaaa

SEQ ID NO: 2751007 - RNA, 13 nt, Human
auauuauguuaaa

SEQ ID NO: 2751008 - RNA, 11 nt, Human
aguuuggccag

SEQ ID NO: 2751009 - RNA, 21 nt, Human
auaacaaugcuguauuuuaaa

SEQ ID NO: 2751010 - RNA, 20 nt, Human
auaacaaugcuguauuuuaa

SEQ ID NO: 2751011 - RNA, 19 nt, Human
auaacaaugcuguauuuua

SEQ ID NO: 2751012 - RNA, 17 nt, Human
auaacaaugcuguauuu

SEQ ID NO: 2751013 - RNA, 15 nt, Human
auaacaaugcuguau

SEQ ID NO: 2751014 - RNA, 14 nt, Human
auaacaaugaaagu

SEQ ID NO: 2751015 - RNA, 18 nt, Human
auaauguuucaaacauau

SEQ ID NO: 2751016 - RNA, 13 nt, Human
auaauguuucaaa

SEQ ID NO: 2751017 - RNA, 22 nt, Human
auaagccagacaucaacagaua

SEQ ID NO: 2751018 - RNA, 21 nt, Human
auaagccagacaucaacagau

SEQ ID NO: 2751019 - RNA, 14 nt, Human
auaagccagacauc

SEQ ID NO: 2751020 - RNA, 16 nt, Human
cacagugcucuuuucu

SEQ ID NO: 2751021 - RNA, 18 nt, Human
cacagugcucuuuucucc

SEQ ID NO: 2751022 - RNA, 14 nt, Human
caaaacugcacugu

SEQ ID NO: 2751023 - RNA, 17 nt, Human
caaaacugcacugucaa

SEQ ID NO: 2751024 - RNA, 18 nt, Human
caaaacugcacugucaag

SEQ ID NO: 2751025 - RNA, 16 nt, Human
caaacugacucuuaag

SEQ ID NO: 2751026 - RNA, 14 nt, Human
caaacugaagccag

SEQ ID NO: 2751027 - RNA, 15 nt, Human
caaacugaagccaga

SEQ ID NO: 2751028 - RNA, 21 nt, Human
caaacugacucuuaagaagac

SEQ ID NO: 2751029 - RNA, 17 nt, Human
caaacugacucuuaaga

SEQ ID NO: 2751030 - RNA, 19 nt, Human
caagaaaugaaagcaggga

SEQ ID NO: 2751031 - RNA, 17 nt, Human
caagaaaugaaagcagg

SEQ ID NO: 2751032 - RNA, 15 nt, Human
caagaaaugaaagca

SEQ ID NO: 2751033 - RNA, 18 nt, Human
caaauguucaucaaugaa

SEQ ID NO: 2751034 - RNA, 14 nt, Human
caaauguucaucaa

SEQ ID NO: 2751035 - RNA, 12 nt, Human
caaauaugcaaa

SEQ ID NO: 2751036 - RNA, 13 nt, Human
caaauaugcaaag

SEQ ID NO: 2751037 - RNA, 20 nt, Human
caaggaaaaaauaacaauga

SEQ ID NO: 2751038 - RNA, 18 nt, Human
caaggaaaaaauaacaau

SEQ ID NO: 2751039 - RNA, 19 nt, Human
caauagucaaauuguguga

SEQ ID NO: 2751040 - RNA, 17 nt, Human
caauagucaaauugugu

SEQ ID NO: 2751041 - RNA, 19 nt, Human
caaggcuuagacccucaug

SEQ ID NO: 2751042 - RNA, 22 nt, Human
caaggcuuagacccucaugcug

SEQ ID NO: 2751043 - RNA, 21 nt, Human
caagggugaugggaaagcauu

SEQ ID NO: 2751044 - RNA, 23 nt, Human
caagggugaugggaaagcauugu

SEQ ID NO: 2751045 - RNA, 13 nt, Human
cacacugaagaag

SEQ ID NO: 2751046 - RNA, 21 nt, Human
cacagcaguugaaaagacucc

SEQ ID NO: 2751047 - RNA, 19 nt, Human
cacagcaguugaaaagacu

SEQ ID NO: 2751048 - RNA, 23 nt, Human
cacagcccuuaugcgguuaauuu

SEQ ID NO: 2751049 - RNA, 17 nt, Human
cacagccagacuggcac

SEQ ID NO: 2751050 - RNA, 18 nt, Human
cacagccagacuggcaca

SEQ ID NO: 2751051 - RNA, 18 nt, Human
cacaagaaaugaaagcag

SEQ ID NO: 2751052 - RNA, 21 nt, Human
cacaagaaaugaaagcaggga

SEQ ID NO: 2751053 - RNA, 20 nt, Human
cacaagaaaugaaagcaggg

SEQ ID NO: 2751054 - RNA, 21 nt, Human
caauaucuuuuuuuuaauaaa

SEQ ID NO: 2751055 - RNA, 22 nt, Human
caauauccuaauaaaaagguga

SEQ ID NO: 2751056 - RNA, 22 nt, Human
caauuuuucuuauuucauuucu

SEQ ID NO: 2751057 - RNA, 21 nt, Human
uguuaaaagaugaaaauauuu

SEQ ID NO: 2751058 - RNA, 22 nt, Human
ugugugaaagguacuucaaauc

SEQ ID NO: 2751059 - RNA, 21 nt, Human
ugugugaaagguacuucaaau

SEQ ID NO: 2751060 - RNA, 20 nt, Human
ugugugaaagguacuucaaa

SEQ ID NO: 2751061 - RNA, 19 nt, Human
uguguuuugcaagccagau

SEQ ID NO: 2751062 - RNA, 13 nt, Human
uguguuuugcaag

SEQ ID NO: 2751063 - RNA, 17 nt, Human
uguuggcauagcucugg

SEQ ID NO: 2751064 - RNA, 17 nt, Human
uguuuaaaaucauuucu

SEQ ID NO: 2751065 - RNA, 18 nt, Human
uguuuaaaaucauuucug

SEQ ID NO: 2751066 - RNA, 14 nt, Human
uguuuaaaaucauu

SEQ ID NO: 2751067 - RNA, 20 nt, Human
uguuggagaagaacugaaau

SEQ ID NO: 2751068 - RNA, 19 nt, Human
uguuggagaagaacugaaa

SEQ ID NO: 2751069 - RNA, 14 nt, Human
uguuggagaagaac

SEQ ID NO: 2751070 - RNA, 17 nt, Human
uguuggagaagaacuga

SEQ ID NO: 2751071 - RNA, 16 nt, Human
uguuggagaagaacug

SEQ ID NO: 2751072 - RNA, 20 nt, Human
uguugacaugggacauuugc

SEQ ID NO: 2751073 - RNA, 22 nt, Human
uuaagcaucuggcucuaauuca

SEQ ID NO: 2751074 - RNA, 20 nt, Human
uuacauuuguauaaaauaau

SEQ ID NO: 2751075 - RNA, 22 nt, Human
uuaaaaaaaaaccugagcccca

SEQ ID NO: 2751076 - RNA, 21 nt, Human
uuaaauauguuagcaaagagu

SEQ ID NO: 2751077 - RNA, 18 nt, Human
uuaaaauacacacucaaa

SEQ ID NO: 2751078 - RNA, 15 nt, Human
uguaccgcaauguga

SEQ ID NO: 2751079 - RNA, 16 nt, Human
uguaccgcaaugugac

SEQ ID NO: 2751080 - RNA, 20 nt, Human
uguaauaaacucauuucuag

SEQ ID NO: 2751081 - RNA, 22 nt, Human
uguaguguuggagaagaacuga

SEQ ID NO: 2751082 - RNA, 19 nt, Human
uguccagggcccugagcuc

SEQ ID NO: 2751083 - RNA, 17 nt, Human
uguccagggcccugagc

SEQ ID NO: 2751084 - RNA, 13 nt, Human
uguccagggcccu

SEQ ID NO: 2751085 - RNA, 13 nt, Human
uguauuuaaauau

SEQ ID NO: 2751086 - RNA, 22 nt, Human
uguaugauuacuggccuuuuuc

SEQ ID NO: 2751087 - RNA, 15 nt, Human
uguaugauucccagc

SEQ ID NO: 2751088 - RNA, 12 nt, Human
uguaugauuacu

SEQ ID NO: 2751089 - RNA, 13 nt, Human
uguaugauuacug

SEQ ID NO: 2751090 - RNA, 24 nt, Human
ugugaauuaggcuguaacuacuuu

SEQ ID NO: 2751091 - RNA, 19 nt, Human
ugugaauuaggcuguaacu

SEQ ID NO: 2751092 - RNA, 22 nt, Human
ugugaauuaggcuguaacuacu

SEQ ID NO: 2751093 - RNA, 23 nt, Human
ugugaauuaggcuguaacuacuu

SEQ ID NO: 2751094 - RNA, 21 nt, Human
uguguaauuagugccacuuaa

SEQ ID NO: 2751095 - RNA, 23 nt, Human
uguguacagaauucugcuaccuc

SEQ ID NO: 2751096 - RNA, 21 nt, Human
uguguacagaauucugcuacc

SEQ ID NO: 2751097 - RNA, 19 nt, Human
ugugcuaguaauuggaaag

SEQ ID NO: 2751098 - RNA, 22 nt, Human
uggaauaauccuaaacauauga

SEQ ID NO: 2751099 - RNA, 15 nt, Human
uggaaaauucauuuu

SEQ ID NO: 2751100 - RNA, 23 nt, Human
uggaaacuucagcgguuuauaua

SEQ ID NO: 2751101 - RNA, 20 nt, Human
uggaacauaaaauacaaugu

SEQ ID NO: 2751102 - RNA, 21 nt, Human
uggaacauaaaauacaauguu

SEQ ID NO: 2751103 - RNA, 13 nt, Human
uggcccaggaguu

SEQ ID NO: 2751104 - RNA, 14 nt, Human
uggcccaggaguuu

SEQ ID NO: 2751105 - RNA, 19 nt, Human
uggcccaggaguuuggcca

SEQ ID NO: 2751106 - RNA, 22 nt, Human
uggcccaggaguuuggccagaa

SEQ ID NO: 2751107 - RNA, 20 nt, Human
uggcccaggaguuuggccag

SEQ ID NO: 2751108 - RNA, 21 nt, Human
uggcccaggaguuuggccaga

SEQ ID NO: 2751109 - RNA, 15 nt, Human
uggauuuccuaauac

SEQ ID NO: 2751110 - RNA, 21 nt, Human
uggauuuccuaauacugucau

SEQ ID NO: 2751111 - RNA, 11 nt, Human
uggagggaagc

SEQ ID NO: 2751112 - RNA, 21 nt, Human
ugguauguuuucaggcuagau

SEQ ID NO: 2751113 - RNA, 16 nt, Human
uggcuuccuggcaaua

SEQ ID NO: 2751114 - RNA, 21 nt, Human
uggcuugaguuuaaauuguaa

SEQ ID NO: 2751115 - RNA, 14 nt, Human
ugggaguacaaaag

SEQ ID NO: 2751116 - RNA, 19 nt, Human
ugccaaauauaaauaaaaa

SEQ ID NO: 2751117 - RNA, 22 nt, Human
ugccaaauauaaauaaaaauaa

SEQ ID NO: 2751118 - RNA, 17 nt, Human
ugccaaauauaaauaaa

SEQ ID NO: 2751119 - RNA, 18 nt, Human
ugccaaauauaaauaaaa

SEQ ID NO: 2751120 - RNA, 20 nt, Human
ugccacuaaauugacacuua

SEQ ID NO: 2751121 - RNA, 23 nt, Human
ugcccagggcucagccugguggg

SEQ ID NO: 2751122 - RNA, 21 nt, Human
ugcccagggcucagccuggug

SEQ ID NO: 2751123 - RNA, 20 nt, Human
ugcccagggcucagccuggu

SEQ ID NO: 2751124 - RNA, 12 nt, Human
ugccaucccucc

SEQ ID NO: 2751125 - RNA, 11 nt, Human
ugccaucccuc

SEQ ID NO: 2751126 - RNA, 14 nt, Human
ugccaucccucccu

SEQ ID NO: 2751127 - RNA, 22 nt, Human
ugcaguucugaagaagauggua

SEQ ID NO: 2751128 - RNA, 19 nt, Human
ugcaguucugaagaagaug

SEQ ID NO: 2751129 - RNA, 14 nt, Human
ugcaguucugaaga

SEQ ID NO: 2751130 - RNA, 18 nt, Human
ugcaguucugaagaagau

SEQ ID NO: 2751131 - RNA, 17 nt, Human
ugcaguucugaagaaga

SEQ ID NO: 2751132 - RNA, 16 nt, Human
ugcaguucugaagaag

SEQ ID NO: 2751133 - RNA, 15 nt, Human
ugcaguucugaagaa

SEQ ID NO: 2751134 - RNA, 19 nt, Human
ugcagugagccgagauugu

SEQ ID NO: 2751135 - RNA, 19 nt, Human
ugcacgcacacugucugcc

SEQ ID NO: 2751136 - RNA, 19 nt, Human
ugcugcaagcacagcccuu

SEQ ID NO: 2751137 - RNA, 17 nt, Human
ugcugaaacaacaaaua

SEQ ID NO: 2751138 - RNA, 19 nt, Human
ugcuaagcauuccaacuau

SEQ ID NO: 2751139 - RNA, 15 nt, Human
ugcuaagcauuccaa

SEQ ID NO: 2751140 - RNA, 16 nt, Human
ugcucaguagucagac

SEQ ID NO: 2751141 - RNA, 15 nt, Human
ugccuucucaacucc

SEQ ID NO: 2751142 - RNA, 18 nt, Human
ugccuguaaucacagcua

SEQ ID NO: 2751143 - RNA, 14 nt, Human
uccgaggcaggguc

SEQ ID NO: 2751144 - RNA, 13 nt, Human
uccgaggcagggu

SEQ ID NO: 2751145 - RNA, 12 nt, Human
uccgaggcaggg

SEQ ID NO: 2751146 - RNA, 17 nt, Human
uccucugcuugccaucc

SEQ ID NO: 2751147 - RNA, 16 nt, Human
uccucugcuugccauc

SEQ ID NO: 2751148 - RNA, 15 nt, Human
uccucugcuugccau

SEQ ID NO: 2751149 - RNA, 14 nt, Human
uccucugcuugcca

SEQ ID NO: 2751150 - RNA, 21 nt, Human
uccugaggcuccacuuggucu

SEQ ID NO: 2751151 - RNA, 13 nt, Human
uccucuguccagg

SEQ ID NO: 2751152 - RNA, 17 nt, Human
uccugaggcuccacuug

SEQ ID NO: 2751153 - RNA, 16 nt, Human
uccugaggcuccacuu

SEQ ID NO: 2751154 - RNA, 15 nt, Human
uccugaggcuccacu

SEQ ID NO: 2751155 - RNA, 23 nt, Human
uccuuagcuuagaccucagccug

SEQ ID NO: 2751156 - RNA, 17 nt, Human
uccuugcaucaauuuuu

SEQ ID NO: 2751157 - RNA, 20 nt, Human
uccuuuugacacugcucuaa

SEQ ID NO: 2751158 - RNA, 22 nt, Human
uccuuuugacacugcucuaaca

SEQ ID NO: 2751159 - RNA, 13 nt, Human
uccuuuugacacu

SEQ ID NO: 2751160 - RNA, 14 nt, Human
uccuuuugacacug

SEQ ID NO: 2751161 - RNA, 16 nt, Human
uccuuuugacacugcu

SEQ ID NO: 2751162 - RNA, 18 nt, Human
uccuuuugacacugcucu

SEQ ID NO: 2751163 - RNA, 14 nt, Human
ucggagcccugucu

SEQ ID NO: 2751164 - RNA, 15 nt, Human
ucggagcccugucuc

SEQ ID NO: 2751165 - RNA, 22 nt, Human
ucggagccucauccgaggcagg

SEQ ID NO: 2751166 - RNA, 23 nt, Human
ucggagccucauccgaggcaggg

SEQ ID NO: 2751167 - RNA, 16 nt, Human
ucggccuccauccuga

SEQ ID NO: 2751168 - RNA, 15 nt, Human
ucggccuccauccug

SEQ ID NO: 2751169 - RNA, 15 nt, Human
ucuacuaaaaauaca

SEQ ID NO: 2751170 - RNA, 19 nt, Human
ucuacuaaaaauacaaaaa

SEQ ID NO: 2751171 - RNA, 12 nt, Human
ucuacuaaaaau

SEQ ID NO: 2751172 - RNA, 13 nt, Human
uccagggcccuga

SEQ ID NO: 2751173 - RNA, 17 nt, Human
uccagggcccugagcuc

SEQ ID NO: 2751174 - RNA, 16 nt, Human
uccagggcccugagcu

SEQ ID NO: 2751175 - RNA, 20 nt, Human
uccagggcccugagcucggu

SEQ ID NO: 2751176 - RNA, 19 nt, Human
ucauggaauuggagcucgu

SEQ ID NO: 2751177 - RNA, 21 nt, Human
ucauggaauuggagcucgugg

SEQ ID NO: 2751178 - RNA, 20 nt, Human
ucagucucucuucucuccag

SEQ ID NO: 2751179 - RNA, 18 nt, Human
ucaguccaugaagaugua

SEQ ID NO: 2751180 - RNA, 22 nt, Human
ucagccuagccgaccucagccu

SEQ ID NO: 2751181 - RNA, 23 nt, Human
ucagccuagccgaccucagccuu

SEQ ID NO: 2751182 - RNA, 22 nt, Human
ucagcuccccucggagaagagc

SEQ ID NO: 2751183 - RNA, 21 nt, Human
ucagcuccccucggagaagag

SEQ ID NO: 2751184 - RNA, 20 nt, Human
ucaggagaggggcagaacag

SEQ ID NO: 2751185 - RNA, 18 nt, Human
ucaggagaggggcagaac

SEQ ID NO: 2751186 - RNA, 17 nt, Human
ucaggagaggggcagaa

SEQ ID NO: 2751187 - RNA, 15 nt, Human
ucaggagaggggcag

SEQ ID NO: 2751188 - RNA, 16 nt, Human
ucagcugcugaaacaa

SEQ ID NO: 2751189 - RNA, 16 nt, Human
ucuucuuggucucagu

SEQ ID NO: 2751190 - RNA, 19 nt, Human
ucuugccaaauauaaauaa

SEQ ID NO: 2751191 - RNA, 22 nt, Human
ucuuaggguuaugauuaaguaa

SEQ ID NO: 2751192 - RNA, 13 nt, Human
ucuuauaauuuaa

SEQ ID NO: 2751193 - RNA, 14 nt, Human
ucuuauaauuuaaa

SEQ ID NO: 2751194 - RNA, 17 nt, Human
ucuuuccacagaagcuc

SEQ ID NO: 2751195 - RNA, 21 nt, Human
ucugcacucccaccugacaca

SEQ ID NO: 2751196 - RNA, 18 nt, Human
ucugcacucccaccugac

SEQ ID NO: 2751197 - RNA, 14 nt, Human
ucugucucagucca

SEQ ID NO: 2751198 - RNA, 24 nt, Human
ugaggcagacagcagcucaggcac

SEQ ID NO: 2751199 - RNA, 23 nt, Human
ugaggcagacagcagcucaggca

SEQ ID NO: 2751200 - RNA, 20 nt, Human
ugaggcagacagcagcucag

SEQ ID NO: 2751201 - RNA, 17 nt, Human
ugaggcagacagcagcu

SEQ ID NO: 2751202 - RNA, 16 nt, Human
ugaggcagacagcagc

SEQ ID NO: 2751203 - RNA, 15 nt, Human
ugaggcagacagcag

SEQ ID NO: 2751204 - RNA, 14 nt, Human
ugaggcagacagca

SEQ ID NO: 2751205 - RNA, 13 nt, Human
ugaggcagacagc

SEQ ID NO: 2751206 - RNA, 12 nt, Human
ugaggcagacag

SEQ ID NO: 2751207 - RNA, 15 nt, Human
ugagcaggauuuuaa

SEQ ID NO: 2751208 - RNA, 20 nt, Human
ugagcaggauuuuaaucuuu

SEQ ID NO: 2751209 - RNA, 15 nt, Human
ugagaaagacuauuc

SEQ ID NO: 2751210 - RNA, 12 nt, Human
ugacuaaacuuu

SEQ ID NO: 2751211 - RNA, 18 nt, Human
ugacuaaacuuuuuuucu

SEQ ID NO: 2751212 - RNA, 19 nt, Human
ugacuaaacuuuuuuucug

SEQ ID NO: 2751213 - RNA, 21 nt, Human
ugacuaaacuuuuuuucugua

SEQ ID NO: 2751214 - RNA, 13 nt, Human
ugacucuuaagaa

SEQ ID NO: 2751215 - RNA, 16 nt, Human
ugacucuuaagaagac

SEQ ID NO: 2751216 - RNA, 15 nt, Human
ugacucuuaagaaga

SEQ ID NO: 2751217 - RNA, 14 nt, Human
ugacucuuaagaag

SEQ ID NO: 2751218 - RNA, 15 nt, Human
ugaaugaauggcuaa

SEQ ID NO: 2751219 - RNA, 18 nt, Human
ugaccacugcagaagaca

SEQ ID NO: 2751220 - RNA, 17 nt, Human
ugaccacugcagaagac

SEQ ID NO: 2751221 - RNA, 16 nt, Human
ugaccacugcagaaga

SEQ ID NO: 2751222 - RNA, 14 nt, Human
ugaauuaaguuuuu

SEQ ID NO: 2751223 - RNA, 13 nt, Human
ugaauuacauuug

SEQ ID NO: 2751224 - RNA, 20 nt, Human
uaccuaagauuacaaaucag

SEQ ID NO: 2751225 - RNA, 22 nt, Human
uaccuaagauuacaaaucagaa

SEQ ID NO: 2751226 - RNA, 17 nt, Human
uaccuaagauuacaaau

SEQ ID NO: 2751227 - RNA, 16 nt, Human
uaccuaucaucuuaag

SEQ ID NO: 2751228 - RNA, 15 nt, Human
uaccucacugggguc

SEQ ID NO: 2751229 - RNA, 15 nt, Human
uaccaaaaauaaaua

SEQ ID NO: 2751230 - RNA, 22 nt, Human
uaccaaaaaucucaauauuuca

SEQ ID NO: 2751231 - RNA, 22 nt, Human
uaccuaacgaaguauccuucag

SEQ ID NO: 2751232 - RNA, 23 nt, Human
uaccuuuguucccaaauuucaua

SEQ ID NO: 2751233 - RNA, 18 nt, Human
uaccuuauaguuacugug

SEQ ID NO: 2751234 - RNA, 16 nt, Human
uaccuuauaguuacug

SEQ ID NO: 2751235 - RNA, 17 nt, Human
uaccuuauaguuacugu

SEQ ID NO: 2751236 - RNA, 23 nt, Human
uacugucauccucaaagaaagug

SEQ ID NO: 2751237 - RNA, 23 nt, Human
uacugucagcuccccucggagaa

SEQ ID NO: 2751238 - RNA, 21 nt, Human
uacaguucugugguuucaugu

SEQ ID NO: 2751239 - RNA, 14 nt, Human
uacaguucuguggu

SEQ ID NO: 2751240 - RNA, 15 nt, Human
uacaguucugugguu

SEQ ID NO: 2751241 - RNA, 23 nt, Human
uacaguucggugagcuacaaaug

SEQ ID NO: 2751242 - RNA, 14 nt, Human
uacacuccagugag

SEQ ID NO: 2751243 - RNA, 17 nt, Human
uacacacucaaaucaag

SEQ ID NO: 2751244 - RNA, 16 nt, Human
uacacacucaaaucaa

SEQ ID NO: 2751245 - RNA, 22 nt, Human
uacaaaucagaagucaucuugc

SEQ ID NO: 2751246 - RNA, 20 nt, Human
uacaaaucagaagucaucuu

SEQ ID NO: 2751247 - RNA, 21 nt, Human
uacaaaucagaagucaucuug

SEQ ID NO: 2751248 - RNA, 16 nt, Human
uacaaaucagaaguca

SEQ ID NO: 2751249 - RNA, 17 nt, Human
uacaaaucagaagucau

SEQ ID NO: 2751250 - RNA, 19 nt, Human
uacaaaucagaagucaucu

SEQ ID NO: 2751251 - RNA, 12 nt, Human
uaauuuuuauau

SEQ ID NO: 2751252 - RNA, 18 nt, Human
uaauuuugugaagcaaaa

SEQ ID NO: 2751253 - RNA, 17 nt, Human
uaauuuuuauauuugaa

SEQ ID NO: 2751254 - RNA, 16 nt, Human
uaauuuuuauauuuga

SEQ ID NO: 2751255 - RNA, 13 nt, Human
uaauuuugugaag

SEQ ID NO: 2751256 - RNA, 14 nt, Human
uaauuagugccacu

SEQ ID NO: 2751257 - RNA, 19 nt, Human
uaauuagugccacuuaaug

SEQ ID NO: 2751258 - RNA, 21 nt, Human
uaauuagugccacuuaaugua

SEQ ID NO: 2751259 - RNA, 22 nt, Human
uaauuagugccacuuaauguau

SEQ ID NO: 2751260 - RNA, 23 nt, Human
uagacccucaugcugccaauauc

SEQ ID NO: 2751261 - RNA, 19 nt, Human
uagacccucaugcugccaa

SEQ ID NO: 2751262 - RNA, 17 nt, Human
uagacccucaugcugcc

SEQ ID NO: 2751263 - RNA, 18 nt, Human
uagacccucaugcugcca

SEQ ID NO: 2751264 - RNA, 23 nt, Human
uagaauaccacaggaaccacaag

SEQ ID NO: 2751265 - RNA, 19 nt, Human
uagaauaaaggcaguuuuc

SEQ ID NO: 2751266 - RNA, 21 nt, Human
uagaauaaaggcaguuuucua

SEQ ID NO: 2751267 - RNA, 22 nt, Human
uagaauaaaggcaguuuucuaa

SEQ ID NO: 2751268 - RNA, 18 nt, Human
uagaauuaacacaugauc

SEQ ID NO: 2751269 - RNA, 16 nt, Human
uagaauuaacacauga

SEQ ID NO: 2751270 - RNA, 15 nt, Human
uagaauuaacacaug

SEQ ID NO: 2751271 - RNA, 16 nt, Human
uagcaugaagacagag

SEQ ID NO: 2751272 - RNA, 17 nt, Human
uagccgaccucagccuu

SEQ ID NO: 2751273 - RNA, 16 nt, Human
uagccgaccucagccu

SEQ ID NO: 2751274 - RNA, 15 nt, Human
uagccgaccucagcc

SEQ ID NO: 2751275 - RNA, 14 nt, Human
uagauaggccaugg

SEQ ID NO: 2751276 - RNA, 20 nt, Human
uaggugcuacaaaaacacag

SEQ ID NO: 2751277 - RNA, 22 nt, Human
uaggugcuacaaaaacacagca

SEQ ID NO: 2751278 - RNA, 23 nt, Human
uaggugcuacaaaaacacagcaa

SEQ ID NO: 2751279 - RNA, 18 nt, Human
uaggugcuacaaaaacac

SEQ ID NO: 2751280 - RNA, 21 nt, Human
uaggcuguaacuacuuuauaa

SEQ ID NO: 2751281 - RNA, 19 nt, Human
uaggcuguaacuacuuuau

SEQ ID NO: 2751282 - RNA, 17 nt, Human
uaguauuguccaggucu

SEQ ID NO: 2751283 - RNA, 19 nt, Human
uauauaacaaugcuguauu

SEQ ID NO: 2751284 - RNA, 17 nt, Human
uauauaacaaugcugua

SEQ ID NO: 2751285 - RNA, 16 nt, Human
uaucaaacugaagcca

SEQ ID NO: 2751286 - RNA, 13 nt, Human
uaucaaacugaag

SEQ ID NO: 2751287 - RNA, 14 nt, Human
uaucaaaagaaaga

SEQ ID NO: 2751288 - RNA, 21 nt, Human
uauauuuuuuguuaaaugauu

SEQ ID NO: 2751289 - RNA, 20 nt, Human
uauauuugaaauauugacuu

SEQ ID NO: 2751290 - RNA, 16 nt, Human
uauaugcuucuguuuu

SEQ ID NO: 2751291 - RNA, 14 nt, Human
uauaugcuucuguu

SEQ ID NO: 2751292 - RNA, 17 nt, Human
uaaccaggggccaugaa

SEQ ID NO: 2751293 - RNA, 21 nt, Human
uaagaaaauaucacuugucaa

SEQ ID NO: 2751294 - RNA, 14 nt, Human
uaagagagaaugag

SEQ ID NO: 2751295 - RNA, 13 nt, Human
uaagagagaauga

SEQ ID NO: 2751296 - RNA, 16 nt, Human
uaacuuuugugaauua

SEQ ID NO: 2751297 - RNA, 22 nt, Human
uaacuuuugugaauuaggcugu

SEQ ID NO: 2751298 - RNA, 12 nt, Human
uaacuuuuguga

SEQ ID NO: 2751299 - RNA, 15 nt, Human
uaacuggaaacuuca

SEQ ID NO: 2751300 - RNA, 20 nt, Human
uaaauggcuuccuggcaaua

SEQ ID NO: 2751301 - RNA, 20 nt, Human
uaaauugacacuuaaaaaug

SEQ ID NO: 2751302 - RNA, 18 nt, Human
uaaauucccguuuuguca

SEQ ID NO: 2751303 - RNA, 19 nt, Human
uaaauucccguuuugucac

SEQ ID NO: 2751304 - RNA, 16 nt, Human
uaaaugugccuucauu

SEQ ID NO: 2751305 - RNA, 13 nt, Human
uaagugaaauaag

SEQ ID NO: 2751306 - RNA, 14 nt, Human
uaauaauguuucaa

SEQ ID NO: 2751307 - RNA, 22 nt, Human
uaauguuucaaacauauauaac

SEQ ID NO: 2751308 - RNA, 22 nt, Human
uaaugauaacuggaaacuucag

SEQ ID NO: 2751309 - RNA, 17 nt, Human
uaaugauaacuggaaac

SEQ ID NO: 2751310 - RNA, 23 nt, Human
uaaugauaacuggaaacuucagc

SEQ ID NO: 2751311 - RNA, 20 nt, Human
uaaacuuuuuuucuguacca

SEQ ID NO: 2751312 - RNA, 17 nt, Human
uaaaggcaguuuucuaa

SEQ ID NO: 2751313 - RNA, 14 nt, Human
uaaaggcaguuuuc

SEQ ID NO: 2751314 - RNA, 14 nt, Human
uaaaguguuugaaa

SEQ ID NO: 2751315 - RNA, 18 nt, Human
uaaaaaugguuuaaaugg

SEQ ID NO: 2751316 - RNA, 15 nt, Human
uaaaaaugguuuaaa

SEQ ID NO: 2751317 - RNA, 19 nt, Human
uaaaaaugguuuaaauggu

SEQ ID NO: 2751318 - RNA, 22 nt, Human
uaaaacaagcacuaaacaaaga

SEQ ID NO: 2751319 - RNA, 18 nt, Human
uaaaaucauuucugcauc

SEQ ID NO: 2751320 - RNA, 22 nt, Human
uaaaaucauuucugcaucagcu

SEQ ID NO: 2751321 - RNA, 17 nt, Human
uaaaauccauacauuug

SEQ ID NO: 2751322 - RNA, 15 nt, Human
uaaaauccauacauu

SEQ ID NO: 2751323 - RNA, 10 nt, Human
uaaaaucauu

SEQ ID NO: 2751324 - RNA, 13 nt, Human
uaaaaucauuucu

SEQ ID NO: 2751325 - RNA, 20 nt, Human
guuuauauaagcuuguauuc

SEQ ID NO: 2751326 - RNA, 21 nt, Human
guuuagcuggaaaaguauguu

SEQ ID NO: 2751327 - RNA, 20 nt, Human
guuuagcuggaaaaguaugu

SEQ ID NO: 2751328 - RNA, 21 nt, Human
guuucauguuaguuaccuuau

SEQ ID NO: 2751329 - RNA, 17 nt, Human
guuucauguuaguuacc

SEQ ID NO: 2751330 - RNA, 14 nt, Human
guggggcagugcuu

SEQ ID NO: 2751331 - RNA, 23 nt, Human
guggggcagugcuuggcccagga

SEQ ID NO: 2751332 - RNA, 23 nt, Human
gugggccuccucuguccagggcc

SEQ ID NO: 2751333 - RNA, 20 nt, Human
gugggccuccucuguccagg

SEQ ID NO: 2751334 - RNA, 15 nt, Human
gugggccuccucugu

SEQ ID NO: 2751335 - RNA, 17 nt, Human
guggcugcuagcacuug

SEQ ID NO: 2751336 - RNA, 19 nt, Human
guggcugcuagcacuugga

SEQ ID NO: 2751337 - RNA, 15 nt, Human
gugcuacaaaaacac

SEQ ID NO: 2751338 - RNA, 20 nt, Human
gugcuacaaaaacacagcaa

SEQ ID NO: 2751339 - RNA, 18 nt, Human
guguacagaauucugcua

SEQ ID NO: 2751340 - RNA, 21 nt, Human
guguaaguagauaggccaugg

SEQ ID NO: 2751341 - RNA, 16 nt, Human
gugugcguccugucgg

SEQ ID NO: 2751342 - RNA, 14 nt, Human
gugugcguccuguc

SEQ ID NO: 2751343 - RNA, 17 nt, Human
guguuauuuaaaugagu

SEQ ID NO: 2751344 - RNA, 20 nt, Human
guuaaaagaugaaaauauuu

SEQ ID NO: 2751345 - RNA, 14 nt, Human
guuaaaagaugaaa

SEQ ID NO: 2751346 - RNA, 16 nt, Human
guuaaaagaugaaaau

SEQ ID NO: 2751347 - RNA, 16 nt, Human
guucaugcagcugugg

SEQ ID NO: 2751348 - RNA, 15 nt, Human
guucaugcagcugug

SEQ ID NO: 2751349 - RNA, 16 nt, Human
guucaucaaugaauga

SEQ ID NO: 2751350 - RNA, 19 nt, Human
guucagagcugcccucucc

SEQ ID NO: 2751351 - RNA, 17 nt, Human
guucagagcugcccucu

SEQ ID NO: 2751352 - RNA, 16 nt, Human
guucagagcugcccuc

SEQ ID NO: 2751353 - RNA, 15 nt, Human
guucagagcugcccu

SEQ ID NO: 2751354 - RNA, 22 nt, Human
guucagagcugcccucuccugg

SEQ ID NO: 2751355 - RNA, 20 nt, Human
guucagagcugcccucuccu

SEQ ID NO: 2751356 - RNA, 23 nt, Human
guucagagcugcccucuccuggg

SEQ ID NO: 2751357 - RNA, 22 nt, Human
guucagagacucagggccccag

SEQ ID NO: 2751358 - RNA, 14 nt, Human
guucagagcugccc

SEQ ID NO: 2751359 - RNA, 13 nt, Human
guucagagcugcc

SEQ ID NO: 2751360 - RNA, 17 nt, Human
guucagagacucagggc

SEQ ID NO: 2751361 - RNA, 16 nt, Human
guucagagacucaggg

SEQ ID NO: 2751362 - RNA, 15 nt, Human
guuaccuuauaguua

SEQ ID NO: 2751363 - RNA, 18 nt, Human
guuaccuuauaguuacug

SEQ ID NO: 2751364 - RNA, 20 nt, Human
guuaccuuauaguuacugug

SEQ ID NO: 2751365 - RNA, 22 nt, Human
guuaccuuauaguuacugugua

SEQ ID NO: 2751366 - RNA, 13 nt, Human
guuacaguucugu

SEQ ID NO: 2751367 - RNA, 14 nt, Human
guuacaguucugug

SEQ ID NO: 2751368 - RNA, 15 nt, Human
guuacaguucugugg

SEQ ID NO: 2751369 - RNA, 23 nt, Human
guuaccucugccucagaaaacaa

SEQ ID NO: 2751370 - RNA, 19 nt, Human
guuggcauagcucuggggu

SEQ ID NO: 2751371 - RNA, 15 nt, Human
guuggcauagcucug

SEQ ID NO: 2751372 - RNA, 18 nt, Human
guuggcauagcucugggg

SEQ ID NO: 2751373 - RNA, 20 nt, Human
guugauggugguauguuuuc

SEQ ID NO: 2751374 - RNA, 21 nt, Human
guugauggugguauguuuuca

SEQ ID NO: 2751375 - RNA, 17 nt, Human
guugaaaagacuccaaa

SEQ ID NO: 2751376 - RNA, 22 nt, Human
guugaaaagacuccaaagaaau

SEQ ID NO: 2751377 - RNA, 23 nt, Human
guugaaaagacuccaaagaaaug

SEQ ID NO: 2751378 - RNA, 13 nt, Human
guucugaagaaga

SEQ ID NO: 2751379 - RNA, 12 nt, Human
guucugaagaag

SEQ ID NO: 2751380 - RNA, 15 nt, Human
guucugaagaagaug

SEQ ID NO: 2751381 - RNA, 14 nt, Human
guucugaagaagau

SEQ ID NO: 2751382 - RNA, 16 nt, Human
gugacaagcucacaga

SEQ ID NO: 2751383 - RNA, 13 nt, Human
gugaacacaucag

SEQ ID NO: 2751384 - RNA, 21 nt, Human
gugaacaaauuuacagagaca

SEQ ID NO: 2751385 - RNA, 20 nt, Human
gugccccccuugccagacau

SEQ ID NO: 2751386 - RNA, 13 nt, Human
gugccccccuugc

SEQ ID NO: 2751387 - RNA, 13 nt, Human
gugcguccugucg

SEQ ID NO: 2751388 - RNA, 19 nt, Human
gucucaccuggacuuaagc

SEQ ID NO: 2751389 - RNA, 13 nt, Human
gucugacuguuuc

SEQ ID NO: 2751390 - RNA, 14 nt, Human
gucucucuucucuc

SEQ ID NO: 2751391 - RNA, 15 nt, Human
gucucucuucucucc

SEQ ID NO: 2751392 - RNA, 19 nt, Human
gucucucuucucuccagcu

SEQ ID NO: 2751393 - RNA, 20 nt, Human
gucucucuucucuccagcug

SEQ ID NO: 2751394 - RNA, 23 nt, Human
gucucucuucucuccagcugacu

SEQ ID NO: 2751395 - RNA, 23 nt, Human
gucggguuuuauuguuuaaaauc

SEQ ID NO: 2751396 - RNA, 12 nt, Human
gucggagcccug

SEQ ID NO: 2751397 - RNA, 16 nt, Human
gucggagcccugucuc

SEQ ID NO: 2751398 - RNA, 18 nt, Human
gucgucaaagcugaaaug

SEQ ID NO: 2751399 - RNA, 23 nt, Human
gucugugagaugcuagaacuccc

SEQ ID NO: 2751400 - RNA, 22 nt, Human
gucugugagaugcuagaacucc

SEQ ID NO: 2751401 - RNA, 21 nt, Human
gucugugagaugcuagaacuc

SEQ ID NO: 2751402 - RNA, 17 nt, Human
gucugugagaugcuaga

SEQ ID NO: 2751403 - RNA, 16 nt, Human
gucugugagaugcuag

SEQ ID NO: 2751404 - RNA, 15 nt, Human
gucugugagaugcua

SEQ ID NO: 2751405 - RNA, 18 nt, Human
gucugccagccagcagcc

SEQ ID NO: 2751406 - RNA, 17 nt, Human
gucugccagccagcagc

SEQ ID NO: 2751407 - RNA, 16 nt, Human
gucugccagccagcag

SEQ ID NO: 2751408 - RNA, 17 nt, Human
guauguuagugcaaauu

SEQ ID NO: 2751409 - RNA, 15 nt, Human
guagcauuacagugg

SEQ ID NO: 2751410 - RNA, 18 nt, Human
gcuauaggugcuacaaaa

SEQ ID NO: 2751411 - RNA, 15 nt, Human
guaguauuuuuugua

SEQ ID NO: 2751412 - RNA, 19 nt, Human
guaguauuuuuuguauaau

SEQ ID NO: 2751413 - RNA, 20 nt, Human
guaguauuuuuuguauaauu

SEQ ID NO: 2751414 - RNA, 23 nt, Human
guaguauuuuuuguauaauugga

SEQ ID NO: 2751415 - RNA, 20 nt, Human
guauaauuggauuuccuaau

SEQ ID NO: 2751416 - RNA, 18 nt, Human
guauaauuggauuuccua

SEQ ID NO: 2751417 - RNA, 19 nt, Human
guauaauuggauuuccuaa

SEQ ID NO: 2751418 - RNA, 15 nt, Human
guaguguuggagaag

SEQ ID NO: 2751419 - RNA, 14 nt, Human
guaguguuggagaa

SEQ ID NO: 2751420 - RNA, 19 nt, Human
gucagcuccccucggagaa

SEQ ID NO: 2751421 - RNA, 20 nt, Human
guauuuuaaaagaaugauua

SEQ ID NO: 2751422 - RNA, 13 nt, Human
guauuuuaaucac

SEQ ID NO: 2751423 - RNA, 18 nt, Human
guauuuuaaaagaaugau

SEQ ID NO: 2751424 - RNA, 15 nt, Human
gucaaugcagccccc

SEQ ID NO: 2751425 - RNA, 16 nt, Human
gucaaggcuuagaccc

SEQ ID NO: 2751426 - RNA, 18 nt, Human
gucaaggcuuagacccuc

SEQ ID NO: 2751427 - RNA, 20 nt, Human
gucaaggcuuagacccucau

SEQ ID NO: 2751428 - RNA, 22 nt, Human
gucaauaaaauccauacauuug

SEQ ID NO: 2751429 - RNA, 23 nt, Human
gucaauaaaauccauacauuugu

SEQ ID NO: 2751430 - RNA, 21 nt, Human
gucccuacaccccuccccugc

SEQ ID NO: 2751431 - RNA, 16 nt, Human
gucccuacaccccucc

SEQ ID NO: 2751432 - RNA, 20 nt, Human
guccagggcccugagcucgg

SEQ ID NO: 2751433 - RNA, 17 nt, Human
guccagggcccugagcu

SEQ ID NO: 2751434 - RNA, 23 nt, Human
gucagcuccccucggagaagagc

SEQ ID NO: 2751435 - RNA, 21 nt, Human
gucagcuccccucggagaaga

SEQ ID NO: 2751436 - RNA, 22 nt, Human
gucagcuccccucggagaagag

SEQ ID NO: 2751437 - RNA, 24 nt, Human
uuuuguauaauuggauuuccuaau

SEQ ID NO: 2751438 - RNA, 14 nt, Human
uuuuguauaauugg

SEQ ID NO: 2751439 - RNA, 16 nt, Human
uuuuguauaauuggau

SEQ ID NO: 2751440 - RNA, 23 nt, Human
uuuuguauaauuggauuuccuaa

SEQ ID NO: 2751441 - RNA, 18 nt, Human
uuuugucacuuuuucuga

SEQ ID NO: 2751442 - RNA, 18 nt, Human
uuuuuaaaaaagaaacau

SEQ ID NO: 2751443 - RNA, 18 nt, Human
uuuuggucuggagggaag

SEQ ID NO: 2751444 - RNA, 14 nt, Human
uuuuccugaaaacc

SEQ ID NO: 2751445 - RNA, 17 nt, Human
uuuuuccuuguauuuaa

SEQ ID NO: 2751446 - RNA, 19 nt, Human
uuuuucucuaggaaauauu

SEQ ID NO: 2751447 - RNA, 13 nt, Human
uuuuucugauaaa

SEQ ID NO: 2751448 - RNA, 17 nt, Human
uuuuucugauaaaagau

SEQ ID NO: 2751449 - RNA, 17 nt, Human
uuucuuauuucauuucu

SEQ ID NO: 2751450 - RNA, 18 nt, Human
uuugaaucaucaagucuu

SEQ ID NO: 2751451 - RNA, 21 nt, Human
uuaccaaaaauaaauauaucu

SEQ ID NO: 2751452 - RNA, 18 nt, Human
uuuccucauuuuuauaau

SEQ ID NO: 2751453 - RNA, 22 nt, Human
uuuccucaaaacuucagacaua

SEQ ID NO: 2751454 - RNA, 13 nt, Human
uuucuagaaagag

SEQ ID NO: 2751455 - RNA, 13 nt, Human
uuucugagaaaga

SEQ ID NO: 2751456 - RNA, 13 nt, Human
uuugguuucuagc

SEQ ID NO: 2751457 - RNA, 16 nt, Human
uuuguauaaaauaauu

SEQ ID NO: 2751458 - RNA, 14 nt, Human
uuuguauaaaauaa

SEQ ID NO: 2751459 - RNA, 13 nt, Human
uuuguauaaaaua

SEQ ID NO: 2751460 - RNA, 15 nt, Human
uuuuaaaagaaugau

SEQ ID NO: 2751461 - RNA, 21 nt, Human
uuuuaaaagaaugauuaugaa

SEQ ID NO: 2751462 - RNA, 20 nt, Human
uuuuaaauucccguuuuguc

SEQ ID NO: 2751463 - RNA, 20 nt, Human
uuuuaauaauguuucaaaca

SEQ ID NO: 2751464 - RNA, 18 nt, Human
gcccagggcucagccugg

SEQ ID NO: 2751465 - RNA, 23 nt, Human
gccccagcacuaaagcaguggac

SEQ ID NO: 2751466 - RNA, 19 nt, Human
gccccagcacuaaagcagu

SEQ ID NO: 2751467 - RNA, 17 nt, Human
gccccagcacuaaagca

SEQ ID NO: 2751468 - RNA, 12 nt, Human
gccccagcacua

SEQ ID NO: 2751469 - RNA, 16 nt, Human
gcccugagcucggugg

SEQ ID NO: 2751470 - RNA, 15 nt, Human
gcccugagcucggug

SEQ ID NO: 2751471 - RNA, 13 nt, Human
gcccugagcucgg

SEQ ID NO: 2751472 - RNA, 22 nt, Human
gcccugagcucgguggacccag

SEQ ID NO: 2751473 - RNA, 23 nt, Human
gccaucccucccuccaccucccu

SEQ ID NO: 2751474 - RNA, 18 nt, Human
gccaucccucccuccacc

SEQ ID NO: 2751475 - RNA, 19 nt, Human
gccaugggcacugugggua

SEQ ID NO: 2751476 - RNA, 22 nt, Human
gccuccccuccucugcuugcca

SEQ ID NO: 2751477 - RNA, 20 nt, Human
gccuccccuccucugcuugc

SEQ ID NO: 2751478 - RNA, 23 nt, Human
gccuccccuccucugcuugccau

SEQ ID NO: 2751479 - RNA, 16 nt, Human
gccuccccuccucugc

SEQ ID NO: 2751480 - RNA, 19 nt, Human
gccuccccuccucugcuug

SEQ ID NO: 2751481 - RNA, 17 nt, Human
gccuccccuccucugcu

SEQ ID NO: 2751482 - RNA, 11 nt, Human
gccgaccucag

SEQ ID NO: 2751483 - RNA, 20 nt, Human
gccgggcgugguggugagug

SEQ ID NO: 2751484 - RNA, 21 nt, Human
gccuauuaucugucagcugca

SEQ ID NO: 2751485 - RNA, 22 nt, Human
gccgugugugugcguccugucg

SEQ ID NO: 2751486 - RNA, 23 nt, Human
gccguggugauuuagcaggaagc

SEQ ID NO: 2751487 - RNA, 13 nt, Human
gccuggugggccu

SEQ ID NO: 2751488 - RNA, 22 nt, Human
gccuuuuucauuuaucuauaau

SEQ ID NO: 2751489 - RNA, 14 nt, Human
gccuuuuucauuua

SEQ ID NO: 2751490 - RNA, 15 nt, Human
gccuuuuucauuuau

SEQ ID NO: 2751491 - RNA, 17 nt, Human
gccuuuuucauuuaucu

SEQ ID NO: 2751492 - RNA, 18 nt, Human
gccuuuuucauuuaucua

SEQ ID NO: 2751493 - RNA, 19 nt, Human
gccuuuuucauuuaucuau

SEQ ID NO: 2751494 - RNA, 13 nt, Human
gcuauaggugcua

SEQ ID NO: 2751495 - RNA, 19 nt, Human
gcuagaacucccuuucaac

SEQ ID NO: 2751496 - RNA, 14 nt, Human
gcuaccucacuggg

SEQ ID NO: 2751497 - RNA, 22 nt, Human
gcgcuaauucaaggaauuucuu

SEQ ID NO: 2751498 - RNA, 12 nt, Human
gcgacagugaga

SEQ ID NO: 2751499 - RNA, 19 nt, Human
gcagauucauuuuucuuuc

SEQ ID NO: 2751500 - RNA, 20 nt, Human
gcagauucauuuuucuuucu

SEQ ID NO: 2751501 - RNA, 18 nt, Human
gcagauaaacaguaguga

SEQ ID NO: 2751502 - RNA, 20 nt, Human
gcagccccgugggguuccuc

SEQ ID NO: 2751503 - RNA, 12 nt, Human
gcaucagcugcu

SEQ ID NO: 2751504 - RNA, 13 nt, Human
gcauuauauuuau

SEQ ID NO: 2751505 - RNA, 15 nt, Human
gcaguggacaccagg

SEQ ID NO: 2751506 - RNA, 18 nt, Human
gcagugcuuggcccagga

SEQ ID NO: 2751507 - RNA, 19 nt, Human
gcagugcuuggcccaggag

SEQ ID NO: 2751508 - RNA, 20 nt, Human
gcagugcuuggcccaggagu

SEQ ID NO: 2751509 - RNA, 17 nt, Human
gcauagguuuaauaauu

SEQ ID NO: 2751510 - RNA, 13 nt, Human
gcauagaaguaaa

SEQ ID NO: 2751511 - RNA, 17 nt, Human
gcaguucugaagaagau

SEQ ID NO: 2751512 - RNA, 14 nt, Human
gcaguucugaagaa

SEQ ID NO: 2751513 - RNA, 18 nt, Human
gcaguucagagcugcccu

SEQ ID NO: 2751514 - RNA, 17 nt, Human
gcaguucagagcugccc

SEQ ID NO: 2751515 - RNA, 15 nt, Human
gcaguucugaagaag

SEQ ID NO: 2751516 - RNA, 16 nt, Human
gcaguucagagcugcc

SEQ ID NO: 2751517 - RNA, 15 nt, Human
gauuuuccugaaaac

SEQ ID NO: 2751518 - RNA, 11 nt, Human
gauuuucagcc

SEQ ID NO: 2751519 - RNA, 15 nt, Human
gauuuucagcccuca

SEQ ID NO: 2751520 - RNA, 19 nt, Human
gauuuucagcccucagaau

SEQ ID NO: 2751521 - RNA, 23 nt, Human
gcaaagcacugacuucuaaguaa

SEQ ID NO: 2751522 - RNA, 15 nt, Human
gcaagguacucuggu

SEQ ID NO: 2751523 - RNA, 17 nt, Human
gcaagguacucugguga

SEQ ID NO: 2751524 - RNA, 10 nt, Human
gcaagccaga

SEQ ID NO: 2751525 - RNA, 14 nt, Human
gcaagggugauggg

SEQ ID NO: 2751526 - RNA, 22 nt, Human
gauaaauaguuuaugauuccac

SEQ ID NO: 2751527 - RNA, 23 nt, Human
gauagauaggucagugcaaauac

SEQ ID NO: 2751528 - RNA, 21 nt, Human
gauggcuaguaucaaaagaaa

SEQ ID NO: 2751529 - RNA, 14 nt, Human
gaugaaaauauuug

SEQ ID NO: 2751530 - RNA, 13 nt, Human
gauccuggaaauc

SEQ ID NO: 2751531 - RNA, 13 nt, Human
gagaaagacuauu

SEQ ID NO: 2751532 - RNA, 15 nt, Human
gagaaagacuauuca

SEQ ID NO: 2751533 - RNA, 17 nt, Human
gagaaagacuauucaaa

SEQ ID NO: 2751534 - RNA, 18 nt, Human
gagaaagacuauucaaac

SEQ ID NO: 2751535 - RNA, 21 nt, Human
gagaaacaguugguaacuuuu

SEQ ID NO: 2751536 - RNA, 22 nt, Human
gagaaacaguugguaacuuuug

SEQ ID NO: 2751537 - RNA, 17 nt, Human
gagaaacaguugguaac

SEQ ID NO: 2751538 - RNA, 18 nt, Human
gagaaacaguugguaacu

SEQ ID NO: 2751539 - RNA, 19 nt, Human
gagaaacaguugguaacuu

SEQ ID NO: 2751540 - RNA, 16 nt, Human
gagaagaacugaaauc

SEQ ID NO: 2751541 - RNA, 14 nt, Human
gagaagaacugaaa

SEQ ID NO: 2751542 - RNA, 13 nt, Human
gagaagaacugaa

SEQ ID NO: 2751543 - RNA, 15 nt, Human
gagaagagcuguuca

SEQ ID NO: 2751544 - RNA, 22 nt, Human
gagaagagcuguucacagccag

SEQ ID NO: 2751545 - RNA, 13 nt, Human
gagaagagcuguu

SEQ ID NO: 2751546 - RNA, 18 nt, Human
gagacacacugaagaagc

SEQ ID NO: 2751547 - RNA, 13 nt, Human
gagacagcucugc

SEQ ID NO: 2751548 - RNA, 18 nt, Human
gagacagcucugcauacu

SEQ ID NO: 2751549 - RNA, 15 nt, Human
gagacagcucugcau

SEQ ID NO: 2751550 - RNA, 17 nt, Human
gagauacagaauuuuau

SEQ ID NO: 2751551 - RNA, 19 nt, Human
gagagugaacaaauuuaca

SEQ ID NO: 2751552 - RNA, 15 nt, Human
gagagugaacaaauu

SEQ ID NO: 2751553 - RNA, 19 nt, Human
gagagacacacugaagaag

SEQ ID NO: 2751554 - RNA, 20 nt, Human
gagccucauccgaggcaggg

SEQ ID NO: 2751555 - RNA, 19 nt, Human
gagccucauccgaggcagg

SEQ ID NO: 2751556 - RNA, 18 nt, Human
gagccucauccgaggcag

SEQ ID NO: 2751557 - RNA, 17 nt, Human
gagccucauccgaggca

SEQ ID NO: 2751558 - RNA, 17 nt, Human
gagcugcccucuccugg

SEQ ID NO: 2751559 - RNA, 16 nt, Human
gagcucgugggacagu

SEQ ID NO: 2751560 - RNA, 15 nt, Human
gagcucgguggaccc

SEQ ID NO: 2751561 - RNA, 23 nt, Human
gagcugcccucuccugggcagcu

SEQ ID NO: 2751562 - RNA, 21 nt, Human
gagcugcccucuccugggcag

SEQ ID NO: 2751563 - RNA, 19 nt, Human
gagcugcccucuccugggc

SEQ ID NO: 2751564 - RNA, 18 nt, Human
gagcugcccucuccuggg

SEQ ID NO: 2751565 - RNA, 15 nt, Human
gacaggaccugacua

SEQ ID NO: 2751566 - RNA, 13 nt, Human
gacaggaccugac

SEQ ID NO: 2751567 - RNA, 22 nt, Human
gacaugggacauuugcucaugg

SEQ ID NO: 2751568 - RNA, 17 nt, Human
gacaugggacauuugcu

SEQ ID NO: 2751569 - RNA, 18 nt, Human
gacuccaaagaaauguaa

SEQ ID NO: 2751570 - RNA, 20 nt, Human
gacucagggccccagcacua

SEQ ID NO: 2751571 - RNA, 18 nt, Human
gacucagggccccagcac

SEQ ID NO: 2751572 - RNA, 17 nt, Human
gacucagggccccagca

SEQ ID NO: 2751573 - RNA, 15 nt, Human
gacucagggccccag

SEQ ID NO: 2751574 - RNA, 14 nt, Human
gacucagggcccca

SEQ ID NO: 2751575 - RNA, 22 nt, Human
gacccacaagaaaugaaagcag

SEQ ID NO: 2751576 - RNA, 20 nt, Human
gaccucagccuuccccuugc

SEQ ID NO: 2751577 - RNA, 14 nt, Human
gaccucagccuucc

SEQ ID NO: 2751578 - RNA, 13 nt, Human
gaccucagccuuc

SEQ ID NO: 2751579 - RNA, 19 nt, Human
gaccucagccugugcugcc

SEQ ID NO: 2751580 - RNA, 16 nt, Human
gaccucagccugugcu

SEQ ID NO: 2751581 - RNA, 14 nt, Human
gaccucagccugug

SEQ ID NO: 2751582 - RNA, 13 nt, Human
gaccucagccugu

SEQ ID NO: 2751583 - RNA, 12 nt, Human
gaccucagccug

SEQ ID NO: 2751584 - RNA, 11 nt, Human
gaccucagccu

SEQ ID NO: 2751585 - RNA, 10 nt, Human
gaccucagcc

SEQ ID NO: 2751586 - RNA, 23 nt, Human
gaccugauuucugagcauuuaau

SEQ ID NO: 2751587 - RNA, 12 nt, Human
cuuuuucauuua

SEQ ID NO: 2751588 - RNA, 23 nt, Human
cuuuuucauuuaucuauaauuua

SEQ ID NO: 2751589 - RNA, 13 nt, Human
cuuuuucauuuau

SEQ ID NO: 2751590 - RNA, 15 nt, Human
cuuuuucauuuaucu

SEQ ID NO: 2751591 - RNA, 13 nt, Human
cuucuuuccacag

SEQ ID NO: 2751592 - RNA, 19 nt, Human
cuucuuuccacagaagcuc

SEQ ID NO: 2751593 - RNA, 16 nt, Human
cuucuuucuagaaaga

SEQ ID NO: 2751594 - RNA, 14 nt, Human
cuugaacccgggag

SEQ ID NO: 2751595 - RNA, 20 nt, Human
cuugaacccgggaggcagag

SEQ ID NO: 2751596 - RNA, 19 nt, Human
cuugaacccgggaggcaga

SEQ ID NO: 2751597 - RNA, 16 nt, Human
cuugagugcucaguag

SEQ ID NO: 2751598 - RNA, 23 nt, Human
cuugcaucaauuuuucuuauuuc

SEQ ID NO: 2751599 - RNA, 21 nt, Human
cuugcaugguuuagaaagcuu

SEQ ID NO: 2751600 - RNA, 20 nt, Human
cuuguauuuaaauauuaaau

SEQ ID NO: 2751601 - RNA, 18 nt, Human
cuuguauuuaaauauuaa

SEQ ID NO: 2751602 - RNA, 12 nt, Human
cuuguauuuaaa

SEQ ID NO: 2751603 - RNA, 18 nt, Human
cuuguaaaggaauuuaaa

SEQ ID NO: 2751604 - RNA, 17 nt, Human
cuugccaaauauaaaua

SEQ ID NO: 2751605 - RNA, 23 nt, Human
gaaaguguauuuggaaauaaagu

SEQ ID NO: 2751606 - RNA, 11 nt, Human
gaaaguguauu

SEQ ID NO: 2751607 - RNA, 15 nt, Human
gaaaguguauuugga

SEQ ID NO: 2751608 - RNA, 21 nt, Human
gaaagcuugcccuggugccuc

SEQ ID NO: 2751609 - RNA, 13 nt, Human
gaaacugccagca

SEQ ID NO: 2751610 - RNA, 15 nt, Human
gaaacugccagcaac

SEQ ID NO: 2751611 - RNA, 16 nt, Human
gaaacugacacaugcu

SEQ ID NO: 2751612 - RNA, 14 nt, Human
gaaagcagaacagu

SEQ ID NO: 2751613 - RNA, 13 nt, Human
gaaagcagaacag

SEQ ID NO: 2751614 - RNA, 22 nt, Human
gaaagacuauucaaacagucuc

SEQ ID NO: 2751615 - RNA, 23 nt, Human
gaaagacuauucaaacagucuca

SEQ ID NO: 2751616 - RNA, 19 nt, Human
gaaagacuauucaaacagu

SEQ ID NO: 2751617 - RNA, 24 nt, Human
gaacaguuaccucugccucagaaa

SEQ ID NO: 2751618 - RNA, 22 nt, Human
gaaauguaagggaaacugccag

SEQ ID NO: 2751619 - RNA, 13 nt, Human
gaaauauuuauuu

SEQ ID NO: 2751620 - RNA, 16 nt, Human
gaaauauuuauuuuaa

SEQ ID NO: 2751621 - RNA, 15 nt, Human
gaaauauuuauuuua

SEQ ID NO: 2751622 - RNA, 14 nt, Human
gaaggaugcugucu

SEQ ID NO: 2751623 - RNA, 19 nt, Human
gaaggaggguuagggaggg

SEQ ID NO: 2751624 - RNA, 18 nt, Human
gaagucaaggcuuagacc

SEQ ID NO: 2751625 - RNA, 23 nt, Human
gaaguccaagcauuuagauguau

SEQ ID NO: 2751626 - RNA, 23 nt, Human
gaagagcuguucacagccagacu

SEQ ID NO: 2751627 - RNA, 13 nt, Human
gaagagcuguuca

SEQ ID NO: 2751628 - RNA, 15 nt, Human
gaagagcuguucaca

SEQ ID NO: 2751629 - RNA, 20 nt, Human
gaagagcuguucacagccag

SEQ ID NO: 2751630 - RNA, 22 nt, Human
gaacuuguaaaggaauuuaaaa

SEQ ID NO: 2751631 - RNA, 15 nt, Human
gaaccacaagacugc

SEQ ID NO: 2751632 - RNA, 14 nt, Human
gaaccacaagacug

SEQ ID NO: 2751633 - RNA, 15 nt, Human
gaacucccuuucaac

SEQ ID NO: 2751634 - RNA, 16 nt, Human
gaacucccuuucaaca

SEQ ID NO: 2751635 - RNA, 15 nt, Human
cuguaugauucccag

SEQ ID NO: 2751636 - RNA, 16 nt, Human
cuguauuuuaaaagaa

SEQ ID NO: 2751637 - RNA, 13 nt, Human
cuguauuuuaaaa

SEQ ID NO: 2751638 - RNA, 20 nt, Human
cugucuccucucucuguaau

SEQ ID NO: 2751639 - RNA, 17 nt, Human
cugucuccucucucugu

SEQ ID NO: 2751640 - RNA, 18 nt, Human
cugucucuacuaaaaaua

SEQ ID NO: 2751641 - RNA, 17 nt, Human
cuguaccaguuaauuuu

SEQ ID NO: 2751642 - RNA, 18 nt, Human
cuguaccaguuaauuuuu

SEQ ID NO: 2751643 - RNA, 12 nt, Human
cuguaccaguua

SEQ ID NO: 2751644 - RNA, 16 nt, Human
cuguaccaguuaauuu

SEQ ID NO: 2751645 - RNA, 22 nt, Human
cuguaauaaacucauuucuagc

SEQ ID NO: 2751646 - RNA, 15 nt, Human
cuggccuucggccuc

SEQ ID NO: 2751647 - RNA, 21 nt, Human
cuggccuucggccuccauccu

SEQ ID NO: 2751648 - RNA, 18 nt, Human
cuggccuucggccuccau

SEQ ID NO: 2751649 - RNA, 17 nt, Human
cuggccuucggccucca

SEQ ID NO: 2751650 - RNA, 16 nt, Human
cuggccuucggccucc

SEQ ID NO: 2751651 - RNA, 20 nt, Human
cuggccuuuuucauuuaucu

SEQ ID NO: 2751652 - RNA, 21 nt, Human
cuggccuuuuucauuuaucua

SEQ ID NO: 2751653 - RNA, 17 nt, Human
cuggccuuuuucauuua

SEQ ID NO: 2751654 - RNA, 19 nt, Human
cuggccuuuuucauuuauc

SEQ ID NO: 2751655 - RNA, 20 nt, Human
cugggaaagggauuuucagc

SEQ ID NO: 2751656 - RNA, 21 nt, Human
cugcccgucuucagccuagcc

SEQ ID NO: 2751657 - RNA, 18 nt, Human
cugcccgucuucagccua

SEQ ID NO: 2751658 - RNA, 17 nt, Human
cugcccgucuucagccu

SEQ ID NO: 2751659 - RNA, 16 nt, Human
cugcccgucuucagcc

SEQ ID NO: 2751660 - RNA, 15 nt, Human
cugcccgucuucagc

SEQ ID NO: 2751661 - RNA, 15 nt, Human
cugccagcaacgcag

SEQ ID NO: 2751662 - RNA, 18 nt, Human
cugcacucccaccugaca

SEQ ID NO: 2751663 - RNA, 19 nt, Human
cugcacucccaccugacac

SEQ ID NO: 2751664 - RNA, 16 nt, Human
cugcacucccaccuga

SEQ ID NO: 2751665 - RNA, 22 nt, Human
cugcacucccaccugacacacc

SEQ ID NO: 2751666 - RNA, 12 nt, Human
cugcacugucaa

SEQ ID NO: 2751667 - RNA, 15 nt, Human
cugcuugccaucccu

SEQ ID NO: 2751668 - RNA, 16 nt, Human
cugcuugccaucccuc

SEQ ID NO: 2751669 - RNA, 22 nt, Human
cugcuugccaucccucccucca

SEQ ID NO: 2751670 - RNA, 20 nt, Human
cugcuugccaucccucccuc

SEQ ID NO: 2751671 - RNA, 19 nt, Human
cugcuugccaucccucccu

SEQ ID NO: 2751672 - RNA, 18 nt, Human
cugcuugccaucccuccc

SEQ ID NO: 2751673 - RNA, 12 nt, Human
cugcucuaacag

SEQ ID NO: 2751674 - RNA, 17 nt, Human
cugcucuaacagcccuc

SEQ ID NO: 2751675 - RNA, 15 nt, Human
cugcccucuccuggg

SEQ ID NO: 2751676 - RNA, 14 nt, Human
cugcccucuccugg

SEQ ID NO: 2751677 - RNA, 13 nt, Human
cugcccucuccug

SEQ ID NO: 2751678 - RNA, 12 nt, Human
cugcccucuccu

SEQ ID NO: 2751679 - RNA, 23 nt, Human
cugaagaagcaccaaucaugaau

SEQ ID NO: 2751680 - RNA, 17 nt, Human
cugaacaucacagcuua

SEQ ID NO: 2751681 - RNA, 22 nt, Human
cucuucuuuaaagggauggcaa

SEQ ID NO: 2751682 - RNA, 20 nt, Human
cucugcuugccaucccuccc

SEQ ID NO: 2751683 - RNA, 17 nt, Human
cucugcuugccaucccu

SEQ ID NO: 2751684 - RNA, 14 nt, Human
cucugcuugccauc

SEQ ID NO: 2751685 - RNA, 12 nt, Human
cucugcuugcca

SEQ ID NO: 2751686 - RNA, 12 nt, Human
cucuggccuucg

SEQ ID NO: 2751687 - RNA, 19 nt, Human
cucuggccuucggccucca

SEQ ID NO: 2751688 - RNA, 17 nt, Human
cugacucuuaagaagac

SEQ ID NO: 2751689 - RNA, 16 nt, Human
cugacuucuaaguaaa

SEQ ID NO: 2751690 - RNA, 13 nt, Human
cugacuucuaagu

SEQ ID NO: 2751691 - RNA, 15 nt, Human
cugacuucuaaguaa

SEQ ID NO: 2751692 - RNA, 22 nt, Human
cugagaaagacuauucaaacag

SEQ ID NO: 2751693 - RNA, 23 nt, Human
cugagaaagacuauucaaacagu

SEQ ID NO: 2751694 - RNA, 17 nt, Human
cugaggcagacagcagc

SEQ ID NO: 2751695 - RNA, 16 nt, Human
cugaggcagacagcag

SEQ ID NO: 2751696 - RNA, 15 nt, Human
cugaggcagacagca

SEQ ID NO: 2751697 - RNA, 14 nt, Human
cugaggcagacagc

SEQ ID NO: 2751698 - RNA, 22 nt, Human
cugaggcagacagcagcucagg

SEQ ID NO: 2751699 - RNA, 18 nt, Human
cugaggcagacagcagcu

SEQ ID NO: 2751700 - RNA, 13 nt, Human
cugaggcagacag

SEQ ID NO: 2751701 - RNA, 22 nt, Human
cugagcucgguggacccaggga

SEQ ID NO: 2751702 - RNA, 20 nt, Human
cugagcgacagugagacucu

SEQ ID NO: 2751703 - RNA, 16 nt, Human
cugagcgacagugaga

SEQ ID NO: 2751704 - RNA, 20 nt, Human
cugagcucgguggacccagg

SEQ ID NO: 2751705 - RNA, 18 nt, Human
cugagcucgguggaccca

SEQ ID NO: 2751706 - RNA, 17 nt, Human
cugagcucgguggaccc

SEQ ID NO: 2751707 - RNA, 18 nt, Human
cuccauccugaggcucca

SEQ ID NO: 2751708 - RNA, 16 nt, Human
cuccauccugaggcuc

SEQ ID NO: 2751709 - RNA, 14 nt, Human
cuccauccugaggc

SEQ ID NO: 2751710 - RNA, 23 nt, Human
cuccugucugccagccagcagcc

SEQ ID NO: 2751711 - RNA, 22 nt, Human
cuccugucugccagccagcagc

SEQ ID NO: 2751712 - RNA, 19 nt, Human
cuccugucugccagccagc

SEQ ID NO: 2751713 - RNA, 17 nt, Human
cuccugucugccagcca

SEQ ID NO: 2751714 - RNA, 17 nt, Human
cucccuccaccucccug

SEQ ID NO: 2751715 - RNA, 15 nt, Human
cucccuccaccuccc

SEQ ID NO: 2751716 - RNA, 20 nt, Human
cucuaauucacagugcucuu

SEQ ID NO: 2751717 - RNA, 23 nt, Human
cucggagccucauccgaggcagg

SEQ ID NO: 2751718 - RNA, 22 nt, Human
cucggagccucauccgaggcag

SEQ ID NO: 2751719 - RNA, 16 nt, Human
cucggagccucauccg

SEQ ID NO: 2751720 - RNA, 13 nt, Human
cucggagccucau

SEQ ID NO: 2751721 - RNA, 17 nt, Human
cucuaggaaauauuuau

SEQ ID NO: 2751722 - RNA, 15 nt, Human
cucuaggaaauauuu

SEQ ID NO: 2751723 - RNA, 15 nt, Human
cucuccagcugacua

SEQ ID NO: 2751724 - RNA, 16 nt, Human
cucuccagcugacuaa

SEQ ID NO: 2751725 - RNA, 14 nt, Human
cucuccagcugacu

SEQ ID NO: 2751726 - RNA, 12 nt, Human
cucuccugggca

SEQ ID NO: 2751727 - RNA, 19 nt, Human
cucuccugggcagcugccu

SEQ ID NO: 2751728 - RNA, 18 nt, Human
cucuccugggcagcugcc

SEQ ID NO: 2751729 - RNA, 16 nt, Human
cucuccugggcagcug

SEQ ID NO: 2751730 - RNA, 15 nt, Human
cucuccugggcagcu

SEQ ID NO: 2751731 - RNA, 20 nt, Human
cucuccugggcagcugccuc

SEQ ID NO: 2751732 - RNA, 17 nt, Human
cggugagcuacaaaugc

SEQ ID NO: 2751733 - RNA, 22 nt, Human
cggucggguuuuauuguuuaaa

SEQ ID NO: 2751734 - RNA, 21 nt, Human
cggguuuuauuguuuaaaauc

SEQ ID NO: 2751735 - RNA, 12 nt, Human
cggccuccaucc

SEQ ID NO: 2751736 - RNA, 23 nt, Human
cgcuaauucaaggaauuucuuaa

SEQ ID NO: 2751737 - RNA, 15 nt, Human
cgcucucuggccuuc

SEQ ID NO: 2751738 - RNA, 14 nt, Human
cgcucucuggccuu

SEQ ID NO: 2751739 - RNA, 18 nt, Human
cgcucucuggccuucggc

SEQ ID NO: 2751740 - RNA, 14 nt, Human
cgucuucagccuag

SEQ ID NO: 2751741 - RNA, 13 nt, Human
cgucuucagccua

SEQ ID NO: 2751742 - RNA, 15 nt, Human
cgucuucagccuagc

SEQ ID NO: 2751743 - RNA, 18 nt, Human
cgugcacgcacacugucu

SEQ ID NO: 2751744 - RNA, 23 nt, Human
cuaaauugacacuuaaaaauggu

SEQ ID NO: 2751745 - RNA, 13 nt, Human
cuaccaguauuua

SEQ ID NO: 2751746 - RNA, 19 nt, Human
cuaccaguauuuagaagcc

SEQ ID NO: 2751747 - RNA, 20 nt, Human
cuaccaguauuuagaagcca

SEQ ID NO: 2751748 - RNA, 17 nt, Human
cuacacuccagugagac

SEQ ID NO: 2751749 - RNA, 16 nt, Human
cuacacuccagugaga

SEQ ID NO: 2751750 - RNA, 17 nt, Human
cuaacauguccugccua

SEQ ID NO: 2751751 - RNA, 14 nt, Human
cuaagcaaaaugug

SEQ ID NO: 2751752 - RNA, 18 nt, Human
cuaagcaaaaugugauau

SEQ ID NO: 2751753 - RNA, 15 nt, Human
cuaagcaaaauguga

SEQ ID NO: 2751754 - RNA, 23 nt, Human
cuagauguaguauuuuuuguaua

SEQ ID NO: 2751755 - RNA, 20 nt, Human
cuagauguaguauuuuuugu

SEQ ID NO: 2751756 - RNA, 22 nt, Human
cuagauguaguauuuuuuguau

SEQ ID NO: 2751757 - RNA, 16 nt, Human
cuagauguaguauuuu

SEQ ID NO: 2751758 - RNA, 18 nt, Human
cuacuugggaggcugaga

SEQ ID NO: 2751759 - RNA, 15 nt, Human
cuacuugggaggcug

SEQ ID NO: 2751760 - RNA, 19 nt, Human
cuacuugggaggcugagau

SEQ ID NO: 2751761 - RNA, 19 nt, Human
cuacuuuauaacuaacaug

SEQ ID NO: 2751762 - RNA, 14 nt, Human
cuacuuuauaacua

SEQ ID NO: 2751763 - RNA, 18 nt, Human
cuacuuuauaacuaacau

SEQ ID NO: 2751764 - RNA, 17 nt, Human
cucaccccuugccauaa

SEQ ID NO: 2751765 - RNA, 13 nt, Human
cucacauuuauau

SEQ ID NO: 2751766 - RNA, 21 nt, Human
cuaucaaacugaagccagaaa

SEQ ID NO: 2751767 - RNA, 20 nt, Human
cuaucaaacugaagccagaa

SEQ ID NO: 2751768 - RNA, 16 nt, Human
cuaucaaacugaagcc

SEQ ID NO: 2751769 - RNA, 22 nt, Human
cuauauuuuuuguuaaaugauu

SEQ ID NO: 2751770 - RNA, 13 nt, Human
cuaucaaacugaa

SEQ ID NO: 2751771 - RNA, 13 nt, Human
cuaugaaauauua

SEQ ID NO: 2751772 - RNA, 20 nt, Human
cuauauuuuuuguuaaauga

SEQ ID NO: 2751773 - RNA, 19 nt, Human
cuauauuguuugcuaagca

SEQ ID NO: 2751774 - RNA, 22 nt, Human
cuaggaaauauuuauuuuaaua

SEQ ID NO: 2751775 - RNA, 16 nt, Human
cuagcacuuggagcca

SEQ ID NO: 2751776 - RNA, 20 nt, Human
cuaguauuucuaugaaauau

SEQ ID NO: 2751777 - RNA, 19 nt, Human
cuaguauuucuaugaaaua

SEQ ID NO: 2751778 - RNA, 22 nt, Human
cuaguauuucuaugaaauauua

SEQ ID NO: 2751779 - RNA, 23 nt, Human
cuaguaucaaaagaaagaaaauc

SEQ ID NO: 2751780 - RNA, 17 nt, Human
cuaguaucaaaagaaag

SEQ ID NO: 2751781 - RNA, 15 nt, Human
cuaguaucaaaagaa

SEQ ID NO: 2751782 - RNA, 15 nt, Human
cccugcaauaaaaug

SEQ ID NO: 2751783 - RNA, 14 nt, Human
cccugcaauaaaau

SEQ ID NO: 2751784 - RNA, 14 nt, Human
ccccaggugccagu

SEQ ID NO: 2751785 - RNA, 13 nt, Human
cccguuuugucac

SEQ ID NO: 2751786 - RNA, 18 nt, Human
cccgucuucagccuagcc

SEQ ID NO: 2751787 - RNA, 12 nt, Human
cccgucuucagc

SEQ ID NO: 2751788 - RNA, 17 nt, Human
cccgucuucagccuagc

SEQ ID NO: 2751789 - RNA, 16 nt, Human
cccgucuucagccuag

SEQ ID NO: 2751790 - RNA, 15 nt, Human
cccgucuucagccua

SEQ ID NO: 2751791 - RNA, 14 nt, Human
cccgucuucagccu

SEQ ID NO: 2751792 - RNA, 13 nt, Human
cccgucuucagcc

SEQ ID NO: 2751793 - RNA, 17 nt, Human
cccucaugcugccaaua

SEQ ID NO: 2751794 - RNA, 14 nt, Human
cccucaugcugcca

SEQ ID NO: 2751795 - RNA, 12 nt, Human
cccucccuccac

SEQ ID NO: 2751796 - RNA, 13 nt, Human
cccucccuccacc

SEQ ID NO: 2751797 - RNA, 20 nt, Human
cccucccuccaccucccugc

SEQ ID NO: 2751798 - RNA, 13 nt, Human
ccuccauccugag

SEQ ID NO: 2751799 - RNA, 12 nt, Human
ccuccauccuga

SEQ ID NO: 2751800 - RNA, 14 nt, Human
ccuccccugcccua

SEQ ID NO: 2751801 - RNA, 13 nt, Human
ccuccccuccucu

SEQ ID NO: 2751802 - RNA, 12 nt, Human
ccuccccuccuc

SEQ ID NO: 2751803 - RNA, 17 nt, Human
ccuauuaucugucagcu

SEQ ID NO: 2751804 - RNA, 20 nt, Human
ccucagaugcacaugagcug

SEQ ID NO: 2751805 - RNA, 23 nt, Human
ccucacugggguccuggggccuc

SEQ ID NO: 2751806 - RNA, 20 nt, Human
ccucacugggguccuggggc

SEQ ID NO: 2751807 - RNA, 19 nt, Human
ccucacugggguccugggg

SEQ ID NO: 2751808 - RNA, 20 nt, Human
ccucacuguauccagguucc

SEQ ID NO: 2751809 - RNA, 17 nt, Human
cccuucuuuccacagaa

SEQ ID NO: 2751810 - RNA, 13 nt, Human
ccuaaacauauga

SEQ ID NO: 2751811 - RNA, 14 nt, Human
ccagcugacuaaac

SEQ ID NO: 2751812 - RNA, 17 nt, Human
ccagcugacuaaacuuu

SEQ ID NO: 2751813 - RNA, 23 nt, Human
ccagcugacuaaacuuuuuuucu

SEQ ID NO: 2751814 - RNA, 12 nt, Human
ccagcucucagc

SEQ ID NO: 2751815 - RNA, 15 nt, Human
ccagcucucagccaa

SEQ ID NO: 2751816 - RNA, 14 nt, Human
ccagcucucagcca

SEQ ID NO: 2751817 - RNA, 13 nt, Human
ccagcucucagcc

SEQ ID NO: 2751818 - RNA, 15 nt, Human
ccauccugaggcucc

SEQ ID NO: 2751819 - RNA, 16 nt, Human
ccauccugaggcucca

SEQ ID NO: 2751820 - RNA, 20 nt, Human
cccagaggagccaccaguuc

SEQ ID NO: 2751821 - RNA, 20 nt, Human
cccagacuagauguaguauu

SEQ ID NO: 2751822 - RNA, 23 nt, Human
cccagacuagauguaguauuuuu

SEQ ID NO: 2751823 - RNA, 23 nt, Human
ccauggcacucuauguucuaaga

SEQ ID NO: 2751824 - RNA, 16 nt, Human
cccaguguuuuaggag

SEQ ID NO: 2751825 - RNA, 17 nt, Human
cccaguguuuuaggagc

SEQ ID NO: 2751826 - RNA, 14 nt, Human
cauuugcucaugga

SEQ ID NO: 2751827 - RNA, 15 nt, Human
cauuugcucauggaa

SEQ ID NO: 2751828 - RNA, 16 nt, Human
cauuugcucauggaau

SEQ ID NO: 2751829 - RNA, 17 nt, Human
ccaaagaaauguaaggg

SEQ ID NO: 2751830 - RNA, 18 nt, Human
cauugacuaucaaacuga

SEQ ID NO: 2751831 - RNA, 22 nt, Human
cauugacuaucaaacugaagcc

SEQ ID NO: 2751832 - RNA, 19 nt, Human
cauugacuaucaaacugaa

SEQ ID NO: 2751833 - RNA, 23 nt, Human
cauuucugcaucagcugcugaaa

SEQ ID NO: 2751834 - RNA, 12 nt, Human
cauuuccaagca

SEQ ID NO: 2751835 - RNA, 19 nt, Human
cauuuaaagcuuauuaaaa

SEQ ID NO: 2751836 - RNA, 18 nt, Human
ccaaggcuagaaccaccu

SEQ ID NO: 2751837 - RNA, 19 nt, Human
ccaaggcugauuaaaccaa

SEQ ID NO: 2751838 - RNA, 20 nt, Human
ccaauauucauagcagcuua

SEQ ID NO: 2751839 - RNA, 22 nt, Human
ccacaagaaaugaaagcaggga

SEQ ID NO: 2751840 - RNA, 16 nt, Human
ccacaagaaaugaaag

SEQ ID NO: 2751841 - RNA, 14 nt, Human
ccaacacgagcagg

SEQ ID NO: 2751842 - RNA, 21 nt, Human
ccaacacgagcaggcuacugu

SEQ ID NO: 2751843 - RNA, 21 nt, Human
cauguggugggacagggaccc

SEQ ID NO: 2751844 - RNA, 12 nt, Human
caugugguggga

SEQ ID NO: 2751845 - RNA, 17 nt, Human
caugggacagggaggac

SEQ ID NO: 2751846 - RNA, 23 nt, Human
caugcugucuacacuaagagaga

SEQ ID NO: 2751847 - RNA, 20 nt, Human
cauauauaacaaugcuguau

SEQ ID NO: 2751848 - RNA, 22 nt, Human
caucaagucuuucacauuuaaa

SEQ ID NO: 2751849 - RNA, 18 nt, Human
caucaaugaaugaaugaa

SEQ ID NO: 2751850 - RNA, 13 nt, Human
caucccucccucc

SEQ ID NO: 2751851 - RNA, 12 nt, Human
caucccucccuc

SEQ ID NO: 2751852 - RNA, 14 nt, Human
caucccucccucca

SEQ ID NO: 2751853 - RNA, 20 nt, Human
caucuugcuaccaguauuua

SEQ ID NO: 2751854 - RNA, 22 nt, Human
caucuugcuaccaguauuuaga

SEQ ID NO: 2751855 - RNA, 14 nt, Human
caucuugcuaccag

SEQ ID NO: 2751856 - RNA, 16 nt, Human
caucuugcuaccagua

SEQ ID NO: 2751857 - RNA, 17 nt, Human
caucuugcuaccaguau

SEQ ID NO: 2751858 - RNA, 18 nt, Human
caucuugcuaccaguauu

SEQ ID NO: 2751859 - RNA, 23 nt, Human
caucuugcuaccaguauuuagaa

SEQ ID NO: 2751860 - RNA, 12 nt, Human
caucuugcuacc

SEQ ID NO: 2751861 - RNA, 22 nt, Human
cauccucaaagaaaguguauug

SEQ ID NO: 2751862 - RNA, 14 nt, Human
cauccucaaagaaa

SEQ ID NO: 2751863 - RNA, 20 nt, Human
cauccucaaagaaaguguau

SEQ ID NO: 2751864 - RNA, 14 nt, Human
caucuagugagcag

SEQ ID NO: 2751865 - RNA, 22 nt, Human
caucuagugagcagucaggaaa

SEQ ID NO: 2751866 - RNA, 14 nt, Human
caguuuucugagaa

SEQ ID NO: 2751867 - RNA, 15 nt, Human
caguuuucugagaaa

SEQ ID NO: 2751868 - RNA, 17 nt, Human
caguugguaacuuuugu

SEQ ID NO: 2751869 - RNA, 14 nt, Human
caguugguaacuuu

SEQ ID NO: 2751870 - RNA, 16 nt, Human
caguugguaacuuuug

SEQ ID NO: 2751871 - RNA, 19 nt, Human
caguuuucugagaaagacu

SEQ ID NO: 2751872 - RNA, 20 nt, Human
caguuuucugagaaagacua

SEQ ID NO: 2751873 - RNA, 21 nt, Human
caguugaaaagacuccaaaga

SEQ ID NO: 2751874 - RNA, 22 nt, Human
caguugaaaagacuccaaagaa

SEQ ID NO: 2751875 - RNA, 23 nt, Human
caguugaaaagacuccaaagaaa

SEQ ID NO: 2751876 - RNA, 14 nt, Human
caguugaaaagacu

SEQ ID NO: 2751877 - RNA, 18 nt, Human
caguugaaaagacuccaa

SEQ ID NO: 2751878 - RNA, 12 nt, Human
cauaaccugucu

SEQ ID NO: 2751879 - RNA, 23 nt, Human
cauaaccugucucaccuggacuu

SEQ ID NO: 2751880 - RNA, 17 nt, Human
cauaccaacacgagcag

SEQ ID NO: 2751881 - RNA, 20 nt, Human
caguucugugguuucauguu

SEQ ID NO: 2751882 - RNA, 22 nt, Human
caguucggugagcuacaaaugc

SEQ ID NO: 2751883 - RNA, 16 nt, Human
caguucugaagaagau

SEQ ID NO: 2751884 - RNA, 15 nt, Human
caguucugaagaaga

SEQ ID NO: 2751885 - RNA, 22 nt, Human
caguucugaagaagaugguacc

SEQ ID NO: 2751886 - RNA, 20 nt, Human
caguucucauggguggcacu

SEQ ID NO: 2751887 - RNA, 14 nt, Human
caguucugaagaag

SEQ ID NO: 2751888 - RNA, 13 nt, Human
caguucugaagaa

SEQ ID NO: 2751889 - RNA, 12 nt, Human
caguucugaaga

SEQ ID NO: 2751890 - RNA, 12 nt, Human
caguuaauuuuu

SEQ ID NO: 2751891 - RNA, 13 nt, Human
caguuaauuuuuc

SEQ ID NO: 2751892 - RNA, 14 nt, Human
caguuaauuuuucc

SEQ ID NO: 2751893 - RNA, 16 nt, Human
caguuaauuuuuccaa

SEQ ID NO: 2751894 - RNA, 19 nt, Human
caguuaauuuuuccaacua

SEQ ID NO: 2751895 - RNA, 21 nt, Human
caguuaccucugccucagaaa

SEQ ID NO: 2751896 - RNA, 16 nt, Human
caguguuuuaggagca

SEQ ID NO: 2751897 - RNA, 20 nt, Human
caguguuuuaggagcaugag

SEQ ID NO: 2751898 - RNA, 22 nt, Human
caguggacaccaggagucccug

SEQ ID NO: 2751899 - RNA, 13 nt, Human
caguggacaccag

SEQ ID NO: 2751900 - RNA, 17 nt, Human
cagugcuuggcccagga

SEQ ID NO: 2751901 - RNA, 18 nt, Human
cagugcuuggcccaggag

SEQ ID NO: 2751902 - RNA, 19 nt, Human
cagugcuuggcccaggagu

SEQ ID NO: 2751903 - RNA, 20 nt, Human
cagugcuuggcccaggaguu

SEQ ID NO: 2751904 - RNA, 13 nt, Human
cagugcuuggccc

SEQ ID NO: 2751905 - RNA, 14 nt, Human
cagugcuuggccca

SEQ ID NO: 2751906 - RNA, 15 nt, Human
cagugcuuggcccag

SEQ ID NO: 2751907 - RNA, 16 nt, Human
cagugcuuggcccagg

SEQ ID NO: 2751908 - RNA, 14 nt, Human
cagugucaaugcag

SEQ ID NO: 2751909 - RNA, 16 nt, Human
acagucacauuccaag

SEQ ID NO: 2751910 - RNA, 16 nt, Human
acuuuaugcuaaguga

SEQ ID NO: 2751911 - RNA, 13 nt, Human
gugcuacaaaaac

SEQ ID NO: 2751912 - RNA, 23 nt, Human
ucaugcugccaauauccuaauaa

SEQ ID NO: 2751913 - RNA, 18 nt, Human
cuggcaaagaugaucagu

SEQ ID NO: 2751914 - RNA, 10 nt, Human
aaaagaugaa

SEQ ID NO: 2751915 - RNA, 21 nt, Human
aaagguauuuuaaucaccaag

SEQ ID NO: 2751916 - RNA, 18 nt, Human
gcugcugaaacaacaaau

SEQ ID NO: 2751917 - RNA, 22 nt, Human
uuggauuuccuaauacugucau

SEQ ID NO: 2751918 - RNA, 15 nt, Human
aacagugauuaccag

SEQ ID NO: 2751919 - RNA, 22 nt, Human
aaaacugcacugucaagaugau

SEQ ID NO: 2751920 - RNA, 17 nt, Human
gacucauuuuaaaaaau

SEQ ID NO: 2751921 - RNA, 14 nt, Human
cuuggucucagugu

SEQ ID NO: 2751922 - RNA, 16 nt, Human
cuccaugaauaucagu

SEQ ID NO: 2751923 - RNA, 22 nt, Human
uauugguuuaaagaaaguguau

SEQ ID NO: 2751924 - RNA, 22 nt, Human
cugagguaaccucauuaucagu

SEQ ID NO: 2751925 - RNA, 20 nt, Human respiratory syncytial virus
gcagagcaacucaaagaaaa

SEQ ID NO: 2751926 - RNA, 17 nt, Human respiratory syncytial virus
uaccaagcaacaaacca

SEQ ID NO: 2751927 - RNA, 19 nt, Human respiratory syncytial virus
gcagauuguuggaaaucaa

SEQ ID NO: 2751928 - RNA, 17 nt, Human respiratory syncytial virus
uaauagguauguuauau

SEQ ID NO: 2751929 - RNA, 16 nt, Human respiratory syncytial virus
acaucaugaacaucua

SEQ ID NO: 2751930 - RNA, 20 nt, Human respiratory syncytial virus
aagaauuggaagccauaaag

SEQ ID NO: 2751931 - RNA, 14 nt, Human respiratory syncytial virus
cauguccaaacaca

SEQ ID NO: 2751932 - RNA, 17 nt, Human respiratory syncytial virus
accauguccaaacacaa

SEQ ID NO: 2751933 - RNA, 22 nt, Human respiratory syncytial virus
uaccaaauacaagaaauacacu

SEQ ID NO: 2751934 - RNA, 19 nt, Human respiratory syncytial virus
cugcugucauccagcaaau

SEQ ID NO: 2751935 - RNA, 13 nt, Human respiratory syncytial virus
guacgccaagaaa

SEQ ID NO: 2751936 - RNA, 13 nt, Human respiratory syncytial virus
auuaacucaagaa

SEQ ID NO: 2751937 - RNA, 14 nt, Human respiratory syncytial virus
cauguuaacaaaca

SEQ ID NO: 2751938 - RNA, 14 nt, Human respiratory syncytial virus
accaccaaaaccac

SEQ ID NO: 2751939 - RNA, 15 nt, Human respiratory syncytial virus
aggauauagcuaaca

SEQ ID NO: 2751940 - RNA, 17 nt, Human respiratory syncytial virus
ccaaccaccaaaaccac

SEQ ID NO: 2751941 - RNA, 20 nt, Human respiratory syncytial virus
auggcucuuagcaaagucaa

SEQ ID NO: 2751942 - RNA, 18 nt, Human respiratory syncytial virus
gugaucaacucacucagc

SEQ ID NO: 2751943 - RNA, 19 nt, Human respiratory syncytial virus
aaaacacacuccuauaaua

SEQ ID NO: 2751944 - RNA, 17 nt, Human respiratory syncytial virus
aagcuacugcacaaagu

SEQ ID NO: 2751945 - RNA, 18 nt, Human respiratory syncytial virus
caaauuagcagcaggaga

SEQ ID NO: 2751946 - RNA, 19 nt, Human respiratory syncytial virus
aauagguaaauaaaaccaa

SEQ ID NO: 2751947 - RNA, 11 nt, Human respiratory syncytial virus
aguaauuacuu

SEQ ID NO: 2751948 - RNA, 20 nt, Human respiratory syncytial virus
gcuaagugaacauaaaacau

SEQ ID NO: 2751949 - RNA, 18 nt, Human respiratory syncytial virus
aucaggucuuacagcagu

SEQ ID NO: 2751950 - RNA, 22 nt, Human respiratory syncytial virus
gucaaugaaaaaaucaaucaaa

SEQ ID NO: 2751951 - RNA, 15 nt, Human respiratory syncytial virus
ccaaaaccacaaaca

SEQ ID NO: 2751952 - RNA, 16 nt, Human respiratory syncytial virus
aaccaacccaaccaaa

SEQ ID NO: 2751953 - RNA, 11 nt, Human respiratory syncytial virus
auaaaaguaaa

SEQ ID NO: 2751954 - RNA, 15 nt, Human respiratory syncytial virus
ggcaaauaagucaac

SEQ ID NO: 2751955 - RNA, 14 nt, Human respiratory syncytial virus
accuagaaaaagag

SEQ ID NO: 2751956 - RNA, 13 nt, Human respiratory syncytial virus
cagaaauggagca

SEQ ID NO: 2751957 - RNA, 13 nt, Human respiratory syncytial virus
aauauacaaauau

SEQ ID NO: 2751958 - RNA, 17 nt, Human respiratory syncytial virus
aauuagcagcaggagac

SEQ ID NO: 2751959 - RNA, 15 nt, Human respiratory syncytial virus
augcuauguccaggu

SEQ ID NO: 2751960 - RNA, 21 nt, Human respiratory syncytial virus
acaagccgagcacaaaaccac

SEQ ID NO: 2751961 - RNA, 15 nt, Human respiratory syncytial virus
caaaaccacaaacaa

SEQ ID NO: 2751962 - RNA, 23 nt, Human respiratory syncytial virus
caaauacacuauucaacguagua

SEQ ID NO: 2751963 - RNA, 12 nt, Human respiratory syncytial virus
aaagaagaucuc

SEQ ID NO: 2751964 - RNA, 22 nt, Human respiratory syncytial virus
ucaacucaacccuaaagaagau

SEQ ID NO: 2751965 - RNA, 13 nt, Human respiratory syncytial virus
cuaccuagaaaaa

SEQ ID NO: 2751966 - RNA, 22 nt, Human respiratory syncytial virus
caaagaaaucaucacacacaaa

SEQ ID NO: 2751967 - RNA, 19 nt, Human respiratory syncytial virus
caacguaguacaggagaua

SEQ ID NO: 2751968 - RNA, 12 nt, Human respiratory syncytial virus
acaaacaaaugu

SEQ ID NO: 2751969 - RNA, 13 nt, Human respiratory syncytial virus
gaaucaacucaac

SEQ ID NO: 2751970 - RNA, 15 nt, Human respiratory syncytial virus
caacuccacacaaac

SEQ ID NO: 2751971 - RNA, 15 nt, Human respiratory syncytial virus
gcaaagauuaaugau

SEQ ID NO: 2751972 - RNA, 14 nt, Human respiratory syncytial virus
uggcaccaacauca

SEQ ID NO: 2751973 - RNA, 17 nt, Human respiratory syncytial virus
agcaacucaaagaaaau

SEQ ID NO: 2751974 - RNA, 15 nt, Human respiratory syncytial virus
uacauauacuauaaa

SEQ ID NO: 2751975 - RNA, 16 nt, Human respiratory syncytial virus
acagaaguugggagga

SEQ ID NO: 2751976 - RNA, 13 nt, Human respiratory syncytial virus
guuaauauaaaaa

SEQ ID NO: 2751977 - RNA, 17 nt, Human respiratory syncytial virus
ggcaugauucuccagac

SEQ ID NO: 2751978 - RNA, 15 nt, Human respiratory syncytial virus
agcaaagucaaguua

SEQ ID NO: 2751979 - RNA, 21 nt, Human respiratory syncytial virus
uacacugaauauaauacaaaa

SEQ ID NO: 2751980 - RNA, 21 nt, Human respiratory syncytial virus
aaaaaacaacaagcaaacaau

SEQ ID NO: 2751981 - RNA, 16 nt, Human respiratory syncytial virus
accacacaacagcaca

SEQ ID NO: 2751982 - RNA, 12 nt, Human respiratory syncytial virus
uaauuuagcuua

SEQ ID NO: 2751983 - RNA, 15 nt, Human respiratory syncytial virus
gaaguggcuccagaa

SEQ ID NO: 2751984 - RNA, 20 nt, Human respiratory syncytial virus
cacaacagcacaaaccaaag

SEQ ID NO: 2751985 - RNA, 21 nt, Human respiratory syncytial virus
agacaacgauagugacaauga

SEQ ID NO: 2751986 - RNA, 21 nt, Human respiratory syncytial virus
uagguaaauaaaaccaaaaua

SEQ ID NO: 2751987 - RNA, 21 nt, Human respiratory syncytial virus
auacuugauaaacaaugaaug

SEQ ID NO: 2751988 - RNA, 12 nt, Human respiratory syncytial virus
cacgccaacuau

SEQ ID NO: 2751989 - RNA, 23 nt, Human respiratory syncytial virus
caacucaacccuaaagaagauga

SEQ ID NO: 2751990 - RNA, 13 nt, Human respiratory syncytial virus
aaacuacacacua

SEQ ID NO: 2751991 - RNA, 19 nt, Human respiratory syncytial virus
cauggugucgcaaaaccac

SEQ ID NO: 2751992 - RNA, 22 nt, Human respiratory syncytial virus
acagaaguugggaggagaagcu

SEQ ID NO: 2751993 - RNA, 18 nt, Human respiratory syncytial virus
aauaagucaacauggaga

SEQ ID NO: 2751994 - RNA, 19 nt, Human respiratory syncytial virus
aaaauccaccaaaaaaacc

SEQ ID NO: 2751995 - RNA, 18 nt, Human respiratory syncytial virus
aaauacggggcaaauaag

SEQ ID NO: 2751996 - RNA, 16 nt, Human respiratory syncytial virus
ugauacaugugcauuu

SEQ ID NO: 2751997 - RNA, 17 nt, Human respiratory syncytial virus
caaacaucaugaacauc

SEQ ID NO: 2751998 - RNA, 11 nt, Human respiratory syncytial virus
aagaaaugaua

SEQ ID NO: 2751999 - RNA, 20 nt, Human respiratory syncytial virus
aacacacaauccaacagcaa

SEQ ID NO: 2752000 - RNA, 20 nt, Human respiratory syncytial virus
caguaccccagaaaccaaag

SEQ ID NO: 2752001 - RNA, 15 nt, Human respiratory syncytial virus
aaacaauaaaaaacc

SEQ ID NO: 2752002 - RNA, 17 nt, Human respiratory syncytial virus
acaucucucaccaaaga

SEQ ID NO: 2752003 - RNA, 22 nt, Human respiratory syncytial virus
caguucaaacaauaaaaaacca

SEQ ID NO: 2752004 - RNA, 14 nt, Human respiratory syncytial virus
aaguguuugaaaaa

SEQ ID NO: 2752005 - RNA, 16 nt, Human respiratory syncytial virus
ucaacauggagaaguu

SEQ ID NO: 2752006 - RNA, 13 nt, Human respiratory syncytial virus
agaugcaaaucau

SEQ ID NO: 2752007 - RNA, 20 nt, Human respiratory syncytial virus
aacacacccaacuccacaca

SEQ ID NO: 2752008 - RNA, 13 nt, Human respiratory syncytial virus
uccuaagaagaaa

SEQ ID NO: 2752009 - RNA, 22 nt, Human respiratory syncytial virus
gaugaagcuacugcacaaagua

SEQ ID NO: 2752010 - RNA, 13 nt, Human respiratory syncytial virus
uuucauggagaag

SEQ ID NO: 2752011 - RNA, 20 nt, Human respiratory syncytial virus
auauaaaaacucaucaaagg

SEQ ID NO: 2752012 - RNA, 20 nt, Human respiratory syncytial virus
aauacacugaauauaauaca

SEQ ID NO: 2752013 - RNA, 13 nt, Human respiratory syncytial virus
ugauucuccagac

SEQ ID NO: 2752014 - RNA, 13 nt, Human respiratory syncytial virus
aauucaaaaaugc

SEQ ID NO: 2752015 - RNA, 15 nt, Human respiratory syncytial virus
agugucaaaaacaag

SEQ ID NO: 2752016 - RNA, 16 nt, Human respiratory syncytial virus
aucuuaaaaaacuaac

SEQ ID NO: 2752017 - RNA, 20 nt, Human respiratory syncytial virus
gagacccaaaaacaccagcc

SEQ ID NO: 2752018 - RNA, 22 nt, Human respiratory syncytial virus
aagaaugcagugacagaauuac

SEQ ID NO: 2752019 - RNA, 20 nt, Human respiratory syncytial virus
caguuacugacaauaaagga

SEQ ID NO: 2752020 - RNA, 14 nt, Human respiratory syncytial virus
gcaaaaacaccuaa

SEQ ID NO: 2752021 - RNA, 15 nt, Human respiratory syncytial virus
ccaacccaacaaaaa

SEQ ID NO: 2752022 - RNA, 14 nt, Human respiratory syncytial virus
caaccuacaaccac

SEQ ID NO: 2752023 - RNA, 19 nt, Human respiratory syncytial virus
auaaauuggggcaaauaca

SEQ ID NO: 2752024 - RNA, 20 nt, Human respiratory syncytial virus
cagcaaucaacaacaucaau

SEQ ID NO: 2752025 - RNA, 16 nt, Human respiratory syncytial virus
gugucgcaaaaccacg

SEQ ID NO: 2752026 - RNA, 13 nt, Human respiratory syncytial virus
caaauacaaagau

SEQ ID NO: 2752027 - RNA, 22 nt, Human respiratory syncytial virus
aagaaaugauagaaaaaauaag

SEQ ID NO: 2752028 - RNA, 9 nt, Human respiratory syncytial virus
ccacaaaca

SEQ ID NO: 2752029 - RNA, 20 nt, Human respiratory syncytial virus
auaaaacauucuguaacaau

SEQ ID NO: 2752030 - RNA, 15 nt, Human respiratory syncytial virus
augacugcaaaauua

SEQ ID NO: 2752031 - RNA, 15 nt, Human respiratory syncytial virus
acaauagaauucaca

SEQ ID NO: 2752032 - RNA, 18 nt, Human respiratory syncytial virus
uaugcaaagauuaaugau

SEQ ID NO: 2752033 - RNA, 21 nt, Human respiratory syncytial virus
uguuaacuacagucaaagauc

SEQ ID NO: 2752034 - RNA, 16 nt, Human respiratory syncytial virus
caccaauccacacaaa

SEQ ID NO: 2752035 - RNA, 22 nt, Human respiratory syncytial virus
aacaaugauacaugugcauuua

SEQ ID NO: 2752036 - RNA, 17 nt, Human respiratory syncytial virus
cacaacagcacaaacca

SEQ ID NO: 2752037 - RNA, 15 nt, Human respiratory syncytial virus
acuacuaugcaaaga

SEQ ID NO: 2752038 - RNA, 19 nt, Human respiratory syncytial virus
aagaugcuggauaucaugu

SEQ ID NO: 2752039 - RNA, 22 nt, Human respiratory syncytial virus
ucaugcuaguguccaggcagaa

SEQ ID NO: 2752040 - RNA, 22 nt, Human respiratory syncytial virus
uaagaaaacuugaugaaagaca

SEQ ID NO: 2752041 - RNA, 17 nt, Human respiratory syncytial virus
gacccaaaaacaccagc

SEQ ID NO: 2752042 - RNA, 16 nt, Human respiratory syncytial virus
ccaacaaaaaaaccaa

SEQ ID NO: 2752043 - RNA, 14 nt, Human respiratory syncytial virus
acucaaaauccaaa

SEQ ID NO: 2752044 - RNA, 18 nt, Human respiratory syncytial virus
uagggaguaccaaauaca

SEQ ID NO: 2752045 - RNA, 20 nt, Human respiratory syncytial virus
aaagaacuugcaagcaucaa

SEQ ID NO: 2752046 - RNA, 15 nt, Human respiratory syncytial virus
cuauuuuacacuaau

SEQ ID NO: 2752047 - RNA, 11 nt, Human respiratory syncytial virus
cagcacaaacc

SEQ ID NO: 2752048 - RNA, 14 nt, Human respiratory syncytial virus
uugcucauaaaaga

SEQ ID NO: 2752049 - RNA, 13 nt, Human respiratory syncytial virus
ugagcacuacaaa

SEQ ID NO: 2752050 - RNA, 13 nt, Human respiratory syncytial virus
accucucucauaa

SEQ ID NO: 2752051 - RNA, 15 nt, Human respiratory syncytial virus
aaauacauccaucac

SEQ ID NO: 2752052 - RNA, 17 nt, Human respiratory syncytial virus
augaugcagccaaagca

SEQ ID NO: 2752053 - RNA, 22 nt, Human respiratory syncytial virus
aacuacacacuauauccaaaca

SEQ ID NO: 2752054 - RNA, 14 nt, Human respiratory syncytial virus
caacauaacaaaac

SEQ ID NO: 2752055 - RNA, 12 nt, Human respiratory syncytial virus
aucauuaacaag

SEQ ID NO: 2752056 - RNA, 13 nt, Human respiratory syncytial virus
auuaugacaucaa

SEQ ID NO: 2752057 - RNA, 17 nt, Human respiratory syncytial virus
uaaauuggggcaaauac

SEQ ID NO: 2752058 - RNA, 18 nt, Human respiratory syncytial virus
aaaucaauaugguuguau

SEQ ID NO: 2752059 - RNA, 15 nt, Human respiratory syncytial virus
ucauccaaagauccu

SEQ ID NO: 2752060 - RNA, 15 nt, Human respiratory syncytial virus
acaauaaaaaaccac

SEQ ID NO: 2752061 - RNA, 15 nt, Human respiratory syncytial virus
caaaucuguaaaaaa

SEQ ID NO: 2752062 - RNA, 13 nt, Human respiratory syncytial virus
uuacaacacaacg

SEQ ID NO: 2752063 - RNA, 23 nt, Human respiratory syncytial virus
acuauaaaucuuaaaaugggaaa

SEQ ID NO: 2752064 - RNA, 21 nt, Human respiratory syncytial virus
acagcagaagaauuggaagcc

SEQ ID NO: 2752065 - RNA, 19 nt, Human respiratory syncytial virus
gcaaacaaugucuuaaaaa

SEQ ID NO: 2752066 - RNA, 17 nt, Human respiratory syncytial virus
acccaaaaacaccagcc

SEQ ID NO: 2752067 - RNA, 15 nt, Human respiratory syncytial virus
uagggaguaccaaau

SEQ ID NO: 2752068 - RNA, 13 nt, Human respiratory syncytial virus
aaugaagaagaau

SEQ ID NO: 2752069 - RNA, 18 nt, Human respiratory syncytial virus
aaugucuuaaaaaaugaa

SEQ ID NO: 2752070 - RNA, 16 nt, Human respiratory syncytial virus
acuauaaagauacuua

SEQ ID NO: 2752071 - RNA, 16 nt, Human respiratory syncytial virus
acuguguauagcagca

SEQ ID NO: 2752072 - RNA, 16 nt, Human respiratory syncytial virus
ccaccaaaaccacaaa

SEQ ID NO: 2752073 - RNA, 22 nt, Human respiratory syncytial virus
aucaacauacuagugaagcaga

SEQ ID NO: 2752074 - RNA, 16 nt, Human respiratory syncytial virus
aaucucaacaaccauu

SEQ ID NO: 2752075 - RNA, 17 nt, Human respiratory syncytial virus
cugaauauaauacaaaa

SEQ ID NO: 2752076 - RNA, 22 nt, Human respiratory syncytial virus
gaaaauccuacaaaaaaaugcu

SEQ ID NO: 2752077 - RNA, 21 nt, Human respiratory syncytial virus
agugucauaacaauagaauua

SEQ ID NO: 2752078 - RNA, 13 nt, Human respiratory syncytial virus
caucacacaaacc

SEQ ID NO: 2752079 - RNA, 14 nt, Human respiratory syncytial virus
gaccgaacaaacaa

SEQ ID NO: 2752080 - RNA, 21 nt, Human respiratory syncytial virus
gaugcagccaaagcauaugca

SEQ ID NO: 2752081 - RNA, 13 nt, Human respiratory syncytial virus
auauacaaaauua

SEQ ID NO: 2752082 - RNA, 13 nt, Human respiratory syncytial virus
uaaccaauuauua

SEQ ID NO: 2752083 - RNA, 14 nt, Human respiratory syncytial virus
gucauuaacucaau

SEQ ID NO: 2752084 - RNA, 19 nt, Human respiratory syncytial virus
acagaaguugggaggagaa

SEQ ID NO: 2752085 - RNA, 15 nt, Human respiratory syncytial virus
cugaacucacuagaa

SEQ ID NO: 2752086 - RNA, 18 nt, Human respiratory syncytial virus
ucagggcaaguaaugcua

SEQ ID NO: 2752087 - RNA, 14 nt, Human respiratory syncytial virus
ucaaaucaacacau

SEQ ID NO: 2752088 - RNA, 13 nt, Human respiratory syncytial virus
auucacaagcaaa

SEQ ID NO: 2752089 - RNA, 17 nt, Human respiratory syncytial virus
caccaauccacacaaau

SEQ ID NO: 2752090 - RNA, 23 nt, Human respiratory syncytial virus
caggauuguuuaugaaugccuau

SEQ ID NO: 2752091 - RNA, 18 nt, Human respiratory syncytial virus
cuugugaaaucaaagcau

SEQ ID NO: 2752092 - RNA, 16 nt, Human respiratory syncytial virus
auaguaaggcaacaaa

SEQ ID NO: 2752093 - RNA, 17 nt, Human respiratory syncytial virus
aagugugguccuaggca

SEQ ID NO: 2752094 - RNA, 14 nt, Human respiratory syncytial virus
agcaggucuaggca

SEQ ID NO: 2752095 - RNA, 16 nt, Human respiratory syncytial virus
acaagaaauacacuga

SEQ ID NO: 2752096 - RNA, 15 nt, Human respiratory syncytial virus
auaccaagcaacaaa

SEQ ID NO: 2752097 - RNA, 15 nt, Human respiratory syncytial virus
cuauauccaaacauc

SEQ ID NO: 2752098 - RNA, 16 nt, Human respiratory syncytial virus
acucaucaaagggaaa

SEQ ID NO: 2752099 - RNA, 18 nt, Human respiratory syncytial virus
ugguccuaggcaaugcag

SEQ ID NO: 2752100 - RNA, 16 nt, Human respiratory syncytial virus
caacacuacuaugcaa

SEQ ID NO: 2752101 - RNA, 15 nt, Human respiratory syncytial virus
aaacuugaugaaaga

SEQ ID NO: 2752102 - RNA, 15 nt, Human respiratory syncytial virus
aggcauaaugggaga

SEQ ID NO: 2752103 - RNA, 17 nt, Human respiratory syncytial virus
gaauauaauacaaaaua

SEQ ID NO: 2752104 - RNA, 23 nt, Human respiratory syncytial virus
cuaggucaugcuaguguccaggc

SEQ ID NO: 2752105 - RNA, 15 nt, Human respiratory syncytial virus
cagcaagacuagaua

SEQ ID NO: 2752106 - RNA, 14 nt, Human respiratory syncytial virus
aagccuacaaaaca

SEQ ID NO: 2752107 - RNA, 17 nt, Human respiratory syncytial virus
uaguaagcuucaaagaa

SEQ ID NO: 2752108 - RNA, 15 nt, Human respiratory syncytial virus
acgaaauuaacaaua

SEQ ID NO: 2752109 - RNA, 15 nt, Human respiratory syncytial virus
guaccaaauacaaga

SEQ ID NO: 2752110 - RNA, 18 nt, Human respiratory syncytial virus
caagcuauuccucaaaca

SEQ ID NO: 2752111 - RNA, 13 nt, Human respiratory syncytial virus
aucuauagcacaa

SEQ ID NO: 2752112 - RNA, 20 nt, Human respiratory syncytial virus
ugucauccagcaaauacacu

SEQ ID NO: 2752113 - RNA, 21 nt, Human respiratory syncytial virus
acagauuaaauuuaaaaucua

SEQ ID NO: 2752114 - RNA, 23 nt, Human respiratory syncytial virus
aauaagucaacauggagaaguuu

SEQ ID NO: 2752115 - RNA, 10 nt, Human respiratory syncytial virus
aaaacacacc

SEQ ID NO: 2752116 - RNA, 14 nt, Human respiratory syncytial virus
caaaaacaccagcc

SEQ ID NO: 2752117 - RNA, 17 nt, Human respiratory syncytial virus
aacuugaugaaagacaa

SEQ ID NO: 2752118 - RNA, 23 nt, Human respiratory syncytial virus
ugacaauaaaggagcauucaaau

SEQ ID NO: 2752119 - RNA, 11 nt, Human respiratory syncytial virus
auacaaagaug

SEQ ID NO: 2752120 - RNA, 11 nt, Human respiratory syncytial virus
caguaaaucaa

SEQ ID NO: 2752121 - RNA, 20 nt, Human respiratory syncytial virus
uagaaacauuugauaacaau

SEQ ID NO: 2752122 - RNA, 18 nt, Human respiratory syncytial virus
caaucaaucauauacaaa

SEQ ID NO: 2752123 - RNA, 13 nt, Human respiratory syncytial virus
uguucuagaaaaa

SEQ ID NO: 2752124 - RNA, 19 nt, Human respiratory syncytial virus
ucaauaucucaagucaaug

SEQ ID NO: 2752125 - RNA, 17 nt, Human respiratory syncytial virus
uaucauugaucaaugau

SEQ ID NO: 2752126 - RNA, 16 nt, Human respiratory syncytial virus
gucuuaaaaaaugaaa

SEQ ID NO: 2752127 - RNA, 21 nt, Human respiratory syncytial virus
auaaaugaucaaacaaaugac

SEQ ID NO: 2752128 - RNA, 15 nt, Human respiratory syncytial virus
uagaugaaagaagca

SEQ ID NO: 2752129 - RNA, 19 nt, Human respiratory syncytial virus
ucagggcaaguaaugcuaa

SEQ ID NO: 2752130 - RNA, 12 nt, Human respiratory syncytial virus
uucaacaucaca

SEQ ID NO: 2752131 - RNA, 23 nt, Human respiratory syncytial virus
agaugauguagagcuuuaaguua

SEQ ID NO: 2752132 - RNA, 17 nt, Human respiratory syncytial virus
gacuugcucauaaaaga

SEQ ID NO: 2752133 - RNA, 15 nt, Human respiratory syncytial virus
cgaacaaacaaaugu

SEQ ID NO: 2752134 - RNA, 17 nt, Human respiratory syncytial virus
uuaguuuuugacacuuu

SEQ ID NO: 2752135 - RNA, 18 nt, Human respiratory syncytial virus
aggaucuuuaugaugcag

SEQ ID NO: 2752136 - RNA, 14 nt, Human respiratory syncytial virus
uacugaaauuauuu

SEQ ID NO: 2752137 - RNA, 15 nt, Human respiratory syncytial virus
agagacccaaaaaca

SEQ ID NO: 2752138 - RNA, 13 nt, Human respiratory syncytial virus
auccuacaaaaaa

SEQ ID NO: 2752139 - RNA, 22 nt, Human respiratory syncytial virus
augauaauacuguguauagcag

SEQ ID NO: 2752140 - RNA, 16 nt, Human respiratory syncytial virus
caauagaaaaaacaac

SEQ ID NO: 2752141 - RNA, 18 nt, Human respiratory syncytial virus
agcaaucaacaacaucaa

SEQ ID NO: 2752142 - RNA, 23 nt, Human respiratory syncytial virus
caaucaaccaacugauccaucag

SEQ ID NO: 2752143 - RNA, 12 nt, Human respiratory syncytial virus
acaauagaauuc

SEQ ID NO: 2752144 - RNA, 13 nt, Human respiratory syncytial virus
aauaaaagcuuag

SEQ ID NO: 2752145 - RNA, 22 nt, Human respiratory syncytial virus
aacucaccuaaucaaucaaacu

SEQ ID NO: 2752146 - RNA, 15 nt, Human respiratory syncytial virus
uaacuacaauuauua

SEQ ID NO: 2752147 - RNA, 23 nt, Human respiratory syncytial virus
acucaccuaaucaaucaaacuau

SEQ ID NO: 2752148 - RNA, 19 nt, Human respiratory syncytial virus
ugaacaucuacacuacaca

SEQ ID NO: 2752149 - RNA, 20 nt, Human respiratory syncytial virus
caaauagacaaaaaaccacc

SEQ ID NO: 2752150 - RNA, 21 nt, Human respiratory syncytial virus
caagccgagcacaaaaccacg

SEQ ID NO: 2752151 - RNA, 21 nt, Human respiratory syncytial virus
ucaacaacaucaauaaaacag

SEQ ID NO: 2752152 - RNA, 16 nt, Human respiratory syncytial virus
cuuuaaguuaacaaaa

SEQ ID NO: 2752153 - RNA, 17 nt, Human respiratory syncytial virus
gcuacucauaugaagag

SEQ ID NO: 2752154 - RNA, 19 nt, Human respiratory syncytial virus
caaacacuucaacaucaca

SEQ ID NO: 2752155 - RNA, 15 nt, Human respiratory syncytial virus
uaaucauuguaguau

SEQ ID NO: 2752156 - RNA, 15 nt, Human respiratory syncytial virus
gccucuuaauccaac

SEQ ID NO: 2752157 - RNA, 22 nt, Human respiratory syncytial virus
aaaacaccuaaacaaacuaugu

SEQ ID NO: 2752158 - RNA, 15 nt, Human respiratory syncytial virus
augugcaaaaacacc

SEQ ID NO: 2752159 - RNA, 24 nt, Human respiratory syncytial virus
ugaacaucuacacuacacacuuca

SEQ ID NO: 2752160 - RNA, 20 nt, Human respiratory syncytial virus
ccuguauauauaaacaaaca

SEQ ID NO: 2752161 - RNA, 15 nt, Human respiratory syncytial virus
gauacucucaaucau

SEQ ID NO: 2752162 - RNA, 11 nt, Human respiratory syncytial virus
uaguaaaucaa

SEQ ID NO: 2752163 - RNA, 17 nt, Human respiratory syncytial virus
ugcagcaggucuaggca

SEQ ID NO: 2752164 - RNA, 15 nt, Human respiratory syncytial virus
gaaaaagaugaugau

SEQ ID NO: 2752165 - RNA, 23 nt, Human respiratory syncytial virus
cucuaccaucaugcugugucaaa

SEQ ID NO: 2752166 - RNA, 17 nt, Human respiratory syncytial virus
augcacagaaguuggga

SEQ ID NO: 2752167 - RNA, 22 nt, Human respiratory syncytial virus
aauuuaaaaucuauagcacaaa

SEQ ID NO: 2752168 - RNA, 13 nt, Human respiratory syncytial virus
uauaaacaaacaa

SEQ ID NO: 2752169 - RNA, 12 nt, Human respiratory syncytial virus
ucaaaacaacac

SEQ ID NO: 2752170 - RNA, 20 nt, Human respiratory syncytial virus
guagagcuuuaaguuaacaa

SEQ ID NO: 2752171 - RNA, 15 nt, Human respiratory syncytial virus
gaaaugauagaaaaa

SEQ ID NO: 2752172 - RNA, 20 nt, Human respiratory syncytial virus
acacaaauucauauacuuga

SEQ ID NO: 2752173 - RNA, 21 nt, Human respiratory syncytial virus
aaccugacgaaauuaacaaua

SEQ ID NO: 2752174 - RNA, 14 nt, Human respiratory syncytial virus
guaacaaaaaaaga

SEQ ID NO: 2752175 - RNA, 18 nt, Human respiratory syncytial virus
ccuaggcaaugcagcagg

SEQ ID NO: 2752176 - RNA, 23 nt, Human respiratory syncytial virus
cuaacaaugauacaugugcauuu

SEQ ID NO: 2752177 - RNA, 21 nt, Human respiratory syncytial virus
auaaaacauucuguaacaaua

SEQ ID NO: 2752178 - RNA, 13 nt, Human respiratory syncytial virus
accaaucaaucaa

SEQ ID NO: 2752179 - RNA, 17 nt, Human respiratory syncytial virus
ucaaagaaaauggagua

SEQ ID NO: 2752180 - RNA, 20 nt, Human respiratory syncytial virus
aacaucuacacuacacacuu

SEQ ID NO: 2752181 - RNA, 18 nt, Human respiratory syncytial virus
acaucaccaauccacaca

SEQ ID NO: 2752182 - RNA, 16 nt, Human respiratory syncytial virus
augaagcuacugcaca

SEQ ID NO: 2752183 - RNA, 19 nt, Human respiratory syncytial virus
cauccagcaaauacacuau

SEQ ID NO: 2752184 - RNA, 20 nt, Human respiratory syncytial virus
uuggucaaauuuagaugcua

SEQ ID NO: 2752185 - RNA, 19 nt, Human respiratory syncytial virus
caaucaaacacuaaaucaa

SEQ ID NO: 2752186 - RNA, 16 nt, Human respiratory syncytial virus
auggagcaaguugugg

SEQ ID NO: 2752187 - RNA, 15 nt, Human respiratory syncytial virus
uggauucuaccauau

SEQ ID NO: 2752188 - RNA, 15 nt, Human respiratory syncytial virus
ccaccaacccaacaa

SEQ ID NO: 2752189 - RNA, 15 nt, Human respiratory syncytial virus
aaaacucaguacuua

SEQ ID NO: 2752190 - RNA, 16 nt, Human respiratory syncytial virus
cacuaccagccacuau

SEQ ID NO: 2752191 - RNA, 13 nt, Human respiratory syncytial virus
caaccacaucacc

SEQ ID NO: 2752192 - RNA, 17 nt, Human respiratory syncytial virus
aguacuuacaacuauaa

SEQ ID NO: 2752193 - RNA, 14 nt, Human respiratory syncytial virus
caaaaaugcuauca

SEQ ID NO: 2752194 - RNA, 17 nt, Human respiratory syncytial virus
aaauccaccaaaaaaac

SEQ ID NO: 2752195 - RNA, 15 nt, Human respiratory syncytial virus
agacaauaaaaaaca

SEQ ID NO: 2752196 - RNA, 18 nt, Human respiratory syncytial virus
auugguuugcuguuguau

SEQ ID NO: 2752197 - RNA, 20 nt, Human respiratory syncytial virus
cucaagugugguccuaggca

SEQ ID NO: 2752198 - RNA, 17 nt, Human respiratory syncytial virus
aagaugcaaauaacaaa

SEQ ID NO: 2752199 - RNA, 18 nt, Human respiratory syncytial virus
cuuuaaguuaacaaaaaa

SEQ ID NO: 2752200 - RNA, 14 nt, Human respiratory syncytial virus
uauaaaaacucauc

SEQ ID NO: 2752201 - RNA, 16 nt, Human respiratory syncytial virus
aucauaaauucacagg

SEQ ID NO: 2752202 - RNA, 22 nt, Human respiratory syncytial virus
guucaguacaauguucuagaaa

SEQ ID NO: 2752203 - RNA, 12 nt, Human respiratory syncytial virus
aacuaccaccaa

SEQ ID NO: 2752204 - RNA, 21 nt, Human respiratory syncytial virus
ucaaccaacugauccaucagc

SEQ ID NO: 2752205 - RNA, 15 nt, Human respiratory syncytial virus
uggaagacaacgaua

SEQ ID NO: 2752206 - RNA, 16 nt, Human respiratory syncytial virus
acuugauaaacaauga

SEQ ID NO: 2752207 - RNA, 22 nt, Human respiratory syncytial virus
gcaaauaagucaacauggagaa

SEQ ID NO: 2752208 - RNA, 14 nt, Human respiratory syncytial virus
aaaacuaacuauaa

SEQ ID NO: 2752209 - RNA, 15 nt, Human respiratory syncytial virus
cuagaaucaauaaag

SEQ ID NO: 2752210 - RNA, 21 nt, Human respiratory syncytial virus
uauuccucaaacaacaaugcu

SEQ ID NO: 2752211 - RNA, 21 nt, Human respiratory syncytial virus
aagucuaugaguaugcacaga

SEQ ID NO: 2752212 - RNA, 13 nt, Human respiratory syncytial virus
ccuaucaagcaag

SEQ ID NO: 2752213 - RNA, 14 nt, Human respiratory syncytial virus
aaagaaucaacuca

SEQ ID NO: 2752214 - RNA, 17 nt, Human respiratory syncytial virus
caacguaguacaggaga

SEQ ID NO: 2752215 - RNA, 18 nt, Human respiratory syncytial virus
acagaaguugggaggaga

SEQ ID NO: 2752216 - RNA, 23 nt, Human respiratory syncytial virus
cuaggacagaugcaucaaaucaa

SEQ ID NO: 2752217 - RNA, 22 nt, Human respiratory syncytial virus
auaacaucucucaccaaagaaa

SEQ ID NO: 2752218 - RNA, 15 nt, Human respiratory syncytial virus
ucaaguuaaaugaua

SEQ ID NO: 2752219 - RNA, 15 nt, Human respiratory syncytial virus
uaugagcacuacaaa

SEQ ID NO: 2752220 - RNA, 15 nt, Human respiratory syncytial virus
aauuaugaugugcaa

SEQ ID NO: 2752221 - RNA, 17 nt, Human respiratory syncytial virus
caaccaccaaaaccaca

SEQ ID NO: 2752222 - RNA, 18 nt, Human respiratory syncytial virus
cacugcauccaacaaaaa

SEQ ID NO: 2752223 - RNA, 20 nt, Human respiratory syncytial virus
uguauuagacuuaacagcag

SEQ ID NO: 2752224 - RNA, 13 nt, Human respiratory syncytial virus
ucgacacaaccac

SEQ ID NO: 2752225 - RNA, 14 nt, Human respiratory syncytial virus
uaaaaaauaugcaa

SEQ ID NO: 2752226 - RNA, 21 nt, Human respiratory syncytial virus
agcaaauagacaaaaaaccac

SEQ ID NO: 2752227 - RNA, 19 nt, Human respiratory syncytial virus
ccaaagaagaaaccaacca

SEQ ID NO: 2752228 - RNA, 12 nt, Human respiratory syncytial virus
gagcaacucaaa

SEQ ID NO: 2752229 - RNA, 21 nt, Human respiratory syncytial virus
aucaucucugccaaucacaaa

SEQ ID NO: 2752230 - RNA, 15 nt, Human respiratory syncytial virus
acuaauacauaugau

SEQ ID NO: 2752231 - RNA, 16 nt, Human respiratory syncytial virus
aacacugacauauuca

SEQ ID NO: 2752232 - RNA, 22 nt, Human respiratory syncytial virus
ccaaagccaacuacccaagaaa

SEQ ID NO: 2752233 - RNA, 21 nt, Human respiratory syncytial virus
cuaagugaacauaaaacauuc

SEQ ID NO: 2752234 - RNA, 20 nt, Human respiratory syncytial virus
cauuaagccuacaaaacaca

SEQ ID NO: 2752235 - RNA, 22 nt, Human respiratory syncytial virus
aaccaggaucuuuaugaugcag

SEQ ID NO: 2752236 - RNA, 13 nt, Human respiratory syncytial virus
aaguaaccaaaga

SEQ ID NO: 2752237 - RNA, 16 nt, Human respiratory syncytial virus
agcaauagaaaaaaca

SEQ ID NO: 2752238 - RNA, 14 nt, Human respiratory syncytial virus
caggacucuagaaa

SEQ ID NO: 2752239 - RNA, 18 nt, Human respiratory syncytial virus
uuacacuaauacauauga

SEQ ID NO: 2752240 - RNA, 18 nt, Human respiratory syncytial virus
ugauaacuacaauuauua

SEQ ID NO: 2752241 - RNA, 20 nt, Human respiratory syncytial virus
cacagaaguugggaggagaa

SEQ ID NO: 2752242 - RNA, 17 nt, Human respiratory syncytial virus
aagaugcuggauaucau

SEQ ID NO: 2752243 - RNA, 23 nt, Human respiratory syncytial virus
caaauucagccacaacaucaccc

SEQ ID NO: 2752244 - RNA, 14 nt, Human respiratory syncytial virus
uuaaucacugaaga

SEQ ID NO: 2752245 - RNA, 21 nt, Human respiratory syncytial virus
ugccagaccgaacaaacaaau

SEQ ID NO: 2752246 - RNA, 13 nt, Human respiratory syncytial virus
auaucauguuaaa

SEQ ID NO: 2752247 - RNA, 15 nt, Human respiratory syncytial virus
caaaugacaacacua

SEQ ID NO: 2752248 - RNA, 17 nt, Human respiratory syncytial virus
auggaacugacacuaaa

SEQ ID NO: 2752249 - RNA, 19 nt, Human respiratory syncytial virus
caaaucuacuacaaauauu

SEQ ID NO: 2752250 - RNA, 14 nt, Human respiratory syncytial virus
ucaucacacaaacc

SEQ ID NO: 2752251 - RNA, 14 nt, Human respiratory syncytial virus
aauuacuacauaau

SEQ ID NO: 2752252 - RNA, 15 nt, Human respiratory syncytial virus
uuaaguuaacaaaaa

SEQ ID NO: 2752253 - RNA, 19 nt, Human respiratory syncytial virus
caaaaaaaugcuaaaagag

SEQ ID NO: 2752254 - RNA, 23 nt, Human respiratory syncytial virus
gcugaucaccaaucccaaaucaa

SEQ ID NO: 2752255 - RNA, 14 nt, Human respiratory syncytial virus
accaaaaaaaccaa

SEQ ID NO: 2752256 - RNA, 24 nt, Human respiratory syncytial virus
aauaaccaaauuagcagcaggaga

SEQ ID NO: 2752257 - RNA, 15 nt, Human respiratory syncytial virus
caaaguuacacuaac

SEQ ID NO: 2752258 - RNA, 23 nt, Human respiratory syncytial virus
uugacacucccaauuaugaugug

SEQ ID NO: 2752259 - RNA, 17 nt, Human respiratory syncytial virus
gaucagaaaaaauuaau

SEQ ID NO: 2752260 - RNA, 16 nt, Human respiratory syncytial virus
ucaaacccacaaacaa

SEQ ID NO: 2752261 - RNA, 20 nt, Human respiratory syncytial virus
cacucaaaauccaaaaucac

SEQ ID NO: 2752262 - RNA, 19 nt, Human respiratory syncytial virus
ccacacaacagcacaaacc

SEQ ID NO: 2752263 - RNA, 16 nt, Human respiratory syncytial virus
cuacauuuacauucuu

SEQ ID NO: 2752264 - RNA, 21 nt, Human respiratory syncytial virus
gauacauuaaauaaggaucag

SEQ ID NO: 2752265 - RNA, 19 nt, Human respiratory syncytial virus
uccaaacaaccuacaacca

SEQ ID NO: 2752266 - RNA, 16 nt, Human respiratory syncytial virus
uuacacuaauacauau

SEQ ID NO: 2752267 - RNA, 16 nt, Human respiratory syncytial virus
auccaaucuucucaca

SEQ ID NO: 2752268 - RNA, 13 nt, Human respiratory syncytial virus
ggcagaaauggag

SEQ ID NO: 2752269 - RNA, 21 nt, Human respiratory syncytial virus
cacaauagaauucacaagcaa

SEQ ID NO: 2752270 - RNA, 17 nt, Human respiratory syncytial virus
caaaauccaaaaucacu

SEQ ID NO: 2752271 - RNA, 14 nt, Human respiratory syncytial virus
aauacaaaauaugg

SEQ ID NO: 2752272 - RNA, 19 nt, Human respiratory syncytial virus
aaauaaaaguaaagccaau

SEQ ID NO: 2752273 - RNA, 21 nt, Human respiratory syncytial virus
caguaauuaggagggcaaaca

SEQ ID NO: 2752274 - RNA, 15 nt, Human respiratory syncytial virus
aucaauaaaacagac

SEQ ID NO: 2752275 - RNA, 22 nt, Human respiratory syncytial virus
accauuuauaccgccaauucaa

SEQ ID NO: 2752276 - RNA, 20 nt, Human respiratory syncytial virus
gcaaacaaugucuuaaaaaa

SEQ ID NO: 2752277 - RNA, 17 nt, Human respiratory syncytial virus
uggaauaagagaugcua

SEQ ID NO: 2752278 - RNA, 16 nt, Human respiratory syncytial virus
aacuaacaaugauaca

SEQ ID NO: 2752279 - RNA, 14 nt, Human respiratory syncytial virus
uauuccucaaacaa

SEQ ID NO: 2752280 - RNA, 18 nt, Human respiratory syncytial virus
auaaacucaccuaaucaa

SEQ ID NO: 2752281 - RNA, 16 nt, Human respiratory syncytial virus
uuaacauuaucaagcu

SEQ ID NO: 2752282 - RNA, 13 nt, Human respiratory syncytial virus
ucaaaaacaacau

SEQ ID NO: 2752283 - RNA, 17 nt, Human respiratory syncytial virus
aucucucaccaaagaaa

SEQ ID NO: 2752284 - RNA, 18 nt, Human respiratory syncytial virus
augcagcaggucuaggca

SEQ ID NO: 2752285 - RNA, 22 nt, Human respiratory syncytial virus
gcggaaccaccaaccaaucaau

SEQ ID NO: 2752286 - RNA, 23 nt, Human respiratory syncytial virus
cacauauauccucaaacuacaca

SEQ ID NO: 2752287 - RNA, 18 nt, Human respiratory syncytial virus
cuaguaagcuucaaagaa

SEQ ID NO: 2752288 - RNA, 19 nt, Human respiratory syncytial virus
augagcacuacaaaugaca

SEQ ID NO: 2752289 - RNA, 15 nt, Human respiratory syncytial virus
auauguggcaacaau

SEQ ID NO: 2752290 - RNA, 21 nt, Human respiratory syncytial virus
aucauaagcgcaaauguauca

SEQ ID NO: 2752291 - RNA, 16 nt, Human respiratory syncytial virus
guuagaguucaaucaa

SEQ ID NO: 2752292 - RNA, 20 nt, Human respiratory syncytial virus
uuuaaguuaacaaaaaauac

SEQ ID NO: 2752293 - RNA, 18 nt, Human respiratory syncytial virus
uggagaagaugcaaauaa

SEQ ID NO: 2752294 - RNA, 17 nt, Human respiratory syncytial virus
cauaaaagaacuugcaa

SEQ ID NO: 2752295 - RNA, 13 nt, Human respiratory syncytial virus
acaucaaaaagag

SEQ ID NO: 2752296 - RNA, 18 nt, Human respiratory syncytial virus
ucaacaacaucaauaaaa

SEQ ID NO: 2752297 - RNA, 21 nt, Human respiratory syncytial virus
uccagcaaauacacuauucaa

SEQ ID NO: 2752298 - RNA, 14 nt, Human respiratory syncytial virus
ccaagcaacaaacc

SEQ ID NO: 2752299 - RNA, 11 nt, Human respiratory syncytial virus
cauaacaaaca

SEQ ID NO: 2752300 - RNA, 16 nt, Human respiratory syncytial virus
cacugcauccaacaaa

SEQ ID NO: 2752301 - RNA, 18 nt, Human respiratory syncytial virus
auaucuguuaacucaaua

SEQ ID NO: 2752302 - RNA, 13 nt, Human respiratory syncytial virus
gaaagcaaucaau

SEQ ID NO: 2752303 - RNA, 13 nt, Human respiratory syncytial virus
ugcaagcaucaac

SEQ ID NO: 2752304 - RNA, 19 nt, Human respiratory syncytial virus
aggauuguuuaugaaugcc

SEQ ID NO: 2752305 - RNA, 22 nt, Human respiratory syncytial virus
cgccaagaaaccaggaucuuua

SEQ ID NO: 2752306 - RNA, 13 nt, Human respiratory syncytial virus
agaauuacauaaa

SEQ ID NO: 2752307 - RNA, 16 nt, Human respiratory syncytial virus
caaccauguccaaaca

SEQ ID NO: 2752308 - RNA, 18 nt, Human respiratory syncytial virus
gcugucauccagcaaaua

SEQ ID NO: 2752309 - RNA, 14 nt, Human respiratory syncytial virus
caaacccacaaaca

SEQ ID NO: 2752310 - RNA, 14 nt, Human respiratory syncytial virus
caucacacacaaau

SEQ ID NO: 2752311 - RNA, 16 nt, Human respiratory syncytial virus
ugcuaguguccaggca

SEQ ID NO: 2752312 - RNA, 20 nt, Human respiratory syncytial virus
uaauauaaaaacucaucaaa

SEQ ID NO: 2752313 - RNA, 17 nt, Human respiratory syncytial virus
uacauguuaacaaacag

SEQ ID NO: 2752314 - RNA, 15 nt, Human respiratory syncytial virus
aaagagaugggagaa

SEQ ID NO: 2752315 - RNA, 17 nt, Human respiratory syncytial virus
uagaguugaaggaaucu

SEQ ID NO: 2752316 - RNA, 12 nt, Human respiratory syncytial virus
ucuagaaaaucc

SEQ ID NO: 2752317 - RNA, 20 nt, Human respiratory syncytial virus
acuauaaagauacuuaaaga

SEQ ID NO: 2752318 - RNA, 18 nt, Human respiratory syncytial virus
ugaauaaaagucuaaaac

SEQ ID NO: 2752319 - RNA, 18 nt, Human respiratory syncytial virus
auguuugcuuaauuacuu

SEQ ID NO: 2752320 - RNA, 20 nt, Human respiratory syncytial virus
aguguccaggcagaaaugga

SEQ ID NO: 2752321 - RNA, 13 nt, Human respiratory syncytial virus
aaugaucaaacaa

SEQ ID NO: 2752322 - RNA, 18 nt, Human respiratory syncytial virus
caacaauaauucagguga

SEQ ID NO: 2752323 - RNA, 22 nt, Human respiratory syncytial virus
uuaguuaauauaaaaacucauc

SEQ ID NO: 2752324 - RNA, 16 nt, Human respiratory syncytial virus
aagaacuugcaagcau

SEQ ID NO: 2752325 - RNA, 16 nt, Human respiratory syncytial virus
aacaaaaaaagaacaa

SEQ ID NO: 2752326 - RNA, 16 nt, Human respiratory syncytial virus
cuaggcaaugcagcag

SEQ ID NO: 2752327 - RNA, 21 nt, Human respiratory syncytial virus
guacaauguucuagaaaaaga

SEQ ID NO: 2752328 - RNA, 18 nt, Human respiratory syncytial virus
uuaaucacugaagaugca

SEQ ID NO: 2752329 - RNA, 21 nt, Human respiratory syncytial virus
gacaagcuacauuuacauucu

SEQ ID NO: 2752330 - RNA, 18 nt, Human respiratory syncytial virus
acaugcuuaaaagugaaa

SEQ ID NO: 2752331 - RNA, 23 nt, Human respiratory syncytial virus
cacucaaccacccccgaaaacac

SEQ ID NO: 2752332 - RNA, 21 nt, Human respiratory syncytial virus
gcacugccaggacucuagaaa

SEQ ID NO: 2752333 - RNA, 21 nt, Human respiratory syncytial virus
auguccagguuaggaagggaa

SEQ ID NO: 2752334 - RNA, 21 nt, Human respiratory syncytial virus
caaagagagcccgauaacauc

SEQ ID NO: 2752335 - RNA, 17 nt, Human respiratory syncytial virus
agaauugaugaaaaauu

SEQ ID NO: 2752336 - RNA, 14 nt, Human respiratory syncytial virus
agauauaaauggaa

SEQ ID NO: 2752337 - RNA, 18 nt, Human respiratory syncytial virus
aaaucaacacaucauuca

SEQ ID NO: 2752338 - RNA, 14 nt, Human respiratory syncytial virus
caauaaaaaacaca

SEQ ID NO: 2752339 - RNA, 19 nt, Human respiratory syncytial virus
aagauggcucuuagcaaag

SEQ ID NO: 2752340 - RNA, 15 nt, Human respiratory syncytial virus
aaaucaaagcaugca

SEQ ID NO: 2752341 - RNA, 17 nt, Human respiratory syncytial virus
cauuggggcaaaugcaa

SEQ ID NO: 2752342 - RNA, 17 nt, Human respiratory syncytial virus
aagacacuauaaagaua

SEQ ID NO: 2752343 - RNA, 18 nt, Human respiratory syncytial virus
cucaaucaucuaauugua

SEQ ID NO: 2752344 - RNA, 17 nt, Human respiratory syncytial virus
aacauucuguaacaaua

SEQ ID NO: 2752345 - RNA, 21 nt, Human respiratory syncytial virus
aggaagaaguccuugcauaug

SEQ ID NO: 2752346 - RNA, 13 nt, Human respiratory syncytial virus
cuuaaaaaaugaa

SEQ ID NO: 2752347 - RNA, 15 nt, Human respiratory syncytial virus
auuaugauugcaaua

SEQ ID NO: 2752348 - RNA, 16 nt, Human respiratory syncytial virus
cuuguaauaaccaaau

SEQ ID NO: 2752349 - RNA, 22 nt, Human respiratory syncytial virus
aacacaagaaucaacgcacugc

SEQ ID NO: 2752350 - RNA, 13 nt, Human respiratory syncytial virus
uccacacaaacac

SEQ ID NO: 2752351 - RNA, 12 nt, Human respiratory syncytial virus
aaauaaggauca

SEQ ID NO: 2752352 - RNA, 18 nt, Human respiratory syncytial virus
agcuuuaaguuaacaaaa

SEQ ID NO: 2752353 - RNA, 14 nt, Human respiratory syncytial virus
gcagagcaacucaa

SEQ ID NO: 2752354 - RNA, 15 nt, Human respiratory syncytial virus
acuuccaaaaaauug

SEQ ID NO: 2752355 - RNA, 16 nt, Human respiratory syncytial virus
aaguaucacaaucaaa

SEQ ID NO: 2752356 - RNA, 17 nt, Human respiratory syncytial virus
gcaagaacgaaauuaaa

SEQ ID NO: 2752357 - RNA, 16 nt, Human respiratory syncytial virus
gaauucaaaaaugcua

SEQ ID NO: 2752358 - RNA, 20 nt, Human respiratory syncytial virus
caccaacccaacaaaaaaac

SEQ ID NO: 2752359 - RNA, 22 nt, Human respiratory syncytial virus
acaagggucucauaccaaagga

SEQ ID NO: 2752360 - RNA, 22 nt, Human respiratory syncytial virus
aaccacaucaccaauccacaca

SEQ ID NO: 2752361 - RNA, 14 nt, Human respiratory syncytial virus
aaugaucugucacu

SEQ ID NO: 2752362 - RNA, 15 nt, Human respiratory syncytial virus
aaacacaccacacaa

SEQ ID NO: 2752363 - RNA, 15 nt, Human respiratory syncytial virus
uaaugucaagcaaug

SEQ ID NO: 2752364 - RNA, 15 nt, Human respiratory syncytial virus
aacuuccaaaaaauu

SEQ ID NO: 2752365 - RNA, 15 nt, Human respiratory syncytial virus
cagguuaggaaggga

SEQ ID NO: 2752366 - RNA, 18 nt, Human respiratory syncytial virus
aguuaaaugauacauuaa

SEQ ID NO: 2752367 - RNA, 20 nt, Human respiratory syncytial virus
aauucaaaaaugcuaucacc

SEQ ID NO: 2752368 - RNA, 20 nt, Human respiratory syncytial virus
uaugcaaagauuaaugauca

SEQ ID NO: 2752369 - RNA, 15 nt, Human respiratory syncytial virus
gaagaaaugauagaa

SEQ ID NO: 2752370 - RNA, 13 nt, Human respiratory syncytial virus
gaucaaaaacaac

SEQ ID NO: 2752371 - RNA, 18 nt, Human respiratory syncytial virus
aguguccaggcagaaaug

SEQ ID NO: 2752372 - RNA, 20 nt, Human respiratory syncytial virus
auugcaaagccaaaaacaca

SEQ ID NO: 2752373 - RNA, 14 nt, Human respiratory syncytial virus
gcaaugauaaucuc

SEQ ID NO: 2752374 - RNA, 19 nt, Human respiratory syncytial virus
uggaagccauaaagaauca

SEQ ID NO: 2752375 - RNA, 15 nt, Human respiratory syncytial virus
caauaaaaaaccaca

SEQ ID NO: 2752376 - RNA, 14 nt, Human respiratory syncytial virus
cagacaucaaucca

SEQ ID NO: 2752377 - RNA, 18 nt, Human respiratory syncytial virus
accaaccaccaaaaccac

SEQ ID NO: 2752378 - RNA, 17 nt, Human respiratory syncytial virus
gagaaguggcuccagaa

SEQ ID NO: 2752379 - RNA, 18 nt, Human respiratory syncytial virus
gaaaucaucacacacaaa

SEQ ID NO: 2752380 - RNA, 12 nt, Human respiratory syncytial virus
caccagccaaaa

SEQ ID NO: 2752381 - RNA, 22 nt, Human respiratory syncytial virus
augcaaccauguccaaacacaa

SEQ ID NO: 2752382 - RNA, 22 nt, Human respiratory syncytial virus
auaguuauuaaaaaauaugcaa

SEQ ID NO: 2752383 - RNA, 16 nt, Human respiratory syncytial virus
gaauauaauacaaaau

SEQ ID NO: 2752384 - RNA, 21 nt, Human respiratory syncytial virus
cuuuaugaugcagccaaagca

SEQ ID NO: 2752385 - RNA, 15 nt, Human respiratory syncytial virus
gucaacauggagaag

SEQ ID NO: 2752386 - RNA, 12 nt, Human respiratory syncytial virus
guucuagaaaaa

SEQ ID NO: 2752387 - RNA, 23 nt, Human respiratory syncytial virus
uacacacuucaucacacaaacca

SEQ ID NO: 2752388 - RNA, 14 nt, Human respiratory syncytial virus
aauaaccaaauuag

SEQ ID NO: 2752389 - RNA, 23 nt, Human respiratory syncytial virus
aaaugcaaccauguccaaacaca

SEQ ID NO: 2752390 - RNA, 14 nt, Human respiratory syncytial virus
cuuagcaaagucaa

SEQ ID NO: 2752391 - RNA, 13 nt, Human respiratory syncytial virus
ucuagaaaaagau

SEQ ID NO: 2752392 - RNA, 12 nt, Human respiratory syncytial virus
cuauguccaggu

SEQ ID NO: 2752393 - RNA, 12 nt, Human respiratory syncytial virus
aacaaauccaau

SEQ ID NO: 2752394 - RNA, 15 nt, Human respiratory syncytial virus
ugcuaacacaucauu

SEQ ID NO: 2752395 - RNA, 18 nt, Human respiratory syncytial virus
auuaaucacugaagaugc

SEQ ID NO: 2752396 - RNA, 21 nt, Human respiratory syncytial virus
agccauaaagaaucaacucaa

SEQ ID NO: 2752397 - RNA, 14 nt, Human respiratory syncytial virus
cuaugcaccaccaa

SEQ ID NO: 2752398 - RNA, 13 nt, Human respiratory syncytial virus
gacacuauaaaga

SEQ ID NO: 2752399 - RNA, 22 nt, Human respiratory syncytial virus
auaaugaaggcuucuacauaau

SEQ ID NO: 2752400 - RNA, 18 nt, Human respiratory syncytial virus
acaaugaagaagaaucua

SEQ ID NO: 2752401 - RNA, 23 nt, Human respiratory syncytial virus
uaguacaggagauaauauugaca

SEQ ID NO: 2752402 - RNA, 16 nt, Human respiratory syncytial virus
acaucaccaauccaca

SEQ ID NO: 2752403 - RNA, 13 nt, Human respiratory syncytial virus
auaauacaaaaua

SEQ ID NO: 2752404 - RNA, 14 nt, Human respiratory syncytial virus
aacacaccagcugc

SEQ ID NO: 2752405 - RNA, 15 nt, Human respiratory syncytial virus
cuaugaguaugcaca

SEQ ID NO: 2752406 - RNA, 18 nt, Human respiratory syncytial virus
auucaauaauaacaucuc

SEQ ID NO: 2752407 - RNA, 13 nt, Human respiratory syncytial virus
aucauccaaagau

SEQ ID NO: 2752408 - RNA, 22 nt, Human respiratory syncytial virus
cuaaucucuuuacuaauuauaa

SEQ ID NO: 2752409 - RNA, 20 nt, Human respiratory syncytial virus
uaggaagggaagacacuaua

SEQ ID NO: 2752410 - RNA, 22 nt, Human respiratory syncytial virus
accaaucaaucaaccaacugau

SEQ ID NO: 2752411 - RNA, 20 nt, Human respiratory syncytial virus
augaguaugcacagaaguug

SEQ ID NO: 2752412 - RNA, 17 nt, Human respiratory syncytial virus
agcuauuccucaaacaa

SEQ ID NO: 2752413 - RNA, 21 nt, Human respiratory syncytial virus
aucucucaccaaagaaaucau

SEQ ID NO: 2752414 - RNA, 10 nt, Human respiratory syncytial virus
caaaaccaca

SEQ ID NO: 2752415 - RNA, 12 nt, Human respiratory syncytial virus
augucaagcaau

SEQ ID NO: 2752416 - RNA, 22 nt, Human respiratory syncytial virus
aacacacuccuauaauauacaa

SEQ ID NO: 2752417 - RNA, 14 nt, Human respiratory syncytial virus
aaaagagacccaaa

SEQ ID NO: 2752418 - RNA, 18 nt, Human respiratory syncytial virus
uaagucaacauggagaag

SEQ ID NO: 2752419 - RNA, 12 nt, Human respiratory syncytial virus
acacuacacacu

SEQ ID NO: 2752420 - RNA, 20 nt, Human respiratory syncytial virus
aacuugcaagcaucaacaua

SEQ ID NO: 2752421 - RNA, 14 nt, Human respiratory syncytial virus
gacaaaaaaccacc

SEQ ID NO: 2752422 - RNA, 20 nt, Human respiratory syncytial virus
gaauuucauggagaagaugc

SEQ ID NO: 2752423 - RNA, 23 nt, Human respiratory syncytial virus
aagaacaagauggggcaaauaug

SEQ ID NO: 2752424 - RNA, 20 nt, Human respiratory syncytial virus
caagaaucaacgcacugcca

SEQ ID NO: 2752425 - RNA, 17 nt, Human respiratory syncytial virus
agcauauauuaugugac

SEQ ID NO: 2752426 - RNA, 23 nt, Human respiratory syncytial virus
ccgucagcggaaccaccaaccaa

SEQ ID NO: 2752427 - RNA, 18 nt, Human respiratory syncytial virus
uucagccacaacaucacc

SEQ ID NO: 2752428 - RNA, 14 nt, Human respiratory syncytial virus
aauuaugaugugca

SEQ ID NO: 2752429 - RNA, 18 nt, Human respiratory syncytial virus
aagaugcaaauaacaaag

SEQ ID NO: 2752430 - RNA, 20 nt, Human respiratory syncytial virus
caaaaccacgccaacuauca

SEQ ID NO: 2752431 - RNA, 17 nt, Human respiratory syncytial virus
ugaauauaauacaaaau

SEQ ID NO: 2752432 - RNA, 14 nt, Human respiratory syncytial virus
gaagccauaaagaa

SEQ ID NO: 2752433 - RNA, 18 nt, Human respiratory syncytial virus
ugaguaugcacagaaguu

SEQ ID NO: 2752434 - RNA, 16 nt, Human respiratory syncytial virus
aguuauuuaaaaauua

SEQ ID NO: 2752435 - RNA, 14 nt, Human respiratory syncytial virus
auuucauggagaag

SEQ ID NO: 2752436 - RNA, 12 nt, Human respiratory syncytial virus
cacuacacacuu

SEQ ID NO: 2752437 - RNA, 12 nt, Human respiratory syncytial virus
aacacaccagcu

SEQ ID NO: 2752438 - RNA, 21 nt, Human respiratory syncytial virus
caaauaagucaacauggagaa

SEQ ID NO: 2752439 - RNA, 20 nt, Human respiratory syncytial virus
uuaacaauauaguaacaaaa

SEQ ID NO: 2752440 - RNA, 11 nt, Human respiratory syncytial virus
ccaaaccaaaa

SEQ ID NO: 2752441 - RNA, 16 nt, Human respiratory syncytial virus
gcgaauagguaaauaa

SEQ ID NO: 2752442 - RNA, 22 nt, Human respiratory syncytial virus
caaggaucugaacucacuagaa

SEQ ID NO: 2752443 - RNA, 18 nt, Human respiratory syncytial virus
uuacauguuaacaaacag

SEQ ID NO: 2752444 - RNA, 19 nt, Human respiratory syncytial virus
agaucaggucuuacagcag

SEQ ID NO: 2752445 - RNA, 12 nt, Human respiratory syncytial virus
aaucaaucucaa

SEQ ID NO: 2752446 - RNA, 13 nt, Human respiratory syncytial virus
gcauaaugggaga

SEQ ID NO: 2752447 - RNA, 14 nt, Human respiratory syncytial virus
agucauaauuacuu

SEQ ID NO: 2752448 - RNA, 22 nt, Human respiratory syncytial virus
cuuaacucauaguuacauaaaa

SEQ ID NO: 2752449 - RNA, 13 nt, Human respiratory syncytial virus
caaucaaaccacu

SEQ ID NO: 2752450 - RNA, 22 nt, Human respiratory syncytial virus
ucagcaaauagacaaaaaacca

SEQ ID NO: 2752451 - RNA, 17 nt, Human respiratory syncytial virus
uacaagaaauacacuga

SEQ ID NO: 2752452 - RNA, 18 nt, Human respiratory syncytial virus
cuagaggauuaaauuuaa

SEQ ID NO: 2752453 - RNA, 22 nt, Human respiratory syncytial virus
ggaucugaacucacuagaaaac

SEQ ID NO: 2752454 - RNA, 15 nt, Human respiratory syncytial virus
cuggcaaugauaauc

SEQ ID NO: 2752455 - RNA, 15 nt, Human respiratory syncytial virus
augggaucaaaaaca

SEQ ID NO: 2752456 - RNA, 21 nt, Human respiratory syncytial virus
aguaauuaggagggcaaacaa

SEQ ID NO: 2752457 - RNA, 13 nt, Human respiratory syncytial virus
agcagaagaacag

SEQ ID NO: 2752458 - RNA, 13 nt, Human respiratory syncytial virus
acaacaucaauaa

SEQ ID NO: 2752459 - RNA, 20 nt, Human respiratory syncytial virus
ucauggugucgcaaaaccac

SEQ ID NO: 2752460 - RNA, 16 nt, Human respiratory syncytial virus
augaucaaacaaauga

SEQ ID NO: 2752461 - RNA, 21 nt, Human respiratory syncytial virus
ccaaaccaagcuauuccucaa

SEQ ID NO: 2752462 - RNA, 22 nt, Human respiratory syncytial virus
augucuuaaaaaaugaaauaaa

SEQ ID NO: 2752463 - RNA, 13 nt, Human respiratory syncytial virus
acaucauucacaa

SEQ ID NO: 2752464 - RNA, 23 nt, Human respiratory syncytial virus
acugacaauaaaggagcauucaa

SEQ ID NO: 2752465 - RNA, 13 nt, Human respiratory syncytial virus
cuuacagcaguaa

SEQ ID NO: 2752466 - RNA, 18 nt, Human respiratory syncytial virus
ucuaaguuguacaaagaa

SEQ ID NO: 2752467 - RNA, 16 nt, Human respiratory syncytial virus
cucaaacuacacacua

SEQ ID NO: 2752468 - RNA, 21 nt, Human respiratory syncytial virus
gaucuuggugccuaccuagaa

SEQ ID NO: 2752469 - RNA, 19 nt, Human respiratory syncytial virus
guaucauuagaugaaagaa

SEQ ID NO: 2752470 - RNA, 15 nt, Human respiratory syncytial virus
auacaaaauauggca

SEQ ID NO: 2752471 - RNA, 14 nt, Human respiratory syncytial virus
aaauaaaaguaaag

SEQ ID NO: 2752472 - RNA, 21 nt, Human respiratory syncytial virus
auuaaucacugaagaugcaaa

SEQ ID NO: 2752473 - RNA, 22 nt, Human respiratory syncytial virus
caaauucagccacaacaucacc

SEQ ID NO: 2752474 - RNA, 23 nt, Human respiratory syncytial virus
auuaacaaguuuggucaaauuua

SEQ ID NO: 2752475 - RNA, 17 nt, Human respiratory syncytial virus
uauaaaagaaaccaaau

SEQ ID NO: 2752476 - RNA, 13 nt, Human respiratory syncytial virus
aagagaugggaga

SEQ ID NO: 2752477 - RNA, 15 nt, Human respiratory syncytial virus
aaggcuccacauaca

SEQ ID NO: 2752478 - RNA, 23 nt, Human respiratory syncytial virus
gcuauuaaucacugaagaugcaa

SEQ ID NO: 2752479 - RNA, 18 nt, Human respiratory syncytial virus
aauuaacauaaugaugaa

SEQ ID NO: 2752480 - RNA, 13 nt, Human respiratory syncytial virus
agaaguugggagg

SEQ ID NO: 2752481 - RNA, 24 nt, Human respiratory syncytial virus
aaaauaugggguaaauagacauua

SEQ ID NO: 2752482 - RNA, 16 nt, Human respiratory syncytial virus
gaugaaagacaagcua

SEQ ID NO: 2752483 - RNA, 22 nt, Human respiratory syncytial virus
aaauacggggcaaauaagucaa

SEQ ID NO: 2752484 - RNA, 13 nt, Human respiratory syncytial virus
uguauagcagcac

SEQ ID NO: 2752485 - RNA, 21 nt, Human respiratory syncytial virus
acaaucagcauguguugcuau

SEQ ID NO: 2752486 - RNA, 11 nt, Human respiratory syncytial virus
ucuacaaacaa

SEQ ID NO: 2752487 - RNA, 18 nt, Human respiratory syncytial virus
cacugaauauaauacaaa

SEQ ID NO: 2752488 - RNA, 20 nt, Human respiratory syncytial virus
cucuaaucucuuuacuaauu

SEQ ID NO: 2752489 - RNA, 19 nt, Human respiratory syncytial virus
ucaaacaauaaaaaaccac

SEQ ID NO: 2752490 - RNA, 14 nt, Human respiratory syncytial virus
aagagcggaagcau

SEQ ID NO: 2752491 - RNA, 19 nt, Human respiratory syncytial virus
caaccacaucaccaaucca

SEQ ID NO: 2752492 - RNA, 18 nt, Human respiratory syncytial virus
aaaauaucauuaacaagu

SEQ ID NO: 2752493 - RNA, 16 nt, Human respiratory syncytial virus
agacacuauaaagaua

SEQ ID NO: 2752494 - RNA, 14 nt, Human respiratory syncytial virus
uauuuaucaaucau

SEQ ID NO: 2752495 - RNA, 22 nt, Human respiratory syncytial virus
uccaucacaauagaauucacaa

SEQ ID NO: 2752496 - RNA, 19 nt, Human respiratory syncytial virus
uguauauauaaacaaacaa

SEQ ID NO: 2752497 - RNA, 16 nt, Human respiratory syncytial virus
aaacaacaaugcucaa

SEQ ID NO: 2752498 - RNA, 18 nt, Human respiratory syncytial virus
caaacaaauguccgucag

SEQ ID NO: 2752499 - RNA, 15 nt, Human respiratory syncytial virus
aaucaaucauauaca

SEQ ID NO: 2752500 - RNA, 23 nt, Human respiratory syncytial virus
ugacaacacuacuaugcaaagau

SEQ ID NO: 2752501 - RNA, 15 nt, Human respiratory syncytial virus
uaaagccaauaacau

SEQ ID NO: 2752502 - RNA, 21 nt, Human respiratory syncytial virus
caaaaaauacggggcaaauaa

SEQ ID NO: 2752503 - RNA, 14 nt, Human respiratory syncytial virus
gccaauaacauaaa

SEQ ID NO: 2752504 - RNA, 22 nt, Human respiratory syncytial virus
ugggaaauacauccaucacaau

SEQ ID NO: 2752505 - RNA, 17 nt, Human respiratory syncytial virus
cuaucaccaaugcgaaa

SEQ ID NO: 2752506 - RNA, 18 nt, Human respiratory syncytial virus
ucaacguaguacaggaga

SEQ ID NO: 2752507 - RNA, 22 nt, Human respiratory syncytial virus
aaaugacaacauuacagcaaga

SEQ ID NO: 2752508 - RNA, 16 nt, Human respiratory syncytial virus
caacaucaucaaucca

SEQ ID NO: 2752509 - RNA, 18 nt, Human respiratory syncytial virus
uucaaagaagaucucacc

SEQ ID NO: 2752510 - RNA, 15 nt, Human respiratory syncytial virus
acaacauuacagcaa

SEQ ID NO: 2752511 - RNA, 17 nt, Human respiratory syncytial virus
uacuaauuauaaucacu

SEQ ID NO: 2752512 - RNA, 19 nt, Human respiratory syncytial virus
cacagaaguugggaggaga

SEQ ID NO: 2752513 - RNA, 15 nt, Human respiratory syncytial virus
gugcuuuaagaacag

SEQ ID NO: 2752514 - RNA, 13 nt, Human respiratory syncytial virus
ccaaaaaaaccaa

SEQ ID NO: 2752515 - RNA, 22 nt, Human respiratory syncytial virus
auaugcaaacuuuucaauaauu

SEQ ID NO: 2752516 - RNA, 20 nt, Human respiratory syncytial virus
ugauaacaaugaagaagaau

SEQ ID NO: 2752517 - RNA, 21 nt, Human respiratory syncytial virus
aucuggcaccaacaucaucaa

SEQ ID NO: 2752518 - RNA, 23 nt, Human respiratory syncytial virus
aagaccaauuagugucaaaaaca

SEQ ID NO: 2752519 - RNA, 14 nt, Human respiratory syncytial virus
aagaugcaaauaac

SEQ ID NO: 2752520 - RNA, 16 nt, Human respiratory syncytial virus
guucaaacaauaaaaa

SEQ ID NO: 2752521 - RNA, 19 nt, Human respiratory syncytial virus
acaucaccaauccacacaa

SEQ ID NO: 2752522 - RNA, 17 nt, Human respiratory syncytial virus
ucaugcuacccacacaa

SEQ ID NO: 2752523 - RNA, 14 nt, Human respiratory syncytial virus
cacagaccaacaag

SEQ ID NO: 2752524 - RNA, 23 nt, Human respiratory syncytial virus
acuauucaacguaguacaggaga

SEQ ID NO: 2752525 - RNA, 19 nt, Human respiratory syncytial virus
aucuaauuguaauauccuc

SEQ ID NO: 2752526 - RNA, 21 nt, Human respiratory syncytial virus
caaagauccuaagaagaaaga

SEQ ID NO: 2752527 - RNA, 22 nt, Human respiratory syncytial virus
gaagaugcaaauaacaaagcua

SEQ ID NO: 2752528 - RNA, 20 nt, Human respiratory syncytial virus
uggauaucauguuaaagcua

SEQ ID NO: 2752529 - RNA, 12 nt, Human respiratory syncytial virus
gcaaagccaaaa

SEQ ID NO: 2752530 - RNA, 21 nt, Human respiratory syncytial virus
aucaacucaacccuaaagaag

SEQ ID NO: 2752531 - RNA, 14 nt, Human respiratory syncytial virus
guauaguuggagug

SEQ ID NO: 2752532 - RNA, 15 nt, Human respiratory syncytial virus
caaaccaaccaccaa

SEQ ID NO: 2752533 - RNA, 14 nt, Human respiratory syncytial virus
aucuguaaaacaau

SEQ ID NO: 2752534 - RNA, 17 nt, Human respiratory syncytial virus
ugcaaauaacaaagcua

SEQ ID NO: 2752535 - RNA, 15 nt, Human respiratory syncytial virus
uuagacuuaacagca

SEQ ID NO: 2752536 - RNA, 15 nt, Human respiratory syncytial virus
uauuaugacaucaaa

SEQ ID NO: 2752537 - RNA, 21 nt, Human respiratory syncytial virus
uuucggcuguggaaagcaauc

SEQ ID NO: 2752538 - RNA, 18 nt, Human respiratory syncytial virus
gauaacaaugaagaagaa

SEQ ID NO: 2752539 - RNA, 21 nt, Human respiratory syncytial virus
agcaacucaaagaaaauggag

SEQ ID NO: 2752540 - RNA, 17 nt, Human respiratory syncytial virus
aauggaaaggaaaugaa

SEQ ID NO: 2752541 - RNA, 21 nt, Human respiratory syncytial virus
gcagccaaagcauaugcagag

SEQ ID NO: 2752542 - RNA, 16 nt, Human respiratory syncytial virus
gagaagaaaugauaga

SEQ ID NO: 2752543 - RNA, 13 nt, Human respiratory syncytial virus
acugaaauuauuu

SEQ ID NO: 2752544 - RNA, 15 nt, Human respiratory syncytial virus
gcaaauacaaagaug

SEQ ID NO: 2752545 - RNA, 15 nt, Human respiratory syncytial virus
cuacacuacacacuu

SEQ ID NO: 2752546 - RNA, 16 nt, Human respiratory syncytial virus
guuuauuuuaaaucaa

SEQ ID NO: 2752547 - RNA, 21 nt, Human respiratory syncytial virus
acuaugagcacuacaaaugac

SEQ ID NO: 2752548 - RNA, 12 nt, Human respiratory syncytial virus
ugcaucacuaac

SEQ ID NO: 2752549 - RNA, 13 nt, Human respiratory syncytial virus
caaacaacaaugc

SEQ ID NO: 2752550 - RNA, 23 nt, Human respiratory syncytial virus
gcaaguucgcaucauccaaagau

SEQ ID NO: 2752551 - RNA, 18 nt, Human respiratory syncytial virus
agaucuuaccaugaagac

SEQ ID NO: 2752552 - RNA, 16 nt, Human respiratory syncytial virus
agauccuaagaagaaa

SEQ ID NO: 2752553 - RNA, 24 nt, Human respiratory syncytial virus
aguaccaaauacaagaaauacacu

SEQ ID NO: 2752554 - RNA, 12 nt, Human respiratory syncytial virus
uccacacaaaca

SEQ ID NO: 2752555 - RNA, 14 nt, Human respiratory syncytial virus
gaucaaacaaauga

SEQ ID NO: 2752556 - RNA, 14 nt, Human respiratory syncytial virus
gauaaccaccagcg

SEQ ID NO: 2752557 - RNA, 18 nt, Human respiratory syncytial virus
aacauuacagcaagacua

SEQ ID NO: 2752558 - RNA, 19 nt, Human respiratory syncytial virus
agacuuaggaaugaggaaa

SEQ ID NO: 2752559 - RNA, 20 nt, Human respiratory syncytial virus
auagaaucuagaaaauccua

SEQ ID NO: 2752560 - RNA, 21 nt, Human respiratory syncytial virus
uuaguuaauauaaaaacucau

SEQ ID NO: 2752561 - RNA, 20 nt, Human respiratory syncytial virus
uaaauguaucaauaagcaag

SEQ ID NO: 2752562 - RNA, 15 nt, Human respiratory syncytial virus
aagcaacaaaccaaa

SEQ ID NO: 2752563 - RNA, 19 nt, Human respiratory syncytial virus
cugaagauauauauacaau

SEQ ID NO: 2752564 - RNA, 20 nt, Human respiratory syncytial virus
gaaaucaucacacacaaauu

SEQ ID NO: 2752565 - RNA, 22 nt, Human respiratory syncytial virus
ugaacaucuacacuacacacuu

SEQ ID NO: 2752566 - RNA, 15 nt, Human respiratory syncytial virus
caaaacacaccagcu

SEQ ID NO: 2752567 - RNA, 23 nt, Human respiratory syncytial virus
uauugaacaauccaaaagcauca

SEQ ID NO: 2752568 - RNA, 18 nt, Human respiratory syncytial virus
agaaaauggaguaauaaa

SEQ ID NO: 2752569 - RNA, 19 nt, Human respiratory syncytial virus
aagcuugacaucagaaaua

SEQ ID NO: 2752570 - RNA, 21 nt, Human respiratory syncytial virus
guucuagaaaaagaugaugau

SEQ ID NO: 2752571 - RNA, 12 nt, Human respiratory syncytial virus
aucaaaaacaac

SEQ ID NO: 2752572 - RNA, 12 nt, Human respiratory syncytial virus
aucuuuaugaug

SEQ ID NO: 2752573 - RNA, 20 nt, Human respiratory syncytial virus
aucauaaaggugaacugaaa

SEQ ID NO: 2752574 - RNA, 19 nt, Human respiratory syncytial virus
acacacaauccaacagcaa

SEQ ID NO: 2752575 - RNA, 18 nt, Human respiratory syncytial virus
aagaaacaauagaaacau

SEQ ID NO: 2752576 - RNA, 12 nt, Human respiratory syncytial virus
uuaaagaugcug

SEQ ID NO: 2752577 - RNA, 19 nt, Human respiratory syncytial virus
agcaaauagacaaaaaacc

SEQ ID NO: 2752578 - RNA, 15 nt, Human respiratory syncytial virus
uaauauaaaaacuca

SEQ ID NO: 2752579 - RNA, 17 nt, Human respiratory syncytial virus
acacuucaucacacaaa

SEQ ID NO: 2752580 - RNA, 21 nt, Human respiratory syncytial virus
ugccaacaaccgggccagaag

SEQ ID NO: 2752581 - RNA, 15 nt, Human respiratory syncytial virus
augaugcagccaaag

SEQ ID NO: 2752582 - RNA, 15 nt, Human respiratory syncytial virus
gaaauacaagucaau

SEQ ID NO: 2752583 - RNA, 16 nt, Human respiratory syncytial virus
caccagcugccaacaa

SEQ ID NO: 2752584 - RNA, 20 nt, Human respiratory syncytial virus
caagccgagcacaaaaccac

SEQ ID NO: 2752585 - RNA, 16 nt, Human respiratory syncytial virus
cacccccgaaaacaca

SEQ ID NO: 2752586 - RNA, 18 nt, Human respiratory syncytial virus
ccaccaaaaaaaccaaaa

SEQ ID NO: 2752587 - RNA, 13 nt, Human respiratory syncytial virus
cucucaccaaaga

SEQ ID NO: 2752588 - RNA, 13 nt, Human respiratory syncytial virus
uaaauaaaaccaa

SEQ ID NO: 2752589 - RNA, 21 nt, Human respiratory syncytial virus
agaaacauuugauaacaauga

SEQ ID NO: 2752590 - RNA, 20 nt, Human respiratory syncytial virus
agaugcuggauaucauguua

SEQ ID NO: 2752591 - RNA, 13 nt, Human respiratory syncytial virus
aucacucaguaaa

SEQ ID NO: 2752592 - RNA, 21 nt, Human respiratory syncytial virus
uaacaucuggcaccaacauca

SEQ ID NO: 2752593 - RNA, 14 nt, Human respiratory syncytial virus
gcaauacuaaauaa

SEQ ID NO: 2752594 - RNA, 19 nt, Human respiratory syncytial virus
aacuugcaagcaucaacau

SEQ ID NO: 2752595 - RNA, 12 nt, Human respiratory syncytial virus
aacaucuacacu

SEQ ID NO: 2752596 - RNA, 18 nt, Human respiratory syncytial virus
auguccagguuaggaagg

SEQ ID NO: 2752597 - RNA, 24 nt, Human respiratory syncytial virus
auggcaaaagacaccucagaugaa

SEQ ID NO: 2752598 - RNA, 22 nt, Human respiratory syncytial virus
ucauaaaagaacuugcaagcau

SEQ ID NO: 2752599 - RNA, 19 nt, Human respiratory syncytial virus
gcuaccaaauuccuagaau

SEQ ID NO: 2752600 - RNA, 19 nt, Human respiratory syncytial virus
agagaagaaaugauagaaa

SEQ ID NO: 2752601 - RNA, 17 nt, Human respiratory syncytial virus
uagaucucaagaauuac

SEQ ID NO: 2752602 - RNA, 17 nt, Human respiratory syncytial virus
aaaucuguaaaaaauau

SEQ ID NO: 2752603 - RNA, 19 nt, Human respiratory syncytial virus
aauaagucaacauggagaa

SEQ ID NO: 2752604 - RNA, 11 nt, Human respiratory syncytial virus
accaauuauua

SEQ ID NO: 2752605 - RNA, 18 nt, Human respiratory syncytial virus
uaccauuuuaguuaauau

SEQ ID NO: 2752606 - RNA, 16 nt, Human respiratory syncytial virus
cuaggacagaugcauc

SEQ ID NO: 2752607 - RNA, 16 nt, Human respiratory syncytial virus
uauccaaacaucauga

SEQ ID NO: 2752608 - RNA, 20 nt, Human respiratory syncytial virus
cacugaauauaauacaaaau

SEQ ID NO: 2752609 - RNA, 13 nt, Human respiratory syncytial virus
cacaaacaaacca

SEQ ID NO: 2752610 - RNA, 21 nt, Human respiratory syncytial virus
caacuacuacuuacaaucaau

SEQ ID NO: 2752611 - RNA, 13 nt, Human respiratory syncytial virus
auucacaaaauua

SEQ ID NO: 2752612 - RNA, 18 nt, Human respiratory syncytial virus
aauuagcauaugauguaa

SEQ ID NO: 2752613 - RNA, 15 nt, Human respiratory syncytial virus
aaagcgaaaaaaugg

SEQ ID NO: 2752614 - RNA, 21 nt, Human respiratory syncytial virus
cagcagauuguuggaaaucaa

SEQ ID NO: 2752615 - RNA, 24 nt, Human respiratory syncytial virus
cacuacaaaugacaacacuacuau

SEQ ID NO: 2752616 - RNA, 21 nt, Human respiratory syncytial virus
acaaaccaaucccacucaaaa

SEQ ID NO: 2752617 - RNA, 17 nt, Human respiratory syncytial virus
auuccuagaaucaauaa

SEQ ID NO: 2752618 - RNA, 18 nt, Human respiratory syncytial virus
aaccacgccaacuaucau

SEQ ID NO: 2752619 - RNA, 21 nt, Human respiratory syncytial virus
ucacaguuacugacaauaaag

SEQ ID NO: 2752620 - RNA, 15 nt, Human respiratory syncytial virus
ugaaauucgaaguau

SEQ ID NO: 2752621 - RNA, 20 nt, Human respiratory syncytial virus
uugugauaaugcaggaucag

SEQ ID NO: 2752622 - RNA, 15 nt, Human respiratory syncytial virus
gauaacaaugaagaa

SEQ ID NO: 2752623 - RNA, 13 nt, Human respiratory syncytial virus
auaguuacauaaa

SEQ ID NO: 2752624 - RNA, 18 nt, Human respiratory syncytial virus
aucgucaagauauaaaug

SEQ ID NO: 2752625 - RNA, 15 nt, Human respiratory syncytial virus
cagcggaaccaccaa

SEQ ID NO: 2752626 - RNA, 15 nt, Human respiratory syncytial virus
acgacgaaaaaagaa

SEQ ID NO: 2752627 - RNA, 15 nt, Human respiratory syncytial virus
gcagagcaacucaaa

SEQ ID NO: 2752628 - RNA, 23 nt, Human respiratory syncytial virus
agcauauauuaugugacuacuaa

SEQ ID NO: 2752629 - RNA, 23 nt, Human respiratory syncytial virus
ucgcaaaaccacgccaacuauca

SEQ ID NO: 2752630 - RNA, 13 nt, Human respiratory syncytial virus
agagaagaaauga

SEQ ID NO: 2752631 - RNA, 19 nt, Human respiratory syncytial virus
caaagcauaugcagagcaa

SEQ ID NO: 2752632 - RNA, 16 nt, Human respiratory syncytial virus
cuauaucauccaacca

SEQ ID NO: 2752633 - RNA, 19 nt, Human respiratory syncytial virus
aacaacauaacaaaacaau

SEQ ID NO: 2752634 - RNA, 15 nt, Human respiratory syncytial virus
ggaaaggaaaugaaa

SEQ ID NO: 2752635 - RNA, 15 nt, Human respiratory syncytial virus
aacacccacagcauc

SEQ ID NO: 2752636 - RNA, 20 nt, Human respiratory syncytial virus
augaaguguuugaaaaacac

SEQ ID NO: 2752637 - RNA, 19 nt, Human respiratory syncytial virus
ugaacucacuagaaaacau

SEQ ID NO: 2752638 - RNA, 15 nt, Human respiratory syncytial virus
ugcaagcaucaacau

SEQ ID NO: 2752639 - RNA, 14 nt, Human respiratory syncytial virus
agcaaagucaaguu

SEQ ID NO: 2752640 - RNA, 17 nt, Human respiratory syncytial virus
aaauuacacacaucacc

SEQ ID NO: 2752641 - RNA, 12 nt, Human respiratory syncytial virus
uaaccaccagcg

SEQ ID NO: 2752642 - RNA, 15 nt, Human respiratory syncytial virus
cuucaucacacaaac

SEQ ID NO: 2752643 - RNA, 17 nt, Human respiratory syncytial virus
cugccagaccgaacaaa

SEQ ID NO: 2752644 - RNA, 23 nt, Human respiratory syncytial virus
uggaaaucaacagagaauucagu

SEQ ID NO: 2752645 - RNA, 12 nt, Human respiratory syncytial virus
uuuauuaaauaa

SEQ ID NO: 2752646 - RNA, 18 nt, Human respiratory syncytial virus
aacauuggggcaaaugca

SEQ ID NO: 2752647 - RNA, 15 nt, Human respiratory syncytial virus
aaaagcaucauugcu

SEQ ID NO: 2752648 - RNA, 21 nt, Human respiratory syncytial virus
agcuacucauaugaagagaua

SEQ ID NO: 2752649 - RNA, 13 nt, Human respiratory syncytial virus
ucaacacaucauu

SEQ ID NO: 2752650 - RNA, 16 nt, Human respiratory syncytial virus
acaaauaugaccucaa

SEQ ID NO: 2752651 - RNA, 16 nt, Human respiratory syncytial virus
gcauuuacaacacaac

SEQ ID NO: 2752652 - RNA, 19 nt, Human respiratory syncytial virus
caagccgagcacaaaacca

SEQ ID NO: 2752653 - RNA, 19 nt, Human respiratory syncytial virus
ugaauuucauggagaagau

SEQ ID NO: 2752654 - RNA, 14 nt, Human respiratory syncytial virus
aauacauuaaauaa

SEQ ID NO: 2752655 - RNA, 13 nt, Human respiratory syncytial virus
acauaaugaugaa

SEQ ID NO: 2752656 - RNA, 15 nt, Human respiratory syncytial virus
aaauauggaaacaua

SEQ ID NO: 2752657 - RNA, 22 nt, Human respiratory syncytial virus
aucauggcggguuucuagaaug

SEQ ID NO: 2752658 - RNA, 13 nt, Human respiratory syncytial virus
aagcaagaagagg

SEQ ID NO: 2752659 - RNA, 19 nt, Human respiratory syncytial virus
ccaaaaccacaaacaaaag

SEQ ID NO: 2752660 - RNA, 17 nt, Human respiratory syncytial virus
cagaugcaucaaaucaa

SEQ ID NO: 2752661 - RNA, 17 nt, Human respiratory syncytial virus
cacucccaauuaugaug

SEQ ID NO: 2752662 - RNA, 19 nt, Human respiratory syncytial virus
auuaugacaucaaaaagag

SEQ ID NO: 2752663 - RNA, 22 nt, Human respiratory syncytial virus
guucaaacaauaaaaaaccaca

SEQ ID NO: 2752664 - RNA, 20 nt, Human respiratory syncytial virus
gauauaaauggaaaggaaau

SEQ ID NO: 2752665 - RNA, 23 nt, Human respiratory syncytial virus
aauagguauguuauaugcuaugu

SEQ ID NO: 2752666 - RNA, 19 nt, Human respiratory syncytial virus
caaacuaugagcacuacaa

SEQ ID NO: 2752667 - RNA, 22 nt, Human respiratory syncytial virus
cuggaaauuacacacaucaccu

SEQ ID NO: 2752668 - RNA, 21 nt, Human respiratory syncytial virus
ugcagagcaacucaaagaaaa

SEQ ID NO: 2752669 - RNA, 17 nt, Human respiratory syncytial virus
cugaaaaaaacaucacc

SEQ ID NO: 2752670 - RNA, 18 nt, Human respiratory syncytial virus
acuacagucaaagaucuu

SEQ ID NO: 2752671 - RNA, 22 nt, Human respiratory syncytial virus
aaagcauaugcagagcaacuca

SEQ ID NO: 2752672 - RNA, 15 nt, Human respiratory syncytial virus
acauaaauuggggca

SEQ ID NO: 2752673 - RNA, 12 nt, Human respiratory syncytial virus
ugucauccagca

SEQ ID NO: 2752674 - RNA, 15 nt, Human respiratory syncytial virus
cacccccgaaaacac

SEQ ID NO: 2752675 - RNA, 16 nt, Human respiratory syncytial virus
uaaaaguaaagccaau

SEQ ID NO: 2752676 - RNA, 16 nt, Human respiratory syncytial virus
ucuaaaacuaacaaug

SEQ ID NO: 2752677 - RNA, 20 nt, Human respiratory syncytial virus
uagcuuacugauuccaaaau

SEQ ID NO: 2752678 - RNA, 13 nt, Human respiratory syncytial virus
cuuaacagcagaa

SEQ ID NO: 2752679 - RNA, 17 nt, Human respiratory syncytial virus
aagccaauaacauaaau

SEQ ID NO: 2752680 - RNA, 23 nt, Human respiratory syncytial virus
uagcaaccaccgaauucaaaaau

SEQ ID NO: 2752681 - RNA, 22 nt, Human respiratory syncytial virus
ccaaacaucaugaacaucuaca

SEQ ID NO: 2752682 - RNA, 16 nt, Human respiratory syncytial virus
caagccgagcacaaaa

SEQ ID NO: 2752683 - RNA, 21 nt, Human respiratory syncytial virus
cagccaaagcauaugcagagc

SEQ ID NO: 2752684 - RNA, 13 nt, Human respiratory syncytial virus
auacauuaaauaa

SEQ ID NO: 2752685 - RNA, 20 nt, Human respiratory syncytial virus
ucacaguucaaacaauaaaa

SEQ ID NO: 2752686 - RNA, 21 nt, Human respiratory syncytial virus
agauggcucuuagcaaaguca

SEQ ID NO: 2752687 - RNA, 12 nt, Human respiratory syncytial virus
uucaauacauau

SEQ ID NO: 2752688 - RNA, 20 nt, Human respiratory syncytial virus
gucacaguucaaacaauaaa

SEQ ID NO: 2752689 - RNA, 18 nt, Human respiratory syncytial virus
cauuuggauaaccaccag

SEQ ID NO: 2752690 - RNA, 16 nt, Human respiratory syncytial virus
acuacaccuugugaaa

SEQ ID NO: 2752691 - RNA, 15 nt, Human respiratory syncytial virus
ugaaauaaaacgcua

SEQ ID NO: 2752692 - RNA, 20 nt, Human respiratory syncytial virus
cauggugucgcaaaaccacg

SEQ ID NO: 2752693 - RNA, 14 nt, Human respiratory syncytial virus
auaauaaauuacua

SEQ ID NO: 2752694 - RNA, 15 nt, Human respiratory syncytial virus
agggcaaguaaugcu

SEQ ID NO: 2752695 - RNA, 18 nt, Human respiratory syncytial virus
ucauccagcaaauacacu

SEQ ID NO: 2752696 - RNA, 18 nt, Human respiratory syncytial virus
ggauaucauguuaaagcu

SEQ ID NO: 2752697 - RNA, 21 nt, Human respiratory syncytial virus
aaauauggaaacauacgugaa

SEQ ID NO: 2752698 - RNA, 19 nt, Human respiratory syncytial virus
uaguuagaguucaaucaau

SEQ ID NO: 2752699 - RNA, 21 nt, Human respiratory syncytial virus
caacaaccgggccagaagaga

SEQ ID NO: 2752700 - RNA, 18 nt, Human respiratory syncytial virus
caaaggcagaaccaccac

SEQ ID NO: 2752701 - RNA, 19 nt, Human respiratory syncytial virus
uaacaaugauacaugugca

SEQ ID NO: 2752702 - RNA, 23 nt, Human respiratory syncytial virus
gauuaauagguauguuauaugcu

SEQ ID NO: 2752703 - RNA, 21 nt, Human respiratory syncytial virus
agggaagacacuauaaagaua

SEQ ID NO: 2752704 - RNA, 20 nt, Human respiratory syncytial virus
caagauauaaauggaaagga

SEQ ID NO: 2752705 - RNA, 21 nt, Human respiratory syncytial virus
aaguugggaggagaagcugga

SEQ ID NO: 2752706 - RNA, 21 nt, Human respiratory syncytial virus
aaucacugaagaugcaaauca

SEQ ID NO: 2752707 - RNA, 12 nt, Human respiratory syncytial virus
uaugcaaagauu

SEQ ID NO: 2752708 - RNA, 21 nt, Human respiratory syncytial virus
ggauucaauaauaacaucucu

SEQ ID NO: 2752709 - RNA, 17 nt, Human respiratory syncytial virus
uaaauaaccaauuauua

SEQ ID NO: 2752710 - RNA, 16 nt, Human respiratory syncytial virus
acccuaaagaagauga

SEQ ID NO: 2752711 - RNA, 18 nt, Human respiratory syncytial virus
aucaagcuugacaucaga

SEQ ID NO: 2752712 - RNA, 18 nt, Human respiratory syncytial virus
ccacaaacaaaccaacca

SEQ ID NO: 2752713 - RNA, 15 nt, Human respiratory syncytial virus
auugaugaaaaauua

SEQ ID NO: 2752714 - RNA, 15 nt, Human respiratory syncytial virus
uaauauacaaauaug

SEQ ID NO: 2752715 - RNA, 19 nt, Human respiratory syncytial virus
gaucugaacucacuagaaa

SEQ ID NO: 2752716 - RNA, 14 nt, Human respiratory syncytial virus
augauacaugugca

SEQ ID NO: 2752717 - RNA, 23 nt, Human respiratory syncytial virus
aaacaauaaaaaaccacacugaa

SEQ ID NO: 2752718 - RNA, 15 nt, Human respiratory syncytial virus
caauuuauauacaaa

SEQ ID NO: 2752719 - RNA, 17 nt, Human respiratory syncytial virus
ugagagaagaaaugaua

SEQ ID NO: 2752720 - RNA, 18 nt, Human respiratory syncytial virus
acaagauggggcaaauau

SEQ ID NO: 2752721 - RNA, 22 nt, Human respiratory syncytial virus
caagcuauuccucaaacaacaa

SEQ ID NO: 2752722 - RNA, 15 nt, Human respiratory syncytial virus
gggcaaauaagucaa

SEQ ID NO: 2752723 - RNA, 17 nt, Human respiratory syncytial virus
cagagcaacucaaagaa

SEQ ID NO: 2752724 - RNA, 15 nt, Human respiratory syncytial virus
uucaucacacaaacc

SEQ ID NO: 2752725 - RNA, 19 nt, Human respiratory syncytial virus
guuuuucaaucaaaccacu

SEQ ID NO: 2752726 - RNA, 17 nt, Human respiratory syncytial virus
aagacuagauagaauug

SEQ ID NO: 2752727 - RNA, 20 nt, Human respiratory syncytial virus
auuucauggagaagaugcaa

SEQ ID NO: 2752728 - RNA, 14 nt, Human respiratory syncytial virus
aaaugaucaaacaa

SEQ ID NO: 2752729 - RNA, 19 nt, Human respiratory syncytial virus
aaugaucaaacaaaugaca

SEQ ID NO: 2752730 - RNA, 13 nt, Human respiratory syncytial virus
acaaaaaaaccaa

SEQ ID NO: 2752731 - RNA, 15 nt, Human respiratory syncytial virus
aauuaacauaaugau

SEQ ID NO: 2752732 - RNA, 20 nt, Human respiratory syncytial virus
caaauuagcagcaggagaca

SEQ ID NO: 2752733 - RNA, 15 nt, Human respiratory syncytial virus
cagacuugcucauaa

SEQ ID NO: 2752734 - RNA, 23 nt, Human respiratory syncytial virus
uuuaugaaguguuugaaaaacac

SEQ ID NO: 2752735 - RNA, 14 nt, Human respiratory syncytial virus
uuaaaaauaaaagu

SEQ ID NO: 2752736 - RNA, 21 nt, Human respiratory syncytial virus
caaaacacacuccuauaauau

SEQ ID NO: 2752737 - RNA, 19 nt, Human respiratory syncytial virus
uuaagcccaacaauaauuc

SEQ ID NO: 2752738 - RNA, 21 nt, Human respiratory syncytial virus
gcagacuugcucauaaaagaa

SEQ ID NO: 2752739 - RNA, 22 nt, Human respiratory syncytial virus
auguccagguuaggaagggaag

SEQ ID NO: 2752740 - RNA, 15 nt, Human respiratory syncytial virus
uacuaugcaaagauu

SEQ ID NO: 2752741 - RNA, 14 nt, Human respiratory syncytial virus
augaacuauacaau

SEQ ID NO: 2752742 - RNA, 13 nt, Human respiratory syncytial virus
cagcugcugucau

SEQ ID NO: 2752743 - RNA, 14 nt, Human respiratory syncytial virus
gugaacauaaaaca

SEQ ID NO: 2752744 - RNA, 14 nt, Human respiratory syncytial virus
agucaacauggaga

SEQ ID NO: 2752745 - RNA, 18 nt, Human respiratory syncytial virus
uaaaacuuauaaaacaag

SEQ ID NO: 2752746 - RNA, 18 nt, Human respiratory syncytial virus
acauuggggcaaaugcaa

SEQ ID NO: 2752747 - RNA, 16 nt, Human respiratory syncytial virus
aguuaacaaaaaauac

SEQ ID NO: 2752748 - RNA, 17 nt, Human respiratory syncytial virus
aagauccuaagaagaaa

SEQ ID NO: 2752749 - RNA, 18 nt, Human respiratory syncytial virus
aaacaaacuaugugguau

SEQ ID NO: 2752750 - RNA, 19 nt, Human respiratory syncytial virus
caauuaugagaugaagcua

SEQ ID NO: 2752751 - RNA, 17 nt, Human respiratory syncytial virus
caaaccaaccaccaaaa

SEQ ID NO: 2752752 - RNA, 19 nt, Human respiratory syncytial virus
cauagugcucuaccaucau

SEQ ID NO: 2752753 - RNA, 15 nt, Human respiratory syncytial virus
ggcauaaugggagag

SEQ ID NO: 2752754 - RNA, 18 nt, Human respiratory syncytial virus
acuuaugcaaaacacacc

SEQ ID NO: 2752755 - RNA, 19 nt, Human respiratory syncytial virus
uuaaguuaacaaaaaauac

SEQ ID NO: 2752756 - RNA, 21 nt, Human respiratory syncytial virus
guuaaaugauacauuaaauaa

SEQ ID NO: 2752757 - RNA, 18 nt, Human respiratory syncytial virus
aaauaaaaguaaagccaa

SEQ ID NO: 2752758 - RNA, 19 nt, Human respiratory syncytial virus
ugcaaaucauaaauucaca

SEQ ID NO: 2752759 - RNA, 14 nt, Human respiratory syncytial virus
cuaauacauaugau

SEQ ID NO: 2752760 - RNA, 11 nt, Human respiratory syncytial virus
caaucaaucaa

SEQ ID NO: 2752761 - RNA, 16 nt, Human respiratory syncytial virus
auagacauguguuuau

SEQ ID NO: 2752762 - RNA, 18 nt, Human respiratory syncytial virus
uagaaguaaccaaagaga

SEQ ID NO: 2752763 - RNA, 20 nt, Human respiratory syncytial virus
ccaggaucuuuaugaugcag

SEQ ID NO: 2752764 - RNA, 15 nt, Human respiratory syncytial virus
gaaguaaccaaagag

SEQ ID NO: 2752765 - RNA, 20 nt, Human respiratory syncytial virus
cacugugcucgacacaacca

SEQ ID NO: 2752766 - RNA, 16 nt, Human respiratory syncytial virus
aguaacaaaaaaagaa

SEQ ID NO: 2752767 - RNA, 11 nt, Human respiratory syncytial virus
gccuacaaaac

SEQ ID NO: 2752768 - RNA, 21 nt, Human respiratory syncytial virus
gaugcaucaaaucaacacaua

SEQ ID NO: 2752769 - RNA, 14 nt, Human respiratory syncytial virus
uauguuauaugcua

SEQ ID NO: 2752770 - RNA, 18 nt, Human respiratory syncytial virus
auuagacuuaacagcaga

SEQ ID NO: 2752771 - RNA, 20 nt, Human respiratory syncytial virus
ugcuauuaaucacugaagau

SEQ ID NO: 2752772 - RNA, 15 nt, Human respiratory syncytial virus
auauaaauggaaagg

SEQ ID NO: 2752773 - RNA, 18 nt, Human respiratory syncytial virus
cagcaggagacagaucag

SEQ ID NO: 2752774 - RNA, 14 nt, Human respiratory syncytial virus
uaauccguuuuagu

SEQ ID NO: 2752775 - RNA, 15 nt, Human respiratory syncytial virus
uagaauucacaagca

SEQ ID NO: 2752776 - RNA, 19 nt, Human respiratory syncytial virus
agauauagaaguaaccaaa

SEQ ID NO: 2752777 - RNA, 12 nt, Human respiratory syncytial virus
augcuaaaagag

SEQ ID NO: 2752778 - RNA, 14 nt, Human respiratory syncytial virus
gaugcaaauaacaa

SEQ ID NO: 2752779 - RNA, 19 nt, Human respiratory syncytial virus
aaauccuacaaaaaaaugc

SEQ ID NO: 2752780 - RNA, 17 nt, Human respiratory syncytial virus
aaucacuaccagccacu

SEQ ID NO: 2752781 - RNA, 20 nt, Human respiratory syncytial virus
aaucuagcuacucauaugaa

SEQ ID NO: 2752782 - RNA, 12 nt, Human respiratory syncytial virus
ucgcaaaaccac

SEQ ID NO: 2752783 - RNA, 22 nt, Human respiratory syncytial virus
auucuuagucaauuaugagaug

SEQ ID NO: 2752784 - RNA, 16 nt, Human respiratory syncytial virus
acauuaaaaagcugag

SEQ ID NO: 2752785 - RNA, 13 nt, Human respiratory syncytial virus
gaucaaacaaaug

SEQ ID NO: 2752786 - RNA, 14 nt, Human respiratory syncytial virus
auaucgaucaaaug

SEQ ID NO: 2752787 - RNA, 14 nt, Human respiratory syncytial virus
uaaguauaagaaug

SEQ ID NO: 2752788 - RNA, 22 nt, Human respiratory syncytial virus
aauggaguagauauaacaacau

SEQ ID NO: 2752789 - RNA, 22 nt, Human respiratory syncytial virus
uuaagcccaacaauaauucagg

SEQ ID NO: 2752790 - RNA, 20 nt, Human respiratory syncytial virus
uggaguagauauaacaacau

SEQ ID NO: 2752791 - RNA, 22 nt, Human respiratory syncytial virus
caaguucgcaucauccaaagau

SEQ ID NO: 2752792 - RNA, 21 nt, Human respiratory syncytial virus
aauaacaucucucaccaaaga

SEQ ID NO: 2752793 - RNA, 13 nt, Human respiratory syncytial virus
aucaaacacuaaa

SEQ ID NO: 2752794 - RNA, 21 nt, Human respiratory syncytial virus
aacacaccacacaacagcaca

SEQ ID NO: 2752795 - RNA, 17 nt, Human respiratory syncytial virus
ucauguuucaacaacag

SEQ ID NO: 2752796 - RNA, 17 nt, Human respiratory syncytial virus
ugaugcagccaaagcau

SEQ ID NO: 2752797 - RNA, 22 nt, Human respiratory syncytial virus
aacugccagaccgaacaaacaa

SEQ ID NO: 2752798 - RNA, 21 nt, Human respiratory syncytial virus
auuagacuuaacagcagaaga

SEQ ID NO: 2752799 - RNA, 14 nt, Human respiratory syncytial virus
cuacaaaaaaaugc

SEQ ID NO: 2752800 - RNA, 18 nt, Human respiratory syncytial virus
agcaagacuagauagaau

SEQ ID NO: 2752801 - RNA, 16 nt, Human respiratory syncytial virus
aacuacagucaaagau

SEQ ID NO: 2752802 - RNA, 12 nt, Human respiratory syncytial virus
ucagcaaucaac

SEQ ID NO: 2752803 - RNA, 12 nt, Human respiratory syncytial virus
auuccaaaauua

SEQ ID NO: 2752804 - RNA, 18 nt, Human respiratory syncytial virus
ccaggcagaaauggagca

SEQ ID NO: 2752805 - RNA, 19 nt, Human respiratory syncytial virus
gcaauagaaaaaacaacaa

SEQ ID NO: 2752806 - RNA, 21 nt, Human respiratory syncytial virus
aaauuggggcaaauacaaaga

SEQ ID NO: 2752807 - RNA, 17 nt, Human respiratory syncytial virus
agcuacucauaugaaga

SEQ ID NO: 2752808 - RNA, 21 nt, Human respiratory syncytial virus
gcauaauaucuguuaacucaa

SEQ ID NO: 2752809 - RNA, 16 nt, Human respiratory syncytial virus
agaaauacacugaaua

SEQ ID NO: 2752810 - RNA, 12 nt, Human respiratory syncytial virus
ucacaauuauuu

SEQ ID NO: 2752811 - RNA, 20 nt, Human respiratory syncytial virus
gaaugacagguccacauaua

SEQ ID NO: 2752812 - RNA, 15 nt, Human respiratory syncytial virus
caggcagaaauggag

SEQ ID NO: 2752813 - RNA, 17 nt, Human respiratory syncytial virus
aucaacaacaucaauaa

SEQ ID NO: 2752814 - RNA, 20 nt, Human respiratory syncytial virus
caaaccaaaggcagaaccac

SEQ ID NO: 2752815 - RNA, 17 nt, Human respiratory syncytial virus
aaucacugaagaugcaa

SEQ ID NO: 2752816 - RNA, 14 nt, Human respiratory syncytial virus
ucaacauggagaag

SEQ ID NO: 2752817 - RNA, 14 nt, Human respiratory syncytial virus
cagauuaaauuuaa

SEQ ID NO: 2752818 - RNA, 14 nt, Human respiratory syncytial virus
aaguaaugcuaaga

SEQ ID NO: 2752819 - RNA, 19 nt, Human respiratory syncytial virus
agaccgaacaaacaaaugu

SEQ ID NO: 2752820 - RNA, 15 nt, Human respiratory syncytial virus
uuucuucacaucaug

SEQ ID NO: 2752821 - RNA, 17 nt, Human respiratory syncytial virus
ugucauccagcaaauac

SEQ ID NO: 2752822 - RNA, 22 nt, Human respiratory syncytial virus
agcauaugaaucuuaaaaaacu

SEQ ID NO: 2752823 - RNA, 22 nt, Human respiratory syncytial virus
caacaacaucaauaaaacagac

SEQ ID NO: 2752824 - RNA, 16 nt, Human respiratory syncytial virus
caaauauaucaagcca

SEQ ID NO: 2752825 - RNA, 17 nt, Human respiratory syncytial virus
cugcaucacuaacaaua

SEQ ID NO: 2752826 - RNA, 18 nt, Human respiratory syncytial virus
ugcucaauaguuaagaag

SEQ ID NO: 2752827 - RNA, 14 nt, Human respiratory syncytial virus
auuaaugaucacgg

SEQ ID NO: 2752828 - RNA, 14 nt, Human respiratory syncytial virus
acauacacagcagc

SEQ ID NO: 2752829 - RNA, 18 nt, Human respiratory syncytial virus
auagaaguaaccaaagag

SEQ ID NO: 2752830 - RNA, 13 nt, Human respiratory syncytial virus
auauaaauggaaa

SEQ ID NO: 2752831 - RNA, 14 nt, Human respiratory syncytial virus
auaaugaugaauua

SEQ ID NO: 2752832 - RNA, 18 nt, Human respiratory syncytial virus
ucaaacaaaugacaacau

SEQ ID NO: 2752833 - RNA, 17 nt, Human respiratory syncytial virus
ucaaaaugaccaaacca

SEQ ID NO: 2752834 - RNA, 12 nt, Human respiratory syncytial virus
auuucauggaga

SEQ ID NO: 2752835 - RNA, 18 nt, Human respiratory syncytial virus
ucaaguaucacaaucaaa

SEQ ID NO: 2752836 - RNA, 14 nt, Human respiratory syncytial virus
ggacucuagaaaag

SEQ ID NO: 2752837 - RNA, 12 nt, Human respiratory syncytial virus
gcaucaaaucaa

SEQ ID NO: 2752838 - RNA, 14 nt, Human respiratory syncytial virus
cugacgaaauuaac

SEQ ID NO: 2752839 - RNA, 20 nt, Human respiratory syncytial virus
uaauacuguguauagcagca

SEQ ID NO: 2752840 - RNA, 21 nt, Human respiratory syncytial virus
aaaaccccuaguaagcuucaa

SEQ ID NO: 2752841 - RNA, 17 nt, Human respiratory syncytial virus
uauagaaguaaccaaag

SEQ ID NO: 2752842 - RNA, 18 nt, Human respiratory syncytial virus
guuacugacaauaaagga

SEQ ID NO: 2752843 - RNA, 18 nt, Human respiratory syncytial virus
aacacuacuaugcaaaga

SEQ ID NO: 2752844 - RNA, 15 nt, Human respiratory syncytial virus
auucgaaguauuaac

SEQ ID NO: 2752845 - RNA, 15 nt, Human respiratory syncytial virus
ucaaacccacaaaca

SEQ ID NO: 2752846 - RNA, 15 nt, Human respiratory syncytial virus
aaaacaccuaaacaa

SEQ ID NO: 2752847 - RNA, 23 nt, Human respiratory syncytial virus
ugaacucacuagaaaacauagca

SEQ ID NO: 2752848 - RNA, 22 nt, Human respiratory syncytial virus
auagcuaacaguuuuuaugaag

SEQ ID NO: 2752849 - RNA, 20 nt, Human respiratory syncytial virus
ugaucaacucacucagcaau

SEQ ID NO: 2752850 - RNA, 14 nt, Human respiratory syncytial virus
ucaucacacacaaa

SEQ ID NO: 2752851 - RNA, 16 nt, Human respiratory syncytial virus
uuaggagggcaaacaa

SEQ ID NO: 2752852 - RNA, 17 nt, Human respiratory syncytial virus
cacacaaaccaauccca

SEQ ID NO: 2752853 - RNA, 20 nt, Human respiratory syncytial virus
gcuacacguuuuucaaucaa

SEQ ID NO: 2752854 - RNA, 16 nt, Human respiratory syncytial virus
uacacacuucaucaca

SEQ ID NO: 2752855 - RNA, 18 nt, Human respiratory syncytial virus
aucacaauagaauucaca

SEQ ID NO: 2752856 - RNA, 13 nt, Human respiratory syncytial virus
uaaauaaggauca

SEQ ID NO: 2752857 - RNA, 21 nt, Human respiratory syncytial virus
uacuaugcaaagauuaaugau

SEQ ID NO: 2752858 - RNA, 22 nt, Human respiratory syncytial virus
cugaaucauuucuucacaucau

SEQ ID NO: 2752859 - RNA, 14 nt, Human respiratory syncytial virus
auacaaauaugacc

SEQ ID NO: 2752860 - RNA, 17 nt, Human respiratory syncytial virus
gaaagauagcauaauau

SEQ ID NO: 2752861 - RNA, 22 nt, Human respiratory syncytial virus
acugaaugacagguccacauau

SEQ ID NO: 2752862 - RNA, 16 nt, Human respiratory syncytial virus
cagaccgaacaaacaa

SEQ ID NO: 2752863 - RNA, 17 nt, Human respiratory syncytial virus
agucagucuaucaaaug

SEQ ID NO: 2752864 - RNA, 22 nt, Human respiratory syncytial virus
agauggggaguuuuagccaaau

SEQ ID NO: 2752865 - RNA, 15 nt, Human respiratory syncytial virus
aauaaacuaggacua

SEQ ID NO: 2752866 - RNA, 23 nt, Human respiratory syncytial virus
gagauagaaucuagaaaauccua

SEQ ID NO: 2752867 - RNA, 17 nt, Human respiratory syncytial virus
augauacauuaaauaag

SEQ ID NO: 2752868 - RNA, 22 nt, Human respiratory syncytial virus
aucgucaagauauaaauggaaa

SEQ ID NO: 2752869 - RNA, 16 nt, Human respiratory syncytial virus
aggauauagcuaacag

SEQ ID NO: 2752870 - RNA, 17 nt, Human respiratory syncytial virus
cuacaaccacaucacca

SEQ ID NO: 2752871 - RNA, 15 nt, Human respiratory syncytial virus
agucagaaacacacc

SEQ ID NO: 2752872 - RNA, 17 nt, Human respiratory syncytial virus
ccacaaacaaaagagac

SEQ ID NO: 2752873 - RNA, 17 nt, Human respiratory syncytial virus
ugaaaucaaagcaugca

SEQ ID NO: 2752874 - RNA, 18 nt, Human respiratory syncytial virus
aggaagggaagacacuau

SEQ ID NO: 2752875 - RNA, 13 nt, Human respiratory syncytial virus
aucacuaacaaua

SEQ ID NO: 2752876 - RNA, 13 nt, Human respiratory syncytial virus
auaaguggagcug

SEQ ID NO: 2752877 - RNA, 15 nt, Human respiratory syncytial virus
gucugagagaagaaa

SEQ ID NO: 2752878 - RNA, 19 nt, Human respiratory syncytial virus
auuuuugaucagugaucaa

SEQ ID NO: 2752879 - RNA, 23 nt, Human respiratory syncytial virus
gauuaaauuuaauuaucaacacu

SEQ ID NO: 2752880 - RNA, 22 nt, Human respiratory syncytial virus
auagcaagugguauagcuguau

SEQ ID NO: 2752881 - RNA, 15 nt, Human respiratory syncytial virus
cagcaaauacacuau

SEQ ID NO: 2752882 - RNA, 14 nt, Human respiratory syncytial virus
auacucucaaucau

SEQ ID NO: 2752883 - RNA, 17 nt, Human respiratory syncytial virus
caaaaaucacucaguaa

SEQ ID NO: 2752884 - RNA, 20 nt, Human respiratory syncytial virus
gucuaggcauaaugggagag

SEQ ID NO: 2752885 - RNA, 16 nt, Human respiratory syncytial virus
uaaagaagaugaugua

SEQ ID NO: 2752886 - RNA, 17 nt, Human respiratory syncytial virus
cacguuuuucaaucaaa

SEQ ID NO: 2752887 - RNA, 15 nt, Human respiratory syncytial virus
ggaagccauaaagaa

SEQ ID NO: 2752888 - RNA, 24 nt, Human respiratory syncytial virus
auuuauaccgccaauucaauacau

SEQ ID NO: 2752889 - RNA, 21 nt, Human respiratory syncytial virus
aaaucaucacacacaaauuca

SEQ ID NO: 2752890 - RNA, 13 nt, Human respiratory syncytial virus
aaaaagaacaaga

SEQ ID NO: 2752891 - RNA, 15 nt, Human respiratory syncytial virus
auuuacaacacaacg

SEQ ID NO: 2752892 - RNA, 12 nt, Human respiratory syncytial virus
gcaacaaucaac

SEQ ID NO: 2752893 - RNA, 21 nt, Human respiratory syncytial virus
ugcuuuguuaucuacaaacaa

SEQ ID NO: 2752894 - RNA, 15 nt, Human respiratory syncytial virus
aauuggaagccauaa

SEQ ID NO: 2752895 - RNA, 19 nt, Human respiratory syncytial virus
cuuaccaugaagacauuca

SEQ ID NO: 2752896 - RNA, 16 nt, Human respiratory syncytial virus
aacaucaucaauccaa

SEQ ID NO: 2752897 - RNA, 22 nt, Human respiratory syncytial virus
acaaaguagggaguaccaaaua

SEQ ID NO: 2752898 - RNA, 15 nt, Human respiratory syncytial virus
acuugcaagcaucaa

SEQ ID NO: 2752899 - RNA, 22 nt, Human respiratory syncytial virus
aaacacacccaacuccacacaa

SEQ ID NO: 2752900 - RNA, 23 nt, Human respiratory syncytial virus
uacauaggaucuauaaacaacau

SEQ ID NO: 2752901 - RNA, 23 nt, Human respiratory syncytial virus
aaaguguuagaucucaagaauua

SEQ ID NO: 2752902 - RNA, 23 nt, Human respiratory syncytial virus
caaaaaugcuaucaccaaugcga

SEQ ID NO: 2752903 - RNA, 15 nt, Human respiratory syncytial virus
agaaaccaaagccaa

SEQ ID NO: 2752904 - RNA, 22 nt, Human respiratory syncytial virus
gauggcucuuagcaaagucaag

SEQ ID NO: 2752905 - RNA, 23 nt, Human respiratory syncytial virus
ucaaagggaaauggggcaaauaa

SEQ ID NO: 2752906 - RNA, 19 nt, Human respiratory syncytial virus
cugccagaccgaacaaaca

SEQ ID NO: 2752907 - RNA, 14 nt, Human respiratory syncytial virus
augauaugccuaua

SEQ ID NO: 2752908 - RNA, 17 nt, Human respiratory syncytial virus
uuaaagcuaauggagua

SEQ ID NO: 2752909 - RNA, 14 nt, Human respiratory syncytial virus
ugguaugcuauuaa

SEQ ID NO: 2752910 - RNA, 18 nt, Human respiratory syncytial virus
gccgagcacaaaaccacg

SEQ ID NO: 2752911 - RNA, 21 nt, Human respiratory syncytial virus
acaucacccaacacaaaguca

SEQ ID NO: 2752912 - RNA, 19 nt, Human respiratory syncytial virus
auucuaccauauauugaac

SEQ ID NO: 2752913 - RNA, 14 nt, Human respiratory syncytial virus
caacagcacaaacc

SEQ ID NO: 2752914 - RNA, 21 nt, Human respiratory syncytial virus
uuauguuuagucuaacucaau

SEQ ID NO: 2752915 - RNA, 18 nt, Human respiratory syncytial virus
caacguaguacaggagau

SEQ ID NO: 2752916 - RNA, 12 nt, Human respiratory syncytial virus
aagaagaaagau

SEQ ID NO: 2752917 - RNA, 15 nt, Human respiratory syncytial virus
auuaugaugugcaaa

SEQ ID NO: 2752918 - RNA, 20 nt, Human respiratory syncytial virus
cauuuggauaaccaccagcg

SEQ ID NO: 2752919 - RNA, 19 nt, Human respiratory syncytial virus
caaaaaaagaacaagaugg

SEQ ID NO: 2752920 - RNA, 12 nt, Human respiratory syncytial virus
caaaaaaaccaa

SEQ ID NO: 2752921 - RNA, 18 nt, Human respiratory syncytial virus
acacucccaauuaugaug

SEQ ID NO: 2752922 - RNA, 19 nt, Human respiratory syncytial virus
aauuacuuggauaaguaau

SEQ ID NO: 2752923 - RNA, 17 nt, Human respiratory syncytial virus
caggacucuagaaaaga

SEQ ID NO: 2752924 - RNA, 16 nt, Human respiratory syncytial virus
accaaccaaucaauca

SEQ ID NO: 2752925 - RNA, 23 nt, Human respiratory syncytial virus
ugcgaauagguaaauaaaaccaa

SEQ ID NO: 2752926 - RNA, 17 nt, Human respiratory syncytial virus
aucaacucacucagcaa

SEQ ID NO: 2752927 - RNA, 17 nt, Human respiratory syncytial virus
acacuacuaugcaaaga

SEQ ID NO: 2752928 - RNA, 15 nt, Human respiratory syncytial virus
uacaaccacaucacc

SEQ ID NO: 2752929 - RNA, 23 nt, Human respiratory syncytial virus
caaagaaaucaucacacacaaau

SEQ ID NO: 2752930 - RNA, 20 nt, Human respiratory syncytial virus
gcaaagucaaguuaaaugau

SEQ ID NO: 2752931 - RNA, 15 nt, Human respiratory syncytial virus
auaaccauggagcug

SEQ ID NO: 2752932 - RNA, 20 nt, Human respiratory syncytial virus
cacuaaaucaacacaucauu

SEQ ID NO: 2752933 - RNA, 14 nt, Human respiratory syncytial virus
caucaaaaacagac

SEQ ID NO: 2752934 - RNA, 14 nt, Human respiratory syncytial virus
aauuggaagccaua

SEQ ID NO: 2752935 - RNA, 17 nt, Human respiratory syncytial virus
uucauggagaagaugca

SEQ ID NO: 2752936 - RNA, 17 nt, Human respiratory syncytial virus
caauuuauauacaaaau

SEQ ID NO: 2752937 - RNA, 15 nt, Human respiratory syncytial virus
cagaccgaacaaaca

SEQ ID NO: 2752938 - RNA, 21 nt, Human respiratory syncytial virus
aaacaacauuggggcaaaugc

SEQ ID NO: 2752939 - RNA, 16 nt, Human respiratory syncytial virus
aauuaucaacacugaa

SEQ ID NO: 2752940 - RNA, 17 nt, Human respiratory syncytial virus
ucaaacuaugagcacua

SEQ ID NO: 2752941 - RNA, 20 nt, Human respiratory syncytial virus
gaacaauccaaaagcaucau

SEQ ID NO: 2752942 - RNA, 15 nt, Human respiratory syncytial virus
aucuguaccagcaga

SEQ ID NO: 2752943 - RNA, 23 nt, Human respiratory syncytial virus
caauaauaacaucucucaccaaa

SEQ ID NO: 2752944 - RNA, 17 nt, Human respiratory syncytial virus
gcaaauuagcauaugau

SEQ ID NO: 2752945 - RNA, 13 nt, Human respiratory syncytial virus
guuuuuaugaagu

SEQ ID NO: 2752946 - RNA, 17 nt, Human respiratory syncytial virus
cuaugagcacuacaaau

SEQ ID NO: 2752947 - RNA, 16 nt, Human respiratory syncytial virus
cuaacaaugauacaug

SEQ ID NO: 2752948 - RNA, 18 nt, Human respiratory syncytial virus
uggcauuaagccuacaaa

SEQ ID NO: 2752949 - RNA, 17 nt, Human respiratory syncytial virus
ucaccaauccacacaaa

SEQ ID NO: 2752950 - RNA, 14 nt, Human respiratory syncytial virus
ccacagaaagagac

SEQ ID NO: 2752951 - RNA, 17 nt, Human respiratory syncytial virus
uauuagacuuaacagca

SEQ ID NO: 2752952 - RNA, 18 nt, Human respiratory syncytial virus
caaauuuagaugcuaaca

SEQ ID NO: 2752953 - RNA, 18 nt, Human respiratory syncytial virus
cugaaaaaaacaucacca

SEQ ID NO: 2752954 - RNA, 18 nt, Human respiratory syncytial virus
gaagccauaaagaaucaa

SEQ ID NO: 2752955 - RNA, 23 nt, Human respiratory syncytial virus
caauaccaagcaacaaaccaaag

SEQ ID NO: 2752956 - RNA, 12 nt, Human respiratory syncytial virus
aaacuacacacu

SEQ ID NO: 2752957 - RNA, 15 nt, Human respiratory syncytial virus
aaacaaggaucugaa

SEQ ID NO: 2752958 - RNA, 15 nt, Human respiratory syncytial virus
auauauccucaaacu

SEQ ID NO: 2752959 - RNA, 19 nt, Human respiratory syncytial virus
ucauggagaagaugcaaau

SEQ ID NO: 2752960 - RNA, 17 nt, Human respiratory syncytial virus
aaaauuaacauaaugau

SEQ ID NO: 2752961 - RNA, 21 nt, Human respiratory syncytial virus
agcauaugcagagcaacucaa

SEQ ID NO: 2752962 - RNA, 19 nt, Human respiratory syncytial virus
acuaugcaaagauuaauga

SEQ ID NO: 2752963 - RNA, 20 nt, Human respiratory syncytial virus
agauccuaagaagaaagaua

SEQ ID NO: 2752964 - RNA, 18 nt, Human respiratory syncytial virus
aagucaaguuaaaugaua

SEQ ID NO: 2752965 - RNA, 14 nt, Human respiratory syncytial virus
guauguuauaugcu

SEQ ID NO: 2752966 - RNA, 13 nt, Human respiratory syncytial virus
auuagaacacaca

SEQ ID NO: 2752967 - RNA, 19 nt, Human respiratory syncytial virus
cuaaagaagaugauguaga

SEQ ID NO: 2752968 - RNA, 16 nt, Human respiratory syncytial virus
aucugaugaauuacua

SEQ ID NO: 2752969 - RNA, 18 nt, Human respiratory syncytial virus
uaaaagaacuugcaagca

SEQ ID NO: 2752970 - RNA, 24 nt, Human respiratory syncytial virus
gugcaaaaacaccuaaacaaacua

SEQ ID NO: 2752971 - RNA, 22 nt, Human respiratory syncytial virus
acugccagaccgaacaaacaaa

SEQ ID NO: 2752972 - RNA, 16 nt, Human respiratory syncytial virus
agguauguuauaugcu

SEQ ID NO: 2752973 - RNA, 15 nt, Human respiratory syncytial virus
aauucaaaaaugcua

SEQ ID NO: 2752974 - RNA, 19 nt, Human respiratory syncytial virus
caaagucaaguuaaaugau

SEQ ID NO: 2752975 - RNA, 20 nt, Human respiratory syncytial virus
ugccucuuaauccaacuucc

SEQ ID NO: 2752976 - RNA, 20 nt, Human respiratory syncytial virus
uaauaaccaaauuagcagca

SEQ ID NO: 2752977 - RNA, 13 nt, Human respiratory syncytial virus
aaagaaaauggag

SEQ ID NO: 2752978 - RNA, 15 nt, Human respiratory syncytial virus
auauuuaucaaucau

SEQ ID NO: 2752979 - RNA, 19 nt, Human respiratory syncytial virus
gcaaaaacaccuaaacaaa

SEQ ID NO: 2752980 - RNA, 14 nt, Human respiratory syncytial virus
acaggauuaauagg

SEQ ID NO: 2752981 - RNA, 23 nt, Human respiratory syncytial virus
ucagcaaauagacaaaaaaccac

SEQ ID NO: 2752982 - RNA, 21 nt, Human respiratory syncytial virus
uuggaagccauaaagaaucaa

SEQ ID NO: 2752983 - RNA, 22 nt, Human respiratory syncytial virus
auaugaagagauaaaugaucaa

SEQ ID NO: 2752984 - RNA, 13 nt, Human respiratory syncytial virus
acagcagaagaau

SEQ ID NO: 2752985 - RNA, 22 nt, Human respiratory syncytial virus
gucuaugaguaugcacagaagu

SEQ ID NO: 2752986 - RNA, 13 nt, Human respiratory syncytial virus
auacucucaauca

SEQ ID NO: 2752987 - RNA, 21 nt, Human respiratory syncytial virus
aacuacaauuauuauaguaau

SEQ ID NO: 2752988 - RNA, 13 nt, Human respiratory syncytial virus
acaauagaauuaa

SEQ ID NO: 2752989 - RNA, 19 nt, Human respiratory syncytial virus
acauaagcagcucaguaau

SEQ ID NO: 2752990 - RNA, 16 nt, Human respiratory syncytial virus
ugacgaaauuaacaau

SEQ ID NO: 2752991 - RNA, 12 nt, Human respiratory syncytial virus
gaguucaaucaa

SEQ ID NO: 2752992 - RNA, 15 nt, Human respiratory syncytial virus
uaaaacuaacaauga

SEQ ID NO: 2752993 - RNA, 18 nt, Human respiratory syncytial virus
uggggcaaauaaacucac

SEQ ID NO: 2752994 - RNA, 17 nt, Human respiratory syncytial virus
aauaucuguuaacucaa

SEQ ID NO: 2752995 - RNA, 22 nt, Human respiratory syncytial virus
uaugcacagaaguugggaggag

SEQ ID NO: 2752996 - RNA, 16 nt, Human respiratory syncytial virus
auaauauacaaauaug

SEQ ID NO: 2752997 - RNA, 17 nt, Human respiratory syncytial virus
aaauuccacccaaaaua

SEQ ID NO: 2752998 - RNA, 23 nt, Human respiratory syncytial virus
aucaaucauggcggguuucuaga

SEQ ID NO: 2752999 - RNA, 22 nt, Human respiratory syncytial virus
cuagaaaagaccugggauacuc

SEQ ID NO: 2753000 - RNA, 20 nt, Human respiratory syncytial virus
auuuaaaaauuaacauaaug

SEQ ID NO: 2753001 - RNA, 16 nt, Human respiratory syncytial virus
caccaguuacacuaag

SEQ ID NO: 2753002 - RNA, 15 nt, Human respiratory syncytial virus
aaguuaaaugauaca

SEQ ID NO: 2753003 - RNA, 14 nt, Human respiratory syncytial virus
caauaccaagcaac

SEQ ID NO: 2753004 - RNA, 20 nt, Human respiratory syncytial virus
ucuagaaaauccuacaaaaa

SEQ ID NO: 2753005 - RNA, 14 nt, Human respiratory syncytial virus
auuaagccuacaaa

SEQ ID NO: 2753006 - RNA, 16 nt, Human respiratory syncytial virus
auaaaacaagaauuag

SEQ ID NO: 2753007 - RNA, 12 nt, Human respiratory syncytial virus
augcaaaacaca

SEQ ID NO: 2753008 - RNA, 19 nt, Human respiratory syncytial virus
agcacuuguaauaaccaaa

SEQ ID NO: 2753009 - RNA, 14 nt, Human respiratory syncytial virus
acaauccaaaagca

SEQ ID NO: 2753010 - RNA, 19 nt, Human respiratory syncytial virus
guaccaaauacaagaaaua

SEQ ID NO: 2753011 - RNA, 19 nt, Human respiratory syncytial virus
uuuauuuuaaaucaauaug

SEQ ID NO: 2753012 - RNA, 12 nt, Human respiratory syncytial virus
aaccacaaacaa

SEQ ID NO: 2753013 - RNA, 16 nt, Human respiratory syncytial virus
uaaaaaauaucaugcu

SEQ ID NO: 2753014 - RNA, 16 nt, Human respiratory syncytial virus
augcuaguguccaggc

SEQ ID NO: 2753015 - RNA, 12 nt, Human respiratory syncytial virus
aaauaaacucac

SEQ ID NO: 2753016 - RNA, 18 nt, Human respiratory syncytial virus
ucaacccauaacaaacac

SEQ ID NO: 2753017 - RNA, 21 nt, Human respiratory syncytial virus
ucaagugugguccuaggcaau

SEQ ID NO: 2753018 - RNA, 16 nt, Human respiratory syncytial virus
caaauuagcauaugau

SEQ ID NO: 2753019 - RNA, 17 nt, Human respiratory syncytial virus
caaccaacugauccauc

SEQ ID NO: 2753020 - RNA, 14 nt, Human respiratory syncytial virus
cugaagaugcaaau

SEQ ID NO: 2753021 - RNA, 16 nt, Human respiratory syncytial virus
caccagccaaaacgac

SEQ ID NO: 2753022 - RNA, 14 nt, Human respiratory syncytial virus
auaauacuguguau

SEQ ID NO: 2753023 - RNA, 24 nt, Human respiratory syncytial virus
ggaaacauacgugaacaagcuuca

SEQ ID NO: 2753024 - RNA, 20 nt, Human respiratory syncytial virus
agagcaauagaaaaaacaac

SEQ ID NO: 2753025 - RNA, 20 nt, Human respiratory syncytial virus
caacaucacccaacacaaag

SEQ ID NO: 2753026 - RNA, 19 nt, Human respiratory syncytial virus
caauagaauucacaagcaa

SEQ ID NO: 2753027 - RNA, 23 nt, Human respiratory syncytial virus
aaucacugaagaugcaaaucaua

SEQ ID NO: 2753028 - RNA, 21 nt, Human respiratory syncytial virus
auaaagauacuuaaagaugcu

SEQ ID NO: 2753029 - RNA, 16 nt, Human respiratory syncytial virus
aacacacaauccaaca

SEQ ID NO: 2753030 - RNA, 13 nt, Human respiratory syncytial virus
caucuuauagaug

SEQ ID NO: 2753031 - RNA, 23 nt, Human respiratory syncytial virus
cuguauauauaaacaaacaaauc

SEQ ID NO: 2753032 - RNA, 15 nt, Human respiratory syncytial virus
uaaauuuaaaaucua

SEQ ID NO: 2753033 - RNA, 13 nt, Human respiratory syncytial virus
caaaaaaaugcua

SEQ ID NO: 2753034 - RNA, 16 nt, Human respiratory syncytial virus
aucaugaacaucuaca

SEQ ID NO: 2753035 - RNA, 23 nt, Human respiratory syncytial virus
aacaguuauagaauuccagcaga

SEQ ID NO: 2753036 - RNA, 14 nt, Human respiratory syncytial virus
acuaauuauaauca

SEQ ID NO: 2753037 - RNA, 17 nt, Human respiratory syncytial virus
ggaaauggggcaaauaa

SEQ ID NO: 2753038 - RNA, 22 nt, Human respiratory syncytial virus
uacuuaugcaaaacacaccagc

SEQ ID NO: 2753039 - RNA, 20 nt, Human respiratory syncytial virus
auuuagaugcuaacacauca

SEQ ID NO: 2753040 - RNA, 12 nt, Human respiratory syncytial virus
cauugcugucau

SEQ ID NO: 2753041 - RNA, 18 nt, Human respiratory syncytial virus
accauuuuaguuaauaua

SEQ ID NO: 2753042 - RNA, 14 nt, Human respiratory syncytial virus
auaaagauacuuaa

SEQ ID NO: 2753043 - RNA, 18 nt, Human respiratory syncytial virus
gcaauacuaaauaagcua

SEQ ID NO: 2753044 - RNA, 15 nt, Human respiratory syncytial virus
accuugugaaaucaa

SEQ ID NO: 2753045 - RNA, 13 nt, Human respiratory syncytial virus
gaccgaacaaaca

SEQ ID NO: 2753046 - RNA, 16 nt, Human respiratory syncytial virus
auucuuagucaauuau

SEQ ID NO: 2753047 - RNA, 11 nt, Human respiratory syncytial virus
ucccacucaaa

SEQ ID NO: 2753048 - RNA, 17 nt, Human respiratory syncytial virus
aauuaugaugugcaaaa

SEQ ID NO: 2753049 - RNA, 14 nt, Human respiratory syncytial virus
aucuuuaugaugca

SEQ ID NO: 2753050 - RNA, 22 nt, Human respiratory syncytial virus
acauuaguuagaguucaaucaa

SEQ ID NO: 2753051 - RNA, 21 nt, Human respiratory syncytial virus
ucaaucauauacaaauucaga

SEQ ID NO: 2753052 - RNA, 18 nt, Human respiratory syncytial virus
ucgcaucauccaaagauc

SEQ ID NO: 2753053 - RNA, 12 nt, Human respiratory syncytial virus
aagcauaugcag

SEQ ID NO: 2753054 - RNA, 20 nt, Human respiratory syncytial virus
aagauggcucuuagcaaagu

SEQ ID NO: 2753055 - RNA, 14 nt, Human respiratory syncytial virus
auauacaaauauga

SEQ ID NO: 2753056 - RNA, 20 nt, Human respiratory syncytial virus
gccauaaagaaucaacucaa

SEQ ID NO: 2753057 - RNA, 16 nt, Human respiratory syncytial virus
cacguuuuucaaucaa

SEQ ID NO: 2753058 - RNA, 18 nt, Human respiratory syncytial virus
uaggaagggaagacacua

SEQ ID NO: 2753059 - RNA, 13 nt, Human respiratory syncytial virus
auccugcaucacu

SEQ ID NO: 2753060 - RNA, 16 nt, Human respiratory syncytial virus
agaaauggagcaaguu

SEQ ID NO: 2753061 - RNA, 20 nt, Human respiratory syncytial virus
aguaccccagaaaccaaagc

SEQ ID NO: 2753062 - RNA, 20 nt, Human respiratory syncytial virus
caaaucauaaauucacagga

SEQ ID NO: 2753063 - RNA, 17 nt, Human respiratory syncytial virus
aauacuaaauaagcuaa

SEQ ID NO: 2753064 - RNA, 23 nt, Human respiratory syncytial virus
ugcuggaaauuacacacaucacc

SEQ ID NO: 2753065 - RNA, 18 nt, Human respiratory syncytial virus
ccucaaacuacacacuau

SEQ ID NO: 2753066 - RNA, 14 nt, Human respiratory syncytial virus
augugcaaaaacac

SEQ ID NO: 2753067 - RNA, 13 nt, Human respiratory syncytial virus
caaaauuaaauaa

SEQ ID NO: 2753068 - RNA, 19 nt, Human respiratory syncytial virus
uaaaaugggaaauacaucc

SEQ ID NO: 2753069 - RNA, 16 nt, Human respiratory syncytial virus
caacuccacacaaaca

SEQ ID NO: 2753070 - RNA, 16 nt, Human respiratory syncytial virus
ccgagcacaaaaccac

SEQ ID NO: 2753071 - RNA, 16 nt, Human respiratory syncytial virus
gcaaauaaacucaccu

SEQ ID NO: 2753072 - RNA, 16 nt, Human respiratory syncytial virus
cugugucaaauuauaa

SEQ ID NO: 2753073 - RNA, 23 nt, Human respiratory syncytial virus
cgaauagguaaauaaaaccaaaa

SEQ ID NO: 2753074 - RNA, 19 nt, Human respiratory syncytial virus
gugacuuguuggaagacaa

SEQ ID NO: 2753075 - RNA, 12 nt, Human respiratory syncytial virus
auaugaagagau

SEQ ID NO: 2753076 - RNA, 20 nt, Human respiratory syncytial virus
guaguuauuuaaaaauuaac

SEQ ID NO: 2753077 - RNA, 16 nt, Human respiratory syncytial virus
acaaacaaagcuguag

SEQ ID NO: 2753078 - RNA, 23 nt, Human respiratory syncytial virus
aaccaaauuagcagcaggagaca

SEQ ID NO: 2753079 - RNA, 12 nt, Human respiratory syncytial virus
auauugaacaau

SEQ ID NO: 2753080 - RNA, 21 nt, Human respiratory syncytial virus
ccaacaucaucaauccaacaa

SEQ ID NO: 2753081 - RNA, 21 nt, Human respiratory syncytial virus
aacuauaacacagucauuaau

SEQ ID NO: 2753082 - RNA, 12 nt, Human respiratory syncytial virus
gagacaccagca

SEQ ID NO: 2753083 - RNA, 23 nt, Human respiratory syncytial virus
aacaacggucacaguucaaacaa

SEQ ID NO: 2753084 - RNA, 15 nt, Human respiratory syncytial virus
aacacacaauccaac

SEQ ID NO: 2753085 - RNA, 14 nt, Human respiratory syncytial virus
uaucacaauuauuu

SEQ ID NO: 2753086 - RNA, 15 nt, Human respiratory syncytial virus
aacuuauaaaacaag

SEQ ID NO: 2753087 - RNA, 23 nt, Human respiratory syncytial virus
ugucauccagcaaauacacuauu

SEQ ID NO: 2753088 - RNA, 22 nt, Human respiratory syncytial virus
uccaaacaaccuacaaccacau

SEQ ID NO: 2753089 - RNA, 16 nt, Human respiratory syncytial virus
aacaguuauagaauuc

SEQ ID NO: 2753090 - RNA, 22 nt, Human respiratory syncytial virus
gaccacagaaagagacaccagc

SEQ ID NO: 2753091 - RNA, 16 nt, Human respiratory syncytial virus
auugcucuaugugaau

SEQ ID NO: 2753092 - RNA, 22 nt, Human respiratory syncytial virus
auuaugauaacuacaauuauua

SEQ ID NO: 2753093 - RNA, 16 nt, Human respiratory syncytial virus
agaagaaccaacuuau

SEQ ID NO: 2753094 - RNA, 23 nt, Human respiratory syncytial virus
acaugcuuaguuauucaaaaacu

SEQ ID NO: 2753095 - RNA, 22 nt, Human respiratory syncytial virus
auugcaaagccaaaaacacacc

SEQ ID NO: 2753096 - RNA, 15 nt, Human respiratory syncytial virus
ccaacccaaccaaac

SEQ ID NO: 2753097 - RNA, 18 nt, Human respiratory syncytial virus
aacacacaauccaacagc

SEQ ID NO: 2753098 - RNA, 17 nt, Human respiratory syncytial virus
gugccuaccuagaaaaa

SEQ ID NO: 2753099 - RNA, 14 nt, Human respiratory syncytial virus
gcagcaggagacag

SEQ ID NO: 2753100 - RNA, 23 nt, Human respiratory syncytial virus
auguuguguuaucacaauuauuu

SEQ ID NO: 2753101 - RNA, 14 nt, Human respiratory syncytial virus
aagacacuauaaag

SEQ ID NO: 2753102 - RNA, 22 nt, Human respiratory syncytial virus
agaugcaucaaaucaacacaua

SEQ ID NO: 2753103 - RNA, 16 nt, Human respiratory syncytial virus
caucuguaccagcaga

SEQ ID NO: 2753104 - RNA, 17 nt, Human respiratory syncytial virus
ucaaucucaacaaccau

SEQ ID NO: 2753105 - RNA, 15 nt, Human respiratory syncytial virus
aguggcuccagaaua

SEQ ID NO: 2753106 - RNA, 15 nt, Human respiratory syncytial virus
agcucauccaaacaa

SEQ ID NO: 2753107 - RNA, 22 nt, Human respiratory syncytial virus
accauauauugaacaauccaaa

SEQ ID NO: 2753108 - RNA, 18 nt, Human respiratory syncytial virus
gauuaaauuuaaaaucua

SEQ ID NO: 2753109 - RNA, 19 nt, Human respiratory syncytial virus
gcaaccaccgaauucaaaa

SEQ ID NO: 2753110 - RNA, 19 nt, Human respiratory syncytial virus
ggaagccauaaagaaucaa

SEQ ID NO: 2753111 - RNA, 14 nt, Human respiratory syncytial virus
caaacuacacacua

SEQ ID NO: 2753112 - RNA, 21 nt, Human respiratory syncytial virus
ucucaagugugguccuaggca

SEQ ID NO: 2753113 - RNA, 19 nt, Human respiratory syncytial virus
aauaguuaagaaggagcua

SEQ ID NO: 2753114 - RNA, 17 nt, Human respiratory syncytial virus
aaugucuuaaaaaauga

SEQ ID NO: 2753115 - RNA, 11 nt, Human respiratory syncytial virus
cagggcaagua

SEQ ID NO: 2753116 - RNA, 16 nt, Human respiratory syncytial virus
ucauggagaagaugca

SEQ ID NO: 2753117 - RNA, 23 nt, Human respiratory syncytial virus
aucugaugaauuacuacauaaug

SEQ ID NO: 2753118 - RNA, 16 nt, Human respiratory syncytial virus
aaaaucaaucaaaguu

SEQ ID NO: 2753119 - RNA, 22 nt, Human respiratory syncytial virus
aaaagucuaaaacuaacaauga

SEQ ID NO: 2753120 - RNA, 16 nt, Human respiratory syncytial virus
ccaaauuagcagcagg

SEQ ID NO: 2753121 - RNA, 14 nt, Human respiratory syncytial virus
auuguuuaugaaug

SEQ ID NO: 2753122 - RNA, 14 nt, Human respiratory syncytial virus
guauauauaaacaa

SEQ ID NO: 2753123 - RNA, 15 nt, Human respiratory syncytial virus
cugaaaaaaacauca

SEQ ID NO: 2753124 - RNA, 13 nt, Human respiratory syncytial virus
auuagaugaaaga

SEQ ID NO: 2753125 - RNA, 20 nt, Human respiratory syncytial virus
gaaacaauagaaacauuuga

SEQ ID NO: 2753126 - RNA, 15 nt, Human respiratory syncytial virus
guuggucugagagaa

SEQ ID NO: 2753127 - RNA, 13 nt, Human respiratory syncytial virus
aacucaaagaaaa

SEQ ID NO: 2753128 - RNA, 15 nt, Human respiratory syncytial virus
augcuauuaaucacu

SEQ ID NO: 2753129 - RNA, 13 nt, Human respiratory syncytial virus
aaauaacauauua

SEQ ID NO: 2753130 - RNA, 18 nt, Human respiratory syncytial virus
gcagagcaacucaaagaa

SEQ ID NO: 2753131 - RNA, 20 nt, Human respiratory syncytial virus
auauaguaacaaaaaaagaa

SEQ ID NO: 2753132 - RNA, 19 nt, Human respiratory syncytial virus
cuaaacaaacuauguggua

SEQ ID NO: 2753133 - RNA, 16 nt, Human respiratory syncytial virus
acaaauagcacuauca

SEQ ID NO: 2753134 - RNA, 21 nt, Human respiratory syncytial virus
augucacuacagucauaauua

SEQ ID NO: 2753135 - RNA, 21 nt, Human respiratory syncytial virus
aacccuaaagaagaugaugua

SEQ ID NO: 2753136 - RNA, 20 nt, Human respiratory syncytial virus
uuagaugcuaacacaucauu

SEQ ID NO: 2753137 - RNA, 19 nt, Human respiratory syncytial virus
cacaaaguuacacuaacaa

SEQ ID NO: 2753138 - RNA, 16 nt, Human respiratory syncytial virus
auccaaacaucaugaa

SEQ ID NO: 2753139 - RNA, 18 nt, Human respiratory syncytial virus
gucagcggaaccaccaac

SEQ ID NO: 2753140 - RNA, 15 nt, Human respiratory syncytial virus
caacccucacgacca

SEQ ID NO: 2753141 - RNA, 18 nt, Human respiratory syncytial virus
ccagcguuuauuaaauaa

SEQ ID NO: 2753142 - RNA, 17 nt, Human respiratory syncytial virus
caaauauggaaacauac

SEQ ID NO: 2753143 - RNA, 19 nt, Human respiratory syncytial virus
aacaucaauaaaacagaca

SEQ ID NO: 2753144 - RNA, 15 nt, Human respiratory syncytial virus
aaauuccuagaauca

SEQ ID NO: 2753145 - RNA, 13 nt, Human respiratory syncytial virus
agaauauaggcau

SEQ ID NO: 2753146 - RNA, 17 nt, Human respiratory syncytial virus
aaacgacgaaaaaagaa

SEQ ID NO: 2753147 - RNA, 18 nt, Human respiratory syncytial virus
cagaaagagacaccagca

SEQ ID NO: 2753148 - RNA, 13 nt, Human respiratory syncytial virus
aagaugauguaga

SEQ ID NO: 2753149 - RNA, 19 nt, Human respiratory syncytial virus
ucaacguaguacaggagau

SEQ ID NO: 2753150 - RNA, 11 nt, Human respiratory syncytial virus
gagagaagaaa

SEQ ID NO: 2753151 - RNA, 17 nt, Human respiratory syncytial virus
ugcagguguaacaacac

SEQ ID NO: 2753152 - RNA, 15 nt, Human respiratory syncytial virus
caaagcauaugcaga

SEQ ID NO: 2753153 - RNA, 17 nt, Human respiratory syncytial virus
cguaaauuccaacaaaa

SEQ ID NO: 2753154 - RNA, 22 nt, Human respiratory syncytial virus
agucaaguuaaaugauacauua

SEQ ID NO: 2753155 - RNA, 16 nt, Human respiratory syncytial virus
aagaaaccaggaucuu

SEQ ID NO: 2753156 - RNA, 13 nt, Human respiratory syncytial virus
auauccaaacauc

SEQ ID NO: 2753157 - RNA, 17 nt, Human respiratory syncytial virus
gagcaacucaaagaaaa

SEQ ID NO: 2753158 - RNA, 19 nt, Human respiratory syncytial virus
aucaaucaaacuaugagca

SEQ ID NO: 2753159 - RNA, 17 nt, Human respiratory syncytial virus
agcagaagaacagcaga

SEQ ID NO: 2753160 - RNA, 23 nt, Human respiratory syncytial virus
uaaauuggggcaaauacaaagau

SEQ ID NO: 2753161 - RNA, 22 nt, Human respiratory syncytial virus
gacuagauagaauugaugaaaa

SEQ ID NO: 2753162 - RNA, 21 nt, Human respiratory syncytial virus
gcaagacuuaggaaugaggaa

SEQ ID NO: 2753163 - RNA, 21 nt, Human respiratory syncytial virus
caaaccaaccaccaaaaccac

SEQ ID NO: 2753164 - RNA, 22 nt, Human respiratory syncytial virus
agcauaugcagagcaacucaaa

SEQ ID NO: 2753165 - RNA, 13 nt, Human respiratory syncytial virus
aaauacaagucaa

SEQ ID NO: 2753166 - RNA, 15 nt, Human respiratory syncytial virus
uacaagaaauacacu

SEQ ID NO: 2753167 - RNA, 17 nt, Human respiratory syncytial virus
caagaaauacacugaau

SEQ ID NO: 2753168 - RNA, 13 nt, Human respiratory syncytial virus
cucuuagcaaagu

SEQ ID NO: 2753169 - RNA, 18 nt, Human respiratory syncytial virus
aauguucuagaaaaagau

SEQ ID NO: 2753170 - RNA, 21 nt, Human respiratory syncytial virus
aguguccaggcagaaauggag

SEQ ID NO: 2753171 - RNA, 23 nt, Human respiratory syncytial virus
gaaggagaagugaacaagaucaa

SEQ ID NO: 2753172 - RNA, 21 nt, Human respiratory syncytial virus
cacaaagucagaaacacacca

SEQ ID NO: 2753173 - RNA, 16 nt, Human respiratory syncytial virus
aguauaugaacuauac

SEQ ID NO: 2753174 - RNA, 16 nt, Human respiratory syncytial virus
acuuuggcauugcaca

SEQ ID NO: 2753175 - RNA, 16 nt, Human respiratory syncytial virus
caccuugugaaaucaa

SEQ ID NO: 2753176 - RNA, 18 nt, Human respiratory syncytial virus
gagcaacucaaagaaaau

SEQ ID NO: 2753177 - RNA, 17 nt, Human respiratory syncytial virus
caaagaaacaauagaaa

SEQ ID NO: 2753178 - RNA, 14 nt, Human respiratory syncytial virus
ucauguuaaagcua

SEQ ID NO: 2753179 - RNA, 13 nt, Human respiratory syncytial virus
ccacaaacaaacc

SEQ ID NO: 2753180 - RNA, 14 nt, Human respiratory syncytial virus
gcaaucaacaacau

SEQ ID NO: 2753181 - RNA, 19 nt, Human respiratory syncytial virus
aagaucuuaccaugaagac

SEQ ID NO: 2753182 - RNA, 17 nt, Human respiratory syncytial virus
cuaaguuguacaaagaa

SEQ ID NO: 2753183 - RNA, 21 nt, Human respiratory syncytial virus
aagcuugacaucagaaauaca

SEQ ID NO: 2753184 - RNA, 12 nt, Human respiratory syncytial virus
acaucaaaaaca

SEQ ID NO: 2753185 - RNA, 20 nt, Human respiratory syncytial virus
acuugaugaaagacaagcua

SEQ ID NO: 2753186 - RNA, 18 nt, Human respiratory syncytial virus
uagguauguuauaugcua

SEQ ID NO: 2753187 - RNA, 20 nt, Human respiratory syncytial virus
auuaggagggcaaacaaugu

SEQ ID NO: 2753188 - RNA, 16 nt, Human respiratory syncytial virus
aaagacuaccagcaga

SEQ ID NO: 2753189 - RNA, 22 nt, Human respiratory syncytial virus
ugcaagugcaggacccacuuca

SEQ ID NO: 2753190 - RNA, 18 nt, Human respiratory syncytial virus
gcaaaaacaccuaaacaa

SEQ ID NO: 2753191 - RNA, 19 nt, Human respiratory syncytial virus
caagucccaccagaaaggg

SEQ ID NO: 2753192 - RNA, 13 nt, Human respiratory syncytial virus
accaacaucauca

SEQ ID NO: 2753193 - RNA, 18 nt, Human respiratory syncytial virus
auauacaaaauuaaauaa

SEQ ID NO: 2753194 - RNA, 19 nt, Human respiratory syncytial virus
ugaugcagccaaagcauau

SEQ ID NO: 2753195 - RNA, 18 nt, Human respiratory syncytial virus
uugugacacuaugaacag

SEQ ID NO: 2753196 - RNA, 13 nt, Human respiratory syncytial virus
aagaagaugaugu

SEQ ID NO: 2753197 - RNA, 13 nt, Human respiratory syncytial virus
ggagaagaugcaa

SEQ ID NO: 2753198 - RNA, 15 nt, Human respiratory syncytial virus
uagacaaaaaaccac

SEQ ID NO: 2753199 - RNA, 17 nt, Human respiratory syncytial virus
acaaugaucugucacuu

SEQ ID NO: 2753200 - RNA, 22 nt, Human respiratory syncytial virus
guauaugaacuauacaaucaau

SEQ ID NO: 2753201 - RNA, 12 nt, Human respiratory syncytial virus
aagccaaaaaca

SEQ ID NO: 2753202 - RNA, 20 nt, Human respiratory syncytial virus
gcacugcauccaacaaaaau

SEQ ID NO: 2753203 - RNA, 19 nt, Human respiratory syncytial virus
ucauccaaagauccuaaga

SEQ ID NO: 2753204 - RNA, 20 nt, Human respiratory syncytial virus
cacuuguaaaguacagucca

SEQ ID NO: 2753205 - RNA, 13 nt, Human respiratory syncytial virus
agaaaaagaugau

SEQ ID NO: 2753206 - RNA, 20 nt, Human respiratory syncytial virus
cacugaauauaauacaaaau

SEQ ID NO: 2753207 - RNA, 22 nt, Human respiratory syncytial virus
cacuccuauaauauacaaauau

SEQ ID NO: 2753208 - RNA, 20 nt, Human respiratory syncytial virus
aacaguuugacauuaccaag

SEQ ID NO: 2753209 - RNA, 14 nt, Human respiratory syncytial virus
auuccaacaaaaaa

SEQ ID NO: 2753210 - RNA, 17 nt, Human respiratory syncytial virus
uaaaugaucaaacaaau

SEQ ID NO: 2753211 - RNA, 15 nt, Human respiratory syncytial virus
uacaaagaaacaaua

SEQ ID NO: 2753212 - RNA, 17 nt, Human respiratory syncytial virus
ucacaguucaaacaaua

SEQ ID NO: 2753213 - RNA, 12 nt, Human respiratory syncytial virus
uauuagugucau

SEQ ID NO: 2753214 - RNA, 18 nt, Human respiratory syncytial virus
uugguauaccagugucau

SEQ ID NO: 2753215 - RNA, 22 nt, Human respiratory syncytial virus
uuaauccaacuuccaaaaaauu

SEQ ID NO: 2753216 - RNA, 13 nt, Human respiratory syncytial virus
uugaugaaaaauu

SEQ ID NO: 2753217 - RNA, 19 nt, Human respiratory syncytial virus
uuccuagaaucaauaaagg

SEQ ID NO: 2753218 - RNA, 20 nt, Human respiratory syncytial virus
ucuuggagcuauagugucau

SEQ ID NO: 2753219 - RNA, 20 nt, Human respiratory syncytial virus
cuugaugauuuuugaucagu

SEQ ID NO: 2753220 - RNA, 16 nt, Human respiratory syncytial virus
aaaaagaacaagaugg

SEQ ID NO: 2753221 - RNA, 21 nt, Human
cuccagugagacagcucugca

SEQ ID NO: 2753222 - RNA, 13 nt, Human
cuccuuucucuuu

SEQ ID NO: 2753223 - RNA, 19 nt, Human
cucucuggccuucggccuc

SEQ ID NO: 2753224 - RNA, 22 nt, Human
cucucuggccuucggccuccau

SEQ ID NO: 2753225 - RNA, 17 nt, Human
cucucuggccuucggcc

SEQ ID NO: 2753226 - RNA, 13 nt, Human
cugaaagaggaau

SEQ ID NO: 2753227 - RNA, 17 nt, Human
cugaaagaggaaugaag

SEQ ID NO: 2753228 - RNA, 18 nt, Human
cugaggaauucuguauag

SEQ ID NO: 2753229 - RNA, 19 nt, Human
cugaggaauucuguauaga

SEQ ID NO: 2753230 - RNA, 15 nt, Human
cugaggaauucugua

SEQ ID NO: 2753231 - RNA, 16 nt, Human
cugaggaauucuguau

SEQ ID NO: 2753232 - RNA, 24 nt, Human
cggagaagagcuguucacagccag

SEQ ID NO: 2753233 - RNA, 23 nt, Human
cggagaagagcuguucacagcca

SEQ ID NO: 2753234 - RNA, 15 nt, Human
cgguuuauauaagcu

SEQ ID NO: 2753235 - RNA, 14 nt, Human
cuaacuggacuggu

SEQ ID NO: 2753236 - RNA, 15 nt, Human
cuaaacuuuucugau

SEQ ID NO: 2753237 - RNA, 16 nt, Human
cuaaacuuuucugaua

SEQ ID NO: 2753238 - RNA, 19 nt, Human
cucagaaaacaaggaugaa

SEQ ID NO: 2753239 - RNA, 23 nt, Human
cucagaaaacaaggaugaauuaa

SEQ ID NO: 2753240 - RNA, 13 nt, Human
cucaaaacugcac

SEQ ID NO: 2753241 - RNA, 14 nt, Human
ccucggagaagagc

SEQ ID NO: 2753242 - RNA, 12 nt, Human
ccucggagaaga

SEQ ID NO: 2753243 - RNA, 16 nt, Human
ccucccuucucuucac

SEQ ID NO: 2753244 - RNA, 17 nt, Human
ccugucucuacuaaaaa

SEQ ID NO: 2753245 - RNA, 13 nt, Human
cccaacuccagaa

SEQ ID NO: 2753246 - RNA, 13 nt, Human
ccaucccucccuc

SEQ ID NO: 2753247 - RNA, 14 nt, Human
ccaucccucccucc

SEQ ID NO: 2753248 - RNA, 15 nt, Human
ccaucccucccucca

SEQ ID NO: 2753249 - RNA, 13 nt, Human
cccuccucugcuu

SEQ ID NO: 2753250 - RNA, 22 nt, Human
cccuccucugcuugccaucccu

SEQ ID NO: 2753251 - RNA, 13 nt, Human
ccccugcacucca

SEQ ID NO: 2753252 - RNA, 24 nt, Human
cccagccagcaguucagagcugcc

SEQ ID NO: 2753253 - RNA, 20 nt, Human
cccauauuuguacaccaaua

SEQ ID NO: 2753254 - RNA, 23 nt, Human
caggaaaucaaauaugcaaagca

SEQ ID NO: 2753255 - RNA, 22 nt, Human
caggaaaucaaauaugcaaagc

SEQ ID NO: 2753256 - RNA, 20 nt, Human
caggaaagagaacuuccaga

SEQ ID NO: 2753257 - RNA, 16 nt, Human
cagcuccccucggaga

SEQ ID NO: 2753258 - RNA, 18 nt, Human
cagcuccccucggagaag

SEQ ID NO: 2753259 - RNA, 17 nt, Human
cagcuccccucggagaa

SEQ ID NO: 2753260 - RNA, 23 nt, Human
cagcugccuccccuccucugcuu

SEQ ID NO: 2753261 - RNA, 24 nt, Human
cagcugccuccccuccucugcuug

SEQ ID NO: 2753262 - RNA, 21 nt, Human
cagcugccuccccuccucugc

SEQ ID NO: 2753263 - RNA, 22 nt, Human
cagcugccuccccuccucugcu

SEQ ID NO: 2753264 - RNA, 15 nt, Human
cagcccuucuuucca

SEQ ID NO: 2753265 - RNA, 19 nt, Human
cagcccuucuuuccacaga

SEQ ID NO: 2753266 - RNA, 20 nt, Human
cagcccuucuuuccacagaa

SEQ ID NO: 2753267 - RNA, 19 nt, Human
cagccugagcgacagugag

SEQ ID NO: 2753268 - RNA, 18 nt, Human
cagccugagcgacaguga

SEQ ID NO: 2753269 - RNA, 22 nt, Human
cagcaguugaaaagacuccaaa

SEQ ID NO: 2753270 - RNA, 17 nt, Human
cagcaguugaaaagacu

SEQ ID NO: 2753271 - RNA, 21 nt, Human
cagcaguugaaaagacuccaa

SEQ ID NO: 2753272 - RNA, 20 nt, Human
cagcaguugaaaagacucca

SEQ ID NO: 2753273 - RNA, 22 nt, Human
cagccagcaguucagagcugcc

SEQ ID NO: 2753274 - RNA, 15 nt, Human
cagccagcaguucag

SEQ ID NO: 2753275 - RNA, 21 nt, Human
cagccagcaguucagagcugc

SEQ ID NO: 2753276 - RNA, 14 nt, Human
cagccagcaguuca

SEQ ID NO: 2753277 - RNA, 22 nt, Human
cagcacagccucuuagaugcag

SEQ ID NO: 2753278 - RNA, 13 nt, Human
cagagcugcccuc

SEQ ID NO: 2753279 - RNA, 15 nt, Human
cagagcugcccucuc

SEQ ID NO: 2753280 - RNA, 15 nt, Human
cagucucaggaaauc

SEQ ID NO: 2753281 - RNA, 16 nt, Human
caguauuguacaaagu

SEQ ID NO: 2753282 - RNA, 17 nt, Human
caguauuguacaaagua

SEQ ID NO: 2753283 - RNA, 18 nt, Human
caguauuguacaaaguau

SEQ ID NO: 2753284 - RNA, 19 nt, Human
caguauuguacaaaguauu

SEQ ID NO: 2753285 - RNA, 12 nt, Human
caguauuguaca

SEQ ID NO: 2753286 - RNA, 13 nt, Human
caguauuguacaa

SEQ ID NO: 2753287 - RNA, 21 nt, Human
caguauuguacaaaguauuaa

SEQ ID NO: 2753288 - RNA, 17 nt, Human
cagggaggacgcucucu

SEQ ID NO: 2753289 - RNA, 18 nt, Human
cagggaggacgcucucug

SEQ ID NO: 2753290 - RNA, 12 nt, Human
cauuaucucaaa

SEQ ID NO: 2753291 - RNA, 13 nt, Human
cauuaucucaaaa

SEQ ID NO: 2753292 - RNA, 16 nt, Human
ccacagaagcuccagg

SEQ ID NO: 2753293 - RNA, 18 nt, Human
ccaccagucugacuguuu

SEQ ID NO: 2753294 - RNA, 18 nt, Human
ccacagaagcuccaggua

SEQ ID NO: 2753295 - RNA, 22 nt, Human
cauuuggaaaucuuuaaaaaaa

SEQ ID NO: 2753296 - RNA, 16 nt, Human
auuuaauaaaugugcc

SEQ ID NO: 2753297 - RNA, 14 nt, Human
auuucuaugaaaua

SEQ ID NO: 2753298 - RNA, 17 nt, Human
auuucuauauuuucauu

SEQ ID NO: 2753299 - RNA, 18 nt, Human
auuucuauauuuucauuc

SEQ ID NO: 2753300 - RNA, 15 nt, Human
auuucuauauuuuca

SEQ ID NO: 2753301 - RNA, 16 nt, Human
auuucuauauuuucau

SEQ ID NO: 2753302 - RNA, 20 nt, Human
auuucauaccuaucaucuua

SEQ ID NO: 2753303 - RNA, 19 nt, Human
auuucuauauuuucauucu

SEQ ID NO: 2753304 - RNA, 19 nt, Human
auuucuaugcugaguuugu

SEQ ID NO: 2753305 - RNA, 21 nt, Human
auuucuaugcugaguuugugc

SEQ ID NO: 2753306 - RNA, 22 nt, Human
auuucuaugcugaguuugugcu

SEQ ID NO: 2753307 - RNA, 15 nt, Human
auuguuuaaaaucau

SEQ ID NO: 2753308 - RNA, 21 nt, Human
auuguaauuauaucugaggaa

SEQ ID NO: 2753309 - RNA, 16 nt, Human
auuguacaaaguauua

SEQ ID NO: 2753310 - RNA, 17 nt, Human
auuguacaaaguauuaa

SEQ ID NO: 2753311 - RNA, 19 nt, Human
auuguacaaaguauuaagc

SEQ ID NO: 2753312 - RNA, 16 nt, Human
auuguaauuauaucug

SEQ ID NO: 2753313 - RNA, 17 nt, Human
auuguaauuauaucuga

SEQ ID NO: 2753314 - RNA, 15 nt, Human
auuguaauuauaucu

SEQ ID NO: 2753315 - RNA, 19 nt, Human
auuaugaauuacauuugua

SEQ ID NO: 2753316 - RNA, 20 nt, Human
auuaugaauuacauuuguau

SEQ ID NO: 2753317 - RNA, 22 nt, Human
auuaugaauuacauuuguauaa

SEQ ID NO: 2753318 - RNA, 21 nt, Human
caaaucuuaacuugaaggagu

SEQ ID NO: 2753319 - RNA, 19 nt, Human
caagacccaaaaggcagaa

SEQ ID NO: 2753320 - RNA, 21 nt, Human
auuuuauaucaauuuaaaaaa

SEQ ID NO: 2753321 - RNA, 15 nt, Human
auuuuuauauuugaa

SEQ ID NO: 2753322 - RNA, 15 nt, Human
auuuuuauauuuacu

SEQ ID NO: 2753323 - RNA, 16 nt, Human
auuuuuauauuuacua

SEQ ID NO: 2753324 - RNA, 13 nt, Human
auuuuuuuguugu

SEQ ID NO: 2753325 - RNA, 21 nt, Human
caaaaggauaaugaauacuuu

SEQ ID NO: 2753326 - RNA, 15 nt, Human
caaacagucucagga

SEQ ID NO: 2753327 - RNA, 17 nt, Human
caaacagucucaggaaa

SEQ ID NO: 2753328 - RNA, 16 nt, Human
caaacagucucaggaa

SEQ ID NO: 2753329 - RNA, 15 nt, Human
caauaaaauggguuu

SEQ ID NO: 2753330 - RNA, 20 nt, Human
caauaaaauccauacauuug

SEQ ID NO: 2753331 - RNA, 23 nt, Human
caauaaaauccauacauuugugu

SEQ ID NO: 2753332 - RNA, 15 nt, Human
cacuuaaaaaugguu

SEQ ID NO: 2753333 - RNA, 17 nt, Human
cacuuguguuuugcaag

SEQ ID NO: 2753334 - RNA, 12 nt, Human
cagaacagugau

SEQ ID NO: 2753335 - RNA, 17 nt, Human
cagaacagugauuacca

SEQ ID NO: 2753336 - RNA, 11 nt, Human
cagaacaguga

SEQ ID NO: 2753337 - RNA, 12 nt, Human
cacuccagccug

SEQ ID NO: 2753338 - RNA, 13 nt, Human
cacuccagccuga

SEQ ID NO: 2753339 - RNA, 23 nt, Human
cacuccagccugagcgacaguga

SEQ ID NO: 2753340 - RNA, 21 nt, Human
cuuaaaaaugguuuaaauggu

SEQ ID NO: 2753341 - RNA, 15 nt, Human
cuuaaaguugaauuu

SEQ ID NO: 2753342 - RNA, 18 nt, Human
cuuaaaguugaauuuauu

SEQ ID NO: 2753343 - RNA, 14 nt, Human
cuuaaaguugaauu

SEQ ID NO: 2753344 - RNA, 22 nt, Human
cuuaaaguugaauuuauuggcu

SEQ ID NO: 2753345 - RNA, 13 nt, Human
cuguuauaaucuu

SEQ ID NO: 2753346 - RNA, 19 nt, Human
cuguuauaaucuuucacag

SEQ ID NO: 2753347 - RNA, 15 nt, Human
cuguacuuuuuggca

SEQ ID NO: 2753348 - RNA, 21 nt, Human
cugccuccccuccucugcuug

SEQ ID NO: 2753349 - RNA, 17 nt, Human
cuucuaaguaaaaccac

SEQ ID NO: 2753350 - RNA, 13 nt, Human
cuucuaaguaaaa

SEQ ID NO: 2753351 - RNA, 21 nt, Human
cuucuaaguaaaaccacagca

SEQ ID NO: 2753352 - RNA, 20 nt, Human
cuucucacauuuauauuuuu

SEQ ID NO: 2753353 - RNA, 13 nt, Human
cuucucacauuua

SEQ ID NO: 2753354 - RNA, 15 nt, Human
cuuucagauacugga

SEQ ID NO: 2753355 - RNA, 17 nt, Human
cuuucagauacuggauu

SEQ ID NO: 2753356 - RNA, 22 nt, Human
cuuucagauacuggauuguacu

SEQ ID NO: 2753357 - RNA, 14 nt, Human
cuuucagauacugg

SEQ ID NO: 2753358 - RNA, 19 nt, Human
cuuggucugugagaugcua

SEQ ID NO: 2753359 - RNA, 16 nt, Human
cuuggucugugagaug

SEQ ID NO: 2753360 - RNA, 14 nt, Human
cuugucucagauuu

SEQ ID NO: 2753361 - RNA, 17 nt, Human
cuugucucagauuuuau

SEQ ID NO: 2753362 - RNA, 13 nt, Human
cuugucucagauu

SEQ ID NO: 2753363 - RNA, 18 nt, Human
cuugucucagauuuuauu

SEQ ID NO: 2753364 - RNA, 17 nt, Human
gaacccgggaggcagag

SEQ ID NO: 2753365 - RNA, 17 nt, Human
gaacccaaguccaagca

SEQ ID NO: 2753366 - RNA, 16 nt, Human
gaacccaaguccaagc

SEQ ID NO: 2753367 - RNA, 21 nt, Human
gaaaacuuuaugcuaagugaa

SEQ ID NO: 2753368 - RNA, 14 nt, Human
gaaaagacuccaaa

SEQ ID NO: 2753369 - RNA, 17 nt, Human
gaaaagacuccaaagaa

SEQ ID NO: 2753370 - RNA, 16 nt, Human
gaaaagacuccaaaga

SEQ ID NO: 2753371 - RNA, 18 nt, Human
gaaagaaaaucaggcugg

SEQ ID NO: 2753372 - RNA, 12 nt, Human
gaaaucuuuaaa

SEQ ID NO: 2753373 - RNA, 15 nt, Human
gaaaucuuuaaaaaa

SEQ ID NO: 2753374 - RNA, 17 nt, Human
gcaaaaauauuuuauga

SEQ ID NO: 2753375 - RNA, 22 nt, Human
gcaaaaauauuuuaugauccag

SEQ ID NO: 2753376 - RNA, 23 nt, Human
gcaaaaauauuuuaugauccagc

SEQ ID NO: 2753377 - RNA, 16 nt, Human
gcaaaaauauuuuaug

SEQ ID NO: 2753378 - RNA, 16 nt, Human
gauucuuaaaguugaa

SEQ ID NO: 2753379 - RNA, 17 nt, Human
gauucuuaaaguugaau

SEQ ID NO: 2753380 - RNA, 21 nt, Human
gauucuuaaaguugaauuuau

SEQ ID NO: 2753381 - RNA, 15 nt, Human
gauucuuaaaguuga

SEQ ID NO: 2753382 - RNA, 18 nt, Human
gcaauagucaaauugugu

SEQ ID NO: 2753383 - RNA, 16 nt, Human
gcaauaaaauggguuu

SEQ ID NO: 2753384 - RNA, 16 nt, Human
gcauuguaaaugugcu

SEQ ID NO: 2753385 - RNA, 15 nt, Human
gcagcuuauucacaa

SEQ ID NO: 2753386 - RNA, 22 nt, Human
gcaguugaaaagacuccaaaga

SEQ ID NO: 2753387 - RNA, 13 nt, Human
gcauaacauaaau

SEQ ID NO: 2753388 - RNA, 13 nt, Human
gagcgacagugag

SEQ ID NO: 2753389 - RNA, 15 nt, Human
gagcgacagugagac

SEQ ID NO: 2753390 - RNA, 17 nt, Human
gacuguggugacuuugg

SEQ ID NO: 2753391 - RNA, 19 nt, Human
gacuuuggauaauaaggaa

SEQ ID NO: 2753392 - RNA, 16 nt, Human
gacuauucaaacaguc

SEQ ID NO: 2753393 - RNA, 15 nt, Human
gacuauucaaacagu

SEQ ID NO: 2753394 - RNA, 14 nt, Human
gacagaaagcagaa

SEQ ID NO: 2753395 - RNA, 20 nt, Human
gacagaaagcagaacaguga

SEQ ID NO: 2753396 - RNA, 21 nt, Human
gacagcccuucuuuccacaga

SEQ ID NO: 2753397 - RNA, 14 nt, Human
ggcuccacuugguc

SEQ ID NO: 2753398 - RNA, 20 nt, Human
gggacagucaccucauggaa

SEQ ID NO: 2753399 - RNA, 21 nt, Human
gggacagucaccucauggaau

SEQ ID NO: 2753400 - RNA, 22 nt, Human
gggacagucaccucauggaauu

SEQ ID NO: 2753401 - RNA, 20 nt, Human
gggaacccaaguccaagcau

SEQ ID NO: 2753402 - RNA, 14 nt, Human
aaaaauaacaauga

SEQ ID NO: 2753403 - RNA, 15 nt, Human
ggcuguacccaggaa

SEQ ID NO: 2753404 - RNA, 15 nt, Human
aaaacuucagacaua

SEQ ID NO: 2753405 - RNA, 17 nt, Human
aaaaaugguuuaaaugg

SEQ ID NO: 2753406 - RNA, 17 nt, Human
aaaaccaguauuguaca

SEQ ID NO: 2753407 - RNA, 16 nt, Human
ggcauaacauaaaucu

SEQ ID NO: 2753408 - RNA, 17 nt, Human
ggcauaacauaaaucug

SEQ ID NO: 2753409 - RNA, 14 nt, Human
ggccuccauccuga

SEQ ID NO: 2753410 - RNA, 15 nt, Human
ggccuccauccugag

SEQ ID NO: 2753411 - RNA, 13 nt, Human
ggccuccauccug

SEQ ID NO: 2753412 - RNA, 21 nt, Human
ggcacaguuuucugagaaaga

SEQ ID NO: 2753413 - RNA, 15 nt, Human
guacuucaugcuguc

SEQ ID NO: 2753414 - RNA, 21 nt, Human
guacuucaaauccuugaagau

SEQ ID NO: 2753415 - RNA, 22 nt, Human
guacuucaaauccuugaagauu

SEQ ID NO: 2753416 - RNA, 23 nt, Human
aaaucauuucugcaucagcugcu

SEQ ID NO: 2753417 - RNA, 22 nt, Human
aaaucauuucugcaucagcugc

SEQ ID NO: 2753418 - RNA, 21 nt, Human
aaaucauuucugcaucagcug

SEQ ID NO: 2753419 - RNA, 19 nt, Human
aaaucauuucugcaucagc

SEQ ID NO: 2753420 - RNA, 11 nt, Human
aaaucauuucu

SEQ ID NO: 2753421 - RNA, 12 nt, Human
aaaucauuucug

SEQ ID NO: 2753422 - RNA, 17 nt, Human
aaauauuauguuaaaac

SEQ ID NO: 2753423 - RNA, 15 nt, Human
aaauccauacauuug

SEQ ID NO: 2753424 - RNA, 20 nt, Human
guaauaggcguaacuaauuu

SEQ ID NO: 2753425 - RNA, 23 nt, Human
guacacugccuucucaacuccaa

SEQ ID NO: 2753426 - RNA, 21 nt, Human
aaauaauuuuuauauuugaaa

SEQ ID NO: 2753427 - RNA, 15 nt, Human
aaauacacacucaaa

SEQ ID NO: 2753428 - RNA, 21 nt, Human
aaauacaauuuuguuucugua

SEQ ID NO: 2753429 - RNA, 22 nt, Human
aaauacaauuuuguuucuguac

SEQ ID NO: 2753430 - RNA, 14 nt, Human
aaauacaauuuugu

SEQ ID NO: 2753431 - RNA, 17 nt, Human
aaauacaauuuuguuuc

SEQ ID NO: 2753432 - RNA, 18 nt, Human
aaauacaauuuuguuucu

SEQ ID NO: 2753433 - RNA, 20 nt, Human
aaauacaauuuuguuucugu

SEQ ID NO: 2753434 - RNA, 22 nt, Human
aaauaauuuuuauauuugaaau

SEQ ID NO: 2753435 - RNA, 23 nt, Human
aaauaauuuuuauauuugaaaua

SEQ ID NO: 2753436 - RNA, 13 nt, Human
aaauacaauuuug

SEQ ID NO: 2753437 - RNA, 19 nt, Human
aaauacacacucaaaucaa

SEQ ID NO: 2753438 - RNA, 18 nt, Human
aaaguauguuagugcaaa

SEQ ID NO: 2753439 - RNA, 20 nt, Human
aaagguauuuuaaucaccaa

SEQ ID NO: 2753440 - RNA, 23 nt, Human
aaaguucugcagauaaacaguag

SEQ ID NO: 2753441 - RNA, 13 nt, Human
aaaguugccuaaa

SEQ ID NO: 2753442 - RNA, 14 nt, Human
aaaguugccuaaau

SEQ ID NO: 2753443 - RNA, 17 nt, Human
aaaguauguuagugcaa

SEQ ID NO: 2753444 - RNA, 13 nt, Human
aaaguauuaagca

SEQ ID NO: 2753445 - RNA, 18 nt, Human
aaaguauuaagcauauau

SEQ ID NO: 2753446 - RNA, 19 nt, Human
aaaguauuaagcauauauu

SEQ ID NO: 2753447 - RNA, 20 nt, Human
aaaguauuaagcauauauuu

SEQ ID NO: 2753448 - RNA, 23 nt, Human
aaaguugccuaaauccauuugga

SEQ ID NO: 2753449 - RNA, 16 nt, Human
aaaguugccuaaaucc

SEQ ID NO: 2753450 - RNA, 17 nt, Human
aaaguugccuaaaucca

SEQ ID NO: 2753451 - RNA, 12 nt, Human
aaaguuuaauau

SEQ ID NO: 2753452 - RNA, 14 nt, Human
aaaguuuaauauua

SEQ ID NO: 2753453 - RNA, 15 nt, Human
aaagaggaaugaagu

SEQ ID NO: 2753454 - RNA, 15 nt, Human
aaagaggcagcuuga

SEQ ID NO: 2753455 - RNA, 14 nt, Human
aaagacuccaaaga

SEQ ID NO: 2753456 - RNA, 21 nt, Human
aaagacuccaaagaaauguaa

SEQ ID NO: 2753457 - RNA, 15 nt, Human
aaagacuccaaagaa

SEQ ID NO: 2753458 - RNA, 21 nt, Human
aaagacuauucaaacagucuc

SEQ ID NO: 2753459 - RNA, 17 nt, Human
aaagacuauucaaacag

SEQ ID NO: 2753460 - RNA, 19 nt, Human
aaagacuauucaaacaguc

SEQ ID NO: 2753461 - RNA, 18 nt, Human
aaagacuauucaaacagu

SEQ ID NO: 2753462 - RNA, 13 nt, Human
aaagacagugaaa

SEQ ID NO: 2753463 - RNA, 11 nt, Human
aaacuuuucug

SEQ ID NO: 2753464 - RNA, 19 nt, Human
aaacuucagacauagaauu

SEQ ID NO: 2753465 - RNA, 23 nt, Human
aaacuucagcgguuuauauaagc

SEQ ID NO: 2753466 - RNA, 14 nt, Human
aaagguacuucaaa

SEQ ID NO: 2753467 - RNA, 21 nt, Human
aaagcacugacuucuaaguaa

SEQ ID NO: 2753468 - RNA, 17 nt, Human
aaagcacugacuucuaa

SEQ ID NO: 2753469 - RNA, 15 nt, Human
aaacucguuaauuug

SEQ ID NO: 2753470 - RNA, 12 nt, Human
aaaccacagcag

SEQ ID NO: 2753471 - RNA, 14 nt, Human
aaacaguagugaua

SEQ ID NO: 2753472 - RNA, 15 nt, Human
aaacagucucaggaa

SEQ ID NO: 2753473 - RNA, 19 nt, Human
ggggaauugaggacacuga

SEQ ID NO: 2753474 - RNA, 14 nt, Human
aaacacagcaaggg

SEQ ID NO: 2753475 - RNA, 12 nt, Human
aaacacagcaag

SEQ ID NO: 2753476 - RNA, 11 nt, Human
aaacacagcaa

SEQ ID NO: 2753477 - RNA, 22 nt, Human
ggacucauuuuaaaaaauggaa

SEQ ID NO: 2753478 - RNA, 13 nt, Human
ggagaaacuggaa

SEQ ID NO: 2753479 - RNA, 12 nt, Human
ggacuuguuaga

SEQ ID NO: 2753480 - RNA, 15 nt, Human
ggacuuguuagaucu

SEQ ID NO: 2753481 - RNA, 21 nt, Human
ggacuucuuuaauuuuggaau

SEQ ID NO: 2753482 - RNA, 18 nt, Human
ggacuucuuuaauuuugg

SEQ ID NO: 2753483 - RNA, 22 nt, Human
ggacuucuuuaauuuuggaauu

SEQ ID NO: 2753484 - RNA, 22 nt, Human
gcugggguuaucugaagucaga

SEQ ID NO: 2753485 - RNA, 23 nt, Human
gcugggguuaucugaagucagau

SEQ ID NO: 2753486 - RNA, 14 nt, Human
gcugggguuaucug

SEQ ID NO: 2753487 - RNA, 22 nt, Human
gcuauuucuauauuuucauucu

SEQ ID NO: 2753488 - RNA, 16 nt, Human
gcuagaacucccuuuc

SEQ ID NO: 2753489 - RNA, 18 nt, Human
gcuagaacucccuuucaa

SEQ ID NO: 2753490 - RNA, 12 nt, Human
gcuagaacuccc

SEQ ID NO: 2753491 - RNA, 13 nt, Human
gcuagaacucccu

SEQ ID NO: 2753492 - RNA, 14 nt, Human
gcuagaacucccuu

SEQ ID NO: 2753493 - RNA, 15 nt, Human
gcuagaacucccuuu

SEQ ID NO: 2753494 - RNA, 15 nt, Human
gcuccacuuggucug

SEQ ID NO: 2753495 - RNA, 21 nt, Human
gcuccccucggagaagagcug

SEQ ID NO: 2753496 - RNA, 18 nt, Human
gcuccacuuggucuguga

SEQ ID NO: 2753497 - RNA, 19 nt, Human
gcuccacuuggucugugag

SEQ ID NO: 2753498 - RNA, 21 nt, Human
gccuucggccuccauccugag

SEQ ID NO: 2753499 - RNA, 20 nt, Human
gccuucggccuccauccuga

SEQ ID NO: 2753500 - RNA, 15 nt, Human
gccucuuagaugcag

SEQ ID NO: 2753501 - RNA, 14 nt, Human
aauacacacucaaa

SEQ ID NO: 2753502 - RNA, 22 nt, Human
aauacaauuuuguuucuguacu

SEQ ID NO: 2753503 - RNA, 23 nt, Human
aauacaauuuuguuucuguacuu

SEQ ID NO: 2753504 - RNA, 15 nt, Human
aauacaauuuuguuu

SEQ ID NO: 2753505 - RNA, 17 nt, Human
aauacaauuuuguuucu

SEQ ID NO: 2753506 - RNA, 18 nt, Human
aauacaauuuuguuucug

SEQ ID NO: 2753507 - RNA, 20 nt, Human
aauacaauuuuguuucugua

SEQ ID NO: 2753508 - RNA, 12 nt, Human
aauacaauuuug

SEQ ID NO: 2753509 - RNA, 13 nt, Human
aauacaauuuugu

SEQ ID NO: 2753510 - RNA, 23 nt, Human
uaaaucccauuauucaaaguugc

SEQ ID NO: 2753511 - RNA, 19 nt, Human
uaaaucccauuauucaaag

SEQ ID NO: 2753512 - RNA, 23 nt, Human
uaaauagcuagacuggugacuga

SEQ ID NO: 2753513 - RNA, 23 nt, Human
uaaauacaauuuuguuucuguac

SEQ ID NO: 2753514 - RNA, 19 nt, Human
uaaauagcuagacugguga

SEQ ID NO: 2753515 - RNA, 15 nt, Human
uaaauacaauuuugu

SEQ ID NO: 2753516 - RNA, 22 nt, Human
uaaauacaauuuuguuucugua

SEQ ID NO: 2753517 - RNA, 13 nt, Human
uaaauacaauuuu

SEQ ID NO: 2753518 - RNA, 15 nt, Human
uaacaaugcuguauu

SEQ ID NO: 2753519 - RNA, 17 nt, Human
uaacaaugcuguauuuu

SEQ ID NO: 2753520 - RNA, 13 nt, Human
uaacaaugcugua

SEQ ID NO: 2753521 - RNA, 16 nt, Human
uaacaacagcuggugc

SEQ ID NO: 2753522 - RNA, 17 nt, Human
uaaaugauuucauucaa

SEQ ID NO: 2753523 - RNA, 15 nt, Human
uaaauguugacaugg

SEQ ID NO: 2753524 - RNA, 12 nt, Human
aauaaaaauaau

SEQ ID NO: 2753525 - RNA, 22 nt, Human
aauaaaauccauacauuugugu

SEQ ID NO: 2753526 - RNA, 15 nt, Human
aauaaaaaauuauga

SEQ ID NO: 2753527 - RNA, 16 nt, Human
aauaaaaaauuaugac

SEQ ID NO: 2753528 - RNA, 14 nt, Human
aauaaaaaauuaug

SEQ ID NO: 2753529 - RNA, 15 nt, Human
aauaacgauaaaaga

SEQ ID NO: 2753530 - RNA, 15 nt, Human
aauaacaauaaaaga

SEQ ID NO: 2753531 - RNA, 21 nt, Human
aauaaaugugccuucauuuuu

SEQ ID NO: 2753532 - RNA, 12 nt, Human
aauaaaugugcc

SEQ ID NO: 2753533 - RNA, 21 nt, Human
aauaaauagcuagacugguga

SEQ ID NO: 2753534 - RNA, 20 nt, Human
aauaauuauaugcuauuucu

SEQ ID NO: 2753535 - RNA, 21 nt, Human
aauaauuauaugcuauuucua

SEQ ID NO: 2753536 - RNA, 22 nt, Human
aauaauuauaugcuauuucuau

SEQ ID NO: 2753537 - RNA, 23 nt, Human
aauaauuauaugcuauuucuaua

SEQ ID NO: 2753538 - RNA, 14 nt, Human
aauaauuauaugcu

SEQ ID NO: 2753539 - RNA, 15 nt, Human
aauaauuauaugcua

SEQ ID NO: 2753540 - RNA, 16 nt, Human
aauaaggaaaaguuua

SEQ ID NO: 2753541 - RNA, 19 nt, Human
aauaaggaaaaguuuaaua

SEQ ID NO: 2753542 - RNA, 22 nt, Human
aauaaggaaaaguuuaauauua

SEQ ID NO: 2753543 - RNA, 13 nt, Human
aauaaggaaaagu

SEQ ID NO: 2753544 - RNA, 15 nt, Human
aauaaggaaaaguuu

SEQ ID NO: 2753545 - RNA, 19 nt, Human
uaaaccaaggcuagaacca

SEQ ID NO: 2753546 - RNA, 19 nt, Human
aaguuuaauauuaaagcca

SEQ ID NO: 2753547 - RNA, 20 nt, Human
aaguuuaauauuaaagccau

SEQ ID NO: 2753548 - RNA, 21 nt, Human
aaguuuaauauuaaagccaug

SEQ ID NO: 2753549 - RNA, 18 nt, Human
aaguuuaauauuaaagcc

SEQ ID NO: 2753550 - RNA, 18 nt, Human
uaaaccaugggauaaaug

SEQ ID NO: 2753551 - RNA, 20 nt, Human
uaaaccaugggauaaaugcc

SEQ ID NO: 2753552 - RNA, 21 nt, Human
uaaaccaugggauaaaugcca

SEQ ID NO: 2753553 - RNA, 22 nt, Human
uaaaccaugggauaaaugccau

SEQ ID NO: 2753554 - RNA, 19 nt, Human
aaggaaaaaauaacaauga

SEQ ID NO: 2753555 - RNA, 16 nt, Human
aaggaaaaaauaacaa

SEQ ID NO: 2753556 - RNA, 13 nt, Human
aaggauaaugaau

SEQ ID NO: 2753557 - RNA, 23 nt, Human
guuuuuuuuuaaaaaagaaacau

SEQ ID NO: 2753558 - RNA, 23 nt, Human
aaguauguuagugcaaauuguca

SEQ ID NO: 2753559 - RNA, 21 nt, Human
aaguauguuagugcaaauugu

SEQ ID NO: 2753560 - RNA, 13 nt, Human
aaguauuaagcau

SEQ ID NO: 2753561 - RNA, 22 nt, Human
guuuucugagaaagacuauuca

SEQ ID NO: 2753562 - RNA, 17 nt, Human
guuuucugagaaagacu

SEQ ID NO: 2753563 - RNA, 16 nt, Human
guuuucugagaaagac

SEQ ID NO: 2753564 - RNA, 21 nt, Human
aagggugaugggaaagcauug

SEQ ID NO: 2753565 - RNA, 16 nt, Human
aaguaaaaccacagca

SEQ ID NO: 2753566 - RNA, 15 nt, Human
aaguaaaaccacagc

SEQ ID NO: 2753567 - RNA, 14 nt, Human
aaguaaaaccacag

SEQ ID NO: 2753568 - RNA, 18 nt, Human
aaguaaaaccacagcagu

SEQ ID NO: 2753569 - RNA, 17 nt, Human
aaguaaaaccacagcag

SEQ ID NO: 2753570 - RNA, 15 nt, Human
guuuuauaauuuugu

SEQ ID NO: 2753571 - RNA, 22 nt, Human
guuuuauaauuuugugaagcaa

SEQ ID NO: 2753572 - RNA, 15 nt, Human
guuuucugagaaaga

SEQ ID NO: 2753573 - RNA, 15 nt, Human
guuucuguacuuuuu

SEQ ID NO: 2753574 - RNA, 10 nt, Human
guuucuguac

SEQ ID NO: 2753575 - RNA, 13 nt, Human
aagaauauuuuaa

SEQ ID NO: 2753576 - RNA, 13 nt, Human
aagacccaaaagg

SEQ ID NO: 2753577 - RNA, 19 nt, Human
gugcugguguaugugugaa

SEQ ID NO: 2753578 - RNA, 22 nt, Human
gugcugggguuaucugaaguca

SEQ ID NO: 2753579 - RNA, 13 nt, Human
aagaaaauaucac

SEQ ID NO: 2753580 - RNA, 22 nt, Human
aagaagcaccaaucaugaauua

SEQ ID NO: 2753581 - RNA, 15 nt, Human
aacuuguguaaauac

SEQ ID NO: 2753582 - RNA, 20 nt, Human
aacuuguguaaauacaauuu

SEQ ID NO: 2753583 - RNA, 14 nt, Human
aacuuguguaaaua

SEQ ID NO: 2753584 - RNA, 19 nt, Human
aagauguagaggagaaacu

SEQ ID NO: 2753585 - RNA, 13 nt, Human
aagcaaaauguga

SEQ ID NO: 2753586 - RNA, 22 nt, Human
aagauguagaggagaaacugga

SEQ ID NO: 2753587 - RNA, 19 nt, Human
aagcaaaauuuuuucucua

SEQ ID NO: 2753588 - RNA, 16 nt, Human
aagcaaguauuagaau

SEQ ID NO: 2753589 - RNA, 21 nt, Human
guguugaaacggaugauuucu

SEQ ID NO: 2753590 - RNA, 23 nt, Human
guguugaaacggaugauuucuau

SEQ ID NO: 2753591 - RNA, 13 nt, Human
aagacuauucaaa

SEQ ID NO: 2753592 - RNA, 14 nt, Human
aagacuauucaaac

SEQ ID NO: 2753593 - RNA, 14 nt, Human
aagacuccaaagaa

SEQ ID NO: 2753594 - RNA, 17 nt, Human
aagacuccaaagaaaug

SEQ ID NO: 2753595 - RNA, 16 nt, Human
aagacuccaaagaaau

SEQ ID NO: 2753596 - RNA, 18 nt, Human
aagagcuguucacagcca

SEQ ID NO: 2753597 - RNA, 14 nt, Human
guggguagacacac

SEQ ID NO: 2753598 - RNA, 19 nt, Human
aacagucucaggaaaucaa

SEQ ID NO: 2753599 - RNA, 17 nt, Human
aacagucucaggaaauc

SEQ ID NO: 2753600 - RNA, 19 nt, Human
aacagauuauuaccuuaca

SEQ ID NO: 2753601 - RNA, 16 nt, Human
aacauauauaacaaug

SEQ ID NO: 2753602 - RNA, 23 nt, Human
aacauguuaaaccaugggauaaa

SEQ ID NO: 2753603 - RNA, 15 nt, Human
aacauaaaucuguga

SEQ ID NO: 2753604 - RNA, 12 nt, Human
aacauaaaucug

SEQ ID NO: 2753605 - RNA, 14 nt, Human
aacauaaaucugug

SEQ ID NO: 2753606 - RNA, 23 nt, Human
guccaugaagauguagaggagaa

SEQ ID NO: 2753607 - RNA, 23 nt, Human
gucucaguccaugaagauguaga

SEQ ID NO: 2753608 - RNA, 13 nt, Human
gucuucacaacag

SEQ ID NO: 2753609 - RNA, 13 nt, Human
aacugaaaucaua

SEQ ID NO: 2753610 - RNA, 20 nt, Human
aacugaaaucauacuucuua

SEQ ID NO: 2753611 - RNA, 13 nt, Human
aacuauauuguuu

SEQ ID NO: 2753612 - RNA, 20 nt, Human
aacuaucucauuuccaagca

SEQ ID NO: 2753613 - RNA, 15 nt, Human
aaugaaugaaugaau

SEQ ID NO: 2753614 - RNA, 18 nt, Human
uacaaaaacacagcaagg

SEQ ID NO: 2753615 - RNA, 17 nt, Human
uacaaaaacacagcaag

SEQ ID NO: 2753616 - RNA, 16 nt, Human
uacaaaaacacagcaa

SEQ ID NO: 2753617 - RNA, 21 nt, Human
uaauuauaugcuauuucuaua

SEQ ID NO: 2753618 - RNA, 20 nt, Human
uaauuauaugcuauuucuau

SEQ ID NO: 2753619 - RNA, 13 nt, Human
uaauuauaucuga

SEQ ID NO: 2753620 - RNA, 17 nt, Human
uaauuauaucugaggaa

SEQ ID NO: 2753621 - RNA, 16 nt, Human
aaugguuuaaaugguc

SEQ ID NO: 2753622 - RNA, 18 nt, Human
aauguugacaugggacau

SEQ ID NO: 2753623 - RNA, 13 nt, Human
aauuaacauguua

SEQ ID NO: 2753624 - RNA, 14 nt, Human
aauuaacauguuaa

SEQ ID NO: 2753625 - RNA, 18 nt, Human
aauuaacauguuaaacca

SEQ ID NO: 2753626 - RNA, 13 nt, Human
aauugacccacaa

SEQ ID NO: 2753627 - RNA, 16 nt, Human
aauugacccacaagaa

SEQ ID NO: 2753628 - RNA, 19 nt, Human
aauugacccacaagaaaug

SEQ ID NO: 2753629 - RNA, 21 nt, Human
aauucuugccaaauauaaaua

SEQ ID NO: 2753630 - RNA, 13 nt, Human
uacucaauuuuaa

SEQ ID NO: 2753631 - RNA, 14 nt, Human
uacucaauuuuaac

SEQ ID NO: 2753632 - RNA, 12 nt, Human
uacucaauuuua

SEQ ID NO: 2753633 - RNA, 23 nt, Human
aauugugugaaagguacuucaaa

SEQ ID NO: 2753634 - RNA, 20 nt, Human
aauuucucccagucauuuaa

SEQ ID NO: 2753635 - RNA, 14 nt, Human
uacuucaaauccuu

SEQ ID NO: 2753636 - RNA, 19 nt, Human
uacuucaaauccuugaaga

SEQ ID NO: 2753637 - RNA, 13 nt, Human
aauuugaauuuug

SEQ ID NO: 2753638 - RNA, 16 nt, Human
aauuugaauuuugugu

SEQ ID NO: 2753639 - RNA, 18 nt, Human
aauuugaauuuuguguua

SEQ ID NO: 2753640 - RNA, 19 nt, Human
aauuuuuucucuaggaaau

SEQ ID NO: 2753641 - RNA, 16 nt, Human
acaaaaacacagcaag

SEQ ID NO: 2753642 - RNA, 19 nt, Human
aauuuuuauauuugaaaua

SEQ ID NO: 2753643 - RNA, 18 nt, Human
uagaacucccuuucaaca

SEQ ID NO: 2753644 - RNA, 21 nt, Human
uacuucaaauccuugaagauu

SEQ ID NO: 2753645 - RNA, 15 nt, Human
uagaacucccuuuca

SEQ ID NO: 2753646 - RNA, 14 nt, Human
uagaaccucuuugu

SEQ ID NO: 2753647 - RNA, 22 nt, Human
acaagaaaugaaagcagggacu

SEQ ID NO: 2753648 - RNA, 18 nt, Human
acaagcacuaaacaaaga

SEQ ID NO: 2753649 - RNA, 18 nt, Human
uagcaugucgucaaagcu

SEQ ID NO: 2753650 - RNA, 21 nt, Human
uagcaugucgucaaagcugaa

SEQ ID NO: 2753651 - RNA, 17 nt, Human
uagaugcaguucugaag

SEQ ID NO: 2753652 - RNA, 19 nt, Human
uagaugcaguucugaagaa

SEQ ID NO: 2753653 - RNA, 16 nt, Human
uagaugcaguucugaa

SEQ ID NO: 2753654 - RNA, 21 nt, Human
uagaggaagccugauuaaaga

SEQ ID NO: 2753655 - RNA, 14 nt, Human
uauuuauuuuaaua

SEQ ID NO: 2753656 - RNA, 16 nt, Human
uauuuauuuuaauaau

SEQ ID NO: 2753657 - RNA, 18 nt, Human
uauuuauuuuaauaaugu

SEQ ID NO: 2753658 - RNA, 18 nt, Human
uauuuacuaaaauggacu

SEQ ID NO: 2753659 - RNA, 17 nt, Human
uauugucuagugaaacu

SEQ ID NO: 2753660 - RNA, 15 nt, Human
uauuguacaaaguau

SEQ ID NO: 2753661 - RNA, 16 nt, Human
uauuguacaaaguauu

SEQ ID NO: 2753662 - RNA, 21 nt, Human
uauuguacaaaguauuaagca

SEQ ID NO: 2753663 - RNA, 22 nt, Human
uauuguacaaaguauuaagcau

SEQ ID NO: 2753664 - RNA, 23 nt, Human
uauuguacaaaguauuaagcaua

SEQ ID NO: 2753665 - RNA, 23 nt, Human
acaguucggugagcuacaaaugc

SEQ ID NO: 2753666 - RNA, 22 nt, Human
acaguucggugagcuacaaaug

SEQ ID NO: 2753667 - RNA, 19 nt, Human
acaguucggugagcuacaa

SEQ ID NO: 2753668 - RNA, 21 nt, Human
uauuggcuuuucugauccagu

SEQ ID NO: 2753669 - RNA, 22 nt, Human
uauuggcuuuucugauccaguu

SEQ ID NO: 2753670 - RNA, 15 nt, Human
uauuggcuuuucuga

SEQ ID NO: 2753671 - RNA, 16 nt, Human
uauuggcuuuucugau

SEQ ID NO: 2753672 - RNA, 17 nt, Human
uauuggcuuuucugauc

SEQ ID NO: 2753673 - RNA, 18 nt, Human
uauuggcuuuucugaucc

SEQ ID NO: 2753674 - RNA, 14 nt, Human
uauuggcuuuucug

SEQ ID NO: 2753675 - RNA, 23 nt, Human
uauucauagcagcuuauucacaa

SEQ ID NO: 2753676 - RNA, 21 nt, Human
uauucaaaguugccuaaaucc

SEQ ID NO: 2753677 - RNA, 22 nt, Human
uauucaaaguugccuaaaucca

SEQ ID NO: 2753678 - RNA, 18 nt, Human
uauucaaaguugccuaaa

SEQ ID NO: 2753679 - RNA, 23 nt, Human
uauucaaaguugccuaaauccau

SEQ ID NO: 2753680 - RNA, 19 nt, Human
uauucacugauuugacaua

SEQ ID NO: 2753681 - RNA, 22 nt, Human
uauucacugauuugacauaguc

SEQ ID NO: 2753682 - RNA, 13 nt, Human
uauucacugauuu

SEQ ID NO: 2753683 - RNA, 15 nt, Human
uauuagaauaccaca

SEQ ID NO: 2753684 - RNA, 12 nt, Human
uauuaaaacuca

SEQ ID NO: 2753685 - RNA, 13 nt, Human
uauuaaagccaug

SEQ ID NO: 2753686 - RNA, 14 nt, Human
uauuaaagccaugu

SEQ ID NO: 2753687 - RNA, 12 nt, Human
uauuaaagccau

SEQ ID NO: 2753688 - RNA, 16 nt, Human
uauuacaguauaauua

SEQ ID NO: 2753689 - RNA, 18 nt, Human
uauuacaguauaauuaac

SEQ ID NO: 2753690 - RNA, 20 nt, Human
uauuacaguauaauuaacau

SEQ ID NO: 2753691 - RNA, 21 nt, Human
uauuacaguauaauuaacaug

SEQ ID NO: 2753692 - RNA, 14 nt, Human
uauuacaguauaau

SEQ ID NO: 2753693 - RNA, 17 nt, Human
uauuaaagccauguuua

SEQ ID NO: 2753694 - RNA, 18 nt, Human
uauuaaagccauguuuau

SEQ ID NO: 2753695 - RNA, 20 nt, Human
uauuaaagccauguuuauua

SEQ ID NO: 2753696 - RNA, 17 nt, Human
acagcuggugcccugcu

SEQ ID NO: 2753697 - RNA, 20 nt, Human
acagcuggugcccugcuuuc

SEQ ID NO: 2753698 - RNA, 16 nt, Human
acagucucaggaaauc

SEQ ID NO: 2753699 - RNA, 15 nt, Human
acagucucaggaaau

SEQ ID NO: 2753700 - RNA, 14 nt, Human
acagucucaggaaa

SEQ ID NO: 2753701 - RNA, 13 nt, Human
acagucucaggaa

SEQ ID NO: 2753702 - RNA, 20 nt, Human
acagugaaagaaaauaacaa

SEQ ID NO: 2753703 - RNA, 17 nt, Human
acagucucaggaaauca

SEQ ID NO: 2753704 - RNA, 14 nt, Human
acagugagacucug

SEQ ID NO: 2753705 - RNA, 18 nt, Human
acagugagacucugucuc

SEQ ID NO: 2753706 - RNA, 21 nt, Human
acaguuaccucugccucagaa

SEQ ID NO: 2753707 - RNA, 21 nt, Human
acaguauggcagcuuuccuca

SEQ ID NO: 2753708 - RNA, 23 nt, Human
acaguauaauuaacauguuaaac

SEQ ID NO: 2753709 - RNA, 21 nt, Human
acaguauaauuaacauguuaa

SEQ ID NO: 2753710 - RNA, 15 nt, Human
uauauuuacaaaugg

SEQ ID NO: 2753711 - RNA, 14 nt, Human
uauauuuacaaaug

SEQ ID NO: 2753712 - RNA, 20 nt, Human
uaucaccugucuugccuuuu

SEQ ID NO: 2753713 - RNA, 17 nt, Human
uauggcuauaggugcua

SEQ ID NO: 2753714 - RNA, 16 nt, Human
uauggcuauaggugcu

SEQ ID NO: 2753715 - RNA, 20 nt, Human
uaugauccagcagauuauuc

SEQ ID NO: 2753716 - RNA, 21 nt, Human
uaugauccagcagauuauuca

SEQ ID NO: 2753717 - RNA, 22 nt, Human
uaugauccagcagauuauucac

SEQ ID NO: 2753718 - RNA, 11 nt, Human
uaugauccagc

SEQ ID NO: 2753719 - RNA, 19 nt, Human
uaugauccagcagauuauu

SEQ ID NO: 2753720 - RNA, 10 nt, Human
uaugauccag

SEQ ID NO: 2753721 - RNA, 14 nt, Human
uauaggaauugacc

SEQ ID NO: 2753722 - RNA, 13 nt, Human
uauaggaauugac

SEQ ID NO: 2753723 - RNA, 23 nt, Human
uauaggugcuacaaaaacacagc

SEQ ID NO: 2753724 - RNA, 20 nt, Human
uauaggugcuacaaaaacac

SEQ ID NO: 2753725 - RNA, 21 nt, Human
uauaggugcuacaaaaacaca

SEQ ID NO: 2753726 - RNA, 18 nt, Human
uauaacaaugcuguauuu

SEQ ID NO: 2753727 - RNA, 14 nt, Human
uauaauuuugugaa

SEQ ID NO: 2753728 - RNA, 19 nt, Human
uauagauuagagaguguug

SEQ ID NO: 2753729 - RNA, 22 nt, Human
uauagauuagagaguguugaaa

SEQ ID NO: 2753730 - RNA, 20 nt, Human
uauagauuagaauucuguau

SEQ ID NO: 2753731 - RNA, 19 nt, Human
uauagauuagaauucugua

SEQ ID NO: 2753732 - RNA, 15 nt, Human
uaguuuuauaugcuu

SEQ ID NO: 2753733 - RNA, 16 nt, Human
uaguuuuauaugcuuc

SEQ ID NO: 2753734 - RNA, 22 nt, Human
uagugagcagucaggaaagaga

SEQ ID NO: 2753735 - RNA, 22 nt, Human
acacaucagcuugcccuguuaa

SEQ ID NO: 2753736 - RNA, 21 nt, Human
uauaaaauaauuuuuauauuu

SEQ ID NO: 2753737 - RNA, 22 nt, Human
uauaaaauaauuuuuauauuug

SEQ ID NO: 2753738 - RNA, 20 nt, Human
uccucaaaacuucagacaua

SEQ ID NO: 2753739 - RNA, 22 nt, Human
acucuccauuuaauaauuauau

SEQ ID NO: 2753740 - RNA, 14 nt, Human
uccgugcuaaggac

SEQ ID NO: 2753741 - RNA, 15 nt, Human
uccgugcuaaggacu

SEQ ID NO: 2753742 - RNA, 12 nt, Human
uccccuccucug

SEQ ID NO: 2753743 - RNA, 13 nt, Human
acuaaaaauacaa

SEQ ID NO: 2753744 - RNA, 13 nt, Human
uccuucagccuga

SEQ ID NO: 2753745 - RNA, 22 nt, Human
acuggcacaguuuucugagaaa

SEQ ID NO: 2753746 - RNA, 21 nt, Human
acuggcacaguuuucugagaa

SEQ ID NO: 2753747 - RNA, 20 nt, Human
acugccuucucaacuccaaa

SEQ ID NO: 2753748 - RNA, 22 nt, Human
acugccuucucaacuccaaacu

SEQ ID NO: 2753749 - RNA, 13 nt, Human
acuggauuguacu

SEQ ID NO: 2753750 - RNA, 16 nt, Human
acuggauuguacuuug

SEQ ID NO: 2753751 - RNA, 18 nt, Human
uccugggcagcugccucc

SEQ ID NO: 2753752 - RNA, 19 nt, Human
uccugggcagcugccuccc

SEQ ID NO: 2753753 - RNA, 22 nt, Human
uccugggcagcugccuccccuc

SEQ ID NO: 2753754 - RNA, 23 nt, Human
uccugggcagcugccuccccucc

SEQ ID NO: 2753755 - RNA, 14 nt, Human
uccugggcagcugc

SEQ ID NO: 2753756 - RNA, 15 nt, Human
uccugggcagcugcc

SEQ ID NO: 2753757 - RNA, 16 nt, Human
uccugggcagcugccu

SEQ ID NO: 2753758 - RNA, 17 nt, Human
uccugggcagcugccuc

SEQ ID NO: 2753759 - RNA, 17 nt, Human
acugaggggaggggagc

SEQ ID NO: 2753760 - RNA, 22 nt, Human
acugaggggaggggagcauggg

SEQ ID NO: 2753761 - RNA, 20 nt, Human
uccagccugagcgacaguga

SEQ ID NO: 2753762 - RNA, 21 nt, Human
uccagccugagcgacagugag

SEQ ID NO: 2753763 - RNA, 22 nt, Human
ucaugaauuaguuuuauaugcu

SEQ ID NO: 2753764 - RNA, 21 nt, Human
ucaugaauuaguuuuauaugc

SEQ ID NO: 2753765 - RNA, 14 nt, Human
ucagauuuuauuau

SEQ ID NO: 2753766 - RNA, 15 nt, Human
ucagauuuuauuaug

SEQ ID NO: 2753767 - RNA, 13 nt, Human
ucagauuuuauua

SEQ ID NO: 2753768 - RNA, 21 nt, Human
ucagaucugccuaaggacuuc

SEQ ID NO: 2753769 - RNA, 16 nt, Human
ucagauuuuauuaugu

SEQ ID NO: 2753770 - RNA, 19 nt, Human
ucagauuuuauuauguaaa

SEQ ID NO: 2753771 - RNA, 20 nt, Human
ucagauuuuauuauguaaau

SEQ ID NO: 2753772 - RNA, 13 nt, Human
acccaaaaggcag

SEQ ID NO: 2753773 - RNA, 15 nt, Human
acccaaaaggcagaa

SEQ ID NO: 2753774 - RNA, 21 nt, Human
acccaaauguucaucaaugaa

SEQ ID NO: 2753775 - RNA, 18 nt, Human
acccaaaaggcagaagca

SEQ ID NO: 2753776 - RNA, 12 nt, Human
uauuucauuucu

SEQ ID NO: 2753777 - RNA, 11 nt, Human
accacagcagu

SEQ ID NO: 2753778 - RNA, 14 nt, Human
accacugcagaaga

SEQ ID NO: 2753779 - RNA, 19 nt, Human
accacugcagaagacagua

SEQ ID NO: 2753780 - RNA, 13 nt, Human
accacugcagaag

SEQ ID NO: 2753781 - RNA, 19 nt, Human
accacuuguguuuugcaag

SEQ ID NO: 2753782 - RNA, 23 nt, Human
accacuuguguuuugcaagccag

SEQ ID NO: 2753783 - RNA, 16 nt, Human
agcaccaaucaugaau

SEQ ID NO: 2753784 - RNA, 22 nt, Human
agcacagccucuuagaugcagu

SEQ ID NO: 2753785 - RNA, 14 nt, Human
agcaacgcaggccc

SEQ ID NO: 2753786 - RNA, 14 nt, Human
agcagaacagugau

SEQ ID NO: 2753787 - RNA, 13 nt, Human
ugagcgacaguga

SEQ ID NO: 2753788 - RNA, 14 nt, Human
ugagcgacagugag

SEQ ID NO: 2753789 - RNA, 16 nt, Human
ugagcgacagugagac

SEQ ID NO: 2753790 - RNA, 20 nt, Human
ugagcgacagugagacucug

SEQ ID NO: 2753791 - RNA, 22 nt, Human
ugagguacugagagugaacaaa

SEQ ID NO: 2753792 - RNA, 17 nt, Human
ugagguacugagaguga

SEQ ID NO: 2753793 - RNA, 15 nt, Human
agcagauuauucacu

SEQ ID NO: 2753794 - RNA, 16 nt, Human
agcagauuauucacug

SEQ ID NO: 2753795 - RNA, 14 nt, Human
agcagauuauucac

SEQ ID NO: 2753796 - RNA, 19 nt, Human
agcagauuauucacugauu

SEQ ID NO: 2753797 - RNA, 20 nt, Human
agcagauuauucacugauuu

SEQ ID NO: 2753798 - RNA, 15 nt, Human
ugaggacacugauau

SEQ ID NO: 2753799 - RNA, 18 nt, Human
ugaggaauucuguauaga

SEQ ID NO: 2753800 - RNA, 19 nt, Human
ugaggaauucuguauagau

SEQ ID NO: 2753801 - RNA, 15 nt, Human
ugaggaauucuguau

SEQ ID NO: 2753802 - RNA, 16 nt, Human
ugaggaauucuguaua

SEQ ID NO: 2753803 - RNA, 14 nt, Human
ugaggaauucugua

SEQ ID NO: 2753804 - RNA, 14 nt, Human
ugagcuacaaaugc

SEQ ID NO: 2753805 - RNA, 13 nt, Human
ugagcuacaaaug

SEQ ID NO: 2753806 - RNA, 16 nt, Human
ugagcuacaaaugcau

SEQ ID NO: 2753807 - RNA, 22 nt, Human
agagugaacaaauuuacagaga

SEQ ID NO: 2753808 - RNA, 14 nt, Human
agagugaacaaauu

SEQ ID NO: 2753809 - RNA, 18 nt, Human
ugaagauguagaggagaa

SEQ ID NO: 2753810 - RNA, 17 nt, Human
ugaagauguagaggaga

SEQ ID NO: 2753811 - RNA, 14 nt, Human
ugaagaagauggua

SEQ ID NO: 2753812 - RNA, 20 nt, Human
ugaagaagcaccaaucauga

SEQ ID NO: 2753813 - RNA, 23 nt, Human
agaugcuagaacucccuuucaac

SEQ ID NO: 2753814 - RNA, 22 nt, Human
agaugcuagaacucccuuucaa

SEQ ID NO: 2753815 - RNA, 19 nt, Human
agaugaugaugaucuuuaa

SEQ ID NO: 2753816 - RNA, 14 nt, Human
agauccuggaaauc

SEQ ID NO: 2753817 - RNA, 15 nt, Human
ugaauuuauuggcuu

SEQ ID NO: 2753818 - RNA, 16 nt, Human
ugaauuuauuggcuuu

SEQ ID NO: 2753819 - RNA, 12 nt, Human
ugaauuuauugg

SEQ ID NO: 2753820 - RNA, 15 nt, Human
ugacuguuuccauca

SEQ ID NO: 2753821 - RNA, 16 nt, Human
agauuauucacugauu

SEQ ID NO: 2753822 - RNA, 16 nt, Human
agauugugccccugca

SEQ ID NO: 2753823 - RNA, 16 nt, Human
agauuuaccacuugug

SEQ ID NO: 2753824 - RNA, 21 nt, Human
agauuuuauuauguaaauccc

SEQ ID NO: 2753825 - RNA, 20 nt, Human
agauuuuauuauguaaaucc

SEQ ID NO: 2753826 - RNA, 22 nt, Human
agauuuuauuauguaaauccca

SEQ ID NO: 2753827 - RNA, 15 nt, Human
agcaaaaauauuuua

SEQ ID NO: 2753828 - RNA, 17 nt, Human
agcaaaaauauuuuaug

SEQ ID NO: 2753829 - RNA, 18 nt, Human
agcaaaaauauuuuauga

SEQ ID NO: 2753830 - RNA, 19 nt, Human
agcaaaaauauuuuaugau

SEQ ID NO: 2753831 - RNA, 23 nt, Human
agcaaaaauauuuuaugauccag

SEQ ID NO: 2753832 - RNA, 16 nt, Human
ucucuggccuucggcc

SEQ ID NO: 2753833 - RNA, 17 nt, Human
ucucuggccuucggccu

SEQ ID NO: 2753834 - RNA, 13 nt, Human
ucucuggccuucg

SEQ ID NO: 2753835 - RNA, 12 nt, Human
ucucuucuuuaa

SEQ ID NO: 2753836 - RNA, 13 nt, Human
ucucuucuuuaaa

SEQ ID NO: 2753837 - RNA, 13 nt, Human
agaaacuggaacu

SEQ ID NO: 2753838 - RNA, 15 nt, Human
agaaacuggaacucu

SEQ ID NO: 2753839 - RNA, 14 nt, Human
agaaagaaaaucag

SEQ ID NO: 2753840 - RNA, 15 nt, Human
agaaacauuugguaa

SEQ ID NO: 2753841 - RNA, 19 nt, Human
agaaaacaaggaugaauua

SEQ ID NO: 2753842 - RNA, 16 nt, Human
agaaaacaaggaugaa

SEQ ID NO: 2753843 - RNA, 22 nt, Human
acuuuuuauggcacuaguauuu

SEQ ID NO: 2753844 - RNA, 21 nt, Human
acuuguguaaauacaauuuug

SEQ ID NO: 2753845 - RNA, 22 nt, Human
acuuguguaaauacaauuuugu

SEQ ID NO: 2753846 - RNA, 23 nt, Human
acuuguguaaauacaauuuuguu

SEQ ID NO: 2753847 - RNA, 15 nt, Human
ucucccagucauuua

SEQ ID NO: 2753848 - RNA, 12 nt, Human
ucuccauuuaau

SEQ ID NO: 2753849 - RNA, 16 nt, Human
ucuccauuuaauaauu

SEQ ID NO: 2753850 - RNA, 19 nt, Human
ucuccauuuaauaauuaua

SEQ ID NO: 2753851 - RNA, 12 nt, Human
ucugcuugccau

SEQ ID NO: 2753852 - RNA, 11 nt, Human
ucugcuugcca

SEQ ID NO: 2753853 - RNA, 21 nt, Human
agaagaacugaaaucauacuu

SEQ ID NO: 2753854 - RNA, 14 nt, Human
ucugccuaaggacu

SEQ ID NO: 2753855 - RNA, 15 nt, Human
ucugccuaaggacuu

SEQ ID NO: 2753856 - RNA, 16 nt, Human
ucugccuaaggacuuc

SEQ ID NO: 2753857 - RNA, 13 nt, Human
ucugccuaaggac

SEQ ID NO: 2753858 - RNA, 14 nt, Human
agaacucccuuuca

SEQ ID NO: 2753859 - RNA, 22 nt, Human
agaaccucuuugucuacaccau

SEQ ID NO: 2753860 - RNA, 22 nt, Human
ucugagaaagacuauucaaaca

SEQ ID NO: 2753861 - RNA, 21 nt, Human
ucugagaaagacuauucaaac

SEQ ID NO: 2753862 - RNA, 23 nt, Human
ucugagaaagacuauucaaacag

SEQ ID NO: 2753863 - RNA, 20 nt, Human
ucugagaaagacuauucaaa

SEQ ID NO: 2753864 - RNA, 19 nt, Human
ucugagaaagacuauucaa

SEQ ID NO: 2753865 - RNA, 15 nt, Human
ucugagaaagacuau

SEQ ID NO: 2753866 - RNA, 14 nt, Human
ucugagaaagacua

SEQ ID NO: 2753867 - RNA, 21 nt, Human
ucugacuguuuccaucaaggg

SEQ ID NO: 2753868 - RNA, 23 nt, Human
agaaagacuauucaaacagucuc

SEQ ID NO: 2753869 - RNA, 20 nt, Human
agaaagacuauucaaacagu

SEQ ID NO: 2753870 - RNA, 18 nt, Human
agaaagacuauucaaaca

SEQ ID NO: 2753871 - RNA, 19 nt, Human
agaaagacuauucaaacag

SEQ ID NO: 2753872 - RNA, 21 nt, Human
agacuauucaaacagucucag

SEQ ID NO: 2753873 - RNA, 20 nt, Human
agacuauucaaacagucuca

SEQ ID NO: 2753874 - RNA, 18 nt, Human
agacuauucaaacagucu

SEQ ID NO: 2753875 - RNA, 12 nt, Human
agacuccaaaga

SEQ ID NO: 2753876 - RNA, 14 nt, Human
agacuccaaagaaa

SEQ ID NO: 2753877 - RNA, 13 nt, Human
agacuccaaagaa

SEQ ID NO: 2753878 - RNA, 16 nt, Human
agacuauucaaacagu

SEQ ID NO: 2753879 - RNA, 19 nt, Human
agacuccaaagaaauguaa

SEQ ID NO: 2753880 - RNA, 16 nt, Human
agacuccaaagaaaug

SEQ ID NO: 2753881 - RNA, 21 nt, Human
ucuuuaaagggauggcaagau

SEQ ID NO: 2753882 - RNA, 13 nt, Human
ucuuuaauuuugg

SEQ ID NO: 2753883 - RNA, 17 nt, Human
ucuuuaaaauacacacu

SEQ ID NO: 2753884 - RNA, 14 nt, Human
ucuuuaauuuugga

SEQ ID NO: 2753885 - RNA, 15 nt, Human
ucuuuaauuuuggaa

SEQ ID NO: 2753886 - RNA, 16 nt, Human
ucuuuaauuuuggaau

SEQ ID NO: 2753887 - RNA, 17 nt, Human
ucuuuaauuuuggaauu

SEQ ID NO: 2753888 - RNA, 18 nt, Human
ucuuuaauuuuggaauuu

SEQ ID NO: 2753889 - RNA, 18 nt, Human
agagacacacugaagaag

SEQ ID NO: 2753890 - RNA, 20 nt, Human
agagacacacugaagaagca

SEQ ID NO: 2753891 - RNA, 15 nt, Human
agagaaugagagaca

SEQ ID NO: 2753892 - RNA, 17 nt, Human
agagacacacugaagaa

SEQ ID NO: 2753893 - RNA, 15 nt, Human
agacuggcacaguuu

SEQ ID NO: 2753894 - RNA, 14 nt, Human
agacuggcacaguu

SEQ ID NO: 2753895 - RNA, 18 nt, Human
agacuggcacaguuuucu

SEQ ID NO: 2753896 - RNA, 14 nt, Human
ucuuaauuaaaaga

SEQ ID NO: 2753897 - RNA, 21 nt, Human
ucuuaauuaaaagaauauuuu

SEQ ID NO: 2753898 - RNA, 18 nt, Human
ucuuaauuaaaagaauau

SEQ ID NO: 2753899 - RNA, 18 nt, Human
ucuguuuuauaauuuugu

SEQ ID NO: 2753900 - RNA, 16 nt, Human
ucuguauagauuagag

SEQ ID NO: 2753901 - RNA, 17 nt, Human
ucuguauagauuagaau

SEQ ID NO: 2753902 - RNA, 19 nt, Human
agcuacuaauuuuaaaaug

SEQ ID NO: 2753903 - RNA, 18 nt, Human
agcccuucuuuccacaga

SEQ ID NO: 2753904 - RNA, 19 nt, Human
agcccuucuuuccacagaa

SEQ ID NO: 2753905 - RNA, 17 nt, Human
agcccuucuuuccacag

SEQ ID NO: 2753906 - RNA, 18 nt, Human
agccugagcgacagugag

SEQ ID NO: 2753907 - RNA, 14 nt, Human
ugcagugagccgag

SEQ ID NO: 2753908 - RNA, 16 nt, Human
agccugcacggugaau

SEQ ID NO: 2753909 - RNA, 18 nt, Human
agccugcacggugaaugg

SEQ ID NO: 2753910 - RNA, 14 nt, Human
agccugauuaaaga

SEQ ID NO: 2753911 - RNA, 13 nt, Human
agcuggaaaagua

SEQ ID NO: 2753912 - RNA, 17 nt, Human
agcugccuccccuccuc

SEQ ID NO: 2753913 - RNA, 18 nt, Human
agcugccuccccuccucu

SEQ ID NO: 2753914 - RNA, 19 nt, Human
agcugccuccccuccucug

SEQ ID NO: 2753915 - RNA, 20 nt, Human
agcugccuccccuccucugc

SEQ ID NO: 2753916 - RNA, 21 nt, Human
agcugccuccccuccucugcu

SEQ ID NO: 2753917 - RNA, 22 nt, Human
agcugccuccccuccucugcuu

SEQ ID NO: 2753918 - RNA, 23 nt, Human
agcugccuccccuccucugcuug

SEQ ID NO: 2753919 - RNA, 13 nt, Human
ugccuuuuucauu

SEQ ID NO: 2753920 - RNA, 14 nt, Human
ugccuuuuucauua

SEQ ID NO: 2753921 - RNA, 15 nt, Human
ugccuuuuucauuau

SEQ ID NO: 2753922 - RNA, 16 nt, Human
ugccuuuuucauuauu

SEQ ID NO: 2753923 - RNA, 17 nt, Human
ugccuuuuucauuauuu

SEQ ID NO: 2753924 - RNA, 21 nt, Human
ugccuuuuucauuauuuuauu

SEQ ID NO: 2753925 - RNA, 16 nt, Human
ugcuaguaauuggaaa

SEQ ID NO: 2753926 - RNA, 14 nt, Human
ugcuaguaauugga

SEQ ID NO: 2753927 - RNA, 13 nt, Human
aggaaagagaacu

SEQ ID NO: 2753928 - RNA, 19 nt, Human
aggaaagagaacuuccaga

SEQ ID NO: 2753929 - RNA, 23 nt, Human
aggaaaaguuuaauauuaaagcc

SEQ ID NO: 2753930 - RNA, 24 nt, Human
aggaaaaguuuaauauuaaagcca

SEQ ID NO: 2753931 - RNA, 21 nt, Human
aggaaaaguuuaauauuaaag

SEQ ID NO: 2753932 - RNA, 15 nt, Human
agcuuauuaaaacuc

SEQ ID NO: 2753933 - RNA, 20 nt, Human
agcuuauuaaaacucauuuu

SEQ ID NO: 2753934 - RNA, 21 nt, Human
agcuuauugucuagugaaacu

SEQ ID NO: 2753935 - RNA, 19 nt, Human
aggaauugacccacaagaa

SEQ ID NO: 2753936 - RNA, 23 nt, Human
aggaauucuguauagauuagaau

SEQ ID NO: 2753937 - RNA, 17 nt, Human
aggaauucuguauagau

SEQ ID NO: 2753938 - RNA, 22 nt, Human
aggaauucuguauagauuagaa

SEQ ID NO: 2753939 - RNA, 16 nt, Human
aggaauucuguauaga

SEQ ID NO: 2753940 - RNA, 15 nt, Human
aggaauucuguauag

SEQ ID NO: 2753941 - RNA, 14 nt, Human
aggaaauauuuauu

SEQ ID NO: 2753942 - RNA, 18 nt, Human
aggaaauauuuauuuuaa

SEQ ID NO: 2753943 - RNA, 13 nt, Human
aggaaauauuuau

SEQ ID NO: 2753944 - RNA, 16 nt, Human
uggagaagaacugaaa

SEQ ID NO: 2753945 - RNA, 14 nt, Human
uggagaagaacuga

SEQ ID NO: 2753946 - RNA, 21 nt, Human
uggagcucgugggacagucac

SEQ ID NO: 2753947 - RNA, 23 nt, Human
uggagccugcacggugaauggcu

SEQ ID NO: 2753948 - RNA, 17 nt, Human
uggaauuuuccuccuuu

SEQ ID NO: 2753949 - RNA, 21 nt, Human
uggaauuuuccuccuuucucu

SEQ ID NO: 2753950 - RNA, 11 nt, Human
aggcuccacuu

SEQ ID NO: 2753951 - RNA, 17 nt, Human
aggcuccacuuggucug

SEQ ID NO: 2753952 - RNA, 21 nt, Human
aggcuccacuuggucugugag

SEQ ID NO: 2753953 - RNA, 22 nt, Human
aggcuccacuuggucugugaga

SEQ ID NO: 2753954 - RNA, 19 nt, Human
uggcuauaggugcuacaaa

SEQ ID NO: 2753955 - RNA, 15 nt, Human
uggcuauaggugcua

SEQ ID NO: 2753956 - RNA, 18 nt, Human
uggcuaagcaaaauguga

SEQ ID NO: 2753957 - RNA, 23 nt, Human
uggcuauaggugcuacaaaaaca

SEQ ID NO: 2753958 - RNA, 18 nt, Human
ugggaaacaaaaggauaa

SEQ ID NO: 2753959 - RNA, 18 nt, Human
ugggaaagcauuguaaau

SEQ ID NO: 2753960 - RNA, 17 nt, Human
ugggaaagcauuguaaa

SEQ ID NO: 2753961 - RNA, 16 nt, Human
ugggaaagcauuguaa

SEQ ID NO: 2753962 - RNA, 14 nt, Human
ugggaaagcauugu

SEQ ID NO: 2753963 - RNA, 15 nt, Human
agggaaacugccagc

SEQ ID NO: 2753964 - RNA, 14 nt, Human
agggaaacugccag

SEQ ID NO: 2753965 - RNA, 23 nt, Human
agggaaacugccagcaacgcagg

SEQ ID NO: 2753966 - RNA, 21 nt, Human
agggaaacugccagcaacgca

SEQ ID NO: 2753967 - RNA, 19 nt, Human
agggaaacugccagcaacg

SEQ ID NO: 2753968 - RNA, 16 nt, Human
agggaaacugccagca

SEQ ID NO: 2753969 - RNA, 20 nt, Human
ugggaacccaaguccaagca

SEQ ID NO: 2753970 - RNA, 22 nt, Human
agggcuguuauaaucuuucaca

SEQ ID NO: 2753971 - RNA, 23 nt, Human
agggacuucugucuucacaacag

SEQ ID NO: 2753972 - RNA, 14 nt, Human
agggagagaagaua

SEQ ID NO: 2753973 - RNA, 13 nt, Human
agggagagaagau

SEQ ID NO: 2753974 - RNA, 19 nt, Human
ugggaggcugagaugggag

SEQ ID NO: 2753975 - RNA, 12 nt, Human
aguauuaagcau

SEQ ID NO: 2753976 - RNA, 14 nt, Human
aguauuaagcauau

SEQ ID NO: 2753977 - RNA, 13 nt, Human
aguauaauuaaca

SEQ ID NO: 2753978 - RNA, 14 nt, Human
aguauaauuaacau

SEQ ID NO: 2753979 - RNA, 16 nt, Human
aguauaauuaacaugu

SEQ ID NO: 2753980 - RNA, 23 nt, Human
aguauaauuaacauguuaaacca

SEQ ID NO: 2753981 - RNA, 14 nt, Human
agucaggaaagaga

SEQ ID NO: 2753982 - RNA, 13 nt, Human
agucucaggaaau

SEQ ID NO: 2753983 - RNA, 16 nt, Human
aggugcuacaaaaaca

SEQ ID NO: 2753984 - RNA, 14 nt, Human
agguugcagugagc

SEQ ID NO: 2753985 - RNA, 19 nt, Human
uguaagggaaacugccagc

SEQ ID NO: 2753986 - RNA, 18 nt, Human
uguaagggaaacugccag

SEQ ID NO: 2753987 - RNA, 13 nt, Human
uguaagggaaacu

SEQ ID NO: 2753988 - RNA, 17 nt, Human
uguaguguuggagaaga

SEQ ID NO: 2753989 - RNA, 18 nt, Human
uguaguguuggagaagaa

SEQ ID NO: 2753990 - RNA, 16 nt, Human
uguaguguuggagaag

SEQ ID NO: 2753991 - RNA, 20 nt, Human
aguaaaaccacagcaguuga

SEQ ID NO: 2753992 - RNA, 19 nt, Human
aguaaaaccacagcaguug

SEQ ID NO: 2753993 - RNA, 17 nt, Human
aguaaaaccacagcagu

SEQ ID NO: 2753994 - RNA, 16 nt, Human
aguaaaaccacagcag

SEQ ID NO: 2753995 - RNA, 12 nt, Human
aguaauuggaaa

SEQ ID NO: 2753996 - RNA, 13 nt, Human
aguaauuggaaag

SEQ ID NO: 2753997 - RNA, 23 nt, Human
aguguuggagaagaacugaaauc

SEQ ID NO: 2753998 - RNA, 15 nt, Human
uguucuaagaaguga

SEQ ID NO: 2753999 - RNA, 22 nt, Human
uguugcccacagcuguaugauu

SEQ ID NO: 2754000 - RNA, 16 nt, Human
uguguuagagauuuuu

SEQ ID NO: 2754001 - RNA, 21 nt, Human
agugaacaaauuuacagagac

SEQ ID NO: 2754002 - RNA, 16 nt, Human
agucuuucacauuuaa

SEQ ID NO: 2754003 - RNA, 20 nt, Human
agucuugucucagauuuuau

SEQ ID NO: 2754004 - RNA, 21 nt, Human
agucuugucucagauuuuauu

SEQ ID NO: 2754005 - RNA, 22 nt, Human
agugaacaaauuuacagagaca

SEQ ID NO: 2754006 - RNA, 23 nt, Human
agugaacaaauuuacagagacag

SEQ ID NO: 2754007 - RNA, 17 nt, Human
agucuugucucagauuu

SEQ ID NO: 2754008 - RNA, 19 nt, Human
agucuugucucagauuuua

SEQ ID NO: 2754009 - RNA, 16 nt, Human
agucuugucucagauu

SEQ ID NO: 2754010 - RNA, 22 nt, Human
agugcaaauugucacaggacag

SEQ ID NO: 2754011 - RNA, 21 nt, Human
agugaguuggguguauugugc

SEQ ID NO: 2754012 - RNA, 20 nt, Human
agugaguuggguguauugug

SEQ ID NO: 2754013 - RNA, 19 nt, Human
ugugcugggguuaucugaa

SEQ ID NO: 2754014 - RNA, 20 nt, Human
ugugcugguguaugugugaa

SEQ ID NO: 2754015 - RNA, 17 nt, Human
auacuauggaauuucuc

SEQ ID NO: 2754016 - RNA, 15 nt, Human
uuauauuugaaauau

SEQ ID NO: 2754017 - RNA, 19 nt, Human
uuauauuugaaauauugac

SEQ ID NO: 2754018 - RNA, 22 nt, Human
auaccacaggaaccacaagacu

SEQ ID NO: 2754019 - RNA, 14 nt, Human
uuaugaauuacauu

SEQ ID NO: 2754020 - RNA, 16 nt, Human
uuaugaauuacauuug

SEQ ID NO: 2754021 - RNA, 17 nt, Human
uuaugaauuacauuugu

SEQ ID NO: 2754022 - RNA, 21 nt, Human
uuaugaauuacauuuguauaa

SEQ ID NO: 2754023 - RNA, 13 nt, Human
uuaugauccagca

SEQ ID NO: 2754024 - RNA, 18 nt, Human
uuaugauccagcagauua

SEQ ID NO: 2754025 - RNA, 16 nt, Human
uuaugaaacuugugua

SEQ ID NO: 2754026 - RNA, 18 nt, Human
uuaugaaacuuguguaaa

SEQ ID NO: 2754027 - RNA, 13 nt, Human
uuaugaaacuugu

SEQ ID NO: 2754028 - RNA, 19 nt, Human
uuaugaaacuuguguaaau

SEQ ID NO: 2754029 - RNA, 19 nt, Human
uuaugauuaaguaaugaua

SEQ ID NO: 2754030 - RNA, 22 nt, Human
uuaugauccagcagauuauuca

SEQ ID NO: 2754031 - RNA, 23 nt, Human
uuaugauccagcagauuauucac

SEQ ID NO: 2754032 - RNA, 19 nt, Human
uuauguaaaucccauuauu

SEQ ID NO: 2754033 - RNA, 21 nt, Human
uuauguaaaucccauuauuca

SEQ ID NO: 2754034 - RNA, 22 nt, Human
uuauguaaaucccauuauucaa

SEQ ID NO: 2754035 - RNA, 23 nt, Human
uuauguaaaucccauuauucaaa

SEQ ID NO: 2754036 - RNA, 12 nt, Human
uuauguaaaucc

SEQ ID NO: 2754037 - RNA, 13 nt, Human
uuauguaaauccc

SEQ ID NO: 2754038 - RNA, 11 nt, Human
uuauguaaauc

SEQ ID NO: 2754039 - RNA, 16 nt, Human
uuaugugcgcugauaa

SEQ ID NO: 2754040 - RNA, 13 nt, Human
auagaaguaaaaa

SEQ ID NO: 2754041 - RNA, 20 nt, Human
auagaaccucuuugucuaca

SEQ ID NO: 2754042 - RNA, 14 nt, Human
auagaaccucuuug

SEQ ID NO: 2754043 - RNA, 17 nt, Human
auagaauuaacacauga

SEQ ID NO: 2754044 - RNA, 18 nt, Human
auagauaggucagugcaa

SEQ ID NO: 2754045 - RNA, 21 nt, Human
auagaggaagccugauuaaag

SEQ ID NO: 2754046 - RNA, 22 nt, Human
auagaggaagccugauuaaaga

SEQ ID NO: 2754047 - RNA, 22 nt, Human
auagauuagagaguguugaaac

SEQ ID NO: 2754048 - RNA, 13 nt, Human
auagauuagaauu

SEQ ID NO: 2754049 - RNA, 15 nt, Human
auagauuagaauucu

SEQ ID NO: 2754050 - RNA, 16 nt, Human
auagauuagaauucug

SEQ ID NO: 2754051 - RNA, 21 nt, Human
auagauuagagaguguugaaa

SEQ ID NO: 2754052 - RNA, 16 nt, Human
auacucauuaggaugg

SEQ ID NO: 2754053 - RNA, 15 nt, Human
auacuggauuguacu

SEQ ID NO: 2754054 - RNA, 19 nt, Human
uuauguuaaaacugggaca

SEQ ID NO: 2754055 - RNA, 14 nt, Human
uuauuauauuuaca

SEQ ID NO: 2754056 - RNA, 15 nt, Human
uuauuauauuuacaa

SEQ ID NO: 2754057 - RNA, 11 nt, Human
uuauuaugaaa

SEQ ID NO: 2754058 - RNA, 17 nt, Human
uuauuaugaaacuugug

SEQ ID NO: 2754059 - RNA, 20 nt, Human
uuauuaugaaacuuguguaa

SEQ ID NO: 2754060 - RNA, 21 nt, Human
uuauuaugaaacuuguguaaa

SEQ ID NO: 2754061 - RNA, 22 nt, Human
uuauuaugaaacuuguguaaau

SEQ ID NO: 2754062 - RNA, 23 nt, Human
uuauuaugaaacuuguguaaaua

SEQ ID NO: 2754063 - RNA, 14 nt, Human
uuauucacugauuu

SEQ ID NO: 2754064 - RNA, 16 nt, Human
uuauuauguaaauccc

SEQ ID NO: 2754065 - RNA, 22 nt, Human
uuauuauguaaaucccauuauu

SEQ ID NO: 2754066 - RNA, 13 nt, Human
uuauuauguaaau

SEQ ID NO: 2754067 - RNA, 14 nt, Human
uuauuauguaaauc

SEQ ID NO: 2754068 - RNA, 13 nt, Human
uuauucaaaguug

SEQ ID NO: 2754069 - RNA, 15 nt, Human
uuauucaaaguugcc

SEQ ID NO: 2754070 - RNA, 19 nt, Human
uuauucaaaguugccuaaa

SEQ ID NO: 2754071 - RNA, 16 nt, Human
aguuuuauaugcuucu

SEQ ID NO: 2754072 - RNA, 14 nt, Human
aguuuuguuuggac

SEQ ID NO: 2754073 - RNA, 16 nt, Human
aguuuuguuuggacca

SEQ ID NO: 2754074 - RNA, 12 nt, Human
aguuuuguuugg

SEQ ID NO: 2754075 - RNA, 18 nt, Human
aguuuuguuuggaccaaa

SEQ ID NO: 2754076 - RNA, 14 nt, Human
uuaauuuuggaauu

SEQ ID NO: 2754077 - RNA, 15 nt, Human
uuaauuuuggaauuu

SEQ ID NO: 2754078 - RNA, 13 nt, Human
uuaauuuuggaau

SEQ ID NO: 2754079 - RNA, 20 nt, Human
aguuuaaauuguaauaggcg

SEQ ID NO: 2754080 - RNA, 17 nt, Human
aguuuaaauuguaauag

SEQ ID NO: 2754081 - RNA, 15 nt, Human
aguuuagcuggaaaa

SEQ ID NO: 2754082 - RNA, 19 nt, Human
uuaaaaaagaaacauuugg

SEQ ID NO: 2754083 - RNA, 16 nt, Human
uuaaaaaauggaacau

SEQ ID NO: 2754084 - RNA, 14 nt, Human
uuaaaaucauuucu

SEQ ID NO: 2754085 - RNA, 22 nt, Human
uuaaaaucauuucugcaucagc

SEQ ID NO: 2754086 - RNA, 17 nt, Human
uuaaaccaugggauaaa

SEQ ID NO: 2754087 - RNA, 19 nt, Human
aguuugugcugguguaugu

SEQ ID NO: 2754088 - RNA, 13 nt, Human
uuaaaguugaauu

SEQ ID NO: 2754089 - RNA, 16 nt, Human
uuaaaguugaauuuau

SEQ ID NO: 2754090 - RNA, 17 nt, Human
uuaaaguugaauuuauu

SEQ ID NO: 2754091 - RNA, 22 nt, Human
uuaaaguugaauuuauuggcuu

SEQ ID NO: 2754092 - RNA, 21 nt, Human
uuaaaccaugggauaaaugcc

SEQ ID NO: 2754093 - RNA, 22 nt, Human
uuaaaccaugggauaaaugcca

SEQ ID NO: 2754094 - RNA, 23 nt, Human
uuaaaccaugggauaaaugccau

SEQ ID NO: 2754095 - RNA, 14 nt, Human
uuaggguuaugauu

SEQ ID NO: 2754096 - RNA, 16 nt, Human
uuaggguuaugauuaa

SEQ ID NO: 2754097 - RNA, 14 nt, Human
uuagggagagaaga

SEQ ID NO: 2754098 - RNA, 15 nt, Human
uuagggagagaagau

SEQ ID NO: 2754099 - RNA, 14 nt, Human
auaaucuuucacag

SEQ ID NO: 2754100 - RNA, 15 nt, Human
auaaaucugugaacu

SEQ ID NO: 2754101 - RNA, 16 nt, Human
auaaaucugugaacuu

SEQ ID NO: 2754102 - RNA, 19 nt, Human
auaaaucugugaacuugaa

SEQ ID NO: 2754103 - RNA, 17 nt, Human
auaaaugccaucaauaa

SEQ ID NO: 2754104 - RNA, 18 nt, Human
auaaaugccaucaauaaa

SEQ ID NO: 2754105 - RNA, 14 nt, Human
uuagaauucuguau

SEQ ID NO: 2754106 - RNA, 15 nt, Human
uuagaauucuguaua

SEQ ID NO: 2754107 - RNA, 17 nt, Human
uuagaauucuguauaga

SEQ ID NO: 2754108 - RNA, 23 nt, Human
augaauggcuaagcaaaauguga

SEQ ID NO: 2754109 - RNA, 15 nt, Human
augaauuaaguuuuu

SEQ ID NO: 2754110 - RNA, 15 nt, Human
augaauuacauuugu

SEQ ID NO: 2754111 - RNA, 16 nt, Human
augaauuacauuugua

SEQ ID NO: 2754112 - RNA, 11 nt, Human
aucugccuaag

SEQ ID NO: 2754113 - RNA, 21 nt, Human
aucugccuaaggacuucuuua

SEQ ID NO: 2754114 - RNA, 22 nt, Human
aucugccuaaggacuucuuuaa

SEQ ID NO: 2754115 - RNA, 23 nt, Human
aucugccuaaggacuucuuuaau

SEQ ID NO: 2754116 - RNA, 19 nt, Human
aucuacacuccagugagac

SEQ ID NO: 2754117 - RNA, 18 nt, Human
aucuacacuccagugaga

SEQ ID NO: 2754118 - RNA, 17 nt, Human
uugaagggaaauuucag

SEQ ID NO: 2754119 - RNA, 22 nt, Human
uugcaagccagauuuuccugaa

SEQ ID NO: 2754120 - RNA, 13 nt, Human
uugcaucaauuuu

SEQ ID NO: 2754121 - RNA, 19 nt, Human
uugaacccgggaggcagag

SEQ ID NO: 2754122 - RNA, 18 nt, Human
uugaacccgggaggcaga

SEQ ID NO: 2754123 - RNA, 15 nt, Human
uugaaauuguaauua

SEQ ID NO: 2754124 - RNA, 17 nt, Human
uugaaauuguaauuaua

SEQ ID NO: 2754125 - RNA, 17 nt, Human
uugaaauuguauuacaa

SEQ ID NO: 2754126 - RNA, 13 nt, Human
uugaaauuguaau

SEQ ID NO: 2754127 - RNA, 14 nt, Human
uugaaauuguaauu

SEQ ID NO: 2754128 - RNA, 12 nt, Human
uucucuaggaaa

SEQ ID NO: 2754129 - RNA, 20 nt, Human
auccauuuggaaaucuuuaa

SEQ ID NO: 2754130 - RNA, 21 nt, Human
auccauuuggaaaucuuuaaa

SEQ ID NO: 2754131 - RNA, 19 nt, Human
uuccguagguuauuuucag

SEQ ID NO: 2754132 - RNA, 20 nt, Human
auauuuuuuguuaaaugauu

SEQ ID NO: 2754133 - RNA, 18 nt, Human
auauuuuuuguuaaauga

SEQ ID NO: 2754134 - RNA, 14 nt, Human
aucaacagauaaau

SEQ ID NO: 2754135 - RNA, 23 nt, Human
aucaccugucuugccuuuuucau

SEQ ID NO: 2754136 - RNA, 22 nt, Human
aucaccugucuugccuuuuuca

SEQ ID NO: 2754137 - RNA, 22 nt, Human
aucacuugucaauaaaauccau

SEQ ID NO: 2754138 - RNA, 17 nt, Human
aucaggguuaguauugu

SEQ ID NO: 2754139 - RNA, 16 nt, Human
uucuaaguaaaaccac

SEQ ID NO: 2754140 - RNA, 15 nt, Human
uucuaaguaaaacca

SEQ ID NO: 2754141 - RNA, 23 nt, Human
uucuaagaagugaaaaucuacac

SEQ ID NO: 2754142 - RNA, 13 nt, Human
uucuaagaaguga

SEQ ID NO: 2754143 - RNA, 15 nt, Human
uucggccuccauccu

SEQ ID NO: 2754144 - RNA, 14 nt, Human
uucggccuccaucc

SEQ ID NO: 2754145 - RNA, 19 nt, Human
uuuguaguguuggagaaga

SEQ ID NO: 2754146 - RNA, 21 nt, Human
uuuguaguguuggagaagaac

SEQ ID NO: 2754147 - RNA, 17 nt, Human
uuugugaagcaaaauuu

SEQ ID NO: 2754148 - RNA, 19 nt, Human
uuugugcugguguaugugu

SEQ ID NO: 2754149 - RNA, 16 nt, Human
auguccacugguucuu

SEQ ID NO: 2754150 - RNA, 17 nt, Human
auguccacugguucuuc

SEQ ID NO: 2754151 - RNA, 21 nt, Human
uuuggcauaacauaaaucugu

SEQ ID NO: 2754152 - RNA, 20 nt, Human
uuuggcauaacauaaaucug

SEQ ID NO: 2754153 - RNA, 12 nt, Human
auguagaggaga

SEQ ID NO: 2754154 - RNA, 13 nt, Human
auguagaggagaa

SEQ ID NO: 2754155 - RNA, 17 nt, Human
auguagaggagaaacug

SEQ ID NO: 2754156 - RNA, 19 nt, Human
auguagaggagaaacugga

SEQ ID NO: 2754157 - RNA, 16 nt, Human
auguacuucaugcugu

SEQ ID NO: 2754158 - RNA, 14 nt, Human
uuugcaagccagau

SEQ ID NO: 2754159 - RNA, 21 nt, Human
augguucccuugaugaagaag

SEQ ID NO: 2754160 - RNA, 14 nt, Human
auguaaaucccauu

SEQ ID NO: 2754161 - RNA, 20 nt, Human
auguaaaucccauuauucaa

SEQ ID NO: 2754162 - RNA, 22 nt, Human
auguaaaucccauuauucaaag

SEQ ID NO: 2754163 - RNA, 23 nt, Human
auguaaaucccauuauucaaagu

SEQ ID NO: 2754164 - RNA, 17 nt, Human
uuucucccagucauuua

SEQ ID NO: 2754165 - RNA, 18 nt, Human
uuucucccagucauuuaa

SEQ ID NO: 2754166 - RNA, 15 nt, Human
augggauaaaugcca

SEQ ID NO: 2754167 - RNA, 16 nt, Human
augggauaaaugccau

SEQ ID NO: 2754168 - RNA, 20 nt, Human
augggauaaaugccaucaau

SEQ ID NO: 2754169 - RNA, 19 nt, Human
uuucuguacuuuuuggcau

SEQ ID NO: 2754170 - RNA, 20 nt, Human
uuucuguacuuuuuggcaua

SEQ ID NO: 2754171 - RNA, 15 nt, Human
uuugaaauauugacu

SEQ ID NO: 2754172 - RNA, 18 nt, Human
uuuaaauauaugcuaagu

SEQ ID NO: 2754173 - RNA, 21 nt, Human
uuuaaauaaauaaauagcuag

SEQ ID NO: 2754174 - RNA, 13 nt, Human
augcaguucugaa

SEQ ID NO: 2754175 - RNA, 21 nt, Human
augccauuuaaagcuuauuaa

SEQ ID NO: 2754176 - RNA, 17 nt, Human
augccauuuaaagcuua

SEQ ID NO: 2754177 - RNA, 18 nt, Human
augauuaaguaaugauaa

SEQ ID NO: 2754178 - RNA, 14 nt, Human
augauuaaguaaug

SEQ ID NO: 2754179 - RNA, 22 nt, Human
augauccagcagauuauucacu

SEQ ID NO: 2754180 - RNA, 19 nt, Human
augauccagcagauuauuc

SEQ ID NO: 2754181 - RNA, 20 nt, Human
augauccagcagauuauuca

SEQ ID NO: 2754182 - RNA, 10 nt, Human
augauccagc

SEQ ID NO: 2754183 - RNA, 15 nt, Human
augauaacuggaaac

SEQ ID NO: 2754184 - RNA, 14 nt, Human
auggcacuaguauu

SEQ ID NO: 2754185 - RNA, 16 nt, Human
auggcacuaguauuuc

SEQ ID NO: 2754186 - RNA, 19 nt, Human
auggcuaagcaaaauguga

SEQ ID NO: 2754187 - RNA, 23 nt, Human
auggcuauaggugcuacaaaaac

SEQ ID NO: 2754188 - RNA, 14 nt, Human
augggauaaaugcc

SEQ ID NO: 2754189 - RNA, 19 nt, Human
uuucauuauuuuauuauga

SEQ ID NO: 2754190 - RNA, 20 nt, Human
uuucauuauuuuauuaugaa

SEQ ID NO: 2754191 - RNA, 13 nt, Human
uuucauuauuuua

SEQ ID NO: 2754192 - RNA, 15 nt, Human
uuucauuauuuuauu

SEQ ID NO: 2754193 - RNA, 17 nt, Human
auggacuguggugacuu

SEQ ID NO: 2754194 - RNA, 22 nt, Human
auggacuguggugacuuuggau

SEQ ID NO: 2754195 - RNA, 16 nt, Human
auggacuguggugacu

SEQ ID NO: 2754196 - RNA, 16 nt, Human
uuucaaacauauauaa

SEQ ID NO: 2754197 - RNA, 18 nt, Human
auggaacgcguugaaauu

SEQ ID NO: 2754198 - RNA, 19 nt, Human
auggaacgcguugaaauug

SEQ ID NO: 2754199 - RNA, 16 nt, Human
auggaacgcguugaaa

SEQ ID NO: 2754200 - RNA, 17 nt, Human
auggaacgcguugaaau

SEQ ID NO: 2754201 - RNA, 15 nt, Human
auggaacgcguugaa

SEQ ID NO: 2754202 - RNA, 20 nt, Human
augcuagaacucccuuucaa

SEQ ID NO: 2754203 - RNA, 21 nt, Human
augcuagaacucccuuucaac

SEQ ID NO: 2754204 - RNA, 19 nt, Human
augcuagaacucccuuuca

SEQ ID NO: 2754205 - RNA, 22 nt, Human
augcuagaacucccuuucaaca

SEQ ID NO: 2754206 - RNA, 14 nt, Human
uuuauuacaguaua

SEQ ID NO: 2754207 - RNA, 18 nt, Human
uuuauuacaguauaauua

SEQ ID NO: 2754208 - RNA, 13 nt, Human
augcuauuucuau

SEQ ID NO: 2754209 - RNA, 14 nt, Human
augcuauuucuaua

SEQ ID NO: 2754210 - RNA, 15 nt, Human
augcuauuucuauau

SEQ ID NO: 2754211 - RNA, 20 nt, Human
augcuauuucuauauuuuca

SEQ ID NO: 2754212 - RNA, 11 nt, Human
augcuauuucu

SEQ ID NO: 2754213 - RNA, 21 nt, Human
augcuauuucuauauuuucau

SEQ ID NO: 2754214 - RNA, 22 nt, Human
augcuauuucuauauuuucauu

SEQ ID NO: 2754215 - RNA, 23 nt, Human
augcuauuucuauauuuucauuc

SEQ ID NO: 2754216 - RNA, 13 nt, Human
uuuauauuuacua

SEQ ID NO: 2754217 - RNA, 16 nt, Human
uuuauauuuacuaaaa

SEQ ID NO: 2754218 - RNA, 19 nt, Human
auuggacaguaaaauccac

SEQ ID NO: 2754219 - RNA, 19 nt, Human
auuggagcucgugggacag

SEQ ID NO: 2754220 - RNA, 13 nt, Human
auugacuuuuuau

SEQ ID NO: 2754221 - RNA, 16 nt, Human
auuggcuuuucugauc

SEQ ID NO: 2754222 - RNA, 19 nt, Human
auuggcuuuucugauccag

SEQ ID NO: 2754223 - RNA, 20 nt, Human
auuggcuuuucugauccagu

SEQ ID NO: 2754224 - RNA, 13 nt, Human
auuggcuuuucug

SEQ ID NO: 2754225 - RNA, 15 nt, Human
auuggcuuuucugau

SEQ ID NO: 2754226 - RNA, 13 nt, Human
auugucuagugaa

SEQ ID NO: 2754227 - RNA, 14 nt, Human
auuuauuuuaauaa

SEQ ID NO: 2754228 - RNA, 16 nt, Human
auuugacauagucugg

SEQ ID NO: 2754229 - RNA, 17 nt, Human
auuugacauagucuggc

SEQ ID NO: 2754230 - RNA, 21 nt, Human
auuugacauagucuggcugua

SEQ ID NO: 2754231 - RNA, 15 nt, Human
auuugaauuuugugu

SEQ ID NO: 2754232 - RNA, 19 nt, Human
auuuguaguguuggagaag

SEQ ID NO: 2754233 - RNA, 22 nt, Human
auuuguaguguuggagaagaac

SEQ ID NO: 2754234 - RNA, 14 nt, Human
auuuguauaaaaua

SEQ ID NO: 2754235 - RNA, 23 nt, Human
auuuuaaaagaaugauuaugaau

SEQ ID NO: 2754236 - RNA, 16 nt, Human
auuuuaaaagaaugau

SEQ ID NO: 2754237 - RNA, 15 nt, Human
auuuucuauaauuua

SEQ ID NO: 2754238 - RNA, 14 nt, Human
auuuucuauaauuu

SEQ ID NO: 2754239 - RNA, 14 nt, Human
auuuuccugaaaac

SEQ ID NO: 2754240 - RNA, 11 nt, Human
auuuuguuucu

SEQ ID NO: 2754241 - RNA, 12 nt, Human
auuuuggaauuu

SEQ ID NO: 2754242 - RNA, 15 nt, Human
auuuuucuuauuuca

SEQ ID NO: 2754243 - RNA, 20 nt, Human
auuuuucuuauuucauuucu

SEQ ID NO: 2754244 - RNA, 19 nt, Human
auuuuucuuauuucauuuc

SEQ ID NO: 2754245 - RNA, 14 nt, Human
auuuuguuucugua

SEQ ID NO: 2754246 - RNA, 15 nt, Human
auuuuguuucuguac

SEQ ID NO: 2754247 - RNA, 22 nt, Human
auuuuugugauuuugugauuga

SEQ ID NO: 2754248 - RNA, 21 nt, Human
auuuuuguuuucauuaucuca

SEQ ID NO: 2754249 - RNA, 18 nt, Human
auuuuuuguuaaaugauu

SEQ ID NO: 2754250 - RNA, 20 nt, Human
auuuuuucucuaggaaauau

SEQ ID NO: 2754251 - RNA, 23 nt, Human
auuuuuucucuaggaaauauuua

SEQ ID NO: 2754252 - RNA, 15 nt, Human
auugacacuuaaaaa

SEQ ID NO: 2754253 - RNA, 17 nt, Human
auugacacuuaaaaaug

SEQ ID NO: 2754254 - RNA, 19 nt, Human
auugacacuuaaaaauggu

SEQ ID NO: 2754255 - RNA, 19 nt, Human
auucuuaaaguugaauuua

SEQ ID NO: 2754256 - RNA, 20 nt, Human
auucuuaaaguugaauuuau

SEQ ID NO: 2754257 - RNA, 21 nt, Human
auucuuaaaguugaauuuauu

SEQ ID NO: 2754258 - RNA, 11 nt, Human
auucuguauag

SEQ ID NO: 2754259 - RNA, 12 nt, Human
auucuguauaga

SEQ ID NO: 2754260 - RNA, 13 nt, Human
auucuguauagau

SEQ ID NO: 2754261 - RNA, 20 nt, Human
auucaaacagucucaggaaa

SEQ ID NO: 2754262 - RNA, 19 nt, Human
auucaaacagucucaggaa

SEQ ID NO: 2754263 - RNA, 18 nt, Human
auucaaacagucucagga

SEQ ID NO: 2754264 - RNA, 16 nt, Human
auucaaacagucucag

SEQ ID NO: 2754265 - RNA, 14 nt, Human
auuauucaaaguug

SEQ ID NO: 2754266 - RNA, 15 nt, Human
auuauucaaaguugc

SEQ ID NO: 2754267 - RNA, 13 nt, Human
auuauucaaaguu

SEQ ID NO: 2754268 - RNA, 17 nt, Human
auuauucaaaguugccu

SEQ ID NO: 2754269 - RNA, 21 nt, Human
auuauguuaaaacugggacag

SEQ ID NO: 2754270 - RNA, 15 nt, Human
auuauauuuauuacu

SEQ ID NO: 2754271 - RNA, 18 nt, Human
auuauauuuauuacugua

SEQ ID NO: 2754272 - RNA, 13 nt, Human
aaaaacacagcaa

SEQ ID NO: 2754273 - RNA, 18 nt, Human
aaaaaauuggggauucuu

SEQ ID NO: 2754274 - RNA, 18 nt, Human
aaaaacacagcaagggug

SEQ ID NO: 2754275 - RNA, 12 nt, Human
aaaaacacagca

SEQ ID NO: 2754276 - RNA, 20 nt, Human
aaaaaccaguauuguacaaa

SEQ ID NO: 2754277 - RNA, 17 nt, Human
acucuauguucuaagaa

SEQ ID NO: 2754278 - RNA, 20 nt, Human
acuaguauuucuaugaaaua

SEQ ID NO: 2754279 - RNA, 21 nt, Human
acuauucaaacagucucagga

SEQ ID NO: 2754280 - RNA, 14 nt, Human
acucaaaucaagaa

SEQ ID NO: 2754281 - RNA, 22 nt, Human
acgcaggcccccaggugccagu

SEQ ID NO: 2754282 - RNA, 19 nt, Human
acgcaggcccccaggugcc

SEQ ID NO: 2754283 - RNA, 13 nt, Human
acuaagagagaau

SEQ ID NO: 2754284 - RNA, 14 nt, Human
agaaaauaacaaua

SEQ ID NO: 2754285 - RNA, 16 nt, Human
agaaaaucaggcuggc

SEQ ID NO: 2754286 - RNA, 22 nt, Human
acuuuauuuucuauaauuuaaa

SEQ ID NO: 2754287 - RNA, 22 nt, Human
acuguaagaaaauaucacuugu

SEQ ID NO: 2754288 - RNA, 19 nt, Human
acuguaagaaaauaucacu

SEQ ID NO: 2754289 - RNA, 13 nt, Human
acuguaagaaaau

SEQ ID NO: 2754290 - RNA, 14 nt, Human
acuggugacugauu

SEQ ID NO: 2754291 - RNA, 20 nt, Human
acucugucucaguccaugaa

SEQ ID NO: 2754292 - RNA, 18 nt, Human
acucugucucaguccaug

SEQ ID NO: 2754293 - RNA, 13 nt, Human
acugccagcaacg

SEQ ID NO: 2754294 - RNA, 12 nt, Human
acuucagacaua

SEQ ID NO: 2754295 - RNA, 21 nt, Human
acuucugucuucacaacagau

SEQ ID NO: 2754296 - RNA, 22 nt, Human
acuucugucuucacaacagauu

SEQ ID NO: 2754297 - RNA, 21 nt, Human
acuuggucugugagaugcuag

SEQ ID NO: 2754298 - RNA, 21 nt, Human
acccacaagaaaugaaagcag

SEQ ID NO: 2754299 - RNA, 17 nt, Human
acccacaagaaaugaaa

SEQ ID NO: 2754300 - RNA, 21 nt, Human
acagcaguugaaaagacucca

SEQ ID NO: 2754301 - RNA, 23 nt, Human
acagcaguugaaaagacuccaaa

SEQ ID NO: 2754302 - RNA, 22 nt, Human
acagcaguugaaaagacuccaa

SEQ ID NO: 2754303 - RNA, 21 nt, Human
acacgagcaggcuacugucag

SEQ ID NO: 2754304 - RNA, 19 nt, Human
acacgagcaggcuacuguc

SEQ ID NO: 2754305 - RNA, 14 nt, Human
acacgagcaggcua

SEQ ID NO: 2754306 - RNA, 14 nt, Human
aauuuuguuucugu

SEQ ID NO: 2754307 - RNA, 13 nt, Human
aauuuuguuucug

SEQ ID NO: 2754308 - RNA, 14 nt, Human
aaaggcagaagcaa

SEQ ID NO: 2754309 - RNA, 10 nt, Human
aaauaaauaa

SEQ ID NO: 2754310 - RNA, 15 nt, Human
aaauauuuauuuuaa

SEQ ID NO: 2754311 - RNA, 13 nt, Human
aaauauuuauuuu

SEQ ID NO: 2754312 - RNA, 20 nt, Human
aaauauuuauuuuaauaaug

SEQ ID NO: 2754313 - RNA, 14 nt, Human
aaaucaaauaugca

SEQ ID NO: 2754314 - RNA, 12 nt, Human
aaaucaaauaug

SEQ ID NO: 2754315 - RNA, 15 nt, Human
aaaucaaauaugcaa

SEQ ID NO: 2754316 - RNA, 15 nt, Human
aaaucugugaacuug

SEQ ID NO: 2754317 - RNA, 16 nt, Human
aaaucugugaacuuga

SEQ ID NO: 2754318 - RNA, 18 nt, Human
aaaucugugaacuugaaa

SEQ ID NO: 2754319 - RNA, 18 nt, Human
aaauagcuagacugguga

SEQ ID NO: 2754320 - RNA, 15 nt, Human
aaagaaauguaaggg

SEQ ID NO: 2754321 - RNA, 23 nt, Human
aaacugagaugugaacacaucag

SEQ ID NO: 2754322 - RNA, 21 nt, Human
aaacugagaugugaacacauc

SEQ ID NO: 2754323 - RNA, 15 nt, Human
aaaccaugggauaaa

SEQ ID NO: 2754324 - RNA, 20 nt, Human
aaaccaugggauaaaugcca

SEQ ID NO: 2754325 - RNA, 16 nt, Human
aaaaucucaauauuuc

SEQ ID NO: 2754326 - RNA, 21 nt, Human
aaaaucuacacuccagugaga

SEQ ID NO: 2754327 - RNA, 18 nt, Human
aaaaguucugcagauaaa

SEQ ID NO: 2754328 - RNA, 16 nt, Human
aaaaagaaacauuugg

SEQ ID NO: 2754329 - RNA, 21 nt, Human
aacuuuaugcuaagugaaaua

SEQ ID NO: 2754330 - RNA, 20 nt, Human
aacuuuaugcuaagugaaau

SEQ ID NO: 2754331 - RNA, 20 nt, Human
aacugagaugugaacacauc

SEQ ID NO: 2754332 - RNA, 19 nt, Human
aacugacucuuaagaagac

SEQ ID NO: 2754333 - RNA, 20 nt, Human
aacugacucuuaagaagacu

SEQ ID NO: 2754334 - RNA, 15 nt, Human
aacugacucuuaaga

SEQ ID NO: 2754335 - RNA, 18 nt, Human
aacugacucuuaagaaga

SEQ ID NO: 2754336 - RNA, 14 nt, Human
aacggaugauuucu

SEQ ID NO: 2754337 - RNA, 15 nt, Human
aacggaugauuucua

SEQ ID NO: 2754338 - RNA, 16 nt, Human
aacggaugauuucuau

SEQ ID NO: 2754339 - RNA, 17 nt, Human
aacggaugauuucuaug

SEQ ID NO: 2754340 - RNA, 17 nt, Human
aaccuagggugauauua

SEQ ID NO: 2754341 - RNA, 16 nt, Human
aacccgggaggcagag

SEQ ID NO: 2754342 - RNA, 22 nt, Human
aaccacuggaaaguuuaugguu

SEQ ID NO: 2754343 - RNA, 19 nt, Human
aacagcuggugcccugcuu

SEQ ID NO: 2754344 - RNA, 17 nt, Human
aacagcuggugcccugc

SEQ ID NO: 2754345 - RNA, 20 nt, Human
aacagcuggugcccugcuuu

SEQ ID NO: 2754346 - RNA, 21 nt, Human
aacagcuggugcccugcuuuc

SEQ ID NO: 2754347 - RNA, 18 nt, Human
aacaaauuuacagagaca

SEQ ID NO: 2754348 - RNA, 16 nt, Human
aacacaucagcuugcc

SEQ ID NO: 2754349 - RNA, 22 nt, Human
aaauguuguucucuucuuuaaa

SEQ ID NO: 2754350 - RNA, 17 nt, Human
aaaucuuauaauuuaaa

SEQ ID NO: 2754351 - RNA, 19 nt, Human
aaauugacacuuaaaaaug

SEQ ID NO: 2754352 - RNA, 17 nt, Human
aagggaaacugccagca

SEQ ID NO: 2754353 - RNA, 16 nt, Human
aagggaaacugccagc

SEQ ID NO: 2754354 - RNA, 23 nt, Human
aagggaaacugccagcaacgcag

SEQ ID NO: 2754355 - RNA, 21 nt, Human
aaguagggacuucugucuuca

SEQ ID NO: 2754356 - RNA, 17 nt, Human
aaguccaagcauaccaa

SEQ ID NO: 2754357 - RNA, 18 nt, Human
aaguccaagcauuuagau

SEQ ID NO: 2754358 - RNA, 12 nt, Human
aaguugccuaaa

SEQ ID NO: 2754359 - RNA, 20 nt, Human
aaggcagcucuaaaugucaa

SEQ ID NO: 2754360 - RNA, 14 nt, Human
aaggacuucuuuaa

SEQ ID NO: 2754361 - RNA, 15 nt, Human
aaggacuucuuuaau

SEQ ID NO: 2754362 - RNA, 20 nt, Human
aaggacuucuuuaauuuugg

SEQ ID NO: 2754363 - RNA, 21 nt, Human
aaggacuucuuuaauuuugga

SEQ ID NO: 2754364 - RNA, 15 nt, Human
aaugauuaugaauua

SEQ ID NO: 2754365 - RNA, 21 nt, Human
aaugauuaugaauuacauuug

SEQ ID NO: 2754366 - RNA, 15 nt, Human
aaguugccuaaaucc

SEQ ID NO: 2754367 - RNA, 16 nt, Human
aaguugccuaaaucca

SEQ ID NO: 2754368 - RNA, 17 nt, Human
aaguugccuaaauccau

SEQ ID NO: 2754369 - RNA, 18 nt, Human
aaguugccuaaauccauu

SEQ ID NO: 2754370 - RNA, 19 nt, Human
aaguugccuaaauccauuu

SEQ ID NO: 2754371 - RNA, 23 nt, Human
aauguuucaaacauauauaacaa

SEQ ID NO: 2754372 - RNA, 16 nt, Human
agcaguugaaaagacu

SEQ ID NO: 2754373 - RNA, 13 nt, Human
agcaguugaaaag

SEQ ID NO: 2754374 - RNA, 23 nt, Human
agcaguucagagcugcccucucc

SEQ ID NO: 2754375 - RNA, 20 nt, Human
agcaguucagagcugcccuc

SEQ ID NO: 2754376 - RNA, 16 nt, Human
agcacugacuucuaag

SEQ ID NO: 2754377 - RNA, 21 nt, Human
agacugcauuauauuuauuac

SEQ ID NO: 2754378 - RNA, 17 nt, Human
agagaacuuccagaucc

SEQ ID NO: 2754379 - RNA, 13 nt, Human
agaguguugaaac

SEQ ID NO: 2754380 - RNA, 23 nt, Human
aggaugguucccuugaugaagaa

SEQ ID NO: 2754381 - RNA, 17 nt, Human
aggauguugaaaaaguu

SEQ ID NO: 2754382 - RNA, 22 nt, Human
agcuccccucggagaagagcug

SEQ ID NO: 2754383 - RNA, 18 nt, Human
aggugcuacaaaaacaca

SEQ ID NO: 2754384 - RNA, 22 nt, Human
aggugcuacaaaaacacagcaa

SEQ ID NO: 2754385 - RNA, 21 nt, Human
aggugcuacaaaaacacagca

SEQ ID NO: 2754386 - RNA, 20 nt, Human
aggugcuacaaaaacacagc

SEQ ID NO: 2754387 - RNA, 19 nt, Human
aggugcuacaaaaacacag

SEQ ID NO: 2754388 - RNA, 20 nt, Human
agguaaaagcaucacaugaa

SEQ ID NO: 2754389 - RNA, 24 nt, Human
aggugcuacaaaaacacagcaagg

SEQ ID NO: 2754390 - RNA, 23 nt, Human
aggugcuacaaaaacacagcaag

SEQ ID NO: 2754391 - RNA, 21 nt, Human
aggcuagaaccaccugccuau

SEQ ID NO: 2754392 - RNA, 17 nt, Human
aggcuacugucagcucc

SEQ ID NO: 2754393 - RNA, 17 nt, Human
aggcuagauguauguac

SEQ ID NO: 2754394 - RNA, 15 nt, Human
aggcuagauguaugu

SEQ ID NO: 2754395 - RNA, 16 nt, Human
aggcuagauguaugua

SEQ ID NO: 2754396 - RNA, 14 nt, Human
auagucaaauugug

SEQ ID NO: 2754397 - RNA, 15 nt, Human
auagguuuaauaauu

SEQ ID NO: 2754398 - RNA, 14 nt, Human
auaggugcuacaaa

SEQ ID NO: 2754399 - RNA, 23 nt, Human
auaggugcuacaaaaacacagca

SEQ ID NO: 2754400 - RNA, 21 nt, Human
auaggugcuacaaaaacacag

SEQ ID NO: 2754401 - RNA, 15 nt, Human
auaggugcuacaaaa

SEQ ID NO: 2754402 - RNA, 18 nt, Human
auagcagcuuauucacaa

SEQ ID NO: 2754403 - RNA, 20 nt, Human
auaugcuucuguuuuauaau

SEQ ID NO: 2754404 - RNA, 22 nt, Human
auaugcuucuguuuuauaauuu

SEQ ID NO: 2754405 - RNA, 22 nt, Human
auaugcuauuucuauauuuuca

SEQ ID NO: 2754406 - RNA, 23 nt, Human
auaugcuauuucuauauuuucau

SEQ ID NO: 2754407 - RNA, 15 nt, Human
auaugcuauuucuau

SEQ ID NO: 2754408 - RNA, 16 nt, Human
auaugcuauuucuaua

SEQ ID NO: 2754409 - RNA, 18 nt, Human
auaugcuauuucuauauu

SEQ ID NO: 2754410 - RNA, 19 nt, Human
auaugcuauuucuauauuu

SEQ ID NO: 2754411 - RNA, 21 nt, Human
auaugcuauuucuauauuuuc

SEQ ID NO: 2754412 - RNA, 16 nt, Human
auauuauguuaaaacu

SEQ ID NO: 2754413 - RNA, 22 nt, Human
auauuuauuacuguaagaaaau

SEQ ID NO: 2754414 - RNA, 13 nt, Human
auauuuauuuuaa

SEQ ID NO: 2754415 - RNA, 18 nt, Human
auauuuacuaaaauggac

SEQ ID NO: 2754416 - RNA, 20 nt, Human
auauuuacuaaaauggacug

SEQ ID NO: 2754417 - RNA, 18 nt, Human
auaaaggauuaaugucaa

SEQ ID NO: 2754418 - RNA, 14 nt, Human
auaacauaaaucug

SEQ ID NO: 2754419 - RNA, 15 nt, Human
auaacauaaaucugu

SEQ ID NO: 2754420 - RNA, 17 nt, Human
auaacauaaaucuguga

SEQ ID NO: 2754421 - RNA, 18 nt, Human
auaacauaaaucugugaa

SEQ ID NO: 2754422 - RNA, 19 nt, Human
auaacauaaaucugugaac

SEQ ID NO: 2754423 - RNA, 18 nt, Human
auacacacucaaaucaag

SEQ ID NO: 2754424 - RNA, 17 nt, Human
auacacacucaaaucaa

SEQ ID NO: 2754425 - RNA, 23 nt, Human
auaauguuucaaacauauauaac

SEQ ID NO: 2754426 - RNA, 15 nt, Human
auaauuaacauguua

SEQ ID NO: 2754427 - RNA, 16 nt, Human
auaaggaaaaguuuaa

SEQ ID NO: 2754428 - RNA, 15 nt, Human
auaaggaaaaguuua

SEQ ID NO: 2754429 - RNA, 15 nt, Human
agugucuuaauuaaa

SEQ ID NO: 2754430 - RNA, 18 nt, Human
agugucuuaauuaaaaga

SEQ ID NO: 2754431 - RNA, 17 nt, Human
agugucuuaauuaaaag

SEQ ID NO: 2754432 - RNA, 23 nt, Human
aguugaaaaucuuauaauuuaaa

SEQ ID NO: 2754433 - RNA, 22 nt, Human
aguugaaaagacuccaaagaaa

SEQ ID NO: 2754434 - RNA, 21 nt, Human
aguugaaaagacuccaaagaa

SEQ ID NO: 2754435 - RNA, 22 nt, Human
aguugaaaaucuuauaauuuaa

SEQ ID NO: 2754436 - RNA, 23 nt, Human
agucaaauugugugaaagguacu

SEQ ID NO: 2754437 - RNA, 19 nt, Human
agucaaauugugugaaagg

SEQ ID NO: 2754438 - RNA, 12 nt, Human
aguccuguaaug

SEQ ID NO: 2754439 - RNA, 19 nt, Human
auguaagggaaacugccag

SEQ ID NO: 2754440 - RNA, 16 nt, Human
auguaagggaaacugc

SEQ ID NO: 2754441 - RNA, 14 nt, Human
auguaagggaaacu

SEQ ID NO: 2754442 - RNA, 20 nt, Human
augguccgugcuaaggacuu

SEQ ID NO: 2754443 - RNA, 21 nt, Human
augguccgugcuaaggacuug

SEQ ID NO: 2754444 - RNA, 19 nt, Human
augguccgugcuaaggacu

SEQ ID NO: 2754445 - RNA, 17 nt, Human
auguucuaagaagugaa

SEQ ID NO: 2754446 - RNA, 18 nt, Human
augugggcagugauguca

SEQ ID NO: 2754447 - RNA, 13 nt, Human
augugugaaguga

SEQ ID NO: 2754448 - RNA, 23 nt, Human
aucagcugcugaaacaacaaaua

SEQ ID NO: 2754449 - RNA, 22 nt, Human
aucagcugcugaaacaacaaau

SEQ ID NO: 2754450 - RNA, 17 nt, Human
auauuuauuuuaauaau

SEQ ID NO: 2754451 - RNA, 14 nt, Human
auauuuauuuuaau

SEQ ID NO: 2754452 - RNA, 15 nt, Human
auauuuauuuuaaua

SEQ ID NO: 2754453 - RNA, 21 nt, Human
aucagcugcugaaacaacaaa

SEQ ID NO: 2754454 - RNA, 22 nt, Human
caaugaaugaaugaauggcuaa

SEQ ID NO: 2754455 - RNA, 21 nt, Human
caauaucuuuuuuuuaauaaa

SEQ ID NO: 2754456 - RNA, 11 nt, Human
cacaacagauu

SEQ ID NO: 2754457 - RNA, 19 nt, Human
cacacucaaaucaagaaac

SEQ ID NO: 2754458 - RNA, 14 nt, Human
cacacugaagaagc

SEQ ID NO: 2754459 - RNA, 13 nt, Human
cacaacuauauug

SEQ ID NO: 2754460 - RNA, 22 nt, Human
cacagcaguugaaaagacucca

SEQ ID NO: 2754461 - RNA, 15 nt, Human
cacaggaaguagagg

SEQ ID NO: 2754462 - RNA, 20 nt, Human
cacaggaaccacaagacugc

SEQ ID NO: 2754463 - RNA, 19 nt, Human
cacaggaaccacaagacug

SEQ ID NO: 2754464 - RNA, 14 nt, Human
cacaguuuucugag

SEQ ID NO: 2754465 - RNA, 20 nt, Human
cacauugguguuguacucaa

SEQ ID NO: 2754466 - RNA, 17 nt, Human
caaauaugcaaagcacu

SEQ ID NO: 2754467 - RNA, 16 nt, Human
caaauaugcaaagcac

SEQ ID NO: 2754468 - RNA, 18 nt, Human
caaauaugcaaagcacug

SEQ ID NO: 2754469 - RNA, 21 nt, Human
caaauguucaucaaugaauga

SEQ ID NO: 2754470 - RNA, 20 nt, Human
caaauguucaucaaugaaug

SEQ ID NO: 2754471 - RNA, 14 nt, Human
caaauaugcaaagc

SEQ ID NO: 2754472 - RNA, 19 nt, Human
caaaguugccuaaauccau

SEQ ID NO: 2754473 - RNA, 14 nt, Human
caaauuuacagaga

SEQ ID NO: 2754474 - RNA, 15 nt, Human
caaauugugugaaag

SEQ ID NO: 2754475 - RNA, 15 nt, Human
caaauuuacagagac

SEQ ID NO: 2754476 - RNA, 17 nt, Human
caagcacuaaacaaaga

SEQ ID NO: 2754477 - RNA, 15 nt, Human
cacccacccuuuuuu

SEQ ID NO: 2754478 - RNA, 19 nt, Human
ccaccucccugcaauaaaa

SEQ ID NO: 2754479 - RNA, 21 nt, Human
ccaccucccugcaauaaaaug

SEQ ID NO: 2754480 - RNA, 15 nt, Human
ccaccucccugcaau

SEQ ID NO: 2754481 - RNA, 14 nt, Human
ccagacaucaacag

SEQ ID NO: 2754482 - RNA, 15 nt, Human
ccacugguucuucuu

SEQ ID NO: 2754483 - RNA, 19 nt, Human
ccagccugagcgacaguga

SEQ ID NO: 2754484 - RNA, 20 nt, Human
ccagguagaggguguguaag

SEQ ID NO: 2754485 - RNA, 20 nt, Human
ccauccugaggcuccacuug

SEQ ID NO: 2754486 - RNA, 18 nt, Human
ccauccugaggcuccacu

SEQ ID NO: 2754487 - RNA, 13 nt, Human
ccaggugccaguu

SEQ ID NO: 2754488 - RNA, 12 nt, Human
ccaggugccagu

SEQ ID NO: 2754489 - RNA, 11 nt, Human
ccauuauucaa

SEQ ID NO: 2754490 - RNA, 13 nt, Human
ccauuuggaaauc

SEQ ID NO: 2754491 - RNA, 23 nt, Human
cccucuccugggcagcugccucc

SEQ ID NO: 2754492 - RNA, 20 nt, Human
cccucuccugggcagcugcc

SEQ ID NO: 2754493 - RNA, 21 nt, Human
cccucuccugggcagcugccu

SEQ ID NO: 2754494 - RNA, 22 nt, Human
cccucuccugggcagcugccuc

SEQ ID NO: 2754495 - RNA, 15 nt, Human
ccuaacgaaguaucc

SEQ ID NO: 2754496 - RNA, 15 nt, Human
ccccucggagaagag

SEQ ID NO: 2754497 - RNA, 13 nt, Human
ccccuccucugcu

SEQ ID NO: 2754498 - RNA, 14 nt, Human
ccccuccucugcuu

SEQ ID NO: 2754499 - RNA, 17 nt, Human
ccccuccucugcuugcc

SEQ ID NO: 2754500 - RNA, 12 nt, Human
cccauuauucaa

SEQ ID NO: 2754501 - RNA, 16 nt, Human
ccccacccugccucac

SEQ ID NO: 2754502 - RNA, 18 nt, Human
cccauuauucaaaguugc

SEQ ID NO: 2754503 - RNA, 23 nt, Human
cccauuauucaaaguugccuaaa

SEQ ID NO: 2754504 - RNA, 17 nt, Human
cucauuuccaagcaagu

SEQ ID NO: 2754505 - RNA, 13 nt, Human
cucauuuccaagc

SEQ ID NO: 2754506 - RNA, 14 nt, Human
cucauuuccaagca

SEQ ID NO: 2754507 - RNA, 12 nt, Human
cucauuuccaag

SEQ ID NO: 2754508 - RNA, 14 nt, Human
cuccccucggagaa

SEQ ID NO: 2754509 - RNA, 13 nt, Human
cuccauuuaauaa

SEQ ID NO: 2754510 - RNA, 20 nt, Human
cuccauuuaauaauuauaug

SEQ ID NO: 2754511 - RNA, 22 nt, Human
cucaggaaaucaaauaugcaaa

SEQ ID NO: 2754512 - RNA, 22 nt, Human
cucagauuuuauuauguaaauc

SEQ ID NO: 2754513 - RNA, 23 nt, Human
cucagauuuuauuauguaaaucc

SEQ ID NO: 2754514 - RNA, 13 nt, Human
cuauaauuuaaau

SEQ ID NO: 2754515 - RNA, 12 nt, Human
cuauaauuuaaa

SEQ ID NO: 2754516 - RNA, 18 nt, Human
cuaugaaauauuauguua

SEQ ID NO: 2754517 - RNA, 19 nt, Human
cuaugaaauauuauguuaa

SEQ ID NO: 2754518 - RNA, 14 nt, Human
cuaugcugaguuug

SEQ ID NO: 2754519 - RNA, 15 nt, Human
cuaugcugaguuugu

SEQ ID NO: 2754520 - RNA, 13 nt, Human
cuaugcugaguuu

SEQ ID NO: 2754521 - RNA, 20 nt, Human
cuauuucuauauuuucauuc

SEQ ID NO: 2754522 - RNA, 19 nt, Human
cuauuucuauauuuucauu

SEQ ID NO: 2754523 - RNA, 18 nt, Human
cuagaguuuagcuggaaa

SEQ ID NO: 2754524 - RNA, 19 nt, Human
cuagaguuuagcuggaaaa

SEQ ID NO: 2754525 - RNA, 19 nt, Human
cuagacuggugacugauuc

SEQ ID NO: 2754526 - RNA, 22 nt, Human
cuagacuggugacugauucuuc

SEQ ID NO: 2754527 - RNA, 23 nt, Human
cuagacuggugacugauucuuca

SEQ ID NO: 2754528 - RNA, 14 nt, Human
cuagacuggugacu

SEQ ID NO: 2754529 - RNA, 15 nt, Human
cuagacuggugacug

SEQ ID NO: 2754530 - RNA, 17 nt, Human
cuagacuggugacugau

SEQ ID NO: 2754531 - RNA, 18 nt, Human
cuagacuggugacugauu

SEQ ID NO: 2754532 - RNA, 14 nt, Human
cuaggaaauauuua

SEQ ID NO: 2754533 - RNA, 15 nt, Human
cuaggaaauauuuau

SEQ ID NO: 2754534 - RNA, 19 nt, Human
cuaggaaauauuuauuuua

SEQ ID NO: 2754535 - RNA, 20 nt, Human
cuaggaaauauuuauuuuaa

SEQ ID NO: 2754536 - RNA, 19 nt, Human
cuaaguaaaaccacagcag

SEQ ID NO: 2754537 - RNA, 18 nt, Human
cuaaguaaaaccacagca

SEQ ID NO: 2754538 - RNA, 14 nt, Human
cuaaguaaaaccac

SEQ ID NO: 2754539 - RNA, 21 nt, Human
cuaagcuucacuguaaaauaa

SEQ ID NO: 2754540 - RNA, 14 nt, Human
cuaaggacuucuuu

SEQ ID NO: 2754541 - RNA, 15 nt, Human
cuaaggacuucuuua

SEQ ID NO: 2754542 - RNA, 16 nt, Human
cuaaggacuucuuuaa

SEQ ID NO: 2754543 - RNA, 23 nt, Human
cuacacgagauacagaauuuuau

SEQ ID NO: 2754544 - RNA, 14 nt, Human
cuacacuaagagag

SEQ ID NO: 2754545 - RNA, 20 nt, Human
cgggaggcagagguugcagu

SEQ ID NO: 2754546 - RNA, 22 nt, Human
cuaaaauggacuguggugacuu

SEQ ID NO: 2754547 - RNA, 21 nt, Human
cuaaaauggacuguggugacu

SEQ ID NO: 2754548 - RNA, 14 nt, Human
cuaagagagaauga

SEQ ID NO: 2754549 - RNA, 15 nt, Human
cuaagagagaaugag

SEQ ID NO: 2754550 - RNA, 19 nt, Human
cuaaauugacacuuaaaaa

SEQ ID NO: 2754551 - RNA, 18 nt, Human
ccuucggccuccauccug

SEQ ID NO: 2754552 - RNA, 16 nt, Human
ccuucggccuccaucc

SEQ ID NO: 2754553 - RNA, 17 nt, Human
ccuucggccuccauccu

SEQ ID NO: 2754554 - RNA, 15 nt, Human
ccuuggacucauuuu

SEQ ID NO: 2754555 - RNA, 24 nt, Human
cgcguugaaauuguaauuauaucu

SEQ ID NO: 2754556 - RNA, 22 nt, Human
cgcguugaaauuguaauuauau

SEQ ID NO: 2754557 - RNA, 17 nt, Human
cgcuaaacuuuucugau

SEQ ID NO: 2754558 - RNA, 18 nt, Human
cgcuaaacuuuucugaua

SEQ ID NO: 2754559 - RNA, 19 nt, Human
cgcuaaacuuuucugauag

SEQ ID NO: 2754560 - RNA, 13 nt, Human
ccugggcagcugc

SEQ ID NO: 2754561 - RNA, 14 nt, Human
ccugggcagcugcc

SEQ ID NO: 2754562 - RNA, 17 nt, Human
ccugccccugagcccau

SEQ ID NO: 2754563 - RNA, 13 nt, Human
ccugaggcuccac

SEQ ID NO: 2754564 - RNA, 14 nt, Human
ccugaggcuccacu

SEQ ID NO: 2754565 - RNA, 16 nt, Human
gaaacacaacuauauu

SEQ ID NO: 2754566 - RNA, 11 nt, Human
gaaacauuugg

SEQ ID NO: 2754567 - RNA, 23 nt, Human
gaaacucguuaauuuguaguguu

SEQ ID NO: 2754568 - RNA, 17 nt, Human
gaaacggaugauuucua

SEQ ID NO: 2754569 - RNA, 18 nt, Human
gaaacggaugauuucuau

SEQ ID NO: 2754570 - RNA, 14 nt, Human
gaaacccugucucu

SEQ ID NO: 2754571 - RNA, 17 nt, Human
gaaagagaacuuccaga

SEQ ID NO: 2754572 - RNA, 21 nt, Human
gaaagaggaaugaaguacuca

SEQ ID NO: 2754573 - RNA, 20 nt, Human
gaaagaggcagcuugaaacu

SEQ ID NO: 2754574 - RNA, 22 nt, Human
gaaagcagaacagugauuacca

SEQ ID NO: 2754575 - RNA, 17 nt, Human
gaaagcagaacagugau

SEQ ID NO: 2754576 - RNA, 14 nt, Human
gaaagcagggacuu

SEQ ID NO: 2754577 - RNA, 18 nt, Human
gaaaaucuuauaauuuaa

SEQ ID NO: 2754578 - RNA, 22 nt, Human
gaaaaucuacacuccagugaga

SEQ ID NO: 2754579 - RNA, 18 nt, Human
gaaaauauuuguaucaca

SEQ ID NO: 2754580 - RNA, 23 nt, Human
gaaaaguuuaauauuaaagccau

SEQ ID NO: 2754581 - RNA, 19 nt, Human
gaaaaguuuaauauuaaag

SEQ ID NO: 2754582 - RNA, 20 nt, Human
gaaaaguuuaauauuaaagc

SEQ ID NO: 2754583 - RNA, 21 nt, Human
gaaaaguuuaauauuaaagcc

SEQ ID NO: 2754584 - RNA, 22 nt, Human
gaaaaguuuaauauuaaagcca

SEQ ID NO: 2754585 - RNA, 15 nt, Human
gaaaaguuuaauauu

SEQ ID NO: 2754586 - RNA, 22 nt, Human
cuuuuuggcauaacauaaaucu

SEQ ID NO: 2754587 - RNA, 16 nt, Human
cuuuuuggcauaacau

SEQ ID NO: 2754588 - RNA, 20 nt, Human
cuuuuuggcauaacauaaau

SEQ ID NO: 2754589 - RNA, 19 nt, Human
cuugaguuuaaauuguaau

SEQ ID NO: 2754590 - RNA, 23 nt, Human
cuugucaauaaaauccauacauu

SEQ ID NO: 2754591 - RNA, 14 nt, Human
cuuguguaaauaca

SEQ ID NO: 2754592 - RNA, 16 nt, Human
cuuguguaaauacaau

SEQ ID NO: 2754593 - RNA, 21 nt, Human
cuuguguaaauacaauuuugu

SEQ ID NO: 2754594 - RNA, 12 nt, Human
cuuguguaaaua

SEQ ID NO: 2754595 - RNA, 22 nt, Human
cuuguuagaucuaguucacucu

SEQ ID NO: 2754596 - RNA, 16 nt, Human
cuuucucuuucguuac

SEQ ID NO: 2754597 - RNA, 15 nt, Human
cuuugugcugggguu

SEQ ID NO: 2754598 - RNA, 20 nt, Human
cuuugugcugggguuaucug

SEQ ID NO: 2754599 - RNA, 22 nt, Human
cuuugugcugggguuaucugaa

SEQ ID NO: 2754600 - RNA, 23 nt, Human
cuuugucuacaccauuaugugcg

SEQ ID NO: 2754601 - RNA, 20 nt, Human
cuuugucuacaccauuaugu

SEQ ID NO: 2754602 - RNA, 14 nt, Human
cuuauuucauuucu

SEQ ID NO: 2754603 - RNA, 15 nt, Human
cuuauuucauuucuu

SEQ ID NO: 2754604 - RNA, 20 nt, Human
cuuagaugcaguucugaaga

SEQ ID NO: 2754605 - RNA, 22 nt, Human
cuuagaugcaguucugaagaag

SEQ ID NO: 2754606 - RNA, 18 nt, Human
cuucugucuucacaacag

SEQ ID NO: 2754607 - RNA, 22 nt, Human
cuucugucuucacaacagauua

SEQ ID NO: 2754608 - RNA, 21 nt, Human
cuucugucuucacaacagauu

SEQ ID NO: 2754609 - RNA, 15 nt, Human
cuucuuuaauuuugg

SEQ ID NO: 2754610 - RNA, 16 nt, Human
cuucuuuaauuuugga

SEQ ID NO: 2754611 - RNA, 17 nt, Human
cuucuuuaauuuuggaa

SEQ ID NO: 2754612 - RNA, 18 nt, Human
cuucuuuaauuuuggaau

SEQ ID NO: 2754613 - RNA, 19 nt, Human
cuucuuuaauuuuggaauu

SEQ ID NO: 2754614 - RNA, 20 nt, Human
cugcccucuccugggcagcu

SEQ ID NO: 2754615 - RNA, 21 nt, Human
cugcccucuccugggcagcug

SEQ ID NO: 2754616 - RNA, 16 nt, Human
cugcccucuccugggc

SEQ ID NO: 2754617 - RNA, 18 nt, Human
cugcccucuccugggcag

SEQ ID NO: 2754618 - RNA, 19 nt, Human
cugcccucuccugggcagc

SEQ ID NO: 2754619 - RNA, 13 nt, Human
cugccuccccucc

SEQ ID NO: 2754620 - RNA, 15 nt, Human
cugccuaaggacuuc

SEQ ID NO: 2754621 - RNA, 13 nt, Human
cugccuaaggacu

SEQ ID NO: 2754622 - RNA, 14 nt, Human
cugccuaaggacuu

SEQ ID NO: 2754623 - RNA, 12 nt, Human
cugccuaaggac

SEQ ID NO: 2754624 - RNA, 18 nt, Human
cugcugaaacaacaaaua

SEQ ID NO: 2754625 - RNA, 20 nt, Human
cuggcacaguuuucugagaa

SEQ ID NO: 2754626 - RNA, 22 nt, Human
cuggcacaguuuucugagaaag

SEQ ID NO: 2754627 - RNA, 21 nt, Human
cuggcacaguuuucugagaaa

SEQ ID NO: 2754628 - RNA, 22 nt, Human
cuggccuucggccuccauccug

SEQ ID NO: 2754629 - RNA, 23 nt, Human
cuggccuucggccuccauccuga

SEQ ID NO: 2754630 - RNA, 12 nt, Human
cuggagcucugc

SEQ ID NO: 2754631 - RNA, 13 nt, Human
cuggagcucugcc

SEQ ID NO: 2754632 - RNA, 16 nt, Human
cuggagcucugcccau

SEQ ID NO: 2754633 - RNA, 20 nt, Human
cuguauuuuaaaagaaugau

SEQ ID NO: 2754634 - RNA, 19 nt, Human
cuguauuuuaaaagaauga

SEQ ID NO: 2754635 - RNA, 22 nt, Human
cuguauuuuaaaagaaugauua

SEQ ID NO: 2754636 - RNA, 16 nt, Human
cuguauagauuagaau

SEQ ID NO: 2754637 - RNA, 20 nt, Human
cugucuacacuaagagagaa

SEQ ID NO: 2754638 - RNA, 23 nt, Human
cuguaaucacagcuacuugggag

SEQ ID NO: 2754639 - RNA, 22 nt, Human
cugggggggauuguaaaauggu

SEQ ID NO: 2754640 - RNA, 20 nt, Human
cuguuaaaagaugaaaauau

SEQ ID NO: 2754641 - RNA, 23 nt, Human
cuguuaaaagaugaaaauauuug

SEQ ID NO: 2754642 - RNA, 21 nt, Human
cuguuaaaagaugaaaauauu

SEQ ID NO: 2754643 - RNA, 16 nt, Human
gaauugacccacaaga

SEQ ID NO: 2754644 - RNA, 21 nt, Human
gaauugacccacaagaaauga

SEQ ID NO: 2754645 - RNA, 16 nt, Human
gaauuggagcucgugg

SEQ ID NO: 2754646 - RNA, 14 nt, Human
gaauucuguauaga

SEQ ID NO: 2754647 - RNA, 21 nt, Human
gaauucuguauagauuagaau

SEQ ID NO: 2754648 - RNA, 22 nt, Human
gaauucuguauagauuagaauu

SEQ ID NO: 2754649 - RNA, 13 nt, Human
gaauucuguauag

SEQ ID NO: 2754650 - RNA, 11 nt, Human
gaauucuguau

SEQ ID NO: 2754651 - RNA, 17 nt, Human
gaauggcuuuguauaga

SEQ ID NO: 2754652 - RNA, 14 nt, Human
gaauggcuuuguau

SEQ ID NO: 2754653 - RNA, 16 nt, Human
gaauggcuuuguauag

SEQ ID NO: 2754654 - RNA, 15 nt, Human
gacaagcucacagac

SEQ ID NO: 2754655 - RNA, 16 nt, Human
gacaaggaaaaaauaa

SEQ ID NO: 2754656 - RNA, 16 nt, Human
gacccaaaaggcagaa

SEQ ID NO: 2754657 - RNA, 15 nt, Human
gacccacaagaaaug

SEQ ID NO: 2754658 - RNA, 21 nt, Human
gaccacugcagaagacaguau

SEQ ID NO: 2754659 - RNA, 16 nt, Human
gacaugggacauuugc

SEQ ID NO: 2754660 - RNA, 18 nt, Human
gacagggaggacgcucuc

SEQ ID NO: 2754661 - RNA, 17 nt, Human
gacagggaggacgcucu

SEQ ID NO: 2754662 - RNA, 20 nt, Human
gacauagaauuaacacauga

SEQ ID NO: 2754663 - RNA, 14 nt, Human
gacugcauuauauu

SEQ ID NO: 2754664 - RNA, 16 nt, Human
gacugcauuauauuua

SEQ ID NO: 2754665 - RNA, 15 nt, Human
gacuccaaagaaaug

SEQ ID NO: 2754666 - RNA, 12 nt, Human
gacuccaaagaa

SEQ ID NO: 2754667 - RNA, 11 nt, Human
gacuccaaaga

SEQ ID NO: 2754668 - RNA, 21 nt, Human
gacucauuuuaaaaaauggaa

SEQ ID NO: 2754669 - RNA, 16 nt, Human
gacuccaaagaaaugu

SEQ ID NO: 2754670 - RNA, 24 nt, Human
gacuucuaaguaaaaccacagcag

SEQ ID NO: 2754671 - RNA, 23 nt, Human
gacuucuaaguaaaaccacagca

SEQ ID NO: 2754672 - RNA, 19 nt, Human
gacuucuaaguaaaaccac

SEQ ID NO: 2754673 - RNA, 23 nt, Human
gacuucugucuucacaacagauu

SEQ ID NO: 2754674 - RNA, 20 nt, Human
gacuucugucuucacaacag

SEQ ID NO: 2754675 - RNA, 18 nt, Human
gacuucuaaguaaaacca

SEQ ID NO: 2754676 - RNA, 17 nt, Human
gacuucuaaguaaaacc

SEQ ID NO: 2754677 - RNA, 16 nt, Human
gacuucuaaguaaaac

SEQ ID NO: 2754678 - RNA, 17 nt, Human
gacuucuuuaauuuugg

SEQ ID NO: 2754679 - RNA, 18 nt, Human
gacuucuuuaauuuugga

SEQ ID NO: 2754680 - RNA, 16 nt, Human
gacuucuuuaauuuug

SEQ ID NO: 2754681 - RNA, 19 nt, Human
gacuucuuuaauuuuggaa

SEQ ID NO: 2754682 - RNA, 20 nt, Human
gacuucuuuaauuuuggaau

SEQ ID NO: 2754683 - RNA, 21 nt, Human
gacuucuuuaauuuuggaauu

SEQ ID NO: 2754684 - RNA, 17 nt, Human
gagaaugagagacacac

SEQ ID NO: 2754685 - RNA, 22 nt, Human
gagaacuuccagauccuggaaa

SEQ ID NO: 2754686 - RNA, 23 nt, Human
gagaacuuccagauccuggaaau

SEQ ID NO: 2754687 - RNA, 21 nt, Human
gagaaccuagggugauauuaa

SEQ ID NO: 2754688 - RNA, 22 nt, Human
gagaaccuagggugauauuaac

SEQ ID NO: 2754689 - RNA, 20 nt, Human
gagacagcucugcauacuca

SEQ ID NO: 2754690 - RNA, 20 nt, Human
gagaaugagagacacacuga

SEQ ID NO: 2754691 - RNA, 21 nt, Human
gagaaugagagacacacugaa

SEQ ID NO: 2754692 - RNA, 13 nt, Human
gagaguguugaaa

SEQ ID NO: 2754693 - RNA, 22 nt, Human
gauaaauggcuuccuggcaaua

SEQ ID NO: 2754694 - RNA, 20 nt, Human
gauaaaugccaucaauaaaa

SEQ ID NO: 2754695 - RNA, 11 nt, Human
gauaaaugcca

SEQ ID NO: 2754696 - RNA, 15 nt, Human
gauaaaugccaucaa

SEQ ID NO: 2754697 - RNA, 16 nt, Human
gaguguugaaacggau

SEQ ID NO: 2754698 - RNA, 12 nt, Human
gaguguugaaac

SEQ ID NO: 2754699 - RNA, 23 nt, Human
gagugaacaaauuuacagagaca

SEQ ID NO: 2754700 - RNA, 15 nt, Human
gcacugacuucuaag

SEQ ID NO: 2754701 - RNA, 18 nt, Human
gcacugacuucuaaguaa

SEQ ID NO: 2754702 - RNA, 20 nt, Human
gaugcuagaacucccuuuca

SEQ ID NO: 2754703 - RNA, 22 nt, Human
gaugcuagaacucccuuucaac

SEQ ID NO: 2754704 - RNA, 18 nt, Human
gaugcuagaacucccuuu

SEQ ID NO: 2754705 - RNA, 19 nt, Human
gauguugaaaaaguucugc

SEQ ID NO: 2754706 - RNA, 16 nt, Human
gcaaauugucacagga

SEQ ID NO: 2754707 - RNA, 15 nt, Human
ggauuguaaaauggu

SEQ ID NO: 2754708 - RNA, 20 nt, Human
ggauucuuaaaguugaauuu

SEQ ID NO: 2754709 - RNA, 18 nt, Human
ggauucuuaaaguugaau

SEQ ID NO: 2754710 - RNA, 19 nt, Human
ggauucuuaaaguugaauu

SEQ ID NO: 2754711 - RNA, 16 nt, Human
ggauucuuaaaguuga

SEQ ID NO: 2754712 - RNA, 14 nt, Human
ggcauggcugggaa

SEQ ID NO: 2754713 - RNA, 13 nt, Human
ggacgcucucugg

SEQ ID NO: 2754714 - RNA, 14 nt, Human
ggacgcucucuggc

SEQ ID NO: 2754715 - RNA, 14 nt, Human
ggacuguggugacu

SEQ ID NO: 2754716 - RNA, 15 nt, Human
ggagaaucacuugaa

SEQ ID NO: 2754717 - RNA, 19 nt, Human
ggagaaucacuugaacccg

SEQ ID NO: 2754718 - RNA, 15 nt, Human
ggacuguggugacuu

SEQ ID NO: 2754719 - RNA, 17 nt, Human
ggacuguggugacuuug

SEQ ID NO: 2754720 - RNA, 21 nt, Human
ggacuguggugacuuuggaua

SEQ ID NO: 2754721 - RNA, 22 nt, Human
ggacuguggugacuuuggauaa

SEQ ID NO: 2754722 - RNA, 16 nt, Human
ggaccaaaaaccagua

SEQ ID NO: 2754723 - RNA, 23 nt, Human
ggaccaaaaaccaguauuguaca

SEQ ID NO: 2754724 - RNA, 14 nt, Human
ggaccaaaaaccag

SEQ ID NO: 2754725 - RNA, 23 nt, Human
ggaauuucucccagucauuuaau

SEQ ID NO: 2754726 - RNA, 16 nt, Human
ggaauuggagcucgug

SEQ ID NO: 2754727 - RNA, 22 nt, Human
ggaauuggagcucgugggacag

SEQ ID NO: 2754728 - RNA, 12 nt, Human
ggaauucuguau

SEQ ID NO: 2754729 - RNA, 15 nt, Human
ggaauucuguauaga

SEQ ID NO: 2754730 - RNA, 17 nt, Human
ggaauucuguauagauu

SEQ ID NO: 2754731 - RNA, 20 nt, Human
ggaagugacgguuuaauggg

SEQ ID NO: 2754732 - RNA, 14 nt, Human
ggaaaaguuuaaua

SEQ ID NO: 2754733 - RNA, 17 nt, Human
ggaaaucaaauaugcaa

SEQ ID NO: 2754734 - RNA, 16 nt, Human
ggaaaucaaauaugca

SEQ ID NO: 2754735 - RNA, 23 nt, Human
gcuuucagauacuggauuguacu

SEQ ID NO: 2754736 - RNA, 20 nt, Human
gcuuuguauagaaccucuuu

SEQ ID NO: 2754737 - RNA, 14 nt, Human
gcuuucagauacug

SEQ ID NO: 2754738 - RNA, 18 nt, Human
gcuuucagauacuggauu

SEQ ID NO: 2754739 - RNA, 20 nt, Human
gcugucuacacuaagagaga

SEQ ID NO: 2754740 - RNA, 22 nt, Human
gccuauauuuuuuguuaaauga

SEQ ID NO: 2754741 - RNA, 17 nt, Human
gccuaagugcagccccg

SEQ ID NO: 2754742 - RNA, 23 nt, Human
gccugcacggugaauggcuuugu

SEQ ID NO: 2754743 - RNA, 16 nt, Human
gccugauuaaagaaug

SEQ ID NO: 2754744 - RNA, 13 nt, Human
gccugauuaaaga

SEQ ID NO: 2754745 - RNA, 12 nt, Human
gcccucuccugg

SEQ ID NO: 2754746 - RNA, 13 nt, Human
gcccucuccuggg

SEQ ID NO: 2754747 - RNA, 22 nt, Human
gcccucuccugggcagcugccu

SEQ ID NO: 2754748 - RNA, 23 nt, Human
gcccucuccugggcagcugccuc

SEQ ID NO: 2754749 - RNA, 14 nt, Human
gcuaagcauuccaa

SEQ ID NO: 2754750 - RNA, 17 nt, Human
gcuaagcaaaaugugau

SEQ ID NO: 2754751 - RNA, 12 nt, Human
gcucucuggccu

SEQ ID NO: 2754752 - RNA, 13 nt, Human
gcucucuggccuu

SEQ ID NO: 2754753 - RNA, 11 nt, Human
gcucucuggcc

SEQ ID NO: 2754754 - RNA, 14 nt, Human
gcucucuggccuuc

SEQ ID NO: 2754755 - RNA, 15 nt, Human
gcucucuggccuucg

SEQ ID NO: 2754756 - RNA, 19 nt, Human
gcucucuggccuucggccu

SEQ ID NO: 2754757 - RNA, 20 nt, Human
gcucucuggccuucggccuc

SEQ ID NO: 2754758 - RNA, 19 nt, Human
guaaugauaacuggaaacu

SEQ ID NO: 2754759 - RNA, 15 nt, Human
guaauuggaaaggca

SEQ ID NO: 2754760 - RNA, 13 nt, Human
guaauuauaucug

SEQ ID NO: 2754761 - RNA, 15 nt, Human
guaccgcaaugugac

SEQ ID NO: 2754762 - RNA, 15 nt, Human
guagaggagaaacug

SEQ ID NO: 2754763 - RNA, 12 nt, Human
guacuuuuuggc

SEQ ID NO: 2754764 - RNA, 21 nt, Human
guacuuuuuggcauaacauaa

SEQ ID NO: 2754765 - RNA, 23 nt, Human
guacuuuauuuucuauaauuuaa

SEQ ID NO: 2754766 - RNA, 18 nt, Human
guaagggaaacugccagc

SEQ ID NO: 2754767 - RNA, 17 nt, Human
guaagggaaacugccag

SEQ ID NO: 2754768 - RNA, 22 nt, Human
guaaauacaauuuuguuucugu

SEQ ID NO: 2754769 - RNA, 23 nt, Human
guaaauacaauuuuguuucugua

SEQ ID NO: 2754770 - RNA, 15 nt, Human
guaaaucccauuauu

SEQ ID NO: 2754771 - RNA, 21 nt, Human
guaaauacaauuuuguuucug

SEQ ID NO: 2754772 - RNA, 16 nt, Human
guaaaucccauuauuc

SEQ ID NO: 2754773 - RNA, 17 nt, Human
guaaaucccauuauuca

SEQ ID NO: 2754774 - RNA, 18 nt, Human
guaaaucccauuauucaa

SEQ ID NO: 2754775 - RNA, 19 nt, Human
guaaaucccauuauucaaa

SEQ ID NO: 2754776 - RNA, 20 nt, Human
guaaaucccauuauucaaag

SEQ ID NO: 2754777 - RNA, 21 nt, Human
guaaaucccauuauucaaagu

SEQ ID NO: 2754778 - RNA, 18 nt, Human
guaaaaccacagcaguug

SEQ ID NO: 2754779 - RNA, 16 nt, Human
guaaaaccacagcagu

SEQ ID NO: 2754780 - RNA, 15 nt, Human
guaaaaccacagcag

SEQ ID NO: 2754781 - RNA, 14 nt, Human
guaaaaccacagca

SEQ ID NO: 2754782 - RNA, 23 nt, Human
guaaaaccacagcaguugaaaag

SEQ ID NO: 2754783 - RNA, 15 nt, Human
gguagacacacauga

SEQ ID NO: 2754784 - RNA, 22 nt, Human
gguagacacacaugaaguccaa

SEQ ID NO: 2754785 - RNA, 22 nt, Human
gguacuucaaauccuugaagau

SEQ ID NO: 2754786 - RNA, 19 nt, Human
ggugcuacaaaaacacagc

SEQ ID NO: 2754787 - RNA, 19 nt, Human
ggugcccugcuuucagaua

SEQ ID NO: 2754788 - RNA, 17 nt, Human
ggugaauggcuuuguau

SEQ ID NO: 2754789 - RNA, 20 nt, Human
ggugaauggcuuuguauaga

SEQ ID NO: 2754790 - RNA, 14 nt, Human
ggugaauggcuuug

SEQ ID NO: 2754791 - RNA, 16 nt, Human
gguccgugcuaaggac

SEQ ID NO: 2754792 - RNA, 17 nt, Human
gguccgugcuaaggacu

SEQ ID NO: 2754793 - RNA, 18 nt, Human
gguccgugcuaaggacuu

SEQ ID NO: 2754794 - RNA, 22 nt, Human
guauuucuaugaaauauuaugu

SEQ ID NO: 2754795 - RNA, 17 nt, Human
guauuucuaugaaauau

SEQ ID NO: 2754796 - RNA, 16 nt, Human
guauuuuaaaagaaug

SEQ ID NO: 2754797 - RNA, 17 nt, Human
guauuuuaaaagaauga

SEQ ID NO: 2754798 - RNA, 14 nt, Human
gucaccucauggaa

SEQ ID NO: 2754799 - RNA, 15 nt, Human
gucaauaaaauccau

SEQ ID NO: 2754800 - RNA, 21 nt, Human
gucaauaaaauccauacauuu

SEQ ID NO: 2754801 - RNA, 20 nt, Human
gucccagccagcaguucaga

SEQ ID NO: 2754802 - RNA, 23 nt, Human
gucuacacuaagagagaaugaga

SEQ ID NO: 2754803 - RNA, 17 nt, Human
gucuacacuaagagaga

SEQ ID NO: 2754804 - RNA, 13 nt, Human
gucucagauuuua

SEQ ID NO: 2754805 - RNA, 18 nt, Human
gugcaaauugucacagga

SEQ ID NO: 2754806 - RNA, 20 nt, Human
gugaaacucguuaauuugua

SEQ ID NO: 2754807 - RNA, 19 nt, Human
gugaaagaaaauaacaaua

SEQ ID NO: 2754808 - RNA, 17 nt, Human
gugaauggcuuuguaua

SEQ ID NO: 2754809 - RNA, 18 nt, Human
gugaauggcuuuguauag

SEQ ID NO: 2754810 - RNA, 19 nt, Human
gugaauggcuuuguauaga

SEQ ID NO: 2754811 - RNA, 13 nt, Human
gugaauggcuuug

SEQ ID NO: 2754812 - RNA, 14 nt, Human
gugaauggcuuugu

SEQ ID NO: 2754813 - RNA, 16 nt, Human
gugagcagucaggaaa

SEQ ID NO: 2754814 - RNA, 14 nt, Human
gugagcuacaaaug

SEQ ID NO: 2754815 - RNA, 17 nt, Human
ucaaacauauauaacaa

SEQ ID NO: 2754816 - RNA, 22 nt, Human
ucaaacagucucaggaaaucaa

SEQ ID NO: 2754817 - RNA, 16 nt, Human
ucaaauccuugaagau

SEQ ID NO: 2754818 - RNA, 15 nt, Human
ucaaauccuugaaga

SEQ ID NO: 2754819 - RNA, 19 nt, Human
ucaaauaugcaaagcacug

SEQ ID NO: 2754820 - RNA, 18 nt, Human
ucaaauaugcaaagcacu

SEQ ID NO: 2754821 - RNA, 17 nt, Human
ucaaauaugcaaagcac

SEQ ID NO: 2754822 - RNA, 16 nt, Human
ucaaauaugcaaagca

SEQ ID NO: 2754823 - RNA, 22 nt, Human
ucaacuccaaacugacucuuaa

SEQ ID NO: 2754824 - RNA, 14 nt, Human
ucaauaaaaaauua

SEQ ID NO: 2754825 - RNA, 16 nt, Human
ucaauaaaaaauuaug

SEQ ID NO: 2754826 - RNA, 13 nt, Human
ucaauaaaaaauu

SEQ ID NO: 2754827 - RNA, 12 nt, Human
ucacauuuaaau

SEQ ID NO: 2754828 - RNA, 18 nt, Human
ucacauugguguuguacu

SEQ ID NO: 2754829 - RNA, 22 nt, Human
ucacaagacccaaaaggcagaa

SEQ ID NO: 2754830 - RNA, 14 nt, Human
ucaauaaaauccau

SEQ ID NO: 2754831 - RNA, 19 nt, Human
ucaauaaaaaauuaugaca

SEQ ID NO: 2754832 - RNA, 17 nt, Human
uauuguuuaaaaucauu

SEQ ID NO: 2754833 - RNA, 16 nt, Human
uauuguuuaaaaucau

SEQ ID NO: 2754834 - RNA, 15 nt, Human
uauuguuuaaaauca

SEQ ID NO: 2754835 - RNA, 19 nt, Human
uauugugcgcuaaacuuuu

SEQ ID NO: 2754836 - RNA, 22 nt, Human
uauugugcgcuaaacuuuucug

SEQ ID NO: 2754837 - RNA, 23 nt, Human
uauugugcgcuaaacuuuucuga

SEQ ID NO: 2754838 - RNA, 14 nt, Human
uauuuauuacugua

SEQ ID NO: 2754839 - RNA, 13 nt, Human
uauuucuaugaaa

SEQ ID NO: 2754840 - RNA, 13 nt, Human
uauuuauuacugu

SEQ ID NO: 2754841 - RNA, 14 nt, Human
uauuucuaugaaau

SEQ ID NO: 2754842 - RNA, 15 nt, Human
uauuucuaugaaaua

SEQ ID NO: 2754843 - RNA, 20 nt, Human
uauuguuuaaaaucauuucu

SEQ ID NO: 2754844 - RNA, 16 nt, Human
uauuauguuaaaacug

SEQ ID NO: 2754845 - RNA, 22 nt, Human
uauuauguaaaucccauuauuc

SEQ ID NO: 2754846 - RNA, 12 nt, Human
uauuauguaaau

SEQ ID NO: 2754847 - RNA, 15 nt, Human
uauuauguaaauccc

SEQ ID NO: 2754848 - RNA, 12 nt, Human
uauuaugaaacu

SEQ ID NO: 2754849 - RNA, 20 nt, Human
uauuaugaaacuuguguaaa

SEQ ID NO: 2754850 - RNA, 21 nt, Human
uauuaugaaacuuguguaaau

SEQ ID NO: 2754851 - RNA, 22 nt, Human
uauuaugaaacuuguguaaaua

SEQ ID NO: 2754852 - RNA, 17 nt, Human
uauuauauuuacaaaug

SEQ ID NO: 2754853 - RNA, 16 nt, Human
uauuaagcauauauuu

SEQ ID NO: 2754854 - RNA, 19 nt, Human
uauguuagugcaaauuguc

SEQ ID NO: 2754855 - RNA, 12 nt, Human
uauguuaaaacu

SEQ ID NO: 2754856 - RNA, 19 nt, Human
uauggaggcuuugcauaga

SEQ ID NO: 2754857 - RNA, 17 nt, Human
uauguucuaagaaguga

SEQ ID NO: 2754858 - RNA, 15 nt, Human
uauccuucagccuga

SEQ ID NO: 2754859 - RNA, 14 nt, Human
uauccuucagccug

SEQ ID NO: 2754860 - RNA, 17 nt, Human
uaucugaggaauucugu

SEQ ID NO: 2754861 - RNA, 16 nt, Human
uaucugaggaauucug

SEQ ID NO: 2754862 - RNA, 18 nt, Human
uaucugaggaauucugua

SEQ ID NO: 2754863 - RNA, 19 nt, Human
uaucugaggaauucuguau

SEQ ID NO: 2754864 - RNA, 21 nt, Human
uaucugaggaauucuguauag

SEQ ID NO: 2754865 - RNA, 22 nt, Human
uaucugaggaauucuguauaga

SEQ ID NO: 2754866 - RNA, 23 nt, Human
uaugaauuacauuuguauaaaau

SEQ ID NO: 2754867 - RNA, 17 nt, Human
uaugaauuacauuugua

SEQ ID NO: 2754868 - RNA, 12 nt, Human
uaugcaaagcac

SEQ ID NO: 2754869 - RNA, 14 nt, Human
uaugcaaagcacug

SEQ ID NO: 2754870 - RNA, 13 nt, Human
uaugcaaagcacu

SEQ ID NO: 2754871 - RNA, 15 nt, Human
uaugcaaagcacuga

SEQ ID NO: 2754872 - RNA, 16 nt, Human
uaugauucccagccag

SEQ ID NO: 2754873 - RNA, 15 nt, Human
uaugcuucuguuuua

SEQ ID NO: 2754874 - RNA, 16 nt, Human
uaugcuucuguuuuau

SEQ ID NO: 2754875 - RNA, 13 nt, Human
uauaugcuucugu

SEQ ID NO: 2754876 - RNA, 13 nt, Human
uauauaacaaugc

SEQ ID NO: 2754877 - RNA, 19 nt, Human
uauaucugaggaauucugu

SEQ ID NO: 2754878 - RNA, 20 nt, Human
uauaucugaggaauucugua

SEQ ID NO: 2754879 - RNA, 21 nt, Human
uauaucugaggaauucuguau

SEQ ID NO: 2754880 - RNA, 22 nt, Human
uauaucugaggaauucuguaua

SEQ ID NO: 2754881 - RNA, 18 nt, Human
uauaucugaggaauucug

SEQ ID NO: 2754882 - RNA, 22 nt, Human
uauaauuaacauguuaaaccau

SEQ ID NO: 2754883 - RNA, 15 nt, Human
uauaauuaacauguu

SEQ ID NO: 2754884 - RNA, 16 nt, Human
uauaauuaacauguua

SEQ ID NO: 2754885 - RNA, 18 nt, Human
uauaauuaacauguuaaa

SEQ ID NO: 2754886 - RNA, 19 nt, Human
uauaauuaacauguuaaac

SEQ ID NO: 2754887 - RNA, 13 nt, Human
uauaauuaacaug

SEQ ID NO: 2754888 - RNA, 14 nt, Human
uauaauuaacaugu

SEQ ID NO: 2754889 - RNA, 12 nt, Human
uauaauuaacau

SEQ ID NO: 2754890 - RNA, 13 nt, Human
uaguaucaaaaga

SEQ ID NO: 2754891 - RNA, 18 nt, Human
uaguauuucuaugaaaua

SEQ ID NO: 2754892 - RNA, 19 nt, Human
uaguauuucuaugaaauau

SEQ ID NO: 2754893 - RNA, 16 nt, Human
uaguauuucuaugaaa

SEQ ID NO: 2754894 - RNA, 13 nt, Human
uagucaaauugug

SEQ ID NO: 2754895 - RNA, 14 nt, Human
uagugcaaauuguc

SEQ ID NO: 2754896 - RNA, 15 nt, Human
uagugcaaauuguca

SEQ ID NO: 2754897 - RNA, 12 nt, Human
uaggaauugacc

SEQ ID NO: 2754898 - RNA, 16 nt, Human
uaggccaugggacagg

SEQ ID NO: 2754899 - RNA, 18 nt, Human
uaggccaugggacaggga

SEQ ID NO: 2754900 - RNA, 16 nt, Human
uaggucagugcaaaua

SEQ ID NO: 2754901 - RNA, 16 nt, Human
ucauuaggauggcuag

SEQ ID NO: 2754902 - RNA, 17 nt, Human
uccaaagaaauguaagg

SEQ ID NO: 2754903 - RNA, 14 nt, Human
uccaaagaaaugua

SEQ ID NO: 2754904 - RNA, 11 nt, Human
ucauagcagcu

SEQ ID NO: 2754905 - RNA, 12 nt, Human
ucauagcagcuu

SEQ ID NO: 2754906 - RNA, 17 nt, Human
ucaucaaugaaugaaug

SEQ ID NO: 2754907 - RNA, 21 nt, Human
ucauggaacgcguugaaauug

SEQ ID NO: 2754908 - RNA, 22 nt, Human
ucauggaacgcguugaaauugu

SEQ ID NO: 2754909 - RNA, 20 nt, Human
ucauggaacgcguugaaauu

SEQ ID NO: 2754910 - RNA, 21 nt, Human
uccacuuggucugugagaugc

SEQ ID NO: 2754911 - RNA, 17 nt, Human
uccacuuggucugugag

SEQ ID NO: 2754912 - RNA, 23 nt, Human
uccacuuggucugugagaugcua

SEQ ID NO: 2754913 - RNA, 15 nt, Human
uccagcagauuauuc

SEQ ID NO: 2754914 - RNA, 16 nt, Human
uccagcagauuauuca

SEQ ID NO: 2754915 - RNA, 14 nt, Human
uccagcagauuauu

SEQ ID NO: 2754916 - RNA, 20 nt, Human
uccaugggccauaugaaaag

SEQ ID NO: 2754917 - RNA, 15 nt, Human
uccauacauuugugu

SEQ ID NO: 2754918 - RNA, 19 nt, Human
uccagguagagggugugua

SEQ ID NO: 2754919 - RNA, 12 nt, Human
uccauacauuug

SEQ ID NO: 2754920 - RNA, 20 nt, Human
uccaguuuuguuuggaccaa

SEQ ID NO: 2754921 - RNA, 15 nt, Human
uccaguuuuguuugg

SEQ ID NO: 2754922 - RNA, 17 nt, Human
uccaguuuuguuuggac

SEQ ID NO: 2754923 - RNA, 16 nt, Human
ucccauuauucaaagu

SEQ ID NO: 2754924 - RNA, 18 nt, Human
ucccauuauucaaaguug

SEQ ID NO: 2754925 - RNA, 19 nt, Human
ucccauuauucaaaguugc

SEQ ID NO: 2754926 - RNA, 13 nt, Human
ucccauuauucaa

SEQ ID NO: 2754927 - RNA, 14 nt, Human
ucccauuauucaaa

SEQ ID NO: 2754928 - RNA, 23 nt, Human
uccuagugaaagaggcagcuuga

SEQ ID NO: 2754929 - RNA, 14 nt, Human
uccuagugaaagag

SEQ ID NO: 2754930 - RNA, 20 nt, Human
uccuaucaccugucuugccu

SEQ ID NO: 2754931 - RNA, 17 nt, Human
uccugccccugagccca

SEQ ID NO: 2754932 - RNA, 18 nt, Human
uccugccccugagcccau

SEQ ID NO: 2754933 - RNA, 19 nt, Human
uccugaggcuccacuuggu

SEQ ID NO: 2754934 - RNA, 20 nt, Human
uccugaggcuccacuugguc

SEQ ID NO: 2754935 - RNA, 18 nt, Human
ucuaugaaauauuauguu

SEQ ID NO: 2754936 - RNA, 12 nt, Human
ucggagaagagc

SEQ ID NO: 2754937 - RNA, 16 nt, Human
ucggagaagagcuguu

SEQ ID NO: 2754938 - RNA, 14 nt, Human
ucggagaagagcug

SEQ ID NO: 2754939 - RNA, 23 nt, Human
ucucaguccaugaagauguagag

SEQ ID NO: 2754940 - RNA, 12 nt, Human
ugacaagcucac

SEQ ID NO: 2754941 - RNA, 15 nt, Human
ugacaagcucacaga

SEQ ID NO: 2754942 - RNA, 20 nt, Human
ugacaagcucacagaccuuu

SEQ ID NO: 2754943 - RNA, 20 nt, Human
ugaccacugcagaagacagu

SEQ ID NO: 2754944 - RNA, 16 nt, Human
ugacaugggacauuug

SEQ ID NO: 2754945 - RNA, 17 nt, Human
ugacaugggacauuugc

SEQ ID NO: 2754946 - RNA, 16 nt, Human
ugacauagucuggcug

SEQ ID NO: 2754947 - RNA, 17 nt, Human
ugacauagucuggcugu

SEQ ID NO: 2754948 - RNA, 18 nt, Human
ugacaugggacauuugcu

SEQ ID NO: 2754949 - RNA, 11 nt, Human
ugaaguccaag

SEQ ID NO: 2754950 - RNA, 23 nt, Human
ugaagucagaucugccuaaggac

SEQ ID NO: 2754951 - RNA, 20 nt, Human
ugaagucagaucugccuaag

SEQ ID NO: 2754952 - RNA, 13 nt, Human
ugaaguccaagca

SEQ ID NO: 2754953 - RNA, 20 nt, Human
ugaaugaauggcuaagcaaa

SEQ ID NO: 2754954 - RNA, 14 nt, Human
ugaauuacauuugu

SEQ ID NO: 2754955 - RNA, 15 nt, Human
ugaauuacauuugua

SEQ ID NO: 2754956 - RNA, 16 nt, Human
ugaauuacauuuguau

SEQ ID NO: 2754957 - RNA, 18 nt, Human
ugaauuacauuuguauaa

SEQ ID NO: 2754958 - RNA, 15 nt, Human
ugaaagguacuucaa

SEQ ID NO: 2754959 - RNA, 16 nt, Human
ugaaagguacuucaaa

SEQ ID NO: 2754960 - RNA, 18 nt, Human
ugaaagaggcagcuugaa

SEQ ID NO: 2754961 - RNA, 22 nt, Human
ugaaacaacaaauaggaauugu

SEQ ID NO: 2754962 - RNA, 19 nt, Human
ugaaauggacuuuuguaca

SEQ ID NO: 2754963 - RNA, 16 nt, Human
ugaaauauugacuuuu

SEQ ID NO: 2754964 - RNA, 17 nt, Human
ucuuucacauuuaaaua

SEQ ID NO: 2754965 - RNA, 19 nt, Human
ucuugccuuuuucauuauu

SEQ ID NO: 2754966 - RNA, 16 nt, Human
ucuugccuuuuucauu

SEQ ID NO: 2754967 - RNA, 17 nt, Human
ucuugccuuuuucauua

SEQ ID NO: 2754968 - RNA, 15 nt, Human
ucuugccuuuuucau

SEQ ID NO: 2754969 - RNA, 19 nt, Human
ucuuuccacagaagcucca

SEQ ID NO: 2754970 - RNA, 12 nt, Human
ucuuugccaagu

SEQ ID NO: 2754971 - RNA, 16 nt, Human
ugauuaccagggacug

SEQ ID NO: 2754972 - RNA, 22 nt, Human
ugauguuuagaaacacaacuau

SEQ ID NO: 2754973 - RNA, 13 nt, Human
ugauuauauguca

SEQ ID NO: 2754974 - RNA, 17 nt, Human
ugauuaugaauuacauu

SEQ ID NO: 2754975 - RNA, 19 nt, Human
ugauuaugaauuacauuug

SEQ ID NO: 2754976 - RNA, 21 nt, Human
ugauuaugaauuacauuugua

SEQ ID NO: 2754977 - RNA, 22 nt, Human
ugauuaugaauuacauuuguau

SEQ ID NO: 2754978 - RNA, 21 nt, Human
ugauucuucagcaaaaauauu

SEQ ID NO: 2754979 - RNA, 15 nt, Human
ugauggugguauguu

SEQ ID NO: 2754980 - RNA, 20 nt, Human
ugaugcuacaggauuugaaa

SEQ ID NO: 2754981 - RNA, 23 nt, Human
ugaugcuacaggauuugaaauug

SEQ ID NO: 2754982 - RNA, 17 nt, Human
ugaucuuuaaaauacac

SEQ ID NO: 2754983 - RNA, 14 nt, Human
ugaucuuuaaaaua

SEQ ID NO: 2754984 - RNA, 24 nt, Human
ugaucagcuuauugucuagugaaa

SEQ ID NO: 2754985 - RNA, 17 nt, Human
ugaucagcuuauugucu

SEQ ID NO: 2754986 - RNA, 15 nt, Human
ugauagaggaagccu

SEQ ID NO: 2754987 - RNA, 16 nt, Human
ugagagugaacaaauu

SEQ ID NO: 2754988 - RNA, 13 nt, Human
ugagccccaaaag

SEQ ID NO: 2754989 - RNA, 16 nt, Human
ugauaacuggaaacuu

SEQ ID NO: 2754990 - RNA, 18 nt, Human
ugaggcuccacuuggucu

SEQ ID NO: 2754991 - RNA, 20 nt, Human
ugaggcuccacuuggucugu

SEQ ID NO: 2754992 - RNA, 13 nt, Human
ugcuagaacuccc

SEQ ID NO: 2754993 - RNA, 14 nt, Human
ugcuagaacucccu

SEQ ID NO: 2754994 - RNA, 15 nt, Human
ugcuagaacucccuu

SEQ ID NO: 2754995 - RNA, 17 nt, Human
ugcuagaacucccuuuc

SEQ ID NO: 2754996 - RNA, 19 nt, Human
ugcgcuaaacuuuucugau

SEQ ID NO: 2754997 - RNA, 20 nt, Human
ugcgcuaaacuuuucugaua

SEQ ID NO: 2754998 - RNA, 21 nt, Human
ugcgcuaaacuuuucugauag

SEQ ID NO: 2754999 - RNA, 20 nt, Human
ugcugggggggauuguaaaa

SEQ ID NO: 2755000 - RNA, 17 nt, Human
ugcugggguuaucugaa

SEQ ID NO: 2755001 - RNA, 20 nt, Human
ugcugggguuaucugaaguc

SEQ ID NO: 2755002 - RNA, 13 nt, Human
ugcugguguaugu

SEQ ID NO: 2755003 - RNA, 22 nt, Human
ugcugguguaugugugaaguga

SEQ ID NO: 2755004 - RNA, 22 nt, Human
ugcaucaauuuuucuuauuuca

SEQ ID NO: 2755005 - RNA, 12 nt, Human
ugcaguucugaa

SEQ ID NO: 2755006 - RNA, 13 nt, Human
ugcaucagcugcu

SEQ ID NO: 2755007 - RNA, 16 nt, Human
ugccacuaaauugaca

SEQ ID NO: 2755008 - RNA, 20 nt, Human
ugccuaaauccauuuggaaa

SEQ ID NO: 2755009 - RNA, 22 nt, Human
ugccuaaauccauuuggaaauc

SEQ ID NO: 2755010 - RNA, 23 nt, Human
ugccuaaauccauuuggaaaucu

SEQ ID NO: 2755011 - RNA, 23 nt, Human
ugccucacccacccuuuuuuaaa

SEQ ID NO: 2755012 - RNA, 20 nt, Human
ugccucacccacccuuuuuu

SEQ ID NO: 2755013 - RNA, 15 nt, Human
ugccuaaauccauuu

SEQ ID NO: 2755014 - RNA, 19 nt, Human
ugccuaaauccauuuggaa

SEQ ID NO: 2755015 - RNA, 13 nt, Human
ugccuaaauccau

SEQ ID NO: 2755016 - RNA, 15 nt, Human
uggcacuaguauuuc

SEQ ID NO: 2755017 - RNA, 20 nt, Human
uggcaauagucaaauugugu

SEQ ID NO: 2755018 - RNA, 20 nt, Human
uggauaauaaggaaaaguuu

SEQ ID NO: 2755019 - RNA, 17 nt, Human
uggaccaaaaaccagua

SEQ ID NO: 2755020 - RNA, 22 nt, Human
uggaccaaaaaccaguauugua

SEQ ID NO: 2755021 - RNA, 13 nt, Human
ugguauguuuuca

SEQ ID NO: 2755022 - RNA, 22 nt, Human
uggucacaggaaguagaggagg

SEQ ID NO: 2755023 - RNA, 17 nt, Human
uggucacaggaaguaga

SEQ ID NO: 2755024 - RNA, 16 nt, Human
uggucccagccagcag

SEQ ID NO: 2755025 - RNA, 17 nt, Human
ugguccgugcuaaggac

SEQ ID NO: 2755026 - RNA, 18 nt, Human
ugguccgugcuaaggacu

SEQ ID NO: 2755027 - RNA, 19 nt, Human
ugguccgugcuaaggacuu

SEQ ID NO: 2755028 - RNA, 20 nt, Human
ugguccgugcuaaggacuug

SEQ ID NO: 2755029 - RNA, 15 nt, Human
uggugacugauucuu

SEQ ID NO: 2755030 - RNA, 16 nt, Human
uggugacugauucuuc

SEQ ID NO: 2755031 - RNA, 19 nt, Human
uggugacugauucuucagc

SEQ ID NO: 2755032 - RNA, 17 nt, Human
ugggcagcugccucccc

SEQ ID NO: 2755033 - RNA, 19 nt, Human
ugggcagcugccuccccuc

SEQ ID NO: 2755034 - RNA, 12 nt, Human
ugggcagcugcc

SEQ ID NO: 2755035 - RNA, 13 nt, Human
ugggcagcugccu

SEQ ID NO: 2755036 - RNA, 14 nt, Human
ugggcagcugccuc

SEQ ID NO: 2755037 - RNA, 15 nt, Human
ugggcagcugccucc

SEQ ID NO: 2755038 - RNA, 19 nt, Human
uuaaaauacacacucaaau

SEQ ID NO: 2755039 - RNA, 18 nt, Human
uuaaaagaugaaaauauu

SEQ ID NO: 2755040 - RNA, 15 nt, Human
uuaaaagaugaaaau

SEQ ID NO: 2755041 - RNA, 22 nt, Human
uuaaaagaauauuuuaacuucc

SEQ ID NO: 2755042 - RNA, 21 nt, Human
uuaaaagaauauuuuaacuuc

SEQ ID NO: 2755043 - RNA, 19 nt, Human
uguuucaaacauauauaac

SEQ ID NO: 2755044 - RNA, 21 nt, Human
uguuucaaacauauauaacaa

SEQ ID NO: 2755045 - RNA, 22 nt, Human
uguuucaaacauauauaacaau

SEQ ID NO: 2755046 - RNA, 21 nt, Human
uuaauauuaaagccauguuua

SEQ ID NO: 2755047 - RNA, 22 nt, Human
uuaauauuaaagccauguuuau

SEQ ID NO: 2755048 - RNA, 20 nt, Human
uuaauauuaaagccauguuu

SEQ ID NO: 2755049 - RNA, 15 nt, Human
uuaagcauauauuuu

SEQ ID NO: 2755050 - RNA, 18 nt, Human
uuaagcauauauuuuuau

SEQ ID NO: 2755051 - RNA, 13 nt, Human
uuaagcauauauu

SEQ ID NO: 2755052 - RNA, 19 nt, Human
uuaagcauauauuuuuaua

SEQ ID NO: 2755053 - RNA, 18 nt, Human
uuaggauguugaaaaagu

SEQ ID NO: 2755054 - RNA, 20 nt, Human
uuagaugcaguucugaagaa

SEQ ID NO: 2755055 - RNA, 21 nt, Human
uuagaugcaguucugaagaag

SEQ ID NO: 2755056 - RNA, 13 nt, Human
uuagaucuaguuc

SEQ ID NO: 2755057 - RNA, 14 nt, Human
uuagaucuaguuca

SEQ ID NO: 2755058 - RNA, 18 nt, Human
uuagagaguguugaaacg

SEQ ID NO: 2755059 - RNA, 12 nt, Human
uuagagauuuuu

SEQ ID NO: 2755060 - RNA, 12 nt, Human
uuagcuggaaaa

SEQ ID NO: 2755061 - RNA, 13 nt, Human
uuagcuggaaaag

SEQ ID NO: 2755062 - RNA, 19 nt, Human
uuagaaacacaacuauauu

SEQ ID NO: 2755063 - RNA, 16 nt, Human
uuagagaguguugaaa

SEQ ID NO: 2755064 - RNA, 17 nt, Human
uuagagaguguugaaac

SEQ ID NO: 2755065 - RNA, 14 nt, Human
uuagagaguguuga

SEQ ID NO: 2755066 - RNA, 17 nt, Human
uuacuaguuucccuugc

SEQ ID NO: 2755067 - RNA, 17 nt, Human
uucccuugaugaagaag

SEQ ID NO: 2755068 - RNA, 20 nt, Human
uuccuuggacucauuuuaaa

SEQ ID NO: 2755069 - RNA, 17 nt, Human
uuccuuggacucauuuu

SEQ ID NO: 2755070 - RNA, 22 nt, Human
uucggccuccauccugaggcuc

SEQ ID NO: 2755071 - RNA, 19 nt, Human
uuccagauccuggaaauca

SEQ ID NO: 2755072 - RNA, 17 nt, Human
uucaaauccuugaagau

SEQ ID NO: 2755073 - RNA, 11 nt, Human
uucaaaguugc

SEQ ID NO: 2755074 - RNA, 15 nt, Human
uucaaaguugccuaa

SEQ ID NO: 2755075 - RNA, 16 nt, Human
uucaaaguugccuaaa

SEQ ID NO: 2755076 - RNA, 17 nt, Human
uucaaaguugccuaaau

SEQ ID NO: 2755077 - RNA, 23 nt, Human
uucaaaguugccuaaauccauuu

SEQ ID NO: 2755078 - RNA, 13 nt, Human
uuauuuuauuaug

SEQ ID NO: 2755079 - RNA, 15 nt, Human
uuauugucuagugaa

SEQ ID NO: 2755080 - RNA, 15 nt, Human
uuauuuuaauaaugu

SEQ ID NO: 2755081 - RNA, 16 nt, Human
uuauuuuaauaauguu

SEQ ID NO: 2755082 - RNA, 12 nt, Human
uuauuggcuuuu

SEQ ID NO: 2755083 - RNA, 16 nt, Human
uuauuggcuuuucuga

SEQ ID NO: 2755084 - RNA, 18 nt, Human
uuauuggcuuuucugauc

SEQ ID NO: 2755085 - RNA, 22 nt, Human
uuauuggcuuuucugauccagu

SEQ ID NO: 2755086 - RNA, 13 nt, Human
uucagagcugccc

SEQ ID NO: 2755087 - RNA, 14 nt, Human
uucagagcugcccu

SEQ ID NO: 2755088 - RNA, 21 nt, Human
uucacucuccauuuaauaauu

SEQ ID NO: 2755089 - RNA, 20 nt, Human
uucagacauagaauuaacac

SEQ ID NO: 2755090 - RNA, 16 nt, Human
uucagacauagaauua

SEQ ID NO: 2755091 - RNA, 17 nt, Human
uuauuacuguaagaaaa

SEQ ID NO: 2755092 - RNA, 18 nt, Human
uuauuacuguaagaaaau

SEQ ID NO: 2755093 - RNA, 16 nt, Human
uuauuacuguaagaaa

SEQ ID NO: 2755094 - RNA, 14 nt, Human
uuauuacaguauaa

SEQ ID NO: 2755095 - RNA, 17 nt, Human
uuauggcuauaggugcu

SEQ ID NO: 2755096 - RNA, 21 nt, Human
uuauggcacuaguauuucuau

SEQ ID NO: 2755097 - RNA, 17 nt, Human
uuaucugaagucagauc

SEQ ID NO: 2755098 - RNA, 13 nt, Human
uuuaauaaaccau

SEQ ID NO: 2755099 - RNA, 14 nt, Human
uuuaauaauguuuc

SEQ ID NO: 2755100 - RNA, 15 nt, Human
uuuaauaauguuuca

SEQ ID NO: 2755101 - RNA, 19 nt, Human
uuuaauaauguuucaaaca

SEQ ID NO: 2755102 - RNA, 14 nt, Human
uuuaauaauuauau

SEQ ID NO: 2755103 - RNA, 13 nt, Human
uuuacagagacag

SEQ ID NO: 2755104 - RNA, 15 nt, Human
uuuaauauuaaagcc

SEQ ID NO: 2755105 - RNA, 17 nt, Human
uuuaauauuaaagccau

SEQ ID NO: 2755106 - RNA, 20 nt, Human
uuuaauauuaaagccauguu

SEQ ID NO: 2755107 - RNA, 21 nt, Human
uuuaauauuaaagccauguuu

SEQ ID NO: 2755108 - RNA, 14 nt, Human
uuuaauauuaaagc

SEQ ID NO: 2755109 - RNA, 19 nt, Human
uuuaaaauacacacucaaa

SEQ ID NO: 2755110 - RNA, 16 nt, Human
uuuaaaaucauuucug

SEQ ID NO: 2755111 - RNA, 14 nt, Human
uuuaaaagaaugau

SEQ ID NO: 2755112 - RNA, 17 nt, Human
uuuaaaagaaugauuau

SEQ ID NO: 2755113 - RNA, 12 nt, Human
uuuaaaaugucu

SEQ ID NO: 2755114 - RNA, 17 nt, Human
uuguuuaaaaucauuuc

SEQ ID NO: 2755115 - RNA, 18 nt, Human
uuguuuaaaaucauuucu

SEQ ID NO: 2755116 - RNA, 13 nt, Human
uuguuuguuuagu

SEQ ID NO: 2755117 - RNA, 14 nt, Human
uuguuuguuuaguc

SEQ ID NO: 2755118 - RNA, 14 nt, Human
uuguuucuguacuu

SEQ ID NO: 2755119 - RNA, 12 nt, Human
uuguuucuguac

SEQ ID NO: 2755120 - RNA, 21 nt, Human
uuugaaauuguauuacaaauc

SEQ ID NO: 2755121 - RNA, 18 nt, Human
uuugguaaggggaauuga

SEQ ID NO: 2755122 - RNA, 12 nt, Human
uuucucuaggaa

SEQ ID NO: 2755123 - RNA, 15 nt, Human
uuucugauccaguuu

SEQ ID NO: 2755124 - RNA, 16 nt, Human
uuucugauccaguuuu

SEQ ID NO: 2755125 - RNA, 20 nt, Human
uuucugauccaguuuuguuu

SEQ ID NO: 2755126 - RNA, 22 nt, Human
uuucugauccaguuuuguuugg

SEQ ID NO: 2755127 - RNA, 13 nt, Human
uuucugauccagu

SEQ ID NO: 2755128 - RNA, 21 nt, Human
uugaaaaucuuauaauuuaaa

SEQ ID NO: 2755129 - RNA, 18 nt, Human
uucuuuccacagaagcuc

SEQ ID NO: 2755130 - RNA, 17 nt, Human
uucuuuaauuuuggaau

SEQ ID NO: 2755131 - RNA, 18 nt, Human
uucuuuaauuuuggaauu

SEQ ID NO: 2755132 - RNA, 12 nt, Human
uucuuuaauuuu

SEQ ID NO: 2755133 - RNA, 16 nt, Human
uugaaacggaugauuu

SEQ ID NO: 2755134 - RNA, 19 nt, Human
uugaaacggaugauuucua

SEQ ID NO: 2755135 - RNA, 19 nt, Human
uucuuaggguuaugauuaa

SEQ ID NO: 2755136 - RNA, 24 nt, Human
uucuaaguaaaaccacagcaguug

SEQ ID NO: 2755137 - RNA, 11 nt, Human
uucuguauaga

SEQ ID NO: 2755138 - RNA, 13 nt, Human
uucuguauagauu

SEQ ID NO: 2755139 - RNA, 14 nt, Human
uucuguauagauua

SEQ ID NO: 2755140 - RNA, 22 nt, Human
uugccaucccucccuccaccuc

SEQ ID NO: 2755141 - RNA, 23 nt, Human
uugccaucccucccuccaccucc

SEQ ID NO: 2755142 - RNA, 14 nt, Human
uugccaucccuccc

SEQ ID NO: 2755143 - RNA, 16 nt, Human
uugccaucccucccuc

SEQ ID NO: 2755144 - RNA, 17 nt, Human
uugccaucccucccucc

SEQ ID NO: 2755145 - RNA, 18 nt, Human
uugccaucccucccucca

SEQ ID NO: 2755146 - RNA, 13 nt, Human
uugccaucccucc

SEQ ID NO: 2755147 - RNA, 20 nt, Human
uugauaugccuuuucccaac

SEQ ID NO: 2755148 - RNA, 12 nt, Human
uuguaaaauggu

SEQ ID NO: 2755149 - RNA, 13 nt, Human
uuguaaaauggug

SEQ ID NO: 2755150 - RNA, 20 nt, Human
uugguaaggggaauugagga

SEQ ID NO: 2755151 - RNA, 19 nt, Human
uuggcauaacauaaaucug

SEQ ID NO: 2755152 - RNA, 20 nt, Human
uuggcauaacauaaaucugu

SEQ ID NO: 2755153 - RNA, 22 nt, Human
uuggcauaacauaaaucuguga

SEQ ID NO: 2755154 - RNA, 23 nt, Human
uuggcauaacauaaaucugugaa

SEQ ID NO: 2755155 - RNA, 18 nt, Human
uuggcauaacauaaaucu

SEQ ID NO: 2755156 - RNA, 20 nt, Human
uuguaaaauggugugaccac

SEQ ID NO: 2755157 - RNA, 16 nt, Human
uuguaccgcaauguga

SEQ ID NO: 2755158 - RNA, 18 nt, Human
uugcuaagcauuccaacu

SEQ ID NO: 2755159 - RNA, 16 nt, Human
uugcuaagcauuccaa

SEQ ID NO: 2755160 - RNA, 14 nt, Human
uugccuuuuucauu

SEQ ID NO: 2755161 - RNA, 15 nt, Human
uugccuuuuucauua

SEQ ID NO: 2755162 - RNA, 16 nt, Human
uugccuuuuucauuau

SEQ ID NO: 2755163 - RNA, 17 nt, Human
uugccuuuuucauuauu

SEQ ID NO: 2755164 - RNA, 12 nt, Human
uugccuuuuuca

SEQ ID NO: 2755165 - RNA, 13 nt, Human
uugccuuuuucau

SEQ ID NO: 2755166 - RNA, 22 nt, Human
cucuuagaugcaguucugaaga

SEQ ID NO: 2755167 - RNA, 21 nt, Human
cucuuagaugcaguucugaag

SEQ ID NO: 2755168 - RNA, 15 nt, Human
cugaaacaacaaaua

SEQ ID NO: 2755169 - RNA, 14 nt, Human
cucguuaauuugua

SEQ ID NO: 2755170 - RNA, 12 nt, Human
cuccucugcuug

SEQ ID NO: 2755171 - RNA, 14 nt, Human
cuccucugcuugcc

SEQ ID NO: 2755172 - RNA, 21 nt, Human
cuccucugcuugccaucccuc

SEQ ID NO: 2755173 - RNA, 15 nt, Human
cuccucugcuugcca

SEQ ID NO: 2755174 - RNA, 16 nt, Human
cuccucugcuugccau

SEQ ID NO: 2755175 - RNA, 17 nt, Human
cuccucugcuugccauc

SEQ ID NO: 2755176 - RNA, 20 nt, Human
cuccucugcuugccaucccu

SEQ ID NO: 2755177 - RNA, 22 nt, Human
cuccugggcagcugccuccccu

SEQ ID NO: 2755178 - RNA, 18 nt, Human
cuccugggcagcugccuc

SEQ ID NO: 2755179 - RNA, 19 nt, Human
cuccugggcagcugccucc

SEQ ID NO: 2755180 - RNA, 14 nt, Human
cuccugggcagcug

SEQ ID NO: 2755181 - RNA, 15 nt, Human
cuccugggcagcugc

SEQ ID NO: 2755182 - RNA, 16 nt, Human
cuccugggcagcugcc

SEQ ID NO: 2755183 - RNA, 17 nt, Human
cuccugggcagcugccu

SEQ ID NO: 2755184 - RNA, 12 nt, Human
cuccugggcagc

SEQ ID NO: 2755185 - RNA, 23 nt, Human
cuccacuuggucugugagaugcu

SEQ ID NO: 2755186 - RNA, 19 nt, Human
cuccccaugauguuuagaa

SEQ ID NO: 2755187 - RNA, 16 nt, Human
cuccacuuggucugug

SEQ ID NO: 2755188 - RNA, 17 nt, Human
cuccacuuggucuguga

SEQ ID NO: 2755189 - RNA, 21 nt, Human
cuccacuuggucugugagaug

SEQ ID NO: 2755190 - RNA, 22 nt, Human
cuccacuuggucugugagaugc

SEQ ID NO: 2755191 - RNA, 13 nt, Human
cuccacuuggucu

SEQ ID NO: 2755192 - RNA, 15 nt, Human
cuccacuuggucugu

SEQ ID NO: 2755193 - RNA, 19 nt, Human
cgcugauaagcguucaugg

SEQ ID NO: 2755194 - RNA, 18 nt, Human
cgcaggcccccaggugcc

SEQ ID NO: 2755195 - RNA, 16 nt, Human
ccuuuuuuaaauaaau

SEQ ID NO: 2755196 - RNA, 17 nt, Human
cucaaaacugcacuguc

SEQ ID NO: 2755197 - RNA, 23 nt, Human
cucaaaauaccaugccauuuaaa

SEQ ID NO: 2755198 - RNA, 15 nt, Human
cuacaaaaacacagc

SEQ ID NO: 2755199 - RNA, 18 nt, Human
cuacaaaaacacagcaag

SEQ ID NO: 2755200 - RNA, 17 nt, Human
cuacaaaaacacagcaa

SEQ ID NO: 2755201 - RNA, 16 nt, Human
cuacaaaaacacagca

SEQ ID NO: 2755202 - RNA, 18 nt, Human
cuacauacuauggaauuu

SEQ ID NO: 2755203 - RNA, 20 nt, Human
cuacaugagguacugagagu

SEQ ID NO: 2755204 - RNA, 18 nt, Human
cuacaugagguacugaga

SEQ ID NO: 2755205 - RNA, 20 nt, Human
cuaaguaaaaccacagcagu

SEQ ID NO: 2755206 - RNA, 23 nt, Human
cuaaguaaaaccacagcaguuga

SEQ ID NO: 2755207 - RNA, 22 nt, Human
cuaaguaaaaccacagcaguug

SEQ ID NO: 2755208 - RNA, 12 nt, Human
cuagaacucccu

SEQ ID NO: 2755209 - RNA, 13 nt, Human
cuagaacucccuu

SEQ ID NO: 2755210 - RNA, 19 nt, Human
ccugucuugccuuuuucau

SEQ ID NO: 2755211 - RNA, 20 nt, Human
ccugucuugccuuuuucauu

SEQ ID NO: 2755212 - RNA, 17 nt, Human
ccugucuugccuuuuuc

SEQ ID NO: 2755213 - RNA, 15 nt, Human
ccuguaaucacagcu

SEQ ID NO: 2755214 - RNA, 23 nt, Human
ccucauggaauuggagcucgugg

SEQ ID NO: 2755215 - RNA, 22 nt, Human
ccauuuaaagcuuauuaaaacu

SEQ ID NO: 2755216 - RNA, 13 nt, Human
ccauacauuugug

SEQ ID NO: 2755217 - RNA, 14 nt, Human
ccauacauuugugu

SEQ ID NO: 2755218 - RNA, 16 nt, Human
ccaguuuuguuuggac

SEQ ID NO: 2755219 - RNA, 19 nt, Human
ccaguuuuguuuggaccaa

SEQ ID NO: 2755220 - RNA, 20 nt, Human
ccaguauuguacaaaguauu

SEQ ID NO: 2755221 - RNA, 22 nt, Human
ccaguauuguacaaaguauuaa

SEQ ID NO: 2755222 - RNA, 15 nt, Human
ccagcagauuauuca

SEQ ID NO: 2755223 - RNA, 18 nt, Human
ccccugcacuccagccug

SEQ ID NO: 2755224 - RNA, 18 nt, Human
cccaggaauggagccugc

SEQ ID NO: 2755225 - RNA, 19 nt, Human
cccaggaauggagccugca

SEQ ID NO: 2755226 - RNA, 20 nt, Human
cccaggaauggagccugcac

SEQ ID NO: 2755227 - RNA, 22 nt, Human
cccaggaauggagccugcacgg

SEQ ID NO: 2755228 - RNA, 17 nt, Human
ccaaauguucaucaaug

SEQ ID NO: 2755229 - RNA, 19 nt, Human
cauuuguauaaaauaauuu

SEQ ID NO: 2755230 - RNA, 20 nt, Human
cauuuguauaaaauaauuuu

SEQ ID NO: 2755231 - RNA, 17 nt, Human
cauuuguauaaaauaau

SEQ ID NO: 2755232 - RNA, 12 nt, Human
ccacagcaguug

SEQ ID NO: 2755233 - RNA, 18 nt, Human
ccacagcaguugaaaaga

SEQ ID NO: 2755234 - RNA, 17 nt, Human
ccacagcaguugaaaag

SEQ ID NO: 2755235 - RNA, 23 nt, Human
ccacagcaguugaaaagacucca

SEQ ID NO: 2755236 - RNA, 14 nt, Human
caugauguuuagaa

SEQ ID NO: 2755237 - RNA, 20 nt, Human
cagcuccccucggagaagag

SEQ ID NO: 2755238 - RNA, 22 nt, Human
cagcuccccucggagaagagcu

SEQ ID NO: 2755239 - RNA, 21 nt, Human
cagcuccccucggagaagagc

SEQ ID NO: 2755240 - RNA, 12 nt, Human
cagauccuggaa

SEQ ID NO: 2755241 - RNA, 17 nt, Human
cagagguugcagugagc

SEQ ID NO: 2755242 - RNA, 16 nt, Human
cagagguugcagugag

SEQ ID NO: 2755243 - RNA, 13 nt, Human
cagcaguucagag

SEQ ID NO: 2755244 - RNA, 20 nt, Human
cagucugacuguuuccauca

SEQ ID NO: 2755245 - RNA, 19 nt, Human
cagucaccucauggaauug

SEQ ID NO: 2755246 - RNA, 15 nt, Human
cagucaccucaugga

SEQ ID NO: 2755247 - RNA, 15 nt, Human
cagucacauuccaag

SEQ ID NO: 2755248 - RNA, 16 nt, Human
cagucaccucauggaa

SEQ ID NO: 2755249 - RNA, 19 nt, Human
caggugccaguuauggcua

SEQ ID NO: 2755250 - RNA, 20 nt, Human
auuucuaugaaauauuaugu

SEQ ID NO: 2755251 - RNA, 15 nt, Human
auuucuaugaaauau

SEQ ID NO: 2755252 - RNA, 18 nt, Human
auuucuaugaaauauuau

SEQ ID NO: 2755253 - RNA, 19 nt, Human
auuguuuaaaaucauuucu

SEQ ID NO: 2755254 - RNA, 22 nt, Human
auuguacaaaguauuaagcaua

SEQ ID NO: 2755255 - RNA, 20 nt, Human
auuguacaaaguauuaagca

SEQ ID NO: 2755256 - RNA, 23 nt, Human
auuguacaaaguauuaagcauau

SEQ ID NO: 2755257 - RNA, 17 nt, Human
auuguaaaugugcuuuu

SEQ ID NO: 2755258 - RNA, 15 nt, Human
auuguaaaugugcuu

SEQ ID NO: 2755259 - RNA, 14 nt, Human
auuguaaaugugcu

SEQ ID NO: 2755260 - RNA, 18 nt, Human
auucacaagacccaaaag

SEQ ID NO: 2755261 - RNA, 18 nt, Human
auugacuuuuuauggcac

SEQ ID NO: 2755262 - RNA, 17 nt, Human
auucuugccaaauauaa

SEQ ID NO: 2755263 - RNA, 15 nt, Human
caaauccuugaagau

SEQ ID NO: 2755264 - RNA, 16 nt, Human
caaaguauuaagcaua

SEQ ID NO: 2755265 - RNA, 17 nt, Human
caaaguauuaagcauau

SEQ ID NO: 2755266 - RNA, 19 nt, Human
caaaguauuaagcauauau

SEQ ID NO: 2755267 - RNA, 21 nt, Human
caaaguauuaagcauauauuu

SEQ ID NO: 2755268 - RNA, 14 nt, Human
caaaguauuaagca

SEQ ID NO: 2755269 - RNA, 15 nt, Human
caaaguauuaagcau

SEQ ID NO: 2755270 - RNA, 19 nt, Human
caacccaaauguucaucaa

SEQ ID NO: 2755271 - RNA, 21 nt, Human
caacuaucucauuuccaagca

SEQ ID NO: 2755272 - RNA, 17 nt, Human
cacuuggucugugagau

SEQ ID NO: 2755273 - RNA, 20 nt, Human
cacuuggucugugagaugcu

SEQ ID NO: 2755274 - RNA, 21 nt, Human
caccuacaugagguacugaga

SEQ ID NO: 2755275 - RNA, 23 nt, Human
caccucaaaauaccaugccauuu

SEQ ID NO: 2755276 - RNA, 14 nt, Human
caaguauuagaaua

SEQ ID NO: 2755277 - RNA, 20 nt, Human
caaguauuagaauaccacag

SEQ ID NO: 2755278 - RNA, 16 nt, Human
caauaaaaaauuauga

SEQ ID NO: 2755279 - RNA, 17 nt, Human
caauaaaaaauuaugac

SEQ ID NO: 2755280 - RNA, 13 nt, Human
caauaaaaaauua

SEQ ID NO: 2755281 - RNA, 12 nt, Human
caauauuucaga

SEQ ID NO: 2755282 - RNA, 20 nt, Human
caauauuucagauaaucaca

SEQ ID NO: 2755283 - RNA, 14 nt, Human
caaugcuguauuuu

SEQ ID NO: 2755284 - RNA, 23 nt, Human
caaugcuguauuuuaaaagaaug

SEQ ID NO: 2755285 - RNA, 12 nt, Human
caauuuaaaaaa

SEQ ID NO: 2755286 - RNA, 16 nt, Human
cacaagacugcacauc

SEQ ID NO: 2755287 - RNA, 18 nt, Human
ggccuucggccuccaucc

SEQ ID NO: 2755288 - RNA, 16 nt, Human
ggccuucggccuccau

SEQ ID NO: 2755289 - RNA, 20 nt, Human
ggcuaagcuucacuguaaaa

SEQ ID NO: 2755290 - RNA, 13 nt, Human
aaaaauacaaaaa

SEQ ID NO: 2755291 - RNA, 19 nt, Human
gguuuuauuguuuaaaauc

SEQ ID NO: 2755292 - RNA, 19 nt, Human
gguguuguacucaauuuua

SEQ ID NO: 2755293 - RNA, 20 nt, Human
gguguuguacucaauuuuaa

SEQ ID NO: 2755294 - RNA, 20 nt, Human
aaagggauggcaagaugugg

SEQ ID NO: 2755295 - RNA, 20 nt, Human
aaagggcuguuauaaucuuu

SEQ ID NO: 2755296 - RNA, 22 nt, Human
aaagggcuguuauaaucuuuca

SEQ ID NO: 2755297 - RNA, 12 nt, Human
aaacuuuaugcu

SEQ ID NO: 2755298 - RNA, 19 nt, Human
aaacuuuaugcuaagugaa

SEQ ID NO: 2755299 - RNA, 16 nt, Human
aaagcagaacagugau

SEQ ID NO: 2755300 - RNA, 20 nt, Human
guacaaaguauuaagcauau

SEQ ID NO: 2755301 - RNA, 21 nt, Human
guacaaaguauuaagcauaua

SEQ ID NO: 2755302 - RNA, 22 nt, Human
aaauaucacuugucaauaaaau

SEQ ID NO: 2755303 - RNA, 18 nt, Human
aaauauaugcuaagucuu

SEQ ID NO: 2755304 - RNA, 21 nt, Human
aaauaccaugccauuuaaagc

SEQ ID NO: 2755305 - RNA, 17 nt, Human
aaauaugcaaagcacug

SEQ ID NO: 2755306 - RNA, 16 nt, Human
aaauaugcaaagcacu

SEQ ID NO: 2755307 - RNA, 15 nt, Human
aaauaugcaaagcac

SEQ ID NO: 2755308 - RNA, 13 nt, Human
aaauaugcaaagc

SEQ ID NO: 2755309 - RNA, 20 nt, Human
ggguuuuauuguuuaaaauc

SEQ ID NO: 2755310 - RNA, 14 nt, Human
ggucagugcaaaua

SEQ ID NO: 2755311 - RNA, 14 nt, Human
aaaauacacacuca

SEQ ID NO: 2755312 - RNA, 16 nt, Human
aaaauaauuuuuauau

SEQ ID NO: 2755313 - RNA, 17 nt, Human
aaaauaauuuuuauauu

SEQ ID NO: 2755314 - RNA, 11 nt, Human
aaaauaauuuu

SEQ ID NO: 2755315 - RNA, 17 nt, Human
aaaaucucaauauuuca

SEQ ID NO: 2755316 - RNA, 18 nt, Human
aaaauauuuuaugaucca

SEQ ID NO: 2755317 - RNA, 15 nt, Human
aaaauauuuuaugau

SEQ ID NO: 2755318 - RNA, 16 nt, Human
aaaaugguuuaaaugg

SEQ ID NO: 2755319 - RNA, 18 nt, Human
aaaaugguuuaaaugguc

SEQ ID NO: 2755320 - RNA, 16 nt, Human
aaaauggguuuuacug

SEQ ID NO: 2755321 - RNA, 11 nt, Human
gcuauuucuau

SEQ ID NO: 2755322 - RNA, 13 nt, Human
gcuauuucuauau

SEQ ID NO: 2755323 - RNA, 15 nt, Human
gcuauuucuauauuu

SEQ ID NO: 2755324 - RNA, 16 nt, Human
gcuauuucuauauuuu

SEQ ID NO: 2755325 - RNA, 18 nt, Human
gcuauuucuauauuuuca

SEQ ID NO: 2755326 - RNA, 19 nt, Human
gcuauuucuauauuuucau

SEQ ID NO: 2755327 - RNA, 20 nt, Human
gcuauuucuauauuuucauu

SEQ ID NO: 2755328 - RNA, 23 nt, Human
gccuucggccuccauccugaggc

SEQ ID NO: 2755329 - RNA, 11 nt, Human
gcuaaggacuu

SEQ ID NO: 2755330 - RNA, 12 nt, Human
gcuaaggacuug

SEQ ID NO: 2755331 - RNA, 12 nt, Human
gcguugaaauug

SEQ ID NO: 2755332 - RNA, 23 nt, Human
gcuaaggacuuguuagaucuagu

SEQ ID NO: 2755333 - RNA, 22 nt, Human
gcguucauggaacgcguugaaa

SEQ ID NO: 2755334 - RNA, 22 nt, Human
gccucauguccacugguucuuc

SEQ ID NO: 2755335 - RNA, 13 nt, Human
gccuccauccuga

SEQ ID NO: 2755336 - RNA, 14 nt, Human
gccuccauccugag

SEQ ID NO: 2755337 - RNA, 12 nt, Human
gccuccauccug

SEQ ID NO: 2755338 - RNA, 11 nt, Human
gccccaaaagg

SEQ ID NO: 2755339 - RNA, 12 nt, Human
gcauuuagaugu

SEQ ID NO: 2755340 - RNA, 19 nt, Human
gcauuuaggccaugggaca

SEQ ID NO: 2755341 - RNA, 13 nt, Human
gcauuuagaugua

SEQ ID NO: 2755342 - RNA, 14 nt, Human
gccauguuuauuac

SEQ ID NO: 2755343 - RNA, 18 nt, Human
gccauguuuauuacagua

SEQ ID NO: 2755344 - RNA, 22 nt, Human
gccauguuuauuacaguauaau

SEQ ID NO: 2755345 - RNA, 13 nt, Human
gccauguuuauua

SEQ ID NO: 2755346 - RNA, 11 nt, Human
gccauguuuau

SEQ ID NO: 2755347 - RNA, 16 nt, Human
ggaaaaaauaacaaug

SEQ ID NO: 2755348 - RNA, 13 nt, Human
ggaaacugccagc

SEQ ID NO: 2755349 - RNA, 19 nt, Human
ggaaaucaggguuaguauu

SEQ ID NO: 2755350 - RNA, 17 nt, Human
ggacagucaccucaugg

SEQ ID NO: 2755351 - RNA, 18 nt, Human
ggacagucaccucaugga

SEQ ID NO: 2755352 - RNA, 21 nt, Human
ggacagucaccucauggaauu

SEQ ID NO: 2755353 - RNA, 15 nt, Human
ggaagccugauuaaa

SEQ ID NO: 2755354 - RNA, 14 nt, Human
gcugccuccccucc

SEQ ID NO: 2755355 - RNA, 21 nt, Human
gcuguauuuuaaaagaaugau

SEQ ID NO: 2755356 - RNA, 20 nt, Human
gcuguauuuuaaaagaauga

SEQ ID NO: 2755357 - RNA, 18 nt, Human
gcuguauuuuaaaagaau

SEQ ID NO: 2755358 - RNA, 13 nt, Human
gcugcugaaacaa

SEQ ID NO: 2755359 - RNA, 12 nt, Human
gcagaacaguga

SEQ ID NO: 2755360 - RNA, 13 nt, Human
gcagaacagugau

SEQ ID NO: 2755361 - RNA, 18 nt, Human
gcagaacagugauuacca

SEQ ID NO: 2755362 - RNA, 22 nt, Human
gcagaacagugauuaccaggga

SEQ ID NO: 2755363 - RNA, 13 nt, Human
gcagugaugucac

SEQ ID NO: 2755364 - RNA, 22 nt, Human
gcaguuguugcccacagcugua

SEQ ID NO: 2755365 - RNA, 16 nt, Human
gauacuggauuguacu

SEQ ID NO: 2755366 - RNA, 20 nt, Human
gauacuggauuguacuuugu

SEQ ID NO: 2755367 - RNA, 13 nt, Human
gaugauuucuaug

SEQ ID NO: 2755368 - RNA, 23 nt, Human
gaugauuucuaugcugaguuugu

SEQ ID NO: 2755369 - RNA, 12 nt, Human
gaugauuucuau

SEQ ID NO: 2755370 - RNA, 19 nt, Human
gauccagcagauuauucac

SEQ ID NO: 2755371 - RNA, 18 nt, Human
gauccagcagauuauuca

SEQ ID NO: 2755372 - RNA, 16 nt, Human
gaucugccuaaggacu

SEQ ID NO: 2755373 - RNA, 12 nt, Human
gaucugccuaag

SEQ ID NO: 2755374 - RNA, 15 nt, Human
gaucugccuaaggac

SEQ ID NO: 2755375 - RNA, 17 nt, Human
gaggcuccacuuggucu

SEQ ID NO: 2755376 - RNA, 18 nt, Human
gaggcugagaugggagaa

SEQ ID NO: 2755377 - RNA, 15 nt, Human
gaggcuccacuuggu

SEQ ID NO: 2755378 - RNA, 12 nt, Human
gaggcuccacuu

SEQ ID NO: 2755379 - RNA, 21 nt, Human
gaggacgcucucuggccuucg

SEQ ID NO: 2755380 - RNA, 20 nt, Human
gaggacgcucucuggccuuc

SEQ ID NO: 2755381 - RNA, 12 nt, Human
gaggagaaacug

SEQ ID NO: 2755382 - RNA, 14 nt, Human
gaggagaaacugga

SEQ ID NO: 2755383 - RNA, 14 nt, Human
gagcagucaggaaa

SEQ ID NO: 2755384 - RNA, 22 nt, Human
gagcuguucacagccagacugg

SEQ ID NO: 2755385 - RNA, 20 nt, Human
gagcuguucacagccagacu

SEQ ID NO: 2755386 - RNA, 17 nt, Human
gagcuguucacagccag

SEQ ID NO: 2755387 - RNA, 21 nt, Human
gagauugugccccugcacucc

SEQ ID NO: 2755388 - RNA, 16 nt, Human
gagaugcuagaacucc

SEQ ID NO: 2755389 - RNA, 20 nt, Human
gagaugcuagaacucccuuu

SEQ ID NO: 2755390 - RNA, 22 nt, Human
gacuuuuuauggcacuaguauu

SEQ ID NO: 2755391 - RNA, 14 nt, Human
gaaugaauggcuaa

SEQ ID NO: 2755392 - RNA, 15 nt, Human
gaaugaauggcuaag

SEQ ID NO: 2755393 - RNA, 20 nt, Human
gaaugaauggcuaagcaaaa

SEQ ID NO: 2755394 - RNA, 14 nt, Human
gaaugauuaugaau

SEQ ID NO: 2755395 - RNA, 22 nt, Human
gaaugauuaugaauuacauuug

SEQ ID NO: 2755396 - RNA, 14 nt, Human
gaauuaacacauga

SEQ ID NO: 2755397 - RNA, 15 nt, Human
gaauuaacacaugau

SEQ ID NO: 2755398 - RNA, 13 nt, Human
gaauuacauuugu

SEQ ID NO: 2755399 - RNA, 15 nt, Human
gaauuacauuuguau

SEQ ID NO: 2755400 - RNA, 18 nt, Human
gaauuacauuuguauaaa

SEQ ID NO: 2755401 - RNA, 20 nt, Human
gaauuacauuuguauaaaau

SEQ ID NO: 2755402 - RNA, 12 nt, Human
gacagcucugca

SEQ ID NO: 2755403 - RNA, 18 nt, Human
gacagucaccucauggaa

SEQ ID NO: 2755404 - RNA, 14 nt, Human
gacgcucucuggcc

SEQ ID NO: 2755405 - RNA, 15 nt, Human
cuggugcccugcuuu

SEQ ID NO: 2755406 - RNA, 16 nt, Human
cuggugcccugcuuuc

SEQ ID NO: 2755407 - RNA, 19 nt, Human
cuggugcccugcuuucaga

SEQ ID NO: 2755408 - RNA, 21 nt, Human
cuggugcccugcuuucagaua

SEQ ID NO: 2755409 - RNA, 23 nt, Human
cuggugcccugcuuucagauacu

SEQ ID NO: 2755410 - RNA, 13 nt, Human
cuggugacugauu

SEQ ID NO: 2755411 - RNA, 14 nt, Human
cuggugacugauuc

SEQ ID NO: 2755412 - RNA, 15 nt, Human
cuggugacugauucu

SEQ ID NO: 2755413 - RNA, 17 nt, Human
cuggugacugauucuuc

SEQ ID NO: 2755414 - RNA, 20 nt, Human
cuguaagaaaauaucacuug

SEQ ID NO: 2755415 - RNA, 21 nt, Human
cugugagaugcuagaacuccc

SEQ ID NO: 2755416 - RNA, 23 nt, Human
cugugagaugcuagaacucccuu

SEQ ID NO: 2755417 - RNA, 16 nt, Human
cugugaacuugaaauu

SEQ ID NO: 2755418 - RNA, 17 nt, Human
cugugaacuugaaauuu

SEQ ID NO: 2755419 - RNA, 15 nt, Human
cugugaacuugaaau

SEQ ID NO: 2755420 - RNA, 19 nt, Human
cuguucacagccagacugg

SEQ ID NO: 2755421 - RNA, 12 nt, Human
cuguucacagcc

SEQ ID NO: 2755422 - RNA, 22 nt, Human
cuguucacagccagacuggcac

SEQ ID NO: 2755423 - RNA, 13 nt, Human
cuuaaaaaugguu

SEQ ID NO: 2755424 - RNA, 20 nt, Human
cuuaaaaaugguuuaaaugg

SEQ ID NO: 2755425 - RNA, 12 nt, Human
cuuaaaaauggu

SEQ ID NO: 2755426 - RNA, 23 nt, Human
cuggaaaaguauguuagugcaaa

SEQ ID NO: 2755427 - RNA, 17 nt, Human
cugccuccccuccucug

SEQ ID NO: 2755428 - RNA, 18 nt, Human
cugccuccccuccucugc

SEQ ID NO: 2755429 - RNA, 14 nt, Human
cugccuccccuccu

SEQ ID NO: 2755430 - RNA, 19 nt, Human
cugccuccccuccucugcu

SEQ ID NO: 2755431 - RNA, 20 nt, Human
cugccuccccuccucugcuu

SEQ ID NO: 2755432 - RNA, 23 nt, Human
cuuggucucagugucaaugcagc

SEQ ID NO: 2755433 - RNA, 21 nt, Human
cuugucucagauuuuauuaug

SEQ ID NO: 2755434 - RNA, 23 nt, Human
gaaacuucagcgguuuauauaag

SEQ ID NO: 2755435 - RNA, 14 nt, Human
gaaacuuguguaaa

SEQ ID NO: 2755436 - RNA, 16 nt, Human
gaaacuuguguaaaua

SEQ ID NO: 2755437 - RNA, 20 nt, Human
gaaacuuguguaaauacaau

SEQ ID NO: 2755438 - RNA, 16 nt, Human
gaaaucaaauaugcaa

SEQ ID NO: 2755439 - RNA, 21 nt, Human
gaaaucaaauaugcaaagcac

SEQ ID NO: 2755440 - RNA, 17 nt, Human
gaaaugaaagcagggac

SEQ ID NO: 2755441 - RNA, 23 nt, Human
gaaaucaaauaugcaaagcacug

SEQ ID NO: 2755442 - RNA, 18 nt, Human
gaaaugaaagcagggacu

SEQ ID NO: 2755443 - RNA, 17 nt, Human
gaacaaauuuacagaga

SEQ ID NO: 2755444 - RNA, 18 nt, Human
gaacaaauuuacagagac

SEQ ID NO: 2755445 - RNA, 23 nt, Human
gaacaaauuuacagagacagaaa

SEQ ID NO: 2755446 - RNA, 18 nt, Human
gaaaagacuccaaagaaa

SEQ ID NO: 2755447 - RNA, 20 nt, Human
gaaaagacuccaaagaaaug

SEQ ID NO: 2755448 - RNA, 21 nt, Human
gaaaagacuccaaagaaaugu

SEQ ID NO: 2755449 - RNA, 17 nt, Human
aagggcuguuauaaucu

SEQ ID NO: 2755450 - RNA, 17 nt, Human
aaggggaauugaggaca

SEQ ID NO: 2755451 - RNA, 15 nt, Human
aagggcuguuauaau

SEQ ID NO: 2755452 - RNA, 14 nt, Human
guuuaugauuccac

SEQ ID NO: 2755453 - RNA, 13 nt, Human
guuuaauauuaaa

SEQ ID NO: 2755454 - RNA, 14 nt, Human
guuuaauauuaaag

SEQ ID NO: 2755455 - RNA, 15 nt, Human
guuuaauauuaaagc

SEQ ID NO: 2755456 - RNA, 18 nt, Human
guuuaauauuaaagccau

SEQ ID NO: 2755457 - RNA, 13 nt, Human
guuuauuacagua

SEQ ID NO: 2755458 - RNA, 17 nt, Human
guuuauuacaguauaau

SEQ ID NO: 2755459 - RNA, 12 nt, Human
guuguuuguuua

SEQ ID NO: 2755460 - RNA, 12 nt, Human
aaggaaaaguuu

SEQ ID NO: 2755461 - RNA, 18 nt, Human
aaguauguuagugcaaau

SEQ ID NO: 2755462 - RNA, 19 nt, Human
aaguauguuagugcaaauu

SEQ ID NO: 2755463 - RNA, 19 nt, Human
aaguaaugauaacuggaaa

SEQ ID NO: 2755464 - RNA, 21 nt, Human
aagucagaucugccuaaggac

SEQ ID NO: 2755465 - RNA, 22 nt, Human
aagucagaucugccuaaggacu

SEQ ID NO: 2755466 - RNA, 18 nt, Human
aagucagaucugccuaag

SEQ ID NO: 2755467 - RNA, 18 nt, Human
guuuggaccaaaaaccag

SEQ ID NO: 2755468 - RNA, 9 nt, Human
uaaaauggu

SEQ ID NO: 2755469 - RNA, 22 nt, Human
uaaaauaauuuuuauauuugaa

SEQ ID NO: 2755470 - RNA, 21 nt, Human
uaaaauacacacucaaaucaa

SEQ ID NO: 2755471 - RNA, 20 nt, Human
uaaaauaauuuuuauauuug

SEQ ID NO: 2755472 - RNA, 13 nt, Human
uaaaagaauauuu

SEQ ID NO: 2755473 - RNA, 21 nt, Human
uaaaaaaaaaccugagcccca

SEQ ID NO: 2755474 - RNA, 14 nt, Human
uaaaaaaaaaauug

SEQ ID NO: 2755475 - RNA, 18 nt, Human
uaaaaaaaaaauugggga

SEQ ID NO: 2755476 - RNA, 23 nt, Human
aagucagaucugccuaaggacuu

SEQ ID NO: 2755477 - RNA, 15 nt, Human
uaaaaccacagcagu

SEQ ID NO: 2755478 - RNA, 13 nt, Human
uaaaaccacagca

SEQ ID NO: 2755479 - RNA, 14 nt, Human
uaaaaccacagcag

SEQ ID NO: 2755480 - RNA, 16 nt, Human
aagcacuaaacaaaga

SEQ ID NO: 2755481 - RNA, 17 nt, Human
aagcacugacuucuaag

SEQ ID NO: 2755482 - RNA, 16 nt, Human
aagcacugacuucuaa

SEQ ID NO: 2755483 - RNA, 19 nt, Human
aagcauuguaaaugugcuu

SEQ ID NO: 2755484 - RNA, 16 nt, Human
aagccauguuuauuac

SEQ ID NO: 2755485 - RNA, 17 nt, Human
aagccauguuuauuaca

SEQ ID NO: 2755486 - RNA, 15 nt, Human
aagccauguuuauua

SEQ ID NO: 2755487 - RNA, 20 nt, Human
aagcacugacuucuaaguaa

SEQ ID NO: 2755488 - RNA, 19 nt, Human
aagcacugacuucuaagua

SEQ ID NO: 2755489 - RNA, 23 nt, Human
aagcauauauuuuuauauuuacu

SEQ ID NO: 2755490 - RNA, 18 nt, Human
aagcauuguaaaugugcu

SEQ ID NO: 2755491 - RNA, 17 nt, Human
aagcaacccaaauguuc

SEQ ID NO: 2755492 - RNA, 22 nt, Human
gugucuuaauuaaaagaauauu

SEQ ID NO: 2755493 - RNA, 14 nt, Human
aagauagcagggca

SEQ ID NO: 2755494 - RNA, 15 nt, Human
aagauagcagggcau

SEQ ID NO: 2755495 - RNA, 18 nt, Human
guguaaauacaauuuugu

SEQ ID NO: 2755496 - RNA, 21 nt, Human
guguaaauacaauuuuguuuc

SEQ ID NO: 2755497 - RNA, 22 nt, Human
guguaaauacaauuuuguuucu

SEQ ID NO: 2755498 - RNA, 19 nt, Human
guuauuauauuuacaaaug

SEQ ID NO: 2755499 - RNA, 18 nt, Human
guuagagauuuuuuuguu

SEQ ID NO: 2755500 - RNA, 17 nt, Human
guuauuauauuuacaaa

SEQ ID NO: 2755501 - RNA, 20 nt, Human
aagccauguuuauuacagua

SEQ ID NO: 2755502 - RNA, 21 nt, Human
aagccauguuuauuacaguau

SEQ ID NO: 2755503 - RNA, 22 nt, Human
aagccauguuuauuacaguaua

SEQ ID NO: 2755504 - RNA, 23 nt, Human
aagccauguuuauuacaguauaa

SEQ ID NO: 2755505 - RNA, 21 nt, Human
aagccuuggggcugaugcagu

SEQ ID NO: 2755506 - RNA, 18 nt, Human
guucccuugaugaagaag

SEQ ID NO: 2755507 - RNA, 18 nt, Human
aagcuuauuaaaacucau

SEQ ID NO: 2755508 - RNA, 15 nt, Human
aaaugugcuuuuaaa

SEQ ID NO: 2755509 - RNA, 18 nt, Human
aaaugugccuucauuuuu

SEQ ID NO: 2755510 - RNA, 17 nt, Human
aaauuguauuacaaauc

SEQ ID NO: 2755511 - RNA, 17 nt, Human
aaauuccaagugauuga

SEQ ID NO: 2755512 - RNA, 19 nt, Human
guauuguacaaaguauuaa

SEQ ID NO: 2755513 - RNA, 21 nt, Human
guauuguacaaaguauuaagc

SEQ ID NO: 2755514 - RNA, 22 nt, Human
guauuguacaaaguauuaagca

SEQ ID NO: 2755515 - RNA, 23 nt, Human
guauuguacaaaguauuaagcau

SEQ ID NO: 2755516 - RNA, 14 nt, Human
gucaggaaagagaa

SEQ ID NO: 2755517 - RNA, 13 nt, Human
gucaggaaagaga

SEQ ID NO: 2755518 - RNA, 20 nt, Human
gucacaggaaguagaggagg

SEQ ID NO: 2755519 - RNA, 21 nt, Human
gucaauuuuguuauguauauu

SEQ ID NO: 2755520 - RNA, 13 nt, Human
gucacaggaagua

SEQ ID NO: 2755521 - RNA, 15 nt, Human
gucacaggaaguaga

SEQ ID NO: 2755522 - RNA, 13 nt, Human
aacagucucagga

SEQ ID NO: 2755523 - RNA, 16 nt, Human
guccgugcuaaggacu

SEQ ID NO: 2755524 - RNA, 17 nt, Human
guccgugcuaaggacuu

SEQ ID NO: 2755525 - RNA, 15 nt, Human
guccgugcuaaggac

SEQ ID NO: 2755526 - RNA, 14 nt, Human
aacauaaaauacaa

SEQ ID NO: 2755527 - RNA, 14 nt, Human
aacagucucaggaa

SEQ ID NO: 2755528 - RNA, 12 nt, Human
aacauauauaac

SEQ ID NO: 2755529 - RNA, 14 nt, Human
aacauguuaaacca

SEQ ID NO: 2755530 - RNA, 15 nt, Human
aacauguuaaaccau

SEQ ID NO: 2755531 - RNA, 16 nt, Human
aacauguuaaaccaug

SEQ ID NO: 2755532 - RNA, 18 nt, Human
aacacagcaagggugaug

SEQ ID NO: 2755533 - RNA, 20 nt, Human
aacacagcaagggugauggg

SEQ ID NO: 2755534 - RNA, 17 nt, Human
aacacaacuauauuguu

SEQ ID NO: 2755535 - RNA, 12 nt, Human
aaauuugaauuu

SEQ ID NO: 2755536 - RNA, 15 nt, Human
aaauuugaauuuugu

SEQ ID NO: 2755537 - RNA, 22 nt, Human
aaauuugaauuuuguguuagag

SEQ ID NO: 2755538 - RNA, 22 nt, Human
guccaugaagauguagaggaga

SEQ ID NO: 2755539 - RNA, 13 nt, Human
aacuucagacaua

SEQ ID NO: 2755540 - RNA, 18 nt, Human
aacuucagcgguuuauau

SEQ ID NO: 2755541 - RNA, 22 nt, Human
aacuuccuuggacucauuuuaa

SEQ ID NO: 2755542 - RNA, 23 nt, Human
aacuuccuuggacucauuuuaaa

SEQ ID NO: 2755543 - RNA, 12 nt, Human
aacuugaaauuu

SEQ ID NO: 2755544 - RNA, 13 nt, Human
aacuugaaauuug

SEQ ID NO: 2755545 - RNA, 18 nt, Human
aacuugaaauuugaauuu

SEQ ID NO: 2755546 - RNA, 19 nt, Human
aacuugaaauuugaauuuu

SEQ ID NO: 2755547 - RNA, 17 nt, Human
gugauuaccagggacug

SEQ ID NO: 2755548 - RNA, 11 nt, Human
gugauuaccag

SEQ ID NO: 2755549 - RNA, 16 nt, Human
gugauuaccagggacu

SEQ ID NO: 2755550 - RNA, 22 nt, Human
gugcuacaaaaacacagcaagg

SEQ ID NO: 2755551 - RNA, 21 nt, Human
gugcuacaaaaacacagcaag

SEQ ID NO: 2755552 - RNA, 14 nt, Human
aagaaagaaaauca

SEQ ID NO: 2755553 - RNA, 13 nt, Human
aagaaagaaaauc

SEQ ID NO: 2755554 - RNA, 16 nt, Human
aagaaagaaaaucagg

SEQ ID NO: 2755555 - RNA, 11 nt, Human
aagaaacauuu

SEQ ID NO: 2755556 - RNA, 19 nt, Human
gucuuauauauuguagaua

SEQ ID NO: 2755557 - RNA, 14 nt, Human
gucuuaauuaaaag

SEQ ID NO: 2755558 - RNA, 23 nt, Human
gucuugucucagauuuuauuaug

SEQ ID NO: 2755559 - RNA, 21 nt, Human
aacucauuuuuguuuucauua

SEQ ID NO: 2755560 - RNA, 24 nt, Human
aacucauuuuuguuuucauuaucu

SEQ ID NO: 2755561 - RNA, 15 nt, Human
gugacuuuggauaau

SEQ ID NO: 2755562 - RNA, 12 nt, Human
gugacuuuggau

SEQ ID NO: 2755563 - RNA, 15 nt, Human
uagggagagaagaua

SEQ ID NO: 2755564 - RNA, 14 nt, Human
uagggagagaagau

SEQ ID NO: 2755565 - RNA, 18 nt, Human
uaggaaauauuuauuuua

SEQ ID NO: 2755566 - RNA, 19 nt, Human
uaggaaauauuuauuuuaa

SEQ ID NO: 2755567 - RNA, 23 nt, Human
acaauacaucccuuaccugggaa

SEQ ID NO: 2755568 - RNA, 13 nt, Human
acaagacugcaca

SEQ ID NO: 2755569 - RNA, 14 nt, Human
acaagacugcacau

SEQ ID NO: 2755570 - RNA, 21 nt, Human
uagcuagacuggugacugauu

SEQ ID NO: 2755571 - RNA, 22 nt, Human
uagcuagacuggugacugauuc

SEQ ID NO: 2755572 - RNA, 18 nt, Human
acaaaaggauaaugaaua

SEQ ID NO: 2755573 - RNA, 19 nt, Human
uagaggagaaacuggaacu

SEQ ID NO: 2755574 - RNA, 23 nt, Human
uagagauuuuuuuguuguuuguu

SEQ ID NO: 2755575 - RNA, 22 nt, Human
uagaggagaaacuggaacucuc

SEQ ID NO: 2755576 - RNA, 15 nt, Human
uagaugcaguucuga

SEQ ID NO: 2755577 - RNA, 20 nt, Human
acaagacccaaaaggcagaa

SEQ ID NO: 2755578 - RNA, 18 nt, Human
acaaauuuacagagacag

SEQ ID NO: 2755579 - RNA, 19 nt, Human
acaaauuuacagagacaga

SEQ ID NO: 2755580 - RNA, 22 nt, Human
uagugaaacucguuaauuugua

SEQ ID NO: 2755581 - RNA, 23 nt, Human
uaguguuggagaagaacugaaau

SEQ ID NO: 2755582 - RNA, 15 nt, Human
acacacucaaaucaa

SEQ ID NO: 2755583 - RNA, 18 nt, Human
acaaugcuguauuuuaaa

SEQ ID NO: 2755584 - RNA, 22 nt, Human
acaaugcuguauuuuaaaagaa

SEQ ID NO: 2755585 - RNA, 19 nt, Human
acacucaaaucaagaaacu

SEQ ID NO: 2755586 - RNA, 13 nt, Human
acacuaagagaga

SEQ ID NO: 2755587 - RNA, 18 nt, Human
acacucaaaucaagaaac

SEQ ID NO: 2755588 - RNA, 18 nt, Human
acacaugauccugcaauu

SEQ ID NO: 2755589 - RNA, 15 nt, Human
acacaugaaguccaa

SEQ ID NO: 2755590 - RNA, 15 nt, Human
acacaucagcuugcc

SEQ ID NO: 2755591 - RNA, 21 nt, Human
acaccauuaugugcgcugaua

SEQ ID NO: 2755592 - RNA, 17 nt, Human
acaccauuaugugcgcu

SEQ ID NO: 2755593 - RNA, 15 nt, Human
uauauuguuugcuaa

SEQ ID NO: 2755594 - RNA, 19 nt, Human
uauauuuacuaaaauggac

SEQ ID NO: 2755595 - RNA, 20 nt, Human
uauauuuacuaaaauggacu

SEQ ID NO: 2755596 - RNA, 21 nt, Human
uauauuuacuaaaauggacug

SEQ ID NO: 2755597 - RNA, 19 nt, Human
uauaauuuugugaagcaaa

SEQ ID NO: 2755598 - RNA, 16 nt, Human
acagccucuuagaugc

SEQ ID NO: 2755599 - RNA, 15 nt, Human
uaugcugaguuugug

SEQ ID NO: 2755600 - RNA, 19 nt, Human
uaugccccauucaacaucu

SEQ ID NO: 2755601 - RNA, 15 nt, Human
uaugccccauucaac

SEQ ID NO: 2755602 - RNA, 21 nt, Human
uaugauuaaguaaugauaacu

SEQ ID NO: 2755603 - RNA, 16 nt, Human
uaugauuaaguaauga

SEQ ID NO: 2755604 - RNA, 20 nt, Human
uaugauuaaguaaugauaac

SEQ ID NO: 2755605 - RNA, 21 nt, Human
uaugaaauauuauguuaaaac

SEQ ID NO: 2755606 - RNA, 20 nt, Human
acagggaggacgcucucugg

SEQ ID NO: 2755607 - RNA, 21 nt, Human
acagggaggacgcucucuggc

SEQ ID NO: 2755608 - RNA, 17 nt, Human
acagucaccucauggaa

SEQ ID NO: 2755609 - RNA, 18 nt, Human
acagucaccucauggaau

SEQ ID NO: 2755610 - RNA, 16 nt, Human
acagucaccucaugga

SEQ ID NO: 2755611 - RNA, 15 nt, Human
acaguauaauuaaca

SEQ ID NO: 2755612 - RNA, 20 nt, Human
acaguauaauuaacauguua

SEQ ID NO: 2755613 - RNA, 13 nt, Human
acaguauaauuaa

SEQ ID NO: 2755614 - RNA, 14 nt, Human
uauuacuguaagaa

SEQ ID NO: 2755615 - RNA, 15 nt, Human
uauucaaacagucuc

SEQ ID NO: 2755616 - RNA, 23 nt, Human
uauucaaacagucucaggaaauc

SEQ ID NO: 2755617 - RNA, 12 nt, Human
uauucaaaguug

SEQ ID NO: 2755618 - RNA, 13 nt, Human
uauucaaaguugc

SEQ ID NO: 2755619 - RNA, 16 nt, Human
uauucaaaguugccua

SEQ ID NO: 2755620 - RNA, 17 nt, Human
acaggaaguagaggagg

SEQ ID NO: 2755621 - RNA, 22 nt, Human
acaggaaccacaagacugcaca

SEQ ID NO: 2755622 - RNA, 21 nt, Human
uauguuuucaggcuagaugua

SEQ ID NO: 2755623 - RNA, 12 nt, Human
uaugugugaagu

SEQ ID NO: 2755624 - RNA, 14 nt, Human
uaugugugaaguga

SEQ ID NO: 2755625 - RNA, 16 nt, Human
uauuaaaacucauuuu

SEQ ID NO: 2755626 - RNA, 21 nt, Human
aauugacccacaagaaaugaa

SEQ ID NO: 2755627 - RNA, 22 nt, Human
aauugacccacaagaaaugaaa

SEQ ID NO: 2755628 - RNA, 13 nt, Human
uacuguaagaaaa

SEQ ID NO: 2755629 - RNA, 14 nt, Human
uacuguaagaaaau

SEQ ID NO: 2755630 - RNA, 14 nt, Human
uacuggauuguacu

SEQ ID NO: 2755631 - RNA, 22 nt, Human
aauuccacuuauaggaauugac

SEQ ID NO: 2755632 - RNA, 18 nt, Human
aauuccaagugauugaaa

SEQ ID NO: 2755633 - RNA, 16 nt, Human
aaugcuguauuuuaaa

SEQ ID NO: 2755634 - RNA, 16 nt, Human
aaugccaucaauaaaa

SEQ ID NO: 2755635 - RNA, 21 nt, Human
aaugccaucaauaaaaaauua

SEQ ID NO: 2755636 - RNA, 23 nt, Human
aaugccaucaauaaaaaauuaug

SEQ ID NO: 2755637 - RNA, 14 nt, Human
uacacuaagagaga

SEQ ID NO: 2755638 - RNA, 16 nt, Human
aauggacuguggugac

SEQ ID NO: 2755639 - RNA, 20 nt, Human
uacaucccuuaccugggaaa

SEQ ID NO: 2755640 - RNA, 18 nt, Human
uaccaccagucugacugu

SEQ ID NO: 2755641 - RNA, 19 nt, Human
aauuaacauguuaaaccau

SEQ ID NO: 2755642 - RNA, 20 nt, Human
aauuaacauguuaaaccaug

SEQ ID NO: 2755643 - RNA, 19 nt, Human
aaucuuauaauuuaaaaua

SEQ ID NO: 2755644 - RNA, 19 nt, Human
aaucuacacuccagugaga

SEQ ID NO: 2755645 - RNA, 20 nt, Human
aaucugugaacuugaaauuu

SEQ ID NO: 2755646 - RNA, 21 nt, Human
aaucugugaacuugaaauuug

SEQ ID NO: 2755647 - RNA, 22 nt, Human
aaucugugaacuugaaauuuga

SEQ ID NO: 2755648 - RNA, 19 nt, Human
uaaguaaugauaacuggaa

SEQ ID NO: 2755649 - RNA, 16 nt, Human
uaaggaaaaguuuaau

SEQ ID NO: 2755650 - RNA, 16 nt, Human
uaagcuuguauuccuu

SEQ ID NO: 2755651 - RNA, 12 nt, Human
aaucaugaauua

SEQ ID NO: 2755652 - RNA, 15 nt, Human
aaucaugaauuaguu

SEQ ID NO: 2755653 - RNA, 13 nt, Human
uaaucuuucacag

SEQ ID NO: 2755654 - RNA, 22 nt, Human
aaugaauggcuaagcaaaaugu

SEQ ID NO: 2755655 - RNA, 18 nt, Human
aauauuuauuuuaauaau

SEQ ID NO: 2755656 - RNA, 19 nt, Human
aauauuuauuuuaauaaug

SEQ ID NO: 2755657 - RNA, 15 nt, Human
aauauuuauuuuaau

SEQ ID NO: 2755658 - RNA, 21 nt, Human
aauaugccccauucaacaucu

SEQ ID NO: 2755659 - RNA, 24 nt, Human
aauaugccccauucaacaucuagu

SEQ ID NO: 2755660 - RNA, 22 nt, Human
aaucaggguuaguauuguccag

SEQ ID NO: 2755661 - RNA, 16 nt, Human
aaucaggguuaguauu

SEQ ID NO: 2755662 - RNA, 21 nt, Human
aaucaggguuaguauugucca

SEQ ID NO: 2755663 - RNA, 20 nt, Human
aauaucacuugucaauaaaa

SEQ ID NO: 2755664 - RNA, 22 nt, Human
aauaucacuugucaauaaaauc

SEQ ID NO: 2755665 - RNA, 12 nt, Human
uaacauaaaucu

SEQ ID NO: 2755666 - RNA, 16 nt, Human
aauagucaaauugugu

SEQ ID NO: 2755667 - RNA, 18 nt, Human
uaagaagugaaaaucuac

SEQ ID NO: 2755668 - RNA, 20 nt, Human
uaacgauaaaagacagugaa

SEQ ID NO: 2755669 - RNA, 14 nt, Human
accagucugacugu

SEQ ID NO: 2755670 - RNA, 23 nt, Human
accaguauuguacaaaguauuaa

SEQ ID NO: 2755671 - RNA, 23 nt, Human
ucacuugaacccgggaggcagag

SEQ ID NO: 2755672 - RNA, 14 nt, Human
accaguauuguaca

SEQ ID NO: 2755673 - RNA, 15 nt, Human
accaguauuguacaa

SEQ ID NO: 2755674 - RNA, 20 nt, Human
accaguauuguacaaaguau

SEQ ID NO: 2755675 - RNA, 22 nt, Human
accaguauuguacaaaguauua

SEQ ID NO: 2755676 - RNA, 12 nt, Human
ucaccucaugga

SEQ ID NO: 2755677 - RNA, 13 nt, Human
ucaccucauggaa

SEQ ID NO: 2755678 - RNA, 14 nt, Human
ucaccucauggaau

SEQ ID NO: 2755679 - RNA, 19 nt, Human
ucaccugucuugccuuuuu

SEQ ID NO: 2755680 - RNA, 20 nt, Human
ucaccugucuugccuuuuuc

SEQ ID NO: 2755681 - RNA, 21 nt, Human
ucacaacagauuauuaccuua

SEQ ID NO: 2755682 - RNA, 16 nt, Human
ucaauucuugccaaau

SEQ ID NO: 2755683 - RNA, 22 nt, Human
ucaauaucuuuuuuuuaauaaa

SEQ ID NO: 2755684 - RNA, 23 nt, Human
ucaaugaaugaaugaauggcuaa

SEQ ID NO: 2755685 - RNA, 15 nt, Human
ucaauauuucagaua

SEQ ID NO: 2755686 - RNA, 19 nt, Human
ucaauauuucagauaauca

SEQ ID NO: 2755687 - RNA, 23 nt, Human
accaaaaaucucaauauuucaga

SEQ ID NO: 2755688 - RNA, 18 nt, Human
ucaaauugugugaaaggu

SEQ ID NO: 2755689 - RNA, 15 nt, Human
ucaaauugugugaaa

SEQ ID NO: 2755690 - RNA, 23 nt, Human
acaugagguacugagagugaaca

SEQ ID NO: 2755691 - RNA, 16 nt, Human
acaugagguacugaga

SEQ ID NO: 2755692 - RNA, 20 nt, Human
acaugagguacugagaguga

SEQ ID NO: 2755693 - RNA, 16 nt, Human
acaugaaguccaagca

SEQ ID NO: 2755694 - RNA, 21 nt, Human
acaugggacauuugcucaugg

SEQ ID NO: 2755695 - RNA, 15 nt, Human
acaugggacauuugc

SEQ ID NO: 2755696 - RNA, 20 nt, Human
acaugggacauuugcucaug

SEQ ID NO: 2755697 - RNA, 11 nt, Human
acaugggacau

SEQ ID NO: 2755698 - RNA, 14 nt, Human
acaugggacauuug

SEQ ID NO: 2755699 - RNA, 17 nt, Human
ucaguuuuugugaaaag

SEQ ID NO: 2755700 - RNA, 15 nt, Human
ucaguuuuugugaaa

SEQ ID NO: 2755701 - RNA, 15 nt, Human
acccgggaggcagag

SEQ ID NO: 2755702 - RNA, 17 nt, Human
acccgggaggcagaggu

SEQ ID NO: 2755703 - RNA, 23 nt, Human
ucagauuuuauuauguaaauccc

SEQ ID NO: 2755704 - RNA, 22 nt, Human
ucagauuuuauuauguaaaucc

SEQ ID NO: 2755705 - RNA, 19 nt, Human
ucagcaaaaauauuuuaug

SEQ ID NO: 2755706 - RNA, 20 nt, Human
ucagcaaaaauauuuuauga

SEQ ID NO: 2755707 - RNA, 19 nt, Human
acuccagugagacagcucu

SEQ ID NO: 2755708 - RNA, 21 nt, Human
acucuuaagaagacugcauua

SEQ ID NO: 2755709 - RNA, 16 nt, Human
uccuggaaaucagggu

SEQ ID NO: 2755710 - RNA, 17 nt, Human
acugagaugugaacaca

SEQ ID NO: 2755711 - RNA, 22 nt, Human
acugagaugugaacacaucagc

SEQ ID NO: 2755712 - RNA, 18 nt, Human
acugagagugaacaaauu

SEQ ID NO: 2755713 - RNA, 22 nt, Human
acugacuucuaaguaaaaccac

SEQ ID NO: 2755714 - RNA, 16 nt, Human
acugacuucuaaguaa

SEQ ID NO: 2755715 - RNA, 15 nt, Human
acugacuucuaagua

SEQ ID NO: 2755716 - RNA, 13 nt, Human
acugacuucuaag

SEQ ID NO: 2755717 - RNA, 17 nt, Human
acugacucuuaagaaga

SEQ ID NO: 2755718 - RNA, 18 nt, Human
acugacucuuaagaagac

SEQ ID NO: 2755719 - RNA, 20 nt, Human
acugacucuuaagaagacug

SEQ ID NO: 2755720 - RNA, 13 nt, Human
acugacucuuaag

SEQ ID NO: 2755721 - RNA, 14 nt, Human
acugacucuuaaga

SEQ ID NO: 2755722 - RNA, 15 nt, Human
acugacucuuaagaa

SEQ ID NO: 2755723 - RNA, 16 nt, Human
acugacucuuaagaag

SEQ ID NO: 2755724 - RNA, 12 nt, Human
acugaagaagca

SEQ ID NO: 2755725 - RNA, 22 nt, Human
uccugaaaacccuugccaugug

SEQ ID NO: 2755726 - RNA, 19 nt, Human
accuugaaaacuuuaugcu

SEQ ID NO: 2755727 - RNA, 22 nt, Human
uccacugguucuucuuggucuc

SEQ ID NO: 2755728 - RNA, 20 nt, Human
accuuuuggucuggagggaa

SEQ ID NO: 2755729 - RNA, 11 nt, Human
acgcucucugg

SEQ ID NO: 2755730 - RNA, 18 nt, Human
uccagugagacagcucug

SEQ ID NO: 2755731 - RNA, 13 nt, Human
acggaugauuucu

SEQ ID NO: 2755732 - RNA, 11 nt, Human
uccauccugag

SEQ ID NO: 2755733 - RNA, 12 nt, Human
uccauccugagg

SEQ ID NO: 2755734 - RNA, 15 nt, Human
uccauccugaggcuc

SEQ ID NO: 2755735 - RNA, 16 nt, Human
acggugaauggcuuug

SEQ ID NO: 2755736 - RNA, 19 nt, Human
acggugaauggcuuuguau

SEQ ID NO: 2755737 - RNA, 20 nt, Human
acggugaauggcuuuguaua

SEQ ID NO: 2755738 - RNA, 15 nt, Human
acuaauuuuaaaaug

SEQ ID NO: 2755739 - RNA, 16 nt, Human
acuaucucauuuccaa

SEQ ID NO: 2755740 - RNA, 17 nt, Human
acuaucucauuuccaag

SEQ ID NO: 2755741 - RNA, 15 nt, Human
acuaucucauuucca

SEQ ID NO: 2755742 - RNA, 22 nt, Human
acuauauuguuugcuaagcauu

SEQ ID NO: 2755743 - RNA, 17 nt, Human
acuauauuguuugcuaa

SEQ ID NO: 2755744 - RNA, 12 nt, Human
acucaauuuuaa

SEQ ID NO: 2755745 - RNA, 15 nt, Human
acucaauuuuaacaa

SEQ ID NO: 2755746 - RNA, 23 nt, Human
ucucaggaaaucaaauaugcaaa

SEQ ID NO: 2755747 - RNA, 21 nt, Human
ucucaggaaaucaaauaugca

SEQ ID NO: 2755748 - RNA, 14 nt, Human
ucucaggaaaucaa

SEQ ID NO: 2755749 - RNA, 12 nt, Human
ucucaggaaauc

SEQ ID NO: 2755750 - RNA, 22 nt, Human
ucucagauuuuauuauguaaau

SEQ ID NO: 2755751 - RNA, 23 nt, Human
ucucagauuuuauuauguaaauc

SEQ ID NO: 2755752 - RNA, 15 nt, Human
ucucauuuccaagca

SEQ ID NO: 2755753 - RNA, 15 nt, Human
acuugucaauaaaau

SEQ ID NO: 2755754 - RNA, 13 nt, Human
acuuguguaaaua

SEQ ID NO: 2755755 - RNA, 17 nt, Human
acuuuggauaauaagga

SEQ ID NO: 2755756 - RNA, 19 nt, Human
acuuuggauaauaaggaaa

SEQ ID NO: 2755757 - RNA, 12 nt, Human
acuuuggauaau

SEQ ID NO: 2755758 - RNA, 16 nt, Human
ucuaggaaauauuuau

SEQ ID NO: 2755759 - RNA, 17 nt, Human
ucuaggaaauauuuauu

SEQ ID NO: 2755760 - RNA, 12 nt, Human
uccugggcagcu

SEQ ID NO: 2755761 - RNA, 13 nt, Human
uccugggcagcug

SEQ ID NO: 2755762 - RNA, 19 nt, Human
ucuaaguaaaaccacagca

SEQ ID NO: 2755763 - RNA, 15 nt, Human
ucuaaguaaaaccac

SEQ ID NO: 2755764 - RNA, 14 nt, Human
ucuaaguaaaacca

SEQ ID NO: 2755765 - RNA, 15 nt, Human
agaauuaacacauga

SEQ ID NO: 2755766 - RNA, 21 nt, Human
agaaugguccgugcuaaggac

SEQ ID NO: 2755767 - RNA, 23 nt, Human
agaaugguccgugcuaaggacuu

SEQ ID NO: 2755768 - RNA, 23 nt, Human
ucugugagaugcuagaacucccu

SEQ ID NO: 2755769 - RNA, 17 nt, Human
ucugugagaugcuagaa

SEQ ID NO: 2755770 - RNA, 22 nt, Human
ucugugagaugcuagaacuccc

SEQ ID NO: 2755771 - RNA, 14 nt, Human
ucugugagaugcua

SEQ ID NO: 2755772 - RNA, 18 nt, Human
ucugugaacuugaaauuu

SEQ ID NO: 2755773 - RNA, 14 nt, Human
ucugugaacuugaa

SEQ ID NO: 2755774 - RNA, 17 nt, Human
ucugugaacuugaaauu

SEQ ID NO: 2755775 - RNA, 12 nt, Human
agaauucuguau

SEQ ID NO: 2755776 - RNA, 14 nt, Human
agaauucuguauag

SEQ ID NO: 2755777 - RNA, 12 nt, Human
agacacacauga

SEQ ID NO: 2755778 - RNA, 18 nt, Human
ucugcagauaaacaguag

SEQ ID NO: 2755779 - RNA, 15 nt, Human
ucugcagauaaacag

SEQ ID NO: 2755780 - RNA, 14 nt, Human
ucugauccaguuuu

SEQ ID NO: 2755781 - RNA, 21 nt, Human
ucugauccaguuuuguuugga

SEQ ID NO: 2755782 - RNA, 11 nt, Human
ucugauccagu

SEQ ID NO: 2755783 - RNA, 14 nt, Human
agaaaugaaagcag

SEQ ID NO: 2755784 - RNA, 13 nt, Human
agaagaacugaaa

SEQ ID NO: 2755785 - RNA, 14 nt, Human
agaagaacugaaau

SEQ ID NO: 2755786 - RNA, 18 nt, Human
agaagaugguaccaccag

SEQ ID NO: 2755787 - RNA, 16 nt, Human
ucugcuugccaucccu

SEQ ID NO: 2755788 - RNA, 17 nt, Human
ucugcuugccaucccuc

SEQ ID NO: 2755789 - RNA, 20 nt, Human
ucugcuugccaucccucccu

SEQ ID NO: 2755790 - RNA, 23 nt, Human
ucugcuugccaucccucccucca

SEQ ID NO: 2755791 - RNA, 14 nt, Human
ucugcuugccaucc

SEQ ID NO: 2755792 - RNA, 13 nt, Human
agauccuggaaau

SEQ ID NO: 2755793 - RNA, 21 nt, Human
agaugcuagaacucccuuuca

SEQ ID NO: 2755794 - RNA, 15 nt, Human
agaugcuagaacucc

SEQ ID NO: 2755795 - RNA, 19 nt, Human
agaugcuagaacucccuuu

SEQ ID NO: 2755796 - RNA, 21 nt, Human
agaugcaguucugaagaagau

SEQ ID NO: 2755797 - RNA, 20 nt, Human
agaugcaguucugaagaaga

SEQ ID NO: 2755798 - RNA, 15 nt, Human
ugacacuuaaaaaug

SEQ ID NO: 2755799 - RNA, 22 nt, Human
agauguauguacuucaugcugu

SEQ ID NO: 2755800 - RNA, 17 nt, Human
agaugugaacacaucag

SEQ ID NO: 2755801 - RNA, 22 nt, Human
agaugugaacacaucagcuugc

SEQ ID NO: 2755802 - RNA, 21 nt, Human
agauugugccccugcacucca

SEQ ID NO: 2755803 - RNA, 15 nt, Human
agauuagaauucugu

SEQ ID NO: 2755804 - RNA, 16 nt, Human
agauuagaauucugua

SEQ ID NO: 2755805 - RNA, 22 nt, Human
agauuagaauucuguauagauu

SEQ ID NO: 2755806 - RNA, 23 nt, Human
agauuagaauucuguauagauua

SEQ ID NO: 2755807 - RNA, 21 nt, Human
agauuagagaguguugaaacg

SEQ ID NO: 2755808 - RNA, 16 nt, Human
agcaagggugauggga

SEQ ID NO: 2755809 - RNA, 22 nt, Human
agcaagggugaugggaaagcau

SEQ ID NO: 2755810 - RNA, 20 nt, Human
agcaagggugaugggaaagc

SEQ ID NO: 2755811 - RNA, 16 nt, Human
agauuuuccugaaaac

SEQ ID NO: 2755812 - RNA, 15 nt, Human
agauuuuccugaaaa

SEQ ID NO: 2755813 - RNA, 14 nt, Human
agauuuuccugaaa

SEQ ID NO: 2755814 - RNA, 20 nt, Human
ugagacucugucucagucca

SEQ ID NO: 2755815 - RNA, 12 nt, Human
ugagacagcucu

SEQ ID NO: 2755816 - RNA, 16 nt, Human
ugagagacacacugaa

SEQ ID NO: 2755817 - RNA, 17 nt, Human
ugagagacacacugaag

SEQ ID NO: 2755818 - RNA, 19 nt, Human
ugagagacacacugaagaa

SEQ ID NO: 2755819 - RNA, 20 nt, Human
ugagagacacacugaagaag

SEQ ID NO: 2755820 - RNA, 21 nt, Human
ugagagacacacugaagaagc

SEQ ID NO: 2755821 - RNA, 22 nt, Human
ugagagacacacugaagaagca

SEQ ID NO: 2755822 - RNA, 13 nt, Human
ugagaugugaaca

SEQ ID NO: 2755823 - RNA, 19 nt, Human
ugagaugugaacacaucag

SEQ ID NO: 2755824 - RNA, 18 nt, Human
ugagaugugaacacauca

SEQ ID NO: 2755825 - RNA, 24 nt, Human
ugagaugugaacacaucagcuugc

SEQ ID NO: 2755826 - RNA, 13 nt, Human
ugaaagaaaauaa

SEQ ID NO: 2755827 - RNA, 22 nt, Human
ugaaaauauuuguaucacaaau

SEQ ID NO: 2755828 - RNA, 21 nt, Human
ugaaaauauuuguaucacaaa

SEQ ID NO: 2755829 - RNA, 20 nt, Human
ugaaaaucuuauaauuuaaa

SEQ ID NO: 2755830 - RNA, 17 nt, Human
ugaaaauauuuguauca

SEQ ID NO: 2755831 - RNA, 18 nt, Human
ugaaagaggaaugaagua

SEQ ID NO: 2755832 - RNA, 17 nt, Human
ugaaagaggaaugaagu

SEQ ID NO: 2755833 - RNA, 16 nt, Human
agagaguguugaaacg

SEQ ID NO: 2755834 - RNA, 15 nt, Human
agagaguguugaaac

SEQ ID NO: 2755835 - RNA, 14 nt, Human
agagacagaaagca

SEQ ID NO: 2755836 - RNA, 16 nt, Human
agagacacacugaaga

SEQ ID NO: 2755837 - RNA, 17 nt, Human
ucuuugucuacaccauu

SEQ ID NO: 2755838 - RNA, 19 nt, Human
agacuggugacugauucuu

SEQ ID NO: 2755839 - RNA, 20 nt, Human
agacuggugacugauucuuc

SEQ ID NO: 2755840 - RNA, 21 nt, Human
agacuggugacugauucuuca

SEQ ID NO: 2755841 - RNA, 22 nt, Human
agacuccaaagaaauguaaggg

SEQ ID NO: 2755842 - RNA, 21 nt, Human
agacuggcacaguuuucugag

SEQ ID NO: 2755843 - RNA, 20 nt, Human
agacuggcacaguuuucuga

SEQ ID NO: 2755844 - RNA, 23 nt, Human
agacuggcacaguuuucugagaa

SEQ ID NO: 2755845 - RNA, 18 nt, Human
agagcuguucacagccag

SEQ ID NO: 2755846 - RNA, 17 nt, Human
ugaagauuuaccacuug

SEQ ID NO: 2755847 - RNA, 20 nt, Human
ugaagauuuaccacuugugu

SEQ ID NO: 2755848 - RNA, 17 nt, Human
ugaaguacucauacaug

SEQ ID NO: 2755849 - RNA, 22 nt, Human
ugaagaagcaccaaucaugaau

SEQ ID NO: 2755850 - RNA, 22 nt, Human
ugaacccauauuuguacaccaa

SEQ ID NO: 2755851 - RNA, 18 nt, Human
ugaacccgggaggcagag

SEQ ID NO: 2755852 - RNA, 13 nt, Human
ugaacaaauuuac

SEQ ID NO: 2755853 - RNA, 16 nt, Human
agagcugcccucuccu

SEQ ID NO: 2755854 - RNA, 17 nt, Human
agagcugcccucuccug

SEQ ID NO: 2755855 - RNA, 18 nt, Human
agagcugcccucuccugg

SEQ ID NO: 2755856 - RNA, 19 nt, Human
agagcugcccucuccuggg

SEQ ID NO: 2755857 - RNA, 20 nt, Human
agagcugcccucuccugggc

SEQ ID NO: 2755858 - RNA, 14 nt, Human
ugaaauaagccaga

SEQ ID NO: 2755859 - RNA, 13 nt, Human
ugaaauuguaauu

SEQ ID NO: 2755860 - RNA, 14 nt, Human
ugaaauuguaauua

SEQ ID NO: 2755861 - RNA, 15 nt, Human
ugaaauuguaauuau

SEQ ID NO: 2755862 - RNA, 16 nt, Human
ugaaauuguaauuaua

SEQ ID NO: 2755863 - RNA, 19 nt, Human
ugaaauuguaauuauaucu

SEQ ID NO: 2755864 - RNA, 17 nt, Human
uguaagaaaauaucacu

SEQ ID NO: 2755865 - RNA, 18 nt, Human
uguaagaaaauaucacuu

SEQ ID NO: 2755866 - RNA, 14 nt, Human
uguacaaaguauua

SEQ ID NO: 2755867 - RNA, 13 nt, Human
uguacaaaguauu

SEQ ID NO: 2755868 - RNA, 16 nt, Human
uguaaauacaauuuug

SEQ ID NO: 2755869 - RNA, 17 nt, Human
uguaaauacaauuuugu

SEQ ID NO: 2755870 - RNA, 18 nt, Human
uguaaauacaauuuuguu

SEQ ID NO: 2755871 - RNA, 19 nt, Human
uguaaauacaauuuuguuu

SEQ ID NO: 2755872 - RNA, 21 nt, Human
uguaaauacaauuuuguuucu

SEQ ID NO: 2755873 - RNA, 10 nt, Human
uguaaauccc

SEQ ID NO: 2755874 - RNA, 23 nt, Human
uggugugaccacugcagaagaca

SEQ ID NO: 2755875 - RNA, 22 nt, Human
agggugaugggaaagcauugua

SEQ ID NO: 2755876 - RNA, 21 nt, Human
agggugaugggaaagcauugu

SEQ ID NO: 2755877 - RNA, 16 nt, Human
aggggaauugaggaca

SEQ ID NO: 2755878 - RNA, 22 nt, Human
ugguccaugggccauaugaaaa

SEQ ID NO: 2755879 - RNA, 22 nt, Human
uggucugugagaugcuagaacu

SEQ ID NO: 2755880 - RNA, 17 nt, Human
aggguuaugauuaagua

SEQ ID NO: 2755881 - RNA, 20 nt, Human
aggguuuauguuuaggaugu

SEQ ID NO: 2755882 - RNA, 15 nt, Human
aggucagugcaaaua

SEQ ID NO: 2755883 - RNA, 22 nt, Human
ugugagaugcuagaacucccuu

SEQ ID NO: 2755884 - RNA, 14 nt, Human
ugugaagcaaaauu

SEQ ID NO: 2755885 - RNA, 17 nt, Human
agugaaagaaaauaaca

SEQ ID NO: 2755886 - RNA, 16 nt, Human
agugaaagaggcagcu

SEQ ID NO: 2755887 - RNA, 14 nt, Human
agugagacagcucu

SEQ ID NO: 2755888 - RNA, 22 nt, Human
agugaaagaggcagcuugaaac

SEQ ID NO: 2755889 - RNA, 21 nt, Human
agugagcagucaggaaagaga

SEQ ID NO: 2755890 - RNA, 16 nt, Human
agugagccgagauugu

SEQ ID NO: 2755891 - RNA, 14 nt, Human
ugucuucacaacag

SEQ ID NO: 2755892 - RNA, 15 nt, Human
ugucuugccuuuuuc

SEQ ID NO: 2755893 - RNA, 16 nt, Human
ugucuugccuuuuuca

SEQ ID NO: 2755894 - RNA, 17 nt, Human
ugucuugccuuuuucau

SEQ ID NO: 2755895 - RNA, 21 nt, Human
ugucuugccuuuuucauuauu

SEQ ID NO: 2755896 - RNA, 17 nt, Human
ugucucuacuaaaaaua

SEQ ID NO: 2755897 - RNA, 14 nt, Human
ugucuuaauuaaaa

SEQ ID NO: 2755898 - RNA, 12 nt, Human
ugucuuaauuaa

SEQ ID NO: 2755899 - RNA, 21 nt, Human
aguauuagaauaccacaggaa

SEQ ID NO: 2755900 - RNA, 18 nt, Human
aguauguuagugcaaauu

SEQ ID NO: 2755901 - RNA, 21 nt, Human
aguauguuagugcaaauuguc

SEQ ID NO: 2755902 - RNA, 15 nt, Human
aguauuguacaaagu

SEQ ID NO: 2755903 - RNA, 20 nt, Human
aguauuguacaaaguauuaa

SEQ ID NO: 2755904 - RNA, 22 nt, Human
aguauuguacaaaguauuaagc

SEQ ID NO: 2755905 - RNA, 23 nt, Human
aguauuguacaaaguauuaagca

SEQ ID NO: 2755906 - RNA, 11 nt, Human
aguauuguaca

SEQ ID NO: 2755907 - RNA, 20 nt, Human
agucacauuccaagccucau

SEQ ID NO: 2755908 - RNA, 15 nt, Human
aguauuguccagguc

SEQ ID NO: 2755909 - RNA, 16 nt, Human
aguauuguccaggucu

SEQ ID NO: 2755910 - RNA, 12 nt, Human
uguaugugugaa

SEQ ID NO: 2755911 - RNA, 23 nt, Human
ugucagcuccccucggagaagag

SEQ ID NO: 2755912 - RNA, 21 nt, Human
ugucagcuccccucggagaag

SEQ ID NO: 2755913 - RNA, 20 nt, Human
ugucagcuccccucggagaa

SEQ ID NO: 2755914 - RNA, 23 nt, Human
agucagaucugccuaaggacuuc

SEQ ID NO: 2755915 - RNA, 21 nt, Human
agucagaucugccuaaggacu

SEQ ID NO: 2755916 - RNA, 22 nt, Human
agucagaucugccuaaggacuu

SEQ ID NO: 2755917 - RNA, 20 nt, Human
agucagaucugccuaaggac

SEQ ID NO: 2755918 - RNA, 17 nt, Human
agucagaucugccuaag

SEQ ID NO: 2755919 - RNA, 23 nt, Human
uuagaugcaguucugaagaagau

SEQ ID NO: 2755920 - RNA, 22 nt, Human
uuagaugcaguucugaagaaga

SEQ ID NO: 2755921 - RNA, 14 nt, Human
auaaugaauacuuu

SEQ ID NO: 2755922 - RNA, 17 nt, Human
auaauuauaugcuauuu

SEQ ID NO: 2755923 - RNA, 19 nt, Human
auaauuauaugcuauuucu

SEQ ID NO: 2755924 - RNA, 21 nt, Human
auaauuauaugcuauuucuau

SEQ ID NO: 2755925 - RNA, 23 nt, Human
auaauuauaugcuauuucuauau

SEQ ID NO: 2755926 - RNA, 21 nt, Human
auaaucuuucacaggggacag

SEQ ID NO: 2755927 - RNA, 17 nt, Human
auaauaaggaaaaguuu

SEQ ID NO: 2755928 - RNA, 18 nt, Human
auaauaaggaaaaguuua

SEQ ID NO: 2755929 - RNA, 19 nt, Human
auaauaaggaaaaguuuaa

SEQ ID NO: 2755930 - RNA, 22 nt, Human
auaauaaggaaaaguuuaauau

SEQ ID NO: 2755931 - RNA, 16 nt, Human
auaauaaggaaaaguu

SEQ ID NO: 2755932 - RNA, 12 nt, Human
auaacuggaaac

SEQ ID NO: 2755933 - RNA, 19 nt, Human
auaaaugugccuucauuuu

SEQ ID NO: 2755934 - RNA, 17 nt, Human
aguuuucugagaaagac

SEQ ID NO: 2755935 - RNA, 14 nt, Human
aguuuucugagaaa

SEQ ID NO: 2755936 - RNA, 13 nt, Human
aguuuucugagaa

SEQ ID NO: 2755937 - RNA, 12 nt, Human
aguuuucugaga

SEQ ID NO: 2755938 - RNA, 18 nt, Human
uuauauaagcuuguauuc

SEQ ID NO: 2755939 - RNA, 14 nt, Human
auaauuuuuauauu

SEQ ID NO: 2755940 - RNA, 16 nt, Human
auaauuuuuauauuug

SEQ ID NO: 2755941 - RNA, 19 nt, Human
auaauuuuuauauuugaaa

SEQ ID NO: 2755942 - RNA, 13 nt, Human
auaauuuugugaa

SEQ ID NO: 2755943 - RNA, 14 nt, Human
auaauuuugugaag

SEQ ID NO: 2755944 - RNA, 15 nt, Human
auaauuuugugaagc

SEQ ID NO: 2755945 - RNA, 20 nt, Human
auaauuuugugaagcaaaau

SEQ ID NO: 2755946 - RNA, 22 nt, Human
auacaaaaaaaaaaaaaaauua

SEQ ID NO: 2755947 - RNA, 21 nt, Human
auaauuuuuauauuugaaaua

SEQ ID NO: 2755948 - RNA, 22 nt, Human
auaauuuuuauauuugaaauau

SEQ ID NO: 2755949 - RNA, 20 nt, Human
auacaucccuuaccugggaa

SEQ ID NO: 2755950 - RNA, 21 nt, Human
auacaguucggugagcuacaa

SEQ ID NO: 2755951 - RNA, 20 nt, Human
aguucggugagcuacaaaug

SEQ ID NO: 2755952 - RNA, 14 nt, Human
aguucagagcugcc

SEQ ID NO: 2755953 - RNA, 15 nt, Human
aguucagagcugccc

SEQ ID NO: 2755954 - RNA, 16 nt, Human
aguucagagcugcccu

SEQ ID NO: 2755955 - RNA, 17 nt, Human
aguucagagcugcccuc

SEQ ID NO: 2755956 - RNA, 18 nt, Human
aguucagagcugcccucu

SEQ ID NO: 2755957 - RNA, 21 nt, Human
uguuguacucaauuuuaacaa

SEQ ID NO: 2755958 - RNA, 19 nt, Human
aguuauggcuauaggugcu

SEQ ID NO: 2755959 - RNA, 20 nt, Human
aguuauuauauuuacaaaug

SEQ ID NO: 2755960 - RNA, 15 nt, Human
uuaaaaaagaaacau

SEQ ID NO: 2755961 - RNA, 18 nt, Human
uuaaaaaagaaacauuug

SEQ ID NO: 2755962 - RNA, 22 nt, Human
aguugcauagguuuaauaauuu

SEQ ID NO: 2755963 - RNA, 20 nt, Human
uuaaaaaugguuuaaauggu

SEQ ID NO: 2755964 - RNA, 15 nt, Human
aguucugaagaagau

SEQ ID NO: 2755965 - RNA, 13 nt, Human
aguucugaagaag

SEQ ID NO: 2755966 - RNA, 14 nt, Human
aguucugaagaaga

SEQ ID NO: 2755967 - RNA, 21 nt, Human
aguugauaugccuuuucccaa

SEQ ID NO: 2755968 - RNA, 13 nt, Human
uguuuuauaauuu

SEQ ID NO: 2755969 - RNA, 20 nt, Human
uguuuuauaauuuugugaag

SEQ ID NO: 2755970 - RNA, 15 nt, Human
uguuugcuaagcauu

SEQ ID NO: 2755971 - RNA, 19 nt, Human
uguuugcuaagcauuccaa

SEQ ID NO: 2755972 - RNA, 18 nt, Human
ugccucagaaaacaagga

SEQ ID NO: 2755973 - RNA, 16 nt, Human
ugccuccccuccucug

SEQ ID NO: 2755974 - RNA, 12 nt, Human
ugccuccccucc

SEQ ID NO: 2755975 - RNA, 13 nt, Human
ugccuccccuccu

SEQ ID NO: 2755976 - RNA, 14 nt, Human
ugccuccccuccuc

SEQ ID NO: 2755977 - RNA, 15 nt, Human
ugccuccccuccucu

SEQ ID NO: 2755978 - RNA, 11 nt, Human
ugccuccccuc

SEQ ID NO: 2755979 - RNA, 15 nt, Human
ugccucaccccuugc

SEQ ID NO: 2755980 - RNA, 21 nt, Human
agcugcccucuccugggcagc

SEQ ID NO: 2755981 - RNA, 19 nt, Human
agcugcccucuccugggca

SEQ ID NO: 2755982 - RNA, 20 nt, Human
agcugcccucuccugggcag

SEQ ID NO: 2755983 - RNA, 17 nt, Human
agcugcccucuccuggg

SEQ ID NO: 2755984 - RNA, 18 nt, Human
agcugcccucuccugggc

SEQ ID NO: 2755985 - RNA, 16 nt, Human
agcugcccucuccugg

SEQ ID NO: 2755986 - RNA, 23 nt, Human
agcucugcccauccugccccuga

SEQ ID NO: 2755987 - RNA, 22 nt, Human
ugcccucuccugggcagcugcc

SEQ ID NO: 2755988 - RNA, 23 nt, Human
ugcccucuccugggcagcugccu

SEQ ID NO: 2755989 - RNA, 16 nt, Human
ugcccucuccugggca

SEQ ID NO: 2755990 - RNA, 17 nt, Human
ugcccucuccugggcag

SEQ ID NO: 2755991 - RNA, 18 nt, Human
ugcccucuccugggcagc

SEQ ID NO: 2755992 - RNA, 20 nt, Human
ugcccucuccugggcagcug

SEQ ID NO: 2755993 - RNA, 13 nt, Human
ugcccucuccugg

SEQ ID NO: 2755994 - RNA, 14 nt, Human
ugcccucuccuggg

SEQ ID NO: 2755995 - RNA, 15 nt, Human
ugcccucuccugggc

SEQ ID NO: 2755996 - RNA, 12 nt, Human
ugcccucuccug

SEQ ID NO: 2755997 - RNA, 22 nt, Human
ugccauuuaaagcuuauuaaaa

SEQ ID NO: 2755998 - RNA, 19 nt, Human
agcuauggugucauaggcu

SEQ ID NO: 2755999 - RNA, 16 nt, Human
ugccccauucaacauc

SEQ ID NO: 2756000 - RNA, 14 nt, Human
ugcagaagacagua

SEQ ID NO: 2756001 - RNA, 15 nt, Human
ugcagaagacaguau

SEQ ID NO: 2756002 - RNA, 12 nt, Human
ugauuucuaugc

SEQ ID NO: 2756003 - RNA, 15 nt, Human
ugauuucuaugcuga

SEQ ID NO: 2756004 - RNA, 16 nt, Human
ugauuucuaugcugag

SEQ ID NO: 2756005 - RNA, 19 nt, Human
ugaugggaaagcauuguaa

SEQ ID NO: 2756006 - RNA, 14 nt, Human
ugaugggaaagcau

SEQ ID NO: 2756007 - RNA, 11 nt, Human
ugaugaagaag

SEQ ID NO: 2756008 - RNA, 12 nt, Human
ugaugaagaagu

SEQ ID NO: 2756009 - RNA, 23 nt, Human
ugauuaaguaaugauaacuggaa

SEQ ID NO: 2756010 - RNA, 18 nt, Human
ugauuaaguaaugauaac

SEQ ID NO: 2756011 - RNA, 15 nt, Human
agccagcaguucaga

SEQ ID NO: 2756012 - RNA, 17 nt, Human
agccagcaguucagagc

SEQ ID NO: 2756013 - RNA, 19 nt, Human
agccagcaguucagagcug

SEQ ID NO: 2756014 - RNA, 22 nt, Human
agccagcaguucagagcugccc

SEQ ID NO: 2756015 - RNA, 20 nt, Human
agccagcaguucagagcugc

SEQ ID NO: 2756016 - RNA, 21 nt, Human
agccagcaguucagagcugcc

SEQ ID NO: 2756017 - RNA, 18 nt, Human
uggaauuggagcucgugg

SEQ ID NO: 2756018 - RNA, 22 nt, Human
uggaauuucucccagucauuua

SEQ ID NO: 2756019 - RNA, 16 nt, Human
ugcuugccaucccucc

SEQ ID NO: 2756020 - RNA, 15 nt, Human
ugcuugccaucccuc

SEQ ID NO: 2756021 - RNA, 11 nt, Human
aggagaaacug

SEQ ID NO: 2756022 - RNA, 17 nt, Human
aggacuuguuagaucua

SEQ ID NO: 2756023 - RNA, 14 nt, Human
aggacuuguuagau

SEQ ID NO: 2756024 - RNA, 16 nt, Human
aggacuuguuagaucu

SEQ ID NO: 2756025 - RNA, 14 nt, Human
aggacacugauaug

SEQ ID NO: 2756026 - RNA, 23 nt, Human
aggacagcccuucuuuccacaga

SEQ ID NO: 2756027 - RNA, 13 nt, Human
ugcuggagcucug

SEQ ID NO: 2756028 - RNA, 14 nt, Human
ugcuggagcucugc

SEQ ID NO: 2756029 - RNA, 23 nt, Human
ugcuguauuuuaaaagaaugauu

SEQ ID NO: 2756030 - RNA, 23 nt, Human
aggaauugacccacaagaaauga

SEQ ID NO: 2756031 - RNA, 11 nt, Human
aggaauuuaaa

SEQ ID NO: 2756032 - RNA, 14 nt, Human
ugcuauuucuauau

SEQ ID NO: 2756033 - RNA, 20 nt, Human
ugcuauuucuauauuuucau

SEQ ID NO: 2756034 - RNA, 12 nt, Human
ugcuauuucuau

SEQ ID NO: 2756035 - RNA, 13 nt, Human
ugcuauuucuaua

SEQ ID NO: 2756036 - RNA, 21 nt, Human
ugggaaagcauuguaaaugug

SEQ ID NO: 2756037 - RNA, 18 nt, Human
uggacgagaaaacaauaa

SEQ ID NO: 2756038 - RNA, 20 nt, Human
uggcacaguuuucugagaaa

SEQ ID NO: 2756039 - RNA, 22 nt, Human
uggcacaguuuucugagaaaga

SEQ ID NO: 2756040 - RNA, 16 nt, Human
auccugcaauuccacu

SEQ ID NO: 2756041 - RNA, 22 nt, Human
auccugaggcuccacuuggucu

SEQ ID NO: 2756042 - RNA, 13 nt, Human
auccugccccuga

SEQ ID NO: 2756043 - RNA, 11 nt, Human
auccugaggcu

SEQ ID NO: 2756044 - RNA, 13 nt, Human
auccugaggcucc

SEQ ID NO: 2756045 - RNA, 16 nt, Human
auccugaggcuccacu

SEQ ID NO: 2756046 - RNA, 18 nt, Human
auccugaggcuccacuug

SEQ ID NO: 2756047 - RNA, 17 nt, Human
uugacacuuaaaaaugg

SEQ ID NO: 2756048 - RNA, 19 nt, Human
uugacacuuaaaaaugguu

SEQ ID NO: 2756049 - RNA, 14 nt, Human
uugacauagucugg

SEQ ID NO: 2756050 - RNA, 17 nt, Human
uugacauagucuggcug

SEQ ID NO: 2756051 - RNA, 14 nt, Human
aucccucccuccac

SEQ ID NO: 2756052 - RNA, 16 nt, Human
aucccucccuccaccu

SEQ ID NO: 2756053 - RNA, 17 nt, Human
aucccucccuccaccuc

SEQ ID NO: 2756054 - RNA, 18 nt, Human
aucccucccuccaccucc

SEQ ID NO: 2756055 - RNA, 20 nt, Human
aucccucccuccaccucccu

SEQ ID NO: 2756056 - RNA, 21 nt, Human
aucccucccuccaccucccug

SEQ ID NO: 2756057 - RNA, 16 nt, Human
uucuguuuuauaauuu

SEQ ID NO: 2756058 - RNA, 17 nt, Human
uucuguuuuauaauuuu

SEQ ID NO: 2756059 - RNA, 13 nt, Human
uucuuaaaguuga

SEQ ID NO: 2756060 - RNA, 23 nt, Human
aucacuugaacccgggaggcaga

SEQ ID NO: 2756061 - RNA, 14 nt, Human
aucaauuuuucuua

SEQ ID NO: 2756062 - RNA, 13 nt, Human
aucaauuuaaaaa

SEQ ID NO: 2756063 - RNA, 21 nt, Human
aucaaggguacacugccuucu

SEQ ID NO: 2756064 - RNA, 18 nt, Human
aucaaauaugcaaagcac

SEQ ID NO: 2756065 - RNA, 17 nt, Human
aucaaauaugcaaagca

SEQ ID NO: 2756066 - RNA, 16 nt, Human
aucaaauaugcaaagc

SEQ ID NO: 2756067 - RNA, 16 nt, Human
aucaaggguacacugc

SEQ ID NO: 2756068 - RNA, 15 nt, Human
aucaaauaugcaaag

SEQ ID NO: 2756069 - RNA, 13 nt, Human
auauuuacaaaug

SEQ ID NO: 2756070 - RNA, 14 nt, Human
auauuguuugcuaa

SEQ ID NO: 2756071 - RNA, 12 nt, Human
auauuaaagcca

SEQ ID NO: 2756072 - RNA, 17 nt, Human
uucagcgguuuauauaa

SEQ ID NO: 2756073 - RNA, 19 nt, Human
uucagcaaaaauauuuuau

SEQ ID NO: 2756074 - RNA, 17 nt, Human
uucagcaaaaauauuuu

SEQ ID NO: 2756075 - RNA, 15 nt, Human
uucaucaaugaauga

SEQ ID NO: 2756076 - RNA, 13 nt, Human
auauaugcuaagu

SEQ ID NO: 2756077 - RNA, 23 nt, Human
auauguaccuaacgaaguauccu

SEQ ID NO: 2756078 - RNA, 21 nt, Human
uucauggaacgcguugaaauu

SEQ ID NO: 2756079 - RNA, 22 nt, Human
uucauggaacgcguugaaauug

SEQ ID NO: 2756080 - RNA, 19 nt, Human
uucauggaacgcguugaaa

SEQ ID NO: 2756081 - RNA, 20 nt, Human
uucauggaacgcguugaaau

SEQ ID NO: 2756082 - RNA, 14 nt, Human
auaugcaaagcacu

SEQ ID NO: 2756083 - RNA, 13 nt, Human
auaugcaaagcac

SEQ ID NO: 2756084 - RNA, 13 nt, Human
auauauuuuuaua

SEQ ID NO: 2756085 - RNA, 14 nt, Human
uucauuaucucaaa

SEQ ID NO: 2756086 - RNA, 22 nt, Human
uucauuauuuuauuaugaaacu

SEQ ID NO: 2756087 - RNA, 22 nt, Human
augggacauuugcucauggaau

SEQ ID NO: 2756088 - RNA, 21 nt, Human
augggacauuugcucauggaa

SEQ ID NO: 2756089 - RNA, 21 nt, Human
auggcuauaggugcuacaaaa

SEQ ID NO: 2756090 - RNA, 19 nt, Human
auggcuauaggugcuacaa

SEQ ID NO: 2756091 - RNA, 16 nt, Human
auggcuauaggugcua

SEQ ID NO: 2756092 - RNA, 17 nt, Human
auggaauuucucccagu

SEQ ID NO: 2756093 - RNA, 14 nt, Human
uuugaaauauugac

SEQ ID NO: 2756094 - RNA, 14 nt, Human
uuucugcaucagcu

SEQ ID NO: 2756095 - RNA, 14 nt, Human
uuucuaugaaauau

SEQ ID NO: 2756096 - RNA, 20 nt, Human
uuucuaugaaauauuauguu

SEQ ID NO: 2756097 - RNA, 13 nt, Human
uuucuaugaaaua

SEQ ID NO: 2756098 - RNA, 21 nt, Human
uuucuaugcugaguuugugcu

SEQ ID NO: 2756099 - RNA, 15 nt, Human
uuucuauauuuucau

SEQ ID NO: 2756100 - RNA, 18 nt, Human
uuucuauauuuucauucu

SEQ ID NO: 2756101 - RNA, 13 nt, Human
uuucuauauuuuc

SEQ ID NO: 2756102 - RNA, 13 nt, Human
augcuaagugaaa

SEQ ID NO: 2756103 - RNA, 24 nt, Human
uuuaaagcuuauuaaaacucauuu

SEQ ID NO: 2756104 - RNA, 17 nt, Human
uuuacuaaaauggacug

SEQ ID NO: 2756105 - RNA, 15 nt, Human
uuuacuaaaauggac

SEQ ID NO: 2756106 - RNA, 16 nt, Human
uuuauuacuguaagaa

SEQ ID NO: 2756107 - RNA, 17 nt, Human
uuuauaugcuucuguuu

SEQ ID NO: 2756108 - RNA, 23 nt, Human
auggaauuggagcucgugggaca

SEQ ID NO: 2756109 - RNA, 14 nt, Human
augcuguauuuuaa

SEQ ID NO: 2756110 - RNA, 23 nt, Human
augcugucuacacuaagagagaa

SEQ ID NO: 2756111 - RNA, 19 nt, Human
uuuauuacuguaagaaaau

SEQ ID NO: 2756112 - RNA, 13 nt, Human
uuuauuaugaaac

SEQ ID NO: 2756113 - RNA, 21 nt, Human
uuuauuaugaaacuuguguaa

SEQ ID NO: 2756114 - RNA, 16 nt, Human
uuuauuuuaauaaugu

SEQ ID NO: 2756115 - RNA, 16 nt, Human
auggaacauaaaauac

SEQ ID NO: 2756116 - RNA, 14 nt, Human
augauaacuggaaa

SEQ ID NO: 2756117 - RNA, 18 nt, Human
uugugaagcaaaauuuuu

SEQ ID NO: 2756118 - RNA, 20 nt, Human
uuuaaaaaagaaacauuugg

SEQ ID NO: 2756119 - RNA, 17 nt, Human
uuuaaaaaaaaaauugg

SEQ ID NO: 2756120 - RNA, 18 nt, Human
augaauuacauuuguaua

SEQ ID NO: 2756121 - RNA, 19 nt, Human
augaauuacauuuguauaa

SEQ ID NO: 2756122 - RNA, 17 nt, Human
augaauuacauuuguau

SEQ ID NO: 2756123 - RNA, 19 nt, Human
uuguauaaaauaauuuuua

SEQ ID NO: 2756124 - RNA, 13 nt, Human
uuguauaaaauaa

SEQ ID NO: 2756125 - RNA, 23 nt, Human
uuguaguguuggagaagaacuga

SEQ ID NO: 2756126 - RNA, 15 nt, Human
uuguaauuauaucug

SEQ ID NO: 2756127 - RNA, 22 nt, Human
augaauuacauuuguauaaaau

SEQ ID NO: 2756128 - RNA, 21 nt, Human
augaauuaguuuuauaugcuu

SEQ ID NO: 2756129 - RNA, 23 nt, Human
augaauuaguuuuauaugcuucu

SEQ ID NO: 2756130 - RNA, 12 nt, Human
uugcucauggaa

SEQ ID NO: 2756131 - RNA, 11 nt, Human
uugcucaugga

SEQ ID NO: 2756132 - RNA, 21 nt, Human
augaaauauuauguuaaaacu

SEQ ID NO: 2756133 - RNA, 20 nt, Human
augaaauauuauguuaaaac

SEQ ID NO: 2756134 - RNA, 13 nt, Human
auuuagauguaua

SEQ ID NO: 2756135 - RNA, 17 nt, Human
auuuauuuuaauaaugu

SEQ ID NO: 2756136 - RNA, 12 nt, Human
auuucauuucuu

SEQ ID NO: 2756137 - RNA, 19 nt, Human
auuuauuuuaauaauguuu

SEQ ID NO: 2756138 - RNA, 20 nt, Human
auuuauuuuaauaauguuuc

SEQ ID NO: 2756139 - RNA, 14 nt, Human
auuugaaauauuga

SEQ ID NO: 2756140 - RNA, 18 nt, Human
auugacccacaagaaaug

SEQ ID NO: 2756141 - RNA, 21 nt, Human
auucuguauagauuagaauuc

SEQ ID NO: 2756142 - RNA, 15 nt, Human
auucuguauagauua

SEQ ID NO: 2756143 - RNA, 13 nt, Human
auucuuaaaguug

SEQ ID NO: 2756144 - RNA, 14 nt, Human
auucuuaaaguuga

SEQ ID NO: 2756145 - RNA, 15 nt, Human
auucuuaaaguugaa

SEQ ID NO: 2756146 - RNA, 16 nt, Human
auucuuaaaguugaau

SEQ ID NO: 2756147 - RNA, 18 nt, Human
auucuuaaaguugaauuu

SEQ ID NO: 2756148 - RNA, 15 nt, Human
auucuucagcaaaaa

SEQ ID NO: 2756149 - RNA, 23 nt, Human
auucuucagcaaaaauauuuuau

SEQ ID NO: 2756150 - RNA, 15 nt, Human
auuguauuacaaauc

SEQ ID NO: 2756151 - RNA, 23 nt, Human
auugguguuguacucaauuuuaa

SEQ ID NO: 2756152 - RNA, 14 nt, Human
auugguguuguacu

SEQ ID NO: 2756153 - RNA, 22 nt, Human
auugguguuguacucaauuuua

SEQ ID NO: 2756154 - RNA, 17 nt, Human
auuuuaaaagaaugauu

SEQ ID NO: 2756155 - RNA, 19 nt, Human
auuuguauaaaauaauuuu

SEQ ID NO: 2756156 - RNA, 15 nt, Human
auuuguauaaaauaa

SEQ ID NO: 2756157 - RNA, 18 nt, Human
auuuguauaaaauaauuu

SEQ ID NO: 2756158 - RNA, 18 nt, Human
auuuuaaaagaaugauua

SEQ ID NO: 2756159 - RNA, 22 nt, Human
auuuuaaaagaaugauuaugaa

SEQ ID NO: 2756160 - RNA, 22 nt, Human
auuuucaguuauuauauuuaca

SEQ ID NO: 2756161 - RNA, 13 nt, Human
auuuuccuccuuu

SEQ ID NO: 2756162 - RNA, 17 nt, Human
auuuuccuccuuucucu

SEQ ID NO: 2756163 - RNA, 20 nt, Human
auuuuauuauguaaauccca

SEQ ID NO: 2756164 - RNA, 21 nt, Human
auuuuauuauguaaaucccau

SEQ ID NO: 2756165 - RNA, 16 nt, Human
auuuuauuauguaaau

SEQ ID NO: 2756166 - RNA, 17 nt, Human
auuuuauuauguaaauc

SEQ ID NO: 2756167 - RNA, 18 nt, Human
auuuuauuauguaaaucc

SEQ ID NO: 2756168 - RNA, 19 nt, Human
auuuuauuauguaaauccc

SEQ ID NO: 2756169 - RNA, 15 nt, Human
auuuuauuauguaaa

SEQ ID NO: 2756170 - RNA, 14 nt, Human
uuuucucuaggaaa

SEQ ID NO: 2756171 - RNA, 18 nt, Human
uuuucugagaaagacuau

SEQ ID NO: 2756172 - RNA, 15 nt, Human
uuuucugagaaagac

SEQ ID NO: 2756173 - RNA, 15 nt, Human
uuuucugauccaguu

SEQ ID NO: 2756174 - RNA, 12 nt, Human
uuuuauuaugaa

SEQ ID NO: 2756175 - RNA, 21 nt, Human
uuuuauuaugaaacuugugua

SEQ ID NO: 2756176 - RNA, 22 nt, Human
uuuuauuaugaaacuuguguaa

SEQ ID NO: 2756177 - RNA, 17 nt, Human
auguuuucaggcuagau

SEQ ID NO: 2756178 - RNA, 21 nt, Human
auguuuucaggcuagauguau

SEQ ID NO: 2756179 - RNA, 15 nt, Human
auguuuucaggcuag

SEQ ID NO: 2756180 - RNA, 18 nt, Human
auguucaucaaugaauga

SEQ ID NO: 2756181 - RNA, 12 nt, Human
auguuaaaccau

SEQ ID NO: 2756182 - RNA, 13 nt, Human
auguuaaaccaug

SEQ ID NO: 2756183 - RNA, 20 nt, Human
auguuaaaccaugggauaaa

SEQ ID NO: 2756184 - RNA, 19 nt, Human
augugcuaguaauuggaaa

SEQ ID NO: 2756185 - RNA, 16 nt, Human
uuuuaauaauguuuca

SEQ ID NO: 2756186 - RNA, 12 nt, Human
uuuuaauaaugu

SEQ ID NO: 2756187 - RNA, 13 nt, Human
uuuuaauaauguu

SEQ ID NO: 2756188 - RNA, 14 nt, Human
uuuuaauaauguuu

SEQ ID NO: 2756189 - RNA, 19 nt, Human
uuuuuauauuugaaauauu

SEQ ID NO: 2756190 - RNA, 17 nt, Human
uuuuuauauuugaaaua

SEQ ID NO: 2756191 - RNA, 23 nt, Human
uuuuguuuggaccaaaaaccagu

SEQ ID NO: 2756192 - RNA, 18 nt, Human
uuuuguuguuuguuuagu

SEQ ID NO: 2756193 - RNA, 12 nt, Human
uuuuguuuggac

SEQ ID NO: 2756194 - RNA, 22 nt, Human
uuuuguuuggaccaaaaaccag

SEQ ID NO: 2756195 - RNA, 13 nt, Human
uuuuguuucugua

SEQ ID NO: 2756196 - RNA, 12 nt, Human
uuuuguuucugu

SEQ ID NO: 2756197 - RNA, 15 nt, Human
auuaagcauauauuu

SEQ ID NO: 2756198 - RNA, 21 nt, Human
auuaagcauauauuuuuauau

SEQ ID NO: 2756199 - RNA, 14 nt, Human
auuaagcauauauu

SEQ ID NO: 2756200 - RNA, 12 nt, Human
auuaccagggac

SEQ ID NO: 2756201 - RNA, 16 nt, Human
auuacauuuguauaaa

SEQ ID NO: 2756202 - RNA, 18 nt, Human
auuacauuuguauaaaau

SEQ ID NO: 2756203 - RNA, 17 nt, Human
auuacauuuguauaaaa

SEQ ID NO: 2756204 - RNA, 19 nt, Human
uuuuugugaaaagcuccau

SEQ ID NO: 2756205 - RNA, 21 nt, Human
auuaaguaaugauaacuggaa

SEQ ID NO: 2756206 - RNA, 23 nt, Human
auuaaguaaugauaacuggaaac

SEQ ID NO: 2756207 - RNA, 15 nt, Human
auuagaauucuguau

SEQ ID NO: 2756208 - RNA, 16 nt, Human
auuagaauucuguaua

SEQ ID NO: 2756209 - RNA, 17 nt, Human
auuagaauucuguauag

SEQ ID NO: 2756210 - RNA, 18 nt, Human
auuagaauucuguauaga

SEQ ID NO: 2756211 - RNA, 13 nt, Human
auuagaauucugu

SEQ ID NO: 2756212 - RNA, 14 nt, Human
auuagaauucugua

SEQ ID NO: 2756213 - RNA, 12 nt, Human
auuagaauucug

SEQ ID NO: 2756214 - RNA, 21 nt, Human
auucuccuaucaccugucuug

SEQ ID NO: 2756215 - RNA, 23 nt, Human
aaaaaauuggggauucuuaaagu

SEQ ID NO: 2756216 - RNA, 14 nt, Human
aaaacaaggaugaa

SEQ ID NO: 2756217 - RNA, 18 nt, Human
aaaacacagcaaggguga

SEQ ID NO: 2756218 - RNA, 13 nt, Human
aaaacacagcaag

SEQ ID NO: 2756219 - RNA, 12 nt, Human
aaaacacagcaa

SEQ ID NO: 2756220 - RNA, 17 nt, Human
aaaacaaggaugaauua

SEQ ID NO: 2756221 - RNA, 17 nt, Human
aaaaauuggggauucuu

SEQ ID NO: 2756222 - RNA, 18 nt, Human
aaaaauuggggauucuua

SEQ ID NO: 2756223 - RNA, 19 nt, Human
aaaaauuggggauucuuaa

SEQ ID NO: 2756224 - RNA, 20 nt, Human
aaaaauuggggauucuuaaa

SEQ ID NO: 2756225 - RNA, 16 nt, Human
aaaaaccaguauugua

SEQ ID NO: 2756226 - RNA, 18 nt, Human
aaaaaccaguauuguaca

SEQ ID NO: 2756227 - RNA, 16 nt, Human
aagauuuaccacuugu

SEQ ID NO: 2756228 - RNA, 13 nt, Human
aagccagauuuuc

SEQ ID NO: 2756229 - RNA, 13 nt, Human
aagccauguuuau

SEQ ID NO: 2756230 - RNA, 21 nt, Human
aauaauccuaaacauaugaau

SEQ ID NO: 2756231 - RNA, 14 nt, Human
aauaaaauggguuu

SEQ ID NO: 2756232 - RNA, 19 nt, Human
aauaaaauggguuuuacug

SEQ ID NO: 2756233 - RNA, 20 nt, Human
aaugauaacuggaaacuuca

SEQ ID NO: 2756234 - RNA, 17 nt, Human
aaugauaacuggaaacu

SEQ ID NO: 2756235 - RNA, 13 nt, Human
aauccauacauuu

SEQ ID NO: 2756236 - RNA, 17 nt, Human
aauccauuuggaaaucu

SEQ ID NO: 2756237 - RNA, 18 nt, Human
aauccauuuggaaaucuu

SEQ ID NO: 2756238 - RNA, 22 nt, Human
aauccauuuggaaaucuuuaaa

SEQ ID NO: 2756239 - RNA, 14 nt, Human
aauccauuuggaaa

SEQ ID NO: 2756240 - RNA, 15 nt, Human
aauccauuuggaaau

SEQ ID NO: 2756241 - RNA, 15 nt, Human
aaucaagaaacuuaa

SEQ ID NO: 2756242 - RNA, 13 nt, Human
aaucacaauacau

SEQ ID NO: 2756243 - RNA, 16 nt, Human
aauauuauguuaaaac

SEQ ID NO: 2756244 - RNA, 14 nt, Human
aauuaguuuuauau

SEQ ID NO: 2756245 - RNA, 17 nt, Human
aauuaguuuuauaugcu

SEQ ID NO: 2756246 - RNA, 20 nt, Human
aauuaguuuuauaugcuucu

SEQ ID NO: 2756247 - RNA, 15 nt, Human
aauggcuuuguauag

SEQ ID NO: 2756248 - RNA, 16 nt, Human
aauggcuuuguauaga

SEQ ID NO: 2756249 - RNA, 18 nt, Human
aauggcuuuguauagaac

SEQ ID NO: 2756250 - RNA, 13 nt, Human
aauggcuuuguau

SEQ ID NO: 2756251 - RNA, 22 nt, Human
aaugguccgugcuaaggacuug

SEQ ID NO: 2756252 - RNA, 19 nt, Human
aaaucaaauaugcaaagca

SEQ ID NO: 2756253 - RNA, 18 nt, Human
aaaucaaauaugcaaagc

SEQ ID NO: 2756254 - RNA, 16 nt, Human
aaaucaaauaugcaaa

SEQ ID NO: 2756255 - RNA, 19 nt, Human
aaauggacuguggugacuu

SEQ ID NO: 2756256 - RNA, 18 nt, Human
aaauauuuuaugauccag

SEQ ID NO: 2756257 - RNA, 19 nt, Human
aaauauuuuaugauccagc

SEQ ID NO: 2756258 - RNA, 14 nt, Human
aaauauuuuaugau

SEQ ID NO: 2756259 - RNA, 12 nt, Human
aaauaacaauga

SEQ ID NO: 2756260 - RNA, 16 nt, Human
aaagaugaaaauauuu

SEQ ID NO: 2756261 - RNA, 13 nt, Human
aaagaugaaaaua

SEQ ID NO: 2756262 - RNA, 17 nt, Human
aaagaugaaaauauuug

SEQ ID NO: 2756263 - RNA, 19 nt, Human
aaacugccagcaacgcagg

SEQ ID NO: 2756264 - RNA, 17 nt, Human
aaacugacucuuaagaa

SEQ ID NO: 2756265 - RNA, 15 nt, Human
aaacugccagcaacg

SEQ ID NO: 2756266 - RNA, 14 nt, Human
aaacugccagcaac

SEQ ID NO: 2756267 - RNA, 16 nt, Human
aaacugacucuuaaga

SEQ ID NO: 2756268 - RNA, 18 nt, Human
aaaauuggggauucuuaa

SEQ ID NO: 2756269 - RNA, 19 nt, Human
aaaauuggggauucuuaaa

SEQ ID NO: 2756270 - RNA, 17 nt, Human
aaaauuggggauucuua

SEQ ID NO: 2756271 - RNA, 14 nt, Human
aagaaauguaaggg

SEQ ID NO: 2756272 - RNA, 13 nt, Human
aagaaauguaagg

SEQ ID NO: 2756273 - RNA, 13 nt, Human
aacuuuucugaua

SEQ ID NO: 2756274 - RNA, 14 nt, Human
aacuuuucugauag

SEQ ID NO: 2756275 - RNA, 12 nt, Human
aacuuuucugau

SEQ ID NO: 2756276 - RNA, 15 nt, Human
aacacgagcaggcua

SEQ ID NO: 2756277 - RNA, 16 nt, Human
aaauuggggauucuua

SEQ ID NO: 2756278 - RNA, 21 nt, Human
aaccaguauuguacaaaguau

SEQ ID NO: 2756279 - RNA, 22 nt, Human
aaccaguauuguacaaaguauu

SEQ ID NO: 2756280 - RNA, 20 nt, Human
aaccaguauuguacaaagua

SEQ ID NO: 2756281 - RNA, 15 nt, Human
aaccaguauuguaca

SEQ ID NO: 2756282 - RNA, 13 nt, Human
acaacuauauugu

SEQ ID NO: 2756283 - RNA, 15 nt, Human
acaauuuuguuucug

SEQ ID NO: 2756284 - RNA, 17 nt, Human
acaauuuuguuucugua

SEQ ID NO: 2756285 - RNA, 14 nt, Human
acaauuuuguuucu

SEQ ID NO: 2756286 - RNA, 20 nt, Human
acagcucugcauacucauua

SEQ ID NO: 2756287 - RNA, 15 nt, Human
acagccagacuggca

SEQ ID NO: 2756288 - RNA, 13 nt, Human
acagccagacugg

SEQ ID NO: 2756289 - RNA, 16 nt, Human
acagccagacuggcac

SEQ ID NO: 2756290 - RNA, 18 nt, Human
acagcaguugaaaagacu

SEQ ID NO: 2756291 - RNA, 15 nt, Human
acagcaguugaaaag

SEQ ID NO: 2756292 - RNA, 13 nt, Human
acauguuacaaca

SEQ ID NO: 2756293 - RNA, 15 nt, Human
acauaaaucugugaa

SEQ ID NO: 2756294 - RNA, 18 nt, Human
acauaaaucugugaacuu

SEQ ID NO: 2756295 - RNA, 14 nt, Human
acauaaaucuguga

SEQ ID NO: 2756296 - RNA, 18 nt, Human
acauuugcucauggaauu

SEQ ID NO: 2756297 - RNA, 16 nt, Human
acauuugcucauggaa

SEQ ID NO: 2756298 - RNA, 14 nt, Human
acauuuguauaaaa

SEQ ID NO: 2756299 - RNA, 15 nt, Human
acccacaagaaauga

SEQ ID NO: 2756300 - RNA, 16 nt, Human
acccaaguccaagcau

SEQ ID NO: 2756301 - RNA, 14 nt, Human
acuuggucugugag

SEQ ID NO: 2756302 - RNA, 13 nt, Human
acuuggucuguga

SEQ ID NO: 2756303 - RNA, 15 nt, Human
acuuggucugugaga

SEQ ID NO: 2756304 - RNA, 18 nt, Human
acuuguaaaggaauuuaa

SEQ ID NO: 2756305 - RNA, 20 nt, Human
acuuguaaaggaauuuaaaa

SEQ ID NO: 2756306 - RNA, 19 nt, Human
acuuguaaaggaauuuaaa

SEQ ID NO: 2756307 - RNA, 21 nt, Human
acuucuuuaauuuuggaauuu

SEQ ID NO: 2756308 - RNA, 12 nt, Human
acuggaacucuc

SEQ ID NO: 2756309 - RNA, 12 nt, Human
acuuuucugaua

SEQ ID NO: 2756310 - RNA, 14 nt, Human
acuagcuauggugu

SEQ ID NO: 2756311 - RNA, 12 nt, Human
acucccuuucaa

SEQ ID NO: 2756312 - RNA, 13 nt, Human
acucccuuucaac

SEQ ID NO: 2756313 - RNA, 15 nt, Human
acuaagagagaauga

SEQ ID NO: 2756314 - RNA, 16 nt, Human
acuaagagagaaugag

SEQ ID NO: 2756315 - RNA, 14 nt, Human
auaauuacuauguc

SEQ ID NO: 2756316 - RNA, 19 nt, Human
auacaauuuuguuucugua

SEQ ID NO: 2756317 - RNA, 20 nt, Human
auacaauuuuguuucuguac

SEQ ID NO: 2756318 - RNA, 20 nt, Human
auaauuaacauguuaaacca

SEQ ID NO: 2756319 - RNA, 21 nt, Human
auaauuaacauguuaaaccau

SEQ ID NO: 2756320 - RNA, 22 nt, Human
auaauuaacauguuaaaccaug

SEQ ID NO: 2756321 - RNA, 17 nt, Human
auaauuaacauguuaaa

SEQ ID NO: 2756322 - RNA, 15 nt, Human
auaucaauuuaaaaa

SEQ ID NO: 2756323 - RNA, 18 nt, Human
auaucacuugucaauaaa

SEQ ID NO: 2756324 - RNA, 23 nt, Human
auaugcuucuguuuuauaauuuu

SEQ ID NO: 2756325 - RNA, 14 nt, Human
auaugcuauuucua

SEQ ID NO: 2756326 - RNA, 18 nt, Human
auauuuauuuuaauaaug

SEQ ID NO: 2756327 - RNA, 14 nt, Human
auauuuauuacugu

SEQ ID NO: 2756328 - RNA, 19 nt, Human
auauuuauuacuguaagaa

SEQ ID NO: 2756329 - RNA, 19 nt, Human
aguuguaccgcaaugugac

SEQ ID NO: 2756330 - RNA, 18 nt, Human
aguuguaccgcaauguga

SEQ ID NO: 2756331 - RNA, 20 nt, Human
aguugaauuuauuggcuuuu

SEQ ID NO: 2756332 - RNA, 11 nt, Human
aguugaauuua

SEQ ID NO: 2756333 - RNA, 13 nt, Human
aguugaauuuauu

SEQ ID NO: 2756334 - RNA, 17 nt, Human
aguugaauuuauuggcu

SEQ ID NO: 2756335 - RNA, 19 nt, Human
aguugaauuuauuggcuuu

SEQ ID NO: 2756336 - RNA, 18 nt, Human
agugauuaccagggacug

SEQ ID NO: 2756337 - RNA, 15 nt, Human
agugauuaccaggga

SEQ ID NO: 2756338 - RNA, 21 nt, Human
agugucuuaauuaaaagaaua

SEQ ID NO: 2756339 - RNA, 13 nt, Human
agucaaauugugu

SEQ ID NO: 2756340 - RNA, 15 nt, Human
agucaaauuguguga

SEQ ID NO: 2756341 - RNA, 17 nt, Human
agucaaauugugugaaa

SEQ ID NO: 2756342 - RNA, 16 nt, Human
aguccaagcauuuaga

SEQ ID NO: 2756343 - RNA, 21 nt, Human
aguccaagcauuuagauguau

SEQ ID NO: 2756344 - RNA, 17 nt, Human
aucagcugcugaaacaa

SEQ ID NO: 2756345 - RNA, 21 nt, Human
aucaccugucuugccuuuuuc

SEQ ID NO: 2756346 - RNA, 12 nt, Human
aucaccugucuu

SEQ ID NO: 2756347 - RNA, 22 nt, Human
aucuuauaauuuaaaauaugcu

SEQ ID NO: 2756348 - RNA, 20 nt, Human
auguaagggaaacugccagc

SEQ ID NO: 2756349 - RNA, 22 nt, Human
auguaagggaaacugccagcaa

SEQ ID NO: 2756350 - RNA, 21 nt, Human
auguaagggaaacugccagca

SEQ ID NO: 2756351 - RNA, 18 nt, Human
auggagccugcacgguga

SEQ ID NO: 2756352 - RNA, 22 nt, Human
auggagccugcacggugaaugg

SEQ ID NO: 2756353 - RNA, 18 nt, Human
agcuucacuguaaaauaa

SEQ ID NO: 2756354 - RNA, 14 nt, Human
aggauguugaaaaa

SEQ ID NO: 2756355 - RNA, 17 nt, Human
agacugcauuauauuua

SEQ ID NO: 2756356 - RNA, 21 nt, Human
agauaggucagugcaaauacu

SEQ ID NO: 2756357 - RNA, 14 nt, Human
agaguguugaaacg

SEQ ID NO: 2756358 - RNA, 21 nt, Human
agccgggcgugguggugagug

SEQ ID NO: 2756359 - RNA, 14 nt, Human
agauguagaggaga

SEQ ID NO: 2756360 - RNA, 21 nt, Human
agaugggagaaucacuugaac

SEQ ID NO: 2756361 - RNA, 21 nt, Human
agcaguugaaaagacuccaaa

SEQ ID NO: 2756362 - RNA, 23 nt, Human
agcaguugaaaagacuccaaaga

SEQ ID NO: 2756363 - RNA, 16 nt, Human
agcaguucagagcugc

SEQ ID NO: 2756364 - RNA, 15 nt, Human
agcaguucagagcug

SEQ ID NO: 2756365 - RNA, 17 nt, Human
agcaguucagagcugcc

SEQ ID NO: 2756366 - RNA, 18 nt, Human
agcaguucagagcugccc

SEQ ID NO: 2756367 - RNA, 19 nt, Human
agcaguucagagcugcccu

SEQ ID NO: 2756368 - RNA, 15 nt, Human
agccagauuuuccug

SEQ ID NO: 2756369 - RNA, 19 nt, Human
agccagauuuuccugaaaa

SEQ ID NO: 2756370 - RNA, 22 nt, Human
agccauguuuauuacaguauaa

SEQ ID NO: 2756371 - RNA, 17 nt, Human
agccauguuuauuacag

SEQ ID NO: 2756372 - RNA, 17 nt, Human
caaggcugauuaaacca

SEQ ID NO: 2756373 - RNA, 21 nt, Human
caagccagauuuuccugaaaa

SEQ ID NO: 2756374 - RNA, 22 nt, Human
caaugugacuuaaugccacuaa

SEQ ID NO: 2756375 - RNA, 23 nt, Human
caauacaucccuuaccugggaaa

SEQ ID NO: 2756376 - RNA, 23 nt, Human
caaaacuucagacauagaauuaa

SEQ ID NO: 2756377 - RNA, 19 nt, Human
caaaaaucucaauauuuca

SEQ ID NO: 2756378 - RNA, 22 nt, Human
caaaaauauuuuaugauccagc

SEQ ID NO: 2756379 - RNA, 23 nt, Human
caaaaauauuuuaugauccagca

SEQ ID NO: 2756380 - RNA, 14 nt, Human
caaaaauauuuuau

SEQ ID NO: 2756381 - RNA, 15 nt, Human
caaaaauauuuuaug

SEQ ID NO: 2756382 - RNA, 17 nt, Human
caaaaauauuuuaugau

SEQ ID NO: 2756383 - RNA, 21 nt, Human
caaaaauauuuuaugauccag

SEQ ID NO: 2756384 - RNA, 13 nt, Human
auuuuccugaaaa

SEQ ID NO: 2756385 - RNA, 17 nt, Human
caaaaacacagcaaggg

SEQ ID NO: 2756386 - RNA, 15 nt, Human
caaaaacacagcaag

SEQ ID NO: 2756387 - RNA, 14 nt, Human
caaaaacacagcaa

SEQ ID NO: 2756388 - RNA, 13 nt, Human
caaaaacacagca

SEQ ID NO: 2756389 - RNA, 19 nt, Human
caaaaaccaguauuguaca

SEQ ID NO: 2756390 - RNA, 20 nt, Human
caaaaaccaguauuguacaa

SEQ ID NO: 2756391 - RNA, 18 nt, Human
caaaaaccaguauuguac

SEQ ID NO: 2756392 - RNA, 21 nt, Human
caaauaugcaaagcacugacu

SEQ ID NO: 2756393 - RNA, 19 nt, Human
caaauaugcaaagcacuga

SEQ ID NO: 2756394 - RNA, 16 nt, Human
caaaauuuuuucucua

SEQ ID NO: 2756395 - RNA, 21 nt, Human
caaaauuuuuucucuaggaaa

SEQ ID NO: 2756396 - RNA, 22 nt, Human
caaaauuuuuucucuaggaaau

SEQ ID NO: 2756397 - RNA, 19 nt, Human
cacaguuuucugagaaaga

SEQ ID NO: 2756398 - RNA, 15 nt, Human
cacaguuuucugaga

SEQ ID NO: 2756399 - RNA, 17 nt, Human
cacaguuuucugagaaa

SEQ ID NO: 2756400 - RNA, 16 nt, Human
cacaguuuucugagaa

SEQ ID NO: 2756401 - RNA, 20 nt, Human
cacuugaacccgggaggcag

SEQ ID NO: 2756402 - RNA, 21 nt, Human
cacuugaacccgggaggcaga

SEQ ID NO: 2756403 - RNA, 23 nt, Human
cacuugaacccgggaggcagagg

SEQ ID NO: 2756404 - RNA, 15 nt, Human
cacuuggucugugag

SEQ ID NO: 2756405 - RNA, 19 nt, Human
cacuguggguagacacaca

SEQ ID NO: 2756406 - RNA, 22 nt, Human
cacuguggguagacacacauga

SEQ ID NO: 2756407 - RNA, 24 nt, Human
cacuguggguagacacacaugaag

SEQ ID NO: 2756408 - RNA, 14 nt, Human
cacugucaagauga

SEQ ID NO: 2756409 - RNA, 20 nt, Human
cacugacuucuaaguaaaac

SEQ ID NO: 2756410 - RNA, 16 nt, Human
cacugacuucuaagua

SEQ ID NO: 2756411 - RNA, 15 nt, Human
cacugacuucuaagu

SEQ ID NO: 2756412 - RNA, 14 nt, Human
cacugacuucuaag

SEQ ID NO: 2756413 - RNA, 21 nt, Human
cacugacuucuaaguaaaacc

SEQ ID NO: 2756414 - RNA, 21 nt, Human
cacugauuugacauagucugg

SEQ ID NO: 2756415 - RNA, 23 nt, Human
cacugauuugacauagucuggcu

SEQ ID NO: 2756416 - RNA, 20 nt, Human
cacugccuucucaacuccaa

SEQ ID NO: 2756417 - RNA, 22 nt, Human
cacguucuuacuaguuucccuu

SEQ ID NO: 2756418 - RNA, 13 nt, Human
cacuaaacaaaga

SEQ ID NO: 2756419 - RNA, 20 nt, Human
cacggugaauggcuuuguau

SEQ ID NO: 2756420 - RNA, 23 nt, Human
cacggugaauggcuuuguauaga

SEQ ID NO: 2756421 - RNA, 20 nt, Human
cacgagcaggcuacugucag

SEQ ID NO: 2756422 - RNA, 19 nt, Human
cacgagcaggcuacuguca

SEQ ID NO: 2756423 - RNA, 17 nt, Human
cacgagcaggcuacugu

SEQ ID NO: 2756424 - RNA, 22 nt, Human
cacgagcaggcuacugucagcu

SEQ ID NO: 2756425 - RNA, 17 nt, Human
caccugucuugccuuuu

SEQ ID NO: 2756426 - RNA, 20 nt, Human
caccugucuugccuuuuuca

SEQ ID NO: 2756427 - RNA, 16 nt, Human
cacucaaaucaagaaa

SEQ ID NO: 2756428 - RNA, 21 nt, Human
cacuaaauugacacuuaaaaa

SEQ ID NO: 2756429 - RNA, 17 nt, Human
cacuaagagagaaugag

SEQ ID NO: 2756430 - RNA, 14 nt, Human
cacuaguauuucua

SEQ ID NO: 2756431 - RNA, 19 nt, Human
cacuaguauuucuaugaaa

SEQ ID NO: 2756432 - RNA, 15 nt, Human
cacucuccauuuaau

SEQ ID NO: 2756433 - RNA, 17 nt, Human
cacucuccauuuaauaa

SEQ ID NO: 2756434 - RNA, 13 nt, Human
caccucccugcaa

SEQ ID NO: 2756435 - RNA, 14 nt, Human
caccucccugcaau

SEQ ID NO: 2756436 - RNA, 10 nt, Human
caccucccug

SEQ ID NO: 2756437 - RNA, 11 nt, Human
caccucaugga

SEQ ID NO: 2756438 - RNA, 12 nt, Human
caccucauggaa

SEQ ID NO: 2756439 - RNA, 14 nt, Human
caccucauggaauu

SEQ ID NO: 2756440 - RNA, 17 nt, Human
cagacauagaauuaaca

SEQ ID NO: 2756441 - RNA, 19 nt, Human
cagacauagaauuaacaca

SEQ ID NO: 2756442 - RNA, 19 nt, Human
cagaagcaacccaaauguu

SEQ ID NO: 2756443 - RNA, 20 nt, Human
cagaagcaacccaaauguuc

SEQ ID NO: 2756444 - RNA, 18 nt, Human
cagaaagcagaacaguga

SEQ ID NO: 2756445 - RNA, 23 nt, Human
cagaacagugauuaccagggacu

SEQ ID NO: 2756446 - RNA, 18 nt, Human
cagaacagugauuaccag

SEQ ID NO: 2756447 - RNA, 19 nt, Human
cagaaagcagaacagugau

SEQ ID NO: 2756448 - RNA, 14 nt, Human
cagauaaucacaau

SEQ ID NO: 2756449 - RNA, 14 nt, Human
cagauaaacaguag

SEQ ID NO: 2756450 - RNA, 23 nt, Human
cagauaaauaguuuaugauucca

SEQ ID NO: 2756451 - RNA, 14 nt, Human
cagauccuggaaau

SEQ ID NO: 2756452 - RNA, 13 nt, Human
cagauccuggaaa

SEQ ID NO: 2756453 - RNA, 19 nt, Human
cagaucugccuaaggacuu

SEQ ID NO: 2756454 - RNA, 20 nt, Human
cagaucugccuaaggacuuc

SEQ ID NO: 2756455 - RNA, 21 nt, Human
cagaucugccuaaggacuucu

SEQ ID NO: 2756456 - RNA, 23 nt, Human
cagaucugccuaaggacuucuuu

SEQ ID NO: 2756457 - RNA, 16 nt, Human
cagaucugccuaagga

SEQ ID NO: 2756458 - RNA, 17 nt, Human
cagaucugccuaaggac

SEQ ID NO: 2756459 - RNA, 14 nt, Human
cagaucugccuaag

SEQ ID NO: 2756460 - RNA, 16 nt, Human
caggaaguagaggagg

SEQ ID NO: 2756461 - RNA, 15 nt, Human
caggaaguagaggag

SEQ ID NO: 2756462 - RNA, 17 nt, Human
caggaauggagccugca

SEQ ID NO: 2756463 - RNA, 23 nt, Human
caggaauggagccugcacgguga

SEQ ID NO: 2756464 - RNA, 18 nt, Human
cagcuugaaacugagaug

SEQ ID NO: 2756465 - RNA, 23 nt, Human
cagcuuuccucaaaacuucagac

SEQ ID NO: 2756466 - RNA, 18 nt, Human
caggaaccacaagacugc

SEQ ID NO: 2756467 - RNA, 18 nt, Human
cagcuguaugauucccag

SEQ ID NO: 2756468 - RNA, 19 nt, Human
cagcuggugcccugcuuuc

SEQ ID NO: 2756469 - RNA, 20 nt, Human
cagcuggugcccugcuuuca

SEQ ID NO: 2756470 - RNA, 21 nt, Human
cagcuggugcccugcuuucag

SEQ ID NO: 2756471 - RNA, 23 nt, Human
cagcuggugcccugcuuucagau

SEQ ID NO: 2756472 - RNA, 18 nt, Human
cagcuggugcccugcuuu

SEQ ID NO: 2756473 - RNA, 21 nt, Human
cagcugcugaaacaacaaaua

SEQ ID NO: 2756474 - RNA, 20 nt, Human
cagcugcugaaacaacaaau

SEQ ID NO: 2756475 - RNA, 20 nt, Human
cagcucugcauacucauuag

SEQ ID NO: 2756476 - RNA, 16 nt, Human
cagccuaguugaucag

SEQ ID NO: 2756477 - RNA, 19 nt, Human
cagcuacuugggaggcuga

SEQ ID NO: 2756478 - RNA, 23 nt, Human
cagcaacgcaggcccccaggugc

SEQ ID NO: 2756479 - RNA, 14 nt, Human
cagauuuuccugaa

SEQ ID NO: 2756480 - RNA, 15 nt, Human
cagauuuuccugaaa

SEQ ID NO: 2756481 - RNA, 17 nt, Human
cagcaaaaauauuuuau

SEQ ID NO: 2756482 - RNA, 13 nt, Human
cagauuuuauuau

SEQ ID NO: 2756483 - RNA, 15 nt, Human
cagauuuuauuaugu

SEQ ID NO: 2756484 - RNA, 16 nt, Human
cagauuuuauuaugua

SEQ ID NO: 2756485 - RNA, 18 nt, Human
cagauuuuauuauguaaa

SEQ ID NO: 2756486 - RNA, 20 nt, Human
cagauuuuauuauguaaauc

SEQ ID NO: 2756487 - RNA, 21 nt, Human
cagauuuuauuauguaaaucc

SEQ ID NO: 2756488 - RNA, 22 nt, Human
cagauuuuauuauguaaauccc

SEQ ID NO: 2756489 - RNA, 12 nt, Human
cagauuauucac

SEQ ID NO: 2756490 - RNA, 18 nt, Human
cagauuauucacugauuu

SEQ ID NO: 2756491 - RNA, 23 nt, Human
cagauuauucacugauuugacau

SEQ ID NO: 2756492 - RNA, 23 nt, Human
cagcaagggugaugggaaagcau

SEQ ID NO: 2756493 - RNA, 22 nt, Human
cagcaagggugaugggaaagca

SEQ ID NO: 2756494 - RNA, 19 nt, Human
cagcaagggugaugggaaa

SEQ ID NO: 2756495 - RNA, 15 nt, Human
cagcagauuauucac

SEQ ID NO: 2756496 - RNA, 19 nt, Human
cagcagauuauucacugau

SEQ ID NO: 2756497 - RNA, 14 nt, Human
cagcagauuauuca

SEQ ID NO: 2756498 - RNA, 13 nt, Human
caggcuagaugua

SEQ ID NO: 2756499 - RNA, 19 nt, Human
caggcuagauguauguacu

SEQ ID NO: 2756500 - RNA, 14 nt, Human
caggcuacugucag

SEQ ID NO: 2756501 - RNA, 11 nt, Human
caggggacagg

SEQ ID NO: 2756502 - RNA, 16 nt, Human
caggggacaggauggu

SEQ ID NO: 2756503 - RNA, 17 nt, Human
cagggcauggcugggaa

SEQ ID NO: 2756504 - RNA, 18 nt, Human
cagggacaggauaagagg

SEQ ID NO: 2756505 - RNA, 19 nt, Human
caggcccccaggugccagu

SEQ ID NO: 2756506 - RNA, 14 nt, Human
caggcccccaggug

SEQ ID NO: 2756507 - RNA, 20 nt, Human
caggcccccaggugccaguu

SEQ ID NO: 2756508 - RNA, 16 nt, Human
caggauuuuaaucuuu

SEQ ID NO: 2756509 - RNA, 21 nt, Human
caggaugguucccuugaugaa

SEQ ID NO: 2756510 - RNA, 23 nt, Human
caggaugguucccuugaugaaga

SEQ ID NO: 2756511 - RNA, 18 nt, Human
cagugauuaccagggacu

SEQ ID NO: 2756512 - RNA, 17 nt, Human
cagugauuaccagggac

SEQ ID NO: 2756513 - RNA, 20 nt, Human
cagugaaagaaaauaacaau

SEQ ID NO: 2756514 - RNA, 16 nt, Human
cagugaaagaaaauaa

SEQ ID NO: 2756515 - RNA, 15 nt, Human
cagugagacagcucu

SEQ ID NO: 2756516 - RNA, 12 nt, Human
caguauggcagc

SEQ ID NO: 2756517 - RNA, 12 nt, Human
caguagugauag

SEQ ID NO: 2756518 - RNA, 14 nt, Human
caguauaauuaaca

SEQ ID NO: 2756519 - RNA, 15 nt, Human
caguauaauuaacau

SEQ ID NO: 2756520 - RNA, 17 nt, Human
caguauaauuaacaugu

SEQ ID NO: 2756521 - RNA, 21 nt, Human
caguauaauuaacauguuaaa

SEQ ID NO: 2756522 - RNA, 22 nt, Human
cagucaggaaagagaacuucca

SEQ ID NO: 2756523 - RNA, 15 nt, Human
cagucaggaaagaga

SEQ ID NO: 2756524 - RNA, 18 nt, Human
cagucaggaaagagaacu

SEQ ID NO: 2756525 - RNA, 13 nt, Human
caguccaugaaga

SEQ ID NO: 2756526 - RNA, 22 nt, Human
cauuccaacuaucucauuucca

SEQ ID NO: 2756527 - RNA, 18 nt, Human
cauuauucaaaguugccu

SEQ ID NO: 2756528 - RNA, 21 nt, Human
cauuauucaaaguugccuaaa

SEQ ID NO: 2756529 - RNA, 22 nt, Human
cauuauucaaaguugccuaaau

SEQ ID NO: 2756530 - RNA, 16 nt, Human
cauuauucaaaguugc

SEQ ID NO: 2756531 - RNA, 17 nt, Human
cauuauuuuauuaugaa

SEQ ID NO: 2756532 - RNA, 13 nt, Human
cauucuggaauaa

SEQ ID NO: 2756533 - RNA, 21 nt, Human
cauuguaaaugugcuuuuaaa

SEQ ID NO: 2756534 - RNA, 17 nt, Human
cauuuggaaaucuuuaa

SEQ ID NO: 2756535 - RNA, 18 nt, Human
cauuuggaaaucuuuaaa

SEQ ID NO: 2756536 - RNA, 11 nt, Human
cauuuggaaau

SEQ ID NO: 2756537 - RNA, 20 nt, Human
caugugcuaguaauuggaaa

SEQ ID NO: 2756538 - RNA, 13 nt, Human
cauguuaaaccau

SEQ ID NO: 2756539 - RNA, 22 nt, Human
cauguuaaaccaugggauaaau

SEQ ID NO: 2756540 - RNA, 23 nt, Human
cauguuuauuacaguauaauuaa

SEQ ID NO: 2756541 - RNA, 20 nt, Human
cauggaauuggagcucgugg

SEQ ID NO: 2756542 - RNA, 23 nt, Human
caugggacagggaggacgcucuc

SEQ ID NO: 2756543 - RNA, 18 nt, Human
caugggauaaaugccauc

SEQ ID NO: 2756544 - RNA, 23 nt, Human
caugggauaaaugccaucaauaa

SEQ ID NO: 2756545 - RNA, 16 nt, Human
caugggauaaaugcca

SEQ ID NO: 2756546 - RNA, 17 nt, Human
caugggauaaaugccau

SEQ ID NO: 2756547 - RNA, 20 nt, Human
caucccucccuccaccuccc

SEQ ID NO: 2756548 - RNA, 18 nt, Human
caucccuuaccugggaaa

SEQ ID NO: 2756549 - RNA, 22 nt, Human
caucccucccuccaccucccug

SEQ ID NO: 2756550 - RNA, 23 nt, Human
caucccucccuccaccucccugc

SEQ ID NO: 2756551 - RNA, 13 nt, Human
cauauauaacaau

SEQ ID NO: 2756552 - RNA, 19 nt, Human
cauagucuggcuguaccca

SEQ ID NO: 2756553 - RNA, 15 nt, Human
cauauauaacaaugc

SEQ ID NO: 2756554 - RNA, 18 nt, Human
cauauauuuuuauauuua

SEQ ID NO: 2756555 - RNA, 20 nt, Human
cauauauuuuuauauuuacu

SEQ ID NO: 2756556 - RNA, 21 nt, Human
cauauauuuuuauauuuacua

SEQ ID NO: 2756557 - RNA, 19 nt, Human
caugaagauguagaggaga

SEQ ID NO: 2756558 - RNA, 18 nt, Human
caugaagauguagaggag

SEQ ID NO: 2756559 - RNA, 16 nt, Human
caugagguacugagag

SEQ ID NO: 2756560 - RNA, 19 nt, Human
caugagguacugagaguga

SEQ ID NO: 2756561 - RNA, 14 nt, Human
ccaccucccugcaa

SEQ ID NO: 2756562 - RNA, 13 nt, Human
ccagcaguucaga

SEQ ID NO: 2756563 - RNA, 18 nt, Human
ccagcaguucagagcugc

SEQ ID NO: 2756564 - RNA, 19 nt, Human
ccagcaguucagagcugcc

SEQ ID NO: 2756565 - RNA, 20 nt, Human
ccagcaguucagagcugccc

SEQ ID NO: 2756566 - RNA, 21 nt, Human
ccagcaguucagagcugcccu

SEQ ID NO: 2756567 - RNA, 22 nt, Human
ccagcaguucagagcugcccuc

SEQ ID NO: 2756568 - RNA, 23 nt, Human
ccagcaguucagagcugcccucu

SEQ ID NO: 2756569 - RNA, 22 nt, Human
ccagccagcaguucagagcugc

SEQ ID NO: 2756570 - RNA, 16 nt, Human
ccaugggacagggagg

SEQ ID NO: 2756571 - RNA, 19 nt, Human
ccaugggacagggaggacg

SEQ ID NO: 2756572 - RNA, 13 nt, Human
ccaugggauaaau

SEQ ID NO: 2756573 - RNA, 13 nt, Human
ccauguuuauuac

SEQ ID NO: 2756574 - RNA, 20 nt, Human
ccauguuuauuacaguauaa

SEQ ID NO: 2756575 - RNA, 14 nt, Human
ccauuauucaaagu

SEQ ID NO: 2756576 - RNA, 17 nt, Human
ccauuauucaaaguugc

SEQ ID NO: 2756577 - RNA, 22 nt, Human
ccauuauucaaaguugccuaaa

SEQ ID NO: 2756578 - RNA, 21 nt, Human
ccaguuauggcuauaggugcu

SEQ ID NO: 2756579 - RNA, 14 nt, Human
ccaguuauggcuau

SEQ ID NO: 2756580 - RNA, 19 nt, Human
ccuuggggcugaugcaguu

SEQ ID NO: 2756581 - RNA, 14 nt, Human
ccuugaugaagaag

SEQ ID NO: 2756582 - RNA, 20 nt, Human
ccuugaaaacuuuaugcuaa

SEQ ID NO: 2756583 - RNA, 14 nt, Human
ccuucggccuccau

SEQ ID NO: 2756584 - RNA, 19 nt, Human
ccuucggccuccauccuga

SEQ ID NO: 2756585 - RNA, 20 nt, Human
ccuucggccuccauccugag

SEQ ID NO: 2756586 - RNA, 21 nt, Human
ccuguuaaaagaugaaaauau

SEQ ID NO: 2756587 - RNA, 20 nt, Human
ccuguuaaaagaugaaaaua

SEQ ID NO: 2756588 - RNA, 18 nt, Human
cgagcaggcuacugucag

SEQ ID NO: 2756589 - RNA, 16 nt, Human
ccugcaauaaaauggg

SEQ ID NO: 2756590 - RNA, 21 nt, Human
ccugcacggugaauggcuuug

SEQ ID NO: 2756591 - RNA, 20 nt, Human
ccugcacggugaauggcuuu

SEQ ID NO: 2756592 - RNA, 11 nt, Human
ccugagcccca

SEQ ID NO: 2756593 - RNA, 23 nt, Human
ccuggaaaucaggguuaguauug

SEQ ID NO: 2756594 - RNA, 22 nt, Human
ccugggcagcugccuccccucc

SEQ ID NO: 2756595 - RNA, 15 nt, Human
cccgugggguuccuc

SEQ ID NO: 2756596 - RNA, 11 nt, Human
cccucuccugg

SEQ ID NO: 2756597 - RNA, 12 nt, Human
cccucuccuggg

SEQ ID NO: 2756598 - RNA, 13 nt, Human
cccucuccugggc

SEQ ID NO: 2756599 - RNA, 14 nt, Human
cccucuccugggca

SEQ ID NO: 2756600 - RNA, 15 nt, Human
cccucuccugggcag

SEQ ID NO: 2756601 - RNA, 19 nt, Human
cccuccaccucccugcaau

SEQ ID NO: 2756602 - RNA, 15 nt, Human
cccuccaccucccug

SEQ ID NO: 2756603 - RNA, 17 nt, Human
cccuccaccucccugca

SEQ ID NO: 2756604 - RNA, 14 nt, Human
cccuccaccucccu

SEQ ID NO: 2756605 - RNA, 12 nt, Human
cccuccaccucc

SEQ ID NO: 2756606 - RNA, 14 nt, Human
cccugcuuucagau

SEQ ID NO: 2756607 - RNA, 17 nt, Human
cccugcuuucagauacu

SEQ ID NO: 2756608 - RNA, 20 nt, Human
cccacaagaaaugaaagcag

SEQ ID NO: 2756609 - RNA, 13 nt, Human
cccacaagaaaug

SEQ ID NO: 2756610 - RNA, 16 nt, Human
ccgggcguggugguga

SEQ ID NO: 2756611 - RNA, 15 nt, Human
ccgugcuaaggacuu

SEQ ID NO: 2756612 - RNA, 16 nt, Human
ccgugcuaaggacuug

SEQ ID NO: 2756613 - RNA, 14 nt, Human
ccgugcuaaggacu

SEQ ID NO: 2756614 - RNA, 12 nt, Human
ccuaaauccauu

SEQ ID NO: 2756615 - RNA, 17 nt, Human
ccuaaauccauuuggaa

SEQ ID NO: 2756616 - RNA, 13 nt, Human
ccuccaccucccu

SEQ ID NO: 2756617 - RNA, 14 nt, Human
ccuccaccucccug

SEQ ID NO: 2756618 - RNA, 15 nt, Human
ccuccaccucccugc

SEQ ID NO: 2756619 - RNA, 17 nt, Human
ccuccaccucccugcaa

SEQ ID NO: 2756620 - RNA, 22 nt, Human
ccuccaccucccugcaauaaaa

SEQ ID NO: 2756621 - RNA, 14 nt, Human
ccuccauccugagg

SEQ ID NO: 2756622 - RNA, 16 nt, Human
ccuccucugcuugcca

SEQ ID NO: 2756623 - RNA, 13 nt, Human
ccuccucugcuug

SEQ ID NO: 2756624 - RNA, 18 nt, Human
ccuccucugcuugccauc

SEQ ID NO: 2756625 - RNA, 20 nt, Human
ccucccuccaccucccugca

SEQ ID NO: 2756626 - RNA, 17 nt, Human
ccucccuccaccucccu

SEQ ID NO: 2756627 - RNA, 19 nt, Human
cuucggccuccauccugag

SEQ ID NO: 2756628 - RNA, 20 nt, Human
cuucggccuccauccugagg

SEQ ID NO: 2756629 - RNA, 20 nt, Human
cuuccuuggacucauuuuaa

SEQ ID NO: 2756630 - RNA, 15 nt, Human
cuucagccugaaaga

SEQ ID NO: 2756631 - RNA, 20 nt, Human
cuucagcaaaaauauuuuau

SEQ ID NO: 2756632 - RNA, 23 nt, Human
cuucagcaaaaauauuuuaugau

SEQ ID NO: 2756633 - RNA, 17 nt, Human
cuucaaauccuugaaga

SEQ ID NO: 2756634 - RNA, 14 nt, Human
cuucacaacagauu

SEQ ID NO: 2756635 - RNA, 12 nt, Human
cuucacaacaga

SEQ ID NO: 2756636 - RNA, 17 nt, Human
cuucagcaaaaauauuu

SEQ ID NO: 2756637 - RNA, 15 nt, Human
cuguuuuauaauuuu

SEQ ID NO: 2756638 - RNA, 14 nt, Human
cuguuuuauaauuu

SEQ ID NO: 2756639 - RNA, 17 nt, Human
cuuaauuaaaagaauau

SEQ ID NO: 2756640 - RNA, 16 nt, Human
cuuaauuaaaagaaua

SEQ ID NO: 2756641 - RNA, 20 nt, Human
cuuaauuaaaagaauauuuu

SEQ ID NO: 2756642 - RNA, 19 nt, Human
cuuaauuaaaagaauauuu

SEQ ID NO: 2756643 - RNA, 21 nt, Human
cuuaagaagacugcauuauau

SEQ ID NO: 2756644 - RNA, 23 nt, Human
cuuaagaagacugcauuauauuu

SEQ ID NO: 2756645 - RNA, 16 nt, Human
cuguuaaaagaugaaa

SEQ ID NO: 2756646 - RNA, 15 nt, Human
cuguuaaaagaugaa

SEQ ID NO: 2756647 - RNA, 19 nt, Human
cuguuaaaagaugaaaaua

SEQ ID NO: 2756648 - RNA, 15 nt, Human
cuguggugacuuugg

SEQ ID NO: 2756649 - RNA, 17 nt, Human
cuguggugacuuuggau

SEQ ID NO: 2756650 - RNA, 18 nt, Human
cuguggugacuuuggaua

SEQ ID NO: 2756651 - RNA, 20 nt, Human
cuguggugacuuuggauaau

SEQ ID NO: 2756652 - RNA, 23 nt, Human
cuguggugacuuuggauaauaag

SEQ ID NO: 2756653 - RNA, 13 nt, Human
cuguggugacuuu

SEQ ID NO: 2756654 - RNA, 14 nt, Human
cuguggugacuuug

SEQ ID NO: 2756655 - RNA, 12 nt, Human
cuguggugacuu

SEQ ID NO: 2756656 - RNA, 18 nt, Human
cugucuucacaacagauu

SEQ ID NO: 2756657 - RNA, 21 nt, Human
cugucuugccuuuuucauuau

SEQ ID NO: 2756658 - RNA, 23 nt, Human
cugucuugccuuuuucauuauuu

SEQ ID NO: 2756659 - RNA, 14 nt, Human
cugggguuaucuga

SEQ ID NO: 2756660 - RNA, 15 nt, Human
cugguguauguguga

SEQ ID NO: 2756661 - RNA, 21 nt, Human
gaacuagaguuuagcuggaaa

SEQ ID NO: 2756662 - RNA, 22 nt, Human
gaacuagaguuuagcuggaaaa

SEQ ID NO: 2756663 - RNA, 16 nt, Human
gaacgcguugaaauug

SEQ ID NO: 2756664 - RNA, 15 nt, Human
gaacgcguugaaauu

SEQ ID NO: 2756665 - RNA, 14 nt, Human
gaacucccuuucaa

SEQ ID NO: 2756666 - RNA, 22 nt, Human
gaacuuccagauccuggaaauc

SEQ ID NO: 2756667 - RNA, 21 nt, Human
gaacuuguaaaggaauuuaaa

SEQ ID NO: 2756668 - RNA, 21 nt, Human
gaagaagcaccaaucaugaau

SEQ ID NO: 2756669 - RNA, 13 nt, Human
gaaauauuauguu

SEQ ID NO: 2756670 - RNA, 16 nt, Human
gaaauauuauguuaaa

SEQ ID NO: 2756671 - RNA, 18 nt, Human
gaaauuguauuacaaauc

SEQ ID NO: 2756672 - RNA, 21 nt, Human
gaagccuuggggcugaugcag

SEQ ID NO: 2756673 - RNA, 14 nt, Human
gaauacuuuauaaa

SEQ ID NO: 2756674 - RNA, 20 nt, Human
gaauaauccuaaacauauga

SEQ ID NO: 2756675 - RNA, 20 nt, Human
gaaaaucuuauaauuuaaaa

SEQ ID NO: 2756676 - RNA, 19 nt, Human
gaaaauaacgauaaaagac

SEQ ID NO: 2756677 - RNA, 19 nt, Human
gaaaaucuuauaauuuaaa

SEQ ID NO: 2756678 - RNA, 12 nt, Human
gaaaauaucacu

SEQ ID NO: 2756679 - RNA, 22 nt, Human
gaaaacaauaacgauaaaagac

SEQ ID NO: 2756680 - RNA, 11 nt, Human
cuuuucugaua

SEQ ID NO: 2756681 - RNA, 14 nt, Human
cuuuucugauagag

SEQ ID NO: 2756682 - RNA, 18 nt, Human
cuuuaaagggauggcaag

SEQ ID NO: 2756683 - RNA, 21 nt, Human
cuuuauuuucuauaauuuaaa

SEQ ID NO: 2756684 - RNA, 13 nt, Human
cuuuccacagaag

SEQ ID NO: 2756685 - RNA, 19 nt, Human
cuuguaaaggaauuuaaaa

SEQ ID NO: 2756686 - RNA, 22 nt, Human
cuugccaucccucccuccaccu

SEQ ID NO: 2756687 - RNA, 21 nt, Human
cuugccaucccucccuccacc

SEQ ID NO: 2756688 - RNA, 20 nt, Human
cuccccuccucugcuugcca

SEQ ID NO: 2756689 - RNA, 13 nt, Human
cuccauccugagg

SEQ ID NO: 2756690 - RNA, 11 nt, Human
cuccccuccuc

SEQ ID NO: 2756691 - RNA, 13 nt, Human
cuccccuccucug

SEQ ID NO: 2756692 - RNA, 12 nt, Human
cuccauccugag

SEQ ID NO: 2756693 - RNA, 11 nt, Human
cuccauccuga

SEQ ID NO: 2756694 - RNA, 23 nt, Human
cuccaccucccugcaauaaaaug

SEQ ID NO: 2756695 - RNA, 21 nt, Human
cuccaaacugacucuuaagaa

SEQ ID NO: 2756696 - RNA, 12 nt, Human
cuccaaagaaau

SEQ ID NO: 2756697 - RNA, 13 nt, Human
cuccaaagaaaug

SEQ ID NO: 2756698 - RNA, 21 nt, Human
cucauuuccaagcaaguauua

SEQ ID NO: 2756699 - RNA, 15 nt, Human
cuauaggugcuacaa

SEQ ID NO: 2756700 - RNA, 20 nt, Human
cuauaggugcuacaaaaaca

SEQ ID NO: 2756701 - RNA, 22 nt, Human
cuauaggugcuacaaaaacaca

SEQ ID NO: 2756702 - RNA, 21 nt, Human
cuauaggugcuacaaaaacac

SEQ ID NO: 2756703 - RNA, 19 nt, Human
cuauauuuucauucuccua

SEQ ID NO: 2756704 - RNA, 15 nt, Human
cuauauuuucauucu

SEQ ID NO: 2756705 - RNA, 16 nt, Human
cuauucaaacagucuc

SEQ ID NO: 2756706 - RNA, 18 nt, Human
cuauucaaacagucucag

SEQ ID NO: 2756707 - RNA, 23 nt, Human
cuauucaaacagucucaggaaau

SEQ ID NO: 2756708 - RNA, 18 nt, Human
cuaugcugaguuugugcu

SEQ ID NO: 2756709 - RNA, 21 nt, Human
cuagugagcagucaggaaaga

SEQ ID NO: 2756710 - RNA, 19 nt, Human
cuagugaaagaggcagcuu

SEQ ID NO: 2756711 - RNA, 18 nt, Human
cuagugaaagaggcagcu

SEQ ID NO: 2756712 - RNA, 20 nt, Human
cuagugaaacucguuaauuu

SEQ ID NO: 2756713 - RNA, 16 nt, Human
cuaguaauuggaaagg

SEQ ID NO: 2756714 - RNA, 15 nt, Human
cucagauuuuauuau

SEQ ID NO: 2756715 - RNA, 17 nt, Human
cucagauuuuauuaugu

SEQ ID NO: 2756716 - RNA, 18 nt, Human
cucagauuuuauuaugua

SEQ ID NO: 2756717 - RNA, 13 nt, Human
cucagauuuuauu

SEQ ID NO: 2756718 - RNA, 16 nt, Human
cuauuucuauauuuuc

SEQ ID NO: 2756719 - RNA, 18 nt, Human
cuauuucuauauuuucau

SEQ ID NO: 2756720 - RNA, 14 nt, Human
cuauuucuauauuu

SEQ ID NO: 2756721 - RNA, 15 nt, Human
cugcaauaaaauggg

SEQ ID NO: 2756722 - RNA, 22 nt, Human
cugcaauaaaauggguuuuacu

SEQ ID NO: 2756723 - RNA, 21 nt, Human
cugauuugacauagucuggcu

SEQ ID NO: 2756724 - RNA, 22 nt, Human
cugauuugacauagucuggcug

SEQ ID NO: 2756725 - RNA, 23 nt, Human
cugauuugacauagucuggcugu

SEQ ID NO: 2756726 - RNA, 21 nt, Human
cugaggcuccacuuggucugu

SEQ ID NO: 2756727 - RNA, 15 nt, Human
cugaggcuccacuug

SEQ ID NO: 2756728 - RNA, 13 nt, Human
cugaguuugugcu

SEQ ID NO: 2756729 - RNA, 18 nt, Human
cugaguuugugcuggugu

SEQ ID NO: 2756730 - RNA, 20 nt, Human
cugcaucagcugcugaaaca

SEQ ID NO: 2756731 - RNA, 23 nt, Human
cucuuugucuacaccauuaugug

SEQ ID NO: 2756732 - RNA, 18 nt, Human
cugagaaagacuauucaa

SEQ ID NO: 2756733 - RNA, 15 nt, Human
cugagaaagacuauu

SEQ ID NO: 2756734 - RNA, 13 nt, Human
cugagaaagacua

SEQ ID NO: 2756735 - RNA, 12 nt, Human
cugagaaagacu

SEQ ID NO: 2756736 - RNA, 21 nt, Human
cugagaugugaacacaucagc

SEQ ID NO: 2756737 - RNA, 20 nt, Human
cugagaaagacuauucaaac

SEQ ID NO: 2756738 - RNA, 19 nt, Human
cugagaaagacuauucaaa

SEQ ID NO: 2756739 - RNA, 20 nt, Human
cugagaugugaacacaucag

SEQ ID NO: 2756740 - RNA, 16 nt, Human
cugagaugugaacaca

SEQ ID NO: 2756741 - RNA, 16 nt, Human
cugagcaggauuuuaa

SEQ ID NO: 2756742 - RNA, 22 nt, Human
cucuggccuucggccuccaucc

SEQ ID NO: 2756743 - RNA, 21 nt, Human
cucuggccuucggccuccauc

SEQ ID NO: 2756744 - RNA, 13 nt, Human
cucuuaagaagac

SEQ ID NO: 2756745 - RNA, 19 nt, Human
cucuuaagaagacugcauu

SEQ ID NO: 2756746 - RNA, 14 nt, Human
gagcugcccucucc

SEQ ID NO: 2756747 - RNA, 15 nt, Human
gagcugcccucuccu

SEQ ID NO: 2756748 - RNA, 16 nt, Human
gagcugcccucuccug

SEQ ID NO: 2756749 - RNA, 14 nt, Human
gagcuacaaaugca

SEQ ID NO: 2756750 - RNA, 13 nt, Human
gagcuacaaaugc

SEQ ID NO: 2756751 - RNA, 12 nt, Human
gagcuacaaaug

SEQ ID NO: 2756752 - RNA, 17 nt, Human
gagccugcacggugaau

SEQ ID NO: 2756753 - RNA, 22 nt, Human
gagccugcacggugaauggcuu

SEQ ID NO: 2756754 - RNA, 23 nt, Human
gagccugcacggugaauggcuuu

SEQ ID NO: 2756755 - RNA, 21 nt, Human
gagcaggcuacugucagcucc

SEQ ID NO: 2756756 - RNA, 19 nt, Human
gaggcagagguugcaguga

SEQ ID NO: 2756757 - RNA, 16 nt, Human
gaggaauucuguauag

SEQ ID NO: 2756758 - RNA, 17 nt, Human
gaggaauucuguauaga

SEQ ID NO: 2756759 - RNA, 14 nt, Human
gaggaauucuguau

SEQ ID NO: 2756760 - RNA, 14 nt, Human
gaucuuuaaaauac

SEQ ID NO: 2756761 - RNA, 13 nt, Human
gaucuuuaaaaua

SEQ ID NO: 2756762 - RNA, 16 nt, Human
gaugggaaagcauugu

SEQ ID NO: 2756763 - RNA, 18 nt, Human
gaugcaguucugaagaag

SEQ ID NO: 2756764 - RNA, 13 nt, Human
gauugugccccug

SEQ ID NO: 2756765 - RNA, 21 nt, Human
gaguugaaaaucuuauaauuu

SEQ ID NO: 2756766 - RNA, 19 nt, Human
gagugaacaaauuuacaga

SEQ ID NO: 2756767 - RNA, 22 nt, Human
gagugaacaaauuuacagagac

SEQ ID NO: 2756768 - RNA, 19 nt, Human
gagugucuuaauuaaaaga

SEQ ID NO: 2756769 - RNA, 13 nt, Human
gauagcagggcau

SEQ ID NO: 2756770 - RNA, 15 nt, Human
gauagaggaagccug

SEQ ID NO: 2756771 - RNA, 21 nt, Human
gauagaggaagccugauuaaa

SEQ ID NO: 2756772 - RNA, 22 nt, Human
gauagaggaagccugauuaaag

SEQ ID NO: 2756773 - RNA, 14 nt, Human
gauagaggaagccu

SEQ ID NO: 2756774 - RNA, 22 nt, Human
gccaugggacagggaggacgcu

SEQ ID NO: 2756775 - RNA, 23 nt, Human
gccaugggacagggaggacgcuc

SEQ ID NO: 2756776 - RNA, 18 nt, Human
gccagacuggcacaguuu

SEQ ID NO: 2756777 - RNA, 15 nt, Human
gccagacuggcacag

SEQ ID NO: 2756778 - RNA, 19 nt, Human
gccagacuggcacaguuuu

SEQ ID NO: 2756779 - RNA, 18 nt, Human
gcagagguugcagugagc

SEQ ID NO: 2756780 - RNA, 23 nt, Human
gcagagguugcagugagccgaga

SEQ ID NO: 2756781 - RNA, 13 nt, Human
gcagauuauucac

SEQ ID NO: 2756782 - RNA, 15 nt, Human
gcacagccucuuaga

SEQ ID NO: 2756783 - RNA, 18 nt, Human
gcacagccucuuagaugc

SEQ ID NO: 2756784 - RNA, 19 nt, Human
gcacuguggguagacacac

SEQ ID NO: 2756785 - RNA, 23 nt, Human
gcaucagcugcugaaacaacaaa

SEQ ID NO: 2756786 - RNA, 22 nt, Human
gcaucagcugcugaaacaacaa

SEQ ID NO: 2756787 - RNA, 20 nt, Human
gcaucuagcaugucgucaaa

SEQ ID NO: 2756788 - RNA, 15 nt, Human
gcaguugaaaagacu

SEQ ID NO: 2756789 - RNA, 19 nt, Human
gcaguugaaaagacuccaa

SEQ ID NO: 2756790 - RNA, 16 nt, Human
gcaguugaaaagacuc

SEQ ID NO: 2756791 - RNA, 21 nt, Human
gcaguugaaaagacuccaaag

SEQ ID NO: 2756792 - RNA, 19 nt, Human
gcaguucagagcugcccuc

SEQ ID NO: 2756793 - RNA, 20 nt, Human
gcaguucagagcugcccucu

SEQ ID NO: 2756794 - RNA, 22 nt, Human
gcaguucagagcugcccucucc

SEQ ID NO: 2756795 - RNA, 23 nt, Human
gcaguucagagcugcccucuccu

SEQ ID NO: 2756796 - RNA, 18 nt, Human
gcuugcccuguuaaaaga

SEQ ID NO: 2756797 - RNA, 12 nt, Human
gcuuuguauaga

SEQ ID NO: 2756798 - RNA, 13 nt, Human
gcuuuguauagaa

SEQ ID NO: 2756799 - RNA, 14 nt, Human
gcuuuguauagaac

SEQ ID NO: 2756800 - RNA, 19 nt, Human
gcuucuguuuuauaauuuu

SEQ ID NO: 2756801 - RNA, 23 nt, Human
gcuggucccagccagcaguucag

SEQ ID NO: 2756802 - RNA, 21 nt, Human
gcugguguaugugugaaguga

SEQ ID NO: 2756803 - RNA, 12 nt, Human
gcugcccucucc

SEQ ID NO: 2756804 - RNA, 21 nt, Human
gcugauuaaaccaaggcuaga

SEQ ID NO: 2756805 - RNA, 13 nt, Human
gcugcccucuccu

SEQ ID NO: 2756806 - RNA, 14 nt, Human
gcugcccucuccug

SEQ ID NO: 2756807 - RNA, 15 nt, Human
gcugcccucuccugg

SEQ ID NO: 2756808 - RNA, 16 nt, Human
gcugcccucuccuggg

SEQ ID NO: 2756809 - RNA, 17 nt, Human
gcugcccucuccugggc

SEQ ID NO: 2756810 - RNA, 18 nt, Human
gcugcccucuccugggca

SEQ ID NO: 2756811 - RNA, 20 nt, Human
gcugcccucuccugggcagc

SEQ ID NO: 2756812 - RNA, 22 nt, Human
gcugcccucuccugggcagcug

SEQ ID NO: 2756813 - RNA, 23 nt, Human
gcugcccucuccugggcagcugc

SEQ ID NO: 2756814 - RNA, 23 nt, Human
gcuggaaaaguauguuagugcaa

SEQ ID NO: 2756815 - RNA, 21 nt, Human
gcuggaaaaguauguuagugc

SEQ ID NO: 2756816 - RNA, 20 nt, Human
gcuccauuuuuagugaaaua

SEQ ID NO: 2756817 - RNA, 19 nt, Human
gcuauaggugcuacaaaaa

SEQ ID NO: 2756818 - RNA, 21 nt, Human
gcuauaggugcuacaaaaaca

SEQ ID NO: 2756819 - RNA, 13 nt, Human
gcuagauguaugu

SEQ ID NO: 2756820 - RNA, 14 nt, Human
gcuagauguaugua

SEQ ID NO: 2756821 - RNA, 17 nt, Human
gccugagcgacagugag

SEQ ID NO: 2756822 - RNA, 20 nt, Human
gccugagcgacagugagacu

SEQ ID NO: 2756823 - RNA, 18 nt, Human
gccuuggggcugaugcag

SEQ ID NO: 2756824 - RNA, 16 nt, Human
ggcuccacuuggucug

SEQ ID NO: 2756825 - RNA, 20 nt, Human
ggcuaguaucaaaagaaaga

SEQ ID NO: 2756826 - RNA, 23 nt, Human
ggcuauaggugcuacaaaaacac

SEQ ID NO: 2756827 - RNA, 21 nt, Human
gggacugaggggaggggagca

SEQ ID NO: 2756828 - RNA, 15 nt, Human
ggcuuuguauagaac

SEQ ID NO: 2756829 - RNA, 17 nt, Human
gggaggacgcucucugg

SEQ ID NO: 2756830 - RNA, 20 nt, Human
gggaggacgcucucuggccu

SEQ ID NO: 2756831 - RNA, 13 nt, Human
ggauucuuaaagu

SEQ ID NO: 2756832 - RNA, 21 nt, Human
ggcagagguugcagugagccg

SEQ ID NO: 2756833 - RNA, 17 nt, Human
ggauuagggagagaaga

SEQ ID NO: 2756834 - RNA, 11 nt, Human
ggcagcugccu

SEQ ID NO: 2756835 - RNA, 12 nt, Human
ggcagcugccuc

SEQ ID NO: 2756836 - RNA, 13 nt, Human
ggcagcugccucc

SEQ ID NO: 2756837 - RNA, 16 nt, Human
ggcagcugccuccccu

SEQ ID NO: 2756838 - RNA, 16 nt, Human
ggacauuugcucaugg

SEQ ID NO: 2756839 - RNA, 17 nt, Human
ggacauuugcucaugga

SEQ ID NO: 2756840 - RNA, 20 nt, Human
ggacauuugcucauggaauu

SEQ ID NO: 2756841 - RNA, 15 nt, Human
ggagaagagcuguuc

SEQ ID NO: 2756842 - RNA, 11 nt, Human
ggagaagaacu

SEQ ID NO: 2756843 - RNA, 14 nt, Human
ggagaagaacugaa

SEQ ID NO: 2756844 - RNA, 23 nt, Human
ggagaagagcuguucacagccag

SEQ ID NO: 2756845 - RNA, 15 nt, Human
ggacgcucucuggcc

SEQ ID NO: 2756846 - RNA, 16 nt, Human
ggacgcucucuggccu

SEQ ID NO: 2756847 - RNA, 19 nt, Human
ggacgcucucuggccuucg

SEQ ID NO: 2756848 - RNA, 19 nt, Human
ggaggggagcaugggaagu

SEQ ID NO: 2756849 - RNA, 16 nt, Human
ggaggacgcucucugg

SEQ ID NO: 2756850 - RNA, 18 nt, Human
ucagagcugcccucuccu

SEQ ID NO: 2756851 - RNA, 19 nt, Human
ucagagcugcccucuccug

SEQ ID NO: 2756852 - RNA, 20 nt, Human
ucagagcugcccucuccugg

SEQ ID NO: 2756853 - RNA, 21 nt, Human
ucagagcugcccucuccuggg

SEQ ID NO: 2756854 - RNA, 22 nt, Human
ucagagcugcccucuccugggc

SEQ ID NO: 2756855 - RNA, 17 nt, Human
ucagcuccccucggaga

SEQ ID NO: 2756856 - RNA, 18 nt, Human
ucagcuccccucggagaa

SEQ ID NO: 2756857 - RNA, 13 nt, Human
ucaggcuagaugu

SEQ ID NO: 2756858 - RNA, 17 nt, Human
ucaggcuagauguaugu

SEQ ID NO: 2756859 - RNA, 19 nt, Human
uccacagaagcuccaggua

SEQ ID NO: 2756860 - RNA, 12 nt, Human
uccaccucccug

SEQ ID NO: 2756861 - RNA, 13 nt, Human
uccaccucccugc

SEQ ID NO: 2756862 - RNA, 14 nt, Human
uccaccucccugca

SEQ ID NO: 2756863 - RNA, 15 nt, Human
uccaccucccugcaa

SEQ ID NO: 2756864 - RNA, 16 nt, Human
uccaccucccugcaau

SEQ ID NO: 2756865 - RNA, 17 nt, Human
uccaccucccugcaaua

SEQ ID NO: 2756866 - RNA, 15 nt, Human
uccacuuggucugug

SEQ ID NO: 2756867 - RNA, 16 nt, Human
uccacuuggucuguga

SEQ ID NO: 2756868 - RNA, 14 nt, Human
uccacuuggucugu

SEQ ID NO: 2756869 - RNA, 18 nt, Human
ucauaccuaucaucuuaa

SEQ ID NO: 2756870 - RNA, 13 nt, Human
ucauuaucucaaa

SEQ ID NO: 2756871 - RNA, 20 nt, Human
ucauuaucucaaaacugcac

SEQ ID NO: 2756872 - RNA, 19 nt, Human
ucauuaucucaaaacugca

SEQ ID NO: 2756873 - RNA, 23 nt, Human
ucauuauuuuauuaugaaacuug

SEQ ID NO: 2756874 - RNA, 22 nt, Human
ucauuauuuuauuaugaaacuu

SEQ ID NO: 2756875 - RNA, 13 nt, Human
ucauuuccaagca

SEQ ID NO: 2756876 - RNA, 16 nt, Human
ucauuuccaagcaagu

SEQ ID NO: 2756877 - RNA, 13 nt, Human
uauguacuucaug

SEQ ID NO: 2756878 - RNA, 17 nt, Human
uauguacuucaugcugu

SEQ ID NO: 2756879 - RNA, 15 nt, Human
uauguaaaucccauu

SEQ ID NO: 2756880 - RNA, 19 nt, Human
uauguaaaucccauuauuc

SEQ ID NO: 2756881 - RNA, 20 nt, Human
uauguaaaucccauuauuca

SEQ ID NO: 2756882 - RNA, 21 nt, Human
uauguaaaucccauuauucaa

SEQ ID NO: 2756883 - RNA, 23 nt, Human
uauguaaaucccauuauucaaag

SEQ ID NO: 2756884 - RNA, 12 nt, Human
uauguaaauccc

SEQ ID NO: 2756885 - RNA, 16 nt, Human
uauuauucccauucua

SEQ ID NO: 2756886 - RNA, 12 nt, Human
uauuacaguaua

SEQ ID NO: 2756887 - RNA, 13 nt, Human
uauuacaguauaa

SEQ ID NO: 2756888 - RNA, 14 nt, Human
ucaaauugugugaa

SEQ ID NO: 2756889 - RNA, 20 nt, Human
ucaaaucaagaaacuuaagg

SEQ ID NO: 2756890 - RNA, 14 nt, Human
ucaaauaugcaaag

SEQ ID NO: 2756891 - RNA, 18 nt, Human
uauuuuauuaugaaacuu

SEQ ID NO: 2756892 - RNA, 23 nt, Human
uauuuuauuaugaaacuugugua

SEQ ID NO: 2756893 - RNA, 13 nt, Human
uauuuuauuauga

SEQ ID NO: 2756894 - RNA, 15 nt, Human
uauuuucauucuccu

SEQ ID NO: 2756895 - RNA, 21 nt, Human
ucaauaaaauccauacauuug

SEQ ID NO: 2756896 - RNA, 13 nt, Human
ucaaugcagcccc

SEQ ID NO: 2756897 - RNA, 17 nt, Human
ucacaagacccaaaagg

SEQ ID NO: 2756898 - RNA, 18 nt, Human
ucacaagacccaaaaggc

SEQ ID NO: 2756899 - RNA, 13 nt, Human
ucacaagacccaa

SEQ ID NO: 2756900 - RNA, 16 nt, Human
ucacagucacauucca

SEQ ID NO: 2756901 - RNA, 14 nt, Human
ucaccaaggcugau

SEQ ID NO: 2756902 - RNA, 16 nt, Human
uccuuggacucauuuu

SEQ ID NO: 2756903 - RNA, 20 nt, Human
uccugccuaagugcagcccc

SEQ ID NO: 2756904 - RNA, 17 nt, Human
uccuggcaauagucaaa

SEQ ID NO: 2756905 - RNA, 13 nt, Human
ucguuaauuugua

SEQ ID NO: 2756906 - RNA, 18 nt, Human
ucggccuccauccugagg

SEQ ID NO: 2756907 - RNA, 17 nt, Human
ucggccuccauccugag

SEQ ID NO: 2756908 - RNA, 21 nt, Human
ucguggaacaguuaccucugc

SEQ ID NO: 2756909 - RNA, 22 nt, Human
ucgugggacagucaccucaugg

SEQ ID NO: 2756910 - RNA, 13 nt, Human
ucuaugaaauauu

SEQ ID NO: 2756911 - RNA, 14 nt, Human
ucuaugaaauauua

SEQ ID NO: 2756912 - RNA, 17 nt, Human
ucuaugaaauauuaugu

SEQ ID NO: 2756913 - RNA, 19 nt, Human
ucuauauuuucauucuccu

SEQ ID NO: 2756914 - RNA, 15 nt, Human
ucucaacuccaaacu

SEQ ID NO: 2756915 - RNA, 16 nt, Human
ucuaugcugaguuugu

SEQ ID NO: 2756916 - RNA, 20 nt, Human
ucuaugcugaguuugugcug

SEQ ID NO: 2756917 - RNA, 19 nt, Human
ucuagugagcagucaggaa

SEQ ID NO: 2756918 - RNA, 22 nt, Human
ucuagugagcagucaggaaaga

SEQ ID NO: 2756919 - RNA, 20 nt, Human
uccucugcuugccaucccuc

SEQ ID NO: 2756920 - RNA, 19 nt, Human
uccucugcuugccaucccu

SEQ ID NO: 2756921 - RNA, 21 nt, Human
uccucugcuugccaucccucc

SEQ ID NO: 2756922 - RNA, 22 nt, Human
uccucugcuugccaucccuccc

SEQ ID NO: 2756923 - RNA, 15 nt, Human
ucccuugaugaagaa

SEQ ID NO: 2756924 - RNA, 16 nt, Human
ucccuugaugaagaag

SEQ ID NO: 2756925 - RNA, 16 nt, Human
ucccugcaauaaaaug

SEQ ID NO: 2756926 - RNA, 23 nt, Human
ucucuggccuucggccuccaucc

SEQ ID NO: 2756927 - RNA, 19 nt, Human
ucucuaggaaauauuuauu

SEQ ID NO: 2756928 - RNA, 14 nt, Human
ucugcaucagcugc

SEQ ID NO: 2756929 - RNA, 21 nt, Human
ucugcaucagcugcugaaaca

SEQ ID NO: 2756930 - RNA, 19 nt, Human
ucugcaucagcugcugaaa

SEQ ID NO: 2756931 - RNA, 15 nt, Human
ucugaggaauucugu

SEQ ID NO: 2756932 - RNA, 16 nt, Human
ucugaggaauucugua

SEQ ID NO: 2756933 - RNA, 17 nt, Human
ucugaggaauucuguau

SEQ ID NO: 2756934 - RNA, 18 nt, Human
ucugaggaauucuguaua

SEQ ID NO: 2756935 - RNA, 14 nt, Human
ucugaggaauucug

SEQ ID NO: 2756936 - RNA, 15 nt, Human
ucugucuucacaaca

SEQ ID NO: 2756937 - RNA, 13 nt, Human
ucuuaaaguugaa

SEQ ID NO: 2756938 - RNA, 14 nt, Human
ucuuaaaguugaau

SEQ ID NO: 2756939 - RNA, 12 nt, Human
ucuuaaaguuga

SEQ ID NO: 2756940 - RNA, 18 nt, Human
ucuuaagaagacugcauu

SEQ ID NO: 2756941 - RNA, 12 nt, Human
ucuuaagaagac

SEQ ID NO: 2756942 - RNA, 16 nt, Human
ucuuaaaguugaauuu

SEQ ID NO: 2756943 - RNA, 19 nt, Human
ucuuaaaguugaauuuauu

SEQ ID NO: 2756944 - RNA, 20 nt, Human
ucuuaaaguugaauuuauug

SEQ ID NO: 2756945 - RNA, 21 nt, Human
ucuuaaaguugaauuuauugg

SEQ ID NO: 2756946 - RNA, 22 nt, Human
ucuuaaaguugaauuuauuggc

SEQ ID NO: 2756947 - RNA, 23 nt, Human
ucuucagcaaaaauauuuuauga

SEQ ID NO: 2756948 - RNA, 21 nt, Human
ucuucagcaaaaauauuuuau

SEQ ID NO: 2756949 - RNA, 22 nt, Human
ucuucagcaaaaauauuuuaug

SEQ ID NO: 2756950 - RNA, 17 nt, Human
ucuggccuucggccucc

SEQ ID NO: 2756951 - RNA, 18 nt, Human
ucuggccuucggccucca

SEQ ID NO: 2756952 - RNA, 10 nt, Human
ucuggccuuc

SEQ ID NO: 2756953 - RNA, 11 nt, Human
uguaaaauggu

SEQ ID NO: 2756954 - RNA, 12 nt, Human
uguaaaauggug

SEQ ID NO: 2756955 - RNA, 21 nt, Human
uguacaaaguauuaagcauau

SEQ ID NO: 2756956 - RNA, 17 nt, Human
uguacaaaguauuaagc

SEQ ID NO: 2756957 - RNA, 18 nt, Human
uguacaaaguauuaagca

SEQ ID NO: 2756958 - RNA, 19 nt, Human
uguacaaaguauuaagcau

SEQ ID NO: 2756959 - RNA, 20 nt, Human
uguacaaaguauuaagcaua

SEQ ID NO: 2756960 - RNA, 15 nt, Human
uguacaaaguauuaa

SEQ ID NO: 2756961 - RNA, 16 nt, Human
ugguucccuugaugaa

SEQ ID NO: 2756962 - RNA, 17 nt, Human
ugguucccuugaugaag

SEQ ID NO: 2756963 - RNA, 20 nt, Human
ugguucccuugaugaagaag

SEQ ID NO: 2756964 - RNA, 14 nt, Human
uggguagacacaca

SEQ ID NO: 2756965 - RNA, 15 nt, Human
uggugacuuuggaua

SEQ ID NO: 2756966 - RNA, 16 nt, Human
uggugacuuuggauaa

SEQ ID NO: 2756967 - RNA, 18 nt, Human
uggugacuuuggauaaua

SEQ ID NO: 2756968 - RNA, 19 nt, Human
uggugacuuuggauaauaa

SEQ ID NO: 2756969 - RNA, 23 nt, Human
uggugacuuuggauaauaaggaa

SEQ ID NO: 2756970 - RNA, 22 nt, Human
ugucuacacuaagagagaauga

SEQ ID NO: 2756971 - RNA, 18 nt, Human
ugucuacaccauuaugug

SEQ ID NO: 2756972 - RNA, 17 nt, Human
ugucuacacuaagagag

SEQ ID NO: 2756973 - RNA, 17 nt, Human
ugucuacaccauuaugu

SEQ ID NO: 2756974 - RNA, 16 nt, Human
ugucucagauuuuauu

SEQ ID NO: 2756975 - RNA, 20 nt, Human
ugucucagauuuuauuaugu

SEQ ID NO: 2756976 - RNA, 22 nt, Human
ugucucagauuuuauuauguaa

SEQ ID NO: 2756977 - RNA, 19 nt, Human
uguaguguuggagaagaac

SEQ ID NO: 2756978 - RNA, 20 nt, Human
uguaguguuggagaagaacu

SEQ ID NO: 2756979 - RNA, 21 nt, Human
uguaguguuggagaagaacug

SEQ ID NO: 2756980 - RNA, 13 nt, Human
uguauaaaauaau

SEQ ID NO: 2756981 - RNA, 14 nt, Human
uguauaaaauaauu

SEQ ID NO: 2756982 - RNA, 15 nt, Human
uguauagauuagaau

SEQ ID NO: 2756983 - RNA, 21 nt, Human
uguauagauuagaauucugua

SEQ ID NO: 2756984 - RNA, 23 nt, Human
uguauagaaccucuuugucuaca

SEQ ID NO: 2756985 - RNA, 23 nt, Human
uguauagauuagagaguguugaa

SEQ ID NO: 2756986 - RNA, 18 nt, Human
uguauuuuaaaagaauga

SEQ ID NO: 2756987 - RNA, 19 nt, Human
uguauuuuaaaagaaugau

SEQ ID NO: 2756988 - RNA, 17 nt, Human
ugcuucuguuuuauaau

SEQ ID NO: 2756989 - RNA, 22 nt, Human
ugcuucuguuuuauaauuuugu

SEQ ID NO: 2756990 - RNA, 14 nt, Human
uggaacgcguugaa

SEQ ID NO: 2756991 - RNA, 15 nt, Human
uggaacgcguugaaa

SEQ ID NO: 2756992 - RNA, 16 nt, Human
uggaacgcguugaaau

SEQ ID NO: 2756993 - RNA, 15 nt, Human
uggaccaaaaaccag

SEQ ID NO: 2756994 - RNA, 22 nt, Human
uggccuucggccuccauccuga

SEQ ID NO: 2756995 - RNA, 20 nt, Human
uggccuucggccuccauccu

SEQ ID NO: 2756996 - RNA, 23 nt, Human
uggccuucggccuccauccugag

SEQ ID NO: 2756997 - RNA, 14 nt, Human
ugggacagggagga

SEQ ID NO: 2756998 - RNA, 13 nt, Human
ugggauaaaugcc

SEQ ID NO: 2756999 - RNA, 14 nt, Human
ugggauaaaugcca

SEQ ID NO: 2757000 - RNA, 12 nt, Human
ugggauaaaugc

SEQ ID NO: 2757001 - RNA, 20 nt, Human
ugggcagcugccuccccucc

SEQ ID NO: 2757002 - RNA, 22 nt, Human
ugggcagcugccuccccuccuc

SEQ ID NO: 2757003 - RNA, 23 nt, Human
ugggcagcugccuccccuccucu

SEQ ID NO: 2757004 - RNA, 23 nt, Human
ugggguuaucugaagucagaucu

SEQ ID NO: 2757005 - RNA, 12 nt, Human
ugacucuuaaga

SEQ ID NO: 2757006 - RNA, 13 nt, Human
ugacugauucuuc

SEQ ID NO: 2757007 - RNA, 14 nt, Human
ugacugauucuuca

SEQ ID NO: 2757008 - RNA, 15 nt, Human
ugacugauucuucag

SEQ ID NO: 2757009 - RNA, 16 nt, Human
ugacugauucuucagc

SEQ ID NO: 2757010 - RNA, 17 nt, Human
ugacugauucuucagca

SEQ ID NO: 2757011 - RNA, 17 nt, Human
ugagaaagacuauucaa

SEQ ID NO: 2757012 - RNA, 16 nt, Human
ugagaaagacuauuca

SEQ ID NO: 2757013 - RNA, 18 nt, Human
ugagaaagacuauucaaa

SEQ ID NO: 2757014 - RNA, 14 nt, Human
ugagacagcucugc

SEQ ID NO: 2757015 - RNA, 16 nt, Human
ugagacagcucugcau

SEQ ID NO: 2757016 - RNA, 14 nt, Human
ugagaugcuagaac

SEQ ID NO: 2757017 - RNA, 16 nt, Human
ugagaugcuagaacuc

SEQ ID NO: 2757018 - RNA, 20 nt, Human
ugagaugcuagaacucccuu

SEQ ID NO: 2757019 - RNA, 20 nt, Human
ugagcagucaggaaagagaa

SEQ ID NO: 2757020 - RNA, 17 nt, Human
ugagcagucaggaaaga

SEQ ID NO: 2757021 - RNA, 15 nt, Human
ugagcagucaggaaa

SEQ ID NO: 2757022 - RNA, 24 nt, Human
ugauaguuguaccgcaaugugacu

SEQ ID NO: 2757023 - RNA, 21 nt, Human
ugcauuauauuuauuacugua

SEQ ID NO: 2757024 - RNA, 17 nt, Human
ugcagauaaacaguagu

SEQ ID NO: 2757025 - RNA, 19 nt, Human
ugcagauaaacaguaguga

SEQ ID NO: 2757026 - RNA, 17 nt, Human
ugcaugguuuagaaagc

SEQ ID NO: 2757027 - RNA, 12 nt, Human
ugcccugcuuuc

SEQ ID NO: 2757028 - RNA, 16 nt, Human
ugcccugcuuucagau

SEQ ID NO: 2757029 - RNA, 17 nt, Human
ugcccugcuuucagaua

SEQ ID NO: 2757030 - RNA, 14 nt, Human
ugccuaaggacuuc

SEQ ID NO: 2757031 - RNA, 15 nt, Human
ugccuaaggacuucu

SEQ ID NO: 2757032 - RNA, 16 nt, Human
ugccuaaggacuucuu

SEQ ID NO: 2757033 - RNA, 20 nt, Human
ugccuaaggacuucuuuaau

SEQ ID NO: 2757034 - RNA, 12 nt, Human
ugccuaaggacu

SEQ ID NO: 2757035 - RNA, 13 nt, Human
ugccuaaggacuu

SEQ ID NO: 2757036 - RNA, 21 nt, Human
ugccuaaggacuucuuuaauu

SEQ ID NO: 2757037 - RNA, 16 nt, Human
ugcacugucaagauga

SEQ ID NO: 2757038 - RNA, 13 nt, Human
uuuucuuauuuca

SEQ ID NO: 2757039 - RNA, 13 nt, Human
uuuuauauuugaa

SEQ ID NO: 2757040 - RNA, 18 nt, Human
uuuuauauuugaaauauu

SEQ ID NO: 2757041 - RNA, 13 nt, Human
uuuuauauuuacu

SEQ ID NO: 2757042 - RNA, 21 nt, Human
uuuuaaaguaacccuacaaaa

SEQ ID NO: 2757043 - RNA, 21 nt, Human
uuuuauaauuuugugaagcaa

SEQ ID NO: 2757044 - RNA, 23 nt, Human
uuuuauaauuuugugaagcaaaa

SEQ ID NO: 2757045 - RNA, 15 nt, Human
uuuccacagaagcuc

SEQ ID NO: 2757046 - RNA, 18 nt, Human
uuuggaccaaaaaccagu

SEQ ID NO: 2757047 - RNA, 21 nt, Human
uuuggaccaaaaaccaguauu

SEQ ID NO: 2757048 - RNA, 22 nt, Human
uuuggaccaaaaaccaguauug

SEQ ID NO: 2757049 - RNA, 17 nt, Human
uuuguauaaaauaauuu

SEQ ID NO: 2757050 - RNA, 18 nt, Human
uuuguauaaaauaauuuu

SEQ ID NO: 2757051 - RNA, 19 nt, Human
uuuguauaaaauaauuuuu

SEQ ID NO: 2757052 - RNA, 24 nt, Human
uuuggaccaaaaaccaguauugua

SEQ ID NO: 2757053 - RNA, 13 nt, Human
uuuuucauuauuu

SEQ ID NO: 2757054 - RNA, 22 nt, Human
uuuuucauuauuuuauuaugaa

SEQ ID NO: 2757055 - RNA, 19 nt, Human
uuuaacucuauaauguguu

SEQ ID NO: 2757056 - RNA, 16 nt, Human
uuuaacaacagcuggu

SEQ ID NO: 2757057 - RNA, 21 nt, Human
uuguuuggaccaaaaaccagu

SEQ ID NO: 2757058 - RNA, 13 nt, Human
uuuaauaauguuu

SEQ ID NO: 2757059 - RNA, 13 nt, Human
uuuaccacuugug

SEQ ID NO: 2757060 - RNA, 18 nt, Human
uuuaauaauuauaugcua

SEQ ID NO: 2757061 - RNA, 21 nt, Human
uuuaauaauuauaugcuauuu

SEQ ID NO: 2757062 - RNA, 17 nt, Human
uuuauggcacuaguauu

SEQ ID NO: 2757063 - RNA, 16 nt, Human
uuuauuauguaaaucc

SEQ ID NO: 2757064 - RNA, 17 nt, Human
uuuauuauguaaauccc

SEQ ID NO: 2757065 - RNA, 14 nt, Human
uuuauuauguaaau

SEQ ID NO: 2757066 - RNA, 22 nt, Human
uuuauaauuuugugaagcaaaa

SEQ ID NO: 2757067 - RNA, 22 nt, Human
uuuauuguuuaaaaucauuucu

SEQ ID NO: 2757068 - RNA, 13 nt, Human
uuucagauacugg

SEQ ID NO: 2757069 - RNA, 21 nt, Human
uuucagauacuggauuguacu

SEQ ID NO: 2757070 - RNA, 21 nt, Human
uuucagauaaucacaauacau

SEQ ID NO: 2757071 - RNA, 14 nt, Human
uuguuuaaaaucau

SEQ ID NO: 2757072 - RNA, 17 nt, Human
uuguuguuuguuuaguc

SEQ ID NO: 2757073 - RNA, 18 nt, Human
uuguguuuugcaagccag

SEQ ID NO: 2757074 - RNA, 17 nt, Human
uuguuagaucuaguuca

SEQ ID NO: 2757075 - RNA, 12 nt, Human
uugugccccugc

SEQ ID NO: 2757076 - RNA, 19 nt, Human
uugugcugggguuaucuga

SEQ ID NO: 2757077 - RNA, 22 nt, Human
uugugcgcuaaacuuuucugau

SEQ ID NO: 2757078 - RNA, 23 nt, Human
uugugcgcuaaacuuuucugaua

SEQ ID NO: 2757079 - RNA, 15 nt, Human
uugucuagugaaacu

SEQ ID NO: 2757080 - RNA, 20 nt, Human
uugucuacaccauuaugugc

SEQ ID NO: 2757081 - RNA, 16 nt, Human
uugucucagauuuuau

SEQ ID NO: 2757082 - RNA, 20 nt, Human
uugucucagauuuuauuaug

SEQ ID NO: 2757083 - RNA, 13 nt, Human
uugucucagauuu

SEQ ID NO: 2757084 - RNA, 22 nt, Human
uugucucagauuuuauuaugua

SEQ ID NO: 2757085 - RNA, 19 nt, Human
uugucuacaccauuaugug

SEQ ID NO: 2757086 - RNA, 14 nt, Human
uuguacucaauuuu

SEQ ID NO: 2757087 - RNA, 15 nt, Human
uuguacucaauuuua

SEQ ID NO: 2757088 - RNA, 15 nt, Human
uuggucugugagaug

SEQ ID NO: 2757089 - RNA, 16 nt, Human
uuggucugugagaugc

SEQ ID NO: 2757090 - RNA, 13 nt, Human
uuggguguauugu

SEQ ID NO: 2757091 - RNA, 15 nt, Human
uuggguguauugugc

SEQ ID NO: 2757092 - RNA, 16 nt, Human
uuggguguauugugcg

SEQ ID NO: 2757093 - RNA, 18 nt, Human
uuauggcuauaggugcua

SEQ ID NO: 2757094 - RNA, 16 nt, Human
uuauuacaguauaauu

SEQ ID NO: 2757095 - RNA, 22 nt, Human
uuaugauuaaguaaugauaacu

SEQ ID NO: 2757096 - RNA, 11 nt, Human
uuaucucaaaa

SEQ ID NO: 2757097 - RNA, 16 nt, Human
uuauauuuacaaaugg

SEQ ID NO: 2757098 - RNA, 20 nt, Human
uuauauuuauuacuguaaga

SEQ ID NO: 2757099 - RNA, 12 nt, Human
uuauauuugaaa

SEQ ID NO: 2757100 - RNA, 13 nt, Human
uuauauuugaaau

SEQ ID NO: 2757101 - RNA, 11 nt, Human
uuauaaucuuu

SEQ ID NO: 2757102 - RNA, 14 nt, Human
uuauaauuuuguga

SEQ ID NO: 2757103 - RNA, 15 nt, Human
uuauaauuuugugaa

SEQ ID NO: 2757104 - RNA, 12 nt, Human
uuauaauuuaaa

SEQ ID NO: 2757105 - RNA, 16 nt, Human
uuauaauuuugugaag

SEQ ID NO: 2757106 - RNA, 17 nt, Human
uuauaauuuugugaagc

SEQ ID NO: 2757107 - RNA, 18 nt, Human
uuauaauuuugugaagca

SEQ ID NO: 2757108 - RNA, 20 nt, Human
uuauaucugaggaauucugu

SEQ ID NO: 2757109 - RNA, 21 nt, Human
uuauaucugaggaauucugua

SEQ ID NO: 2757110 - RNA, 14 nt, Human
uuauaucugaggaa

SEQ ID NO: 2757111 - RNA, 22 nt, Human
uuauaucugaggaauucuguau

SEQ ID NO: 2757112 - RNA, 23 nt, Human
uuauaucugaggaauucuguaua

SEQ ID NO: 2757113 - RNA, 16 nt, Human
uuauaugcuauuucua

SEQ ID NO: 2757114 - RNA, 18 nt, Human
uuauaugcuauuucuaua

SEQ ID NO: 2757115 - RNA, 15 nt, Human
uucagagcugcccuc

SEQ ID NO: 2757116 - RNA, 17 nt, Human
uucagagcugcccucuc

SEQ ID NO: 2757117 - RNA, 18 nt, Human
uucagagcugcccucucc

SEQ ID NO: 2757118 - RNA, 19 nt, Human
uucagagcugcccucuccu

SEQ ID NO: 2757119 - RNA, 20 nt, Human
uucagagcugcccucuccug

SEQ ID NO: 2757120 - RNA, 20 nt, Human
uucagauaaucacaauacau

SEQ ID NO: 2757121 - RNA, 16 nt, Human
uucagauacuggauug

SEQ ID NO: 2757122 - RNA, 20 nt, Human
uucagauacuggauuguacu

SEQ ID NO: 2757123 - RNA, 20 nt, Human
uuauuuuaauaauguuucaa

SEQ ID NO: 2757124 - RNA, 14 nt, Human
uuauuuuauuauga

SEQ ID NO: 2757125 - RNA, 15 nt, Human
uuauuuuauuaugaa

SEQ ID NO: 2757126 - RNA, 16 nt, Human
uuauuuuauuaugaaa

SEQ ID NO: 2757127 - RNA, 17 nt, Human
uuauuuuaauaauguuu

SEQ ID NO: 2757128 - RNA, 19 nt, Human
uuauuuuaauaauguuuca

SEQ ID NO: 2757129 - RNA, 20 nt, Human
uuauuuuauuaugaaacuug

SEQ ID NO: 2757130 - RNA, 18 nt, Human
uuccagauccuggaaauc

SEQ ID NO: 2757131 - RNA, 23 nt, Human
uucaguuauuauauuuacaaaug

SEQ ID NO: 2757132 - RNA, 18 nt, Human
uucggugagcuacaaaug

SEQ ID NO: 2757133 - RNA, 15 nt, Human
uucuacauacuaugg

SEQ ID NO: 2757134 - RNA, 21 nt, Human
uucugagaaagacuauucaaa

SEQ ID NO: 2757135 - RNA, 16 nt, Human
uucugagaaagacuau

SEQ ID NO: 2757136 - RNA, 13 nt, Human
uucugauagagga

SEQ ID NO: 2757137 - RNA, 21 nt, Human
uucugauagaggaagccugau

SEQ ID NO: 2757138 - RNA, 21 nt, Human
uucuaugaaauauuauguuaa

SEQ ID NO: 2757139 - RNA, 14 nt, Human
uucuaugaaauauu

SEQ ID NO: 2757140 - RNA, 14 nt, Human
uugacccacaagaa

SEQ ID NO: 2757141 - RNA, 17 nt, Human
uugacccacaagaaaug

SEQ ID NO: 2757142 - RNA, 15 nt, Human
uugaauuuauuggcu

SEQ ID NO: 2757143 - RNA, 18 nt, Human
uugaauuuauuggcuuuu

SEQ ID NO: 2757144 - RNA, 22 nt, Human
uugaauuuauuggcuuuucuga

SEQ ID NO: 2757145 - RNA, 17 nt, Human
uugaauuuuguguuaga

SEQ ID NO: 2757146 - RNA, 21 nt, Human
uugaauuuuguguuagagauu

SEQ ID NO: 2757147 - RNA, 23 nt, Human
uugaugaagaaguugauaugccu

SEQ ID NO: 2757148 - RNA, 13 nt, Human
uugaugaagaagu

SEQ ID NO: 2757149 - RNA, 14 nt, Human
uugaugaagaaguu

SEQ ID NO: 2757150 - RNA, 17 nt, Human
uucugucuucacaacag

SEQ ID NO: 2757151 - RNA, 17 nt, Human
aaaagaaagaaaaucag

SEQ ID NO: 2757152 - RNA, 12 nt, Human
aaaagaauauuu

SEQ ID NO: 2757153 - RNA, 20 nt, Human
aaaagacaaggaaaaaauaa

SEQ ID NO: 2757154 - RNA, 13 nt, Human
aaaagaauauuuu

SEQ ID NO: 2757155 - RNA, 11 nt, Human
aaaagaaugau

SEQ ID NO: 2757156 - RNA, 13 nt, Human
aaaagacuccaaa

SEQ ID NO: 2757157 - RNA, 10 nt, Human
aaaaucauuu

SEQ ID NO: 2757158 - RNA, 12 nt, Human
aaaaucauuucu

SEQ ID NO: 2757159 - RNA, 11 nt, Human
aaaaucauuuc

SEQ ID NO: 2757160 - RNA, 14 nt, Human
aaaaguuuaauauu

SEQ ID NO: 2757161 - RNA, 16 nt, Human
aaaaguuuaauauuaa

SEQ ID NO: 2757162 - RNA, 18 nt, Human
aaaaguuuaauauuaaag

SEQ ID NO: 2757163 - RNA, 17 nt, Human
aaagcauuguaaaugug

SEQ ID NO: 2757164 - RNA, 15 nt, Human
aaagcauuguaaaug

SEQ ID NO: 2757165 - RNA, 14 nt, Human
aaagccauguuuau

SEQ ID NO: 2757166 - RNA, 16 nt, Human
aaagccauguuuauua

SEQ ID NO: 2757167 - RNA, 17 nt, Human
aaagccauguuuauuac

SEQ ID NO: 2757168 - RNA, 18 nt, Human
aaagccauguuuauuaca

SEQ ID NO: 2757169 - RNA, 23 nt, Human
aaagccauguuuauuacaguaua

SEQ ID NO: 2757170 - RNA, 21 nt, Human
aaaaucauuucugcaucagcu

SEQ ID NO: 2757171 - RNA, 15 nt, Human
aaacugcacugucaa

SEQ ID NO: 2757172 - RNA, 19 nt, Human
aaacccuugccaugugcua

SEQ ID NO: 2757173 - RNA, 14 nt, Human
aaaccaguauugua

SEQ ID NO: 2757174 - RNA, 16 nt, Human
aaaccaguauuguaca

SEQ ID NO: 2757175 - RNA, 17 nt, Human
aaaccaguauuguacaa

SEQ ID NO: 2757176 - RNA, 18 nt, Human
aaaccaguauuguacaaa

SEQ ID NO: 2757177 - RNA, 22 nt, Human
aaaccaguauuguacaaaguau

SEQ ID NO: 2757178 - RNA, 21 nt, Human
aaauauuuauuuuaauaaugu

SEQ ID NO: 2757179 - RNA, 18 nt, Human
aaaucucaauauuucaga

SEQ ID NO: 2757180 - RNA, 21 nt, Human
aaauggacuguggugacuuug

SEQ ID NO: 2757181 - RNA, 20 nt, Human
aaauggacuguggugacuuu

SEQ ID NO: 2757182 - RNA, 23 nt, Human
aaauggacuguggugacuuugga

SEQ ID NO: 2757183 - RNA, 13 nt, Human
aaauguucaucaa

SEQ ID NO: 2757184 - RNA, 22 nt, Human
aaauguugacaugggacauuug

SEQ ID NO: 2757185 - RNA, 23 nt, Human
aaauguugacaugggacauuugc

SEQ ID NO: 2757186 - RNA, 20 nt, Human
aaugaauacuuuauaaagga

SEQ ID NO: 2757187 - RNA, 16 nt, Human
aaucucaauauuucag

SEQ ID NO: 2757188 - RNA, 22 nt, Human
aauauuaaagccauguuuauua

SEQ ID NO: 2757189 - RNA, 15 nt, Human
aaguugaauuuauug

SEQ ID NO: 2757190 - RNA, 17 nt, Human
aaguugaauuuauuggc

SEQ ID NO: 2757191 - RNA, 14 nt, Human
aaguugaauuuauu

SEQ ID NO: 2757192 - RNA, 23 nt, Human
aaguugaauuuauuggcuuuucu

SEQ ID NO: 2757193 - RNA, 24 nt, Human
aaguugaauuuauuggcuuuucug

SEQ ID NO: 2757194 - RNA, 15 nt, Human
aaguuuaauauuaaa

SEQ ID NO: 2757195 - RNA, 17 nt, Human
aaguuuaauauuaaagc

SEQ ID NO: 2757196 - RNA, 21 nt, Human
aagacaaggaaaaaauaacaa

SEQ ID NO: 2757197 - RNA, 20 nt, Human
aagaagacugcauuauauuu

SEQ ID NO: 2757198 - RNA, 15 nt, Human
aagaagacugcauua

SEQ ID NO: 2757199 - RNA, 20 nt, Human
aacgcaggcccccaggugcc

SEQ ID NO: 2757200 - RNA, 12 nt, Human
aagaacugaaau

SEQ ID NO: 2757201 - RNA, 13 nt, Human
aagaacugaaauc

SEQ ID NO: 2757202 - RNA, 11 nt, Human
aagaacugaaa

SEQ ID NO: 2757203 - RNA, 15 nt, Human
aagaacugaaaucau

SEQ ID NO: 2757204 - RNA, 15 nt, Human
aaggacuuguuagau

SEQ ID NO: 2757205 - RNA, 21 nt, Human
aaggacuuguuagaucuaguu

SEQ ID NO: 2757206 - RNA, 23 nt, Human
aaggacuucuuuaauuuuggaau

SEQ ID NO: 2757207 - RNA, 23 nt, Human
aaggacuuguuagaucuaguuca

SEQ ID NO: 2757208 - RNA, 15 nt, Human
aauuggagcucgugg

SEQ ID NO: 2757209 - RNA, 12 nt, Human
aauucuguauag

SEQ ID NO: 2757210 - RNA, 13 nt, Human
aauucuguauaga

SEQ ID NO: 2757211 - RNA, 14 nt, Human
aauucuguauagau

SEQ ID NO: 2757212 - RNA, 20 nt, Human
aauucuguauagauuagaga

SEQ ID NO: 2757213 - RNA, 20 nt, Human
aauuauaucugaggaauucu

SEQ ID NO: 2757214 - RNA, 22 nt, Human
aauuauaucugaggaauucugu

SEQ ID NO: 2757215 - RNA, 23 nt, Human
aauuauaucugaggaauucugua

SEQ ID NO: 2757216 - RNA, 19 nt, Human
aauuauaugcuauuucuau

SEQ ID NO: 2757217 - RNA, 20 nt, Human
aauuauaugcuauuucuaua

SEQ ID NO: 2757218 - RNA, 21 nt, Human
aauuauaugcuauuucuauau

SEQ ID NO: 2757219 - RNA, 11 nt, Human
aauuguaauag

SEQ ID NO: 2757220 - RNA, 15 nt, Human
aauuguaauuauauc

SEQ ID NO: 2757221 - RNA, 16 nt, Human
aauuguaauuauaucu

SEQ ID NO: 2757222 - RNA, 14 nt, Human
aauuguaauuauau

SEQ ID NO: 2757223 - RNA, 22 nt, Human
aauuucauaccuaucaucuuaa

SEQ ID NO: 2757224 - RNA, 17 nt, Human
aauuguaauuauaucug

SEQ ID NO: 2757225 - RNA, 15 nt, Human
acaccaauauucaua

SEQ ID NO: 2757226 - RNA, 24 nt, Human
acaggaugguucccuugaugaaga

SEQ ID NO: 2757227 - RNA, 22 nt, Human
acaggaugguucccuugaugaa

SEQ ID NO: 2757228 - RNA, 19 nt, Human
acagugauuaccagggacu

SEQ ID NO: 2757229 - RNA, 15 nt, Human
acauuugcucaugga

SEQ ID NO: 2757230 - RNA, 16 nt, Human
acauuuguauaaaaua

SEQ ID NO: 2757231 - RNA, 19 nt, Human
acauuuguauaaaauaauu

SEQ ID NO: 2757232 - RNA, 21 nt, Human
acauuuguauaaaauaauuuu

SEQ ID NO: 2757233 - RNA, 16 nt, Human
acauguuaaaccaugg

SEQ ID NO: 2757234 - RNA, 21 nt, Human
acauguuaaaccaugggauaa

SEQ ID NO: 2757235 - RNA, 23 nt, Human
acauguuaaaccaugggauaaau

SEQ ID NO: 2757236 - RNA, 14 nt, Human
acauguuaaaccau

SEQ ID NO: 2757237 - RNA, 20 nt, Human
accucugccucagaaaacaa

SEQ ID NO: 2757238 - RNA, 21 nt, Human
acccugucucuacuaaaaaua

SEQ ID NO: 2757239 - RNA, 17 nt, Human
acuguaaaauaauaacu

SEQ ID NO: 2757240 - RNA, 20 nt, Human
acuggugacugauucuucag

SEQ ID NO: 2757241 - RNA, 18 nt, Human
acuggugacugauucuuc

SEQ ID NO: 2757242 - RNA, 19 nt, Human
acuggugacugauucuuca

SEQ ID NO: 2757243 - RNA, 16 nt, Human
acuggugacugauucu

SEQ ID NO: 2757244 - RNA, 21 nt, Human
acuuaaaaaugguuuaaaugg

SEQ ID NO: 2757245 - RNA, 22 nt, Human
acuuaaaaaugguuuaaauggu

SEQ ID NO: 2757246 - RNA, 18 nt, Human
acuucaaauccuugaaga

SEQ ID NO: 2757247 - RNA, 17 nt, Human
acuucaaauccuugaag

SEQ ID NO: 2757248 - RNA, 21 nt, Human
acuucagacauagaauuaaca

SEQ ID NO: 2757249 - RNA, 18 nt, Human
acuucuuuaauuuuggaa

SEQ ID NO: 2757250 - RNA, 19 nt, Human
acuucuuuaauuuuggaau

SEQ ID NO: 2757251 - RNA, 20 nt, Human
acuucuuuaauuuuggaauu

SEQ ID NO: 2757252 - RNA, 14 nt, Human
acucccuuucaaca

SEQ ID NO: 2757253 - RNA, 14 nt, Human
acucguuaauuugu

SEQ ID NO: 2757254 - RNA, 19 nt, Human
acucguuaauuuguagugu

SEQ ID NO: 2757255 - RNA, 19 nt, Human
acugauaugggucuugaua

SEQ ID NO: 2757256 - RNA, 22 nt, Human
acugauuugacauagucuggcu

SEQ ID NO: 2757257 - RNA, 15 nt, Human
auaaaagacagugaa

SEQ ID NO: 2757258 - RNA, 16 nt, Human
auaaaagacagugaaa

SEQ ID NO: 2757259 - RNA, 16 nt, Human
auaaaaaauuaugaca

SEQ ID NO: 2757260 - RNA, 20 nt, Human
auacacacucaaaucaagaa

SEQ ID NO: 2757261 - RNA, 14 nt, Human
auacaauuuuguuu

SEQ ID NO: 2757262 - RNA, 16 nt, Human
auacaauuuuguuucu

SEQ ID NO: 2757263 - RNA, 17 nt, Human
auacaauuuuguuucug

SEQ ID NO: 2757264 - RNA, 18 nt, Human
auacaauuuuguuucugu

SEQ ID NO: 2757265 - RNA, 13 nt, Human
aguacucauacau

SEQ ID NO: 2757266 - RNA, 13 nt, Human
agugauuaccagg

SEQ ID NO: 2757267 - RNA, 19 nt, Human
agugaugucacuagggcag

SEQ ID NO: 2757268 - RNA, 13 nt, Human
agucauuuaauaa

SEQ ID NO: 2757269 - RNA, 19 nt, Human
agucuggcuguacccagga

SEQ ID NO: 2757270 - RNA, 21 nt, Human
agucuggcuguacccaggaau

SEQ ID NO: 2757271 - RNA, 21 nt, Human
aucaugaauuaguuuuauaug

SEQ ID NO: 2757272 - RNA, 18 nt, Human
auccagcagauuauucac

SEQ ID NO: 2757273 - RNA, 12 nt, Human
auccuugaagau

SEQ ID NO: 2757274 - RNA, 14 nt, Human
aucaaaagaaagaa

SEQ ID NO: 2757275 - RNA, 23 nt, Human
auggcuuccuggcaauagucaaa

SEQ ID NO: 2757276 - RNA, 15 nt, Human
auggcuuuguauaga

SEQ ID NO: 2757277 - RNA, 16 nt, Human
auggcuuuguauagaa

SEQ ID NO: 2757278 - RNA, 20 nt, Human
augggaaagcauuguaaaug

SEQ ID NO: 2757279 - RNA, 14 nt, Human
augggaaagcauug

SEQ ID NO: 2757280 - RNA, 15 nt, Human
augggacagggagga

SEQ ID NO: 2757281 - RNA, 20 nt, Human
augggacauuugcucaugga

SEQ ID NO: 2757282 - RNA, 18 nt, Human
augaaacuuguguaaaua

SEQ ID NO: 2757283 - RNA, 20 nt, Human
agggauuagggagagaagau

SEQ ID NO: 2757284 - RNA, 17 nt, Human
agggacaggauaagagg

SEQ ID NO: 2757285 - RNA, 23 nt, Human
aggccaugggcacuguggguaga

SEQ ID NO: 2757286 - RNA, 20 nt, Human
aggcagagguugcagugagc

SEQ ID NO: 2757287 - RNA, 13 nt, Human
agcuacaaaugca

SEQ ID NO: 2757288 - RNA, 12 nt, Human
agcuacaaaugc

SEQ ID NO: 2757289 - RNA, 13 nt, Human
agcgacagugaga

SEQ ID NO: 2757290 - RNA, 15 nt, Human
agcgacagugagacu

SEQ ID NO: 2757291 - RNA, 20 nt, Human
agcugcugaaacaacaaaua

SEQ ID NO: 2757292 - RNA, 16 nt, Human
agcugcugaaacaaca

SEQ ID NO: 2757293 - RNA, 15 nt, Human
agcugcugaaacaac

SEQ ID NO: 2757294 - RNA, 14 nt, Human
agcugcugaaacaa

SEQ ID NO: 2757295 - RNA, 14 nt, Human
agcuguaugauucc

SEQ ID NO: 2757296 - RNA, 14 nt, Human
agcuggugcccugc

SEQ ID NO: 2757297 - RNA, 17 nt, Human
agcuguaugauucccag

SEQ ID NO: 2757298 - RNA, 18 nt, Human
agcuguaugauucccagc

SEQ ID NO: 2757299 - RNA, 18 nt, Human
aggaaaaaauaacaauga

SEQ ID NO: 2757300 - RNA, 19 nt, Human
agacaaggaaaaaauaaca

SEQ ID NO: 2757301 - RNA, 22 nt, Human
agaacagugauuaccagggacu

SEQ ID NO: 2757302 - RNA, 13 nt, Human
agaagagcuguuc

SEQ ID NO: 2757303 - RNA, 13 nt, Human
agaagauagcagg

SEQ ID NO: 2757304 - RNA, 20 nt, Human
agaagagcuguucacagcca

SEQ ID NO: 2757305 - RNA, 21 nt, Human
agaagacugcauuauauuuau

SEQ ID NO: 2757306 - RNA, 18 nt, Human
agaagacugcauuauauu

SEQ ID NO: 2757307 - RNA, 23 nt, Human
agcaaaauuuuuucucuaggaaa

SEQ ID NO: 2757308 - RNA, 13 nt, Human
agaucugccuaag

SEQ ID NO: 2757309 - RNA, 18 nt, Human
agaucugccuaaggacuu

SEQ ID NO: 2757310 - RNA, 20 nt, Human
agauagauaggucagugcaa

SEQ ID NO: 2757311 - RNA, 19 nt, Human
agcacugacuucuaaguaa

SEQ ID NO: 2757312 - RNA, 17 nt, Human
agcacugacuucuaagu

SEQ ID NO: 2757313 - RNA, 14 nt, Human
agccagcaguucag

SEQ ID NO: 2757314 - RNA, 21 nt, Human
aaaacuuuaugcuaagugaaa

SEQ ID NO: 2757315 - RNA, 22 nt, Human
aaaagcuccauuuuuagugaaa

SEQ ID NO: 2757316 - RNA, 11 nt, Human
gggaggcagag

SEQ ID NO: 2757317 - RNA, 20 nt, Human
gggaggcagagguugcagug

SEQ ID NO: 2757318 - RNA, 12 nt, Human
gggcagcugccu

SEQ ID NO: 2757319 - RNA, 13 nt, Human
gggcagcugccuc

SEQ ID NO: 2757320 - RNA, 14 nt, Human
gggcagcugccucc

SEQ ID NO: 2757321 - RNA, 19 nt, Human
gggcagcugccuccccucc

SEQ ID NO: 2757322 - RNA, 20 nt, Human
gggcagcugccuccccuccu

SEQ ID NO: 2757323 - RNA, 23 nt, Human
gggcagcugccuccccuccucug

SEQ ID NO: 2757324 - RNA, 20 nt, Human
gggauucuuaaaguugaauu

SEQ ID NO: 2757325 - RNA, 15 nt, Human
gggauucuuaaaguu

SEQ ID NO: 2757326 - RNA, 20 nt, Human
aaaauaauuuuuauauuuga

SEQ ID NO: 2757327 - RNA, 21 nt, Human
aaaauaauuuuuauauuugaa

SEQ ID NO: 2757328 - RNA, 23 nt, Human
aaaauaauuuuuauauuugaaau

SEQ ID NO: 2757329 - RNA, 21 nt, Human
aaacauauauaacaaugcugu

SEQ ID NO: 2757330 - RNA, 16 nt, Human
aaacauauauaacaau

SEQ ID NO: 2757331 - RNA, 19 nt, Human
aaacauauauaacaaugcu

SEQ ID NO: 2757332 - RNA, 13 nt, Human
aaacauauauaac

SEQ ID NO: 2757333 - RNA, 14 nt, Human
aaacacaacuauau

SEQ ID NO: 2757334 - RNA, 17 nt, Human
aaacaaggaugaauuaa

SEQ ID NO: 2757335 - RNA, 19 nt, Human
aaaauuuuuucucuaggaa

SEQ ID NO: 2757336 - RNA, 22 nt, Human
aaaauggacuguggugacuuug

SEQ ID NO: 2757337 - RNA, 21 nt, Human
aaaauuggggauucuuaaagu

SEQ ID NO: 2757338 - RNA, 23 nt, Human
aaaauuggggauucuuaaaguug

SEQ ID NO: 2757339 - RNA, 15 nt, Human
aaaccacagcaguug

SEQ ID NO: 2757340 - RNA, 16 nt, Human
aaaccacagcaguuga

SEQ ID NO: 2757341 - RNA, 16 nt, Human
aaacggaugauuucua

SEQ ID NO: 2757342 - RNA, 18 nt, Human
aaacggaugauuucuaug

SEQ ID NO: 2757343 - RNA, 14 nt, Human
ggucugugagaugc

SEQ ID NO: 2757344 - RNA, 24 nt, Human
ggucugugagaugcuagaacuccc

SEQ ID NO: 2757345 - RNA, 15 nt, Human
ggugccaguuauggc

SEQ ID NO: 2757346 - RNA, 13 nt, Human
aaaggaauuuaaa

SEQ ID NO: 2757347 - RNA, 13 nt, Human
aaagcuuauuaaa

SEQ ID NO: 2757348 - RNA, 16 nt, Human
aaagaaugauuaugaa

SEQ ID NO: 2757349 - RNA, 16 nt, Human
aaacuuuucugauaga

SEQ ID NO: 2757350 - RNA, 17 nt, Human
aaacuuuucugauagag

SEQ ID NO: 2757351 - RNA, 13 nt, Human
aaacuuuucugau

SEQ ID NO: 2757352 - RNA, 14 nt, Human
aaacuuuucugaua

SEQ ID NO: 2757353 - RNA, 12 nt, Human
aaacuuuucuga

SEQ ID NO: 2757354 - RNA, 17 nt, Human
aaacuuguguaaauaca

SEQ ID NO: 2757355 - RNA, 15 nt, Human
aaacuuguguaaaua

SEQ ID NO: 2757356 - RNA, 23 nt, Human
aaagacuauucaaacagucucag

SEQ ID NO: 2757357 - RNA, 13 nt, Human
aaagacuccaaag

SEQ ID NO: 2757358 - RNA, 22 nt, Human
aaagacuauucaaacagucuca

SEQ ID NO: 2757359 - RNA, 18 nt, Human
aaagagaacuuccagauc

SEQ ID NO: 2757360 - RNA, 20 nt, Human
aaagaggcagcuugaaacug

SEQ ID NO: 2757361 - RNA, 16 nt, Human
ggccuccauccugagg

SEQ ID NO: 2757362 - RNA, 22 nt, Human
ggauguugaaaaaguucugcag

SEQ ID NO: 2757363 - RNA, 22 nt, Human
ggaugguucccuugaugaagaa

SEQ ID NO: 2757364 - RNA, 23 nt, Human
ggaugguucccuugaugaagaag

SEQ ID NO: 2757365 - RNA, 15 nt, Human
ggaggcugagauggg

SEQ ID NO: 2757366 - RNA, 19 nt, Human
ggaggcugagaugggagaa

SEQ ID NO: 2757367 - RNA, 21 nt, Human
gcugccuccccuccucugcuu

SEQ ID NO: 2757368 - RNA, 22 nt, Human
gcugccuccccuccucugcuug

SEQ ID NO: 2757369 - RNA, 16 nt, Human
gcugccuccccuccuc

SEQ ID NO: 2757370 - RNA, 17 nt, Human
gcugccuccccuccucu

SEQ ID NO: 2757371 - RNA, 20 nt, Human
gcugccuccccuccucugcu

SEQ ID NO: 2757372 - RNA, 14 nt, Human
gcuggagcucugcc

SEQ ID NO: 2757373 - RNA, 17 nt, Human
gcuggagcucugcccau

SEQ ID NO: 2757374 - RNA, 16 nt, Human
gcuaguaucaaaagaa

SEQ ID NO: 2757375 - RNA, 21 nt, Human
gcuaguaauuggaaaggcagc

SEQ ID NO: 2757376 - RNA, 18 nt, Human
gcuccccucggagaagag

SEQ ID NO: 2757377 - RNA, 15 nt, Human
gcuccccucggagaa

SEQ ID NO: 2757378 - RNA, 22 nt, Human
gccagacaucaacagauaaaua

SEQ ID NO: 2757379 - RNA, 19 nt, Human
gccagauuuuccugaaaac

SEQ ID NO: 2757380 - RNA, 22 nt, Human
gccagcaguucagagcugcccu

SEQ ID NO: 2757381 - RNA, 23 nt, Human
gccagcaguucagagcugcccuc

SEQ ID NO: 2757382 - RNA, 16 nt, Human
gccauaugaaaaggcu

SEQ ID NO: 2757383 - RNA, 16 nt, Human
gcccccaggugccagu

SEQ ID NO: 2757384 - RNA, 13 nt, Human
gcccuguuaaaag

SEQ ID NO: 2757385 - RNA, 17 nt, Human
gcccuguuaaaagauga

SEQ ID NO: 2757386 - RNA, 14 nt, Human
gcccuguuaaaaga

SEQ ID NO: 2757387 - RNA, 21 nt, Human
gagugaguuggguguauugug

SEQ ID NO: 2757388 - RNA, 16 nt, Human
gaguuuaaauuguaau

SEQ ID NO: 2757389 - RNA, 23 nt, Human
gaggcuccacuuggucugugaga

SEQ ID NO: 2757390 - RNA, 19 nt, Human
gaggcuccacuuggucugu

SEQ ID NO: 2757391 - RNA, 18 nt, Human
gaggcuccacuuggucug

SEQ ID NO: 2757392 - RNA, 15 nt, Human
gaggacgcucucugg

SEQ ID NO: 2757393 - RNA, 21 nt, Human
gauuauucacugauuugacau

SEQ ID NO: 2757394 - RNA, 22 nt, Human
gauuauucacugauuugacaua

SEQ ID NO: 2757395 - RNA, 15 nt, Human
gauuuaccacuugug

SEQ ID NO: 2757396 - RNA, 23 nt, Human
gauucuucagcaaaaauauuuua

SEQ ID NO: 2757397 - RNA, 16 nt, Human
gauuuaccacuugugu

SEQ ID NO: 2757398 - RNA, 18 nt, Human
gaucugccuaaggacuuc

SEQ ID NO: 2757399 - RNA, 20 nt, Human
gaucugccuaaggacuucuu

SEQ ID NO: 2757400 - RNA, 21 nt, Human
gaucugccuaaggacuucuuu

SEQ ID NO: 2757401 - RNA, 23 nt, Human
gaucugccuaaggacuucuuuaa

SEQ ID NO: 2757402 - RNA, 17 nt, Human
gaucugccuaaggacuu

SEQ ID NO: 2757403 - RNA, 16 nt, Human
gaugaucuuuaaaaua

SEQ ID NO: 2757404 - RNA, 17 nt, Human
gauguagaggagaaacu

SEQ ID NO: 2757405 - RNA, 18 nt, Human
gauguagaggagaaacug

SEQ ID NO: 2757406 - RNA, 22 nt, Human
gaugguucccuugaugaagaag

SEQ ID NO: 2757407 - RNA, 18 nt, Human
gauuuuuuuguuguuugu

SEQ ID NO: 2757408 - RNA, 21 nt, Human
gauuuuuuuguuguuuguuua

SEQ ID NO: 2757409 - RNA, 20 nt, Human
gcaaguauuagaauaccaca

SEQ ID NO: 2757410 - RNA, 22 nt, Human
gcaauagucaaauugugugaaa

SEQ ID NO: 2757411 - RNA, 22 nt, Human
gcacaguuuucugagaaagacu

SEQ ID NO: 2757412 - RNA, 20 nt, Human
gcacaguuuucugagaaaga

SEQ ID NO: 2757413 - RNA, 23 nt, Human
gcacaguuuucugagaaagacua

SEQ ID NO: 2757414 - RNA, 14 nt, Human
gaagcaaaauuuuu

SEQ ID NO: 2757415 - RNA, 23 nt, Human
gaagcaacccaaauguucaucaa

SEQ ID NO: 2757416 - RNA, 19 nt, Human
gaacccgggaggcagaggu

SEQ ID NO: 2757417 - RNA, 14 nt, Human
gaacugaaaucaua

SEQ ID NO: 2757418 - RNA, 13 nt, Human
gaacugaaaucau

SEQ ID NO: 2757419 - RNA, 16 nt, Human
gacgcucucuggccuu

SEQ ID NO: 2757420 - RNA, 17 nt, Human
gacgcucucuggccuuc

SEQ ID NO: 2757421 - RNA, 15 nt, Human
gacgcucucuggccu

SEQ ID NO: 2757422 - RNA, 14 nt, Human
gacucuuaagaaga

SEQ ID NO: 2757423 - RNA, 18 nt, Human
gacucuuaagaagacugc

SEQ ID NO: 2757424 - RNA, 21 nt, Human
gacucuuaagaagacugcauu

SEQ ID NO: 2757425 - RNA, 13 nt, Human
gacuguggugacu

SEQ ID NO: 2757426 - RNA, 14 nt, Human
gacuguggugacuu

SEQ ID NO: 2757427 - RNA, 16 nt, Human
gacauuugcucaugga

SEQ ID NO: 2757428 - RNA, 17 nt, Human
gacauuugcucauggaa

SEQ ID NO: 2757429 - RNA, 21 nt, Human
gacagugagacucugucucag

SEQ ID NO: 2757430 - RNA, 15 nt, Human
gacacacugaagaag

SEQ ID NO: 2757431 - RNA, 16 nt, Human
gacacacugaagaagc

SEQ ID NO: 2757432 - RNA, 14 nt, Human
gacacacugaagaa

SEQ ID NO: 2757433 - RNA, 21 nt, Human
gacagaaagcagaacagugau

SEQ ID NO: 2757434 - RNA, 21 nt, Human
cuuugagugucuuaauuaaaa

SEQ ID NO: 2757435 - RNA, 13 nt, Human
cuuucagauacug

SEQ ID NO: 2757436 - RNA, 20 nt, Human
cuuuaaagggauggcaagau

SEQ ID NO: 2757437 - RNA, 14 nt, Human
cuuuaauuuuggaa

SEQ ID NO: 2757438 - RNA, 15 nt, Human
cuuuaauuuuggaau

SEQ ID NO: 2757439 - RNA, 13 nt, Human
cuuuaauuuugga

SEQ ID NO: 2757440 - RNA, 16 nt, Human
cuuuaauuuuggaauu

SEQ ID NO: 2757441 - RNA, 15 nt, Human
cuucuguuuuauaau

SEQ ID NO: 2757442 - RNA, 20 nt, Human
cuucuguuuuauaauuuugu

SEQ ID NO: 2757443 - RNA, 23 nt, Human
cuucaugcugucuacacuaagag

SEQ ID NO: 2757444 - RNA, 11 nt, Human
cuucagacaua

SEQ ID NO: 2757445 - RNA, 11 nt, Human
cuuaaaguuga

SEQ ID NO: 2757446 - RNA, 13 nt, Human
cuuaaaguugaau

SEQ ID NO: 2757447 - RNA, 21 nt, Human
cuggugccucaccccuugcca

SEQ ID NO: 2757448 - RNA, 12 nt, Human
cuggugccucac

SEQ ID NO: 2757449 - RNA, 13 nt, Human
cugggcagcugcc

SEQ ID NO: 2757450 - RNA, 14 nt, Human
cugggcagcugccu

SEQ ID NO: 2757451 - RNA, 15 nt, Human
cugggcagcugccuc

SEQ ID NO: 2757452 - RNA, 17 nt, Human
cugcacuccagccugag

SEQ ID NO: 2757453 - RNA, 20 nt, Human
cugcacuccagccugagcga

SEQ ID NO: 2757454 - RNA, 16 nt, Human
cugcacuccagccuga

SEQ ID NO: 2757455 - RNA, 14 nt, Human
cugcacggugaaug

SEQ ID NO: 2757456 - RNA, 15 nt, Human
cugcacggugaaugg

SEQ ID NO: 2757457 - RNA, 17 nt, Human
cugcacggugaauggcu

SEQ ID NO: 2757458 - RNA, 20 nt, Human
cugcacggugaauggcuuug

SEQ ID NO: 2757459 - RNA, 14 nt, Human
ccaaaaggcagaag

SEQ ID NO: 2757460 - RNA, 14 nt, Human
cauuuguauaaaau

SEQ ID NO: 2757461 - RNA, 16 nt, Human
cauuuguauaaaauaa

SEQ ID NO: 2757462 - RNA, 17 nt, Human
cauugguguuguacuca

SEQ ID NO: 2757463 - RNA, 21 nt, Human
ccaacuccagaaagugacaag

SEQ ID NO: 2757464 - RNA, 19 nt, Human
cauuauauuuauuacugua

SEQ ID NO: 2757465 - RNA, 14 nt, Human
cauuauucaaaguu

SEQ ID NO: 2757466 - RNA, 15 nt, Human
cauuauucaaaguug

SEQ ID NO: 2757467 - RNA, 18 nt, Human
cauccugaggcuccacuu

SEQ ID NO: 2757468 - RNA, 19 nt, Human
cauccugaggcuccacuug

SEQ ID NO: 2757469 - RNA, 19 nt, Human
cauagcagcuuauucacaa

SEQ ID NO: 2757470 - RNA, 16 nt, Human
cauagguuuaauaauu

SEQ ID NO: 2757471 - RNA, 21 nt, Human
caguuauuauauuuacaaaug

SEQ ID NO: 2757472 - RNA, 17 nt, Human
caguuauuauauuuaca

SEQ ID NO: 2757473 - RNA, 20 nt, Human
caguuauggcuauaggugcu

SEQ ID NO: 2757474 - RNA, 19 nt, Human
caguuauggcuauaggugc

SEQ ID NO: 2757475 - RNA, 13 nt, Human
caguuauggcuau

SEQ ID NO: 2757476 - RNA, 22 nt, Human
cagugauuaccagggacugagg

SEQ ID NO: 2757477 - RNA, 15 nt, Human
caguucagagcugcc

SEQ ID NO: 2757478 - RNA, 16 nt, Human
caguucagagcugccc

SEQ ID NO: 2757479 - RNA, 17 nt, Human
caguucagagcugcccu

SEQ ID NO: 2757480 - RNA, 22 nt, Human
caguuauuauauuuacaaaugg

SEQ ID NO: 2757481 - RNA, 23 nt, Human
caguucagagcugcccucuccug

SEQ ID NO: 2757482 - RNA, 24 nt, Human
caguucagagcugcccucuccugg

SEQ ID NO: 2757483 - RNA, 18 nt, Human
caguucagagcugcccuc

SEQ ID NO: 2757484 - RNA, 19 nt, Human
caguucagagcugcccucu

SEQ ID NO: 2757485 - RNA, 21 nt, Human
caguucagagcugcccucucc

SEQ ID NO: 2757486 - RNA, 22 nt, Human
caguucagagcugcccucuccu

SEQ ID NO: 2757487 - RNA, 18 nt, Human
cagacuggcacaguuuuc

SEQ ID NO: 2757488 - RNA, 17 nt, Human
cagacuggcacaguuuu

SEQ ID NO: 2757489 - RNA, 23 nt, Human
cagacuggcacaguuuucugaga

SEQ ID NO: 2757490 - RNA, 22 nt, Human
cagacuggcacaguuuucugag

SEQ ID NO: 2757491 - RNA, 23 nt, Human
cagccagcaguucagagcugccc

SEQ ID NO: 2757492 - RNA, 18 nt, Human
cagccagacuggcacagu

SEQ ID NO: 2757493 - RNA, 15 nt, Human
cagccagacuggcac

SEQ ID NO: 2757494 - RNA, 14 nt, Human
cagccagacuggca

SEQ ID NO: 2757495 - RNA, 18 nt, Human
cagagcugcccucuccug

SEQ ID NO: 2757496 - RNA, 19 nt, Human
cagagcugcccucuccugg

SEQ ID NO: 2757497 - RNA, 20 nt, Human
cagagcugcccucuccuggg

SEQ ID NO: 2757498 - RNA, 21 nt, Human
cagagcugcccucuccugggc

SEQ ID NO: 2757499 - RNA, 23 nt, Human
cagagcugcccucuccugggcag

SEQ ID NO: 2757500 - RNA, 17 nt, Human
cagagcugcccucuccu

SEQ ID NO: 2757501 - RNA, 18 nt, Human
cagauacuggauuguacu

SEQ ID NO: 2757502 - RNA, 14 nt, Human
cagauacuggauug

SEQ ID NO: 2757503 - RNA, 11 nt, Human
caggcuacugu

SEQ ID NO: 2757504 - RNA, 16 nt, Human
caggaaagagaacuuc

SEQ ID NO: 2757505 - RNA, 14 nt, Human
cagcuuauugucua

SEQ ID NO: 2757506 - RNA, 20 nt, Human
cagcuguaugauucccagcc

SEQ ID NO: 2757507 - RNA, 17 nt, Human
cagcuuauucacaagac

SEQ ID NO: 2757508 - RNA, 20 nt, Human
cagcuuauugucuagugaaa

SEQ ID NO: 2757509 - RNA, 11 nt, Human
cagcugccucc

SEQ ID NO: 2757510 - RNA, 10 nt, Human
cagcugccuc

SEQ ID NO: 2757511 - RNA, 9 nt, Human
cagcugccu

SEQ ID NO: 2757512 - RNA, 14 nt, Human
cagcugccuccccu

SEQ ID NO: 2757513 - RNA, 15 nt, Human
cagcugccuccccuc

SEQ ID NO: 2757514 - RNA, 16 nt, Human
cagcugccuccccucc

SEQ ID NO: 2757515 - RNA, 17 nt, Human
cagcugccuccccuccu

SEQ ID NO: 2757516 - RNA, 18 nt, Human
cagcugccuccccuccuc

SEQ ID NO: 2757517 - RNA, 19 nt, Human
cagcugccuccccuccucu

SEQ ID NO: 2757518 - RNA, 20 nt, Human
cagcugccuccccuccucug

SEQ ID NO: 2757519 - RNA, 19 nt, Human
cagcuguaugauucccagc

SEQ ID NO: 2757520 - RNA, 21 nt, Human
caauauuucagauaaucacaa

SEQ ID NO: 2757521 - RNA, 17 nt, Human
caaucagccuaguugau

SEQ ID NO: 2757522 - RNA, 19 nt, Human
caacuauauuguuugcuaa

SEQ ID NO: 2757523 - RNA, 19 nt, Human
caacuaucucauuuccaag

SEQ ID NO: 2757524 - RNA, 12 nt, Human
caacuccagaaa

SEQ ID NO: 2757525 - RNA, 14 nt, Human
caagcaaguauuag

SEQ ID NO: 2757526 - RNA, 16 nt, Human
cacuccagugagacag

SEQ ID NO: 2757527 - RNA, 21 nt, Human
cacuccagugagacagcucug

SEQ ID NO: 2757528 - RNA, 11 nt, Human
cacugaagaag

SEQ ID NO: 2757529 - RNA, 23 nt, Human
cacugaagaagcaccaaucauga

SEQ ID NO: 2757530 - RNA, 23 nt, Human
cacaucagcuugcccuguuaaaa

SEQ ID NO: 2757531 - RNA, 13 nt, Human
cacaucagcuugc

SEQ ID NO: 2757532 - RNA, 18 nt, Human
auuuucuauaauuuaaau

SEQ ID NO: 2757533 - RNA, 17 nt, Human
auuuucuauaauuuaaa

SEQ ID NO: 2757534 - RNA, 19 nt, Human
auuuucuauaauuuaaaua

SEQ ID NO: 2757535 - RNA, 21 nt, Human
caaaagguauuuuaaucacca

SEQ ID NO: 2757536 - RNA, 17 nt, Human
caaacauauauaacaau

SEQ ID NO: 2757537 - RNA, 19 nt, Human
auuuuuauauuugaaauau

SEQ ID NO: 2757538 - RNA, 16 nt, Human
auuuuuauauuugaaa

SEQ ID NO: 2757539 - RNA, 18 nt, Human
auuuuuuuguuguuuguu

SEQ ID NO: 2757540 - RNA, 16 nt, Human
auuucagcagcugcag

SEQ ID NO: 2757541 - RNA, 13 nt, Human
auuuaauaauuau

SEQ ID NO: 2757542 - RNA, 15 nt, Human
auuuaauaauuauau

SEQ ID NO: 2757543 - RNA, 18 nt, Human
auuuaauaauuauaugcu

SEQ ID NO: 2757544 - RNA, 22 nt, Human
auugaggacacugauauggguc

SEQ ID NO: 2757545 - RNA, 15 nt, Human
auuauguaaauccca

SEQ ID NO: 2757546 - RNA, 17 nt, Human
auuauguaaaucccauu

SEQ ID NO: 2757547 - RNA, 22 nt, Human
auuauguaaaucccauuauuca

SEQ ID NO: 2757548 - RNA, 23 nt, Human
auuauguaaaucccauuauucaa

SEQ ID NO: 2757549 - RNA, 13 nt, Human
auuauguaaaucc

SEQ ID NO: 2757550 - RNA, 14 nt, Human
auuauguaaauccc

SEQ ID NO: 2757551 - RNA, 12 nt, Human
auuauguaaauc

SEQ ID NO: 2757552 - RNA, 12 nt, Human
ccuuuucccaac

SEQ ID NO: 2757553 - RNA, 20 nt, Human
cuacaaaaacacagcaaggg

SEQ ID NO: 2757554 - RNA, 20 nt, Human
cuaacgaaguauccuucagc

SEQ ID NO: 2757555 - RNA, 17 nt, Human
ccuucucuucacaguca

SEQ ID NO: 2757556 - RNA, 18 nt, Human
cuauguucuaagaaguga

SEQ ID NO: 2757557 - RNA, 18 nt, Human
cuaucucauuuccaagca

SEQ ID NO: 2757558 - RNA, 23 nt, Human
cuaugucauuugcuggagcucug

SEQ ID NO: 2757559 - RNA, 16 nt, Human
cucaguccaugaagau

SEQ ID NO: 2757560 - RNA, 19 nt, Human
cucccuccaccucccugca

SEQ ID NO: 2757561 - RNA, 20 nt, Human
cucccuccaccucccugcaa

SEQ ID NO: 2757562 - RNA, 21 nt, Human
cucccuccaccucccugcaau

SEQ ID NO: 2757563 - RNA, 22 nt, Human
cucccuccaccucccugcaaua

SEQ ID NO: 2757564 - RNA, 22 nt, Human
cuccucugcuugccaucccucc

SEQ ID NO: 2757565 - RNA, 14 nt, Human
cucucuggccuucg

SEQ ID NO: 2757566 - RNA, 16 nt, Human
cucucuggccuucggc

SEQ ID NO: 2757567 - RNA, 13 nt, Human
cucucuggccuuc

SEQ ID NO: 2757568 - RNA, 19 nt, Human
cucuauguucuaagaagug

SEQ ID NO: 2757569 - RNA, 16 nt, Human
cucuccccaugauguu

SEQ ID NO: 2757570 - RNA, 15 nt, Human
cucuccccaugaugu

SEQ ID NO: 2757571 - RNA, 20 nt, Human
ccuaacgaaguauccuucag

SEQ ID NO: 2757572 - RNA, 16 nt, Human
ccuaaggacuucuuua

SEQ ID NO: 2757573 - RNA, 17 nt, Human
ccuaaggacuucuuuaa

SEQ ID NO: 2757574 - RNA, 18 nt, Human
ccuaaggacuucuuuaau

SEQ ID NO: 2757575 - RNA, 23 nt, Human
ccuaaggacuucuuuaauuuugg

SEQ ID NO: 2757576 - RNA, 11 nt, Human
ccuaaggacuu

SEQ ID NO: 2757577 - RNA, 12 nt, Human
ccuaaggacuuc

SEQ ID NO: 2757578 - RNA, 14 nt, Human
cccugagcaggauu

SEQ ID NO: 2757579 - RNA, 13 nt, Human
cccucggagaaga

SEQ ID NO: 2757580 - RNA, 17 nt, Human
ccucuccugggcagcug

SEQ ID NO: 2757581 - RNA, 18 nt, Human
ccucuccugggcagcugc

SEQ ID NO: 2757582 - RNA, 19 nt, Human
ccucuccugggcagcugcc

SEQ ID NO: 2757583 - RNA, 20 nt, Human
ccucuccugggcagcugccu

SEQ ID NO: 2757584 - RNA, 14 nt, Human
ccucuccugggcag

SEQ ID NO: 2757585 - RNA, 15 nt, Human
ccucuccugggcagc

SEQ ID NO: 2757586 - RNA, 16 nt, Human
ccucuccugggcagcu

SEQ ID NO: 2757587 - RNA, 21 nt, Human
ccucuccugggcagcugccuc

SEQ ID NO: 2757588 - RNA, 22 nt, Human
ccucuccugggcagcugccucc

SEQ ID NO: 2757589 - RNA, 15 nt, Human
ccccauuguggucac

SEQ ID NO: 2757590 - RNA, 18 nt, Human
ccaugggcacugugggua

SEQ ID NO: 2757591 - RNA, 17 nt, Human
ccaugggauaaaugcca

SEQ ID NO: 2757592 - RNA, 19 nt, Human
ccaugggauaaaugccauc

SEQ ID NO: 2757593 - RNA, 22 nt, Human
ccauuguggucacaggaaguag

SEQ ID NO: 2757594 - RNA, 13 nt, Human
ccauuuaaagcuu

SEQ ID NO: 2757595 - RNA, 12 nt, Human
ccacuuggucug

SEQ ID NO: 2757596 - RNA, 20 nt, Human
ccacuuggucugugagaugc

SEQ ID NO: 2757597 - RNA, 22 nt, Human
ccacuuggucugugagaugcua

SEQ ID NO: 2757598 - RNA, 15 nt, Human
ccacuuggucuguga

SEQ ID NO: 2757599 - RNA, 16 nt, Human
ccacuuggucugugag

SEQ ID NO: 2757600 - RNA, 17 nt, Human
ccacuuggucugugaga

SEQ ID NO: 2757601 - RNA, 19 nt, Human
ccacuuggucugugagaug

SEQ ID NO: 2757602 - RNA, 15 nt, Human
ccaggggccaugaau

SEQ ID NO: 2757603 - RNA, 14 nt, Human
ccaguauuguacaa

SEQ ID NO: 2757604 - RNA, 18 nt, Human
aaauuucagcagcugcag

SEQ ID NO: 2757605 - RNA, 17 nt, Human
aaauuucagcagcugca

SEQ ID NO: 2757606 - RNA, 22 nt, Human
aaauguaagggaaacugccagc

SEQ ID NO: 2757607 - RNA, 14 nt, Human
guaugauucccagc

SEQ ID NO: 2757608 - RNA, 17 nt, Human
guaugugugaagugagu

SEQ ID NO: 2757609 - RNA, 13 nt, Human
guaugugugaagu

SEQ ID NO: 2757610 - RNA, 19 nt, Human
aaaucuacacuccagugag

SEQ ID NO: 2757611 - RNA, 14 nt, Human
aaauccuugaagau

SEQ ID NO: 2757612 - RNA, 18 nt, Human
aaauccauuuggaaaucu

SEQ ID NO: 2757613 - RNA, 21 nt, Human
aaauccauuuggaaaucuuua

SEQ ID NO: 2757614 - RNA, 22 nt, Human
aaauccauuuggaaaucuuuaa

SEQ ID NO: 2757615 - RNA, 23 nt, Human
aaauccauuuggaaaucuuuaaa

SEQ ID NO: 2757616 - RNA, 13 nt, Human
aaaucccauuauu

SEQ ID NO: 2757617 - RNA, 15 nt, Human
aaaucccauuauuca

SEQ ID NO: 2757618 - RNA, 16 nt, Human
aaaucccauuauucaa

SEQ ID NO: 2757619 - RNA, 17 nt, Human
aaaucccauuauucaaa

SEQ ID NO: 2757620 - RNA, 19 nt, Human
aaaucccauuauucaaagu

SEQ ID NO: 2757621 - RNA, 20 nt, Human
aaaucccauuauucaaaguu

SEQ ID NO: 2757622 - RNA, 21 nt, Human
aaaucccauuauucaaaguug

SEQ ID NO: 2757623 - RNA, 22 nt, Human
aaaucccauuauucaaaguugc

SEQ ID NO: 2757624 - RNA, 15 nt, Human
aaauccauuuggaaa

SEQ ID NO: 2757625 - RNA, 16 nt, Human
aaauccauuuggaaau

SEQ ID NO: 2757626 - RNA, 14 nt, Human
aaauccauuuggaa

SEQ ID NO: 2757627 - RNA, 18 nt, Human
aaauccauacauuugugu

SEQ ID NO: 2757628 - RNA, 21 nt, Human
aaaugaaagcagggacuugaa

SEQ ID NO: 2757629 - RNA, 22 nt, Human
aaaugaaagcagggacuugaac

SEQ ID NO: 2757630 - RNA, 14 nt, Human
aaaugcauuucuaa

SEQ ID NO: 2757631 - RNA, 19 nt, Human
aaauggcuuccuggcaaua

SEQ ID NO: 2757632 - RNA, 18 nt, Human
aaauggcuuccuggcaau

SEQ ID NO: 2757633 - RNA, 18 nt, Human
aacauuugguaaggggaa

SEQ ID NO: 2757634 - RNA, 22 nt, Human
aacaguagugauaguuguaccg

SEQ ID NO: 2757635 - RNA, 21 nt, Human
aacaagccuccuuuuaaagua

SEQ ID NO: 2757636 - RNA, 15 nt, Human
aacaaggaugaauua

SEQ ID NO: 2757637 - RNA, 21 nt, Human
guccaagcauuuagauguaua

SEQ ID NO: 2757638 - RNA, 24 nt, Human
guccaagcauaccaacacgagcag

SEQ ID NO: 2757639 - RNA, 14 nt, Human
aacuccagaaagug

SEQ ID NO: 2757640 - RNA, 21 nt, Human
aacuccagaaagugacaagcu

SEQ ID NO: 2757641 - RNA, 13 nt, Human
aacucccuuucaa

SEQ ID NO: 2757642 - RNA, 14 nt, Human
aacucccuuucaac

SEQ ID NO: 2757643 - RNA, 18 nt, Human
aacucguuaauuuguagu

SEQ ID NO: 2757644 - RNA, 15 nt, Human
gugaacacaucagcu

SEQ ID NO: 2757645 - RNA, 21 nt, Human
gucuuaauuaaaagaauauuu

SEQ ID NO: 2757646 - RNA, 19 nt, Human
gucuuaauuaaaagaauau

SEQ ID NO: 2757647 - RNA, 22 nt, Human
gucuuaauuaaaagaauauuuu

SEQ ID NO: 2757648 - RNA, 12 nt, Human
aaccacagcagu

SEQ ID NO: 2757649 - RNA, 15 nt, Human
aaccaugggauaaau

SEQ ID NO: 2757650 - RNA, 17 nt, Human
aaccaugggauaaaugc

SEQ ID NO: 2757651 - RNA, 18 nt, Human
aaccaugggauaaaugcc

SEQ ID NO: 2757652 - RNA, 20 nt, Human
aaccaugggauaaaugccau

SEQ ID NO: 2757653 - RNA, 20 nt, Human
aaccuagggugauauuaacc

SEQ ID NO: 2757654 - RNA, 18 nt, Human
aacccaaauguucaucaa

SEQ ID NO: 2757655 - RNA, 13 nt, Human
aacccaaauguuc

SEQ ID NO: 2757656 - RNA, 21 nt, Human
aaccaugggauaaaugccauc

SEQ ID NO: 2757657 - RNA, 20 nt, Human
aacccauauuuguacaccaa

SEQ ID NO: 2757658 - RNA, 18 nt, Human
guuguaccgcaaugugac

SEQ ID NO: 2757659 - RNA, 16 nt, Human
guuuaaaaucauuucu

SEQ ID NO: 2757660 - RNA, 10 nt, Human
guuuaaaauc

SEQ ID NO: 2757661 - RNA, 15 nt, Human
guugccuaaauccau

SEQ ID NO: 2757662 - RNA, 16 nt, Human
guugccuaaauccauu

SEQ ID NO: 2757663 - RNA, 14 nt, Human
guugccuaaaucca

SEQ ID NO: 2757664 - RNA, 21 nt, Human
guuucaaacauauauaacaau

SEQ ID NO: 2757665 - RNA, 23 nt, Human
guuuucugagaaagacuauucaa

SEQ ID NO: 2757666 - RNA, 20 nt, Human
guuucuguacuuuuuggcau

SEQ ID NO: 2757667 - RNA, 23 nt, Human
aagcuuguauuccuuuuucucuc

SEQ ID NO: 2757668 - RNA, 14 nt, Human
guugacaugggaca

SEQ ID NO: 2757669 - RNA, 18 nt, Human
guugacaugggacauuug

SEQ ID NO: 2757670 - RNA, 13 nt, Human
guugacaugggac

SEQ ID NO: 2757671 - RNA, 12 nt, Human
guuagaucuagu

SEQ ID NO: 2757672 - RNA, 21 nt, Human
gugugaccacugcagaagaca

SEQ ID NO: 2757673 - RNA, 19 nt, Human
guguuguacucaauuuuaa

SEQ ID NO: 2757674 - RNA, 19 nt, Human
aagagcuguucacagccag

SEQ ID NO: 2757675 - RNA, 21 nt, Human
gugggacagucaccucaugga

SEQ ID NO: 2757676 - RNA, 16 nt, Human
aagaagugaaaaucua

SEQ ID NO: 2757677 - RNA, 22 nt, Human
aagaagugaaaaucuacacucc

SEQ ID NO: 2757678 - RNA, 18 nt, Human
gugcuaguaauuggaaag

SEQ ID NO: 2757679 - RNA, 16 nt, Human
aagaaugauuaugaau

SEQ ID NO: 2757680 - RNA, 18 nt, Human
aagaaugauuaugaauua

SEQ ID NO: 2757681 - RNA, 19 nt, Human
aagaaugguccgugcuaag

SEQ ID NO: 2757682 - RNA, 22 nt, Human
aagaaugguccgugcuaaggac

SEQ ID NO: 2757683 - RNA, 21 nt, Human
aaugagagacacacugaagaa

SEQ ID NO: 2757684 - RNA, 16 nt, Human
uaaugauaacuggaaa

SEQ ID NO: 2757685 - RNA, 19 nt, Human
aaucuuuaaaaaaaaaauu

SEQ ID NO: 2757686 - RNA, 20 nt, Human
aaucuuuaaaaaaaaaauug

SEQ ID NO: 2757687 - RNA, 23 nt, Human
aaucaugaauuaguuuuauaugc

SEQ ID NO: 2757688 - RNA, 19 nt, Human
aaucaugaauuaguuuuau

SEQ ID NO: 2757689 - RNA, 17 nt, Human
aaucaugaauuaguuuu

SEQ ID NO: 2757690 - RNA, 15 nt, Human
aaucaucaagucuuu

SEQ ID NO: 2757691 - RNA, 13 nt, Human
aauccuugaagau

SEQ ID NO: 2757692 - RNA, 16 nt, Human
aaucuuauaauuuaaa

SEQ ID NO: 2757693 - RNA, 14 nt, Human
aaucuuauaauuua

SEQ ID NO: 2757694 - RNA, 19 nt, Human
aaucugugaacuugaaauu

SEQ ID NO: 2757695 - RNA, 17 nt, Human
aaucugugaacuugaaa

SEQ ID NO: 2757696 - RNA, 18 nt, Human
aaucugugaacuugaaau

SEQ ID NO: 2757697 - RNA, 13 nt, Human
aaucugugaacuu

SEQ ID NO: 2757698 - RNA, 15 nt, Human
aaucugugaacuuga

SEQ ID NO: 2757699 - RNA, 15 nt, Human
uacaaaaacacagca

SEQ ID NO: 2757700 - RNA, 14 nt, Human
uacaaaaacacagc

SEQ ID NO: 2757701 - RNA, 13 nt, Human
uacaaaaacacag

SEQ ID NO: 2757702 - RNA, 18 nt, Human
uacacuaagagagaauga

SEQ ID NO: 2757703 - RNA, 19 nt, Human
uacacuaagagagaaugag

SEQ ID NO: 2757704 - RNA, 16 nt, Human
uacaguauaauuaaca

SEQ ID NO: 2757705 - RNA, 17 nt, Human
uacaguauaauuaacau

SEQ ID NO: 2757706 - RNA, 14 nt, Human
uacaguauaauuaa

SEQ ID NO: 2757707 - RNA, 19 nt, Human
aauggacuuuuguacauag

SEQ ID NO: 2757708 - RNA, 20 nt, Human
aauggacuguggugacuuug

SEQ ID NO: 2757709 - RNA, 11 nt, Human
aaugugauaug

SEQ ID NO: 2757710 - RNA, 18 nt, Human
uacaguauaauuaacaug

SEQ ID NO: 2757711 - RNA, 19 nt, Human
uacaguauaauuaacaugu

SEQ ID NO: 2757712 - RNA, 23 nt, Human
uacaguauaauuaacauguuaaa

SEQ ID NO: 2757713 - RNA, 20 nt, Human
aauaauuuuuauauuugaaa

SEQ ID NO: 2757714 - RNA, 17 nt, Human
uaaauaaauaaauagcu

SEQ ID NO: 2757715 - RNA, 14 nt, Human
uaaauaaauagcua

SEQ ID NO: 2757716 - RNA, 17 nt, Human
aauaauuuuuauauuug

SEQ ID NO: 2757717 - RNA, 19 nt, Human
aauaauuuuuauauuugaa

SEQ ID NO: 2757718 - RNA, 16 nt, Human
aauaauuuuuauauuu

SEQ ID NO: 2757719 - RNA, 18 nt, Human
uaaauagcuagacuggug

SEQ ID NO: 2757720 - RNA, 15 nt, Human
uaaaucugugaacuu

SEQ ID NO: 2757721 - RNA, 16 nt, Human
uaaaucugugaacuug

SEQ ID NO: 2757722 - RNA, 17 nt, Human
uaaaucugugaacuuga

SEQ ID NO: 2757723 - RNA, 18 nt, Human
uaaaucugugaacuugaa

SEQ ID NO: 2757724 - RNA, 19 nt, Human
uaaaucugugaacuugaaa

SEQ ID NO: 2757725 - RNA, 21 nt, Human
uaaaucugugaacuugaaauu

SEQ ID NO: 2757726 - RNA, 22 nt, Human
uaaaucugugaacuugaaauuu

SEQ ID NO: 2757727 - RNA, 21 nt, Human
aauaacaaugaaaguugauaa

SEQ ID NO: 2757728 - RNA, 19 nt, Human
aauaucuuuuuuuuaauaa

SEQ ID NO: 2757729 - RNA, 15 nt, Human
aauauuucagauaau

SEQ ID NO: 2757730 - RNA, 14 nt, Human
aauauuucagauaa

SEQ ID NO: 2757731 - RNA, 17 nt, Human
aauauuuuaugauccag

SEQ ID NO: 2757732 - RNA, 18 nt, Human
aauauuuuaugauccagc

SEQ ID NO: 2757733 - RNA, 24 nt, Human
aauaugcaaagcacugacuucuaa

SEQ ID NO: 2757734 - RNA, 17 nt, Human
aauaugcaaagcacuga

SEQ ID NO: 2757735 - RNA, 15 nt, Human
aauaugcaaagcacu

SEQ ID NO: 2757736 - RNA, 15 nt, Human
aauaucacuugucaa

SEQ ID NO: 2757737 - RNA, 12 nt, Human
aauaucacuugu

SEQ ID NO: 2757738 - RNA, 15 nt, Human
uaacauaaaucugug

SEQ ID NO: 2757739 - RNA, 16 nt, Human
uaacauaaaucuguga

SEQ ID NO: 2757740 - RNA, 17 nt, Human
uaacauaaaucugugaa

SEQ ID NO: 2757741 - RNA, 18 nt, Human
uaacauaaaucugugaac

SEQ ID NO: 2757742 - RNA, 20 nt, Human
uaacauaaaucugugaacuu

SEQ ID NO: 2757743 - RNA, 14 nt, Human
uaacauaaaucugu

SEQ ID NO: 2757744 - RNA, 18 nt, Human
aauaggcguaacuaauuu

SEQ ID NO: 2757745 - RNA, 16 nt, Human
uagcuacuaauuuuaa

SEQ ID NO: 2757746 - RNA, 15 nt, Human
uagcuagacugguga

SEQ ID NO: 2757747 - RNA, 18 nt, Human
uagcuagacuggugacug

SEQ ID NO: 2757748 - RNA, 17 nt, Human
acaaauuuacagagaca

SEQ ID NO: 2757749 - RNA, 15 nt, Human
acaacagcuggugcc

SEQ ID NO: 2757750 - RNA, 22 nt, Human
acaagcucacagaccuuugaac

SEQ ID NO: 2757751 - RNA, 22 nt, Human
aauuuuuucucuaggaaauauu

SEQ ID NO: 2757752 - RNA, 21 nt, Human
aauuuuucuuauuucauuucu

SEQ ID NO: 2757753 - RNA, 16 nt, Human
aauuuuguuucuguac

SEQ ID NO: 2757754 - RNA, 15 nt, Human
aauuuuguuucugua

SEQ ID NO: 2757755 - RNA, 14 nt, Human
uacuuuuuggcaua

SEQ ID NO: 2757756 - RNA, 16 nt, Human
uacuuugugcuggggu

SEQ ID NO: 2757757 - RNA, 22 nt, Human
uacuuugugcugggguuaucug

SEQ ID NO: 2757758 - RNA, 19 nt, Human
uacuuuuuggcauaacaua

SEQ ID NO: 2757759 - RNA, 20 nt, Human
uacuuuuuggcauaacauaa

SEQ ID NO: 2757760 - RNA, 21 nt, Human
uagaugcaguucugaagaaga

SEQ ID NO: 2757761 - RNA, 20 nt, Human
uagaugcaguucugaagaag

SEQ ID NO: 2757762 - RNA, 14 nt, Human
uagaucuaguucac

SEQ ID NO: 2757763 - RNA, 22 nt, Human
uagauaggucagugcaaauacu

SEQ ID NO: 2757764 - RNA, 17 nt, Human
uagauaggccaugggca

SEQ ID NO: 2757765 - RNA, 20 nt, Human
acaaaguauuaagcauauau

SEQ ID NO: 2757766 - RNA, 16 nt, Human
uacuucaugcugucua

SEQ ID NO: 2757767 - RNA, 19 nt, Human
uacuucuuaggguuaugau

SEQ ID NO: 2757768 - RNA, 17 nt, Human
aauuuacagagacagaa

SEQ ID NO: 2757769 - RNA, 18 nt, Human
aauuuacagagacagaaa

SEQ ID NO: 2757770 - RNA, 19 nt, Human
aauuucucccagucauuua

SEQ ID NO: 2757771 - RNA, 18 nt, Human
aauugaggacacugauau

SEQ ID NO: 2757772 - RNA, 17 nt, Human
uacugagagugaacaaa

SEQ ID NO: 2757773 - RNA, 18 nt, Human
uacuaaaaauacaaaaaa

SEQ ID NO: 2757774 - RNA, 14 nt, Human
uacuaaaaauacaa

SEQ ID NO: 2757775 - RNA, 13 nt, Human
acacacugaagaa

SEQ ID NO: 2757776 - RNA, 20 nt, Human
acacacucaaaucaagaaac

SEQ ID NO: 2757777 - RNA, 14 nt, Human
acacaacuauauug

SEQ ID NO: 2757778 - RNA, 17 nt, Human
acacaacuauauuguuu

SEQ ID NO: 2757779 - RNA, 14 nt, Human
acaaugcuguauuu

SEQ ID NO: 2757780 - RNA, 17 nt, Human
acaaugcuguauuuuaa

SEQ ID NO: 2757781 - RNA, 14 nt, Human
acacacugaagaag

SEQ ID NO: 2757782 - RNA, 16 nt, Human
uaguguuggagaagaa

SEQ ID NO: 2757783 - RNA, 17 nt, Human
uaguguuggagaagaac

SEQ ID NO: 2757784 - RNA, 12 nt, Human
uaguguuggaga

SEQ ID NO: 2757785 - RNA, 17 nt, Human
uagucuugucucagauu

SEQ ID NO: 2757786 - RNA, 22 nt, Human
uagucuugucucagauuuuauu

SEQ ID NO: 2757787 - RNA, 17 nt, Human
acacuaagagagaauga

SEQ ID NO: 2757788 - RNA, 18 nt, Human
acacuaagagagaaugag

SEQ ID NO: 2757789 - RNA, 14 nt, Human
acacuaagagagaa

SEQ ID NO: 2757790 - RNA, 23 nt, Human
uauaaaauaauuuuuauauuuga

SEQ ID NO: 2757791 - RNA, 14 nt, Human
acacuccagugaga

SEQ ID NO: 2757792 - RNA, 12 nt, Human
acacugaagaag

SEQ ID NO: 2757793 - RNA, 14 nt, Human
acacugaagaagca

SEQ ID NO: 2757794 - RNA, 12 nt, Human
uauauuuacaaa

SEQ ID NO: 2757795 - RNA, 13 nt, Human
acacuuaaaaaug

SEQ ID NO: 2757796 - RNA, 15 nt, Human
acacuuaaaaauggu

SEQ ID NO: 2757797 - RNA, 20 nt, Human
acagcccuucuuuccacaga

SEQ ID NO: 2757798 - RNA, 21 nt, Human
acagcccuucuuuccacagaa

SEQ ID NO: 2757799 - RNA, 19 nt, Human
acagcccuucuuuccacag

SEQ ID NO: 2757800 - RNA, 19 nt, Human
uauauuuauuacuguaaga

SEQ ID NO: 2757801 - RNA, 15 nt, Human
uauauuuauuacugu

SEQ ID NO: 2757802 - RNA, 17 nt, Human
uaucucaaaacugcacu

SEQ ID NO: 2757803 - RNA, 19 nt, Human
acaugauccugcaauucca

SEQ ID NO: 2757804 - RNA, 14 nt, Human
ucaaagcugaaaug

SEQ ID NO: 2757805 - RNA, 18 nt, Human
ucaaaguugccuaaaucc

SEQ ID NO: 2757806 - RNA, 19 nt, Human
ucaaaguugccuaaaucca

SEQ ID NO: 2757807 - RNA, 21 nt, Human
ucaaaguugccuaaauccauu

SEQ ID NO: 2757808 - RNA, 22 nt, Human
ucaaaguugccuaaauccauuu

SEQ ID NO: 2757809 - RNA, 18 nt, Human
ucaaaagaaagaaaauca

SEQ ID NO: 2757810 - RNA, 16 nt, Human
uauuuuuauauuuacu

SEQ ID NO: 2757811 - RNA, 21 nt, Human
ucaaaauaccaugccauuuaa

SEQ ID NO: 2757812 - RNA, 23 nt, Human
ucaaaauaccaugccauuuaaag

SEQ ID NO: 2757813 - RNA, 21 nt, Human
ucaaaauaugccccauucaac

SEQ ID NO: 2757814 - RNA, 22 nt, Human
ucaagaugaugaugaucuuuaa

SEQ ID NO: 2757815 - RNA, 15 nt, Human
acaguuuucugagaa

SEQ ID NO: 2757816 - RNA, 17 nt, Human
acaguuuucugagaaag

SEQ ID NO: 2757817 - RNA, 16 nt, Human
acaguuuucugagaaa

SEQ ID NO: 2757818 - RNA, 21 nt, Human
acaguuuucugagaaagacua

SEQ ID NO: 2757819 - RNA, 20 nt, Human
acaguuuucugagaaagacu

SEQ ID NO: 2757820 - RNA, 19 nt, Human
acaguuuucugagaaagac

SEQ ID NO: 2757821 - RNA, 18 nt, Human
acaguuuucugagaaaga

SEQ ID NO: 2757822 - RNA, 13 nt, Human
uauuucauuucuu

SEQ ID NO: 2757823 - RNA, 16 nt, Human
uauuucuauauuuuca

SEQ ID NO: 2757824 - RNA, 17 nt, Human
uauuucuauauuuucau

SEQ ID NO: 2757825 - RNA, 18 nt, Human
uauuucuauauuuucauu

SEQ ID NO: 2757826 - RNA, 13 nt, Human
acaucaacagaua

SEQ ID NO: 2757827 - RNA, 14 nt, Human
acauagaauuaaca

SEQ ID NO: 2757828 - RNA, 18 nt, Human
acauagaauuaacacaug

SEQ ID NO: 2757829 - RNA, 19 nt, Human
acauauauaacaaugcugu

SEQ ID NO: 2757830 - RNA, 14 nt, Human
acauagucuggcug

SEQ ID NO: 2757831 - RNA, 15 nt, Human
acauagucuggcugu

SEQ ID NO: 2757832 - RNA, 20 nt, Human
acauagucuggcuguaccca

SEQ ID NO: 2757833 - RNA, 14 nt, Human
accagggacugagg

SEQ ID NO: 2757834 - RNA, 18 nt, Human
accacuuguguuuugcaa

SEQ ID NO: 2757835 - RNA, 15 nt, Human
ucaauucuugccaaa

SEQ ID NO: 2757836 - RNA, 13 nt, Human
ucaauuuuaacaa

SEQ ID NO: 2757837 - RNA, 23 nt, Human
ucaauuuuucuuauuucauuucu

SEQ ID NO: 2757838 - RNA, 20 nt, Human
ucaauuuuucuuauuucauu

SEQ ID NO: 2757839 - RNA, 13 nt, Human
accaaucaugaau

SEQ ID NO: 2757840 - RNA, 15 nt, Human
accaaucaugaauua

SEQ ID NO: 2757841 - RNA, 23 nt, Human
accauuucuugagguaaaagcau

SEQ ID NO: 2757842 - RNA, 19 nt, Human
accaugggauaaaugccau

SEQ ID NO: 2757843 - RNA, 12 nt, Human
ucagagcugccc

SEQ ID NO: 2757844 - RNA, 13 nt, Human
ucaggaaagagaa

SEQ ID NO: 2757845 - RNA, 19 nt, Human
ucaggaaagagaacuucca

SEQ ID NO: 2757846 - RNA, 21 nt, Human
ucaggaaaucaaauaugcaaa

SEQ ID NO: 2757847 - RNA, 20 nt, Human
ucaggaaaucaaauaugcaa

SEQ ID NO: 2757848 - RNA, 19 nt, Human
uccauccugaggcuccacu

SEQ ID NO: 2757849 - RNA, 20 nt, Human
uccauccugaggcuccacuu

SEQ ID NO: 2757850 - RNA, 21 nt, Human
uccauccugaggcuccacuug

SEQ ID NO: 2757851 - RNA, 21 nt, Human
uccaugaagauguagaggaga

SEQ ID NO: 2757852 - RNA, 13 nt, Human
uccaugaagaugu

SEQ ID NO: 2757853 - RNA, 18 nt, Human
uccauuuaauaauuauau

SEQ ID NO: 2757854 - RNA, 22 nt, Human
ucccagucauuuaauaaaugug

SEQ ID NO: 2757855 - RNA, 14 nt, Human
ucccagucauuuaa

SEQ ID NO: 2757856 - RNA, 17 nt, Human
ucccagccagcaguuca

SEQ ID NO: 2757857 - RNA, 18 nt, Human
ucccagccagcaguucag

SEQ ID NO: 2757858 - RNA, 16 nt, Human
uccccucggagaagag

SEQ ID NO: 2757859 - RNA, 17 nt, Human
uccccucggagaagagc

SEQ ID NO: 2757860 - RNA, 13 nt, Human
ucccucccuccac

SEQ ID NO: 2757861 - RNA, 14 nt, Human
ucccucccuccacc

SEQ ID NO: 2757862 - RNA, 21 nt, Human
ucccuccaccucccugcaaua

SEQ ID NO: 2757863 - RNA, 23 nt, Human
ucccuccaccucccugcaauaaa

SEQ ID NO: 2757864 - RNA, 15 nt, Human
ucccucccuccaccu

SEQ ID NO: 2757865 - RNA, 16 nt, Human
ucccucccuccaccuc

SEQ ID NO: 2757866 - RNA, 11 nt, Human
ucccugagcag

SEQ ID NO: 2757867 - RNA, 14 nt, Human
acuccaaagaaaug

SEQ ID NO: 2757868 - RNA, 18 nt, Human
acuccaaagaaauguaag

SEQ ID NO: 2757869 - RNA, 15 nt, Human
acuccaaagaaaugu

SEQ ID NO: 2757870 - RNA, 21 nt, Human
acuccaaagaaauguaaggga

SEQ ID NO: 2757871 - RNA, 18 nt, Human
acuccagaaagugacaag

SEQ ID NO: 2757872 - RNA, 21 nt, Human
accuagggugauauuaaccag

SEQ ID NO: 2757873 - RNA, 16 nt, Human
accuagggugauauua

SEQ ID NO: 2757874 - RNA, 23 nt, Human
ucaggaaaucaaauaugcaaagc

SEQ ID NO: 2757875 - RNA, 22 nt, Human
ucaggaaaucaaauaugcaaag

SEQ ID NO: 2757876 - RNA, 16 nt, Human
ucaugaauuaguuuua

SEQ ID NO: 2757877 - RNA, 12 nt, Human
accucccugcaa

SEQ ID NO: 2757878 - RNA, 13 nt, Human
accucccugcaau

SEQ ID NO: 2757879 - RNA, 14 nt, Human
acgagaaaacaaua

SEQ ID NO: 2757880 - RNA, 20 nt, Human
acgagcaggcuacugucagc

SEQ ID NO: 2757881 - RNA, 19 nt, Human
acgagcaggcuacugucag

SEQ ID NO: 2757882 - RNA, 21 nt, Human
uccaacuaucucauuuccaag

SEQ ID NO: 2757883 - RNA, 14 nt, Human
acugcauuauauuu

SEQ ID NO: 2757884 - RNA, 15 nt, Human
acugcauuauauuua

SEQ ID NO: 2757885 - RNA, 13 nt, Human
acugccuucucaa

SEQ ID NO: 2757886 - RNA, 19 nt, Human
acugccuucucaacuccaa

SEQ ID NO: 2757887 - RNA, 20 nt, Human
acuggcacaguuuucugaga

SEQ ID NO: 2757888 - RNA, 19 nt, Human
acuggcacaguuuucugag

SEQ ID NO: 2757889 - RNA, 13 nt, Human
acuggcacaguuu

SEQ ID NO: 2757890 - RNA, 20 nt, Human
ucuaaagccauuguaguccu

SEQ ID NO: 2757891 - RNA, 22 nt, Human
ucuaaguaaaaccacagcaguu

SEQ ID NO: 2757892 - RNA, 21 nt, Human
ucuaaguaaaaccacagcagu

SEQ ID NO: 2757893 - RNA, 20 nt, Human
ucuaaguaaaaccacagcag

SEQ ID NO: 2757894 - RNA, 16 nt, Human
ucuacauacuauggaa

SEQ ID NO: 2757895 - RNA, 23 nt, Human
ucuaaguaaaaccacagcaguug

SEQ ID NO: 2757896 - RNA, 18 nt, Human
acugggacaggggagaac

SEQ ID NO: 2757897 - RNA, 21 nt, Human
acugucagcuccccucggaga

SEQ ID NO: 2757898 - RNA, 18 nt, Human
acuguggguagacacaca

SEQ ID NO: 2757899 - RNA, 14 nt, Human
acuguggugacuuu

SEQ ID NO: 2757900 - RNA, 15 nt, Human
acuguggugacuuug

SEQ ID NO: 2757901 - RNA, 12 nt, Human
acuguggugacu

SEQ ID NO: 2757902 - RNA, 18 nt, Human
acuguggugacuuuggau

SEQ ID NO: 2757903 - RNA, 20 nt, Human
acuguggugacuuuggauaa

SEQ ID NO: 2757904 - RNA, 21 nt, Human
acuguggugacuuuggauaau

SEQ ID NO: 2757905 - RNA, 22 nt, Human
ucggguuuuauuguuuaaaauc

SEQ ID NO: 2757906 - RNA, 12 nt, Human
ucugaagaagau

SEQ ID NO: 2757907 - RNA, 15 nt, Human
ucugaagucagaucu

SEQ ID NO: 2757908 - RNA, 19 nt, Human
ucugaagucagaucugccu

SEQ ID NO: 2757909 - RNA, 21 nt, Human
ucucuggccuucggccuccau

SEQ ID NO: 2757910 - RNA, 22 nt, Human
ucucuggccuucggccuccauc

SEQ ID NO: 2757911 - RNA, 12 nt, Human
ucucuggccuuc

SEQ ID NO: 2757912 - RNA, 21 nt, Human
acuugaacccauauuuguaca

SEQ ID NO: 2757913 - RNA, 19 nt, Human
acuugaacccgggaggcag

SEQ ID NO: 2757914 - RNA, 20 nt, Human
acuugaacccgggaggcaga

SEQ ID NO: 2757915 - RNA, 20 nt, Human
acuugaaauuugaauuuugu

SEQ ID NO: 2757916 - RNA, 19 nt, Human
acuugaaauuugaauuuug

SEQ ID NO: 2757917 - RNA, 16 nt, Human
acuugaaauuugaauu

SEQ ID NO: 2757918 - RNA, 16 nt, Human
acuugucaauaaaauc

SEQ ID NO: 2757919 - RNA, 23 nt, Human
acuucuaaguaaaaccacagcag

SEQ ID NO: 2757920 - RNA, 16 nt, Human
acuuguguuuugcaag

SEQ ID NO: 2757921 - RNA, 14 nt, Human
acuuguuagaucua

SEQ ID NO: 2757922 - RNA, 15 nt, Human
acuuguuagaucuag

SEQ ID NO: 2757923 - RNA, 23 nt, Human
acuuguuagaucuaguucacucu

SEQ ID NO: 2757924 - RNA, 16 nt, Human
agacacacugaagaag

SEQ ID NO: 2757925 - RNA, 17 nt, Human
agacacacugaagaagc

SEQ ID NO: 2757926 - RNA, 15 nt, Human
agacacacaugaagu

SEQ ID NO: 2757927 - RNA, 23 nt, Human
ucuuagaugcaguucugaagaag

SEQ ID NO: 2757928 - RNA, 22 nt, Human
ucuuagaugcaguucugaagaa

SEQ ID NO: 2757929 - RNA, 19 nt, Human
ucugugaacuugaaauuug

SEQ ID NO: 2757930 - RNA, 22 nt, Human
ucugugaacuugaaauuugaau

SEQ ID NO: 2757931 - RNA, 14 nt, Human
ucuguacuuuuugg

SEQ ID NO: 2757932 - RNA, 17 nt, Human
ucuguacuuuuuggcau

SEQ ID NO: 2757933 - RNA, 13 nt, Human
ucuguacuuuuug

SEQ ID NO: 2757934 - RNA, 23 nt, Human
agaauuaacacaugauccugcaa

SEQ ID NO: 2757935 - RNA, 24 nt, Human
agagacagaaagcagaacagugau

SEQ ID NO: 2757936 - RNA, 15 nt, Human
agagacagaaagcag

SEQ ID NO: 2757937 - RNA, 16 nt, Human
agacuggugacugauu

SEQ ID NO: 2757938 - RNA, 17 nt, Human
agacuggugacugauuc

SEQ ID NO: 2757939 - RNA, 13 nt, Human
agacuggugacug

SEQ ID NO: 2757940 - RNA, 14 nt, Human
agacuggugacuga

SEQ ID NO: 2757941 - RNA, 12 nt, Human
agacuggugacu

SEQ ID NO: 2757942 - RNA, 15 nt, Human
ucuuauuucauuucu

SEQ ID NO: 2757943 - RNA, 16 nt, Human
ucuuauuucauuucuu

SEQ ID NO: 2757944 - RNA, 23 nt, Human
agacuauucaaacagucucagga

SEQ ID NO: 2757945 - RNA, 16 nt, Human
agaguuuagcuggaaa

SEQ ID NO: 2757946 - RNA, 17 nt, Human
agaguuuagcuggaaaa

SEQ ID NO: 2757947 - RNA, 17 nt, Human
ugaauuuauuggcuuuu

SEQ ID NO: 2757948 - RNA, 21 nt, Human
ugaauuuauuggcuuuucuga

SEQ ID NO: 2757949 - RNA, 22 nt, Human
ugaauuuauuggcuuuucugau

SEQ ID NO: 2757950 - RNA, 23 nt, Human
ugaauuuauuggcuuuucugauc

SEQ ID NO: 2757951 - RNA, 14 nt, Human
agaugcuagaacuc

SEQ ID NO: 2757952 - RNA, 18 nt, Human
agaugcaguucugaagaa

SEQ ID NO: 2757953 - RNA, 19 nt, Human
agaugcaguucugaagaag

SEQ ID NO: 2757954 - RNA, 17 nt, Human
agaugcaguucugaaga

SEQ ID NO: 2757955 - RNA, 17 nt, Human
ugacccacaagaaauga

SEQ ID NO: 2757956 - RNA, 15 nt, Human
agagguugcagugag

SEQ ID NO: 2757957 - RNA, 21 nt, Human
agagcuguucacagccagacu

SEQ ID NO: 2757958 - RNA, 19 nt, Human
agagcuguucacagccaga

SEQ ID NO: 2757959 - RNA, 22 nt, Human
agagcugcccucuccugggcag

SEQ ID NO: 2757960 - RNA, 23 nt, Human
ugaacuagaguuuagcuggaaaa

SEQ ID NO: 2757961 - RNA, 19 nt, Human
ugaacaaauuuacagagac

SEQ ID NO: 2757962 - RNA, 20 nt, Human
ugaacaaauuuacagagaca

SEQ ID NO: 2757963 - RNA, 18 nt, Human
ugaacaaauuuacagaga

SEQ ID NO: 2757964 - RNA, 18 nt, Human
ugaaauauuauguuaaaa

SEQ ID NO: 2757965 - RNA, 15 nt, Human
ugaaauuguauuaca

SEQ ID NO: 2757966 - RNA, 21 nt, Human
ugaaauuguaauuauaucuga

SEQ ID NO: 2757967 - RNA, 20 nt, Human
ugaaauuguaauuauaucug

SEQ ID NO: 2757968 - RNA, 15 nt, Human
ugaaauuugaauuuu

SEQ ID NO: 2757969 - RNA, 16 nt, Human
ugaaauuugaauuuug

SEQ ID NO: 2757970 - RNA, 14 nt, Human
ugaaauuugaauuu

SEQ ID NO: 2757971 - RNA, 17 nt, Human
ugaaauuugaauuuugu

SEQ ID NO: 2757972 - RNA, 17 nt, Human
ugaaauaagccagacau

SEQ ID NO: 2757973 - RNA, 18 nt, Human
ugaaauaagccagacauc

SEQ ID NO: 2757974 - RNA, 20 nt, Human
ugaaauaagccagacaucaa

SEQ ID NO: 2757975 - RNA, 23 nt, Human
ugaaauaagccagacaucaacag

SEQ ID NO: 2757976 - RNA, 15 nt, Human
agagcugcccucucc

SEQ ID NO: 2757977 - RNA, 13 nt, Human
agagcugcccucu

SEQ ID NO: 2757978 - RNA, 14 nt, Human
agagcugcccucuc

SEQ ID NO: 2757979 - RNA, 23 nt, Human
agagauuuuuuuguuguuuguuu

SEQ ID NO: 2757980 - RNA, 22 nt, Human
agagauuuuuuuguuguuuguu

SEQ ID NO: 2757981 - RNA, 20 nt, Human
agcaucacaugaacuuguaa

SEQ ID NO: 2757982 - RNA, 22 nt, Human
agcauuuagauguauagguuga

SEQ ID NO: 2757983 - RNA, 16 nt, Human
ugauuaaguaaugaua

SEQ ID NO: 2757984 - RNA, 15 nt, Human
ugauuaaguaaugau

SEQ ID NO: 2757985 - RNA, 19 nt, Human
ugauccagcagauuauuca

SEQ ID NO: 2757986 - RNA, 14 nt, Human
agcaggcuacuguc

SEQ ID NO: 2757987 - RNA, 20 nt, Human
agcaggcuacugucagcucc

SEQ ID NO: 2757988 - RNA, 19 nt, Human
agcaggcuacugucagcuc

SEQ ID NO: 2757989 - RNA, 17 nt, Human
agcaggcuacugucagc

SEQ ID NO: 2757990 - RNA, 16 nt, Human
agcaggcuacugucag

SEQ ID NO: 2757991 - RNA, 19 nt, Human
agcagggcauggcugggaa

SEQ ID NO: 2757992 - RNA, 22 nt, Human
agcauaccaacacgagcaggcu

SEQ ID NO: 2757993 - RNA, 19 nt, Human
agcauaccaacacgagcag

SEQ ID NO: 2757994 - RNA, 15 nt, Human
agcauauauuuuuau

SEQ ID NO: 2757995 - RNA, 13 nt, Human
agcauaccaacac

SEQ ID NO: 2757996 - RNA, 18 nt, Human
agcauauauuuuuauauu

SEQ ID NO: 2757997 - RNA, 20 nt, Human
agcauauauuuuuauauuua

SEQ ID NO: 2757998 - RNA, 22 nt, Human
agcauauauuuuuauauuuacu

SEQ ID NO: 2757999 - RNA, 19 nt, Human
agcagucaggaaagagaac

SEQ ID NO: 2758000 - RNA, 17 nt, Human
agcagucaggaaagaga

SEQ ID NO: 2758001 - RNA, 18 nt, Human
agcagucaggaaagagaa

SEQ ID NO: 2758002 - RNA, 18 nt, Human
ugagugucuuaauuaaaa

SEQ ID NO: 2758003 - RNA, 13 nt, Human
ugccauaauuacu

SEQ ID NO: 2758004 - RNA, 17 nt, Human
ugccaguuauggcuaua

SEQ ID NO: 2758005 - RNA, 19 nt, Human
agccugagcgacagugaga

SEQ ID NO: 2758006 - RNA, 19 nt, Human
ugcauacucauuaggaugg

SEQ ID NO: 2758007 - RNA, 13 nt, Human
ugcauacucauua

SEQ ID NO: 2758008 - RNA, 20 nt, Human
ugcauagauucccugagcag

SEQ ID NO: 2758009 - RNA, 17 nt, Human
ugcaauaaaauggguuu

SEQ ID NO: 2758010 - RNA, 21 nt, Human
ugcaauaaaauggguuuuacu

SEQ ID NO: 2758011 - RNA, 15 nt, Human
ugcaagccagauuuu

SEQ ID NO: 2758012 - RNA, 21 nt, Human
ugcaagccagauuuuccugaa

SEQ ID NO: 2758013 - RNA, 18 nt, Human
ugcaaagcacugacuucu

SEQ ID NO: 2758014 - RNA, 22 nt, Human
ugcaaagcacugacuucuaagu

SEQ ID NO: 2758015 - RNA, 20 nt, Human
ugcaaagcacugacuucuaa

SEQ ID NO: 2758016 - RNA, 13 nt, Human
ugauuucauucaa

SEQ ID NO: 2758017 - RNA, 23 nt, Human
ugauuugacauagucuggcugua

SEQ ID NO: 2758018 - RNA, 22 nt, Human
ugcagaagacaguauggcagcu

SEQ ID NO: 2758019 - RNA, 17 nt, Human
ugcacuccagccugagc

SEQ ID NO: 2758020 - RNA, 15 nt, Human
ugcacuccagccuga

SEQ ID NO: 2758021 - RNA, 13 nt, Human
aggacgcucucug

SEQ ID NO: 2758022 - RNA, 14 nt, Human
aggacgcucucugg

SEQ ID NO: 2758023 - RNA, 16 nt, Human
aggacgcucucuggcc

SEQ ID NO: 2758024 - RNA, 17 nt, Human
aggacgcucucuggccu

SEQ ID NO: 2758025 - RNA, 19 nt, Human
aggacgcucucuggccuuc

SEQ ID NO: 2758026 - RNA, 20 nt, Human
aggacgcucucuggccuucg

SEQ ID NO: 2758027 - RNA, 13 nt, Human
aggaauucuguau

SEQ ID NO: 2758028 - RNA, 14 nt, Human
aggaauucuguaua

SEQ ID NO: 2758029 - RNA, 18 nt, Human
aggagaaacuggaacucu

SEQ ID NO: 2758030 - RNA, 19 nt, Human
aggagaaacuggaacucuc

SEQ ID NO: 2758031 - RNA, 17 nt, Human
aggagaaacuggaacuc

SEQ ID NO: 2758032 - RNA, 16 nt, Human
aggacuucuuuaauuu

SEQ ID NO: 2758033 - RNA, 21 nt, Human
aggacuucuuuaauuuuggaa

SEQ ID NO: 2758034 - RNA, 22 nt, Human
aggacuucuuuaauuuuggaau

SEQ ID NO: 2758035 - RNA, 23 nt, Human
aggacuucuuuaauuuuggaauu

SEQ ID NO: 2758036 - RNA, 14 nt, Human
aggacuucuuuaau

SEQ ID NO: 2758037 - RNA, 17 nt, Human
ugcuuuuaaaaaaaaau

SEQ ID NO: 2758038 - RNA, 17 nt, Human
uggagcucguggaacag

SEQ ID NO: 2758039 - RNA, 21 nt, Human
uggagcucguggaacaguuac

SEQ ID NO: 2758040 - RNA, 14 nt, Human
uggagcucguggaa

SEQ ID NO: 2758041 - RNA, 20 nt, Human
aggcauuuaggccaugggac

SEQ ID NO: 2758042 - RNA, 20 nt, Human
aggcagcucuaaaugucaau

SEQ ID NO: 2758043 - RNA, 15 nt, Human
aggcagcuugaaacu

SEQ ID NO: 2758044 - RNA, 14 nt, Human
uggaguugaaaauc

SEQ ID NO: 2758045 - RNA, 15 nt, Human
aggcccccaggugcc

SEQ ID NO: 2758046 - RNA, 22 nt, Human
aggaaaucaaauaugcaaagca

SEQ ID NO: 2758047 - RNA, 21 nt, Human
aggaaaucaaauaugcaaagc

SEQ ID NO: 2758048 - RNA, 20 nt, Human
aggaaaucaaauaugcaaag

SEQ ID NO: 2758049 - RNA, 19 nt, Human
aggaaaucaaauaugcaaa

SEQ ID NO: 2758050 - RNA, 21 nt, Human
ugcuauuucuauauuuucauu

SEQ ID NO: 2758051 - RNA, 22 nt, Human
ugcuauuucuauauuuucauuc

SEQ ID NO: 2758052 - RNA, 17 nt, Human
ugccuuuucccaacucc

SEQ ID NO: 2758053 - RNA, 19 nt, Human
ugccuuuucccaacuccag

SEQ ID NO: 2758054 - RNA, 14 nt, Human
ugcuacaaaaacac

SEQ ID NO: 2758055 - RNA, 19 nt, Human
agcuugcccuguuaaaaga

SEQ ID NO: 2758056 - RNA, 18 nt, Human
agcuugcccuguuaaaag

SEQ ID NO: 2758057 - RNA, 16 nt, Human
agcuugcccuguuaaa

SEQ ID NO: 2758058 - RNA, 20 nt, Human
agcuugcccuggugccucac

SEQ ID NO: 2758059 - RNA, 20 nt, Human
ugcccuguuaaaagaugaaa

SEQ ID NO: 2758060 - RNA, 19 nt, Human
ugcccuguuaaaagaugaa

SEQ ID NO: 2758061 - RNA, 13 nt, Human
agcugcccucucc

SEQ ID NO: 2758062 - RNA, 14 nt, Human
agcugcccucuccu

SEQ ID NO: 2758063 - RNA, 15 nt, Human
agcugcccucuccug

SEQ ID NO: 2758064 - RNA, 14 nt, Human
ugccaucaauaaaa

SEQ ID NO: 2758065 - RNA, 22 nt, Human
ugccaucaauaaaaaauuauga

SEQ ID NO: 2758066 - RNA, 14 nt, Human
agcuguucacagcc

SEQ ID NO: 2758067 - RNA, 16 nt, Human
uguaaaggaauuuaaa

SEQ ID NO: 2758068 - RNA, 15 nt, Human
uguaaauacaauuuu

SEQ ID NO: 2758069 - RNA, 16 nt, Human
uggugcccugcuuuca

SEQ ID NO: 2758070 - RNA, 19 nt, Human
uggugcccugcuuucagau

SEQ ID NO: 2758071 - RNA, 20 nt, Human
uggugcccugcuuucagaua

SEQ ID NO: 2758072 - RNA, 14 nt, Human
uggugcccugcuuu

SEQ ID NO: 2758073 - RNA, 14 nt, Human
uguaguguuggaga

SEQ ID NO: 2758074 - RNA, 15 nt, Human
uguaguguuggagaa

SEQ ID NO: 2758075 - RNA, 18 nt, Human
uguaucacaaaucuuaac

SEQ ID NO: 2758076 - RNA, 15 nt, Human
uguaucacaaaucuu

SEQ ID NO: 2758077 - RNA, 13 nt, Human
uguaugugugaag

SEQ ID NO: 2758078 - RNA, 22 nt, Human
uguauuacaaauccaaugaaau

SEQ ID NO: 2758079 - RNA, 13 nt, Human
uguauuacaaauc

SEQ ID NO: 2758080 - RNA, 18 nt, Human
aguauuagaauaccacag

SEQ ID NO: 2758081 - RNA, 14 nt, Human
agucaccucaugga

SEQ ID NO: 2758082 - RNA, 15 nt, Human
agucaccucauggaa

SEQ ID NO: 2758083 - RNA, 17 nt, Human
agucaccucauggaauu

SEQ ID NO: 2758084 - RNA, 18 nt, Human
aguauuucuaugaaauau

SEQ ID NO: 2758085 - RNA, 17 nt, Human
aguauuucuaugaaaua

SEQ ID NO: 2758086 - RNA, 16 nt, Human
aguauuucuaugaaau

SEQ ID NO: 2758087 - RNA, 13 nt, Human
aguaaugauaacu

SEQ ID NO: 2758088 - RNA, 17 nt, Human
aguaaugauaacuggaa

SEQ ID NO: 2758089 - RNA, 18 nt, Human
aguaaugauaacuggaaa

SEQ ID NO: 2758090 - RNA, 20 nt, Human
aguaaugauaacuggaaacu

SEQ ID NO: 2758091 - RNA, 13 nt, Human
aguaaaauccaca

SEQ ID NO: 2758092 - RNA, 13 nt, Human
agggaaauuucag

SEQ ID NO: 2758093 - RNA, 21 nt, Human
agggaggacgcucucuggccu

SEQ ID NO: 2758094 - RNA, 22 nt, Human
agggaggacgcucucuggccuu

SEQ ID NO: 2758095 - RNA, 23 nt, Human
agggaggacgcucucuggccuuc

SEQ ID NO: 2758096 - RNA, 18 nt, Human
aggggagcaugggaagug

SEQ ID NO: 2758097 - RNA, 16 nt, Human
aguucugcagauaaac

SEQ ID NO: 2758098 - RNA, 21 nt, Human
aguucugcagauaaacaguag

SEQ ID NO: 2758099 - RNA, 16 nt, Human
aguucugaagaagaug

SEQ ID NO: 2758100 - RNA, 14 nt, Human
uguuuugcaagcca

SEQ ID NO: 2758101 - RNA, 19 nt, Human
uguuuucauuaucucaaaa

SEQ ID NO: 2758102 - RNA, 19 nt, Human
uguuuggaccaaaaaccag

SEQ ID NO: 2758103 - RNA, 14 nt, Human
uguuuauuacagua

SEQ ID NO: 2758104 - RNA, 22 nt, Human
uguuuagucuugucucagauuu

SEQ ID NO: 2758105 - RNA, 20 nt, Human
uguuuagucuugucucagau

SEQ ID NO: 2758106 - RNA, 23 nt, Human
uguuuagucuugucucagauuuu

SEQ ID NO: 2758107 - RNA, 16 nt, Human
aguuuagcuggaaaag

SEQ ID NO: 2758108 - RNA, 20 nt, Human
aguuuaauauuaaagccaug

SEQ ID NO: 2758109 - RNA, 15 nt, Human
aguuuaauauuaaag

SEQ ID NO: 2758110 - RNA, 16 nt, Human
aguuuaauauuaaagc

SEQ ID NO: 2758111 - RNA, 18 nt, Human
aguuuaauauuaaagcca

SEQ ID NO: 2758112 - RNA, 19 nt, Human
aguuuaauauuaaagccau

SEQ ID NO: 2758113 - RNA, 17 nt, Human
aguuggguguauugugc

SEQ ID NO: 2758114 - RNA, 20 nt, Human
aguuggguguauugugcgcu

SEQ ID NO: 2758115 - RNA, 22 nt, Human
aguugccuaaauccauuuggaa

SEQ ID NO: 2758116 - RNA, 23 nt, Human
aguugccuaaauccauuuggaaa

SEQ ID NO: 2758117 - RNA, 19 nt, Human
aguugccuaaauccauuug

SEQ ID NO: 2758118 - RNA, 16 nt, Human
aguuggguguauugug

SEQ ID NO: 2758119 - RNA, 14 nt, Human
uuaacaacagcugg

SEQ ID NO: 2758120 - RNA, 14 nt, Human
uuaccuuacagaag

SEQ ID NO: 2758121 - RNA, 12 nt, Human
uuaccugggaaa

SEQ ID NO: 2758122 - RNA, 15 nt, Human
uuacuguaagaaaau

SEQ ID NO: 2758123 - RNA, 16 nt, Human
auaaauagcuagacug

SEQ ID NO: 2758124 - RNA, 18 nt, Human
auaaauagcuagacuggu

SEQ ID NO: 2758125 - RNA, 21 nt, Human
auaaaucugugaacuugaaau

SEQ ID NO: 2758126 - RNA, 22 nt, Human
auaaaucugugaacuugaaauu

SEQ ID NO: 2758127 - RNA, 20 nt, Human
auaaaucugugaacuugaaa

SEQ ID NO: 2758128 - RNA, 16 nt, Human
uuacaguauaauuaac

SEQ ID NO: 2758129 - RNA, 17 nt, Human
uuacaguauaauuaaca

SEQ ID NO: 2758130 - RNA, 13 nt, Human
uuacaguauaauu

SEQ ID NO: 2758131 - RNA, 18 nt, Human
uuacaguauaauuaacau

SEQ ID NO: 2758132 - RNA, 19 nt, Human
uuacaguauaauuaacaug

SEQ ID NO: 2758133 - RNA, 20 nt, Human
uuacaguauaauuaacaugu

SEQ ID NO: 2758134 - RNA, 20 nt, Human
uuaagaagacugcauuauau

SEQ ID NO: 2758135 - RNA, 22 nt, Human
uuaagaagacugcauuauauuu

SEQ ID NO: 2758136 - RNA, 18 nt, Human
uuaaguaaugauaacugg

SEQ ID NO: 2758137 - RNA, 15 nt, Human
auaaaauaauuuuua

SEQ ID NO: 2758138 - RNA, 16 nt, Human
auaaaauaauuuuuau

SEQ ID NO: 2758139 - RNA, 21 nt, Human
auaaaauaauuuuuauauuug

SEQ ID NO: 2758140 - RNA, 18 nt, Human
auaaaauccauacauuug

SEQ ID NO: 2758141 - RNA, 19 nt, Human
auaaaauccauacauuugu

SEQ ID NO: 2758142 - RNA, 18 nt, Human
agucuuucacauuuaaau

SEQ ID NO: 2758143 - RNA, 20 nt, Human
agugaaacucguuaauuugu

SEQ ID NO: 2758144 - RNA, 15 nt, Human
ugugagaugcuagaa

SEQ ID NO: 2758145 - RNA, 19 nt, Human
ugugagaugcuagaacucc

SEQ ID NO: 2758146 - RNA, 22 nt, Human
agucucaggaaaucaaauaugc

SEQ ID NO: 2758147 - RNA, 16 nt, Human
agucucaggaaaucaa

SEQ ID NO: 2758148 - RNA, 14 nt, Human
ugugaacuugaaau

SEQ ID NO: 2758149 - RNA, 15 nt, Human
ugugaacuugaaauu

SEQ ID NO: 2758150 - RNA, 16 nt, Human
ugugaacuugaaauuu

SEQ ID NO: 2758151 - RNA, 12 nt, Human
ugugaacuugaa

SEQ ID NO: 2758152 - RNA, 16 nt, Human
agugaacaaauuuaca

SEQ ID NO: 2758153 - RNA, 20 nt, Human
agugaacaaauuuacagaga

SEQ ID NO: 2758154 - RNA, 15 nt, Human
agugaaagaaaauaa

SEQ ID NO: 2758155 - RNA, 18 nt, Human
ugugcugggguuaucuga

SEQ ID NO: 2758156 - RNA, 20 nt, Human
uguggucacaggaaguagag

SEQ ID NO: 2758157 - RNA, 19 nt, Human
agugaguuggguguauugu

SEQ ID NO: 2758158 - RNA, 13 nt, Human
uguguaaguagau

SEQ ID NO: 2758159 - RNA, 15 nt, Human
uguuauaaucuuuca

SEQ ID NO: 2758160 - RNA, 18 nt, Human
uguuccuagugaaagagg

SEQ ID NO: 2758161 - RNA, 14 nt, Human
uguuccuagugaaa

SEQ ID NO: 2758162 - RNA, 19 nt, Human
aucaauuuuucuuauuuca

SEQ ID NO: 2758163 - RNA, 17 nt, Human
auauuuuaugauccagc

SEQ ID NO: 2758164 - RNA, 22 nt, Human
auauuuuaugauccagcagauu

SEQ ID NO: 2758165 - RNA, 12 nt, Human
auauuuuaugau

SEQ ID NO: 2758166 - RNA, 13 nt, Human
auauuuuaugauc

SEQ ID NO: 2758167 - RNA, 13 nt, Human
auauuugaaauau

SEQ ID NO: 2758168 - RNA, 22 nt, Human
auauuuguaucacaaaucuuaa

SEQ ID NO: 2758169 - RNA, 12 nt, Human
auauuuuaacuu

SEQ ID NO: 2758170 - RNA, 23 nt, Human
auauuugaaauauugacuuuuua

SEQ ID NO: 2758171 - RNA, 14 nt, Human
auauuugaaauauu

SEQ ID NO: 2758172 - RNA, 19 nt, Human
auauuugaaauauugacuu

SEQ ID NO: 2758173 - RNA, 14 nt, Human
auauuaaagccaug

SEQ ID NO: 2758174 - RNA, 15 nt, Human
auauuaaagccaugu

SEQ ID NO: 2758175 - RNA, 18 nt, Human
auauuaaagccauguuua

SEQ ID NO: 2758176 - RNA, 23 nt, Human
auauuaaagccauguuuauuaca

SEQ ID NO: 2758177 - RNA, 12 nt, Human
uucugaagaaga

SEQ ID NO: 2758178 - RNA, 13 nt, Human
uucugaagaagau

SEQ ID NO: 2758179 - RNA, 14 nt, Human
uucugaagaagaug

SEQ ID NO: 2758180 - RNA, 23 nt, Human
uucugcaucagcugcugaaacaa

SEQ ID NO: 2758181 - RNA, 16 nt, Human
uucugcaucagcugcu

SEQ ID NO: 2758182 - RNA, 11 nt, Human
aucccucccuc

SEQ ID NO: 2758183 - RNA, 13 nt, Human
aucccucccucca

SEQ ID NO: 2758184 - RNA, 23 nt, Human
aucccucccuccaccucccugca

SEQ ID NO: 2758185 - RNA, 20 nt, Human
aucauuucugcaucagcugc

SEQ ID NO: 2758186 - RNA, 14 nt, Human
uucucaacuccaaa

SEQ ID NO: 2758187 - RNA, 18 nt, Human
uucucaacuccaaacuga

SEQ ID NO: 2758188 - RNA, 17 nt, Human
uuauuguuuaaaaucau

SEQ ID NO: 2758189 - RNA, 18 nt, Human
auagcuacuaauuuuaaa

SEQ ID NO: 2758190 - RNA, 15 nt, Human
auagcuagacuggug

SEQ ID NO: 2758191 - RNA, 16 nt, Human
auagcuagacugguga

SEQ ID NO: 2758192 - RNA, 14 nt, Human
auagcuagacuggu

SEQ ID NO: 2758193 - RNA, 18 nt, Human
auagcuagacuggugacu

SEQ ID NO: 2758194 - RNA, 19 nt, Human
auagcuagacuggugacug

SEQ ID NO: 2758195 - RNA, 23 nt, Human
auagcuagacuggugacugauuc

SEQ ID NO: 2758196 - RNA, 17 nt, Human
auagcuacuaauuuuaa

SEQ ID NO: 2758197 - RNA, 14 nt, Human
auagcuacuaauuu

SEQ ID NO: 2758198 - RNA, 21 nt, Human
auaggaauugacccacaagaa

SEQ ID NO: 2758199 - RNA, 15 nt, Human
uucaaacauauauaa

SEQ ID NO: 2758200 - RNA, 17 nt, Human
auagucaaauuguguga

SEQ ID NO: 2758201 - RNA, 18 nt, Human
auagucaaauugugugaa

SEQ ID NO: 2758202 - RNA, 14 nt, Human
auauauaacaaugc

SEQ ID NO: 2758203 - RNA, 17 nt, Human
auauauaacaaugcugu

SEQ ID NO: 2758204 - RNA, 18 nt, Human
auauauaacaaugcugua

SEQ ID NO: 2758205 - RNA, 19 nt, Human
auauaagcuuguauuccuu

SEQ ID NO: 2758206 - RNA, 12 nt, Human
auauaacaaugc

SEQ ID NO: 2758207 - RNA, 15 nt, Human
auauaacaaugcugu

SEQ ID NO: 2758208 - RNA, 21 nt, Human
uucagcaaaaauauuuuauga

SEQ ID NO: 2758209 - RNA, 15 nt, Human
auaugcaaagcacug

SEQ ID NO: 2758210 - RNA, 16 nt, Human
auaugcaaagcacuga

SEQ ID NO: 2758211 - RNA, 23 nt, Human
auaugcaaagcacugacuucuaa

SEQ ID NO: 2758212 - RNA, 15 nt, Human
auaucugaggaauuc

SEQ ID NO: 2758213 - RNA, 16 nt, Human
auaucugaggaauucu

SEQ ID NO: 2758214 - RNA, 17 nt, Human
auaucugaggaauucug

SEQ ID NO: 2758215 - RNA, 18 nt, Human
auaucugaggaauucugu

SEQ ID NO: 2758216 - RNA, 19 nt, Human
auaucugaggaauucugua

SEQ ID NO: 2758217 - RNA, 20 nt, Human
auaucugaggaauucuguau

SEQ ID NO: 2758218 - RNA, 21 nt, Human
auaucugaggaauucuguaua

SEQ ID NO: 2758219 - RNA, 22 nt, Human
auaucugaggaauucuguauag

SEQ ID NO: 2758220 - RNA, 23 nt, Human
auaucugaggaauucuguauaga

SEQ ID NO: 2758221 - RNA, 18 nt, Human
augaacuuguaaaggaau

SEQ ID NO: 2758222 - RNA, 15 nt, Human
aucuuauaauuuaaa

SEQ ID NO: 2758223 - RNA, 16 nt, Human
aucuuauaauuuaaaa

SEQ ID NO: 2758224 - RNA, 14 nt, Human
aucuuauaauuuaa

SEQ ID NO: 2758225 - RNA, 15 nt, Human
aucuuuaaaauacac

SEQ ID NO: 2758226 - RNA, 12 nt, Human
aucuuuaaaaua

SEQ ID NO: 2758227 - RNA, 17 nt, Human
uuggagaagaacugaaa

SEQ ID NO: 2758228 - RNA, 22 nt, Human
uuggagaagaacugaaaucaua

SEQ ID NO: 2758229 - RNA, 15 nt, Human
uuggagaagaacuga

SEQ ID NO: 2758230 - RNA, 15 nt, Human
aucucaaaacugcac

SEQ ID NO: 2758231 - RNA, 20 nt, Human
aucucaaaacugcacuguca

SEQ ID NO: 2758232 - RNA, 19 nt, Human
aucucaaaacugcacuguc

SEQ ID NO: 2758233 - RNA, 13 nt, Human
uugacaugggaca

SEQ ID NO: 2758234 - RNA, 12 nt, Human
uugacuuuuuau

SEQ ID NO: 2758235 - RNA, 16 nt, Human
aucugaagucagaucu

SEQ ID NO: 2758236 - RNA, 17 nt, Human
aucugaagucagaucug

SEQ ID NO: 2758237 - RNA, 18 nt, Human
aucugaagucagaucugc

SEQ ID NO: 2758238 - RNA, 23 nt, Human
aucugaagucagaucugccuaag

SEQ ID NO: 2758239 - RNA, 21 nt, Human
uuuauaugcuucuguuuuaua

SEQ ID NO: 2758240 - RNA, 19 nt, Human
uuuauaugcuucuguuuua

SEQ ID NO: 2758241 - RNA, 17 nt, Human
uuuagucuugucucaga

SEQ ID NO: 2758242 - RNA, 23 nt, Human
uuuagucuugucucagauuuuau

SEQ ID NO: 2758243 - RNA, 15 nt, Human
uuuagucuugucuca

SEQ ID NO: 2758244 - RNA, 14 nt, Human
augccuuuucccaa

SEQ ID NO: 2758245 - RNA, 20 nt, Human
augccuuuucccaacuccag

SEQ ID NO: 2758246 - RNA, 22 nt, Human
augccuuuucccaacuccagaa

SEQ ID NO: 2758247 - RNA, 18 nt, Human
augcuacaggauuugaaa

SEQ ID NO: 2758248 - RNA, 14 nt, Human
augccaucaauaaa

SEQ ID NO: 2758249 - RNA, 23 nt, Human
augcuguauuuuaaaagaaugau

SEQ ID NO: 2758250 - RNA, 19 nt, Human
augcuguauuuuaaaagaa

SEQ ID NO: 2758251 - RNA, 22 nt, Human
augcuguauuuuaaaagaauga

SEQ ID NO: 2758252 - RNA, 21 nt, Human
augcuucuguuuuauaauuuu

SEQ ID NO: 2758253 - RNA, 19 nt, Human
uuucaaacauauauaacaa

SEQ ID NO: 2758254 - RNA, 17 nt, Human
uuucaaacauauauaac

SEQ ID NO: 2758255 - RNA, 21 nt, Human
uuuaaauauaugcuaagucuu

SEQ ID NO: 2758256 - RNA, 14 nt, Human
augcaaagcacuga

SEQ ID NO: 2758257 - RNA, 13 nt, Human
augcaaagcacug

SEQ ID NO: 2758258 - RNA, 12 nt, Human
augcaaagcacu

SEQ ID NO: 2758259 - RNA, 18 nt, Human
uuuaaaaaaauuccaagu

SEQ ID NO: 2758260 - RNA, 13 nt, Human
augauuucauuca

SEQ ID NO: 2758261 - RNA, 17 nt, Human
augagguacugagagug

SEQ ID NO: 2758262 - RNA, 18 nt, Human
augagguacugagaguga

SEQ ID NO: 2758263 - RNA, 15 nt, Human
augagguacugagag

SEQ ID NO: 2758264 - RNA, 20 nt, Human
uugucaauaaaauccauaca

SEQ ID NO: 2758265 - RNA, 15 nt, Human
auuacuguaagaaaa

SEQ ID NO: 2758266 - RNA, 16 nt, Human
auuacuguaagaaaau

SEQ ID NO: 2758267 - RNA, 21 nt, Human
auuagaauucuguauagauua

SEQ ID NO: 2758268 - RNA, 14 nt, Human
uuuugugaagcaaa

SEQ ID NO: 2758269 - RNA, 15 nt, Human
uuuuggaauuuuccu

SEQ ID NO: 2758270 - RNA, 15 nt, Human
uuuuguuuucauuau

SEQ ID NO: 2758271 - RNA, 20 nt, Human
uuuuuauauuuacuaaaaug

SEQ ID NO: 2758272 - RNA, 15 nt, Human
uuuuugaagcuguau

SEQ ID NO: 2758273 - RNA, 23 nt, Human
uuuuuggcauaacauaaaucugu

SEQ ID NO: 2758274 - RNA, 24 nt, Human
uuuuuggcauaacauaaaucugug

SEQ ID NO: 2758275 - RNA, 17 nt, Human
auuccaagugauugaaa

SEQ ID NO: 2758276 - RNA, 12 nt, Human
auucacugauuu

SEQ ID NO: 2758277 - RNA, 17 nt, Human
auucacugauuugacau

SEQ ID NO: 2758278 - RNA, 20 nt, Human
auuauauggcuugaguuuaa

SEQ ID NO: 2758279 - RNA, 18 nt, Human
auuauaugcuauuucuau

SEQ ID NO: 2758280 - RNA, 17 nt, Human
auuauaugcuauuucua

SEQ ID NO: 2758281 - RNA, 19 nt, Human
auuauaugcuauuucuaua

SEQ ID NO: 2758282 - RNA, 19 nt, Human
auuauucaaaguugccuaa

SEQ ID NO: 2758283 - RNA, 22 nt, Human
auuauucaaaguugccuaaauc

SEQ ID NO: 2758284 - RNA, 18 nt, Human
auuauucaaaguugccua

SEQ ID NO: 2758285 - RNA, 24 nt, Human
auuauucaaaguugccuaaaucca

SEQ ID NO: 2758286 - RNA, 19 nt, Human
auuauucacugauuugaca

SEQ ID NO: 2758287 - RNA, 20 nt, Human
auuauaucugaggaauucug

SEQ ID NO: 2758288 - RNA, 21 nt, Human
auuauaucugaggaauucugu

SEQ ID NO: 2758289 - RNA, 22 nt, Human
auuauaucugaggaauucugua

SEQ ID NO: 2758290 - RNA, 16 nt, Human
auuauaugcuauuucu

SEQ ID NO: 2758291 - RNA, 18 nt, Human
auuauaucugaggaauuc

SEQ ID NO: 2758292 - RNA, 19 nt, Human
auuauaucugaggaauucu

SEQ ID NO: 2758293 - RNA, 22 nt, Human
auucaaacagucucaggaaauc

SEQ ID NO: 2758294 - RNA, 20 nt, Human
uuugcuggagcucugcccau

SEQ ID NO: 2758295 - RNA, 19 nt, Human
uuugcuaagcauuccaacu

SEQ ID NO: 2758296 - RNA, 12 nt, Human
uuugaauuuugu

SEQ ID NO: 2758297 - RNA, 14 nt, Human
uuugaauuuugugu

SEQ ID NO: 2758298 - RNA, 17 nt, Human
uuuguaguguuggagaa

SEQ ID NO: 2758299 - RNA, 23 nt, Human
augucgucaaagcugaaauggac

SEQ ID NO: 2758300 - RNA, 19 nt, Human
auguauauuuuauaucaau

SEQ ID NO: 2758301 - RNA, 21 nt, Human
augugcuaguaauuggaaagg

SEQ ID NO: 2758302 - RNA, 20 nt, Human
augugcuaguaauuggaaag

SEQ ID NO: 2758303 - RNA, 22 nt, Human
uuuuauggcacuaguauuucua

SEQ ID NO: 2758304 - RNA, 20 nt, Human
uuuucaggcuagauguaugu

SEQ ID NO: 2758305 - RNA, 16 nt, Human
uuuucucuaggaaaua

SEQ ID NO: 2758306 - RNA, 19 nt, Human
uuuucugauccaguuuugu

SEQ ID NO: 2758307 - RNA, 12 nt, Human
auguuuauuaca

SEQ ID NO: 2758308 - RNA, 15 nt, Human
auguuuauuacagua

SEQ ID NO: 2758309 - RNA, 16 nt, Human
auguuuauuacaguau

SEQ ID NO: 2758310 - RNA, 18 nt, Human
auguuuauuacaguauaa

SEQ ID NO: 2758311 - RNA, 19 nt, Human
auguuuauuacaguauaau

SEQ ID NO: 2758312 - RNA, 22 nt, Human
auguuuauuacaguauaauuaa

SEQ ID NO: 2758313 - RNA, 23 nt, Human
auguuuauuacaguauaauuaac

SEQ ID NO: 2758314 - RNA, 16 nt, Human
auuggagcucguggaa

SEQ ID NO: 2758315 - RNA, 17 nt, Human
auuggagcucgugggac

SEQ ID NO: 2758316 - RNA, 14 nt, Human
auuggggauucuua

SEQ ID NO: 2758317 - RNA, 15 nt, Human
auuggggauucuuaa

SEQ ID NO: 2758318 - RNA, 16 nt, Human
auuggggauucuuaaa

SEQ ID NO: 2758319 - RNA, 20 nt, Human
auuggggauucuuaaaguug

SEQ ID NO: 2758320 - RNA, 21 nt, Human
auuggggauucuuaaaguuga

SEQ ID NO: 2758321 - RNA, 22 nt, Human
auuggggauucuuaaaguugaa

SEQ ID NO: 2758322 - RNA, 20 nt, Human
auuucuugagguaaaagcau

SEQ ID NO: 2758323 - RNA, 13 nt, Human
auuugaauuuugu

SEQ ID NO: 2758324 - RNA, 21 nt, Human
auuuauuuuaauaauguuuca

SEQ ID NO: 2758325 - RNA, 20 nt, Human
auuuauuggcuuuucugauc

SEQ ID NO: 2758326 - RNA, 23 nt, Human
auuuauuggcuuuucugauccag

SEQ ID NO: 2758327 - RNA, 19 nt, Human
auuuauuacuguaagaaaa

SEQ ID NO: 2758328 - RNA, 20 nt, Human
auuuauuacuguaagaaaau

SEQ ID NO: 2758329 - RNA, 14 nt, Human
auuuauuggcuuuu

SEQ ID NO: 2758330 - RNA, 18 nt, Human
auuuauuggcuuuucuga

SEQ ID NO: 2758331 - RNA, 17 nt, Human
auuuaaaaaaaaaccug

SEQ ID NO: 2758332 - RNA, 16 nt, Human
auuguaguccuguaau

SEQ ID NO: 2758333 - RNA, 15 nt, Human
auuguacuuugugcu

SEQ ID NO: 2758334 - RNA, 15 nt, Human
auuuaccacuugugu

SEQ ID NO: 2758335 - RNA, 22 nt, Human
auuuaccacuuguguuuugcaa

SEQ ID NO: 2758336 - RNA, 15 nt, Human
auuuacuaaaaugga

SEQ ID NO: 2758337 - RNA, 16 nt, Human
auuuacuaaaauggac

SEQ ID NO: 2758338 - RNA, 19 nt, Human
auuuacuaaaauggacugu

SEQ ID NO: 2758339 - RNA, 20 nt, Human
auuuacuaaaauggacugug

SEQ ID NO: 2758340 - RNA, 18 nt, Human
auuuuaauaauguuucaa

SEQ ID NO: 2758341 - RNA, 19 nt, Human
auuuuaauaauguuucaaa

SEQ ID NO: 2758342 - RNA, 17 nt, Human
auuuuaacaacagcugg

SEQ ID NO: 2758343 - RNA, 14 nt, Human
caaagaaauguaag

SEQ ID NO: 2758344 - RNA, 15 nt, Human
caaaguugccuaaau

SEQ ID NO: 2758345 - RNA, 17 nt, Human
caaaguugccuaaaucc

SEQ ID NO: 2758346 - RNA, 14 nt, Human
caaaguugccuaaa

SEQ ID NO: 2758347 - RNA, 18 nt, Human
caaaguugccuaaaucca

SEQ ID NO: 2758348 - RNA, 19 nt, Human
caagacugcacaucaaaau

SEQ ID NO: 2758349 - RNA, 13 nt, Human
caagaaaugaaag

SEQ ID NO: 2758350 - RNA, 16 nt, Human
caagcauaccaacacg

SEQ ID NO: 2758351 - RNA, 21 nt, Human
caagcauaccaacacgagcag

SEQ ID NO: 2758352 - RNA, 16 nt, Human
caagcauuuagaugua

SEQ ID NO: 2758353 - RNA, 19 nt, Human
caagcauuuagauguauag

SEQ ID NO: 2758354 - RNA, 16 nt, Human
caaauuuacagagaca

SEQ ID NO: 2758355 - RNA, 17 nt, Human
caaauuuacagagacag

SEQ ID NO: 2758356 - RNA, 23 nt, Human
caaauuuacagagacagaaagca

SEQ ID NO: 2758357 - RNA, 23 nt, Human
cacaagaaaugaaagcagggacu

SEQ ID NO: 2758358 - RNA, 23 nt, Human
cacaagacccaaaaggcagaagc

SEQ ID NO: 2758359 - RNA, 13 nt, Human
cacaagaaaugaa

SEQ ID NO: 2758360 - RNA, 15 nt, Human
cacaagaaaugaaag

SEQ ID NO: 2758361 - RNA, 13 nt, Human
caauuuuguuucu

SEQ ID NO: 2758362 - RNA, 14 nt, Human
caauuuuguuucug

SEQ ID NO: 2758363 - RNA, 16 nt, Human
caauuuuguuucugua

SEQ ID NO: 2758364 - RNA, 17 nt, Human
caauuuuguuucuguac

SEQ ID NO: 2758365 - RNA, 17 nt, Human
cacaugaaguccaagca

SEQ ID NO: 2758366 - RNA, 20 nt, Human
cacaugaaguccaagcauuu

SEQ ID NO: 2758367 - RNA, 16 nt, Human
cacaugaaguccaagc

SEQ ID NO: 2758368 - RNA, 20 nt, Human
cacaguuuucugagaaagac

SEQ ID NO: 2758369 - RNA, 22 nt, Human
cacaguuuucugagaaagacua

SEQ ID NO: 2758370 - RNA, 21 nt, Human
cacaguuuucugagaaagacu

SEQ ID NO: 2758371 - RNA, 13 nt, Human
cccaggugccagu

SEQ ID NO: 2758372 - RNA, 18 nt, Human
ccaucaaggguacacugc

SEQ ID NO: 2758373 - RNA, 19 nt, Human
ccaucaauaaaaaauuaug

SEQ ID NO: 2758374 - RNA, 20 nt, Human
ccaucaauaaaaaauuauga

SEQ ID NO: 2758375 - RNA, 14 nt, Human
ccaugaagauguag

SEQ ID NO: 2758376 - RNA, 16 nt, Human
ccaugauguuuagaaa

SEQ ID NO: 2758377 - RNA, 18 nt, Human
cccaaaaggcagaagcaa

SEQ ID NO: 2758378 - RNA, 13 nt, Human
cccaaaaggcaga

SEQ ID NO: 2758379 - RNA, 17 nt, Human
ccaggugccaguuaugg

SEQ ID NO: 2758380 - RNA, 20 nt, Human
ccaggaauggagccugcacg

SEQ ID NO: 2758381 - RNA, 13 nt, Human
ccacugcagaaga

SEQ ID NO: 2758382 - RNA, 18 nt, Human
ccacugcagaagacagua

SEQ ID NO: 2758383 - RNA, 16 nt, Human
ccaauauucauagcag

SEQ ID NO: 2758384 - RNA, 20 nt, Human
ccacaggaaccacaagacug

SEQ ID NO: 2758385 - RNA, 22 nt, Human
ccaaacugacucuuaagaagac

SEQ ID NO: 2758386 - RNA, 23 nt, Human
ccaaauuucauaccuaucaucuu

SEQ ID NO: 2758387 - RNA, 14 nt, Human
ccaagcaaguauua

SEQ ID NO: 2758388 - RNA, 17 nt, Human
ccaagcauuuagaugua

SEQ ID NO: 2758389 - RNA, 22 nt, Human
ccaagcauaccaacacgagcag

SEQ ID NO: 2758390 - RNA, 17 nt, Human
cauuuaggccaugggac

SEQ ID NO: 2758391 - RNA, 23 nt, Human
cauuuaauaauuauaugcuauuu

SEQ ID NO: 2758392 - RNA, 15 nt, Human
cauuuaauaauuaua

SEQ ID NO: 2758393 - RNA, 16 nt, Human
cauuuaauaauuauau

SEQ ID NO: 2758394 - RNA, 17 nt, Human
cauuuaauaauuauaug

SEQ ID NO: 2758395 - RNA, 19 nt, Human
cauuuaauaauuauaugcu

SEQ ID NO: 2758396 - RNA, 12 nt, Human
cauuuaauaauu

SEQ ID NO: 2758397 - RNA, 14 nt, Human
cauuuaauaauuau

SEQ ID NO: 2758398 - RNA, 13 nt, Human
cauuugcucaugg

SEQ ID NO: 2758399 - RNA, 18 nt, Human
cauuugcucauggaauug

SEQ ID NO: 2758400 - RNA, 14 nt, Human
cggccuccauccug

SEQ ID NO: 2758401 - RNA, 16 nt, Human
cggccuccauccugag

SEQ ID NO: 2758402 - RNA, 17 nt, Human
cggccuccauccugagg

SEQ ID NO: 2758403 - RNA, 14 nt, Human
cggaugauuucuau

SEQ ID NO: 2758404 - RNA, 13 nt, Human
cggaugauuucua

SEQ ID NO: 2758405 - RNA, 11 nt, Human
cgcaaugugac

SEQ ID NO: 2758406 - RNA, 16 nt, Human
ccuuucucuuucguua

SEQ ID NO: 2758407 - RNA, 13 nt, Human
cgcguugaaauug

SEQ ID NO: 2758408 - RNA, 17 nt, Human
cgcguugaaauuguaau

SEQ ID NO: 2758409 - RNA, 21 nt, Human
cgcguugaaauuguaauuaua

SEQ ID NO: 2758410 - RNA, 13 nt, Human
cguugaaauugua

SEQ ID NO: 2758411 - RNA, 23 nt, Human
cguucauggaacgcguugaaauu

SEQ ID NO: 2758412 - RNA, 21 nt, Human
cguucauggaacgcguugaaa

SEQ ID NO: 2758413 - RNA, 22 nt, Human
cguucauggaacgcguugaaau

SEQ ID NO: 2758414 - RNA, 20 nt, Human
ccugggcagcugccuccccu

SEQ ID NO: 2758415 - RNA, 15 nt, Human
ccugggcagcugccu

SEQ ID NO: 2758416 - RNA, 16 nt, Human
ccugggcagcugccuc

SEQ ID NO: 2758417 - RNA, 17 nt, Human
ccugggcagcugccucc

SEQ ID NO: 2758418 - RNA, 18 nt, Human
ccugggcagcugccuccc

SEQ ID NO: 2758419 - RNA, 21 nt, Human
ccugcuuucagauacuggauu

SEQ ID NO: 2758420 - RNA, 15 nt, Human
ccugcuuucagauac

SEQ ID NO: 2758421 - RNA, 16 nt, Human
ccugcuuucagauacu

SEQ ID NO: 2758422 - RNA, 12 nt, Human
ccuucagccuga

SEQ ID NO: 2758423 - RNA, 17 nt, Human
ccuccccuccucugcuu

SEQ ID NO: 2758424 - RNA, 18 nt, Human
ccuccccuccucugcuug

SEQ ID NO: 2758425 - RNA, 12 nt, Human
ccucccugcaau

SEQ ID NO: 2758426 - RNA, 16 nt, Human
ccucccugcaauaaaa

SEQ ID NO: 2758427 - RNA, 11 nt, Human
ccuccucugcu

SEQ ID NO: 2758428 - RNA, 15 nt, Human
ccuccccuccucugc

SEQ ID NO: 2758429 - RNA, 14 nt, Human
ccuccccuccucug

SEQ ID NO: 2758430 - RNA, 20 nt, Human
ccucagaaaacaaggaugaa

SEQ ID NO: 2758431 - RNA, 17 nt, Human
ccucugcuugccauccc

SEQ ID NO: 2758432 - RNA, 20 nt, Human
ccucugcuugccaucccucc

SEQ ID NO: 2758433 - RNA, 21 nt, Human
ccucugcuugccaucccuccc

SEQ ID NO: 2758434 - RNA, 11 nt, Human
ccucuccuggg

SEQ ID NO: 2758435 - RNA, 12 nt, Human
ccucuccugggc

SEQ ID NO: 2758436 - RNA, 13 nt, Human
ccucuccugggca

SEQ ID NO: 2758437 - RNA, 17 nt, Human
ccugaggcuccacuugg

SEQ ID NO: 2758438 - RNA, 18 nt, Human
ccugaggcuccacuuggu

SEQ ID NO: 2758439 - RNA, 20 nt, Human
ccugaggcuccacuuggucu

SEQ ID NO: 2758440 - RNA, 12 nt, Human
ccugauuaaaga

SEQ ID NO: 2758441 - RNA, 13 nt, Human
ccugauuaaagaa

SEQ ID NO: 2758442 - RNA, 23 nt, Human
ccugaaagaggaaugaaguacuc

SEQ ID NO: 2758443 - RNA, 18 nt, Human
ccugaaagaggaaugaag

SEQ ID NO: 2758444 - RNA, 13 nt, Human
ccugaaagaggaa

SEQ ID NO: 2758445 - RNA, 23 nt, Human
ccucuuagaugcaguucugaaga

SEQ ID NO: 2758446 - RNA, 15 nt, Human
cccuugaugaagaag

SEQ ID NO: 2758447 - RNA, 16 nt, Human
cccuugaugaagaagu

SEQ ID NO: 2758448 - RNA, 22 nt, Human
ccgggaggcagagguugcagug

SEQ ID NO: 2758449 - RNA, 13 nt, Human
ccgugcuaaggac

SEQ ID NO: 2758450 - RNA, 21 nt, Human
ccucacccacccuuuuuuaaa

SEQ ID NO: 2758451 - RNA, 21 nt, Human
cuggucccagccagcaguuca

SEQ ID NO: 2758452 - RNA, 22 nt, Human
cugggaacccaaguccaagcau

SEQ ID NO: 2758453 - RNA, 19 nt, Human
cuggcacaguuuucugaga

SEQ ID NO: 2758454 - RNA, 18 nt, Human
cuggcacaguuuucugag

SEQ ID NO: 2758455 - RNA, 19 nt, Human
cuggauuguacuuugugcu

SEQ ID NO: 2758456 - RNA, 20 nt, Human
cuggauuguacuuugugcug

SEQ ID NO: 2758457 - RNA, 16 nt, Human
cuggccaacgggguga

SEQ ID NO: 2758458 - RNA, 23 nt, Human
cuggaauaauccuaaacauauga

SEQ ID NO: 2758459 - RNA, 13 nt, Human
cugcugaaacaac

SEQ ID NO: 2758460 - RNA, 18 nt, Human
cugcuuucagauacugga

SEQ ID NO: 2758461 - RNA, 21 nt, Human
cugcuuucagauacuggauug

SEQ ID NO: 2758462 - RNA, 16 nt, Human
cugcuuucagauacug

SEQ ID NO: 2758463 - RNA, 15 nt, Human
cugccuaagugcagc

SEQ ID NO: 2758464 - RNA, 20 nt, Human
cugccuaaggacuucuuuaa

SEQ ID NO: 2758465 - RNA, 21 nt, Human
cugccuaaggacuucuuuaau

SEQ ID NO: 2758466 - RNA, 22 nt, Human
cugccuaaggacuucuuuaauu

SEQ ID NO: 2758467 - RNA, 19 nt, Human
cugccuaaggacuucuuua

SEQ ID NO: 2758468 - RNA, 23 nt, Human
cugcagaagacaguauggcagcu

SEQ ID NO: 2758469 - RNA, 13 nt, Human
cugcagaagacag

SEQ ID NO: 2758470 - RNA, 15 nt, Human
cugauucuucagcaa

SEQ ID NO: 2758471 - RNA, 21 nt, Human
cugauguuccuagugaaagag

SEQ ID NO: 2758472 - RNA, 20 nt, Human
cugauguuccuagugaaaga

SEQ ID NO: 2758473 - RNA, 18 nt, Human
cugauguuccuagugaaa

SEQ ID NO: 2758474 - RNA, 13 nt, Human
cugauguuccuag

SEQ ID NO: 2758475 - RNA, 20 nt, Human
cugauagaggaagccugauu

SEQ ID NO: 2758476 - RNA, 20 nt, Human
cugauccaguuuuguuugga

SEQ ID NO: 2758477 - RNA, 15 nt, Human
cugaagucagaucug

SEQ ID NO: 2758478 - RNA, 16 nt, Human
cugaagucagaucugc

SEQ ID NO: 2758479 - RNA, 14 nt, Human
cugaagucagaucu

SEQ ID NO: 2758480 - RNA, 21 nt, Human
cugaagucagaucugccuaag

SEQ ID NO: 2758481 - RNA, 21 nt, Human
cucuccugggcagcugccucc

SEQ ID NO: 2758482 - RNA, 13 nt, Human
cucuccauuuaau

SEQ ID NO: 2758483 - RNA, 23 nt, Human
cucugcauacucauuaggauggc

SEQ ID NO: 2758484 - RNA, 14 nt, Human
cuccaccucccugc

SEQ ID NO: 2758485 - RNA, 15 nt, Human
cuccaccucccugca

SEQ ID NO: 2758486 - RNA, 16 nt, Human
cuccaccucccugcaa

SEQ ID NO: 2758487 - RNA, 17 nt, Human
cuccaccucccugcaau

SEQ ID NO: 2758488 - RNA, 17 nt, Human
cucccagucauuuaaua

SEQ ID NO: 2758489 - RNA, 23 nt, Human
cuccauccugaggcuccacuugg

SEQ ID NO: 2758490 - RNA, 21 nt, Human
cuccauccugaggcuccacuu

SEQ ID NO: 2758491 - RNA, 20 nt, Human
cuccauccugaggcuccacu

SEQ ID NO: 2758492 - RNA, 17 nt, Human
cucauuaggauggcuag

SEQ ID NO: 2758493 - RNA, 18 nt, Human
cucauuaggauggcuagu

SEQ ID NO: 2758494 - RNA, 12 nt, Human
cucggagaagag

SEQ ID NO: 2758495 - RNA, 20 nt, Human
cucggagaagagcuguucac

SEQ ID NO: 2758496 - RNA, 13 nt, Human
cucggagaagagc

SEQ ID NO: 2758497 - RNA, 13 nt, Human
cucccuuucaaca

SEQ ID NO: 2758498 - RNA, 12 nt, Human
cucccuuucaac

SEQ ID NO: 2758499 - RNA, 16 nt, Human
cucccuucucuucaca

SEQ ID NO: 2758500 - RNA, 18 nt, Human
cuccuaucaccugucuug

SEQ ID NO: 2758501 - RNA, 18 nt, Human
cuucggccuccauccuga

SEQ ID NO: 2758502 - RNA, 17 nt, Human
cuucggccuccauccug

SEQ ID NO: 2758503 - RNA, 19 nt, Human
cuuccuuggacucauuuua

SEQ ID NO: 2758504 - RNA, 18 nt, Human
cuucagcgguuuauauaa

SEQ ID NO: 2758505 - RNA, 16 nt, Human
cuucagcgguuuauau

SEQ ID NO: 2758506 - RNA, 19 nt, Human
cuuccagauccuggaaauc

SEQ ID NO: 2758507 - RNA, 13 nt, Human
cuuauaauuuaaa

SEQ ID NO: 2758508 - RNA, 21 nt, Human
cuuaggguuaugauuaaguaa

SEQ ID NO: 2758509 - RNA, 19 nt, Human
cuuauaggaauugacccac

SEQ ID NO: 2758510 - RNA, 14 nt, Human
cuuauaauuuaaaa

SEQ ID NO: 2758511 - RNA, 19 nt, Human
cuuagaugcaguucugaag

SEQ ID NO: 2758512 - RNA, 19 nt, Human
cuuacuaguuucccuugca

SEQ ID NO: 2758513 - RNA, 19 nt, Human
cuguuuuauaauuuuguga

SEQ ID NO: 2758514 - RNA, 18 nt, Human
cuuaaugccacuaaauug

SEQ ID NO: 2758515 - RNA, 19 nt, Human
gaaaauaacaauaaaagac

SEQ ID NO: 2758516 - RNA, 20 nt, Human
gaaaaguauguuagugcaaa

SEQ ID NO: 2758517 - RNA, 14 nt, Human
gaaaaguauguuag

SEQ ID NO: 2758518 - RNA, 14 nt, Human
gaaaacaaggauga

SEQ ID NO: 2758519 - RNA, 14 nt, Human
cuuuucugauccag

SEQ ID NO: 2758520 - RNA, 15 nt, Human
cuuuucugauccagu

SEQ ID NO: 2758521 - RNA, 11 nt, Human
cuuuucugauc

SEQ ID NO: 2758522 - RNA, 16 nt, Human
cuuuucugauccaguu

SEQ ID NO: 2758523 - RNA, 18 nt, Human
cuuuucugauccaguuuu

SEQ ID NO: 2758524 - RNA, 15 nt, Human
cuuuuuuaaauaaau

SEQ ID NO: 2758525 - RNA, 12 nt, Human
cuuuuucauuau

SEQ ID NO: 2758526 - RNA, 13 nt, Human
cuuuuucauuauu

SEQ ID NO: 2758527 - RNA, 14 nt, Human
cuuuuucauuauuu

SEQ ID NO: 2758528 - RNA, 19 nt, Human
cuuuccucaaaacuucaga

SEQ ID NO: 2758529 - RNA, 16 nt, Human
cuuuggauaauaagga

SEQ ID NO: 2758530 - RNA, 14 nt, Human
cuuuggauaauaag

SEQ ID NO: 2758531 - RNA, 17 nt, Human
cuuguacuuuauuuucu

SEQ ID NO: 2758532 - RNA, 18 nt, Human
cuuggggcugaugcaguu

SEQ ID NO: 2758533 - RNA, 16 nt, Human
cuuggggcugaugcag

SEQ ID NO: 2758534 - RNA, 16 nt, Human
cuuggacucauuuuaa

SEQ ID NO: 2758535 - RNA, 13 nt, Human
cuuguuagaucua

SEQ ID NO: 2758536 - RNA, 16 nt, Human
cuuguuagaucuaguu

SEQ ID NO: 2758537 - RNA, 17 nt, Human
cuuuaaaaaaaaaauug

SEQ ID NO: 2758538 - RNA, 22 nt, Human
cuugcccuguuaaaagaugaaa

SEQ ID NO: 2758539 - RNA, 20 nt, Human
cuugcuugauuguauggugg

SEQ ID NO: 2758540 - RNA, 14 nt, Human
cuugccaucccucc

SEQ ID NO: 2758541 - RNA, 17 nt, Human
cuugccaucccucccuc

SEQ ID NO: 2758542 - RNA, 15 nt, Human
cuugccaucccuccc

SEQ ID NO: 2758543 - RNA, 16 nt, Human
cuugccaucccucccu

SEQ ID NO: 2758544 - RNA, 19 nt, Human
cuugccaucccucccucca

SEQ ID NO: 2758545 - RNA, 18 nt, Human
cuugcccuggugccucac

SEQ ID NO: 2758546 - RNA, 14 nt, Human
cuugcccuguuaaa

SEQ ID NO: 2758547 - RNA, 24 nt, Human
gacugcauuauauuuauuacugua

SEQ ID NO: 2758548 - RNA, 16 nt, Human
gacugauucuucagca

SEQ ID NO: 2758549 - RNA, 13 nt, Human
gacugauucuuca

SEQ ID NO: 2758550 - RNA, 16 nt, Human
gacugaggggagggga

SEQ ID NO: 2758551 - RNA, 14 nt, Human
gacuggcacaguuu

SEQ ID NO: 2758552 - RNA, 22 nt, Human
gacuggcacaguuuucugagaa

SEQ ID NO: 2758553 - RNA, 18 nt, Human
gacuggcacaguuuucug

SEQ ID NO: 2758554 - RNA, 16 nt, Human
gaccacugcagaagac

SEQ ID NO: 2758555 - RNA, 18 nt, Human
gaccacugcagaagacag

SEQ ID NO: 2758556 - RNA, 18 nt, Human
gacccaaaaggcagaagc

SEQ ID NO: 2758557 - RNA, 19 nt, Human
gacccaaaaggcagaagca

SEQ ID NO: 2758558 - RNA, 20 nt, Human
gacccaaaaggcagaagcaa

SEQ ID NO: 2758559 - RNA, 23 nt, Human
gacaggaugguucccuugaugaa

SEQ ID NO: 2758560 - RNA, 14 nt, Human
gacaucaacagaua

SEQ ID NO: 2758561 - RNA, 16 nt, Human
gaaguauccuucagcc

SEQ ID NO: 2758562 - RNA, 14 nt, Human
gaaguauccuucag

SEQ ID NO: 2758563 - RNA, 12 nt, Human
gaaguccaagca

SEQ ID NO: 2758564 - RNA, 22 nt, Human
gaaguccaagcauuuagaugua

SEQ ID NO: 2758565 - RNA, 16 nt, Human
gaauauuuuaacuucc

SEQ ID NO: 2758566 - RNA, 14 nt, Human
gaauuuauuggcuu

SEQ ID NO: 2758567 - RNA, 16 nt, Human
gaauuuauuggcuuuu

SEQ ID NO: 2758568 - RNA, 20 nt, Human
gaauuuauuggcuuuucuga

SEQ ID NO: 2758569 - RNA, 21 nt, Human
gaauuuauuggcuuuucugau

SEQ ID NO: 2758570 - RNA, 22 nt, Human
gaauuuauuggcuuuucugauc

SEQ ID NO: 2758571 - RNA, 21 nt, Human
gaauggcuuuguauagaaccu

SEQ ID NO: 2758572 - RNA, 20 nt, Human
gaaugguccgugcuaaggac

SEQ ID NO: 2758573 - RNA, 22 nt, Human
gaaugguccgugcuaaggacuu

SEQ ID NO: 2758574 - RNA, 23 nt, Human
gaaugguccgugcuaaggacuug

SEQ ID NO: 2758575 - RNA, 17 nt, Human
gaagauguagaggagaa

SEQ ID NO: 2758576 - RNA, 18 nt, Human
gaagauguagaggagaaa

SEQ ID NO: 2758577 - RNA, 12 nt, Human
gaagaacugaaa

SEQ ID NO: 2758578 - RNA, 19 nt, Human
gaagacugcauuauauuua

SEQ ID NO: 2758579 - RNA, 17 nt, Human
gaagacugcauuauauu

SEQ ID NO: 2758580 - RNA, 16 nt, Human
gaaauuguauuacaaa

SEQ ID NO: 2758581 - RNA, 17 nt, Human
gaaauuguaauuauauc

SEQ ID NO: 2758582 - RNA, 16 nt, Human
gaacagugauuaccag

SEQ ID NO: 2758583 - RNA, 20 nt, Human
gaacagugauuaccagggac

SEQ ID NO: 2758584 - RNA, 15 nt, Human
gaacauaaaauacaa

SEQ ID NO: 2758585 - RNA, 14 nt, Human
gauccuggaaauca

SEQ ID NO: 2758586 - RNA, 17 nt, Human
gaucuaguucacucucc

SEQ ID NO: 2758587 - RNA, 13 nt, Human
gauaaacaguagu

SEQ ID NO: 2758588 - RNA, 22 nt, Human
gauaauaaggaaaaguuuaaua

SEQ ID NO: 2758589 - RNA, 20 nt, Human
gauaauaaggaaaaguuuaa

SEQ ID NO: 2758590 - RNA, 21 nt, Human
gauaauaaggaaaaguuuaau

SEQ ID NO: 2758591 - RNA, 23 nt, Human
gaucagcuuauugucuagugaaa

SEQ ID NO: 2758592 - RNA, 16 nt, Human
gcaagaugugggcagu

SEQ ID NO: 2758593 - RNA, 12 nt, Human
gcaagauguggg

SEQ ID NO: 2758594 - RNA, 16 nt, Human
gaugcuagaacucccu

SEQ ID NO: 2758595 - RNA, 22 nt, Human
gauuaaguaaugauaacuggaa

SEQ ID NO: 2758596 - RNA, 14 nt, Human
gauuaaguaaugau

SEQ ID NO: 2758597 - RNA, 14 nt, Human
gcagaagacaguau

SEQ ID NO: 2758598 - RNA, 15 nt, Human
gcacugucaagauga

SEQ ID NO: 2758599 - RNA, 20 nt, Human
gcacagccucuuagaugcag

SEQ ID NO: 2758600 - RNA, 15 nt, Human
gcaggcuacugucag

SEQ ID NO: 2758601 - RNA, 13 nt, Human
gcaguucugaaga

SEQ ID NO: 2758602 - RNA, 18 nt, Human
gcauagauucccugagca

SEQ ID NO: 2758603 - RNA, 14 nt, Human
gcauauauuuuuau

SEQ ID NO: 2758604 - RNA, 15 nt, Human
gcauauauuuuuaua

SEQ ID NO: 2758605 - RNA, 11 nt, Human
gcauauauuuu

SEQ ID NO: 2758606 - RNA, 16 nt, Human
gcauauauuuuuauau

SEQ ID NO: 2758607 - RNA, 18 nt, Human
gcccucuccugggcagcu

SEQ ID NO: 2758608 - RNA, 19 nt, Human
gcccucuccugggcagcug

SEQ ID NO: 2758609 - RNA, 21 nt, Human
gcccucuccugggcagcugcc

SEQ ID NO: 2758610 - RNA, 14 nt, Human
gcccucuccugggc

SEQ ID NO: 2758611 - RNA, 15 nt, Human
gcccucuccugggca

SEQ ID NO: 2758612 - RNA, 16 nt, Human
gcccucuccugggcag

SEQ ID NO: 2758613 - RNA, 19 nt, Human
gccccugcacuccagccug

SEQ ID NO: 2758614 - RNA, 17 nt, Human
gccccgugggguuccuc

SEQ ID NO: 2758615 - RNA, 16 nt, Human
gcccacagcuguauga

SEQ ID NO: 2758616 - RNA, 22 nt, Human
gccauuuaaagcuuauuaaaac

SEQ ID NO: 2758617 - RNA, 14 nt, Human
gccaugggacaggg

SEQ ID NO: 2758618 - RNA, 19 nt, Human
gccaugggacagggaggac

SEQ ID NO: 2758619 - RNA, 15 nt, Human
gccaucccucccucc

SEQ ID NO: 2758620 - RNA, 16 nt, Human
gccaucccucccucca

SEQ ID NO: 2758621 - RNA, 11 nt, Human
gccaucccucc

SEQ ID NO: 2758622 - RNA, 13 nt, Human
gccaucccucccu

SEQ ID NO: 2758623 - RNA, 14 nt, Human
gccaucccucccuc

SEQ ID NO: 2758624 - RNA, 22 nt, Human
gccacguucuuacuaguuuccc

SEQ ID NO: 2758625 - RNA, 19 nt, Human
gccuucggccuccauccug

SEQ ID NO: 2758626 - RNA, 18 nt, Human
gccuucggccuccauccu

SEQ ID NO: 2758627 - RNA, 22 nt, Human
gcgacagugagacucugucuca

SEQ ID NO: 2758628 - RNA, 20 nt, Human
gccuuuuucauuauuuuauu

SEQ ID NO: 2758629 - RNA, 22 nt, Human
gccuuuuucauuauuuuauuau

SEQ ID NO: 2758630 - RNA, 12 nt, Human
gccuuuuucauu

SEQ ID NO: 2758631 - RNA, 16 nt, Human
gccuuuuucauuauuu

SEQ ID NO: 2758632 - RNA, 18 nt, Human
gccuguaaucacagcuac

SEQ ID NO: 2758633 - RNA, 13 nt, Human
gcuagacugguga

SEQ ID NO: 2758634 - RNA, 15 nt, Human
gcuagacuggugacu

SEQ ID NO: 2758635 - RNA, 16 nt, Human
gcuagacuggugacug

SEQ ID NO: 2758636 - RNA, 19 nt, Human
gcuagacuggugacugauu

SEQ ID NO: 2758637 - RNA, 20 nt, Human
gcuagacuggugacugauuc

SEQ ID NO: 2758638 - RNA, 22 nt, Human
gcuagacuggugacugauucuu

SEQ ID NO: 2758639 - RNA, 11 nt, Human
gccuccccucc

SEQ ID NO: 2758640 - RNA, 12 nt, Human
gccuccccuccu

SEQ ID NO: 2758641 - RNA, 13 nt, Human
gccuccccuccuc

SEQ ID NO: 2758642 - RNA, 14 nt, Human
gccuccccuccucu

SEQ ID NO: 2758643 - RNA, 19 nt, Human
gcccuucuuuccacagaag

SEQ ID NO: 2758644 - RNA, 11 nt, Human
gccuaaaucca

SEQ ID NO: 2758645 - RNA, 14 nt, Human
gccuaaggacuucu

SEQ ID NO: 2758646 - RNA, 15 nt, Human
gccuaaggacuucuu

SEQ ID NO: 2758647 - RNA, 18 nt, Human
gccuaaggacuucuuuaa

SEQ ID NO: 2758648 - RNA, 12 nt, Human
gccuaaggacuu

SEQ ID NO: 2758649 - RNA, 13 nt, Human
gccuaaggacuuc

SEQ ID NO: 2758650 - RNA, 22 nt, Human
ggcagcugccuccccuccucug

SEQ ID NO: 2758651 - RNA, 18 nt, Human
ggcagcugccuccccucc

SEQ ID NO: 2758652 - RNA, 21 nt, Human
ggcagcugccuccccuccucu

SEQ ID NO: 2758653 - RNA, 22 nt, Human
ggccaugggacagggaggacgc

SEQ ID NO: 2758654 - RNA, 19 nt, Human
ggaggacgcucucuggccu

SEQ ID NO: 2758655 - RNA, 20 nt, Human
ggaggacgcucucuggccuu

SEQ ID NO: 2758656 - RNA, 21 nt, Human
ggaggacgcucucuggccuuc

SEQ ID NO: 2758657 - RNA, 22 nt, Human
gcuguauuuuaaaagaaugauu

SEQ ID NO: 2758658 - RNA, 22 nt, Human
gcuggugcccugcuuucagaua

SEQ ID NO: 2758659 - RNA, 24 nt, Human
gcuggugcccugcuuucagauacu

SEQ ID NO: 2758660 - RNA, 18 nt, Human
gcuagauguauguacuuc

SEQ ID NO: 2758661 - RNA, 16 nt, Human
gcuagauguauguacu

SEQ ID NO: 2758662 - RNA, 13 nt, Human
ggaaauauuuauu

SEQ ID NO: 2758663 - RNA, 15 nt, Human
ggaaauauuuauuuu

SEQ ID NO: 2758664 - RNA, 12 nt, Human
ggaaauauuuau

SEQ ID NO: 2758665 - RNA, 17 nt, Human
ggaaauauuuauuuuaa

SEQ ID NO: 2758666 - RNA, 18 nt, Human
ggaaauauuuauuuuaau

SEQ ID NO: 2758667 - RNA, 19 nt, Human
ggaaaaguuuaauauuaaa

SEQ ID NO: 2758668 - RNA, 18 nt, Human
ggaaaaguuuaauauuaa

SEQ ID NO: 2758669 - RNA, 17 nt, Human
ggaacgcguugaaauug

SEQ ID NO: 2758670 - RNA, 16 nt, Human
ggaacgcguugaaauu

SEQ ID NO: 2758671 - RNA, 21 nt, Human
ggaacgcguugaaauuguaau

SEQ ID NO: 2758672 - RNA, 23 nt, Human
gcuguucacagccagacuggcac

SEQ ID NO: 2758673 - RNA, 16 nt, Human
gcuguucacagccaga

SEQ ID NO: 2758674 - RNA, 15 nt, Human
gcuguucacagccag

SEQ ID NO: 2758675 - RNA, 17 nt, Human
gcuugcccuggugccuc

SEQ ID NO: 2758676 - RNA, 19 nt, Human
gcuugcccuggugccucac

SEQ ID NO: 2758677 - RNA, 18 nt, Human
gcuugccaucccucccuc

SEQ ID NO: 2758678 - RNA, 21 nt, Human
gcuugccaucccucccuccac

SEQ ID NO: 2758679 - RNA, 16 nt, Human
gcuugccaucccuccc

SEQ ID NO: 2758680 - RNA, 17 nt, Human
gcuuuuaaaaaaaaaua

SEQ ID NO: 2758681 - RNA, 20 nt, Human
ggaaaaaauaacaaugaaag

SEQ ID NO: 2758682 - RNA, 22 nt, Human
ggcuugaguuuaaauuguaaua

SEQ ID NO: 2758683 - RNA, 13 nt, Human
ggcuuuucugauc

SEQ ID NO: 2758684 - RNA, 16 nt, Human
ggcuuuucugauccag

SEQ ID NO: 2758685 - RNA, 12 nt, Human
ggcuuuucugau

SEQ ID NO: 2758686 - RNA, 14 nt, Human
gggaauugaggaca

SEQ ID NO: 2758687 - RNA, 17 nt, Human
ggcuuuucugauccagu

SEQ ID NO: 2758688 - RNA, 23 nt, Human
ggugcuacaaaaacacagcaagg

SEQ ID NO: 2758689 - RNA, 21 nt, Human
ggugcuacaaaaacacagcaa

SEQ ID NO: 2758690 - RNA, 19 nt, Human
ggugacuuuggauaauaag

SEQ ID NO: 2758691 - RNA, 20 nt, Human
ggugacuuuggauaauaagg

SEQ ID NO: 2758692 - RNA, 21 nt, Human
ggugacuuuggauaauaagga

SEQ ID NO: 2758693 - RNA, 14 nt, Human
ggugacuuuggaua

SEQ ID NO: 2758694 - RNA, 18 nt, Human
ggugacuuuggauaauaa

SEQ ID NO: 2758695 - RNA, 20 nt, Human
gguuaucugaagucagaucu

SEQ ID NO: 2758696 - RNA, 16 nt, Human
gguguaugugugaagu

SEQ ID NO: 2758697 - RNA, 11 nt, Human
ggggauucuua

SEQ ID NO: 2758698 - RNA, 15 nt, Human
ggggauucuuaaagu

SEQ ID NO: 2758699 - RNA, 19 nt, Human
uauauuuuuuguuaaauga

SEQ ID NO: 2758700 - RNA, 19 nt, Human
uauauuuuuauauuuacua

SEQ ID NO: 2758701 - RNA, 20 nt, Human
uauauuuauuacuguaagaa

SEQ ID NO: 2758702 - RNA, 23 nt, Human
uauauuuauuacuguaagaaaau

SEQ ID NO: 2758703 - RNA, 14 nt, Human
uauauuugaaauau

SEQ ID NO: 2758704 - RNA, 13 nt, Human
uauauuugaaaua

SEQ ID NO: 2758705 - RNA, 18 nt, Human
uauauuuuuauauuuacu

SEQ ID NO: 2758706 - RNA, 18 nt, Human
uauaugcuauuucuauau

SEQ ID NO: 2758707 - RNA, 16 nt, Human
uauaugcuauuucuau

SEQ ID NO: 2758708 - RNA, 18 nt, Human
uagucaaauugugugaaa

SEQ ID NO: 2758709 - RNA, 14 nt, Human
uagucaaauugugu

SEQ ID NO: 2758710 - RNA, 21 nt, Human
uaguuguaccgcaaugugacu

SEQ ID NO: 2758711 - RNA, 23 nt, Human
uaggaauugacccacaagaaaug

SEQ ID NO: 2758712 - RNA, 20 nt, Human
uaggaauugacccacaagaa

SEQ ID NO: 2758713 - RNA, 13 nt, Human
uaggccaugggac

SEQ ID NO: 2758714 - RNA, 17 nt, Human
uagaguuuagcuggaaa

SEQ ID NO: 2758715 - RNA, 18 nt, Human
uagaguuuagcuggaaaa

SEQ ID NO: 2758716 - RNA, 14 nt, Human
uagagaguguugaa

SEQ ID NO: 2758717 - RNA, 15 nt, Human
uagagaguguugaaa

SEQ ID NO: 2758718 - RNA, 13 nt, Human
uagacuggugacu

SEQ ID NO: 2758719 - RNA, 14 nt, Human
uagacuggugacug

SEQ ID NO: 2758720 - RNA, 17 nt, Human
uagacuggugacugauu

SEQ ID NO: 2758721 - RNA, 20 nt, Human
uagauguauguacuucaugc

SEQ ID NO: 2758722 - RNA, 16 nt, Human
uagauguauguacuuc

SEQ ID NO: 2758723 - RNA, 20 nt, Human
uagcagggcauggcugggaa

SEQ ID NO: 2758724 - RNA, 19 nt, Human
uacugagagugaacaaauu

SEQ ID NO: 2758725 - RNA, 23 nt, Human
uacugauguuccuagugaaagag

SEQ ID NO: 2758726 - RNA, 23 nt, Human
uaccacaggaaccacaagacugc

SEQ ID NO: 2758727 - RNA, 21 nt, Human
uacaugagguacugagaguga

SEQ ID NO: 2758728 - RNA, 22 nt, Human
uacaugagguacugagagugaa

SEQ ID NO: 2758729 - RNA, 17 nt, Human
uacauuuguauaaaaua

SEQ ID NO: 2758730 - RNA, 11 nt, Human
uacauuugugu

SEQ ID NO: 2758731 - RNA, 16 nt, Human
uacauuuguauaaaau

SEQ ID NO: 2758732 - RNA, 16 nt, Human
uaccaacacgagcagg

SEQ ID NO: 2758733 - RNA, 14 nt, Human
uacaggauuugaaa

SEQ ID NO: 2758734 - RNA, 12 nt, Human
uaauuuuggaau

SEQ ID NO: 2758735 - RNA, 13 nt, Human
uaauuuuggaauu

SEQ ID NO: 2758736 - RNA, 19 nt, Human
uacaauuuuguuucuguac

SEQ ID NO: 2758737 - RNA, 21 nt, Human
uacaauuuuguuucuguacuu

SEQ ID NO: 2758738 - RNA, 18 nt, Human
uacaauuuuguuucugua

SEQ ID NO: 2758739 - RNA, 19 nt, Human
uaaugccacuaaauugaca

SEQ ID NO: 2758740 - RNA, 13 nt, Human
uaauauuaaagcc

SEQ ID NO: 2758741 - RNA, 14 nt, Human
uaauauuaaagcca

SEQ ID NO: 2758742 - RNA, 12 nt, Human
uaauauuaaagc

SEQ ID NO: 2758743 - RNA, 15 nt, Human
uaauaauguuucaaa

SEQ ID NO: 2758744 - RNA, 14 nt, Human
uaauaauguuucaa

SEQ ID NO: 2758745 - RNA, 15 nt, Human
uaauaauuauaugcu

SEQ ID NO: 2758746 - RNA, 16 nt, Human
uaauaauuauaugcua

SEQ ID NO: 2758747 - RNA, 19 nt, Human
uaauaauuauaugcuauuu

SEQ ID NO: 2758748 - RNA, 20 nt, Human
uaauaauuauaugcuauuuc

SEQ ID NO: 2758749 - RNA, 22 nt, Human
uaauaauuauaugcuauuucua

SEQ ID NO: 2758750 - RNA, 23 nt, Human
uaauaauuauaugcuauuucuau

SEQ ID NO: 2758751 - RNA, 20 nt, Human
uaauaaggaaaaguuuaaua

SEQ ID NO: 2758752 - RNA, 18 nt, Human
uaauaaggaaaaguuuaa

SEQ ID NO: 2758753 - RNA, 20 nt, Human
uaauuuguaguguuggagaa

SEQ ID NO: 2758754 - RNA, 23 nt, Human
uaauuuguaguguuggagaagaa

SEQ ID NO: 2758755 - RNA, 22 nt, Human
uaauuggaaaggcagcucuaaa

SEQ ID NO: 2758756 - RNA, 20 nt, Human
uaauuaaaagaauauuuuaa

SEQ ID NO: 2758757 - RNA, 12 nt, Human
uaauuaacaugu

SEQ ID NO: 2758758 - RNA, 14 nt, Human
uaauuaacauguua

SEQ ID NO: 2758759 - RNA, 15 nt, Human
uaauuaacauguuaa

SEQ ID NO: 2758760 - RNA, 17 nt, Human
uaauuaacauguuaaac

SEQ ID NO: 2758761 - RNA, 18 nt, Human
uaauuaacauguuaaacc

SEQ ID NO: 2758762 - RNA, 19 nt, Human
uaauuaacauguuaaacca

SEQ ID NO: 2758763 - RNA, 15 nt, Human
uaauguuucaaacau

SEQ ID NO: 2758764 - RNA, 14 nt, Human
uaauguuucaaaca

SEQ ID NO: 2758765 - RNA, 19 nt, Human
uaacaaugcuguauuuuaa

SEQ ID NO: 2758766 - RNA, 23 nt, Human
uaaauugacacuuaaaaaugguu

SEQ ID NO: 2758767 - RNA, 16 nt, Human
uaaaucccauuauuca

SEQ ID NO: 2758768 - RNA, 17 nt, Human
uaaaucccauuauucaa

SEQ ID NO: 2758769 - RNA, 18 nt, Human
uaaauccauuuggaaauc

SEQ ID NO: 2758770 - RNA, 19 nt, Human
uaaauccauuuggaaaucu

SEQ ID NO: 2758771 - RNA, 22 nt, Human
uaaauccauuuggaaaucuuua

SEQ ID NO: 2758772 - RNA, 23 nt, Human
uaaauccauuuggaaaucuuuaa

SEQ ID NO: 2758773 - RNA, 16 nt, Human
uaacauguuaaaccau

SEQ ID NO: 2758774 - RNA, 17 nt, Human
uaacauguuaaaccaug

SEQ ID NO: 2758775 - RNA, 18 nt, Human
uaacauguuaaaccaugg

SEQ ID NO: 2758776 - RNA, 23 nt, Human
uaagagggauuagggagagaaga

SEQ ID NO: 2758777 - RNA, 23 nt, Human
uaagagagaaugagagacacacu

SEQ ID NO: 2758778 - RNA, 13 nt, Human
uaagccagacauc

SEQ ID NO: 2758779 - RNA, 20 nt, Human
uaagcauuccaacuaucuca

SEQ ID NO: 2758780 - RNA, 16 nt, Human
uaagcauuccaacuau

SEQ ID NO: 2758781 - RNA, 18 nt, Human
uaagcauuccaacuaucu

SEQ ID NO: 2758782 - RNA, 23 nt, Human
uaagcauauauuuuuauauuuac

SEQ ID NO: 2758783 - RNA, 21 nt, Human
uaagcauauauuuuuauauuu

SEQ ID NO: 2758784 - RNA, 22 nt, Human
uaagcauauauuuuuauauuua

SEQ ID NO: 2758785 - RNA, 19 nt, Human
uaagcauauauuuuuauau

SEQ ID NO: 2758786 - RNA, 16 nt, Human
uaagcauauauuuuua

SEQ ID NO: 2758787 - RNA, 20 nt, Human
uaagccagacaucaacagau

SEQ ID NO: 2758788 - RNA, 21 nt, Human
uaagccagacaucaacagaua

SEQ ID NO: 2758789 - RNA, 20 nt, Human
guuuaggauguugaaaaagu

SEQ ID NO: 2758790 - RNA, 14 nt, Human
guuuagucuugucu

SEQ ID NO: 2758791 - RNA, 18 nt, Human
guuuagucuugucucaga

SEQ ID NO: 2758792 - RNA, 13 nt, Human
guuuagaaagcuu

SEQ ID NO: 2758793 - RNA, 23 nt, Human
guuugugcugguguaugugugaa

SEQ ID NO: 2758794 - RNA, 16 nt, Human
uaaaaaagaaacauuu

SEQ ID NO: 2758795 - RNA, 18 nt, Human
guuuucaggcuagaugua

SEQ ID NO: 2758796 - RNA, 12 nt, Human
guuuguuuaguc

SEQ ID NO: 2758797 - RNA, 16 nt, Human
guuuucauuaucucaa

SEQ ID NO: 2758798 - RNA, 14 nt, Human
uaaaagaugaaaau

SEQ ID NO: 2758799 - RNA, 19 nt, Human
uaaaauccauacauuugug

SEQ ID NO: 2758800 - RNA, 18 nt, Human
uaaaauccauacauuugu

SEQ ID NO: 2758801 - RNA, 17 nt, Human
uaaaauggguuuuacug

SEQ ID NO: 2758802 - RNA, 14 nt, Human
uaaaggaauuuaaa

SEQ ID NO: 2758803 - RNA, 13 nt, Human
uaaacuuuucuga

SEQ ID NO: 2758804 - RNA, 14 nt, Human
uaaacuuuucugau

SEQ ID NO: 2758805 - RNA, 15 nt, Human
uaaacuuuucugaua

SEQ ID NO: 2758806 - RNA, 17 nt, Human
uaaauaaaaauaauccu

SEQ ID NO: 2758807 - RNA, 17 nt, Human
uaaaguugaauuuauug

SEQ ID NO: 2758808 - RNA, 19 nt, Human
uaaaguugaauuuauuggc

SEQ ID NO: 2758809 - RNA, 21 nt, Human
uaaaguugaauuuauuggcuu

SEQ ID NO: 2758810 - RNA, 23 nt, Human
uaaaguugaauuuauuggcuuuu

SEQ ID NO: 2758811 - RNA, 14 nt, Human
uaaaguugaauuua

SEQ ID NO: 2758812 - RNA, 15 nt, Human
uaaaguugaauuuau

SEQ ID NO: 2758813 - RNA, 13 nt, Human
uaaaguugaauuu

SEQ ID NO: 2758814 - RNA, 18 nt, Human
uaaauauaugcuaagucu

SEQ ID NO: 2758815 - RNA, 15 nt, Human
uaaauccauuuggaa

SEQ ID NO: 2758816 - RNA, 16 nt, Human
uaaauccauuuggaaa

SEQ ID NO: 2758817 - RNA, 14 nt, Human
uaaauccauuugga

SEQ ID NO: 2758818 - RNA, 21 nt, Human
uauuucuaugaaauauuaugu

SEQ ID NO: 2758819 - RNA, 22 nt, Human
uauuucuaugaaauauuauguu

SEQ ID NO: 2758820 - RNA, 17 nt, Human
uaucugaagucagaucu

SEQ ID NO: 2758821 - RNA, 18 nt, Human
uaucugaagucagaucug

SEQ ID NO: 2758822 - RNA, 15 nt, Human
uaucugaggaauucu

SEQ ID NO: 2758823 - RNA, 13 nt, Human
ucaaaacugcacu

SEQ ID NO: 2758824 - RNA, 12 nt, Human
uauuuuaugauc

SEQ ID NO: 2758825 - RNA, 19 nt, Human
ucaacuccaaacugacucu

SEQ ID NO: 2758826 - RNA, 14 nt, Human
ucacaggaaguaga

SEQ ID NO: 2758827 - RNA, 19 nt, Human
ucacaggaaguagaggagg

SEQ ID NO: 2758828 - RNA, 23 nt, Human
ucacaggacagcccuucuuucca

SEQ ID NO: 2758829 - RNA, 23 nt, Human
ucagagcugcccucuccugggca

SEQ ID NO: 2758830 - RNA, 22 nt, Human
ucagacauagaauuaacacaug

SEQ ID NO: 2758831 - RNA, 19 nt, Human
ucagacauagaauuaacac

SEQ ID NO: 2758832 - RNA, 17 nt, Human
ucacuugucaauaaaau

SEQ ID NO: 2758833 - RNA, 18 nt, Human
ucacucuccauuuaauaa

SEQ ID NO: 2758834 - RNA, 16 nt, Human
ucccaaauuucauacc

SEQ ID NO: 2758835 - RNA, 17 nt, Human
ucccucccuccaccucc

SEQ ID NO: 2758836 - RNA, 17 nt, Human
uccaagcauuuagaugu

SEQ ID NO: 2758837 - RNA, 23 nt, Human
uccaagcauaccaacacgagcag

SEQ ID NO: 2758838 - RNA, 14 nt, Human
ucauuucuuugagu

SEQ ID NO: 2758839 - RNA, 22 nt, Human
ucauuucugcaucagcugcuga

SEQ ID NO: 2758840 - RNA, 16 nt, Human
ucauuucugcaucagc

SEQ ID NO: 2758841 - RNA, 12 nt, Human
uccaaagaaaug

SEQ ID NO: 2758842 - RNA, 23 nt, Human
uccaaacugacucuuaagaagac

SEQ ID NO: 2758843 - RNA, 14 nt, Human
uccaccuacaugag

SEQ ID NO: 2758844 - RNA, 23 nt, Human
uccaccucccugcaauaaaaugg

SEQ ID NO: 2758845 - RNA, 20 nt, Human
uccaagcauuuagauguaua

SEQ ID NO: 2758846 - RNA, 14 nt, Human
uccagauccuggaa

SEQ ID NO: 2758847 - RNA, 16 nt, Human
uccagauccuggaaau

SEQ ID NO: 2758848 - RNA, 17 nt, Human
uccagauccuggaaauc

SEQ ID NO: 2758849 - RNA, 22 nt, Human
uccagcagauuauucacugauu

SEQ ID NO: 2758850 - RNA, 17 nt, Human
uccagcagauuauucac

SEQ ID NO: 2758851 - RNA, 20 nt, Human
uccagcagauuauucacuga

SEQ ID NO: 2758852 - RNA, 12 nt, Human
uccacuuggucu

SEQ ID NO: 2758853 - RNA, 13 nt, Human
uccacuuggucug

SEQ ID NO: 2758854 - RNA, 16 nt, Human
ucauuauuuuauuaug

SEQ ID NO: 2758855 - RNA, 18 nt, Human
ucauuauuuuauuaugaa

SEQ ID NO: 2758856 - RNA, 19 nt, Human
ucauuauuuuauuaugaaa

SEQ ID NO: 2758857 - RNA, 14 nt, Human
ucauuauuuuauua

SEQ ID NO: 2758858 - RNA, 15 nt, Human
ucauuauuuuauuau

SEQ ID NO: 2758859 - RNA, 13 nt, Human
ucauuauuuuauu

SEQ ID NO: 2758860 - RNA, 18 nt, Human
ucucuucacagucacauu

SEQ ID NO: 2758861 - RNA, 20 nt, Human
ucugaggaauucuguauaga

SEQ ID NO: 2758862 - RNA, 19 nt, Human
ucugaggaauucuguauag

SEQ ID NO: 2758863 - RNA, 13 nt, Human
ucucuaggaaaua

SEQ ID NO: 2758864 - RNA, 21 nt, Human
ucuccugggcagcugccuccc

SEQ ID NO: 2758865 - RNA, 19 nt, Human
ucuccugggcagcugccuc

SEQ ID NO: 2758866 - RNA, 20 nt, Human
ucuccugggcagcugccucc

SEQ ID NO: 2758867 - RNA, 21 nt, Human
ucucagugucaaugcagcccc

SEQ ID NO: 2758868 - RNA, 14 nt, Human
ucuccugggcagcu

SEQ ID NO: 2758869 - RNA, 13 nt, Human
ucuccugggcagc

SEQ ID NO: 2758870 - RNA, 15 nt, Human
ucuccugggcagcug

SEQ ID NO: 2758871 - RNA, 16 nt, Human
ucuccugggcagcugc

SEQ ID NO: 2758872 - RNA, 17 nt, Human
ucuccugggcagcugcc

SEQ ID NO: 2758873 - RNA, 18 nt, Human
ucuccugggcagcugccu

SEQ ID NO: 2758874 - RNA, 15 nt, Human
uccuugcaucaauuu

SEQ ID NO: 2758875 - RNA, 21 nt, Human
ucuacacuaagagagaaugag

SEQ ID NO: 2758876 - RNA, 17 nt, Human
ucuacacuccagugaga

SEQ ID NO: 2758877 - RNA, 17 nt, Human
ucuacacuaagagagaa

SEQ ID NO: 2758878 - RNA, 14 nt, Human
ugaacacaucagcu

SEQ ID NO: 2758879 - RNA, 22 nt, Human
ugaacuuguaaaggaauuuaaa

SEQ ID NO: 2758880 - RNA, 21 nt, Human
ugaaguccaagcauuuagaug

SEQ ID NO: 2758881 - RNA, 22 nt, Human
ugaaguccaagcauuuagaugu

SEQ ID NO: 2758882 - RNA, 18 nt, Human
ugaaagcagggacuugaa

SEQ ID NO: 2758883 - RNA, 19 nt, Human
ugaaagcagggacuugaac

SEQ ID NO: 2758884 - RNA, 23 nt, Human
ugaaagcagggacuugaacccau

SEQ ID NO: 2758885 - RNA, 18 nt, Human
ugaaacccugucucuacu

SEQ ID NO: 2758886 - RNA, 22 nt, Human
ugaaaagacuccaaagaaaugu

SEQ ID NO: 2758887 - RNA, 19 nt, Human
ugaaaacuuuaugcuaagu

SEQ ID NO: 2758888 - RNA, 19 nt, Human
ugaaaagacuccaaagaaa

SEQ ID NO: 2758889 - RNA, 17 nt, Human
ugaaaagacuccaaaga

SEQ ID NO: 2758890 - RNA, 16 nt, Human
ugaaaagacuccaaag

SEQ ID NO: 2758891 - RNA, 15 nt, Human
ugaaaagacuccaaa

SEQ ID NO: 2758892 - RNA, 20 nt, Human
ucuguuuuauaauuuuguga

SEQ ID NO: 2758893 - RNA, 22 nt, Human
ucuguuuuauaauuuugugaag

SEQ ID NO: 2758894 - RNA, 23 nt, Human
ucuggccuucggccuccauccug

SEQ ID NO: 2758895 - RNA, 18 nt, Human
ucuuuaaaaaaaaaauug

SEQ ID NO: 2758896 - RNA, 19 nt, Human
ucuuuaaaaaaaaaauugg

SEQ ID NO: 2758897 - RNA, 19 nt, Human
ucuugucucagauuuuauu

SEQ ID NO: 2758898 - RNA, 17 nt, Human
ucuugucucagauuuua

SEQ ID NO: 2758899 - RNA, 18 nt, Human
ugccuccccuccucugcu

SEQ ID NO: 2758900 - RNA, 19 nt, Human
ugccuccccuccucugcuu

SEQ ID NO: 2758901 - RNA, 22 nt, Human
ugccuccccuccucugcuugcc

SEQ ID NO: 2758902 - RNA, 23 nt, Human
ugccuccccuccucugcuugcca

SEQ ID NO: 2758903 - RNA, 23 nt, Human
ugccuaaggacuucuuuaauuuu

SEQ ID NO: 2758904 - RNA, 22 nt, Human
ugccuucucaacuccaaacuga

SEQ ID NO: 2758905 - RNA, 17 nt, Human
ugccuucucaacuccaa

SEQ ID NO: 2758906 - RNA, 19 nt, Human
ugcuagaacucccuuucaa

SEQ ID NO: 2758907 - RNA, 18 nt, Human
ugcuagaacucccuuuca

SEQ ID NO: 2758908 - RNA, 20 nt, Human
ugcuagaacucccuuucaac

SEQ ID NO: 2758909 - RNA, 21 nt, Human
ugcuagaacucccuuucaaca

SEQ ID NO: 2758910 - RNA, 15 nt, Human
ugcugaguuugugcu

SEQ ID NO: 2758911 - RNA, 17 nt, Human
ugcugaguuugugcugg

SEQ ID NO: 2758912 - RNA, 16 nt, Human
ugcagauaaacaguag

SEQ ID NO: 2758913 - RNA, 22 nt, Human
ugcacggugaauggcuuuguau

SEQ ID NO: 2758914 - RNA, 23 nt, Human
ugcacggugaauggcuuuguaua

SEQ ID NO: 2758915 - RNA, 19 nt, Human
ugcacggugaauggcuuug

SEQ ID NO: 2758916 - RNA, 15 nt, Human
ugcacaucaaaauau

SEQ ID NO: 2758917 - RNA, 21 nt, Human
ugccaucccucccuccaccuc

SEQ ID NO: 2758918 - RNA, 22 nt, Human
ugccaucccucccuccaccucc

SEQ ID NO: 2758919 - RNA, 15 nt, Human
ugccaucccucccuc

SEQ ID NO: 2758920 - RNA, 14 nt, Human
ugccaucccucccu

SEQ ID NO: 2758921 - RNA, 19 nt, Human
ugccaucccucccuccacc

SEQ ID NO: 2758922 - RNA, 20 nt, Human
ugccaucccucccuccaccu

SEQ ID NO: 2758923 - RNA, 22 nt, Human
ugcaucagcugcugaaacaaca

SEQ ID NO: 2758924 - RNA, 19 nt, Human
ugcaucagcugcugaaaca

SEQ ID NO: 2758925 - RNA, 14 nt, Human
ugcauuauauuuau

SEQ ID NO: 2758926 - RNA, 20 nt, Human
ugcauuauauuuauuacugu

SEQ ID NO: 2758927 - RNA, 15 nt, Human
ugcauuauauuuauu

SEQ ID NO: 2758928 - RNA, 14 nt, Human
uggaacucucgagc

SEQ ID NO: 2758929 - RNA, 22 nt, Human
uggaaaaguauguuagugcaaa

SEQ ID NO: 2758930 - RNA, 14 nt, Human
ugcuucuguuuuau

SEQ ID NO: 2758931 - RNA, 16 nt, Human
ugcuuucagauacugg

SEQ ID NO: 2758932 - RNA, 17 nt, Human
ugcuuucagauacugga

SEQ ID NO: 2758933 - RNA, 20 nt, Human
ugcuuucagauacuggauug

SEQ ID NO: 2758934 - RNA, 21 nt, Human
ugcuuucagauacuggauugu

SEQ ID NO: 2758935 - RNA, 12 nt, Human
ugcuuucagaua

SEQ ID NO: 2758936 - RNA, 15 nt, Human
uggcauaacauaaau

SEQ ID NO: 2758937 - RNA, 17 nt, Human
uggguagacacacauga

SEQ ID NO: 2758938 - RNA, 16 nt, Human
uggguagacacacaug

SEQ ID NO: 2758939 - RNA, 18 nt, Human
ugggacagucaccucaug

SEQ ID NO: 2758940 - RNA, 20 nt, Human
ugggacagucaccucaugga

SEQ ID NO: 2758941 - RNA, 21 nt, Human
ugggacagucaccucauggaa

SEQ ID NO: 2758942 - RNA, 15 nt, Human
uggcuguacccagga

SEQ ID NO: 2758943 - RNA, 14 nt, Human
uggcuuuguauaga

SEQ ID NO: 2758944 - RNA, 22 nt, Human
uggcuuuguauagaaccucuuu

SEQ ID NO: 2758945 - RNA, 19 nt, Human
ugggacauuugcucaugga

SEQ ID NO: 2758946 - RNA, 20 nt, Human
ugggacauuugcucauggaa

SEQ ID NO: 2758947 - RNA, 14 nt, Human
uggccuucggccuc

SEQ ID NO: 2758948 - RNA, 17 nt, Human
uggccuucggccuccau

SEQ ID NO: 2758949 - RNA, 18 nt, Human
uggccuucggccuccauc

SEQ ID NO: 2758950 - RNA, 19 nt, Human
uuaaaagaaugauuaugaa

SEQ ID NO: 2758951 - RNA, 13 nt, Human
uuaaaagaaugau

SEQ ID NO: 2758952 - RNA, 20 nt, Human
uuaaagcuuauuaaaacuca

SEQ ID NO: 2758953 - RNA, 18 nt, Human
uuaacauguuaaaccaug

SEQ ID NO: 2758954 - RNA, 19 nt, Human
uuaacauguuaaaccaugg

SEQ ID NO: 2758955 - RNA, 12 nt, Human
uuaacauguuaa

SEQ ID NO: 2758956 - RNA, 21 nt, Human
uguuuguuuagucuugucuca

SEQ ID NO: 2758957 - RNA, 12 nt, Human
uguuuguuuagu

SEQ ID NO: 2758958 - RNA, 18 nt, Human
uuaauaauguuucaaaca

SEQ ID NO: 2758959 - RNA, 18 nt, Human
uuaauaauuauaugcuau

SEQ ID NO: 2758960 - RNA, 20 nt, Human
uuaauaauuauaugcuauuu

SEQ ID NO: 2758961 - RNA, 23 nt, Human
uuaauaauuauaugcuauuucua

SEQ ID NO: 2758962 - RNA, 16 nt, Human
uuaauaauguuucaaa

SEQ ID NO: 2758963 - RNA, 22 nt, Human
uuaaugucaauucuugccaaau

SEQ ID NO: 2758964 - RNA, 20 nt, Human
uuacagagacagaaagcaga

SEQ ID NO: 2758965 - RNA, 14 nt, Human
uuacauuuguauaa

SEQ ID NO: 2758966 - RNA, 15 nt, Human
uuacauuuguauaaa

SEQ ID NO: 2758967 - RNA, 21 nt, Human
uuaccacuuguguuuugcaag

SEQ ID NO: 2758968 - RNA, 17 nt, Human
ugugugaagugagugag

SEQ ID NO: 2758969 - RNA, 16 nt, Human
uguucacagccagacu

SEQ ID NO: 2758970 - RNA, 14 nt, Human
uguuagugcaaauu

SEQ ID NO: 2758971 - RNA, 16 nt, Human
uguuagaucuaguuca

SEQ ID NO: 2758972 - RNA, 12 nt, Human
uguuauaaucuu

SEQ ID NO: 2758973 - RNA, 20 nt, Human
uguuaaaccaugggauaaau

SEQ ID NO: 2758974 - RNA, 21 nt, Human
uguuaaaccaugggauaaaug

SEQ ID NO: 2758975 - RNA, 18 nt, Human
uguuaaaccaugggauaa

SEQ ID NO: 2758976 - RNA, 16 nt, Human
uguuaaaccaugggau

SEQ ID NO: 2758977 - RNA, 23 nt, Human
uguuaaaccaugggauaaaugcc

SEQ ID NO: 2758978 - RNA, 13 nt, Human
uguuuaaaaucau

SEQ ID NO: 2758979 - RNA, 14 nt, Human
uguuguuuguuuag

SEQ ID NO: 2758980 - RNA, 21 nt, Human
uguuggagaagaacugaaauc

SEQ ID NO: 2758981 - RNA, 21 nt, Human
uguugaaacggaugauuucua

SEQ ID NO: 2758982 - RNA, 22 nt, Human
uguugaaacggaugauuucuau

SEQ ID NO: 2758983 - RNA, 23 nt, Human
uguugaaacggaugauuucuaug

SEQ ID NO: 2758984 - RNA, 20 nt, Human
uguugaaacggaugauuucu

SEQ ID NO: 2758985 - RNA, 16 nt, Human
uguaugauucccagcc

SEQ ID NO: 2758986 - RNA, 16 nt, Human
uguauagaaccucuuu

SEQ ID NO: 2758987 - RNA, 15 nt, Human
uguaaucacagcuac

SEQ ID NO: 2758988 - RNA, 14 nt, Human
uguaaucacagcua

SEQ ID NO: 2758989 - RNA, 17 nt, Human
uguagauaauacaguuc

SEQ ID NO: 2758990 - RNA, 13 nt, Human
uguacucaauuuu

SEQ ID NO: 2758991 - RNA, 19 nt, Human
ugugcgcuaaacuuuucug

SEQ ID NO: 2758992 - RNA, 22 nt, Human
ugugcgcuaaacuuuucugaua

SEQ ID NO: 2758993 - RNA, 23 nt, Human
ugugcgcuaaacuuuucugauag

SEQ ID NO: 2758994 - RNA, 14 nt, Human
ugugcgcuaaacuu

SEQ ID NO: 2758995 - RNA, 21 nt, Human
ugucucaguccaugaagaugu

SEQ ID NO: 2758996 - RNA, 22 nt, Human
ugucucaguccaugaagaugua

SEQ ID NO: 2758997 - RNA, 22 nt, Human
ugugaccacugcagaagacagu

SEQ ID NO: 2758998 - RNA, 12 nt, Human
uugggaggcuga

SEQ ID NO: 2758999 - RNA, 19 nt, Human
uuggcuuuucugauccagu

SEQ ID NO: 2759000 - RNA, 22 nt, Human
uuggcuuuucugauccaguuuu

SEQ ID NO: 2759001 - RNA, 15 nt, Human
uuggcuuuucugauc

SEQ ID NO: 2759002 - RNA, 14 nt, Human
uuguauuacaaauc

SEQ ID NO: 2759003 - RNA, 19 nt, Human
uuguaucacaaaucuuaac

SEQ ID NO: 2759004 - RNA, 18 nt, Human
uuguaaaugugcuuuuaa

SEQ ID NO: 2759005 - RNA, 14 nt, Human
uuguaaaugugcuu

SEQ ID NO: 2759006 - RNA, 11 nt, Human
uuguaaaugug

SEQ ID NO: 2759007 - RNA, 22 nt, Human
uuguacaaaguauuaagcauau

SEQ ID NO: 2759008 - RNA, 16 nt, Human
uuguaaaggaauuuaa

SEQ ID NO: 2759009 - RNA, 15 nt, Human
uuggaaaucuuuaaa

SEQ ID NO: 2759010 - RNA, 12 nt, Human
uuggaaaucuuu

SEQ ID NO: 2759011 - RNA, 21 nt, Human
uuggaccaaaaaccaguauug

SEQ ID NO: 2759012 - RNA, 14 nt, Human
uucugagcauuuaa

SEQ ID NO: 2759013 - RNA, 15 nt, Human
uucugagaaagacua

SEQ ID NO: 2759014 - RNA, 15 nt, Human
uucuuauuucauuuc

SEQ ID NO: 2759015 - RNA, 23 nt, Human
uugaaaagacuccaaagaaaugu

SEQ ID NO: 2759016 - RNA, 22 nt, Human
uugaaaagacuccaaagaaaug

SEQ ID NO: 2759017 - RNA, 18 nt, Human
uugaaaagacuccaaaga

SEQ ID NO: 2759018 - RNA, 16 nt, Human
uugaaaagacuccaaa

SEQ ID NO: 2759019 - RNA, 23 nt, Human
uugaaacugagaugugaacacau

SEQ ID NO: 2759020 - RNA, 22 nt, Human
uugaaacggaugauuucuaugc

SEQ ID NO: 2759021 - RNA, 20 nt, Human
uugaaacggaugauuucuau

SEQ ID NO: 2759022 - RNA, 21 nt, Human
uugaaacggaugauuucuaug

SEQ ID NO: 2759023 - RNA, 15 nt, Human
uugaggacacugaua

SEQ ID NO: 2759024 - RNA, 14 nt, Human
uugaggacacugau

SEQ ID NO: 2759025 - RNA, 18 nt, Human
uugcauagauucccugag

SEQ ID NO: 2759026 - RNA, 12 nt, Human
uugaugaagaag

SEQ ID NO: 2759027 - RNA, 21 nt, Human
uucagagcugcccucuccugg

SEQ ID NO: 2759028 - RNA, 22 nt, Human
uucagagcugcccucuccuggg

SEQ ID NO: 2759029 - RNA, 23 nt, Human
uucagagcugcccucuccugggc

SEQ ID NO: 2759030 - RNA, 11 nt, Human
uucacugauuu

SEQ ID NO: 2759031 - RNA, 15 nt, Human
uuacuaaaauggacu

SEQ ID NO: 2759032 - RNA, 16 nt, Human
uuacuaaaauggacug

SEQ ID NO: 2759033 - RNA, 17 nt, Human
uuacuaaaauggacugu

SEQ ID NO: 2759034 - RNA, 18 nt, Human
uuacuaaaauggacugug

SEQ ID NO: 2759035 - RNA, 19 nt, Human
uuccacuuauaggaauuga

SEQ ID NO: 2759036 - RNA, 18 nt, Human
uucggccuccauccugag

SEQ ID NO: 2759037 - RNA, 19 nt, Human
uucggccuccauccugagg

SEQ ID NO: 2759038 - RNA, 12 nt, Human
uuccuagugaaa

SEQ ID NO: 2759039 - RNA, 18 nt, Human
uucccuugaugaagaagu

SEQ ID NO: 2759040 - RNA, 23 nt, Human
uucucuccucuccccaugauguu

SEQ ID NO: 2759041 - RNA, 15 nt, Human
uucuauauuuucauu

SEQ ID NO: 2759042 - RNA, 16 nt, Human
uucuauauuuucauuc

SEQ ID NO: 2759043 - RNA, 18 nt, Human
uucuauauuuucauucuc

SEQ ID NO: 2759044 - RNA, 21 nt, Human
uucuauauuuucauucuccua

SEQ ID NO: 2759045 - RNA, 11 nt, Human
uucuauauuuu

SEQ ID NO: 2759046 - RNA, 14 nt, Human
uucuauauuuucau

SEQ ID NO: 2759047 - RNA, 17 nt, Human
uucuaugcugaguuugu

SEQ ID NO: 2759048 - RNA, 15 nt, Human
uuucagcagcugcag

SEQ ID NO: 2759049 - RNA, 15 nt, Human
uuucagauaaucaca

SEQ ID NO: 2759050 - RNA, 15 nt, Human
uuucugagaaagacu

SEQ ID NO: 2759051 - RNA, 14 nt, Human
uuucucuuucguua

SEQ ID NO: 2759052 - RNA, 22 nt, Human
uuucugagaaagacuauucaaa

SEQ ID NO: 2759053 - RNA, 12 nt, Human
uuuagaaacaca

SEQ ID NO: 2759054 - RNA, 20 nt, Human
uuuagaaacacaacuauauu

SEQ ID NO: 2759055 - RNA, 13 nt, Human
uuuaugauccagc

SEQ ID NO: 2759056 - RNA, 17 nt, Human
uuuauuggcuuuucuga

SEQ ID NO: 2759057 - RNA, 21 nt, Human
uuuauuggcuuuucugaucca

SEQ ID NO: 2759058 - RNA, 21 nt, Human
uuuguauaaaauaauuuuuau

SEQ ID NO: 2759059 - RNA, 11 nt, Human
uuuguauagaa

SEQ ID NO: 2759060 - RNA, 12 nt, Human
uuuguuguuugu

SEQ ID NO: 2759061 - RNA, 14 nt, Human
uuuguuguuuguuu

SEQ ID NO: 2759062 - RNA, 12 nt, Human
uuuguguuagag

SEQ ID NO: 2759063 - RNA, 21 nt, Human
uuugcauagauucccugagca

SEQ ID NO: 2759064 - RNA, 16 nt, Human
uuuggaaaucuuuaaa

SEQ ID NO: 2759065 - RNA, 15 nt, Human
uuuggaaaucuuuaa

SEQ ID NO: 2759066 - RNA, 10 nt, Human
uuuuauauuu

SEQ ID NO: 2759067 - RNA, 20 nt, Human
uuuuauaucaauuuaaaaaa

SEQ ID NO: 2759068 - RNA, 15 nt, Human
uuuuauaugcuucug

SEQ ID NO: 2759069 - RNA, 20 nt, Human
uuuuauaugcuucuguuuua

SEQ ID NO: 2759070 - RNA, 19 nt, Human
uuuguuguuuguuuagucu

SEQ ID NO: 2759071 - RNA, 13 nt, Human
uuuuaugauccag

SEQ ID NO: 2759072 - RNA, 15 nt, Human
uuuuaugauccagca

SEQ ID NO: 2759073 - RNA, 20 nt, Human
cucuuagaugcaguucugaa

SEQ ID NO: 2759074 - RNA, 12 nt, Human
cucucuggccuu

SEQ ID NO: 2759075 - RNA, 11 nt, Human
cucucuggccu

SEQ ID NO: 2759076 - RNA, 15 nt, Human
cucuuagaugcaguu

SEQ ID NO: 2759077 - RNA, 14 nt, Human
cucccugcaauaaa

SEQ ID NO: 2759078 - RNA, 16 nt, Human
cucccugcaauaaaau

SEQ ID NO: 2759079 - RNA, 15 nt, Human
cgacagugagacucu

SEQ ID NO: 2759080 - RNA, 16 nt, Human
cgacagugagacucug

SEQ ID NO: 2759081 - RNA, 15 nt, Human
ccuuuuucauuauuu

SEQ ID NO: 2759082 - RNA, 17 nt, Human
ccuuuuucauuauuuua

SEQ ID NO: 2759083 - RNA, 20 nt, Human
cuaagugaaauaagccagac

SEQ ID NO: 2759084 - RNA, 23 nt, Human
cuaagugaaauaagccagacauc

SEQ ID NO: 2759085 - RNA, 15 nt, Human
cuacaugagguacug

SEQ ID NO: 2759086 - RNA, 13 nt, Human
cuaaacuuuucug

SEQ ID NO: 2759087 - RNA, 16 nt, Human
cuagaacucccuuuca

SEQ ID NO: 2759088 - RNA, 17 nt, Human
cuagaacucccuuucaa

SEQ ID NO: 2759089 - RNA, 18 nt, Human
cuagaacucccuuucaac

SEQ ID NO: 2759090 - RNA, 19 nt, Human
cuagaacucccuuucaaca

SEQ ID NO: 2759091 - RNA, 23 nt, Human
cuaguugaucagcuuauugucua

SEQ ID NO: 2759092 - RNA, 16 nt, Human
cccagccagcaguuca

SEQ ID NO: 2759093 - RNA, 17 nt, Human
cccagccagcaguucag

SEQ ID NO: 2759094 - RNA, 20 nt, Human
cccagccagcaguucagagc

SEQ ID NO: 2759095 - RNA, 22 nt, Human
cccauuguggucacaggaagua

SEQ ID NO: 2759096 - RNA, 23 nt, Human
cccauuguggucacaggaaguag

SEQ ID NO: 2759097 - RNA, 23 nt, Human
cccgggaggcagagguugcagug

SEQ ID NO: 2759098 - RNA, 15 nt, Human
ccagauccuggaaau

SEQ ID NO: 2759099 - RNA, 21 nt, Human
ccagcagauuauucacugauu

SEQ ID NO: 2759100 - RNA, 22 nt, Human
ccagcagauuauucacugauuu

SEQ ID NO: 2759101 - RNA, 16 nt, Human
ccagcagauuauucac

SEQ ID NO: 2759102 - RNA, 13 nt, Human
ccucugcuugcca

SEQ ID NO: 2759103 - RNA, 15 nt, Human
ccucauguccacugg

SEQ ID NO: 2759104 - RNA, 20 nt, Human
ccucauguccacugguucuu

SEQ ID NO: 2759105 - RNA, 16 nt, Human
ccguagguuauuuuca

SEQ ID NO: 2759106 - RNA, 23 nt, Human
caacacgagcaggcuacugucag

SEQ ID NO: 2759107 - RNA, 15 nt, Human
caacacgagcaggcu

SEQ ID NO: 2759108 - RNA, 22 nt, Human
caaagcacugacuucuaaguaa

SEQ ID NO: 2759109 - RNA, 20 nt, Human
caaagcacugacuucuaagu

SEQ ID NO: 2759110 - RNA, 20 nt, Human
caaaaaaaaaaaaaaauuag

SEQ ID NO: 2759111 - RNA, 15 nt, Human
caaaaggcagaagca

SEQ ID NO: 2759112 - RNA, 14 nt, Human
auuugcucauggaa

SEQ ID NO: 2759113 - RNA, 17 nt, Human
auuugcucauggaauug

SEQ ID NO: 2759114 - RNA, 11 nt, Human
auuuggaaauc

SEQ ID NO: 2759115 - RNA, 12 nt, Human
auuuggaaaucu

SEQ ID NO: 2759116 - RNA, 13 nt, Human
auuuggaaaucuu

SEQ ID NO: 2759117 - RNA, 19 nt, Human
auuuuauagcuacuaauuu

SEQ ID NO: 2759118 - RNA, 17 nt, Human
auuuuauagcuacuaau

SEQ ID NO: 2759119 - RNA, 15 nt, Human
auuuuaugauccagc

SEQ ID NO: 2759120 - RNA, 16 nt, Human
auuuuaugauccagca

SEQ ID NO: 2759121 - RNA, 14 nt, Human
auuuuaugauccag

SEQ ID NO: 2759122 - RNA, 14 nt, Human
auuaugaauuacau

SEQ ID NO: 2759123 - RNA, 17 nt, Human
auuaugaauuacauuug

SEQ ID NO: 2759124 - RNA, 18 nt, Human
auuaugaaacuuguguaa

SEQ ID NO: 2759125 - RNA, 20 nt, Human
auuaugaaacuuguguaaau

SEQ ID NO: 2759126 - RNA, 21 nt, Human
auuaugaaacuuguguaaaua

SEQ ID NO: 2759127 - RNA, 14 nt, Human
auuaugaaacuugu

SEQ ID NO: 2759128 - RNA, 15 nt, Human
auuaugaaacuugug

SEQ ID NO: 2759129 - RNA, 16 nt, Human
auuagggagagaagau

SEQ ID NO: 2759130 - RNA, 19 nt, Human
auucacaagacccaaaagg

SEQ ID NO: 2759131 - RNA, 18 nt, Human
auuaugaauuacauuugu

SEQ ID NO: 2759132 - RNA, 18 nt, Human
auucaaaguugccuaaau

SEQ ID NO: 2759133 - RNA, 20 nt, Human
auucaaaguugccuaaaucc

SEQ ID NO: 2759134 - RNA, 21 nt, Human
auucaaaguugccuaaaucca

SEQ ID NO: 2759135 - RNA, 22 nt, Human
auucaaaguugccuaaauccau

SEQ ID NO: 2759136 - RNA, 17 nt, Human
auucaaaguugccuaaa

SEQ ID NO: 2759137 - RNA, 19 nt, Human
auucauagcagcuuauuca

SEQ ID NO: 2759138 - RNA, 22 nt, Human
auucauagcagcuuauucacaa

SEQ ID NO: 2759139 - RNA, 12 nt, Human
auuacaguauaa

SEQ ID NO: 2759140 - RNA, 14 nt, Human
auuacaguauaauu

SEQ ID NO: 2759141 - RNA, 15 nt, Human
auuacaguauaauua

SEQ ID NO: 2759142 - RNA, 16 nt, Human
auuacaguauaauuaa

SEQ ID NO: 2759143 - RNA, 23 nt, Human
auuguaauaggcguaacuaauuu

SEQ ID NO: 2759144 - RNA, 13 nt, Human
auuguaauuauau

SEQ ID NO: 2759145 - RNA, 13 nt, Human
auuguaaaauggu

SEQ ID NO: 2759146 - RNA, 14 nt, Human
auuguaaaauggug

SEQ ID NO: 2759147 - RNA, 14 nt, Human
auuguaauuauauc

SEQ ID NO: 2759148 - RNA, 17 nt, Human
cacagccucuuagaugc

SEQ ID NO: 2759149 - RNA, 21 nt, Human
cacagccucuuagaugcaguu

SEQ ID NO: 2759150 - RNA, 17 nt, Human
cacacaugaaguccaag

SEQ ID NO: 2759151 - RNA, 22 nt, Human
cacacaugaaguccaagcauuu

SEQ ID NO: 2759152 - RNA, 18 nt, Human
cacaagacugcacaucaa

SEQ ID NO: 2759153 - RNA, 15 nt, Human
caaugcuguauuuua

SEQ ID NO: 2759154 - RNA, 16 nt, Human
caaugcuguauuuuaa

SEQ ID NO: 2759155 - RNA, 17 nt, Human
caaugcuguauuuuaaa

SEQ ID NO: 2759156 - RNA, 15 nt, Human
caauucuugccaaau

SEQ ID NO: 2759157 - RNA, 14 nt, Human
caaguccaagcaua

SEQ ID NO: 2759158 - RNA, 21 nt, Human
cacuagggcagggacaggaua

SEQ ID NO: 2759159 - RNA, 20 nt, Human
cacuagggcagggacaggau

SEQ ID NO: 2759160 - RNA, 21 nt, Human
cacugcagaagacaguauggc

SEQ ID NO: 2759161 - RNA, 22 nt, Human
cacuuguguuuugcaagccaga

SEQ ID NO: 2759162 - RNA, 19 nt, Human
cacuuguguuuugcaagcc

SEQ ID NO: 2759163 - RNA, 16 nt, Human
cacuugucaauaaaau

SEQ ID NO: 2759164 - RNA, 22 nt, Human
cacugguucuucuuggucucag

SEQ ID NO: 2759165 - RNA, 16 nt, Human
caugaauuaguuuuau

SEQ ID NO: 2759166 - RNA, 20 nt, Human
caucagcuugcccuguuaaa

SEQ ID NO: 2759167 - RNA, 13 nt, Human
caucagcugcuga

SEQ ID NO: 2759168 - RNA, 15 nt, Human
caucagcugcugaaa

SEQ ID NO: 2759169 - RNA, 18 nt, Human
caucagcugcugaaacaa

SEQ ID NO: 2759170 - RNA, 17 nt, Human
caucagcugcugaaaca

SEQ ID NO: 2759171 - RNA, 20 nt, Human
cauagcagcuuauucacaag

SEQ ID NO: 2759172 - RNA, 18 nt, Human
cauagauucccugagcag

SEQ ID NO: 2759173 - RNA, 17 nt, Human
cauagauucccugagca

SEQ ID NO: 2759174 - RNA, 15 nt, Human
cauuaggauggcuag

SEQ ID NO: 2759175 - RNA, 21 nt, Human
cauucuccuaucaccugucuu

SEQ ID NO: 2759176 - RNA, 16 nt, Human
ccaaaaaccaguauug

SEQ ID NO: 2759177 - RNA, 19 nt, Human
ccaaaaaccaguauuguac

SEQ ID NO: 2759178 - RNA, 20 nt, Human
ccaaaaaccaguauuguaca

SEQ ID NO: 2759179 - RNA, 18 nt, Human
ccaaauguucaucaauga

SEQ ID NO: 2759180 - RNA, 23 nt, Human
caggacagcccuucuuuccacag

SEQ ID NO: 2759181 - RNA, 24 nt, Human
caggacagcccuucuuuccacaga

SEQ ID NO: 2759182 - RNA, 21 nt, Human
caggaaaucaaauaugcaaag

SEQ ID NO: 2759183 - RNA, 19 nt, Human
caggaaaucaaauaugcaa

SEQ ID NO: 2759184 - RNA, 16 nt, Human
cagcuuauucacaaga

SEQ ID NO: 2759185 - RNA, 22 nt, Human
cagggaggacgcucucuggccu

SEQ ID NO: 2759186 - RNA, 19 nt, Human
cagggaggacgcucucugg

SEQ ID NO: 2759187 - RNA, 22 nt, Human
caguauuguacaaaguauuaag

SEQ ID NO: 2759188 - RNA, 22 nt, Human
cagccugagcgacagugagacu

SEQ ID NO: 2759189 - RNA, 23 nt, Human
cagccugagcgacagugagacuc

SEQ ID NO: 2759190 - RNA, 19 nt, Human
cagccccgugggguuccuc

SEQ ID NO: 2759191 - RNA, 18 nt, Human
cagcaguucagagcugcc

SEQ ID NO: 2759192 - RNA, 19 nt, Human
cagcaguucagagcugccc

SEQ ID NO: 2759193 - RNA, 20 nt, Human
cagcaguucagagcugcccu

SEQ ID NO: 2759194 - RNA, 21 nt, Human
cagcaguucagagcugcccuc

SEQ ID NO: 2759195 - RNA, 22 nt, Human
cagcaguucagagcugcccucu

SEQ ID NO: 2759196 - RNA, 20 nt, Human
cagccagacuggcacaguuu

SEQ ID NO: 2759197 - RNA, 13 nt, Human
cagauacuggauu

SEQ ID NO: 2759198 - RNA, 20 nt, Human
gggacauuugcucauggaau

SEQ ID NO: 2759199 - RNA, 21 nt, Human
gggacauuugcucauggaauu

SEQ ID NO: 2759200 - RNA, 19 nt, Human
gggacauuugcucauggaa

SEQ ID NO: 2759201 - RNA, 14 nt, Human
aaaaauauuuuaug

SEQ ID NO: 2759202 - RNA, 12 nt, Human
aaaaccacagca

SEQ ID NO: 2759203 - RNA, 22 nt, Human
aaaaauggaacauaaaauacaa

SEQ ID NO: 2759204 - RNA, 13 nt, Human
aaaacucauuuuu

SEQ ID NO: 2759205 - RNA, 17 nt, Human
aaaagaugaaaauauuu

SEQ ID NO: 2759206 - RNA, 14 nt, Human
aaaaccacagcagu

SEQ ID NO: 2759207 - RNA, 13 nt, Human
aaaaccacagcag

SEQ ID NO: 2759208 - RNA, 16 nt, Human
gggauuguaaaauggu

SEQ ID NO: 2759209 - RNA, 17 nt, Human
gggauuguaaaauggug

SEQ ID NO: 2759210 - RNA, 19 nt, Human
aaaaguauguuagugcaaa

SEQ ID NO: 2759211 - RNA, 15 nt, Human
gggcgugguggugag

SEQ ID NO: 2759212 - RNA, 20 nt, Human
aaacagucucaggaaaucaa

SEQ ID NO: 2759213 - RNA, 20 nt, Human
aaacaagcacuaaacaaaga

SEQ ID NO: 2759214 - RNA, 22 nt, Human
aaaauuuuuucucuaggaaaua

SEQ ID NO: 2759215 - RNA, 15 nt, Human
aaaaugugauaugua

SEQ ID NO: 2759216 - RNA, 15 nt, Human
aaauaauuuuuauau

SEQ ID NO: 2759217 - RNA, 18 nt, Human
aaauaauuuuuauauuug

SEQ ID NO: 2759218 - RNA, 20 nt, Human
aaauaauuuuuauauuugaa

SEQ ID NO: 2759219 - RNA, 20 nt, Human
aaaguuuaauauuaaagcca

SEQ ID NO: 2759220 - RNA, 21 nt, Human
aaaguuuaauauuaaagccau

SEQ ID NO: 2759221 - RNA, 22 nt, Human
aaaguuuaauauuaaagccaug

SEQ ID NO: 2759222 - RNA, 16 nt, Human
aaaguuuaauauuaaa

SEQ ID NO: 2759223 - RNA, 19 nt, Human
aaaguuuaauauuaaagcc

SEQ ID NO: 2759224 - RNA, 16 nt, Human
aaaguugaauuuauug

SEQ ID NO: 2759225 - RNA, 22 nt, Human
aaaguugaauuuauuggcuuuu

SEQ ID NO: 2759226 - RNA, 12 nt, Human
aaaguugaauuu

SEQ ID NO: 2759227 - RNA, 13 nt, Human
aaaguugaauuua

SEQ ID NO: 2759228 - RNA, 16 nt, Human
gguuuagaaagcuugc

SEQ ID NO: 2759229 - RNA, 16 nt, Human
ggugugaccacugcag

SEQ ID NO: 2759230 - RNA, 17 nt, Human
aaagcagggacuugaac

SEQ ID NO: 2759231 - RNA, 15 nt, Human
aaagacuauucaaac

SEQ ID NO: 2759232 - RNA, 14 nt, Human
aaagacuauucaaa

SEQ ID NO: 2759233 - RNA, 22 nt, Human
ggccuucggccuccauccugag

SEQ ID NO: 2759234 - RNA, 23 nt, Human
ggccuucggccuccauccugagg

SEQ ID NO: 2759235 - RNA, 12 nt, Human
ggauggcaagau

SEQ ID NO: 2759236 - RNA, 22 nt, Human
ggauaauaaggaaaaguuuaau

SEQ ID NO: 2759237 - RNA, 12 nt, Human
ggauaaaugcca

SEQ ID NO: 2759238 - RNA, 13 nt, Human
gccagcaguucag

SEQ ID NO: 2759239 - RNA, 14 nt, Human
gccagcaguucaga

SEQ ID NO: 2759240 - RNA, 19 nt, Human
gccagcaguucagagcugc

SEQ ID NO: 2759241 - RNA, 20 nt, Human
gccagcaguucagagcugcc

SEQ ID NO: 2759242 - RNA, 21 nt, Human
gccagcaguucagagcugccc

SEQ ID NO: 2759243 - RNA, 22 nt, Human
gccaguuauggcuauaggugcu

SEQ ID NO: 2759244 - RNA, 22 nt, Human
gccaugugcuaguaauuggaaa

SEQ ID NO: 2759245 - RNA, 24 nt, Human
gccaucaauaaaaaauuaugacau

SEQ ID NO: 2759246 - RNA, 17 nt, Human
gcuacaaaaacacagca

SEQ ID NO: 2759247 - RNA, 19 nt, Human
gcuacaaaaacacagcaag

SEQ ID NO: 2759248 - RNA, 18 nt, Human
gcuacaaaaacacagcaa

SEQ ID NO: 2759249 - RNA, 23 nt, Human
gcguugaaauuguaauuauaucu

SEQ ID NO: 2759250 - RNA, 24 nt, Human
gcguugaaauuguaauuauaucug

SEQ ID NO: 2759251 - RNA, 17 nt, Human
gcuacuugggaggcuga

SEQ ID NO: 2759252 - RNA, 15 nt, Human
gcuacugucagcucc

SEQ ID NO: 2759253 - RNA, 18 nt, Human
gcguugaaauuguaauua

SEQ ID NO: 2759254 - RNA, 15 nt, Human
gccuccauccugagg

SEQ ID NO: 2759255 - RNA, 16 nt, Human
gccuccauccugaggc

SEQ ID NO: 2759256 - RNA, 20 nt, Human
gccuccauccugaggcucca

SEQ ID NO: 2759257 - RNA, 13 nt, Human
ggaaaucuuuaaa

SEQ ID NO: 2759258 - RNA, 12 nt, Human
gcuuuucugauc

SEQ ID NO: 2759259 - RNA, 15 nt, Human
gcuuuucugauccag

SEQ ID NO: 2759260 - RNA, 16 nt, Human
gcuuuucugauccagu

SEQ ID NO: 2759261 - RNA, 11 nt, Human
gcuuuucugau

SEQ ID NO: 2759262 - RNA, 19 nt, Human
gcuuccuggcaauagucaa

SEQ ID NO: 2759263 - RNA, 13 nt, Human
gcuguauuuuaaa

SEQ ID NO: 2759264 - RNA, 12 nt, Human
gcuguauuuuaa

SEQ ID NO: 2759265 - RNA, 21 nt, Human
gcucugcccauccugccccug

SEQ ID NO: 2759266 - RNA, 15 nt, Human
gcucugcccauccug

SEQ ID NO: 2759267 - RNA, 16 nt, Human
gcugaaacaacaaaua

SEQ ID NO: 2759268 - RNA, 20 nt, Human
gcuccacuuggucugugaga

SEQ ID NO: 2759269 - RNA, 16 nt, Human
gaguuuagcuggaaaa

SEQ ID NO: 2759270 - RNA, 20 nt, Human
gauauguaccuaacgaagua

SEQ ID NO: 2759271 - RNA, 11 nt, Human
gauccaguuuu

SEQ ID NO: 2759272 - RNA, 17 nt, Human
gauccaguuuuguuugg

SEQ ID NO: 2759273 - RNA, 22 nt, Human
gauccaguuuuguuuggaccaa

SEQ ID NO: 2759274 - RNA, 13 nt, Human
gauuauucacuga

SEQ ID NO: 2759275 - RNA, 15 nt, Human
gauuauucacugauu

SEQ ID NO: 2759276 - RNA, 16 nt, Human
gauuauucacugauuu

SEQ ID NO: 2759277 - RNA, 17 nt, Human
gauuagggagagaagau

SEQ ID NO: 2759278 - RNA, 14 nt, Human
gauuagagaguguu

SEQ ID NO: 2759279 - RNA, 18 nt, Human
gauuagagaguguugaaa

SEQ ID NO: 2759280 - RNA, 14 nt, Human
gauuaccagggacu

SEQ ID NO: 2759281 - RNA, 14 nt, Human
gauuagaauucugu

SEQ ID NO: 2759282 - RNA, 15 nt, Human
gauuagaauucugua

SEQ ID NO: 2759283 - RNA, 23 nt, Human
gauuagaauucuguauagauuag

SEQ ID NO: 2759284 - RNA, 16 nt, Human
gaugugaacacaucag

SEQ ID NO: 2759285 - RNA, 14 nt, Human
gaugugaacacauc

SEQ ID NO: 2759286 - RNA, 15 nt, Human
gcauaacauaaaucu

SEQ ID NO: 2759287 - RNA, 21 nt, Human
gcauaacauaaaucugugaac

SEQ ID NO: 2759288 - RNA, 23 nt, Human
gcauaacauaaaucugugaacuu

SEQ ID NO: 2759289 - RNA, 11 nt, Human
gcagcugccuc

SEQ ID NO: 2759290 - RNA, 12 nt, Human
gcagcugccucc

SEQ ID NO: 2759291 - RNA, 13 nt, Human
gcagcugccuccc

SEQ ID NO: 2759292 - RNA, 15 nt, Human
gcagcugccuccccu

SEQ ID NO: 2759293 - RNA, 16 nt, Human
gcagcugccuccccuc

SEQ ID NO: 2759294 - RNA, 17 nt, Human
gcagcugccuccccucc

SEQ ID NO: 2759295 - RNA, 18 nt, Human
gcagcugccuccccuccu

SEQ ID NO: 2759296 - RNA, 22 nt, Human
gcagcugccuccccuccucugc

SEQ ID NO: 2759297 - RNA, 19 nt, Human
gcagggacuugaacccaua

SEQ ID NO: 2759298 - RNA, 18 nt, Human
gcacaguuuucugagaaa

SEQ ID NO: 2759299 - RNA, 17 nt, Human
gcacaguuuucugagaa

SEQ ID NO: 2759300 - RNA, 14 nt, Human
gcacaguuuucuga

SEQ ID NO: 2759301 - RNA, 12 nt, Human
gacuggugacug

SEQ ID NO: 2759302 - RNA, 15 nt, Human
gacuggugacugauu

SEQ ID NO: 2759303 - RNA, 18 nt, Human
gacuggugacugauucuu

SEQ ID NO: 2759304 - RNA, 14 nt, Human
gagaaucacuugaa

SEQ ID NO: 2759305 - RNA, 15 nt, Human
gagaaucacuugaac

SEQ ID NO: 2759306 - RNA, 22 nt, Human
gacuauucaaacagucucagga

SEQ ID NO: 2759307 - RNA, 17 nt, Human
gacucuuaagaagacug

SEQ ID NO: 2759308 - RNA, 15 nt, Human
gacucuuaagaagac

SEQ ID NO: 2759309 - RNA, 16 nt, Human
gacucuuaagaagacu

SEQ ID NO: 2759310 - RNA, 16 nt, Human
gacacuuaaaaauggu

SEQ ID NO: 2759311 - RNA, 20 nt, Human
gacaguauggcagcuuuccu

SEQ ID NO: 2759312 - RNA, 17 nt, Human
gacagucaccucaugga

SEQ ID NO: 2759313 - RNA, 14 nt, Human
gacagugaaagaaa

SEQ ID NO: 2759314 - RNA, 13 nt, Human
gacacacugaaga

SEQ ID NO: 2759315 - RNA, 12 nt, Human
gacacacaugaa

SEQ ID NO: 2759316 - RNA, 11 nt, Human
gaauuaguuuu

SEQ ID NO: 2759317 - RNA, 16 nt, Human
gaauuuuguguuagag

SEQ ID NO: 2759318 - RNA, 22 nt, Human
gaauuuuguguuagagauuuuu

SEQ ID NO: 2759319 - RNA, 13 nt, Human
gaauuuuguguua

SEQ ID NO: 2759320 - RNA, 22 nt, Human
gaaugagagacacacugaagaa

SEQ ID NO: 2759321 - RNA, 23 nt, Human
gaaugagagacacacugaagaag

SEQ ID NO: 2759322 - RNA, 20 nt, Human
gaaugagagacacacugaag

SEQ ID NO: 2759323 - RNA, 13 nt, Human
cuugaugaagaag

SEQ ID NO: 2759324 - RNA, 14 nt, Human
cuugccuuuuucau

SEQ ID NO: 2759325 - RNA, 15 nt, Human
cuugccuuuuucauu

SEQ ID NO: 2759326 - RNA, 20 nt, Human
cuugccuuuuucauuauuuu

SEQ ID NO: 2759327 - RNA, 22 nt, Human
cuugccuuuuucauuauuuuau

SEQ ID NO: 2759328 - RNA, 23 nt, Human
cuugccuuuuucauuauuuuauu

SEQ ID NO: 2759329 - RNA, 12 nt, Human
cuugaugaagaa

SEQ ID NO: 2759330 - RNA, 23 nt, Human
cuucuaaguaaaaccacagcagu

SEQ ID NO: 2759331 - RNA, 22 nt, Human
cuucuaaguaaaaccacagcag

SEQ ID NO: 2759332 - RNA, 15 nt, Human
cuucacuguaaaaua

SEQ ID NO: 2759333 - RNA, 17 nt, Human
gaaagacuauucaaaca

SEQ ID NO: 2759334 - RNA, 15 nt, Human
gaaagacuauucaaa

SEQ ID NO: 2759335 - RNA, 14 nt, Human
gaaagacuauucaa

SEQ ID NO: 2759336 - RNA, 17 nt, Human
gaaauauuuauuuuaau

SEQ ID NO: 2759337 - RNA, 17 nt, Human
gaaaucaaauaugcaaa

SEQ ID NO: 2759338 - RNA, 18 nt, Human
gaaaucaaauaugcaaag

SEQ ID NO: 2759339 - RNA, 18 nt, Human
gaaauauuuauuuuaaua

SEQ ID NO: 2759340 - RNA, 22 nt, Human
gaaauauuuauuuuaauaaugu

SEQ ID NO: 2759341 - RNA, 20 nt, Human
gaaaucaaauaugcaaagca

SEQ ID NO: 2759342 - RNA, 19 nt, Human
gaaaucaaauaugcaaagc

SEQ ID NO: 2759343 - RNA, 11 nt, Human
cuuuguauaga

SEQ ID NO: 2759344 - RNA, 20 nt, Human
cuuuguauagaaccucuuug

SEQ ID NO: 2759345 - RNA, 16 nt, Human
cugugagaugcuagaa

SEQ ID NO: 2759346 - RNA, 18 nt, Human
cugugaacuugaaauuug

SEQ ID NO: 2759347 - RNA, 23 nt, Human
cugucagcuccccucggagaaga

SEQ ID NO: 2759348 - RNA, 21 nt, Human
cugucagcuccccucggagaa

SEQ ID NO: 2759349 - RNA, 14 nt, Human
cuguacuuuuuggc

SEQ ID NO: 2759350 - RNA, 16 nt, Human
cugggcagcugccucc

SEQ ID NO: 2759351 - RNA, 19 nt, Human
cugggcagcugccuccccu

SEQ ID NO: 2759352 - RNA, 20 nt, Human
cugggcagcugccuccccuc

SEQ ID NO: 2759353 - RNA, 21 nt, Human
cugggcagcugccuccccucc

SEQ ID NO: 2759354 - RNA, 22 nt, Human
cugggcagcugccuccccuccu

SEQ ID NO: 2759355 - RNA, 18 nt, Human
cuggugacugauucuuca

SEQ ID NO: 2759356 - RNA, 10 nt, Human
cugggacagg

SEQ ID NO: 2759357 - RNA, 21 nt, Human
cuggaaaucaggguuaguauu

SEQ ID NO: 2759358 - RNA, 21 nt, Human
aacuagaguuuagcuggaaaa

SEQ ID NO: 2759359 - RNA, 23 nt, Human
aacuaucucauuuccaagcaagu

SEQ ID NO: 2759360 - RNA, 18 nt, Human
aaccuugaaaacuuuaug

SEQ ID NO: 2759361 - RNA, 16 nt, Human
gucuuucacauuuaaa

SEQ ID NO: 2759362 - RNA, 20 nt, Human
aaccugagccccaaaaggua

SEQ ID NO: 2759363 - RNA, 18 nt, Human
aaccugagccccaaaagg

SEQ ID NO: 2759364 - RNA, 16 nt, Human
aaccucuuugucuaca

SEQ ID NO: 2759365 - RNA, 23 nt, Human
aacccaaauguucaucaaugaau

SEQ ID NO: 2759366 - RNA, 18 nt, Human
aacccaaguccaagcaua

SEQ ID NO: 2759367 - RNA, 21 nt, Human
aacuucagcgguuuauauaag

SEQ ID NO: 2759368 - RNA, 18 nt, Human
aacuuccagauccuggaa

SEQ ID NO: 2759369 - RNA, 17 nt, Human
gugaugggaaagcauug

SEQ ID NO: 2759370 - RNA, 17 nt, Human
aacugggacaggggaga

SEQ ID NO: 2759371 - RNA, 19 nt, Human
aacuggacugguucaaaug

SEQ ID NO: 2759372 - RNA, 19 nt, Human
aacugcacugucaagauga

SEQ ID NO: 2759373 - RNA, 12 nt, Human
aacugaaaucau

SEQ ID NO: 2759374 - RNA, 21 nt, Human
gugagaugcuagaacucccuu

SEQ ID NO: 2759375 - RNA, 14 nt, Human
gugaacuugaaauu

SEQ ID NO: 2759376 - RNA, 15 nt, Human
gugaacuugaaauuu

SEQ ID NO: 2759377 - RNA, 20 nt, Human
aaauuuuuucucuaggaaau

SEQ ID NO: 2759378 - RNA, 12 nt, Human
aacaauaaaaga

SEQ ID NO: 2759379 - RNA, 14 nt, Human
aacaaugcuguauu

SEQ ID NO: 2759380 - RNA, 15 nt, Human
aacaaugcuguauuu

SEQ ID NO: 2759381 - RNA, 15 nt, Human
aacacaacuauauug

SEQ ID NO: 2759382 - RNA, 16 nt, Human
aacacaacuauauugu

SEQ ID NO: 2759383 - RNA, 17 nt, Human
aacaaugcuguauuuua

SEQ ID NO: 2759384 - RNA, 22 nt, Human
aacaaugcuguauuuuaaaaga

SEQ ID NO: 2759385 - RNA, 15 nt, Human
aacacagcaagggug

SEQ ID NO: 2759386 - RNA, 15 nt, Human
aacagugauuaccag

SEQ ID NO: 2759387 - RNA, 22 nt, Human
aacagugauuaccagggacuga

SEQ ID NO: 2759388 - RNA, 16 nt, Human
aacagauaaauaguuu

SEQ ID NO: 2759389 - RNA, 18 nt, Human
guauguacuucaugcugu

SEQ ID NO: 2759390 - RNA, 16 nt, Human
gucaaauugugugaaa

SEQ ID NO: 2759391 - RNA, 15 nt, Human
aaauuguaauuauau

SEQ ID NO: 2759392 - RNA, 14 nt, Human
aaauuguaauuaua

SEQ ID NO: 2759393 - RNA, 14 nt, Human
aaauggguuuuacu

SEQ ID NO: 2759394 - RNA, 15 nt, Human
aaauggguuuuacug

SEQ ID NO: 2759395 - RNA, 20 nt, Human
guaguguuggagaagaacug

SEQ ID NO: 2759396 - RNA, 17 nt, Human
guaguguuggagaagaa

SEQ ID NO: 2759397 - RNA, 16 nt, Human
aaauguaagggaaacu

SEQ ID NO: 2759398 - RNA, 16 nt, Human
guauauuuuauaucaa

SEQ ID NO: 2759399 - RNA, 15 nt, Human
guauaaaauaauuuu

SEQ ID NO: 2759400 - RNA, 21 nt, Human
guauaaaauaauuuuuauauu

SEQ ID NO: 2759401 - RNA, 13 nt, Human
aagguacuucaaa

SEQ ID NO: 2759402 - RNA, 19 nt, Human
aagggugaugggaaagcau

SEQ ID NO: 2759403 - RNA, 14 nt, Human
aagguacuucaaau

SEQ ID NO: 2759404 - RNA, 20 nt, Human
guuuaauauuaaagccaugu

SEQ ID NO: 2759405 - RNA, 19 nt, Human
guuuaauauuaaagccaug

SEQ ID NO: 2759406 - RNA, 17 nt, Human
guugccuaaauccauuu

SEQ ID NO: 2759407 - RNA, 22 nt, Human
guugccuaaauccauuuggaaa

SEQ ID NO: 2759408 - RNA, 22 nt, Human
aagucuuauauauuguagauaa

SEQ ID NO: 2759409 - RNA, 16 nt, Human
aagucuuucacauuua

SEQ ID NO: 2759410 - RNA, 13 nt, Human
aaguauuagaaua

SEQ ID NO: 2759411 - RNA, 16 nt, Human
aaguauuaagcauaua

SEQ ID NO: 2759412 - RNA, 17 nt, Human
aaguauuaagcauauau

SEQ ID NO: 2759413 - RNA, 18 nt, Human
aaguauuaagcauauauu

SEQ ID NO: 2759414 - RNA, 14 nt, Human
aaguauuaagcaua

SEQ ID NO: 2759415 - RNA, 15 nt, Human
aaguauuaagcauau

SEQ ID NO: 2759416 - RNA, 14 nt, Human
aaguaaugauaacu

SEQ ID NO: 2759417 - RNA, 12 nt, Human
uaaaagaaugau

SEQ ID NO: 2759418 - RNA, 23 nt, Human
uaaaagaauauuuuaacuuccuu

SEQ ID NO: 2759419 - RNA, 16 nt, Human
uaaaagaauauuuuaa

SEQ ID NO: 2759420 - RNA, 20 nt, Human
uaaaagacagugaaagaaaa

SEQ ID NO: 2759421 - RNA, 13 nt, Human
aagauguagagga

SEQ ID NO: 2759422 - RNA, 14 nt, Human
aagaugaaaauauu

SEQ ID NO: 2759423 - RNA, 13 nt, Human
aagaugaaaauau

SEQ ID NO: 2759424 - RNA, 16 nt, Human
aagacugcacaucaaa

SEQ ID NO: 2759425 - RNA, 17 nt, Human
aagacugcauuauauuu

SEQ ID NO: 2759426 - RNA, 23 nt, Human
aagaggaaugaaguacucauaca

SEQ ID NO: 2759427 - RNA, 20 nt, Human
guuauuauauuuacaaaugg

SEQ ID NO: 2759428 - RNA, 13 nt, Human
aagcuccagguag

SEQ ID NO: 2759429 - RNA, 14 nt, Human
aagcuccagguaga

SEQ ID NO: 2759430 - RNA, 20 nt, Human
aagcucacagaccuuugaac

SEQ ID NO: 2759431 - RNA, 16 nt, Human
aagcauuuagauguau

SEQ ID NO: 2759432 - RNA, 13 nt, Human
aagcauuguaaau

SEQ ID NO: 2759433 - RNA, 16 nt, Human
uaaaugugcuuuuaaa

SEQ ID NO: 2759434 - RNA, 23 nt, Human
aauacaucccuuaccugggaaag

SEQ ID NO: 2759435 - RNA, 23 nt, Human
aauaccacaggaaccacaagacu

SEQ ID NO: 2759436 - RNA, 18 nt, Human
aauaccaugccauuuaaa

SEQ ID NO: 2759437 - RNA, 19 nt, Human
aauagucaaauugugugaa

SEQ ID NO: 2759438 - RNA, 21 nt, Human
aauagcuagacuggugacuga

SEQ ID NO: 2759439 - RNA, 14 nt, Human
aauagcuagacugg

SEQ ID NO: 2759440 - RNA, 20 nt, Human
aauagcuagacuggugacug

SEQ ID NO: 2759441 - RNA, 12 nt, Human
uaacauguuaaa

SEQ ID NO: 2759442 - RNA, 15 nt, Human
uaacauguuaaacca

SEQ ID NO: 2759443 - RNA, 21 nt, Human
uaacuuccuuggacucauuuu

SEQ ID NO: 2759444 - RNA, 13 nt, Human
uaagaagugaaaa

SEQ ID NO: 2759445 - RNA, 20 nt, Human
aauccucaguuuuugugaaa

SEQ ID NO: 2759446 - RNA, 21 nt, Human
aaucccauuauucaaaguugc

SEQ ID NO: 2759447 - RNA, 14 nt, Human
aaucccauuauuca

SEQ ID NO: 2759448 - RNA, 16 nt, Human
aaucccauuauucaaa

SEQ ID NO: 2759449 - RNA, 20 nt, Human
uaaguaaugauaacuggaaa

SEQ ID NO: 2759450 - RNA, 19 nt, Human
uaaguaaaaccacagcagu

SEQ ID NO: 2759451 - RNA, 18 nt, Human
uaaguaaaaccacagcag

SEQ ID NO: 2759452 - RNA, 17 nt, Human
uaaguaaaaccacagca

SEQ ID NO: 2759453 - RNA, 16 nt, Human
uaaguaaaaccacagc

SEQ ID NO: 2759454 - RNA, 15 nt, Human
uaaguaaaaccacag

SEQ ID NO: 2759455 - RNA, 13 nt, Human
uaaguaaaaccac

SEQ ID NO: 2759456 - RNA, 18 nt, Human
uaagguuaccuuuguucc

SEQ ID NO: 2759457 - RNA, 13 nt, Human
uaaggacuuguua

SEQ ID NO: 2759458 - RNA, 15 nt, Human
uaaggacuuguuaga

SEQ ID NO: 2759459 - RNA, 16 nt, Human
uaaggacuuguuagau

SEQ ID NO: 2759460 - RNA, 19 nt, Human
uaaggacuuguuagaucua

SEQ ID NO: 2759461 - RNA, 18 nt, Human
uaaguuuuuuuuuaaaaa

SEQ ID NO: 2759462 - RNA, 15 nt, Human
uaagcaaaaugugau

SEQ ID NO: 2759463 - RNA, 21 nt, Human
uaagcaaaaugugauauguac

SEQ ID NO: 2759464 - RNA, 14 nt, Human
uaagcaaaauguga

SEQ ID NO: 2759465 - RNA, 13 nt, Human
uaagcauauauuu

SEQ ID NO: 2759466 - RNA, 21 nt, Human
uaaggaaaaguuuaauauuaa

SEQ ID NO: 2759467 - RNA, 17 nt, Human
uaaggaaaaguuuaaua

SEQ ID NO: 2759468 - RNA, 19 nt, Human
uaaggaaaaguuuaauauu

SEQ ID NO: 2759469 - RNA, 14 nt, Human
uaaggacuucuuua

SEQ ID NO: 2759470 - RNA, 15 nt, Human
uaaggacuucuuuaa

SEQ ID NO: 2759471 - RNA, 16 nt, Human
uaaggacuucuuuaau

SEQ ID NO: 2759472 - RNA, 22 nt, Human
uaaggacuucuuuaauuuugga

SEQ ID NO: 2759473 - RNA, 16 nt, Human
aaucagccuaguugau

SEQ ID NO: 2759474 - RNA, 21 nt, Human
uacaaaaaaaaaaaaaaauua

SEQ ID NO: 2759475 - RNA, 22 nt, Human
aaugcuguauuuuaaaagaaug

SEQ ID NO: 2759476 - RNA, 20 nt, Human
aaugcuguauuuuaaaagaa

SEQ ID NO: 2759477 - RNA, 21 nt, Human
aaugcuguauuuuaaaagaau

SEQ ID NO: 2759478 - RNA, 20 nt, Human
aauguaagggaaacugccag

SEQ ID NO: 2759479 - RNA, 17 nt, Human
uacagagacagaaagca

SEQ ID NO: 2759480 - RNA, 13 nt, Human
uacagaauuuuau

SEQ ID NO: 2759481 - RNA, 14 nt, Human
uacaccauuaugug

SEQ ID NO: 2759482 - RNA, 22 nt, Human
uaauuccguagguuauuuucag

SEQ ID NO: 2759483 - RNA, 18 nt, Human
uaauuuuuauauuugaaa

SEQ ID NO: 2759484 - RNA, 19 nt, Human
uaauuuuuauauuugaaau

SEQ ID NO: 2759485 - RNA, 21 nt, Human
uaauuuuuauauuugaaauau

SEQ ID NO: 2759486 - RNA, 16 nt, Human
aaugauuucauucaau

SEQ ID NO: 2759487 - RNA, 14 nt, Human
uaauuauaugcuau

SEQ ID NO: 2759488 - RNA, 18 nt, Human
uaauuauaugcuauuucu

SEQ ID NO: 2759489 - RNA, 19 nt, Human
uaauuauaugcuauuucua

SEQ ID NO: 2759490 - RNA, 19 nt, Human
uaauuauaucugaggaauu

SEQ ID NO: 2759491 - RNA, 21 nt, Human
uaauuauaucugaggaauucu

SEQ ID NO: 2759492 - RNA, 22 nt, Human
uaauuauaucugaggaauucug

SEQ ID NO: 2759493 - RNA, 23 nt, Human
uaauuauaucugaggaauucugu

SEQ ID NO: 2759494 - RNA, 22 nt, Human
aaugagagacacacugaagaag

SEQ ID NO: 2759495 - RNA, 23 nt, Human
aaugauuaugaauuacauuugua

SEQ ID NO: 2759496 - RNA, 16 nt, Human
aauguucaucaaugaa

SEQ ID NO: 2759497 - RNA, 20 nt, Human
aauguucaucaaugaaugaa

SEQ ID NO: 2759498 - RNA, 13 nt, Human
aauguucaucaau

SEQ ID NO: 2759499 - RNA, 19 nt, Human
uaccagggacugaggggag

SEQ ID NO: 2759500 - RNA, 16 nt, Human
uaccaugccauuuaaa

SEQ ID NO: 2759501 - RNA, 14 nt, Human
aauuacauuuguau

SEQ ID NO: 2759502 - RNA, 13 nt, Human
aauuacauuugua

SEQ ID NO: 2759503 - RNA, 17 nt, Human
acacucaaaucaagaaa

SEQ ID NO: 2759504 - RNA, 13 nt, Human
acacucaaaucaa

SEQ ID NO: 2759505 - RNA, 19 nt, Human
acacuaagagagaaugaga

SEQ ID NO: 2759506 - RNA, 16 nt, Human
uauaggugcuacaaaa

SEQ ID NO: 2759507 - RNA, 19 nt, Human
uauaggaauugacccacaa

SEQ ID NO: 2759508 - RNA, 12 nt, Human
uauaggaauuga

SEQ ID NO: 2759509 - RNA, 18 nt, Human
uauagauuagaauucugu

SEQ ID NO: 2759510 - RNA, 19 nt, Human
acagaaagcagaacaguga

SEQ ID NO: 2759511 - RNA, 14 nt, Human
acagaccuuugaac

SEQ ID NO: 2759512 - RNA, 20 nt, Human
uaucacaaaucuuaacuuga

SEQ ID NO: 2759513 - RNA, 16 nt, Human
uaucacaaaucuuaac

SEQ ID NO: 2759514 - RNA, 14 nt, Human
uaucacaaaucuua

SEQ ID NO: 2759515 - RNA, 14 nt, Human
acagcuguaugauu

SEQ ID NO: 2759516 - RNA, 19 nt, Human
acagcuguaugauucccag

SEQ ID NO: 2759517 - RNA, 20 nt, Human
acagcuguaugauucccagc

SEQ ID NO: 2759518 - RNA, 23 nt, Human
acagcuguaugauucccagccag

SEQ ID NO: 2759519 - RNA, 14 nt, Human
uaugaaacuugugu

SEQ ID NO: 2759520 - RNA, 19 nt, Human
uaugaaacuuguguaaaua

SEQ ID NO: 2759521 - RNA, 21 nt, Human
uaugaaacuuguguaaauaca

SEQ ID NO: 2759522 - RNA, 18 nt, Human
acagcaagggugauggga

SEQ ID NO: 2759523 - RNA, 14 nt, Human
uaugcuauuucuau

SEQ ID NO: 2759524 - RNA, 15 nt, Human
uaugcuauuucuaua

SEQ ID NO: 2759525 - RNA, 16 nt, Human
uaugcuauuucuauau

SEQ ID NO: 2759526 - RNA, 18 nt, Human
uaugcuauuucuauauuu

SEQ ID NO: 2759527 - RNA, 22 nt, Human
uaugcuauuucuauauuuucau

SEQ ID NO: 2759528 - RNA, 23 nt, Human
uaugcuauuucuauauuuucauu

SEQ ID NO: 2759529 - RNA, 17 nt, Human
uagaacucccuuucaac

SEQ ID NO: 2759530 - RNA, 16 nt, Human
uagaacucccuuucaa

SEQ ID NO: 2759531 - RNA, 15 nt, Human
uagaaacacaacuau

SEQ ID NO: 2759532 - RNA, 13 nt, Human
uagacacacauga

SEQ ID NO: 2759533 - RNA, 13 nt, Human
acaaaaacacagc

SEQ ID NO: 2759534 - RNA, 15 nt, Human
acaaaaacacagcaa

SEQ ID NO: 2759535 - RNA, 14 nt, Human
acaaaaacacagca

SEQ ID NO: 2759536 - RNA, 15 nt, Human
acaaaguauuaagca

SEQ ID NO: 2759537 - RNA, 16 nt, Human
acaaaguauuaagcau

SEQ ID NO: 2759538 - RNA, 13 nt, Human
acaaaguauuaag

SEQ ID NO: 2759539 - RNA, 18 nt, Human
acaaaguauuaagcauau

SEQ ID NO: 2759540 - RNA, 14 nt, Human
uagaggguguguaa

SEQ ID NO: 2759541 - RNA, 13 nt, Human
uaggauguugaaa

SEQ ID NO: 2759542 - RNA, 13 nt, Human
acacaacuauauu

SEQ ID NO: 2759543 - RNA, 18 nt, Human
acuauucaaacagucuca

SEQ ID NO: 2759544 - RNA, 16 nt, Human
acuauucaaacagucu

SEQ ID NO: 2759545 - RNA, 14 nt, Human
acuauucaaacagu

SEQ ID NO: 2759546 - RNA, 13 nt, Human
acuauucaaacag

SEQ ID NO: 2759547 - RNA, 14 nt, Human
uccccuccucugcu

SEQ ID NO: 2759548 - RNA, 15 nt, Human
uccccuccucugcuu

SEQ ID NO: 2759549 - RNA, 18 nt, Human
uccccuccucugcuugcc

SEQ ID NO: 2759550 - RNA, 24 nt, Human
uccccuccucugcuugccaucccu

SEQ ID NO: 2759551 - RNA, 20 nt, Human
acuagaguuuagcuggaaaa

SEQ ID NO: 2759552 - RNA, 21 nt, Human
acuccaaacugacucuuaaga

SEQ ID NO: 2759553 - RNA, 20 nt, Human
acucauuuuaaaaaauggaa

SEQ ID NO: 2759554 - RNA, 19 nt, Human
ucccuccaccucccugcaa

SEQ ID NO: 2759555 - RNA, 15 nt, Human
ucccuccaccucccu

SEQ ID NO: 2759556 - RNA, 17 nt, Human
ucccuccaccucccugc

SEQ ID NO: 2759557 - RNA, 14 nt, Human
ucccuccaccuccc

SEQ ID NO: 2759558 - RNA, 14 nt, Human
acuccagaaaguga

SEQ ID NO: 2759559 - RNA, 17 nt, Human
uccgugcuaaggacuug

SEQ ID NO: 2759560 - RNA, 18 nt, Human
uccgugcuaaggacuugu

SEQ ID NO: 2759561 - RNA, 16 nt, Human
uccgugcuaaggacuu

SEQ ID NO: 2759562 - RNA, 23 nt, Human
uccgugcuaaggacuuguuagau

SEQ ID NO: 2759563 - RNA, 21 nt, Human
uccugaaaacccuugccaugu

SEQ ID NO: 2759564 - RNA, 17 nt, Human
uccucuccccaugaugu

SEQ ID NO: 2759565 - RNA, 16 nt, Human
ucauaauaaguugcau

SEQ ID NO: 2759566 - RNA, 12 nt, Human
accugagcccca

SEQ ID NO: 2759567 - RNA, 17 nt, Human
accugagccccaaaagg

SEQ ID NO: 2759568 - RNA, 17 nt, Human
acgcucucuggccuucg

SEQ ID NO: 2759569 - RNA, 15 nt, Human
acggaugauuucuau

SEQ ID NO: 2759570 - RNA, 14 nt, Human
acggaugauuucua

SEQ ID NO: 2759571 - RNA, 15 nt, Human
acgcucucuggccuu

SEQ ID NO: 2759572 - RNA, 16 nt, Human
acgcucucuggccuuc

SEQ ID NO: 2759573 - RNA, 14 nt, Human
acgcucucuggccu

SEQ ID NO: 2759574 - RNA, 13 nt, Human
acgcguugaaauu

SEQ ID NO: 2759575 - RNA, 14 nt, Human
acgcguugaaauug

SEQ ID NO: 2759576 - RNA, 18 nt, Human
acgcguugaaauuguaau

SEQ ID NO: 2759577 - RNA, 20 nt, Human
acgcguugaaauuguaauua

SEQ ID NO: 2759578 - RNA, 14 nt, Human
uccagugagacagc

SEQ ID NO: 2759579 - RNA, 22 nt, Human
uccaugaagauguagaggagaa

SEQ ID NO: 2759580 - RNA, 12 nt, Human
uccauuuaauaa

SEQ ID NO: 2759581 - RNA, 17 nt, Human
uccauuuaauaauuaua

SEQ ID NO: 2759582 - RNA, 12 nt, Human
uccauuuggaaa

SEQ ID NO: 2759583 - RNA, 19 nt, Human
uccauuuggaaaucuuuaa

SEQ ID NO: 2759584 - RNA, 20 nt, Human
uccauuuggaaaucuuuaaa

SEQ ID NO: 2759585 - RNA, 23 nt, Human
ucaauauuucagauaaucacaau

SEQ ID NO: 2759586 - RNA, 14 nt, Human
acauugguguugua

SEQ ID NO: 2759587 - RNA, 16 nt, Human
acauugguguuguacu

SEQ ID NO: 2759588 - RNA, 22 nt, Human
acauugguguuguacucaauuu

SEQ ID NO: 2759589 - RNA, 23 nt, Human
acauugguguuguacucaauuuu

SEQ ID NO: 2759590 - RNA, 12 nt, Human
ucaauuuaaaaa

SEQ ID NO: 2759591 - RNA, 13 nt, Human
ucaauuuaaaaaa

SEQ ID NO: 2759592 - RNA, 16 nt, Human
ucacagaccuuugaac

SEQ ID NO: 2759593 - RNA, 23 nt, Human
ucacagccagacuggcacaguuu

SEQ ID NO: 2759594 - RNA, 17 nt, Human
ucacagccagacuggca

SEQ ID NO: 2759595 - RNA, 16 nt, Human
accacaagacugcaca

SEQ ID NO: 2759596 - RNA, 19 nt, Human
accaacacgagcaggcuac

SEQ ID NO: 2759597 - RNA, 14 nt, Human
accaacacgagcag

SEQ ID NO: 2759598 - RNA, 12 nt, Human
accaaaaaccag

SEQ ID NO: 2759599 - RNA, 13 nt, Human
accaaaaaccagu

SEQ ID NO: 2759600 - RNA, 18 nt, Human
uauuuuaaaagaaugauu

SEQ ID NO: 2759601 - RNA, 14 nt, Human
uauuuuaaaagaau

SEQ ID NO: 2759602 - RNA, 19 nt, Human
uauuuuaauaauguuucaa

SEQ ID NO: 2759603 - RNA, 22 nt, Human
uauuuuaauaauguuucaaaca

SEQ ID NO: 2759604 - RNA, 21 nt, Human
ucaaacagucucaggaaauca

SEQ ID NO: 2759605 - RNA, 20 nt, Human
ucaaacagucucaggaaauc

SEQ ID NO: 2759606 - RNA, 13 nt, Human
ucaaacagucuca

SEQ ID NO: 2759607 - RNA, 15 nt, Human
ucaaaguugccuaaa

SEQ ID NO: 2759608 - RNA, 17 nt, Human
ucagagcugcccucucc

SEQ ID NO: 2759609 - RNA, 15 nt, Human
ucagagcugcccucu

SEQ ID NO: 2759610 - RNA, 16 nt, Human
ucagagcugcccucuc

SEQ ID NO: 2759611 - RNA, 13 nt, Human
ucagaucugccua

SEQ ID NO: 2759612 - RNA, 15 nt, Human
ucagaucugccuaag

SEQ ID NO: 2759613 - RNA, 18 nt, Human
ucagaucugccuaaggac

SEQ ID NO: 2759614 - RNA, 20 nt, Human
ucagaucugccuaaggacuu

SEQ ID NO: 2759615 - RNA, 13 nt, Human
ucagagcugcccu

SEQ ID NO: 2759616 - RNA, 14 nt, Human
ucagagcugcccuc

SEQ ID NO: 2759617 - RNA, 16 nt, Human
acccaaauguucauca

SEQ ID NO: 2759618 - RNA, 20 nt, Human
acccaaauguucaucaauga

SEQ ID NO: 2759619 - RNA, 17 nt, Human
accaugggauaaaugcc

SEQ ID NO: 2759620 - RNA, 18 nt, Human
accaugggauaaaugcca

SEQ ID NO: 2759621 - RNA, 13 nt, Human
acuguggguagac

SEQ ID NO: 2759622 - RNA, 17 nt, Human
ucuaccaaaaaucucaa

SEQ ID NO: 2759623 - RNA, 23 nt, Human
acugucagcuccccucggagaag

SEQ ID NO: 2759624 - RNA, 22 nt, Human
acugucagcuccccucggagaa

SEQ ID NO: 2759625 - RNA, 22 nt, Human
acugaagaagcaccaaucauga

SEQ ID NO: 2759626 - RNA, 23 nt, Human
acuugaacccgggaggcagaggu

SEQ ID NO: 2759627 - RNA, 21 nt, Human
acuugaacccgggaggcagag

SEQ ID NO: 2759628 - RNA, 17 nt, Human
ucucaaaacugcacugu

SEQ ID NO: 2759629 - RNA, 21 nt, Human
acuucuaaguaaaaccacagc

SEQ ID NO: 2759630 - RNA, 13 nt, Human
acuucuaaguaaa

SEQ ID NO: 2759631 - RNA, 19 nt, Human
acuucuaaguaaaaccaca

SEQ ID NO: 2759632 - RNA, 18 nt, Human
acuucuaaguaaaaccac

SEQ ID NO: 2759633 - RNA, 13 nt, Human
ucuauaauuuaaa

SEQ ID NO: 2759634 - RNA, 16 nt, Human
ucuaguucacucucca

SEQ ID NO: 2759635 - RNA, 19 nt, Human
ucuaguucacucuccauuu

SEQ ID NO: 2759636 - RNA, 12 nt, Human
ucuaguucacuc

SEQ ID NO: 2759637 - RNA, 20 nt, Human
acuuccagauccuggaaauc

SEQ ID NO: 2759638 - RNA, 20 nt, Human
agaaagcagaacagugauua

SEQ ID NO: 2759639 - RNA, 17 nt, Human
agaaagcagaacaguga

SEQ ID NO: 2759640 - RNA, 18 nt, Human
agaaagcagaacagugau

SEQ ID NO: 2759641 - RNA, 16 nt, Human
agaaagacuauucaaa

SEQ ID NO: 2759642 - RNA, 16 nt, Human
agaaacacaacuauau

SEQ ID NO: 2759643 - RNA, 23 nt, Human
agaaacuuaagguuaccuuuguu

SEQ ID NO: 2759644 - RNA, 22 nt, Human
acuuugugcugggguuaucuga

SEQ ID NO: 2759645 - RNA, 19 nt, Human
agaagcaacccaaauguuc

SEQ ID NO: 2759646 - RNA, 19 nt, Human
agaagcaccaaucaugaau

SEQ ID NO: 2759647 - RNA, 20 nt, Human
ucugcccauccugccccuga

SEQ ID NO: 2759648 - RNA, 21 nt, Human
agaagccccacccugccucac

SEQ ID NO: 2759649 - RNA, 17 nt, Human
agaacucccuuucaaca

SEQ ID NO: 2759650 - RNA, 15 nt, Human
agaacucccuuucaa

SEQ ID NO: 2759651 - RNA, 16 nt, Human
agaacucccuuucaac

SEQ ID NO: 2759652 - RNA, 13 nt, Human
agaaguugauaug

SEQ ID NO: 2759653 - RNA, 14 nt, Human
agaagcuccaggua

SEQ ID NO: 2759654 - RNA, 15 nt, Human
ugaauacuuuauaaa

SEQ ID NO: 2759655 - RNA, 12 nt, Human
ugaauggcuuug

SEQ ID NO: 2759656 - RNA, 15 nt, Human
ugaauggcuuuguau

SEQ ID NO: 2759657 - RNA, 11 nt, Human
ugaauggcuuu

SEQ ID NO: 2759658 - RNA, 17 nt, Human
ugaauggcuuuguauag

SEQ ID NO: 2759659 - RNA, 18 nt, Human
ugaauggcuuuguauaga

SEQ ID NO: 2759660 - RNA, 19 nt, Human
ugaauggcuuuguauagaa

SEQ ID NO: 2759661 - RNA, 22 nt, Human
ugaauggcuuuguauagaaccu

SEQ ID NO: 2759662 - RNA, 21 nt, Human
ugaauuuuguguuagagauuu

SEQ ID NO: 2759663 - RNA, 17 nt, Human
ugaauuuuguguuagag

SEQ ID NO: 2759664 - RNA, 17 nt, Human
agauacuggauuguacu

SEQ ID NO: 2759665 - RNA, 14 nt, Human
agauacuggauugu

SEQ ID NO: 2759666 - RNA, 23 nt, Human
agcaacgcaggcccccaggugcc

SEQ ID NO: 2759667 - RNA, 15 nt, Human
agauuuuuuuguugu

SEQ ID NO: 2759668 - RNA, 16 nt, Human
agauuuuuuuguuguu

SEQ ID NO: 2759669 - RNA, 18 nt, Human
agauuuuuuuguuguuug

SEQ ID NO: 2759670 - RNA, 19 nt, Human
agauuuuuuuguuguuugu

SEQ ID NO: 2759671 - RNA, 23 nt, Human
agauuuuuuuguuguuuguuuag

SEQ ID NO: 2759672 - RNA, 15 nt, Human
agauucccugagcag

SEQ ID NO: 2759673 - RNA, 15 nt, Human
ugacuucuaaguaaa

SEQ ID NO: 2759674 - RNA, 23 nt, Human
ugacuucuaaguaaaaccacagc

SEQ ID NO: 2759675 - RNA, 22 nt, Human
ugacuucuaaguaaaaccacag

SEQ ID NO: 2759676 - RNA, 24 nt, Human
ugacuucuaaguaaaaccacagca

SEQ ID NO: 2759677 - RNA, 15 nt, Human
agauuuuauuaugua

SEQ ID NO: 2759678 - RNA, 16 nt, Human
agauuuuauuauguaa

SEQ ID NO: 2759679 - RNA, 17 nt, Human
agauuuuauuauguaaa

SEQ ID NO: 2759680 - RNA, 18 nt, Human
agauuuuauuauguaaau

SEQ ID NO: 2759681 - RNA, 14 nt, Human
agauuuuauuaugu

SEQ ID NO: 2759682 - RNA, 19 nt, Human
agauuuuauuauguaaauc

SEQ ID NO: 2759683 - RNA, 17 nt, Human
ugacacuuaaaaauggu

SEQ ID NO: 2759684 - RNA, 16 nt, Human
ugacacuuaaaaaugg

SEQ ID NO: 2759685 - RNA, 16 nt, Human
agaugcaguucugaag

SEQ ID NO: 2759686 - RNA, 14 nt, Human
agacuauucaaaca

SEQ ID NO: 2759687 - RNA, 12 nt, Human
agacuauucaaa

SEQ ID NO: 2759688 - RNA, 15 nt, Human
agacuauucaaacag

SEQ ID NO: 2759689 - RNA, 14 nt, Human
agaaucacuugaac

SEQ ID NO: 2759690 - RNA, 15 nt, Human
ucuucacaacagauu

SEQ ID NO: 2759691 - RNA, 17 nt, Human
agacaucaacagauaaa

SEQ ID NO: 2759692 - RNA, 18 nt, Human
agacaucaacagauaaau

SEQ ID NO: 2759693 - RNA, 14 nt, Human
agacauagaauuaa

SEQ ID NO: 2759694 - RNA, 21 nt, Human
agacauagaauuaacacauga

SEQ ID NO: 2759695 - RNA, 20 nt, Human
ugaaaagcuccauuuuuagu

SEQ ID NO: 2759696 - RNA, 22 nt, Human
ugaaaaaguucugcagauaaac

SEQ ID NO: 2759697 - RNA, 22 nt, Human
ugaaacugagaugugaacacau

SEQ ID NO: 2759698 - RNA, 19 nt, Human
ugaaacucguuaauuugua

SEQ ID NO: 2759699 - RNA, 17 nt, Human
ugaaacuuguguaaaua

SEQ ID NO: 2759700 - RNA, 23 nt, Human
ugaaacuuguguaaauacaauuu

SEQ ID NO: 2759701 - RNA, 17 nt, Human
ugaaacggaugauuucu

SEQ ID NO: 2759702 - RNA, 18 nt, Human
ugaaacggaugauuucua

SEQ ID NO: 2759703 - RNA, 19 nt, Human
ugaaacggaugauuucuau

SEQ ID NO: 2759704 - RNA, 20 nt, Human
ugaaacggaugauuucuaug

SEQ ID NO: 2759705 - RNA, 15 nt, Human
ugaaacggaugauuu

SEQ ID NO: 2759706 - RNA, 12 nt, Human
ugauaugggucu

SEQ ID NO: 2759707 - RNA, 20 nt, Human
agcaugucgucaaagcugaa

SEQ ID NO: 2759708 - RNA, 17 nt, Human
agcaugucgucaaagcu

SEQ ID NO: 2759709 - RNA, 18 nt, Human
agcauuguaaaugugcuu

SEQ ID NO: 2759710 - RNA, 17 nt, Human
agcauuguaaaugugcu

SEQ ID NO: 2759711 - RNA, 22 nt, Human
ugaguaacugauuuguaacaag

SEQ ID NO: 2759712 - RNA, 23 nt, Human
agcauaaauguugacaugggaca

SEQ ID NO: 2759713 - RNA, 17 nt, Human
ugaugaagaaguugaua

SEQ ID NO: 2759714 - RNA, 22 nt, Human
ugauccagcagauuauucacug

SEQ ID NO: 2759715 - RNA, 21 nt, Human
ugauccagcagauuauucacu

SEQ ID NO: 2759716 - RNA, 20 nt, Human
ugauccagcagauuauucac

SEQ ID NO: 2759717 - RNA, 22 nt, Human
ugauccaguuuuguuuggacca

SEQ ID NO: 2759718 - RNA, 14 nt, Human
ugauuaccagggac

SEQ ID NO: 2759719 - RNA, 12 nt, Human
ugauuaaaccaa

SEQ ID NO: 2759720 - RNA, 17 nt, Human
ugaugaucuuuaaaaua

SEQ ID NO: 2759721 - RNA, 14 nt, Human
ugaugaucuuuaaa

SEQ ID NO: 2759722 - RNA, 14 nt, Human
agccagacuggcac

SEQ ID NO: 2759723 - RNA, 19 nt, Human
agccagacuggcacaguuu

SEQ ID NO: 2759724 - RNA, 13 nt, Human
agccauguuuauu

SEQ ID NO: 2759725 - RNA, 14 nt, Human
agccauguuuauua

SEQ ID NO: 2759726 - RNA, 16 nt, Human
agccauguuuauuaca

SEQ ID NO: 2759727 - RNA, 22 nt, Human
agccugaaagaggaaugaagua

SEQ ID NO: 2759728 - RNA, 15 nt, Human
agccucauguccacu

SEQ ID NO: 2759729 - RNA, 20 nt, Human
agccucauguccacugguuc

SEQ ID NO: 2759730 - RNA, 18 nt, Human
agcccauggcacucuaug

SEQ ID NO: 2759731 - RNA, 18 nt, Human
agccccgugggguuccuc

SEQ ID NO: 2759732 - RNA, 17 nt, Human
agcuacuugggaggcug

SEQ ID NO: 2759733 - RNA, 18 nt, Human
agcuacuugggaggcuga

SEQ ID NO: 2759734 - RNA, 14 nt, Human
agcuagacugguga

SEQ ID NO: 2759735 - RNA, 16 nt, Human
agcuagacuggugacu

SEQ ID NO: 2759736 - RNA, 17 nt, Human
agcuagacuggugacug

SEQ ID NO: 2759737 - RNA, 21 nt, Human
agcuagacuggugacugauuc

SEQ ID NO: 2759738 - RNA, 13 nt, Human
agcuagacuggug

SEQ ID NO: 2759739 - RNA, 20 nt, Human
agccuuggggcugaugcagu

SEQ ID NO: 2759740 - RNA, 13 nt, Human
uggagaagaacug

SEQ ID NO: 2759741 - RNA, 17 nt, Human
uggacuguggugacuuu

SEQ ID NO: 2759742 - RNA, 19 nt, Human
uggacuguggugacuuugg

SEQ ID NO: 2759743 - RNA, 21 nt, Human
uggacuguggugacuuuggau

SEQ ID NO: 2759744 - RNA, 22 nt, Human
uggacuguggugacuuuggaua

SEQ ID NO: 2759745 - RNA, 15 nt, Human
uggacuguggugacu

SEQ ID NO: 2759746 - RNA, 16 nt, Human
uggacuguggugacuu

SEQ ID NO: 2759747 - RNA, 13 nt, Human
uggaaaggcagcu

SEQ ID NO: 2759748 - RNA, 14 nt, Human
uggaaaucuuuaaa

SEQ ID NO: 2759749 - RNA, 15 nt, Human
uggaaaucuuuaaaa

SEQ ID NO: 2759750 - RNA, 19 nt, Human
uggcacaguuuucugagaa

SEQ ID NO: 2759751 - RNA, 18 nt, Human
uggcacaguuuucugaga

SEQ ID NO: 2759752 - RNA, 17 nt, Human
uggcauaacauaaaucu

SEQ ID NO: 2759753 - RNA, 21 nt, Human
uggcauaacauaaaucuguga

SEQ ID NO: 2759754 - RNA, 22 nt, Human
uggcauaacauaaaucugugaa

SEQ ID NO: 2759755 - RNA, 19 nt, Human
agcuguucacagccagacu

SEQ ID NO: 2759756 - RNA, 16 nt, Human
agcuguucacagccag

SEQ ID NO: 2759757 - RNA, 22 nt, Human
agcugcccucuccugggcagcu

SEQ ID NO: 2759758 - RNA, 15 nt, Human
agcugccuccccucc

SEQ ID NO: 2759759 - RNA, 16 nt, Human
agcugccuccccuccu

SEQ ID NO: 2759760 - RNA, 19 nt, Human
ugcuacaaaaacacagcaa

SEQ ID NO: 2759761 - RNA, 18 nt, Human
ugcuacaaaaacacagca

SEQ ID NO: 2759762 - RNA, 17 nt, Human
ugcuacaaaaacacagc

SEQ ID NO: 2759763 - RNA, 16 nt, Human
ugcuacaaaaacacag

SEQ ID NO: 2759764 - RNA, 15 nt, Human
ugcuacaaaaacaca

SEQ ID NO: 2759765 - RNA, 13 nt, Human
ugcuaaggacuug

SEQ ID NO: 2759766 - RNA, 18 nt, Human
ugcuaaggacuuguuaga

SEQ ID NO: 2759767 - RNA, 22 nt, Human
ugcuaaggacuuguuagaucua

SEQ ID NO: 2759768 - RNA, 20 nt, Human
ugcuacaaaaacacagcaag

SEQ ID NO: 2759769 - RNA, 17 nt, Human
agcuugaaacugagaug

SEQ ID NO: 2759770 - RNA, 12 nt, Human
ugcuaaggacuu

SEQ ID NO: 2759771 - RNA, 13 nt, Human
ugcuguauuuuaa

SEQ ID NO: 2759772 - RNA, 21 nt, Human
ugcuguauuuuaaaagaauga

SEQ ID NO: 2759773 - RNA, 22 nt, Human
ugcuguauuuuaaaagaaugau

SEQ ID NO: 2759774 - RNA, 23 nt, Human
aggaauggagccugcacggugaa

SEQ ID NO: 2759775 - RNA, 17 nt, Human
aggacacugauaugggu

SEQ ID NO: 2759776 - RNA, 23 nt, Human
aggaaaucaaauaugcaaagcac

SEQ ID NO: 2759777 - RNA, 12 nt, Human
aggaaauauuua

SEQ ID NO: 2759778 - RNA, 21 nt, Human
aggaagccugauuaaagaaug

SEQ ID NO: 2759779 - RNA, 17 nt, Human
aggaagccugauuaaag

SEQ ID NO: 2759780 - RNA, 18 nt, Human
aggaagccugauuaaaga

SEQ ID NO: 2759781 - RNA, 14 nt, Human
ugcucauggaauug

SEQ ID NO: 2759782 - RNA, 11 nt, Human
ugcucauggaa

SEQ ID NO: 2759783 - RNA, 19 nt, Human
aguagauaggccaugggca

SEQ ID NO: 2759784 - RNA, 15 nt, Human
aguaaaaccacagca

SEQ ID NO: 2759785 - RNA, 18 nt, Human
uguagaggagaaacugga

SEQ ID NO: 2759786 - RNA, 16 nt, Human
uguagaggagaaacug

SEQ ID NO: 2759787 - RNA, 17 nt, Human
uguacuuuuuggcauaa

SEQ ID NO: 2759788 - RNA, 15 nt, Human
uguacuuuuuggcau

SEQ ID NO: 2759789 - RNA, 16 nt, Human
uguacuuuuuggcaua

SEQ ID NO: 2759790 - RNA, 12 nt, Human
uguacuuuuugg

SEQ ID NO: 2759791 - RNA, 13 nt, Human
uguaauuauaucu

SEQ ID NO: 2759792 - RNA, 14 nt, Human
uguaauuauaucug

SEQ ID NO: 2759793 - RNA, 15 nt, Human
uguaauuauaucuga

SEQ ID NO: 2759794 - RNA, 16 nt, Human
uguaaaucccauuauu

SEQ ID NO: 2759795 - RNA, 18 nt, Human
uguaaaucccauuauuca

SEQ ID NO: 2759796 - RNA, 13 nt, Human
uguaaaucccauu

SEQ ID NO: 2759797 - RNA, 19 nt, Human
uguaaaucccauuauucaa

SEQ ID NO: 2759798 - RNA, 20 nt, Human
uguaaaucccauuauucaaa

SEQ ID NO: 2759799 - RNA, 22 nt, Human
uguaaaucccauuauucaaagu

SEQ ID NO: 2759800 - RNA, 21 nt, Human
ugucaauaaaauccauacauu

SEQ ID NO: 2759801 - RNA, 20 nt, Human
ugucaaucagccuaguugau

SEQ ID NO: 2759802 - RNA, 22 nt, Human
aguauuucuaugaaauauuaug

SEQ ID NO: 2759803 - RNA, 13 nt, Human
aguauuucuauga

SEQ ID NO: 2759804 - RNA, 15 nt, Human
aguauuucuaugaaa

SEQ ID NO: 2759805 - RNA, 23 nt, Human
ugucauuugcuggagcucugccc

SEQ ID NO: 2759806 - RNA, 16 nt, Human
agucaggaaagagaac

SEQ ID NO: 2759807 - RNA, 15 nt, Human
agucaggaaagagaa

SEQ ID NO: 2759808 - RNA, 17 nt, Human
agggcagggacaggaua

SEQ ID NO: 2759809 - RNA, 20 nt, Human
ugguaaggggaauugaggac

SEQ ID NO: 2759810 - RNA, 23 nt, Human
agguacuucaaauccuugaagau

SEQ ID NO: 2759811 - RNA, 21 nt, Human
agugccuguaaucacagcuac

SEQ ID NO: 2759812 - RNA, 16 nt, Human
uguggugacuuuggau

SEQ ID NO: 2759813 - RNA, 17 nt, Human
uguggugacuuuggaua

SEQ ID NO: 2759814 - RNA, 18 nt, Human
agugcaaauugucacagg

SEQ ID NO: 2759815 - RNA, 21 nt, Human
agugcaaauugucacaggaca

SEQ ID NO: 2759816 - RNA, 14 nt, Human
agugcaaauuguca

SEQ ID NO: 2759817 - RNA, 17 nt, Human
aguguuggagaagaacu

SEQ ID NO: 2759818 - RNA, 18 nt, Human
aguguuggagaagaacug

SEQ ID NO: 2759819 - RNA, 14 nt, Human
aguguuggagaaga

SEQ ID NO: 2759820 - RNA, 16 nt, Human
aguguuggagaagaac

SEQ ID NO: 2759821 - RNA, 21 nt, Human
aguguugaaacggaugauuuc

SEQ ID NO: 2759822 - RNA, 19 nt, Human
aguucggugagcuacaaau

SEQ ID NO: 2759823 - RNA, 22 nt, Human
aguucacucuccauuuaauaau

SEQ ID NO: 2759824 - RNA, 24 nt, Human
aguucacucuccauuuaauaauua

SEQ ID NO: 2759825 - RNA, 13 nt, Human
uguuuagucuugu

SEQ ID NO: 2759826 - RNA, 17 nt, Human
uguuuagucuugucuca

SEQ ID NO: 2759827 - RNA, 18 nt, Human
uguuuagucuugucucag

SEQ ID NO: 2759828 - RNA, 19 nt, Human
uguuuagucuugucucaga

SEQ ID NO: 2759829 - RNA, 18 nt, Human
uguuuauuacaguauaau

SEQ ID NO: 2759830 - RNA, 23 nt, Human
aguuuucugagaaagacuauuca

SEQ ID NO: 2759831 - RNA, 18 nt, Human
aguuuucugagaaagacu

SEQ ID NO: 2759832 - RNA, 19 nt, Human
aguuuucugagaaagacua

SEQ ID NO: 2759833 - RNA, 22 nt, Human
auaaaauaauuuuuauauuuga

SEQ ID NO: 2759834 - RNA, 12 nt, Human
auaaaauaauuu

SEQ ID NO: 2759835 - RNA, 13 nt, Human
uguuucaaacaua

SEQ ID NO: 2759836 - RNA, 15 nt, Human
aguugccuaaaucca

SEQ ID NO: 2759837 - RNA, 16 nt, Human
aguugccuaaauccau

SEQ ID NO: 2759838 - RNA, 11 nt, Human
aguugccuaaa

SEQ ID NO: 2759839 - RNA, 17 nt, Human
aguugccuaaauccauu

SEQ ID NO: 2759840 - RNA, 14 nt, Human
aguuuaaauuguaa

SEQ ID NO: 2759841 - RNA, 18 nt, Human
auaauccuaaacauauga

SEQ ID NO: 2759842 - RNA, 22 nt, Human
auaacgauaaaagacagugaaa

SEQ ID NO: 2759843 - RNA, 13 nt, Human
auaaauaaaaaua

SEQ ID NO: 2759844 - RNA, 14 nt, Human
auaaauaaaaauaa

SEQ ID NO: 2759845 - RNA, 21 nt, Human
auaaauagcuagacuggugac

SEQ ID NO: 2759846 - RNA, 22 nt, Human
auaaauagcuagacuggugacu

SEQ ID NO: 2759847 - RNA, 15 nt, Human
auaaauaguuuauga

SEQ ID NO: 2759848 - RNA, 13 nt, Human
uuugcucauggaa

SEQ ID NO: 2759849 - RNA, 15 nt, Human
auggcuauaggugcu

SEQ ID NO: 2759850 - RNA, 11 nt, Human
uuugcucaugg

SEQ ID NO: 2759851 - RNA, 12 nt, Human
uuugcucaugga

SEQ ID NO: 2759852 - RNA, 14 nt, Human
uuuuaaaagaauga

SEQ ID NO: 2759853 - RNA, 13 nt, Human
uuuuaaaaaagaa

SEQ ID NO: 2759854 - RNA, 15 nt, Human
uuugucuacaccauu

SEQ ID NO: 2759855 - RNA, 18 nt, Human
uuuguuucuguacuuuuu

SEQ ID NO: 2759856 - RNA, 12 nt, Human
uuuguuucugua

SEQ ID NO: 2759857 - RNA, 13 nt, Human
uuuguuucuguac

SEQ ID NO: 2759858 - RNA, 21 nt, Human
auguuucaaacauauauaaca

SEQ ID NO: 2759859 - RNA, 18 nt, Human
auguuucaaacauauaua

SEQ ID NO: 2759860 - RNA, 16 nt, Human
auuaaaagaauauuuu

SEQ ID NO: 2759861 - RNA, 15 nt, Human
auuaaaagaauauuu

SEQ ID NO: 2759862 - RNA, 12 nt, Human
auuaaagccaug

SEQ ID NO: 2759863 - RNA, 16 nt, Human
auuaaagccauguuua

SEQ ID NO: 2759864 - RNA, 17 nt, Human
auuaaagccauguuuau

SEQ ID NO: 2759865 - RNA, 21 nt, Human
auuaaagccauguuuauuaca

SEQ ID NO: 2759866 - RNA, 11 nt, Human
auuaaagccau

SEQ ID NO: 2759867 - RNA, 13 nt, Human
auuaacauguuaa

SEQ ID NO: 2759868 - RNA, 14 nt, Human
auuaacauguuaaa

SEQ ID NO: 2759869 - RNA, 15 nt, Human
auuaacauguuaaac

SEQ ID NO: 2759870 - RNA, 17 nt, Human
auuaacauguuaaacca

SEQ ID NO: 2759871 - RNA, 19 nt, Human
auuaacauguuaaaccaug

SEQ ID NO: 2759872 - RNA, 15 nt, Human
auguugacaugggac

SEQ ID NO: 2759873 - RNA, 19 nt, Human
auguucaucaaugaaugaa

SEQ ID NO: 2759874 - RNA, 19 nt, Human
uuuuauggcacuaguauuu

SEQ ID NO: 2759875 - RNA, 23 nt, Human
uuuuauggaggcuuugcauagau

SEQ ID NO: 2759876 - RNA, 12 nt, Human
uuuuauuaugua

SEQ ID NO: 2759877 - RNA, 14 nt, Human
uuuuauaauuuugu

SEQ ID NO: 2759878 - RNA, 13 nt, Human
uuuuauuauguaa

SEQ ID NO: 2759879 - RNA, 14 nt, Human
uuuuauuauguaaa

SEQ ID NO: 2759880 - RNA, 16 nt, Human
uuuucuauaauuuaaa

SEQ ID NO: 2759881 - RNA, 15 nt, Human
uuuucauuauuuuau

SEQ ID NO: 2759882 - RNA, 22 nt, Human
uuuucauucuccuaucaccugu

SEQ ID NO: 2759883 - RNA, 21 nt, Human
uuuucauuauuuuauuaugaa

SEQ ID NO: 2759884 - RNA, 15 nt, Human
auuauauuuacaaau

SEQ ID NO: 2759885 - RNA, 17 nt, Human
auuauauuuacaaaugg

SEQ ID NO: 2759886 - RNA, 23 nt, Human
auuaucucaaaacugcacuguca

SEQ ID NO: 2759887 - RNA, 18 nt, Human
auuaucucaaaacugcac

SEQ ID NO: 2759888 - RNA, 20 nt, Human
auuauuaccuuacagaaguu

SEQ ID NO: 2759889 - RNA, 15 nt, Human
auuauuuuauuauga

SEQ ID NO: 2759890 - RNA, 16 nt, Human
auuauauuuacaaaug

SEQ ID NO: 2759891 - RNA, 15 nt, Human
auuagagaguguuga

SEQ ID NO: 2759892 - RNA, 16 nt, Human
auuagagaguguugaa

SEQ ID NO: 2759893 - RNA, 17 nt, Human
auuagagaguguugaaa

SEQ ID NO: 2759894 - RNA, 18 nt, Human
auuagagaguguugaaac

SEQ ID NO: 2759895 - RNA, 19 nt, Human
auuagagaguguugaaacg

SEQ ID NO: 2759896 - RNA, 13 nt, Human
auuaaguaaugau

SEQ ID NO: 2759897 - RNA, 15 nt, Human
auuaaguaaugauaa

SEQ ID NO: 2759898 - RNA, 23 nt, Human
uuuuuuaaaaaagaaacauuugg

SEQ ID NO: 2759899 - RNA, 15 nt, Human
auuacauuuguauaa

SEQ ID NO: 2759900 - RNA, 20 nt, Human
auuacauuuguauaaaauaa

SEQ ID NO: 2759901 - RNA, 13 nt, Human
auuacauuuguau

SEQ ID NO: 2759902 - RNA, 15 nt, Human
auucaaacagucuca

SEQ ID NO: 2759903 - RNA, 14 nt, Human
auucaaacagucuc

SEQ ID NO: 2759904 - RNA, 21 nt, Human
auuauuuuauuaugaaacuug

SEQ ID NO: 2759905 - RNA, 22 nt, Human
auuauuuuauuaugaaacuugu

SEQ ID NO: 2759906 - RNA, 20 nt, Human
auuccacuuauaggaauuga

SEQ ID NO: 2759907 - RNA, 16 nt, Human
auuuacaaaugggaaa

SEQ ID NO: 2759908 - RNA, 19 nt, Human
auuuaaagcuuauuaaaac

SEQ ID NO: 2759909 - RNA, 13 nt, Human
auugugccccugc

SEQ ID NO: 2759910 - RNA, 14 nt, Human
auuguauuacaaau

SEQ ID NO: 2759911 - RNA, 23 nt, Human
auugugcgcuaaacuuuucugau

SEQ ID NO: 2759912 - RNA, 20 nt, Human
auugacacuuaaaaaugguu

SEQ ID NO: 2759913 - RNA, 21 nt, Human
auugacccacaagaaaugaaa

SEQ ID NO: 2759914 - RNA, 12 nt, Human
auuuuaauaaug

SEQ ID NO: 2759915 - RNA, 14 nt, Human
auuuuaauaauguu

SEQ ID NO: 2759916 - RNA, 15 nt, Human
auuuuaauaauguuu

SEQ ID NO: 2759917 - RNA, 16 nt, Human
auuuuaauaauguuuc

SEQ ID NO: 2759918 - RNA, 21 nt, Human
auuuguauaaaauaauuuuua

SEQ ID NO: 2759919 - RNA, 15 nt, Human
auuuguaucacaaau

SEQ ID NO: 2759920 - RNA, 13 nt, Human
auuuuauuaugaa

SEQ ID NO: 2759921 - RNA, 14 nt, Human
auuuuauuaugaaa

SEQ ID NO: 2759922 - RNA, 11 nt, Human
auuuuauuaug

SEQ ID NO: 2759923 - RNA, 12 nt, Human
auuuuauuauga

SEQ ID NO: 2759924 - RNA, 18 nt, Human
auuuuauuaugaaacuug

SEQ ID NO: 2759925 - RNA, 21 nt, Human
auuuuauuaugaaacuugugu

SEQ ID NO: 2759926 - RNA, 14 nt, Human
auuuuauuauguaa

SEQ ID NO: 2759927 - RNA, 13 nt, Human
auuuuauuaugua

SEQ ID NO: 2759928 - RNA, 22 nt, Human
auuuauuacuguaagaaaauau

SEQ ID NO: 2759929 - RNA, 23 nt, Human
auuugguaaggggaauugaggac

SEQ ID NO: 2759930 - RNA, 18 nt, Human
auuuguaguguuggagaa

SEQ ID NO: 2759931 - RNA, 17 nt, Human
auuuggaaaucuuuaaa

SEQ ID NO: 2759932 - RNA, 20 nt, Human
auuuggaaaucuuuaaaaaa

SEQ ID NO: 2759933 - RNA, 19 nt, Human
auauauaacaaugcuguau

SEQ ID NO: 2759934 - RNA, 17 nt, Human
auauaacaaugcuguau

SEQ ID NO: 2759935 - RNA, 20 nt, Human
auaguuguaccgcaauguga

SEQ ID NO: 2759936 - RNA, 13 nt, Human
auagucuggcugu

SEQ ID NO: 2759937 - RNA, 22 nt, Human
uucacaagacccaaaaggcaga

SEQ ID NO: 2759938 - RNA, 23 nt, Human
uucacaagacccaaaaggcagaa

SEQ ID NO: 2759939 - RNA, 22 nt, Human
auaggaauugacccacaagaaa

SEQ ID NO: 2759940 - RNA, 17 nt, Human
auaggcguaacuaauuu

SEQ ID NO: 2759941 - RNA, 14 nt, Human
uucaaacauauaua

SEQ ID NO: 2759942 - RNA, 18 nt, Human
uucaaacagucucaggaa

SEQ ID NO: 2759943 - RNA, 18 nt, Human
uucccaacuccagaaagu

SEQ ID NO: 2759944 - RNA, 12 nt, Human
uucccaaauuuc

SEQ ID NO: 2759945 - RNA, 20 nt, Human
aucaaauaugcaaagcacug

SEQ ID NO: 2759946 - RNA, 16 nt, Human
auauuuuuauauuuac

SEQ ID NO: 2759947 - RNA, 17 nt, Human
auauuuucauucuccua

SEQ ID NO: 2759948 - RNA, 13 nt, Human
auauuuucauucu

SEQ ID NO: 2759949 - RNA, 17 nt, Human
uucuaaguaaaaccaca

SEQ ID NO: 2759950 - RNA, 20 nt, Human
uucuaaguaaaaccacagca

SEQ ID NO: 2759951 - RNA, 19 nt, Human
uucuaaguaaaaccacagc

SEQ ID NO: 2759952 - RNA, 15 nt, Human
aucaauaaaaaauua

SEQ ID NO: 2759953 - RNA, 17 nt, Human
aucaauaaaaaauuaug

SEQ ID NO: 2759954 - RNA, 18 nt, Human
aucaauaaaaaauuauga

SEQ ID NO: 2759955 - RNA, 21 nt, Human
uucuaaguaaaaccacagcag

SEQ ID NO: 2759956 - RNA, 14 nt, Human
uucuauaauuuaaa

SEQ ID NO: 2759957 - RNA, 13 nt, Human
uucuauaauuuaa

SEQ ID NO: 2759958 - RNA, 14 nt, Human
auccauacauuugu

SEQ ID NO: 2759959 - RNA, 17 nt, Human
auccauuuggaaaucuu

SEQ ID NO: 2759960 - RNA, 19 nt, Human
auccauuuggaaaucuuua

SEQ ID NO: 2759961 - RNA, 13 nt, Human
auccauuuggaaa

SEQ ID NO: 2759962 - RNA, 20 nt, Human
auccaguuuuguuuggacca

SEQ ID NO: 2759963 - RNA, 21 nt, Human
auccaguuuuguuuggaccaa

SEQ ID NO: 2759964 - RNA, 18 nt, Human
auccaguuuuguuuggac

SEQ ID NO: 2759965 - RNA, 17 nt, Human
auccaguuuuguuugga

SEQ ID NO: 2759966 - RNA, 18 nt, Human
uucuguacuuuuuggcau

SEQ ID NO: 2759967 - RNA, 19 nt, Human
uucuguacuuuuuggcaua

SEQ ID NO: 2759968 - RNA, 13 nt, Human
uucuguacuuuuu

SEQ ID NO: 2759969 - RNA, 19 nt, Human
uugaaauauugacuuuuua

SEQ ID NO: 2759970 - RNA, 23 nt, Human
uugugugaaagguacuucaaauc

SEQ ID NO: 2759971 - RNA, 19 nt, Human
uuguguaaauacaauuuug

SEQ ID NO: 2759972 - RNA, 23 nt, Human
augagagacacacugaagaagca

SEQ ID NO: 2759973 - RNA, 20 nt, Human
augagagacacacugaagaa

SEQ ID NO: 2759974 - RNA, 21 nt, Human
augagagacacacugaagaag

SEQ ID NO: 2759975 - RNA, 22 nt, Human
augauuaugaauuacauuugua

SEQ ID NO: 2759976 - RNA, 12 nt, Human
augauucccagc

SEQ ID NO: 2759977 - RNA, 15 nt, Human
augcaaagcacugac

SEQ ID NO: 2759978 - RNA, 12 nt, Human
augauuucuaug

SEQ ID NO: 2759979 - RNA, 13 nt, Human
augauuucuaugc

SEQ ID NO: 2759980 - RNA, 16 nt, Human
augauuucuaugcuga

SEQ ID NO: 2759981 - RNA, 14 nt, Human
uuguuuucauuauc

SEQ ID NO: 2759982 - RNA, 15 nt, Human
augccacuaaauuga

SEQ ID NO: 2759983 - RNA, 17 nt, Human
augccacuaaauugaca

SEQ ID NO: 2759984 - RNA, 18 nt, Human
augcaguucugaagaaga

SEQ ID NO: 2759985 - RNA, 19 nt, Human
augcaguucugaagaagau

SEQ ID NO: 2759986 - RNA, 15 nt, Human
augcaguucugaaga

SEQ ID NO: 2759987 - RNA, 17 nt, Human
augcaguucugaagaag

SEQ ID NO: 2759988 - RNA, 14 nt, Human
uuuaauuuuggaau

SEQ ID NO: 2759989 - RNA, 15 nt, Human
uuuaauuuuggaauu

SEQ ID NO: 2759990 - RNA, 17 nt, Human
uuuaauuuuggaauuuu

SEQ ID NO: 2759991 - RNA, 20 nt, Human
auggcuaguaucaaaagaaa

SEQ ID NO: 2759992 - RNA, 22 nt, Human
augcugucuacacuaagagaga

SEQ ID NO: 2759993 - RNA, 23 nt, Human
auggaacgcguugaaauuguaau

SEQ ID NO: 2759994 - RNA, 16 nt, Human
augcuagaacucccuu

SEQ ID NO: 2759995 - RNA, 15 nt, Human
augcuagaacucccu

SEQ ID NO: 2759996 - RNA, 23 nt, Human
uuuauuacaguauaauuaacaug

SEQ ID NO: 2759997 - RNA, 13 nt, Human
uuuauauaagcuu

SEQ ID NO: 2759998 - RNA, 22 nt, Human
uuuauuacaguauaauuaacau

SEQ ID NO: 2759999 - RNA, 20 nt, Human
uuuagcuggaaaaguauguu

SEQ ID NO: 2760000 - RNA, 22 nt, Human
uuuagcuggaaaaguauguuag

SEQ ID NO: 2760001 - RNA, 14 nt, Human
uuuagucuugucuc

SEQ ID NO: 2760002 - RNA, 13 nt, Human
uugcccuguuaaa

SEQ ID NO: 2760003 - RNA, 14 nt, Human
uugccuaaauccau

SEQ ID NO: 2760004 - RNA, 15 nt, Human
uugccuaaauccauu

SEQ ID NO: 2760005 - RNA, 13 nt, Human
uugccuaaaucca

SEQ ID NO: 2760006 - RNA, 22 nt, Human
uugccuaaauccauuuggaaau

SEQ ID NO: 2760007 - RNA, 15 nt, Human
aucugaggaauucug

SEQ ID NO: 2760008 - RNA, 16 nt, Human
aucugaggaauucugu

SEQ ID NO: 2760009 - RNA, 17 nt, Human
aucugaggaauucugua

SEQ ID NO: 2760010 - RNA, 18 nt, Human
aucugaggaauucuguau

SEQ ID NO: 2760011 - RNA, 20 nt, Human
aucugaggaauucuguauag

SEQ ID NO: 2760012 - RNA, 21 nt, Human
aucugaggaauucuguauaga

SEQ ID NO: 2760013 - RNA, 14 nt, Human
aucugccuaaggac

SEQ ID NO: 2760014 - RNA, 15 nt, Human
aucugccuaaggacu

SEQ ID NO: 2760015 - RNA, 16 nt, Human
aucugccuaaggacuu

SEQ ID NO: 2760016 - RNA, 17 nt, Human
aucugccuaaggacuuc

SEQ ID NO: 2760017 - RNA, 13 nt, Human
aucugccuaagga

SEQ ID NO: 2760018 - RNA, 18 nt, Human
aucugccuaaggacuucu

SEQ ID NO: 2760019 - RNA, 19 nt, Human
aucugccuaaggacuucuu

SEQ ID NO: 2760020 - RNA, 20 nt, Human
aucugccuaaggacuucuuu

SEQ ID NO: 2760021 - RNA, 13 nt, Human
aucugugaacuug

SEQ ID NO: 2760022 - RNA, 17 nt, Human
aucugugaacuugaaau

SEQ ID NO: 2760023 - RNA, 18 nt, Human
aucugugaacuugaaauu

SEQ ID NO: 2760024 - RNA, 19 nt, Human
aucugugaacuugaaauuu

SEQ ID NO: 2760025 - RNA, 13 nt, Human
aucucaauauuuc

SEQ ID NO: 2760026 - RNA, 21 nt, Human
aucucauuuccaagcaaguau

SEQ ID NO: 2760027 - RNA, 23 nt, Human
aucucauuuccaagcaaguauua

SEQ ID NO: 2760028 - RNA, 14 nt, Human
aucucauuuccaag

SEQ ID NO: 2760029 - RNA, 19 nt, Human
uugauggugguauguuuuc

SEQ ID NO: 2760030 - RNA, 18 nt, Human
uugauggugguauguuuu

SEQ ID NO: 2760031 - RNA, 13 nt, Human
aucuuuuucuaac

SEQ ID NO: 2760032 - RNA, 15 nt, Human
augaaagcagggacu

SEQ ID NO: 2760033 - RNA, 19 nt, Human
uuggauaauaaggaaaagu

SEQ ID NO: 2760034 - RNA, 21 nt, Human
uuggauaauaaggaaaaguuu

SEQ ID NO: 2760035 - RNA, 15 nt, Human
uuggauaauaaggaa

SEQ ID NO: 2760036 - RNA, 18 nt, Human
augaaauauuauguuaaa

SEQ ID NO: 2760037 - RNA, 13 nt, Human
augaaauauuaug

SEQ ID NO: 2760038 - RNA, 17 nt, Human
augaaauauuauguuaa

SEQ ID NO: 2760039 - RNA, 18 nt, Human
augaagauguagaggaga

SEQ ID NO: 2760040 - RNA, 13 nt, Human
augaaugaauggc

SEQ ID NO: 2760041 - RNA, 13 nt, Human
uuggggauucuua

SEQ ID NO: 2760042 - RNA, 15 nt, Human
uuggggauucuuaaa

SEQ ID NO: 2760043 - RNA, 16 nt, Human
uuguauaaaauaauuu

SEQ ID NO: 2760044 - RNA, 15 nt, Human
uuguauaaaauaauu

SEQ ID NO: 2760045 - RNA, 15 nt, Human
uuguacaaaguauua

SEQ ID NO: 2760046 - RNA, 17 nt, Human
uuguacaaaguauuaag

SEQ ID NO: 2760047 - RNA, 20 nt, Human
uuguacaaaguauuaagcau

SEQ ID NO: 2760048 - RNA, 21 nt, Human
uuguacaaaguauuaagcaua

SEQ ID NO: 2760049 - RNA, 13 nt, Human
uuguacaaaguau

SEQ ID NO: 2760050 - RNA, 14 nt, Human
uuguacaaaguauu

SEQ ID NO: 2760051 - RNA, 16 nt, Human
uuguaucacaaaucuu

SEQ ID NO: 2760052 - RNA, 17 nt, Human
uuguauaaaauaauuuu

SEQ ID NO: 2760053 - RNA, 13 nt, Human
augagagacacac

SEQ ID NO: 2760054 - RNA, 14 nt, Human
augagagacacacu

SEQ ID NO: 2760055 - RNA, 17 nt, Human
augagagacacacugaa

SEQ ID NO: 2760056 - RNA, 19 nt, Human
augagagacacacugaaga

SEQ ID NO: 2760057 - RNA, 14 nt, Human
auaagccagacauc

SEQ ID NO: 2760058 - RNA, 21 nt, Human
auaagccagacaucaacagau

SEQ ID NO: 2760059 - RNA, 22 nt, Human
auaagccagacaucaacagaua

SEQ ID NO: 2760060 - RNA, 13 nt, Human
auaauguuucaaa

SEQ ID NO: 2760061 - RNA, 18 nt, Human
auaauguuucaaacauau

SEQ ID NO: 2760062 - RNA, 14 nt, Human
auaacaaugaaagu

SEQ ID NO: 2760063 - RNA, 15 nt, Human
auaacaaugcuguau

SEQ ID NO: 2760064 - RNA, 17 nt, Human
auaacaaugcuguauuu

SEQ ID NO: 2760065 - RNA, 19 nt, Human
auaacaaugcuguauuuua

SEQ ID NO: 2760066 - RNA, 20 nt, Human
auaacaaugcuguauuuuaa

SEQ ID NO: 2760067 - RNA, 21 nt, Human
auaacaaugcuguauuuuaaa

SEQ ID NO: 2760068 - RNA, 13 nt, Human
auauuauguuaaa

SEQ ID NO: 2760069 - RNA, 14 nt, Human
auauuauguuaaaa

SEQ ID NO: 2760070 - RNA, 23 nt, Human
auauuucagauaaucacaauaca

SEQ ID NO: 2760071 - RNA, 18 nt, Human
auauauuuuuauauuuac

SEQ ID NO: 2760072 - RNA, 19 nt, Human
auauauuuuuauauuuacu

SEQ ID NO: 2760073 - RNA, 20 nt, Human
auauauuuuuauauuuacua

SEQ ID NO: 2760074 - RNA, 15 nt, Human
auagcagcuuauuca

SEQ ID NO: 2760075 - RNA, 11 nt, Human
aguccaagcau

SEQ ID NO: 2760076 - RNA, 19 nt, Human
agugucaaugcagccccca

SEQ ID NO: 2760077 - RNA, 23 nt, Human
aguucagagcugcccucuccugg

SEQ ID NO: 2760078 - RNA, 21 nt, Human
aguucagagcugcccucuccu

SEQ ID NO: 2760079 - RNA, 22 nt, Human
aguucagagcugcccucuccug

SEQ ID NO: 2760080 - RNA, 20 nt, Human
aguucagagcugcccucucc

SEQ ID NO: 2760081 - RNA, 19 nt, Human
aguucagagcugcccucuc

SEQ ID NO: 2760082 - RNA, 18 nt, Human
aguugaaaagacuccaaa

SEQ ID NO: 2760083 - RNA, 14 nt, Human
aguugaaaagacuc

SEQ ID NO: 2760084 - RNA, 20 nt, Human
aguugaaaagacuccaaaga

SEQ ID NO: 2760085 - RNA, 19 nt, Human
aguugaaaagacuccaaag

SEQ ID NO: 2760086 - RNA, 13 nt, Human
augaaguacucau

SEQ ID NO: 2760087 - RNA, 21 nt, Human
augaaguacucauacauguua

SEQ ID NO: 2760088 - RNA, 20 nt, Human
augaaguccaagcauuuaga

SEQ ID NO: 2760089 - RNA, 23 nt, Human
augaaguccaagcauuuagaugu

SEQ ID NO: 2760090 - RNA, 19 nt, Human
auccucaguuuuugugaaa

SEQ ID NO: 2760091 - RNA, 14 nt, Human
aucccauuauucaa

SEQ ID NO: 2760092 - RNA, 15 nt, Human
aucccauuauucaaa

SEQ ID NO: 2760093 - RNA, 20 nt, Human
aucccauuauucaaaguugc

SEQ ID NO: 2760094 - RNA, 14 nt, Human
aucaaauaugcaaa

SEQ ID NO: 2760095 - RNA, 17 nt, Human
aucaugaauuaguuuua

SEQ ID NO: 2760096 - RNA, 13 nt, Human
aucagcuuauugu

SEQ ID NO: 2760097 - RNA, 22 nt, Human
aucagcuugcccuguuaaaaga

SEQ ID NO: 2760098 - RNA, 17 nt, Human
auguuccuagugaaaga

SEQ ID NO: 2760099 - RNA, 16 nt, Human
auguuccuagugaaag

SEQ ID NO: 2760100 - RNA, 15 nt, Human
auguuccuagugaaa

SEQ ID NO: 2760101 - RNA, 15 nt, Human
augugaacacaucag

SEQ ID NO: 2760102 - RNA, 16 nt, Human
augucaaucagccuag

SEQ ID NO: 2760103 - RNA, 21 nt, Human
augucaaucagccuaguugau

SEQ ID NO: 2760104 - RNA, 15 nt, Human
augguccgugcuaag

SEQ ID NO: 2760105 - RNA, 18 nt, Human
augguccgugcuaaggac

SEQ ID NO: 2760106 - RNA, 16 nt, Human
augaucuuuaaaauac

SEQ ID NO: 2760107 - RNA, 21 nt, Human
augaugaucuuuaaaauacac

SEQ ID NO: 2760108 - RNA, 18 nt, Human
augaugaucuuuaaaaua

SEQ ID NO: 2760109 - RNA, 19 nt, Human
auggcuuuguauagaaccu

SEQ ID NO: 2760110 - RNA, 18 nt, Human
auggcuuuguauagaacc

SEQ ID NO: 2760111 - RNA, 20 nt, Human
augcugaguuugugcuggug

SEQ ID NO: 2760112 - RNA, 17 nt, Human
agcgacagugagacucu

SEQ ID NO: 2760113 - RNA, 19 nt, Human
agcuccccucggagaagag

SEQ ID NO: 2760114 - RNA, 17 nt, Human
agcuccccucggagaag

SEQ ID NO: 2760115 - RNA, 20 nt, Human
agcuccccucggagaagagc

SEQ ID NO: 2760116 - RNA, 13 nt, Human
aggaaguagagga

SEQ ID NO: 2760117 - RNA, 15 nt, Human
agggauuagggagag

SEQ ID NO: 2760118 - RNA, 15 nt, Human
agggacugaggggag

SEQ ID NO: 2760119 - RNA, 21 nt, Human
aggccaugggcacugugggua

SEQ ID NO: 2760120 - RNA, 13 nt, Human
agaggaaugaagu

SEQ ID NO: 2760121 - RNA, 18 nt, Human
agacucugucucagucca

SEQ ID NO: 2760122 - RNA, 17 nt, Human
agacccaaaaggcagaa

SEQ ID NO: 2760123 - RNA, 19 nt, Human
agacccaaaaggcagaagc

SEQ ID NO: 2760124 - RNA, 17 nt, Human
agaaugagagacacacu

SEQ ID NO: 2760125 - RNA, 22 nt, Human
agaaugagagacacacugaaga

SEQ ID NO: 2760126 - RNA, 17 nt, Human
agaaugauuaugaauua

SEQ ID NO: 2760127 - RNA, 21 nt, Human
agaagugaaaaucuacacucc

SEQ ID NO: 2760128 - RNA, 21 nt, Human
agaagagcuguucacagccag

SEQ ID NO: 2760129 - RNA, 22 nt, Human
agaagagcuguucacagccaga

SEQ ID NO: 2760130 - RNA, 16 nt, Human
agauguagaggagaaa

SEQ ID NO: 2760131 - RNA, 19 nt, Human
agauguagaggagaaacug

SEQ ID NO: 2760132 - RNA, 19 nt, Human
agaucugccuaaggacuuc

SEQ ID NO: 2760133 - RNA, 24 nt, Human
agcaaaauuuuuucucuaggaaau

SEQ ID NO: 2760134 - RNA, 12 nt, Human
aaguagaggagg

SEQ ID NO: 2760135 - RNA, 17 nt, Human
aagggauggcaagaugu

SEQ ID NO: 2760136 - RNA, 14 nt, Human
aagggauggcaaga

SEQ ID NO: 2760137 - RNA, 19 nt, Human
aagccagauuuuccugaaa

SEQ ID NO: 2760138 - RNA, 23 nt, Human
aagacagugaaagaaaauaacaa

SEQ ID NO: 2760139 - RNA, 15 nt, Human
aagagaacuuccaga

SEQ ID NO: 2760140 - RNA, 15 nt, Human
aagcagggacuugaa

SEQ ID NO: 2760141 - RNA, 17 nt, Human
aaguucugcagauaaac

SEQ ID NO: 2760142 - RNA, 22 nt, Human
aaguugauaugccuuuucccaa

SEQ ID NO: 2760143 - RNA, 10 nt, Human
aauaaaccau

SEQ ID NO: 2760144 - RNA, 14 nt, Human
aauaauguuucaaa

SEQ ID NO: 2760145 - RNA, 19 nt, Human
aauaauguuucaaacauau

SEQ ID NO: 2760146 - RNA, 12 nt, Human
aauaauguuuca

SEQ ID NO: 2760147 - RNA, 16 nt, Human
aauauuaaagccaugu

SEQ ID NO: 2760148 - RNA, 18 nt, Human
aauauuaaagccauguuu

SEQ ID NO: 2760149 - RNA, 19 nt, Human
aauauuaaagccauguuua

SEQ ID NO: 2760150 - RNA, 20 nt, Human
aauauuaaagccauguuuau

SEQ ID NO: 2760151 - RNA, 14 nt, Human
aauauuaaagccau

SEQ ID NO: 2760152 - RNA, 15 nt, Human
aauauuaaagccaug

SEQ ID NO: 2760153 - RNA, 13 nt, Human
aauauuaaagcca

SEQ ID NO: 2760154 - RNA, 12 nt, Human
aauauuaaagcc

SEQ ID NO: 2760155 - RNA, 22 nt, Human
aaucaaauaugcaaagcacuga

SEQ ID NO: 2760156 - RNA, 16 nt, Human
aaucaaauaugcaaag

SEQ ID NO: 2760157 - RNA, 15 nt, Human
aaucaaauaugcaaa

SEQ ID NO: 2760158 - RNA, 22 nt, Human
aaucauuucugcaucagcugcu

SEQ ID NO: 2760159 - RNA, 14 nt, Human
aaugauaacuggaa

SEQ ID NO: 2760160 - RNA, 15 nt, Human
aaugauaacuggaaa

SEQ ID NO: 2760161 - RNA, 16 nt, Human
aaugauaacuggaaac

SEQ ID NO: 2760162 - RNA, 14 nt, Human
aauccauacauuug

SEQ ID NO: 2760163 - RNA, 17 nt, Human
aauccauacauuugugu

SEQ ID NO: 2760164 - RNA, 16 nt, Human
aauccauacauuugug

SEQ ID NO: 2760165 - RNA, 15 nt, Human
aauccaaugaaauga

SEQ ID NO: 2760166 - RNA, 20 nt, Human
aaugguccgugcuaaggacu

SEQ ID NO: 2760167 - RNA, 23 nt, Human
aacugagaugugaacacaucagc

SEQ ID NO: 2760168 - RNA, 13 nt, Human
aacgcguugaaau

SEQ ID NO: 2760169 - RNA, 14 nt, Human
aacgcguugaaauu

SEQ ID NO: 2760170 - RNA, 15 nt, Human
aacgcguugaaauug

SEQ ID NO: 2760171 - RNA, 17 nt, Human
aacgcguugaaauugua

SEQ ID NO: 2760172 - RNA, 11 nt, Human
aaccaguauug

SEQ ID NO: 2760173 - RNA, 13 nt, Human
aaccaguauugua

SEQ ID NO: 2760174 - RNA, 14 nt, Human
aaccaguauuguac

SEQ ID NO: 2760175 - RNA, 14 nt, Human
aaaucuuaacuuga

SEQ ID NO: 2760176 - RNA, 20 nt, Human
aaaucugugaacuugaaauu

SEQ ID NO: 2760177 - RNA, 19 nt, Human
aaaucugugaacuugaaau

SEQ ID NO: 2760178 - RNA, 21 nt, Human
aaaucugugaacuugaaauuu

SEQ ID NO: 2760179 - RNA, 17 nt, Human
aaauguucaucaaugaa

SEQ ID NO: 2760180 - RNA, 20 nt, Human
aaauguucaucaaugaauga

SEQ ID NO: 2760181 - RNA, 22 nt, Human
aaauugacacuuaaaaaugguu

SEQ ID NO: 2760182 - RNA, 18 nt, Human
aaauuggggauucuuaaa

SEQ ID NO: 2760183 - RNA, 19 nt, Human
aaauuggggauucuuaaag

SEQ ID NO: 2760184 - RNA, 20 nt, Human
aaauuggggauucuuaaagu

SEQ ID NO: 2760185 - RNA, 22 nt, Human
aaauuggggauucuuaaaguug

SEQ ID NO: 2760186 - RNA, 17 nt, Human
aaauuggggauucuuaa

SEQ ID NO: 2760187 - RNA, 23 nt, Human
aaauuggggauucuuaaaguuga

SEQ ID NO: 2760188 - RNA, 12 nt, Human
aacacaucagcu

SEQ ID NO: 2760189 - RNA, 19 nt, Human
aaaauccauacauuugugu

SEQ ID NO: 2760190 - RNA, 20 nt, Human
aaaaguuuaauauuaaagcc

SEQ ID NO: 2760191 - RNA, 21 nt, Human
aaaaguuuaauauuaaagcca

SEQ ID NO: 2760192 - RNA, 22 nt, Human
aaaaguuuaauauuaaagccau

SEQ ID NO: 2760193 - RNA, 23 nt, Human
aaaaguuuaauauuaaagccaug

SEQ ID NO: 2760194 - RNA, 13 nt, Human
aaagaaacauuug

SEQ ID NO: 2760195 - RNA, 21 nt, Human
aaacccugucucuacuaaaaa

SEQ ID NO: 2760196 - RNA, 20 nt, Human
aaagcauuguaaaugugcuu

SEQ ID NO: 2760197 - RNA, 19 nt, Human
aaagcauuguaaaugugcu

SEQ ID NO: 2760198 - RNA, 19 nt, Human
aaaggcagaagcaacccaa

SEQ ID NO: 2760199 - RNA, 16 nt, Human
acagaagcuccaggua

SEQ ID NO: 2760200 - RNA, 20 nt, Human
acaauuuuguuucuguacuu

SEQ ID NO: 2760201 - RNA, 18 nt, Human
acaauuuuguuucuguac

SEQ ID NO: 2760202 - RNA, 13 nt, Human
acaagaaaugaaa

SEQ ID NO: 2760203 - RNA, 15 nt, Human
acaagaaaugaaagc

SEQ ID NO: 2760204 - RNA, 16 nt, Human
acaagaaaugaaagca

SEQ ID NO: 2760205 - RNA, 21 nt, Human
acaaggaugaauuaaguuuuu

SEQ ID NO: 2760206 - RNA, 13 nt, Human
aauuuugugaagc

SEQ ID NO: 2760207 - RNA, 17 nt, Human
aauuuugugaagcaaaa

SEQ ID NO: 2760208 - RNA, 18 nt, Human
aauuuugugaagcaaaau

SEQ ID NO: 2760209 - RNA, 11 nt, Human
aauuuuggaau

SEQ ID NO: 2760210 - RNA, 12 nt, Human
aauuuuggaauu

SEQ ID NO: 2760211 - RNA, 16 nt, Human
aauuggggauucuuaa

SEQ ID NO: 2760212 - RNA, 15 nt, Human
aauuggggauucuua

SEQ ID NO: 2760213 - RNA, 21 nt, Human
aaugguccgugcuaaggacuu

SEQ ID NO: 2760214 - RNA, 17 nt, Human
aauuggggauucuuaaa

SEQ ID NO: 2760215 - RNA, 20 nt, Human
aauuggggauucuuaaaguu

SEQ ID NO: 2760216 - RNA, 17 nt, Human
aauuuauuggcuuuucu

SEQ ID NO: 2760217 - RNA, 19 nt, Human
aauuuauuggcuuuucuga

SEQ ID NO: 2760218 - RNA, 20 nt, Human
aauuuauuggcuuuucugau

SEQ ID NO: 2760219 - RNA, 21 nt, Human
aauuuauuggcuuuucugauc

SEQ ID NO: 2760220 - RNA, 23 nt, Human
aauuuauuggcuuuucugaucca

SEQ ID NO: 2760221 - RNA, 21 nt, Human
acagugauuaccagggacuga

SEQ ID NO: 2760222 - RNA, 20 nt, Human
acagugauuaccagggacug

SEQ ID NO: 2760223 - RNA, 20 nt, Human
acaucccuuaccugggaaag

SEQ ID NO: 2760224 - RNA, 19 nt, Human
accaaggcugauuaaacca

SEQ ID NO: 2760225 - RNA, 20 nt, Human
accaaggcugauuaaaccaa

SEQ ID NO: 2760226 - RNA, 19 nt, Human
acggacgaaccuugaaaac

SEQ ID NO: 2760227 - RNA, 19 nt, Human
acuaguauuucuaugaaau

SEQ ID NO: 2760228 - RNA, 18 nt, Human
acuaguauuucuaugaaa

SEQ ID NO: 2760229 - RNA, 17 nt, Human
accucugccucagaaaa

SEQ ID NO: 2760230 - RNA, 18 nt, Human
accucugccucagaaaac

SEQ ID NO: 2760231 - RNA, 19 nt, Human
accugucuugccuuuuuca

SEQ ID NO: 2760232 - RNA, 21 nt, Human
accugucuugccuuuuucauu

SEQ ID NO: 2760233 - RNA, 22 nt, Human
accugucuugccuuuuucauua

SEQ ID NO: 2760234 - RNA, 14 nt, Human
acucuuaagaagac

SEQ ID NO: 2760235 - RNA, 15 nt, Human
acucuuaagaagacu

SEQ ID NO: 2760236 - RNA, 20 nt, Human
acucuuaagaagacugcauu

SEQ ID NO: 2760237 - RNA, 15 nt, Human
acucugucucagucc

SEQ ID NO: 2760238 - RNA, 17 nt, Human
acucugucucaguccau

SEQ ID NO: 2760239 - RNA, 12 nt, Human
acugauucuuca

SEQ ID NO: 2760240 - RNA, 13 nt, Human
acugauucuucag

SEQ ID NO: 2760241 - RNA, 15 nt, Human
acugauucuucagca

SEQ ID NO: 2760242 - RNA, 22 nt, Human
acugauucuucagcaaaaauau

SEQ ID NO: 2760243 - RNA, 22 nt, Human
acuugggaggcugagaugggag

SEQ ID NO: 2760244 - RNA, 12 nt, Human
acuuuaugcuaa

SEQ ID NO: 2760245 - RNA, 17 nt, Human
acuuuaugcuaagugaa

SEQ ID NO: 2760246 - RNA, 13 nt, Human
acuuaaaaauggu

SEQ ID NO: 2760247 - RNA, 14 nt, Human
acuuaaaaaugguu

SEQ ID NO: 2760248 - RNA, 19 nt, Human
acuucaaauccuugaagau

SEQ ID NO: 2760249 - RNA, 20 nt, Human
acuucaaauccuugaagauu

SEQ ID NO: 2760250 - RNA, 17 nt, Human
acuucagcgguuuauau

SEQ ID NO: 2760251 - RNA, 18 nt, Human
acuucagcgguuuauaua

SEQ ID NO: 2760252 - RNA, 19 nt, Human
acuucagcgguuuauauaa

SEQ ID NO: 2760253 - RNA, 22 nt, Human
caauuuuucuuauuucauuucu

SEQ ID NO: 2760254 - RNA, 20 nt, Human
cacaagaaaugaaagcaggg

SEQ ID NO: 2760255 - RNA, 21 nt, Human
cacaagaaaugaaagcaggga

SEQ ID NO: 2760256 - RNA, 18 nt, Human
cacaagaaaugaaagcag

SEQ ID NO: 2760257 - RNA, 18 nt, Human
cacagccagacuggcaca

SEQ ID NO: 2760258 - RNA, 17 nt, Human
cacagccagacuggcac

SEQ ID NO: 2760259 - RNA, 19 nt, Human
cacagcaguugaaaagacu

SEQ ID NO: 2760260 - RNA, 21 nt, Human
cacagcaguugaaaagacucc

SEQ ID NO: 2760261 - RNA, 13 nt, Human
cacacugaagaag

SEQ ID NO: 2760262 - RNA, 23 nt, Human
caagggugaugggaaagcauugu

SEQ ID NO: 2760263 - RNA, 21 nt, Human
caagggugaugggaaagcauu

SEQ ID NO: 2760264 - RNA, 17 nt, Human
caauagucaaauugugu

SEQ ID NO: 2760265 - RNA, 19 nt, Human
caauagucaaauuguguga

SEQ ID NO: 2760266 - RNA, 18 nt, Human
caaggaaaaaauaacaau

SEQ ID NO: 2760267 - RNA, 20 nt, Human
caaggaaaaaauaacaauga

SEQ ID NO: 2760268 - RNA, 13 nt, Human
caaauaugcaaag

SEQ ID NO: 2760269 - RNA, 12 nt, Human
caaauaugcaaa

SEQ ID NO: 2760270 - RNA, 14 nt, Human
caaauguucaucaa

SEQ ID NO: 2760271 - RNA, 18 nt, Human
caaauguucaucaaugaa

SEQ ID NO: 2760272 - RNA, 23 nt, Human
caacagcuggugcccugcuuuca

SEQ ID NO: 2760273 - RNA, 15 nt, Human
caagaaaugaaagca

SEQ ID NO: 2760274 - RNA, 17 nt, Human
caagaaaugaaagcagg

SEQ ID NO: 2760275 - RNA, 19 nt, Human
caagaaaugaaagcaggga

SEQ ID NO: 2760276 - RNA, 17 nt, Human
caaacugacucuuaaga

SEQ ID NO: 2760277 - RNA, 21 nt, Human
caaacugacucuuaagaagac

SEQ ID NO: 2760278 - RNA, 16 nt, Human
caaacugacucuuaag

SEQ ID NO: 2760279 - RNA, 18 nt, Human
caaaacugcacugucaag

SEQ ID NO: 2760280 - RNA, 17 nt, Human
caaaacugcacugucaa

SEQ ID NO: 2760281 - RNA, 14 nt, Human
caaaacugcacugu

SEQ ID NO: 2760282 - RNA, 14 nt, Human
cagugucaaugcag

SEQ ID NO: 2760283 - RNA, 21 nt, Human
caguuaccucugccucagaaa

SEQ ID NO: 2760284 - RNA, 12 nt, Human
caguucugaaga

SEQ ID NO: 2760285 - RNA, 13 nt, Human
caguucugaagaa

SEQ ID NO: 2760286 - RNA, 14 nt, Human
caguucugaagaag

SEQ ID NO: 2760287 - RNA, 22 nt, Human
caguucugaagaagaugguacc

SEQ ID NO: 2760288 - RNA, 15 nt, Human
caguucugaagaaga

SEQ ID NO: 2760289 - RNA, 16 nt, Human
caguucugaagaagau

SEQ ID NO: 2760290 - RNA, 22 nt, Human
caguucggugagcuacaaaugc

SEQ ID NO: 2760291 - RNA, 17 nt, Human
cauaccaacacgagcag

SEQ ID NO: 2760292 - RNA, 21 nt, Human
cauaacauaaaucugugaacu

SEQ ID NO: 2760293 - RNA, 12 nt, Human
cauaacauaaau

SEQ ID NO: 2760294 - RNA, 19 nt, Human
cauaacauaaaucugugaa

SEQ ID NO: 2760295 - RNA, 14 nt, Human
cauaaaucugugaa

SEQ ID NO: 2760296 - RNA, 16 nt, Human
cauaaaucugugaacu

SEQ ID NO: 2760297 - RNA, 18 nt, Human
cauaaaucugugaacuug

SEQ ID NO: 2760298 - RNA, 22 nt, Human
cauaaaucugugaacuugaaau

SEQ ID NO: 2760299 - RNA, 23 nt, Human
cauaaaucugugaacuugaaauu

SEQ ID NO: 2760300 - RNA, 18 nt, Human
caguugaaaagacuccaa

SEQ ID NO: 2760301 - RNA, 14 nt, Human
caguugaaaagacu

SEQ ID NO: 2760302 - RNA, 23 nt, Human
caguugaaaagacuccaaagaaa

SEQ ID NO: 2760303 - RNA, 22 nt, Human
caguugaaaagacuccaaagaa

SEQ ID NO: 2760304 - RNA, 21 nt, Human
caguugaaaagacuccaaaga

SEQ ID NO: 2760305 - RNA, 20 nt, Human
caguuuucugagaaagacua

SEQ ID NO: 2760306 - RNA, 19 nt, Human
caguuuucugagaaagacu

SEQ ID NO: 2760307 - RNA, 21 nt, Human
caguuuuguuuggaccaaaaa

SEQ ID NO: 2760308 - RNA, 15 nt, Human
caguuuucugagaaa

SEQ ID NO: 2760309 - RNA, 14 nt, Human
caguuuucugagaa

SEQ ID NO: 2760310 - RNA, 22 nt, Human
caucuagugagcagucaggaaa

SEQ ID NO: 2760311 - RNA, 14 nt, Human
caucuagugagcag

SEQ ID NO: 2760312 - RNA, 14 nt, Human
caucccucccucca

SEQ ID NO: 2760313 - RNA, 12 nt, Human
caucccucccuc

SEQ ID NO: 2760314 - RNA, 13 nt, Human
caucccucccucc

SEQ ID NO: 2760315 - RNA, 18 nt, Human
caucaaugaaugaaugaa

SEQ ID NO: 2760316 - RNA, 22 nt, Human
caucaagucuuucacauuuaaa

SEQ ID NO: 2760317 - RNA, 20 nt, Human
cauauauaacaaugcuguau

SEQ ID NO: 2760318 - RNA, 22 nt, Human
cauauauuuuuauauuuacuaa

SEQ ID NO: 2760319 - RNA, 23 nt, Human
caugcugucuacacuaagagaga

SEQ ID NO: 2760320 - RNA, 19 nt, Human
cauggaacgcguugaaauu

SEQ ID NO: 2760321 - RNA, 20 nt, Human
cauggaacgcguugaaauug

SEQ ID NO: 2760322 - RNA, 23 nt, Human
cauggaacgcguugaaauuguaa

SEQ ID NO: 2760323 - RNA, 18 nt, Human
cauggaacgcguugaaau

SEQ ID NO: 2760324 - RNA, 17 nt, Human
caugggacagggaggac

SEQ ID NO: 2760325 - RNA, 13 nt, Human
cauguuuauuaca

SEQ ID NO: 2760326 - RNA, 18 nt, Human
cauguuuauuacaguaua

SEQ ID NO: 2760327 - RNA, 19 nt, Human
cauguuuauuacaguauaa

SEQ ID NO: 2760328 - RNA, 20 nt, Human
cauguuuauuacaguauaau

SEQ ID NO: 2760329 - RNA, 22 nt, Human
cauguuuauuacaguauaauua

SEQ ID NO: 2760330 - RNA, 12 nt, Human
cauguuuauuac

SEQ ID NO: 2760331 - RNA, 11 nt, Human
cauuauuuuau

SEQ ID NO: 2760332 - RNA, 21 nt, Human
ccaacacgagcaggcuacugu

SEQ ID NO: 2760333 - RNA, 14 nt, Human
ccaacacgagcagg

SEQ ID NO: 2760334 - RNA, 16 nt, Human
ccacaagaaaugaaag

SEQ ID NO: 2760335 - RNA, 22 nt, Human
ccacaagaaaugaaagcaggga

SEQ ID NO: 2760336 - RNA, 20 nt, Human
ccaauauucauagcagcuua

SEQ ID NO: 2760337 - RNA, 19 nt, Human
ccaaggcugauuaaaccaa

SEQ ID NO: 2760338 - RNA, 18 nt, Human
ccaaggcuagaaccaccu

SEQ ID NO: 2760339 - RNA, 19 nt, Human
cauuuaaagcuuauuaaaa

SEQ ID NO: 2760340 - RNA, 12 nt, Human
cauuuccaagca

SEQ ID NO: 2760341 - RNA, 23 nt, Human
cauuucugcaucagcugcugaaa

SEQ ID NO: 2760342 - RNA, 12 nt, Human
cauuauuuuauu

SEQ ID NO: 2760343 - RNA, 14 nt, Human
cauuauuuuauuau

SEQ ID NO: 2760344 - RNA, 16 nt, Human
cauuauuuuauuauga

SEQ ID NO: 2760345 - RNA, 17 nt, Human
ccaaagaaauguaaggg

SEQ ID NO: 2760346 - RNA, 16 nt, Human
cauuugcucauggaau

SEQ ID NO: 2760347 - RNA, 15 nt, Human
cauuugcucauggaa

SEQ ID NO: 2760348 - RNA, 14 nt, Human
cauuugcucaugga

SEQ ID NO: 2760349 - RNA, 23 nt, Human
ccauggcacucuauguucuaaga

SEQ ID NO: 2760350 - RNA, 16 nt, Human
ccauccugaggcucca

SEQ ID NO: 2760351 - RNA, 15 nt, Human
ccauccugaggcucc

SEQ ID NO: 2760352 - RNA, 13 nt, Human
ccuaaacauauga

SEQ ID NO: 2760353 - RNA, 19 nt, Human
ccuaaauccauuuggaaau

SEQ ID NO: 2760354 - RNA, 18 nt, Human
ccuaaauccauuuggaaa

SEQ ID NO: 2760355 - RNA, 20 nt, Human
ccuaaauccauuuggaaauc

SEQ ID NO: 2760356 - RNA, 21 nt, Human
ccuaaauccauuuggaaaucu

SEQ ID NO: 2760357 - RNA, 17 nt, Human
cccuucuuuccacagaa

SEQ ID NO: 2760358 - RNA, 12 nt, Human
ccuccccuccuc

SEQ ID NO: 2760359 - RNA, 13 nt, Human
ccuccccuccucu

SEQ ID NO: 2760360 - RNA, 12 nt, Human
ccuccauccuga

SEQ ID NO: 2760361 - RNA, 13 nt, Human
ccuccauccugag

SEQ ID NO: 2760362 - RNA, 20 nt, Human
cccucccuccaccucccugc

SEQ ID NO: 2760363 - RNA, 13 nt, Human
cccucccuccacc

SEQ ID NO: 2760364 - RNA, 12 nt, Human
cccucccuccac

SEQ ID NO: 2760365 - RNA, 14 nt, Human
ccccaggugccagu

SEQ ID NO: 2760366 - RNA, 14 nt, Human
cccugcaauaaaau

SEQ ID NO: 2760367 - RNA, 15 nt, Human
cccugcaauaaaaug

SEQ ID NO: 2760368 - RNA, 15 nt, Human
cuaguaucaaaagaa

SEQ ID NO: 2760369 - RNA, 17 nt, Human
cuaguaucaaaagaaag

SEQ ID NO: 2760370 - RNA, 23 nt, Human
cuaguaucaaaagaaagaaaauc

SEQ ID NO: 2760371 - RNA, 22 nt, Human
cuaguauuucuaugaaauauua

SEQ ID NO: 2760372 - RNA, 19 nt, Human
cuaguauuucuaugaaaua

SEQ ID NO: 2760373 - RNA, 20 nt, Human
cuaguauuucuaugaaauau

SEQ ID NO: 2760374 - RNA, 22 nt, Human
cuaggaaauauuuauuuuaaua

SEQ ID NO: 2760375 - RNA, 19 nt, Human
cuauauuguuugcuaagca

SEQ ID NO: 2760376 - RNA, 20 nt, Human
cuauauuuuuuguuaaauga

SEQ ID NO: 2760377 - RNA, 18 nt, Human
cuauauuguuugcuaagc

SEQ ID NO: 2760378 - RNA, 12 nt, Human
cuaguucacucu

SEQ ID NO: 2760379 - RNA, 13 nt, Human
cuaugaaauauua

SEQ ID NO: 2760380 - RNA, 22 nt, Human
cuauauuuuuuguuaaaugauu

SEQ ID NO: 2760381 - RNA, 13 nt, Human
cucacauuuauau

SEQ ID NO: 2760382 - RNA, 17 nt, Human
cucaccccuugccauaa

SEQ ID NO: 2760383 - RNA, 19 nt, Human
cuacuugggaggcugagau

SEQ ID NO: 2760384 - RNA, 15 nt, Human
cuacuugggaggcug

SEQ ID NO: 2760385 - RNA, 18 nt, Human
cuacuugggaggcugaga

SEQ ID NO: 2760386 - RNA, 15 nt, Human
cuaagcaaaauguga

SEQ ID NO: 2760387 - RNA, 18 nt, Human
cuaagcaaaaugugauau

SEQ ID NO: 2760388 - RNA, 14 nt, Human
cuaagcaaaaugug

SEQ ID NO: 2760389 - RNA, 16 nt, Human
cuaaggacuuguuaga

SEQ ID NO: 2760390 - RNA, 17 nt, Human
cuaaggacuuguuagau

SEQ ID NO: 2760391 - RNA, 11 nt, Human
cuaaggacuug

SEQ ID NO: 2760392 - RNA, 22 nt, Human
cuaaggacuucuuuaauuuugg

SEQ ID NO: 2760393 - RNA, 16 nt, Human
cuacacuccagugaga

SEQ ID NO: 2760394 - RNA, 17 nt, Human
cuacacuccagugagac

SEQ ID NO: 2760395 - RNA, 23 nt, Human
cuaaauugacacuuaaaaauggu

SEQ ID NO: 2760396 - RNA, 17 nt, Human
cuaaauccauuuggaaa

SEQ ID NO: 2760397 - RNA, 19 nt, Human
cuaaauccauuuggaaauc

SEQ ID NO: 2760398 - RNA, 20 nt, Human
cuaaauccauuuggaaaucu

SEQ ID NO: 2760399 - RNA, 16 nt, Human
cuaaauccauuuggaa

SEQ ID NO: 2760400 - RNA, 23 nt, Human
cguugaaauuguaauuauaucug

SEQ ID NO: 2760401 - RNA, 18 nt, Human
cguugaaauuguaauuau

SEQ ID NO: 2760402 - RNA, 12 nt, Human
cgugcuaaggac

SEQ ID NO: 2760403 - RNA, 13 nt, Human
cgugcuaaggacu

SEQ ID NO: 2760404 - RNA, 14 nt, Human
cgugcuaaggacuu

SEQ ID NO: 2760405 - RNA, 15 nt, Human
cgugcuaaggacuug

SEQ ID NO: 2760406 - RNA, 16 nt, Human
cgugcuaaggacuugu

SEQ ID NO: 2760407 - RNA, 18 nt, Human
cgcucucuggccuucggc

SEQ ID NO: 2760408 - RNA, 14 nt, Human
cgcucucuggccuu

SEQ ID NO: 2760409 - RNA, 15 nt, Human
cgcucucuggccuuc

SEQ ID NO: 2760410 - RNA, 12 nt, Human
cggccuccaucc

SEQ ID NO: 2760411 - RNA, 21 nt, Human
cggguuuuauuguuuaaaauc

SEQ ID NO: 2760412 - RNA, 22 nt, Human
cggucggguuuuauuguuuaaa

SEQ ID NO: 2760413 - RNA, 13 nt, Human
cggugaauggcuu

SEQ ID NO: 2760414 - RNA, 14 nt, Human
cggugaauggcuuu

SEQ ID NO: 2760415 - RNA, 15 nt, Human
cggugaauggcuuug

SEQ ID NO: 2760416 - RNA, 16 nt, Human
cggugaauggcuuugu

SEQ ID NO: 2760417 - RNA, 17 nt, Human
cggugagcuacaaaugc

SEQ ID NO: 2760418 - RNA, 18 nt, Human
cggugaauggcuuuguau

SEQ ID NO: 2760419 - RNA, 20 nt, Human
cggugaauggcuuuguauag

SEQ ID NO: 2760420 - RNA, 22 nt, Human
cggugaauggcuuuguauagaa

SEQ ID NO: 2760421 - RNA, 20 nt, Human
cucuccugggcagcugccuc

SEQ ID NO: 2760422 - RNA, 15 nt, Human
cucuccugggcagcu

SEQ ID NO: 2760423 - RNA, 16 nt, Human
cucuccugggcagcug

SEQ ID NO: 2760424 - RNA, 18 nt, Human
cucuccugggcagcugcc

SEQ ID NO: 2760425 - RNA, 19 nt, Human
cucuccugggcagcugccu

SEQ ID NO: 2760426 - RNA, 12 nt, Human
cucuccugggca

SEQ ID NO: 2760427 - RNA, 15 nt, Human
cucuaggaaauauuu

SEQ ID NO: 2760428 - RNA, 17 nt, Human
cucuaggaaauauuuau

SEQ ID NO: 2760429 - RNA, 15 nt, Human
cucccuccaccuccc

SEQ ID NO: 2760430 - RNA, 17 nt, Human
cucccuccaccucccug

SEQ ID NO: 2760431 - RNA, 14 nt, Human
cuccauccugaggc

SEQ ID NO: 2760432 - RNA, 16 nt, Human
cuccauccugaggcuc

SEQ ID NO: 2760433 - RNA, 18 nt, Human
cuccauccugaggcucca

SEQ ID NO: 2760434 - RNA, 16 nt, Human
cugagcgacagugaga

SEQ ID NO: 2760435 - RNA, 20 nt, Human
cugagcgacagugagacucu

SEQ ID NO: 2760436 - RNA, 23 nt, Human
cugagaaagacuauucaaacagu

SEQ ID NO: 2760437 - RNA, 22 nt, Human
cugagaaagacuauucaaacag

SEQ ID NO: 2760438 - RNA, 15 nt, Human
cugacuucuaaguaa

SEQ ID NO: 2760439 - RNA, 13 nt, Human
cugacuucuaagu

SEQ ID NO: 2760440 - RNA, 16 nt, Human
cugacuucuaaguaaa

SEQ ID NO: 2760441 - RNA, 17 nt, Human
cugacucuuaagaagac

SEQ ID NO: 2760442 - RNA, 19 nt, Human
cucuggccuucggccucca

SEQ ID NO: 2760443 - RNA, 12 nt, Human
cucuggccuucg

SEQ ID NO: 2760444 - RNA, 12 nt, Human
cucugcuugcca

SEQ ID NO: 2760445 - RNA, 14 nt, Human
cucugcuugccauc

SEQ ID NO: 2760446 - RNA, 17 nt, Human
cucugcuugccaucccu

SEQ ID NO: 2760447 - RNA, 20 nt, Human
cucugcuugccaucccuccc

SEQ ID NO: 2760448 - RNA, 22 nt, Human
cucuucuuuaaagggauggcaa

SEQ ID NO: 2760449 - RNA, 23 nt, Human
cugaagaagcaccaaucaugaau

SEQ ID NO: 2760450 - RNA, 14 nt, Human
cugaagaagauggu

SEQ ID NO: 2760451 - RNA, 12 nt, Human
cugcccucuccu

SEQ ID NO: 2760452 - RNA, 13 nt, Human
cugcccucuccug

SEQ ID NO: 2760453 - RNA, 14 nt, Human
cugcccucuccugg

SEQ ID NO: 2760454 - RNA, 15 nt, Human
cugcccucuccuggg

SEQ ID NO: 2760455 - RNA, 18 nt, Human
cugcuugccaucccuccc

SEQ ID NO: 2760456 - RNA, 19 nt, Human
cugcuugccaucccucccu

SEQ ID NO: 2760457 - RNA, 20 nt, Human
cugcuugccaucccucccuc

SEQ ID NO: 2760458 - RNA, 22 nt, Human
cugcuugccaucccucccucca

SEQ ID NO: 2760459 - RNA, 16 nt, Human
cugcuugccaucccuc

SEQ ID NO: 2760460 - RNA, 15 nt, Human
cugcuugccaucccu

SEQ ID NO: 2760461 - RNA, 12 nt, Human
cugcuuucagau

SEQ ID NO: 2760462 - RNA, 15 nt, Human
cugcuuucagauacu

SEQ ID NO: 2760463 - RNA, 12 nt, Human
cugcacugucaa

SEQ ID NO: 2760464 - RNA, 15 nt, Human
cugccagcaacgcag

SEQ ID NO: 2760465 - RNA, 16 nt, Human
cuggccuucggccucc

SEQ ID NO: 2760466 - RNA, 17 nt, Human
cuggccuucggccucca

SEQ ID NO: 2760467 - RNA, 18 nt, Human
cuggccuucggccuccau

SEQ ID NO: 2760468 - RNA, 21 nt, Human
cuggccuucggccuccauccu

SEQ ID NO: 2760469 - RNA, 15 nt, Human
cuggccuucggccuc

SEQ ID NO: 2760470 - RNA, 18 nt, Human
cugucucuacuaaaaaua

SEQ ID NO: 2760471 - RNA, 13 nt, Human
cuguauuuuaaaa

SEQ ID NO: 2760472 - RNA, 16 nt, Human
cuguauuuuaaaagaa

SEQ ID NO: 2760473 - RNA, 15 nt, Human
cuguaugauucccag

SEQ ID NO: 2760474 - RNA, 15 nt, Human
cuguauagauuagag

SEQ ID NO: 2760475 - RNA, 20 nt, Human
cuguauagauuagaauucug

SEQ ID NO: 2760476 - RNA, 16 nt, Human
cuguauagauuagaga

SEQ ID NO: 2760477 - RNA, 16 nt, Human
gaacucccuuucaaca

SEQ ID NO: 2760478 - RNA, 15 nt, Human
gaacucccuuucaac

SEQ ID NO: 2760479 - RNA, 14 nt, Human
gaaccacaagacug

SEQ ID NO: 2760480 - RNA, 15 nt, Human
gaaccacaagacugc

SEQ ID NO: 2760481 - RNA, 12 nt, Human
gaacuugaaauu

SEQ ID NO: 2760482 - RNA, 13 nt, Human
gaacuugaaauuu

SEQ ID NO: 2760483 - RNA, 15 nt, Human
gaacuugaaauuuga

SEQ ID NO: 2760484 - RNA, 22 nt, Human
gaacuugaaauuugaauuuugu

SEQ ID NO: 2760485 - RNA, 22 nt, Human
gaacuuguaaaggaauuuaaaa

SEQ ID NO: 2760486 - RNA, 20 nt, Human
gaagagcuguucacagccag

SEQ ID NO: 2760487 - RNA, 15 nt, Human
gaagagcuguucaca

SEQ ID NO: 2760488 - RNA, 13 nt, Human
gaagagcuguuca

SEQ ID NO: 2760489 - RNA, 23 nt, Human
gaagagcuguucacagccagacu

SEQ ID NO: 2760490 - RNA, 23 nt, Human
gaaguccaagcauuuagauguau

SEQ ID NO: 2760491 - RNA, 22 nt, Human
gaagucagaucugccuaaggac

SEQ ID NO: 2760492 - RNA, 23 nt, Human
gaagucagaucugccuaaggacu

SEQ ID NO: 2760493 - RNA, 14 nt, Human
gaagucagaucugc

SEQ ID NO: 2760494 - RNA, 15 nt, Human
gaaauauuuauuuua

SEQ ID NO: 2760495 - RNA, 16 nt, Human
gaaauauuuauuuuaa

SEQ ID NO: 2760496 - RNA, 13 nt, Human
gaaauauuuauuu

SEQ ID NO: 2760497 - RNA, 22 nt, Human
gaaauguaagggaaacugccag

SEQ ID NO: 2760498 - RNA, 24 nt, Human
gaacaguuaccucugccucagaaa

SEQ ID NO: 2760499 - RNA, 16 nt, Human
gaaauuugaauuuugu

SEQ ID NO: 2760500 - RNA, 24 nt, Human
gaaauuugaauuuuguguuagaga

SEQ ID NO: 2760501 - RNA, 13 nt, Human
gaaauuugaauuu

SEQ ID NO: 2760502 - RNA, 19 nt, Human
gaaagacuauucaaacagu

SEQ ID NO: 2760503 - RNA, 23 nt, Human
gaaagacuauucaaacagucuca

SEQ ID NO: 2760504 - RNA, 22 nt, Human
gaaagacuauucaaacagucuc

SEQ ID NO: 2760505 - RNA, 13 nt, Human
gaaagcagaacag

SEQ ID NO: 2760506 - RNA, 14 nt, Human
gaaagcagaacagu

SEQ ID NO: 2760507 - RNA, 15 nt, Human
gaaacugccagcaac

SEQ ID NO: 2760508 - RNA, 13 nt, Human
gaaacugccagca

SEQ ID NO: 2760509 - RNA, 16 nt, Human
gaaacggaugauuucu

SEQ ID NO: 2760510 - RNA, 21 nt, Human
gaaagcuugcccuggugccuc

SEQ ID NO: 2760511 - RNA, 17 nt, Human
cuugccaaauauaaaua

SEQ ID NO: 2760512 - RNA, 18 nt, Human
cuuguaaaggaauuuaaa

SEQ ID NO: 2760513 - RNA, 21 nt, Human
cuugcaugguuuagaaagcuu

SEQ ID NO: 2760514 - RNA, 23 nt, Human
cuugcaucaauuuuucuuauuuc

SEQ ID NO: 2760515 - RNA, 19 nt, Human
cuugaacccgggaggcaga

SEQ ID NO: 2760516 - RNA, 20 nt, Human
cuugaacccgggaggcagag

SEQ ID NO: 2760517 - RNA, 14 nt, Human
cuugaacccgggag

SEQ ID NO: 2760518 - RNA, 19 nt, Human
cuugaaauuugaauuuugu

SEQ ID NO: 2760519 - RNA, 20 nt, Human
cuugaaauuugaauuuugug

SEQ ID NO: 2760520 - RNA, 19 nt, Human
cuucuuuccacagaagcuc

SEQ ID NO: 2760521 - RNA, 13 nt, Human
cuucuuuccacag

SEQ ID NO: 2760522 - RNA, 21 nt, Human
cuuuuucauuauuuuauuaug

SEQ ID NO: 2760523 - RNA, 23 nt, Human
gaccugauuucugagcauuuaau

SEQ ID NO: 2760524 - RNA, 22 nt, Human
gacccacaagaaaugaaagcag

SEQ ID NO: 2760525 - RNA, 18 nt, Human
gacuccaaagaaauguaa

SEQ ID NO: 2760526 - RNA, 17 nt, Human
gacaugggacauuugcu

SEQ ID NO: 2760527 - RNA, 22 nt, Human
gacaugggacauuugcucaugg

SEQ ID NO: 2760528 - RNA, 13 nt, Human
gaccaaaaaccag

SEQ ID NO: 2760529 - RNA, 19 nt, Human
gaccaaaaaccaguauugu

SEQ ID NO: 2760530 - RNA, 20 nt, Human
gaccaaaaaccaguauugua

SEQ ID NO: 2760531 - RNA, 16 nt, Human
gacauagucuggcugu

SEQ ID NO: 2760532 - RNA, 18 nt, Human
gagcugcccucuccuggg

SEQ ID NO: 2760533 - RNA, 19 nt, Human
gagcugcccucuccugggc

SEQ ID NO: 2760534 - RNA, 21 nt, Human
gagcugcccucuccugggcag

SEQ ID NO: 2760535 - RNA, 23 nt, Human
gagcugcccucuccugggcagcu

SEQ ID NO: 2760536 - RNA, 18 nt, Human
gaggaagccugauuaaag

SEQ ID NO: 2760537 - RNA, 19 nt, Human
gaggaagccugauuaaaga

SEQ ID NO: 2760538 - RNA, 16 nt, Human
gagcucgugggacagu

SEQ ID NO: 2760539 - RNA, 17 nt, Human
gagcugcccucuccugg

SEQ ID NO: 2760540 - RNA, 19 nt, Human
gagagacacacugaagaag

SEQ ID NO: 2760541 - RNA, 15 nt, Human
gagagugaacaaauu

SEQ ID NO: 2760542 - RNA, 19 nt, Human
gagagugaacaaauuuaca

SEQ ID NO: 2760543 - RNA, 17 nt, Human
gagauacagaauuuuau

SEQ ID NO: 2760544 - RNA, 15 nt, Human
gagacagcucugcau

SEQ ID NO: 2760545 - RNA, 18 nt, Human
gagacagcucugcauacu

SEQ ID NO: 2760546 - RNA, 13 nt, Human
gagacagcucugc

SEQ ID NO: 2760547 - RNA, 18 nt, Human
gagacacacugaagaagc

SEQ ID NO: 2760548 - RNA, 13 nt, Human
gagaagagcuguu

SEQ ID NO: 2760549 - RNA, 22 nt, Human
gagaagagcuguucacagccag

SEQ ID NO: 2760550 - RNA, 15 nt, Human
gagaagagcuguuca

SEQ ID NO: 2760551 - RNA, 13 nt, Human
gagaagaacugaa

SEQ ID NO: 2760552 - RNA, 14 nt, Human
gagaagaacugaaa

SEQ ID NO: 2760553 - RNA, 16 nt, Human
gagaagaacugaaauc

SEQ ID NO: 2760554 - RNA, 18 nt, Human
gagaaagacuauucaaac

SEQ ID NO: 2760555 - RNA, 17 nt, Human
gagaaagacuauucaaa

SEQ ID NO: 2760556 - RNA, 15 nt, Human
gagaaagacuauuca

SEQ ID NO: 2760557 - RNA, 13 nt, Human
gagaaagacuauu

SEQ ID NO: 2760558 - RNA, 12 nt, Human
gacuuguuagau

SEQ ID NO: 2760559 - RNA, 13 nt, Human
gauccuggaaauc

SEQ ID NO: 2760560 - RNA, 14 nt, Human
gaugaaaauauuug

SEQ ID NO: 2760561 - RNA, 21 nt, Human
gauggcuaguaucaaaagaaa

SEQ ID NO: 2760562 - RNA, 23 nt, Human
gauagauaggucagugcaaauac

SEQ ID NO: 2760563 - RNA, 17 nt, Human
gauaggucagugcaaau

SEQ ID NO: 2760564 - RNA, 22 nt, Human
gauaaauaguuuaugauuccac

SEQ ID NO: 2760565 - RNA, 14 nt, Human
gcaagggugauggg

SEQ ID NO: 2760566 - RNA, 10 nt, Human
gcaagccaga

SEQ ID NO: 2760567 - RNA, 23 nt, Human
gcaaagcacugacuucuaaguaa

SEQ ID NO: 2760568 - RNA, 15 nt, Human
gauuuuccugaaaac

SEQ ID NO: 2760569 - RNA, 13 nt, Human
gauuuuauuaugu

SEQ ID NO: 2760570 - RNA, 15 nt, Human
gauuuuauuauguaa

SEQ ID NO: 2760571 - RNA, 18 nt, Human
gauuuuauuauguaaauc

SEQ ID NO: 2760572 - RNA, 19 nt, Human
gauuuuauuauguaaaucc

SEQ ID NO: 2760573 - RNA, 20 nt, Human
gauuuuauuauguaaauccc

SEQ ID NO: 2760574 - RNA, 23 nt, Human
gauuuuauuauguaaaucccauu

SEQ ID NO: 2760575 - RNA, 16 nt, Human
gcaguucagagcugcc

SEQ ID NO: 2760576 - RNA, 15 nt, Human
gcaguucugaagaag

SEQ ID NO: 2760577 - RNA, 17 nt, Human
gcaguucagagcugccc

SEQ ID NO: 2760578 - RNA, 18 nt, Human
gcaguucagagcugcccu

SEQ ID NO: 2760579 - RNA, 14 nt, Human
gcaguucugaagaa

SEQ ID NO: 2760580 - RNA, 17 nt, Human
gcaguucugaagaagau

SEQ ID NO: 2760581 - RNA, 13 nt, Human
gcauagaaguaaa

SEQ ID NO: 2760582 - RNA, 17 nt, Human
gcauagguuuaauaauu

SEQ ID NO: 2760583 - RNA, 20 nt, Human
gcauauauuuuuauauuuac

SEQ ID NO: 2760584 - RNA, 13 nt, Human
gcauuauauuuau

SEQ ID NO: 2760585 - RNA, 12 nt, Human
gcaucagcugcu

SEQ ID NO: 2760586 - RNA, 20 nt, Human
gcagccccgugggguuccuc

SEQ ID NO: 2760587 - RNA, 18 nt, Human
gcagauaaacaguaguga

SEQ ID NO: 2760588 - RNA, 18 nt, Human
gcagauuauucacugauu

SEQ ID NO: 2760589 - RNA, 16 nt, Human
gcagauuauucacuga

SEQ ID NO: 2760590 - RNA, 18 nt, Human
gcacggugaauggcuuug

SEQ ID NO: 2760591 - RNA, 12 nt, Human
gcgacagugaga

SEQ ID NO: 2760592 - RNA, 19 nt, Human
gcuagaacucccuuucaac

SEQ ID NO: 2760593 - RNA, 13 nt, Human
gcuauaggugcua

SEQ ID NO: 2760594 - RNA, 15 nt, Human
gcuaaacuuuucuga

SEQ ID NO: 2760595 - RNA, 17 nt, Human
gcuaaacuuuucugaua

SEQ ID NO: 2760596 - RNA, 13 nt, Human
gcuaaacuuuucu

SEQ ID NO: 2760597 - RNA, 23 nt, Human
gccuuuuucauuauuuuauuaug

SEQ ID NO: 2760598 - RNA, 12 nt, Human
gccuaaauccau

SEQ ID NO: 2760599 - RNA, 13 nt, Human
gccuaaauccauu

SEQ ID NO: 2760600 - RNA, 19 nt, Human
gccuaaauccauuuggaaa

SEQ ID NO: 2760601 - RNA, 21 nt, Human
gccuaaauccauuuggaaauc

SEQ ID NO: 2760602 - RNA, 22 nt, Human
gccuaaauccauuuggaaaucu

SEQ ID NO: 2760603 - RNA, 23 nt, Human
gccuaaauccauuuggaaaucuu

SEQ ID NO: 2760604 - RNA, 20 nt, Human
gccgggcgugguggugagug

SEQ ID NO: 2760605 - RNA, 14 nt, Human
gcccugcuuucaga

SEQ ID NO: 2760606 - RNA, 16 nt, Human
gcccugcuuucagaua

SEQ ID NO: 2760607 - RNA, 17 nt, Human
gccuccccuccucugcu

SEQ ID NO: 2760608 - RNA, 19 nt, Human
gccuccccuccucugcuug

SEQ ID NO: 2760609 - RNA, 16 nt, Human
gccuccccuccucugc

SEQ ID NO: 2760610 - RNA, 23 nt, Human
gccuccccuccucugcuugccau

SEQ ID NO: 2760611 - RNA, 20 nt, Human
gccuccccuccucugcuugc

SEQ ID NO: 2760612 - RNA, 22 nt, Human
gccuccccuccucugcuugcca

SEQ ID NO: 2760613 - RNA, 19 nt, Human
gccaugggcacugugggua

SEQ ID NO: 2760614 - RNA, 18 nt, Human
gccaucccucccuccacc

SEQ ID NO: 2760615 - RNA, 23 nt, Human
gccaucccucccuccaccucccu

SEQ ID NO: 2760616 - RNA, 20 nt, Human
uuuuaauaauguuucaaaca

SEQ ID NO: 2760617 - RNA, 21 nt, Human
uuuuaaaagaaugauuaugaa

SEQ ID NO: 2760618 - RNA, 15 nt, Human
uuuuaaaagaaugau

SEQ ID NO: 2760619 - RNA, 13 nt, Human
uuuguauaaaaua

SEQ ID NO: 2760620 - RNA, 14 nt, Human
uuuguauaaaauaa

SEQ ID NO: 2760621 - RNA, 16 nt, Human
uuuguauaaaauaauu

SEQ ID NO: 2760622 - RNA, 16 nt, Human
uuuggauaauaaggaa

SEQ ID NO: 2760623 - RNA, 22 nt, Human
uuuggaauuuuccuccuuucuc

SEQ ID NO: 2760624 - RNA, 13 nt, Human
uuucugagaaaga

SEQ ID NO: 2760625 - RNA, 22 nt, Human
uuuccucaaaacuucagacaua

SEQ ID NO: 2760626 - RNA, 18 nt, Human
uuugaaucaucaagucuu

SEQ ID NO: 2760627 - RNA, 17 nt, Human
uuucuuauuucauuucu

SEQ ID NO: 2760628 - RNA, 19 nt, Human
uuuuucucuaggaaauauu

SEQ ID NO: 2760629 - RNA, 14 nt, Human
uuuuccugaaaacc

SEQ ID NO: 2760630 - RNA, 13 nt, Human
uuuuccugaaaac

SEQ ID NO: 2760631 - RNA, 18 nt, Human
uuuuggucuggagggaag

SEQ ID NO: 2760632 - RNA, 21 nt, Human
uuuuggcauaacauaaaucug

SEQ ID NO: 2760633 - RNA, 18 nt, Human
uuuuuaaaaaagaaacau

SEQ ID NO: 2760634 - RNA, 22 nt, Human
gucagcuccccucggagaagag

SEQ ID NO: 2760635 - RNA, 21 nt, Human
gucagcuccccucggagaaga

SEQ ID NO: 2760636 - RNA, 23 nt, Human
gucagcuccccucggagaagagc

SEQ ID NO: 2760637 - RNA, 23 nt, Human
gucaauaaaauccauacauuugu

SEQ ID NO: 2760638 - RNA, 22 nt, Human
gucaauaaaauccauacauuug

SEQ ID NO: 2760639 - RNA, 15 nt, Human
gucaaugcagccccc

SEQ ID NO: 2760640 - RNA, 18 nt, Human
guauuuuaaaagaaugau

SEQ ID NO: 2760641 - RNA, 13 nt, Human
guauuuuaaucac

SEQ ID NO: 2760642 - RNA, 20 nt, Human
guauuuuaaaagaaugauua

SEQ ID NO: 2760643 - RNA, 16 nt, Human
guauuaagcauauauu

SEQ ID NO: 2760644 - RNA, 17 nt, Human
guauuaagcauauauuu

SEQ ID NO: 2760645 - RNA, 15 nt, Human
guauuaagcauauau

SEQ ID NO: 2760646 - RNA, 18 nt, Human
guauuaagcauauauuuu

SEQ ID NO: 2760647 - RNA, 21 nt, Human
guauuaagcauauauuuuuau

SEQ ID NO: 2760648 - RNA, 19 nt, Human
gucagcuccccucggagaa

SEQ ID NO: 2760649 - RNA, 19 nt, Human
gucagaucugccuaaggac

SEQ ID NO: 2760650 - RNA, 20 nt, Human
gucagaucugccuaaggacu

SEQ ID NO: 2760651 - RNA, 21 nt, Human
gucagaucugccuaaggacuu

SEQ ID NO: 2760652 - RNA, 16 nt, Human
gucagaucugccuaag

SEQ ID NO: 2760653 - RNA, 18 nt, Human
gucagaucugccuaagga

SEQ ID NO: 2760654 - RNA, 14 nt, Human
guaguguuggagaa

SEQ ID NO: 2760655 - RNA, 15 nt, Human
guaguguuggagaag

SEQ ID NO: 2760656 - RNA, 13 nt, Human
guauaauuaacau

SEQ ID NO: 2760657 - RNA, 14 nt, Human
guauaauuaacaug

SEQ ID NO: 2760658 - RNA, 10 nt, Human
guauaauuaa

SEQ ID NO: 2760659 - RNA, 15 nt, Human
guauaauuaacaugu

SEQ ID NO: 2760660 - RNA, 17 nt, Human
guauaauuaacauguua

SEQ ID NO: 2760661 - RNA, 19 nt, Human
guauaauuaacauguuaaa

SEQ ID NO: 2760662 - RNA, 22 nt, Human
guauaauuaacauguuaaacca

SEQ ID NO: 2760663 - RNA, 23 nt, Human
guauaauuaacauguuaaaccau

SEQ ID NO: 2760664 - RNA, 18 nt, Human
gcuauaggugcuacaaaa

SEQ ID NO: 2760665 - RNA, 17 nt, Human
guauguuagugcaaauu

SEQ ID NO: 2760666 - RNA, 21 nt, Human
guaugugugaagugagugagu

SEQ ID NO: 2760667 - RNA, 19 nt, Human
guauagaaccucuuugucu

SEQ ID NO: 2760668 - RNA, 14 nt, Human
guauagauuagaau

SEQ ID NO: 2760669 - RNA, 15 nt, Human
gucugugagaugcua

SEQ ID NO: 2760670 - RNA, 16 nt, Human
gucugugagaugcuag

SEQ ID NO: 2760671 - RNA, 17 nt, Human
gucugugagaugcuaga

SEQ ID NO: 2760672 - RNA, 21 nt, Human
gucugugagaugcuagaacuc

SEQ ID NO: 2760673 - RNA, 22 nt, Human
gucugugagaugcuagaacucc

SEQ ID NO: 2760674 - RNA, 23 nt, Human
gucugugagaugcuagaacuccc

SEQ ID NO: 2760675 - RNA, 15 nt, Human
gucuugccuuuuuca

SEQ ID NO: 2760676 - RNA, 16 nt, Human
gucuugccuuuuucau

SEQ ID NO: 2760677 - RNA, 17 nt, Human
gucuugccuuuuucauu

SEQ ID NO: 2760678 - RNA, 18 nt, Human
gucuugccuuuuucauua

SEQ ID NO: 2760679 - RNA, 20 nt, Human
gucuugccuuuuucauuauu

SEQ ID NO: 2760680 - RNA, 20 nt, Human
gucuugucucagauuuuauu

SEQ ID NO: 2760681 - RNA, 22 nt, Human
gucuugucucagauuuuauuau

SEQ ID NO: 2760682 - RNA, 15 nt, Human
gucuugucucagauu

SEQ ID NO: 2760683 - RNA, 18 nt, Human
gucgucaaagcugaaaug

SEQ ID NO: 2760684 - RNA, 23 nt, Human
gucggguuuuauuguuuaaaauc

SEQ ID NO: 2760685 - RNA, 13 nt, Human
gucugacuguuuc

SEQ ID NO: 2760686 - RNA, 15 nt, Human
gucucagauuuuauu

SEQ ID NO: 2760687 - RNA, 16 nt, Human
gucucagauuuuauua

SEQ ID NO: 2760688 - RNA, 14 nt, Human
gucucagauuuuau

SEQ ID NO: 2760689 - RNA, 17 nt, Human
gucucagauuuuauuau

SEQ ID NO: 2760690 - RNA, 21 nt, Human
gucucagauuuuauuauguaa

SEQ ID NO: 2760691 - RNA, 17 nt, Human
gugcgcuaaacuuuucu

SEQ ID NO: 2760692 - RNA, 21 nt, Human
gugcgcuaaacuuuucugaua

SEQ ID NO: 2760693 - RNA, 12 nt, Human
gugcuaaggacu

SEQ ID NO: 2760694 - RNA, 13 nt, Human
gugcuaaggacuu

SEQ ID NO: 2760695 - RNA, 14 nt, Human
gugcuaaggacuug

SEQ ID NO: 2760696 - RNA, 20 nt, Human
gugcuaaggacuuguuagau

SEQ ID NO: 2760697 - RNA, 21 nt, Human
gugaacaaauuuacagagaca

SEQ ID NO: 2760698 - RNA, 13 nt, Human
gugaacacaucag

SEQ ID NO: 2760699 - RNA, 16 nt, Human
gugacaagcucacaga

SEQ ID NO: 2760700 - RNA, 14 nt, Human
guucugaagaagau

SEQ ID NO: 2760701 - RNA, 15 nt, Human
guucugaagaagaug

SEQ ID NO: 2760702 - RNA, 12 nt, Human
guucugaagaag

SEQ ID NO: 2760703 - RNA, 13 nt, Human
guucugaagaaga

SEQ ID NO: 2760704 - RNA, 23 nt, Human
guugaaaagacuccaaagaaaug

SEQ ID NO: 2760705 - RNA, 22 nt, Human
guugaaaagacuccaaagaaau

SEQ ID NO: 2760706 - RNA, 17 nt, Human
guugaaaagacuccaaa

SEQ ID NO: 2760707 - RNA, 21 nt, Human
guugauggugguauguuuuca

SEQ ID NO: 2760708 - RNA, 20 nt, Human
guugauggugguauguuuuc

SEQ ID NO: 2760709 - RNA, 21 nt, Human
guugaauuuauuggcuuuucu

SEQ ID NO: 2760710 - RNA, 22 nt, Human
guugaauuuauuggcuuuucug

SEQ ID NO: 2760711 - RNA, 14 nt, Human
guugaauuuauugg

SEQ ID NO: 2760712 - RNA, 16 nt, Human
guugaaauuguaauua

SEQ ID NO: 2760713 - RNA, 20 nt, Human
guugaaauuguaauuauauc

SEQ ID NO: 2760714 - RNA, 15 nt, Human
guugaaauuguaauu

SEQ ID NO: 2760715 - RNA, 21 nt, Human
guugaaacggaugauuucuau

SEQ ID NO: 2760716 - RNA, 22 nt, Human
guugaaacggaugauuucuaug

SEQ ID NO: 2760717 - RNA, 23 nt, Human
guuaccucugccucagaaaacaa

SEQ ID NO: 2760718 - RNA, 19 nt, Human
guuaucugaagucagaucu

SEQ ID NO: 2760719 - RNA, 13 nt, Human
guucagagcugcc

SEQ ID NO: 2760720 - RNA, 14 nt, Human
guucagagcugccc

SEQ ID NO: 2760721 - RNA, 23 nt, Human
guucagagcugcccucuccuggg

SEQ ID NO: 2760722 - RNA, 20 nt, Human
guucagagcugcccucuccu

SEQ ID NO: 2760723 - RNA, 22 nt, Human
guucagagcugcccucuccugg

SEQ ID NO: 2760724 - RNA, 15 nt, Human
guucagagcugcccu

SEQ ID NO: 2760725 - RNA, 16 nt, Human
guucagagcugcccuc

SEQ ID NO: 2760726 - RNA, 17 nt, Human
guucagagcugcccucu

SEQ ID NO: 2760727 - RNA, 19 nt, Human
guucagagcugcccucucc

SEQ ID NO: 2760728 - RNA, 19 nt, Human
guucacucuccauuuaaua

SEQ ID NO: 2760729 - RNA, 16 nt, Human
guucaucaaugaauga

SEQ ID NO: 2760730 - RNA, 22 nt, Human
guucauggaacgcguugaaauu

SEQ ID NO: 2760731 - RNA, 23 nt, Human
guucauggaacgcguugaaauug

SEQ ID NO: 2760732 - RNA, 16 nt, Human
guuaaaagaugaaaau

SEQ ID NO: 2760733 - RNA, 14 nt, Human
guuaaaagaugaaa

SEQ ID NO: 2760734 - RNA, 20 nt, Human
guuaaaagaugaaaauauuu

SEQ ID NO: 2760735 - RNA, 18 nt, Human
guuaaaccaugggauaaa

SEQ ID NO: 2760736 - RNA, 21 nt, Human
guuaaaccaugggauaaaugc

SEQ ID NO: 2760737 - RNA, 13 nt, Human
guuacagaagccc

SEQ ID NO: 2760738 - RNA, 21 nt, Human
guguaaguagauaggccaugg

SEQ ID NO: 2760739 - RNA, 16 nt, Human
guggugacuuuggaua

SEQ ID NO: 2760740 - RNA, 13 nt, Human
guggugacuuugg

SEQ ID NO: 2760741 - RNA, 15 nt, Human
guggugacuuuggau

SEQ ID NO: 2760742 - RNA, 20 nt, Human
gugcuacaaaaacacagcaa

SEQ ID NO: 2760743 - RNA, 15 nt, Human
gugcuacaaaaacac

SEQ ID NO: 2760744 - RNA, 20 nt, Human
guuuagcuggaaaaguaugu

SEQ ID NO: 2760745 - RNA, 21 nt, Human
guuuagcuggaaaaguauguu

SEQ ID NO: 2760746 - RNA, 20 nt, Human
guuuauauaagcuuguauuc

SEQ ID NO: 2760747 - RNA, 17 nt, Human
guuuagaaagcuugccc

SEQ ID NO: 2760748 - RNA, 13 nt, Human
uaaaaucauuucu

SEQ ID NO: 2760749 - RNA, 10 nt, Human
uaaaaucauu

SEQ ID NO: 2760750 - RNA, 15 nt, Human
uaaaauccauacauu

SEQ ID NO: 2760751 - RNA, 17 nt, Human
uaaaauccauacauuug

SEQ ID NO: 2760752 - RNA, 22 nt, Human
uaaaaucauuucugcaucagcu

SEQ ID NO: 2760753 - RNA, 18 nt, Human
uaaaaucauuucugcauc

SEQ ID NO: 2760754 - RNA, 22 nt, Human
uaaaacaagcacuaaacaaaga

SEQ ID NO: 2760755 - RNA, 19 nt, Human
uaaaaaugguuuaaauggu

SEQ ID NO: 2760756 - RNA, 15 nt, Human
uaaaaaugguuuaaa

SEQ ID NO: 2760757 - RNA, 18 nt, Human
uaaaaaugguuuaaaugg

SEQ ID NO: 2760758 - RNA, 14 nt, Human
uaaaguguuugaaa

SEQ ID NO: 2760759 - RNA, 15 nt, Human
uaaagccauguuuau

SEQ ID NO: 2760760 - RNA, 20 nt, Human
uaaagccauguuuauuacag

SEQ ID NO: 2760761 - RNA, 11 nt, Human
uaaagccaugu

SEQ ID NO: 2760762 - RNA, 13 nt, Human
uaaagccauguuu

SEQ ID NO: 2760763 - RNA, 23 nt, Human
uaaugauaacuggaaacuucagc

SEQ ID NO: 2760764 - RNA, 17 nt, Human
uaaugauaacuggaaac

SEQ ID NO: 2760765 - RNA, 22 nt, Human
uaaugauaacuggaaacuucag

SEQ ID NO: 2760766 - RNA, 22 nt, Human
uaauguuucaaacauauauaac

SEQ ID NO: 2760767 - RNA, 20 nt, Human
uaauuaacauguuaaaccau

SEQ ID NO: 2760768 - RNA, 21 nt, Human
uaauuaacauguuaaaccaug

SEQ ID NO: 2760769 - RNA, 15 nt, Human
uaauauuaaagccau

SEQ ID NO: 2760770 - RNA, 16 nt, Human
uaauauuaaagccaug

SEQ ID NO: 2760771 - RNA, 17 nt, Human
uaauauuaaagccaugu

SEQ ID NO: 2760772 - RNA, 20 nt, Human
uaauauuaaagccauguuua

SEQ ID NO: 2760773 - RNA, 21 nt, Human
uaauauuaaagccauguuuau

SEQ ID NO: 2760774 - RNA, 13 nt, Human
uaagugaaauaag

SEQ ID NO: 2760775 - RNA, 16 nt, Human
uaauaaggaaaaguuu

SEQ ID NO: 2760776 - RNA, 16 nt, Human
uaaaugugccuucauu

SEQ ID NO: 2760777 - RNA, 20 nt, Human
uaaauugacacuuaaaaaug

SEQ ID NO: 2760778 - RNA, 20 nt, Human
uaaauggcuuccuggcaaua

SEQ ID NO: 2760779 - RNA, 16 nt, Human
uaaaugccaucaauaa

SEQ ID NO: 2760780 - RNA, 23 nt, Human
uaaaugccaucaauaaaaaauua

SEQ ID NO: 2760781 - RNA, 15 nt, Human
uaacuggaaacuuca

SEQ ID NO: 2760782 - RNA, 13 nt, Human
uaagagagaauga

SEQ ID NO: 2760783 - RNA, 14 nt, Human
uaagagagaaugag

SEQ ID NO: 2760784 - RNA, 21 nt, Human
uaagaaaauaucacuugucaa

SEQ ID NO: 2760785 - RNA, 17 nt, Human
uaaccaggggccaugaa

SEQ ID NO: 2760786 - RNA, 14 nt, Human
uauaugcuucuguu

SEQ ID NO: 2760787 - RNA, 16 nt, Human
uauaugcuucuguuuu

SEQ ID NO: 2760788 - RNA, 20 nt, Human
uauauuugaaauauugacuu

SEQ ID NO: 2760789 - RNA, 21 nt, Human
uauauuuuuuguuaaaugauu

SEQ ID NO: 2760790 - RNA, 16 nt, Human
uauauuuucauucucc

SEQ ID NO: 2760791 - RNA, 14 nt, Human
uaucaaaagaaaga

SEQ ID NO: 2760792 - RNA, 17 nt, Human
uauauaacaaugcugua

SEQ ID NO: 2760793 - RNA, 19 nt, Human
uauauaacaaugcuguauu

SEQ ID NO: 2760794 - RNA, 23 nt, Human
uauaucugaggaauucuguauag

SEQ ID NO: 2760795 - RNA, 21 nt, Human
uauagaaccucuuugucuaca

SEQ ID NO: 2760796 - RNA, 20 nt, Human
uauagaaccucuuugucuac

SEQ ID NO: 2760797 - RNA, 17 nt, Human
uaguauuguccaggucu

SEQ ID NO: 2760798 - RNA, 18 nt, Human
uaggugcuacaaaaacac

SEQ ID NO: 2760799 - RNA, 23 nt, Human
uaggugcuacaaaaacacagcaa

SEQ ID NO: 2760800 - RNA, 22 nt, Human
uaggugcuacaaaaacacagca

SEQ ID NO: 2760801 - RNA, 20 nt, Human
uaggugcuacaaaaacacag

SEQ ID NO: 2760802 - RNA, 14 nt, Human
uagauaggccaugg

SEQ ID NO: 2760803 - RNA, 16 nt, Human
uagauuagaauucugu

SEQ ID NO: 2760804 - RNA, 17 nt, Human
uagauuagaauucugua

SEQ ID NO: 2760805 - RNA, 19 nt, Human
uagauuagaauucuguaua

SEQ ID NO: 2760806 - RNA, 20 nt, Human
uagauuagaauucuguauag

SEQ ID NO: 2760807 - RNA, 14 nt, Human
uagauuagaauucu

SEQ ID NO: 2760808 - RNA, 15 nt, Human
uagauuagaauucug

SEQ ID NO: 2760809 - RNA, 20 nt, Human
uagauuagagaguguugaaa

SEQ ID NO: 2760810 - RNA, 15 nt, Human
uagaauuaacacaug

SEQ ID NO: 2760811 - RNA, 16 nt, Human
uagaauuaacacauga

SEQ ID NO: 2760812 - RNA, 18 nt, Human
uagaauuaacacaugauc

SEQ ID NO: 2760813 - RNA, 23 nt, Human
uagaauaccacaggaaccacaag

SEQ ID NO: 2760814 - RNA, 14 nt, Human
uagaauucuguaua

SEQ ID NO: 2760815 - RNA, 15 nt, Human
uagaauucuguauag

SEQ ID NO: 2760816 - RNA, 16 nt, Human
uagaauucuguauaga

SEQ ID NO: 2760817 - RNA, 21 nt, Human
uagaauucuguauagauuaga

SEQ ID NO: 2760818 - RNA, 11 nt, Human
uagaauucugu

SEQ ID NO: 2760819 - RNA, 13 nt, Human
uagaauucuguau

SEQ ID NO: 2760820 - RNA, 21 nt, Human
uagacuggugacugauucuuc

SEQ ID NO: 2760821 - RNA, 23 nt, Human
uagacuggugacugauucuucag

SEQ ID NO: 2760822 - RNA, 20 nt, Human
uagacuggugacugauucuu

SEQ ID NO: 2760823 - RNA, 18 nt, Human
uagacuggugacugauuc

SEQ ID NO: 2760824 - RNA, 13 nt, Human
uaauuuugugaag

SEQ ID NO: 2760825 - RNA, 16 nt, Human
uaauuuuuauauuuga

SEQ ID NO: 2760826 - RNA, 17 nt, Human
uaauuuuuauauuugaa

SEQ ID NO: 2760827 - RNA, 18 nt, Human
uaauuuugugaagcaaaa

SEQ ID NO: 2760828 - RNA, 12 nt, Human
uaauuuuuauau

SEQ ID NO: 2760829 - RNA, 15 nt, Human
uacaaaguauuaagc

SEQ ID NO: 2760830 - RNA, 16 nt, Human
uacaaaguauuaagca

SEQ ID NO: 2760831 - RNA, 18 nt, Human
uacaaaguauuaagcaua

SEQ ID NO: 2760832 - RNA, 19 nt, Human
uacaaaguauuaagcauau

SEQ ID NO: 2760833 - RNA, 13 nt, Human
uacaaaguauuaa

SEQ ID NO: 2760834 - RNA, 14 nt, Human
uacaaaguauuaag

SEQ ID NO: 2760835 - RNA, 12 nt, Human
uacaaaguauua

SEQ ID NO: 2760836 - RNA, 16 nt, Human
uacacacucaaaucaa

SEQ ID NO: 2760837 - RNA, 17 nt, Human
uacacacucaaaucaag

SEQ ID NO: 2760838 - RNA, 14 nt, Human
uacacuccagugag

SEQ ID NO: 2760839 - RNA, 17 nt, Human
uacaauuuuguuucugu

SEQ ID NO: 2760840 - RNA, 15 nt, Human
uacaauuuuguuucu

SEQ ID NO: 2760841 - RNA, 16 nt, Human
uacaauuuuguuucug

SEQ ID NO: 2760842 - RNA, 12 nt, Human
uacaauuuuguu

SEQ ID NO: 2760843 - RNA, 23 nt, Human
uacaguucggugagcuacaaaug

SEQ ID NO: 2760844 - RNA, 23 nt, Human
uacugucagcuccccucggagaa

SEQ ID NO: 2760845 - RNA, 23 nt, Human
uaccuuuguucccaaauuucaua

SEQ ID NO: 2760846 - RNA, 23 nt, Human
uacuaaaauggacuguggugacu

SEQ ID NO: 2760847 - RNA, 17 nt, Human
uacuaaaauggacugug

SEQ ID NO: 2760848 - RNA, 15 nt, Human
uacuaaaauggacug

SEQ ID NO: 2760849 - RNA, 22 nt, Human
uaccuaacgaaguauccuucag

SEQ ID NO: 2760850 - RNA, 22 nt, Human
uaccaaaaaucucaauauuuca

SEQ ID NO: 2760851 - RNA, 16 nt, Human
uaccuaucaucuuaag

SEQ ID NO: 2760852 - RNA, 13 nt, Human
ugaauuacauuug

SEQ ID NO: 2760853 - RNA, 14 nt, Human
ugaauuaaguuuuu

SEQ ID NO: 2760854 - RNA, 16 nt, Human
ugaccacugcagaaga

SEQ ID NO: 2760855 - RNA, 17 nt, Human
ugaccacugcagaagac

SEQ ID NO: 2760856 - RNA, 18 nt, Human
ugaccacugcagaagaca

SEQ ID NO: 2760857 - RNA, 15 nt, Human
ugaaugaauggcuaa

SEQ ID NO: 2760858 - RNA, 13 nt, Human
ugaacuugaaauu

SEQ ID NO: 2760859 - RNA, 14 nt, Human
ugaacuugaaauuu

SEQ ID NO: 2760860 - RNA, 18 nt, Human
ugaacuugaaauuugaau

SEQ ID NO: 2760861 - RNA, 14 nt, Human
ugacucuuaagaag

SEQ ID NO: 2760862 - RNA, 15 nt, Human
ugacucuuaagaaga

SEQ ID NO: 2760863 - RNA, 16 nt, Human
ugacucuuaagaagac

SEQ ID NO: 2760864 - RNA, 13 nt, Human
ugacucuuaagaa

SEQ ID NO: 2760865 - RNA, 12 nt, Human
ugacuuuggaua

SEQ ID NO: 2760866 - RNA, 13 nt, Human
ugacuuuggauaa

SEQ ID NO: 2760867 - RNA, 14 nt, Human
ugacuuuggauaau

SEQ ID NO: 2760868 - RNA, 15 nt, Human
ugacuuuggauaaua

SEQ ID NO: 2760869 - RNA, 16 nt, Human
ugacuuuggauaauaa

SEQ ID NO: 2760870 - RNA, 20 nt, Human
ugacuuuggauaauaaggaa

SEQ ID NO: 2760871 - RNA, 22 nt, Human
ugacuuuggauaauaaggaaaa

SEQ ID NO: 2760872 - RNA, 15 nt, Human
ugagaaagacuauuc

SEQ ID NO: 2760873 - RNA, 20 nt, Human
ugagaaagacuauucaaaca

SEQ ID NO: 2760874 - RNA, 20 nt, Human
ugagcaggauuuuaaucuuu

SEQ ID NO: 2760875 - RNA, 15 nt, Human
ugagcaggauuuuaa

SEQ ID NO: 2760876 - RNA, 14 nt, Human
ucugucucagucca

SEQ ID NO: 2760877 - RNA, 23 nt, Human
ucugccuaaggacuucuuuaauu

SEQ ID NO: 2760878 - RNA, 20 nt, Human
ucugccuaaggacuucuuua

SEQ ID NO: 2760879 - RNA, 21 nt, Human
ucugccuaaggacuucuuuaa

SEQ ID NO: 2760880 - RNA, 17 nt, Human
ucuuuccacagaagcuc

SEQ ID NO: 2760881 - RNA, 14 nt, Human
ucuugucucagauu

SEQ ID NO: 2760882 - RNA, 15 nt, Human
ucuugucucagauuu

SEQ ID NO: 2760883 - RNA, 12 nt, Human
ucuugucucaga

SEQ ID NO: 2760884 - RNA, 14 nt, Human
ucuuauaauuuaaa

SEQ ID NO: 2760885 - RNA, 13 nt, Human
ucuuauaauuuaa

SEQ ID NO: 2760886 - RNA, 22 nt, Human
ucuuaggguuaugauuaaguaa

SEQ ID NO: 2760887 - RNA, 19 nt, Human
ucuugccaaauauaaauaa

SEQ ID NO: 2760888 - RNA, 16 nt, Human
ucuucuuggucucagu

SEQ ID NO: 2760889 - RNA, 16 nt, Human
ucagcugcugaaacaa

SEQ ID NO: 2760890 - RNA, 21 nt, Human
ucagcuccccucggagaagag

SEQ ID NO: 2760891 - RNA, 22 nt, Human
ucagcuccccucggagaagagc

SEQ ID NO: 2760892 - RNA, 16 nt, Human
ucagauacuggauugu

SEQ ID NO: 2760893 - RNA, 19 nt, Human
ucagauacuggauuguacu

SEQ ID NO: 2760894 - RNA, 20 nt, Human
ucagauacuggauuguacuu

SEQ ID NO: 2760895 - RNA, 14 nt, Human
ucagauacuggauu

SEQ ID NO: 2760896 - RNA, 15 nt, Human
ucagauacuggauug

SEQ ID NO: 2760897 - RNA, 18 nt, Human
ucaguccaugaagaugua

SEQ ID NO: 2760898 - RNA, 21 nt, Human
ucauggaauuggagcucgugg

SEQ ID NO: 2760899 - RNA, 19 nt, Human
ucauggaauuggagcucgu

SEQ ID NO: 2760900 - RNA, 12 nt, Human
ucuacuaaaaau

SEQ ID NO: 2760901 - RNA, 19 nt, Human
ucuacuaaaaauacaaaaa

SEQ ID NO: 2760902 - RNA, 15 nt, Human
ucuacuaaaaauaca

SEQ ID NO: 2760903 - RNA, 13 nt, Human
ucuauauuuucau

SEQ ID NO: 2760904 - RNA, 14 nt, Human
ucuauauuuucauu

SEQ ID NO: 2760905 - RNA, 15 nt, Human
ucuauauuuucauuc

SEQ ID NO: 2760906 - RNA, 16 nt, Human
ucuauauuuucauucu

SEQ ID NO: 2760907 - RNA, 16 nt, Human
ucucagauuuuauuau

SEQ ID NO: 2760908 - RNA, 17 nt, Human
ucucagauuuuauuaug

SEQ ID NO: 2760909 - RNA, 18 nt, Human
ucucagauuuuauuaugu

SEQ ID NO: 2760910 - RNA, 19 nt, Human
ucucagauuuuauuaugua

SEQ ID NO: 2760911 - RNA, 14 nt, Human
ucucagauuuuauu

SEQ ID NO: 2760912 - RNA, 15 nt, Human
ucucagauuuuauua

SEQ ID NO: 2760913 - RNA, 13 nt, Human
ucucagauuuuau

SEQ ID NO: 2760914 - RNA, 15 nt, Human
ucggccuccauccug

SEQ ID NO: 2760915 - RNA, 16 nt, Human
ucggccuccauccuga

SEQ ID NO: 2760916 - RNA, 17 nt, Human
uccuugcaucaauuuuu

SEQ ID NO: 2760917 - RNA, 15 nt, Human
uccugaggcuccacu

SEQ ID NO: 2760918 - RNA, 16 nt, Human
uccugaggcuccacuu

SEQ ID NO: 2760919 - RNA, 17 nt, Human
uccugaggcuccacuug

SEQ ID NO: 2760920 - RNA, 21 nt, Human
uccugaggcuccacuuggucu

SEQ ID NO: 2760921 - RNA, 14 nt, Human
uccucugcuugcca

SEQ ID NO: 2760922 - RNA, 15 nt, Human
uccucugcuugccau

SEQ ID NO: 2760923 - RNA, 16 nt, Human
uccucugcuugccauc

SEQ ID NO: 2760924 - RNA, 17 nt, Human
uccucugcuugccaucc

SEQ ID NO: 2760925 - RNA, 18 nt, Human
ugccuguaaucacagcua

SEQ ID NO: 2760926 - RNA, 15 nt, Human
ugccuucucaacucc

SEQ ID NO: 2760927 - RNA, 15 nt, Human
ugcuaagcauuccaa

SEQ ID NO: 2760928 - RNA, 19 nt, Human
ugcuaagcauuccaacuau

SEQ ID NO: 2760929 - RNA, 17 nt, Human
ugcugaaacaacaaaua

SEQ ID NO: 2760930 - RNA, 14 nt, Human
ugcacggugaaugg

SEQ ID NO: 2760931 - RNA, 18 nt, Human
ugcacggugaauggcuuu

SEQ ID NO: 2760932 - RNA, 19 nt, Human
ugcagugagccgagauugu

SEQ ID NO: 2760933 - RNA, 15 nt, Human
ugcaguucugaagaa

SEQ ID NO: 2760934 - RNA, 16 nt, Human
ugcaguucugaagaag

SEQ ID NO: 2760935 - RNA, 17 nt, Human
ugcaguucugaagaaga

SEQ ID NO: 2760936 - RNA, 18 nt, Human
ugcaguucugaagaagau

SEQ ID NO: 2760937 - RNA, 14 nt, Human
ugcaguucugaaga

SEQ ID NO: 2760938 - RNA, 19 nt, Human
ugcaguucugaagaagaug

SEQ ID NO: 2760939 - RNA, 22 nt, Human
ugcaguucugaagaagauggua

SEQ ID NO: 2760940 - RNA, 11 nt, Human
ugccaucccuc

SEQ ID NO: 2760941 - RNA, 12 nt, Human
ugccaucccucc

SEQ ID NO: 2760942 - RNA, 20 nt, Human
ugccacuaaauugacacuua

SEQ ID NO: 2760943 - RNA, 18 nt, Human
ugccaaauauaaauaaaa

SEQ ID NO: 2760944 - RNA, 17 nt, Human
ugccaaauauaaauaaa

SEQ ID NO: 2760945 - RNA, 22 nt, Human
ugccaaauauaaauaaaaauaa

SEQ ID NO: 2760946 - RNA, 19 nt, Human
ugccaaauauaaauaaaaa

SEQ ID NO: 2760947 - RNA, 14 nt, Human
ugggaguacaaaag

SEQ ID NO: 2760948 - RNA, 21 nt, Human
uggcuugaguuuaaauuguaa

SEQ ID NO: 2760949 - RNA, 18 nt, Human
uggcuuuucugauccagu

SEQ ID NO: 2760950 - RNA, 19 nt, Human
uggcuuuucugauccaguu

SEQ ID NO: 2760951 - RNA, 14 nt, Human
uggcuuuucugauc

SEQ ID NO: 2760952 - RNA, 17 nt, Human
uggcuuuucugauccag

SEQ ID NO: 2760953 - RNA, 13 nt, Human
uggcuuuucugau

SEQ ID NO: 2760954 - RNA, 16 nt, Human
uggcuuccuggcaaua

SEQ ID NO: 2760955 - RNA, 21 nt, Human
ugguauguuuucaggcuagau

SEQ ID NO: 2760956 - RNA, 18 nt, Human
uggggauucuuaaaguug

SEQ ID NO: 2760957 - RNA, 20 nt, Human
uggggauucuuaaaguugaa

SEQ ID NO: 2760958 - RNA, 13 nt, Human
uggggauucuuaa

SEQ ID NO: 2760959 - RNA, 16 nt, Human
uggggauucuuaaagu

SEQ ID NO: 2760960 - RNA, 12 nt, Human
uggggauucuua

SEQ ID NO: 2760961 - RNA, 11 nt, Human
uggagggaagc

SEQ ID NO: 2760962 - RNA, 21 nt, Human
uggaacauaaaauacaauguu

SEQ ID NO: 2760963 - RNA, 20 nt, Human
uggaacauaaaauacaaugu

SEQ ID NO: 2760964 - RNA, 23 nt, Human
uggaaacuucagcgguuuauaua

SEQ ID NO: 2760965 - RNA, 22 nt, Human
uggaauaauccuaaacauauga

SEQ ID NO: 2760966 - RNA, 18 nt, Human
uggaacgcguugaaauug

SEQ ID NO: 2760967 - RNA, 17 nt, Human
uggaacgcguugaaauu

SEQ ID NO: 2760968 - RNA, 19 nt, Human
uggaacgcguugaaauugu

SEQ ID NO: 2760969 - RNA, 19 nt, Human
ugugcuaguaauuggaaag

SEQ ID NO: 2760970 - RNA, 15 nt, Human
uguaugauucccagc

SEQ ID NO: 2760971 - RNA, 21 nt, Human
uguauugugcgcuaaacuuuu

SEQ ID NO: 2760972 - RNA, 22 nt, Human
uguaguguuggagaagaacuga

SEQ ID NO: 2760973 - RNA, 16 nt, Human
uguaccgcaaugugac

SEQ ID NO: 2760974 - RNA, 15 nt, Human
uguaccgcaauguga

SEQ ID NO: 2760975 - RNA, 18 nt, Human
uuaaaauacacacucaaa

SEQ ID NO: 2760976 - RNA, 18 nt, Human
uuaaagccauguuuauua

SEQ ID NO: 2760977 - RNA, 20 nt, Human
uuaaagccauguuuauuaca

SEQ ID NO: 2760978 - RNA, 12 nt, Human
uuaaagccaugu

SEQ ID NO: 2760979 - RNA, 14 nt, Human
uuaaagccauguuu

SEQ ID NO: 2760980 - RNA, 22 nt, Human
uuaaaaaaaaaccugagcccca

SEQ ID NO: 2760981 - RNA, 15 nt, Human
uuaaaaaaaaaauug

SEQ ID NO: 2760982 - RNA, 11 nt, Human
uguuucuguac

SEQ ID NO: 2760983 - RNA, 22 nt, Human
uguuucuguacuuuuuggcaua

SEQ ID NO: 2760984 - RNA, 23 nt, Human
uguuucuguacuuuuuggcauaa

SEQ ID NO: 2760985 - RNA, 20 nt, Human
uuacauuuguauaaaauaau

SEQ ID NO: 2760986 - RNA, 12 nt, Human
uuacagaagccc

SEQ ID NO: 2760987 - RNA, 18 nt, Human
uuaauauuaaagccaugu

SEQ ID NO: 2760988 - RNA, 19 nt, Human
uuaauauuaaagccauguu

SEQ ID NO: 2760989 - RNA, 23 nt, Human
uuaagcauauauuuuuauauuua

SEQ ID NO: 2760990 - RNA, 13 nt, Human
uuaauauuaaagc

SEQ ID NO: 2760991 - RNA, 14 nt, Human
uuaauauuaaagcc

SEQ ID NO: 2760992 - RNA, 16 nt, Human
uuaauauuaaagccau

SEQ ID NO: 2760993 - RNA, 17 nt, Human
uuaauauuaaagccaug

SEQ ID NO: 2760994 - RNA, 11 nt, Human
uuaauauuaaa

SEQ ID NO: 2760995 - RNA, 20 nt, Human
uguugacaugggacauuugc

SEQ ID NO: 2760996 - RNA, 16 nt, Human
uguuggagaagaacug

SEQ ID NO: 2760997 - RNA, 17 nt, Human
uguuggagaagaacuga

SEQ ID NO: 2760998 - RNA, 14 nt, Human
uguuggagaagaac

SEQ ID NO: 2760999 - RNA, 19 nt, Human
uguuggagaagaacugaaa

SEQ ID NO: 2761000 - RNA, 20 nt, Human
uguuggagaagaacugaaau

SEQ ID NO: 2761001 - RNA, 14 nt, Human
uguuuaaaaucauu

SEQ ID NO: 2761002 - RNA, 18 nt, Human
uguuuaaaaucauuucug

SEQ ID NO: 2761003 - RNA, 17 nt, Human
uguuuaaaaucauuucu

SEQ ID NO: 2761004 - RNA, 13 nt, Human
uguguuuugcaag

SEQ ID NO: 2761005 - RNA, 19 nt, Human
uguguuuugcaagccagau

SEQ ID NO: 2761006 - RNA, 20 nt, Human
ugugugaaagguacuucaaa

SEQ ID NO: 2761007 - RNA, 21 nt, Human
ugugugaaagguacuucaaau

SEQ ID NO: 2761008 - RNA, 22 nt, Human
ugugugaaagguacuucaaauc

SEQ ID NO: 2761009 - RNA, 21 nt, Human
uguuaaaagaugaaaauauuu

SEQ ID NO: 2761010 - RNA, 16 nt, Human
auagaauuaacacaug

SEQ ID NO: 2761011 - RNA, 22 nt, Human
agguacugagagugaacaaauu

SEQ ID NO: 2761012 - RNA, 22 nt, Human
aggaauugacccacaagaaaug

SEQ ID NO: 2761013 - RNA, 16 nt, Human
cugaggaauucuguau

SEQ ID NO: 2761014 - RNA, 15 nt, Human
cugaggaauucugua

SEQ ID NO: 2761015 - RNA, 19 nt, Human
cugaggaauucuguauaga

SEQ ID NO: 2761016 - RNA, 18 nt, Human
cugaggaauucuguauag

SEQ ID NO: 2761017 - RNA, 17 nt, Human
cugaaagaggaaugaag

SEQ ID NO: 2761018 - RNA, 13 nt, Human
cugaaagaggaau

SEQ ID NO: 2761019 - RNA, 17 nt, Human
cucucuggccuucggcc

SEQ ID NO: 2761020 - RNA, 22 nt, Human
cucucuggccuucggccuccau

SEQ ID NO: 2761021 - RNA, 19 nt, Human
cucucuggccuucggccuc

SEQ ID NO: 2761022 - RNA, 13 nt, Human
cuccuuucucuuu

SEQ ID NO: 2761023 - RNA, 21 nt, Human
cuccagugagacagcucugca

SEQ ID NO: 2761024 - RNA, 13 nt, Human
cucaaaacugcac

SEQ ID NO: 2761025 - RNA, 23 nt, Human
cucagaaaacaaggaugaauuaa

SEQ ID NO: 2761026 - RNA, 19 nt, Human
cucagaaaacaaggaugaa

SEQ ID NO: 2761027 - RNA, 16 nt, Human
cuaaacuuuucugaua

SEQ ID NO: 2761028 - RNA, 15 nt, Human
cuaaacuuuucugau

SEQ ID NO: 2761029 - RNA, 14 nt, Human
cuaacuggacuggu

SEQ ID NO: 2761030 - RNA, 15 nt, Human
cgguuuauauaagcu

SEQ ID NO: 2761031 - RNA, 23 nt, Human
cggagaagagcuguucacagcca

SEQ ID NO: 2761032 - RNA, 24 nt, Human
cggagaagagcuguucacagccag

SEQ ID NO: 2761033 - RNA, 20 nt, Human
cccauauuuguacaccaaua

SEQ ID NO: 2761034 - RNA, 24 nt, Human
cccagccagcaguucagagcugcc

SEQ ID NO: 2761035 - RNA, 13 nt, Human
ccccugcacucca

SEQ ID NO: 2761036 - RNA, 22 nt, Human
cccuccucugcuugccaucccu

SEQ ID NO: 2761037 - RNA, 13 nt, Human
cccuccucugcuu

SEQ ID NO: 2761038 - RNA, 15 nt, Human
ccaucccucccucca

SEQ ID NO: 2761039 - RNA, 14 nt, Human
ccaucccucccucc

SEQ ID NO: 2761040 - RNA, 13 nt, Human
ccaucccucccuc

SEQ ID NO: 2761041 - RNA, 13 nt, Human
cccaacuccagaa

SEQ ID NO: 2761042 - RNA, 17 nt, Human
ccugucucuacuaaaaa

SEQ ID NO: 2761043 - RNA, 16 nt, Human
ccucccuucucuucac

SEQ ID NO: 2761044 - RNA, 12 nt, Human
ccucggagaaga

SEQ ID NO: 2761045 - RNA, 14 nt, Human
ccucggagaagagc

SEQ ID NO: 2761046 - RNA, 23 nt, Human
cacuccagccugagcgacaguga

SEQ ID NO: 2761047 - RNA, 13 nt, Human
cacuccagccuga

SEQ ID NO: 2761048 - RNA, 12 nt, Human
cacuccagccug

SEQ ID NO: 2761049 - RNA, 11 nt, Human
cagaacaguga

SEQ ID NO: 2761050 - RNA, 17 nt, Human
cagaacagugauuacca

SEQ ID NO: 2761051 - RNA, 12 nt, Human
cagaacagugau

SEQ ID NO: 2761052 - RNA, 15 nt, Human
cacuuaaaaaugguu

SEQ ID NO: 2761053 - RNA, 23 nt, Human
caauaaaauccauacauuugugu

SEQ ID NO: 2761054 - RNA, 20 nt, Human
caauaaaauccauacauuug

SEQ ID NO: 2761055 - RNA, 15 nt, Human
caauaaaauggguuu

SEQ ID NO: 2761056 - RNA, 16 nt, Human
caaacagucucaggaa

SEQ ID NO: 2761057 - RNA, 17 nt, Human
caaacagucucaggaaa

SEQ ID NO: 2761058 - RNA, 15 nt, Human
caaacagucucagga

SEQ ID NO: 2761059 - RNA, 21 nt, Human
caaaaggauaaugaauacuuu

SEQ ID NO: 2761060 - RNA, 13 nt, Human
auuuuuuuguugu

SEQ ID NO: 2761061 - RNA, 16 nt, Human
auuuuuauauuuacua

SEQ ID NO: 2761062 - RNA, 15 nt, Human
auuuuuauauuuacu

SEQ ID NO: 2761063 - RNA, 15 nt, Human
auuuuuauauuugaa

SEQ ID NO: 2761064 - RNA, 21 nt, Human
auuuuauaucaauuuaaaaaa

SEQ ID NO: 2761065 - RNA, 19 nt, Human
caagacccaaaaggcagaa

SEQ ID NO: 2761066 - RNA, 21 nt, Human
caaaucuuaacuugaaggagu

SEQ ID NO: 2761067 - RNA, 22 nt, Human
auuaugaauuacauuuguauaa

SEQ ID NO: 2761068 - RNA, 20 nt, Human
auuaugaauuacauuuguau

SEQ ID NO: 2761069 - RNA, 19 nt, Human
auuaugaauuacauuugua

SEQ ID NO: 2761070 - RNA, 15 nt, Human
auuguaauuauaucu

SEQ ID NO: 2761071 - RNA, 17 nt, Human
auuguaauuauaucuga

SEQ ID NO: 2761072 - RNA, 16 nt, Human
auuguaauuauaucug

SEQ ID NO: 2761073 - RNA, 19 nt, Human
auuguacaaaguauuaagc

SEQ ID NO: 2761074 - RNA, 17 nt, Human
auuguacaaaguauuaa

SEQ ID NO: 2761075 - RNA, 16 nt, Human
auuguacaaaguauua

SEQ ID NO: 2761076 - RNA, 21 nt, Human
auuguaauuauaucugaggaa

SEQ ID NO: 2761077 - RNA, 15 nt, Human
auuguuuaaaaucau

SEQ ID NO: 2761078 - RNA, 22 nt, Human
auuucuaugcugaguuugugcu

SEQ ID NO: 2761079 - RNA, 21 nt, Human
auuucuaugcugaguuugugc

SEQ ID NO: 2761080 - RNA, 19 nt, Human
auuucuaugcugaguuugu

SEQ ID NO: 2761081 - RNA, 19 nt, Human
auuucuauauuuucauucu

SEQ ID NO: 2761082 - RNA, 20 nt, Human
auuucauaccuaucaucuua

SEQ ID NO: 2761083 - RNA, 16 nt, Human
auuucuauauuuucau

SEQ ID NO: 2761084 - RNA, 15 nt, Human
auuucuauauuuuca

SEQ ID NO: 2761085 - RNA, 18 nt, Human
auuucuauauuuucauuc

SEQ ID NO: 2761086 - RNA, 17 nt, Human
auuucuauauuuucauu

SEQ ID NO: 2761087 - RNA, 14 nt, Human
auuucuaugaaaua

SEQ ID NO: 2761088 - RNA, 16 nt, Human
auuuaauaaaugugcc

SEQ ID NO: 2761089 - RNA, 22 nt, Human
cauuuggaaaucuuuaaaaaaa

SEQ ID NO: 2761090 - RNA, 18 nt, Human
ccacagaagcuccaggua

SEQ ID NO: 2761091 - RNA, 18 nt, Human
ccaccagucugacuguuu

SEQ ID NO: 2761092 - RNA, 16 nt, Human
ccacagaagcuccagg

SEQ ID NO: 2761093 - RNA, 13 nt, Human
cauuaucucaaaa

SEQ ID NO: 2761094 - RNA, 12 nt, Human
cauuaucucaaa

SEQ ID NO: 2761095 - RNA, 18 nt, Human
cagggaggacgcucucug

SEQ ID NO: 2761096 - RNA, 17 nt, Human
cagggaggacgcucucu

SEQ ID NO: 2761097 - RNA, 21 nt, Human
caguauuguacaaaguauuaa

SEQ ID NO: 2761098 - RNA, 13 nt, Human
caguauuguacaa

SEQ ID NO: 2761099 - RNA, 12 nt, Human
caguauuguaca

SEQ ID NO: 2761100 - RNA, 19 nt, Human
caguauuguacaaaguauu

SEQ ID NO: 2761101 - RNA, 18 nt, Human
caguauuguacaaaguau

SEQ ID NO: 2761102 - RNA, 17 nt, Human
caguauuguacaaagua

SEQ ID NO: 2761103 - RNA, 16 nt, Human
caguauuguacaaagu

SEQ ID NO: 2761104 - RNA, 15 nt, Human
cagucucaggaaauc

SEQ ID NO: 2761105 - RNA, 15 nt, Human
cagagcugcccucuc

SEQ ID NO: 2761106 - RNA, 13 nt, Human
cagagcugcccuc

SEQ ID NO: 2761107 - RNA, 22 nt, Human
cagcacagccucuuagaugcag

SEQ ID NO: 2761108 - RNA, 14 nt, Human
cagccagcaguuca

SEQ ID NO: 2761109 - RNA, 21 nt, Human
cagccagcaguucagagcugc

SEQ ID NO: 2761110 - RNA, 15 nt, Human
cagccagcaguucag

SEQ ID NO: 2761111 - RNA, 20 nt, Human
cagcaguugaaaagacucca

SEQ ID NO: 2761112 - RNA, 21 nt, Human
cagcaguugaaaagacuccaa

SEQ ID NO: 2761113 - RNA, 17 nt, Human
cagcaguugaaaagacu

SEQ ID NO: 2761114 - RNA, 18 nt, Human
cagccugagcgacaguga

SEQ ID NO: 2761115 - RNA, 19 nt, Human
cagccugagcgacagugag

SEQ ID NO: 2761116 - RNA, 20 nt, Human
cagcccuucuuuccacagaa

SEQ ID NO: 2761117 - RNA, 19 nt, Human
cagcccuucuuuccacaga

SEQ ID NO: 2761118 - RNA, 15 nt, Human
cagcccuucuuucca

SEQ ID NO: 2761119 - RNA, 22 nt, Human
cagcugccuccccuccucugcu

SEQ ID NO: 2761120 - RNA, 21 nt, Human
cagcugccuccccuccucugc

SEQ ID NO: 2761121 - RNA, 24 nt, Human
cagcugccuccccuccucugcuug

SEQ ID NO: 2761122 - RNA, 23 nt, Human
cagcugccuccccuccucugcuu

SEQ ID NO: 2761123 - RNA, 17 nt, Human
cagcuccccucggagaa

SEQ ID NO: 2761124 - RNA, 18 nt, Human
cagcuccccucggagaag

SEQ ID NO: 2761125 - RNA, 16 nt, Human
cagcuccccucggaga

SEQ ID NO: 2761126 - RNA, 20 nt, Human
caggaaagagaacuuccaga

SEQ ID NO: 2761127 - RNA, 22 nt, Human
caggaaaucaaauaugcaaagc

SEQ ID NO: 2761128 - RNA, 23 nt, Human
caggaaaucaaauaugcaaagca

SEQ ID NO: 2761129 - RNA, 15 nt, Human
gccucuuagaugcag

SEQ ID NO: 2761130 - RNA, 20 nt, Human
gccuucggccuccauccuga

SEQ ID NO: 2761131 - RNA, 21 nt, Human
gccuucggccuccauccugag

SEQ ID NO: 2761132 - RNA, 19 nt, Human
gcuccacuuggucugugag

SEQ ID NO: 2761133 - RNA, 18 nt, Human
gcuccacuuggucuguga

SEQ ID NO: 2761134 - RNA, 21 nt, Human
gcuccccucggagaagagcug

SEQ ID NO: 2761135 - RNA, 18 nt, Human
gcuccccucggagaagag

SEQ ID NO: 2761136 - RNA, 15 nt, Human
gcuccacuuggucug

SEQ ID NO: 2761137 - RNA, 15 nt, Human
gcuagaacucccuuu

SEQ ID NO: 2761138 - RNA, 14 nt, Human
gcuagaacucccuu

SEQ ID NO: 2761139 - RNA, 13 nt, Human
gcuagaacucccu

SEQ ID NO: 2761140 - RNA, 12 nt, Human
gcuagaacuccc

SEQ ID NO: 2761141 - RNA, 18 nt, Human
gcuagaacucccuuucaa

SEQ ID NO: 2761142 - RNA, 16 nt, Human
gcuagaacucccuuuc

SEQ ID NO: 2761143 - RNA, 22 nt, Human
gcuauuucuauauuuucauucu

SEQ ID NO: 2761144 - RNA, 14 nt, Human
gcugggguuaucug

SEQ ID NO: 2761145 - RNA, 23 nt, Human
gcugggguuaucugaagucagau

SEQ ID NO: 2761146 - RNA, 22 nt, Human
gcugggguuaucugaagucaga

SEQ ID NO: 2761147 - RNA, 22 nt, Human
ggacuucuuuaauuuuggaauu

SEQ ID NO: 2761148 - RNA, 18 nt, Human
ggacuucuuuaauuuugg

SEQ ID NO: 2761149 - RNA, 21 nt, Human
ggacuucuuuaauuuuggaau

SEQ ID NO: 2761150 - RNA, 15 nt, Human
ggacuuguuagaucu

SEQ ID NO: 2761151 - RNA, 12 nt, Human
ggacuuguuaga

SEQ ID NO: 2761152 - RNA, 13 nt, Human
ggagaaacuggaa

SEQ ID NO: 2761153 - RNA, 22 nt, Human
ggacucauuuuaaaaaauggaa

SEQ ID NO: 2761154 - RNA, 11 nt, Human
aaacacagcaa

SEQ ID NO: 2761155 - RNA, 12 nt, Human
aaacacagcaag

SEQ ID NO: 2761156 - RNA, 14 nt, Human
aaacacagcaaggg

SEQ ID NO: 2761157 - RNA, 19 nt, Human
ggggaauugaggacacuga

SEQ ID NO: 2761158 - RNA, 15 nt, Human
aaacagucucaggaa

SEQ ID NO: 2761159 - RNA, 14 nt, Human
aaacaguagugaua

SEQ ID NO: 2761160 - RNA, 12 nt, Human
aaaccacagcag

SEQ ID NO: 2761161 - RNA, 15 nt, Human
aaacucguuaauuug

SEQ ID NO: 2761162 - RNA, 17 nt, Human
aaagcacugacuucuaa

SEQ ID NO: 2761163 - RNA, 21 nt, Human
aaagcacugacuucuaaguaa

SEQ ID NO: 2761164 - RNA, 14 nt, Human
aaagguacuucaaa

SEQ ID NO: 2761165 - RNA, 23 nt, Human
aaacuucagcgguuuauauaagc

SEQ ID NO: 2761166 - RNA, 19 nt, Human
aaacuucagacauagaauu

SEQ ID NO: 2761167 - RNA, 11 nt, Human
aaacuuuucug

SEQ ID NO: 2761168 - RNA, 13 nt, Human
aaagacagugaaa

SEQ ID NO: 2761169 - RNA, 18 nt, Human
aaagacuauucaaacagu

SEQ ID NO: 2761170 - RNA, 19 nt, Human
aaagacuauucaaacaguc

SEQ ID NO: 2761171 - RNA, 17 nt, Human
aaagacuauucaaacag

SEQ ID NO: 2761172 - RNA, 21 nt, Human
aaagacuauucaaacagucuc

SEQ ID NO: 2761173 - RNA, 15 nt, Human
aaagacuccaaagaa

SEQ ID NO: 2761174 - RNA, 21 nt, Human
aaagacuccaaagaaauguaa

SEQ ID NO: 2761175 - RNA, 14 nt, Human
aaagacuccaaaga

SEQ ID NO: 2761176 - RNA, 15 nt, Human
aaagaggcagcuuga

SEQ ID NO: 2761177 - RNA, 15 nt, Human
aaagaggaaugaagu

SEQ ID NO: 2761178 - RNA, 12 nt, Human
aaaguuuaauau

SEQ ID NO: 2761179 - RNA, 17 nt, Human
aaaguugccuaaaucca

SEQ ID NO: 2761180 - RNA, 16 nt, Human
aaaguugccuaaaucc

SEQ ID NO: 2761181 - RNA, 23 nt, Human
aaaguugccuaaauccauuugga

SEQ ID NO: 2761182 - RNA, 20 nt, Human
aaaguauuaagcauauauuu

SEQ ID NO: 2761183 - RNA, 19 nt, Human
aaaguauuaagcauauauu

SEQ ID NO: 2761184 - RNA, 18 nt, Human
aaaguauuaagcauauau

SEQ ID NO: 2761185 - RNA, 13 nt, Human
aaaguauuaagca

SEQ ID NO: 2761186 - RNA, 17 nt, Human
aaaguauguuagugcaa

SEQ ID NO: 2761187 - RNA, 14 nt, Human
aaaguugccuaaau

SEQ ID NO: 2761188 - RNA, 13 nt, Human
aaaguugccuaaa

SEQ ID NO: 2761189 - RNA, 23 nt, Human
aaaguucugcagauaaacaguag

SEQ ID NO: 2761190 - RNA, 20 nt, Human
aaagguauuuuaaucaccaa

SEQ ID NO: 2761191 - RNA, 18 nt, Human
aaaguauguuagugcaaa

SEQ ID NO: 2761192 - RNA, 19 nt, Human
aaauacacacucaaaucaa

SEQ ID NO: 2761193 - RNA, 13 nt, Human
aaauacaauuuug

SEQ ID NO: 2761194 - RNA, 23 nt, Human
aaauaauuuuuauauuugaaaua

SEQ ID NO: 2761195 - RNA, 22 nt, Human
aaauaauuuuuauauuugaaau

SEQ ID NO: 2761196 - RNA, 20 nt, Human
aaauacaauuuuguuucugu

SEQ ID NO: 2761197 - RNA, 18 nt, Human
aaauacaauuuuguuucu

SEQ ID NO: 2761198 - RNA, 17 nt, Human
aaauacaauuuuguuuc

SEQ ID NO: 2761199 - RNA, 14 nt, Human
aaauacaauuuugu

SEQ ID NO: 2761200 - RNA, 22 nt, Human
aaauacaauuuuguuucuguac

SEQ ID NO: 2761201 - RNA, 21 nt, Human
aaauacaauuuuguuucugua

SEQ ID NO: 2761202 - RNA, 15 nt, Human
aaauacacacucaaa

SEQ ID NO: 2761203 - RNA, 21 nt, Human
aaauaauuuuuauauuugaaa

SEQ ID NO: 2761204 - RNA, 23 nt, Human
guacacugccuucucaacuccaa

SEQ ID NO: 2761205 - RNA, 20 nt, Human
guaauaggcguaacuaauuu

SEQ ID NO: 2761206 - RNA, 15 nt, Human
aaauccauacauuug

SEQ ID NO: 2761207 - RNA, 17 nt, Human
aaauauuauguuaaaac

SEQ ID NO: 2761208 - RNA, 12 nt, Human
aaaucauuucug

SEQ ID NO: 2761209 - RNA, 11 nt, Human
aaaucauuucu

SEQ ID NO: 2761210 - RNA, 19 nt, Human
aaaucauuucugcaucagc

SEQ ID NO: 2761211 - RNA, 21 nt, Human
aaaucauuucugcaucagcug

SEQ ID NO: 2761212 - RNA, 22 nt, Human
aaaucauuucugcaucagcugc

SEQ ID NO: 2761213 - RNA, 23 nt, Human
aaaucauuucugcaucagcugcu

SEQ ID NO: 2761214 - RNA, 22 nt, Human
guacuucaaauccuugaagauu

SEQ ID NO: 2761215 - RNA, 21 nt, Human
guacuucaaauccuugaagau

SEQ ID NO: 2761216 - RNA, 15 nt, Human
guacuucaugcuguc

SEQ ID NO: 2761217 - RNA, 21 nt, Human
ggcacaguuuucugagaaaga

SEQ ID NO: 2761218 - RNA, 13 nt, Human
ggccuccauccug

SEQ ID NO: 2761219 - RNA, 15 nt, Human
ggccuccauccugag

SEQ ID NO: 2761220 - RNA, 14 nt, Human
ggccuccauccuga

SEQ ID NO: 2761221 - RNA, 17 nt, Human
ggcauaacauaaaucug

SEQ ID NO: 2761222 - RNA, 16 nt, Human
ggcauaacauaaaucu

SEQ ID NO: 2761223 - RNA, 17 nt, Human
aaaaccaguauuguaca

SEQ ID NO: 2761224 - RNA, 14 nt, Human
aaaaccacagcagu

SEQ ID NO: 2761225 - RNA, 17 nt, Human
aaaaaugguuuaaaugg

SEQ ID NO: 2761226 - RNA, 15 nt, Human
aaaacuucagacaua

SEQ ID NO: 2761227 - RNA, 15 nt, Human
ggcuguacccaggaa

SEQ ID NO: 2761228 - RNA, 14 nt, Human
aaaaauaacaauga

SEQ ID NO: 2761229 - RNA, 20 nt, Human
gggaacccaaguccaagcau

SEQ ID NO: 2761230 - RNA, 22 nt, Human
gggacagucaccucauggaauu

SEQ ID NO: 2761231 - RNA, 21 nt, Human
gggacagucaccucauggaau

SEQ ID NO: 2761232 - RNA, 20 nt, Human
gggacagucaccucauggaa

SEQ ID NO: 2761233 - RNA, 14 nt, Human
ggcuccacuugguc

SEQ ID NO: 2761234 - RNA, 21 nt, Human
gacagcccuucuuuccacaga

SEQ ID NO: 2761235 - RNA, 20 nt, Human
gacagaaagcagaacaguga

SEQ ID NO: 2761236 - RNA, 14 nt, Human
gacagaaagcagaa

SEQ ID NO: 2761237 - RNA, 15 nt, Human
gacuauucaaacagu

SEQ ID NO: 2761238 - RNA, 16 nt, Human
gacuauucaaacaguc

SEQ ID NO: 2761239 - RNA, 19 nt, Human
gacuuuggauaauaaggaa

SEQ ID NO: 2761240 - RNA, 17 nt, Human
gacuguggugacuuugg

SEQ ID NO: 2761241 - RNA, 15 nt, Human
gagcgacagugagac

SEQ ID NO: 2761242 - RNA, 13 nt, Human
gagcgacagugag

SEQ ID NO: 2761243 - RNA, 13 nt, Human
gcauaacauaaau

SEQ ID NO: 2761244 - RNA, 22 nt, Human
gcaguugaaaagacuccaaaga

SEQ ID NO: 2761245 - RNA, 15 nt, Human
gcagcuuauucacaa

SEQ ID NO: 2761246 - RNA, 16 nt, Human
gcauuguaaaugugcu

SEQ ID NO: 2761247 - RNA, 16 nt, Human
gcaauaaaauggguuu

SEQ ID NO: 2761248 - RNA, 18 nt, Human
gcaauagucaaauugugu

SEQ ID NO: 2761249 - RNA, 15 nt, Human
gauucuuaaaguuga

SEQ ID NO: 2761250 - RNA, 21 nt, Human
gauucuuaaaguugaauuuau

SEQ ID NO: 2761251 - RNA, 17 nt, Human
gauucuuaaaguugaau

SEQ ID NO: 2761252 - RNA, 16 nt, Human
gauucuuaaaguugaa

SEQ ID NO: 2761253 - RNA, 16 nt, Human
gcaaaaauauuuuaug

SEQ ID NO: 2761254 - RNA, 23 nt, Human
gcaaaaauauuuuaugauccagc

SEQ ID NO: 2761255 - RNA, 22 nt, Human
gcaaaaauauuuuaugauccag

SEQ ID NO: 2761256 - RNA, 17 nt, Human
gcaaaaauauuuuauga

SEQ ID NO: 2761257 - RNA, 15 nt, Human
gaaaucuuuaaaaaa

SEQ ID NO: 2761258 - RNA, 12 nt, Human
gaaaucuuuaaa

SEQ ID NO: 2761259 - RNA, 18 nt, Human
gaaagaaaaucaggcugg

SEQ ID NO: 2761260 - RNA, 16 nt, Human
gaaaagacuccaaaga

SEQ ID NO: 2761261 - RNA, 17 nt, Human
gaaaagacuccaaagaa

SEQ ID NO: 2761262 - RNA, 14 nt, Human
gaaaagacuccaaa

SEQ ID NO: 2761263 - RNA, 21 nt, Human
gaaaacuuuaugcuaagugaa

SEQ ID NO: 2761264 - RNA, 16 nt, Human
gaacccaaguccaagc

SEQ ID NO: 2761265 - RNA, 17 nt, Human
gaacccaaguccaagca

SEQ ID NO: 2761266 - RNA, 17 nt, Human
gaacccgggaggcagag

SEQ ID NO: 2761267 - RNA, 18 nt, Human
cuugucucagauuuuauu

SEQ ID NO: 2761268 - RNA, 13 nt, Human
cuugucucagauu

SEQ ID NO: 2761269 - RNA, 17 nt, Human
cuugucucagauuuuau

SEQ ID NO: 2761270 - RNA, 14 nt, Human
cuugucucagauuu

SEQ ID NO: 2761271 - RNA, 16 nt, Human
cuuggucugugagaug

SEQ ID NO: 2761272 - RNA, 19 nt, Human
cuuggucugugagaugcua

SEQ ID NO: 2761273 - RNA, 14 nt, Human
cuuucagauacugg

SEQ ID NO: 2761274 - RNA, 22 nt, Human
cuuucagauacuggauuguacu

SEQ ID NO: 2761275 - RNA, 13 nt, Human
cuuucagauacug

SEQ ID NO: 2761276 - RNA, 17 nt, Human
cuuucagauacuggauu

SEQ ID NO: 2761277 - RNA, 15 nt, Human
cuuucagauacugga

SEQ ID NO: 2761278 - RNA, 13 nt, Human
cuucucacauuua

SEQ ID NO: 2761279 - RNA, 20 nt, Human
cuucucacauuuauauuuuu

SEQ ID NO: 2761280 - RNA, 21 nt, Human
cuucuaaguaaaaccacagca

SEQ ID NO: 2761281 - RNA, 13 nt, Human
cuucuaaguaaaa

SEQ ID NO: 2761282 - RNA, 17 nt, Human
cuucuaaguaaaaccac

SEQ ID NO: 2761283 - RNA, 21 nt, Human
cugccuccccuccucugcuug

SEQ ID NO: 2761284 - RNA, 15 nt, Human
cuguacuuuuuggca

SEQ ID NO: 2761285 - RNA, 13 nt, Human
cuguuauaaucuu

SEQ ID NO: 2761286 - RNA, 22 nt, Human
cuuaaaguugaauuuauuggcu

SEQ ID NO: 2761287 - RNA, 14 nt, Human
cuuaaaguugaauu

SEQ ID NO: 2761288 - RNA, 18 nt, Human
cuuaaaguugaauuuauu

SEQ ID NO: 2761289 - RNA, 15 nt, Human
cuuaaaguugaauuu

SEQ ID NO: 2761290 - RNA, 21 nt, Human
cuuaaaaaugguuuaaauggu

SEQ ID NO: 2761291 - RNA, 18 nt, Human
auuauauuuauuacugua

SEQ ID NO: 2761292 - RNA, 15 nt, Human
auuauauuuauuacu

SEQ ID NO: 2761293 - RNA, 21 nt, Human
auuauguuaaaacugggacag

SEQ ID NO: 2761294 - RNA, 20 nt, Human
auuauuaccuuacagaaguu

SEQ ID NO: 2761295 - RNA, 17 nt, Human
auuauucaaaguugccu

SEQ ID NO: 2761296 - RNA, 13 nt, Human
auuauucaaaguu

SEQ ID NO: 2761297 - RNA, 15 nt, Human
auuauucaaaguugc

SEQ ID NO: 2761298 - RNA, 14 nt, Human
auuauucaaaguug

SEQ ID NO: 2761299 - RNA, 16 nt, Human
auucaaacagucucag

SEQ ID NO: 2761300 - RNA, 18 nt, Human
auucaaacagucucagga

SEQ ID NO: 2761301 - RNA, 19 nt, Human
auucaaacagucucaggaa

SEQ ID NO: 2761302 - RNA, 20 nt, Human
auucaaacagucucaggaaa

SEQ ID NO: 2761303 - RNA, 13 nt, Human
auucuguauagau

SEQ ID NO: 2761304 - RNA, 12 nt, Human
auucuguauaga

SEQ ID NO: 2761305 - RNA, 11 nt, Human
auucuguauag

SEQ ID NO: 2761306 - RNA, 21 nt, Human
auucuuaaaguugaauuuauu

SEQ ID NO: 2761307 - RNA, 20 nt, Human
auucuuaaaguugaauuuau

SEQ ID NO: 2761308 - RNA, 19 nt, Human
auucuuaaaguugaauuua

SEQ ID NO: 2761309 - RNA, 19 nt, Human
auugacacuuaaaaauggu

SEQ ID NO: 2761310 - RNA, 17 nt, Human
auugacacuuaaaaaug

SEQ ID NO: 2761311 - RNA, 15 nt, Human
auugacacuuaaaaa

SEQ ID NO: 2761312 - RNA, 23 nt, Human
auuuuuucucuaggaaauauuua

SEQ ID NO: 2761313 - RNA, 20 nt, Human
auuuuuucucuaggaaauau

SEQ ID NO: 2761314 - RNA, 18 nt, Human
auuuuuuguuaaaugauu

SEQ ID NO: 2761315 - RNA, 21 nt, Human
auuuuuguuuucauuaucuca

SEQ ID NO: 2761316 - RNA, 22 nt, Human
auuuuugugauuuugugauuga

SEQ ID NO: 2761317 - RNA, 15 nt, Human
auuuuguuucuguac

SEQ ID NO: 2761318 - RNA, 14 nt, Human
auuuuguuucugua

SEQ ID NO: 2761319 - RNA, 19 nt, Human
auuuuucuuauuucauuuc

SEQ ID NO: 2761320 - RNA, 20 nt, Human
auuuuucuuauuucauuucu

SEQ ID NO: 2761321 - RNA, 15 nt, Human
auuuuucuuauuuca

SEQ ID NO: 2761322 - RNA, 12 nt, Human
auuuuggaauuu

SEQ ID NO: 2761323 - RNA, 11 nt, Human
auuuuguuucu

SEQ ID NO: 2761324 - RNA, 14 nt, Human
auuuuccugaaaac

SEQ ID NO: 2761325 - RNA, 14 nt, Human
auuuucuauaauuu

SEQ ID NO: 2761326 - RNA, 15 nt, Human
auuuucuauaauuua

SEQ ID NO: 2761327 - RNA, 16 nt, Human
auuuuaaaagaaugau

SEQ ID NO: 2761328 - RNA, 23 nt, Human
auuuuaaaagaaugauuaugaau

SEQ ID NO: 2761329 - RNA, 17 nt, Human
auuuuaacaacagcugg

SEQ ID NO: 2761330 - RNA, 14 nt, Human
auuuguauaaaaua

SEQ ID NO: 2761331 - RNA, 22 nt, Human
auuuguaguguuggagaagaac

SEQ ID NO: 2761332 - RNA, 19 nt, Human
auuuguaguguuggagaag

SEQ ID NO: 2761333 - RNA, 15 nt, Human
auuugaauuuugugu

SEQ ID NO: 2761334 - RNA, 21 nt, Human
auuugacauagucuggcugua

SEQ ID NO: 2761335 - RNA, 17 nt, Human
auuugacauagucuggc

SEQ ID NO: 2761336 - RNA, 16 nt, Human
auuugacauagucugg

SEQ ID NO: 2761337 - RNA, 14 nt, Human
auuuauuuuaauaa

SEQ ID NO: 2761338 - RNA, 13 nt, Human
auugucuagugaa

SEQ ID NO: 2761339 - RNA, 15 nt, Human
auuggcuuuucugau

SEQ ID NO: 2761340 - RNA, 13 nt, Human
auuggcuuuucug

SEQ ID NO: 2761341 - RNA, 20 nt, Human
auuggcuuuucugauccagu

SEQ ID NO: 2761342 - RNA, 19 nt, Human
auuggcuuuucugauccag

SEQ ID NO: 2761343 - RNA, 16 nt, Human
auuggcuuuucugauc

SEQ ID NO: 2761344 - RNA, 13 nt, Human
auugacuuuuuau

SEQ ID NO: 2761345 - RNA, 19 nt, Human
auuggagcucgugggacag

SEQ ID NO: 2761346 - RNA, 19 nt, Human
auuggacaguaaaauccac

SEQ ID NO: 2761347 - RNA, 16 nt, Human
uuuauauuuacuaaaa

SEQ ID NO: 2761348 - RNA, 13 nt, Human
uuuauauuuacua

SEQ ID NO: 2761349 - RNA, 23 nt, Human
augcuauuucuauauuuucauuc

SEQ ID NO: 2761350 - RNA, 22 nt, Human
augcuauuucuauauuuucauu

SEQ ID NO: 2761351 - RNA, 21 nt, Human
augcuauuucuauauuuucau

SEQ ID NO: 2761352 - RNA, 11 nt, Human
augcuauuucu

SEQ ID NO: 2761353 - RNA, 20 nt, Human
augcuauuucuauauuuuca

SEQ ID NO: 2761354 - RNA, 15 nt, Human
augcuauuucuauau

SEQ ID NO: 2761355 - RNA, 14 nt, Human
augcuauuucuaua

SEQ ID NO: 2761356 - RNA, 13 nt, Human
augcuauuucuau

SEQ ID NO: 2761357 - RNA, 18 nt, Human
uuuauuacaguauaauua

SEQ ID NO: 2761358 - RNA, 14 nt, Human
uuuauuacaguaua

SEQ ID NO: 2761359 - RNA, 22 nt, Human
augcuagaacucccuuucaaca

SEQ ID NO: 2761360 - RNA, 19 nt, Human
augcuagaacucccuuuca

SEQ ID NO: 2761361 - RNA, 21 nt, Human
augcuagaacucccuuucaac

SEQ ID NO: 2761362 - RNA, 20 nt, Human
augcuagaacucccuuucaa

SEQ ID NO: 2761363 - RNA, 15 nt, Human
auggaacgcguugaa

SEQ ID NO: 2761364 - RNA, 17 nt, Human
auggaacgcguugaaau

SEQ ID NO: 2761365 - RNA, 16 nt, Human
auggaacgcguugaaa

SEQ ID NO: 2761366 - RNA, 19 nt, Human
auggaacgcguugaaauug

SEQ ID NO: 2761367 - RNA, 18 nt, Human
auggaacgcguugaaauu

SEQ ID NO: 2761368 - RNA, 16 nt, Human
uuucaaacauauauaa

SEQ ID NO: 2761369 - RNA, 16 nt, Human
auggacuguggugacu

SEQ ID NO: 2761370 - RNA, 22 nt, Human
auggacuguggugacuuuggau

SEQ ID NO: 2761371 - RNA, 17 nt, Human
auggacuguggugacuu

SEQ ID NO: 2761372 - RNA, 15 nt, Human
uuucauuauuuuauu

SEQ ID NO: 2761373 - RNA, 13 nt, Human
uuucauuauuuua

SEQ ID NO: 2761374 - RNA, 20 nt, Human
uuucauuauuuuauuaugaa

SEQ ID NO: 2761375 - RNA, 19 nt, Human
uuucauuauuuuauuauga

SEQ ID NO: 2761376 - RNA, 14 nt, Human
augggauaaaugcc

SEQ ID NO: 2761377 - RNA, 23 nt, Human
auggcuauaggugcuacaaaaac

SEQ ID NO: 2761378 - RNA, 19 nt, Human
auggcuaagcaaaauguga

SEQ ID NO: 2761379 - RNA, 16 nt, Human
auggcacuaguauuuc

SEQ ID NO: 2761380 - RNA, 14 nt, Human
auggcacuaguauu

SEQ ID NO: 2761381 - RNA, 15 nt, Human
augauaacuggaaac

SEQ ID NO: 2761382 - RNA, 10 nt, Human
augauccagc

SEQ ID NO: 2761383 - RNA, 20 nt, Human
augauccagcagauuauuca

SEQ ID NO: 2761384 - RNA, 19 nt, Human
augauccagcagauuauuc

SEQ ID NO: 2761385 - RNA, 22 nt, Human
augauccagcagauuauucacu

SEQ ID NO: 2761386 - RNA, 14 nt, Human
augauuaaguaaug

SEQ ID NO: 2761387 - RNA, 18 nt, Human
augauuaaguaaugauaa

SEQ ID NO: 2761388 - RNA, 17 nt, Human
augccauuuaaagcuua

SEQ ID NO: 2761389 - RNA, 21 nt, Human
augccauuuaaagcuuauuaa

SEQ ID NO: 2761390 - RNA, 13 nt, Human
augcaguucugaa

SEQ ID NO: 2761391 - RNA, 21 nt, Human
uuuaaauaaauaaauagcuag

SEQ ID NO: 2761392 - RNA, 18 nt, Human
uuuaaauauaugcuaagu

SEQ ID NO: 2761393 - RNA, 15 nt, Human
uuugaaauauugacu

SEQ ID NO: 2761394 - RNA, 20 nt, Human
uuucuguacuuuuuggcaua

SEQ ID NO: 2761395 - RNA, 19 nt, Human
uuucuguacuuuuuggcau

SEQ ID NO: 2761396 - RNA, 20 nt, Human
augggauaaaugccaucaau

SEQ ID NO: 2761397 - RNA, 16 nt, Human
augggauaaaugccau

SEQ ID NO: 2761398 - RNA, 15 nt, Human
augggauaaaugcca

SEQ ID NO: 2761399 - RNA, 18 nt, Human
uuucucccagucauuuaa

SEQ ID NO: 2761400 - RNA, 17 nt, Human
uuucucccagucauuua

SEQ ID NO: 2761401 - RNA, 23 nt, Human
auguaaaucccauuauucaaagu

SEQ ID NO: 2761402 - RNA, 22 nt, Human
auguaaaucccauuauucaaag

SEQ ID NO: 2761403 - RNA, 20 nt, Human
auguaaaucccauuauucaa

SEQ ID NO: 2761404 - RNA, 14 nt, Human
auguaaaucccauu

SEQ ID NO: 2761405 - RNA, 21 nt, Human
augguucccuugaugaagaag

SEQ ID NO: 2761406 - RNA, 14 nt, Human
uuugcaagccagau

SEQ ID NO: 2761407 - RNA, 13 nt, Human
uuugcucauggaa

SEQ ID NO: 2761408 - RNA, 16 nt, Human
auguacuucaugcugu

SEQ ID NO: 2761409 - RNA, 19 nt, Human
auguagaggagaaacugga

SEQ ID NO: 2761410 - RNA, 17 nt, Human
auguagaggagaaacug

SEQ ID NO: 2761411 - RNA, 13 nt, Human
auguagaggagaa

SEQ ID NO: 2761412 - RNA, 12 nt, Human
auguagaggaga

SEQ ID NO: 2761413 - RNA, 20 nt, Human
uuuggcauaacauaaaucug

SEQ ID NO: 2761414 - RNA, 21 nt, Human
uuuggcauaacauaaaucugu

SEQ ID NO: 2761415 - RNA, 17 nt, Human
auguccacugguucuuc

SEQ ID NO: 2761416 - RNA, 16 nt, Human
auguccacugguucuu

SEQ ID NO: 2761417 - RNA, 19 nt, Human
uuugugcugguguaugugu

SEQ ID NO: 2761418 - RNA, 17 nt, Human
uuugugaagcaaaauuu

SEQ ID NO: 2761419 - RNA, 21 nt, Human
uuuguaguguuggagaagaac

SEQ ID NO: 2761420 - RNA, 19 nt, Human
uuuguaguguuggagaaga

SEQ ID NO: 2761421 - RNA, 17 nt, Human
uuuguaguguuggagaa

SEQ ID NO: 2761422 - RNA, 14 nt, Human
uucggccuccaucc

SEQ ID NO: 2761423 - RNA, 15 nt, Human
uucggccuccauccu

SEQ ID NO: 2761424 - RNA, 13 nt, Human
uucuaagaaguga

SEQ ID NO: 2761425 - RNA, 23 nt, Human
uucuaagaagugaaaaucuacac

SEQ ID NO: 2761426 - RNA, 15 nt, Human
uucuaaguaaaacca

SEQ ID NO: 2761427 - RNA, 16 nt, Human
uucuaaguaaaaccac

SEQ ID NO: 2761428 - RNA, 17 nt, Human
aucaggguuaguauugu

SEQ ID NO: 2761429 - RNA, 22 nt, Human
aucacuugucaauaaaauccau

SEQ ID NO: 2761430 - RNA, 22 nt, Human
aucaccugucuugccuuuuuca

SEQ ID NO: 2761431 - RNA, 23 nt, Human
aucaccugucuugccuuuuucau

SEQ ID NO: 2761432 - RNA, 14 nt, Human
aucaacagauaaau

SEQ ID NO: 2761433 - RNA, 18 nt, Human
auauuuuuuguuaaauga

SEQ ID NO: 2761434 - RNA, 20 nt, Human
auauuuuuuguuaaaugauu

SEQ ID NO: 2761435 - RNA, 19 nt, Human
uuccguagguuauuuucag

SEQ ID NO: 2761436 - RNA, 21 nt, Human
auccauuuggaaaucuuuaaa

SEQ ID NO: 2761437 - RNA, 20 nt, Human
auccauuuggaaaucuuuaa

SEQ ID NO: 2761438 - RNA, 12 nt, Human
uucucuaggaaa

SEQ ID NO: 2761439 - RNA, 14 nt, Human
uugaaauuguaauu

SEQ ID NO: 2761440 - RNA, 13 nt, Human
uugaaauuguaau

SEQ ID NO: 2761441 - RNA, 17 nt, Human
uugaaauuguauuacaa

SEQ ID NO: 2761442 - RNA, 17 nt, Human
uugaaauuguaauuaua

SEQ ID NO: 2761443 - RNA, 15 nt, Human
uugaaauuguaauua

SEQ ID NO: 2761444 - RNA, 18 nt, Human
uugaacccgggaggcaga

SEQ ID NO: 2761445 - RNA, 19 nt, Human
uugaacccgggaggcagag

SEQ ID NO: 2761446 - RNA, 13 nt, Human
uugcaucaauuuu

SEQ ID NO: 2761447 - RNA, 22 nt, Human
uugcaagccagauuuuccugaa

SEQ ID NO: 2761448 - RNA, 17 nt, Human
uugaagggaaauuucag

SEQ ID NO: 2761449 - RNA, 18 nt, Human
aucuacacuccagugaga

SEQ ID NO: 2761450 - RNA, 19 nt, Human
aucuacacuccagugagac

SEQ ID NO: 2761451 - RNA, 23 nt, Human
aucugccuaaggacuucuuuaau

SEQ ID NO: 2761452 - RNA, 22 nt, Human
aucugccuaaggacuucuuuaa

SEQ ID NO: 2761453 - RNA, 21 nt, Human
aucugccuaaggacuucuuua

SEQ ID NO: 2761454 - RNA, 11 nt, Human
aucugccuaag

SEQ ID NO: 2761455 - RNA, 16 nt, Human
augaauuacauuugua

SEQ ID NO: 2761456 - RNA, 15 nt, Human
augaauuacauuugu

SEQ ID NO: 2761457 - RNA, 15 nt, Human
augaauuaaguuuuu

SEQ ID NO: 2761458 - RNA, 23 nt, Human
augaauggcuaagcaaaauguga

SEQ ID NO: 2761459 - RNA, 15 nt, Human
uuagaauucuguaua

SEQ ID NO: 2761460 - RNA, 14 nt, Human
uuagaauucuguau

SEQ ID NO: 2761461 - RNA, 18 nt, Human
auaaaugccaucaauaaa

SEQ ID NO: 2761462 - RNA, 17 nt, Human
auaaaugccaucaauaa

SEQ ID NO: 2761463 - RNA, 19 nt, Human
auaaaucugugaacuugaa

SEQ ID NO: 2761464 - RNA, 16 nt, Human
auaaaucugugaacuu

SEQ ID NO: 2761465 - RNA, 15 nt, Human
auaaaucugugaacu

SEQ ID NO: 2761466 - RNA, 14 nt, Human
auaaucuuucacag

SEQ ID NO: 2761467 - RNA, 15 nt, Human
uuagggagagaagau

SEQ ID NO: 2761468 - RNA, 14 nt, Human
uuagggagagaaga

SEQ ID NO: 2761469 - RNA, 16 nt, Human
uuaggguuaugauuaa

SEQ ID NO: 2761470 - RNA, 14 nt, Human
uuaggguuaugauu

SEQ ID NO: 2761471 - RNA, 22 nt, Human
uuaaaccaugggauaaaugcca

SEQ ID NO: 2761472 - RNA, 21 nt, Human
uuaaaccaugggauaaaugcc

SEQ ID NO: 2761473 - RNA, 22 nt, Human
uuaaaguugaauuuauuggcuu

SEQ ID NO: 2761474 - RNA, 17 nt, Human
uuaaaguugaauuuauu

SEQ ID NO: 2761475 - RNA, 16 nt, Human
uuaaaguugaauuuau

SEQ ID NO: 2761476 - RNA, 13 nt, Human
uuaaaguugaauu

SEQ ID NO: 2761477 - RNA, 19 nt, Human
aguuugugcugguguaugu

SEQ ID NO: 2761478 - RNA, 17 nt, Human
uuaaaccaugggauaaa

SEQ ID NO: 2761479 - RNA, 22 nt, Human
uuaaaaucauuucugcaucagc

SEQ ID NO: 2761480 - RNA, 14 nt, Human
uuaaaaucauuucu

SEQ ID NO: 2761481 - RNA, 16 nt, Human
uuaaaaaauggaacau

SEQ ID NO: 2761482 - RNA, 19 nt, Human
uuaaaaaagaaacauuugg

SEQ ID NO: 2761483 - RNA, 15 nt, Human
aguuuagcuggaaaa

SEQ ID NO: 2761484 - RNA, 17 nt, Human
aguuuaaauuguaauag

SEQ ID NO: 2761485 - RNA, 20 nt, Human
aguuuaaauuguaauaggcg

SEQ ID NO: 2761486 - RNA, 13 nt, Human
uuaauuuuggaau

SEQ ID NO: 2761487 - RNA, 15 nt, Human
uuaauuuuggaauuu

SEQ ID NO: 2761488 - RNA, 14 nt, Human
uuaauuuuggaauu

SEQ ID NO: 2761489 - RNA, 18 nt, Human
aguuuuguuuggaccaaa

SEQ ID NO: 2761490 - RNA, 12 nt, Human
aguuuuguuugg

SEQ ID NO: 2761491 - RNA, 16 nt, Human
aguuuuguuuggacca

SEQ ID NO: 2761492 - RNA, 14 nt, Human
aguuuuguuuggac

SEQ ID NO: 2761493 - RNA, 16 nt, Human
aguuuuauaugcuucu

SEQ ID NO: 2761494 - RNA, 19 nt, Human
uuauucaaaguugccuaaa

SEQ ID NO: 2761495 - RNA, 15 nt, Human
uuauucaaaguugcc

SEQ ID NO: 2761496 - RNA, 13 nt, Human
uuauucaaaguug

SEQ ID NO: 2761497 - RNA, 14 nt, Human
uuauuauguaaauc

SEQ ID NO: 2761498 - RNA, 13 nt, Human
uuauuauguaaau

SEQ ID NO: 2761499 - RNA, 22 nt, Human
uuauuauguaaaucccauuauu

SEQ ID NO: 2761500 - RNA, 16 nt, Human
uuauuauguaaauccc

SEQ ID NO: 2761501 - RNA, 14 nt, Human
uuauucacugauuu

SEQ ID NO: 2761502 - RNA, 23 nt, Human
uuauuaugaaacuuguguaaaua

SEQ ID NO: 2761503 - RNA, 22 nt, Human
uuauuaugaaacuuguguaaau

SEQ ID NO: 2761504 - RNA, 21 nt, Human
uuauuaugaaacuuguguaaa

SEQ ID NO: 2761505 - RNA, 20 nt, Human
uuauuaugaaacuuguguaa

SEQ ID NO: 2761506 - RNA, 17 nt, Human
uuauuaugaaacuugug

SEQ ID NO: 2761507 - RNA, 11 nt, Human
uuauuaugaaa

SEQ ID NO: 2761508 - RNA, 15 nt, Human
uuauuauauuuacaa

SEQ ID NO: 2761509 - RNA, 14 nt, Human
uuauuauauuuaca

SEQ ID NO: 2761510 - RNA, 19 nt, Human
uuauguuaaaacugggaca

SEQ ID NO: 2761511 - RNA, 15 nt, Human
auacuggauuguacu

SEQ ID NO: 2761512 - RNA, 16 nt, Human
auacucauuaggaugg

SEQ ID NO: 2761513 - RNA, 21 nt, Human
auagauuagagaguguugaaa

SEQ ID NO: 2761514 - RNA, 16 nt, Human
auagauuagaauucug

SEQ ID NO: 2761515 - RNA, 15 nt, Human
auagauuagaauucu

SEQ ID NO: 2761516 - RNA, 13 nt, Human
auagauuagaauu

SEQ ID NO: 2761517 - RNA, 22 nt, Human
auagauuagagaguguugaaac

SEQ ID NO: 2761518 - RNA, 22 nt, Human
auagaggaagccugauuaaaga

SEQ ID NO: 2761519 - RNA, 21 nt, Human
auagaggaagccugauuaaag

SEQ ID NO: 2761520 - RNA, 18 nt, Human
auagauaggucagugcaa

SEQ ID NO: 2761521 - RNA, 17 nt, Human
auagaauuaacacauga

SEQ ID NO: 2761522 - RNA, 14 nt, Human
auagaaccucuuug

SEQ ID NO: 2761523 - RNA, 20 nt, Human
auagaaccucuuugucuaca

SEQ ID NO: 2761524 - RNA, 13 nt, Human
auagaaguaaaaa

SEQ ID NO: 2761525 - RNA, 16 nt, Human
uuaugugcgcugauaa

SEQ ID NO: 2761526 - RNA, 11 nt, Human
uuauguaaauc

SEQ ID NO: 2761527 - RNA, 13 nt, Human
uuauguaaauccc

SEQ ID NO: 2761528 - RNA, 12 nt, Human
uuauguaaaucc

SEQ ID NO: 2761529 - RNA, 23 nt, Human
uuauguaaaucccauuauucaaa

SEQ ID NO: 2761530 - RNA, 22 nt, Human
uuauguaaaucccauuauucaa

SEQ ID NO: 2761531 - RNA, 21 nt, Human
uuauguaaaucccauuauuca

SEQ ID NO: 2761532 - RNA, 19 nt, Human
uuauguaaaucccauuauu

SEQ ID NO: 2761533 - RNA, 23 nt, Human
uuaugauccagcagauuauucac

SEQ ID NO: 2761534 - RNA, 22 nt, Human
uuaugauccagcagauuauuca

SEQ ID NO: 2761535 - RNA, 19 nt, Human
uuaugauuaaguaaugaua

SEQ ID NO: 2761536 - RNA, 19 nt, Human
uuaugaaacuuguguaaau

SEQ ID NO: 2761537 - RNA, 13 nt, Human
uuaugaaacuugu

SEQ ID NO: 2761538 - RNA, 18 nt, Human
uuaugaaacuuguguaaa

SEQ ID NO: 2761539 - RNA, 16 nt, Human
uuaugaaacuugugua

SEQ ID NO: 2761540 - RNA, 18 nt, Human
uuaugauccagcagauua

SEQ ID NO: 2761541 - RNA, 13 nt, Human
uuaugauccagca

SEQ ID NO: 2761542 - RNA, 21 nt, Human
uuaugaauuacauuuguauaa

SEQ ID NO: 2761543 - RNA, 17 nt, Human
uuaugaauuacauuugu

SEQ ID NO: 2761544 - RNA, 16 nt, Human
uuaugaauuacauuug

SEQ ID NO: 2761545 - RNA, 14 nt, Human
uuaugaauuacauu

SEQ ID NO: 2761546 - RNA, 22 nt, Human
auaccacaggaaccacaagacu

SEQ ID NO: 2761547 - RNA, 19 nt, Human
uuauauuugaaauauugac

SEQ ID NO: 2761548 - RNA, 15 nt, Human
uuauauuugaaauau

SEQ ID NO: 2761549 - RNA, 17 nt, Human
auacuauggaauuucuc

SEQ ID NO: 2761550 - RNA, 20 nt, Human
ugugcugguguaugugugaa

SEQ ID NO: 2761551 - RNA, 19 nt, Human
ugugcugggguuaucugaa

SEQ ID NO: 2761552 - RNA, 20 nt, Human
agugaguuggguguauugug

SEQ ID NO: 2761553 - RNA, 21 nt, Human
agugaguuggguguauugugc

SEQ ID NO: 2761554 - RNA, 22 nt, Human
agugcaaauugucacaggacag

SEQ ID NO: 2761555 - RNA, 16 nt, Human
agucuugucucagauu

SEQ ID NO: 2761556 - RNA, 19 nt, Human
agucuugucucagauuuua

SEQ ID NO: 2761557 - RNA, 17 nt, Human
agucuugucucagauuu

SEQ ID NO: 2761558 - RNA, 23 nt, Human
agugaacaaauuuacagagacag

SEQ ID NO: 2761559 - RNA, 22 nt, Human
agugaacaaauuuacagagaca

SEQ ID NO: 2761560 - RNA, 21 nt, Human
agucuugucucagauuuuauu

SEQ ID NO: 2761561 - RNA, 20 nt, Human
agucuugucucagauuuuau

SEQ ID NO: 2761562 - RNA, 16 nt, Human
agucuuucacauuuaa

SEQ ID NO: 2761563 - RNA, 21 nt, Human
agugaacaaauuuacagagac

SEQ ID NO: 2761564 - RNA, 16 nt, Human
uguguuagagauuuuu

SEQ ID NO: 2761565 - RNA, 22 nt, Human
uguugcccacagcuguaugauu

SEQ ID NO: 2761566 - RNA, 15 nt, Human
uguucuaagaaguga

SEQ ID NO: 2761567 - RNA, 23 nt, Human
aguguuggagaagaacugaaauc

SEQ ID NO: 2761568 - RNA, 13 nt, Human
aguaauuggaaag

SEQ ID NO: 2761569 - RNA, 12 nt, Human
aguaauuggaaa

SEQ ID NO: 2761570 - RNA, 16 nt, Human
aguaaaaccacagcag

SEQ ID NO: 2761571 - RNA, 17 nt, Human
aguaaaaccacagcagu

SEQ ID NO: 2761572 - RNA, 19 nt, Human
aguaaaaccacagcaguug

SEQ ID NO: 2761573 - RNA, 20 nt, Human
aguaaaaccacagcaguuga

SEQ ID NO: 2761574 - RNA, 16 nt, Human
uguaguguuggagaag

SEQ ID NO: 2761575 - RNA, 18 nt, Human
uguaguguuggagaagaa

SEQ ID NO: 2761576 - RNA, 17 nt, Human
uguaguguuggagaaga

SEQ ID NO: 2761577 - RNA, 13 nt, Human
uguaagggaaacu

SEQ ID NO: 2761578 - RNA, 18 nt, Human
uguaagggaaacugccag

SEQ ID NO: 2761579 - RNA, 19 nt, Human
uguaagggaaacugccagc

SEQ ID NO: 2761580 - RNA, 14 nt, Human
agguugcagugagc

SEQ ID NO: 2761581 - RNA, 16 nt, Human
aggugcuacaaaaaca

SEQ ID NO: 2761582 - RNA, 13 nt, Human
agucucaggaaau

SEQ ID NO: 2761583 - RNA, 14 nt, Human
agucaggaaagaga

SEQ ID NO: 2761584 - RNA, 23 nt, Human
aguauaauuaacauguuaaacca

SEQ ID NO: 2761585 - RNA, 16 nt, Human
aguauaauuaacaugu

SEQ ID NO: 2761586 - RNA, 14 nt, Human
aguauaauuaacau

SEQ ID NO: 2761587 - RNA, 13 nt, Human
aguauaauuaaca

SEQ ID NO: 2761588 - RNA, 14 nt, Human
aguauuaagcauau

SEQ ID NO: 2761589 - RNA, 12 nt, Human
aguauuaagcau

SEQ ID NO: 2761590 - RNA, 19 nt, Human
ugggaggcugagaugggag

SEQ ID NO: 2761591 - RNA, 13 nt, Human
agggagagaagau

SEQ ID NO: 2761592 - RNA, 14 nt, Human
agggagagaagaua

SEQ ID NO: 2761593 - RNA, 23 nt, Human
agggacuucugucuucacaacag

SEQ ID NO: 2761594 - RNA, 22 nt, Human
agggcuguuauaaucuuucaca

SEQ ID NO: 2761595 - RNA, 20 nt, Human
ugggaacccaaguccaagca

SEQ ID NO: 2761596 - RNA, 16 nt, Human
agggaaacugccagca

SEQ ID NO: 2761597 - RNA, 19 nt, Human
agggaaacugccagcaacg

SEQ ID NO: 2761598 - RNA, 21 nt, Human
agggaaacugccagcaacgca

SEQ ID NO: 2761599 - RNA, 23 nt, Human
agggaaacugccagcaacgcagg

SEQ ID NO: 2761600 - RNA, 14 nt, Human
agggaaacugccag

SEQ ID NO: 2761601 - RNA, 15 nt, Human
agggaaacugccagc

SEQ ID NO: 2761602 - RNA, 14 nt, Human
ugggaaagcauugu

SEQ ID NO: 2761603 - RNA, 16 nt, Human
ugggaaagcauuguaa

SEQ ID NO: 2761604 - RNA, 17 nt, Human
ugggaaagcauuguaaa

SEQ ID NO: 2761605 - RNA, 18 nt, Human
ugggaaagcauuguaaau

SEQ ID NO: 2761606 - RNA, 18 nt, Human
ugggaaacaaaaggauaa

SEQ ID NO: 2761607 - RNA, 23 nt, Human
uggcuauaggugcuacaaaaaca

SEQ ID NO: 2761608 - RNA, 18 nt, Human
uggcuaagcaaaauguga

SEQ ID NO: 2761609 - RNA, 15 nt, Human
uggcuauaggugcua

SEQ ID NO: 2761610 - RNA, 19 nt, Human
uggcuauaggugcuacaaa

SEQ ID NO: 2761611 - RNA, 22 nt, Human
aggcuccacuuggucugugaga

SEQ ID NO: 2761612 - RNA, 21 nt, Human
aggcuccacuuggucugugag

SEQ ID NO: 2761613 - RNA, 17 nt, Human
aggcuccacuuggucug

SEQ ID NO: 2761614 - RNA, 11 nt, Human
aggcuccacuu

SEQ ID NO: 2761615 - RNA, 21 nt, Human
uggaauuuuccuccuuucucu

SEQ ID NO: 2761616 - RNA, 17 nt, Human
uggaauuuuccuccuuu

SEQ ID NO: 2761617 - RNA, 23 nt, Human
uggagccugcacggugaauggcu

SEQ ID NO: 2761618 - RNA, 21 nt, Human
uggagcucgugggacagucac

SEQ ID NO: 2761619 - RNA, 14 nt, Human
uggagaagaacuga

SEQ ID NO: 2761620 - RNA, 16 nt, Human
uggagaagaacugaaa

SEQ ID NO: 2761621 - RNA, 13 nt, Human
aggaaauauuuau

SEQ ID NO: 2761622 - RNA, 18 nt, Human
aggaaauauuuauuuuaa

SEQ ID NO: 2761623 - RNA, 14 nt, Human
aggaaauauuuauu

SEQ ID NO: 2761624 - RNA, 15 nt, Human
aggaauucuguauag

SEQ ID NO: 2761625 - RNA, 16 nt, Human
aggaauucuguauaga

SEQ ID NO: 2761626 - RNA, 22 nt, Human
aggaauucuguauagauuagaa

SEQ ID NO: 2761627 - RNA, 17 nt, Human
aggaauucuguauagau

SEQ ID NO: 2761628 - RNA, 23 nt, Human
aggaauucuguauagauuagaau

SEQ ID NO: 2761629 - RNA, 19 nt, Human
aggaauugacccacaagaa

SEQ ID NO: 2761630 - RNA, 21 nt, Human
agcuuauugucuagugaaacu

SEQ ID NO: 2761631 - RNA, 20 nt, Human
agcuuauuaaaacucauuuu

SEQ ID NO: 2761632 - RNA, 15 nt, Human
agcuuauuaaaacuc

SEQ ID NO: 2761633 - RNA, 21 nt, Human
aggaaaaguuuaauauuaaag

SEQ ID NO: 2761634 - RNA, 24 nt, Human
aggaaaaguuuaauauuaaagcca

SEQ ID NO: 2761635 - RNA, 23 nt, Human
aggaaaaguuuaauauuaaagcc

SEQ ID NO: 2761636 - RNA, 19 nt, Human
aggaaagagaacuuccaga

SEQ ID NO: 2761637 - RNA, 13 nt, Human
aggaaagagaacu

SEQ ID NO: 2761638 - RNA, 14 nt, Human
ugcuaguaauugga

SEQ ID NO: 2761639 - RNA, 16 nt, Human
ugcuaguaauuggaaa

SEQ ID NO: 2761640 - RNA, 21 nt, Human
ugccuuuuucauuauuuuauu

SEQ ID NO: 2761641 - RNA, 17 nt, Human
ugccuuuuucauuauuu

SEQ ID NO: 2761642 - RNA, 16 nt, Human
ugccuuuuucauuauu

SEQ ID NO: 2761643 - RNA, 15 nt, Human
ugccuuuuucauuau

SEQ ID NO: 2761644 - RNA, 14 nt, Human
ugccuuuuucauua

SEQ ID NO: 2761645 - RNA, 13 nt, Human
ugccuuuuucauu

SEQ ID NO: 2761646 - RNA, 23 nt, Human
agcugccuccccuccucugcuug

SEQ ID NO: 2761647 - RNA, 22 nt, Human
agcugccuccccuccucugcuu

SEQ ID NO: 2761648 - RNA, 21 nt, Human
agcugccuccccuccucugcu

SEQ ID NO: 2761649 - RNA, 20 nt, Human
agcugccuccccuccucugc

SEQ ID NO: 2761650 - RNA, 19 nt, Human
agcugccuccccuccucug

SEQ ID NO: 2761651 - RNA, 18 nt, Human
agcugccuccccuccucu

SEQ ID NO: 2761652 - RNA, 17 nt, Human
agcugccuccccuccuc

SEQ ID NO: 2761653 - RNA, 13 nt, Human
agcuggaaaagua

SEQ ID NO: 2761654 - RNA, 14 nt, Human
agccugauuaaaga

SEQ ID NO: 2761655 - RNA, 18 nt, Human
agccugcacggugaaugg

SEQ ID NO: 2761656 - RNA, 16 nt, Human
agccugcacggugaau

SEQ ID NO: 2761657 - RNA, 14 nt, Human
ugcagugagccgag

SEQ ID NO: 2761658 - RNA, 18 nt, Human
agccugagcgacagugag

SEQ ID NO: 2761659 - RNA, 17 nt, Human
agcccuucuuuccacag

SEQ ID NO: 2761660 - RNA, 19 nt, Human
agcccuucuuuccacagaa

SEQ ID NO: 2761661 - RNA, 18 nt, Human
agcccuucuuuccacaga

SEQ ID NO: 2761662 - RNA, 19 nt, Human
agcuacuaauuuuaaaaug

SEQ ID NO: 2761663 - RNA, 17 nt, Human
ucuguauagauuagaau

SEQ ID NO: 2761664 - RNA, 16 nt, Human
ucuguauagauuagag

SEQ ID NO: 2761665 - RNA, 18 nt, Human
ucuguuuuauaauuuugu

SEQ ID NO: 2761666 - RNA, 18 nt, Human
ucuuaauuaaaagaauau

SEQ ID NO: 2761667 - RNA, 21 nt, Human
ucuuaauuaaaagaauauuuu

SEQ ID NO: 2761668 - RNA, 14 nt, Human
ucuuaauuaaaaga

SEQ ID NO: 2761669 - RNA, 14 nt, Human
agacuggcacaguu

SEQ ID NO: 2761670 - RNA, 15 nt, Human
agacuggcacaguuu

SEQ ID NO: 2761671 - RNA, 17 nt, Human
agagacacacugaagaa

SEQ ID NO: 2761672 - RNA, 15 nt, Human
agagaaugagagaca

SEQ ID NO: 2761673 - RNA, 20 nt, Human
agagacacacugaagaagca

SEQ ID NO: 2761674 - RNA, 18 nt, Human
agagacacacugaagaag

SEQ ID NO: 2761675 - RNA, 18 nt, Human
ucuuuaauuuuggaauuu

SEQ ID NO: 2761676 - RNA, 17 nt, Human
ucuuuaauuuuggaauu

SEQ ID NO: 2761677 - RNA, 16 nt, Human
ucuuuaauuuuggaau

SEQ ID NO: 2761678 - RNA, 15 nt, Human
ucuuuaauuuuggaa

SEQ ID NO: 2761679 - RNA, 14 nt, Human
ucuuuaauuuugga

SEQ ID NO: 2761680 - RNA, 17 nt, Human
ucuuuaaaauacacacu

SEQ ID NO: 2761681 - RNA, 13 nt, Human
ucuuuaauuuugg

SEQ ID NO: 2761682 - RNA, 21 nt, Human
ucuuuaaagggauggcaagau

SEQ ID NO: 2761683 - RNA, 16 nt, Human
agacuccaaagaaaug

SEQ ID NO: 2761684 - RNA, 19 nt, Human
agacuccaaagaaauguaa

SEQ ID NO: 2761685 - RNA, 16 nt, Human
agacuauucaaacagu

SEQ ID NO: 2761686 - RNA, 13 nt, Human
agacuccaaagaa

SEQ ID NO: 2761687 - RNA, 14 nt, Human
agacuccaaagaaa

SEQ ID NO: 2761688 - RNA, 12 nt, Human
agacuccaaaga

SEQ ID NO: 2761689 - RNA, 18 nt, Human
agacuauucaaacagucu

SEQ ID NO: 2761690 - RNA, 20 nt, Human
agacuauucaaacagucuca

SEQ ID NO: 2761691 - RNA, 21 nt, Human
agacuauucaaacagucucag

SEQ ID NO: 2761692 - RNA, 19 nt, Human
agaaagacuauucaaacag

SEQ ID NO: 2761693 - RNA, 18 nt, Human
agaaagacuauucaaaca

SEQ ID NO: 2761694 - RNA, 20 nt, Human
agaaagacuauucaaacagu

SEQ ID NO: 2761695 - RNA, 23 nt, Human
agaaagacuauucaaacagucuc

SEQ ID NO: 2761696 - RNA, 21 nt, Human
ucugacuguuuccaucaaggg

SEQ ID NO: 2761697 - RNA, 14 nt, Human
ucugagaaagacua

SEQ ID NO: 2761698 - RNA, 15 nt, Human
ucugagaaagacuau

SEQ ID NO: 2761699 - RNA, 19 nt, Human
ucugagaaagacuauucaa

SEQ ID NO: 2761700 - RNA, 20 nt, Human
ucugagaaagacuauucaaa

SEQ ID NO: 2761701 - RNA, 23 nt, Human
ucugagaaagacuauucaaacag

SEQ ID NO: 2761702 - RNA, 21 nt, Human
ucugagaaagacuauucaaac

SEQ ID NO: 2761703 - RNA, 22 nt, Human
ucugagaaagacuauucaaaca

SEQ ID NO: 2761704 - RNA, 14 nt, Human
agaacucccuuuca

SEQ ID NO: 2761705 - RNA, 13 nt, Human
ucugccuaaggac

SEQ ID NO: 2761706 - RNA, 16 nt, Human
ucugccuaaggacuuc

SEQ ID NO: 2761707 - RNA, 15 nt, Human
ucugccuaaggacuu

SEQ ID NO: 2761708 - RNA, 14 nt, Human
ucugccuaaggacu

SEQ ID NO: 2761709 - RNA, 21 nt, Human
agaagaacugaaaucauacuu

SEQ ID NO: 2761710 - RNA, 11 nt, Human
ucugcuugcca

SEQ ID NO: 2761711 - RNA, 12 nt, Human
ucugcuugccau

SEQ ID NO: 2761712 - RNA, 19 nt, Human
ucuccauuuaauaauuaua

SEQ ID NO: 2761713 - RNA, 16 nt, Human
ucuccauuuaauaauu

SEQ ID NO: 2761714 - RNA, 12 nt, Human
ucuccauuuaau

SEQ ID NO: 2761715 - RNA, 15 nt, Human
ucucccagucauuua

SEQ ID NO: 2761716 - RNA, 23 nt, Human
acuuguguaaauacaauuuuguu

SEQ ID NO: 2761717 - RNA, 13 nt, Human
acuuguguaaaua

SEQ ID NO: 2761718 - RNA, 22 nt, Human
acuuguguaaauacaauuuugu

SEQ ID NO: 2761719 - RNA, 21 nt, Human
acuuguguaaauacaauuuug

SEQ ID NO: 2761720 - RNA, 22 nt, Human
acuuuuuauggcacuaguauuu

SEQ ID NO: 2761721 - RNA, 16 nt, Human
agaaaacaaggaugaa

SEQ ID NO: 2761722 - RNA, 19 nt, Human
agaaaacaaggaugaauua

SEQ ID NO: 2761723 - RNA, 15 nt, Human
agaaacauuugguaa

SEQ ID NO: 2761724 - RNA, 14 nt, Human
agaaagaaaaucag

SEQ ID NO: 2761725 - RNA, 13 nt, Human
agaaacuggaacu

SEQ ID NO: 2761726 - RNA, 13 nt, Human
ucucuucuuuaaa

SEQ ID NO: 2761727 - RNA, 12 nt, Human
ucucuucuuuaa

SEQ ID NO: 2761728 - RNA, 13 nt, Human
ucucuggccuucg

SEQ ID NO: 2761729 - RNA, 17 nt, Human
ucucuggccuucggccu

SEQ ID NO: 2761730 - RNA, 16 nt, Human
ucucuggccuucggcc

SEQ ID NO: 2761731 - RNA, 23 nt, Human
agcaaaaauauuuuaugauccag

SEQ ID NO: 2761732 - RNA, 19 nt, Human
agcaaaaauauuuuaugau

SEQ ID NO: 2761733 - RNA, 18 nt, Human
agcaaaaauauuuuauga

SEQ ID NO: 2761734 - RNA, 17 nt, Human
agcaaaaauauuuuaug

SEQ ID NO: 2761735 - RNA, 15 nt, Human
agcaaaaauauuuua

SEQ ID NO: 2761736 - RNA, 22 nt, Human
agauuuuauuauguaaauccca

SEQ ID NO: 2761737 - RNA, 20 nt, Human
agauuuuauuauguaaaucc

SEQ ID NO: 2761738 - RNA, 21 nt, Human
agauuuuauuauguaaauccc

SEQ ID NO: 2761739 - RNA, 16 nt, Human
agauuuaccacuugug

SEQ ID NO: 2761740 - RNA, 16 nt, Human
agauugugccccugca

SEQ ID NO: 2761741 - RNA, 16 nt, Human
agauuauucacugauu

SEQ ID NO: 2761742 - RNA, 15 nt, Human
ugacuguuuccauca

SEQ ID NO: 2761743 - RNA, 12 nt, Human
ugaauuuauugg

SEQ ID NO: 2761744 - RNA, 16 nt, Human
ugaauuuauuggcuuu

SEQ ID NO: 2761745 - RNA, 15 nt, Human
ugaauuuauuggcuu

SEQ ID NO: 2761746 - RNA, 14 nt, Human
agauccuggaaauc

SEQ ID NO: 2761747 - RNA, 19 nt, Human
agaugaugaugaucuuuaa

SEQ ID NO: 2761748 - RNA, 22 nt, Human
agaugcuagaacucccuuucaa

SEQ ID NO: 2761749 - RNA, 23 nt, Human
agaugcuagaacucccuuucaac

SEQ ID NO: 2761750 - RNA, 20 nt, Human
ugaagaagcaccaaucauga

SEQ ID NO: 2761751 - RNA, 14 nt, Human
ugaagaagauggua

SEQ ID NO: 2761752 - RNA, 17 nt, Human
ugaagauguagaggaga

SEQ ID NO: 2761753 - RNA, 18 nt, Human
ugaagauguagaggagaa

SEQ ID NO: 2761754 - RNA, 14 nt, Human
agagugaacaaauu

SEQ ID NO: 2761755 - RNA, 22 nt, Human
agagugaacaaauuuacagaga

SEQ ID NO: 2761756 - RNA, 16 nt, Human
ugagcuacaaaugcau

SEQ ID NO: 2761757 - RNA, 13 nt, Human
ugagcuacaaaug

SEQ ID NO: 2761758 - RNA, 14 nt, Human
ugagcuacaaaugc

SEQ ID NO: 2761759 - RNA, 14 nt, Human
ugaggaauucugua

SEQ ID NO: 2761760 - RNA, 16 nt, Human
ugaggaauucuguaua

SEQ ID NO: 2761761 - RNA, 15 nt, Human
ugaggaauucuguau

SEQ ID NO: 2761762 - RNA, 19 nt, Human
ugaggaauucuguauagau

SEQ ID NO: 2761763 - RNA, 18 nt, Human
ugaggaauucuguauaga

SEQ ID NO: 2761764 - RNA, 15 nt, Human
ugaggacacugauau

SEQ ID NO: 2761765 - RNA, 20 nt, Human
agcagauuauucacugauuu

SEQ ID NO: 2761766 - RNA, 19 nt, Human
agcagauuauucacugauu

SEQ ID NO: 2761767 - RNA, 14 nt, Human
agcagauuauucac

SEQ ID NO: 2761768 - RNA, 16 nt, Human
agcagauuauucacug

SEQ ID NO: 2761769 - RNA, 15 nt, Human
agcagauuauucacu

SEQ ID NO: 2761770 - RNA, 17 nt, Human
ugagguacugagaguga

SEQ ID NO: 2761771 - RNA, 22 nt, Human
ugagguacugagagugaacaaa

SEQ ID NO: 2761772 - RNA, 20 nt, Human
ugagcgacagugagacucug

SEQ ID NO: 2761773 - RNA, 16 nt, Human
ugagcgacagugagac

SEQ ID NO: 2761774 - RNA, 14 nt, Human
ugagcgacagugag

SEQ ID NO: 2761775 - RNA, 13 nt, Human
ugagcgacaguga

SEQ ID NO: 2761776 - RNA, 14 nt, Human
agcagaacagugau

SEQ ID NO: 2761777 - RNA, 14 nt, Human
agcaacgcaggccc

SEQ ID NO: 2761778 - RNA, 22 nt, Human
agcacagccucuuagaugcagu

SEQ ID NO: 2761779 - RNA, 16 nt, Human
agcaccaaucaugaau

SEQ ID NO: 2761780 - RNA, 23 nt, Human
accacuuguguuuugcaagccag

SEQ ID NO: 2761781 - RNA, 19 nt, Human
accacuuguguuuugcaag

SEQ ID NO: 2761782 - RNA, 13 nt, Human
accacugcagaag

SEQ ID NO: 2761783 - RNA, 19 nt, Human
accacugcagaagacagua

SEQ ID NO: 2761784 - RNA, 14 nt, Human
accacugcagaaga

SEQ ID NO: 2761785 - RNA, 11 nt, Human
accacagcagu

SEQ ID NO: 2761786 - RNA, 12 nt, Human
uauuucauuucu

SEQ ID NO: 2761787 - RNA, 18 nt, Human
acccaaaaggcagaagca

SEQ ID NO: 2761788 - RNA, 21 nt, Human
acccaaauguucaucaaugaa

SEQ ID NO: 2761789 - RNA, 15 nt, Human
acccaaaaggcagaa

SEQ ID NO: 2761790 - RNA, 13 nt, Human
acccaaaaggcag

SEQ ID NO: 2761791 - RNA, 20 nt, Human
ucagauuuuauuauguaaau

SEQ ID NO: 2761792 - RNA, 19 nt, Human
ucagauuuuauuauguaaa

SEQ ID NO: 2761793 - RNA, 16 nt, Human
ucagauuuuauuaugu

SEQ ID NO: 2761794 - RNA, 21 nt, Human
ucagaucugccuaaggacuuc

SEQ ID NO: 2761795 - RNA, 13 nt, Human
ucagauuuuauua

SEQ ID NO: 2761796 - RNA, 15 nt, Human
ucagauuuuauuaug

SEQ ID NO: 2761797 - RNA, 14 nt, Human
ucagauuuuauuau

SEQ ID NO: 2761798 - RNA, 21 nt, Human
ucaugaauuaguuuuauaugc

SEQ ID NO: 2761799 - RNA, 22 nt, Human
ucaugaauuaguuuuauaugcu

SEQ ID NO: 2761800 - RNA, 21 nt, Human
uccagccugagcgacagugag

SEQ ID NO: 2761801 - RNA, 20 nt, Human
uccagccugagcgacaguga

SEQ ID NO: 2761802 - RNA, 22 nt, Human
acugaggggaggggagcauggg

SEQ ID NO: 2761803 - RNA, 17 nt, Human
acugaggggaggggagc

SEQ ID NO: 2761804 - RNA, 17 nt, Human
uccugggcagcugccuc

SEQ ID NO: 2761805 - RNA, 16 nt, Human
uccugggcagcugccu

SEQ ID NO: 2761806 - RNA, 15 nt, Human
uccugggcagcugcc

SEQ ID NO: 2761807 - RNA, 14 nt, Human
uccugggcagcugc

SEQ ID NO: 2761808 - RNA, 23 nt, Human
uccugggcagcugccuccccucc

SEQ ID NO: 2761809 - RNA, 22 nt, Human
uccugggcagcugccuccccuc

SEQ ID NO: 2761810 - RNA, 19 nt, Human
uccugggcagcugccuccc

SEQ ID NO: 2761811 - RNA, 18 nt, Human
uccugggcagcugccucc

SEQ ID NO: 2761812 - RNA, 16 nt, Human
acuggauuguacuuug

SEQ ID NO: 2761813 - RNA, 13 nt, Human
acuggauuguacu

SEQ ID NO: 2761814 - RNA, 22 nt, Human
acugccuucucaacuccaaacu

SEQ ID NO: 2761815 - RNA, 20 nt, Human
acugccuucucaacuccaaa

SEQ ID NO: 2761816 - RNA, 21 nt, Human
acuggcacaguuuucugagaa

SEQ ID NO: 2761817 - RNA, 22 nt, Human
acuggcacaguuuucugagaaa

SEQ ID NO: 2761818 - RNA, 13 nt, Human
uccuucagccuga

SEQ ID NO: 2761819 - RNA, 13 nt, Human
acuaaaaauacaa

SEQ ID NO: 2761820 - RNA, 12 nt, Human
uccccuccucug

SEQ ID NO: 2761821 - RNA, 15 nt, Human
uccgugcuaaggacu

SEQ ID NO: 2761822 - RNA, 14 nt, Human
uccgugcuaaggac

SEQ ID NO: 2761823 - RNA, 22 nt, Human
acucuccauuuaauaauuauau

SEQ ID NO: 2761824 - RNA, 20 nt, Human
uccucaaaacuucagacaua

SEQ ID NO: 2761825 - RNA, 22 nt, Human
uauaaaauaauuuuuauauuug

SEQ ID NO: 2761826 - RNA, 21 nt, Human
uauaaaauaauuuuuauauuu

SEQ ID NO: 2761827 - RNA, 22 nt, Human
acacaucagcuugcccuguuaa

SEQ ID NO: 2761828 - RNA, 22 nt, Human
uagugagcagucaggaaagaga

SEQ ID NO: 2761829 - RNA, 16 nt, Human
uaguuuuauaugcuuc

SEQ ID NO: 2761830 - RNA, 15 nt, Human
uaguuuuauaugcuu

SEQ ID NO: 2761831 - RNA, 19 nt, Human
uauagauuagaauucugua

SEQ ID NO: 2761832 - RNA, 20 nt, Human
uauagauuagaauucuguau

SEQ ID NO: 2761833 - RNA, 22 nt, Human
uauagauuagagaguguugaaa

SEQ ID NO: 2761834 - RNA, 19 nt, Human
uauagauuagagaguguug

SEQ ID NO: 2761835 - RNA, 14 nt, Human
uauaauuuugugaa

SEQ ID NO: 2761836 - RNA, 18 nt, Human
uauaacaaugcuguauuu

SEQ ID NO: 2761837 - RNA, 21 nt, Human
uauaggugcuacaaaaacaca

SEQ ID NO: 2761838 - RNA, 20 nt, Human
uauaggugcuacaaaaacac

SEQ ID NO: 2761839 - RNA, 23 nt, Human
uauaggugcuacaaaaacacagc

SEQ ID NO: 2761840 - RNA, 13 nt, Human
uauaggaauugac

SEQ ID NO: 2761841 - RNA, 14 nt, Human
uauaggaauugacc

SEQ ID NO: 2761842 - RNA, 10 nt, Human
uaugauccag

SEQ ID NO: 2761843 - RNA, 19 nt, Human
uaugauccagcagauuauu

SEQ ID NO: 2761844 - RNA, 11 nt, Human
uaugauccagc

SEQ ID NO: 2761845 - RNA, 22 nt, Human
uaugauccagcagauuauucac

SEQ ID NO: 2761846 - RNA, 21 nt, Human
uaugauccagcagauuauuca

SEQ ID NO: 2761847 - RNA, 20 nt, Human
uaugauccagcagauuauuc

SEQ ID NO: 2761848 - RNA, 16 nt, Human
uauggcuauaggugcu

SEQ ID NO: 2761849 - RNA, 17 nt, Human
uauggcuauaggugcua

SEQ ID NO: 2761850 - RNA, 20 nt, Human
uaucaccugucuugccuuuu

SEQ ID NO: 2761851 - RNA, 14 nt, Human
uauauuuacaaaug

SEQ ID NO: 2761852 - RNA, 15 nt, Human
uauauuuacaaaugg

SEQ ID NO: 2761853 - RNA, 21 nt, Human
acaguauaauuaacauguuaa

SEQ ID NO: 2761854 - RNA, 23 nt, Human
acaguauaauuaacauguuaaac

SEQ ID NO: 2761855 - RNA, 21 nt, Human
acaguauggcagcuuuccuca

SEQ ID NO: 2761856 - RNA, 21 nt, Human
acaguuaccucugccucagaa

SEQ ID NO: 2761857 - RNA, 18 nt, Human
acagugagacucugucuc

SEQ ID NO: 2761858 - RNA, 14 nt, Human
acagugagacucug

SEQ ID NO: 2761859 - RNA, 17 nt, Human
acagucucaggaaauca

SEQ ID NO: 2761860 - RNA, 20 nt, Human
acagugaaagaaaauaacaa

SEQ ID NO: 2761861 - RNA, 13 nt, Human
acagucucaggaa

SEQ ID NO: 2761862 - RNA, 14 nt, Human
acagucucaggaaa

SEQ ID NO: 2761863 - RNA, 15 nt, Human
acagucucaggaaau

SEQ ID NO: 2761864 - RNA, 16 nt, Human
acagucucaggaaauc

SEQ ID NO: 2761865 - RNA, 20 nt, Human
acagcuggugcccugcuuuc

SEQ ID NO: 2761866 - RNA, 17 nt, Human
acagcuggugcccugcu

SEQ ID NO: 2761867 - RNA, 20 nt, Human
uauuaaagccauguuuauua

SEQ ID NO: 2761868 - RNA, 18 nt, Human
uauuaaagccauguuuau

SEQ ID NO: 2761869 - RNA, 17 nt, Human
uauuaaagccauguuua

SEQ ID NO: 2761870 - RNA, 14 nt, Human
uauuacaguauaau

SEQ ID NO: 2761871 - RNA, 21 nt, Human
uauuacaguauaauuaacaug

SEQ ID NO: 2761872 - RNA, 20 nt, Human
uauuacaguauaauuaacau

SEQ ID NO: 2761873 - RNA, 18 nt, Human
uauuacaguauaauuaac

SEQ ID NO: 2761874 - RNA, 16 nt, Human
uauuacaguauaauua

SEQ ID NO: 2761875 - RNA, 12 nt, Human
uauuaaagccau

SEQ ID NO: 2761876 - RNA, 14 nt, Human
uauuaaagccaugu

SEQ ID NO: 2761877 - RNA, 13 nt, Human
uauuaaagccaug

SEQ ID NO: 2761878 - RNA, 12 nt, Human
uauuaaaacuca

SEQ ID NO: 2761879 - RNA, 15 nt, Human
uauuagaauaccaca

SEQ ID NO: 2761880 - RNA, 13 nt, Human
uauucacugauuu

SEQ ID NO: 2761881 - RNA, 22 nt, Human
uauucacugauuugacauaguc

SEQ ID NO: 2761882 - RNA, 19 nt, Human
uauucacugauuugacaua

SEQ ID NO: 2761883 - RNA, 23 nt, Human
uauucaaaguugccuaaauccau

SEQ ID NO: 2761884 - RNA, 18 nt, Human
uauucaaaguugccuaaa

SEQ ID NO: 2761885 - RNA, 22 nt, Human
uauucaaaguugccuaaaucca

SEQ ID NO: 2761886 - RNA, 21 nt, Human
uauucaaaguugccuaaaucc

SEQ ID NO: 2761887 - RNA, 23 nt, Human
uauucauagcagcuuauucacaa

SEQ ID NO: 2761888 - RNA, 14 nt, Human
uauuggcuuuucug

SEQ ID NO: 2761889 - RNA, 18 nt, Human
uauuggcuuuucugaucc

SEQ ID NO: 2761890 - RNA, 17 nt, Human
uauuggcuuuucugauc

SEQ ID NO: 2761891 - RNA, 16 nt, Human
uauuggcuuuucugau

SEQ ID NO: 2761892 - RNA, 15 nt, Human
uauuggcuuuucuga

SEQ ID NO: 2761893 - RNA, 22 nt, Human
uauuggcuuuucugauccaguu

SEQ ID NO: 2761894 - RNA, 21 nt, Human
uauuggcuuuucugauccagu

SEQ ID NO: 2761895 - RNA, 19 nt, Human
acaguucggugagcuacaa

SEQ ID NO: 2761896 - RNA, 22 nt, Human
acaguucggugagcuacaaaug

SEQ ID NO: 2761897 - RNA, 23 nt, Human
acaguucggugagcuacaaaugc

SEQ ID NO: 2761898 - RNA, 23 nt, Human
uauuguacaaaguauuaagcaua

SEQ ID NO: 2761899 - RNA, 22 nt, Human
uauuguacaaaguauuaagcau

SEQ ID NO: 2761900 - RNA, 21 nt, Human
uauuguacaaaguauuaagca

SEQ ID NO: 2761901 - RNA, 16 nt, Human
uauuguacaaaguauu

SEQ ID NO: 2761902 - RNA, 15 nt, Human
uauuguacaaaguau

SEQ ID NO: 2761903 - RNA, 17 nt, Human
uauugucuagugaaacu

SEQ ID NO: 2761904 - RNA, 18 nt, Human
uauuuacuaaaauggacu

SEQ ID NO: 2761905 - RNA, 18 nt, Human
uauuuauuuuaauaaugu

SEQ ID NO: 2761906 - RNA, 16 nt, Human
uauuuauuuuaauaau

SEQ ID NO: 2761907 - RNA, 14 nt, Human
uauuuauuuuaaua

SEQ ID NO: 2761908 - RNA, 21 nt, Human
uagaggaagccugauuaaaga

SEQ ID NO: 2761909 - RNA, 16 nt, Human
uagaugcaguucugaa

SEQ ID NO: 2761910 - RNA, 19 nt, Human
uagaugcaguucugaagaa

SEQ ID NO: 2761911 - RNA, 17 nt, Human
uagaugcaguucugaag

SEQ ID NO: 2761912 - RNA, 21 nt, Human
uagcaugucgucaaagcugaa

SEQ ID NO: 2761913 - RNA, 18 nt, Human
uagcaugucgucaaagcu

SEQ ID NO: 2761914 - RNA, 18 nt, Human
acaagcacuaaacaaaga

SEQ ID NO: 2761915 - RNA, 22 nt, Human
acaagaaaugaaagcagggacu

SEQ ID NO: 2761916 - RNA, 14 nt, Human
uagaaccucuuugu

SEQ ID NO: 2761917 - RNA, 15 nt, Human
uagaacucccuuuca

SEQ ID NO: 2761918 - RNA, 21 nt, Human
uacuucaaauccuugaagauu

SEQ ID NO: 2761919 - RNA, 18 nt, Human
uagaacucccuuucaaca

SEQ ID NO: 2761920 - RNA, 19 nt, Human
aauuuuuauauuugaaaua

SEQ ID NO: 2761921 - RNA, 16 nt, Human
acaaaaacacagcaag

SEQ ID NO: 2761922 - RNA, 19 nt, Human
aauuuuuucucuaggaaau

SEQ ID NO: 2761923 - RNA, 18 nt, Human
aauuugaauuuuguguua

SEQ ID NO: 2761924 - RNA, 16 nt, Human
aauuugaauuuugugu

SEQ ID NO: 2761925 - RNA, 13 nt, Human
aauuugaauuuug

SEQ ID NO: 2761926 - RNA, 19 nt, Human
uacuucaaauccuugaaga

SEQ ID NO: 2761927 - RNA, 14 nt, Human
uacuucaaauccuu

SEQ ID NO: 2761928 - RNA, 20 nt, Human
aauuucucccagucauuuaa

SEQ ID NO: 2761929 - RNA, 19 nt, Human
aauuucucccagucauuua

SEQ ID NO: 2761930 - RNA, 23 nt, Human
aauugugugaaagguacuucaaa

SEQ ID NO: 2761931 - RNA, 12 nt, Human
uacucaauuuua

SEQ ID NO: 2761932 - RNA, 14 nt, Human
uacucaauuuuaac

SEQ ID NO: 2761933 - RNA, 13 nt, Human
uacucaauuuuaa

SEQ ID NO: 2761934 - RNA, 21 nt, Human
aauucuugccaaauauaaaua

SEQ ID NO: 2761935 - RNA, 19 nt, Human
aauugacccacaagaaaug

SEQ ID NO: 2761936 - RNA, 16 nt, Human
aauugacccacaagaa

SEQ ID NO: 2761937 - RNA, 13 nt, Human
aauugacccacaa

SEQ ID NO: 2761938 - RNA, 18 nt, Human
aauuaacauguuaaacca

SEQ ID NO: 2761939 - RNA, 14 nt, Human
aauuaacauguuaa

SEQ ID NO: 2761940 - RNA, 13 nt, Human
aauuaacauguua

SEQ ID NO: 2761941 - RNA, 18 nt, Human
aauguugacaugggacau

SEQ ID NO: 2761942 - RNA, 16 nt, Human
aaugguuuaaaugguc

SEQ ID NO: 2761943 - RNA, 17 nt, Human
uaauuauaucugaggaa

SEQ ID NO: 2761944 - RNA, 13 nt, Human
uaauuauaucuga

SEQ ID NO: 2761945 - RNA, 20 nt, Human
uaauuauaugcuauuucuau

SEQ ID NO: 2761946 - RNA, 21 nt, Human
uaauuauaugcuauuucuaua

SEQ ID NO: 2761947 - RNA, 16 nt, Human
uacaaaaacacagcaa

SEQ ID NO: 2761948 - RNA, 17 nt, Human
uacaaaaacacagcaag

SEQ ID NO: 2761949 - RNA, 18 nt, Human
uacaaaaacacagcaagg

SEQ ID NO: 2761950 - RNA, 15 nt, Human
aaugaaugaaugaau

SEQ ID NO: 2761951 - RNA, 20 nt, Human
aacuaucucauuuccaagca

SEQ ID NO: 2761952 - RNA, 13 nt, Human
aacuauauuguuu

SEQ ID NO: 2761953 - RNA, 20 nt, Human
aacugaaaucauacuucuua

SEQ ID NO: 2761954 - RNA, 13 nt, Human
aacugaaaucaua

SEQ ID NO: 2761955 - RNA, 13 nt, Human
gucuucacaacag

SEQ ID NO: 2761956 - RNA, 23 nt, Human
gucucaguccaugaagauguaga

SEQ ID NO: 2761957 - RNA, 23 nt, Human
guccaugaagauguagaggagaa

SEQ ID NO: 2761958 - RNA, 14 nt, Human
aacauaaaucugug

SEQ ID NO: 2761959 - RNA, 12 nt, Human
aacauaaaucug

SEQ ID NO: 2761960 - RNA, 15 nt, Human
aacauaaaucuguga

SEQ ID NO: 2761961 - RNA, 23 nt, Human
aacauguuaaaccaugggauaaa

SEQ ID NO: 2761962 - RNA, 16 nt, Human
aacauguuaaaccaug

SEQ ID NO: 2761963 - RNA, 16 nt, Human
aacauauauaacaaug

SEQ ID NO: 2761964 - RNA, 19 nt, Human
aacagauuauuaccuuaca

SEQ ID NO: 2761965 - RNA, 17 nt, Human
aacagucucaggaaauc

SEQ ID NO: 2761966 - RNA, 19 nt, Human
aacagucucaggaaaucaa

SEQ ID NO: 2761967 - RNA, 14 nt, Human
guggguagacacac

SEQ ID NO: 2761968 - RNA, 18 nt, Human
aagagcuguucacagcca

SEQ ID NO: 2761969 - RNA, 16 nt, Human
aagacuccaaagaaau

SEQ ID NO: 2761970 - RNA, 17 nt, Human
aagacuccaaagaaaug

SEQ ID NO: 2761971 - RNA, 14 nt, Human
aagacuccaaagaa

SEQ ID NO: 2761972 - RNA, 14 nt, Human
aagacuauucaaac

SEQ ID NO: 2761973 - RNA, 13 nt, Human
aagacuauucaaa

SEQ ID NO: 2761974 - RNA, 23 nt, Human
guguugaaacggaugauuucuau

SEQ ID NO: 2761975 - RNA, 21 nt, Human
guguugaaacggaugauuucu

SEQ ID NO: 2761976 - RNA, 16 nt, Human
aagcaaguauuagaau

SEQ ID NO: 2761977 - RNA, 19 nt, Human
aagcaaaauuuuuucucua

SEQ ID NO: 2761978 - RNA, 22 nt, Human
aagauguagaggagaaacugga

SEQ ID NO: 2761979 - RNA, 13 nt, Human
aagcaaaauguga

SEQ ID NO: 2761980 - RNA, 19 nt, Human
aagauguagaggagaaacu

SEQ ID NO: 2761981 - RNA, 14 nt, Human
aacuuguguaaaua

SEQ ID NO: 2761982 - RNA, 20 nt, Human
aacuuguguaaauacaauuu

SEQ ID NO: 2761983 - RNA, 15 nt, Human
aacuuguguaaauac

SEQ ID NO: 2761984 - RNA, 22 nt, Human
aagaagcaccaaucaugaauua

SEQ ID NO: 2761985 - RNA, 13 nt, Human
aagaaaauaucac

SEQ ID NO: 2761986 - RNA, 22 nt, Human
gugcugggguuaucugaaguca

SEQ ID NO: 2761987 - RNA, 19 nt, Human
gugcugguguaugugugaa

SEQ ID NO: 2761988 - RNA, 13 nt, Human
aagacccaaaagg

SEQ ID NO: 2761989 - RNA, 13 nt, Human
aagaauauuuuaa

SEQ ID NO: 2761990 - RNA, 10 nt, Human
guuucuguac

SEQ ID NO: 2761991 - RNA, 15 nt, Human
guuuucugagaaaga

SEQ ID NO: 2761992 - RNA, 22 nt, Human
guuuuauaauuuugugaagcaa

SEQ ID NO: 2761993 - RNA, 15 nt, Human
guuuuauaauuuugu

SEQ ID NO: 2761994 - RNA, 17 nt, Human
aaguaaaaccacagcag

SEQ ID NO: 2761995 - RNA, 18 nt, Human
aaguaaaaccacagcagu

SEQ ID NO: 2761996 - RNA, 14 nt, Human
aaguaaaaccacag

SEQ ID NO: 2761997 - RNA, 15 nt, Human
aaguaaaaccacagc

SEQ ID NO: 2761998 - RNA, 16 nt, Human
aaguaaaaccacagca

SEQ ID NO: 2761999 - RNA, 21 nt, Human
aagggugaugggaaagcauug

SEQ ID NO: 2762000 - RNA, 16 nt, Human
guuuucugagaaagac

SEQ ID NO: 2762001 - RNA, 17 nt, Human
guuuucugagaaagacu

SEQ ID NO: 2762002 - RNA, 22 nt, Human
guuuucugagaaagacuauuca

SEQ ID NO: 2762003 - RNA, 13 nt, Human
aaguauuaagcau

SEQ ID NO: 2762004 - RNA, 21 nt, Human
aaguauguuagugcaaauugu

SEQ ID NO: 2762005 - RNA, 23 nt, Human
aaguauguuagugcaaauuguca

SEQ ID NO: 2762006 - RNA, 23 nt, Human
guuuuuuuuuaaaaaagaaacau

SEQ ID NO: 2762007 - RNA, 13 nt, Human
aaggauaaugaau

SEQ ID NO: 2762008 - RNA, 16 nt, Human
aaggaaaaaauaacaa

SEQ ID NO: 2762009 - RNA, 19 nt, Human
aaggaaaaaauaacaauga

SEQ ID NO: 2762010 - RNA, 22 nt, Human
uaaaccaugggauaaaugccau

SEQ ID NO: 2762011 - RNA, 21 nt, Human
uaaaccaugggauaaaugcca

SEQ ID NO: 2762012 - RNA, 20 nt, Human
uaaaccaugggauaaaugcc

SEQ ID NO: 2762013 - RNA, 18 nt, Human
uaaaccaugggauaaaug

SEQ ID NO: 2762014 - RNA, 18 nt, Human
aaguuuaauauuaaagcc

SEQ ID NO: 2762015 - RNA, 21 nt, Human
aaguuuaauauuaaagccaug

SEQ ID NO: 2762016 - RNA, 20 nt, Human
aaguuuaauauuaaagccau

SEQ ID NO: 2762017 - RNA, 19 nt, Human
aaguuuaauauuaaagcca

SEQ ID NO: 2762018 - RNA, 19 nt, Human
uaaaccaaggcuagaacca

SEQ ID NO: 2762019 - RNA, 15 nt, Human
aauaaggaaaaguuu

SEQ ID NO: 2762020 - RNA, 13 nt, Human
aauaaggaaaagu

SEQ ID NO: 2762021 - RNA, 22 nt, Human
aauaaggaaaaguuuaauauua

SEQ ID NO: 2762022 - RNA, 19 nt, Human
aauaaggaaaaguuuaaua

SEQ ID NO: 2762023 - RNA, 16 nt, Human
aauaaggaaaaguuua

SEQ ID NO: 2762024 - RNA, 15 nt, Human
aauaauuauaugcua

SEQ ID NO: 2762025 - RNA, 14 nt, Human
aauaauuauaugcu

SEQ ID NO: 2762026 - RNA, 23 nt, Human
aauaauuauaugcuauuucuaua

SEQ ID NO: 2762027 - RNA, 22 nt, Human
aauaauuauaugcuauuucuau

SEQ ID NO: 2762028 - RNA, 21 nt, Human
aauaauuauaugcuauuucua

SEQ ID NO: 2762029 - RNA, 20 nt, Human
aauaauuauaugcuauuucu

SEQ ID NO: 2762030 - RNA, 21 nt, Human
aauaaauagcuagacugguga

SEQ ID NO: 2762031 - RNA, 12 nt, Human
aauaaaugugcc

SEQ ID NO: 2762032 - RNA, 21 nt, Human
aauaaaugugccuucauuuuu

SEQ ID NO: 2762033 - RNA, 15 nt, Human
aauaacaauaaaaga

SEQ ID NO: 2762034 - RNA, 15 nt, Human
aauaacgauaaaaga

SEQ ID NO: 2762035 - RNA, 14 nt, Human
aauaaaaaauuaug

SEQ ID NO: 2762036 - RNA, 16 nt, Human
aauaaaaaauuaugac

SEQ ID NO: 2762037 - RNA, 15 nt, Human
aauaaaaaauuauga

SEQ ID NO: 2762038 - RNA, 22 nt, Human
aauaaaauccauacauuugugu

SEQ ID NO: 2762039 - RNA, 12 nt, Human
aauaaaaauaau

SEQ ID NO: 2762040 - RNA, 15 nt, Human
uaaauguugacaugg

SEQ ID NO: 2762041 - RNA, 17 nt, Human
uaaaugauuucauucaa

SEQ ID NO: 2762042 - RNA, 16 nt, Human
uaacaacagcuggugc

SEQ ID NO: 2762043 - RNA, 13 nt, Human
uaacaaugcugua

SEQ ID NO: 2762044 - RNA, 17 nt, Human
uaacaaugcuguauuuu

SEQ ID NO: 2762045 - RNA, 15 nt, Human
uaacaaugcuguauu

SEQ ID NO: 2762046 - RNA, 13 nt, Human
uaaauacaauuuu

SEQ ID NO: 2762047 - RNA, 22 nt, Human
uaaauacaauuuuguuucugua

SEQ ID NO: 2762048 - RNA, 15 nt, Human
uaaauacaauuuugu

SEQ ID NO: 2762049 - RNA, 19 nt, Human
uaaauagcuagacugguga

SEQ ID NO: 2762050 - RNA, 23 nt, Human
uaaauacaauuuuguuucuguac

SEQ ID NO: 2762051 - RNA, 23 nt, Human
uaaauagcuagacuggugacuga

SEQ ID NO: 2762052 - RNA, 19 nt, Human
uaaaucccauuauucaaag

SEQ ID NO: 2762053 - RNA, 23 nt, Human
uaaaucccauuauucaaaguugc

SEQ ID NO: 2762054 - RNA, 13 nt, Human
aauacaauuuugu

SEQ ID NO: 2762055 - RNA, 12 nt, Human
aauacaauuuug

SEQ ID NO: 2762056 - RNA, 20 nt, Human
aauacaauuuuguuucugua

SEQ ID NO: 2762057 - RNA, 18 nt, Human
aauacaauuuuguuucug

SEQ ID NO: 2762058 - RNA, 17 nt, Human
aauacaauuuuguuucu

SEQ ID NO: 2762059 - RNA, 15 nt, Human
aauacaauuuuguuu

SEQ ID NO: 2762060 - RNA, 23 nt, Human
aauacaauuuuguuucuguacuu

SEQ ID NO: 2762061 - RNA, 22 nt, Human
aauacaauuuuguuucuguacu

SEQ ID NO: 2762062 - RNA, 14 nt, Human
aauacacacucaaa

SEQ ID NO: 2762063 - RNA, 21 nt, Human
aucagcugcugaaacaacaaa

SEQ ID NO: 2762064 - RNA, 15 nt, Human
auauuuauuuuaaua

SEQ ID NO: 2762065 - RNA, 14 nt, Human
auauuuauuuuaau

SEQ ID NO: 2762066 - RNA, 17 nt, Human
auauuuauuuuaauaau

SEQ ID NO: 2762067 - RNA, 22 nt, Human
aucagcugcugaaacaacaaau

SEQ ID NO: 2762068 - RNA, 23 nt, Human
aucagcugcugaaacaacaaaua

SEQ ID NO: 2762069 - RNA, 13 nt, Human
augugugaaguga

SEQ ID NO: 2762070 - RNA, 18 nt, Human
augugggcagugauguca

SEQ ID NO: 2762071 - RNA, 17 nt, Human
auguucuaagaagugaa

SEQ ID NO: 2762072 - RNA, 19 nt, Human
augguccgugcuaaggacu

SEQ ID NO: 2762073 - RNA, 21 nt, Human
augguccgugcuaaggacuug

SEQ ID NO: 2762074 - RNA, 20 nt, Human
augguccgugcuaaggacuu

SEQ ID NO: 2762075 - RNA, 14 nt, Human
auguaagggaaacu

SEQ ID NO: 2762076 - RNA, 16 nt, Human
auguaagggaaacugc

SEQ ID NO: 2762077 - RNA, 19 nt, Human
auguaagggaaacugccag

SEQ ID NO: 2762078 - RNA, 12 nt, Human
aguccuguaaug

SEQ ID NO: 2762079 - RNA, 19 nt, Human
agucaaauugugugaaagg

SEQ ID NO: 2762080 - RNA, 23 nt, Human
agucaaauugugugaaagguacu

SEQ ID NO: 2762081 - RNA, 22 nt, Human
aguugaaaaucuuauaauuuaa

SEQ ID NO: 2762082 - RNA, 21 nt, Human
aguugaaaagacuccaaagaa

SEQ ID NO: 2762083 - RNA, 22 nt, Human
aguugaaaagacuccaaagaaa

SEQ ID NO: 2762084 - RNA, 23 nt, Human
aguugaaaaucuuauaauuuaaa

SEQ ID NO: 2762085 - RNA, 17 nt, Human
agugucuuaauuaaaag

SEQ ID NO: 2762086 - RNA, 18 nt, Human
agugucuuaauuaaaaga

SEQ ID NO: 2762087 - RNA, 15 nt, Human
agugucuuaauuaaa

SEQ ID NO: 2762088 - RNA, 15 nt, Human
auaaggaaaaguuua

SEQ ID NO: 2762089 - RNA, 16 nt, Human
auaaggaaaaguuuaa

SEQ ID NO: 2762090 - RNA, 15 nt, Human
auaauuaacauguua

SEQ ID NO: 2762091 - RNA, 23 nt, Human
auaauguuucaaacauauauaac

SEQ ID NO: 2762092 - RNA, 17 nt, Human
auacacacucaaaucaa

SEQ ID NO: 2762093 - RNA, 18 nt, Human
auacacacucaaaucaag

SEQ ID NO: 2762094 - RNA, 19 nt, Human
auaacauaaaucugugaac

SEQ ID NO: 2762095 - RNA, 18 nt, Human
auaacauaaaucugugaa

SEQ ID NO: 2762096 - RNA, 17 nt, Human
auaacauaaaucuguga

SEQ ID NO: 2762097 - RNA, 15 nt, Human
auaacauaaaucugu

SEQ ID NO: 2762098 - RNA, 14 nt, Human
auaacauaaaucug

SEQ ID NO: 2762099 - RNA, 18 nt, Human
auaaaggauuaaugucaa

SEQ ID NO: 2762100 - RNA, 20 nt, Human
auauuuacuaaaauggacug

SEQ ID NO: 2762101 - RNA, 18 nt, Human
auauuuacuaaaauggac

SEQ ID NO: 2762102 - RNA, 13 nt, Human
auauuuauuuuaa

SEQ ID NO: 2762103 - RNA, 22 nt, Human
auauuuauuacuguaagaaaau

SEQ ID NO: 2762104 - RNA, 16 nt, Human
auauuauguuaaaacu

SEQ ID NO: 2762105 - RNA, 21 nt, Human
auaugcuauuucuauauuuuc

SEQ ID NO: 2762106 - RNA, 19 nt, Human
auaugcuauuucuauauuu

SEQ ID NO: 2762107 - RNA, 18 nt, Human
auaugcuauuucuauauu

SEQ ID NO: 2762108 - RNA, 16 nt, Human
auaugcuauuucuaua

SEQ ID NO: 2762109 - RNA, 15 nt, Human
auaugcuauuucuau

SEQ ID NO: 2762110 - RNA, 23 nt, Human
auaugcuauuucuauauuuucau

SEQ ID NO: 2762111 - RNA, 22 nt, Human
auaugcuauuucuauauuuuca

SEQ ID NO: 2762112 - RNA, 22 nt, Human
auaugcuucuguuuuauaauuu

SEQ ID NO: 2762113 - RNA, 20 nt, Human
auaugcuucuguuuuauaau

SEQ ID NO: 2762114 - RNA, 18 nt, Human
auagcagcuuauucacaa

SEQ ID NO: 2762115 - RNA, 15 nt, Human
auaggugcuacaaaa

SEQ ID NO: 2762116 - RNA, 21 nt, Human
auaggugcuacaaaaacacag

SEQ ID NO: 2762117 - RNA, 23 nt, Human
auaggugcuacaaaaacacagca

SEQ ID NO: 2762118 - RNA, 14 nt, Human
auaggugcuacaaa

SEQ ID NO: 2762119 - RNA, 15 nt, Human
auagguuuaauaauu

SEQ ID NO: 2762120 - RNA, 14 nt, Human
auagucaaauugug

SEQ ID NO: 2762121 - RNA, 16 nt, Human
aggcuagauguaugua

SEQ ID NO: 2762122 - RNA, 15 nt, Human
aggcuagauguaugu

SEQ ID NO: 2762123 - RNA, 17 nt, Human
aggcuagauguauguac

SEQ ID NO: 2762124 - RNA, 17 nt, Human
aggcuacugucagcucc

SEQ ID NO: 2762125 - RNA, 21 nt, Human
aggcuagaaccaccugccuau

SEQ ID NO: 2762126 - RNA, 23 nt, Human
aggugcuacaaaaacacagcaag

SEQ ID NO: 2762127 - RNA, 24 nt, Human
aggugcuacaaaaacacagcaagg

SEQ ID NO: 2762128 - RNA, 20 nt, Human
agguaaaagcaucacaugaa

SEQ ID NO: 2762129 - RNA, 19 nt, Human
aggugcuacaaaaacacag

SEQ ID NO: 2762130 - RNA, 20 nt, Human
aggugcuacaaaaacacagc

SEQ ID NO: 2762131 - RNA, 21 nt, Human
aggugcuacaaaaacacagca

SEQ ID NO: 2762132 - RNA, 22 nt, Human
aggugcuacaaaaacacagcaa

SEQ ID NO: 2762133 - RNA, 18 nt, Human
aggugcuacaaaaacaca

SEQ ID NO: 2762134 - RNA, 22 nt, Human
agcuccccucggagaagagcug

SEQ ID NO: 2762135 - RNA, 17 nt, Human
aggauguugaaaaaguu

SEQ ID NO: 2762136 - RNA, 23 nt, Human
aggaugguucccuugaugaagaa

SEQ ID NO: 2762137 - RNA, 17 nt, Human
agagaacuuccagaucc

SEQ ID NO: 2762138 - RNA, 21 nt, Human
agacugcauuauauuuauuac

SEQ ID NO: 2762139 - RNA, 16 nt, Human
agcacugacuucuaag

SEQ ID NO: 2762140 - RNA, 20 nt, Human
agcaguucagagcugcccuc

SEQ ID NO: 2762141 - RNA, 23 nt, Human
agcaguucagagcugcccucucc

SEQ ID NO: 2762142 - RNA, 13 nt, Human
agcaguugaaaag

SEQ ID NO: 2762143 - RNA, 16 nt, Human
agcaguugaaaagacu

SEQ ID NO: 2762144 - RNA, 23 nt, Human
aauguuucaaacauauauaacaa

SEQ ID NO: 2762145 - RNA, 19 nt, Human
aaguugccuaaauccauuu

SEQ ID NO: 2762146 - RNA, 18 nt, Human
aaguugccuaaauccauu

SEQ ID NO: 2762147 - RNA, 17 nt, Human
aaguugccuaaauccau

SEQ ID NO: 2762148 - RNA, 16 nt, Human
aaguugccuaaaucca

SEQ ID NO: 2762149 - RNA, 15 nt, Human
aaguugccuaaaucc

SEQ ID NO: 2762150 - RNA, 21 nt, Human
aaugauuaugaauuacauuug

SEQ ID NO: 2762151 - RNA, 15 nt, Human
aaugauuaugaauua

SEQ ID NO: 2762152 - RNA, 21 nt, Human
aaggacuucuuuaauuuugga

SEQ ID NO: 2762153 - RNA, 20 nt, Human
aaggacuucuuuaauuuugg

SEQ ID NO: 2762154 - RNA, 15 nt, Human
aaggacuucuuuaau

SEQ ID NO: 2762155 - RNA, 14 nt, Human
aaggacuucuuuaa

SEQ ID NO: 2762156 - RNA, 20 nt, Human
aaggcagcucuaaaugucaa

SEQ ID NO: 2762157 - RNA, 12 nt, Human
aaguugccuaaa

SEQ ID NO: 2762158 - RNA, 18 nt, Human
aaguccaagcauuuagau

SEQ ID NO: 2762159 - RNA, 17 nt, Human
aaguccaagcauaccaa

SEQ ID NO: 2762160 - RNA, 21 nt, Human
aaguagggacuucugucuuca

SEQ ID NO: 2762161 - RNA, 23 nt, Human
aagggaaacugccagcaacgcag

SEQ ID NO: 2762162 - RNA, 16 nt, Human
aagggaaacugccagc

SEQ ID NO: 2762163 - RNA, 17 nt, Human
aagggaaacugccagca

SEQ ID NO: 2762164 - RNA, 19 nt, Human
aaauugacacuuaaaaaug

SEQ ID NO: 2762165 - RNA, 17 nt, Human
aaaucuuauaauuuaaa

SEQ ID NO: 2762166 - RNA, 22 nt, Human
aaauguuguucucuucuuuaaa

SEQ ID NO: 2762167 - RNA, 16 nt, Human
aacacaucagcuugcc

SEQ ID NO: 2762168 - RNA, 18 nt, Human
aacaaauuuacagagaca

SEQ ID NO: 2762169 - RNA, 21 nt, Human
aacagcuggugcccugcuuuc

SEQ ID NO: 2762170 - RNA, 20 nt, Human
aacagcuggugcccugcuuu

SEQ ID NO: 2762171 - RNA, 17 nt, Human
aacagcuggugcccugc

SEQ ID NO: 2762172 - RNA, 19 nt, Human
aacagcuggugcccugcuu

SEQ ID NO: 2762173 - RNA, 22 nt, Human
aaccacuggaaaguuuaugguu

SEQ ID NO: 2762174 - RNA, 16 nt, Human
aacccgggaggcagag

SEQ ID NO: 2762175 - RNA, 17 nt, Human
aaccuagggugauauua

SEQ ID NO: 2762176 - RNA, 17 nt, Human
aacggaugauuucuaug

SEQ ID NO: 2762177 - RNA, 16 nt, Human
aacggaugauuucuau

SEQ ID NO: 2762178 - RNA, 15 nt, Human
aacggaugauuucua

SEQ ID NO: 2762179 - RNA, 14 nt, Human
aacggaugauuucu

SEQ ID NO: 2762180 - RNA, 18 nt, Human
aacugacucuuaagaaga

SEQ ID NO: 2762181 - RNA, 15 nt, Human
aacugacucuuaaga

SEQ ID NO: 2762182 - RNA, 20 nt, Human
aacugacucuuaagaagacu

SEQ ID NO: 2762183 - RNA, 19 nt, Human
aacugacucuuaagaagac

SEQ ID NO: 2762184 - RNA, 20 nt, Human
aacugagaugugaacacauc

SEQ ID NO: 2762185 - RNA, 20 nt, Human
aacuuuaugcuaagugaaau

SEQ ID NO: 2762186 - RNA, 21 nt, Human
aacuuuaugcuaagugaaaua

SEQ ID NO: 2762187 - RNA, 16 nt, Human
aaaaagaaacauuugg

SEQ ID NO: 2762188 - RNA, 18 nt, Human
aaaaguucugcagauaaa

SEQ ID NO: 2762189 - RNA, 21 nt, Human
aaaaucuacacuccagugaga

SEQ ID NO: 2762190 - RNA, 16 nt, Human
aaaaucucaauauuuc

SEQ ID NO: 2762191 - RNA, 20 nt, Human
aaaccaugggauaaaugcca

SEQ ID NO: 2762192 - RNA, 15 nt, Human
aaaccaugggauaaa

SEQ ID NO: 2762193 - RNA, 21 nt, Human
aaacugagaugugaacacauc

SEQ ID NO: 2762194 - RNA, 23 nt, Human
aaacugagaugugaacacaucag

SEQ ID NO: 2762195 - RNA, 15 nt, Human
aaagaaauguaaggg

SEQ ID NO: 2762196 - RNA, 18 nt, Human
aaauagcuagacugguga

SEQ ID NO: 2762197 - RNA, 18 nt, Human
aaaucugugaacuugaaa

SEQ ID NO: 2762198 - RNA, 16 nt, Human
aaaucugugaacuuga

SEQ ID NO: 2762199 - RNA, 15 nt, Human
aaaucugugaacuug

SEQ ID NO: 2762200 - RNA, 15 nt, Human
aaaucaaauaugcaa

SEQ ID NO: 2762201 - RNA, 12 nt, Human
aaaucaaauaug

SEQ ID NO: 2762202 - RNA, 14 nt, Human
aaaucaaauaugca

SEQ ID NO: 2762203 - RNA, 20 nt, Human
aaauauuuauuuuaauaaug

SEQ ID NO: 2762204 - RNA, 13 nt, Human
aaauauuuauuuu

SEQ ID NO: 2762205 - RNA, 15 nt, Human
aaauauuuauuuuaa

SEQ ID NO: 2762206 - RNA, 10 nt, Human
aaauaaauaa

SEQ ID NO: 2762207 - RNA, 14 nt, Human
aaaggcagaagcaa

SEQ ID NO: 2762208 - RNA, 13 nt, Human
aauuuuguuucug

SEQ ID NO: 2762209 - RNA, 14 nt, Human
aauuuuguuucugu

SEQ ID NO: 2762210 - RNA, 14 nt, Human
acacgagcaggcua

SEQ ID NO: 2762211 - RNA, 19 nt, Human
acacgagcaggcuacuguc

SEQ ID NO: 2762212 - RNA, 21 nt, Human
acacgagcaggcuacugucag

SEQ ID NO: 2762213 - RNA, 22 nt, Human
acagcaguugaaaagacuccaa

SEQ ID NO: 2762214 - RNA, 23 nt, Human
acagcaguugaaaagacuccaaa

SEQ ID NO: 2762215 - RNA, 21 nt, Human
acagcaguugaaaagacucca

SEQ ID NO: 2762216 - RNA, 17 nt, Human
acccacaagaaaugaaa

SEQ ID NO: 2762217 - RNA, 21 nt, Human
acccacaagaaaugaaagcag

SEQ ID NO: 2762218 - RNA, 21 nt, Human
acuuggucugugagaugcuag

SEQ ID NO: 2762219 - RNA, 22 nt, Human
acuucugucuucacaacagauu

SEQ ID NO: 2762220 - RNA, 21 nt, Human
acuucugucuucacaacagau

SEQ ID NO: 2762221 - RNA, 12 nt, Human
acuucagacaua

SEQ ID NO: 2762222 - RNA, 13 nt, Human
acugccagcaacg

SEQ ID NO: 2762223 - RNA, 18 nt, Human
acucugucucaguccaug

SEQ ID NO: 2762224 - RNA, 20 nt, Human
acucugucucaguccaugaa

SEQ ID NO: 2762225 - RNA, 14 nt, Human
acuggugacugauu

SEQ ID NO: 2762226 - RNA, 13 nt, Human
acuguaagaaaau

SEQ ID NO: 2762227 - RNA, 19 nt, Human
acuguaagaaaauaucacu

SEQ ID NO: 2762228 - RNA, 22 nt, Human
acuguaagaaaauaucacuugu

SEQ ID NO: 2762229 - RNA, 22 nt, Human
acuuuauuuucuauaauuuaaa

SEQ ID NO: 2762230 - RNA, 16 nt, Human
agaaaaucaggcuggc

SEQ ID NO: 2762231 - RNA, 14 nt, Human
agaaaauaacaaua

SEQ ID NO: 2762232 - RNA, 13 nt, Human
acuaagagagaau

SEQ ID NO: 2762233 - RNA, 19 nt, Human
acgcaggcccccaggugcc

SEQ ID NO: 2762234 - RNA, 22 nt, Human
acgcaggcccccaggugccagu

SEQ ID NO: 2762235 - RNA, 14 nt, Human
acucaaaucaagaa

SEQ ID NO: 2762236 - RNA, 21 nt, Human
acuauucaaacagucucagga

SEQ ID NO: 2762237 - RNA, 20 nt, Human
acuaguauuucuaugaaaua

SEQ ID NO: 2762238 - RNA, 17 nt, Human
acucuauguucuaagaa

SEQ ID NO: 2762239 - RNA, 20 nt, Human
aaaaaccaguauuguacaaa

SEQ ID NO: 2762240 - RNA, 12 nt, Human
aaaaacacagca

SEQ ID NO: 2762241 - RNA, 18 nt, Human
aaaaacacagcaagggug

SEQ ID NO: 2762242 - RNA, 18 nt, Human
aaaaaauuggggauucuu

SEQ ID NO: 2762243 - RNA, 13 nt, Human
aaaaacacagcaa

SEQ ID NO: 2762244 - RNA, 15 nt, Human
cacccacccuuuuuu

SEQ ID NO: 2762245 - RNA, 17 nt, Human
caagcacuaaacaaaga

SEQ ID NO: 2762246 - RNA, 15 nt, Human
caaauuuacagagac

SEQ ID NO: 2762247 - RNA, 15 nt, Human
caaauugugugaaag

SEQ ID NO: 2762248 - RNA, 14 nt, Human
caaauuuacagaga

SEQ ID NO: 2762249 - RNA, 19 nt, Human
caaaguugccuaaauccau

SEQ ID NO: 2762250 - RNA, 14 nt, Human
caaauaugcaaagc

SEQ ID NO: 2762251 - RNA, 20 nt, Human
caaauguucaucaaugaaug

SEQ ID NO: 2762252 - RNA, 21 nt, Human
caaauguucaucaaugaauga

SEQ ID NO: 2762253 - RNA, 18 nt, Human
caaauaugcaaagcacug

SEQ ID NO: 2762254 - RNA, 16 nt, Human
caaauaugcaaagcac

SEQ ID NO: 2762255 - RNA, 17 nt, Human
caaauaugcaaagcacu

SEQ ID NO: 2762256 - RNA, 20 nt, Human
cacauugguguuguacucaa

SEQ ID NO: 2762257 - RNA, 14 nt, Human
cacaguuuucugag

SEQ ID NO: 2762258 - RNA, 19 nt, Human
cacaggaaccacaagacug

SEQ ID NO: 2762259 - RNA, 20 nt, Human
cacaggaaccacaagacugc

SEQ ID NO: 2762260 - RNA, 15 nt, Human
cacaggaaguagagg

SEQ ID NO: 2762261 - RNA, 22 nt, Human
cacagcaguugaaaagacucca

SEQ ID NO: 2762262 - RNA, 13 nt, Human
cacaacuauauug

SEQ ID NO: 2762263 - RNA, 14 nt, Human
cacacugaagaagc

SEQ ID NO: 2762264 - RNA, 19 nt, Human
cacacucaaaucaagaaac

SEQ ID NO: 2762265 - RNA, 11 nt, Human
cacaacagauu

SEQ ID NO: 2762266 - RNA, 21 nt, Human
caauaucuuuuuuuuaauaaa

SEQ ID NO: 2762267 - RNA, 22 nt, Human
caaugaaugaaugaauggcuaa

SEQ ID NO: 2762268 - RNA, 13 nt, Human
uugccuuuuucau

SEQ ID NO: 2762269 - RNA, 12 nt, Human
uugccuuuuuca

SEQ ID NO: 2762270 - RNA, 17 nt, Human
uugccuuuuucauuauu

SEQ ID NO: 2762271 - RNA, 16 nt, Human
uugccuuuuucauuau

SEQ ID NO: 2762272 - RNA, 15 nt, Human
uugccuuuuucauua

SEQ ID NO: 2762273 - RNA, 14 nt, Human
uugccuuuuucauu

SEQ ID NO: 2762274 - RNA, 16 nt, Human
uugcuaagcauuccaa

SEQ ID NO: 2762275 - RNA, 18 nt, Human
uugcuaagcauuccaacu

SEQ ID NO: 2762276 - RNA, 16 nt, Human
uuguaccgcaauguga

SEQ ID NO: 2762277 - RNA, 20 nt, Human
uuguaaaauggugugaccac

SEQ ID NO: 2762278 - RNA, 18 nt, Human
uuggcauaacauaaaucu

SEQ ID NO: 2762279 - RNA, 23 nt, Human
uuggcauaacauaaaucugugaa

SEQ ID NO: 2762280 - RNA, 22 nt, Human
uuggcauaacauaaaucuguga

SEQ ID NO: 2762281 - RNA, 20 nt, Human
uuggcauaacauaaaucugu

SEQ ID NO: 2762282 - RNA, 19 nt, Human
uuggcauaacauaaaucug

SEQ ID NO: 2762283 - RNA, 20 nt, Human
uugguaaggggaauugagga

SEQ ID NO: 2762284 - RNA, 13 nt, Human
uuguaaaauggug

SEQ ID NO: 2762285 - RNA, 12 nt, Human
uuguaaaauggu

SEQ ID NO: 2762286 - RNA, 20 nt, Human
uugauaugccuuuucccaac

SEQ ID NO: 2762287 - RNA, 13 nt, Human
uugccaucccucc

SEQ ID NO: 2762288 - RNA, 18 nt, Human
uugccaucccucccucca

SEQ ID NO: 2762289 - RNA, 17 nt, Human
uugccaucccucccucc

SEQ ID NO: 2762290 - RNA, 16 nt, Human
uugccaucccucccuc

SEQ ID NO: 2762291 - RNA, 14 nt, Human
uugccaucccuccc

SEQ ID NO: 2762292 - RNA, 23 nt, Human
uugccaucccucccuccaccucc

SEQ ID NO: 2762293 - RNA, 22 nt, Human
uugccaucccucccuccaccuc

SEQ ID NO: 2762294 - RNA, 14 nt, Human
uucuguauagauua

SEQ ID NO: 2762295 - RNA, 13 nt, Human
uucuguauagauu

SEQ ID NO: 2762296 - RNA, 11 nt, Human
uucuguauaga

SEQ ID NO: 2762297 - RNA, 24 nt, Human
uucuaaguaaaaccacagcaguug

SEQ ID NO: 2762298 - RNA, 19 nt, Human
uucuuaggguuaugauuaa

SEQ ID NO: 2762299 - RNA, 19 nt, Human
uugaaacggaugauuucua

SEQ ID NO: 2762300 - RNA, 16 nt, Human
uugaaacggaugauuu

SEQ ID NO: 2762301 - RNA, 12 nt, Human
uucuuuaauuuu

SEQ ID NO: 2762302 - RNA, 18 nt, Human
uucuuuaauuuuggaauu

SEQ ID NO: 2762303 - RNA, 17 nt, Human
uucuuuaauuuuggaau

SEQ ID NO: 2762304 - RNA, 18 nt, Human
uucuuuccacagaagcuc

SEQ ID NO: 2762305 - RNA, 21 nt, Human
uugaaaaucuuauaauuuaaa

SEQ ID NO: 2762306 - RNA, 13 nt, Human
uuucugauccagu

SEQ ID NO: 2762307 - RNA, 22 nt, Human
uuucugauccaguuuuguuugg

SEQ ID NO: 2762308 - RNA, 20 nt, Human
uuucugauccaguuuuguuu

SEQ ID NO: 2762309 - RNA, 16 nt, Human
uuucugauccaguuuu

SEQ ID NO: 2762310 - RNA, 15 nt, Human
uuucugauccaguuu

SEQ ID NO: 2762311 - RNA, 12 nt, Human
uuucucuaggaa

SEQ ID NO: 2762312 - RNA, 18 nt, Human
uuugguaaggggaauuga

SEQ ID NO: 2762313 - RNA, 21 nt, Human
uuugaaauuguauuacaaauc

SEQ ID NO: 2762314 - RNA, 12 nt, Human
uuguuucuguac

SEQ ID NO: 2762315 - RNA, 14 nt, Human
uuguuucuguacuu

SEQ ID NO: 2762316 - RNA, 14 nt, Human
uuguuuguuuaguc

SEQ ID NO: 2762317 - RNA, 13 nt, Human
uuguuuguuuagu

SEQ ID NO: 2762318 - RNA, 18 nt, Human
uuguuuaaaaucauuucu

SEQ ID NO: 2762319 - RNA, 17 nt, Human
uuguuuaaaaucauuuc

SEQ ID NO: 2762320 - RNA, 12 nt, Human
uuuaaaaugucu

SEQ ID NO: 2762321 - RNA, 17 nt, Human
uuuaaaagaaugauuau

SEQ ID NO: 2762322 - RNA, 14 nt, Human
uuuaaaagaaugau

SEQ ID NO: 2762323 - RNA, 16 nt, Human
uuuaaaaucauuucug

SEQ ID NO: 2762324 - RNA, 19 nt, Human
uuuaaaauacacacucaaa

SEQ ID NO: 2762325 - RNA, 14 nt, Human
uuuaauauuaaagc

SEQ ID NO: 2762326 - RNA, 21 nt, Human
uuuaauauuaaagccauguuu

SEQ ID NO: 2762327 - RNA, 20 nt, Human
uuuaauauuaaagccauguu

SEQ ID NO: 2762328 - RNA, 17 nt, Human
uuuaauauuaaagccau

SEQ ID NO: 2762329 - RNA, 15 nt, Human
uuuaauauuaaagcc

SEQ ID NO: 2762330 - RNA, 13 nt, Human
uuuacagagacag

SEQ ID NO: 2762331 - RNA, 19 nt, Human
uuuaauaauguuucaaaca

SEQ ID NO: 2762332 - RNA, 15 nt, Human
uuuaauaauguuuca

SEQ ID NO: 2762333 - RNA, 14 nt, Human
uuuaauaauguuuc

SEQ ID NO: 2762334 - RNA, 13 nt, Human
uuuaauaaaccau

SEQ ID NO: 2762335 - RNA, 17 nt, Human
uuaucugaagucagauc

SEQ ID NO: 2762336 - RNA, 21 nt, Human
uuauggcacuaguauuucuau

SEQ ID NO: 2762337 - RNA, 17 nt, Human
uuauggcuauaggugcu

SEQ ID NO: 2762338 - RNA, 16 nt, Human
uuauuacuguaagaaa

SEQ ID NO: 2762339 - RNA, 18 nt, Human
uuauuacuguaagaaaau

SEQ ID NO: 2762340 - RNA, 17 nt, Human
uuauuacuguaagaaaa

SEQ ID NO: 2762341 - RNA, 16 nt, Human
uucagacauagaauua

SEQ ID NO: 2762342 - RNA, 20 nt, Human
uucagacauagaauuaacac

SEQ ID NO: 2762343 - RNA, 21 nt, Human
uucacucuccauuuaauaauu

SEQ ID NO: 2762344 - RNA, 13 nt, Human
uucagagcugccc

SEQ ID NO: 2762345 - RNA, 22 nt, Human
uuauuggcuuuucugauccagu

SEQ ID NO: 2762346 - RNA, 18 nt, Human
uuauuggcuuuucugauc

SEQ ID NO: 2762347 - RNA, 16 nt, Human
uuauuggcuuuucuga

SEQ ID NO: 2762348 - RNA, 12 nt, Human
uuauuggcuuuu

SEQ ID NO: 2762349 - RNA, 16 nt, Human
uuauuuuaauaauguu

SEQ ID NO: 2762350 - RNA, 15 nt, Human
uuauuuuaauaaugu

SEQ ID NO: 2762351 - RNA, 15 nt, Human
uuauugucuagugaa

SEQ ID NO: 2762352 - RNA, 13 nt, Human
uuauuuuauuaug

SEQ ID NO: 2762353 - RNA, 23 nt, Human
uucaaaguugccuaaauccauuu

SEQ ID NO: 2762354 - RNA, 17 nt, Human
uucaaaguugccuaaau

SEQ ID NO: 2762355 - RNA, 16 nt, Human
uucaaaguugccuaaa

SEQ ID NO: 2762356 - RNA, 15 nt, Human
uucaaaguugccuaa

SEQ ID NO: 2762357 - RNA, 11 nt, Human
uucaaaguugc

SEQ ID NO: 2762358 - RNA, 19 nt, Human
uuccagauccuggaaauca

SEQ ID NO: 2762359 - RNA, 22 nt, Human
uucggccuccauccugaggcuc

SEQ ID NO: 2762360 - RNA, 17 nt, Human
uuccuuggacucauuuu

SEQ ID NO: 2762361 - RNA, 20 nt, Human
uuccuuggacucauuuuaaa

SEQ ID NO: 2762362 - RNA, 17 nt, Human
uucccuugaugaagaag

SEQ ID NO: 2762363 - RNA, 17 nt, Human
uuacuaguuucccuugc

SEQ ID NO: 2762364 - RNA, 14 nt, Human
uuagagaguguuga

SEQ ID NO: 2762365 - RNA, 17 nt, Human
uuagagaguguugaaac

SEQ ID NO: 2762366 - RNA, 16 nt, Human
uuagagaguguugaaa

SEQ ID NO: 2762367 - RNA, 19 nt, Human
uuagaaacacaacuauauu

SEQ ID NO: 2762368 - RNA, 13 nt, Human
uuagcuggaaaag

SEQ ID NO: 2762369 - RNA, 12 nt, Human
uuagcuggaaaa

SEQ ID NO: 2762370 - RNA, 12 nt, Human
uuagagauuuuu

SEQ ID NO: 2762371 - RNA, 18 nt, Human
uuagagaguguugaaacg

SEQ ID NO: 2762372 - RNA, 14 nt, Human
uuagaucuaguuca

SEQ ID NO: 2762373 - RNA, 13 nt, Human
uuagaucuaguuc

SEQ ID NO: 2762374 - RNA, 21 nt, Human
uuagaugcaguucugaagaag

SEQ ID NO: 2762375 - RNA, 20 nt, Human
uuagaugcaguucugaagaa

SEQ ID NO: 2762376 - RNA, 18 nt, Human
uuaggauguugaaaaagu

SEQ ID NO: 2762377 - RNA, 19 nt, Human
uuaagcauauauuuuuaua

SEQ ID NO: 2762378 - RNA, 13 nt, Human
uuaagcauauauu

SEQ ID NO: 2762379 - RNA, 18 nt, Human
uuaagcauauauuuuuau

SEQ ID NO: 2762380 - RNA, 15 nt, Human
uuaagcauauauuuu

SEQ ID NO: 2762381 - RNA, 20 nt, Human
uuaauauuaaagccauguuu

SEQ ID NO: 2762382 - RNA, 22 nt, Human
uuaauauuaaagccauguuuau

SEQ ID NO: 2762383 - RNA, 21 nt, Human
uuaauauuaaagccauguuua

SEQ ID NO: 2762384 - RNA, 22 nt, Human
uguuucaaacauauauaacaau

SEQ ID NO: 2762385 - RNA, 21 nt, Human
uguuucaaacauauauaacaa

SEQ ID NO: 2762386 - RNA, 19 nt, Human
uguuucaaacauauauaac

SEQ ID NO: 2762387 - RNA, 21 nt, Human
uuaaaagaauauuuuaacuuc

SEQ ID NO: 2762388 - RNA, 22 nt, Human
uuaaaagaauauuuuaacuucc

SEQ ID NO: 2762389 - RNA, 15 nt, Human
uuaaaagaugaaaau

SEQ ID NO: 2762390 - RNA, 18 nt, Human
uuaaaagaugaaaauauu

SEQ ID NO: 2762391 - RNA, 19 nt, Human
uuaaaauacacacucaaau

SEQ ID NO: 2762392 - RNA, 15 nt, Human
ugggcagcugccucc

SEQ ID NO: 2762393 - RNA, 14 nt, Human
ugggcagcugccuc

SEQ ID NO: 2762394 - RNA, 13 nt, Human
ugggcagcugccu

SEQ ID NO: 2762395 - RNA, 12 nt, Human
ugggcagcugcc

SEQ ID NO: 2762396 - RNA, 19 nt, Human
ugggcagcugccuccccuc

SEQ ID NO: 2762397 - RNA, 17 nt, Human
ugggcagcugccucccc

SEQ ID NO: 2762398 - RNA, 19 nt, Human
uggugacugauucuucagc

SEQ ID NO: 2762399 - RNA, 16 nt, Human
uggugacugauucuuc

SEQ ID NO: 2762400 - RNA, 15 nt, Human
uggugacugauucuu

SEQ ID NO: 2762401 - RNA, 20 nt, Human
ugguccgugcuaaggacuug

SEQ ID NO: 2762402 - RNA, 19 nt, Human
ugguccgugcuaaggacuu

SEQ ID NO: 2762403 - RNA, 18 nt, Human
ugguccgugcuaaggacu

SEQ ID NO: 2762404 - RNA, 17 nt, Human
ugguccgugcuaaggac

SEQ ID NO: 2762405 - RNA, 16 nt, Human
uggucccagccagcag

SEQ ID NO: 2762406 - RNA, 17 nt, Human
uggucacaggaaguaga

SEQ ID NO: 2762407 - RNA, 22 nt, Human
uggucacaggaaguagaggagg

SEQ ID NO: 2762408 - RNA, 13 nt, Human
ugguauguuuuca

SEQ ID NO: 2762409 - RNA, 22 nt, Human
uggaccaaaaaccaguauugua

SEQ ID NO: 2762410 - RNA, 17 nt, Human
uggaccaaaaaccagua

SEQ ID NO: 2762411 - RNA, 20 nt, Human
uggcaauagucaaauugugu

SEQ ID NO: 2762412 - RNA, 15 nt, Human
uggcacuaguauuuc

SEQ ID NO: 2762413 - RNA, 13 nt, Human
ugccuaaauccau

SEQ ID NO: 2762414 - RNA, 19 nt, Human
ugccuaaauccauuuggaa

SEQ ID NO: 2762415 - RNA, 15 nt, Human
ugccuaaauccauuu

SEQ ID NO: 2762416 - RNA, 20 nt, Human
ugccucacccacccuuuuuu

SEQ ID NO: 2762417 - RNA, 23 nt, Human
ugccuaaauccauuuggaaaucu

SEQ ID NO: 2762418 - RNA, 22 nt, Human
ugccuaaauccauuuggaaauc

SEQ ID NO: 2762419 - RNA, 20 nt, Human
ugccuaaauccauuuggaaa

SEQ ID NO: 2762420 - RNA, 16 nt, Human
ugccacuaaauugaca

SEQ ID NO: 2762421 - RNA, 13 nt, Human
ugcaucagcugcu

SEQ ID NO: 2762422 - RNA, 12 nt, Human
ugcaguucugaa

SEQ ID NO: 2762423 - RNA, 22 nt, Human
ugcaucaauuuuucuuauuuca

SEQ ID NO: 2762424 - RNA, 22 nt, Human
ugcugguguaugugugaaguga

SEQ ID NO: 2762425 - RNA, 13 nt, Human
ugcugguguaugu

SEQ ID NO: 2762426 - RNA, 20 nt, Human
ugcugggguuaucugaaguc

SEQ ID NO: 2762427 - RNA, 17 nt, Human
ugcugggguuaucugaa

SEQ ID NO: 2762428 - RNA, 20 nt, Human
ugcugggggggauuguaaaa

SEQ ID NO: 2762429 - RNA, 21 nt, Human
ugcgcuaaacuuuucugauag

SEQ ID NO: 2762430 - RNA, 20 nt, Human
ugcgcuaaacuuuucugaua

SEQ ID NO: 2762431 - RNA, 19 nt, Human
ugcgcuaaacuuuucugau

SEQ ID NO: 2762432 - RNA, 17 nt, Human
ugcuagaacucccuuuc

SEQ ID NO: 2762433 - RNA, 15 nt, Human
ugcuagaacucccuu

SEQ ID NO: 2762434 - RNA, 14 nt, Human
ugcuagaacucccu

SEQ ID NO: 2762435 - RNA, 13 nt, Human
ugcuagaacuccc

SEQ ID NO: 2762436 - RNA, 20 nt, Human
ugaggcuccacuuggucugu

SEQ ID NO: 2762437 - RNA, 18 nt, Human
ugaggcuccacuuggucu

SEQ ID NO: 2762438 - RNA, 16 nt, Human
ugauaacuggaaacuu

SEQ ID NO: 2762439 - RNA, 13 nt, Human
ugagccccaaaag

SEQ ID NO: 2762440 - RNA, 16 nt, Human
ugagagugaacaaauu

SEQ ID NO: 2762441 - RNA, 15 nt, Human
ugauagaggaagccu

SEQ ID NO: 2762442 - RNA, 17 nt, Human
ugaucagcuuauugucu

SEQ ID NO: 2762443 - RNA, 24 nt, Human
ugaucagcuuauugucuagugaaa

SEQ ID NO: 2762444 - RNA, 14 nt, Human
ugaucuuuaaaaua

SEQ ID NO: 2762445 - RNA, 17 nt, Human
ugaucuuuaaaauacac

SEQ ID NO: 2762446 - RNA, 23 nt, Human
ugaugcuacaggauuugaaauug

SEQ ID NO: 2762447 - RNA, 20 nt, Human
ugaugcuacaggauuugaaa

SEQ ID NO: 2762448 - RNA, 15 nt, Human
ugauggugguauguu

SEQ ID NO: 2762449 - RNA, 21 nt, Human
ugauucuucagcaaaaauauu

SEQ ID NO: 2762450 - RNA, 22 nt, Human
ugauuaugaauuacauuuguau

SEQ ID NO: 2762451 - RNA, 21 nt, Human
ugauuaugaauuacauuugua

SEQ ID NO: 2762452 - RNA, 19 nt, Human
ugauuaugaauuacauuug

SEQ ID NO: 2762453 - RNA, 17 nt, Human
ugauuaugaauuacauu

SEQ ID NO: 2762454 - RNA, 13 nt, Human
ugauuauauguca

SEQ ID NO: 2762455 - RNA, 22 nt, Human
ugauguuuagaaacacaacuau

SEQ ID NO: 2762456 - RNA, 16 nt, Human
ugauuaccagggacug

SEQ ID NO: 2762457 - RNA, 12 nt, Human
ucuuugccaagu

SEQ ID NO: 2762458 - RNA, 19 nt, Human
ucuuuccacagaagcucca

SEQ ID NO: 2762459 - RNA, 15 nt, Human
ucuugccuuuuucau

SEQ ID NO: 2762460 - RNA, 17 nt, Human
ucuugccuuuuucauua

SEQ ID NO: 2762461 - RNA, 16 nt, Human
ucuugccuuuuucauu

SEQ ID NO: 2762462 - RNA, 19 nt, Human
ucuugccuuuuucauuauu

SEQ ID NO: 2762463 - RNA, 17 nt, Human
ucuuucacauuuaaaua

SEQ ID NO: 2762464 - RNA, 16 nt, Human
ugaaauauugacuuuu

SEQ ID NO: 2762465 - RNA, 19 nt, Human
ugaaauggacuuuuguaca

SEQ ID NO: 2762466 - RNA, 22 nt, Human
ugaaacaacaaauaggaauugu

SEQ ID NO: 2762467 - RNA, 18 nt, Human
ugaaagaggcagcuugaa

SEQ ID NO: 2762468 - RNA, 16 nt, Human
ugaaagguacuucaaa

SEQ ID NO: 2762469 - RNA, 15 nt, Human
ugaaagguacuucaa

SEQ ID NO: 2762470 - RNA, 18 nt, Human
ugaauuacauuuguauaa

SEQ ID NO: 2762471 - RNA, 16 nt, Human
ugaauuacauuuguau

SEQ ID NO: 2762472 - RNA, 15 nt, Human
ugaauuacauuugua

SEQ ID NO: 2762473 - RNA, 14 nt, Human
ugaauuacauuugu

SEQ ID NO: 2762474 - RNA, 20 nt, Human
ugaaugaauggcuaagcaaa

SEQ ID NO: 2762475 - RNA, 13 nt, Human
ugaaguccaagca

SEQ ID NO: 2762476 - RNA, 20 nt, Human
ugaagucagaucugccuaag

SEQ ID NO: 2762477 - RNA, 23 nt, Human
ugaagucagaucugccuaaggac

SEQ ID NO: 2762478 - RNA, 11 nt, Human
ugaaguccaag

SEQ ID NO: 2762479 - RNA, 18 nt, Human
ugacaugggacauuugcu

SEQ ID NO: 2762480 - RNA, 17 nt, Human
ugacauagucuggcugu

SEQ ID NO: 2762481 - RNA, 16 nt, Human
ugacauagucuggcug

SEQ ID NO: 2762482 - RNA, 17 nt, Human
ugacaugggacauuugc

SEQ ID NO: 2762483 - RNA, 16 nt, Human
ugacaugggacauuug

SEQ ID NO: 2762484 - RNA, 20 nt, Human
ugaccacugcagaagacagu

SEQ ID NO: 2762485 - RNA, 18 nt, Human
ugaccacugcagaagaca

SEQ ID NO: 2762486 - RNA, 20 nt, Human
ugacaagcucacagaccuuu

SEQ ID NO: 2762487 - RNA, 15 nt, Human
ugacaagcucacaga

SEQ ID NO: 2762488 - RNA, 12 nt, Human
ugacaagcucac

SEQ ID NO: 2762489 - RNA, 23 nt, Human
ucucaguccaugaagauguagag

SEQ ID NO: 2762490 - RNA, 14 nt, Human
ucggagaagagcug

SEQ ID NO: 2762491 - RNA, 16 nt, Human
ucggagaagagcuguu

SEQ ID NO: 2762492 - RNA, 12 nt, Human
ucggagaagagc

SEQ ID NO: 2762493 - RNA, 18 nt, Human
ucuaugaaauauuauguu

SEQ ID NO: 2762494 - RNA, 20 nt, Human
uccugaggcuccacuugguc

SEQ ID NO: 2762495 - RNA, 19 nt, Human
uccugaggcuccacuuggu

SEQ ID NO: 2762496 - RNA, 17 nt, Human
uccugaggcuccacuug

SEQ ID NO: 2762497 - RNA, 18 nt, Human
uccugccccugagcccau

SEQ ID NO: 2762498 - RNA, 17 nt, Human
uccugccccugagccca

SEQ ID NO: 2762499 - RNA, 20 nt, Human
uccuaucaccugucuugccu

SEQ ID NO: 2762500 - RNA, 14 nt, Human
uccuagugaaagag

SEQ ID NO: 2762501 - RNA, 23 nt, Human
uccuagugaaagaggcagcuuga

SEQ ID NO: 2762502 - RNA, 14 nt, Human
ucccauuauucaaa

SEQ ID NO: 2762503 - RNA, 13 nt, Human
ucccauuauucaa

SEQ ID NO: 2762504 - RNA, 19 nt, Human
ucccauuauucaaaguugc

SEQ ID NO: 2762505 - RNA, 18 nt, Human
ucccauuauucaaaguug

SEQ ID NO: 2762506 - RNA, 16 nt, Human
ucccauuauucaaagu

SEQ ID NO: 2762507 - RNA, 17 nt, Human
uccaguuuuguuuggac

SEQ ID NO: 2762508 - RNA, 15 nt, Human
uccaguuuuguuugg

SEQ ID NO: 2762509 - RNA, 20 nt, Human
uccaguuuuguuuggaccaa

SEQ ID NO: 2762510 - RNA, 12 nt, Human
uccauacauuug

SEQ ID NO: 2762511 - RNA, 19 nt, Human
uccagguagagggugugua

SEQ ID NO: 2762512 - RNA, 15 nt, Human
uccauacauuugugu

SEQ ID NO: 2762513 - RNA, 20 nt, Human
uccaugggccauaugaaaag

SEQ ID NO: 2762514 - RNA, 14 nt, Human
uccagcagauuauu

SEQ ID NO: 2762515 - RNA, 16 nt, Human
uccagcagauuauuca

SEQ ID NO: 2762516 - RNA, 15 nt, Human
uccagcagauuauuc

SEQ ID NO: 2762517 - RNA, 23 nt, Human
uccacuuggucugugagaugcua

SEQ ID NO: 2762518 - RNA, 17 nt, Human
uccacuuggucugugag

SEQ ID NO: 2762519 - RNA, 21 nt, Human
uccacuuggucugugagaugc

SEQ ID NO: 2762520 - RNA, 20 nt, Human
ucauggaacgcguugaaauu

SEQ ID NO: 2762521 - RNA, 22 nt, Human
ucauggaacgcguugaaauugu

SEQ ID NO: 2762522 - RNA, 21 nt, Human
ucauggaacgcguugaaauug

SEQ ID NO: 2762523 - RNA, 17 nt, Human
ucaucaaugaaugaaug

SEQ ID NO: 2762524 - RNA, 12 nt, Human
ucauagcagcuu

SEQ ID NO: 2762525 - RNA, 11 nt, Human
ucauagcagcu

SEQ ID NO: 2762526 - RNA, 14 nt, Human
uccaaagaaaugua

SEQ ID NO: 2762527 - RNA, 17 nt, Human
uccaaagaaauguaagg

SEQ ID NO: 2762528 - RNA, 16 nt, Human
ucauuaggauggcuag

SEQ ID NO: 2762529 - RNA, 16 nt, Human
uaggucagugcaaaua

SEQ ID NO: 2762530 - RNA, 18 nt, Human
uaggccaugggacaggga

SEQ ID NO: 2762531 - RNA, 16 nt, Human
uaggccaugggacagg

SEQ ID NO: 2762532 - RNA, 12 nt, Human
uaggaauugacc

SEQ ID NO: 2762533 - RNA, 15 nt, Human
uagugcaaauuguca

SEQ ID NO: 2762534 - RNA, 14 nt, Human
uagugcaaauuguc

SEQ ID NO: 2762535 - RNA, 13 nt, Human
uagucaaauugug

SEQ ID NO: 2762536 - RNA, 16 nt, Human
uaguauuucuaugaaa

SEQ ID NO: 2762537 - RNA, 19 nt, Human
uaguauuucuaugaaauau

SEQ ID NO: 2762538 - RNA, 18 nt, Human
uaguauuucuaugaaaua

SEQ ID NO: 2762539 - RNA, 13 nt, Human
uaguaucaaaaga

SEQ ID NO: 2762540 - RNA, 12 nt, Human
uauaauuaacau

SEQ ID NO: 2762541 - RNA, 14 nt, Human
uauaauuaacaugu

SEQ ID NO: 2762542 - RNA, 13 nt, Human
uauaauuaacaug

SEQ ID NO: 2762543 - RNA, 19 nt, Human
uauaauuaacauguuaaac

SEQ ID NO: 2762544 - RNA, 18 nt, Human
uauaauuaacauguuaaa

SEQ ID NO: 2762545 - RNA, 16 nt, Human
uauaauuaacauguua

SEQ ID NO: 2762546 - RNA, 15 nt, Human
uauaauuaacauguu

SEQ ID NO: 2762547 - RNA, 22 nt, Human
uauaauuaacauguuaaaccau

SEQ ID NO: 2762548 - RNA, 18 nt, Human
uauaucugaggaauucug

SEQ ID NO: 2762549 - RNA, 22 nt, Human
uauaucugaggaauucuguaua

SEQ ID NO: 2762550 - RNA, 21 nt, Human
uauaucugaggaauucuguau

SEQ ID NO: 2762551 - RNA, 20 nt, Human
uauaucugaggaauucugua

SEQ ID NO: 2762552 - RNA, 19 nt, Human
uauaucugaggaauucugu

SEQ ID NO: 2762553 - RNA, 13 nt, Human
uauaugcuucugu

SEQ ID NO: 2762554 - RNA, 16 nt, Human
uaugcuucuguuuuau

SEQ ID NO: 2762555 - RNA, 15 nt, Human
uaugcuucuguuuua

SEQ ID NO: 2762556 - RNA, 16 nt, Human
uaugauucccagccag

SEQ ID NO: 2762557 - RNA, 15 nt, Human
uaugcaaagcacuga

SEQ ID NO: 2762558 - RNA, 13 nt, Human
uaugcaaagcacu

SEQ ID NO: 2762559 - RNA, 14 nt, Human
uaugcaaagcacug

SEQ ID NO: 2762560 - RNA, 12 nt, Human
uaugcaaagcac

SEQ ID NO: 2762561 - RNA, 17 nt, Human
uaugaauuacauuugua

SEQ ID NO: 2762562 - RNA, 23 nt, Human
uaugaauuacauuuguauaaaau

SEQ ID NO: 2762563 - RNA, 22 nt, Human
uaucugaggaauucuguauaga

SEQ ID NO: 2762564 - RNA, 21 nt, Human
uaucugaggaauucuguauag

SEQ ID NO: 2762565 - RNA, 19 nt, Human
uaucugaggaauucuguau

SEQ ID NO: 2762566 - RNA, 18 nt, Human
uaucugaggaauucugua

SEQ ID NO: 2762567 - RNA, 16 nt, Human
uaucugaggaauucug

SEQ ID NO: 2762568 - RNA, 17 nt, Human
uaucugaggaauucugu

SEQ ID NO: 2762569 - RNA, 14 nt, Human
uauccuucagccug

SEQ ID NO: 2762570 - RNA, 15 nt, Human
uauccuucagccuga

SEQ ID NO: 2762571 - RNA, 17 nt, Human
uauguucuaagaaguga

SEQ ID NO: 2762572 - RNA, 19 nt, Human
uauggaggcuuugcauaga

SEQ ID NO: 2762573 - RNA, 12 nt, Human
uauguuaaaacu

SEQ ID NO: 2762574 - RNA, 19 nt, Human
uauguuagugcaaauuguc

SEQ ID NO: 2762575 - RNA, 16 nt, Human
uauuaagcauauauuu

SEQ ID NO: 2762576 - RNA, 17 nt, Human
uauuauauuuacaaaug

SEQ ID NO: 2762577 - RNA, 22 nt, Human
uauuaugaaacuuguguaaaua

SEQ ID NO: 2762578 - RNA, 21 nt, Human
uauuaugaaacuuguguaaau

SEQ ID NO: 2762579 - RNA, 20 nt, Human
uauuaugaaacuuguguaaa

SEQ ID NO: 2762580 - RNA, 12 nt, Human
uauuaugaaacu

SEQ ID NO: 2762581 - RNA, 15 nt, Human
uauuauguaaauccc

SEQ ID NO: 2762582 - RNA, 12 nt, Human
uauuauguaaau

SEQ ID NO: 2762583 - RNA, 22 nt, Human
uauuauguaaaucccauuauuc

SEQ ID NO: 2762584 - RNA, 16 nt, Human
uauuauguuaaaacug

SEQ ID NO: 2762585 - RNA, 20 nt, Human
uauuguuuaaaaucauuucu

SEQ ID NO: 2762586 - RNA, 15 nt, Human
uauuucuaugaaaua

SEQ ID NO: 2762587 - RNA, 14 nt, Human
uauuucuaugaaau

SEQ ID NO: 2762588 - RNA, 13 nt, Human
uauuuauuacugu

SEQ ID NO: 2762589 - RNA, 13 nt, Human
uauuucuaugaaa

SEQ ID NO: 2762590 - RNA, 14 nt, Human
uauuuauuacugua

SEQ ID NO: 2762591 - RNA, 23 nt, Human
uauugugcgcuaaacuuuucuga

SEQ ID NO: 2762592 - RNA, 22 nt, Human
uauugugcgcuaaacuuuucug

SEQ ID NO: 2762593 - RNA, 19 nt, Human
uauugugcgcuaaacuuuu

SEQ ID NO: 2762594 - RNA, 15 nt, Human
uauuguuuaaaauca

SEQ ID NO: 2762595 - RNA, 16 nt, Human
uauuguuuaaaaucau

SEQ ID NO: 2762596 - RNA, 17 nt, Human
uauuguuuaaaaucauu

SEQ ID NO: 2762597 - RNA, 19 nt, Human
ucaauaaaaaauuaugaca

SEQ ID NO: 2762598 - RNA, 22 nt, Human
ucacaagacccaaaaggcagaa

SEQ ID NO: 2762599 - RNA, 18 nt, Human
ucacauugguguuguacu

SEQ ID NO: 2762600 - RNA, 12 nt, Human
ucacauuuaaau

SEQ ID NO: 2762601 - RNA, 13 nt, Human
ucaauaaaaaauu

SEQ ID NO: 2762602 - RNA, 16 nt, Human
ucaauaaaaaauuaug

SEQ ID NO: 2762603 - RNA, 14 nt, Human
ucaauaaaaaauua

SEQ ID NO: 2762604 - RNA, 22 nt, Human
ucaacuccaaacugacucuuaa

SEQ ID NO: 2762605 - RNA, 16 nt, Human
ucaaauaugcaaagca

SEQ ID NO: 2762606 - RNA, 17 nt, Human
ucaaauaugcaaagcac

SEQ ID NO: 2762607 - RNA, 18 nt, Human
ucaaauaugcaaagcacu

SEQ ID NO: 2762608 - RNA, 19 nt, Human
ucaaauaugcaaagcacug

SEQ ID NO: 2762609 - RNA, 15 nt, Human
ucaaauccuugaaga

SEQ ID NO: 2762610 - RNA, 16 nt, Human
ucaaauccuugaagau

SEQ ID NO: 2762611 - RNA, 22 nt, Human
ucaaacagucucaggaaaucaa

SEQ ID NO: 2762612 - RNA, 17 nt, Human
ucaaacauauauaacaa

SEQ ID NO: 2762613 - RNA, 14 nt, Human
gugagcuacaaaug

SEQ ID NO: 2762614 - RNA, 16 nt, Human
gugagcagucaggaaa

SEQ ID NO: 2762615 - RNA, 14 nt, Human
gugaauggcuuugu

SEQ ID NO: 2762616 - RNA, 13 nt, Human
gugaauggcuuug

SEQ ID NO: 2762617 - RNA, 19 nt, Human
gugaauggcuuuguauaga

SEQ ID NO: 2762618 - RNA, 18 nt, Human
gugaauggcuuuguauag

SEQ ID NO: 2762619 - RNA, 17 nt, Human
gugaauggcuuuguaua

SEQ ID NO: 2762620 - RNA, 19 nt, Human
gugaaagaaaauaacaaua

SEQ ID NO: 2762621 - RNA, 20 nt, Human
gugaaacucguuaauuugua

SEQ ID NO: 2762622 - RNA, 18 nt, Human
gugcaaauugucacagga

SEQ ID NO: 2762623 - RNA, 13 nt, Human
gucucagauuuua

SEQ ID NO: 2762624 - RNA, 17 nt, Human
gucuacacuaagagaga

SEQ ID NO: 2762625 - RNA, 23 nt, Human
gucuacacuaagagagaaugaga

SEQ ID NO: 2762626 - RNA, 20 nt, Human
gucccagccagcaguucaga

SEQ ID NO: 2762627 - RNA, 21 nt, Human
gucaauaaaauccauacauuu

SEQ ID NO: 2762628 - RNA, 15 nt, Human
gucaauaaaauccau

SEQ ID NO: 2762629 - RNA, 14 nt, Human
gucaccucauggaa

SEQ ID NO: 2762630 - RNA, 17 nt, Human
guauuuuaaaagaauga

SEQ ID NO: 2762631 - RNA, 16 nt, Human
guauuuuaaaagaaug

SEQ ID NO: 2762632 - RNA, 17 nt, Human
guauuucuaugaaauau

SEQ ID NO: 2762633 - RNA, 22 nt, Human
guauuucuaugaaauauuaugu

SEQ ID NO: 2762634 - RNA, 18 nt, Human
gguccgugcuaaggacuu

SEQ ID NO: 2762635 - RNA, 17 nt, Human
gguccgugcuaaggacu

SEQ ID NO: 2762636 - RNA, 16 nt, Human
gguccgugcuaaggac

SEQ ID NO: 2762637 - RNA, 14 nt, Human
ggugaauggcuuug

SEQ ID NO: 2762638 - RNA, 20 nt, Human
ggugaauggcuuuguauaga

SEQ ID NO: 2762639 - RNA, 17 nt, Human
ggugaauggcuuuguau

SEQ ID NO: 2762640 - RNA, 19 nt, Human
ggugcccugcuuucagaua

SEQ ID NO: 2762641 - RNA, 19 nt, Human
ggugcuacaaaaacacagc

SEQ ID NO: 2762642 - RNA, 22 nt, Human
gguacuucaaauccuugaagau

SEQ ID NO: 2762643 - RNA, 22 nt, Human
gguagacacacaugaaguccaa

SEQ ID NO: 2762644 - RNA, 15 nt, Human
gguagacacacauga

SEQ ID NO: 2762645 - RNA, 23 nt, Human
guaaaaccacagcaguugaaaag

SEQ ID NO: 2762646 - RNA, 14 nt, Human
guaaaaccacagca

SEQ ID NO: 2762647 - RNA, 15 nt, Human
guaaaaccacagcag

SEQ ID NO: 2762648 - RNA, 16 nt, Human
guaaaaccacagcagu

SEQ ID NO: 2762649 - RNA, 18 nt, Human
guaaaaccacagcaguug

SEQ ID NO: 2762650 - RNA, 21 nt, Human
guaaaucccauuauucaaagu

SEQ ID NO: 2762651 - RNA, 20 nt, Human
guaaaucccauuauucaaag

SEQ ID NO: 2762652 - RNA, 19 nt, Human
guaaaucccauuauucaaa

SEQ ID NO: 2762653 - RNA, 18 nt, Human
guaaaucccauuauucaa

SEQ ID NO: 2762654 - RNA, 17 nt, Human
guaaaucccauuauuca

SEQ ID NO: 2762655 - RNA, 16 nt, Human
guaaaucccauuauuc

SEQ ID NO: 2762656 - RNA, 21 nt, Human
guaaauacaauuuuguuucug

SEQ ID NO: 2762657 - RNA, 15 nt, Human
guaaaucccauuauu

SEQ ID NO: 2762658 - RNA, 23 nt, Human
guaaauacaauuuuguuucugua

SEQ ID NO: 2762659 - RNA, 22 nt, Human
guaaauacaauuuuguuucugu

SEQ ID NO: 2762660 - RNA, 17 nt, Human
guaagggaaacugccag

SEQ ID NO: 2762661 - RNA, 18 nt, Human
guaagggaaacugccagc

SEQ ID NO: 2762662 - RNA, 23 nt, Human
guacuuuauuuucuauaauuuaa

SEQ ID NO: 2762663 - RNA, 21 nt, Human
guacuuuuuggcauaacauaa

SEQ ID NO: 2762664 - RNA, 12 nt, Human
guacuuuuuggc

SEQ ID NO: 2762665 - RNA, 15 nt, Human
guagaggagaaacug

SEQ ID NO: 2762666 - RNA, 15 nt, Human
guaccgcaaugugac

SEQ ID NO: 2762667 - RNA, 13 nt, Human
guaauuauaucug

SEQ ID NO: 2762668 - RNA, 15 nt, Human
guaauuggaaaggca

SEQ ID NO: 2762669 - RNA, 19 nt, Human
guaaugauaacuggaaacu

SEQ ID NO: 2762670 - RNA, 20 nt, Human
gcucucuggccuucggccuc

SEQ ID NO: 2762671 - RNA, 19 nt, Human
gcucucuggccuucggccu

SEQ ID NO: 2762672 - RNA, 15 nt, Human
gcucucuggccuucg

SEQ ID NO: 2762673 - RNA, 14 nt, Human
gcucucuggccuuc

SEQ ID NO: 2762674 - RNA, 11 nt, Human
gcucucuggcc

SEQ ID NO: 2762675 - RNA, 13 nt, Human
gcucucuggccuu

SEQ ID NO: 2762676 - RNA, 12 nt, Human
gcucucuggccu

SEQ ID NO: 2762677 - RNA, 17 nt, Human
gcuaagcaaaaugugau

SEQ ID NO: 2762678 - RNA, 14 nt, Human
gcuaagcauuccaa

SEQ ID NO: 2762679 - RNA, 23 nt, Human
gcccucuccugggcagcugccuc

SEQ ID NO: 2762680 - RNA, 22 nt, Human
gcccucuccugggcagcugccu

SEQ ID NO: 2762681 - RNA, 13 nt, Human
gcccucuccuggg

SEQ ID NO: 2762682 - RNA, 12 nt, Human
gcccucuccugg

SEQ ID NO: 2762683 - RNA, 13 nt, Human
gccugauuaaaga

SEQ ID NO: 2762684 - RNA, 16 nt, Human
gccugauuaaagaaug

SEQ ID NO: 2762685 - RNA, 23 nt, Human
gccugcacggugaauggcuuugu

SEQ ID NO: 2762686 - RNA, 17 nt, Human
gccuaagugcagccccg

SEQ ID NO: 2762687 - RNA, 22 nt, Human
gccuauauuuuuuguuaaauga

SEQ ID NO: 2762688 - RNA, 23 nt, Human
gccuccccuccucugcuugccau

SEQ ID NO: 2762689 - RNA, 20 nt, Human
gcugucuacacuaagagaga

SEQ ID NO: 2762690 - RNA, 18 nt, Human
gcuuucagauacuggauu

SEQ ID NO: 2762691 - RNA, 14 nt, Human
gcuuucagauacug

SEQ ID NO: 2762692 - RNA, 20 nt, Human
gcuuuguauagaaccucuuu

SEQ ID NO: 2762693 - RNA, 23 nt, Human
gcuuucagauacuggauuguacu

SEQ ID NO: 2762694 - RNA, 16 nt, Human
ggaaaucaaauaugca

SEQ ID NO: 2762695 - RNA, 17 nt, Human
ggaaaucaaauaugcaa

SEQ ID NO: 2762696 - RNA, 14 nt, Human
ggaaaaguuuaaua

SEQ ID NO: 2762697 - RNA, 20 nt, Human
ggaagugacgguuuaauggg

SEQ ID NO: 2762698 - RNA, 17 nt, Human
ggaauucuguauagauu

SEQ ID NO: 2762699 - RNA, 15 nt, Human
ggaauucuguauaga

SEQ ID NO: 2762700 - RNA, 12 nt, Human
ggaauucuguau

SEQ ID NO: 2762701 - RNA, 22 nt, Human
ggaauuggagcucgugggacag

SEQ ID NO: 2762702 - RNA, 16 nt, Human
ggaauuggagcucgug

SEQ ID NO: 2762703 - RNA, 23 nt, Human
ggaauuucucccagucauuuaau

SEQ ID NO: 2762704 - RNA, 14 nt, Human
ggaccaaaaaccag

SEQ ID NO: 2762705 - RNA, 23 nt, Human
ggaccaaaaaccaguauuguaca

SEQ ID NO: 2762706 - RNA, 16 nt, Human
ggaccaaaaaccagua

SEQ ID NO: 2762707 - RNA, 22 nt, Human
ggacuguggugacuuuggauaa

SEQ ID NO: 2762708 - RNA, 21 nt, Human
ggacuguggugacuuuggaua

SEQ ID NO: 2762709 - RNA, 17 nt, Human
ggacuguggugacuuug

SEQ ID NO: 2762710 - RNA, 15 nt, Human
ggacuguggugacuu

SEQ ID NO: 2762711 - RNA, 19 nt, Human
ggagaaucacuugaacccg

SEQ ID NO: 2762712 - RNA, 15 nt, Human
ggagaaucacuugaa

SEQ ID NO: 2762713 - RNA, 14 nt, Human
ggacuguggugacu

SEQ ID NO: 2762714 - RNA, 14 nt, Human
ggacgcucucuggc

SEQ ID NO: 2762715 - RNA, 13 nt, Human
ggacgcucucugg

SEQ ID NO: 2762716 - RNA, 14 nt, Human
ggcauggcugggaa

SEQ ID NO: 2762717 - RNA, 16 nt, Human
ggauucuuaaaguuga

SEQ ID NO: 2762718 - RNA, 19 nt, Human
ggauucuuaaaguugaauu

SEQ ID NO: 2762719 - RNA, 18 nt, Human
ggauucuuaaaguugaau

SEQ ID NO: 2762720 - RNA, 20 nt, Human
ggauucuuaaaguugaauuu

SEQ ID NO: 2762721 - RNA, 15 nt, Human
ggauuguaaaauggu

SEQ ID NO: 2762722 - RNA, 16 nt, Human
gcaaauugucacagga

SEQ ID NO: 2762723 - RNA, 19 nt, Human
gauguugaaaaaguucugc

SEQ ID NO: 2762724 - RNA, 18 nt, Human
gaugcuagaacucccuuu

SEQ ID NO: 2762725 - RNA, 22 nt, Human
gaugcuagaacucccuuucaac

SEQ ID NO: 2762726 - RNA, 20 nt, Human
gaugcuagaacucccuuuca

SEQ ID NO: 2762727 - RNA, 18 nt, Human
gcacugacuucuaaguaa

SEQ ID NO: 2762728 - RNA, 15 nt, Human
gcacugacuucuaag

SEQ ID NO: 2762729 - RNA, 23 nt, Human
gagugaacaaauuuacagagaca

SEQ ID NO: 2762730 - RNA, 12 nt, Human
gaguguugaaac

SEQ ID NO: 2762731 - RNA, 16 nt, Human
gaguguugaaacggau

SEQ ID NO: 2762732 - RNA, 15 nt, Human
gauaaaugccaucaa

SEQ ID NO: 2762733 - RNA, 11 nt, Human
gauaaaugcca

SEQ ID NO: 2762734 - RNA, 20 nt, Human
gauaaaugccaucaauaaaa

SEQ ID NO: 2762735 - RNA, 22 nt, Human
gauaaauggcuuccuggcaaua

SEQ ID NO: 2762736 - RNA, 13 nt, Human
gagaguguugaaa

SEQ ID NO: 2762737 - RNA, 19 nt, Human
gagagacacacugaagaag

SEQ ID NO: 2762738 - RNA, 21 nt, Human
gagaaugagagacacacugaa

SEQ ID NO: 2762739 - RNA, 20 nt, Human
gagaaugagagacacacuga

SEQ ID NO: 2762740 - RNA, 20 nt, Human
gagacagcucugcauacuca

SEQ ID NO: 2762741 - RNA, 22 nt, Human
gagaaccuagggugauauuaac

SEQ ID NO: 2762742 - RNA, 21 nt, Human
gagaaccuagggugauauuaa

SEQ ID NO: 2762743 - RNA, 23 nt, Human
gagaacuuccagauccuggaaau

SEQ ID NO: 2762744 - RNA, 22 nt, Human
gagaacuuccagauccuggaaa

SEQ ID NO: 2762745 - RNA, 17 nt, Human
gagaaugagagacacac

SEQ ID NO: 2762746 - RNA, 21 nt, Human
gacuucuuuaauuuuggaauu

SEQ ID NO: 2762747 - RNA, 20 nt, Human
gacuucuuuaauuuuggaau

SEQ ID NO: 2762748 - RNA, 19 nt, Human
gacuucuuuaauuuuggaa

SEQ ID NO: 2762749 - RNA, 16 nt, Human
gacuucuuuaauuuug

SEQ ID NO: 2762750 - RNA, 18 nt, Human
gacuucuuuaauuuugga

SEQ ID NO: 2762751 - RNA, 17 nt, Human
gacuucuuuaauuuugg

SEQ ID NO: 2762752 - RNA, 16 nt, Human
gacuucuaaguaaaac

SEQ ID NO: 2762753 - RNA, 17 nt, Human
gacuucuaaguaaaacc

SEQ ID NO: 2762754 - RNA, 18 nt, Human
gacuucuaaguaaaacca

SEQ ID NO: 2762755 - RNA, 20 nt, Human
gacuucugucuucacaacag

SEQ ID NO: 2762756 - RNA, 23 nt, Human
gacuucugucuucacaacagauu

SEQ ID NO: 2762757 - RNA, 19 nt, Human
gacuucuaaguaaaaccac

SEQ ID NO: 2762758 - RNA, 23 nt, Human
gacuucuaaguaaaaccacagca

SEQ ID NO: 2762759 - RNA, 24 nt, Human
gacuucuaaguaaaaccacagcag

SEQ ID NO: 2762760 - RNA, 16 nt, Human
gacuccaaagaaaugu

SEQ ID NO: 2762761 - RNA, 21 nt, Human
gacucauuuuaaaaaauggaa

SEQ ID NO: 2762762 - RNA, 11 nt, Human
gacuccaaaga

SEQ ID NO: 2762763 - RNA, 12 nt, Human
gacuccaaagaa

SEQ ID NO: 2762764 - RNA, 15 nt, Human
gacuccaaagaaaug

SEQ ID NO: 2762765 - RNA, 16 nt, Human
gacugcauuauauuua

SEQ ID NO: 2762766 - RNA, 14 nt, Human
gacugcauuauauu

SEQ ID NO: 2762767 - RNA, 20 nt, Human
gacauagaauuaacacauga

SEQ ID NO: 2762768 - RNA, 17 nt, Human
gacagggaggacgcucu

SEQ ID NO: 2762769 - RNA, 18 nt, Human
gacagggaggacgcucuc

SEQ ID NO: 2762770 - RNA, 16 nt, Human
gacaugggacauuugc

SEQ ID NO: 2762771 - RNA, 21 nt, Human
gaccacugcagaagacaguau

SEQ ID NO: 2762772 - RNA, 15 nt, Human
gacccacaagaaaug

SEQ ID NO: 2762773 - RNA, 16 nt, Human
gacccaaaaggcagaa

SEQ ID NO: 2762774 - RNA, 16 nt, Human
gacaaggaaaaaauaa

SEQ ID NO: 2762775 - RNA, 15 nt, Human
gacaagcucacagac

SEQ ID NO: 2762776 - RNA, 16 nt, Human
gaauggcuuuguauag

SEQ ID NO: 2762777 - RNA, 14 nt, Human
gaauggcuuuguau

SEQ ID NO: 2762778 - RNA, 17 nt, Human
gaauggcuuuguauaga

SEQ ID NO: 2762779 - RNA, 11 nt, Human
gaauucuguau

SEQ ID NO: 2762780 - RNA, 13 nt, Human
gaauucuguauag

SEQ ID NO: 2762781 - RNA, 22 nt, Human
gaauucuguauagauuagaauu

SEQ ID NO: 2762782 - RNA, 21 nt, Human
gaauucuguauagauuagaau

SEQ ID NO: 2762783 - RNA, 14 nt, Human
gaauucuguauaga

SEQ ID NO: 2762784 - RNA, 16 nt, Human
gaauuggagcucgugg

SEQ ID NO: 2762785 - RNA, 21 nt, Human
gaauugacccacaagaaauga

SEQ ID NO: 2762786 - RNA, 16 nt, Human
gaauugacccacaaga

SEQ ID NO: 2762787 - RNA, 21 nt, Human
cuguuaaaagaugaaaauauu

SEQ ID NO: 2762788 - RNA, 23 nt, Human
cuguuaaaagaugaaaauauuug

SEQ ID NO: 2762789 - RNA, 20 nt, Human
cuguuaaaagaugaaaauau

SEQ ID NO: 2762790 - RNA, 22 nt, Human
cugggggggauuguaaaauggu

SEQ ID NO: 2762791 - RNA, 23 nt, Human
cuguaaucacagcuacuugggag

SEQ ID NO: 2762792 - RNA, 20 nt, Human
cugucuacacuaagagagaa

SEQ ID NO: 2762793 - RNA, 16 nt, Human
cuguauagauuagaau

SEQ ID NO: 2762794 - RNA, 22 nt, Human
cuguauuuuaaaagaaugauua

SEQ ID NO: 2762795 - RNA, 19 nt, Human
cuguauuuuaaaagaauga

SEQ ID NO: 2762796 - RNA, 20 nt, Human
cuguauuuuaaaagaaugau

SEQ ID NO: 2762797 - RNA, 16 nt, Human
cuggagcucugcccau

SEQ ID NO: 2762798 - RNA, 13 nt, Human
cuggagcucugcc

SEQ ID NO: 2762799 - RNA, 12 nt, Human
cuggagcucugc

SEQ ID NO: 2762800 - RNA, 23 nt, Human
cuggccuucggccuccauccuga

SEQ ID NO: 2762801 - RNA, 22 nt, Human
cuggccuucggccuccauccug

SEQ ID NO: 2762802 - RNA, 21 nt, Human
cuggcacaguuuucugagaaa

SEQ ID NO: 2762803 - RNA, 22 nt, Human
cuggcacaguuuucugagaaag

SEQ ID NO: 2762804 - RNA, 20 nt, Human
cuggcacaguuuucugagaa

SEQ ID NO: 2762805 - RNA, 18 nt, Human
cugcugaaacaacaaaua

SEQ ID NO: 2762806 - RNA, 12 nt, Human
cugccuaaggac

SEQ ID NO: 2762807 - RNA, 14 nt, Human
cugccuaaggacuu

SEQ ID NO: 2762808 - RNA, 13 nt, Human
cugccuaaggacu

SEQ ID NO: 2762809 - RNA, 15 nt, Human
cugccuaaggacuuc

SEQ ID NO: 2762810 - RNA, 13 nt, Human
cugccuccccucc

SEQ ID NO: 2762811 - RNA, 19 nt, Human
cugcccucuccugggcagc

SEQ ID NO: 2762812 - RNA, 18 nt, Human
cugcccucuccugggcag

SEQ ID NO: 2762813 - RNA, 16 nt, Human
cugcccucuccugggc

SEQ ID NO: 2762814 - RNA, 21 nt, Human
cugcccucuccugggcagcug

SEQ ID NO: 2762815 - RNA, 20 nt, Human
cugcccucuccugggcagcu

SEQ ID NO: 2762816 - RNA, 19 nt, Human
cuucuuuaauuuuggaauu

SEQ ID NO: 2762817 - RNA, 18 nt, Human
cuucuuuaauuuuggaau

SEQ ID NO: 2762818 - RNA, 17 nt, Human
cuucuuuaauuuuggaa

SEQ ID NO: 2762819 - RNA, 16 nt, Human
cuucuuuaauuuugga

SEQ ID NO: 2762820 - RNA, 15 nt, Human
cuucuuuaauuuugg

SEQ ID NO: 2762821 - RNA, 21 nt, Human
cuucugucuucacaacagauu

SEQ ID NO: 2762822 - RNA, 22 nt, Human
cuucugucuucacaacagauua

SEQ ID NO: 2762823 - RNA, 18 nt, Human
cuucugucuucacaacag

SEQ ID NO: 2762824 - RNA, 22 nt, Human
cuuagaugcaguucugaagaag

SEQ ID NO: 2762825 - RNA, 20 nt, Human
cuuagaugcaguucugaaga

SEQ ID NO: 2762826 - RNA, 15 nt, Human
cuuauuucauuucuu

SEQ ID NO: 2762827 - RNA, 14 nt, Human
cuuauuucauuucu

SEQ ID NO: 2762828 - RNA, 20 nt, Human
cuuugucuacaccauuaugu

SEQ ID NO: 2762829 - RNA, 23 nt, Human
cuuugucuacaccauuaugugcg

SEQ ID NO: 2762830 - RNA, 22 nt, Human
cuuugugcugggguuaucugaa

SEQ ID NO: 2762831 - RNA, 20 nt, Human
cuuugugcugggguuaucug

SEQ ID NO: 2762832 - RNA, 15 nt, Human
cuuugugcugggguu

SEQ ID NO: 2762833 - RNA, 16 nt, Human
cuuucucuuucguuac

SEQ ID NO: 2762834 - RNA, 22 nt, Human
cuuguuagaucuaguucacucu

SEQ ID NO: 2762835 - RNA, 12 nt, Human
cuuguguaaaua

SEQ ID NO: 2762836 - RNA, 21 nt, Human
cuuguguaaauacaauuuugu

SEQ ID NO: 2762837 - RNA, 16 nt, Human
cuuguguaaauacaau

SEQ ID NO: 2762838 - RNA, 14 nt, Human
cuuguguaaauaca

SEQ ID NO: 2762839 - RNA, 23 nt, Human
cuugucaauaaaauccauacauu

SEQ ID NO: 2762840 - RNA, 19 nt, Human
cuugaguuuaaauuguaau

SEQ ID NO: 2762841 - RNA, 20 nt, Human
cuuuuuggcauaacauaaau

SEQ ID NO: 2762842 - RNA, 16 nt, Human
cuuuuuggcauaacau

SEQ ID NO: 2762843 - RNA, 22 nt, Human
cuuuuuggcauaacauaaaucu

SEQ ID NO: 2762844 - RNA, 15 nt, Human
gaaaaguuuaauauu

SEQ ID NO: 2762845 - RNA, 22 nt, Human
gaaaaguuuaauauuaaagcca

SEQ ID NO: 2762846 - RNA, 21 nt, Human
gaaaaguuuaauauuaaagcc

SEQ ID NO: 2762847 - RNA, 20 nt, Human
gaaaaguuuaauauuaaagc

SEQ ID NO: 2762848 - RNA, 19 nt, Human
gaaaaguuuaauauuaaag

SEQ ID NO: 2762849 - RNA, 23 nt, Human
gaaaaguuuaauauuaaagccau

SEQ ID NO: 2762850 - RNA, 18 nt, Human
gaaaauauuuguaucaca

SEQ ID NO: 2762851 - RNA, 22 nt, Human
gaaaaucuacacuccagugaga

SEQ ID NO: 2762852 - RNA, 18 nt, Human
gaaaaucuuauaauuuaa

SEQ ID NO: 2762853 - RNA, 14 nt, Human
gaaagcagggacuu

SEQ ID NO: 2762854 - RNA, 17 nt, Human
gaaagcagaacagugau

SEQ ID NO: 2762855 - RNA, 14 nt, Human
gaaagcagaacagu

SEQ ID NO: 2762856 - RNA, 22 nt, Human
gaaagcagaacagugauuacca

SEQ ID NO: 2762857 - RNA, 20 nt, Human
gaaagaggcagcuugaaacu

SEQ ID NO: 2762858 - RNA, 21 nt, Human
gaaagaggaaugaaguacuca

SEQ ID NO: 2762859 - RNA, 17 nt, Human
gaaagagaacuuccaga

SEQ ID NO: 2762860 - RNA, 14 nt, Human
gaaacccugucucu

SEQ ID NO: 2762861 - RNA, 18 nt, Human
gaaacggaugauuucuau

SEQ ID NO: 2762862 - RNA, 17 nt, Human
gaaacggaugauuucua

SEQ ID NO: 2762863 - RNA, 23 nt, Human
gaaacucguuaauuuguaguguu

SEQ ID NO: 2762864 - RNA, 11 nt, Human
gaaacauuugg

SEQ ID NO: 2762865 - RNA, 16 nt, Human
gaaacacaacuauauu

SEQ ID NO: 2762866 - RNA, 14 nt, Human
ccugaggcuccacu

SEQ ID NO: 2762867 - RNA, 13 nt, Human
ccugaggcuccac

SEQ ID NO: 2762868 - RNA, 17 nt, Human
ccugccccugagcccau

SEQ ID NO: 2762869 - RNA, 14 nt, Human
ccugggcagcugcc

SEQ ID NO: 2762870 - RNA, 13 nt, Human
ccugggcagcugc

SEQ ID NO: 2762871 - RNA, 19 nt, Human
cgcuaaacuuuucugauag

SEQ ID NO: 2762872 - RNA, 18 nt, Human
cgcuaaacuuuucugaua

SEQ ID NO: 2762873 - RNA, 17 nt, Human
cgcuaaacuuuucugau

SEQ ID NO: 2762874 - RNA, 22 nt, Human
cgcguugaaauuguaauuauau

SEQ ID NO: 2762875 - RNA, 24 nt, Human
cgcguugaaauuguaauuauaucu

SEQ ID NO: 2762876 - RNA, 15 nt, Human
ccuuggacucauuuu

SEQ ID NO: 2762877 - RNA, 17 nt, Human
ccuucggccuccauccu

SEQ ID NO: 2762878 - RNA, 16 nt, Human
ccuucggccuccaucc

SEQ ID NO: 2762879 - RNA, 18 nt, Human
ccuucggccuccauccug

SEQ ID NO: 2762880 - RNA, 19 nt, Human
cuaaauugacacuuaaaaa

SEQ ID NO: 2762881 - RNA, 15 nt, Human
cuaagagagaaugag

SEQ ID NO: 2762882 - RNA, 14 nt, Human
cuaagagagaauga

SEQ ID NO: 2762883 - RNA, 21 nt, Human
cuaaaauggacuguggugacu

SEQ ID NO: 2762884 - RNA, 22 nt, Human
cuaaaauggacuguggugacuu

SEQ ID NO: 2762885 - RNA, 20 nt, Human
cgggaggcagagguugcagu

SEQ ID NO: 2762886 - RNA, 14 nt, Human
cuacacuaagagag

SEQ ID NO: 2762887 - RNA, 23 nt, Human
cuacacgagauacagaauuuuau

SEQ ID NO: 2762888 - RNA, 16 nt, Human
cuaaggacuucuuuaa

SEQ ID NO: 2762889 - RNA, 15 nt, Human
cuaaggacuucuuua

SEQ ID NO: 2762890 - RNA, 14 nt, Human
cuaaggacuucuuu

SEQ ID NO: 2762891 - RNA, 21 nt, Human
cuaagcuucacuguaaaauaa

SEQ ID NO: 2762892 - RNA, 14 nt, Human
cuaaguaaaaccac

SEQ ID NO: 2762893 - RNA, 18 nt, Human
cuaaguaaaaccacagca

SEQ ID NO: 2762894 - RNA, 19 nt, Human
cuaaguaaaaccacagcag

SEQ ID NO: 2762895 - RNA, 20 nt, Human
cuaggaaauauuuauuuuaa

SEQ ID NO: 2762896 - RNA, 19 nt, Human
cuaggaaauauuuauuuua

SEQ ID NO: 2762897 - RNA, 15 nt, Human
cuaggaaauauuuau

SEQ ID NO: 2762898 - RNA, 14 nt, Human
cuaggaaauauuua

SEQ ID NO: 2762899 - RNA, 18 nt, Human
cuagacuggugacugauu

SEQ ID NO: 2762900 - RNA, 17 nt, Human
cuagacuggugacugau

SEQ ID NO: 2762901 - RNA, 15 nt, Human
cuagacuggugacug

SEQ ID NO: 2762902 - RNA, 14 nt, Human
cuagacuggugacu

SEQ ID NO: 2762903 - RNA, 23 nt, Human
cuagacuggugacugauucuuca

SEQ ID NO: 2762904 - RNA, 22 nt, Human
cuagacuggugacugauucuuc

SEQ ID NO: 2762905 - RNA, 19 nt, Human
cuagacuggugacugauuc

SEQ ID NO: 2762906 - RNA, 19 nt, Human
cuagaguuuagcuggaaaa

SEQ ID NO: 2762907 - RNA, 18 nt, Human
cuagaguuuagcuggaaa

SEQ ID NO: 2762908 - RNA, 19 nt, Human
cuauuucuauauuuucauu

SEQ ID NO: 2762909 - RNA, 20 nt, Human
cuauuucuauauuuucauuc

SEQ ID NO: 2762910 - RNA, 13 nt, Human
cuaugcugaguuu

SEQ ID NO: 2762911 - RNA, 15 nt, Human
cuaugcugaguuugu

SEQ ID NO: 2762912 - RNA, 14 nt, Human
cuaugcugaguuug

SEQ ID NO: 2762913 - RNA, 19 nt, Human
cuaugaaauauuauguuaa

SEQ ID NO: 2762914 - RNA, 18 nt, Human
cuaugaaauauuauguua

SEQ ID NO: 2762915 - RNA, 12 nt, Human
cuauaauuuaaa

SEQ ID NO: 2762916 - RNA, 13 nt, Human
cuauaauuuaaau

SEQ ID NO: 2762917 - RNA, 23 nt, Human
cucagauuuuauuauguaaaucc

SEQ ID NO: 2762918 - RNA, 22 nt, Human
cucagauuuuauuauguaaauc

SEQ ID NO: 2762919 - RNA, 22 nt, Human
cucaggaaaucaaauaugcaaa

SEQ ID NO: 2762920 - RNA, 20 nt, Human
cuccauuuaauaauuauaug

SEQ ID NO: 2762921 - RNA, 13 nt, Human
cuccauuuaauaa

SEQ ID NO: 2762922 - RNA, 14 nt, Human
cuccccucggagaa

SEQ ID NO: 2762923 - RNA, 12 nt, Human
cucauuuccaag

SEQ ID NO: 2762924 - RNA, 14 nt, Human
cucauuuccaagca

SEQ ID NO: 2762925 - RNA, 13 nt, Human
cucauuuccaagc

SEQ ID NO: 2762926 - RNA, 17 nt, Human
cucauuuccaagcaagu

SEQ ID NO: 2762927 - RNA, 23 nt, Human
cccauuauucaaaguugccuaaa

SEQ ID NO: 2762928 - RNA, 18 nt, Human
cccauuauucaaaguugc

SEQ ID NO: 2762929 - RNA, 16 nt, Human
ccccacccugccucac

SEQ ID NO: 2762930 - RNA, 12 nt, Human
cccauuauucaa

SEQ ID NO: 2762931 - RNA, 17 nt, Human
ccccuccucugcuugcc

SEQ ID NO: 2762932 - RNA, 14 nt, Human
ccccuccucugcuu

SEQ ID NO: 2762933 - RNA, 13 nt, Human
ccccuccucugcu

SEQ ID NO: 2762934 - RNA, 15 nt, Human
ccccucggagaagag

SEQ ID NO: 2762935 - RNA, 15 nt, Human
ccuaacgaaguaucc

SEQ ID NO: 2762936 - RNA, 22 nt, Human
cccucuccugggcagcugccuc

SEQ ID NO: 2762937 - RNA, 21 nt, Human
cccucuccugggcagcugccu

SEQ ID NO: 2762938 - RNA, 20 nt, Human
cccucuccugggcagcugcc

SEQ ID NO: 2762939 - RNA, 23 nt, Human
cccucuccugggcagcugccucc

SEQ ID NO: 2762940 - RNA, 13 nt, Human
ccauuuggaaauc

SEQ ID NO: 2762941 - RNA, 11 nt, Human
ccauuauucaa

SEQ ID NO: 2762942 - RNA, 12 nt, Human
ccaggugccagu

SEQ ID NO: 2762943 - RNA, 13 nt, Human
ccaggugccaguu

SEQ ID NO: 2762944 - RNA, 18 nt, Human
ccauccugaggcuccacu

SEQ ID NO: 2762945 - RNA, 20 nt, Human
ccauccugaggcuccacuug

SEQ ID NO: 2762946 - RNA, 20 nt, Human
ccagguagaggguguguaag

SEQ ID NO: 2762947 - RNA, 19 nt, Human
ccagccugagcgacaguga

SEQ ID NO: 2762948 - RNA, 15 nt, Human
ccacugguucuucuu

SEQ ID NO: 2762949 - RNA, 14 nt, Human
ccagacaucaacag

SEQ ID NO: 2762950 - RNA, 15 nt, Human
ccaccucccugcaau

SEQ ID NO: 2762951 - RNA, 21 nt, Human
ccaccucccugcaauaaaaug

SEQ ID NO: 2762952 - RNA, 19 nt, Human
ccaccucccugcaauaaaa

SEQ ID NO: 2762953 - RNA, 18 nt, Human
aaaaaccaguauuguaca

SEQ ID NO: 2762954 - RNA, 16 nt, Human
aaaaaccaguauugua

SEQ ID NO: 2762955 - RNA, 20 nt, Human
aaaaauuggggauucuuaaa

SEQ ID NO: 2762956 - RNA, 19 nt, Human
aaaaauuggggauucuuaa

SEQ ID NO: 2762957 - RNA, 18 nt, Human
aaaaauuggggauucuua

SEQ ID NO: 2762958 - RNA, 17 nt, Human
aaaaauuggggauucuu

SEQ ID NO: 2762959 - RNA, 17 nt, Human
aaaacaaggaugaauua

SEQ ID NO: 2762960 - RNA, 12 nt, Human
aaaacacagcaa

SEQ ID NO: 2762961 - RNA, 13 nt, Human
aaaacacagcaag

SEQ ID NO: 2762962 - RNA, 18 nt, Human
aaaacacagcaaggguga

SEQ ID NO: 2762963 - RNA, 14 nt, Human
aaaacaaggaugaa

SEQ ID NO: 2762964 - RNA, 23 nt, Human
aaaaaauuggggauucuuaaagu

SEQ ID NO: 2762965 - RNA, 17 nt, Human
agccauguuuauuacag

SEQ ID NO: 2762966 - RNA, 22 nt, Human
agccauguuuauuacaguauaa

SEQ ID NO: 2762967 - RNA, 19 nt, Human
agccagauuuuccugaaaa

SEQ ID NO: 2762968 - RNA, 15 nt, Human
agccagauuuuccug

SEQ ID NO: 2762969 - RNA, 19 nt, Human
agcaguucagagcugcccu

SEQ ID NO: 2762970 - RNA, 18 nt, Human
agcaguucagagcugccc

SEQ ID NO: 2762971 - RNA, 17 nt, Human
agcaguucagagcugcc

SEQ ID NO: 2762972 - RNA, 15 nt, Human
agcaguucagagcug

SEQ ID NO: 2762973 - RNA, 16 nt, Human
agcaguucagagcugc

SEQ ID NO: 2762974 - RNA, 23 nt, Human
agcaguugaaaagacuccaaaga

SEQ ID NO: 2762975 - RNA, 21 nt, Human
agcaguugaaaagacuccaaa

SEQ ID NO: 2762976 - RNA, 21 nt, Human
agaugggagaaucacuugaac

SEQ ID NO: 2762977 - RNA, 14 nt, Human
agauguagaggaga

SEQ ID NO: 2762978 - RNA, 21 nt, Human
agccgggcgugguggugagug

SEQ ID NO: 2762979 - RNA, 14 nt, Human
agaguguugaaacg

SEQ ID NO: 2762980 - RNA, 13 nt, Human
agaguguugaaac

SEQ ID NO: 2762981 - RNA, 21 nt, Human
agauaggucagugcaaauacu

SEQ ID NO: 2762982 - RNA, 17 nt, Human
agacugcauuauauuua

SEQ ID NO: 2762983 - RNA, 14 nt, Human
aggauguugaaaaa

SEQ ID NO: 2762984 - RNA, 18 nt, Human
agcuucacuguaaaauaa

SEQ ID NO: 2762985 - RNA, 22 nt, Human
auggagccugcacggugaaugg

SEQ ID NO: 2762986 - RNA, 18 nt, Human
auggagccugcacgguga

SEQ ID NO: 2762987 - RNA, 21 nt, Human
auguaagggaaacugccagca

SEQ ID NO: 2762988 - RNA, 22 nt, Human
auguaagggaaacugccagcaa

SEQ ID NO: 2762989 - RNA, 20 nt, Human
auguaagggaaacugccagc

SEQ ID NO: 2762990 - RNA, 22 nt, Human
aucuuauaauuuaaaauaugcu

SEQ ID NO: 2762991 - RNA, 12 nt, Human
aucaccugucuu

SEQ ID NO: 2762992 - RNA, 21 nt, Human
aucaccugucuugccuuuuuc

SEQ ID NO: 2762993 - RNA, 17 nt, Human
aucagcugcugaaacaa

SEQ ID NO: 2762994 - RNA, 21 nt, Human
aguccaagcauuuagauguau

SEQ ID NO: 2762995 - RNA, 16 nt, Human
aguccaagcauuuaga

SEQ ID NO: 2762996 - RNA, 17 nt, Human
agucaaauugugugaaa

SEQ ID NO: 2762997 - RNA, 15 nt, Human
agucaaauuguguga

SEQ ID NO: 2762998 - RNA, 13 nt, Human
agucaaauugugu

SEQ ID NO: 2762999 - RNA, 21 nt, Human
agugucuuaauuaaaagaaua

SEQ ID NO: 2763000 - RNA, 15 nt, Human
agugauuaccaggga

SEQ ID NO: 2763001 - RNA, 18 nt, Human
agugauuaccagggacug

SEQ ID NO: 2763002 - RNA, 19 nt, Human
aguugaauuuauuggcuuu

SEQ ID NO: 2763003 - RNA, 17 nt, Human
aguugaauuuauuggcu

SEQ ID NO: 2763004 - RNA, 13 nt, Human
aguugaauuuauu

SEQ ID NO: 2763005 - RNA, 11 nt, Human
aguugaauuua

SEQ ID NO: 2763006 - RNA, 20 nt, Human
aguugaauuuauuggcuuuu

SEQ ID NO: 2763007 - RNA, 18 nt, Human
aguuguaccgcaauguga

SEQ ID NO: 2763008 - RNA, 19 nt, Human
aguuguaccgcaaugugac

SEQ ID NO: 2763009 - RNA, 19 nt, Human
auauuuauuacuguaagaa

SEQ ID NO: 2763010 - RNA, 14 nt, Human
auauuuauuacugu

SEQ ID NO: 2763011 - RNA, 18 nt, Human
auauuuauuuuaauaaug

SEQ ID NO: 2763012 - RNA, 14 nt, Human
auaugcuauuucua

SEQ ID NO: 2763013 - RNA, 23 nt, Human
auaugcuucuguuuuauaauuuu

SEQ ID NO: 2763014 - RNA, 18 nt, Human
auaucacuugucaauaaa

SEQ ID NO: 2763015 - RNA, 15 nt, Human
auaucaauuuaaaaa

SEQ ID NO: 2763016 - RNA, 17 nt, Human
auaauuaacauguuaaa

SEQ ID NO: 2763017 - RNA, 22 nt, Human
auaauuaacauguuaaaccaug

SEQ ID NO: 2763018 - RNA, 21 nt, Human
auaauuaacauguuaaaccau

SEQ ID NO: 2763019 - RNA, 20 nt, Human
auaauuaacauguuaaacca

SEQ ID NO: 2763020 - RNA, 20 nt, Human
auacaauuuuguuucuguac

SEQ ID NO: 2763021 - RNA, 19 nt, Human
auacaauuuuguuucugua

SEQ ID NO: 2763022 - RNA, 14 nt, Human
auaauuacuauguc

SEQ ID NO: 2763023 - RNA, 18 nt, Human
auacaauuuuguuucugu

SEQ ID NO: 2763024 - RNA, 16 nt, Human
acuaagagagaaugag

SEQ ID NO: 2763025 - RNA, 15 nt, Human
acuaagagagaauga

SEQ ID NO: 2763026 - RNA, 13 nt, Human
acucccuuucaac

SEQ ID NO: 2763027 - RNA, 12 nt, Human
acucccuuucaa

SEQ ID NO: 2763028 - RNA, 14 nt, Human
acuagcuauggugu

SEQ ID NO: 2763029 - RNA, 12 nt, Human
acuuuucugaua

SEQ ID NO: 2763030 - RNA, 12 nt, Human
acuggaacucuc

SEQ ID NO: 2763031 - RNA, 21 nt, Human
acuucuuuaauuuuggaauuu

SEQ ID NO: 2763032 - RNA, 19 nt, Human
acuuguaaaggaauuuaaa

SEQ ID NO: 2763033 - RNA, 20 nt, Human
acuuguaaaggaauuuaaaa

SEQ ID NO: 2763034 - RNA, 18 nt, Human
acuuguaaaggaauuuaa

SEQ ID NO: 2763035 - RNA, 15 nt, Human
acuuggucugugaga

SEQ ID NO: 2763036 - RNA, 13 nt, Human
acuuggucuguga

SEQ ID NO: 2763037 - RNA, 14 nt, Human
acuuggucugugag

SEQ ID NO: 2763038 - RNA, 16 nt, Human
acccaaguccaagcau

SEQ ID NO: 2763039 - RNA, 15 nt, Human
acccacaagaaauga

SEQ ID NO: 2763040 - RNA, 14 nt, Human
acauuuguauaaaa

SEQ ID NO: 2763041 - RNA, 16 nt, Human
acauuugcucauggaa

SEQ ID NO: 2763042 - RNA, 18 nt, Human
acauuugcucauggaauu

SEQ ID NO: 2763043 - RNA, 14 nt, Human
acauaaaucuguga

SEQ ID NO: 2763044 - RNA, 18 nt, Human
acauaaaucugugaacuu

SEQ ID NO: 2763045 - RNA, 15 nt, Human
acauaaaucugugaa

SEQ ID NO: 2763046 - RNA, 13 nt, Human
acauguuacaaca

SEQ ID NO: 2763047 - RNA, 15 nt, Human
acagcaguugaaaag

SEQ ID NO: 2763048 - RNA, 18 nt, Human
acagcaguugaaaagacu

SEQ ID NO: 2763049 - RNA, 16 nt, Human
acagccagacuggcac

SEQ ID NO: 2763050 - RNA, 13 nt, Human
acagccagacugg

SEQ ID NO: 2763051 - RNA, 15 nt, Human
acagccagacuggca

SEQ ID NO: 2763052 - RNA, 20 nt, Human
acagcucugcauacucauua

SEQ ID NO: 2763053 - RNA, 14 nt, Human
acaauuuuguuucu

SEQ ID NO: 2763054 - RNA, 17 nt, Human
acaauuuuguuucugua

SEQ ID NO: 2763055 - RNA, 15 nt, Human
acaauuuuguuucug

SEQ ID NO: 2763056 - RNA, 13 nt, Human
acaacuauauugu

SEQ ID NO: 2763057 - RNA, 15 nt, Human
aaccaguauuguaca

SEQ ID NO: 2763058 - RNA, 20 nt, Human
aaccaguauuguacaaagua

SEQ ID NO: 2763059 - RNA, 22 nt, Human
aaccaguauuguacaaaguauu

SEQ ID NO: 2763060 - RNA, 21 nt, Human
aaccaguauuguacaaaguau

SEQ ID NO: 2763061 - RNA, 16 nt, Human
aaauuggggauucuua

SEQ ID NO: 2763062 - RNA, 15 nt, Human
aacacgagcaggcua

SEQ ID NO: 2763063 - RNA, 12 nt, Human
aacuuuucugau

SEQ ID NO: 2763064 - RNA, 14 nt, Human
aacuuuucugauag

SEQ ID NO: 2763065 - RNA, 13 nt, Human
aacuuuucugaua

SEQ ID NO: 2763066 - RNA, 13 nt, Human
aagaaauguaagg

SEQ ID NO: 2763067 - RNA, 14 nt, Human
aagaaauguaaggg

SEQ ID NO: 2763068 - RNA, 17 nt, Human
aaaauuggggauucuua

SEQ ID NO: 2763069 - RNA, 19 nt, Human
aaaauuggggauucuuaaa

SEQ ID NO: 2763070 - RNA, 18 nt, Human
aaaauuggggauucuuaa

SEQ ID NO: 2763071 - RNA, 16 nt, Human
aaacugacucuuaaga

SEQ ID NO: 2763072 - RNA, 14 nt, Human
aaacugccagcaac

SEQ ID NO: 2763073 - RNA, 15 nt, Human
aaacugccagcaacg

SEQ ID NO: 2763074 - RNA, 17 nt, Human
aaacugacucuuaagaa

SEQ ID NO: 2763075 - RNA, 19 nt, Human
aaacugccagcaacgcagg

SEQ ID NO: 2763076 - RNA, 17 nt, Human
aaagaugaaaauauuug

SEQ ID NO: 2763077 - RNA, 13 nt, Human
aaagaugaaaaua

SEQ ID NO: 2763078 - RNA, 16 nt, Human
aaagaugaaaauauuu

SEQ ID NO: 2763079 - RNA, 12 nt, Human
aaauaacaauga

SEQ ID NO: 2763080 - RNA, 14 nt, Human
aaauauuuuaugau

SEQ ID NO: 2763081 - RNA, 19 nt, Human
aaauauuuuaugauccagc

SEQ ID NO: 2763082 - RNA, 18 nt, Human
aaauauuuuaugauccag

SEQ ID NO: 2763083 - RNA, 19 nt, Human
aaauggacuguggugacuu

SEQ ID NO: 2763084 - RNA, 16 nt, Human
aaaucaaauaugcaaa

SEQ ID NO: 2763085 - RNA, 18 nt, Human
aaaucaaauaugcaaagc

SEQ ID NO: 2763086 - RNA, 19 nt, Human
aaaucaaauaugcaaagca

SEQ ID NO: 2763087 - RNA, 22 nt, Human
aaugguccgugcuaaggacuug

SEQ ID NO: 2763088 - RNA, 13 nt, Human
aauggcuuuguau

SEQ ID NO: 2763089 - RNA, 18 nt, Human
aauggcuuuguauagaac

SEQ ID NO: 2763090 - RNA, 16 nt, Human
aauggcuuuguauaga

SEQ ID NO: 2763091 - RNA, 15 nt, Human
aauggcuuuguauag

SEQ ID NO: 2763092 - RNA, 20 nt, Human
aauuaguuuuauaugcuucu

SEQ ID NO: 2763093 - RNA, 17 nt, Human
aauuaguuuuauaugcu

SEQ ID NO: 2763094 - RNA, 14 nt, Human
aauuaguuuuauau

SEQ ID NO: 2763095 - RNA, 16 nt, Human
aauauuauguuaaaac

SEQ ID NO: 2763096 - RNA, 13 nt, Human
aaucacaauacau

SEQ ID NO: 2763097 - RNA, 15 nt, Human
aaucaagaaacuuaa

SEQ ID NO: 2763098 - RNA, 15 nt, Human
aauccauuuggaaau

SEQ ID NO: 2763099 - RNA, 14 nt, Human
aauccauuuggaaa

SEQ ID NO: 2763100 - RNA, 22 nt, Human
aauccauuuggaaaucuuuaaa

SEQ ID NO: 2763101 - RNA, 18 nt, Human
aauccauuuggaaaucuu

SEQ ID NO: 2763102 - RNA, 17 nt, Human
aauccauuuggaaaucu

SEQ ID NO: 2763103 - RNA, 13 nt, Human
aauccauacauuu

SEQ ID NO: 2763104 - RNA, 17 nt, Human
aaugauaacuggaaacu

SEQ ID NO: 2763105 - RNA, 20 nt, Human
aaugauaacuggaaacuuca

SEQ ID NO: 2763106 - RNA, 19 nt, Human
aauaaaauggguuuuacug

SEQ ID NO: 2763107 - RNA, 14 nt, Human
aauaaaauggguuu

SEQ ID NO: 2763108 - RNA, 21 nt, Human
aauaauccuaaacauaugaau

SEQ ID NO: 2763109 - RNA, 13 nt, Human
aagccauguuuau

SEQ ID NO: 2763110 - RNA, 13 nt, Human
aagccagauuuuc

SEQ ID NO: 2763111 - RNA, 16 nt, Human
aagauuuaccacuugu

SEQ ID NO: 2763112 - RNA, 21 nt, Human
auucuccuaucaccugucuug

SEQ ID NO: 2763113 - RNA, 12 nt, Human
auuagaauucug

SEQ ID NO: 2763114 - RNA, 14 nt, Human
auuagaauucugua

SEQ ID NO: 2763115 - RNA, 13 nt, Human
auuagaauucugu

SEQ ID NO: 2763116 - RNA, 18 nt, Human
auuagaauucuguauaga

SEQ ID NO: 2763117 - RNA, 17 nt, Human
auuagaauucuguauag

SEQ ID NO: 2763118 - RNA, 16 nt, Human
auuagaauucuguaua

SEQ ID NO: 2763119 - RNA, 15 nt, Human
auuagaauucuguau

SEQ ID NO: 2763120 - RNA, 23 nt, Human
auuaaguaaugauaacuggaaac

SEQ ID NO: 2763121 - RNA, 21 nt, Human
auuaaguaaugauaacuggaa

SEQ ID NO: 2763122 - RNA, 19 nt, Human
uuuuugugaaaagcuccau

SEQ ID NO: 2763123 - RNA, 17 nt, Human
auuacauuuguauaaaa

SEQ ID NO: 2763124 - RNA, 18 nt, Human
auuacauuuguauaaaau

SEQ ID NO: 2763125 - RNA, 16 nt, Human
auuacauuuguauaaa

SEQ ID NO: 2763126 - RNA, 12 nt, Human
auuaccagggac

SEQ ID NO: 2763127 - RNA, 14 nt, Human
auuaagcauauauu

SEQ ID NO: 2763128 - RNA, 21 nt, Human
auuaagcauauauuuuuauau

SEQ ID NO: 2763129 - RNA, 15 nt, Human
auuaagcauauauuu

SEQ ID NO: 2763130 - RNA, 12 nt, Human
uuuuguuucugu

SEQ ID NO: 2763131 - RNA, 13 nt, Human
uuuuguuucugua

SEQ ID NO: 2763132 - RNA, 22 nt, Human
uuuuguuuggaccaaaaaccag

SEQ ID NO: 2763133 - RNA, 12 nt, Human
uuuuguuuggac

SEQ ID NO: 2763134 - RNA, 18 nt, Human
uuuuguuguuuguuuagu

SEQ ID NO: 2763135 - RNA, 23 nt, Human
uuuuguuuggaccaaaaaccagu

SEQ ID NO: 2763136 - RNA, 17 nt, Human
uuuuuauauuugaaaua

SEQ ID NO: 2763137 - RNA, 19 nt, Human
uuuuuauauuugaaauauu

SEQ ID NO: 2763138 - RNA, 14 nt, Human
uuuuaauaauguuu

SEQ ID NO: 2763139 - RNA, 13 nt, Human
uuuuaauaauguu

SEQ ID NO: 2763140 - RNA, 12 nt, Human
uuuuaauaaugu

SEQ ID NO: 2763141 - RNA, 16 nt, Human
uuuuaauaauguuuca

SEQ ID NO: 2763142 - RNA, 19 nt, Human
augugcuaguaauuggaaa

SEQ ID NO: 2763143 - RNA, 20 nt, Human
auguuaaaccaugggauaaa

SEQ ID NO: 2763144 - RNA, 13 nt, Human
auguuaaaccaug

SEQ ID NO: 2763145 - RNA, 12 nt, Human
auguuaaaccau

SEQ ID NO: 2763146 - RNA, 18 nt, Human
auguucaucaaugaauga

SEQ ID NO: 2763147 - RNA, 15 nt, Human
auguuuucaggcuag

SEQ ID NO: 2763148 - RNA, 21 nt, Human
auguuuucaggcuagauguau

SEQ ID NO: 2763149 - RNA, 17 nt, Human
auguuuucaggcuagau

SEQ ID NO: 2763150 - RNA, 22 nt, Human
uuuuauuaugaaacuuguguaa

SEQ ID NO: 2763151 - RNA, 21 nt, Human
uuuuauuaugaaacuugugua

SEQ ID NO: 2763152 - RNA, 12 nt, Human
uuuuauuaugaa

SEQ ID NO: 2763153 - RNA, 15 nt, Human
uuuucugauccaguu

SEQ ID NO: 2763154 - RNA, 15 nt, Human
uuuucugagaaagac

SEQ ID NO: 2763155 - RNA, 18 nt, Human
uuuucugagaaagacuau

SEQ ID NO: 2763156 - RNA, 14 nt, Human
uuuucucuaggaaa

SEQ ID NO: 2763157 - RNA, 22 nt, Human
uuuucauucuccuaucaccugu

SEQ ID NO: 2763158 - RNA, 15 nt, Human
auuuuauuauguaaa

SEQ ID NO: 2763159 - RNA, 19 nt, Human
auuuuauuauguaaauccc

SEQ ID NO: 2763160 - RNA, 18 nt, Human
auuuuauuauguaaaucc

SEQ ID NO: 2763161 - RNA, 17 nt, Human
auuuuauuauguaaauc

SEQ ID NO: 2763162 - RNA, 16 nt, Human
auuuuauuauguaaau

SEQ ID NO: 2763163 - RNA, 21 nt, Human
auuuuauuauguaaaucccau

SEQ ID NO: 2763164 - RNA, 20 nt, Human
auuuuauuauguaaauccca

SEQ ID NO: 2763165 - RNA, 17 nt, Human
auuuuccuccuuucucu

SEQ ID NO: 2763166 - RNA, 13 nt, Human
auuuuccuccuuu

SEQ ID NO: 2763167 - RNA, 22 nt, Human
auuuucaguuauuauauuuaca

SEQ ID NO: 2763168 - RNA, 22 nt, Human
auuuuaaaagaaugauuaugaa

SEQ ID NO: 2763169 - RNA, 18 nt, Human
auuuuaaaagaaugauua

SEQ ID NO: 2763170 - RNA, 18 nt, Human
auuuguauaaaauaauuu

SEQ ID NO: 2763171 - RNA, 15 nt, Human
auuuguauaaaauaa

SEQ ID NO: 2763172 - RNA, 19 nt, Human
auuuguauaaaauaauuuu

SEQ ID NO: 2763173 - RNA, 17 nt, Human
auuuuaaaagaaugauu

SEQ ID NO: 2763174 - RNA, 22 nt, Human
auugguguuguacucaauuuua

SEQ ID NO: 2763175 - RNA, 14 nt, Human
auugguguuguacu

SEQ ID NO: 2763176 - RNA, 23 nt, Human
auugguguuguacucaauuuuaa

SEQ ID NO: 2763177 - RNA, 15 nt, Human
auuguauuacaaauc

SEQ ID NO: 2763178 - RNA, 23 nt, Human
auucuucagcaaaaauauuuuau

SEQ ID NO: 2763179 - RNA, 15 nt, Human
auucuucagcaaaaa

SEQ ID NO: 2763180 - RNA, 18 nt, Human
auucuuaaaguugaauuu

SEQ ID NO: 2763181 - RNA, 16 nt, Human
auucuuaaaguugaau

SEQ ID NO: 2763182 - RNA, 15 nt, Human
auucuuaaaguugaa

SEQ ID NO: 2763183 - RNA, 14 nt, Human
auucuuaaaguuga

SEQ ID NO: 2763184 - RNA, 13 nt, Human
auucuuaaaguug

SEQ ID NO: 2763185 - RNA, 15 nt, Human
auucuguauagauua

SEQ ID NO: 2763186 - RNA, 21 nt, Human
auucuguauagauuagaauuc

SEQ ID NO: 2763187 - RNA, 18 nt, Human
auugacccacaagaaaug

SEQ ID NO: 2763188 - RNA, 14 nt, Human
auuugaaauauuga

SEQ ID NO: 2763189 - RNA, 20 nt, Human
auuuauuuuaauaauguuuc

SEQ ID NO: 2763190 - RNA, 19 nt, Human
auuuauuuuaauaauguuu

SEQ ID NO: 2763191 - RNA, 12 nt, Human
auuucauuucuu

SEQ ID NO: 2763192 - RNA, 17 nt, Human
auuuauuuuaauaaugu

SEQ ID NO: 2763193 - RNA, 13 nt, Human
auuuagauguaua

SEQ ID NO: 2763194 - RNA, 20 nt, Human
augaaauauuauguuaaaac

SEQ ID NO: 2763195 - RNA, 21 nt, Human
augaaauauuauguuaaaacu

SEQ ID NO: 2763196 - RNA, 11 nt, Human
uugcucaugga

SEQ ID NO: 2763197 - RNA, 12 nt, Human
uugcucauggaa

SEQ ID NO: 2763198 - RNA, 23 nt, Human
augaauuaguuuuauaugcuucu

SEQ ID NO: 2763199 - RNA, 21 nt, Human
augaauuaguuuuauaugcuu

SEQ ID NO: 2763200 - RNA, 22 nt, Human
augaauuacauuuguauaaaau

SEQ ID NO: 2763201 - RNA, 15 nt, Human
uuguaauuauaucug

SEQ ID NO: 2763202 - RNA, 23 nt, Human
uuguaguguuggagaagaacuga

SEQ ID NO: 2763203 - RNA, 13 nt, Human
uuguauaaaauaa

SEQ ID NO: 2763204 - RNA, 19 nt, Human
uuguauaaaauaauuuuua

SEQ ID NO: 2763205 - RNA, 17 nt, Human
augaauuacauuuguau

SEQ ID NO: 2763206 - RNA, 19 nt, Human
augaauuacauuuguauaa

SEQ ID NO: 2763207 - RNA, 18 nt, Human
augaauuacauuuguaua

SEQ ID NO: 2763208 - RNA, 17 nt, Human
uuuaaaaaaaaaauugg

SEQ ID NO: 2763209 - RNA, 20 nt, Human
uuuaaaaaagaaacauuugg

SEQ ID NO: 2763210 - RNA, 18 nt, Human
uugugaagcaaaauuuuu

SEQ ID NO: 2763211 - RNA, 14 nt, Human
augauaacuggaaa

SEQ ID NO: 2763212 - RNA, 16 nt, Human
auggaacauaaaauac

SEQ ID NO: 2763213 - RNA, 16 nt, Human
uuuauuuuaauaaugu

SEQ ID NO: 2763214 - RNA, 21 nt, Human
uuuauuaugaaacuuguguaa

SEQ ID NO: 2763215 - RNA, 13 nt, Human
uuuauuaugaaac

SEQ ID NO: 2763216 - RNA, 19 nt, Human
uuuauuacuguaagaaaau

SEQ ID NO: 2763217 - RNA, 23 nt, Human
augcugucuacacuaagagagaa

SEQ ID NO: 2763218 - RNA, 14 nt, Human
augcuguauuuuaa

SEQ ID NO: 2763219 - RNA, 23 nt, Human
auggaauuggagcucgugggaca

SEQ ID NO: 2763220 - RNA, 17 nt, Human
uuuauaugcuucuguuu

SEQ ID NO: 2763221 - RNA, 16 nt, Human
uuuauuacuguaagaa

SEQ ID NO: 2763222 - RNA, 15 nt, Human
uuuacuaaaauggac

SEQ ID NO: 2763223 - RNA, 17 nt, Human
uuuacuaaaauggacug

SEQ ID NO: 2763224 - RNA, 24 nt, Human
uuuaaagcuuauuaaaacucauuu

SEQ ID NO: 2763225 - RNA, 13 nt, Human
augcuaagugaaa

SEQ ID NO: 2763226 - RNA, 13 nt, Human
uuucuauauuuuc

SEQ ID NO: 2763227 - RNA, 18 nt, Human
uuucuauauuuucauucu

SEQ ID NO: 2763228 - RNA, 15 nt, Human
uuucuauauuuucau

SEQ ID NO: 2763229 - RNA, 21 nt, Human
uuucuaugcugaguuugugcu

SEQ ID NO: 2763230 - RNA, 13 nt, Human
uuucuaugaaaua

SEQ ID NO: 2763231 - RNA, 20 nt, Human
uuucuaugaaauauuauguu

SEQ ID NO: 2763232 - RNA, 14 nt, Human
uuucuaugaaauau

SEQ ID NO: 2763233 - RNA, 14 nt, Human
uuucugcaucagcu

SEQ ID NO: 2763234 - RNA, 14 nt, Human
uuugaaauauugac

SEQ ID NO: 2763235 - RNA, 17 nt, Human
auggaauuucucccagu

SEQ ID NO: 2763236 - RNA, 16 nt, Human
auggcuauaggugcua

SEQ ID NO: 2763237 - RNA, 19 nt, Human
auggcuauaggugcuacaa

SEQ ID NO: 2763238 - RNA, 21 nt, Human
auggcuauaggugcuacaaaa

SEQ ID NO: 2763239 - RNA, 21 nt, Human
augggacauuugcucauggaa

SEQ ID NO: 2763240 - RNA, 22 nt, Human
augggacauuugcucauggaau

SEQ ID NO: 2763241 - RNA, 22 nt, Human
uucauuauuuuauuaugaaacu

SEQ ID NO: 2763242 - RNA, 14 nt, Human
uucauuaucucaaa

SEQ ID NO: 2763243 - RNA, 13 nt, Human
auauauuuuuaua

SEQ ID NO: 2763244 - RNA, 13 nt, Human
auaugcaaagcac

SEQ ID NO: 2763245 - RNA, 14 nt, Human
auaugcaaagcacu

SEQ ID NO: 2763246 - RNA, 20 nt, Human
uucauggaacgcguugaaau

SEQ ID NO: 2763247 - RNA, 19 nt, Human
uucauggaacgcguugaaa

SEQ ID NO: 2763248 - RNA, 22 nt, Human
uucauggaacgcguugaaauug

SEQ ID NO: 2763249 - RNA, 21 nt, Human
uucauggaacgcguugaaauu

SEQ ID NO: 2763250 - RNA, 23 nt, Human
auauguaccuaacgaaguauccu

SEQ ID NO: 2763251 - RNA, 13 nt, Human
auauaugcuaagu

SEQ ID NO: 2763252 - RNA, 15 nt, Human
uucaucaaugaauga

SEQ ID NO: 2763253 - RNA, 17 nt, Human
uucagcaaaaauauuuu

SEQ ID NO: 2763254 - RNA, 19 nt, Human
uucagcaaaaauauuuuau

SEQ ID NO: 2763255 - RNA, 17 nt, Human
uucagcgguuuauauaa

SEQ ID NO: 2763256 - RNA, 12 nt, Human
auauuaaagcca

SEQ ID NO: 2763257 - RNA, 14 nt, Human
auauuguuugcuaa

SEQ ID NO: 2763258 - RNA, 13 nt, Human
auauuuacaaaug

SEQ ID NO: 2763259 - RNA, 15 nt, Human
aucaaauaugcaaag

SEQ ID NO: 2763260 - RNA, 16 nt, Human
aucaaggguacacugc

SEQ ID NO: 2763261 - RNA, 16 nt, Human
aucaaauaugcaaagc

SEQ ID NO: 2763262 - RNA, 17 nt, Human
aucaaauaugcaaagca

SEQ ID NO: 2763263 - RNA, 18 nt, Human
aucaaauaugcaaagcac

SEQ ID NO: 2763264 - RNA, 21 nt, Human
aucaaggguacacugccuucu

SEQ ID NO: 2763265 - RNA, 13 nt, Human
aucaauuuaaaaa

SEQ ID NO: 2763266 - RNA, 14 nt, Human
aucaauuuuucuua

SEQ ID NO: 2763267 - RNA, 23 nt, Human
aucacuugaacccgggaggcaga

SEQ ID NO: 2763268 - RNA, 13 nt, Human
uucuuaaaguuga

SEQ ID NO: 2763269 - RNA, 17 nt, Human
uucuguuuuauaauuuu

SEQ ID NO: 2763270 - RNA, 16 nt, Human
uucuguuuuauaauuu

SEQ ID NO: 2763271 - RNA, 20 nt, Human
aucccucccuccaccucccu

SEQ ID NO: 2763272 - RNA, 18 nt, Human
aucccucccuccaccucc

SEQ ID NO: 2763273 - RNA, 17 nt, Human
aucccucccuccaccuc

SEQ ID NO: 2763274 - RNA, 16 nt, Human
aucccucccuccaccu

SEQ ID NO: 2763275 - RNA, 14 nt, Human
aucccucccuccac

SEQ ID NO: 2763276 - RNA, 17 nt, Human
uugacauagucuggcug

SEQ ID NO: 2763277 - RNA, 14 nt, Human
uugacauagucugg

SEQ ID NO: 2763278 - RNA, 19 nt, Human
uugacacuuaaaaaugguu

SEQ ID NO: 2763279 - RNA, 17 nt, Human
uugacacuuaaaaaugg

SEQ ID NO: 2763280 - RNA, 18 nt, Human
auccugaggcuccacuug

SEQ ID NO: 2763281 - RNA, 16 nt, Human
auccugaggcuccacu

SEQ ID NO: 2763282 - RNA, 13 nt, Human
auccugaggcucc

SEQ ID NO: 2763283 - RNA, 11 nt, Human
auccugaggcu

SEQ ID NO: 2763284 - RNA, 13 nt, Human
auccugccccuga

SEQ ID NO: 2763285 - RNA, 22 nt, Human
auccugaggcuccacuuggucu

SEQ ID NO: 2763286 - RNA, 16 nt, Human
auccugcaauuccacu

SEQ ID NO: 2763287 - RNA, 22 nt, Human
uggcacaguuuucugagaaaga

SEQ ID NO: 2763288 - RNA, 20 nt, Human
uggcacaguuuucugagaaa

SEQ ID NO: 2763289 - RNA, 18 nt, Human
uggacgagaaaacaauaa

SEQ ID NO: 2763290 - RNA, 21 nt, Human
ugggaaagcauuguaaaugug

SEQ ID NO: 2763291 - RNA, 13 nt, Human
ugcuauuucuaua

SEQ ID NO: 2763292 - RNA, 12 nt, Human
ugcuauuucuau

SEQ ID NO: 2763293 - RNA, 20 nt, Human
ugcuauuucuauauuuucau

SEQ ID NO: 2763294 - RNA, 14 nt, Human
ugcuauuucuauau

SEQ ID NO: 2763295 - RNA, 11 nt, Human
aggaauuuaaa

SEQ ID NO: 2763296 - RNA, 23 nt, Human
aggaauugacccacaagaaauga

SEQ ID NO: 2763297 - RNA, 23 nt, Human
ugcuguauuuuaaaagaaugauu

SEQ ID NO: 2763298 - RNA, 14 nt, Human
ugcuggagcucugc

SEQ ID NO: 2763299 - RNA, 13 nt, Human
ugcuggagcucug

SEQ ID NO: 2763300 - RNA, 23 nt, Human
aggacagcccuucuuuccacaga

SEQ ID NO: 2763301 - RNA, 14 nt, Human
aggacacugauaug

SEQ ID NO: 2763302 - RNA, 16 nt, Human
aggacuuguuagaucu

SEQ ID NO: 2763303 - RNA, 14 nt, Human
aggacuuguuagau

SEQ ID NO: 2763304 - RNA, 17 nt, Human
aggacuuguuagaucua

SEQ ID NO: 2763305 - RNA, 11 nt, Human
aggagaaacug

SEQ ID NO: 2763306 - RNA, 15 nt, Human
ugcuugccaucccuc

SEQ ID NO: 2763307 - RNA, 16 nt, Human
ugcuugccaucccucc

SEQ ID NO: 2763308 - RNA, 22 nt, Human
uggaauuucucccagucauuua

SEQ ID NO: 2763309 - RNA, 18 nt, Human
uggaauuggagcucgugg

SEQ ID NO: 2763310 - RNA, 21 nt, Human
agccagcaguucagagcugcc

SEQ ID NO: 2763311 - RNA, 20 nt, Human
agccagcaguucagagcugc

SEQ ID NO: 2763312 - RNA, 22 nt, Human
agccagcaguucagagcugccc

SEQ ID NO: 2763313 - RNA, 19 nt, Human
agccagcaguucagagcug

SEQ ID NO: 2763314 - RNA, 17 nt, Human
agccagcaguucagagc

SEQ ID NO: 2763315 - RNA, 15 nt, Human
agccagcaguucaga

SEQ ID NO: 2763316 - RNA, 18 nt, Human
ugauuaaguaaugauaac

SEQ ID NO: 2763317 - RNA, 23 nt, Human
ugauuaaguaaugauaacuggaa

SEQ ID NO: 2763318 - RNA, 12 nt, Human
ugaugaagaagu

SEQ ID NO: 2763319 - RNA, 11 nt, Human
ugaugaagaag

SEQ ID NO: 2763320 - RNA, 14 nt, Human
ugaugggaaagcau

SEQ ID NO: 2763321 - RNA, 19 nt, Human
ugaugggaaagcauuguaa

SEQ ID NO: 2763322 - RNA, 16 nt, Human
ugauuucuaugcugag

SEQ ID NO: 2763323 - RNA, 15 nt, Human
ugauuucuaugcuga

SEQ ID NO: 2763324 - RNA, 12 nt, Human
ugauuucuaugc

SEQ ID NO: 2763325 - RNA, 15 nt, Human
ugcagaagacaguau

SEQ ID NO: 2763326 - RNA, 14 nt, Human
ugcagaagacagua

SEQ ID NO: 2763327 - RNA, 16 nt, Human
ugccccauucaacauc

SEQ ID NO: 2763328 - RNA, 19 nt, Human
agcuauggugucauaggcu

SEQ ID NO: 2763329 - RNA, 22 nt, Human
ugccauuuaaagcuuauuaaaa

SEQ ID NO: 2763330 - RNA, 12 nt, Human
ugcccucuccug

SEQ ID NO: 2763331 - RNA, 15 nt, Human
ugcccucuccugggc

SEQ ID NO: 2763332 - RNA, 14 nt, Human
ugcccucuccuggg

SEQ ID NO: 2763333 - RNA, 13 nt, Human
ugcccucuccugg

SEQ ID NO: 2763334 - RNA, 20 nt, Human
ugcccucuccugggcagcug

SEQ ID NO: 2763335 - RNA, 18 nt, Human
ugcccucuccugggcagc

SEQ ID NO: 2763336 - RNA, 17 nt, Human
ugcccucuccugggcag

SEQ ID NO: 2763337 - RNA, 16 nt, Human
ugcccucuccugggca

SEQ ID NO: 2763338 - RNA, 23 nt, Human
ugcccucuccugggcagcugccu

SEQ ID NO: 2763339 - RNA, 22 nt, Human
ugcccucuccugggcagcugcc

SEQ ID NO: 2763340 - RNA, 23 nt, Human
agcucugcccauccugccccuga

SEQ ID NO: 2763341 - RNA, 16 nt, Human
agcugcccucuccugg

SEQ ID NO: 2763342 - RNA, 18 nt, Human
agcugcccucuccugggc

SEQ ID NO: 2763343 - RNA, 17 nt, Human
agcugcccucuccuggg

SEQ ID NO: 2763344 - RNA, 20 nt, Human
agcugcccucuccugggcag

SEQ ID NO: 2763345 - RNA, 19 nt, Human
agcugcccucuccugggca

SEQ ID NO: 2763346 - RNA, 21 nt, Human
agcugcccucuccugggcagc

SEQ ID NO: 2763347 - RNA, 15 nt, Human
ugccucaccccuugc

SEQ ID NO: 2763348 - RNA, 23 nt, Human
ugccucacccacccuuuuuuaaa

SEQ ID NO: 2763349 - RNA, 11 nt, Human
ugccuccccuc

SEQ ID NO: 2763350 - RNA, 15 nt, Human
ugccuccccuccucu

SEQ ID NO: 2763351 - RNA, 14 nt, Human
ugccuccccuccuc

SEQ ID NO: 2763352 - RNA, 13 nt, Human
ugccuccccuccu

SEQ ID NO: 2763353 - RNA, 12 nt, Human
ugccuccccucc

SEQ ID NO: 2763354 - RNA, 16 nt, Human
ugccuccccuccucug

SEQ ID NO: 2763355 - RNA, 18 nt, Human
ugccucagaaaacaagga

SEQ ID NO: 2763356 - RNA, 19 nt, Human
uguuugcuaagcauuccaa

SEQ ID NO: 2763357 - RNA, 15 nt, Human
uguuugcuaagcauu

SEQ ID NO: 2763358 - RNA, 20 nt, Human
uguuuuauaauuuugugaag

SEQ ID NO: 2763359 - RNA, 13 nt, Human
uguuuuauaauuu

SEQ ID NO: 2763360 - RNA, 21 nt, Human
aguugauaugccuuuucccaa

SEQ ID NO: 2763361 - RNA, 14 nt, Human
aguucugaagaaga

SEQ ID NO: 2763362 - RNA, 13 nt, Human
aguucugaagaag

SEQ ID NO: 2763363 - RNA, 15 nt, Human
aguucugaagaagau

SEQ ID NO: 2763364 - RNA, 20 nt, Human
uuaaaaaugguuuaaauggu

SEQ ID NO: 2763365 - RNA, 22 nt, Human
aguugcauagguuuaauaauuu

SEQ ID NO: 2763366 - RNA, 18 nt, Human
uuaaaaaagaaacauuug

SEQ ID NO: 2763367 - RNA, 15 nt, Human
uuaaaaaagaaacau

SEQ ID NO: 2763368 - RNA, 23 nt, Human
uuaaaccaugggauaaaugccau

SEQ ID NO: 2763369 - RNA, 20 nt, Human
aguuauuauauuuacaaaug

SEQ ID NO: 2763370 - RNA, 19 nt, Human
aguuauggcuauaggugcu

SEQ ID NO: 2763371 - RNA, 21 nt, Human
uguuguacucaauuuuaacaa

SEQ ID NO: 2763372 - RNA, 18 nt, Human
aguucagagcugcccucu

SEQ ID NO: 2763373 - RNA, 17 nt, Human
aguucagagcugcccuc

SEQ ID NO: 2763374 - RNA, 16 nt, Human
aguucagagcugcccu

SEQ ID NO: 2763375 - RNA, 15 nt, Human
aguucagagcugccc

SEQ ID NO: 2763376 - RNA, 14 nt, Human
aguucagagcugcc

SEQ ID NO: 2763377 - RNA, 20 nt, Human
aguucggugagcuacaaaug

SEQ ID NO: 2763378 - RNA, 21 nt, Human
auacaguucggugagcuacaa

SEQ ID NO: 2763379 - RNA, 20 nt, Human
auacaucccuuaccugggaa

SEQ ID NO: 2763380 - RNA, 22 nt, Human
auaauuuuuauauuugaaauau

SEQ ID NO: 2763381 - RNA, 21 nt, Human
auaauuuuuauauuugaaaua

SEQ ID NO: 2763382 - RNA, 22 nt, Human
auacaaaaaaaaaaaaaaauua

SEQ ID NO: 2763383 - RNA, 20 nt, Human
auaauuuugugaagcaaaau

SEQ ID NO: 2763384 - RNA, 15 nt, Human
auaauuuugugaagc

SEQ ID NO: 2763385 - RNA, 14 nt, Human
auaauuuugugaag

SEQ ID NO: 2763386 - RNA, 13 nt, Human
auaauuuugugaa

SEQ ID NO: 2763387 - RNA, 19 nt, Human
auaauuuuuauauuugaaa

SEQ ID NO: 2763388 - RNA, 16 nt, Human
auaauuuuuauauuug

SEQ ID NO: 2763389 - RNA, 14 nt, Human
auaauuuuuauauu

SEQ ID NO: 2763390 - RNA, 18 nt, Human
uuauauaagcuuguauuc

SEQ ID NO: 2763391 - RNA, 12 nt, Human
aguuuucugaga

SEQ ID NO: 2763392 - RNA, 13 nt, Human
aguuuucugagaa

SEQ ID NO: 2763393 - RNA, 14 nt, Human
aguuuucugagaaa

SEQ ID NO: 2763394 - RNA, 17 nt, Human
aguuuucugagaaagac

SEQ ID NO: 2763395 - RNA, 19 nt, Human
auaaaugugccuucauuuu

SEQ ID NO: 2763396 - RNA, 12 nt, Human
auaacuggaaac

SEQ ID NO: 2763397 - RNA, 16 nt, Human
auaauaaggaaaaguu

SEQ ID NO: 2763398 - RNA, 22 nt, Human
auaauaaggaaaaguuuaauau

SEQ ID NO: 2763399 - RNA, 19 nt, Human
auaauaaggaaaaguuuaa

SEQ ID NO: 2763400 - RNA, 18 nt, Human
auaauaaggaaaaguuua

SEQ ID NO: 2763401 - RNA, 17 nt, Human
auaauaaggaaaaguuu

SEQ ID NO: 2763402 - RNA, 21 nt, Human
auaaucuuucacaggggacag

SEQ ID NO: 2763403 - RNA, 23 nt, Human
auaauuauaugcuauuucuauau

SEQ ID NO: 2763404 - RNA, 21 nt, Human
auaauuauaugcuauuucuau

SEQ ID NO: 2763405 - RNA, 19 nt, Human
auaauuauaugcuauuucu

SEQ ID NO: 2763406 - RNA, 17 nt, Human
auaauuauaugcuauuu

SEQ ID NO: 2763407 - RNA, 14 nt, Human
auaaugaauacuuu

SEQ ID NO: 2763408 - RNA, 22 nt, Human
uuagaugcaguucugaagaaga

SEQ ID NO: 2763409 - RNA, 23 nt, Human
uuagaugcaguucugaagaagau

SEQ ID NO: 2763410 - RNA, 17 nt, Human
agucagaucugccuaag

SEQ ID NO: 2763411 - RNA, 20 nt, Human
agucagaucugccuaaggac

SEQ ID NO: 2763412 - RNA, 22 nt, Human
agucagaucugccuaaggacuu

SEQ ID NO: 2763413 - RNA, 21 nt, Human
agucagaucugccuaaggacu

SEQ ID NO: 2763414 - RNA, 23 nt, Human
agucagaucugccuaaggacuuc

SEQ ID NO: 2763415 - RNA, 20 nt, Human
ugucagcuccccucggagaa

SEQ ID NO: 2763416 - RNA, 21 nt, Human
ugucagcuccccucggagaag

SEQ ID NO: 2763417 - RNA, 23 nt, Human
ugucagcuccccucggagaagag

SEQ ID NO: 2763418 - RNA, 12 nt, Human
uguaugugugaa

SEQ ID NO: 2763419 - RNA, 16 nt, Human
aguauuguccaggucu

SEQ ID NO: 2763420 - RNA, 15 nt, Human
aguauuguccagguc

SEQ ID NO: 2763421 - RNA, 20 nt, Human
agucacauuccaagccucau

SEQ ID NO: 2763422 - RNA, 11 nt, Human
aguauuguaca

SEQ ID NO: 2763423 - RNA, 23 nt, Human
aguauuguacaaaguauuaagca

SEQ ID NO: 2763424 - RNA, 22 nt, Human
aguauuguacaaaguauuaagc

SEQ ID NO: 2763425 - RNA, 20 nt, Human
aguauuguacaaaguauuaa

SEQ ID NO: 2763426 - RNA, 15 nt, Human
aguauuguacaaagu

SEQ ID NO: 2763427 - RNA, 21 nt, Human
aguauguuagugcaaauuguc

SEQ ID NO: 2763428 - RNA, 18 nt, Human
aguauguuagugcaaauu

SEQ ID NO: 2763429 - RNA, 21 nt, Human
aguauuagaauaccacaggaa

SEQ ID NO: 2763430 - RNA, 12 nt, Human
ugucuuaauuaa

SEQ ID NO: 2763431 - RNA, 14 nt, Human
ugucuuaauuaaaa

SEQ ID NO: 2763432 - RNA, 17 nt, Human
ugucucuacuaaaaaua

SEQ ID NO: 2763433 - RNA, 21 nt, Human
ugucuugccuuuuucauuauu

SEQ ID NO: 2763434 - RNA, 17 nt, Human
ugucuugccuuuuucau

SEQ ID NO: 2763435 - RNA, 16 nt, Human
ugucuugccuuuuuca

SEQ ID NO: 2763436 - RNA, 15 nt, Human
ugucuugccuuuuuc

SEQ ID NO: 2763437 - RNA, 14 nt, Human
ugucuucacaacag

SEQ ID NO: 2763438 - RNA, 16 nt, Human
agugagccgagauugu

SEQ ID NO: 2763439 - RNA, 21 nt, Human
agugagcagucaggaaagaga

SEQ ID NO: 2763440 - RNA, 22 nt, Human
agugaaagaggcagcuugaaac

SEQ ID NO: 2763441 - RNA, 14 nt, Human
agugagacagcucu

SEQ ID NO: 2763442 - RNA, 16 nt, Human
agugaaagaggcagcu

SEQ ID NO: 2763443 - RNA, 17 nt, Human
agugaaagaaaauaaca

SEQ ID NO: 2763444 - RNA, 14 nt, Human
ugugaagcaaaauu

SEQ ID NO: 2763445 - RNA, 22 nt, Human
ugugagaugcuagaacucccuu

SEQ ID NO: 2763446 - RNA, 15 nt, Human
aggucagugcaaaua

SEQ ID NO: 2763447 - RNA, 20 nt, Human
aggguuuauguuuaggaugu

SEQ ID NO: 2763448 - RNA, 17 nt, Human
aggguuaugauuaagua

SEQ ID NO: 2763449 - RNA, 22 nt, Human
uggucugugagaugcuagaacu

SEQ ID NO: 2763450 - RNA, 22 nt, Human
ugguccaugggccauaugaaaa

SEQ ID NO: 2763451 - RNA, 16 nt, Human
aggggaauugaggaca

SEQ ID NO: 2763452 - RNA, 21 nt, Human
agggugaugggaaagcauugu

SEQ ID NO: 2763453 - RNA, 22 nt, Human
agggugaugggaaagcauugua

SEQ ID NO: 2763454 - RNA, 23 nt, Human
uggugugaccacugcagaagaca

SEQ ID NO: 2763455 - RNA, 10 nt, Human
uguaaauccc

SEQ ID NO: 2763456 - RNA, 21 nt, Human
uguaaauacaauuuuguuucu

SEQ ID NO: 2763457 - RNA, 19 nt, Human
uguaaauacaauuuuguuu

SEQ ID NO: 2763458 - RNA, 18 nt, Human
uguaaauacaauuuuguu

SEQ ID NO: 2763459 - RNA, 17 nt, Human
uguaaauacaauuuugu

SEQ ID NO: 2763460 - RNA, 16 nt, Human
uguaaauacaauuuug

SEQ ID NO: 2763461 - RNA, 13 nt, Human
uguacaaaguauu

SEQ ID NO: 2763462 - RNA, 14 nt, Human
uguacaaaguauua

SEQ ID NO: 2763463 - RNA, 18 nt, Human
uguaagaaaauaucacuu

SEQ ID NO: 2763464 - RNA, 17 nt, Human
uguaagaaaauaucacu

SEQ ID NO: 2763465 - RNA, 19 nt, Human
ugaaauuguaauuauaucu

SEQ ID NO: 2763466 - RNA, 16 nt, Human
ugaaauuguaauuaua

SEQ ID NO: 2763467 - RNA, 15 nt, Human
ugaaauuguaauuau

SEQ ID NO: 2763468 - RNA, 14 nt, Human
ugaaauuguaauua

SEQ ID NO: 2763469 - RNA, 13 nt, Human
ugaaauuguaauu

SEQ ID NO: 2763470 - RNA, 14 nt, Human
ugaaauaagccaga

SEQ ID NO: 2763471 - RNA, 20 nt, Human
agagcugcccucuccugggc

SEQ ID NO: 2763472 - RNA, 19 nt, Human
agagcugcccucuccuggg

SEQ ID NO: 2763473 - RNA, 18 nt, Human
agagcugcccucuccugg

SEQ ID NO: 2763474 - RNA, 17 nt, Human
agagcugcccucuccug

SEQ ID NO: 2763475 - RNA, 16 nt, Human
agagcugcccucuccu

SEQ ID NO: 2763476 - RNA, 13 nt, Human
ugaacaaauuuac

SEQ ID NO: 2763477 - RNA, 18 nt, Human
ugaacccgggaggcagag

SEQ ID NO: 2763478 - RNA, 22 nt, Human
ugaacccauauuuguacaccaa

SEQ ID NO: 2763479 - RNA, 22 nt, Human
ugaagaagcaccaaucaugaau

SEQ ID NO: 2763480 - RNA, 17 nt, Human
ugaaguacucauacaug

SEQ ID NO: 2763481 - RNA, 20 nt, Human
ugaagauuuaccacuugugu

SEQ ID NO: 2763482 - RNA, 17 nt, Human
ugaagauuuaccacuug

SEQ ID NO: 2763483 - RNA, 18 nt, Human
agagcuguucacagccag

SEQ ID NO: 2763484 - RNA, 23 nt, Human
agacuggcacaguuuucugagaa

SEQ ID NO: 2763485 - RNA, 20 nt, Human
agacuggcacaguuuucuga

SEQ ID NO: 2763486 - RNA, 21 nt, Human
agacuggcacaguuuucugag

SEQ ID NO: 2763487 - RNA, 18 nt, Human
agacuggcacaguuuucu

SEQ ID NO: 2763488 - RNA, 22 nt, Human
agacuccaaagaaauguaaggg

SEQ ID NO: 2763489 - RNA, 21 nt, Human
agacuggugacugauucuuca

SEQ ID NO: 2763490 - RNA, 20 nt, Human
agacuggugacugauucuuc

SEQ ID NO: 2763491 - RNA, 19 nt, Human
agacuggugacugauucuu

SEQ ID NO: 2763492 - RNA, 17 nt, Human
ucuuugucuacaccauu

SEQ ID NO: 2763493 - RNA, 16 nt, Human
agagacacacugaaga

SEQ ID NO: 2763494 - RNA, 14 nt, Human
agagacagaaagca

SEQ ID NO: 2763495 - RNA, 15 nt, Human
agagaguguugaaac

SEQ ID NO: 2763496 - RNA, 16 nt, Human
agagaguguugaaacg

SEQ ID NO: 2763497 - RNA, 17 nt, Human
ugaaagaggaaugaagu

SEQ ID NO: 2763498 - RNA, 18 nt, Human
ugaaagaggaaugaagua

SEQ ID NO: 2763499 - RNA, 17 nt, Human
ugaaaauauuuguauca

SEQ ID NO: 2763500 - RNA, 20 nt, Human
ugaaaaucuuauaauuuaaa

SEQ ID NO: 2763501 - RNA, 21 nt, Human
ugaaaauauuuguaucacaaa

SEQ ID NO: 2763502 - RNA, 22 nt, Human
ugaaaauauuuguaucacaaau

SEQ ID NO: 2763503 - RNA, 13 nt, Human
ugaaagaaaauaa

SEQ ID NO: 2763504 - RNA, 24 nt, Human
ugagaugugaacacaucagcuugc

SEQ ID NO: 2763505 - RNA, 18 nt, Human
ugagaugugaacacauca

SEQ ID NO: 2763506 - RNA, 19 nt, Human
ugagaugugaacacaucag

SEQ ID NO: 2763507 - RNA, 13 nt, Human
ugagaugugaaca

SEQ ID NO: 2763508 - RNA, 22 nt, Human
ugagagacacacugaagaagca

SEQ ID NO: 2763509 - RNA, 21 nt, Human
ugagagacacacugaagaagc

SEQ ID NO: 2763510 - RNA, 20 nt, Human
ugagagacacacugaagaag

SEQ ID NO: 2763511 - RNA, 19 nt, Human
ugagagacacacugaagaa

SEQ ID NO: 2763512 - RNA, 17 nt, Human
ugagagacacacugaag

SEQ ID NO: 2763513 - RNA, 16 nt, Human
ugagagacacacugaa

SEQ ID NO: 2763514 - RNA, 12 nt, Human
ugagacagcucu

SEQ ID NO: 2763515 - RNA, 20 nt, Human
ugagacucugucucagucca

SEQ ID NO: 2763516 - RNA, 14 nt, Human
agauuuuccugaaa

SEQ ID NO: 2763517 - RNA, 15 nt, Human
agauuuuccugaaaa

SEQ ID NO: 2763518 - RNA, 16 nt, Human
agauuuuccugaaaac

SEQ ID NO: 2763519 - RNA, 20 nt, Human
agcaagggugaugggaaagc

SEQ ID NO: 2763520 - RNA, 22 nt, Human
agcaagggugaugggaaagcau

SEQ ID NO: 2763521 - RNA, 16 nt, Human
agcaagggugauggga

SEQ ID NO: 2763522 - RNA, 21 nt, Human
agauuagagaguguugaaacg

SEQ ID NO: 2763523 - RNA, 23 nt, Human
agauuagaauucuguauagauua

SEQ ID NO: 2763524 - RNA, 22 nt, Human
agauuagaauucuguauagauu

SEQ ID NO: 2763525 - RNA, 16 nt, Human
agauuagaauucugua

SEQ ID NO: 2763526 - RNA, 15 nt, Human
agauuagaauucugu

SEQ ID NO: 2763527 - RNA, 21 nt, Human
agauugugccccugcacucca

SEQ ID NO: 2763528 - RNA, 22 nt, Human
agaugugaacacaucagcuugc

SEQ ID NO: 2763529 - RNA, 17 nt, Human
agaugugaacacaucag

SEQ ID NO: 2763530 - RNA, 22 nt, Human
agauguauguacuucaugcugu

SEQ ID NO: 2763531 - RNA, 15 nt, Human
ugacacuuaaaaaug

SEQ ID NO: 2763532 - RNA, 20 nt, Human
agaugcaguucugaagaaga

SEQ ID NO: 2763533 - RNA, 21 nt, Human
agaugcaguucugaagaagau

SEQ ID NO: 2763534 - RNA, 19 nt, Human
agaugcuagaacucccuuu

SEQ ID NO: 2763535 - RNA, 15 nt, Human
agaugcuagaacucc

SEQ ID NO: 2763536 - RNA, 21 nt, Human
agaugcuagaacucccuuuca

SEQ ID NO: 2763537 - RNA, 13 nt, Human
agauccuggaaau

SEQ ID NO: 2763538 - RNA, 14 nt, Human
ucugcuugccaucc

SEQ ID NO: 2763539 - RNA, 23 nt, Human
ucugcuugccaucccucccucca

SEQ ID NO: 2763540 - RNA, 20 nt, Human
ucugcuugccaucccucccu

SEQ ID NO: 2763541 - RNA, 17 nt, Human
ucugcuugccaucccuc

SEQ ID NO: 2763542 - RNA, 16 nt, Human
ucugcuugccaucccu

SEQ ID NO: 2763543 - RNA, 18 nt, Human
agaagaugguaccaccag

SEQ ID NO: 2763544 - RNA, 14 nt, Human
agaagaacugaaau

SEQ ID NO: 2763545 - RNA, 13 nt, Human
agaagaacugaaa

SEQ ID NO: 2763546 - RNA, 14 nt, Human
agaaaugaaagcag

SEQ ID NO: 2763547 - RNA, 11 nt, Human
ucugauccagu

SEQ ID NO: 2763548 - RNA, 21 nt, Human
ucugauccaguuuuguuugga

SEQ ID NO: 2763549 - RNA, 14 nt, Human
ucugauccaguuuu

SEQ ID NO: 2763550 - RNA, 15 nt, Human
ucugcagauaaacag

SEQ ID NO: 2763551 - RNA, 18 nt, Human
ucugcagauaaacaguag

SEQ ID NO: 2763552 - RNA, 12 nt, Human
agacacacauga

SEQ ID NO: 2763553 - RNA, 14 nt, Human
agaauucuguauag

SEQ ID NO: 2763554 - RNA, 12 nt, Human
agaauucuguau

SEQ ID NO: 2763555 - RNA, 17 nt, Human
ucugugaacuugaaauu

SEQ ID NO: 2763556 - RNA, 14 nt, Human
ucugugaacuugaa

SEQ ID NO: 2763557 - RNA, 18 nt, Human
ucugugaacuugaaauuu

SEQ ID NO: 2763558 - RNA, 14 nt, Human
ucugugagaugcua

SEQ ID NO: 2763559 - RNA, 22 nt, Human
ucugugagaugcuagaacuccc

SEQ ID NO: 2763560 - RNA, 17 nt, Human
ucugugagaugcuagaa

SEQ ID NO: 2763561 - RNA, 23 nt, Human
ucugugagaugcuagaacucccu

SEQ ID NO: 2763562 - RNA, 23 nt, Human
agaaugguccgugcuaaggacuu

SEQ ID NO: 2763563 - RNA, 21 nt, Human
agaaugguccgugcuaaggac

SEQ ID NO: 2763564 - RNA, 15 nt, Human
agaauuaacacauga

SEQ ID NO: 2763565 - RNA, 14 nt, Human
ucuaaguaaaacca

SEQ ID NO: 2763566 - RNA, 15 nt, Human
ucuaaguaaaaccac

SEQ ID NO: 2763567 - RNA, 19 nt, Human
ucuaaguaaaaccacagca

SEQ ID NO: 2763568 - RNA, 13 nt, Human
uccugggcagcug

SEQ ID NO: 2763569 - RNA, 12 nt, Human
uccugggcagcu

SEQ ID NO: 2763570 - RNA, 17 nt, Human
ucuaggaaauauuuauu

SEQ ID NO: 2763571 - RNA, 16 nt, Human
ucuaggaaauauuuau

SEQ ID NO: 2763572 - RNA, 12 nt, Human
acuuuggauaau

SEQ ID NO: 2763573 - RNA, 19 nt, Human
acuuuggauaauaaggaaa

SEQ ID NO: 2763574 - RNA, 17 nt, Human
acuuuggauaauaagga

SEQ ID NO: 2763575 - RNA, 15 nt, Human
acuugucaauaaaau

SEQ ID NO: 2763576 - RNA, 15 nt, Human
ucucauuuccaagca

SEQ ID NO: 2763577 - RNA, 23 nt, Human
ucucagauuuuauuauguaaauc

SEQ ID NO: 2763578 - RNA, 22 nt, Human
ucucagauuuuauuauguaaau

SEQ ID NO: 2763579 - RNA, 12 nt, Human
ucucaggaaauc

SEQ ID NO: 2763580 - RNA, 14 nt, Human
ucucaggaaaucaa

SEQ ID NO: 2763581 - RNA, 21 nt, Human
ucucaggaaaucaaauaugca

SEQ ID NO: 2763582 - RNA, 23 nt, Human
ucucaggaaaucaaauaugcaaa

SEQ ID NO: 2763583 - RNA, 15 nt, Human
acucaauuuuaacaa

SEQ ID NO: 2763584 - RNA, 12 nt, Human
acucaauuuuaa

SEQ ID NO: 2763585 - RNA, 17 nt, Human
acuauauuguuugcuaa

SEQ ID NO: 2763586 - RNA, 22 nt, Human
acuauauuguuugcuaagcauu

SEQ ID NO: 2763587 - RNA, 15 nt, Human
acuaucucauuucca

SEQ ID NO: 2763588 - RNA, 17 nt, Human
acuaucucauuuccaag

SEQ ID NO: 2763589 - RNA, 16 nt, Human
acuaucucauuuccaa

SEQ ID NO: 2763590 - RNA, 15 nt, Human
acuaauuuuaaaaug

SEQ ID NO: 2763591 - RNA, 20 nt, Human
acggugaauggcuuuguaua

SEQ ID NO: 2763592 - RNA, 19 nt, Human
acggugaauggcuuuguau

SEQ ID NO: 2763593 - RNA, 16 nt, Human
acggugaauggcuuug

SEQ ID NO: 2763594 - RNA, 15 nt, Human
uccauccugaggcuc

SEQ ID NO: 2763595 - RNA, 12 nt, Human
uccauccugagg

SEQ ID NO: 2763596 - RNA, 11 nt, Human
uccauccugag

SEQ ID NO: 2763597 - RNA, 13 nt, Human
acggaugauuucu

SEQ ID NO: 2763598 - RNA, 18 nt, Human
uccagugagacagcucug

SEQ ID NO: 2763599 - RNA, 11 nt, Human
acgcucucugg

SEQ ID NO: 2763600 - RNA, 20 nt, Human
accuuuuggucuggagggaa

SEQ ID NO: 2763601 - RNA, 22 nt, Human
uccacugguucuucuuggucuc

SEQ ID NO: 2763602 - RNA, 19 nt, Human
accuugaaaacuuuaugcu

SEQ ID NO: 2763603 - RNA, 22 nt, Human
uccugaaaacccuugccaugug

SEQ ID NO: 2763604 - RNA, 12 nt, Human
acugaagaagca

SEQ ID NO: 2763605 - RNA, 16 nt, Human
acugacucuuaagaag

SEQ ID NO: 2763606 - RNA, 15 nt, Human
acugacucuuaagaa

SEQ ID NO: 2763607 - RNA, 14 nt, Human
acugacucuuaaga

SEQ ID NO: 2763608 - RNA, 13 nt, Human
acugacucuuaag

SEQ ID NO: 2763609 - RNA, 20 nt, Human
acugacucuuaagaagacug

SEQ ID NO: 2763610 - RNA, 18 nt, Human
acugacucuuaagaagac

SEQ ID NO: 2763611 - RNA, 17 nt, Human
acugacucuuaagaaga

SEQ ID NO: 2763612 - RNA, 13 nt, Human
acugacuucuaag

SEQ ID NO: 2763613 - RNA, 15 nt, Human
acugacuucuaagua

SEQ ID NO: 2763614 - RNA, 16 nt, Human
acugacuucuaaguaa

SEQ ID NO: 2763615 - RNA, 22 nt, Human
acugacuucuaaguaaaaccac

SEQ ID NO: 2763616 - RNA, 18 nt, Human
acugagagugaacaaauu

SEQ ID NO: 2763617 - RNA, 22 nt, Human
acugagaugugaacacaucagc

SEQ ID NO: 2763618 - RNA, 17 nt, Human
acugagaugugaacaca

SEQ ID NO: 2763619 - RNA, 16 nt, Human
uccuggaaaucagggu

SEQ ID NO: 2763620 - RNA, 21 nt, Human
acucuuaagaagacugcauua

SEQ ID NO: 2763621 - RNA, 19 nt, Human
acuccagugagacagcucu

SEQ ID NO: 2763622 - RNA, 20 nt, Human
ucagcaaaaauauuuuauga

SEQ ID NO: 2763623 - RNA, 19 nt, Human
ucagcaaaaauauuuuaug

SEQ ID NO: 2763624 - RNA, 22 nt, Human
ucagauuuuauuauguaaaucc

SEQ ID NO: 2763625 - RNA, 23 nt, Human
ucagauuuuauuauguaaauccc

SEQ ID NO: 2763626 - RNA, 17 nt, Human
acccgggaggcagaggu

SEQ ID NO: 2763627 - RNA, 15 nt, Human
acccgggaggcagag

SEQ ID NO: 2763628 - RNA, 15 nt, Human
ucaguuuuugugaaa

SEQ ID NO: 2763629 - RNA, 17 nt, Human
ucaguuuuugugaaaag

SEQ ID NO: 2763630 - RNA, 14 nt, Human
acaugggacauuug

SEQ ID NO: 2763631 - RNA, 11 nt, Human
acaugggacau

SEQ ID NO: 2763632 - RNA, 20 nt, Human
acaugggacauuugcucaug

SEQ ID NO: 2763633 - RNA, 15 nt, Human
acaugggacauuugc

SEQ ID NO: 2763634 - RNA, 21 nt, Human
acaugggacauuugcucaugg

SEQ ID NO: 2763635 - RNA, 16 nt, Human
acaugaaguccaagca

SEQ ID NO: 2763636 - RNA, 20 nt, Human
acaugagguacugagaguga

SEQ ID NO: 2763637 - RNA, 16 nt, Human
acaugagguacugaga

SEQ ID NO: 2763638 - RNA, 23 nt, Human
acaugagguacugagagugaaca

SEQ ID NO: 2763639 - RNA, 15 nt, Human
ucaaauugugugaaa

SEQ ID NO: 2763640 - RNA, 18 nt, Human
ucaaauugugugaaaggu

SEQ ID NO: 2763641 - RNA, 23 nt, Human
accaaaaaucucaauauuucaga

SEQ ID NO: 2763642 - RNA, 19 nt, Human
ucaauauuucagauaauca

SEQ ID NO: 2763643 - RNA, 15 nt, Human
ucaauauuucagaua

SEQ ID NO: 2763644 - RNA, 23 nt, Human
ucaaugaaugaaugaauggcuaa

SEQ ID NO: 2763645 - RNA, 22 nt, Human
ucaauaucuuuuuuuuaauaaa

SEQ ID NO: 2763646 - RNA, 16 nt, Human
ucaauucuugccaaau

SEQ ID NO: 2763647 - RNA, 21 nt, Human
ucacaacagauuauuaccuua

SEQ ID NO: 2763648 - RNA, 20 nt, Human
ucaccugucuugccuuuuuc

SEQ ID NO: 2763649 - RNA, 19 nt, Human
ucaccugucuugccuuuuu

SEQ ID NO: 2763650 - RNA, 14 nt, Human
ucaccucauggaau

SEQ ID NO: 2763651 - RNA, 13 nt, Human
ucaccucauggaa

SEQ ID NO: 2763652 - RNA, 12 nt, Human
ucaccucaugga

SEQ ID NO: 2763653 - RNA, 22 nt, Human
accaguauuguacaaaguauua

SEQ ID NO: 2763654 - RNA, 20 nt, Human
accaguauuguacaaaguau

SEQ ID NO: 2763655 - RNA, 15 nt, Human
accaguauuguacaa

SEQ ID NO: 2763656 - RNA, 14 nt, Human
accaguauuguaca

SEQ ID NO: 2763657 - RNA, 23 nt, Human
ucacuugaacccgggaggcagag

SEQ ID NO: 2763658 - RNA, 23 nt, Human
accaguauuguacaaaguauuaa

SEQ ID NO: 2763659 - RNA, 14 nt, Human
accagucugacugu

SEQ ID NO: 2763660 - RNA, 20 nt, Human
uaacgauaaaagacagugaa

SEQ ID NO: 2763661 - RNA, 18 nt, Human
uaagaagugaaaaucuac

SEQ ID NO: 2763662 - RNA, 16 nt, Human
aauagucaaauugugu

SEQ ID NO: 2763663 - RNA, 12 nt, Human
uaacauaaaucu

SEQ ID NO: 2763664 - RNA, 22 nt, Human
aauaucacuugucaauaaaauc

SEQ ID NO: 2763665 - RNA, 20 nt, Human
aauaucacuugucaauaaaa

SEQ ID NO: 2763666 - RNA, 21 nt, Human
aaucaggguuaguauugucca

SEQ ID NO: 2763667 - RNA, 16 nt, Human
aaucaggguuaguauu

SEQ ID NO: 2763668 - RNA, 22 nt, Human
aaucaggguuaguauuguccag

SEQ ID NO: 2763669 - RNA, 24 nt, Human
aauaugccccauucaacaucuagu

SEQ ID NO: 2763670 - RNA, 21 nt, Human
aauaugccccauucaacaucu

SEQ ID NO: 2763671 - RNA, 15 nt, Human
aauauuuauuuuaau

SEQ ID NO: 2763672 - RNA, 19 nt, Human
aauauuuauuuuaauaaug

SEQ ID NO: 2763673 - RNA, 18 nt, Human
aauauuuauuuuaauaau

SEQ ID NO: 2763674 - RNA, 22 nt, Human
aaugaauggcuaagcaaaaugu

SEQ ID NO: 2763675 - RNA, 13 nt, Human
uaaucuuucacag

SEQ ID NO: 2763676 - RNA, 15 nt, Human
aaucaugaauuaguu

SEQ ID NO: 2763677 - RNA, 12 nt, Human
aaucaugaauua

SEQ ID NO: 2763678 - RNA, 16 nt, Human
uaagcuuguauuccuu

SEQ ID NO: 2763679 - RNA, 19 nt, Human
uaaguaaugauaacuggaa

SEQ ID NO: 2763680 - RNA, 22 nt, Human
aaucugugaacuugaaauuuga

SEQ ID NO: 2763681 - RNA, 21 nt, Human
aaucugugaacuugaaauuug

SEQ ID NO: 2763682 - RNA, 20 nt, Human
aaucugugaacuugaaauuu

SEQ ID NO: 2763683 - RNA, 19 nt, Human
aaucuacacuccagugaga

SEQ ID NO: 2763684 - RNA, 19 nt, Human
aaucuuauaauuuaaaaua

SEQ ID NO: 2763685 - RNA, 20 nt, Human
aauuaacauguuaaaccaug

SEQ ID NO: 2763686 - RNA, 19 nt, Human
aauuaacauguuaaaccau

SEQ ID NO: 2763687 - RNA, 18 nt, Human
uaccaccagucugacugu

SEQ ID NO: 2763688 - RNA, 20 nt, Human
uacaucccuuaccugggaaa

SEQ ID NO: 2763689 - RNA, 14 nt, Human
uacacuaagagaga

SEQ ID NO: 2763690 - RNA, 23 nt, Human
aaugccaucaauaaaaaauuaug

SEQ ID NO: 2763691 - RNA, 21 nt, Human
aaugccaucaauaaaaaauua

SEQ ID NO: 2763692 - RNA, 16 nt, Human
aaugccaucaauaaaa

SEQ ID NO: 2763693 - RNA, 16 nt, Human
aaugcuguauuuuaaa

SEQ ID NO: 2763694 - RNA, 18 nt, Human
aauuccaagugauugaaa

SEQ ID NO: 2763695 - RNA, 22 nt, Human
aauuccacuuauaggaauugac

SEQ ID NO: 2763696 - RNA, 14 nt, Human
uacuggauuguacu

SEQ ID NO: 2763697 - RNA, 14 nt, Human
uacuguaagaaaau

SEQ ID NO: 2763698 - RNA, 13 nt, Human
uacuguaagaaaa

SEQ ID NO: 2763699 - RNA, 22 nt, Human
aauugacccacaagaaaugaaa

SEQ ID NO: 2763700 - RNA, 21 nt, Human
aauugacccacaagaaaugaa

SEQ ID NO: 2763701 - RNA, 16 nt, Human
uauuaaaacucauuuu

SEQ ID NO: 2763702 - RNA, 14 nt, Human
uaugugugaaguga

SEQ ID NO: 2763703 - RNA, 12 nt, Human
uaugugugaagu

SEQ ID NO: 2763704 - RNA, 21 nt, Human
uauguuuucaggcuagaugua

SEQ ID NO: 2763705 - RNA, 22 nt, Human
acaggaaccacaagacugcaca

SEQ ID NO: 2763706 - RNA, 17 nt, Human
acaggaaguagaggagg

SEQ ID NO: 2763707 - RNA, 16 nt, Human
uauucaaaguugccua

SEQ ID NO: 2763708 - RNA, 13 nt, Human
uauucaaaguugc

SEQ ID NO: 2763709 - RNA, 12 nt, Human
uauucaaaguug

SEQ ID NO: 2763710 - RNA, 23 nt, Human
uauucaaacagucucaggaaauc

SEQ ID NO: 2763711 - RNA, 15 nt, Human
uauucaaacagucuc

SEQ ID NO: 2763712 - RNA, 14 nt, Human
uauuacuguaagaa

SEQ ID NO: 2763713 - RNA, 13 nt, Human
acaguauaauuaa

SEQ ID NO: 2763714 - RNA, 20 nt, Human
acaguauaauuaacauguua

SEQ ID NO: 2763715 - RNA, 15 nt, Human
acaguauaauuaaca

SEQ ID NO: 2763716 - RNA, 16 nt, Human
acagucaccucaugga

SEQ ID NO: 2763717 - RNA, 18 nt, Human
acagucaccucauggaau

SEQ ID NO: 2763718 - RNA, 17 nt, Human
acagucaccucauggaa

SEQ ID NO: 2763719 - RNA, 21 nt, Human
acagggaggacgcucucuggc

SEQ ID NO: 2763720 - RNA, 20 nt, Human
acagggaggacgcucucugg

SEQ ID NO: 2763721 - RNA, 21 nt, Human
uaugaaauauuauguuaaaac

SEQ ID NO: 2763722 - RNA, 20 nt, Human
uaugauuaaguaaugauaac

SEQ ID NO: 2763723 - RNA, 16 nt, Human
uaugauuaaguaauga

SEQ ID NO: 2763724 - RNA, 21 nt, Human
uaugauuaaguaaugauaacu

SEQ ID NO: 2763725 - RNA, 15 nt, Human
uaugccccauucaac

SEQ ID NO: 2763726 - RNA, 19 nt, Human
uaugccccauucaacaucu

SEQ ID NO: 2763727 - RNA, 15 nt, Human
uaugcugaguuugug

SEQ ID NO: 2763728 - RNA, 16 nt, Human
acagccucuuagaugc

SEQ ID NO: 2763729 - RNA, 19 nt, Human
uauaauuuugugaagcaaa

SEQ ID NO: 2763730 - RNA, 21 nt, Human
uauauuuacuaaaauggacug

SEQ ID NO: 2763731 - RNA, 20 nt, Human
uauauuuacuaaaauggacu

SEQ ID NO: 2763732 - RNA, 19 nt, Human
uauauuuacuaaaauggac

SEQ ID NO: 2763733 - RNA, 15 nt, Human
uauauuguuugcuaa

SEQ ID NO: 2763734 - RNA, 17 nt, Human
acaccauuaugugcgcu

SEQ ID NO: 2763735 - RNA, 21 nt, Human
acaccauuaugugcgcugaua

SEQ ID NO: 2763736 - RNA, 15 nt, Human
acacaucagcuugcc

SEQ ID NO: 2763737 - RNA, 15 nt, Human
acacaugaaguccaa

SEQ ID NO: 2763738 - RNA, 18 nt, Human
acacaugauccugcaauu

SEQ ID NO: 2763739 - RNA, 18 nt, Human
acacucaaaucaagaaac

SEQ ID NO: 2763740 - RNA, 13 nt, Human
acacuaagagaga

SEQ ID NO: 2763741 - RNA, 19 nt, Human
acacucaaaucaagaaacu

SEQ ID NO: 2763742 - RNA, 22 nt, Human
acaaugcuguauuuuaaaagaa

SEQ ID NO: 2763743 - RNA, 18 nt, Human
acaaugcuguauuuuaaa

SEQ ID NO: 2763744 - RNA, 15 nt, Human
acacacucaaaucaa

SEQ ID NO: 2763745 - RNA, 23 nt, Human
uaguguuggagaagaacugaaau

SEQ ID NO: 2763746 - RNA, 17 nt, Human
uaguguuggagaagaac

SEQ ID NO: 2763747 - RNA, 22 nt, Human
uagugaaacucguuaauuugua

SEQ ID NO: 2763748 - RNA, 19 nt, Human
acaaauuuacagagacaga

SEQ ID NO: 2763749 - RNA, 18 nt, Human
acaaauuuacagagacag

SEQ ID NO: 2763750 - RNA, 20 nt, Human
acaagacccaaaaggcagaa

SEQ ID NO: 2763751 - RNA, 15 nt, Human
uagaugcaguucuga

SEQ ID NO: 2763752 - RNA, 22 nt, Human
uagaggagaaacuggaacucuc

SEQ ID NO: 2763753 - RNA, 23 nt, Human
uagagauuuuuuuguuguuuguu

SEQ ID NO: 2763754 - RNA, 19 nt, Human
uagaggagaaacuggaacu

SEQ ID NO: 2763755 - RNA, 18 nt, Human
acaaaaggauaaugaaua

SEQ ID NO: 2763756 - RNA, 22 nt, Human
uagcuagacuggugacugauuc

SEQ ID NO: 2763757 - RNA, 21 nt, Human
uagcuagacuggugacugauu

SEQ ID NO: 2763758 - RNA, 14 nt, Human
acaagacugcacau

SEQ ID NO: 2763759 - RNA, 13 nt, Human
acaagacugcaca

SEQ ID NO: 2763760 - RNA, 23 nt, Human
acaauacaucccuuaccugggaa

SEQ ID NO: 2763761 - RNA, 19 nt, Human
uaggaaauauuuauuuuaa

SEQ ID NO: 2763762 - RNA, 18 nt, Human
uaggaaauauuuauuuua

SEQ ID NO: 2763763 - RNA, 14 nt, Human
uagggagagaagau

SEQ ID NO: 2763764 - RNA, 15 nt, Human
uagggagagaagaua

SEQ ID NO: 2763765 - RNA, 12 nt, Human
gugacuuuggau

SEQ ID NO: 2763766 - RNA, 15 nt, Human
gugacuuuggauaau

SEQ ID NO: 2763767 - RNA, 24 nt, Human
aacucauuuuuguuuucauuaucu

SEQ ID NO: 2763768 - RNA, 21 nt, Human
aacucauuuuuguuuucauua

SEQ ID NO: 2763769 - RNA, 23 nt, Human
gucuugucucagauuuuauuaug

SEQ ID NO: 2763770 - RNA, 14 nt, Human
gucuuaauuaaaag

SEQ ID NO: 2763771 - RNA, 19 nt, Human
gucuuauauauuguagaua

SEQ ID NO: 2763772 - RNA, 11 nt, Human
aagaaacauuu

SEQ ID NO: 2763773 - RNA, 16 nt, Human
aagaaagaaaaucagg

SEQ ID NO: 2763774 - RNA, 13 nt, Human
aagaaagaaaauc

SEQ ID NO: 2763775 - RNA, 14 nt, Human
aagaaagaaaauca

SEQ ID NO: 2763776 - RNA, 21 nt, Human
gugcuacaaaaacacagcaag

SEQ ID NO: 2763777 - RNA, 22 nt, Human
gugcuacaaaaacacagcaagg

SEQ ID NO: 2763778 - RNA, 18 nt, Human
gugcuaguaauuggaaag

SEQ ID NO: 2763779 - RNA, 16 nt, Human
gugauuaccagggacu

SEQ ID NO: 2763780 - RNA, 11 nt, Human
gugauuaccag

SEQ ID NO: 2763781 - RNA, 17 nt, Human
gugauuaccagggacug

SEQ ID NO: 2763782 - RNA, 19 nt, Human
aacuugaaauuugaauuuu

SEQ ID NO: 2763783 - RNA, 18 nt, Human
aacuugaaauuugaauuu

SEQ ID NO: 2763784 - RNA, 13 nt, Human
aacuugaaauuug

SEQ ID NO: 2763785 - RNA, 12 nt, Human
aacuugaaauuu

SEQ ID NO: 2763786 - RNA, 23 nt, Human
aacuuccuuggacucauuuuaaa

SEQ ID NO: 2763787 - RNA, 22 nt, Human
aacuuccuuggacucauuuuaa

SEQ ID NO: 2763788 - RNA, 18 nt, Human
aacuucagcgguuuauau

SEQ ID NO: 2763789 - RNA, 13 nt, Human
aacuucagacaua

SEQ ID NO: 2763790 - RNA, 22 nt, Human
guccaugaagauguagaggaga

SEQ ID NO: 2763791 - RNA, 22 nt, Human
aaauuugaauuuuguguuagag

SEQ ID NO: 2763792 - RNA, 15 nt, Human
aaauuugaauuuugu

SEQ ID NO: 2763793 - RNA, 12 nt, Human
aaauuugaauuu

SEQ ID NO: 2763794 - RNA, 17 nt, Human
aacacaacuauauuguu

SEQ ID NO: 2763795 - RNA, 20 nt, Human
aacacagcaagggugauggg

SEQ ID NO: 2763796 - RNA, 18 nt, Human
aacacagcaagggugaug

SEQ ID NO: 2763797 - RNA, 15 nt, Human
aacauguuaaaccau

SEQ ID NO: 2763798 - RNA, 14 nt, Human
aacauguuaaacca

SEQ ID NO: 2763799 - RNA, 12 nt, Human
aacauauauaac

SEQ ID NO: 2763800 - RNA, 14 nt, Human
aacagucucaggaa

SEQ ID NO: 2763801 - RNA, 14 nt, Human
aacauaaaauacaa

SEQ ID NO: 2763802 - RNA, 15 nt, Human
guccgugcuaaggac

SEQ ID NO: 2763803 - RNA, 17 nt, Human
guccgugcuaaggacuu

SEQ ID NO: 2763804 - RNA, 16 nt, Human
guccgugcuaaggacu

SEQ ID NO: 2763805 - RNA, 13 nt, Human
aacagucucagga

SEQ ID NO: 2763806 - RNA, 15 nt, Human
gucacaggaaguaga

SEQ ID NO: 2763807 - RNA, 13 nt, Human
gucacaggaagua

SEQ ID NO: 2763808 - RNA, 21 nt, Human
gucaauuuuguuauguauauu

SEQ ID NO: 2763809 - RNA, 20 nt, Human
gucacaggaaguagaggagg

SEQ ID NO: 2763810 - RNA, 13 nt, Human
gucaggaaagaga

SEQ ID NO: 2763811 - RNA, 14 nt, Human
gucaggaaagagaa

SEQ ID NO: 2763812 - RNA, 23 nt, Human
guauuguacaaaguauuaagcau

SEQ ID NO: 2763813 - RNA, 22 nt, Human
guauuguacaaaguauuaagca

SEQ ID NO: 2763814 - RNA, 21 nt, Human
guauuguacaaaguauuaagc

SEQ ID NO: 2763815 - RNA, 19 nt, Human
guauuguacaaaguauuaa

SEQ ID NO: 2763816 - RNA, 17 nt, Human
aaauuccaagugauuga

SEQ ID NO: 2763817 - RNA, 17 nt, Human
aaauuguauuacaaauc

SEQ ID NO: 2763818 - RNA, 18 nt, Human
aaaugugccuucauuuuu

SEQ ID NO: 2763819 - RNA, 15 nt, Human
aaaugugcuuuuaaa

SEQ ID NO: 2763820 - RNA, 18 nt, Human
aagcuuauuaaaacucau

SEQ ID NO: 2763821 - RNA, 18 nt, Human
guucccuugaugaagaag

SEQ ID NO: 2763822 - RNA, 21 nt, Human
aagccuuggggcugaugcagu

SEQ ID NO: 2763823 - RNA, 23 nt, Human
aagccauguuuauuacaguauaa

SEQ ID NO: 2763824 - RNA, 22 nt, Human
aagccauguuuauuacaguaua

SEQ ID NO: 2763825 - RNA, 21 nt, Human
aagccauguuuauuacaguau

SEQ ID NO: 2763826 - RNA, 20 nt, Human
aagccauguuuauuacagua

SEQ ID NO: 2763827 - RNA, 17 nt, Human
guuauuauauuuacaaa

SEQ ID NO: 2763828 - RNA, 18 nt, Human
guuagagauuuuuuuguu

SEQ ID NO: 2763829 - RNA, 19 nt, Human
guuauuauauuuacaaaug

SEQ ID NO: 2763830 - RNA, 22 nt, Human
guguaaauacaauuuuguuucu

SEQ ID NO: 2763831 - RNA, 21 nt, Human
guguaaauacaauuuuguuuc

SEQ ID NO: 2763832 - RNA, 18 nt, Human
guguaaauacaauuuugu

SEQ ID NO: 2763833 - RNA, 15 nt, Human
aagauagcagggcau

SEQ ID NO: 2763834 - RNA, 14 nt, Human
aagauagcagggca

SEQ ID NO: 2763835 - RNA, 22 nt, Human
gugucuuaauuaaaagaauauu

SEQ ID NO: 2763836 - RNA, 17 nt, Human
aagcaacccaaauguuc

SEQ ID NO: 2763837 - RNA, 18 nt, Human
aagcauuguaaaugugcu

SEQ ID NO: 2763838 - RNA, 23 nt, Human
aagcauauauuuuuauauuuacu

SEQ ID NO: 2763839 - RNA, 19 nt, Human
aagcacugacuucuaagua

SEQ ID NO: 2763840 - RNA, 20 nt, Human
aagcacugacuucuaaguaa

SEQ ID NO: 2763841 - RNA, 15 nt, Human
aagccauguuuauua

SEQ ID NO: 2763842 - RNA, 17 nt, Human
aagccauguuuauuaca

SEQ ID NO: 2763843 - RNA, 16 nt, Human
aagccauguuuauuac

SEQ ID NO: 2763844 - RNA, 19 nt, Human
aagcauuguaaaugugcuu

SEQ ID NO: 2763845 - RNA, 16 nt, Human
aagcacugacuucuaa

SEQ ID NO: 2763846 - RNA, 17 nt, Human
aagcacugacuucuaag

SEQ ID NO: 2763847 - RNA, 16 nt, Human
aagcacuaaacaaaga

SEQ ID NO: 2763848 - RNA, 14 nt, Human
uaaaaccacagcag

SEQ ID NO: 2763849 - RNA, 13 nt, Human
uaaaaccacagca

SEQ ID NO: 2763850 - RNA, 15 nt, Human
uaaaaccacagcagu

SEQ ID NO: 2763851 - RNA, 23 nt, Human
aagucagaucugccuaaggacuu

SEQ ID NO: 2763852 - RNA, 18 nt, Human
uaaaaaaaaaauugggga

SEQ ID NO: 2763853 - RNA, 14 nt, Human
uaaaaaaaaaauug

SEQ ID NO: 2763854 - RNA, 21 nt, Human
uaaaaaaaaaccugagcccca

SEQ ID NO: 2763855 - RNA, 13 nt, Human
uaaaagaauauuu

SEQ ID NO: 2763856 - RNA, 20 nt, Human
uaaaauaauuuuuauauuug

SEQ ID NO: 2763857 - RNA, 21 nt, Human
uaaaauacacacucaaaucaa

SEQ ID NO: 2763858 - RNA, 22 nt, Human
uaaaauaauuuuuauauuugaa

SEQ ID NO: 2763859 - RNA, 9 nt, Human
uaaaauggu

SEQ ID NO: 2763860 - RNA, 18 nt, Human
guuuggaccaaaaaccag

SEQ ID NO: 2763861 - RNA, 18 nt, Human
aagucagaucugccuaag

SEQ ID NO: 2763862 - RNA, 22 nt, Human
aagucagaucugccuaaggacu

SEQ ID NO: 2763863 - RNA, 21 nt, Human
aagucagaucugccuaaggac

SEQ ID NO: 2763864 - RNA, 19 nt, Human
aaguaaugauaacuggaaa

SEQ ID NO: 2763865 - RNA, 19 nt, Human
aaguauguuagugcaaauu

SEQ ID NO: 2763866 - RNA, 18 nt, Human
aaguauguuagugcaaau

SEQ ID NO: 2763867 - RNA, 12 nt, Human
aaggaaaaguuu

SEQ ID NO: 2763868 - RNA, 12 nt, Human
guuguuuguuua

SEQ ID NO: 2763869 - RNA, 17 nt, Human
guuuauuacaguauaau

SEQ ID NO: 2763870 - RNA, 13 nt, Human
guuuauuacagua

SEQ ID NO: 2763871 - RNA, 18 nt, Human
guuuaauauuaaagccau

SEQ ID NO: 2763872 - RNA, 15 nt, Human
guuuaauauuaaagc

SEQ ID NO: 2763873 - RNA, 14 nt, Human
guuuaauauuaaag

SEQ ID NO: 2763874 - RNA, 13 nt, Human
guuuaauauuaaa

SEQ ID NO: 2763875 - RNA, 14 nt, Human
guuuaugauuccac

SEQ ID NO: 2763876 - RNA, 15 nt, Human
aagggcuguuauaau

SEQ ID NO: 2763877 - RNA, 17 nt, Human
aaggggaauugaggaca

SEQ ID NO: 2763878 - RNA, 17 nt, Human
aagggcuguuauaaucu

SEQ ID NO: 2763879 - RNA, 21 nt, Human
gaaaagacuccaaagaaaugu

SEQ ID NO: 2763880 - RNA, 20 nt, Human
gaaaagacuccaaagaaaug

SEQ ID NO: 2763881 - RNA, 18 nt, Human
gaaaagacuccaaagaaa

SEQ ID NO: 2763882 - RNA, 23 nt, Human
gaacaaauuuacagagacagaaa

SEQ ID NO: 2763883 - RNA, 18 nt, Human
gaacaaauuuacagagac

SEQ ID NO: 2763884 - RNA, 17 nt, Human
gaacaaauuuacagaga

SEQ ID NO: 2763885 - RNA, 18 nt, Human
gaaaugaaagcagggacu

SEQ ID NO: 2763886 - RNA, 23 nt, Human
gaaaucaaauaugcaaagcacug

SEQ ID NO: 2763887 - RNA, 17 nt, Human
gaaaugaaagcagggac

SEQ ID NO: 2763888 - RNA, 21 nt, Human
gaaaucaaauaugcaaagcac

SEQ ID NO: 2763889 - RNA, 16 nt, Human
gaaaucaaauaugcaa

SEQ ID NO: 2763890 - RNA, 20 nt, Human
gaaacuuguguaaauacaau

SEQ ID NO: 2763891 - RNA, 16 nt, Human
gaaacuuguguaaaua

SEQ ID NO: 2763892 - RNA, 14 nt, Human
gaaacuuguguaaa

SEQ ID NO: 2763893 - RNA, 23 nt, Human
gaaacuucagcgguuuauauaag

SEQ ID NO: 2763894 - RNA, 21 nt, Human
cuugucucagauuuuauuaug

SEQ ID NO: 2763895 - RNA, 23 nt, Human
cuuggucucagugucaaugcagc

SEQ ID NO: 2763896 - RNA, 20 nt, Human
cugccuccccuccucugcuu

SEQ ID NO: 2763897 - RNA, 19 nt, Human
cugccuccccuccucugcu

SEQ ID NO: 2763898 - RNA, 14 nt, Human
cugccuccccuccu

SEQ ID NO: 2763899 - RNA, 18 nt, Human
cugccuccccuccucugc

SEQ ID NO: 2763900 - RNA, 17 nt, Human
cugccuccccuccucug

SEQ ID NO: 2763901 - RNA, 23 nt, Human
cuggaaaaguauguuagugcaaa

SEQ ID NO: 2763902 - RNA, 12 nt, Human
cuuaaaaauggu

SEQ ID NO: 2763903 - RNA, 20 nt, Human
cuuaaaaaugguuuaaaugg

SEQ ID NO: 2763904 - RNA, 13 nt, Human
cuuaaaaaugguu

SEQ ID NO: 2763905 - RNA, 22 nt, Human
cuguucacagccagacuggcac

SEQ ID NO: 2763906 - RNA, 12 nt, Human
cuguucacagcc

SEQ ID NO: 2763907 - RNA, 19 nt, Human
cuguucacagccagacugg

SEQ ID NO: 2763908 - RNA, 19 nt, Human
cuguuauaaucuuucacag

SEQ ID NO: 2763909 - RNA, 15 nt, Human
cugugaacuugaaau

SEQ ID NO: 2763910 - RNA, 17 nt, Human
cugugaacuugaaauuu

SEQ ID NO: 2763911 - RNA, 16 nt, Human
cugugaacuugaaauu

SEQ ID NO: 2763912 - RNA, 23 nt, Human
cugugagaugcuagaacucccuu

SEQ ID NO: 2763913 - RNA, 21 nt, Human
cugugagaugcuagaacuccc

SEQ ID NO: 2763914 - RNA, 20 nt, Human
cuguaagaaaauaucacuug

SEQ ID NO: 2763915 - RNA, 17 nt, Human
cuggugacugauucuuc

SEQ ID NO: 2763916 - RNA, 15 nt, Human
cuggugacugauucu

SEQ ID NO: 2763917 - RNA, 14 nt, Human
cuggugacugauuc

SEQ ID NO: 2763918 - RNA, 13 nt, Human
cuggugacugauu

SEQ ID NO: 2763919 - RNA, 23 nt, Human
cuggugcccugcuuucagauacu

SEQ ID NO: 2763920 - RNA, 21 nt, Human
cuggugcccugcuuucagaua

SEQ ID NO: 2763921 - RNA, 19 nt, Human
cuggugcccugcuuucaga

SEQ ID NO: 2763922 - RNA, 16 nt, Human
cuggugcccugcuuuc

SEQ ID NO: 2763923 - RNA, 15 nt, Human
cuggugcccugcuuu

SEQ ID NO: 2763924 - RNA, 14 nt, Human
gacgcucucuggcc

SEQ ID NO: 2763925 - RNA, 18 nt, Human
gacagucaccucauggaa

SEQ ID NO: 2763926 - RNA, 12 nt, Human
gacagcucugca

SEQ ID NO: 2763927 - RNA, 20 nt, Human
gaauuacauuuguauaaaau

SEQ ID NO: 2763928 - RNA, 18 nt, Human
gaauuacauuuguauaaa

SEQ ID NO: 2763929 - RNA, 15 nt, Human
gaauuacauuuguau

SEQ ID NO: 2763930 - RNA, 13 nt, Human
gaauuacauuugu

SEQ ID NO: 2763931 - RNA, 15 nt, Human
gaauuaacacaugau

SEQ ID NO: 2763932 - RNA, 14 nt, Human
gaauuaacacauga

SEQ ID NO: 2763933 - RNA, 22 nt, Human
gaaugauuaugaauuacauuug

SEQ ID NO: 2763934 - RNA, 14 nt, Human
gaaugauuaugaau

SEQ ID NO: 2763935 - RNA, 20 nt, Human
gaaugaauggcuaagcaaaa

SEQ ID NO: 2763936 - RNA, 15 nt, Human
gaaugaauggcuaag

SEQ ID NO: 2763937 - RNA, 14 nt, Human
gaaugaauggcuaa

SEQ ID NO: 2763938 - RNA, 22 nt, Human
gacuuuuuauggcacuaguauu

SEQ ID NO: 2763939 - RNA, 20 nt, Human
gagaugcuagaacucccuuu

SEQ ID NO: 2763940 - RNA, 16 nt, Human
gagaugcuagaacucc

SEQ ID NO: 2763941 - RNA, 21 nt, Human
gagauugugccccugcacucc

SEQ ID NO: 2763942 - RNA, 17 nt, Human
gagcuguucacagccag

SEQ ID NO: 2763943 - RNA, 20 nt, Human
gagcuguucacagccagacu

SEQ ID NO: 2763944 - RNA, 22 nt, Human
gagcuguucacagccagacugg

SEQ ID NO: 2763945 - RNA, 14 nt, Human
gagcagucaggaaa

SEQ ID NO: 2763946 - RNA, 14 nt, Human
gaggagaaacugga

SEQ ID NO: 2763947 - RNA, 12 nt, Human
gaggagaaacug

SEQ ID NO: 2763948 - RNA, 20 nt, Human
gaggacgcucucuggccuuc

SEQ ID NO: 2763949 - RNA, 21 nt, Human
gaggacgcucucuggccuucg

SEQ ID NO: 2763950 - RNA, 12 nt, Human
gaggcuccacuu

SEQ ID NO: 2763951 - RNA, 15 nt, Human
gaggcuccacuuggu

SEQ ID NO: 2763952 - RNA, 18 nt, Human
gaggcugagaugggagaa

SEQ ID NO: 2763953 - RNA, 17 nt, Human
gaggcuccacuuggucu

SEQ ID NO: 2763954 - RNA, 15 nt, Human
gaucugccuaaggac

SEQ ID NO: 2763955 - RNA, 12 nt, Human
gaucugccuaag

SEQ ID NO: 2763956 - RNA, 16 nt, Human
gaucugccuaaggacu

SEQ ID NO: 2763957 - RNA, 18 nt, Human
gauccagcagauuauuca

SEQ ID NO: 2763958 - RNA, 19 nt, Human
gauccagcagauuauucac

SEQ ID NO: 2763959 - RNA, 12 nt, Human
gaugauuucuau

SEQ ID NO: 2763960 - RNA, 23 nt, Human
gaugauuucuaugcugaguuugu

SEQ ID NO: 2763961 - RNA, 13 nt, Human
gaugauuucuaug

SEQ ID NO: 2763962 - RNA, 20 nt, Human
gauacuggauuguacuuugu

SEQ ID NO: 2763963 - RNA, 16 nt, Human
gauacuggauuguacu

SEQ ID NO: 2763964 - RNA, 22 nt, Human
gcaguuguugcccacagcugua

SEQ ID NO: 2763965 - RNA, 13 nt, Human
gcagugaugucac

SEQ ID NO: 2763966 - RNA, 22 nt, Human
gcagaacagugauuaccaggga

SEQ ID NO: 2763967 - RNA, 18 nt, Human
gcagaacagugauuacca

SEQ ID NO: 2763968 - RNA, 13 nt, Human
gcagaacagugau

SEQ ID NO: 2763969 - RNA, 12 nt, Human
gcagaacaguga

SEQ ID NO: 2763970 - RNA, 13 nt, Human
gcugcugaaacaa

SEQ ID NO: 2763971 - RNA, 18 nt, Human
gcuguauuuuaaaagaau

SEQ ID NO: 2763972 - RNA, 20 nt, Human
gcuguauuuuaaaagaauga

SEQ ID NO: 2763973 - RNA, 21 nt, Human
gcuguauuuuaaaagaaugau

SEQ ID NO: 2763974 - RNA, 15 nt, Human
ggaagccugauuaaa

SEQ ID NO: 2763975 - RNA, 21 nt, Human
ggacagucaccucauggaauu

SEQ ID NO: 2763976 - RNA, 18 nt, Human
ggacagucaccucaugga

SEQ ID NO: 2763977 - RNA, 17 nt, Human
ggacagucaccucaugg

SEQ ID NO: 2763978 - RNA, 19 nt, Human
ggaaaucaggguuaguauu

SEQ ID NO: 2763979 - RNA, 13 nt, Human
ggaaacugccagc

SEQ ID NO: 2763980 - RNA, 16 nt, Human
ggaaaaaauaacaaug

SEQ ID NO: 2763981 - RNA, 11 nt, Human
gccauguuuau

SEQ ID NO: 2763982 - RNA, 13 nt, Human
gccauguuuauua

SEQ ID NO: 2763983 - RNA, 22 nt, Human
gccauguuuauuacaguauaau

SEQ ID NO: 2763984 - RNA, 18 nt, Human
gccauguuuauuacagua

SEQ ID NO: 2763985 - RNA, 14 nt, Human
gccauguuuauuac

SEQ ID NO: 2763986 - RNA, 13 nt, Human
gcauuuagaugua

SEQ ID NO: 2763987 - RNA, 19 nt, Human
gcauuuaggccaugggaca

SEQ ID NO: 2763988 - RNA, 12 nt, Human
gcauuuagaugu

SEQ ID NO: 2763989 - RNA, 11 nt, Human
gccccaaaagg

SEQ ID NO: 2763990 - RNA, 12 nt, Human
gccuccauccug

SEQ ID NO: 2763991 - RNA, 14 nt, Human
gccuccauccugag

SEQ ID NO: 2763992 - RNA, 13 nt, Human
gccuccauccuga

SEQ ID NO: 2763993 - RNA, 22 nt, Human
gccucauguccacugguucuuc

SEQ ID NO: 2763994 - RNA, 22 nt, Human
gcguucauggaacgcguugaaa

SEQ ID NO: 2763995 - RNA, 23 nt, Human
gcuaaggacuuguuagaucuagu

SEQ ID NO: 2763996 - RNA, 12 nt, Human
gcguugaaauug

SEQ ID NO: 2763997 - RNA, 12 nt, Human
gcuaaggacuug

SEQ ID NO: 2763998 - RNA, 11 nt, Human
gcuaaggacuu

SEQ ID NO: 2763999 - RNA, 23 nt, Human
gccuucggccuccauccugaggc

SEQ ID NO: 2764000 - RNA, 20 nt, Human
gcuauuucuauauuuucauu

SEQ ID NO: 2764001 - RNA, 19 nt, Human
gcuauuucuauauuuucau

SEQ ID NO: 2764002 - RNA, 18 nt, Human
gcuauuucuauauuuuca

SEQ ID NO: 2764003 - RNA, 16 nt, Human
gcuauuucuauauuuu

SEQ ID NO: 2764004 - RNA, 15 nt, Human
gcuauuucuauauuu

SEQ ID NO: 2764005 - RNA, 13 nt, Human
gcuauuucuauau

SEQ ID NO: 2764006 - RNA, 11 nt, Human
gcuauuucuau

SEQ ID NO: 2764007 - RNA, 16 nt, Human
aaaauggguuuuacug

SEQ ID NO: 2764008 - RNA, 18 nt, Human
aaaaugguuuaaaugguc

SEQ ID NO: 2764009 - RNA, 16 nt, Human
aaaaugguuuaaaugg

SEQ ID NO: 2764010 - RNA, 15 nt, Human
aaaauauuuuaugau

SEQ ID NO: 2764011 - RNA, 18 nt, Human
aaaauauuuuaugaucca

SEQ ID NO: 2764012 - RNA, 17 nt, Human
aaaaucucaauauuuca

SEQ ID NO: 2764013 - RNA, 11 nt, Human
aaaauaauuuu

SEQ ID NO: 2764014 - RNA, 17 nt, Human
aaaauaauuuuuauauu

SEQ ID NO: 2764015 - RNA, 16 nt, Human
aaaauaauuuuuauau

SEQ ID NO: 2764016 - RNA, 14 nt, Human
aaaauacacacuca

SEQ ID NO: 2764017 - RNA, 14 nt, Human
ggucagugcaaaua

SEQ ID NO: 2764018 - RNA, 20 nt, Human
ggguuuuauuguuuaaaauc

SEQ ID NO: 2764019 - RNA, 13 nt, Human
aaauaugcaaagc

SEQ ID NO: 2764020 - RNA, 15 nt, Human
aaauaugcaaagcac

SEQ ID NO: 2764021 - RNA, 16 nt, Human
aaauaugcaaagcacu

SEQ ID NO: 2764022 - RNA, 17 nt, Human
aaauaugcaaagcacug

SEQ ID NO: 2764023 - RNA, 21 nt, Human
aaauaccaugccauuuaaagc

SEQ ID NO: 2764024 - RNA, 18 nt, Human
aaauauaugcuaagucuu

SEQ ID NO: 2764025 - RNA, 22 nt, Human
aaauaucacuugucaauaaaau

SEQ ID NO: 2764026 - RNA, 21 nt, Human
guacaaaguauuaagcauaua

SEQ ID NO: 2764027 - RNA, 20 nt, Human
guacaaaguauuaagcauau

SEQ ID NO: 2764028 - RNA, 16 nt, Human
aaagcagaacagugau

SEQ ID NO: 2764029 - RNA, 19 nt, Human
aaacuuuaugcuaagugaa

SEQ ID NO: 2764030 - RNA, 12 nt, Human
aaacuuuaugcu

SEQ ID NO: 2764031 - RNA, 22 nt, Human
aaagggcuguuauaaucuuuca

SEQ ID NO: 2764032 - RNA, 20 nt, Human
aaagggcuguuauaaucuuu

SEQ ID NO: 2764033 - RNA, 20 nt, Human
aaagggauggcaagaugugg

SEQ ID NO: 2764034 - RNA, 20 nt, Human
gguguuguacucaauuuuaa

SEQ ID NO: 2764035 - RNA, 19 nt, Human
gguguuguacucaauuuua

SEQ ID NO: 2764036 - RNA, 19 nt, Human
gguuuuauuguuuaaaauc

SEQ ID NO: 2764037 - RNA, 13 nt, Human
aaaaauacaaaaa

SEQ ID NO: 2764038 - RNA, 20 nt, Human
ggcuaagcuucacuguaaaa

SEQ ID NO: 2764039 - RNA, 16 nt, Human
ggccuucggccuccau

SEQ ID NO: 2764040 - RNA, 18 nt, Human
ggccuucggccuccaucc

SEQ ID NO: 2764041 - RNA, 16 nt, Human
cacaagacugcacauc

SEQ ID NO: 2764042 - RNA, 12 nt, Human
caauuuaaaaaa

SEQ ID NO: 2764043 - RNA, 23 nt, Human
caaugcuguauuuuaaaagaaug

SEQ ID NO: 2764044 - RNA, 14 nt, Human
caaugcuguauuuu

SEQ ID NO: 2764045 - RNA, 20 nt, Human
caauauuucagauaaucaca

SEQ ID NO: 2764046 - RNA, 12 nt, Human
caauauuucaga

SEQ ID NO: 2764047 - RNA, 13 nt, Human
caauaaaaaauua

SEQ ID NO: 2764048 - RNA, 17 nt, Human
caauaaaaaauuaugac

SEQ ID NO: 2764049 - RNA, 16 nt, Human
caauaaaaaauuauga

SEQ ID NO: 2764050 - RNA, 20 nt, Human
caaguauuagaauaccacag

SEQ ID NO: 2764051 - RNA, 14 nt, Human
caaguauuagaaua

SEQ ID NO: 2764052 - RNA, 23 nt, Human
caccucaaaauaccaugccauuu

SEQ ID NO: 2764053 - RNA, 21 nt, Human
caccuacaugagguacugaga

SEQ ID NO: 2764054 - RNA, 20 nt, Human
cacuuggucugugagaugcu

SEQ ID NO: 2764055 - RNA, 17 nt, Human
cacuuggucugugagau

SEQ ID NO: 2764056 - RNA, 21 nt, Human
caacuaucucauuuccaagca

SEQ ID NO: 2764057 - RNA, 19 nt, Human
caacccaaauguucaucaa

SEQ ID NO: 2764058 - RNA, 15 nt, Human
caaaguauuaagcau

SEQ ID NO: 2764059 - RNA, 14 nt, Human
caaaguauuaagca

SEQ ID NO: 2764060 - RNA, 21 nt, Human
caaaguauuaagcauauauuu

SEQ ID NO: 2764061 - RNA, 19 nt, Human
caaaguauuaagcauauau

SEQ ID NO: 2764062 - RNA, 17 nt, Human
caaaguauuaagcauau

SEQ ID NO: 2764063 - RNA, 16 nt, Human
caaaguauuaagcaua

SEQ ID NO: 2764064 - RNA, 15 nt, Human
caaauccuugaagau

SEQ ID NO: 2764065 - RNA, 17 nt, Human
auucuugccaaauauaa

SEQ ID NO: 2764066 - RNA, 18 nt, Human
auugacuuuuuauggcac

SEQ ID NO: 2764067 - RNA, 18 nt, Human
auucacaagacccaaaag

SEQ ID NO: 2764068 - RNA, 14 nt, Human
auuguaaaugugcu

SEQ ID NO: 2764069 - RNA, 15 nt, Human
auuguaaaugugcuu

SEQ ID NO: 2764070 - RNA, 17 nt, Human
auuguaaaugugcuuuu

SEQ ID NO: 2764071 - RNA, 23 nt, Human
auuguacaaaguauuaagcauau

SEQ ID NO: 2764072 - RNA, 20 nt, Human
auuguacaaaguauuaagca

SEQ ID NO: 2764073 - RNA, 22 nt, Human
auuguacaaaguauuaagcaua

SEQ ID NO: 2764074 - RNA, 19 nt, Human
auuguuuaaaaucauuucu

SEQ ID NO: 2764075 - RNA, 18 nt, Human
auuucuaugaaauauuau

SEQ ID NO: 2764076 - RNA, 15 nt, Human
auuucuaugaaauau

SEQ ID NO: 2764077 - RNA, 20 nt, Human
auuucuaugaaauauuaugu

SEQ ID NO: 2764078 - RNA, 19 nt, Human
caggugccaguuauggcua

SEQ ID NO: 2764079 - RNA, 16 nt, Human
cagucaccucauggaa

SEQ ID NO: 2764080 - RNA, 15 nt, Human
cagucacauuccaag

SEQ ID NO: 2764081 - RNA, 15 nt, Human
cagucaccucaugga

SEQ ID NO: 2764082 - RNA, 19 nt, Human
cagucaccucauggaauug

SEQ ID NO: 2764083 - RNA, 20 nt, Human
cagucugacuguuuccauca

SEQ ID NO: 2764084 - RNA, 13 nt, Human
cagcaguucagag

SEQ ID NO: 2764085 - RNA, 22 nt, Human
cagcaguugaaaagacuccaaa

SEQ ID NO: 2764086 - RNA, 16 nt, Human
cagagguugcagugag

SEQ ID NO: 2764087 - RNA, 17 nt, Human
cagagguugcagugagc

SEQ ID NO: 2764088 - RNA, 12 nt, Human
cagauccuggaa

SEQ ID NO: 2764089 - RNA, 21 nt, Human
cagcuccccucggagaagagc

SEQ ID NO: 2764090 - RNA, 22 nt, Human
cagcuccccucggagaagagcu

SEQ ID NO: 2764091 - RNA, 20 nt, Human
cagcuccccucggagaagag

SEQ ID NO: 2764092 - RNA, 14 nt, Human
caugauguuuagaa

SEQ ID NO: 2764093 - RNA, 23 nt, Human
ccacagcaguugaaaagacucca

SEQ ID NO: 2764094 - RNA, 17 nt, Human
ccacagcaguugaaaag

SEQ ID NO: 2764095 - RNA, 18 nt, Human
ccacagcaguugaaaaga

SEQ ID NO: 2764096 - RNA, 12 nt, Human
ccacagcaguug

SEQ ID NO: 2764097 - RNA, 17 nt, Human
cauuuguauaaaauaau

SEQ ID NO: 2764098 - RNA, 20 nt, Human
cauuuguauaaaauaauuuu

SEQ ID NO: 2764099 - RNA, 19 nt, Human
cauuuguauaaaauaauuu

SEQ ID NO: 2764100 - RNA, 17 nt, Human
ccaaauguucaucaaug

SEQ ID NO: 2764101 - RNA, 22 nt, Human
cccaggaauggagccugcacgg

SEQ ID NO: 2764102 - RNA, 20 nt, Human
cccaggaauggagccugcac

SEQ ID NO: 2764103 - RNA, 19 nt, Human
cccaggaauggagccugca

SEQ ID NO: 2764104 - RNA, 18 nt, Human
cccaggaauggagccugc

SEQ ID NO: 2764105 - RNA, 18 nt, Human
ccccugcacuccagccug

SEQ ID NO: 2764106 - RNA, 15 nt, Human
ccagcagauuauuca

SEQ ID NO: 2764107 - RNA, 22 nt, Human
ccaguauuguacaaaguauuaa

SEQ ID NO: 2764108 - RNA, 20 nt, Human
ccaguauuguacaaaguauu

SEQ ID NO: 2764109 - RNA, 19 nt, Human
ccaguuuuguuuggaccaa

SEQ ID NO: 2764110 - RNA, 16 nt, Human
ccaguuuuguuuggac

SEQ ID NO: 2764111 - RNA, 14 nt, Human
ccauacauuugugu

SEQ ID NO: 2764112 - RNA, 13 nt, Human
ccauacauuugug

SEQ ID NO: 2764113 - RNA, 22 nt, Human
ccauuuaaagcuuauuaaaacu

SEQ ID NO: 2764114 - RNA, 23 nt, Human
ccucauggaauuggagcucgugg

SEQ ID NO: 2764115 - RNA, 15 nt, Human
ccuguaaucacagcu

SEQ ID NO: 2764116 - RNA, 17 nt, Human
ccugucuugccuuuuuc

SEQ ID NO: 2764117 - RNA, 20 nt, Human
ccugucuugccuuuuucauu

SEQ ID NO: 2764118 - RNA, 19 nt, Human
ccugucuugccuuuuucau

SEQ ID NO: 2764119 - RNA, 13 nt, Human
cuagaacucccuu

SEQ ID NO: 2764120 - RNA, 12 nt, Human
cuagaacucccu

SEQ ID NO: 2764121 - RNA, 22 nt, Human
cuaaguaaaaccacagcaguug

SEQ ID NO: 2764122 - RNA, 23 nt, Human
cuaaguaaaaccacagcaguuga

SEQ ID NO: 2764123 - RNA, 20 nt, Human
cuaaguaaaaccacagcagu

SEQ ID NO: 2764124 - RNA, 18 nt, Human
cuacaugagguacugaga

SEQ ID NO: 2764125 - RNA, 20 nt, Human
cuacaugagguacugagagu

SEQ ID NO: 2764126 - RNA, 18 nt, Human
cuacauacuauggaauuu

SEQ ID NO: 2764127 - RNA, 16 nt, Human
cuacaaaaacacagca

SEQ ID NO: 2764128 - RNA, 17 nt, Human
cuacaaaaacacagcaa

SEQ ID NO: 2764129 - RNA, 18 nt, Human
cuacaaaaacacagcaag

SEQ ID NO: 2764130 - RNA, 15 nt, Human
cuacaaaaacacagc

SEQ ID NO: 2764131 - RNA, 23 nt, Human
cucaaaauaccaugccauuuaaa

SEQ ID NO: 2764132 - RNA, 17 nt, Human
cucaaaacugcacuguc

SEQ ID NO: 2764133 - RNA, 16 nt, Human
ccuuuuuuaaauaaau

SEQ ID NO: 2764134 - RNA, 18 nt, Human
cgcaggcccccaggugcc

SEQ ID NO: 2764135 - RNA, 19 nt, Human
cgcugauaagcguucaugg

SEQ ID NO: 2764136 - RNA, 15 nt, Human
cuccacuuggucugu

SEQ ID NO: 2764137 - RNA, 13 nt, Human
cuccacuuggucu

SEQ ID NO: 2764138 - RNA, 22 nt, Human
cuccacuuggucugugagaugc

SEQ ID NO: 2764139 - RNA, 21 nt, Human
cuccacuuggucugugagaug

SEQ ID NO: 2764140 - RNA, 17 nt, Human
cuccacuuggucuguga

SEQ ID NO: 2764141 - RNA, 16 nt, Human
cuccacuuggucugug

SEQ ID NO: 2764142 - RNA, 19 nt, Human
cuccccaugauguuuagaa

SEQ ID NO: 2764143 - RNA, 23 nt, Human
cuccacuuggucugugagaugcu

SEQ ID NO: 2764144 - RNA, 12 nt, Human
cuccugggcagc

SEQ ID NO: 2764145 - RNA, 17 nt, Human
cuccugggcagcugccu

SEQ ID NO: 2764146 - RNA, 16 nt, Human
cuccugggcagcugcc

SEQ ID NO: 2764147 - RNA, 15 nt, Human
cuccugggcagcugc

SEQ ID NO: 2764148 - RNA, 14 nt, Human
cuccugggcagcug

SEQ ID NO: 2764149 - RNA, 19 nt, Human
cuccugggcagcugccucc

SEQ ID NO: 2764150 - RNA, 18 nt, Human
cuccugggcagcugccuc

SEQ ID NO: 2764151 - RNA, 22 nt, Human
cuccugggcagcugccuccccu

SEQ ID NO: 2764152 - RNA, 20 nt, Human
cuccucugcuugccaucccu

SEQ ID NO: 2764153 - RNA, 17 nt, Human
cuccucugcuugccauc

SEQ ID NO: 2764154 - RNA, 16 nt, Human
cuccucugcuugccau

SEQ ID NO: 2764155 - RNA, 15 nt, Human
cuccucugcuugcca

SEQ ID NO: 2764156 - RNA, 21 nt, Human
cuccucugcuugccaucccuc

SEQ ID NO: 2764157 - RNA, 14 nt, Human
cuccucugcuugcc

SEQ ID NO: 2764158 - RNA, 12 nt, Human
cuccucugcuug

SEQ ID NO: 2764159 - RNA, 14 nt, Human
cucguuaauuugua

SEQ ID NO: 2764160 - RNA, 15 nt, Human
cugaaacaacaaaua

SEQ ID NO: 2764161 - RNA, 21 nt, Human
cucuuagaugcaguucugaag

SEQ ID NO: 2764162 - RNA, 22 nt, Human
cucuuagaugcaguucugaaga

SEQ ID NO: 2764163 - RNA, 16 nt, Human
cacaguuuucugagaa

SEQ ID NO: 2764164 - RNA, 17 nt, Human
cacaguuuucugagaaa

SEQ ID NO: 2764165 - RNA, 15 nt, Human
cacaguuuucugaga

SEQ ID NO: 2764166 - RNA, 19 nt, Human
cacaguuuucugagaaaga

SEQ ID NO: 2764167 - RNA, 22 nt, Human
caaaauuuuuucucuaggaaau

SEQ ID NO: 2764168 - RNA, 21 nt, Human
caaaauuuuuucucuaggaaa

SEQ ID NO: 2764169 - RNA, 16 nt, Human
caaaauuuuuucucua

SEQ ID NO: 2764170 - RNA, 19 nt, Human
caaauaugcaaagcacuga

SEQ ID NO: 2764171 - RNA, 21 nt, Human
caaauaugcaaagcacugacu

SEQ ID NO: 2764172 - RNA, 18 nt, Human
caaaaaccaguauuguac

SEQ ID NO: 2764173 - RNA, 20 nt, Human
caaaaaccaguauuguacaa

SEQ ID NO: 2764174 - RNA, 19 nt, Human
caaaaaccaguauuguaca

SEQ ID NO: 2764175 - RNA, 13 nt, Human
caaaaacacagca

SEQ ID NO: 2764176 - RNA, 14 nt, Human
caaaaacacagcaa

SEQ ID NO: 2764177 - RNA, 15 nt, Human
caaaaacacagcaag

SEQ ID NO: 2764178 - RNA, 17 nt, Human
caaaaacacagcaaggg

SEQ ID NO: 2764179 - RNA, 13 nt, Human
auuuuccugaaaa

SEQ ID NO: 2764180 - RNA, 21 nt, Human
caaaaauauuuuaugauccag

SEQ ID NO: 2764181 - RNA, 17 nt, Human
caaaaauauuuuaugau

SEQ ID NO: 2764182 - RNA, 15 nt, Human
caaaaauauuuuaug

SEQ ID NO: 2764183 - RNA, 14 nt, Human
caaaaauauuuuau

SEQ ID NO: 2764184 - RNA, 23 nt, Human
caaaaauauuuuaugauccagca

SEQ ID NO: 2764185 - RNA, 22 nt, Human
caaaaauauuuuaugauccagc

SEQ ID NO: 2764186 - RNA, 19 nt, Human
caaaaaucucaauauuuca

SEQ ID NO: 2764187 - RNA, 23 nt, Human
caaaacuucagacauagaauuaa

SEQ ID NO: 2764188 - RNA, 23 nt, Human
caauacaucccuuaccugggaaa

SEQ ID NO: 2764189 - RNA, 22 nt, Human
caaugugacuuaaugccacuaa

SEQ ID NO: 2764190 - RNA, 21 nt, Human
caagccagauuuuccugaaaa

SEQ ID NO: 2764191 - RNA, 17 nt, Human
caaggcugauuaaacca

SEQ ID NO: 2764192 - RNA, 17 nt, Human
uucugucuucacaacag

SEQ ID NO: 2764193 - RNA, 14 nt, Human
uugaugaagaaguu

SEQ ID NO: 2764194 - RNA, 13 nt, Human
uugaugaagaagu

SEQ ID NO: 2764195 - RNA, 23 nt, Human
uugaugaagaaguugauaugccu

SEQ ID NO: 2764196 - RNA, 21 nt, Human
uugaauuuuguguuagagauu

SEQ ID NO: 2764197 - RNA, 17 nt, Human
uugaauuuuguguuaga

SEQ ID NO: 2764198 - RNA, 22 nt, Human
uugaauuuauuggcuuuucuga

SEQ ID NO: 2764199 - RNA, 18 nt, Human
uugaauuuauuggcuuuu

SEQ ID NO: 2764200 - RNA, 15 nt, Human
uugaauuuauuggcu

SEQ ID NO: 2764201 - RNA, 17 nt, Human
uugacccacaagaaaug

SEQ ID NO: 2764202 - RNA, 14 nt, Human
uugacccacaagaa

SEQ ID NO: 2764203 - RNA, 14 nt, Human
uucuaugaaauauu

SEQ ID NO: 2764204 - RNA, 21 nt, Human
uucuaugaaauauuauguuaa

SEQ ID NO: 2764205 - RNA, 23 nt, Human
uucucuccucuccccaugauguu

SEQ ID NO: 2764206 - RNA, 21 nt, Human
uucugauagaggaagccugau

SEQ ID NO: 2764207 - RNA, 13 nt, Human
uucugauagagga

SEQ ID NO: 2764208 - RNA, 16 nt, Human
uucugagaaagacuau

SEQ ID NO: 2764209 - RNA, 21 nt, Human
uucugagaaagacuauucaaa

SEQ ID NO: 2764210 - RNA, 15 nt, Human
uucuacauacuaugg

SEQ ID NO: 2764211 - RNA, 18 nt, Human
uucggugagcuacaaaug

SEQ ID NO: 2764212 - RNA, 23 nt, Human
uucaguuauuauauuuacaaaug

SEQ ID NO: 2764213 - RNA, 18 nt, Human
uuccagauccuggaaauc

SEQ ID NO: 2764214 - RNA, 20 nt, Human
uuauuuuauuaugaaacuug

SEQ ID NO: 2764215 - RNA, 17 nt, Human
uucaaauccuugaagau

SEQ ID NO: 2764216 - RNA, 19 nt, Human
uuauuuuaauaauguuuca

SEQ ID NO: 2764217 - RNA, 17 nt, Human
uuauuuuaauaauguuu

SEQ ID NO: 2764218 - RNA, 16 nt, Human
uuauuuuauuaugaaa

SEQ ID NO: 2764219 - RNA, 15 nt, Human
uuauuuuauuaugaa

SEQ ID NO: 2764220 - RNA, 14 nt, Human
uuauuuuauuauga

SEQ ID NO: 2764221 - RNA, 20 nt, Human
uuauuuuaauaauguuucaa

SEQ ID NO: 2764222 - RNA, 20 nt, Human
uucagauacuggauuguacu

SEQ ID NO: 2764223 - RNA, 16 nt, Human
uucagauacuggauug

SEQ ID NO: 2764224 - RNA, 14 nt, Human
uucagagcugcccu

SEQ ID NO: 2764225 - RNA, 20 nt, Human
uucagauaaucacaauacau

SEQ ID NO: 2764226 - RNA, 20 nt, Human
uucagagcugcccucuccug

SEQ ID NO: 2764227 - RNA, 19 nt, Human
uucagagcugcccucuccu

SEQ ID NO: 2764228 - RNA, 18 nt, Human
uucagagcugcccucucc

SEQ ID NO: 2764229 - RNA, 17 nt, Human
uucagagcugcccucuc

SEQ ID NO: 2764230 - RNA, 15 nt, Human
uucagagcugcccuc

SEQ ID NO: 2764231 - RNA, 18 nt, Human
uuauaugcuauuucuaua

SEQ ID NO: 2764232 - RNA, 16 nt, Human
uuauaugcuauuucua

SEQ ID NO: 2764233 - RNA, 23 nt, Human
uuauaucugaggaauucuguaua

SEQ ID NO: 2764234 - RNA, 22 nt, Human
uuauaucugaggaauucuguau

SEQ ID NO: 2764235 - RNA, 14 nt, Human
uuauaucugaggaa

SEQ ID NO: 2764236 - RNA, 21 nt, Human
uuauaucugaggaauucugua

SEQ ID NO: 2764237 - RNA, 20 nt, Human
uuauaucugaggaauucugu

SEQ ID NO: 2764238 - RNA, 18 nt, Human
uuauaauuuugugaagca

SEQ ID NO: 2764239 - RNA, 17 nt, Human
uuauaauuuugugaagc

SEQ ID NO: 2764240 - RNA, 16 nt, Human
uuauaauuuugugaag

SEQ ID NO: 2764241 - RNA, 12 nt, Human
uuauaauuuaaa

SEQ ID NO: 2764242 - RNA, 15 nt, Human
uuauaauuuugugaa

SEQ ID NO: 2764243 - RNA, 14 nt, Human
uuauaauuuuguga

SEQ ID NO: 2764244 - RNA, 11 nt, Human
uuauaaucuuu

SEQ ID NO: 2764245 - RNA, 13 nt, Human
uuauauuugaaau

SEQ ID NO: 2764246 - RNA, 12 nt, Human
uuauauuugaaa

SEQ ID NO: 2764247 - RNA, 20 nt, Human
uuauauuuauuacuguaaga

SEQ ID NO: 2764248 - RNA, 16 nt, Human
uuauauuuacaaaugg

SEQ ID NO: 2764249 - RNA, 11 nt, Human
uuaucucaaaa

SEQ ID NO: 2764250 - RNA, 22 nt, Human
uuaugauuaaguaaugauaacu

SEQ ID NO: 2764251 - RNA, 16 nt, Human
uuauuacaguauaauu

SEQ ID NO: 2764252 - RNA, 14 nt, Human
uuauuacaguauaa

SEQ ID NO: 2764253 - RNA, 18 nt, Human
uuauggcuauaggugcua

SEQ ID NO: 2764254 - RNA, 16 nt, Human
uuggguguauugugcg

SEQ ID NO: 2764255 - RNA, 15 nt, Human
uuggguguauugugc

SEQ ID NO: 2764256 - RNA, 13 nt, Human
uuggguguauugu

SEQ ID NO: 2764257 - RNA, 16 nt, Human
uuggucugugagaugc

SEQ ID NO: 2764258 - RNA, 15 nt, Human
uuggucugugagaug

SEQ ID NO: 2764259 - RNA, 15 nt, Human
uuguacucaauuuua

SEQ ID NO: 2764260 - RNA, 14 nt, Human
uuguacucaauuuu

SEQ ID NO: 2764261 - RNA, 19 nt, Human
uugucuacaccauuaugug

SEQ ID NO: 2764262 - RNA, 22 nt, Human
uugucucagauuuuauuaugua

SEQ ID NO: 2764263 - RNA, 13 nt, Human
uugucucagauuu

SEQ ID NO: 2764264 - RNA, 20 nt, Human
uugucucagauuuuauuaug

SEQ ID NO: 2764265 - RNA, 16 nt, Human
uugucucagauuuuau

SEQ ID NO: 2764266 - RNA, 20 nt, Human
uugucuacaccauuaugugc

SEQ ID NO: 2764267 - RNA, 15 nt, Human
uugucuagugaaacu

SEQ ID NO: 2764268 - RNA, 23 nt, Human
uugugcgcuaaacuuuucugaua

SEQ ID NO: 2764269 - RNA, 22 nt, Human
uugugcgcuaaacuuuucugau

SEQ ID NO: 2764270 - RNA, 19 nt, Human
uugugcugggguuaucuga

SEQ ID NO: 2764271 - RNA, 12 nt, Human
uugugccccugc

SEQ ID NO: 2764272 - RNA, 17 nt, Human
uuguuagaucuaguuca

SEQ ID NO: 2764273 - RNA, 18 nt, Human
uuguguuuugcaagccag

SEQ ID NO: 2764274 - RNA, 17 nt, Human
uuguuguuuguuuaguc

SEQ ID NO: 2764275 - RNA, 14 nt, Human
uuguuuaaaaucau

SEQ ID NO: 2764276 - RNA, 21 nt, Human
uuucagauaaucacaauacau

SEQ ID NO: 2764277 - RNA, 21 nt, Human
uuucagauacuggauuguacu

SEQ ID NO: 2764278 - RNA, 13 nt, Human
uuucagauacugg

SEQ ID NO: 2764279 - RNA, 22 nt, Human
uuuauuguuuaaaaucauuucu

SEQ ID NO: 2764280 - RNA, 22 nt, Human
uuuauaauuuugugaagcaaaa

SEQ ID NO: 2764281 - RNA, 14 nt, Human
uuuauuauguaaau

SEQ ID NO: 2764282 - RNA, 17 nt, Human
uuuauuauguaaauccc

SEQ ID NO: 2764283 - RNA, 16 nt, Human
uuuauuauguaaaucc

SEQ ID NO: 2764284 - RNA, 17 nt, Human
uuuauggcacuaguauu

SEQ ID NO: 2764285 - RNA, 21 nt, Human
uuuaauaauuauaugcuauuu

SEQ ID NO: 2764286 - RNA, 18 nt, Human
uuuaauaauuauaugcua

SEQ ID NO: 2764287 - RNA, 14 nt, Human
uuuaauaauuauau

SEQ ID NO: 2764288 - RNA, 13 nt, Human
uuuaccacuugug

SEQ ID NO: 2764289 - RNA, 13 nt, Human
uuuaauaauguuu

SEQ ID NO: 2764290 - RNA, 21 nt, Human
uuguuuggaccaaaaaccagu

SEQ ID NO: 2764291 - RNA, 16 nt, Human
uuuaacaacagcuggu

SEQ ID NO: 2764292 - RNA, 19 nt, Human
uuuaacucuauaauguguu

SEQ ID NO: 2764293 - RNA, 22 nt, Human
uuuuucauuauuuuauuaugaa

SEQ ID NO: 2764294 - RNA, 13 nt, Human
uuuuucauuauuu

SEQ ID NO: 2764295 - RNA, 24 nt, Human
uuuggaccaaaaaccaguauugua

SEQ ID NO: 2764296 - RNA, 19 nt, Human
uuuguauaaaauaauuuuu

SEQ ID NO: 2764297 - RNA, 18 nt, Human
uuuguauaaaauaauuuu

SEQ ID NO: 2764298 - RNA, 17 nt, Human
uuuguauaaaauaauuu

SEQ ID NO: 2764299 - RNA, 22 nt, Human
uuuggaccaaaaaccaguauug

SEQ ID NO: 2764300 - RNA, 21 nt, Human
uuuggaccaaaaaccaguauu

SEQ ID NO: 2764301 - RNA, 18 nt, Human
uuuggaccaaaaaccagu

SEQ ID NO: 2764302 - RNA, 15 nt, Human
uuuccacagaagcuc

SEQ ID NO: 2764303 - RNA, 23 nt, Human
uuuuauaauuuugugaagcaaaa

SEQ ID NO: 2764304 - RNA, 21 nt, Human
uuuuauaauuuugugaagcaa

SEQ ID NO: 2764305 - RNA, 21 nt, Human
uuuuaaaguaacccuacaaaa

SEQ ID NO: 2764306 - RNA, 13 nt, Human
uuuuauauuuacu

SEQ ID NO: 2764307 - RNA, 18 nt, Human
uuuuauauuugaaauauu

SEQ ID NO: 2764308 - RNA, 13 nt, Human
uuuuauauuugaa

SEQ ID NO: 2764309 - RNA, 13 nt, Human
uuuucuuauuuca

SEQ ID NO: 2764310 - RNA, 16 nt, Human
ugcacugucaagauga

SEQ ID NO: 2764311 - RNA, 21 nt, Human
ugccuaaggacuucuuuaauu

SEQ ID NO: 2764312 - RNA, 13 nt, Human
ugccuaaggacuu

SEQ ID NO: 2764313 - RNA, 12 nt, Human
ugccuaaggacu

SEQ ID NO: 2764314 - RNA, 20 nt, Human
ugccuaaggacuucuuuaau

SEQ ID NO: 2764315 - RNA, 16 nt, Human
ugccuaaggacuucuu

SEQ ID NO: 2764316 - RNA, 15 nt, Human
ugccuaaggacuucu

SEQ ID NO: 2764317 - RNA, 14 nt, Human
ugccuaaggacuuc

SEQ ID NO: 2764318 - RNA, 17 nt, Human
ugcccugcuuucagaua

SEQ ID NO: 2764319 - RNA, 16 nt, Human
ugcccugcuuucagau

SEQ ID NO: 2764320 - RNA, 12 nt, Human
ugcccugcuuuc

SEQ ID NO: 2764321 - RNA, 17 nt, Human
ugcaugguuuagaaagc

SEQ ID NO: 2764322 - RNA, 19 nt, Human
ugcagauaaacaguaguga

SEQ ID NO: 2764323 - RNA, 17 nt, Human
ugcagauaaacaguagu

SEQ ID NO: 2764324 - RNA, 21 nt, Human
ugcauuauauuuauuacugua

SEQ ID NO: 2764325 - RNA, 24 nt, Human
ugauaguuguaccgcaaugugacu

SEQ ID NO: 2764326 - RNA, 15 nt, Human
ugagcagucaggaaa

SEQ ID NO: 2764327 - RNA, 17 nt, Human
ugagcagucaggaaaga

SEQ ID NO: 2764328 - RNA, 20 nt, Human
ugagcagucaggaaagagaa

SEQ ID NO: 2764329 - RNA, 20 nt, Human
ugagaugcuagaacucccuu

SEQ ID NO: 2764330 - RNA, 16 nt, Human
ugagaugcuagaacuc

SEQ ID NO: 2764331 - RNA, 14 nt, Human
ugagaugcuagaac

SEQ ID NO: 2764332 - RNA, 16 nt, Human
ugagacagcucugcau

SEQ ID NO: 2764333 - RNA, 14 nt, Human
ugagacagcucugc

SEQ ID NO: 2764334 - RNA, 18 nt, Human
ugagaaagacuauucaaa

SEQ ID NO: 2764335 - RNA, 16 nt, Human
ugagaaagacuauuca

SEQ ID NO: 2764336 - RNA, 17 nt, Human
ugagaaagacuauucaa

SEQ ID NO: 2764337 - RNA, 17 nt, Human
ugacugauucuucagca

SEQ ID NO: 2764338 - RNA, 16 nt, Human
ugacugauucuucagc

SEQ ID NO: 2764339 - RNA, 15 nt, Human
ugacugauucuucag

SEQ ID NO: 2764340 - RNA, 14 nt, Human
ugacugauucuuca

SEQ ID NO: 2764341 - RNA, 13 nt, Human
ugacugauucuuc

SEQ ID NO: 2764342 - RNA, 12 nt, Human
ugacucuuaaga

SEQ ID NO: 2764343 - RNA, 23 nt, Human
ugggguuaucugaagucagaucu

SEQ ID NO: 2764344 - RNA, 23 nt, Human
ugggcagcugccuccccuccucu

SEQ ID NO: 2764345 - RNA, 22 nt, Human
ugggcagcugccuccccuccuc

SEQ ID NO: 2764346 - RNA, 20 nt, Human
ugggcagcugccuccccucc

SEQ ID NO: 2764347 - RNA, 12 nt, Human
ugggauaaaugc

SEQ ID NO: 2764348 - RNA, 14 nt, Human
ugggauaaaugcca

SEQ ID NO: 2764349 - RNA, 13 nt, Human
ugggauaaaugcc

SEQ ID NO: 2764350 - RNA, 14 nt, Human
ugggacagggagga

SEQ ID NO: 2764351 - RNA, 23 nt, Human
uggccuucggccuccauccugag

SEQ ID NO: 2764352 - RNA, 20 nt, Human
uggccuucggccuccauccu

SEQ ID NO: 2764353 - RNA, 22 nt, Human
uggccuucggccuccauccuga

SEQ ID NO: 2764354 - RNA, 15 nt, Human
uggaccaaaaaccag

SEQ ID NO: 2764355 - RNA, 16 nt, Human
uggaacgcguugaaau

SEQ ID NO: 2764356 - RNA, 15 nt, Human
uggaacgcguugaaa

SEQ ID NO: 2764357 - RNA, 14 nt, Human
uggaacgcguugaa

SEQ ID NO: 2764358 - RNA, 22 nt, Human
ugcuucuguuuuauaauuuugu

SEQ ID NO: 2764359 - RNA, 17 nt, Human
ugcuucuguuuuauaau

SEQ ID NO: 2764360 - RNA, 19 nt, Human
uguauuuuaaaagaaugau

SEQ ID NO: 2764361 - RNA, 18 nt, Human
uguauuuuaaaagaauga

SEQ ID NO: 2764362 - RNA, 23 nt, Human
uguauagauuagagaguguugaa

SEQ ID NO: 2764363 - RNA, 23 nt, Human
uguauagaaccucuuugucuaca

SEQ ID NO: 2764364 - RNA, 21 nt, Human
uguauagauuagaauucugua

SEQ ID NO: 2764365 - RNA, 15 nt, Human
uguauagauuagaau

SEQ ID NO: 2764366 - RNA, 14 nt, Human
uguauaaaauaauu

SEQ ID NO: 2764367 - RNA, 13 nt, Human
uguauaaaauaau

SEQ ID NO: 2764368 - RNA, 21 nt, Human
uguaguguuggagaagaacug

SEQ ID NO: 2764369 - RNA, 20 nt, Human
uguaguguuggagaagaacu

SEQ ID NO: 2764370 - RNA, 19 nt, Human
uguaguguuggagaagaac

SEQ ID NO: 2764371 - RNA, 22 nt, Human
ugucucagauuuuauuauguaa

SEQ ID NO: 2764372 - RNA, 20 nt, Human
ugucucagauuuuauuaugu

SEQ ID NO: 2764373 - RNA, 16 nt, Human
ugucucagauuuuauu

SEQ ID NO: 2764374 - RNA, 17 nt, Human
ugucuacaccauuaugu

SEQ ID NO: 2764375 - RNA, 17 nt, Human
ugucuacacuaagagag

SEQ ID NO: 2764376 - RNA, 18 nt, Human
ugucuacaccauuaugug

SEQ ID NO: 2764377 - RNA, 22 nt, Human
ugucuacacuaagagagaauga

SEQ ID NO: 2764378 - RNA, 23 nt, Human
uggugacuuuggauaauaaggaa

SEQ ID NO: 2764379 - RNA, 19 nt, Human
uggugacuuuggauaauaa

SEQ ID NO: 2764380 - RNA, 18 nt, Human
uggugacuuuggauaaua

SEQ ID NO: 2764381 - RNA, 16 nt, Human
uggugacuuuggauaa

SEQ ID NO: 2764382 - RNA, 15 nt, Human
uggugacuuuggaua

SEQ ID NO: 2764383 - RNA, 14 nt, Human
uggguagacacaca

SEQ ID NO: 2764384 - RNA, 20 nt, Human
ugguucccuugaugaagaag

SEQ ID NO: 2764385 - RNA, 17 nt, Human
ugguucccuugaugaag

SEQ ID NO: 2764386 - RNA, 16 nt, Human
ugguucccuugaugaa

SEQ ID NO: 2764387 - RNA, 15 nt, Human
uguacaaaguauuaa

SEQ ID NO: 2764388 - RNA, 20 nt, Human
uguacaaaguauuaagcaua

SEQ ID NO: 2764389 - RNA, 19 nt, Human
uguacaaaguauuaagcau

SEQ ID NO: 2764390 - RNA, 18 nt, Human
uguacaaaguauuaagca

SEQ ID NO: 2764391 - RNA, 17 nt, Human
uguacaaaguauuaagc

SEQ ID NO: 2764392 - RNA, 21 nt, Human
uguacaaaguauuaagcauau

SEQ ID NO: 2764393 - RNA, 12 nt, Human
uguaaaauggug

SEQ ID NO: 2764394 - RNA, 11 nt, Human
uguaaaauggu

SEQ ID NO: 2764395 - RNA, 10 nt, Human
ucuggccuuc

SEQ ID NO: 2764396 - RNA, 18 nt, Human
ucuggccuucggccucca

SEQ ID NO: 2764397 - RNA, 17 nt, Human
ucuggccuucggccucc

SEQ ID NO: 2764398 - RNA, 22 nt, Human
ucuucagcaaaaauauuuuaug

SEQ ID NO: 2764399 - RNA, 21 nt, Human
ucuucagcaaaaauauuuuau

SEQ ID NO: 2764400 - RNA, 23 nt, Human
ucuucagcaaaaauauuuuauga

SEQ ID NO: 2764401 - RNA, 22 nt, Human
ucuuaaaguugaauuuauuggc

SEQ ID NO: 2764402 - RNA, 21 nt, Human
ucuuaaaguugaauuuauugg

SEQ ID NO: 2764403 - RNA, 20 nt, Human
ucuuaaaguugaauuuauug

SEQ ID NO: 2764404 - RNA, 19 nt, Human
ucuuaaaguugaauuuauu

SEQ ID NO: 2764405 - RNA, 16 nt, Human
ucuuaaaguugaauuu

SEQ ID NO: 2764406 - RNA, 12 nt, Human
ucuuaagaagac

SEQ ID NO: 2764407 - RNA, 18 nt, Human
ucuuaagaagacugcauu

SEQ ID NO: 2764408 - RNA, 12 nt, Human
ucuuaaaguuga

SEQ ID NO: 2764409 - RNA, 14 nt, Human
ucuuaaaguugaau

SEQ ID NO: 2764410 - RNA, 13 nt, Human
ucuuaaaguugaa

SEQ ID NO: 2764411 - RNA, 15 nt, Human
ucugucuucacaaca

SEQ ID NO: 2764412 - RNA, 14 nt, Human
ucugaggaauucug

SEQ ID NO: 2764413 - RNA, 18 nt, Human
ucugaggaauucuguaua

SEQ ID NO: 2764414 - RNA, 17 nt, Human
ucugaggaauucuguau

SEQ ID NO: 2764415 - RNA, 16 nt, Human
ucugaggaauucugua

SEQ ID NO: 2764416 - RNA, 15 nt, Human
ucugaggaauucugu

SEQ ID NO: 2764417 - RNA, 19 nt, Human
ucugcaucagcugcugaaa

SEQ ID NO: 2764418 - RNA, 21 nt, Human
ucugcaucagcugcugaaaca

SEQ ID NO: 2764419 - RNA, 14 nt, Human
ucugcaucagcugc

SEQ ID NO: 2764420 - RNA, 19 nt, Human
ucucuaggaaauauuuauu

SEQ ID NO: 2764421 - RNA, 23 nt, Human
ucucuggccuucggccuccaucc

SEQ ID NO: 2764422 - RNA, 16 nt, Human
ucccugcaauaaaaug

SEQ ID NO: 2764423 - RNA, 16 nt, Human
ucccuugaugaagaag

SEQ ID NO: 2764424 - RNA, 15 nt, Human
ucccuugaugaagaa

SEQ ID NO: 2764425 - RNA, 22 nt, Human
uccucugcuugccaucccuccc

SEQ ID NO: 2764426 - RNA, 21 nt, Human
uccucugcuugccaucccucc

SEQ ID NO: 2764427 - RNA, 19 nt, Human
uccucugcuugccaucccu

SEQ ID NO: 2764428 - RNA, 20 nt, Human
uccucugcuugccaucccuc

SEQ ID NO: 2764429 - RNA, 22 nt, Human
ucuagugagcagucaggaaaga

SEQ ID NO: 2764430 - RNA, 19 nt, Human
ucuagugagcagucaggaa

SEQ ID NO: 2764431 - RNA, 20 nt, Human
ucuaugcugaguuugugcug

SEQ ID NO: 2764432 - RNA, 16 nt, Human
ucuaugcugaguuugu

SEQ ID NO: 2764433 - RNA, 15 nt, Human
ucucaacuccaaacu

SEQ ID NO: 2764434 - RNA, 19 nt, Human
ucuauauuuucauucuccu

SEQ ID NO: 2764435 - RNA, 17 nt, Human
ucuaugaaauauuaugu

SEQ ID NO: 2764436 - RNA, 14 nt, Human
ucuaugaaauauua

SEQ ID NO: 2764437 - RNA, 13 nt, Human
ucuaugaaauauu

SEQ ID NO: 2764438 - RNA, 22 nt, Human
ucgugggacagucaccucaugg

SEQ ID NO: 2764439 - RNA, 21 nt, Human
ucguggaacaguuaccucugc

SEQ ID NO: 2764440 - RNA, 17 nt, Human
ucggccuccauccugag

SEQ ID NO: 2764441 - RNA, 18 nt, Human
ucggccuccauccugagg

SEQ ID NO: 2764442 - RNA, 13 nt, Human
ucguuaauuugua

SEQ ID NO: 2764443 - RNA, 17 nt, Human
uccuggcaauagucaaa

SEQ ID NO: 2764444 - RNA, 20 nt, Human
uccugccuaagugcagcccc

SEQ ID NO: 2764445 - RNA, 16 nt, Human
uccuuggacucauuuu

SEQ ID NO: 2764446 - RNA, 14 nt, Human
ucaccaaggcugau

SEQ ID NO: 2764447 - RNA, 16 nt, Human
ucacagucacauucca

SEQ ID NO: 2764448 - RNA, 13 nt, Human
ucacaagacccaa

SEQ ID NO: 2764449 - RNA, 18 nt, Human
ucacaagacccaaaaggc

SEQ ID NO: 2764450 - RNA, 17 nt, Human
ucacaagacccaaaagg

SEQ ID NO: 2764451 - RNA, 13 nt, Human
ucaaugcagcccc

SEQ ID NO: 2764452 - RNA, 21 nt, Human
ucaauaaaauccauacauuug

SEQ ID NO: 2764453 - RNA, 14 nt, Human
ucaauaaaauccau

SEQ ID NO: 2764454 - RNA, 15 nt, Human
uauuuucauucuccu

SEQ ID NO: 2764455 - RNA, 13 nt, Human
uauuuuauuauga

SEQ ID NO: 2764456 - RNA, 23 nt, Human
uauuuuauuaugaaacuugugua

SEQ ID NO: 2764457 - RNA, 18 nt, Human
uauuuuauuaugaaacuu

SEQ ID NO: 2764458 - RNA, 14 nt, Human
ucaaauaugcaaag

SEQ ID NO: 2764459 - RNA, 20 nt, Human
ucaaaucaagaaacuuaagg

SEQ ID NO: 2764460 - RNA, 14 nt, Human
ucaaauugugugaa

SEQ ID NO: 2764461 - RNA, 13 nt, Human
uauuacaguauaa

SEQ ID NO: 2764462 - RNA, 12 nt, Human
uauuacaguaua

SEQ ID NO: 2764463 - RNA, 16 nt, Human
uauuauucccauucua

SEQ ID NO: 2764464 - RNA, 12 nt, Human
uauguaaauccc

SEQ ID NO: 2764465 - RNA, 23 nt, Human
uauguaaaucccauuauucaaag

SEQ ID NO: 2764466 - RNA, 21 nt, Human
uauguaaaucccauuauucaa

SEQ ID NO: 2764467 - RNA, 20 nt, Human
uauguaaaucccauuauuca

SEQ ID NO: 2764468 - RNA, 19 nt, Human
uauguaaaucccauuauuc

SEQ ID NO: 2764469 - RNA, 15 nt, Human
uauguaaaucccauu

SEQ ID NO: 2764470 - RNA, 17 nt, Human
uauguacuucaugcugu

SEQ ID NO: 2764471 - RNA, 13 nt, Human
uauguacuucaug

SEQ ID NO: 2764472 - RNA, 16 nt, Human
ucauuuccaagcaagu

SEQ ID NO: 2764473 - RNA, 13 nt, Human
ucauuuccaagca

SEQ ID NO: 2764474 - RNA, 22 nt, Human
ucauuauuuuauuaugaaacuu

SEQ ID NO: 2764475 - RNA, 23 nt, Human
ucauuauuuuauuaugaaacuug

SEQ ID NO: 2764476 - RNA, 19 nt, Human
ucauuaucucaaaacugca

SEQ ID NO: 2764477 - RNA, 20 nt, Human
ucauuaucucaaaacugcac

SEQ ID NO: 2764478 - RNA, 13 nt, Human
ucauuaucucaaa

SEQ ID NO: 2764479 - RNA, 18 nt, Human
ucauaccuaucaucuuaa

SEQ ID NO: 2764480 - RNA, 14 nt, Human
uccacuuggucugu

SEQ ID NO: 2764481 - RNA, 16 nt, Human
uccacuuggucuguga

SEQ ID NO: 2764482 - RNA, 15 nt, Human
uccacuuggucugug

SEQ ID NO: 2764483 - RNA, 17 nt, Human
uccaccucccugcaaua

SEQ ID NO: 2764484 - RNA, 16 nt, Human
uccaccucccugcaau

SEQ ID NO: 2764485 - RNA, 15 nt, Human
uccaccucccugcaa

SEQ ID NO: 2764486 - RNA, 14 nt, Human
uccaccucccugca

SEQ ID NO: 2764487 - RNA, 13 nt, Human
uccaccucccugc

SEQ ID NO: 2764488 - RNA, 12 nt, Human
uccaccucccug

SEQ ID NO: 2764489 - RNA, 19 nt, Human
uccacagaagcuccaggua

SEQ ID NO: 2764490 - RNA, 17 nt, Human
ucaggcuagauguaugu

SEQ ID NO: 2764491 - RNA, 13 nt, Human
ucaggcuagaugu

SEQ ID NO: 2764492 - RNA, 18 nt, Human
ucagcuccccucggagaa

SEQ ID NO: 2764493 - RNA, 17 nt, Human
ucagcuccccucggaga

SEQ ID NO: 2764494 - RNA, 22 nt, Human
ucagagcugcccucuccugggc

SEQ ID NO: 2764495 - RNA, 21 nt, Human
ucagagcugcccucuccuggg

SEQ ID NO: 2764496 - RNA, 20 nt, Human
ucagagcugcccucuccugg

SEQ ID NO: 2764497 - RNA, 19 nt, Human
ucagagcugcccucuccug

SEQ ID NO: 2764498 - RNA, 18 nt, Human
ucagagcugcccucuccu

SEQ ID NO: 2764499 - RNA, 16 nt, Human
ggaggacgcucucugg

SEQ ID NO: 2764500 - RNA, 19 nt, Human
ggaggggagcaugggaagu

SEQ ID NO: 2764501 - RNA, 19 nt, Human
ggacgcucucuggccuucg

SEQ ID NO: 2764502 - RNA, 16 nt, Human
ggacgcucucuggccu

SEQ ID NO: 2764503 - RNA, 15 nt, Human
ggacgcucucuggcc

SEQ ID NO: 2764504 - RNA, 23 nt, Human
ggagaagagcuguucacagccag

SEQ ID NO: 2764505 - RNA, 14 nt, Human
ggagaagaacugaa

SEQ ID NO: 2764506 - RNA, 11 nt, Human
ggagaagaacu

SEQ ID NO: 2764507 - RNA, 15 nt, Human
ggagaagagcuguuc

SEQ ID NO: 2764508 - RNA, 20 nt, Human
ggacauuugcucauggaauu

SEQ ID NO: 2764509 - RNA, 17 nt, Human
ggacauuugcucaugga

SEQ ID NO: 2764510 - RNA, 16 nt, Human
ggacauuugcucaugg

SEQ ID NO: 2764511 - RNA, 13 nt, Human
ggcagcugccucc

SEQ ID NO: 2764512 - RNA, 12 nt, Human
ggcagcugccuc

SEQ ID NO: 2764513 - RNA, 11 nt, Human
ggcagcugccu

SEQ ID NO: 2764514 - RNA, 17 nt, Human
ggauuagggagagaaga

SEQ ID NO: 2764515 - RNA, 21 nt, Human
ggcagagguugcagugagccg

SEQ ID NO: 2764516 - RNA, 13 nt, Human
ggauucuuaaagu

SEQ ID NO: 2764517 - RNA, 20 nt, Human
gggaggacgcucucuggccu

SEQ ID NO: 2764518 - RNA, 17 nt, Human
gggaggacgcucucugg

SEQ ID NO: 2764519 - RNA, 15 nt, Human
ggcuuuguauagaac

SEQ ID NO: 2764520 - RNA, 21 nt, Human
gggacugaggggaggggagca

SEQ ID NO: 2764521 - RNA, 23 nt, Human
ggcuauaggugcuacaaaaacac

SEQ ID NO: 2764522 - RNA, 20 nt, Human
ggcuaguaucaaaagaaaga

SEQ ID NO: 2764523 - RNA, 16 nt, Human
ggcuccacuuggucug

SEQ ID NO: 2764524 - RNA, 18 nt, Human
gccuuggggcugaugcag

SEQ ID NO: 2764525 - RNA, 20 nt, Human
gccugagcgacagugagacu

SEQ ID NO: 2764526 - RNA, 17 nt, Human
gccugagcgacagugag

SEQ ID NO: 2764527 - RNA, 14 nt, Human
gcuagauguaugua

SEQ ID NO: 2764528 - RNA, 13 nt, Human
gcuagauguaugu

SEQ ID NO: 2764529 - RNA, 21 nt, Human
gcuauaggugcuacaaaaaca

SEQ ID NO: 2764530 - RNA, 19 nt, Human
gcuauaggugcuacaaaaa

SEQ ID NO: 2764531 - RNA, 20 nt, Human
gcuccauuuuuagugaaaua

SEQ ID NO: 2764532 - RNA, 21 nt, Human
gcuggaaaaguauguuagugc

SEQ ID NO: 2764533 - RNA, 23 nt, Human
gcuggaaaaguauguuagugcaa

SEQ ID NO: 2764534 - RNA, 23 nt, Human
gcugcccucuccugggcagcugc

SEQ ID NO: 2764535 - RNA, 22 nt, Human
gcugcccucuccugggcagcug

SEQ ID NO: 2764536 - RNA, 20 nt, Human
gcugcccucuccugggcagc

SEQ ID NO: 2764537 - RNA, 18 nt, Human
gcugcccucuccugggca

SEQ ID NO: 2764538 - RNA, 17 nt, Human
gcugcccucuccugggc

SEQ ID NO: 2764539 - RNA, 16 nt, Human
gcugcccucuccuggg

SEQ ID NO: 2764540 - RNA, 15 nt, Human
gcugcccucuccugg

SEQ ID NO: 2764541 - RNA, 14 nt, Human
gcugcccucuccug

SEQ ID NO: 2764542 - RNA, 13 nt, Human
gcugcccucuccu

SEQ ID NO: 2764543 - RNA, 21 nt, Human
gcugauuaaaccaaggcuaga

SEQ ID NO: 2764544 - RNA, 12 nt, Human
gcugcccucucc

SEQ ID NO: 2764545 - RNA, 21 nt, Human
gcugguguaugugugaaguga

SEQ ID NO: 2764546 - RNA, 23 nt, Human
gcuggucccagccagcaguucag

SEQ ID NO: 2764547 - RNA, 19 nt, Human
gcuucuguuuuauaauuuu

SEQ ID NO: 2764548 - RNA, 14 nt, Human
gcuuuguauagaac

SEQ ID NO: 2764549 - RNA, 13 nt, Human
gcuuuguauagaa

SEQ ID NO: 2764550 - RNA, 12 nt, Human
gcuuuguauaga

SEQ ID NO: 2764551 - RNA, 18 nt, Human
gcuugcccuguuaaaaga

SEQ ID NO: 2764552 - RNA, 23 nt, Human
gcaguucagagcugcccucuccu

SEQ ID NO: 2764553 - RNA, 22 nt, Human
gcaguucagagcugcccucucc

SEQ ID NO: 2764554 - RNA, 20 nt, Human
gcaguucagagcugcccucu

SEQ ID NO: 2764555 - RNA, 19 nt, Human
gcaguucagagcugcccuc

SEQ ID NO: 2764556 - RNA, 21 nt, Human
gcaguugaaaagacuccaaag

SEQ ID NO: 2764557 - RNA, 16 nt, Human
gcaguugaaaagacuc

SEQ ID NO: 2764558 - RNA, 19 nt, Human
gcaguugaaaagacuccaa

SEQ ID NO: 2764559 - RNA, 15 nt, Human
gcaguugaaaagacu

SEQ ID NO: 2764560 - RNA, 20 nt, Human
gcaucuagcaugucgucaaa

SEQ ID NO: 2764561 - RNA, 22 nt, Human
gcaucagcugcugaaacaacaa

SEQ ID NO: 2764562 - RNA, 23 nt, Human
gcaucagcugcugaaacaacaaa

SEQ ID NO: 2764563 - RNA, 19 nt, Human
gcacuguggguagacacac

SEQ ID NO: 2764564 - RNA, 15 nt, Human
gcacagccucuuaga

SEQ ID NO: 2764565 - RNA, 13 nt, Human
gcagauuauucac

SEQ ID NO: 2764566 - RNA, 23 nt, Human
gcagagguugcagugagccgaga

SEQ ID NO: 2764567 - RNA, 18 nt, Human
gcagagguugcagugagc

SEQ ID NO: 2764568 - RNA, 19 nt, Human
gccagacuggcacaguuuu

SEQ ID NO: 2764569 - RNA, 15 nt, Human
gccagacuggcacag

SEQ ID NO: 2764570 - RNA, 18 nt, Human
gccagacuggcacaguuu

SEQ ID NO: 2764571 - RNA, 23 nt, Human
gccaugggacagggaggacgcuc

SEQ ID NO: 2764572 - RNA, 22 nt, Human
gccaugggacagggaggacgcu

SEQ ID NO: 2764573 - RNA, 14 nt, Human
gauagaggaagccu

SEQ ID NO: 2764574 - RNA, 22 nt, Human
gauagaggaagccugauuaaag

SEQ ID NO: 2764575 - RNA, 21 nt, Human
gauagaggaagccugauuaaa

SEQ ID NO: 2764576 - RNA, 15 nt, Human
gauagaggaagccug

SEQ ID NO: 2764577 - RNA, 13 nt, Human
gauagcagggcau

SEQ ID NO: 2764578 - RNA, 19 nt, Human
gagugucuuaauuaaaaga

SEQ ID NO: 2764579 - RNA, 22 nt, Human
gagugaacaaauuuacagagac

SEQ ID NO: 2764580 - RNA, 19 nt, Human
gagugaacaaauuuacaga

SEQ ID NO: 2764581 - RNA, 21 nt, Human
gaguugaaaaucuuauaauuu

SEQ ID NO: 2764582 - RNA, 13 nt, Human
gauugugccccug

SEQ ID NO: 2764583 - RNA, 18 nt, Human
gaugcaguucugaagaag

SEQ ID NO: 2764584 - RNA, 16 nt, Human
gaugggaaagcauugu

SEQ ID NO: 2764585 - RNA, 13 nt, Human
gaucuuuaaaaua

SEQ ID NO: 2764586 - RNA, 14 nt, Human
gaucuuuaaaauac

SEQ ID NO: 2764587 - RNA, 14 nt, Human
gaggaauucuguau

SEQ ID NO: 2764588 - RNA, 17 nt, Human
gaggaauucuguauaga

SEQ ID NO: 2764589 - RNA, 16 nt, Human
gaggaauucuguauag

SEQ ID NO: 2764590 - RNA, 19 nt, Human
gaggcagagguugcaguga

SEQ ID NO: 2764591 - RNA, 21 nt, Human
gagcaggcuacugucagcucc

SEQ ID NO: 2764592 - RNA, 23 nt, Human
gagccugcacggugaauggcuuu

SEQ ID NO: 2764593 - RNA, 22 nt, Human
gagccugcacggugaauggcuu

SEQ ID NO: 2764594 - RNA, 17 nt, Human
gagccugcacggugaau

SEQ ID NO: 2764595 - RNA, 12 nt, Human
gagcuacaaaug

SEQ ID NO: 2764596 - RNA, 13 nt, Human
gagcuacaaaugc

SEQ ID NO: 2764597 - RNA, 14 nt, Human
gagcuacaaaugca

SEQ ID NO: 2764598 - RNA, 16 nt, Human
gagcugcccucuccug

SEQ ID NO: 2764599 - RNA, 15 nt, Human
gagcugcccucuccu

SEQ ID NO: 2764600 - RNA, 14 nt, Human
gagcugcccucucc

SEQ ID NO: 2764601 - RNA, 19 nt, Human
cucuuaagaagacugcauu

SEQ ID NO: 2764602 - RNA, 13 nt, Human
cucuuaagaagac

SEQ ID NO: 2764603 - RNA, 21 nt, Human
cucuggccuucggccuccauc

SEQ ID NO: 2764604 - RNA, 22 nt, Human
cucuggccuucggccuccaucc

SEQ ID NO: 2764605 - RNA, 16 nt, Human
cugagcaggauuuuaa

SEQ ID NO: 2764606 - RNA, 16 nt, Human
cugagaugugaacaca

SEQ ID NO: 2764607 - RNA, 20 nt, Human
cugagaugugaacacaucag

SEQ ID NO: 2764608 - RNA, 19 nt, Human
cugagaaagacuauucaaa

SEQ ID NO: 2764609 - RNA, 20 nt, Human
cugagaaagacuauucaaac

SEQ ID NO: 2764610 - RNA, 21 nt, Human
cugagaugugaacacaucagc

SEQ ID NO: 2764611 - RNA, 12 nt, Human
cugagaaagacu

SEQ ID NO: 2764612 - RNA, 13 nt, Human
cugagaaagacua

SEQ ID NO: 2764613 - RNA, 15 nt, Human
cugagaaagacuauu

SEQ ID NO: 2764614 - RNA, 18 nt, Human
cugagaaagacuauucaa

SEQ ID NO: 2764615 - RNA, 23 nt, Human
cucuuugucuacaccauuaugug

SEQ ID NO: 2764616 - RNA, 20 nt, Human
cugcaucagcugcugaaaca

SEQ ID NO: 2764617 - RNA, 18 nt, Human
cugaguuugugcuggugu

SEQ ID NO: 2764618 - RNA, 13 nt, Human
cugaguuugugcu

SEQ ID NO: 2764619 - RNA, 15 nt, Human
cugaggcuccacuug

SEQ ID NO: 2764620 - RNA, 21 nt, Human
cugaggcuccacuuggucugu

SEQ ID NO: 2764621 - RNA, 23 nt, Human
cugauuugacauagucuggcugu

SEQ ID NO: 2764622 - RNA, 22 nt, Human
cugauuugacauagucuggcug

SEQ ID NO: 2764623 - RNA, 21 nt, Human
cugauuugacauagucuggcu

SEQ ID NO: 2764624 - RNA, 22 nt, Human
cugcaauaaaauggguuuuacu

SEQ ID NO: 2764625 - RNA, 15 nt, Human
cugcaauaaaauggg

SEQ ID NO: 2764626 - RNA, 14 nt, Human
cuauuucuauauuu

SEQ ID NO: 2764627 - RNA, 18 nt, Human
cuauuucuauauuuucau

SEQ ID NO: 2764628 - RNA, 16 nt, Human
cuauuucuauauuuuc

SEQ ID NO: 2764629 - RNA, 13 nt, Human
cucacauuuauau

SEQ ID NO: 2764630 - RNA, 13 nt, Human
cucagauuuuauu

SEQ ID NO: 2764631 - RNA, 18 nt, Human
cucagauuuuauuaugua

SEQ ID NO: 2764632 - RNA, 17 nt, Human
cucagauuuuauuaugu

SEQ ID NO: 2764633 - RNA, 15 nt, Human
cucagauuuuauuau

SEQ ID NO: 2764634 - RNA, 16 nt, Human
cuaguaauuggaaagg

SEQ ID NO: 2764635 - RNA, 20 nt, Human
cuagugaaacucguuaauuu

SEQ ID NO: 2764636 - RNA, 18 nt, Human
cuagugaaagaggcagcu

SEQ ID NO: 2764637 - RNA, 19 nt, Human
cuagugaaagaggcagcuu

SEQ ID NO: 2764638 - RNA, 21 nt, Human
cuagugagcagucaggaaaga

SEQ ID NO: 2764639 - RNA, 18 nt, Human
cuaugcugaguuugugcu

SEQ ID NO: 2764640 - RNA, 23 nt, Human
cuauucaaacagucucaggaaau

SEQ ID NO: 2764641 - RNA, 18 nt, Human
cuauucaaacagucucag

SEQ ID NO: 2764642 - RNA, 16 nt, Human
cuauucaaacagucuc

SEQ ID NO: 2764643 - RNA, 15 nt, Human
cuauauuuucauucu

SEQ ID NO: 2764644 - RNA, 19 nt, Human
cuauauuuucauucuccua

SEQ ID NO: 2764645 - RNA, 21 nt, Human
cuauaggugcuacaaaaacac

SEQ ID NO: 2764646 - RNA, 22 nt, Human
cuauaggugcuacaaaaacaca

SEQ ID NO: 2764647 - RNA, 20 nt, Human
cuauaggugcuacaaaaaca

SEQ ID NO: 2764648 - RNA, 15 nt, Human
cuauaggugcuacaa

SEQ ID NO: 2764649 - RNA, 21 nt, Human
cucauuuccaagcaaguauua

SEQ ID NO: 2764650 - RNA, 13 nt, Human
cuccaaagaaaug

SEQ ID NO: 2764651 - RNA, 12 nt, Human
cuccaaagaaau

SEQ ID NO: 2764652 - RNA, 21 nt, Human
cuccaaacugacucuuaagaa

SEQ ID NO: 2764653 - RNA, 23 nt, Human
cuccaccucccugcaauaaaaug

SEQ ID NO: 2764654 - RNA, 11 nt, Human
cuccauccuga

SEQ ID NO: 2764655 - RNA, 12 nt, Human
cuccauccugag

SEQ ID NO: 2764656 - RNA, 13 nt, Human
cuccccuccucug

SEQ ID NO: 2764657 - RNA, 11 nt, Human
cuccccuccuc

SEQ ID NO: 2764658 - RNA, 13 nt, Human
cuccauccugagg

SEQ ID NO: 2764659 - RNA, 20 nt, Human
cuccccuccucugcuugcca

SEQ ID NO: 2764660 - RNA, 21 nt, Human
cuugccaucccucccuccacc

SEQ ID NO: 2764661 - RNA, 22 nt, Human
cuugccaucccucccuccaccu

SEQ ID NO: 2764662 - RNA, 19 nt, Human
cuuguaaaggaauuuaaaa

SEQ ID NO: 2764663 - RNA, 13 nt, Human
cuuuccacagaag

SEQ ID NO: 2764664 - RNA, 21 nt, Human
cuuuauuuucuauaauuuaaa

SEQ ID NO: 2764665 - RNA, 18 nt, Human
cuuuaaagggauggcaag

SEQ ID NO: 2764666 - RNA, 11 nt, Human
cuuuucugaua

SEQ ID NO: 2764667 - RNA, 22 nt, Human
gaaaacaauaacgauaaaagac

SEQ ID NO: 2764668 - RNA, 12 nt, Human
gaaaauaucacu

SEQ ID NO: 2764669 - RNA, 19 nt, Human
gaaaaucuuauaauuuaaa

SEQ ID NO: 2764670 - RNA, 19 nt, Human
gaaaauaacgauaaaagac

SEQ ID NO: 2764671 - RNA, 20 nt, Human
gaaaaucuuauaauuuaaaa

SEQ ID NO: 2764672 - RNA, 20 nt, Human
gaauaauccuaaacauauga

SEQ ID NO: 2764673 - RNA, 14 nt, Human
gaauacuuuauaaa

SEQ ID NO: 2764674 - RNA, 21 nt, Human
gaagccuuggggcugaugcag

SEQ ID NO: 2764675 - RNA, 18 nt, Human
gaaauuguauuacaaauc

SEQ ID NO: 2764676 - RNA, 16 nt, Human
gaaauauuauguuaaa

SEQ ID NO: 2764677 - RNA, 13 nt, Human
gaaauauuauguu

SEQ ID NO: 2764678 - RNA, 21 nt, Human
gaagaagcaccaaucaugaau

SEQ ID NO: 2764679 - RNA, 21 nt, Human
gaacuuguaaaggaauuuaaa

SEQ ID NO: 2764680 - RNA, 22 nt, Human
gaacuuccagauccuggaaauc

SEQ ID NO: 2764681 - RNA, 14 nt, Human
gaacucccuuucaa

SEQ ID NO: 2764682 - RNA, 15 nt, Human
gaacgcguugaaauu

SEQ ID NO: 2764683 - RNA, 16 nt, Human
gaacgcguugaaauug

SEQ ID NO: 2764684 - RNA, 22 nt, Human
gaacuagaguuuagcuggaaaa

SEQ ID NO: 2764685 - RNA, 21 nt, Human
gaacuagaguuuagcuggaaa

SEQ ID NO: 2764686 - RNA, 15 nt, Human
cugguguauguguga

SEQ ID NO: 2764687 - RNA, 14 nt, Human
cugggguuaucuga

SEQ ID NO: 2764688 - RNA, 23 nt, Human
cugucuugccuuuuucauuauuu

SEQ ID NO: 2764689 - RNA, 21 nt, Human
cugucuugccuuuuucauuau

SEQ ID NO: 2764690 - RNA, 18 nt, Human
cugucuucacaacagauu

SEQ ID NO: 2764691 - RNA, 12 nt, Human
cuguggugacuu

SEQ ID NO: 2764692 - RNA, 14 nt, Human
cuguggugacuuug

SEQ ID NO: 2764693 - RNA, 13 nt, Human
cuguggugacuuu

SEQ ID NO: 2764694 - RNA, 23 nt, Human
cuguggugacuuuggauaauaag

SEQ ID NO: 2764695 - RNA, 20 nt, Human
cuguggugacuuuggauaau

SEQ ID NO: 2764696 - RNA, 18 nt, Human
cuguggugacuuuggaua

SEQ ID NO: 2764697 - RNA, 17 nt, Human
cuguggugacuuuggau

SEQ ID NO: 2764698 - RNA, 15 nt, Human
cuguggugacuuugg

SEQ ID NO: 2764699 - RNA, 19 nt, Human
cuguuaaaagaugaaaaua

SEQ ID NO: 2764700 - RNA, 15 nt, Human
cuguuaaaagaugaa

SEQ ID NO: 2764701 - RNA, 16 nt, Human
cuguuaaaagaugaaa

SEQ ID NO: 2764702 - RNA, 23 nt, Human
cuuaagaagacugcauuauauuu

SEQ ID NO: 2764703 - RNA, 21 nt, Human
cuuaagaagacugcauuauau

SEQ ID NO: 2764704 - RNA, 19 nt, Human
cuuaauuaaaagaauauuu

SEQ ID NO: 2764705 - RNA, 20 nt, Human
cuuaauuaaaagaauauuuu

SEQ ID NO: 2764706 - RNA, 16 nt, Human
cuuaauuaaaagaaua

SEQ ID NO: 2764707 - RNA, 17 nt, Human
cuuaauuaaaagaauau

SEQ ID NO: 2764708 - RNA, 14 nt, Human
cuguuuuauaauuu

SEQ ID NO: 2764709 - RNA, 15 nt, Human
cuguuuuauaauuuu

SEQ ID NO: 2764710 - RNA, 17 nt, Human
cuucagcaaaaauauuu

SEQ ID NO: 2764711 - RNA, 12 nt, Human
cuucacaacaga

SEQ ID NO: 2764712 - RNA, 14 nt, Human
cuucacaacagauu

SEQ ID NO: 2764713 - RNA, 17 nt, Human
cuucaaauccuugaaga

SEQ ID NO: 2764714 - RNA, 23 nt, Human
cuucagcaaaaauauuuuaugau

SEQ ID NO: 2764715 - RNA, 20 nt, Human
cuucagcaaaaauauuuuau

SEQ ID NO: 2764716 - RNA, 15 nt, Human
cuucagccugaaaga

SEQ ID NO: 2764717 - RNA, 20 nt, Human
cuuccuuggacucauuuuaa

SEQ ID NO: 2764718 - RNA, 20 nt, Human
cuucggccuccauccugagg

SEQ ID NO: 2764719 - RNA, 19 nt, Human
cuucggccuccauccugag

SEQ ID NO: 2764720 - RNA, 17 nt, Human
ccucccuccaccucccu

SEQ ID NO: 2764721 - RNA, 20 nt, Human
ccucccuccaccucccugca

SEQ ID NO: 2764722 - RNA, 18 nt, Human
ccuccucugcuugccauc

SEQ ID NO: 2764723 - RNA, 13 nt, Human
ccuccucugcuug

SEQ ID NO: 2764724 - RNA, 16 nt, Human
ccuccucugcuugcca

SEQ ID NO: 2764725 - RNA, 14 nt, Human
ccuccauccugagg

SEQ ID NO: 2764726 - RNA, 22 nt, Human
ccuccaccucccugcaauaaaa

SEQ ID NO: 2764727 - RNA, 17 nt, Human
ccuccaccucccugcaa

SEQ ID NO: 2764728 - RNA, 15 nt, Human
ccuccaccucccugc

SEQ ID NO: 2764729 - RNA, 14 nt, Human
ccuccaccucccug

SEQ ID NO: 2764730 - RNA, 13 nt, Human
ccuccaccucccu

SEQ ID NO: 2764731 - RNA, 17 nt, Human
ccuaaauccauuuggaa

SEQ ID NO: 2764732 - RNA, 12 nt, Human
ccuaaauccauu

SEQ ID NO: 2764733 - RNA, 14 nt, Human
ccgugcuaaggacu

SEQ ID NO: 2764734 - RNA, 16 nt, Human
ccgugcuaaggacuug

SEQ ID NO: 2764735 - RNA, 15 nt, Human
ccgugcuaaggacuu

SEQ ID NO: 2764736 - RNA, 16 nt, Human
ccgggcguggugguga

SEQ ID NO: 2764737 - RNA, 13 nt, Human
cccacaagaaaug

SEQ ID NO: 2764738 - RNA, 20 nt, Human
cccacaagaaaugaaagcag

SEQ ID NO: 2764739 - RNA, 17 nt, Human
cccugcuuucagauacu

SEQ ID NO: 2764740 - RNA, 14 nt, Human
cccugcuuucagau

SEQ ID NO: 2764741 - RNA, 12 nt, Human
cccuccaccucc

SEQ ID NO: 2764742 - RNA, 14 nt, Human
cccuccaccucccu

SEQ ID NO: 2764743 - RNA, 17 nt, Human
cccuccaccucccugca

SEQ ID NO: 2764744 - RNA, 15 nt, Human
cccuccaccucccug

SEQ ID NO: 2764745 - RNA, 19 nt, Human
cccuccaccucccugcaau

SEQ ID NO: 2764746 - RNA, 15 nt, Human
cccucuccugggcag

SEQ ID NO: 2764747 - RNA, 14 nt, Human
cccucuccugggca

SEQ ID NO: 2764748 - RNA, 13 nt, Human
cccucuccugggc

SEQ ID NO: 2764749 - RNA, 12 nt, Human
cccucuccuggg

SEQ ID NO: 2764750 - RNA, 11 nt, Human
cccucuccugg

SEQ ID NO: 2764751 - RNA, 15 nt, Human
cccgugggguuccuc

SEQ ID NO: 2764752 - RNA, 22 nt, Human
ccugggcagcugccuccccucc

SEQ ID NO: 2764753 - RNA, 23 nt, Human
ccuggaaaucaggguuaguauug

SEQ ID NO: 2764754 - RNA, 11 nt, Human
ccugagcccca

SEQ ID NO: 2764755 - RNA, 20 nt, Human
ccugcacggugaauggcuuu

SEQ ID NO: 2764756 - RNA, 21 nt, Human
ccugcacggugaauggcuuug

SEQ ID NO: 2764757 - RNA, 16 nt, Human
ccugcaauaaaauggg

SEQ ID NO: 2764758 - RNA, 18 nt, Human
cgagcaggcuacugucag

SEQ ID NO: 2764759 - RNA, 20 nt, Human
ccuguuaaaagaugaaaaua

SEQ ID NO: 2764760 - RNA, 21 nt, Human
ccuguuaaaagaugaaaauau

SEQ ID NO: 2764761 - RNA, 20 nt, Human
ccuucggccuccauccugag

SEQ ID NO: 2764762 - RNA, 19 nt, Human
ccuucggccuccauccuga

SEQ ID NO: 2764763 - RNA, 14 nt, Human
ccuucggccuccau

SEQ ID NO: 2764764 - RNA, 20 nt, Human
ccuugaaaacuuuaugcuaa

SEQ ID NO: 2764765 - RNA, 14 nt, Human
ccuugaugaagaag

SEQ ID NO: 2764766 - RNA, 19 nt, Human
ccuuggggcugaugcaguu

SEQ ID NO: 2764767 - RNA, 14 nt, Human
ccaguuauggcuau

SEQ ID NO: 2764768 - RNA, 21 nt, Human
ccaguuauggcuauaggugcu

SEQ ID NO: 2764769 - RNA, 22 nt, Human
ccauuauucaaaguugccuaaa

SEQ ID NO: 2764770 - RNA, 17 nt, Human
ccauuauucaaaguugc

SEQ ID NO: 2764771 - RNA, 14 nt, Human
ccauuauucaaagu

SEQ ID NO: 2764772 - RNA, 20 nt, Human
ccauguuuauuacaguauaa

SEQ ID NO: 2764773 - RNA, 13 nt, Human
ccauguuuauuac

SEQ ID NO: 2764774 - RNA, 13 nt, Human
ccaugggauaaau

SEQ ID NO: 2764775 - RNA, 19 nt, Human
ccaugggacagggaggacg

SEQ ID NO: 2764776 - RNA, 16 nt, Human
ccaugggacagggagg

SEQ ID NO: 2764777 - RNA, 22 nt, Human
ccagccagcaguucagagcugc

SEQ ID NO: 2764778 - RNA, 23 nt, Human
ccagcaguucagagcugcccucu

SEQ ID NO: 2764779 - RNA, 22 nt, Human
ccagcaguucagagcugcccuc

SEQ ID NO: 2764780 - RNA, 21 nt, Human
ccagcaguucagagcugcccu

SEQ ID NO: 2764781 - RNA, 20 nt, Human
ccagcaguucagagcugccc

SEQ ID NO: 2764782 - RNA, 19 nt, Human
ccagcaguucagagcugcc

SEQ ID NO: 2764783 - RNA, 18 nt, Human
ccagcaguucagagcugc

SEQ ID NO: 2764784 - RNA, 13 nt, Human
ccagcaguucaga

SEQ ID NO: 2764785 - RNA, 14 nt, Human
ccaccucccugcaa

SEQ ID NO: 2764786 - RNA, 19 nt, Human
caugagguacugagaguga

SEQ ID NO: 2764787 - RNA, 16 nt, Human
caugagguacugagag

SEQ ID NO: 2764788 - RNA, 18 nt, Human
caugaagauguagaggag

SEQ ID NO: 2764789 - RNA, 19 nt, Human
caugaagauguagaggaga

SEQ ID NO: 2764790 - RNA, 21 nt, Human
cauauauuuuuauauuuacua

SEQ ID NO: 2764791 - RNA, 20 nt, Human
cauauauuuuuauauuuacu

SEQ ID NO: 2764792 - RNA, 18 nt, Human
cauauauuuuuauauuua

SEQ ID NO: 2764793 - RNA, 15 nt, Human
cauauauaacaaugc

SEQ ID NO: 2764794 - RNA, 19 nt, Human
cauagucuggcuguaccca

SEQ ID NO: 2764795 - RNA, 13 nt, Human
cauauauaacaau

SEQ ID NO: 2764796 - RNA, 23 nt, Human
caucccucccuccaccucccugc

SEQ ID NO: 2764797 - RNA, 22 nt, Human
caucccucccuccaccucccug

SEQ ID NO: 2764798 - RNA, 18 nt, Human
caucccuuaccugggaaa

SEQ ID NO: 2764799 - RNA, 20 nt, Human
caucccucccuccaccuccc

SEQ ID NO: 2764800 - RNA, 17 nt, Human
caugggauaaaugccau

SEQ ID NO: 2764801 - RNA, 16 nt, Human
caugggauaaaugcca

SEQ ID NO: 2764802 - RNA, 23 nt, Human
caugggauaaaugccaucaauaa

SEQ ID NO: 2764803 - RNA, 18 nt, Human
caugggauaaaugccauc

SEQ ID NO: 2764804 - RNA, 23 nt, Human
caugggacagggaggacgcucuc

SEQ ID NO: 2764805 - RNA, 20 nt, Human
cauggaauuggagcucgugg

SEQ ID NO: 2764806 - RNA, 23 nt, Human
cauguuuauuacaguauaauuaa

SEQ ID NO: 2764807 - RNA, 22 nt, Human
cauguuaaaccaugggauaaau

SEQ ID NO: 2764808 - RNA, 13 nt, Human
cauguuaaaccau

SEQ ID NO: 2764809 - RNA, 20 nt, Human
caugugcuaguaauuggaaa

SEQ ID NO: 2764810 - RNA, 11 nt, Human
cauuuggaaau

SEQ ID NO: 2764811 - RNA, 18 nt, Human
cauuuggaaaucuuuaaa

SEQ ID NO: 2764812 - RNA, 17 nt, Human
cauuuggaaaucuuuaa

SEQ ID NO: 2764813 - RNA, 21 nt, Human
cauuguaaaugugcuuuuaaa

SEQ ID NO: 2764814 - RNA, 13 nt, Human
cauucuggaauaa

SEQ ID NO: 2764815 - RNA, 17 nt, Human
cauuauuuuauuaugaa

SEQ ID NO: 2764816 - RNA, 16 nt, Human
cauuauucaaaguugc

SEQ ID NO: 2764817 - RNA, 22 nt, Human
cauuauucaaaguugccuaaau

SEQ ID NO: 2764818 - RNA, 21 nt, Human
cauuauucaaaguugccuaaa

SEQ ID NO: 2764819 - RNA, 18 nt, Human
cauuauucaaaguugccu

SEQ ID NO: 2764820 - RNA, 22 nt, Human
cauuccaacuaucucauuucca

SEQ ID NO: 2764821 - RNA, 13 nt, Human
caguccaugaaga

SEQ ID NO: 2764822 - RNA, 18 nt, Human
cagucaggaaagagaacu

SEQ ID NO: 2764823 - RNA, 15 nt, Human
cagucaggaaagaga

SEQ ID NO: 2764824 - RNA, 22 nt, Human
cagucaggaaagagaacuucca

SEQ ID NO: 2764825 - RNA, 21 nt, Human
caguauaauuaacauguuaaa

SEQ ID NO: 2764826 - RNA, 17 nt, Human
caguauaauuaacaugu

SEQ ID NO: 2764827 - RNA, 15 nt, Human
caguauaauuaacau

SEQ ID NO: 2764828 - RNA, 14 nt, Human
caguauaauuaaca

SEQ ID NO: 2764829 - RNA, 12 nt, Human
caguagugauag

SEQ ID NO: 2764830 - RNA, 12 nt, Human
caguauggcagc

SEQ ID NO: 2764831 - RNA, 15 nt, Human
cagugagacagcucu

SEQ ID NO: 2764832 - RNA, 16 nt, Human
cagugaaagaaaauaa

SEQ ID NO: 2764833 - RNA, 20 nt, Human
cagugaaagaaaauaacaau

SEQ ID NO: 2764834 - RNA, 17 nt, Human
cagugauuaccagggac

SEQ ID NO: 2764835 - RNA, 18 nt, Human
cagugauuaccagggacu

SEQ ID NO: 2764836 - RNA, 23 nt, Human
caggaugguucccuugaugaaga

SEQ ID NO: 2764837 - RNA, 21 nt, Human
caggaugguucccuugaugaa

SEQ ID NO: 2764838 - RNA, 16 nt, Human
caggauuuuaaucuuu

SEQ ID NO: 2764839 - RNA, 20 nt, Human
caggcccccaggugccaguu

SEQ ID NO: 2764840 - RNA, 14 nt, Human
caggcccccaggug

SEQ ID NO: 2764841 - RNA, 19 nt, Human
caggcccccaggugccagu

SEQ ID NO: 2764842 - RNA, 18 nt, Human
cagggacaggauaagagg

SEQ ID NO: 2764843 - RNA, 17 nt, Human
cagggcauggcugggaa

SEQ ID NO: 2764844 - RNA, 16 nt, Human
caggggacaggauggu

SEQ ID NO: 2764845 - RNA, 11 nt, Human
caggggacagg

SEQ ID NO: 2764846 - RNA, 14 nt, Human
caggcuacugucag

SEQ ID NO: 2764847 - RNA, 19 nt, Human
caggcuagauguauguacu

SEQ ID NO: 2764848 - RNA, 13 nt, Human
caggcuagaugua

SEQ ID NO: 2764849 - RNA, 14 nt, Human
cagcagauuauuca

SEQ ID NO: 2764850 - RNA, 19 nt, Human
cagcagauuauucacugau

SEQ ID NO: 2764851 - RNA, 15 nt, Human
cagcagauuauucac

SEQ ID NO: 2764852 - RNA, 19 nt, Human
cagcaagggugaugggaaa

SEQ ID NO: 2764853 - RNA, 22 nt, Human
cagcaagggugaugggaaagca

SEQ ID NO: 2764854 - RNA, 23 nt, Human
cagcaagggugaugggaaagcau

SEQ ID NO: 2764855 - RNA, 23 nt, Human
cagauuauucacugauuugacau

SEQ ID NO: 2764856 - RNA, 18 nt, Human
cagauuauucacugauuu

SEQ ID NO: 2764857 - RNA, 12 nt, Human
cagauuauucac

SEQ ID NO: 2764858 - RNA, 22 nt, Human
cagauuuuauuauguaaauccc

SEQ ID NO: 2764859 - RNA, 21 nt, Human
cagauuuuauuauguaaaucc

SEQ ID NO: 2764860 - RNA, 20 nt, Human
cagauuuuauuauguaaauc

SEQ ID NO: 2764861 - RNA, 18 nt, Human
cagauuuuauuauguaaa

SEQ ID NO: 2764862 - RNA, 16 nt, Human
cagauuuuauuaugua

SEQ ID NO: 2764863 - RNA, 15 nt, Human
cagauuuuauuaugu

SEQ ID NO: 2764864 - RNA, 13 nt, Human
cagauuuuauuau

SEQ ID NO: 2764865 - RNA, 17 nt, Human
cagcaaaaauauuuuau

SEQ ID NO: 2764866 - RNA, 15 nt, Human
cagauuuuccugaaa

SEQ ID NO: 2764867 - RNA, 14 nt, Human
cagauuuuccugaa

SEQ ID NO: 2764868 - RNA, 23 nt, Human
cagcaacgcaggcccccaggugc

SEQ ID NO: 2764869 - RNA, 19 nt, Human
cagcuacuugggaggcuga

SEQ ID NO: 2764870 - RNA, 16 nt, Human
cagccuaguugaucag

SEQ ID NO: 2764871 - RNA, 20 nt, Human
cagcucugcauacucauuag

SEQ ID NO: 2764872 - RNA, 20 nt, Human
cagcugcugaaacaacaaau

SEQ ID NO: 2764873 - RNA, 21 nt, Human
cagcugcugaaacaacaaaua

SEQ ID NO: 2764874 - RNA, 18 nt, Human
cagcuggugcccugcuuu

SEQ ID NO: 2764875 - RNA, 23 nt, Human
cagcuggugcccugcuuucagau

SEQ ID NO: 2764876 - RNA, 21 nt, Human
cagcuggugcccugcuuucag

SEQ ID NO: 2764877 - RNA, 20 nt, Human
cagcuggugcccugcuuuca

SEQ ID NO: 2764878 - RNA, 19 nt, Human
cagcuggugcccugcuuuc

SEQ ID NO: 2764879 - RNA, 18 nt, Human
cagcuguaugauucccag

SEQ ID NO: 2764880 - RNA, 18 nt, Human
caggaaccacaagacugc

SEQ ID NO: 2764881 - RNA, 23 nt, Human
cagcuuuccucaaaacuucagac

SEQ ID NO: 2764882 - RNA, 18 nt, Human
cagcuugaaacugagaug

SEQ ID NO: 2764883 - RNA, 23 nt, Human
caggaauggagccugcacgguga

SEQ ID NO: 2764884 - RNA, 17 nt, Human
caggaauggagccugca

SEQ ID NO: 2764885 - RNA, 15 nt, Human
caggaaguagaggag

SEQ ID NO: 2764886 - RNA, 16 nt, Human
caggaaguagaggagg

SEQ ID NO: 2764887 - RNA, 14 nt, Human
cagaucugccuaag

SEQ ID NO: 2764888 - RNA, 17 nt, Human
cagaucugccuaaggac

SEQ ID NO: 2764889 - RNA, 16 nt, Human
cagaucugccuaagga

SEQ ID NO: 2764890 - RNA, 23 nt, Human
cagaucugccuaaggacuucuuu

SEQ ID NO: 2764891 - RNA, 21 nt, Human
cagaucugccuaaggacuucu

SEQ ID NO: 2764892 - RNA, 20 nt, Human
cagaucugccuaaggacuuc

SEQ ID NO: 2764893 - RNA, 19 nt, Human
cagaucugccuaaggacuu

SEQ ID NO: 2764894 - RNA, 13 nt, Human
cagauccuggaaa

SEQ ID NO: 2764895 - RNA, 14 nt, Human
cagauccuggaaau

SEQ ID NO: 2764896 - RNA, 23 nt, Human
cagauaaauaguuuaugauucca

SEQ ID NO: 2764897 - RNA, 14 nt, Human
cagauaaacaguag

SEQ ID NO: 2764898 - RNA, 14 nt, Human
cagauaaucacaau

SEQ ID NO: 2764899 - RNA, 19 nt, Human
cagaaagcagaacagugau

SEQ ID NO: 2764900 - RNA, 18 nt, Human
cagaacagugauuaccag

SEQ ID NO: 2764901 - RNA, 23 nt, Human
cagaacagugauuaccagggacu

SEQ ID NO: 2764902 - RNA, 18 nt, Human
cagaaagcagaacaguga

SEQ ID NO: 2764903 - RNA, 20 nt, Human
cagaagcaacccaaauguuc

SEQ ID NO: 2764904 - RNA, 19 nt, Human
cagaagcaacccaaauguu

SEQ ID NO: 2764905 - RNA, 19 nt, Human
cagacauagaauuaacaca

SEQ ID NO: 2764906 - RNA, 17 nt, Human
cagacauagaauuaaca

SEQ ID NO: 2764907 - RNA, 14 nt, Human
caccucauggaauu

SEQ ID NO: 2764908 - RNA, 12 nt, Human
caccucauggaa

SEQ ID NO: 2764909 - RNA, 11 nt, Human
caccucaugga

SEQ ID NO: 2764910 - RNA, 10 nt, Human
caccucccug

SEQ ID NO: 2764911 - RNA, 14 nt, Human
caccucccugcaau

SEQ ID NO: 2764912 - RNA, 13 nt, Human
caccucccugcaa

SEQ ID NO: 2764913 - RNA, 17 nt, Human
cacucuccauuuaauaa

SEQ ID NO: 2764914 - RNA, 15 nt, Human
cacucuccauuuaau

SEQ ID NO: 2764915 - RNA, 19 nt, Human
cacuaguauuucuaugaaa

SEQ ID NO: 2764916 - RNA, 14 nt, Human
cacuaguauuucua

SEQ ID NO: 2764917 - RNA, 17 nt, Human
cacuaagagagaaugag

SEQ ID NO: 2764918 - RNA, 21 nt, Human
cacuaaauugacacuuaaaaa

SEQ ID NO: 2764919 - RNA, 16 nt, Human
cacucaaaucaagaaa

SEQ ID NO: 2764920 - RNA, 20 nt, Human
caccugucuugccuuuuuca

SEQ ID NO: 2764921 - RNA, 17 nt, Human
caccugucuugccuuuu

SEQ ID NO: 2764922 - RNA, 22 nt, Human
cacgagcaggcuacugucagcu

SEQ ID NO: 2764923 - RNA, 17 nt, Human
cacgagcaggcuacugu

SEQ ID NO: 2764924 - RNA, 19 nt, Human
cacgagcaggcuacuguca

SEQ ID NO: 2764925 - RNA, 20 nt, Human
cacgagcaggcuacugucag

SEQ ID NO: 2764926 - RNA, 23 nt, Human
cacggugaauggcuuuguauaga

SEQ ID NO: 2764927 - RNA, 20 nt, Human
cacggugaauggcuuuguau

SEQ ID NO: 2764928 - RNA, 13 nt, Human
cacuaaacaaaga

SEQ ID NO: 2764929 - RNA, 22 nt, Human
cacguucuuacuaguuucccuu

SEQ ID NO: 2764930 - RNA, 20 nt, Human
cacugccuucucaacuccaa

SEQ ID NO: 2764931 - RNA, 23 nt, Human
cacugauuugacauagucuggcu

SEQ ID NO: 2764932 - RNA, 21 nt, Human
cacugauuugacauagucugg

SEQ ID NO: 2764933 - RNA, 21 nt, Human
cacugacuucuaaguaaaacc

SEQ ID NO: 2764934 - RNA, 14 nt, Human
cacugacuucuaag

SEQ ID NO: 2764935 - RNA, 15 nt, Human
cacugacuucuaagu

SEQ ID NO: 2764936 - RNA, 16 nt, Human
cacugacuucuaagua

SEQ ID NO: 2764937 - RNA, 20 nt, Human
cacugacuucuaaguaaaac

SEQ ID NO: 2764938 - RNA, 14 nt, Human
cacugucaagauga

SEQ ID NO: 2764939 - RNA, 24 nt, Human
cacuguggguagacacacaugaag

SEQ ID NO: 2764940 - RNA, 22 nt, Human
cacuguggguagacacacauga

SEQ ID NO: 2764941 - RNA, 19 nt, Human
cacuguggguagacacaca

SEQ ID NO: 2764942 - RNA, 15 nt, Human
cacuuggucugugag

SEQ ID NO: 2764943 - RNA, 23 nt, Human
cacuugaacccgggaggcagagg

SEQ ID NO: 2764944 - RNA, 21 nt, Human
cacuugaacccgggaggcaga

SEQ ID NO: 2764945 - RNA, 20 nt, Human
cacuugaacccgggaggcag

SEQ ID NO: 2764946 - RNA, 14 nt, Human
caaaacugcacugu

SEQ ID NO: 2764947 - RNA, 17 nt, Human
caaaacugcacugucaa

SEQ ID NO: 2764948 - RNA, 18 nt, Human
caaaacugcacugucaag

SEQ ID NO: 2764949 - RNA, 16 nt, Human
caaacugacucuuaag

SEQ ID NO: 2764950 - RNA, 21 nt, Human
caaacugacucuuaagaagac

SEQ ID NO: 2764951 - RNA, 17 nt, Human
caaacugacucuuaaga

SEQ ID NO: 2764952 - RNA, 19 nt, Human
caagaaaugaaagcaggga

SEQ ID NO: 2764953 - RNA, 17 nt, Human
caagaaaugaaagcagg

SEQ ID NO: 2764954 - RNA, 15 nt, Human
caagaaaugaaagca

SEQ ID NO: 2764955 - RNA, 23 nt, Human
caacagcuggugcccugcuuuca

SEQ ID NO: 2764956 - RNA, 18 nt, Human
caaauguucaucaaugaa

SEQ ID NO: 2764957 - RNA, 14 nt, Human
caaauguucaucaa

SEQ ID NO: 2764958 - RNA, 12 nt, Human
caaauaugcaaa

SEQ ID NO: 2764959 - RNA, 13 nt, Human
caaauaugcaaag

SEQ ID NO: 2764960 - RNA, 20 nt, Human
caaggaaaaaauaacaauga

SEQ ID NO: 2764961 - RNA, 18 nt, Human
caaggaaaaaauaacaau

SEQ ID NO: 2764962 - RNA, 19 nt, Human
caauagucaaauuguguga

SEQ ID NO: 2764963 - RNA, 17 nt, Human
caauagucaaauugugu

SEQ ID NO: 2764964 - RNA, 21 nt, Human
caagggugaugggaaagcauu

SEQ ID NO: 2764965 - RNA, 23 nt, Human
caagggugaugggaaagcauugu

SEQ ID NO: 2764966 - RNA, 13 nt, Human
cacacugaagaag

SEQ ID NO: 2764967 - RNA, 21 nt, Human
cacagcaguugaaaagacucc

SEQ ID NO: 2764968 - RNA, 19 nt, Human
cacagcaguugaaaagacu

SEQ ID NO: 2764969 - RNA, 17 nt, Human
cacagccagacuggcac

SEQ ID NO: 2764970 - RNA, 18 nt, Human
cacagccagacuggcaca

SEQ ID NO: 2764971 - RNA, 18 nt, Human
cacaagaaaugaaagcag

SEQ ID NO: 2764972 - RNA, 21 nt, Human
cacaagaaaugaaagcaggga

SEQ ID NO: 2764973 - RNA, 20 nt, Human
cacaagaaaugaaagcaggg

SEQ ID NO: 2764974 - RNA, 22 nt, Human
caauuuuucuuauuucauuucu

SEQ ID NO: 2764975 - RNA, 19 nt, Human
acuucagcgguuuauauaa

SEQ ID NO: 2764976 - RNA, 18 nt, Human
acuucagcgguuuauaua

SEQ ID NO: 2764977 - RNA, 17 nt, Human
acuucagcgguuuauau

SEQ ID NO: 2764978 - RNA, 20 nt, Human
acuucaaauccuugaagauu

SEQ ID NO: 2764979 - RNA, 19 nt, Human
acuucaaauccuugaagau

SEQ ID NO: 2764980 - RNA, 14 nt, Human
acuuaaaaaugguu

SEQ ID NO: 2764981 - RNA, 13 nt, Human
acuuaaaaauggu

SEQ ID NO: 2764982 - RNA, 17 nt, Human
acuuuaugcuaagugaa

SEQ ID NO: 2764983 - RNA, 12 nt, Human
acuuuaugcuaa

SEQ ID NO: 2764984 - RNA, 22 nt, Human
acuugggaggcugagaugggag

SEQ ID NO: 2764985 - RNA, 22 nt, Human
acugauucuucagcaaaaauau

SEQ ID NO: 2764986 - RNA, 15 nt, Human
acugauucuucagca

SEQ ID NO: 2764987 - RNA, 13 nt, Human
acugauucuucag

SEQ ID NO: 2764988 - RNA, 12 nt, Human
acugauucuuca

SEQ ID NO: 2764989 - RNA, 17 nt, Human
acucugucucaguccau

SEQ ID NO: 2764990 - RNA, 15 nt, Human
acucugucucagucc

SEQ ID NO: 2764991 - RNA, 20 nt, Human
acucuuaagaagacugcauu

SEQ ID NO: 2764992 - RNA, 15 nt, Human
acucuuaagaagacu

SEQ ID NO: 2764993 - RNA, 14 nt, Human
acucuuaagaagac

SEQ ID NO: 2764994 - RNA, 22 nt, Human
accugucuugccuuuuucauua

SEQ ID NO: 2764995 - RNA, 21 nt, Human
accugucuugccuuuuucauu

SEQ ID NO: 2764996 - RNA, 19 nt, Human
accugucuugccuuuuuca

SEQ ID NO: 2764997 - RNA, 18 nt, Human
accucugccucagaaaac

SEQ ID NO: 2764998 - RNA, 17 nt, Human
accucugccucagaaaa

SEQ ID NO: 2764999 - RNA, 18 nt, Human
acuaguauuucuaugaaa

SEQ ID NO: 2765000 - RNA, 19 nt, Human
acuaguauuucuaugaaau

SEQ ID NO: 2765001 - RNA, 19 nt, Human
acggacgaaccuugaaaac

SEQ ID NO: 2765002 - RNA, 20 nt, Human
accaaggcugauuaaaccaa

SEQ ID NO: 2765003 - RNA, 19 nt, Human
accaaggcugauuaaacca

SEQ ID NO: 2765004 - RNA, 20 nt, Human
acaucccuuaccugggaaag

SEQ ID NO: 2765005 - RNA, 20 nt, Human
acagugauuaccagggacug

SEQ ID NO: 2765006 - RNA, 21 nt, Human
acagugauuaccagggacuga

SEQ ID NO: 2765007 - RNA, 23 nt, Human
aauuuauuggcuuuucugaucca

SEQ ID NO: 2765008 - RNA, 21 nt, Human
aauuuauuggcuuuucugauc

SEQ ID NO: 2765009 - RNA, 20 nt, Human
aauuuauuggcuuuucugau

SEQ ID NO: 2765010 - RNA, 19 nt, Human
aauuuauuggcuuuucuga

SEQ ID NO: 2765011 - RNA, 17 nt, Human
aauuuauuggcuuuucu

SEQ ID NO: 2765012 - RNA, 20 nt, Human
aauuggggauucuuaaaguu

SEQ ID NO: 2765013 - RNA, 17 nt, Human
aauuggggauucuuaaa

SEQ ID NO: 2765014 - RNA, 21 nt, Human
aaugguccgugcuaaggacuu

SEQ ID NO: 2765015 - RNA, 15 nt, Human
aauuggggauucuua

SEQ ID NO: 2765016 - RNA, 16 nt, Human
aauuggggauucuuaa

SEQ ID NO: 2765017 - RNA, 12 nt, Human
aauuuuggaauu

SEQ ID NO: 2765018 - RNA, 11 nt, Human
aauuuuggaau

SEQ ID NO: 2765019 - RNA, 18 nt, Human
aauuuugugaagcaaaau

SEQ ID NO: 2765020 - RNA, 17 nt, Human
aauuuugugaagcaaaa

SEQ ID NO: 2765021 - RNA, 13 nt, Human
aauuuugugaagc

SEQ ID NO: 2765022 - RNA, 21 nt, Human
acaaggaugaauuaaguuuuu

SEQ ID NO: 2765023 - RNA, 16 nt, Human
acaagaaaugaaagca

SEQ ID NO: 2765024 - RNA, 15 nt, Human
acaagaaaugaaagc

SEQ ID NO: 2765025 - RNA, 13 nt, Human
acaagaaaugaaa

SEQ ID NO: 2765026 - RNA, 18 nt, Human
acaauuuuguuucuguac

SEQ ID NO: 2765027 - RNA, 20 nt, Human
acaauuuuguuucuguacuu

SEQ ID NO: 2765028 - RNA, 16 nt, Human
acagaagcuccaggua

SEQ ID NO: 2765029 - RNA, 19 nt, Human
aaaggcagaagcaacccaa

SEQ ID NO: 2765030 - RNA, 19 nt, Human
aaagcauuguaaaugugcu

SEQ ID NO: 2765031 - RNA, 20 nt, Human
aaagcauuguaaaugugcuu

SEQ ID NO: 2765032 - RNA, 21 nt, Human
aaacccugucucuacuaaaaa

SEQ ID NO: 2765033 - RNA, 13 nt, Human
aaagaaacauuug

SEQ ID NO: 2765034 - RNA, 23 nt, Human
aaaaguuuaauauuaaagccaug

SEQ ID NO: 2765035 - RNA, 22 nt, Human
aaaaguuuaauauuaaagccau

SEQ ID NO: 2765036 - RNA, 21 nt, Human
aaaaguuuaauauuaaagcca

SEQ ID NO: 2765037 - RNA, 20 nt, Human
aaaaguuuaauauuaaagcc

SEQ ID NO: 2765038 - RNA, 19 nt, Human
aaaauccauacauuugugu

SEQ ID NO: 2765039 - RNA, 12 nt, Human
aacacaucagcu

SEQ ID NO: 2765040 - RNA, 23 nt, Human
aaauuggggauucuuaaaguuga

SEQ ID NO: 2765041 - RNA, 17 nt, Human
aaauuggggauucuuaa

SEQ ID NO: 2765042 - RNA, 22 nt, Human
aaauuggggauucuuaaaguug

SEQ ID NO: 2765043 - RNA, 20 nt, Human
aaauuggggauucuuaaagu

SEQ ID NO: 2765044 - RNA, 19 nt, Human
aaauuggggauucuuaaag

SEQ ID NO: 2765045 - RNA, 18 nt, Human
aaauuggggauucuuaaa

SEQ ID NO: 2765046 - RNA, 22 nt, Human
aaauugacacuuaaaaaugguu

SEQ ID NO: 2765047 - RNA, 20 nt, Human
aaauguucaucaaugaauga

SEQ ID NO: 2765048 - RNA, 17 nt, Human
aaauguucaucaaugaa

SEQ ID NO: 2765049 - RNA, 21 nt, Human
aaaucugugaacuugaaauuu

SEQ ID NO: 2765050 - RNA, 19 nt, Human
aaaucugugaacuugaaau

SEQ ID NO: 2765051 - RNA, 20 nt, Human
aaaucugugaacuugaaauu

SEQ ID NO: 2765052 - RNA, 14 nt, Human
aaaucuuaacuuga

SEQ ID NO: 2765053 - RNA, 14 nt, Human
aaccaguauuguac

SEQ ID NO: 2765054 - RNA, 13 nt, Human
aaccaguauugua

SEQ ID NO: 2765055 - RNA, 11 nt, Human
aaccaguauug

SEQ ID NO: 2765056 - RNA, 17 nt, Human
aacgcguugaaauugua

SEQ ID NO: 2765057 - RNA, 15 nt, Human
aacgcguugaaauug

SEQ ID NO: 2765058 - RNA, 14 nt, Human
aacgcguugaaauu

SEQ ID NO: 2765059 - RNA, 13 nt, Human
aacgcguugaaau

SEQ ID NO: 2765060 - RNA, 23 nt, Human
aacugagaugugaacacaucagc

SEQ ID NO: 2765061 - RNA, 20 nt, Human
aaugguccgugcuaaggacu

SEQ ID NO: 2765062 - RNA, 15 nt, Human
aauccaaugaaauga

SEQ ID NO: 2765063 - RNA, 16 nt, Human
aauccauacauuugug

SEQ ID NO: 2765064 - RNA, 17 nt, Human
aauccauacauuugugu

SEQ ID NO: 2765065 - RNA, 14 nt, Human
aauccauacauuug

SEQ ID NO: 2765066 - RNA, 16 nt, Human
aaugauaacuggaaac

SEQ ID NO: 2765067 - RNA, 15 nt, Human
aaugauaacuggaaa

SEQ ID NO: 2765068 - RNA, 14 nt, Human
aaugauaacuggaa

SEQ ID NO: 2765069 - RNA, 22 nt, Human
aaucauuucugcaucagcugcu

SEQ ID NO: 2765070 - RNA, 15 nt, Human
aaucaaauaugcaaa

SEQ ID NO: 2765071 - RNA, 16 nt, Human
aaucaaauaugcaaag

SEQ ID NO: 2765072 - RNA, 22 nt, Human
aaucaaauaugcaaagcacuga

SEQ ID NO: 2765073 - RNA, 12 nt, Human
aauauuaaagcc

SEQ ID NO: 2765074 - RNA, 13 nt, Human
aauauuaaagcca

SEQ ID NO: 2765075 - RNA, 15 nt, Human
aauauuaaagccaug

SEQ ID NO: 2765076 - RNA, 14 nt, Human
aauauuaaagccau

SEQ ID NO: 2765077 - RNA, 20 nt, Human
aauauuaaagccauguuuau

SEQ ID NO: 2765078 - RNA, 19 nt, Human
aauauuaaagccauguuua

SEQ ID NO: 2765079 - RNA, 18 nt, Human
aauauuaaagccauguuu

SEQ ID NO: 2765080 - RNA, 16 nt, Human
aauauuaaagccaugu

SEQ ID NO: 2765081 - RNA, 12 nt, Human
aauaauguuuca

SEQ ID NO: 2765082 - RNA, 19 nt, Human
aauaauguuucaaacauau

SEQ ID NO: 2765083 - RNA, 14 nt, Human
aauaauguuucaaa

SEQ ID NO: 2765084 - RNA, 10 nt, Human
aauaaaccau

SEQ ID NO: 2765085 - RNA, 22 nt, Human
aaguugauaugccuuuucccaa

SEQ ID NO: 2765086 - RNA, 17 nt, Human
aaguucugcagauaaac

SEQ ID NO: 2765087 - RNA, 15 nt, Human
aagcagggacuugaa

SEQ ID NO: 2765088 - RNA, 15 nt, Human
aagagaacuuccaga

SEQ ID NO: 2765089 - RNA, 23 nt, Human
aagacagugaaagaaaauaacaa

SEQ ID NO: 2765090 - RNA, 19 nt, Human
aagccagauuuuccugaaa

SEQ ID NO: 2765091 - RNA, 14 nt, Human
aagggauggcaaga

SEQ ID NO: 2765092 - RNA, 17 nt, Human
aagggauggcaagaugu

SEQ ID NO: 2765093 - RNA, 12 nt, Human
aaguagaggagg

SEQ ID NO: 2765094 - RNA, 24 nt, Human
agcaaaauuuuuucucuaggaaau

SEQ ID NO: 2765095 - RNA, 23 nt, Human
agcaaaauuuuuucucuaggaaa

SEQ ID NO: 2765096 - RNA, 19 nt, Human
agaucugccuaaggacuuc

SEQ ID NO: 2765097 - RNA, 19 nt, Human
agauguagaggagaaacug

SEQ ID NO: 2765098 - RNA, 16 nt, Human
agauguagaggagaaa

SEQ ID NO: 2765099 - RNA, 22 nt, Human
agaagagcuguucacagccaga

SEQ ID NO: 2765100 - RNA, 21 nt, Human
agaagagcuguucacagccag

SEQ ID NO: 2765101 - RNA, 21 nt, Human
agaagugaaaaucuacacucc

SEQ ID NO: 2765102 - RNA, 17 nt, Human
agaaugauuaugaauua

SEQ ID NO: 2765103 - RNA, 22 nt, Human
agaaugagagacacacugaaga

SEQ ID NO: 2765104 - RNA, 17 nt, Human
agaaugagagacacacu

SEQ ID NO: 2765105 - RNA, 19 nt, Human
agacccaaaaggcagaagc

SEQ ID NO: 2765106 - RNA, 17 nt, Human
agacccaaaaggcagaa

SEQ ID NO: 2765107 - RNA, 18 nt, Human
agacucugucucagucca

SEQ ID NO: 2765108 - RNA, 13 nt, Human
agaggaaugaagu

SEQ ID NO: 2765109 - RNA, 21 nt, Human
aggccaugggcacugugggua

SEQ ID NO: 2765110 - RNA, 15 nt, Human
agggacugaggggag

SEQ ID NO: 2765111 - RNA, 15 nt, Human
agggauuagggagag

SEQ ID NO: 2765112 - RNA, 13 nt, Human
aggaaguagagga

SEQ ID NO: 2765113 - RNA, 20 nt, Human
agcuccccucggagaagagc

SEQ ID NO: 2765114 - RNA, 17 nt, Human
agcuccccucggagaag

SEQ ID NO: 2765115 - RNA, 19 nt, Human
agcuccccucggagaagag

SEQ ID NO: 2765116 - RNA, 17 nt, Human
agcgacagugagacucu

SEQ ID NO: 2765117 - RNA, 20 nt, Human
augcugaguuugugcuggug

SEQ ID NO: 2765118 - RNA, 18 nt, Human
auggcuuuguauagaacc

SEQ ID NO: 2765119 - RNA, 19 nt, Human
auggcuuuguauagaaccu

SEQ ID NO: 2765120 - RNA, 18 nt, Human
augaugaucuuuaaaaua

SEQ ID NO: 2765121 - RNA, 21 nt, Human
augaugaucuuuaaaauacac

SEQ ID NO: 2765122 - RNA, 16 nt, Human
augaucuuuaaaauac

SEQ ID NO: 2765123 - RNA, 18 nt, Human
augguccgugcuaaggac

SEQ ID NO: 2765124 - RNA, 15 nt, Human
augguccgugcuaag

SEQ ID NO: 2765125 - RNA, 21 nt, Human
augucaaucagccuaguugau

SEQ ID NO: 2765126 - RNA, 16 nt, Human
augucaaucagccuag

SEQ ID NO: 2765127 - RNA, 15 nt, Human
augugaacacaucag

SEQ ID NO: 2765128 - RNA, 15 nt, Human
auguuccuagugaaa

SEQ ID NO: 2765129 - RNA, 16 nt, Human
auguuccuagugaaag

SEQ ID NO: 2765130 - RNA, 17 nt, Human
auguuccuagugaaaga

SEQ ID NO: 2765131 - RNA, 22 nt, Human
aucagcuugcccuguuaaaaga

SEQ ID NO: 2765132 - RNA, 13 nt, Human
aucagcuuauugu

SEQ ID NO: 2765133 - RNA, 17 nt, Human
aucaugaauuaguuuua

SEQ ID NO: 2765134 - RNA, 14 nt, Human
aucaaauaugcaaa

SEQ ID NO: 2765135 - RNA, 20 nt, Human
aucccauuauucaaaguugc

SEQ ID NO: 2765136 - RNA, 15 nt, Human
aucccauuauucaaa

SEQ ID NO: 2765137 - RNA, 14 nt, Human
aucccauuauucaa

SEQ ID NO: 2765138 - RNA, 19 nt, Human
auccucaguuuuugugaaa

SEQ ID NO: 2765139 - RNA, 23 nt, Human
augaaguccaagcauuuagaugu

SEQ ID NO: 2765140 - RNA, 20 nt, Human
augaaguccaagcauuuaga

SEQ ID NO: 2765141 - RNA, 21 nt, Human
augaaguacucauacauguua

SEQ ID NO: 2765142 - RNA, 13 nt, Human
augaaguacucau

SEQ ID NO: 2765143 - RNA, 19 nt, Human
aguugaaaagacuccaaag

SEQ ID NO: 2765144 - RNA, 20 nt, Human
aguugaaaagacuccaaaga

SEQ ID NO: 2765145 - RNA, 14 nt, Human
aguugaaaagacuc

SEQ ID NO: 2765146 - RNA, 18 nt, Human
aguugaaaagacuccaaa

SEQ ID NO: 2765147 - RNA, 19 nt, Human
aguucagagcugcccucuc

SEQ ID NO: 2765148 - RNA, 20 nt, Human
aguucagagcugcccucucc

SEQ ID NO: 2765149 - RNA, 22 nt, Human
aguucagagcugcccucuccug

SEQ ID NO: 2765150 - RNA, 21 nt, Human
aguucagagcugcccucuccu

SEQ ID NO: 2765151 - RNA, 23 nt, Human
aguucagagcugcccucuccugg

SEQ ID NO: 2765152 - RNA, 19 nt, Human
agugucaaugcagccccca

SEQ ID NO: 2765153 - RNA, 11 nt, Human
aguccaagcau

SEQ ID NO: 2765154 - RNA, 15 nt, Human
auagcagcuuauuca

SEQ ID NO: 2765155 - RNA, 20 nt, Human
auauauuuuuauauuuacua

SEQ ID NO: 2765156 - RNA, 19 nt, Human
auauauuuuuauauuuacu

SEQ ID NO: 2765157 - RNA, 18 nt, Human
auauauuuuuauauuuac

SEQ ID NO: 2765158 - RNA, 23 nt, Human
auauuucagauaaucacaauaca

SEQ ID NO: 2765159 - RNA, 14 nt, Human
auauuauguuaaaa

SEQ ID NO: 2765160 - RNA, 13 nt, Human
auauuauguuaaa

SEQ ID NO: 2765161 - RNA, 21 nt, Human
auaacaaugcuguauuuuaaa

SEQ ID NO: 2765162 - RNA, 20 nt, Human
auaacaaugcuguauuuuaa

SEQ ID NO: 2765163 - RNA, 19 nt, Human
auaacaaugcuguauuuua

SEQ ID NO: 2765164 - RNA, 17 nt, Human
auaacaaugcuguauuu

SEQ ID NO: 2765165 - RNA, 15 nt, Human
auaacaaugcuguau

SEQ ID NO: 2765166 - RNA, 14 nt, Human
auaacaaugaaagu

SEQ ID NO: 2765167 - RNA, 18 nt, Human
auaauguuucaaacauau

SEQ ID NO: 2765168 - RNA, 13 nt, Human
auaauguuucaaa

SEQ ID NO: 2765169 - RNA, 22 nt, Human
auaagccagacaucaacagaua

SEQ ID NO: 2765170 - RNA, 21 nt, Human
auaagccagacaucaacagau

SEQ ID NO: 2765171 - RNA, 14 nt, Human
auaagccagacauc

SEQ ID NO: 2765172 - RNA, 19 nt, Human
augagagacacacugaaga

SEQ ID NO: 2765173 - RNA, 17 nt, Human
augagagacacacugaa

SEQ ID NO: 2765174 - RNA, 14 nt, Human
augagagacacacu

SEQ ID NO: 2765175 - RNA, 13 nt, Human
augagagacacac

SEQ ID NO: 2765176 - RNA, 17 nt, Human
uuguauaaaauaauuuu

SEQ ID NO: 2765177 - RNA, 16 nt, Human
uuguaucacaaaucuu

SEQ ID NO: 2765178 - RNA, 14 nt, Human
uuguacaaaguauu

SEQ ID NO: 2765179 - RNA, 13 nt, Human
uuguacaaaguau

SEQ ID NO: 2765180 - RNA, 21 nt, Human
uuguacaaaguauuaagcaua

SEQ ID NO: 2765181 - RNA, 20 nt, Human
uuguacaaaguauuaagcau

SEQ ID NO: 2765182 - RNA, 17 nt, Human
uuguacaaaguauuaag

SEQ ID NO: 2765183 - RNA, 15 nt, Human
uuguacaaaguauua

SEQ ID NO: 2765184 - RNA, 15 nt, Human
uuguauaaaauaauu

SEQ ID NO: 2765185 - RNA, 16 nt, Human
uuguauaaaauaauuu

SEQ ID NO: 2765186 - RNA, 15 nt, Human
uuggggauucuuaaa

SEQ ID NO: 2765187 - RNA, 13 nt, Human
uuggggauucuua

SEQ ID NO: 2765188 - RNA, 13 nt, Human
augaaugaauggc

SEQ ID NO: 2765189 - RNA, 18 nt, Human
augaagauguagaggaga

SEQ ID NO: 2765190 - RNA, 17 nt, Human
augaaauauuauguuaa

SEQ ID NO: 2765191 - RNA, 13 nt, Human
augaaauauuaug

SEQ ID NO: 2765192 - RNA, 18 nt, Human
augaaauauuauguuaaa

SEQ ID NO: 2765193 - RNA, 15 nt, Human
uuggauaauaaggaa

SEQ ID NO: 2765194 - RNA, 21 nt, Human
uuggauaauaaggaaaaguuu

SEQ ID NO: 2765195 - RNA, 19 nt, Human
uuggauaauaaggaaaagu

SEQ ID NO: 2765196 - RNA, 15 nt, Human
augaaagcagggacu

SEQ ID NO: 2765197 - RNA, 13 nt, Human
aucuuuuucuaac

SEQ ID NO: 2765198 - RNA, 18 nt, Human
uugauggugguauguuuu

SEQ ID NO: 2765199 - RNA, 19 nt, Human
uugauggugguauguuuuc

SEQ ID NO: 2765200 - RNA, 14 nt, Human
aucucauuuccaag

SEQ ID NO: 2765201 - RNA, 23 nt, Human
aucucauuuccaagcaaguauua

SEQ ID NO: 2765202 - RNA, 21 nt, Human
aucucauuuccaagcaaguau

SEQ ID NO: 2765203 - RNA, 13 nt, Human
aucucaauauuuc

SEQ ID NO: 2765204 - RNA, 19 nt, Human
aucugugaacuugaaauuu

SEQ ID NO: 2765205 - RNA, 18 nt, Human
aucugugaacuugaaauu

SEQ ID NO: 2765206 - RNA, 17 nt, Human
aucugugaacuugaaau

SEQ ID NO: 2765207 - RNA, 13 nt, Human
aucugugaacuug

SEQ ID NO: 2765208 - RNA, 20 nt, Human
aucugccuaaggacuucuuu

SEQ ID NO: 2765209 - RNA, 19 nt, Human
aucugccuaaggacuucuu

SEQ ID NO: 2765210 - RNA, 18 nt, Human
aucugccuaaggacuucu

SEQ ID NO: 2765211 - RNA, 13 nt, Human
aucugccuaagga

SEQ ID NO: 2765212 - RNA, 17 nt, Human
aucugccuaaggacuuc

SEQ ID NO: 2765213 - RNA, 16 nt, Human
aucugccuaaggacuu

SEQ ID NO: 2765214 - RNA, 15 nt, Human
aucugccuaaggacu

SEQ ID NO: 2765215 - RNA, 14 nt, Human
aucugccuaaggac

SEQ ID NO: 2765216 - RNA, 21 nt, Human
aucugaggaauucuguauaga

SEQ ID NO: 2765217 - RNA, 20 nt, Human
aucugaggaauucuguauag

SEQ ID NO: 2765218 - RNA, 18 nt, Human
aucugaggaauucuguau

SEQ ID NO: 2765219 - RNA, 17 nt, Human
aucugaggaauucugua

SEQ ID NO: 2765220 - RNA, 16 nt, Human
aucugaggaauucugu

SEQ ID NO: 2765221 - RNA, 15 nt, Human
aucugaggaauucug

SEQ ID NO: 2765222 - RNA, 22 nt, Human
uugccuaaauccauuuggaaau

SEQ ID NO: 2765223 - RNA, 13 nt, Human
uugccuaaaucca

SEQ ID NO: 2765224 - RNA, 15 nt, Human
uugccuaaauccauu

SEQ ID NO: 2765225 - RNA, 14 nt, Human
uugccuaaauccau

SEQ ID NO: 2765226 - RNA, 13 nt, Human
uugcccuguuaaa

SEQ ID NO: 2765227 - RNA, 14 nt, Human
uuuagucuugucuc

SEQ ID NO: 2765228 - RNA, 22 nt, Human
uuuagcuggaaaaguauguuag

SEQ ID NO: 2765229 - RNA, 20 nt, Human
uuuagcuggaaaaguauguu

SEQ ID NO: 2765230 - RNA, 22 nt, Human
uuuauuacaguauaauuaacau

SEQ ID NO: 2765231 - RNA, 13 nt, Human
uuuauauaagcuu

SEQ ID NO: 2765232 - RNA, 23 nt, Human
uuuauuacaguauaauuaacaug

SEQ ID NO: 2765233 - RNA, 15 nt, Human
augcuagaacucccu

SEQ ID NO: 2765234 - RNA, 16 nt, Human
augcuagaacucccuu

SEQ ID NO: 2765235 - RNA, 23 nt, Human
auggaacgcguugaaauuguaau

SEQ ID NO: 2765236 - RNA, 22 nt, Human
augcugucuacacuaagagaga

SEQ ID NO: 2765237 - RNA, 20 nt, Human
auggcuaguaucaaaagaaa

SEQ ID NO: 2765238 - RNA, 17 nt, Human
uuuaauuuuggaauuuu

SEQ ID NO: 2765239 - RNA, 15 nt, Human
uuuaauuuuggaauu

SEQ ID NO: 2765240 - RNA, 14 nt, Human
uuuaauuuuggaau

SEQ ID NO: 2765241 - RNA, 17 nt, Human
augcaguucugaagaag

SEQ ID NO: 2765242 - RNA, 15 nt, Human
augcaguucugaaga

SEQ ID NO: 2765243 - RNA, 19 nt, Human
augcaguucugaagaagau

SEQ ID NO: 2765244 - RNA, 18 nt, Human
augcaguucugaagaaga

SEQ ID NO: 2765245 - RNA, 17 nt, Human
augccacuaaauugaca

SEQ ID NO: 2765246 - RNA, 15 nt, Human
augccacuaaauuga

SEQ ID NO: 2765247 - RNA, 14 nt, Human
uuguuuucauuauc

SEQ ID NO: 2765248 - RNA, 16 nt, Human
augauuucuaugcuga

SEQ ID NO: 2765249 - RNA, 13 nt, Human
augauuucuaugc

SEQ ID NO: 2765250 - RNA, 12 nt, Human
augauuucuaug

SEQ ID NO: 2765251 - RNA, 15 nt, Human
augcaaagcacugac

SEQ ID NO: 2765252 - RNA, 12 nt, Human
augauucccagc

SEQ ID NO: 2765253 - RNA, 22 nt, Human
augauuaugaauuacauuugua

SEQ ID NO: 2765254 - RNA, 21 nt, Human
augagagacacacugaagaag

SEQ ID NO: 2765255 - RNA, 20 nt, Human
augagagacacacugaagaa

SEQ ID NO: 2765256 - RNA, 23 nt, Human
augagagacacacugaagaagca

SEQ ID NO: 2765257 - RNA, 19 nt, Human
uuguguaaauacaauuuug

SEQ ID NO: 2765258 - RNA, 23 nt, Human
uugugugaaagguacuucaaauc

SEQ ID NO: 2765259 - RNA, 19 nt, Human
uugaaauauugacuuuuua

SEQ ID NO: 2765260 - RNA, 13 nt, Human
uucuguacuuuuu

SEQ ID NO: 2765261 - RNA, 19 nt, Human
uucuguacuuuuuggcaua

SEQ ID NO: 2765262 - RNA, 18 nt, Human
uucuguacuuuuuggcau

SEQ ID NO: 2765263 - RNA, 17 nt, Human
auccaguuuuguuugga

SEQ ID NO: 2765264 - RNA, 18 nt, Human
auccaguuuuguuuggac

SEQ ID NO: 2765265 - RNA, 21 nt, Human
auccaguuuuguuuggaccaa

SEQ ID NO: 2765266 - RNA, 20 nt, Human
auccaguuuuguuuggacca

SEQ ID NO: 2765267 - RNA, 13 nt, Human
auccauuuggaaa

SEQ ID NO: 2765268 - RNA, 19 nt, Human
auccauuuggaaaucuuua

SEQ ID NO: 2765269 - RNA, 17 nt, Human
auccauuuggaaaucuu

SEQ ID NO: 2765270 - RNA, 14 nt, Human
auccauacauuugu

SEQ ID NO: 2765271 - RNA, 13 nt, Human
uucuauaauuuaa

SEQ ID NO: 2765272 - RNA, 14 nt, Human
uucuauaauuuaaa

SEQ ID NO: 2765273 - RNA, 21 nt, Human
uucuaaguaaaaccacagcag

SEQ ID NO: 2765274 - RNA, 18 nt, Human
aucaauaaaaaauuauga

SEQ ID NO: 2765275 - RNA, 17 nt, Human
aucaauaaaaaauuaug

SEQ ID NO: 2765276 - RNA, 15 nt, Human
aucaauaaaaaauua

SEQ ID NO: 2765277 - RNA, 19 nt, Human
uucuaaguaaaaccacagc

SEQ ID NO: 2765278 - RNA, 20 nt, Human
uucuaaguaaaaccacagca

SEQ ID NO: 2765279 - RNA, 17 nt, Human
uucuaaguaaaaccaca

SEQ ID NO: 2765280 - RNA, 13 nt, Human
auauuuucauucu

SEQ ID NO: 2765281 - RNA, 17 nt, Human
auauuuucauucuccua

SEQ ID NO: 2765282 - RNA, 16 nt, Human
auauuuuuauauuuac

SEQ ID NO: 2765283 - RNA, 20 nt, Human
aucaaauaugcaaagcacug

SEQ ID NO: 2765284 - RNA, 12 nt, Human
uucccaaauuuc

SEQ ID NO: 2765285 - RNA, 18 nt, Human
uucccaacuccagaaagu

SEQ ID NO: 2765286 - RNA, 18 nt, Human
uucaaacagucucaggaa

SEQ ID NO: 2765287 - RNA, 14 nt, Human
uucaaacauauaua

SEQ ID NO: 2765288 - RNA, 17 nt, Human
auaggcguaacuaauuu

SEQ ID NO: 2765289 - RNA, 22 nt, Human
auaggaauugacccacaagaaa

SEQ ID NO: 2765290 - RNA, 23 nt, Human
uucacaagacccaaaaggcagaa

SEQ ID NO: 2765291 - RNA, 22 nt, Human
uucacaagacccaaaaggcaga

SEQ ID NO: 2765292 - RNA, 13 nt, Human
auagucuggcugu

SEQ ID NO: 2765293 - RNA, 20 nt, Human
auaguuguaccgcaauguga

SEQ ID NO: 2765294 - RNA, 17 nt, Human
auauaacaaugcuguau

SEQ ID NO: 2765295 - RNA, 19 nt, Human
auauauaacaaugcuguau

SEQ ID NO: 2765296 - RNA, 20 nt, Human
auuuggaaaucuuuaaaaaa

SEQ ID NO: 2765297 - RNA, 17 nt, Human
auuuggaaaucuuuaaa

SEQ ID NO: 2765298 - RNA, 18 nt, Human
auuuguaguguuggagaa

SEQ ID NO: 2765299 - RNA, 23 nt, Human
auuugguaaggggaauugaggac

SEQ ID NO: 2765300 - RNA, 22 nt, Human
auuuauuacuguaagaaaauau

SEQ ID NO: 2765301 - RNA, 13 nt, Human
auuuuauuaugua

SEQ ID NO: 2765302 - RNA, 14 nt, Human
auuuuauuauguaa

SEQ ID NO: 2765303 - RNA, 21 nt, Human
auuuuauuaugaaacuugugu

SEQ ID NO: 2765304 - RNA, 18 nt, Human
auuuuauuaugaaacuug

SEQ ID NO: 2765305 - RNA, 12 nt, Human
auuuuauuauga

SEQ ID NO: 2765306 - RNA, 11 nt, Human
auuuuauuaug

SEQ ID NO: 2765307 - RNA, 14 nt, Human
auuuuauuaugaaa

SEQ ID NO: 2765308 - RNA, 13 nt, Human
auuuuauuaugaa

SEQ ID NO: 2765309 - RNA, 15 nt, Human
auuuguaucacaaau

SEQ ID NO: 2765310 - RNA, 21 nt, Human
auuuguauaaaauaauuuuua

SEQ ID NO: 2765311 - RNA, 16 nt, Human
auuuuaauaauguuuc

SEQ ID NO: 2765312 - RNA, 15 nt, Human
auuuuaauaauguuu

SEQ ID NO: 2765313 - RNA, 14 nt, Human
auuuuaauaauguu

SEQ ID NO: 2765314 - RNA, 12 nt, Human
auuuuaauaaug

SEQ ID NO: 2765315 - RNA, 21 nt, Human
auugacccacaagaaaugaaa

SEQ ID NO: 2765316 - RNA, 20 nt, Human
auugacacuuaaaaaugguu

SEQ ID NO: 2765317 - RNA, 23 nt, Human
auugugcgcuaaacuuuucugau

SEQ ID NO: 2765318 - RNA, 14 nt, Human
auuguauuacaaau

SEQ ID NO: 2765319 - RNA, 13 nt, Human
auugugccccugc

SEQ ID NO: 2765320 - RNA, 19 nt, Human
auuuaaagcuuauuaaaac

SEQ ID NO: 2765321 - RNA, 16 nt, Human
auuuacaaaugggaaa

SEQ ID NO: 2765322 - RNA, 20 nt, Human
auuccacuuauaggaauuga

SEQ ID NO: 2765323 - RNA, 22 nt, Human
auuauuuuauuaugaaacuugu

SEQ ID NO: 2765324 - RNA, 21 nt, Human
auuauuuuauuaugaaacuug

SEQ ID NO: 2765325 - RNA, 14 nt, Human
auucaaacagucuc

SEQ ID NO: 2765326 - RNA, 15 nt, Human
auucaaacagucuca

SEQ ID NO: 2765327 - RNA, 13 nt, Human
auuacauuuguau

SEQ ID NO: 2765328 - RNA, 20 nt, Human
auuacauuuguauaaaauaa

SEQ ID NO: 2765329 - RNA, 15 nt, Human
auuacauuuguauaa

SEQ ID NO: 2765330 - RNA, 23 nt, Human
uuuuuuaaaaaagaaacauuugg

SEQ ID NO: 2765331 - RNA, 15 nt, Human
auuaaguaaugauaa

SEQ ID NO: 2765332 - RNA, 13 nt, Human
auuaaguaaugau

SEQ ID NO: 2765333 - RNA, 19 nt, Human
auuagagaguguugaaacg

SEQ ID NO: 2765334 - RNA, 18 nt, Human
auuagagaguguugaaac

SEQ ID NO: 2765335 - RNA, 17 nt, Human
auuagagaguguugaaa

SEQ ID NO: 2765336 - RNA, 16 nt, Human
auuagagaguguugaa

SEQ ID NO: 2765337 - RNA, 15 nt, Human
auuagagaguguuga

SEQ ID NO: 2765338 - RNA, 16 nt, Human
auuauauuuacaaaug

SEQ ID NO: 2765339 - RNA, 15 nt, Human
auuauuuuauuauga

SEQ ID NO: 2765340 - RNA, 18 nt, Human
auuaucucaaaacugcac

SEQ ID NO: 2765341 - RNA, 23 nt, Human
auuaucucaaaacugcacuguca

SEQ ID NO: 2765342 - RNA, 17 nt, Human
auuauauuuacaaaugg

SEQ ID NO: 2765343 - RNA, 15 nt, Human
auuauauuuacaaau

SEQ ID NO: 2765344 - RNA, 21 nt, Human
uuuucauuauuuuauuaugaa

SEQ ID NO: 2765345 - RNA, 15 nt, Human
uuuucauuauuuuau

SEQ ID NO: 2765346 - RNA, 16 nt, Human
uuuucuauaauuuaaa

SEQ ID NO: 2765347 - RNA, 14 nt, Human
uuuuauuauguaaa

SEQ ID NO: 2765348 - RNA, 13 nt, Human
uuuuauuauguaa

SEQ ID NO: 2765349 - RNA, 14 nt, Human
uuuuauaauuuugu

SEQ ID NO: 2765350 - RNA, 12 nt, Human
uuuuauuaugua

SEQ ID NO: 2765351 - RNA, 23 nt, Human
uuuuauggaggcuuugcauagau

SEQ ID NO: 2765352 - RNA, 19 nt, Human
uuuuauggcacuaguauuu

SEQ ID NO: 2765353 - RNA, 19 nt, Human
auguucaucaaugaaugaa

SEQ ID NO: 2765354 - RNA, 15 nt, Human
auguugacaugggac

SEQ ID NO: 2765355 - RNA, 19 nt, Human
auuaacauguuaaaccaug

SEQ ID NO: 2765356 - RNA, 17 nt, Human
auuaacauguuaaacca

SEQ ID NO: 2765357 - RNA, 15 nt, Human
auuaacauguuaaac

SEQ ID NO: 2765358 - RNA, 14 nt, Human
auuaacauguuaaa

SEQ ID NO: 2765359 - RNA, 13 nt, Human
auuaacauguuaa

SEQ ID NO: 2765360 - RNA, 11 nt, Human
auuaaagccau

SEQ ID NO: 2765361 - RNA, 21 nt, Human
auuaaagccauguuuauuaca

SEQ ID NO: 2765362 - RNA, 17 nt, Human
auuaaagccauguuuau

SEQ ID NO: 2765363 - RNA, 16 nt, Human
auuaaagccauguuua

SEQ ID NO: 2765364 - RNA, 12 nt, Human
auuaaagccaug

SEQ ID NO: 2765365 - RNA, 15 nt, Human
auuaaaagaauauuu

SEQ ID NO: 2765366 - RNA, 16 nt, Human
auuaaaagaauauuuu

SEQ ID NO: 2765367 - RNA, 18 nt, Human
auguuucaaacauauaua

SEQ ID NO: 2765368 - RNA, 21 nt, Human
auguuucaaacauauauaaca

SEQ ID NO: 2765369 - RNA, 13 nt, Human
uuuguuucuguac

SEQ ID NO: 2765370 - RNA, 12 nt, Human
uuuguuucugua

SEQ ID NO: 2765371 - RNA, 18 nt, Human
uuuguuucuguacuuuuu

SEQ ID NO: 2765372 - RNA, 15 nt, Human
uuugucuacaccauu

SEQ ID NO: 2765373 - RNA, 13 nt, Human
uuuuaaaaaagaa

SEQ ID NO: 2765374 - RNA, 14 nt, Human
uuuuaaaagaauga

SEQ ID NO: 2765375 - RNA, 12 nt, Human
uuugcucaugga

SEQ ID NO: 2765376 - RNA, 11 nt, Human
uuugcucaugg

SEQ ID NO: 2765377 - RNA, 15 nt, Human
auggcuauaggugcu

SEQ ID NO: 2765378 - RNA, 15 nt, Human
auaaauaguuuauga

SEQ ID NO: 2765379 - RNA, 22 nt, Human
auaaauagcuagacuggugacu

SEQ ID NO: 2765380 - RNA, 21 nt, Human
auaaauagcuagacuggugac

SEQ ID NO: 2765381 - RNA, 14 nt, Human
auaaauaaaaauaa

SEQ ID NO: 2765382 - RNA, 13 nt, Human
auaaauaaaaaua

SEQ ID NO: 2765383 - RNA, 22 nt, Human
auaacgauaaaagacagugaaa

SEQ ID NO: 2765384 - RNA, 18 nt, Human
auaauccuaaacauauga

SEQ ID NO: 2765385 - RNA, 14 nt, Human
aguuuaaauuguaa

SEQ ID NO: 2765386 - RNA, 17 nt, Human
aguugccuaaauccauu

SEQ ID NO: 2765387 - RNA, 11 nt, Human
aguugccuaaa

SEQ ID NO: 2765388 - RNA, 16 nt, Human
aguugccuaaauccau

SEQ ID NO: 2765389 - RNA, 15 nt, Human
aguugccuaaaucca

SEQ ID NO: 2765390 - RNA, 13 nt, Human
uguuucaaacaua

SEQ ID NO: 2765391 - RNA, 12 nt, Human
auaaaauaauuu

SEQ ID NO: 2765392 - RNA, 22 nt, Human
auaaaauaauuuuuauauuuga

SEQ ID NO: 2765393 - RNA, 19 nt, Human
aguuuucugagaaagacua

SEQ ID NO: 2765394 - RNA, 18 nt, Human
aguuuucugagaaagacu

SEQ ID NO: 2765395 - RNA, 23 nt, Human
aguuuucugagaaagacuauuca

SEQ ID NO: 2765396 - RNA, 18 nt, Human
uguuuauuacaguauaau

SEQ ID NO: 2765397 - RNA, 19 nt, Human
uguuuagucuugucucaga

SEQ ID NO: 2765398 - RNA, 18 nt, Human
uguuuagucuugucucag

SEQ ID NO: 2765399 - RNA, 17 nt, Human
uguuuagucuugucuca

SEQ ID NO: 2765400 - RNA, 13 nt, Human
uguuuagucuugu

SEQ ID NO: 2765401 - RNA, 24 nt, Human
aguucacucuccauuuaauaauua

SEQ ID NO: 2765402 - RNA, 22 nt, Human
aguucacucuccauuuaauaau

SEQ ID NO: 2765403 - RNA, 19 nt, Human
aguucggugagcuacaaau

SEQ ID NO: 2765404 - RNA, 21 nt, Human
aguguugaaacggaugauuuc

SEQ ID NO: 2765405 - RNA, 16 nt, Human
aguguuggagaagaac

SEQ ID NO: 2765406 - RNA, 14 nt, Human
aguguuggagaaga

SEQ ID NO: 2765407 - RNA, 18 nt, Human
aguguuggagaagaacug

SEQ ID NO: 2765408 - RNA, 17 nt, Human
aguguuggagaagaacu

SEQ ID NO: 2765409 - RNA, 14 nt, Human
agugcaaauuguca

SEQ ID NO: 2765410 - RNA, 21 nt, Human
agugcaaauugucacaggaca

SEQ ID NO: 2765411 - RNA, 18 nt, Human
agugcaaauugucacagg

SEQ ID NO: 2765412 - RNA, 17 nt, Human
uguggugacuuuggaua

SEQ ID NO: 2765413 - RNA, 16 nt, Human
uguggugacuuuggau

SEQ ID NO: 2765414 - RNA, 21 nt, Human
agugccuguaaucacagcuac

SEQ ID NO: 2765415 - RNA, 23 nt, Human
agguacuucaaauccuugaagau

SEQ ID NO: 2765416 - RNA, 20 nt, Human
ugguaaggggaauugaggac

SEQ ID NO: 2765417 - RNA, 17 nt, Human
agggcagggacaggaua

SEQ ID NO: 2765418 - RNA, 15 nt, Human
agucaggaaagagaa

SEQ ID NO: 2765419 - RNA, 16 nt, Human
agucaggaaagagaac

SEQ ID NO: 2765420 - RNA, 23 nt, Human
ugucauuugcuggagcucugccc

SEQ ID NO: 2765421 - RNA, 15 nt, Human
aguauuucuaugaaa

SEQ ID NO: 2765422 - RNA, 13 nt, Human
aguauuucuauga

SEQ ID NO: 2765423 - RNA, 22 nt, Human
aguauuucuaugaaauauuaug

SEQ ID NO: 2765424 - RNA, 20 nt, Human
ugucaaucagccuaguugau

SEQ ID NO: 2765425 - RNA, 21 nt, Human
ugucaauaaaauccauacauu

SEQ ID NO: 2765426 - RNA, 22 nt, Human
uguaaaucccauuauucaaagu

SEQ ID NO: 2765427 - RNA, 20 nt, Human
uguaaaucccauuauucaaa

SEQ ID NO: 2765428 - RNA, 19 nt, Human
uguaaaucccauuauucaa

SEQ ID NO: 2765429 - RNA, 13 nt, Human
uguaaaucccauu

SEQ ID NO: 2765430 - RNA, 18 nt, Human
uguaaaucccauuauuca

SEQ ID NO: 2765431 - RNA, 16 nt, Human
uguaaaucccauuauu

SEQ ID NO: 2765432 - RNA, 15 nt, Human
uguaauuauaucuga

SEQ ID NO: 2765433 - RNA, 14 nt, Human
uguaauuauaucug

SEQ ID NO: 2765434 - RNA, 13 nt, Human
uguaauuauaucu

SEQ ID NO: 2765435 - RNA, 12 nt, Human
uguacuuuuugg

SEQ ID NO: 2765436 - RNA, 16 nt, Human
uguacuuuuuggcaua

SEQ ID NO: 2765437 - RNA, 15 nt, Human
uguacuuuuuggcau

SEQ ID NO: 2765438 - RNA, 17 nt, Human
uguacuuuuuggcauaa

SEQ ID NO: 2765439 - RNA, 16 nt, Human
uguagaggagaaacug

SEQ ID NO: 2765440 - RNA, 18 nt, Human
uguagaggagaaacugga

SEQ ID NO: 2765441 - RNA, 15 nt, Human
aguaaaaccacagca

SEQ ID NO: 2765442 - RNA, 19 nt, Human
aguagauaggccaugggca

SEQ ID NO: 2765443 - RNA, 11 nt, Human
ugcucauggaa

SEQ ID NO: 2765444 - RNA, 14 nt, Human
ugcucauggaauug

SEQ ID NO: 2765445 - RNA, 18 nt, Human
aggaagccugauuaaaga

SEQ ID NO: 2765446 - RNA, 17 nt, Human
aggaagccugauuaaag

SEQ ID NO: 2765447 - RNA, 21 nt, Human
aggaagccugauuaaagaaug

SEQ ID NO: 2765448 - RNA, 12 nt, Human
aggaaauauuua

SEQ ID NO: 2765449 - RNA, 23 nt, Human
aggaaaucaaauaugcaaagcac

SEQ ID NO: 2765450 - RNA, 17 nt, Human
aggacacugauaugggu

SEQ ID NO: 2765451 - RNA, 23 nt, Human
aggaauggagccugcacggugaa

SEQ ID NO: 2765452 - RNA, 22 nt, Human
ugcuguauuuuaaaagaaugau

SEQ ID NO: 2765453 - RNA, 21 nt, Human
ugcuguauuuuaaaagaauga

SEQ ID NO: 2765454 - RNA, 13 nt, Human
ugcuguauuuuaa

SEQ ID NO: 2765455 - RNA, 12 nt, Human
ugcuaaggacuu

SEQ ID NO: 2765456 - RNA, 17 nt, Human
agcuugaaacugagaug

SEQ ID NO: 2765457 - RNA, 20 nt, Human
ugcuacaaaaacacagcaag

SEQ ID NO: 2765458 - RNA, 22 nt, Human
ugcuaaggacuuguuagaucua

SEQ ID NO: 2765459 - RNA, 18 nt, Human
ugcuaaggacuuguuaga

SEQ ID NO: 2765460 - RNA, 13 nt, Human
ugcuaaggacuug

SEQ ID NO: 2765461 - RNA, 15 nt, Human
ugcuacaaaaacaca

SEQ ID NO: 2765462 - RNA, 16 nt, Human
ugcuacaaaaacacag

SEQ ID NO: 2765463 - RNA, 17 nt, Human
ugcuacaaaaacacagc

SEQ ID NO: 2765464 - RNA, 18 nt, Human
ugcuacaaaaacacagca

SEQ ID NO: 2765465 - RNA, 19 nt, Human
ugcuacaaaaacacagcaa

SEQ ID NO: 2765466 - RNA, 16 nt, Human
agcugccuccccuccu

SEQ ID NO: 2765467 - RNA, 15 nt, Human
agcugccuccccucc

SEQ ID NO: 2765468 - RNA, 22 nt, Human
agcugcccucuccugggcagcu

SEQ ID NO: 2765469 - RNA, 16 nt, Human
agcuguucacagccag

SEQ ID NO: 2765470 - RNA, 19 nt, Human
agcuguucacagccagacu

SEQ ID NO: 2765471 - RNA, 22 nt, Human
uggcauaacauaaaucugugaa

SEQ ID NO: 2765472 - RNA, 21 nt, Human
uggcauaacauaaaucuguga

SEQ ID NO: 2765473 - RNA, 17 nt, Human
uggcauaacauaaaucu

SEQ ID NO: 2765474 - RNA, 18 nt, Human
uggcacaguuuucugaga

SEQ ID NO: 2765475 - RNA, 19 nt, Human
uggcacaguuuucugagaa

SEQ ID NO: 2765476 - RNA, 15 nt, Human
uggaaaucuuuaaaa

SEQ ID NO: 2765477 - RNA, 14 nt, Human
uggaaaucuuuaaa

SEQ ID NO: 2765478 - RNA, 13 nt, Human
uggaaaggcagcu

SEQ ID NO: 2765479 - RNA, 16 nt, Human
uggacuguggugacuu

SEQ ID NO: 2765480 - RNA, 15 nt, Human
uggacuguggugacu

SEQ ID NO: 2765481 - RNA, 22 nt, Human
uggacuguggugacuuuggaua

SEQ ID NO: 2765482 - RNA, 21 nt, Human
uggacuguggugacuuuggau

SEQ ID NO: 2765483 - RNA, 19 nt, Human
uggacuguggugacuuugg

SEQ ID NO: 2765484 - RNA, 17 nt, Human
uggacuguggugacuuu

SEQ ID NO: 2765485 - RNA, 13 nt, Human
uggagaagaacug

SEQ ID NO: 2765486 - RNA, 20 nt, Human
agccuuggggcugaugcagu

SEQ ID NO: 2765487 - RNA, 13 nt, Human
agcuagacuggug

SEQ ID NO: 2765488 - RNA, 21 nt, Human
agcuagacuggugacugauuc

SEQ ID NO: 2765489 - RNA, 17 nt, Human
agcuagacuggugacug

SEQ ID NO: 2765490 - RNA, 16 nt, Human
agcuagacuggugacu

SEQ ID NO: 2765491 - RNA, 14 nt, Human
agcuagacugguga

SEQ ID NO: 2765492 - RNA, 18 nt, Human
agcuacuugggaggcuga

SEQ ID NO: 2765493 - RNA, 17 nt, Human
agcuacuugggaggcug

SEQ ID NO: 2765494 - RNA, 18 nt, Human
agccccgugggguuccuc

SEQ ID NO: 2765495 - RNA, 18 nt, Human
agcccauggcacucuaug

SEQ ID NO: 2765496 - RNA, 20 nt, Human
agccucauguccacugguuc

SEQ ID NO: 2765497 - RNA, 15 nt, Human
agccucauguccacu

SEQ ID NO: 2765498 - RNA, 22 nt, Human
agccugaaagaggaaugaagua

SEQ ID NO: 2765499 - RNA, 16 nt, Human
agccauguuuauuaca

SEQ ID NO: 2765500 - RNA, 14 nt, Human
agccauguuuauua

SEQ ID NO: 2765501 - RNA, 13 nt, Human
agccauguuuauu

SEQ ID NO: 2765502 - RNA, 19 nt, Human
agccagacuggcacaguuu

SEQ ID NO: 2765503 - RNA, 14 nt, Human
agccagacuggcac

SEQ ID NO: 2765504 - RNA, 14 nt, Human
ugaugaucuuuaaa

SEQ ID NO: 2765505 - RNA, 17 nt, Human
ugaugaucuuuaaaaua

SEQ ID NO: 2765506 - RNA, 12 nt, Human
ugauuaaaccaa

SEQ ID NO: 2765507 - RNA, 14 nt, Human
ugauuaccagggac

SEQ ID NO: 2765508 - RNA, 22 nt, Human
ugauccaguuuuguuuggacca

SEQ ID NO: 2765509 - RNA, 20 nt, Human
ugauccagcagauuauucac

SEQ ID NO: 2765510 - RNA, 21 nt, Human
ugauccagcagauuauucacu

SEQ ID NO: 2765511 - RNA, 22 nt, Human
ugauccagcagauuauucacug

SEQ ID NO: 2765512 - RNA, 17 nt, Human
ugaugaagaaguugaua

SEQ ID NO: 2765513 - RNA, 23 nt, Human
agcauaaauguugacaugggaca

SEQ ID NO: 2765514 - RNA, 22 nt, Human
ugaguaacugauuuguaacaag

SEQ ID NO: 2765515 - RNA, 17 nt, Human
agcauuguaaaugugcu

SEQ ID NO: 2765516 - RNA, 18 nt, Human
agcauuguaaaugugcuu

SEQ ID NO: 2765517 - RNA, 17 nt, Human
agcaugucgucaaagcu

SEQ ID NO: 2765518 - RNA, 20 nt, Human
agcaugucgucaaagcugaa

SEQ ID NO: 2765519 - RNA, 12 nt, Human
ugauaugggucu

SEQ ID NO: 2765520 - RNA, 15 nt, Human
ugaaacggaugauuu

SEQ ID NO: 2765521 - RNA, 20 nt, Human
ugaaacggaugauuucuaug

SEQ ID NO: 2765522 - RNA, 19 nt, Human
ugaaacggaugauuucuau

SEQ ID NO: 2765523 - RNA, 18 nt, Human
ugaaacggaugauuucua

SEQ ID NO: 2765524 - RNA, 17 nt, Human
ugaaacggaugauuucu

SEQ ID NO: 2765525 - RNA, 23 nt, Human
ugaaacuuguguaaauacaauuu

SEQ ID NO: 2765526 - RNA, 17 nt, Human
ugaaacuuguguaaaua

SEQ ID NO: 2765527 - RNA, 19 nt, Human
ugaaacucguuaauuugua

SEQ ID NO: 2765528 - RNA, 22 nt, Human
ugaaacugagaugugaacacau

SEQ ID NO: 2765529 - RNA, 22 nt, Human
ugaaaaaguucugcagauaaac

SEQ ID NO: 2765530 - RNA, 20 nt, Human
ugaaaagcuccauuuuuagu

SEQ ID NO: 2765531 - RNA, 21 nt, Human
agacauagaauuaacacauga

SEQ ID NO: 2765532 - RNA, 14 nt, Human
agacauagaauuaa

SEQ ID NO: 2765533 - RNA, 18 nt, Human
agacaucaacagauaaau

SEQ ID NO: 2765534 - RNA, 17 nt, Human
agacaucaacagauaaa

SEQ ID NO: 2765535 - RNA, 15 nt, Human
ucuucacaacagauu

SEQ ID NO: 2765536 - RNA, 14 nt, Human
agaaucacuugaac

SEQ ID NO: 2765537 - RNA, 15 nt, Human
agacuauucaaacag

SEQ ID NO: 2765538 - RNA, 12 nt, Human
agacuauucaaa

SEQ ID NO: 2765539 - RNA, 14 nt, Human
agacuauucaaaca

SEQ ID NO: 2765540 - RNA, 16 nt, Human
agaugcaguucugaag

SEQ ID NO: 2765541 - RNA, 16 nt, Human
ugacacuuaaaaaugg

SEQ ID NO: 2765542 - RNA, 17 nt, Human
ugacacuuaaaaauggu

SEQ ID NO: 2765543 - RNA, 19 nt, Human
agauuuuauuauguaaauc

SEQ ID NO: 2765544 - RNA, 14 nt, Human
agauuuuauuaugu

SEQ ID NO: 2765545 - RNA, 18 nt, Human
agauuuuauuauguaaau

SEQ ID NO: 2765546 - RNA, 17 nt, Human
agauuuuauuauguaaa

SEQ ID NO: 2765547 - RNA, 16 nt, Human
agauuuuauuauguaa

SEQ ID NO: 2765548 - RNA, 15 nt, Human
agauuuuauuaugua

SEQ ID NO: 2765549 - RNA, 24 nt, Human
ugacuucuaaguaaaaccacagca

SEQ ID NO: 2765550 - RNA, 22 nt, Human
ugacuucuaaguaaaaccacag

SEQ ID NO: 2765551 - RNA, 23 nt, Human
ugacuucuaaguaaaaccacagc

SEQ ID NO: 2765552 - RNA, 15 nt, Human
ugacuucuaaguaaa

SEQ ID NO: 2765553 - RNA, 15 nt, Human
agauucccugagcag

SEQ ID NO: 2765554 - RNA, 23 nt, Human
agauuuuuuuguuguuuguuuag

SEQ ID NO: 2765555 - RNA, 19 nt, Human
agauuuuuuuguuguuugu

SEQ ID NO: 2765556 - RNA, 18 nt, Human
agauuuuuuuguuguuug

SEQ ID NO: 2765557 - RNA, 16 nt, Human
agauuuuuuuguuguu

SEQ ID NO: 2765558 - RNA, 15 nt, Human
agauuuuuuuguugu

SEQ ID NO: 2765559 - RNA, 23 nt, Human
agcaacgcaggcccccaggugcc

SEQ ID NO: 2765560 - RNA, 14 nt, Human
agauacuggauugu

SEQ ID NO: 2765561 - RNA, 17 nt, Human
agauacuggauuguacu

SEQ ID NO: 2765562 - RNA, 17 nt, Human
ugaauuuuguguuagag

SEQ ID NO: 2765563 - RNA, 21 nt, Human
ugaauuuuguguuagagauuu

SEQ ID NO: 2765564 - RNA, 22 nt, Human
ugaauggcuuuguauagaaccu

SEQ ID NO: 2765565 - RNA, 19 nt, Human
ugaauggcuuuguauagaa

SEQ ID NO: 2765566 - RNA, 18 nt, Human
ugaauggcuuuguauaga

SEQ ID NO: 2765567 - RNA, 17 nt, Human
ugaauggcuuuguauag

SEQ ID NO: 2765568 - RNA, 11 nt, Human
ugaauggcuuu

SEQ ID NO: 2765569 - RNA, 15 nt, Human
ugaauggcuuuguau

SEQ ID NO: 2765570 - RNA, 12 nt, Human
ugaauggcuuug

SEQ ID NO: 2765571 - RNA, 15 nt, Human
ugaauacuuuauaaa

SEQ ID NO: 2765572 - RNA, 14 nt, Human
agaagcuccaggua

SEQ ID NO: 2765573 - RNA, 13 nt, Human
agaaguugauaug

SEQ ID NO: 2765574 - RNA, 16 nt, Human
agaacucccuuucaac

SEQ ID NO: 2765575 - RNA, 15 nt, Human
agaacucccuuucaa

SEQ ID NO: 2765576 - RNA, 17 nt, Human
agaacucccuuucaaca

SEQ ID NO: 2765577 - RNA, 22 nt, Human
agaaccucuuugucuacaccau

SEQ ID NO: 2765578 - RNA, 21 nt, Human
agaagccccacccugccucac

SEQ ID NO: 2765579 - RNA, 20 nt, Human
ucugcccauccugccccuga

SEQ ID NO: 2765580 - RNA, 19 nt, Human
agaagcaccaaucaugaau

SEQ ID NO: 2765581 - RNA, 19 nt, Human
agaagcaacccaaauguuc

SEQ ID NO: 2765582 - RNA, 22 nt, Human
acuuugugcugggguuaucuga

SEQ ID NO: 2765583 - RNA, 15 nt, Human
agaaacuggaacucu

SEQ ID NO: 2765584 - RNA, 16 nt, Human
agaaacacaacuauau

SEQ ID NO: 2765585 - RNA, 16 nt, Human
agaaagacuauucaaa

SEQ ID NO: 2765586 - RNA, 18 nt, Human
agaaagcagaacagugau

SEQ ID NO: 2765587 - RNA, 17 nt, Human
agaaagcagaacaguga

SEQ ID NO: 2765588 - RNA, 20 nt, Human
agaaagcagaacagugauua

SEQ ID NO: 2765589 - RNA, 20 nt, Human
acuuccagauccuggaaauc

SEQ ID NO: 2765590 - RNA, 12 nt, Human
ucuaguucacuc

SEQ ID NO: 2765591 - RNA, 19 nt, Human
ucuaguucacucuccauuu

SEQ ID NO: 2765592 - RNA, 16 nt, Human
ucuaguucacucucca

SEQ ID NO: 2765593 - RNA, 13 nt, Human
ucuauaauuuaaa

SEQ ID NO: 2765594 - RNA, 18 nt, Human
acuucuaaguaaaaccac

SEQ ID NO: 2765595 - RNA, 19 nt, Human
acuucuaaguaaaaccaca

SEQ ID NO: 2765596 - RNA, 13 nt, Human
acuucuaaguaaa

SEQ ID NO: 2765597 - RNA, 21 nt, Human
acuucuaaguaaaaccacagc

SEQ ID NO: 2765598 - RNA, 17 nt, Human
ucucaaaacugcacugu

SEQ ID NO: 2765599 - RNA, 21 nt, Human
acuugaacccgggaggcagag

SEQ ID NO: 2765600 - RNA, 23 nt, Human
acuugaacccgggaggcagaggu

SEQ ID NO: 2765601 - RNA, 22 nt, Human
acugaagaagcaccaaucauga

SEQ ID NO: 2765602 - RNA, 22 nt, Human
acugucagcuccccucggagaa

SEQ ID NO: 2765603 - RNA, 23 nt, Human
acugucagcuccccucggagaag

SEQ ID NO: 2765604 - RNA, 17 nt, Human
ucuaccaaaaaucucaa

SEQ ID NO: 2765605 - RNA, 17 nt, Human
accaugggauaaaugcc

SEQ ID NO: 2765606 - RNA, 20 nt, Human
acccaaauguucaucaauga

SEQ ID NO: 2765607 - RNA, 16 nt, Human
acccaaauguucauca

SEQ ID NO: 2765608 - RNA, 14 nt, Human
ucagagcugcccuc

SEQ ID NO: 2765609 - RNA, 13 nt, Human
ucagagcugcccu

SEQ ID NO: 2765610 - RNA, 20 nt, Human
ucagaucugccuaaggacuu

SEQ ID NO: 2765611 - RNA, 18 nt, Human
ucagaucugccuaaggac

SEQ ID NO: 2765612 - RNA, 15 nt, Human
ucagaucugccuaag

SEQ ID NO: 2765613 - RNA, 13 nt, Human
ucagaucugccua

SEQ ID NO: 2765614 - RNA, 16 nt, Human
ucagagcugcccucuc

SEQ ID NO: 2765615 - RNA, 15 nt, Human
ucagagcugcccucu

SEQ ID NO: 2765616 - RNA, 17 nt, Human
ucagagcugcccucucc

SEQ ID NO: 2765617 - RNA, 15 nt, Human
ucaaaguugccuaaa

SEQ ID NO: 2765618 - RNA, 13 nt, Human
ucaaacagucuca

SEQ ID NO: 2765619 - RNA, 20 nt, Human
ucaaacagucucaggaaauc

SEQ ID NO: 2765620 - RNA, 21 nt, Human
ucaaacagucucaggaaauca

SEQ ID NO: 2765621 - RNA, 22 nt, Human
uauuuuaauaauguuucaaaca

SEQ ID NO: 2765622 - RNA, 19 nt, Human
uauuuuaauaauguuucaa

SEQ ID NO: 2765623 - RNA, 14 nt, Human
uauuuuaaaagaau

SEQ ID NO: 2765624 - RNA, 18 nt, Human
uauuuuaaaagaaugauu

SEQ ID NO: 2765625 - RNA, 13 nt, Human
accaaaaaccagu

SEQ ID NO: 2765626 - RNA, 12 nt, Human
accaaaaaccag

SEQ ID NO: 2765627 - RNA, 14 nt, Human
accaacacgagcag

SEQ ID NO: 2765628 - RNA, 19 nt, Human
accaacacgagcaggcuac

SEQ ID NO: 2765629 - RNA, 16 nt, Human
accacaagacugcaca

SEQ ID NO: 2765630 - RNA, 17 nt, Human
ucacagccagacuggca

SEQ ID NO: 2765631 - RNA, 23 nt, Human
ucacagccagacuggcacaguuu

SEQ ID NO: 2765632 - RNA, 16 nt, Human
ucacagaccuuugaac

SEQ ID NO: 2765633 - RNA, 13 nt, Human
ucaauuuaaaaaa

SEQ ID NO: 2765634 - RNA, 12 nt, Human
ucaauuuaaaaa

SEQ ID NO: 2765635 - RNA, 23 nt, Human
acauugguguuguacucaauuuu

SEQ ID NO: 2765636 - RNA, 22 nt, Human
acauugguguuguacucaauuu

SEQ ID NO: 2765637 - RNA, 16 nt, Human
acauugguguuguacu

SEQ ID NO: 2765638 - RNA, 14 nt, Human
acauugguguugua

SEQ ID NO: 2765639 - RNA, 23 nt, Human
ucaauauuucagauaaucacaau

SEQ ID NO: 2765640 - RNA, 20 nt, Human
uccauuuggaaaucuuuaaa

SEQ ID NO: 2765641 - RNA, 19 nt, Human
uccauuuggaaaucuuuaa

SEQ ID NO: 2765642 - RNA, 12 nt, Human
uccauuuggaaa

SEQ ID NO: 2765643 - RNA, 17 nt, Human
uccauuuaauaauuaua

SEQ ID NO: 2765644 - RNA, 12 nt, Human
uccauuuaauaa

SEQ ID NO: 2765645 - RNA, 22 nt, Human
uccaugaagauguagaggagaa

SEQ ID NO: 2765646 - RNA, 14 nt, Human
uccagugagacagc

SEQ ID NO: 2765647 - RNA, 20 nt, Human
acgcguugaaauuguaauua

SEQ ID NO: 2765648 - RNA, 18 nt, Human
acgcguugaaauuguaau

SEQ ID NO: 2765649 - RNA, 14 nt, Human
acgcguugaaauug

SEQ ID NO: 2765650 - RNA, 13 nt, Human
acgcguugaaauu

SEQ ID NO: 2765651 - RNA, 14 nt, Human
acgcucucuggccu

SEQ ID NO: 2765652 - RNA, 16 nt, Human
acgcucucuggccuuc

SEQ ID NO: 2765653 - RNA, 15 nt, Human
acgcucucuggccuu

SEQ ID NO: 2765654 - RNA, 14 nt, Human
acggaugauuucua

SEQ ID NO: 2765655 - RNA, 15 nt, Human
acggaugauuucuau

SEQ ID NO: 2765656 - RNA, 17 nt, Human
acgcucucuggccuucg

SEQ ID NO: 2765657 - RNA, 17 nt, Human
accugagccccaaaagg

SEQ ID NO: 2765658 - RNA, 12 nt, Human
accugagcccca

SEQ ID NO: 2765659 - RNA, 16 nt, Human
ucauaauaaguugcau

SEQ ID NO: 2765660 - RNA, 17 nt, Human
uccucuccccaugaugu

SEQ ID NO: 2765661 - RNA, 21 nt, Human
uccugaaaacccuugccaugu

SEQ ID NO: 2765662 - RNA, 23 nt, Human
uccgugcuaaggacuuguuagau

SEQ ID NO: 2765663 - RNA, 16 nt, Human
uccgugcuaaggacuu

SEQ ID NO: 2765664 - RNA, 18 nt, Human
uccgugcuaaggacuugu

SEQ ID NO: 2765665 - RNA, 17 nt, Human
uccgugcuaaggacuug

SEQ ID NO: 2765666 - RNA, 14 nt, Human
acuccagaaaguga

SEQ ID NO: 2765667 - RNA, 14 nt, Human
ucccuccaccuccc

SEQ ID NO: 2765668 - RNA, 17 nt, Human
ucccuccaccucccugc

SEQ ID NO: 2765669 - RNA, 15 nt, Human
ucccuccaccucccu

SEQ ID NO: 2765670 - RNA, 19 nt, Human
ucccuccaccucccugcaa

SEQ ID NO: 2765671 - RNA, 20 nt, Human
acucauuuuaaaaaauggaa

SEQ ID NO: 2765672 - RNA, 21 nt, Human
acuccaaacugacucuuaaga

SEQ ID NO: 2765673 - RNA, 20 nt, Human
acuagaguuuagcuggaaaa

SEQ ID NO: 2765674 - RNA, 24 nt, Human
uccccuccucugcuugccaucccu

SEQ ID NO: 2765675 - RNA, 18 nt, Human
uccccuccucugcuugcc

SEQ ID NO: 2765676 - RNA, 15 nt, Human
uccccuccucugcuu

SEQ ID NO: 2765677 - RNA, 14 nt, Human
uccccuccucugcu

SEQ ID NO: 2765678 - RNA, 13 nt, Human
acuauucaaacag

SEQ ID NO: 2765679 - RNA, 14 nt, Human
acuauucaaacagu

SEQ ID NO: 2765680 - RNA, 16 nt, Human
acuauucaaacagucu

SEQ ID NO: 2765681 - RNA, 18 nt, Human
acuauucaaacagucuca

SEQ ID NO: 2765682 - RNA, 13 nt, Human
acacaacuauauu

SEQ ID NO: 2765683 - RNA, 13 nt, Human
uaggauguugaaa

SEQ ID NO: 2765684 - RNA, 14 nt, Human
uagaggguguguaa

SEQ ID NO: 2765685 - RNA, 18 nt, Human
acaaaguauuaagcauau

SEQ ID NO: 2765686 - RNA, 13 nt, Human
acaaaguauuaag

SEQ ID NO: 2765687 - RNA, 16 nt, Human
acaaaguauuaagcau

SEQ ID NO: 2765688 - RNA, 15 nt, Human
acaaaguauuaagca

SEQ ID NO: 2765689 - RNA, 14 nt, Human
acaaaaacacagca

SEQ ID NO: 2765690 - RNA, 15 nt, Human
acaaaaacacagcaa

SEQ ID NO: 2765691 - RNA, 13 nt, Human
acaaaaacacagc

SEQ ID NO: 2765692 - RNA, 13 nt, Human
uagacacacauga

SEQ ID NO: 2765693 - RNA, 15 nt, Human
uagaaacacaacuau

SEQ ID NO: 2765694 - RNA, 16 nt, Human
uagaacucccuuucaa

SEQ ID NO: 2765695 - RNA, 17 nt, Human
uagaacucccuuucaac

SEQ ID NO: 2765696 - RNA, 23 nt, Human
uaugcuauuucuauauuuucauu

SEQ ID NO: 2765697 - RNA, 22 nt, Human
uaugcuauuucuauauuuucau

SEQ ID NO: 2765698 - RNA, 18 nt, Human
uaugcuauuucuauauuu

SEQ ID NO: 2765699 - RNA, 16 nt, Human
uaugcuauuucuauau

SEQ ID NO: 2765700 - RNA, 15 nt, Human
uaugcuauuucuaua

SEQ ID NO: 2765701 - RNA, 14 nt, Human
uaugcuauuucuau

SEQ ID NO: 2765702 - RNA, 18 nt, Human
acagcaagggugauggga

SEQ ID NO: 2765703 - RNA, 21 nt, Human
uaugaaacuuguguaaauaca

SEQ ID NO: 2765704 - RNA, 19 nt, Human
uaugaaacuuguguaaaua

SEQ ID NO: 2765705 - RNA, 14 nt, Human
uaugaaacuugugu

SEQ ID NO: 2765706 - RNA, 23 nt, Human
acagcuguaugauucccagccag

SEQ ID NO: 2765707 - RNA, 20 nt, Human
acagcuguaugauucccagc

SEQ ID NO: 2765708 - RNA, 19 nt, Human
acagcuguaugauucccag

SEQ ID NO: 2765709 - RNA, 14 nt, Human
acagcuguaugauu

SEQ ID NO: 2765710 - RNA, 14 nt, Human
uaucacaaaucuua

SEQ ID NO: 2765711 - RNA, 16 nt, Human
uaucacaaaucuuaac

SEQ ID NO: 2765712 - RNA, 20 nt, Human
uaucacaaaucuuaacuuga

SEQ ID NO: 2765713 - RNA, 14 nt, Human
acagaccuuugaac

SEQ ID NO: 2765714 - RNA, 19 nt, Human
acagaaagcagaacaguga

SEQ ID NO: 2765715 - RNA, 18 nt, Human
uauagauuagaauucugu

SEQ ID NO: 2765716 - RNA, 12 nt, Human
uauaggaauuga

SEQ ID NO: 2765717 - RNA, 19 nt, Human
uauaggaauugacccacaa

SEQ ID NO: 2765718 - RNA, 16 nt, Human
uauaggugcuacaaaa

SEQ ID NO: 2765719 - RNA, 19 nt, Human
acacuaagagagaaugaga

SEQ ID NO: 2765720 - RNA, 13 nt, Human
acacucaaaucaa

SEQ ID NO: 2765721 - RNA, 17 nt, Human
acacucaaaucaagaaa

SEQ ID NO: 2765722 - RNA, 13 nt, Human
aauuacauuugua

SEQ ID NO: 2765723 - RNA, 14 nt, Human
aauuacauuuguau

SEQ ID NO: 2765724 - RNA, 16 nt, Human
uaccaugccauuuaaa

SEQ ID NO: 2765725 - RNA, 19 nt, Human
uaccagggacugaggggag

SEQ ID NO: 2765726 - RNA, 13 nt, Human
aauguucaucaau

SEQ ID NO: 2765727 - RNA, 20 nt, Human
aauguucaucaaugaaugaa

SEQ ID NO: 2765728 - RNA, 16 nt, Human
aauguucaucaaugaa

SEQ ID NO: 2765729 - RNA, 23 nt, Human
aaugauuaugaauuacauuugua

SEQ ID NO: 2765730 - RNA, 22 nt, Human
aaugagagacacacugaagaag

SEQ ID NO: 2765731 - RNA, 23 nt, Human
uaauuauaucugaggaauucugu

SEQ ID NO: 2765732 - RNA, 22 nt, Human
uaauuauaucugaggaauucug

SEQ ID NO: 2765733 - RNA, 21 nt, Human
uaauuauaucugaggaauucu

SEQ ID NO: 2765734 - RNA, 19 nt, Human
uaauuauaucugaggaauu

SEQ ID NO: 2765735 - RNA, 19 nt, Human
uaauuauaugcuauuucua

SEQ ID NO: 2765736 - RNA, 18 nt, Human
uaauuauaugcuauuucu

SEQ ID NO: 2765737 - RNA, 14 nt, Human
uaauuauaugcuau

SEQ ID NO: 2765738 - RNA, 16 nt, Human
aaugauuucauucaau

SEQ ID NO: 2765739 - RNA, 21 nt, Human
uaauuuuuauauuugaaauau

SEQ ID NO: 2765740 - RNA, 19 nt, Human
uaauuuuuauauuugaaau

SEQ ID NO: 2765741 - RNA, 18 nt, Human
uaauuuuuauauuugaaa

SEQ ID NO: 2765742 - RNA, 22 nt, Human
uaauuccguagguuauuuucag

SEQ ID NO: 2765743 - RNA, 14 nt, Human
uacaccauuaugug

SEQ ID NO: 2765744 - RNA, 13 nt, Human
uacagaauuuuau

SEQ ID NO: 2765745 - RNA, 17 nt, Human
uacagagacagaaagca

SEQ ID NO: 2765746 - RNA, 20 nt, Human
aauguaagggaaacugccag

SEQ ID NO: 2765747 - RNA, 21 nt, Human
aaugcuguauuuuaaaagaau

SEQ ID NO: 2765748 - RNA, 20 nt, Human
aaugcuguauuuuaaaagaa

SEQ ID NO: 2765749 - RNA, 22 nt, Human
aaugcuguauuuuaaaagaaug

SEQ ID NO: 2765750 - RNA, 21 nt, Human
uacaaaaaaaaaaaaaaauua

SEQ ID NO: 2765751 - RNA, 16 nt, Human
aaucagccuaguugau

SEQ ID NO: 2765752 - RNA, 22 nt, Human
uaaggacuucuuuaauuuugga

SEQ ID NO: 2765753 - RNA, 16 nt, Human
uaaggacuucuuuaau

SEQ ID NO: 2765754 - RNA, 15 nt, Human
uaaggacuucuuuaa

SEQ ID NO: 2765755 - RNA, 14 nt, Human
uaaggacuucuuua

SEQ ID NO: 2765756 - RNA, 19 nt, Human
uaaggaaaaguuuaauauu

SEQ ID NO: 2765757 - RNA, 17 nt, Human
uaaggaaaaguuuaaua

SEQ ID NO: 2765758 - RNA, 21 nt, Human
uaaggaaaaguuuaauauuaa

SEQ ID NO: 2765759 - RNA, 16 nt, Human
uaaggaaaaguuuaau

SEQ ID NO: 2765760 - RNA, 13 nt, Human
uaagcauauauuu

SEQ ID NO: 2765761 - RNA, 14 nt, Human
uaagcaaaauguga

SEQ ID NO: 2765762 - RNA, 21 nt, Human
uaagcaaaaugugauauguac

SEQ ID NO: 2765763 - RNA, 15 nt, Human
uaagcaaaaugugau

SEQ ID NO: 2765764 - RNA, 18 nt, Human
uaaguuuuuuuuuaaaaa

SEQ ID NO: 2765765 - RNA, 19 nt, Human
uaaggacuuguuagaucua

SEQ ID NO: 2765766 - RNA, 16 nt, Human
uaaggacuuguuagau

SEQ ID NO: 2765767 - RNA, 15 nt, Human
uaaggacuuguuaga

SEQ ID NO: 2765768 - RNA, 13 nt, Human
uaaggacuuguua

SEQ ID NO: 2765769 - RNA, 18 nt, Human
uaagguuaccuuuguucc

SEQ ID NO: 2765770 - RNA, 13 nt, Human
uaaguaaaaccac

SEQ ID NO: 2765771 - RNA, 15 nt, Human
uaaguaaaaccacag

SEQ ID NO: 2765772 - RNA, 16 nt, Human
uaaguaaaaccacagc

SEQ ID NO: 2765773 - RNA, 17 nt, Human
uaaguaaaaccacagca

SEQ ID NO: 2765774 - RNA, 18 nt, Human
uaaguaaaaccacagcag

SEQ ID NO: 2765775 - RNA, 19 nt, Human
uaaguaaaaccacagcagu

SEQ ID NO: 2765776 - RNA, 20 nt, Human
uaaguaaugauaacuggaaa

SEQ ID NO: 2765777 - RNA, 16 nt, Human
aaucccauuauucaaa

SEQ ID NO: 2765778 - RNA, 14 nt, Human
aaucccauuauuca

SEQ ID NO: 2765779 - RNA, 21 nt, Human
aaucccauuauucaaaguugc

SEQ ID NO: 2765780 - RNA, 20 nt, Human
aauccucaguuuuugugaaa

SEQ ID NO: 2765781 - RNA, 13 nt, Human
uaagaagugaaaa

SEQ ID NO: 2765782 - RNA, 21 nt, Human
uaacuuccuuggacucauuuu

SEQ ID NO: 2765783 - RNA, 15 nt, Human
uaacauguuaaacca

SEQ ID NO: 2765784 - RNA, 12 nt, Human
uaacauguuaaa

SEQ ID NO: 2765785 - RNA, 20 nt, Human
aauagcuagacuggugacug

SEQ ID NO: 2765786 - RNA, 14 nt, Human
aauagcuagacugg

SEQ ID NO: 2765787 - RNA, 21 nt, Human
aauagcuagacuggugacuga

SEQ ID NO: 2765788 - RNA, 19 nt, Human
aauagucaaauugugugaa

SEQ ID NO: 2765789 - RNA, 18 nt, Human
aauaccaugccauuuaaa

SEQ ID NO: 2765790 - RNA, 23 nt, Human
aauaccacaggaaccacaagacu

SEQ ID NO: 2765791 - RNA, 23 nt, Human
aauacaucccuuaccugggaaag

SEQ ID NO: 2765792 - RNA, 16 nt, Human
uaaaugugcuuuuaaa

SEQ ID NO: 2765793 - RNA, 13 nt, Human
aagcauuguaaau

SEQ ID NO: 2765794 - RNA, 16 nt, Human
aagcauuuagauguau

SEQ ID NO: 2765795 - RNA, 20 nt, Human
aagcucacagaccuuugaac

SEQ ID NO: 2765796 - RNA, 14 nt, Human
aagcuccagguaga

SEQ ID NO: 2765797 - RNA, 13 nt, Human
aagcuccagguag

SEQ ID NO: 2765798 - RNA, 20 nt, Human
guuauuauauuuacaaaugg

SEQ ID NO: 2765799 - RNA, 23 nt, Human
aagaggaaugaaguacucauaca

SEQ ID NO: 2765800 - RNA, 17 nt, Human
aagacugcauuauauuu

SEQ ID NO: 2765801 - RNA, 16 nt, Human
aagacugcacaucaaa

SEQ ID NO: 2765802 - RNA, 13 nt, Human
aagaugaaaauau

SEQ ID NO: 2765803 - RNA, 14 nt, Human
aagaugaaaauauu

SEQ ID NO: 2765804 - RNA, 13 nt, Human
aagauguagagga

SEQ ID NO: 2765805 - RNA, 20 nt, Human
uaaaagacagugaaagaaaa

SEQ ID NO: 2765806 - RNA, 16 nt, Human
uaaaagaauauuuuaa

SEQ ID NO: 2765807 - RNA, 23 nt, Human
uaaaagaauauuuuaacuuccuu

SEQ ID NO: 2765808 - RNA, 12 nt, Human
uaaaagaaugau

SEQ ID NO: 2765809 - RNA, 14 nt, Human
aaguaaugauaacu

SEQ ID NO: 2765810 - RNA, 15 nt, Human
aaguauuaagcauau

SEQ ID NO: 2765811 - RNA, 14 nt, Human
aaguauuaagcaua

SEQ ID NO: 2765812 - RNA, 18 nt, Human
aaguauuaagcauauauu

SEQ ID NO: 2765813 - RNA, 17 nt, Human
aaguauuaagcauauau

SEQ ID NO: 2765814 - RNA, 16 nt, Human
aaguauuaagcauaua

SEQ ID NO: 2765815 - RNA, 13 nt, Human
aaguauuagaaua

SEQ ID NO: 2765816 - RNA, 16 nt, Human
aagucuuucacauuua

SEQ ID NO: 2765817 - RNA, 22 nt, Human
aagucuuauauauuguagauaa

SEQ ID NO: 2765818 - RNA, 22 nt, Human
guugccuaaauccauuuggaaa

SEQ ID NO: 2765819 - RNA, 17 nt, Human
guugccuaaauccauuu

SEQ ID NO: 2765820 - RNA, 19 nt, Human
guuuaauauuaaagccaug

SEQ ID NO: 2765821 - RNA, 20 nt, Human
guuuaauauuaaagccaugu

SEQ ID NO: 2765822 - RNA, 14 nt, Human
aagguacuucaaau

SEQ ID NO: 2765823 - RNA, 19 nt, Human
aagggugaugggaaagcau

SEQ ID NO: 2765824 - RNA, 13 nt, Human
aagguacuucaaa

SEQ ID NO: 2765825 - RNA, 21 nt, Human
guauaaaauaauuuuuauauu

SEQ ID NO: 2765826 - RNA, 15 nt, Human
guauaaaauaauuuu

SEQ ID NO: 2765827 - RNA, 16 nt, Human
guauauuuuauaucaa

SEQ ID NO: 2765828 - RNA, 16 nt, Human
aaauguaagggaaacu

SEQ ID NO: 2765829 - RNA, 17 nt, Human
guaguguuggagaagaa

SEQ ID NO: 2765830 - RNA, 20 nt, Human
guaguguuggagaagaacug

SEQ ID NO: 2765831 - RNA, 15 nt, Human
aaauggguuuuacug

SEQ ID NO: 2765832 - RNA, 14 nt, Human
aaauggguuuuacu

SEQ ID NO: 2765833 - RNA, 14 nt, Human
aaauuguaauuaua

SEQ ID NO: 2765834 - RNA, 15 nt, Human
aaauuguaauuauau

SEQ ID NO: 2765835 - RNA, 16 nt, Human
gucaaauugugugaaa

SEQ ID NO: 2765836 - RNA, 18 nt, Human
guauguacuucaugcugu

SEQ ID NO: 2765837 - RNA, 16 nt, Human
aacagauaaauaguuu

SEQ ID NO: 2765838 - RNA, 22 nt, Human
aacagugauuaccagggacuga

SEQ ID NO: 2765839 - RNA, 15 nt, Human
aacagugauuaccag

SEQ ID NO: 2765840 - RNA, 15 nt, Human
aacacagcaagggug

SEQ ID NO: 2765841 - RNA, 22 nt, Human
aacaaugcuguauuuuaaaaga

SEQ ID NO: 2765842 - RNA, 17 nt, Human
aacaaugcuguauuuua

SEQ ID NO: 2765843 - RNA, 16 nt, Human
aacacaacuauauugu

SEQ ID NO: 2765844 - RNA, 15 nt, Human
aacacaacuauauug

SEQ ID NO: 2765845 - RNA, 15 nt, Human
aacaaugcuguauuu

SEQ ID NO: 2765846 - RNA, 14 nt, Human
aacaaugcuguauu

SEQ ID NO: 2765847 - RNA, 12 nt, Human
aacaauaaaaga

SEQ ID NO: 2765848 - RNA, 20 nt, Human
aaauuuuuucucuaggaaau

SEQ ID NO: 2765849 - RNA, 15 nt, Human
gugaacuugaaauuu

SEQ ID NO: 2765850 - RNA, 14 nt, Human
gugaacuugaaauu

SEQ ID NO: 2765851 - RNA, 21 nt, Human
gugagaugcuagaacucccuu

SEQ ID NO: 2765852 - RNA, 12 nt, Human
aacugaaaucau

SEQ ID NO: 2765853 - RNA, 19 nt, Human
aacugcacugucaagauga

SEQ ID NO: 2765854 - RNA, 19 nt, Human
aacuggacugguucaaaug

SEQ ID NO: 2765855 - RNA, 17 nt, Human
aacugggacaggggaga

SEQ ID NO: 2765856 - RNA, 17 nt, Human
gugaugggaaagcauug

SEQ ID NO: 2765857 - RNA, 18 nt, Human
aacuuccagauccuggaa

SEQ ID NO: 2765858 - RNA, 21 nt, Human
aacuucagcgguuuauauaag

SEQ ID NO: 2765859 - RNA, 18 nt, Human
aacccaaguccaagcaua

SEQ ID NO: 2765860 - RNA, 23 nt, Human
aacccaaauguucaucaaugaau

SEQ ID NO: 2765861 - RNA, 16 nt, Human
aaccucuuugucuaca

SEQ ID NO: 2765862 - RNA, 18 nt, Human
aaccugagccccaaaagg

SEQ ID NO: 2765863 - RNA, 20 nt, Human
aaccugagccccaaaaggua

SEQ ID NO: 2765864 - RNA, 16 nt, Human
gucuuucacauuuaaa

SEQ ID NO: 2765865 - RNA, 18 nt, Human
aaccuugaaaacuuuaug

SEQ ID NO: 2765866 - RNA, 23 nt, Human
aacuaucucauuuccaagcaagu

SEQ ID NO: 2765867 - RNA, 21 nt, Human
aacuagaguuuagcuggaaaa

SEQ ID NO: 2765868 - RNA, 21 nt, Human
cuggaaaucaggguuaguauu

SEQ ID NO: 2765869 - RNA, 10 nt, Human
cugggacagg

SEQ ID NO: 2765870 - RNA, 18 nt, Human
cuggugacugauucuuca

SEQ ID NO: 2765871 - RNA, 22 nt, Human
cugggcagcugccuccccuccu

SEQ ID NO: 2765872 - RNA, 21 nt, Human
cugggcagcugccuccccucc

SEQ ID NO: 2765873 - RNA, 20 nt, Human
cugggcagcugccuccccuc

SEQ ID NO: 2765874 - RNA, 19 nt, Human
cugggcagcugccuccccu

SEQ ID NO: 2765875 - RNA, 16 nt, Human
cugggcagcugccucc

SEQ ID NO: 2765876 - RNA, 14 nt, Human
cuguacuuuuuggc

SEQ ID NO: 2765877 - RNA, 21 nt, Human
cugucagcuccccucggagaa

SEQ ID NO: 2765878 - RNA, 23 nt, Human
cugucagcuccccucggagaaga

SEQ ID NO: 2765879 - RNA, 18 nt, Human
cugugaacuugaaauuug

SEQ ID NO: 2765880 - RNA, 16 nt, Human
cugugagaugcuagaa

SEQ ID NO: 2765881 - RNA, 20 nt, Human
cuuuguauagaaccucuuug

SEQ ID NO: 2765882 - RNA, 11 nt, Human
cuuuguauaga

SEQ ID NO: 2765883 - RNA, 19 nt, Human
gaaaucaaauaugcaaagc

SEQ ID NO: 2765884 - RNA, 20 nt, Human
gaaaucaaauaugcaaagca

SEQ ID NO: 2765885 - RNA, 22 nt, Human
gaaauauuuauuuuaauaaugu

SEQ ID NO: 2765886 - RNA, 18 nt, Human
gaaauauuuauuuuaaua

SEQ ID NO: 2765887 - RNA, 18 nt, Human
gaaaucaaauaugcaaag

SEQ ID NO: 2765888 - RNA, 17 nt, Human
gaaaucaaauaugcaaa

SEQ ID NO: 2765889 - RNA, 17 nt, Human
gaaauauuuauuuuaau

SEQ ID NO: 2765890 - RNA, 14 nt, Human
gaaagacuauucaa

SEQ ID NO: 2765891 - RNA, 15 nt, Human
gaaagacuauucaaa

SEQ ID NO: 2765892 - RNA, 17 nt, Human
gaaagacuauucaaaca

SEQ ID NO: 2765893 - RNA, 15 nt, Human
cuucacuguaaaaua

SEQ ID NO: 2765894 - RNA, 22 nt, Human
cuucuaaguaaaaccacagcag

SEQ ID NO: 2765895 - RNA, 23 nt, Human
cuucuaaguaaaaccacagcagu

SEQ ID NO: 2765896 - RNA, 12 nt, Human
cuugaugaagaa

SEQ ID NO: 2765897 - RNA, 23 nt, Human
cuugccuuuuucauuauuuuauu

SEQ ID NO: 2765898 - RNA, 22 nt, Human
cuugccuuuuucauuauuuuau

SEQ ID NO: 2765899 - RNA, 20 nt, Human
cuugccuuuuucauuauuuu

SEQ ID NO: 2765900 - RNA, 15 nt, Human
cuugccuuuuucauu

SEQ ID NO: 2765901 - RNA, 14 nt, Human
cuugccuuuuucau

SEQ ID NO: 2765902 - RNA, 13 nt, Human
cuugaugaagaag

SEQ ID NO: 2765903 - RNA, 20 nt, Human
gaaugagagacacacugaag

SEQ ID NO: 2765904 - RNA, 23 nt, Human
gaaugagagacacacugaagaag

SEQ ID NO: 2765905 - RNA, 22 nt, Human
gaaugagagacacacugaagaa

SEQ ID NO: 2765906 - RNA, 13 nt, Human
gaauuuuguguua

SEQ ID NO: 2765907 - RNA, 22 nt, Human
gaauuuuguguuagagauuuuu

SEQ ID NO: 2765908 - RNA, 16 nt, Human
gaauuuuguguuagag

SEQ ID NO: 2765909 - RNA, 11 nt, Human
gaauuaguuuu

SEQ ID NO: 2765910 - RNA, 12 nt, Human
gacacacaugaa

SEQ ID NO: 2765911 - RNA, 13 nt, Human
gacacacugaaga

SEQ ID NO: 2765912 - RNA, 14 nt, Human
gacagugaaagaaa

SEQ ID NO: 2765913 - RNA, 17 nt, Human
gacagucaccucaugga

SEQ ID NO: 2765914 - RNA, 20 nt, Human
gacaguauggcagcuuuccu

SEQ ID NO: 2765915 - RNA, 16 nt, Human
gacacuuaaaaauggu

SEQ ID NO: 2765916 - RNA, 16 nt, Human
gacucuuaagaagacu

SEQ ID NO: 2765917 - RNA, 15 nt, Human
gacucuuaagaagac

SEQ ID NO: 2765918 - RNA, 17 nt, Human
gacucuuaagaagacug

SEQ ID NO: 2765919 - RNA, 22 nt, Human
gacuauucaaacagucucagga

SEQ ID NO: 2765920 - RNA, 15 nt, Human
gagaaucacuugaac

SEQ ID NO: 2765921 - RNA, 14 nt, Human
gagaaucacuugaa

SEQ ID NO: 2765922 - RNA, 18 nt, Human
gacuggugacugauucuu

SEQ ID NO: 2765923 - RNA, 15 nt, Human
gacuggugacugauu

SEQ ID NO: 2765924 - RNA, 12 nt, Human
gacuggugacug

SEQ ID NO: 2765925 - RNA, 14 nt, Human
gcacaguuuucuga

SEQ ID NO: 2765926 - RNA, 17 nt, Human
gcacaguuuucugagaa

SEQ ID NO: 2765927 - RNA, 18 nt, Human
gcacaguuuucugagaaa

SEQ ID NO: 2765928 - RNA, 19 nt, Human
gcagggacuugaacccaua

SEQ ID NO: 2765929 - RNA, 22 nt, Human
gcagcugccuccccuccucugc

SEQ ID NO: 2765930 - RNA, 18 nt, Human
gcagcugccuccccuccu

SEQ ID NO: 2765931 - RNA, 17 nt, Human
gcagcugccuccccucc

SEQ ID NO: 2765932 - RNA, 16 nt, Human
gcagcugccuccccuc

SEQ ID NO: 2765933 - RNA, 15 nt, Human
gcagcugccuccccu

SEQ ID NO: 2765934 - RNA, 13 nt, Human
gcagcugccuccc

SEQ ID NO: 2765935 - RNA, 12 nt, Human
gcagcugccucc

SEQ ID NO: 2765936 - RNA, 11 nt, Human
gcagcugccuc

SEQ ID NO: 2765937 - RNA, 23 nt, Human
gcauaacauaaaucugugaacuu

SEQ ID NO: 2765938 - RNA, 21 nt, Human
gcauaacauaaaucugugaac

SEQ ID NO: 2765939 - RNA, 15 nt, Human
gcauaacauaaaucu

SEQ ID NO: 2765940 - RNA, 14 nt, Human
gaugugaacacauc

SEQ ID NO: 2765941 - RNA, 16 nt, Human
gaugugaacacaucag

SEQ ID NO: 2765942 - RNA, 23 nt, Human
gauuagaauucuguauagauuag

SEQ ID NO: 2765943 - RNA, 15 nt, Human
gauuagaauucugua

SEQ ID NO: 2765944 - RNA, 14 nt, Human
gauuagaauucugu

SEQ ID NO: 2765945 - RNA, 14 nt, Human
gauuaccagggacu

SEQ ID NO: 2765946 - RNA, 18 nt, Human
gauuagagaguguugaaa

SEQ ID NO: 2765947 - RNA, 14 nt, Human
gauuagagaguguu

SEQ ID NO: 2765948 - RNA, 17 nt, Human
gauuagggagagaagau

SEQ ID NO: 2765949 - RNA, 16 nt, Human
gauuauucacugauuu

SEQ ID NO: 2765950 - RNA, 15 nt, Human
gauuauucacugauu

SEQ ID NO: 2765951 - RNA, 13 nt, Human
gauuauucacuga

SEQ ID NO: 2765952 - RNA, 22 nt, Human
gauccaguuuuguuuggaccaa

SEQ ID NO: 2765953 - RNA, 17 nt, Human
gauccaguuuuguuugg

SEQ ID NO: 2765954 - RNA, 11 nt, Human
gauccaguuuu

SEQ ID NO: 2765955 - RNA, 20 nt, Human
gauauguaccuaacgaagua

SEQ ID NO: 2765956 - RNA, 16 nt, Human
gaguuuagcuggaaaa

SEQ ID NO: 2765957 - RNA, 16 nt, Human
gaguuuaaauuguaau

SEQ ID NO: 2765958 - RNA, 20 nt, Human
gcuccacuuggucugugaga

SEQ ID NO: 2765959 - RNA, 16 nt, Human
gcugaaacaacaaaua

SEQ ID NO: 2765960 - RNA, 15 nt, Human
gcucugcccauccug

SEQ ID NO: 2765961 - RNA, 21 nt, Human
gcucugcccauccugccccug

SEQ ID NO: 2765962 - RNA, 12 nt, Human
gcuguauuuuaa

SEQ ID NO: 2765963 - RNA, 13 nt, Human
gcuguauuuuaaa

SEQ ID NO: 2765964 - RNA, 19 nt, Human
gcuuccuggcaauagucaa

SEQ ID NO: 2765965 - RNA, 11 nt, Human
gcuuuucugau

SEQ ID NO: 2765966 - RNA, 16 nt, Human
gcuuuucugauccagu

SEQ ID NO: 2765967 - RNA, 15 nt, Human
gcuuuucugauccag

SEQ ID NO: 2765968 - RNA, 12 nt, Human
gcuuuucugauc

SEQ ID NO: 2765969 - RNA, 13 nt, Human
ggaaaucuuuaaa

SEQ ID NO: 2765970 - RNA, 20 nt, Human
gccuccauccugaggcucca

SEQ ID NO: 2765971 - RNA, 16 nt, Human
gccuccauccugaggc

SEQ ID NO: 2765972 - RNA, 15 nt, Human
gccuccauccugagg

SEQ ID NO: 2765973 - RNA, 18 nt, Human
gcguugaaauuguaauua

SEQ ID NO: 2765974 - RNA, 15 nt, Human
gcuacugucagcucc

SEQ ID NO: 2765975 - RNA, 17 nt, Human
gcuacuugggaggcuga

SEQ ID NO: 2765976 - RNA, 24 nt, Human
gcguugaaauuguaauuauaucug

SEQ ID NO: 2765977 - RNA, 23 nt, Human
gcguugaaauuguaauuauaucu

SEQ ID NO: 2765978 - RNA, 18 nt, Human
gcuacaaaaacacagcaa

SEQ ID NO: 2765979 - RNA, 19 nt, Human
gcuacaaaaacacagcaag

SEQ ID NO: 2765980 - RNA, 17 nt, Human
gcuacaaaaacacagca

SEQ ID NO: 2765981 - RNA, 22 nt, Human
gccaugugcuaguaauuggaaa

SEQ ID NO: 2765982 - RNA, 22 nt, Human
gccaguuauggcuauaggugcu

SEQ ID NO: 2765983 - RNA, 21 nt, Human
gccagcaguucagagcugccc

SEQ ID NO: 2765984 - RNA, 20 nt, Human
gccagcaguucagagcugcc

SEQ ID NO: 2765985 - RNA, 19 nt, Human
gccagcaguucagagcugc

SEQ ID NO: 2765986 - RNA, 14 nt, Human
gccagcaguucaga

SEQ ID NO: 2765987 - RNA, 13 nt, Human
gccagcaguucag

SEQ ID NO: 2765988 - RNA, 12 nt, Human
ggauaaaugcca

SEQ ID NO: 2765989 - RNA, 22 nt, Human
ggauaauaaggaaaaguuuaau

SEQ ID NO: 2765990 - RNA, 12 nt, Human
ggauggcaagau

SEQ ID NO: 2765991 - RNA, 23 nt, Human
ggccuucggccuccauccugagg

SEQ ID NO: 2765992 - RNA, 22 nt, Human
ggccuucggccuccauccugag

SEQ ID NO: 2765993 - RNA, 14 nt, Human
aaagacuauucaaa

SEQ ID NO: 2765994 - RNA, 15 nt, Human
aaagacuauucaaac

SEQ ID NO: 2765995 - RNA, 17 nt, Human
aaagcagggacuugaac

SEQ ID NO: 2765996 - RNA, 16 nt, Human
ggugugaccacugcag

SEQ ID NO: 2765997 - RNA, 16 nt, Human
gguuuagaaagcuugc

SEQ ID NO: 2765998 - RNA, 13 nt, Human
aaaguugaauuua

SEQ ID NO: 2765999 - RNA, 12 nt, Human
aaaguugaauuu

SEQ ID NO: 2766000 - RNA, 22 nt, Human
aaaguugaauuuauuggcuuuu

SEQ ID NO: 2766001 - RNA, 16 nt, Human
aaaguugaauuuauug

SEQ ID NO: 2766002 - RNA, 19 nt, Human
aaaguuuaauauuaaagcc

SEQ ID NO: 2766003 - RNA, 16 nt, Human
aaaguuuaauauuaaa

SEQ ID NO: 2766004 - RNA, 14 nt, Human
aaaguuuaauauua

SEQ ID NO: 2766005 - RNA, 22 nt, Human
aaaguuuaauauuaaagccaug

SEQ ID NO: 2766006 - RNA, 21 nt, Human
aaaguuuaauauuaaagccau

SEQ ID NO: 2766007 - RNA, 20 nt, Human
aaaguuuaauauuaaagcca

SEQ ID NO: 2766008 - RNA, 20 nt, Human
aaauaauuuuuauauuugaa

SEQ ID NO: 2766009 - RNA, 18 nt, Human
aaauaauuuuuauauuug

SEQ ID NO: 2766010 - RNA, 15 nt, Human
aaauaauuuuuauau

SEQ ID NO: 2766011 - RNA, 15 nt, Human
aaaaugugauaugua

SEQ ID NO: 2766012 - RNA, 22 nt, Human
aaaauuuuuucucuaggaaaua

SEQ ID NO: 2766013 - RNA, 20 nt, Human
aaacaagcacuaaacaaaga

SEQ ID NO: 2766014 - RNA, 20 nt, Human
aaacagucucaggaaaucaa

SEQ ID NO: 2766015 - RNA, 15 nt, Human
gggcgugguggugag

SEQ ID NO: 2766016 - RNA, 19 nt, Human
aaaaguauguuagugcaaa

SEQ ID NO: 2766017 - RNA, 17 nt, Human
gggauuguaaaauggug

SEQ ID NO: 2766018 - RNA, 16 nt, Human
gggauuguaaaauggu

SEQ ID NO: 2766019 - RNA, 13 nt, Human
aaaaccacagcag

SEQ ID NO: 2766020 - RNA, 17 nt, Human
aaaagaugaaaauauuu

SEQ ID NO: 2766021 - RNA, 13 nt, Human
aaaacucauuuuu

SEQ ID NO: 2766022 - RNA, 22 nt, Human
aaaaauggaacauaaaauacaa

SEQ ID NO: 2766023 - RNA, 12 nt, Human
aaaaccacagca

SEQ ID NO: 2766024 - RNA, 14 nt, Human
aaaaauauuuuaug

SEQ ID NO: 2766025 - RNA, 19 nt, Human
gggacauuugcucauggaa

SEQ ID NO: 2766026 - RNA, 21 nt, Human
gggacauuugcucauggaauu

SEQ ID NO: 2766027 - RNA, 20 nt, Human
gggacauuugcucauggaau

SEQ ID NO: 2766028 - RNA, 20 nt, Human
cagccagacuggcacaguuu

SEQ ID NO: 2766029 - RNA, 22 nt, Human
cagcaguucagagcugcccucu

SEQ ID NO: 2766030 - RNA, 21 nt, Human
cagcaguucagagcugcccuc

SEQ ID NO: 2766031 - RNA, 20 nt, Human
cagcaguucagagcugcccu

SEQ ID NO: 2766032 - RNA, 19 nt, Human
cagcaguucagagcugccc

SEQ ID NO: 2766033 - RNA, 18 nt, Human
cagcaguucagagcugcc

SEQ ID NO: 2766034 - RNA, 19 nt, Human
cagccccgugggguuccuc

SEQ ID NO: 2766035 - RNA, 23 nt, Human
cagccugagcgacagugagacuc

SEQ ID NO: 2766036 - RNA, 22 nt, Human
cagccugagcgacagugagacu

SEQ ID NO: 2766037 - RNA, 22 nt, Human
caguauuguacaaaguauuaag

SEQ ID NO: 2766038 - RNA, 19 nt, Human
cagggaggacgcucucugg

SEQ ID NO: 2766039 - RNA, 22 nt, Human
cagggaggacgcucucuggccu

SEQ ID NO: 2766040 - RNA, 16 nt, Human
cagcuuauucacaaga

SEQ ID NO: 2766041 - RNA, 19 nt, Human
caggaaaucaaauaugcaa

SEQ ID NO: 2766042 - RNA, 21 nt, Human
caggaaaucaaauaugcaaag

SEQ ID NO: 2766043 - RNA, 24 nt, Human
caggacagcccuucuuuccacaga

SEQ ID NO: 2766044 - RNA, 23 nt, Human
caggacagcccuucuuuccacag

SEQ ID NO: 2766045 - RNA, 18 nt, Human
ccaaauguucaucaauga

SEQ ID NO: 2766046 - RNA, 20 nt, Human
ccaaaaaccaguauuguaca

SEQ ID NO: 2766047 - RNA, 19 nt, Human
ccaaaaaccaguauuguac

SEQ ID NO: 2766048 - RNA, 16 nt, Human
ccaaaaaccaguauug

SEQ ID NO: 2766049 - RNA, 21 nt, Human
cauucuccuaucaccugucuu

SEQ ID NO: 2766050 - RNA, 15 nt, Human
cauuaggauggcuag

SEQ ID NO: 2766051 - RNA, 17 nt, Human
cauagauucccugagca

SEQ ID NO: 2766052 - RNA, 18 nt, Human
cauagauucccugagcag

SEQ ID NO: 2766053 - RNA, 20 nt, Human
cauagcagcuuauucacaag

SEQ ID NO: 2766054 - RNA, 17 nt, Human
caucagcugcugaaaca

SEQ ID NO: 2766055 - RNA, 18 nt, Human
caucagcugcugaaacaa

SEQ ID NO: 2766056 - RNA, 15 nt, Human
caucagcugcugaaa

SEQ ID NO: 2766057 - RNA, 13 nt, Human
caucagcugcuga

SEQ ID NO: 2766058 - RNA, 20 nt, Human
caucagcuugcccuguuaaa

SEQ ID NO: 2766059 - RNA, 16 nt, Human
caugaauuaguuuuau

SEQ ID NO: 2766060 - RNA, 22 nt, Human
cacugguucuucuuggucucag

SEQ ID NO: 2766061 - RNA, 16 nt, Human
cacuugucaauaaaau

SEQ ID NO: 2766062 - RNA, 19 nt, Human
cacuuguguuuugcaagcc

SEQ ID NO: 2766063 - RNA, 22 nt, Human
cacuuguguuuugcaagccaga

SEQ ID NO: 2766064 - RNA, 17 nt, Human
cacuuguguuuugcaag

SEQ ID NO: 2766065 - RNA, 21 nt, Human
cacugcagaagacaguauggc

SEQ ID NO: 2766066 - RNA, 20 nt, Human
cacuagggcagggacaggau

SEQ ID NO: 2766067 - RNA, 21 nt, Human
cacuagggcagggacaggaua

SEQ ID NO: 2766068 - RNA, 14 nt, Human
caaguccaagcaua

SEQ ID NO: 2766069 - RNA, 15 nt, Human
caauucuugccaaau

SEQ ID NO: 2766070 - RNA, 17 nt, Human
caaugcuguauuuuaaa

SEQ ID NO: 2766071 - RNA, 16 nt, Human
caaugcuguauuuuaa

SEQ ID NO: 2766072 - RNA, 15 nt, Human
caaugcuguauuuua

SEQ ID NO: 2766073 - RNA, 18 nt, Human
cacaagacugcacaucaa

SEQ ID NO: 2766074 - RNA, 22 nt, Human
cacacaugaaguccaagcauuu

SEQ ID NO: 2766075 - RNA, 17 nt, Human
cacacaugaaguccaag

SEQ ID NO: 2766076 - RNA, 21 nt, Human
cacagccucuuagaugcaguu

SEQ ID NO: 2766077 - RNA, 17 nt, Human
cacagccucuuagaugc

SEQ ID NO: 2766078 - RNA, 14 nt, Human
auuguaauuauauc

SEQ ID NO: 2766079 - RNA, 14 nt, Human
auuguaaaauggug

SEQ ID NO: 2766080 - RNA, 13 nt, Human
auuguaaaauggu

SEQ ID NO: 2766081 - RNA, 13 nt, Human
auuguaauuauau

SEQ ID NO: 2766082 - RNA, 23 nt, Human
auuguaauaggcguaacuaauuu

SEQ ID NO: 2766083 - RNA, 16 nt, Human
auuacaguauaauuaa

SEQ ID NO: 2766084 - RNA, 15 nt, Human
auuacaguauaauua

SEQ ID NO: 2766085 - RNA, 14 nt, Human
auuacaguauaauu

SEQ ID NO: 2766086 - RNA, 12 nt, Human
auuacaguauaa

SEQ ID NO: 2766087 - RNA, 22 nt, Human
auucauagcagcuuauucacaa

SEQ ID NO: 2766088 - RNA, 19 nt, Human
auucauagcagcuuauuca

SEQ ID NO: 2766089 - RNA, 17 nt, Human
auucaaaguugccuaaa

SEQ ID NO: 2766090 - RNA, 22 nt, Human
auucaaaguugccuaaauccau

SEQ ID NO: 2766091 - RNA, 21 nt, Human
auucaaaguugccuaaaucca

SEQ ID NO: 2766092 - RNA, 20 nt, Human
auucaaaguugccuaaaucc

SEQ ID NO: 2766093 - RNA, 18 nt, Human
auucaaaguugccuaaau

SEQ ID NO: 2766094 - RNA, 18 nt, Human
auuaugaauuacauuugu

SEQ ID NO: 2766095 - RNA, 19 nt, Human
auucacaagacccaaaagg

SEQ ID NO: 2766096 - RNA, 16 nt, Human
auuagggagagaagau

SEQ ID NO: 2766097 - RNA, 15 nt, Human
auuaugaaacuugug

SEQ ID NO: 2766098 - RNA, 14 nt, Human
auuaugaaacuugu

SEQ ID NO: 2766099 - RNA, 21 nt, Human
auuaugaaacuuguguaaaua

SEQ ID NO: 2766100 - RNA, 20 nt, Human
auuaugaaacuuguguaaau

SEQ ID NO: 2766101 - RNA, 18 nt, Human
auuaugaaacuuguguaa

SEQ ID NO: 2766102 - RNA, 17 nt, Human
auuaugaauuacauuug

SEQ ID NO: 2766103 - RNA, 14 nt, Human
auuaugaauuacau

SEQ ID NO: 2766104 - RNA, 14 nt, Human
auuuuaugauccag

SEQ ID NO: 2766105 - RNA, 16 nt, Human
auuuuaugauccagca

SEQ ID NO: 2766106 - RNA, 15 nt, Human
auuuuaugauccagc

SEQ ID NO: 2766107 - RNA, 17 nt, Human
auuuuauagcuacuaau

SEQ ID NO: 2766108 - RNA, 19 nt, Human
auuuuauagcuacuaauuu

SEQ ID NO: 2766109 - RNA, 13 nt, Human
auuuggaaaucuu

SEQ ID NO: 2766110 - RNA, 12 nt, Human
auuuggaaaucu

SEQ ID NO: 2766111 - RNA, 11 nt, Human
auuuggaaauc

SEQ ID NO: 2766112 - RNA, 17 nt, Human
auuugcucauggaauug

SEQ ID NO: 2766113 - RNA, 14 nt, Human
auuugcucauggaa

SEQ ID NO: 2766114 - RNA, 15 nt, Human
caaaaggcagaagca

SEQ ID NO: 2766115 - RNA, 20 nt, Human
caaaaaaaaaaaaaaauuag

SEQ ID NO: 2766116 - RNA, 20 nt, Human
caaagcacugacuucuaagu

SEQ ID NO: 2766117 - RNA, 22 nt, Human
caaagcacugacuucuaaguaa

SEQ ID NO: 2766118 - RNA, 15 nt, Human
caacacgagcaggcu

SEQ ID NO: 2766119 - RNA, 23 nt, Human
caacacgagcaggcuacugucag

SEQ ID NO: 2766120 - RNA, 16 nt, Human
ccguagguuauuuuca

SEQ ID NO: 2766121 - RNA, 20 nt, Human
ccucauguccacugguucuu

SEQ ID NO: 2766122 - RNA, 15 nt, Human
ccucauguccacugg

SEQ ID NO: 2766123 - RNA, 13 nt, Human
ccucugcuugcca

SEQ ID NO: 2766124 - RNA, 16 nt, Human
ccagcagauuauucac

SEQ ID NO: 2766125 - RNA, 22 nt, Human
ccagcagauuauucacugauuu

SEQ ID NO: 2766126 - RNA, 21 nt, Human
ccagcagauuauucacugauu

SEQ ID NO: 2766127 - RNA, 15 nt, Human
ccagauccuggaaau

SEQ ID NO: 2766128 - RNA, 23 nt, Human
cccgggaggcagagguugcagug

SEQ ID NO: 2766129 - RNA, 23 nt, Human
cccauuguggucacaggaaguag

SEQ ID NO: 2766130 - RNA, 22 nt, Human
cccauuguggucacaggaagua

SEQ ID NO: 2766131 - RNA, 20 nt, Human
cccagccagcaguucagagc

SEQ ID NO: 2766132 - RNA, 17 nt, Human
cccagccagcaguucag

SEQ ID NO: 2766133 - RNA, 16 nt, Human
cccagccagcaguuca

SEQ ID NO: 2766134 - RNA, 23 nt, Human
cuaguugaucagcuuauugucua

SEQ ID NO: 2766135 - RNA, 19 nt, Human
cuagaacucccuuucaaca

SEQ ID NO: 2766136 - RNA, 18 nt, Human
cuagaacucccuuucaac

SEQ ID NO: 2766137 - RNA, 17 nt, Human
cuagaacucccuuucaa

SEQ ID NO: 2766138 - RNA, 16 nt, Human
cuagaacucccuuuca

SEQ ID NO: 2766139 - RNA, 13 nt, Human
cuaaacuuuucug

SEQ ID NO: 2766140 - RNA, 15 nt, Human
cuacaugagguacug

SEQ ID NO: 2766141 - RNA, 23 nt, Human
cuaagugaaauaagccagacauc

SEQ ID NO: 2766142 - RNA, 20 nt, Human
cuaagugaaauaagccagac

SEQ ID NO: 2766143 - RNA, 17 nt, Human
ccuuuuucauuauuuua

SEQ ID NO: 2766144 - RNA, 15 nt, Human
ccuuuuucauuauuu

SEQ ID NO: 2766145 - RNA, 16 nt, Human
cgacagugagacucug

SEQ ID NO: 2766146 - RNA, 15 nt, Human
cgacagugagacucu

SEQ ID NO: 2766147 - RNA, 16 nt, Human
cucccugcaauaaaau

SEQ ID NO: 2766148 - RNA, 14 nt, Human
cucccugcaauaaa

SEQ ID NO: 2766149 - RNA, 15 nt, Human
cucuuagaugcaguu

SEQ ID NO: 2766150 - RNA, 11 nt, Human
cucucuggccu

SEQ ID NO: 2766151 - RNA, 12 nt, Human
cucucuggccuu

SEQ ID NO: 2766152 - RNA, 20 nt, Human
cucuuagaugcaguucugaa

SEQ ID NO: 2766153 - RNA, 21 nt, Human
uguuaaaagaugaaaauauuu

SEQ ID NO: 2766154 - RNA, 22 nt, Human
ugugugaaagguacuucaaauc

SEQ ID NO: 2766155 - RNA, 21 nt, Human
ugugugaaagguacuucaaau

SEQ ID NO: 2766156 - RNA, 20 nt, Human
ugugugaaagguacuucaaa

SEQ ID NO: 2766157 - RNA, 19 nt, Human
uguguuuugcaagccagau

SEQ ID NO: 2766158 - RNA, 13 nt, Human
uguguuuugcaag

SEQ ID NO: 2766159 - RNA, 17 nt, Human
uguuuaaaaucauuucu

SEQ ID NO: 2766160 - RNA, 18 nt, Human
uguuuaaaaucauuucug

SEQ ID NO: 2766161 - RNA, 14 nt, Human
uguuuaaaaucauu

SEQ ID NO: 2766162 - RNA, 20 nt, Human
uguuggagaagaacugaaau

SEQ ID NO: 2766163 - RNA, 19 nt, Human
uguuggagaagaacugaaa

SEQ ID NO: 2766164 - RNA, 14 nt, Human
uguuggagaagaac

SEQ ID NO: 2766165 - RNA, 17 nt, Human
uguuggagaagaacuga

SEQ ID NO: 2766166 - RNA, 16 nt, Human
uguuggagaagaacug

SEQ ID NO: 2766167 - RNA, 20 nt, Human
uguugacaugggacauuugc

SEQ ID NO: 2766168 - RNA, 11 nt, Human
uuaauauuaaa

SEQ ID NO: 2766169 - RNA, 17 nt, Human
uuaauauuaaagccaug

SEQ ID NO: 2766170 - RNA, 16 nt, Human
uuaauauuaaagccau

SEQ ID NO: 2766171 - RNA, 14 nt, Human
uuaauauuaaagcc

SEQ ID NO: 2766172 - RNA, 13 nt, Human
uuaauauuaaagc

SEQ ID NO: 2766173 - RNA, 23 nt, Human
uuaagcauauauuuuuauauuua

SEQ ID NO: 2766174 - RNA, 19 nt, Human
uuaauauuaaagccauguu

SEQ ID NO: 2766175 - RNA, 18 nt, Human
uuaauauuaaagccaugu

SEQ ID NO: 2766176 - RNA, 12 nt, Human
uuacagaagccc

SEQ ID NO: 2766177 - RNA, 20 nt, Human
uuacauuuguauaaaauaau

SEQ ID NO: 2766178 - RNA, 23 nt, Human
uguuucuguacuuuuuggcauaa

SEQ ID NO: 2766179 - RNA, 22 nt, Human
uguuucuguacuuuuuggcaua

SEQ ID NO: 2766180 - RNA, 11 nt, Human
uguuucuguac

SEQ ID NO: 2766181 - RNA, 15 nt, Human
uuaaaaaaaaaauug

SEQ ID NO: 2766182 - RNA, 22 nt, Human
uuaaaaaaaaaccugagcccca

SEQ ID NO: 2766183 - RNA, 14 nt, Human
uuaaagccauguuu

SEQ ID NO: 2766184 - RNA, 12 nt, Human
uuaaagccaugu

SEQ ID NO: 2766185 - RNA, 20 nt, Human
uuaaagccauguuuauuaca

SEQ ID NO: 2766186 - RNA, 18 nt, Human
uuaaagccauguuuauua

SEQ ID NO: 2766187 - RNA, 18 nt, Human
uuaaaauacacacucaaa

SEQ ID NO: 2766188 - RNA, 15 nt, Human
uguaccgcaauguga

SEQ ID NO: 2766189 - RNA, 16 nt, Human
uguaccgcaaugugac

SEQ ID NO: 2766190 - RNA, 22 nt, Human
uguaguguuggagaagaacuga

SEQ ID NO: 2766191 - RNA, 21 nt, Human
uguauugugcgcuaaacuuuu

SEQ ID NO: 2766192 - RNA, 15 nt, Human
uguaugauucccagc

SEQ ID NO: 2766193 - RNA, 19 nt, Human
ugugcuaguaauuggaaag

SEQ ID NO: 2766194 - RNA, 19 nt, Human
uggaacgcguugaaauugu

SEQ ID NO: 2766195 - RNA, 17 nt, Human
uggaacgcguugaaauu

SEQ ID NO: 2766196 - RNA, 18 nt, Human
uggaacgcguugaaauug

SEQ ID NO: 2766197 - RNA, 22 nt, Human
uggaauaauccuaaacauauga

SEQ ID NO: 2766198 - RNA, 23 nt, Human
uggaaacuucagcgguuuauaua

SEQ ID NO: 2766199 - RNA, 20 nt, Human
uggaacauaaaauacaaugu

SEQ ID NO: 2766200 - RNA, 21 nt, Human
uggaacauaaaauacaauguu

SEQ ID NO: 2766201 - RNA, 11 nt, Human
uggagggaagc

SEQ ID NO: 2766202 - RNA, 12 nt, Human
uggggauucuua

SEQ ID NO: 2766203 - RNA, 16 nt, Human
uggggauucuuaaagu

SEQ ID NO: 2766204 - RNA, 13 nt, Human
uggggauucuuaa

SEQ ID NO: 2766205 - RNA, 20 nt, Human
uggggauucuuaaaguugaa

SEQ ID NO: 2766206 - RNA, 18 nt, Human
uggggauucuuaaaguug

SEQ ID NO: 2766207 - RNA, 21 nt, Human
ugguauguuuucaggcuagau

SEQ ID NO: 2766208 - RNA, 16 nt, Human
uggcuuccuggcaaua

SEQ ID NO: 2766209 - RNA, 13 nt, Human
uggcuuuucugau

SEQ ID NO: 2766210 - RNA, 17 nt, Human
uggcuuuucugauccag

SEQ ID NO: 2766211 - RNA, 14 nt, Human
uggcuuuucugauc

SEQ ID NO: 2766212 - RNA, 19 nt, Human
uggcuuuucugauccaguu

SEQ ID NO: 2766213 - RNA, 18 nt, Human
uggcuuuucugauccagu

SEQ ID NO: 2766214 - RNA, 21 nt, Human
uggcuugaguuuaaauuguaa

SEQ ID NO: 2766215 - RNA, 14 nt, Human
ugggaguacaaaag

SEQ ID NO: 2766216 - RNA, 19 nt, Human
ugccaaauauaaauaaaaa

SEQ ID NO: 2766217 - RNA, 22 nt, Human
ugccaaauauaaauaaaaauaa

SEQ ID NO: 2766218 - RNA, 17 nt, Human
ugccaaauauaaauaaa

SEQ ID NO: 2766219 - RNA, 18 nt, Human
ugccaaauauaaauaaaa

SEQ ID NO: 2766220 - RNA, 20 nt, Human
ugccacuaaauugacacuua

SEQ ID NO: 2766221 - RNA, 12 nt, Human
ugccaucccucc

SEQ ID NO: 2766222 - RNA, 11 nt, Human
ugccaucccuc

SEQ ID NO: 2766223 - RNA, 22 nt, Human
ugcaguucugaagaagauggua

SEQ ID NO: 2766224 - RNA, 19 nt, Human
ugcaguucugaagaagaug

SEQ ID NO: 2766225 - RNA, 14 nt, Human
ugcaguucugaaga

SEQ ID NO: 2766226 - RNA, 18 nt, Human
ugcaguucugaagaagau

SEQ ID NO: 2766227 - RNA, 17 nt, Human
ugcaguucugaagaaga

SEQ ID NO: 2766228 - RNA, 16 nt, Human
ugcaguucugaagaag

SEQ ID NO: 2766229 - RNA, 15 nt, Human
ugcaguucugaagaa

SEQ ID NO: 2766230 - RNA, 19 nt, Human
ugcagugagccgagauugu

SEQ ID NO: 2766231 - RNA, 18 nt, Human
ugcacggugaauggcuuu

SEQ ID NO: 2766232 - RNA, 14 nt, Human
ugcacggugaaugg

SEQ ID NO: 2766233 - RNA, 17 nt, Human
ugcugaaacaacaaaua

SEQ ID NO: 2766234 - RNA, 19 nt, Human
ugcuaagcauuccaacuau

SEQ ID NO: 2766235 - RNA, 15 nt, Human
ugcuaagcauuccaa

SEQ ID NO: 2766236 - RNA, 15 nt, Human
ugccuucucaacucc

SEQ ID NO: 2766237 - RNA, 18 nt, Human
ugccuguaaucacagcua

SEQ ID NO: 2766238 - RNA, 17 nt, Human
uccucugcuugccaucc

SEQ ID NO: 2766239 - RNA, 16 nt, Human
uccucugcuugccauc

SEQ ID NO: 2766240 - RNA, 15 nt, Human
uccucugcuugccau

SEQ ID NO: 2766241 - RNA, 14 nt, Human
uccucugcuugcca

SEQ ID NO: 2766242 - RNA, 21 nt, Human
uccugaggcuccacuuggucu

SEQ ID NO: 2766243 - RNA, 16 nt, Human
uccugaggcuccacuu

SEQ ID NO: 2766244 - RNA, 15 nt, Human
uccugaggcuccacu

SEQ ID NO: 2766245 - RNA, 17 nt, Human
uccuugcaucaauuuuu

SEQ ID NO: 2766246 - RNA, 16 nt, Human
ucggccuccauccuga

SEQ ID NO: 2766247 - RNA, 15 nt, Human
ucggccuccauccug

SEQ ID NO: 2766248 - RNA, 13 nt, Human
ucucagauuuuau

SEQ ID NO: 2766249 - RNA, 15 nt, Human
ucucagauuuuauua

SEQ ID NO: 2766250 - RNA, 14 nt, Human
ucucagauuuuauu

SEQ ID NO: 2766251 - RNA, 19 nt, Human
ucucagauuuuauuaugua

SEQ ID NO: 2766252 - RNA, 18 nt, Human
ucucagauuuuauuaugu

SEQ ID NO: 2766253 - RNA, 17 nt, Human
ucucagauuuuauuaug

SEQ ID NO: 2766254 - RNA, 16 nt, Human
ucucagauuuuauuau

SEQ ID NO: 2766255 - RNA, 16 nt, Human
ucuauauuuucauucu

SEQ ID NO: 2766256 - RNA, 15 nt, Human
ucuauauuuucauuc

SEQ ID NO: 2766257 - RNA, 14 nt, Human
ucuauauuuucauu

SEQ ID NO: 2766258 - RNA, 13 nt, Human
ucuauauuuucau

SEQ ID NO: 2766259 - RNA, 15 nt, Human
ucuacuaaaaauaca

SEQ ID NO: 2766260 - RNA, 19 nt, Human
ucuacuaaaaauacaaaaa

SEQ ID NO: 2766261 - RNA, 12 nt, Human
ucuacuaaaaau

SEQ ID NO: 2766262 - RNA, 19 nt, Human
ucauggaauuggagcucgu

SEQ ID NO: 2766263 - RNA, 21 nt, Human
ucauggaauuggagcucgugg

SEQ ID NO: 2766264 - RNA, 18 nt, Human
ucaguccaugaagaugua

SEQ ID NO: 2766265 - RNA, 15 nt, Human
ucagauacuggauug

SEQ ID NO: 2766266 - RNA, 14 nt, Human
ucagauacuggauu

SEQ ID NO: 2766267 - RNA, 20 nt, Human
ucagauacuggauuguacuu

SEQ ID NO: 2766268 - RNA, 19 nt, Human
ucagauacuggauuguacu

SEQ ID NO: 2766269 - RNA, 16 nt, Human
ucagauacuggauugu

SEQ ID NO: 2766270 - RNA, 22 nt, Human
ucagcuccccucggagaagagc

SEQ ID NO: 2766271 - RNA, 21 nt, Human
ucagcuccccucggagaagag

SEQ ID NO: 2766272 - RNA, 16 nt, Human
ucagcugcugaaacaa

SEQ ID NO: 2766273 - RNA, 16 nt, Human
ucuucuuggucucagu

SEQ ID NO: 2766274 - RNA, 19 nt, Human
ucuugccaaauauaaauaa

SEQ ID NO: 2766275 - RNA, 22 nt, Human
ucuuaggguuaugauuaaguaa

SEQ ID NO: 2766276 - RNA, 13 nt, Human
ucuuauaauuuaa

SEQ ID NO: 2766277 - RNA, 14 nt, Human
ucuuauaauuuaaa

SEQ ID NO: 2766278 - RNA, 12 nt, Human
ucuugucucaga

SEQ ID NO: 2766279 - RNA, 15 nt, Human
ucuugucucagauuu

SEQ ID NO: 2766280 - RNA, 14 nt, Human
ucuugucucagauu

SEQ ID NO: 2766281 - RNA, 17 nt, Human
ucuuuccacagaagcuc

SEQ ID NO: 2766282 - RNA, 21 nt, Human
ucugccuaaggacuucuuuaa

SEQ ID NO: 2766283 - RNA, 20 nt, Human
ucugccuaaggacuucuuua

SEQ ID NO: 2766284 - RNA, 23 nt, Human
ucugccuaaggacuucuuuaauu

SEQ ID NO: 2766285 - RNA, 14 nt, Human
ucugucucagucca

SEQ ID NO: 2766286 - RNA, 15 nt, Human
ugagcaggauuuuaa

SEQ ID NO: 2766287 - RNA, 20 nt, Human
ugagcaggauuuuaaucuuu

SEQ ID NO: 2766288 - RNA, 20 nt, Human
ugagaaagacuauucaaaca

SEQ ID NO: 2766289 - RNA, 15 nt, Human
ugagaaagacuauuc

SEQ ID NO: 2766290 - RNA, 22 nt, Human
ugacuuuggauaauaaggaaaa

SEQ ID NO: 2766291 - RNA, 20 nt, Human
ugacuuuggauaauaaggaa

SEQ ID NO: 2766292 - RNA, 16 nt, Human
ugacuuuggauaauaa

SEQ ID NO: 2766293 - RNA, 15 nt, Human
ugacuuuggauaaua

SEQ ID NO: 2766294 - RNA, 14 nt, Human
ugacuuuggauaau

SEQ ID NO: 2766295 - RNA, 13 nt, Human
ugacuuuggauaa

SEQ ID NO: 2766296 - RNA, 12 nt, Human
ugacuuuggaua

SEQ ID NO: 2766297 - RNA, 13 nt, Human
ugacucuuaagaa

SEQ ID NO: 2766298 - RNA, 16 nt, Human
ugacucuuaagaagac

SEQ ID NO: 2766299 - RNA, 15 nt, Human
ugacucuuaagaaga

SEQ ID NO: 2766300 - RNA, 14 nt, Human
ugacucuuaagaag

SEQ ID NO: 2766301 - RNA, 18 nt, Human
ugaacuugaaauuugaau

SEQ ID NO: 2766302 - RNA, 14 nt, Human
ugaacuugaaauuu

SEQ ID NO: 2766303 - RNA, 13 nt, Human
ugaacuugaaauu

SEQ ID NO: 2766304 - RNA, 15 nt, Human
ugaaugaauggcuaa

SEQ ID NO: 2766305 - RNA, 17 nt, Human
ugaccacugcagaagac

SEQ ID NO: 2766306 - RNA, 16 nt, Human
ugaccacugcagaaga

SEQ ID NO: 2766307 - RNA, 14 nt, Human
ugaauuaaguuuuu

SEQ ID NO: 2766308 - RNA, 13 nt, Human
ugaauuacauuug

SEQ ID NO: 2766309 - RNA, 16 nt, Human
uaccuaucaucuuaag

SEQ ID NO: 2766310 - RNA, 22 nt, Human
uaccaaaaaucucaauauuuca

SEQ ID NO: 2766311 - RNA, 22 nt, Human
uaccuaacgaaguauccuucag

SEQ ID NO: 2766312 - RNA, 15 nt, Human
uacuaaaauggacug

SEQ ID NO: 2766313 - RNA, 17 nt, Human
uacuaaaauggacugug

SEQ ID NO: 2766314 - RNA, 23 nt, Human
uacuaaaauggacuguggugacu

SEQ ID NO: 2766315 - RNA, 23 nt, Human
uaccuuuguucccaaauuucaua

SEQ ID NO: 2766316 - RNA, 23 nt, Human
uacugucagcuccccucggagaa

SEQ ID NO: 2766317 - RNA, 23 nt, Human
uacaguucggugagcuacaaaug

SEQ ID NO: 2766318 - RNA, 12 nt, Human
uacaauuuuguu

SEQ ID NO: 2766319 - RNA, 16 nt, Human
uacaauuuuguuucug

SEQ ID NO: 2766320 - RNA, 15 nt, Human
uacaauuuuguuucu

SEQ ID NO: 2766321 - RNA, 17 nt, Human
uacaauuuuguuucugu

SEQ ID NO: 2766322 - RNA, 14 nt, Human
uacacuccagugag

SEQ ID NO: 2766323 - RNA, 17 nt, Human
uacacacucaaaucaag

SEQ ID NO: 2766324 - RNA, 16 nt, Human
uacacacucaaaucaa

SEQ ID NO: 2766325 - RNA, 12 nt, Human
uacaaaguauua

SEQ ID NO: 2766326 - RNA, 14 nt, Human
uacaaaguauuaag

SEQ ID NO: 2766327 - RNA, 13 nt, Human
uacaaaguauuaa

SEQ ID NO: 2766328 - RNA, 19 nt, Human
uacaaaguauuaagcauau

SEQ ID NO: 2766329 - RNA, 18 nt, Human
uacaaaguauuaagcaua

SEQ ID NO: 2766330 - RNA, 16 nt, Human
uacaaaguauuaagca

SEQ ID NO: 2766331 - RNA, 15 nt, Human
uacaaaguauuaagc

SEQ ID NO: 2766332 - RNA, 12 nt, Human
uaauuuuuauau

SEQ ID NO: 2766333 - RNA, 18 nt, Human
uaauuuugugaagcaaaa

SEQ ID NO: 2766334 - RNA, 17 nt, Human
uaauuuuuauauuugaa

SEQ ID NO: 2766335 - RNA, 16 nt, Human
uaauuuuuauauuuga

SEQ ID NO: 2766336 - RNA, 13 nt, Human
uaauuuugugaag

SEQ ID NO: 2766337 - RNA, 18 nt, Human
uagacuggugacugauuc

SEQ ID NO: 2766338 - RNA, 20 nt, Human
uagacuggugacugauucuu

SEQ ID NO: 2766339 - RNA, 23 nt, Human
uagacuggugacugauucuucag

SEQ ID NO: 2766340 - RNA, 21 nt, Human
uagacuggugacugauucuuc

SEQ ID NO: 2766341 - RNA, 13 nt, Human
uagaauucuguau

SEQ ID NO: 2766342 - RNA, 11 nt, Human
uagaauucugu

SEQ ID NO: 2766343 - RNA, 21 nt, Human
uagaauucuguauagauuaga

SEQ ID NO: 2766344 - RNA, 16 nt, Human
uagaauucuguauaga

SEQ ID NO: 2766345 - RNA, 15 nt, Human
uagaauucuguauag

SEQ ID NO: 2766346 - RNA, 14 nt, Human
uagaauucuguaua

SEQ ID NO: 2766347 - RNA, 23 nt, Human
uagaauaccacaggaaccacaag

SEQ ID NO: 2766348 - RNA, 18 nt, Human
uagaauuaacacaugauc

SEQ ID NO: 2766349 - RNA, 16 nt, Human
uagaauuaacacauga

SEQ ID NO: 2766350 - RNA, 15 nt, Human
uagaauuaacacaug

SEQ ID NO: 2766351 - RNA, 20 nt, Human
uagauuagagaguguugaaa

SEQ ID NO: 2766352 - RNA, 15 nt, Human
uagauuagaauucug

SEQ ID NO: 2766353 - RNA, 14 nt, Human
uagauuagaauucu

SEQ ID NO: 2766354 - RNA, 20 nt, Human
uagauuagaauucuguauag

SEQ ID NO: 2766355 - RNA, 19 nt, Human
uagauuagaauucuguaua

SEQ ID NO: 2766356 - RNA, 17 nt, Human
uagauuagaauucugua

SEQ ID NO: 2766357 - RNA, 16 nt, Human
uagauuagaauucugu

SEQ ID NO: 2766358 - RNA, 14 nt, Human
uagauaggccaugg

SEQ ID NO: 2766359 - RNA, 20 nt, Human
uaggugcuacaaaaacacag

SEQ ID NO: 2766360 - RNA, 22 nt, Human
uaggugcuacaaaaacacagca

SEQ ID NO: 2766361 - RNA, 23 nt, Human
uaggugcuacaaaaacacagcaa

SEQ ID NO: 2766362 - RNA, 18 nt, Human
uaggugcuacaaaaacac

SEQ ID NO: 2766363 - RNA, 17 nt, Human
uaguauuguccaggucu

SEQ ID NO: 2766364 - RNA, 20 nt, Human
uauagaaccucuuugucuac

SEQ ID NO: 2766365 - RNA, 21 nt, Human
uauagaaccucuuugucuaca

SEQ ID NO: 2766366 - RNA, 23 nt, Human
uauaucugaggaauucuguauag

SEQ ID NO: 2766367 - RNA, 19 nt, Human
uauauaacaaugcuguauu

SEQ ID NO: 2766368 - RNA, 17 nt, Human
uauauaacaaugcugua

SEQ ID NO: 2766369 - RNA, 13 nt, Human
uauauaacaaugc

SEQ ID NO: 2766370 - RNA, 14 nt, Human
uaucaaaagaaaga

SEQ ID NO: 2766371 - RNA, 16 nt, Human
uauauuuucauucucc

SEQ ID NO: 2766372 - RNA, 21 nt, Human
uauauuuuuuguuaaaugauu

SEQ ID NO: 2766373 - RNA, 20 nt, Human
uauauuugaaauauugacuu

SEQ ID NO: 2766374 - RNA, 16 nt, Human
uauaugcuucuguuuu

SEQ ID NO: 2766375 - RNA, 14 nt, Human
uauaugcuucuguu

SEQ ID NO: 2766376 - RNA, 17 nt, Human
uaaccaggggccaugaa

SEQ ID NO: 2766377 - RNA, 21 nt, Human
uaagaaaauaucacuugucaa

SEQ ID NO: 2766378 - RNA, 14 nt, Human
uaagagagaaugag

SEQ ID NO: 2766379 - RNA, 13 nt, Human
uaagagagaauga

SEQ ID NO: 2766380 - RNA, 15 nt, Human
uaacuggaaacuuca

SEQ ID NO: 2766381 - RNA, 23 nt, Human
uaaaugccaucaauaaaaaauua

SEQ ID NO: 2766382 - RNA, 16 nt, Human
uaaaugccaucaauaa

SEQ ID NO: 2766383 - RNA, 20 nt, Human
uaaauggcuuccuggcaaua

SEQ ID NO: 2766384 - RNA, 20 nt, Human
uaaauugacacuuaaaaaug

SEQ ID NO: 2766385 - RNA, 16 nt, Human
uaaaugugccuucauu

SEQ ID NO: 2766386 - RNA, 16 nt, Human
uaauaaggaaaaguuu

SEQ ID NO: 2766387 - RNA, 13 nt, Human
uaagugaaauaag

SEQ ID NO: 2766388 - RNA, 21 nt, Human
uaauauuaaagccauguuuau

SEQ ID NO: 2766389 - RNA, 20 nt, Human
uaauauuaaagccauguuua

SEQ ID NO: 2766390 - RNA, 17 nt, Human
uaauauuaaagccaugu

SEQ ID NO: 2766391 - RNA, 16 nt, Human
uaauauuaaagccaug

SEQ ID NO: 2766392 - RNA, 15 nt, Human
uaauauuaaagccau

SEQ ID NO: 2766393 - RNA, 21 nt, Human
uaauuaacauguuaaaccaug

SEQ ID NO: 2766394 - RNA, 20 nt, Human
uaauuaacauguuaaaccau

SEQ ID NO: 2766395 - RNA, 22 nt, Human
uaauguuucaaacauauauaac

SEQ ID NO: 2766396 - RNA, 22 nt, Human
uaaugauaacuggaaacuucag

SEQ ID NO: 2766397 - RNA, 17 nt, Human
uaaugauaacuggaaac

SEQ ID NO: 2766398 - RNA, 23 nt, Human
uaaugauaacuggaaacuucagc

SEQ ID NO: 2766399 - RNA, 13 nt, Human
uaaagccauguuu

SEQ ID NO: 2766400 - RNA, 11 nt, Human
uaaagccaugu

SEQ ID NO: 2766401 - RNA, 20 nt, Human
uaaagccauguuuauuacag

SEQ ID NO: 2766402 - RNA, 15 nt, Human
uaaagccauguuuau

SEQ ID NO: 2766403 - RNA, 14 nt, Human
uaaaguguuugaaa

SEQ ID NO: 2766404 - RNA, 18 nt, Human
uaaaaaugguuuaaaugg

SEQ ID NO: 2766405 - RNA, 15 nt, Human
uaaaaaugguuuaaa

SEQ ID NO: 2766406 - RNA, 19 nt, Human
uaaaaaugguuuaaauggu

SEQ ID NO: 2766407 - RNA, 22 nt, Human
uaaaacaagcacuaaacaaaga

SEQ ID NO: 2766408 - RNA, 18 nt, Human
uaaaaucauuucugcauc

SEQ ID NO: 2766409 - RNA, 22 nt, Human
uaaaaucauuucugcaucagcu

SEQ ID NO: 2766410 - RNA, 17 nt, Human
uaaaauccauacauuug

SEQ ID NO: 2766411 - RNA, 15 nt, Human
uaaaauccauacauu

SEQ ID NO: 2766412 - RNA, 10 nt, Human
uaaaaucauu

SEQ ID NO: 2766413 - RNA, 13 nt, Human
uaaaaucauuucu

SEQ ID NO: 2766414 - RNA, 17 nt, Human
guuuagaaagcuugccc

SEQ ID NO: 2766415 - RNA, 20 nt, Human
guuuauauaagcuuguauuc

SEQ ID NO: 2766416 - RNA, 21 nt, Human
guuuagcuggaaaaguauguu

SEQ ID NO: 2766417 - RNA, 20 nt, Human
guuuagcuggaaaaguaugu

SEQ ID NO: 2766418 - RNA, 18 nt, Human
guuuagucuugucucaga

SEQ ID NO: 2766419 - RNA, 15 nt, Human
gugcuacaaaaacac

SEQ ID NO: 2766420 - RNA, 20 nt, Human
gugcuacaaaaacacagcaa

SEQ ID NO: 2766421 - RNA, 15 nt, Human
guggugacuuuggau

SEQ ID NO: 2766422 - RNA, 13 nt, Human
guggugacuuugg

SEQ ID NO: 2766423 - RNA, 16 nt, Human
guggugacuuuggaua

SEQ ID NO: 2766424 - RNA, 21 nt, Human
guguaaguagauaggccaugg

SEQ ID NO: 2766425 - RNA, 13 nt, Human
guuacagaagccc

SEQ ID NO: 2766426 - RNA, 21 nt, Human
guuaaaccaugggauaaaugc

SEQ ID NO: 2766427 - RNA, 18 nt, Human
guuaaaccaugggauaaa

SEQ ID NO: 2766428 - RNA, 20 nt, Human
guuaaaagaugaaaauauuu

SEQ ID NO: 2766429 - RNA, 14 nt, Human
guuaaaagaugaaa

SEQ ID NO: 2766430 - RNA, 16 nt, Human
guuaaaagaugaaaau

SEQ ID NO: 2766431 - RNA, 23 nt, Human
guucauggaacgcguugaaauug

SEQ ID NO: 2766432 - RNA, 22 nt, Human
guucauggaacgcguugaaauu

SEQ ID NO: 2766433 - RNA, 16 nt, Human
guucaucaaugaauga

SEQ ID NO: 2766434 - RNA, 19 nt, Human
guucacucuccauuuaaua

SEQ ID NO: 2766435 - RNA, 19 nt, Human
guucagagcugcccucucc

SEQ ID NO: 2766436 - RNA, 17 nt, Human
guucagagcugcccucu

SEQ ID NO: 2766437 - RNA, 16 nt, Human
guucagagcugcccuc

SEQ ID NO: 2766438 - RNA, 15 nt, Human
guucagagcugcccu

SEQ ID NO: 2766439 - RNA, 22 nt, Human
guucagagcugcccucuccugg

SEQ ID NO: 2766440 - RNA, 20 nt, Human
guucagagcugcccucuccu

SEQ ID NO: 2766441 - RNA, 23 nt, Human
guucagagcugcccucuccuggg

SEQ ID NO: 2766442 - RNA, 14 nt, Human
guucagagcugccc

SEQ ID NO: 2766443 - RNA, 13 nt, Human
guucagagcugcc

SEQ ID NO: 2766444 - RNA, 19 nt, Human
guuaucugaagucagaucu

SEQ ID NO: 2766445 - RNA, 23 nt, Human
guuaccucugccucagaaaacaa

SEQ ID NO: 2766446 - RNA, 22 nt, Human
guugaaacggaugauuucuaug

SEQ ID NO: 2766447 - RNA, 21 nt, Human
guugaaacggaugauuucuau

SEQ ID NO: 2766448 - RNA, 15 nt, Human
guugaaauuguaauu

SEQ ID NO: 2766449 - RNA, 20 nt, Human
guugaaauuguaauuauauc

SEQ ID NO: 2766450 - RNA, 16 nt, Human
guugaaauuguaauua

SEQ ID NO: 2766451 - RNA, 14 nt, Human
guugaauuuauugg

SEQ ID NO: 2766452 - RNA, 22 nt, Human
guugaauuuauuggcuuuucug

SEQ ID NO: 2766453 - RNA, 21 nt, Human
guugaauuuauuggcuuuucu

SEQ ID NO: 2766454 - RNA, 20 nt, Human
guugauggugguauguuuuc

SEQ ID NO: 2766455 - RNA, 21 nt, Human
guugauggugguauguuuuca

SEQ ID NO: 2766456 - RNA, 17 nt, Human
guugaaaagacuccaaa

SEQ ID NO: 2766457 - RNA, 22 nt, Human
guugaaaagacuccaaagaaau

SEQ ID NO: 2766458 - RNA, 23 nt, Human
guugaaaagacuccaaagaaaug

SEQ ID NO: 2766459 - RNA, 13 nt, Human
guucugaagaaga

SEQ ID NO: 2766460 - RNA, 12 nt, Human
guucugaagaag

SEQ ID NO: 2766461 - RNA, 15 nt, Human
guucugaagaagaug

SEQ ID NO: 2766462 - RNA, 14 nt, Human
guucugaagaagau

SEQ ID NO: 2766463 - RNA, 16 nt, Human
gugacaagcucacaga

SEQ ID NO: 2766464 - RNA, 13 nt, Human
gugaacacaucag

SEQ ID NO: 2766465 - RNA, 21 nt, Human
gugaacaaauuuacagagaca

SEQ ID NO: 2766466 - RNA, 20 nt, Human
gugcuaaggacuuguuagau

SEQ ID NO: 2766467 - RNA, 14 nt, Human
gugcuaaggacuug

SEQ ID NO: 2766468 - RNA, 13 nt, Human
gugcuaaggacuu

SEQ ID NO: 2766469 - RNA, 12 nt, Human
gugcuaaggacu

SEQ ID NO: 2766470 - RNA, 21 nt, Human
gugcgcuaaacuuuucugaua

SEQ ID NO: 2766471 - RNA, 17 nt, Human
gugcgcuaaacuuuucu

SEQ ID NO: 2766472 - RNA, 21 nt, Human
gucucagauuuuauuauguaa

SEQ ID NO: 2766473 - RNA, 17 nt, Human
gucucagauuuuauuau

SEQ ID NO: 2766474 - RNA, 14 nt, Human
gucucagauuuuau

SEQ ID NO: 2766475 - RNA, 16 nt, Human
gucucagauuuuauua

SEQ ID NO: 2766476 - RNA, 15 nt, Human
gucucagauuuuauu

SEQ ID NO: 2766477 - RNA, 13 nt, Human
gucugacuguuuc

SEQ ID NO: 2766478 - RNA, 23 nt, Human
gucggguuuuauuguuuaaaauc

SEQ ID NO: 2766479 - RNA, 18 nt, Human
gucgucaaagcugaaaug

SEQ ID NO: 2766480 - RNA, 15 nt, Human
gucuugucucagauu

SEQ ID NO: 2766481 - RNA, 22 nt, Human
gucuugucucagauuuuauuau

SEQ ID NO: 2766482 - RNA, 20 nt, Human
gucuugucucagauuuuauu

SEQ ID NO: 2766483 - RNA, 20 nt, Human
gucuugccuuuuucauuauu

SEQ ID NO: 2766484 - RNA, 18 nt, Human
gucuugccuuuuucauua

SEQ ID NO: 2766485 - RNA, 17 nt, Human
gucuugccuuuuucauu

SEQ ID NO: 2766486 - RNA, 16 nt, Human
gucuugccuuuuucau

SEQ ID NO: 2766487 - RNA, 15 nt, Human
gucuugccuuuuuca

SEQ ID NO: 2766488 - RNA, 23 nt, Human
gucugugagaugcuagaacuccc

SEQ ID NO: 2766489 - RNA, 22 nt, Human
gucugugagaugcuagaacucc

SEQ ID NO: 2766490 - RNA, 21 nt, Human
gucugugagaugcuagaacuc

SEQ ID NO: 2766491 - RNA, 17 nt, Human
gucugugagaugcuaga

SEQ ID NO: 2766492 - RNA, 16 nt, Human
gucugugagaugcuag

SEQ ID NO: 2766493 - RNA, 15 nt, Human
gucugugagaugcua

SEQ ID NO: 2766494 - RNA, 14 nt, Human
guauagauuagaau

SEQ ID NO: 2766495 - RNA, 19 nt, Human
guauagaaccucuuugucu

SEQ ID NO: 2766496 - RNA, 21 nt, Human
guaugugugaagugagugagu

SEQ ID NO: 2766497 - RNA, 17 nt, Human
guauguuagugcaaauu

SEQ ID NO: 2766498 - RNA, 18 nt, Human
gcuauaggugcuacaaaa

SEQ ID NO: 2766499 - RNA, 23 nt, Human
guauaauuaacauguuaaaccau

SEQ ID NO: 2766500 - RNA, 22 nt, Human
guauaauuaacauguuaaacca

SEQ ID NO: 2766501 - RNA, 19 nt, Human
guauaauuaacauguuaaa

SEQ ID NO: 2766502 - RNA, 17 nt, Human
guauaauuaacauguua

SEQ ID NO: 2766503 - RNA, 15 nt, Human
guauaauuaacaugu

SEQ ID NO: 2766504 - RNA, 10 nt, Human
guauaauuaa

SEQ ID NO: 2766505 - RNA, 14 nt, Human
guauaauuaacaug

SEQ ID NO: 2766506 - RNA, 13 nt, Human
guauaauuaacau

SEQ ID NO: 2766507 - RNA, 15 nt, Human
guaguguuggagaag

SEQ ID NO: 2766508 - RNA, 14 nt, Human
guaguguuggagaa

SEQ ID NO: 2766509 - RNA, 18 nt, Human
gucagaucugccuaagga

SEQ ID NO: 2766510 - RNA, 16 nt, Human
gucagaucugccuaag

SEQ ID NO: 2766511 - RNA, 21 nt, Human
gucagaucugccuaaggacuu

SEQ ID NO: 2766512 - RNA, 20 nt, Human
gucagaucugccuaaggacu

SEQ ID NO: 2766513 - RNA, 19 nt, Human
gucagaucugccuaaggac

SEQ ID NO: 2766514 - RNA, 19 nt, Human
gucagcuccccucggagaa

SEQ ID NO: 2766515 - RNA, 21 nt, Human
guauuaagcauauauuuuuau

SEQ ID NO: 2766516 - RNA, 18 nt, Human
guauuaagcauauauuuu

SEQ ID NO: 2766517 - RNA, 15 nt, Human
guauuaagcauauau

SEQ ID NO: 2766518 - RNA, 17 nt, Human
guauuaagcauauauuu

SEQ ID NO: 2766519 - RNA, 16 nt, Human
guauuaagcauauauu

SEQ ID NO: 2766520 - RNA, 20 nt, Human
guauuuuaaaagaaugauua

SEQ ID NO: 2766521 - RNA, 13 nt, Human
guauuuuaaucac

SEQ ID NO: 2766522 - RNA, 18 nt, Human
guauuuuaaaagaaugau

SEQ ID NO: 2766523 - RNA, 15 nt, Human
gucaaugcagccccc

SEQ ID NO: 2766524 - RNA, 22 nt, Human
gucaauaaaauccauacauuug

SEQ ID NO: 2766525 - RNA, 23 nt, Human
gucaauaaaauccauacauuugu

SEQ ID NO: 2766526 - RNA, 23 nt, Human
gucagcuccccucggagaagagc

SEQ ID NO: 2766527 - RNA, 21 nt, Human
gucagcuccccucggagaaga

SEQ ID NO: 2766528 - RNA, 22 nt, Human
gucagcuccccucggagaagag

SEQ ID NO: 2766529 - RNA, 18 nt, Human
uuuuuaaaaaagaaacau

SEQ ID NO: 2766530 - RNA, 21 nt, Human
uuuuggcauaacauaaaucug

SEQ ID NO: 2766531 - RNA, 18 nt, Human
uuuuggucuggagggaag

SEQ ID NO: 2766532 - RNA, 13 nt, Human
uuuuccugaaaac

SEQ ID NO: 2766533 - RNA, 14 nt, Human
uuuuccugaaaacc

SEQ ID NO: 2766534 - RNA, 19 nt, Human
uuuuucucuaggaaauauu

SEQ ID NO: 2766535 - RNA, 17 nt, Human
uuucuuauuucauuucu

SEQ ID NO: 2766536 - RNA, 18 nt, Human
uuugaaucaucaagucuu

SEQ ID NO: 2766537 - RNA, 22 nt, Human
uuuccucaaaacuucagacaua

SEQ ID NO: 2766538 - RNA, 13 nt, Human
uuucugagaaaga

SEQ ID NO: 2766539 - RNA, 22 nt, Human
uuuggaauuuuccuccuuucuc

SEQ ID NO: 2766540 - RNA, 16 nt, Human
uuuggauaauaaggaa

SEQ ID NO: 2766541 - RNA, 16 nt, Human
uuuguauaaaauaauu

SEQ ID NO: 2766542 - RNA, 14 nt, Human
uuuguauaaaauaa

SEQ ID NO: 2766543 - RNA, 13 nt, Human
uuuguauaaaaua

SEQ ID NO: 2766544 - RNA, 15 nt, Human
uuuuaaaagaaugau

SEQ ID NO: 2766545 - RNA, 21 nt, Human
uuuuaaaagaaugauuaugaa

SEQ ID NO: 2766546 - RNA, 20 nt, Human
uuuuaauaauguuucaaaca

SEQ ID NO: 2766547 - RNA, 23 nt, Human
gccaucccucccuccaccucccu

SEQ ID NO: 2766548 - RNA, 18 nt, Human
gccaucccucccuccacc

SEQ ID NO: 2766549 - RNA, 24 nt, Human
gccaucaauaaaaaauuaugacau

SEQ ID NO: 2766550 - RNA, 19 nt, Human
gccaugggcacugugggua

SEQ ID NO: 2766551 - RNA, 22 nt, Human
gccuccccuccucugcuugcca

SEQ ID NO: 2766552 - RNA, 20 nt, Human
gccuccccuccucugcuugc

SEQ ID NO: 2766553 - RNA, 16 nt, Human
gccuccccuccucugc

SEQ ID NO: 2766554 - RNA, 19 nt, Human
gccuccccuccucugcuug

SEQ ID NO: 2766555 - RNA, 17 nt, Human
gccuccccuccucugcu

SEQ ID NO: 2766556 - RNA, 16 nt, Human
gcccugcuuucagaua

SEQ ID NO: 2766557 - RNA, 14 nt, Human
gcccugcuuucaga

SEQ ID NO: 2766558 - RNA, 20 nt, Human
gccgggcgugguggugagug

SEQ ID NO: 2766559 - RNA, 23 nt, Human
gccuaaauccauuuggaaaucuu

SEQ ID NO: 2766560 - RNA, 22 nt, Human
gccuaaauccauuuggaaaucu

SEQ ID NO: 2766561 - RNA, 21 nt, Human
gccuaaauccauuuggaaauc

SEQ ID NO: 2766562 - RNA, 19 nt, Human
gccuaaauccauuuggaaa

SEQ ID NO: 2766563 - RNA, 13 nt, Human
gccuaaauccauu

SEQ ID NO: 2766564 - RNA, 12 nt, Human
gccuaaauccau

SEQ ID NO: 2766565 - RNA, 23 nt, Human
gccuuuuucauuauuuuauuaug

SEQ ID NO: 2766566 - RNA, 13 nt, Human
gcuaaacuuuucu

SEQ ID NO: 2766567 - RNA, 17 nt, Human
gcuaaacuuuucugaua

SEQ ID NO: 2766568 - RNA, 15 nt, Human
gcuaaacuuuucuga

SEQ ID NO: 2766569 - RNA, 13 nt, Human
gcuauaggugcua

SEQ ID NO: 2766570 - RNA, 19 nt, Human
gcuagaacucccuuucaac

SEQ ID NO: 2766571 - RNA, 12 nt, Human
gcgacagugaga

SEQ ID NO: 2766572 - RNA, 18 nt, Human
gcacggugaauggcuuug

SEQ ID NO: 2766573 - RNA, 16 nt, Human
gcagauuauucacuga

SEQ ID NO: 2766574 - RNA, 18 nt, Human
gcagauuauucacugauu

SEQ ID NO: 2766575 - RNA, 18 nt, Human
gcagauaaacaguaguga

SEQ ID NO: 2766576 - RNA, 20 nt, Human
gcagccccgugggguuccuc

SEQ ID NO: 2766577 - RNA, 12 nt, Human
gcaucagcugcu

SEQ ID NO: 2766578 - RNA, 13 nt, Human
gcauuauauuuau

SEQ ID NO: 2766579 - RNA, 20 nt, Human
gcauauauuuuuauauuuac

SEQ ID NO: 2766580 - RNA, 17 nt, Human
gcauagguuuaauaauu

SEQ ID NO: 2766581 - RNA, 13 nt, Human
gcauagaaguaaa

SEQ ID NO: 2766582 - RNA, 17 nt, Human
gcaguucugaagaagau

SEQ ID NO: 2766583 - RNA, 14 nt, Human
gcaguucugaagaa

SEQ ID NO: 2766584 - RNA, 18 nt, Human
gcaguucagagcugcccu

SEQ ID NO: 2766585 - RNA, 17 nt, Human
gcaguucagagcugccc

SEQ ID NO: 2766586 - RNA, 15 nt, Human
gcaguucugaagaag

SEQ ID NO: 2766587 - RNA, 16 nt, Human
gcaguucagagcugcc

SEQ ID NO: 2766588 - RNA, 23 nt, Human
gauuuuauuauguaaaucccauu

SEQ ID NO: 2766589 - RNA, 20 nt, Human
gauuuuauuauguaaauccc

SEQ ID NO: 2766590 - RNA, 19 nt, Human
gauuuuauuauguaaaucc

SEQ ID NO: 2766591 - RNA, 18 nt, Human
gauuuuauuauguaaauc

SEQ ID NO: 2766592 - RNA, 15 nt, Human
gauuuuauuauguaa

SEQ ID NO: 2766593 - RNA, 13 nt, Human
gauuuuauuaugu

SEQ ID NO: 2766594 - RNA, 15 nt, Human
gauuuuccugaaaac

SEQ ID NO: 2766595 - RNA, 23 nt, Human
gcaaagcacugacuucuaaguaa

SEQ ID NO: 2766596 - RNA, 10 nt, Human
gcaagccaga

SEQ ID NO: 2766597 - RNA, 14 nt, Human
gcaagggugauggg

SEQ ID NO: 2766598 - RNA, 22 nt, Human
gauaaauaguuuaugauuccac

SEQ ID NO: 2766599 - RNA, 17 nt, Human
gauaggucagugcaaau

SEQ ID NO: 2766600 - RNA, 23 nt, Human
gauagauaggucagugcaaauac

SEQ ID NO: 2766601 - RNA, 21 nt, Human
gauggcuaguaucaaaagaaa

SEQ ID NO: 2766602 - RNA, 14 nt, Human
gaugaaaauauuug

SEQ ID NO: 2766603 - RNA, 12 nt, Human
gacuuguuagau

SEQ ID NO: 2766604 - RNA, 13 nt, Human
gagaaagacuauu

SEQ ID NO: 2766605 - RNA, 15 nt, Human
gagaaagacuauuca

SEQ ID NO: 2766606 - RNA, 17 nt, Human
gagaaagacuauucaaa

SEQ ID NO: 2766607 - RNA, 18 nt, Human
gagaaagacuauucaaac

SEQ ID NO: 2766608 - RNA, 16 nt, Human
gagaagaacugaaauc

SEQ ID NO: 2766609 - RNA, 14 nt, Human
gagaagaacugaaa

SEQ ID NO: 2766610 - RNA, 13 nt, Human
gagaagaacugaa

SEQ ID NO: 2766611 - RNA, 15 nt, Human
gagaagagcuguuca

SEQ ID NO: 2766612 - RNA, 22 nt, Human
gagaagagcuguucacagccag

SEQ ID NO: 2766613 - RNA, 13 nt, Human
gagaagagcuguu

SEQ ID NO: 2766614 - RNA, 18 nt, Human
gagacacacugaagaagc

SEQ ID NO: 2766615 - RNA, 13 nt, Human
gagacagcucugc

SEQ ID NO: 2766616 - RNA, 18 nt, Human
gagacagcucugcauacu

SEQ ID NO: 2766617 - RNA, 15 nt, Human
gagacagcucugcau

SEQ ID NO: 2766618 - RNA, 17 nt, Human
gagauacagaauuuuau

SEQ ID NO: 2766619 - RNA, 19 nt, Human
gagagugaacaaauuuaca

SEQ ID NO: 2766620 - RNA, 15 nt, Human
gagagugaacaaauu

SEQ ID NO: 2766621 - RNA, 17 nt, Human
gagcugcccucuccugg

SEQ ID NO: 2766622 - RNA, 16 nt, Human
gagcucgugggacagu

SEQ ID NO: 2766623 - RNA, 19 nt, Human
gaggaagccugauuaaaga

SEQ ID NO: 2766624 - RNA, 18 nt, Human
gaggaagccugauuaaag

SEQ ID NO: 2766625 - RNA, 23 nt, Human
gagcugcccucuccugggcagcu

SEQ ID NO: 2766626 - RNA, 21 nt, Human
gagcugcccucuccugggcag

SEQ ID NO: 2766627 - RNA, 19 nt, Human
gagcugcccucuccugggc

SEQ ID NO: 2766628 - RNA, 18 nt, Human
gagcugcccucuccuggg

SEQ ID NO: 2766629 - RNA, 16 nt, Human
gacauagucuggcugu

SEQ ID NO: 2766630 - RNA, 20 nt, Human
gaccaaaaaccaguauugua

SEQ ID NO: 2766631 - RNA, 19 nt, Human
gaccaaaaaccaguauugu

SEQ ID NO: 2766632 - RNA, 13 nt, Human
gaccaaaaaccag

SEQ ID NO: 2766633 - RNA, 22 nt, Human
gacaugggacauuugcucaugg

SEQ ID NO: 2766634 - RNA, 17 nt, Human
gacaugggacauuugcu

SEQ ID NO: 2766635 - RNA, 18 nt, Human
gacuccaaagaaauguaa

SEQ ID NO: 2766636 - RNA, 22 nt, Human
gacccacaagaaaugaaagcag

SEQ ID NO: 2766637 - RNA, 23 nt, Human
gaccugauuucugagcauuuaau

SEQ ID NO: 2766638 - RNA, 21 nt, Human
cuuuuucauuauuuuauuaug

SEQ ID NO: 2766639 - RNA, 13 nt, Human
cuucuuuccacag

SEQ ID NO: 2766640 - RNA, 19 nt, Human
cuucuuuccacagaagcuc

SEQ ID NO: 2766641 - RNA, 20 nt, Human
cuugaaauuugaauuuugug

SEQ ID NO: 2766642 - RNA, 19 nt, Human
cuugaaauuugaauuuugu

SEQ ID NO: 2766643 - RNA, 14 nt, Human
cuugaacccgggag

SEQ ID NO: 2766644 - RNA, 20 nt, Human
cuugaacccgggaggcagag

SEQ ID NO: 2766645 - RNA, 19 nt, Human
cuugaacccgggaggcaga

SEQ ID NO: 2766646 - RNA, 23 nt, Human
cuugcaucaauuuuucuuauuuc

SEQ ID NO: 2766647 - RNA, 21 nt, Human
cuugcaugguuuagaaagcuu

SEQ ID NO: 2766648 - RNA, 18 nt, Human
cuuguaaaggaauuuaaa

SEQ ID NO: 2766649 - RNA, 17 nt, Human
cuugccaaauauaaaua

SEQ ID NO: 2766650 - RNA, 21 nt, Human
gaaagcuugcccuggugccuc

SEQ ID NO: 2766651 - RNA, 16 nt, Human
gaaacggaugauuucu

SEQ ID NO: 2766652 - RNA, 13 nt, Human
gaaacugccagca

SEQ ID NO: 2766653 - RNA, 15 nt, Human
gaaacugccagcaac

SEQ ID NO: 2766654 - RNA, 13 nt, Human
gaaagcagaacag

SEQ ID NO: 2766655 - RNA, 22 nt, Human
gaaagacuauucaaacagucuc

SEQ ID NO: 2766656 - RNA, 23 nt, Human
gaaagacuauucaaacagucuca

SEQ ID NO: 2766657 - RNA, 19 nt, Human
gaaagacuauucaaacagu

SEQ ID NO: 2766658 - RNA, 13 nt, Human
gaaauuugaauuu

SEQ ID NO: 2766659 - RNA, 24 nt, Human
gaaauuugaauuuuguguuagaga

SEQ ID NO: 2766660 - RNA, 16 nt, Human
gaaauuugaauuuugu

SEQ ID NO: 2766661 - RNA, 24 nt, Human
gaacaguuaccucugccucagaaa

SEQ ID NO: 2766662 - RNA, 22 nt, Human
gaaauguaagggaaacugccag

SEQ ID NO: 2766663 - RNA, 13 nt, Human
gaaauauuuauuu

SEQ ID NO: 2766664 - RNA, 16 nt, Human
gaaauauuuauuuuaa

SEQ ID NO: 2766665 - RNA, 15 nt, Human
gaaauauuuauuuua

SEQ ID NO: 2766666 - RNA, 14 nt, Human
gaagucagaucugc

SEQ ID NO: 2766667 - RNA, 23 nt, Human
gaagucagaucugccuaaggacu

SEQ ID NO: 2766668 - RNA, 22 nt, Human
gaagucagaucugccuaaggac

SEQ ID NO: 2766669 - RNA, 23 nt, Human
gaaguccaagcauuuagauguau

SEQ ID NO: 2766670 - RNA, 23 nt, Human
gaagagcuguucacagccagacu

SEQ ID NO: 2766671 - RNA, 13 nt, Human
gaagagcuguuca

SEQ ID NO: 2766672 - RNA, 15 nt, Human
gaagagcuguucaca

SEQ ID NO: 2766673 - RNA, 20 nt, Human
gaagagcuguucacagccag

SEQ ID NO: 2766674 - RNA, 22 nt, Human
gaacuuguaaaggaauuuaaaa

SEQ ID NO: 2766675 - RNA, 22 nt, Human
gaacuugaaauuugaauuuugu

SEQ ID NO: 2766676 - RNA, 15 nt, Human
gaacuugaaauuuga

SEQ ID NO: 2766677 - RNA, 13 nt, Human
gaacuugaaauuu

SEQ ID NO: 2766678 - RNA, 12 nt, Human
gaacuugaaauu

SEQ ID NO: 2766679 - RNA, 15 nt, Human
gaaccacaagacugc

SEQ ID NO: 2766680 - RNA, 14 nt, Human
gaaccacaagacug

SEQ ID NO: 2766681 - RNA, 15 nt, Human
gaacucccuuucaac

SEQ ID NO: 2766682 - RNA, 16 nt, Human
gaacucccuuucaaca

SEQ ID NO: 2766683 - RNA, 16 nt, Human
cuguauagauuagaga

SEQ ID NO: 2766684 - RNA, 20 nt, Human
cuguauagauuagaauucug

SEQ ID NO: 2766685 - RNA, 15 nt, Human
cuguauagauuagag

SEQ ID NO: 2766686 - RNA, 15 nt, Human
cuguaugauucccag

SEQ ID NO: 2766687 - RNA, 16 nt, Human
cuguauuuuaaaagaa

SEQ ID NO: 2766688 - RNA, 13 nt, Human
cuguauuuuaaaa

SEQ ID NO: 2766689 - RNA, 18 nt, Human
cugucucuacuaaaaaua

SEQ ID NO: 2766690 - RNA, 15 nt, Human
cuggccuucggccuc

SEQ ID NO: 2766691 - RNA, 21 nt, Human
cuggccuucggccuccauccu

SEQ ID NO: 2766692 - RNA, 18 nt, Human
cuggccuucggccuccau

SEQ ID NO: 2766693 - RNA, 17 nt, Human
cuggccuucggccucca

SEQ ID NO: 2766694 - RNA, 16 nt, Human
cuggccuucggccucc

SEQ ID NO: 2766695 - RNA, 15 nt, Human
cugccagcaacgcag

SEQ ID NO: 2766696 - RNA, 12 nt, Human
cugcacugucaa

SEQ ID NO: 2766697 - RNA, 15 nt, Human
cugcuuucagauacu

SEQ ID NO: 2766698 - RNA, 12 nt, Human
cugcuuucagau

SEQ ID NO: 2766699 - RNA, 15 nt, Human
cugcuugccaucccu

SEQ ID NO: 2766700 - RNA, 16 nt, Human
cugcuugccaucccuc

SEQ ID NO: 2766701 - RNA, 22 nt, Human
cugcuugccaucccucccucca

SEQ ID NO: 2766702 - RNA, 20 nt, Human
cugcuugccaucccucccuc

SEQ ID NO: 2766703 - RNA, 19 nt, Human
cugcuugccaucccucccu

SEQ ID NO: 2766704 - RNA, 18 nt, Human
cugcuugccaucccuccc

SEQ ID NO: 2766705 - RNA, 15 nt, Human
cugcccucuccuggg

SEQ ID NO: 2766706 - RNA, 14 nt, Human
cugcccucuccugg

SEQ ID NO: 2766707 - RNA, 13 nt, Human
cugcccucuccug

SEQ ID NO: 2766708 - RNA, 12 nt, Human
cugcccucuccu

SEQ ID NO: 2766709 - RNA, 14 nt, Human
cugaagaagauggu

SEQ ID NO: 2766710 - RNA, 23 nt, Human
cugaagaagcaccaaucaugaau

SEQ ID NO: 2766711 - RNA, 22 nt, Human
cucuucuuuaaagggauggcaa

SEQ ID NO: 2766712 - RNA, 20 nt, Human
cucugcuugccaucccuccc

SEQ ID NO: 2766713 - RNA, 17 nt, Human
cucugcuugccaucccu

SEQ ID NO: 2766714 - RNA, 14 nt, Human
cucugcuugccauc

SEQ ID NO: 2766715 - RNA, 12 nt, Human
cucugcuugcca

SEQ ID NO: 2766716 - RNA, 12 nt, Human
cucuggccuucg

SEQ ID NO: 2766717 - RNA, 19 nt, Human
cucuggccuucggccucca

SEQ ID NO: 2766718 - RNA, 17 nt, Human
cugacucuuaagaagac

SEQ ID NO: 2766719 - RNA, 16 nt, Human
cugacuucuaaguaaa

SEQ ID NO: 2766720 - RNA, 13 nt, Human
cugacuucuaagu

SEQ ID NO: 2766721 - RNA, 15 nt, Human
cugacuucuaaguaa

SEQ ID NO: 2766722 - RNA, 22 nt, Human
cugagaaagacuauucaaacag

SEQ ID NO: 2766723 - RNA, 23 nt, Human
cugagaaagacuauucaaacagu

SEQ ID NO: 2766724 - RNA, 20 nt, Human
cugagcgacagugagacucu

SEQ ID NO: 2766725 - RNA, 16 nt, Human
cugagcgacagugaga

SEQ ID NO: 2766726 - RNA, 18 nt, Human
cuccauccugaggcucca

SEQ ID NO: 2766727 - RNA, 16 nt, Human
cuccauccugaggcuc

SEQ ID NO: 2766728 - RNA, 14 nt, Human
cuccauccugaggc

SEQ ID NO: 2766729 - RNA, 17 nt, Human
cucccuccaccucccug

SEQ ID NO: 2766730 - RNA, 15 nt, Human
cucccuccaccuccc

SEQ ID NO: 2766731 - RNA, 17 nt, Human
cucuaggaaauauuuau

SEQ ID NO: 2766732 - RNA, 15 nt, Human
cucuaggaaauauuu

SEQ ID NO: 2766733 - RNA, 12 nt, Human
cucuccugggca

SEQ ID NO: 2766734 - RNA, 19 nt, Human
cucuccugggcagcugccu

SEQ ID NO: 2766735 - RNA, 18 nt, Human
cucuccugggcagcugcc

SEQ ID NO: 2766736 - RNA, 16 nt, Human
cucuccugggcagcug

SEQ ID NO: 2766737 - RNA, 15 nt, Human
cucuccugggcagcu

SEQ ID NO: 2766738 - RNA, 20 nt, Human
cucuccugggcagcugccuc

SEQ ID NO: 2766739 - RNA, 22 nt, Human
cggugaauggcuuuguauagaa

SEQ ID NO: 2766740 - RNA, 20 nt, Human
cggugaauggcuuuguauag

SEQ ID NO: 2766741 - RNA, 18 nt, Human
cggugaauggcuuuguau

SEQ ID NO: 2766742 - RNA, 17 nt, Human
cggugagcuacaaaugc

SEQ ID NO: 2766743 - RNA, 16 nt, Human
cggugaauggcuuugu

SEQ ID NO: 2766744 - RNA, 15 nt, Human
cggugaauggcuuug

SEQ ID NO: 2766745 - RNA, 14 nt, Human
cggugaauggcuuu

SEQ ID NO: 2766746 - RNA, 13 nt, Human
cggugaauggcuu

SEQ ID NO: 2766747 - RNA, 22 nt, Human
cggucggguuuuauuguuuaaa

SEQ ID NO: 2766748 - RNA, 21 nt, Human
cggguuuuauuguuuaaaauc

SEQ ID NO: 2766749 - RNA, 12 nt, Human
cggccuccaucc

SEQ ID NO: 2766750 - RNA, 15 nt, Human
cgcucucuggccuuc

SEQ ID NO: 2766751 - RNA, 14 nt, Human
cgcucucuggccuu

SEQ ID NO: 2766752 - RNA, 18 nt, Human
cgcucucuggccuucggc

SEQ ID NO: 2766753 - RNA, 16 nt, Human
cgugcuaaggacuugu

SEQ ID NO: 2766754 - RNA, 15 nt, Human
cgugcuaaggacuug

SEQ ID NO: 2766755 - RNA, 14 nt, Human
cgugcuaaggacuu

SEQ ID NO: 2766756 - RNA, 13 nt, Human
cgugcuaaggacu

SEQ ID NO: 2766757 - RNA, 12 nt, Human
cgugcuaaggac

SEQ ID NO: 2766758 - RNA, 18 nt, Human
cguugaaauuguaauuau

SEQ ID NO: 2766759 - RNA, 23 nt, Human
cguugaaauuguaauuauaucug

SEQ ID NO: 2766760 - RNA, 16 nt, Human
cuaaauccauuuggaa

SEQ ID NO: 2766761 - RNA, 20 nt, Human
cuaaauccauuuggaaaucu

SEQ ID NO: 2766762 - RNA, 19 nt, Human
cuaaauccauuuggaaauc

SEQ ID NO: 2766763 - RNA, 17 nt, Human
cuaaauccauuuggaaa

SEQ ID NO: 2766764 - RNA, 23 nt, Human
cuaaauugacacuuaaaaauggu

SEQ ID NO: 2766765 - RNA, 17 nt, Human
cuacacuccagugagac

SEQ ID NO: 2766766 - RNA, 16 nt, Human
cuacacuccagugaga

SEQ ID NO: 2766767 - RNA, 22 nt, Human
cuaaggacuucuuuaauuuugg

SEQ ID NO: 2766768 - RNA, 11 nt, Human
cuaaggacuug

SEQ ID NO: 2766769 - RNA, 17 nt, Human
cuaaggacuuguuagau

SEQ ID NO: 2766770 - RNA, 16 nt, Human
cuaaggacuuguuaga

SEQ ID NO: 2766771 - RNA, 14 nt, Human
cuaagcaaaaugug

SEQ ID NO: 2766772 - RNA, 18 nt, Human
cuaagcaaaaugugauau

SEQ ID NO: 2766773 - RNA, 15 nt, Human
cuaagcaaaauguga

SEQ ID NO: 2766774 - RNA, 18 nt, Human
cuacuugggaggcugaga

SEQ ID NO: 2766775 - RNA, 15 nt, Human
cuacuugggaggcug

SEQ ID NO: 2766776 - RNA, 19 nt, Human
cuacuugggaggcugagau

SEQ ID NO: 2766777 - RNA, 17 nt, Human
cucaccccuugccauaa

SEQ ID NO: 2766778 - RNA, 22 nt, Human
cuauauuuuuuguuaaaugauu

SEQ ID NO: 2766779 - RNA, 13 nt, Human
cuaugaaauauua

SEQ ID NO: 2766780 - RNA, 12 nt, Human
cuaguucacucu

SEQ ID NO: 2766781 - RNA, 18 nt, Human
cuauauuguuugcuaagc

SEQ ID NO: 2766782 - RNA, 20 nt, Human
cuauauuuuuuguuaaauga

SEQ ID NO: 2766783 - RNA, 19 nt, Human
cuauauuguuugcuaagca

SEQ ID NO: 2766784 - RNA, 22 nt, Human
cuaggaaauauuuauuuuaaua

SEQ ID NO: 2766785 - RNA, 20 nt, Human
cuaguauuucuaugaaauau

SEQ ID NO: 2766786 - RNA, 19 nt, Human
cuaguauuucuaugaaaua

SEQ ID NO: 2766787 - RNA, 22 nt, Human
cuaguauuucuaugaaauauua

SEQ ID NO: 2766788 - RNA, 23 nt, Human
cuaguaucaaaagaaagaaaauc

SEQ ID NO: 2766789 - RNA, 17 nt, Human
cuaguaucaaaagaaag

SEQ ID NO: 2766790 - RNA, 15 nt, Human
cuaguaucaaaagaa

SEQ ID NO: 2766791 - RNA, 15 nt, Human
cccugcaauaaaaug

SEQ ID NO: 2766792 - RNA, 14 nt, Human
cccugcaauaaaau

SEQ ID NO: 2766793 - RNA, 14 nt, Human
ccccaggugccagu

SEQ ID NO: 2766794 - RNA, 12 nt, Human
cccucccuccac

SEQ ID NO: 2766795 - RNA, 13 nt, Human
cccucccuccacc

SEQ ID NO: 2766796 - RNA, 20 nt, Human
cccucccuccaccucccugc

SEQ ID NO: 2766797 - RNA, 13 nt, Human
ccuccauccugag

SEQ ID NO: 2766798 - RNA, 12 nt, Human
ccuccauccuga

SEQ ID NO: 2766799 - RNA, 13 nt, Human
ccuccccuccucu

SEQ ID NO: 2766800 - RNA, 12 nt, Human
ccuccccuccuc

SEQ ID NO: 2766801 - RNA, 17 nt, Human
cccuucuuuccacagaa

SEQ ID NO: 2766802 - RNA, 21 nt, Human
ccuaaauccauuuggaaaucu

SEQ ID NO: 2766803 - RNA, 20 nt, Human
ccuaaauccauuuggaaauc

SEQ ID NO: 2766804 - RNA, 18 nt, Human
ccuaaauccauuuggaaa

SEQ ID NO: 2766805 - RNA, 19 nt, Human
ccuaaauccauuuggaaau

SEQ ID NO: 2766806 - RNA, 13 nt, Human
ccuaaacauauga

SEQ ID NO: 2766807 - RNA, 15 nt, Human
ccauccugaggcucc

SEQ ID NO: 2766808 - RNA, 16 nt, Human
ccauccugaggcucca

SEQ ID NO: 2766809 - RNA, 23 nt, Human
ccauggcacucuauguucuaaga

SEQ ID NO: 2766810 - RNA, 14 nt, Human
cauuugcucaugga

SEQ ID NO: 2766811 - RNA, 15 nt, Human
cauuugcucauggaa

SEQ ID NO: 2766812 - RNA, 16 nt, Human
cauuugcucauggaau

SEQ ID NO: 2766813 - RNA, 17 nt, Human
ccaaagaaauguaaggg

SEQ ID NO: 2766814 - RNA, 16 nt, Human
cauuauuuuauuauga

SEQ ID NO: 2766815 - RNA, 14 nt, Human
cauuauuuuauuau

SEQ ID NO: 2766816 - RNA, 12 nt, Human
cauuauuuuauu

SEQ ID NO: 2766817 - RNA, 23 nt, Human
cauuucugcaucagcugcugaaa

SEQ ID NO: 2766818 - RNA, 12 nt, Human
cauuuccaagca

SEQ ID NO: 2766819 - RNA, 19 nt, Human
cauuuaaagcuuauuaaaa

SEQ ID NO: 2766820 - RNA, 18 nt, Human
ccaaggcuagaaccaccu

SEQ ID NO: 2766821 - RNA, 19 nt, Human
ccaaggcugauuaaaccaa

SEQ ID NO: 2766822 - RNA, 20 nt, Human
ccaauauucauagcagcuua

SEQ ID NO: 2766823 - RNA, 22 nt, Human
ccacaagaaaugaaagcaggga

SEQ ID NO: 2766824 - RNA, 16 nt, Human
ccacaagaaaugaaag

SEQ ID NO: 2766825 - RNA, 14 nt, Human
ccaacacgagcagg

SEQ ID NO: 2766826 - RNA, 21 nt, Human
ccaacacgagcaggcuacugu

SEQ ID NO: 2766827 - RNA, 11 nt, Human
cauuauuuuau

SEQ ID NO: 2766828 - RNA, 12 nt, Human
cauguuuauuac

SEQ ID NO: 2766829 - RNA, 22 nt, Human
cauguuuauuacaguauaauua

SEQ ID NO: 2766830 - RNA, 20 nt, Human
cauguuuauuacaguauaau

SEQ ID NO: 2766831 - RNA, 19 nt, Human
cauguuuauuacaguauaa

SEQ ID NO: 2766832 - RNA, 18 nt, Human
cauguuuauuacaguaua

SEQ ID NO: 2766833 - RNA, 13 nt, Human
cauguuuauuaca

SEQ ID NO: 2766834 - RNA, 17 nt, Human
caugggacagggaggac

SEQ ID NO: 2766835 - RNA, 18 nt, Human
cauggaacgcguugaaau

SEQ ID NO: 2766836 - RNA, 23 nt, Human
cauggaacgcguugaaauuguaa

SEQ ID NO: 2766837 - RNA, 20 nt, Human
cauggaacgcguugaaauug

SEQ ID NO: 2766838 - RNA, 19 nt, Human
cauggaacgcguugaaauu

SEQ ID NO: 2766839 - RNA, 23 nt, Human
caugcugucuacacuaagagaga

SEQ ID NO: 2766840 - RNA, 22 nt, Human
cauauauuuuuauauuuacuaa

SEQ ID NO: 2766841 - RNA, 20 nt, Human
cauauauaacaaugcuguau

SEQ ID NO: 2766842 - RNA, 22 nt, Human
caucaagucuuucacauuuaaa

SEQ ID NO: 2766843 - RNA, 18 nt, Human
caucaaugaaugaaugaa

SEQ ID NO: 2766844 - RNA, 13 nt, Human
caucccucccucc

SEQ ID NO: 2766845 - RNA, 12 nt, Human
caucccucccuc

SEQ ID NO: 2766846 - RNA, 14 nt, Human
caucccucccucca

SEQ ID NO: 2766847 - RNA, 14 nt, Human
caucuagugagcag

SEQ ID NO: 2766848 - RNA, 22 nt, Human
caucuagugagcagucaggaaa

SEQ ID NO: 2766849 - RNA, 14 nt, Human
caguuuucugagaa

SEQ ID NO: 2766850 - RNA, 15 nt, Human
caguuuucugagaaa

SEQ ID NO: 2766851 - RNA, 21 nt, Human
caguuuuguuuggaccaaaaa

SEQ ID NO: 2766852 - RNA, 19 nt, Human
caguuuucugagaaagacu

SEQ ID NO: 2766853 - RNA, 20 nt, Human
caguuuucugagaaagacua

SEQ ID NO: 2766854 - RNA, 21 nt, Human
caguugaaaagacuccaaaga

SEQ ID NO: 2766855 - RNA, 22 nt, Human
caguugaaaagacuccaaagaa

SEQ ID NO: 2766856 - RNA, 23 nt, Human
caguugaaaagacuccaaagaaa

SEQ ID NO: 2766857 - RNA, 14 nt, Human
caguugaaaagacu

SEQ ID NO: 2766858 - RNA, 18 nt, Human
caguugaaaagacuccaa

SEQ ID NO: 2766859 - RNA, 23 nt, Human
cauaaaucugugaacuugaaauu

SEQ ID NO: 2766860 - RNA, 22 nt, Human
cauaaaucugugaacuugaaau

SEQ ID NO: 2766861 - RNA, 18 nt, Human
cauaaaucugugaacuug

SEQ ID NO: 2766862 - RNA, 16 nt, Human
cauaaaucugugaacu

SEQ ID NO: 2766863 - RNA, 14 nt, Human
cauaaaucugugaa

SEQ ID NO: 2766864 - RNA, 19 nt, Human
cauaacauaaaucugugaa

SEQ ID NO: 2766865 - RNA, 12 nt, Human
cauaacauaaau

SEQ ID NO: 2766866 - RNA, 21 nt, Human
cauaacauaaaucugugaacu

SEQ ID NO: 2766867 - RNA, 17 nt, Human
cauaccaacacgagcag

SEQ ID NO: 2766868 - RNA, 22 nt, Human
caguucggugagcuacaaaugc

SEQ ID NO: 2766869 - RNA, 16 nt, Human
caguucugaagaagau

SEQ ID NO: 2766870 - RNA, 15 nt, Human
caguucugaagaaga

SEQ ID NO: 2766871 - RNA, 22 nt, Human
caguucugaagaagaugguacc

SEQ ID NO: 2766872 - RNA, 14 nt, Human
caguucugaagaag

SEQ ID NO: 2766873 - RNA, 13 nt, Human
caguucugaagaa

SEQ ID NO: 2766874 - RNA, 12 nt, Human
caguucugaaga

SEQ ID NO: 2766875 - RNA, 21 nt, Human
caguuaccucugccucagaaa

SEQ ID NO: 2766876 - RNA, 14 nt, Human
cagugucaaugcag

SEQ ID NO: 2766877 - RNA, 21 nt, Human
cacaguuuucugagaaagacu

SEQ ID NO: 2766878 - RNA, 22 nt, Human
cacaguuuucugagaaagacua

SEQ ID NO: 2766879 - RNA, 20 nt, Human
cacaguuuucugagaaagac

SEQ ID NO: 2766880 - RNA, 16 nt, Human
cacaugaaguccaagc

SEQ ID NO: 2766881 - RNA, 20 nt, Human
cacaugaaguccaagcauuu

SEQ ID NO: 2766882 - RNA, 17 nt, Human
cacaugaaguccaagca

SEQ ID NO: 2766883 - RNA, 17 nt, Human
caauuuuguuucuguac

SEQ ID NO: 2766884 - RNA, 16 nt, Human
caauuuuguuucugua

SEQ ID NO: 2766885 - RNA, 14 nt, Human
caauuuuguuucug

SEQ ID NO: 2766886 - RNA, 13 nt, Human
caauuuuguuucu

SEQ ID NO: 2766887 - RNA, 15 nt, Human
cacaagaaaugaaag

SEQ ID NO: 2766888 - RNA, 13 nt, Human
cacaagaaaugaa

SEQ ID NO: 2766889 - RNA, 23 nt, Human
cacaagacccaaaaggcagaagc

SEQ ID NO: 2766890 - RNA, 23 nt, Human
cacaagaaaugaaagcagggacu

SEQ ID NO: 2766891 - RNA, 23 nt, Human
caaauuuacagagacagaaagca

SEQ ID NO: 2766892 - RNA, 17 nt, Human
caaauuuacagagacag

SEQ ID NO: 2766893 - RNA, 16 nt, Human
caaauuuacagagaca

SEQ ID NO: 2766894 - RNA, 19 nt, Human
caagcauuuagauguauag

SEQ ID NO: 2766895 - RNA, 16 nt, Human
caagcauuuagaugua

SEQ ID NO: 2766896 - RNA, 21 nt, Human
caagcauaccaacacgagcag

SEQ ID NO: 2766897 - RNA, 16 nt, Human
caagcauaccaacacg

SEQ ID NO: 2766898 - RNA, 13 nt, Human
caagaaaugaaag

SEQ ID NO: 2766899 - RNA, 19 nt, Human
caagacugcacaucaaaau

SEQ ID NO: 2766900 - RNA, 18 nt, Human
caaaguugccuaaaucca

SEQ ID NO: 2766901 - RNA, 14 nt, Human
caaaguugccuaaa

SEQ ID NO: 2766902 - RNA, 17 nt, Human
caaaguugccuaaaucc

SEQ ID NO: 2766903 - RNA, 15 nt, Human
caaaguugccuaaau

SEQ ID NO: 2766904 - RNA, 14 nt, Human
caaagaaauguaag

SEQ ID NO: 2766905 - RNA, 19 nt, Human
auuuuaauaauguuucaaa

SEQ ID NO: 2766906 - RNA, 18 nt, Human
auuuuaauaauguuucaa

SEQ ID NO: 2766907 - RNA, 20 nt, Human
auuuacuaaaauggacugug

SEQ ID NO: 2766908 - RNA, 19 nt, Human
auuuacuaaaauggacugu

SEQ ID NO: 2766909 - RNA, 16 nt, Human
auuuacuaaaauggac

SEQ ID NO: 2766910 - RNA, 15 nt, Human
auuuacuaaaaugga

SEQ ID NO: 2766911 - RNA, 22 nt, Human
auuuaccacuuguguuuugcaa

SEQ ID NO: 2766912 - RNA, 15 nt, Human
auuuaccacuugugu

SEQ ID NO: 2766913 - RNA, 15 nt, Human
auuguacuuugugcu

SEQ ID NO: 2766914 - RNA, 16 nt, Human
auuguaguccuguaau

SEQ ID NO: 2766915 - RNA, 17 nt, Human
auuuaaaaaaaaaccug

SEQ ID NO: 2766916 - RNA, 18 nt, Human
auuuauuggcuuuucuga

SEQ ID NO: 2766917 - RNA, 14 nt, Human
auuuauuggcuuuu

SEQ ID NO: 2766918 - RNA, 20 nt, Human
auuuauuacuguaagaaaau

SEQ ID NO: 2766919 - RNA, 19 nt, Human
auuuauuacuguaagaaaa

SEQ ID NO: 2766920 - RNA, 23 nt, Human
auuuauuggcuuuucugauccag

SEQ ID NO: 2766921 - RNA, 20 nt, Human
auuuauuggcuuuucugauc

SEQ ID NO: 2766922 - RNA, 21 nt, Human
auuuauuuuaauaauguuuca

SEQ ID NO: 2766923 - RNA, 13 nt, Human
auuugaauuuugu

SEQ ID NO: 2766924 - RNA, 20 nt, Human
auuucuugagguaaaagcau

SEQ ID NO: 2766925 - RNA, 22 nt, Human
auuggggauucuuaaaguugaa

SEQ ID NO: 2766926 - RNA, 21 nt, Human
auuggggauucuuaaaguuga

SEQ ID NO: 2766927 - RNA, 20 nt, Human
auuggggauucuuaaaguug

SEQ ID NO: 2766928 - RNA, 16 nt, Human
auuggggauucuuaaa

SEQ ID NO: 2766929 - RNA, 15 nt, Human
auuggggauucuuaa

SEQ ID NO: 2766930 - RNA, 14 nt, Human
auuggggauucuua

SEQ ID NO: 2766931 - RNA, 17 nt, Human
auuggagcucgugggac

SEQ ID NO: 2766932 - RNA, 16 nt, Human
auuggagcucguggaa

SEQ ID NO: 2766933 - RNA, 23 nt, Human
auguuuauuacaguauaauuaac

SEQ ID NO: 2766934 - RNA, 22 nt, Human
auguuuauuacaguauaauuaa

SEQ ID NO: 2766935 - RNA, 19 nt, Human
auguuuauuacaguauaau

SEQ ID NO: 2766936 - RNA, 18 nt, Human
auguuuauuacaguauaa

SEQ ID NO: 2766937 - RNA, 16 nt, Human
auguuuauuacaguau

SEQ ID NO: 2766938 - RNA, 15 nt, Human
auguuuauuacagua

SEQ ID NO: 2766939 - RNA, 12 nt, Human
auguuuauuaca

SEQ ID NO: 2766940 - RNA, 19 nt, Human
uuuucugauccaguuuugu

SEQ ID NO: 2766941 - RNA, 16 nt, Human
uuuucucuaggaaaua

SEQ ID NO: 2766942 - RNA, 20 nt, Human
uuuucaggcuagauguaugu

SEQ ID NO: 2766943 - RNA, 22 nt, Human
uuuuauggcacuaguauuucua

SEQ ID NO: 2766944 - RNA, 20 nt, Human
augugcuaguaauuggaaag

SEQ ID NO: 2766945 - RNA, 21 nt, Human
augugcuaguaauuggaaagg

SEQ ID NO: 2766946 - RNA, 19 nt, Human
auguauauuuuauaucaau

SEQ ID NO: 2766947 - RNA, 23 nt, Human
augucgucaaagcugaaauggac

SEQ ID NO: 2766948 - RNA, 14 nt, Human
uuugaauuuugugu

SEQ ID NO: 2766949 - RNA, 12 nt, Human
uuugaauuuugu

SEQ ID NO: 2766950 - RNA, 19 nt, Human
uuugcuaagcauuccaacu

SEQ ID NO: 2766951 - RNA, 20 nt, Human
uuugcuggagcucugcccau

SEQ ID NO: 2766952 - RNA, 22 nt, Human
auucaaacagucucaggaaauc

SEQ ID NO: 2766953 - RNA, 19 nt, Human
auuauaucugaggaauucu

SEQ ID NO: 2766954 - RNA, 18 nt, Human
auuauaucugaggaauuc

SEQ ID NO: 2766955 - RNA, 16 nt, Human
auuauaugcuauuucu

SEQ ID NO: 2766956 - RNA, 22 nt, Human
auuauaucugaggaauucugua

SEQ ID NO: 2766957 - RNA, 21 nt, Human
auuauaucugaggaauucugu

SEQ ID NO: 2766958 - RNA, 20 nt, Human
auuauaucugaggaauucug

SEQ ID NO: 2766959 - RNA, 19 nt, Human
auuauucacugauuugaca

SEQ ID NO: 2766960 - RNA, 24 nt, Human
auuauucaaaguugccuaaaucca

SEQ ID NO: 2766961 - RNA, 18 nt, Human
auuauucaaaguugccua

SEQ ID NO: 2766962 - RNA, 22 nt, Human
auuauucaaaguugccuaaauc

SEQ ID NO: 2766963 - RNA, 19 nt, Human
auuauucaaaguugccuaa

SEQ ID NO: 2766964 - RNA, 19 nt, Human
auuauaugcuauuucuaua

SEQ ID NO: 2766965 - RNA, 17 nt, Human
auuauaugcuauuucua

SEQ ID NO: 2766966 - RNA, 18 nt, Human
auuauaugcuauuucuau

SEQ ID NO: 2766967 - RNA, 20 nt, Human
auuauauggcuugaguuuaa

SEQ ID NO: 2766968 - RNA, 17 nt, Human
auucacugauuugacau

SEQ ID NO: 2766969 - RNA, 12 nt, Human
auucacugauuu

SEQ ID NO: 2766970 - RNA, 17 nt, Human
auuccaagugauugaaa

SEQ ID NO: 2766971 - RNA, 24 nt, Human
uuuuuggcauaacauaaaucugug

SEQ ID NO: 2766972 - RNA, 23 nt, Human
uuuuuggcauaacauaaaucugu

SEQ ID NO: 2766973 - RNA, 15 nt, Human
uuuuugaagcuguau

SEQ ID NO: 2766974 - RNA, 20 nt, Human
uuuuuauauuuacuaaaaug

SEQ ID NO: 2766975 - RNA, 15 nt, Human
uuuuguuuucauuau

SEQ ID NO: 2766976 - RNA, 15 nt, Human
uuuuggaauuuuccu

SEQ ID NO: 2766977 - RNA, 14 nt, Human
uuuugugaagcaaa

SEQ ID NO: 2766978 - RNA, 21 nt, Human
auuagaauucuguauagauua

SEQ ID NO: 2766979 - RNA, 16 nt, Human
auuacuguaagaaaau

SEQ ID NO: 2766980 - RNA, 15 nt, Human
auuacuguaagaaaa

SEQ ID NO: 2766981 - RNA, 20 nt, Human
uugucaauaaaauccauaca

SEQ ID NO: 2766982 - RNA, 15 nt, Human
augagguacugagag

SEQ ID NO: 2766983 - RNA, 18 nt, Human
augagguacugagaguga

SEQ ID NO: 2766984 - RNA, 17 nt, Human
augagguacugagagug

SEQ ID NO: 2766985 - RNA, 13 nt, Human
augauuucauuca

SEQ ID NO: 2766986 - RNA, 18 nt, Human
uuuaaaaaaauuccaagu

SEQ ID NO: 2766987 - RNA, 12 nt, Human
augcaaagcacu

SEQ ID NO: 2766988 - RNA, 13 nt, Human
augcaaagcacug

SEQ ID NO: 2766989 - RNA, 14 nt, Human
augcaaagcacuga

SEQ ID NO: 2766990 - RNA, 21 nt, Human
uuuaaauauaugcuaagucuu

SEQ ID NO: 2766991 - RNA, 17 nt, Human
uuucaaacauauauaac

SEQ ID NO: 2766992 - RNA, 19 nt, Human
uuucaaacauauauaacaa

SEQ ID NO: 2766993 - RNA, 21 nt, Human
augcuucuguuuuauaauuuu

SEQ ID NO: 2766994 - RNA, 22 nt, Human
augcuguauuuuaaaagaauga

SEQ ID NO: 2766995 - RNA, 19 nt, Human
augcuguauuuuaaaagaa

SEQ ID NO: 2766996 - RNA, 23 nt, Human
augcuguauuuuaaaagaaugau

SEQ ID NO: 2766997 - RNA, 14 nt, Human
augccaucaauaaa

SEQ ID NO: 2766998 - RNA, 18 nt, Human
augcuacaggauuugaaa

SEQ ID NO: 2766999 - RNA, 22 nt, Human
augccuuuucccaacuccagaa

SEQ ID NO: 2767000 - RNA, 20 nt, Human
augccuuuucccaacuccag

SEQ ID NO: 2767001 - RNA, 14 nt, Human
augccuuuucccaa

SEQ ID NO: 2767002 - RNA, 15 nt, Human
uuuagucuugucuca

SEQ ID NO: 2767003 - RNA, 23 nt, Human
uuuagucuugucucagauuuuau

SEQ ID NO: 2767004 - RNA, 17 nt, Human
uuuagucuugucucaga

SEQ ID NO: 2767005 - RNA, 19 nt, Human
uuuauaugcuucuguuuua

SEQ ID NO: 2767006 - RNA, 21 nt, Human
uuuauaugcuucuguuuuaua

SEQ ID NO: 2767007 - RNA, 23 nt, Human
aucugaagucagaucugccuaag

SEQ ID NO: 2767008 - RNA, 18 nt, Human
aucugaagucagaucugc

SEQ ID NO: 2767009 - RNA, 17 nt, Human
aucugaagucagaucug

SEQ ID NO: 2767010 - RNA, 16 nt, Human
aucugaagucagaucu

SEQ ID NO: 2767011 - RNA, 12 nt, Human
uugacuuuuuau

SEQ ID NO: 2767012 - RNA, 13 nt, Human
uugacaugggaca

SEQ ID NO: 2767013 - RNA, 19 nt, Human
aucucaaaacugcacuguc

SEQ ID NO: 2767014 - RNA, 20 nt, Human
aucucaaaacugcacuguca

SEQ ID NO: 2767015 - RNA, 15 nt, Human
aucucaaaacugcac

SEQ ID NO: 2767016 - RNA, 15 nt, Human
uuggagaagaacuga

SEQ ID NO: 2767017 - RNA, 22 nt, Human
uuggagaagaacugaaaucaua

SEQ ID NO: 2767018 - RNA, 17 nt, Human
uuggagaagaacugaaa

SEQ ID NO: 2767019 - RNA, 12 nt, Human
aucuuuaaaaua

SEQ ID NO: 2767020 - RNA, 15 nt, Human
aucuuuaaaauacac

SEQ ID NO: 2767021 - RNA, 14 nt, Human
aucuuauaauuuaa

SEQ ID NO: 2767022 - RNA, 16 nt, Human
aucuuauaauuuaaaa

SEQ ID NO: 2767023 - RNA, 15 nt, Human
aucuuauaauuuaaa

SEQ ID NO: 2767024 - RNA, 18 nt, Human
augaacuuguaaaggaau

SEQ ID NO: 2767025 - RNA, 23 nt, Human
auaucugaggaauucuguauaga

SEQ ID NO: 2767026 - RNA, 22 nt, Human
auaucugaggaauucuguauag

SEQ ID NO: 2767027 - RNA, 21 nt, Human
auaucugaggaauucuguaua

SEQ ID NO: 2767028 - RNA, 20 nt, Human
auaucugaggaauucuguau

SEQ ID NO: 2767029 - RNA, 19 nt, Human
auaucugaggaauucugua

SEQ ID NO: 2767030 - RNA, 18 nt, Human
auaucugaggaauucugu

SEQ ID NO: 2767031 - RNA, 17 nt, Human
auaucugaggaauucug

SEQ ID NO: 2767032 - RNA, 16 nt, Human
auaucugaggaauucu

SEQ ID NO: 2767033 - RNA, 15 nt, Human
auaucugaggaauuc

SEQ ID NO: 2767034 - RNA, 23 nt, Human
auaugcaaagcacugacuucuaa

SEQ ID NO: 2767035 - RNA, 16 nt, Human
auaugcaaagcacuga

SEQ ID NO: 2767036 - RNA, 15 nt, Human
auaugcaaagcacug

SEQ ID NO: 2767037 - RNA, 21 nt, Human
uucagcaaaaauauuuuauga

SEQ ID NO: 2767038 - RNA, 15 nt, Human
auauaacaaugcugu

SEQ ID NO: 2767039 - RNA, 12 nt, Human
auauaacaaugc

SEQ ID NO: 2767040 - RNA, 19 nt, Human
auauaagcuuguauuccuu

SEQ ID NO: 2767041 - RNA, 18 nt, Human
auauauaacaaugcugua

SEQ ID NO: 2767042 - RNA, 17 nt, Human
auauauaacaaugcugu

SEQ ID NO: 2767043 - RNA, 14 nt, Human
auauauaacaaugc

SEQ ID NO: 2767044 - RNA, 18 nt, Human
auagucaaauugugugaa

SEQ ID NO: 2767045 - RNA, 17 nt, Human
auagucaaauuguguga

SEQ ID NO: 2767046 - RNA, 15 nt, Human
uucaaacauauauaa

SEQ ID NO: 2767047 - RNA, 21 nt, Human
auaggaauugacccacaagaa

SEQ ID NO: 2767048 - RNA, 14 nt, Human
auagcuacuaauuu

SEQ ID NO: 2767049 - RNA, 17 nt, Human
auagcuacuaauuuuaa

SEQ ID NO: 2767050 - RNA, 23 nt, Human
auagcuagacuggugacugauuc

SEQ ID NO: 2767051 - RNA, 19 nt, Human
auagcuagacuggugacug

SEQ ID NO: 2767052 - RNA, 18 nt, Human
auagcuagacuggugacu

SEQ ID NO: 2767053 - RNA, 14 nt, Human
auagcuagacuggu

SEQ ID NO: 2767054 - RNA, 16 nt, Human
auagcuagacugguga

SEQ ID NO: 2767055 - RNA, 15 nt, Human
auagcuagacuggug

SEQ ID NO: 2767056 - RNA, 18 nt, Human
auagcuacuaauuuuaaa

SEQ ID NO: 2767057 - RNA, 17 nt, Human
uuauuguuuaaaaucau

SEQ ID NO: 2767058 - RNA, 18 nt, Human
uucucaacuccaaacuga

SEQ ID NO: 2767059 - RNA, 14 nt, Human
uucucaacuccaaa

SEQ ID NO: 2767060 - RNA, 20 nt, Human
aucauuucugcaucagcugc

SEQ ID NO: 2767061 - RNA, 23 nt, Human
aucccucccuccaccucccugca

SEQ ID NO: 2767062 - RNA, 21 nt, Human
aucccucccuccaccucccug

SEQ ID NO: 2767063 - RNA, 13 nt, Human
aucccucccucca

SEQ ID NO: 2767064 - RNA, 11 nt, Human
aucccucccuc

SEQ ID NO: 2767065 - RNA, 16 nt, Human
uucugcaucagcugcu

SEQ ID NO: 2767066 - RNA, 23 nt, Human
uucugcaucagcugcugaaacaa

SEQ ID NO: 2767067 - RNA, 14 nt, Human
uucugaagaagaug

SEQ ID NO: 2767068 - RNA, 13 nt, Human
uucugaagaagau

SEQ ID NO: 2767069 - RNA, 12 nt, Human
uucugaagaaga

SEQ ID NO: 2767070 - RNA, 23 nt, Human
auauuaaagccauguuuauuaca

SEQ ID NO: 2767071 - RNA, 18 nt, Human
auauuaaagccauguuua

SEQ ID NO: 2767072 - RNA, 15 nt, Human
auauuaaagccaugu

SEQ ID NO: 2767073 - RNA, 14 nt, Human
auauuaaagccaug

SEQ ID NO: 2767074 - RNA, 19 nt, Human
auauuugaaauauugacuu

SEQ ID NO: 2767075 - RNA, 14 nt, Human
auauuugaaauauu

SEQ ID NO: 2767076 - RNA, 23 nt, Human
auauuugaaauauugacuuuuua

SEQ ID NO: 2767077 - RNA, 12 nt, Human
auauuuuaacuu

SEQ ID NO: 2767078 - RNA, 22 nt, Human
auauuuguaucacaaaucuuaa

SEQ ID NO: 2767079 - RNA, 13 nt, Human
auauuugaaauau

SEQ ID NO: 2767080 - RNA, 13 nt, Human
auauuuuaugauc

SEQ ID NO: 2767081 - RNA, 12 nt, Human
auauuuuaugau

SEQ ID NO: 2767082 - RNA, 22 nt, Human
auauuuuaugauccagcagauu

SEQ ID NO: 2767083 - RNA, 17 nt, Human
auauuuuaugauccagc

SEQ ID NO: 2767084 - RNA, 19 nt, Human
aucaauuuuucuuauuuca

SEQ ID NO: 2767085 - RNA, 14 nt, Human
uguuccuagugaaa

SEQ ID NO: 2767086 - RNA, 18 nt, Human
uguuccuagugaaagagg

SEQ ID NO: 2767087 - RNA, 15 nt, Human
uguuauaaucuuuca

SEQ ID NO: 2767088 - RNA, 13 nt, Human
uguguaaguagau

SEQ ID NO: 2767089 - RNA, 19 nt, Human
agugaguuggguguauugu

SEQ ID NO: 2767090 - RNA, 20 nt, Human
uguggucacaggaaguagag

SEQ ID NO: 2767091 - RNA, 18 nt, Human
ugugcugggguuaucuga

SEQ ID NO: 2767092 - RNA, 15 nt, Human
agugaaagaaaauaa

SEQ ID NO: 2767093 - RNA, 20 nt, Human
agugaacaaauuuacagaga

SEQ ID NO: 2767094 - RNA, 16 nt, Human
agugaacaaauuuaca

SEQ ID NO: 2767095 - RNA, 12 nt, Human
ugugaacuugaa

SEQ ID NO: 2767096 - RNA, 16 nt, Human
ugugaacuugaaauuu

SEQ ID NO: 2767097 - RNA, 15 nt, Human
ugugaacuugaaauu

SEQ ID NO: 2767098 - RNA, 14 nt, Human
ugugaacuugaaau

SEQ ID NO: 2767099 - RNA, 16 nt, Human
agucucaggaaaucaa

SEQ ID NO: 2767100 - RNA, 22 nt, Human
agucucaggaaaucaaauaugc

SEQ ID NO: 2767101 - RNA, 19 nt, Human
ugugagaugcuagaacucc

SEQ ID NO: 2767102 - RNA, 15 nt, Human
ugugagaugcuagaa

SEQ ID NO: 2767103 - RNA, 20 nt, Human
agugaaacucguuaauuugu

SEQ ID NO: 2767104 - RNA, 18 nt, Human
agucuuucacauuuaaau

SEQ ID NO: 2767105 - RNA, 19 nt, Human
auaaaauccauacauuugu

SEQ ID NO: 2767106 - RNA, 18 nt, Human
auaaaauccauacauuug

SEQ ID NO: 2767107 - RNA, 21 nt, Human
auaaaauaauuuuuauauuug

SEQ ID NO: 2767108 - RNA, 16 nt, Human
auaaaauaauuuuuau

SEQ ID NO: 2767109 - RNA, 15 nt, Human
auaaaauaauuuuua

SEQ ID NO: 2767110 - RNA, 18 nt, Human
uuaaguaaugauaacugg

SEQ ID NO: 2767111 - RNA, 22 nt, Human
uuaagaagacugcauuauauuu

SEQ ID NO: 2767112 - RNA, 20 nt, Human
uuaagaagacugcauuauau

SEQ ID NO: 2767113 - RNA, 20 nt, Human
uuacaguauaauuaacaugu

SEQ ID NO: 2767114 - RNA, 19 nt, Human
uuacaguauaauuaacaug

SEQ ID NO: 2767115 - RNA, 18 nt, Human
uuacaguauaauuaacau

SEQ ID NO: 2767116 - RNA, 13 nt, Human
uuacaguauaauu

SEQ ID NO: 2767117 - RNA, 17 nt, Human
uuacaguauaauuaaca

SEQ ID NO: 2767118 - RNA, 16 nt, Human
uuacaguauaauuaac

SEQ ID NO: 2767119 - RNA, 20 nt, Human
auaaaucugugaacuugaaa

SEQ ID NO: 2767120 - RNA, 22 nt, Human
auaaaucugugaacuugaaauu

SEQ ID NO: 2767121 - RNA, 21 nt, Human
auaaaucugugaacuugaaau

SEQ ID NO: 2767122 - RNA, 18 nt, Human
auaaauagcuagacuggu

SEQ ID NO: 2767123 - RNA, 16 nt, Human
auaaauagcuagacug

SEQ ID NO: 2767124 - RNA, 15 nt, Human
uuacuguaagaaaau

SEQ ID NO: 2767125 - RNA, 17 nt, Human
uuagaauucuguauaga

SEQ ID NO: 2767126 - RNA, 12 nt, Human
uuaccugggaaa

SEQ ID NO: 2767127 - RNA, 14 nt, Human
uuaccuuacagaag

SEQ ID NO: 2767128 - RNA, 14 nt, Human
uuaacaacagcugg

SEQ ID NO: 2767129 - RNA, 16 nt, Human
aguuggguguauugug

SEQ ID NO: 2767130 - RNA, 19 nt, Human
aguugccuaaauccauuug

SEQ ID NO: 2767131 - RNA, 23 nt, Human
aguugccuaaauccauuuggaaa

SEQ ID NO: 2767132 - RNA, 22 nt, Human
aguugccuaaauccauuuggaa

SEQ ID NO: 2767133 - RNA, 20 nt, Human
aguuggguguauugugcgcu

SEQ ID NO: 2767134 - RNA, 17 nt, Human
aguuggguguauugugc

SEQ ID NO: 2767135 - RNA, 19 nt, Human
aguuuaauauuaaagccau

SEQ ID NO: 2767136 - RNA, 18 nt, Human
aguuuaauauuaaagcca

SEQ ID NO: 2767137 - RNA, 16 nt, Human
aguuuaauauuaaagc

SEQ ID NO: 2767138 - RNA, 15 nt, Human
aguuuaauauuaaag

SEQ ID NO: 2767139 - RNA, 20 nt, Human
aguuuaauauuaaagccaug

SEQ ID NO: 2767140 - RNA, 16 nt, Human
aguuuagcuggaaaag

SEQ ID NO: 2767141 - RNA, 23 nt, Human
uguuuagucuugucucagauuuu

SEQ ID NO: 2767142 - RNA, 20 nt, Human
uguuuagucuugucucagau

SEQ ID NO: 2767143 - RNA, 22 nt, Human
uguuuagucuugucucagauuu

SEQ ID NO: 2767144 - RNA, 14 nt, Human
uguuuauuacagua

SEQ ID NO: 2767145 - RNA, 19 nt, Human
uguuuggaccaaaaaccag

SEQ ID NO: 2767146 - RNA, 19 nt, Human
uguuuucauuaucucaaaa

SEQ ID NO: 2767147 - RNA, 14 nt, Human
uguuuugcaagcca

SEQ ID NO: 2767148 - RNA, 16 nt, Human
aguucugaagaagaug

SEQ ID NO: 2767149 - RNA, 21 nt, Human
aguucugcagauaaacaguag

SEQ ID NO: 2767150 - RNA, 16 nt, Human
aguucugcagauaaac

SEQ ID NO: 2767151 - RNA, 18 nt, Human
aggggagcaugggaagug

SEQ ID NO: 2767152 - RNA, 23 nt, Human
agggaggacgcucucuggccuuc

SEQ ID NO: 2767153 - RNA, 22 nt, Human
agggaggacgcucucuggccuu

SEQ ID NO: 2767154 - RNA, 21 nt, Human
agggaggacgcucucuggccu

SEQ ID NO: 2767155 - RNA, 13 nt, Human
agggaaauuucag

SEQ ID NO: 2767156 - RNA, 13 nt, Human
aguaaaauccaca

SEQ ID NO: 2767157 - RNA, 20 nt, Human
aguaaugauaacuggaaacu

SEQ ID NO: 2767158 - RNA, 18 nt, Human
aguaaugauaacuggaaa

SEQ ID NO: 2767159 - RNA, 17 nt, Human
aguaaugauaacuggaa

SEQ ID NO: 2767160 - RNA, 13 nt, Human
aguaaugauaacu

SEQ ID NO: 2767161 - RNA, 16 nt, Human
aguauuucuaugaaau

SEQ ID NO: 2767162 - RNA, 17 nt, Human
aguauuucuaugaaaua

SEQ ID NO: 2767163 - RNA, 18 nt, Human
aguauuucuaugaaauau

SEQ ID NO: 2767164 - RNA, 17 nt, Human
agucaccucauggaauu

SEQ ID NO: 2767165 - RNA, 15 nt, Human
agucaccucauggaa

SEQ ID NO: 2767166 - RNA, 14 nt, Human
agucaccucaugga

SEQ ID NO: 2767167 - RNA, 18 nt, Human
aguauuagaauaccacag

SEQ ID NO: 2767168 - RNA, 13 nt, Human
uguauuacaaauc

SEQ ID NO: 2767169 - RNA, 22 nt, Human
uguauuacaaauccaaugaaau

SEQ ID NO: 2767170 - RNA, 13 nt, Human
uguaugugugaag

SEQ ID NO: 2767171 - RNA, 15 nt, Human
uguaucacaaaucuu

SEQ ID NO: 2767172 - RNA, 18 nt, Human
uguaucacaaaucuuaac

SEQ ID NO: 2767173 - RNA, 15 nt, Human
uguaguguuggagaa

SEQ ID NO: 2767174 - RNA, 14 nt, Human
uguaguguuggaga

SEQ ID NO: 2767175 - RNA, 14 nt, Human
uggugcccugcuuu

SEQ ID NO: 2767176 - RNA, 20 nt, Human
uggugcccugcuuucagaua

SEQ ID NO: 2767177 - RNA, 19 nt, Human
uggugcccugcuuucagau

SEQ ID NO: 2767178 - RNA, 16 nt, Human
uggugcccugcuuuca

SEQ ID NO: 2767179 - RNA, 15 nt, Human
uguaaauacaauuuu

SEQ ID NO: 2767180 - RNA, 16 nt, Human
uguaaaggaauuuaaa

SEQ ID NO: 2767181 - RNA, 14 nt, Human
agcuguucacagcc

SEQ ID NO: 2767182 - RNA, 22 nt, Human
ugccaucaauaaaaaauuauga

SEQ ID NO: 2767183 - RNA, 14 nt, Human
ugccaucaauaaaa

SEQ ID NO: 2767184 - RNA, 15 nt, Human
agcugcccucuccug

SEQ ID NO: 2767185 - RNA, 14 nt, Human
agcugcccucuccu

SEQ ID NO: 2767186 - RNA, 13 nt, Human
agcugcccucucc

SEQ ID NO: 2767187 - RNA, 19 nt, Human
ugcccuguuaaaagaugaa

SEQ ID NO: 2767188 - RNA, 20 nt, Human
ugcccuguuaaaagaugaaa

SEQ ID NO: 2767189 - RNA, 20 nt, Human
agcuugcccuggugccucac

SEQ ID NO: 2767190 - RNA, 16 nt, Human
agcuugcccuguuaaa

SEQ ID NO: 2767191 - RNA, 18 nt, Human
agcuugcccuguuaaaag

SEQ ID NO: 2767192 - RNA, 19 nt, Human
agcuugcccuguuaaaaga

SEQ ID NO: 2767193 - RNA, 14 nt, Human
ugcuacaaaaacac

SEQ ID NO: 2767194 - RNA, 19 nt, Human
ugccuuuucccaacuccag

SEQ ID NO: 2767195 - RNA, 17 nt, Human
ugccuuuucccaacucc

SEQ ID NO: 2767196 - RNA, 22 nt, Human
ugcuauuucuauauuuucauuc

SEQ ID NO: 2767197 - RNA, 21 nt, Human
ugcuauuucuauauuuucauu

SEQ ID NO: 2767198 - RNA, 19 nt, Human
aggaaaucaaauaugcaaa

SEQ ID NO: 2767199 - RNA, 20 nt, Human
aggaaaucaaauaugcaaag

SEQ ID NO: 2767200 - RNA, 21 nt, Human
aggaaaucaaauaugcaaagc

SEQ ID NO: 2767201 - RNA, 22 nt, Human
aggaaaucaaauaugcaaagca

SEQ ID NO: 2767202 - RNA, 15 nt, Human
aggcccccaggugcc

SEQ ID NO: 2767203 - RNA, 14 nt, Human
uggaguugaaaauc

SEQ ID NO: 2767204 - RNA, 15 nt, Human
aggcagcuugaaacu

SEQ ID NO: 2767205 - RNA, 20 nt, Human
aggcagcucuaaaugucaau

SEQ ID NO: 2767206 - RNA, 20 nt, Human
aggcauuuaggccaugggac

SEQ ID NO: 2767207 - RNA, 14 nt, Human
uggagcucguggaa

SEQ ID NO: 2767208 - RNA, 21 nt, Human
uggagcucguggaacaguuac

SEQ ID NO: 2767209 - RNA, 17 nt, Human
uggagcucguggaacag

SEQ ID NO: 2767210 - RNA, 17 nt, Human
ugcuuuuaaaaaaaaau

SEQ ID NO: 2767211 - RNA, 14 nt, Human
aggacuucuuuaau

SEQ ID NO: 2767212 - RNA, 23 nt, Human
aggacuucuuuaauuuuggaauu

SEQ ID NO: 2767213 - RNA, 22 nt, Human
aggacuucuuuaauuuuggaau

SEQ ID NO: 2767214 - RNA, 21 nt, Human
aggacuucuuuaauuuuggaa

SEQ ID NO: 2767215 - RNA, 16 nt, Human
aggacuucuuuaauuu

SEQ ID NO: 2767216 - RNA, 17 nt, Human
aggagaaacuggaacuc

SEQ ID NO: 2767217 - RNA, 19 nt, Human
aggagaaacuggaacucuc

SEQ ID NO: 2767218 - RNA, 18 nt, Human
aggagaaacuggaacucu

SEQ ID NO: 2767219 - RNA, 14 nt, Human
aggaauucuguaua

SEQ ID NO: 2767220 - RNA, 13 nt, Human
aggaauucuguau

SEQ ID NO: 2767221 - RNA, 20 nt, Human
aggacgcucucuggccuucg

SEQ ID NO: 2767222 - RNA, 19 nt, Human
aggacgcucucuggccuuc

SEQ ID NO: 2767223 - RNA, 17 nt, Human
aggacgcucucuggccu

SEQ ID NO: 2767224 - RNA, 16 nt, Human
aggacgcucucuggcc

SEQ ID NO: 2767225 - RNA, 14 nt, Human
aggacgcucucugg

SEQ ID NO: 2767226 - RNA, 13 nt, Human
aggacgcucucug

SEQ ID NO: 2767227 - RNA, 15 nt, Human
ugcacuccagccuga

SEQ ID NO: 2767228 - RNA, 17 nt, Human
ugcacuccagccugagc

SEQ ID NO: 2767229 - RNA, 22 nt, Human
ugcagaagacaguauggcagcu

SEQ ID NO: 2767230 - RNA, 23 nt, Human
ugauuugacauagucuggcugua

SEQ ID NO: 2767231 - RNA, 13 nt, Human
ugauuucauucaa

SEQ ID NO: 2767232 - RNA, 20 nt, Human
ugcaaagcacugacuucuaa

SEQ ID NO: 2767233 - RNA, 22 nt, Human
ugcaaagcacugacuucuaagu

SEQ ID NO: 2767234 - RNA, 18 nt, Human
ugcaaagcacugacuucu

SEQ ID NO: 2767235 - RNA, 21 nt, Human
ugcaagccagauuuuccugaa

SEQ ID NO: 2767236 - RNA, 15 nt, Human
ugcaagccagauuuu

SEQ ID NO: 2767237 - RNA, 21 nt, Human
ugcaauaaaauggguuuuacu

SEQ ID NO: 2767238 - RNA, 17 nt, Human
ugcaauaaaauggguuu

SEQ ID NO: 2767239 - RNA, 20 nt, Human
ugcauagauucccugagcag

SEQ ID NO: 2767240 - RNA, 13 nt, Human
ugcauacucauua

SEQ ID NO: 2767241 - RNA, 19 nt, Human
ugcauacucauuaggaugg

SEQ ID NO: 2767242 - RNA, 19 nt, Human
agccugagcgacagugaga

SEQ ID NO: 2767243 - RNA, 17 nt, Human
ugccaguuauggcuaua

SEQ ID NO: 2767244 - RNA, 13 nt, Human
ugccauaauuacu

SEQ ID NO: 2767245 - RNA, 18 nt, Human
ugagugucuuaauuaaaa

SEQ ID NO: 2767246 - RNA, 18 nt, Human
agcagucaggaaagagaa

SEQ ID NO: 2767247 - RNA, 17 nt, Human
agcagucaggaaagaga

SEQ ID NO: 2767248 - RNA, 19 nt, Human
agcagucaggaaagagaac

SEQ ID NO: 2767249 - RNA, 22 nt, Human
agcauauauuuuuauauuuacu

SEQ ID NO: 2767250 - RNA, 20 nt, Human
agcauauauuuuuauauuua

SEQ ID NO: 2767251 - RNA, 18 nt, Human
agcauauauuuuuauauu

SEQ ID NO: 2767252 - RNA, 13 nt, Human
agcauaccaacac

SEQ ID NO: 2767253 - RNA, 15 nt, Human
agcauauauuuuuau

SEQ ID NO: 2767254 - RNA, 19 nt, Human
agcauaccaacacgagcag

SEQ ID NO: 2767255 - RNA, 22 nt, Human
agcauaccaacacgagcaggcu

SEQ ID NO: 2767256 - RNA, 19 nt, Human
agcagggcauggcugggaa

SEQ ID NO: 2767257 - RNA, 16 nt, Human
agcaggcuacugucag

SEQ ID NO: 2767258 - RNA, 17 nt, Human
agcaggcuacugucagc

SEQ ID NO: 2767259 - RNA, 19 nt, Human
agcaggcuacugucagcuc

SEQ ID NO: 2767260 - RNA, 20 nt, Human
agcaggcuacugucagcucc

SEQ ID NO: 2767261 - RNA, 14 nt, Human
agcaggcuacuguc

SEQ ID NO: 2767262 - RNA, 19 nt, Human
ugauccagcagauuauuca

SEQ ID NO: 2767263 - RNA, 15 nt, Human
ugauuaaguaaugau

SEQ ID NO: 2767264 - RNA, 16 nt, Human
ugauuaaguaaugaua

SEQ ID NO: 2767265 - RNA, 22 nt, Human
agcauuuagauguauagguuga

SEQ ID NO: 2767266 - RNA, 20 nt, Human
agcaucacaugaacuuguaa

SEQ ID NO: 2767267 - RNA, 22 nt, Human
agagauuuuuuuguuguuuguu

SEQ ID NO: 2767268 - RNA, 23 nt, Human
agagauuuuuuuguuguuuguuu

SEQ ID NO: 2767269 - RNA, 14 nt, Human
agagcugcccucuc

SEQ ID NO: 2767270 - RNA, 13 nt, Human
agagcugcccucu

SEQ ID NO: 2767271 - RNA, 15 nt, Human
agagcugcccucucc

SEQ ID NO: 2767272 - RNA, 23 nt, Human
ugaaauaagccagacaucaacag

SEQ ID NO: 2767273 - RNA, 20 nt, Human
ugaaauaagccagacaucaa

SEQ ID NO: 2767274 - RNA, 18 nt, Human
ugaaauaagccagacauc

SEQ ID NO: 2767275 - RNA, 17 nt, Human
ugaaauaagccagacau

SEQ ID NO: 2767276 - RNA, 17 nt, Human
ugaaauuugaauuuugu

SEQ ID NO: 2767277 - RNA, 14 nt, Human
ugaaauuugaauuu

SEQ ID NO: 2767278 - RNA, 16 nt, Human
ugaaauuugaauuuug

SEQ ID NO: 2767279 - RNA, 15 nt, Human
ugaaauuugaauuuu

SEQ ID NO: 2767280 - RNA, 20 nt, Human
ugaaauuguaauuauaucug

SEQ ID NO: 2767281 - RNA, 21 nt, Human
ugaaauuguaauuauaucuga

SEQ ID NO: 2767282 - RNA, 15 nt, Human
ugaaauuguauuaca

SEQ ID NO: 2767283 - RNA, 18 nt, Human
ugaaauauuauguuaaaa

SEQ ID NO: 2767284 - RNA, 18 nt, Human
ugaacaaauuuacagaga

SEQ ID NO: 2767285 - RNA, 20 nt, Human
ugaacaaauuuacagagaca

SEQ ID NO: 2767286 - RNA, 19 nt, Human
ugaacaaauuuacagagac

SEQ ID NO: 2767287 - RNA, 23 nt, Human
ugaacuagaguuuagcuggaaaa

SEQ ID NO: 2767288 - RNA, 22 nt, Human
agagcugcccucuccugggcag

SEQ ID NO: 2767289 - RNA, 19 nt, Human
agagcuguucacagccaga

SEQ ID NO: 2767290 - RNA, 21 nt, Human
agagcuguucacagccagacu

SEQ ID NO: 2767291 - RNA, 15 nt, Human
agagguugcagugag

SEQ ID NO: 2767292 - RNA, 17 nt, Human
ugacccacaagaaauga

SEQ ID NO: 2767293 - RNA, 17 nt, Human
agaugcaguucugaaga

SEQ ID NO: 2767294 - RNA, 19 nt, Human
agaugcaguucugaagaag

SEQ ID NO: 2767295 - RNA, 18 nt, Human
agaugcaguucugaagaa

SEQ ID NO: 2767296 - RNA, 14 nt, Human
agaugcuagaacuc

SEQ ID NO: 2767297 - RNA, 23 nt, Human
ugaauuuauuggcuuuucugauc

SEQ ID NO: 2767298 - RNA, 22 nt, Human
ugaauuuauuggcuuuucugau

SEQ ID NO: 2767299 - RNA, 21 nt, Human
ugaauuuauuggcuuuucuga

SEQ ID NO: 2767300 - RNA, 17 nt, Human
ugaauuuauuggcuuuu

SEQ ID NO: 2767301 - RNA, 17 nt, Human
agaguuuagcuggaaaa

SEQ ID NO: 2767302 - RNA, 16 nt, Human
agaguuuagcuggaaa

SEQ ID NO: 2767303 - RNA, 23 nt, Human
agacuauucaaacagucucagga

SEQ ID NO: 2767304 - RNA, 16 nt, Human
ucuuauuucauuucuu

SEQ ID NO: 2767305 - RNA, 15 nt, Human
ucuuauuucauuucu

SEQ ID NO: 2767306 - RNA, 12 nt, Human
agacuggugacu

SEQ ID NO: 2767307 - RNA, 14 nt, Human
agacuggugacuga

SEQ ID NO: 2767308 - RNA, 13 nt, Human
agacuggugacug

SEQ ID NO: 2767309 - RNA, 17 nt, Human
agacuggugacugauuc

SEQ ID NO: 2767310 - RNA, 16 nt, Human
agacuggugacugauu

SEQ ID NO: 2767311 - RNA, 15 nt, Human
agagacagaaagcag

SEQ ID NO: 2767312 - RNA, 24 nt, Human
agagacagaaagcagaacagugau

SEQ ID NO: 2767313 - RNA, 23 nt, Human
agaauuaacacaugauccugcaa

SEQ ID NO: 2767314 - RNA, 13 nt, Human
ucuguacuuuuug

SEQ ID NO: 2767315 - RNA, 17 nt, Human
ucuguacuuuuuggcau

SEQ ID NO: 2767316 - RNA, 14 nt, Human
ucuguacuuuuugg

SEQ ID NO: 2767317 - RNA, 22 nt, Human
ucugugaacuugaaauuugaau

SEQ ID NO: 2767318 - RNA, 19 nt, Human
ucugugaacuugaaauuug

SEQ ID NO: 2767319 - RNA, 22 nt, Human
ucuuagaugcaguucugaagaa

SEQ ID NO: 2767320 - RNA, 23 nt, Human
ucuuagaugcaguucugaagaag

SEQ ID NO: 2767321 - RNA, 15 nt, Human
agacacacaugaagu

SEQ ID NO: 2767322 - RNA, 17 nt, Human
agacacacugaagaagc

SEQ ID NO: 2767323 - RNA, 16 nt, Human
agacacacugaagaag

SEQ ID NO: 2767324 - RNA, 23 nt, Human
acuuguuagaucuaguucacucu

SEQ ID NO: 2767325 - RNA, 15 nt, Human
acuuguuagaucuag

SEQ ID NO: 2767326 - RNA, 14 nt, Human
acuuguuagaucua

SEQ ID NO: 2767327 - RNA, 16 nt, Human
acuuguguuuugcaag

SEQ ID NO: 2767328 - RNA, 23 nt, Human
acuucuaaguaaaaccacagcag

SEQ ID NO: 2767329 - RNA, 16 nt, Human
acuugucaauaaaauc

SEQ ID NO: 2767330 - RNA, 16 nt, Human
acuugaaauuugaauu

SEQ ID NO: 2767331 - RNA, 19 nt, Human
acuugaaauuugaauuuug

SEQ ID NO: 2767332 - RNA, 20 nt, Human
acuugaaauuugaauuuugu

SEQ ID NO: 2767333 - RNA, 20 nt, Human
acuugaacccgggaggcaga

SEQ ID NO: 2767334 - RNA, 19 nt, Human
acuugaacccgggaggcag

SEQ ID NO: 2767335 - RNA, 21 nt, Human
acuugaacccauauuuguaca

SEQ ID NO: 2767336 - RNA, 12 nt, Human
ucucuggccuuc

SEQ ID NO: 2767337 - RNA, 22 nt, Human
ucucuggccuucggccuccauc

SEQ ID NO: 2767338 - RNA, 21 nt, Human
ucucuggccuucggccuccau

SEQ ID NO: 2767339 - RNA, 23 nt, Human
agaaacuuaagguuaccuuuguu

SEQ ID NO: 2767340 - RNA, 19 nt, Human
ucugaagucagaucugccu

SEQ ID NO: 2767341 - RNA, 15 nt, Human
ucugaagucagaucu

SEQ ID NO: 2767342 - RNA, 12 nt, Human
ucugaagaagau

SEQ ID NO: 2767343 - RNA, 22 nt, Human
ucggguuuuauuguuuaaaauc

SEQ ID NO: 2767344 - RNA, 21 nt, Human
acuguggugacuuuggauaau

SEQ ID NO: 2767345 - RNA, 20 nt, Human
acuguggugacuuuggauaa

SEQ ID NO: 2767346 - RNA, 18 nt, Human
acuguggugacuuuggau

SEQ ID NO: 2767347 - RNA, 12 nt, Human
acuguggugacu

SEQ ID NO: 2767348 - RNA, 15 nt, Human
acuguggugacuuug

SEQ ID NO: 2767349 - RNA, 14 nt, Human
acuguggugacuuu

SEQ ID NO: 2767350 - RNA, 18 nt, Human
acuguggguagacacaca

SEQ ID NO: 2767351 - RNA, 13 nt, Human
acuguggguagac

SEQ ID NO: 2767352 - RNA, 21 nt, Human
acugucagcuccccucggaga

SEQ ID NO: 2767353 - RNA, 18 nt, Human
acugggacaggggagaac

SEQ ID NO: 2767354 - RNA, 23 nt, Human
ucuaaguaaaaccacagcaguug

SEQ ID NO: 2767355 - RNA, 16 nt, Human
ucuacauacuauggaa

SEQ ID NO: 2767356 - RNA, 20 nt, Human
ucuaaguaaaaccacagcag

SEQ ID NO: 2767357 - RNA, 21 nt, Human
ucuaaguaaaaccacagcagu

SEQ ID NO: 2767358 - RNA, 22 nt, Human
ucuaaguaaaaccacagcaguu

SEQ ID NO: 2767359 - RNA, 20 nt, Human
ucuaaagccauuguaguccu

SEQ ID NO: 2767360 - RNA, 13 nt, Human
acuggcacaguuu

SEQ ID NO: 2767361 - RNA, 19 nt, Human
acuggcacaguuuucugag

SEQ ID NO: 2767362 - RNA, 20 nt, Human
acuggcacaguuuucugaga

SEQ ID NO: 2767363 - RNA, 19 nt, Human
acugccuucucaacuccaa

SEQ ID NO: 2767364 - RNA, 13 nt, Human
acugccuucucaa

SEQ ID NO: 2767365 - RNA, 15 nt, Human
acugcauuauauuua

SEQ ID NO: 2767366 - RNA, 14 nt, Human
acugcauuauauuu

SEQ ID NO: 2767367 - RNA, 21 nt, Human
uccaacuaucucauuuccaag

SEQ ID NO: 2767368 - RNA, 19 nt, Human
acgagcaggcuacugucag

SEQ ID NO: 2767369 - RNA, 20 nt, Human
acgagcaggcuacugucagc

SEQ ID NO: 2767370 - RNA, 14 nt, Human
acgagaaaacaaua

SEQ ID NO: 2767371 - RNA, 13 nt, Human
accucccugcaau

SEQ ID NO: 2767372 - RNA, 12 nt, Human
accucccugcaa

SEQ ID NO: 2767373 - RNA, 16 nt, Human
ucaugaauuaguuuua

SEQ ID NO: 2767374 - RNA, 22 nt, Human
ucaggaaaucaaauaugcaaag

SEQ ID NO: 2767375 - RNA, 23 nt, Human
ucaggaaaucaaauaugcaaagc

SEQ ID NO: 2767376 - RNA, 16 nt, Human
accuagggugauauua

SEQ ID NO: 2767377 - RNA, 21 nt, Human
accuagggugauauuaaccag

SEQ ID NO: 2767378 - RNA, 18 nt, Human
acuccagaaagugacaag

SEQ ID NO: 2767379 - RNA, 21 nt, Human
acuccaaagaaauguaaggga

SEQ ID NO: 2767380 - RNA, 15 nt, Human
acuccaaagaaaugu

SEQ ID NO: 2767381 - RNA, 18 nt, Human
acuccaaagaaauguaag

SEQ ID NO: 2767382 - RNA, 14 nt, Human
acuccaaagaaaug

SEQ ID NO: 2767383 - RNA, 11 nt, Human
ucccugagcag

SEQ ID NO: 2767384 - RNA, 16 nt, Human
ucccucccuccaccuc

SEQ ID NO: 2767385 - RNA, 15 nt, Human
ucccucccuccaccu

SEQ ID NO: 2767386 - RNA, 23 nt, Human
ucccuccaccucccugcaauaaa

SEQ ID NO: 2767387 - RNA, 21 nt, Human
ucccuccaccucccugcaaua

SEQ ID NO: 2767388 - RNA, 14 nt, Human
ucccucccuccacc

SEQ ID NO: 2767389 - RNA, 13 nt, Human
ucccucccuccac

SEQ ID NO: 2767390 - RNA, 17 nt, Human
uccccucggagaagagc

SEQ ID NO: 2767391 - RNA, 16 nt, Human
uccccucggagaagag

SEQ ID NO: 2767392 - RNA, 18 nt, Human
ucccagccagcaguucag

SEQ ID NO: 2767393 - RNA, 17 nt, Human
ucccagccagcaguuca

SEQ ID NO: 2767394 - RNA, 14 nt, Human
ucccagucauuuaa

SEQ ID NO: 2767395 - RNA, 22 nt, Human
ucccagucauuuaauaaaugug

SEQ ID NO: 2767396 - RNA, 18 nt, Human
uccauuuaauaauuauau

SEQ ID NO: 2767397 - RNA, 13 nt, Human
uccaugaagaugu

SEQ ID NO: 2767398 - RNA, 21 nt, Human
uccaugaagauguagaggaga

SEQ ID NO: 2767399 - RNA, 21 nt, Human
uccauccugaggcuccacuug

SEQ ID NO: 2767400 - RNA, 20 nt, Human
uccauccugaggcuccacuu

SEQ ID NO: 2767401 - RNA, 19 nt, Human
uccauccugaggcuccacu

SEQ ID NO: 2767402 - RNA, 20 nt, Human
ucaggaaaucaaauaugcaa

SEQ ID NO: 2767403 - RNA, 21 nt, Human
ucaggaaaucaaauaugcaaa

SEQ ID NO: 2767404 - RNA, 19 nt, Human
ucaggaaagagaacuucca

SEQ ID NO: 2767405 - RNA, 13 nt, Human
ucaggaaagagaa

SEQ ID NO: 2767406 - RNA, 12 nt, Human
ucagagcugccc

SEQ ID NO: 2767407 - RNA, 19 nt, Human
accaugggauaaaugccau

SEQ ID NO: 2767408 - RNA, 18 nt, Human
accaugggauaaaugcca

SEQ ID NO: 2767409 - RNA, 23 nt, Human
accauuucuugagguaaaagcau

SEQ ID NO: 2767410 - RNA, 15 nt, Human
accaaucaugaauua

SEQ ID NO: 2767411 - RNA, 13 nt, Human
accaaucaugaau

SEQ ID NO: 2767412 - RNA, 20 nt, Human
ucaauuuuucuuauuucauu

SEQ ID NO: 2767413 - RNA, 23 nt, Human
ucaauuuuucuuauuucauuucu

SEQ ID NO: 2767414 - RNA, 13 nt, Human
ucaauuuuaacaa

SEQ ID NO: 2767415 - RNA, 15 nt, Human
ucaauucuugccaaa

SEQ ID NO: 2767416 - RNA, 18 nt, Human
accacuuguguuuugcaa

SEQ ID NO: 2767417 - RNA, 14 nt, Human
accagggacugagg

SEQ ID NO: 2767418 - RNA, 20 nt, Human
acauagucuggcuguaccca

SEQ ID NO: 2767419 - RNA, 15 nt, Human
acauagucuggcugu

SEQ ID NO: 2767420 - RNA, 14 nt, Human
acauagucuggcug

SEQ ID NO: 2767421 - RNA, 19 nt, Human
acauauauaacaaugcugu

SEQ ID NO: 2767422 - RNA, 18 nt, Human
acauagaauuaacacaug

SEQ ID NO: 2767423 - RNA, 14 nt, Human
acauagaauuaaca

SEQ ID NO: 2767424 - RNA, 13 nt, Human
acaucaacagaua

SEQ ID NO: 2767425 - RNA, 18 nt, Human
uauuucuauauuuucauu

SEQ ID NO: 2767426 - RNA, 17 nt, Human
uauuucuauauuuucau

SEQ ID NO: 2767427 - RNA, 16 nt, Human
uauuucuauauuuuca

SEQ ID NO: 2767428 - RNA, 13 nt, Human
uauuucauuucuu

SEQ ID NO: 2767429 - RNA, 18 nt, Human
acaguuuucugagaaaga

SEQ ID NO: 2767430 - RNA, 19 nt, Human
acaguuuucugagaaagac

SEQ ID NO: 2767431 - RNA, 20 nt, Human
acaguuuucugagaaagacu

SEQ ID NO: 2767432 - RNA, 21 nt, Human
acaguuuucugagaaagacua

SEQ ID NO: 2767433 - RNA, 16 nt, Human
acaguuuucugagaaa

SEQ ID NO: 2767434 - RNA, 17 nt, Human
acaguuuucugagaaag

SEQ ID NO: 2767435 - RNA, 15 nt, Human
acaguuuucugagaa

SEQ ID NO: 2767436 - RNA, 22 nt, Human
ucaagaugaugaugaucuuuaa

SEQ ID NO: 2767437 - RNA, 21 nt, Human
ucaaaauaugccccauucaac

SEQ ID NO: 2767438 - RNA, 23 nt, Human
ucaaaauaccaugccauuuaaag

SEQ ID NO: 2767439 - RNA, 21 nt, Human
ucaaaauaccaugccauuuaa

SEQ ID NO: 2767440 - RNA, 16 nt, Human
uauuuuuauauuuacu

SEQ ID NO: 2767441 - RNA, 18 nt, Human
ucaaaagaaagaaaauca

SEQ ID NO: 2767442 - RNA, 22 nt, Human
ucaaaguugccuaaauccauuu

SEQ ID NO: 2767443 - RNA, 21 nt, Human
ucaaaguugccuaaauccauu

SEQ ID NO: 2767444 - RNA, 19 nt, Human
ucaaaguugccuaaaucca

SEQ ID NO: 2767445 - RNA, 18 nt, Human
ucaaaguugccuaaaucc

SEQ ID NO: 2767446 - RNA, 14 nt, Human
ucaaagcugaaaug

SEQ ID NO: 2767447 - RNA, 19 nt, Human
acaugauccugcaauucca

SEQ ID NO: 2767448 - RNA, 17 nt, Human
uaucucaaaacugcacu

SEQ ID NO: 2767449 - RNA, 15 nt, Human
uauauuuauuacugu

SEQ ID NO: 2767450 - RNA, 19 nt, Human
uauauuuauuacuguaaga

SEQ ID NO: 2767451 - RNA, 19 nt, Human
acagcccuucuuuccacag

SEQ ID NO: 2767452 - RNA, 21 nt, Human
acagcccuucuuuccacagaa

SEQ ID NO: 2767453 - RNA, 20 nt, Human
acagcccuucuuuccacaga

SEQ ID NO: 2767454 - RNA, 15 nt, Human
acacuuaaaaauggu

SEQ ID NO: 2767455 - RNA, 13 nt, Human
acacuuaaaaaug

SEQ ID NO: 2767456 - RNA, 12 nt, Human
uauauuuacaaa

SEQ ID NO: 2767457 - RNA, 14 nt, Human
acacugaagaagca

SEQ ID NO: 2767458 - RNA, 12 nt, Human
acacugaagaag

SEQ ID NO: 2767459 - RNA, 14 nt, Human
acacuccagugaga

SEQ ID NO: 2767460 - RNA, 23 nt, Human
uauaaaauaauuuuuauauuuga

SEQ ID NO: 2767461 - RNA, 14 nt, Human
acacuaagagagaa

SEQ ID NO: 2767462 - RNA, 18 nt, Human
acacuaagagagaaugag

SEQ ID NO: 2767463 - RNA, 17 nt, Human
acacuaagagagaauga

SEQ ID NO: 2767464 - RNA, 22 nt, Human
uagucuugucucagauuuuauu

SEQ ID NO: 2767465 - RNA, 17 nt, Human
uagucuugucucagauu

SEQ ID NO: 2767466 - RNA, 12 nt, Human
uaguguuggaga

SEQ ID NO: 2767467 - RNA, 16 nt, Human
uaguguuggagaagaa

SEQ ID NO: 2767468 - RNA, 14 nt, Human
acacacugaagaag

SEQ ID NO: 2767469 - RNA, 17 nt, Human
acaaugcuguauuuuaa

SEQ ID NO: 2767470 - RNA, 14 nt, Human
acaaugcuguauuu

SEQ ID NO: 2767471 - RNA, 17 nt, Human
acacaacuauauuguuu

SEQ ID NO: 2767472 - RNA, 14 nt, Human
acacaacuauauug

SEQ ID NO: 2767473 - RNA, 20 nt, Human
acacacucaaaucaagaaac

SEQ ID NO: 2767474 - RNA, 13 nt, Human
acacacugaagaa

SEQ ID NO: 2767475 - RNA, 14 nt, Human
uacuaaaaauacaa

SEQ ID NO: 2767476 - RNA, 18 nt, Human
uacuaaaaauacaaaaaa

SEQ ID NO: 2767477 - RNA, 17 nt, Human
uacugagagugaacaaa

SEQ ID NO: 2767478 - RNA, 18 nt, Human
aauugaggacacugauau

SEQ ID NO: 2767479 - RNA, 18 nt, Human
aauuuacagagacagaaa

SEQ ID NO: 2767480 - RNA, 17 nt, Human
aauuuacagagacagaa

SEQ ID NO: 2767481 - RNA, 19 nt, Human
uacuucuuaggguuaugau

SEQ ID NO: 2767482 - RNA, 16 nt, Human
uacuucaugcugucua

SEQ ID NO: 2767483 - RNA, 20 nt, Human
acaaaguauuaagcauauau

SEQ ID NO: 2767484 - RNA, 17 nt, Human
uagauaggccaugggca

SEQ ID NO: 2767485 - RNA, 22 nt, Human
uagauaggucagugcaaauacu

SEQ ID NO: 2767486 - RNA, 14 nt, Human
uagaucuaguucac

SEQ ID NO: 2767487 - RNA, 20 nt, Human
uagaugcaguucugaagaag

SEQ ID NO: 2767488 - RNA, 21 nt, Human
uagaugcaguucugaagaaga

SEQ ID NO: 2767489 - RNA, 20 nt, Human
uacuuuuuggcauaacauaa

SEQ ID NO: 2767490 - RNA, 19 nt, Human
uacuuuuuggcauaacaua

SEQ ID NO: 2767491 - RNA, 22 nt, Human
uacuuugugcugggguuaucug

SEQ ID NO: 2767492 - RNA, 16 nt, Human
uacuuugugcuggggu

SEQ ID NO: 2767493 - RNA, 14 nt, Human
uacuuuuuggcaua

SEQ ID NO: 2767494 - RNA, 15 nt, Human
aauuuuguuucugua

SEQ ID NO: 2767495 - RNA, 16 nt, Human
aauuuuguuucuguac

SEQ ID NO: 2767496 - RNA, 21 nt, Human
aauuuuucuuauuucauuucu

SEQ ID NO: 2767497 - RNA, 22 nt, Human
aauuuuuucucuaggaaauauu

SEQ ID NO: 2767498 - RNA, 22 nt, Human
acaagcucacagaccuuugaac

SEQ ID NO: 2767499 - RNA, 15 nt, Human
acaacagcuggugcc

SEQ ID NO: 2767500 - RNA, 17 nt, Human
acaaauuuacagagaca

SEQ ID NO: 2767501 - RNA, 18 nt, Human
uagcuagacuggugacug

SEQ ID NO: 2767502 - RNA, 15 nt, Human
uagcuagacugguga

SEQ ID NO: 2767503 - RNA, 16 nt, Human
uagcuacuaauuuuaa

SEQ ID NO: 2767504 - RNA, 18 nt, Human
aauaggcguaacuaauuu

SEQ ID NO: 2767505 - RNA, 14 nt, Human
uaacauaaaucugu

SEQ ID NO: 2767506 - RNA, 20 nt, Human
uaacauaaaucugugaacuu

SEQ ID NO: 2767507 - RNA, 18 nt, Human
uaacauaaaucugugaac

SEQ ID NO: 2767508 - RNA, 17 nt, Human
uaacauaaaucugugaa

SEQ ID NO: 2767509 - RNA, 16 nt, Human
uaacauaaaucuguga

SEQ ID NO: 2767510 - RNA, 15 nt, Human
uaacauaaaucugug

SEQ ID NO: 2767511 - RNA, 12 nt, Human
aauaucacuugu

SEQ ID NO: 2767512 - RNA, 15 nt, Human
aauaucacuugucaa

SEQ ID NO: 2767513 - RNA, 15 nt, Human
aauaugcaaagcacu

SEQ ID NO: 2767514 - RNA, 17 nt, Human
aauaugcaaagcacuga

SEQ ID NO: 2767515 - RNA, 24 nt, Human
aauaugcaaagcacugacuucuaa

SEQ ID NO: 2767516 - RNA, 18 nt, Human
aauauuuuaugauccagc

SEQ ID NO: 2767517 - RNA, 17 nt, Human
aauauuuuaugauccag

SEQ ID NO: 2767518 - RNA, 14 nt, Human
aauauuucagauaa

SEQ ID NO: 2767519 - RNA, 15 nt, Human
aauauuucagauaau

SEQ ID NO: 2767520 - RNA, 19 nt, Human
aauaucuuuuuuuuaauaa

SEQ ID NO: 2767521 - RNA, 21 nt, Human
aauaacaaugaaaguugauaa

SEQ ID NO: 2767522 - RNA, 22 nt, Human
uaaaucugugaacuugaaauuu

SEQ ID NO: 2767523 - RNA, 21 nt, Human
uaaaucugugaacuugaaauu

SEQ ID NO: 2767524 - RNA, 19 nt, Human
uaaaucugugaacuugaaa

SEQ ID NO: 2767525 - RNA, 18 nt, Human
uaaaucugugaacuugaa

SEQ ID NO: 2767526 - RNA, 17 nt, Human
uaaaucugugaacuuga

SEQ ID NO: 2767527 - RNA, 16 nt, Human
uaaaucugugaacuug

SEQ ID NO: 2767528 - RNA, 15 nt, Human
uaaaucugugaacuu

SEQ ID NO: 2767529 - RNA, 18 nt, Human
uaaauagcuagacuggug

SEQ ID NO: 2767530 - RNA, 16 nt, Human
aauaauuuuuauauuu

SEQ ID NO: 2767531 - RNA, 19 nt, Human
aauaauuuuuauauuugaa

SEQ ID NO: 2767532 - RNA, 17 nt, Human
aauaauuuuuauauuug

SEQ ID NO: 2767533 - RNA, 14 nt, Human
uaaauaaauagcua

SEQ ID NO: 2767534 - RNA, 17 nt, Human
uaaauaaauaaauagcu

SEQ ID NO: 2767535 - RNA, 20 nt, Human
aauaauuuuuauauuugaaa

SEQ ID NO: 2767536 - RNA, 23 nt, Human
uacaguauaauuaacauguuaaa

SEQ ID NO: 2767537 - RNA, 19 nt, Human
uacaguauaauuaacaugu

SEQ ID NO: 2767538 - RNA, 18 nt, Human
uacaguauaauuaacaug

SEQ ID NO: 2767539 - RNA, 11 nt, Human
aaugugauaug

SEQ ID NO: 2767540 - RNA, 20 nt, Human
aauggacuguggugacuuug

SEQ ID NO: 2767541 - RNA, 16 nt, Human
aauggacuguggugac

SEQ ID NO: 2767542 - RNA, 19 nt, Human
aauggacuuuuguacauag

SEQ ID NO: 2767543 - RNA, 14 nt, Human
uacaguauaauuaa

SEQ ID NO: 2767544 - RNA, 17 nt, Human
uacaguauaauuaacau

SEQ ID NO: 2767545 - RNA, 16 nt, Human
uacaguauaauuaaca

SEQ ID NO: 2767546 - RNA, 19 nt, Human
uacacuaagagagaaugag

SEQ ID NO: 2767547 - RNA, 18 nt, Human
uacacuaagagagaauga

SEQ ID NO: 2767548 - RNA, 13 nt, Human
uacaaaaacacag

SEQ ID NO: 2767549 - RNA, 14 nt, Human
uacaaaaacacagc

SEQ ID NO: 2767550 - RNA, 15 nt, Human
uacaaaaacacagca

SEQ ID NO: 2767551 - RNA, 15 nt, Human
aaucugugaacuuga

SEQ ID NO: 2767552 - RNA, 13 nt, Human
aaucugugaacuu

SEQ ID NO: 2767553 - RNA, 18 nt, Human
aaucugugaacuugaaau

SEQ ID NO: 2767554 - RNA, 17 nt, Human
aaucugugaacuugaaa

SEQ ID NO: 2767555 - RNA, 19 nt, Human
aaucugugaacuugaaauu

SEQ ID NO: 2767556 - RNA, 14 nt, Human
aaucuuauaauuua

SEQ ID NO: 2767557 - RNA, 16 nt, Human
aaucuuauaauuuaaa

SEQ ID NO: 2767558 - RNA, 13 nt, Human
aauccuugaagau

SEQ ID NO: 2767559 - RNA, 15 nt, Human
aaucaucaagucuuu

SEQ ID NO: 2767560 - RNA, 17 nt, Human
aaucaugaauuaguuuu

SEQ ID NO: 2767561 - RNA, 19 nt, Human
aaucaugaauuaguuuuau

SEQ ID NO: 2767562 - RNA, 23 nt, Human
aaucaugaauuaguuuuauaugc

SEQ ID NO: 2767563 - RNA, 20 nt, Human
aaucuuuaaaaaaaaaauug

SEQ ID NO: 2767564 - RNA, 19 nt, Human
aaucuuuaaaaaaaaaauu

SEQ ID NO: 2767565 - RNA, 16 nt, Human
uaaugauaacuggaaa

SEQ ID NO: 2767566 - RNA, 21 nt, Human
aaugagagacacacugaagaa

SEQ ID NO: 2767567 - RNA, 22 nt, Human
aagaaugguccgugcuaaggac

SEQ ID NO: 2767568 - RNA, 19 nt, Human
aagaaugguccgugcuaag

SEQ ID NO: 2767569 - RNA, 18 nt, Human
aagaaugauuaugaauua

SEQ ID NO: 2767570 - RNA, 16 nt, Human
aagaaugauuaugaau

SEQ ID NO: 2767571 - RNA, 22 nt, Human
aagaagugaaaaucuacacucc

SEQ ID NO: 2767572 - RNA, 16 nt, Human
aagaagugaaaaucua

SEQ ID NO: 2767573 - RNA, 21 nt, Human
gugggacagucaccucaugga

SEQ ID NO: 2767574 - RNA, 19 nt, Human
aagagcuguucacagccag

SEQ ID NO: 2767575 - RNA, 19 nt, Human
guguuguacucaauuuuaa

SEQ ID NO: 2767576 - RNA, 21 nt, Human
gugugaccacugcagaagaca

SEQ ID NO: 2767577 - RNA, 12 nt, Human
guuagaucuagu

SEQ ID NO: 2767578 - RNA, 13 nt, Human
guugacaugggac

SEQ ID NO: 2767579 - RNA, 18 nt, Human
guugacaugggacauuug

SEQ ID NO: 2767580 - RNA, 14 nt, Human
guugacaugggaca

SEQ ID NO: 2767581 - RNA, 23 nt, Human
aagcuuguauuccuuuuucucuc

SEQ ID NO: 2767582 - RNA, 20 nt, Human
guuucuguacuuuuuggcau

SEQ ID NO: 2767583 - RNA, 15 nt, Human
guuucuguacuuuuu

SEQ ID NO: 2767584 - RNA, 23 nt, Human
guuuucugagaaagacuauucaa

SEQ ID NO: 2767585 - RNA, 21 nt, Human
guuucaaacauauauaacaau

SEQ ID NO: 2767586 - RNA, 14 nt, Human
guugccuaaaucca

SEQ ID NO: 2767587 - RNA, 16 nt, Human
guugccuaaauccauu

SEQ ID NO: 2767588 - RNA, 15 nt, Human
guugccuaaauccau

SEQ ID NO: 2767589 - RNA, 10 nt, Human
guuuaaaauc

SEQ ID NO: 2767590 - RNA, 16 nt, Human
guuuaaaaucauuucu

SEQ ID NO: 2767591 - RNA, 18 nt, Human
guuguaccgcaaugugac

SEQ ID NO: 2767592 - RNA, 20 nt, Human
aacccauauuuguacaccaa

SEQ ID NO: 2767593 - RNA, 21 nt, Human
aaccaugggauaaaugccauc

SEQ ID NO: 2767594 - RNA, 13 nt, Human
aacccaaauguuc

SEQ ID NO: 2767595 - RNA, 18 nt, Human
aacccaaauguucaucaa

SEQ ID NO: 2767596 - RNA, 20 nt, Human
aaccuagggugauauuaacc

SEQ ID NO: 2767597 - RNA, 20 nt, Human
aaccaugggauaaaugccau

SEQ ID NO: 2767598 - RNA, 18 nt, Human
aaccaugggauaaaugcc

SEQ ID NO: 2767599 - RNA, 17 nt, Human
aaccaugggauaaaugc

SEQ ID NO: 2767600 - RNA, 15 nt, Human
aaccaugggauaaau

SEQ ID NO: 2767601 - RNA, 12 nt, Human
aaccacagcagu

SEQ ID NO: 2767602 - RNA, 22 nt, Human
gucuuaauuaaaagaauauuuu

SEQ ID NO: 2767603 - RNA, 19 nt, Human
gucuuaauuaaaagaauau

SEQ ID NO: 2767604 - RNA, 21 nt, Human
gucuuaauuaaaagaauauuu

SEQ ID NO: 2767605 - RNA, 15 nt, Human
gugaacacaucagcu

SEQ ID NO: 2767606 - RNA, 18 nt, Human
aacucguuaauuuguagu

SEQ ID NO: 2767607 - RNA, 14 nt, Human
aacucccuuucaac

SEQ ID NO: 2767608 - RNA, 13 nt, Human
aacucccuuucaa

SEQ ID NO: 2767609 - RNA, 21 nt, Human
aacuccagaaagugacaagcu

SEQ ID NO: 2767610 - RNA, 14 nt, Human
aacuccagaaagug

SEQ ID NO: 2767611 - RNA, 24 nt, Human
guccaagcauaccaacacgagcag

SEQ ID NO: 2767612 - RNA, 21 nt, Human
guccaagcauuuagauguaua

SEQ ID NO: 2767613 - RNA, 15 nt, Human
aacaaggaugaauua

SEQ ID NO: 2767614 - RNA, 21 nt, Human
aacaagccuccuuuuaaagua

SEQ ID NO: 2767615 - RNA, 22 nt, Human
aacaguagugauaguuguaccg

SEQ ID NO: 2767616 - RNA, 18 nt, Human
aacauuugguaaggggaa

SEQ ID NO: 2767617 - RNA, 18 nt, Human
aaauggcuuccuggcaau

SEQ ID NO: 2767618 - RNA, 19 nt, Human
aaauggcuuccuggcaaua

SEQ ID NO: 2767619 - RNA, 14 nt, Human
aaaugcauuucuaa

SEQ ID NO: 2767620 - RNA, 22 nt, Human
aaaugaaagcagggacuugaac

SEQ ID NO: 2767621 - RNA, 21 nt, Human
aaaugaaagcagggacuugaa

SEQ ID NO: 2767622 - RNA, 18 nt, Human
aaauccauacauuugugu

SEQ ID NO: 2767623 - RNA, 14 nt, Human
aaauccauuuggaa

SEQ ID NO: 2767624 - RNA, 16 nt, Human
aaauccauuuggaaau

SEQ ID NO: 2767625 - RNA, 15 nt, Human
aaauccauuuggaaa

SEQ ID NO: 2767626 - RNA, 22 nt, Human
aaaucccauuauucaaaguugc

SEQ ID NO: 2767627 - RNA, 21 nt, Human
aaaucccauuauucaaaguug

SEQ ID NO: 2767628 - RNA, 20 nt, Human
aaaucccauuauucaaaguu

SEQ ID NO: 2767629 - RNA, 19 nt, Human
aaaucccauuauucaaagu

SEQ ID NO: 2767630 - RNA, 17 nt, Human
aaaucccauuauucaaa

SEQ ID NO: 2767631 - RNA, 16 nt, Human
aaaucccauuauucaa

SEQ ID NO: 2767632 - RNA, 15 nt, Human
aaaucccauuauuca

SEQ ID NO: 2767633 - RNA, 13 nt, Human
aaaucccauuauu

SEQ ID NO: 2767634 - RNA, 23 nt, Human
aaauccauuuggaaaucuuuaaa

SEQ ID NO: 2767635 - RNA, 22 nt, Human
aaauccauuuggaaaucuuuaa

SEQ ID NO: 2767636 - RNA, 21 nt, Human
aaauccauuuggaaaucuuua

SEQ ID NO: 2767637 - RNA, 18 nt, Human
aaauccauuuggaaaucu

SEQ ID NO: 2767638 - RNA, 14 nt, Human
aaauccuugaagau

SEQ ID NO: 2767639 - RNA, 19 nt, Human
aaaucuacacuccagugag

SEQ ID NO: 2767640 - RNA, 13 nt, Human
guaugugugaagu

SEQ ID NO: 2767641 - RNA, 17 nt, Human
guaugugugaagugagu

SEQ ID NO: 2767642 - RNA, 14 nt, Human
guaugauucccagc

SEQ ID NO: 2767643 - RNA, 22 nt, Human
aaauguaagggaaacugccagc

SEQ ID NO: 2767644 - RNA, 17 nt, Human
aaauuucagcagcugca

SEQ ID NO: 2767645 - RNA, 18 nt, Human
aaauuucagcagcugcag

SEQ ID NO: 2767646 - RNA, 14 nt, Human
ccaguauuguacaa

SEQ ID NO: 2767647 - RNA, 15 nt, Human
ccaggggccaugaau

SEQ ID NO: 2767648 - RNA, 19 nt, Human
ccacuuggucugugagaug

SEQ ID NO: 2767649 - RNA, 17 nt, Human
ccacuuggucugugaga

SEQ ID NO: 2767650 - RNA, 16 nt, Human
ccacuuggucugugag

SEQ ID NO: 2767651 - RNA, 15 nt, Human
ccacuuggucuguga

SEQ ID NO: 2767652 - RNA, 22 nt, Human
ccacuuggucugugagaugcua

SEQ ID NO: 2767653 - RNA, 20 nt, Human
ccacuuggucugugagaugc

SEQ ID NO: 2767654 - RNA, 12 nt, Human
ccacuuggucug

SEQ ID NO: 2767655 - RNA, 13 nt, Human
ccauuuaaagcuu

SEQ ID NO: 2767656 - RNA, 22 nt, Human
ccauuguggucacaggaaguag

SEQ ID NO: 2767657 - RNA, 19 nt, Human
ccaugggauaaaugccauc

SEQ ID NO: 2767658 - RNA, 17 nt, Human
ccaugggauaaaugcca

SEQ ID NO: 2767659 - RNA, 18 nt, Human
ccaugggcacugugggua

SEQ ID NO: 2767660 - RNA, 15 nt, Human
ccccauuguggucac

SEQ ID NO: 2767661 - RNA, 22 nt, Human
ccucuccugggcagcugccucc

SEQ ID NO: 2767662 - RNA, 21 nt, Human
ccucuccugggcagcugccuc

SEQ ID NO: 2767663 - RNA, 16 nt, Human
ccucuccugggcagcu

SEQ ID NO: 2767664 - RNA, 15 nt, Human
ccucuccugggcagc

SEQ ID NO: 2767665 - RNA, 14 nt, Human
ccucuccugggcag

SEQ ID NO: 2767666 - RNA, 20 nt, Human
ccucuccugggcagcugccu

SEQ ID NO: 2767667 - RNA, 19 nt, Human
ccucuccugggcagcugcc

SEQ ID NO: 2767668 - RNA, 18 nt, Human
ccucuccugggcagcugc

SEQ ID NO: 2767669 - RNA, 17 nt, Human
ccucuccugggcagcug

SEQ ID NO: 2767670 - RNA, 13 nt, Human
cccucggagaaga

SEQ ID NO: 2767671 - RNA, 14 nt, Human
cccugagcaggauu

SEQ ID NO: 2767672 - RNA, 12 nt, Human
ccuaaggacuuc

SEQ ID NO: 2767673 - RNA, 11 nt, Human
ccuaaggacuu

SEQ ID NO: 2767674 - RNA, 23 nt, Human
ccuaaggacuucuuuaauuuugg

SEQ ID NO: 2767675 - RNA, 18 nt, Human
ccuaaggacuucuuuaau

SEQ ID NO: 2767676 - RNA, 17 nt, Human
ccuaaggacuucuuuaa

SEQ ID NO: 2767677 - RNA, 16 nt, Human
ccuaaggacuucuuua

SEQ ID NO: 2767678 - RNA, 20 nt, Human
ccuaacgaaguauccuucag

SEQ ID NO: 2767679 - RNA, 15 nt, Human
cucuccccaugaugu

SEQ ID NO: 2767680 - RNA, 16 nt, Human
cucuccccaugauguu

SEQ ID NO: 2767681 - RNA, 19 nt, Human
cucuauguucuaagaagug

SEQ ID NO: 2767682 - RNA, 13 nt, Human
cucucuggccuuc

SEQ ID NO: 2767683 - RNA, 16 nt, Human
cucucuggccuucggc

SEQ ID NO: 2767684 - RNA, 14 nt, Human
cucucuggccuucg

SEQ ID NO: 2767685 - RNA, 22 nt, Human
cuccucugcuugccaucccucc

SEQ ID NO: 2767686 - RNA, 22 nt, Human
cucccuccaccucccugcaaua

SEQ ID NO: 2767687 - RNA, 21 nt, Human
cucccuccaccucccugcaau

SEQ ID NO: 2767688 - RNA, 20 nt, Human
cucccuccaccucccugcaa

SEQ ID NO: 2767689 - RNA, 19 nt, Human
cucccuccaccucccugca

SEQ ID NO: 2767690 - RNA, 16 nt, Human
cucaguccaugaagau

SEQ ID NO: 2767691 - RNA, 23 nt, Human
cuaugucauuugcuggagcucug

SEQ ID NO: 2767692 - RNA, 18 nt, Human
cuaucucauuuccaagca

SEQ ID NO: 2767693 - RNA, 18 nt, Human
cuauguucuaagaaguga

SEQ ID NO: 2767694 - RNA, 17 nt, Human
ccuucucuucacaguca

SEQ ID NO: 2767695 - RNA, 20 nt, Human
cuaacgaaguauccuucagc

SEQ ID NO: 2767696 - RNA, 20 nt, Human
cuacaaaaacacagcaaggg

SEQ ID NO: 2767697 - RNA, 12 nt, Human
ccuuuucccaac

SEQ ID NO: 2767698 - RNA, 12 nt, Human
auuauguaaauc

SEQ ID NO: 2767699 - RNA, 14 nt, Human
auuauguaaauccc

SEQ ID NO: 2767700 - RNA, 13 nt, Human
auuauguaaaucc

SEQ ID NO: 2767701 - RNA, 23 nt, Human
auuauguaaaucccauuauucaa

SEQ ID NO: 2767702 - RNA, 22 nt, Human
auuauguaaaucccauuauuca

SEQ ID NO: 2767703 - RNA, 17 nt, Human
auuauguaaaucccauu

SEQ ID NO: 2767704 - RNA, 15 nt, Human
auuauguaaauccca

SEQ ID NO: 2767705 - RNA, 22 nt, Human
auugaggacacugauauggguc

SEQ ID NO: 2767706 - RNA, 18 nt, Human
auuuaauaauuauaugcu

SEQ ID NO: 2767707 - RNA, 15 nt, Human
auuuaauaauuauau

SEQ ID NO: 2767708 - RNA, 13 nt, Human
auuuaauaauuau

SEQ ID NO: 2767709 - RNA, 16 nt, Human
auuucagcagcugcag

SEQ ID NO: 2767710 - RNA, 18 nt, Human
auuuuuuuguuguuuguu

SEQ ID NO: 2767711 - RNA, 16 nt, Human
auuuuuauauuugaaa

SEQ ID NO: 2767712 - RNA, 19 nt, Human
auuuuuauauuugaaauau

SEQ ID NO: 2767713 - RNA, 17 nt, Human
caaacauauauaacaau

SEQ ID NO: 2767714 - RNA, 21 nt, Human
caaaagguauuuuaaucacca

SEQ ID NO: 2767715 - RNA, 19 nt, Human
auuuucuauaauuuaaaua

SEQ ID NO: 2767716 - RNA, 17 nt, Human
auuuucuauaauuuaaa

SEQ ID NO: 2767717 - RNA, 18 nt, Human
auuuucuauaauuuaaau

SEQ ID NO: 2767718 - RNA, 13 nt, Human
cacaucagcuugc

SEQ ID NO: 2767719 - RNA, 23 nt, Human
cacaucagcuugcccuguuaaaa

SEQ ID NO: 2767720 - RNA, 23 nt, Human
cacugaagaagcaccaaucauga

SEQ ID NO: 2767721 - RNA, 11 nt, Human
cacugaagaag

SEQ ID NO: 2767722 - RNA, 21 nt, Human
cacuccagugagacagcucug

SEQ ID NO: 2767723 - RNA, 16 nt, Human
cacuccagugagacag

SEQ ID NO: 2767724 - RNA, 14 nt, Human
caagcaaguauuag

SEQ ID NO: 2767725 - RNA, 12 nt, Human
caacuccagaaa

SEQ ID NO: 2767726 - RNA, 19 nt, Human
caacuaucucauuuccaag

SEQ ID NO: 2767727 - RNA, 19 nt, Human
caacuauauuguuugcuaa

SEQ ID NO: 2767728 - RNA, 17 nt, Human
caaucagccuaguugau

SEQ ID NO: 2767729 - RNA, 21 nt, Human
caauauuucagauaaucacaa

SEQ ID NO: 2767730 - RNA, 19 nt, Human
cagcuguaugauucccagc

SEQ ID NO: 2767731 - RNA, 20 nt, Human
cagcugccuccccuccucug

SEQ ID NO: 2767732 - RNA, 19 nt, Human
cagcugccuccccuccucu

SEQ ID NO: 2767733 - RNA, 18 nt, Human
cagcugccuccccuccuc

SEQ ID NO: 2767734 - RNA, 17 nt, Human
cagcugccuccccuccu

SEQ ID NO: 2767735 - RNA, 16 nt, Human
cagcugccuccccucc

SEQ ID NO: 2767736 - RNA, 15 nt, Human
cagcugccuccccuc

SEQ ID NO: 2767737 - RNA, 14 nt, Human
cagcugccuccccu

SEQ ID NO: 2767738 - RNA, 9 nt, Human
cagcugccu

SEQ ID NO: 2767739 - RNA, 10 nt, Human
cagcugccuc

SEQ ID NO: 2767740 - RNA, 11 nt, Human
cagcugccucc

SEQ ID NO: 2767741 - RNA, 20 nt, Human
cagcuuauugucuagugaaa

SEQ ID NO: 2767742 - RNA, 17 nt, Human
cagcuuauucacaagac

SEQ ID NO: 2767743 - RNA, 20 nt, Human
cagcuguaugauucccagcc

SEQ ID NO: 2767744 - RNA, 14 nt, Human
cagcuuauugucua

SEQ ID NO: 2767745 - RNA, 16 nt, Human
caggaaagagaacuuc

SEQ ID NO: 2767746 - RNA, 11 nt, Human
caggcuacugu

SEQ ID NO: 2767747 - RNA, 14 nt, Human
cagauacuggauug

SEQ ID NO: 2767748 - RNA, 13 nt, Human
cagauacuggauu

SEQ ID NO: 2767749 - RNA, 18 nt, Human
cagauacuggauuguacu

SEQ ID NO: 2767750 - RNA, 17 nt, Human
cagagcugcccucuccu

SEQ ID NO: 2767751 - RNA, 23 nt, Human
cagagcugcccucuccugggcag

SEQ ID NO: 2767752 - RNA, 21 nt, Human
cagagcugcccucuccugggc

SEQ ID NO: 2767753 - RNA, 20 nt, Human
cagagcugcccucuccuggg

SEQ ID NO: 2767754 - RNA, 19 nt, Human
cagagcugcccucuccugg

SEQ ID NO: 2767755 - RNA, 18 nt, Human
cagagcugcccucuccug

SEQ ID NO: 2767756 - RNA, 14 nt, Human
cagccagacuggca

SEQ ID NO: 2767757 - RNA, 15 nt, Human
cagccagacuggcac

SEQ ID NO: 2767758 - RNA, 18 nt, Human
cagccagacuggcacagu

SEQ ID NO: 2767759 - RNA, 23 nt, Human
cagccagcaguucagagcugccc

SEQ ID NO: 2767760 - RNA, 22 nt, Human
cagccagcaguucagagcugcc

SEQ ID NO: 2767761 - RNA, 22 nt, Human
cagacuggcacaguuuucugag

SEQ ID NO: 2767762 - RNA, 23 nt, Human
cagacuggcacaguuuucugaga

SEQ ID NO: 2767763 - RNA, 17 nt, Human
cagacuggcacaguuuu

SEQ ID NO: 2767764 - RNA, 18 nt, Human
cagacuggcacaguuuuc

SEQ ID NO: 2767765 - RNA, 22 nt, Human
caguucagagcugcccucuccu

SEQ ID NO: 2767766 - RNA, 21 nt, Human
caguucagagcugcccucucc

SEQ ID NO: 2767767 - RNA, 19 nt, Human
caguucagagcugcccucu

SEQ ID NO: 2767768 - RNA, 18 nt, Human
caguucagagcugcccuc

SEQ ID NO: 2767769 - RNA, 24 nt, Human
caguucagagcugcccucuccugg

SEQ ID NO: 2767770 - RNA, 23 nt, Human
caguucagagcugcccucuccug

SEQ ID NO: 2767771 - RNA, 22 nt, Human
caguuauuauauuuacaaaugg

SEQ ID NO: 2767772 - RNA, 17 nt, Human
caguucagagcugcccu

SEQ ID NO: 2767773 - RNA, 16 nt, Human
caguucagagcugccc

SEQ ID NO: 2767774 - RNA, 15 nt, Human
caguucagagcugcc

SEQ ID NO: 2767775 - RNA, 22 nt, Human
cagugauuaccagggacugagg

SEQ ID NO: 2767776 - RNA, 13 nt, Human
caguuauggcuau

SEQ ID NO: 2767777 - RNA, 19 nt, Human
caguuauggcuauaggugc

SEQ ID NO: 2767778 - RNA, 20 nt, Human
caguuauggcuauaggugcu

SEQ ID NO: 2767779 - RNA, 17 nt, Human
caguuauuauauuuaca

SEQ ID NO: 2767780 - RNA, 21 nt, Human
caguuauuauauuuacaaaug

SEQ ID NO: 2767781 - RNA, 16 nt, Human
cauagguuuaauaauu

SEQ ID NO: 2767782 - RNA, 19 nt, Human
cauagcagcuuauucacaa

SEQ ID NO: 2767783 - RNA, 19 nt, Human
cauccugaggcuccacuug

SEQ ID NO: 2767784 - RNA, 18 nt, Human
cauccugaggcuccacuu

SEQ ID NO: 2767785 - RNA, 15 nt, Human
cauuauucaaaguug

SEQ ID NO: 2767786 - RNA, 14 nt, Human
cauuauucaaaguu

SEQ ID NO: 2767787 - RNA, 19 nt, Human
cauuauauuuauuacugua

SEQ ID NO: 2767788 - RNA, 21 nt, Human
ccaacuccagaaagugacaag

SEQ ID NO: 2767789 - RNA, 17 nt, Human
cauugguguuguacuca

SEQ ID NO: 2767790 - RNA, 16 nt, Human
cauuuguauaaaauaa

SEQ ID NO: 2767791 - RNA, 14 nt, Human
cauuuguauaaaau

SEQ ID NO: 2767792 - RNA, 14 nt, Human
ccaaaaggcagaag

SEQ ID NO: 2767793 - RNA, 20 nt, Human
cugcacggugaauggcuuug

SEQ ID NO: 2767794 - RNA, 17 nt, Human
cugcacggugaauggcu

SEQ ID NO: 2767795 - RNA, 15 nt, Human
cugcacggugaaugg

SEQ ID NO: 2767796 - RNA, 14 nt, Human
cugcacggugaaug

SEQ ID NO: 2767797 - RNA, 16 nt, Human
cugcacuccagccuga

SEQ ID NO: 2767798 - RNA, 20 nt, Human
cugcacuccagccugagcga

SEQ ID NO: 2767799 - RNA, 17 nt, Human
cugcacuccagccugag

SEQ ID NO: 2767800 - RNA, 15 nt, Human
cugggcagcugccuc

SEQ ID NO: 2767801 - RNA, 14 nt, Human
cugggcagcugccu

SEQ ID NO: 2767802 - RNA, 13 nt, Human
cugggcagcugcc

SEQ ID NO: 2767803 - RNA, 12 nt, Human
cuggugccucac

SEQ ID NO: 2767804 - RNA, 21 nt, Human
cuggugccucaccccuugcca

SEQ ID NO: 2767805 - RNA, 13 nt, Human
cuuaaaguugaau

SEQ ID NO: 2767806 - RNA, 11 nt, Human
cuuaaaguuga

SEQ ID NO: 2767807 - RNA, 11 nt, Human
cuucagacaua

SEQ ID NO: 2767808 - RNA, 23 nt, Human
cuucaugcugucuacacuaagag

SEQ ID NO: 2767809 - RNA, 20 nt, Human
cuucuguuuuauaauuuugu

SEQ ID NO: 2767810 - RNA, 15 nt, Human
cuucuguuuuauaau

SEQ ID NO: 2767811 - RNA, 16 nt, Human
cuuuaauuuuggaauu

SEQ ID NO: 2767812 - RNA, 13 nt, Human
cuuuaauuuugga

SEQ ID NO: 2767813 - RNA, 15 nt, Human
cuuuaauuuuggaau

SEQ ID NO: 2767814 - RNA, 14 nt, Human
cuuuaauuuuggaa

SEQ ID NO: 2767815 - RNA, 20 nt, Human
cuuuaaagggauggcaagau

SEQ ID NO: 2767816 - RNA, 21 nt, Human
cuuugagugucuuaauuaaaa

SEQ ID NO: 2767817 - RNA, 21 nt, Human
gacagaaagcagaacagugau

SEQ ID NO: 2767818 - RNA, 14 nt, Human
gacacacugaagaa

SEQ ID NO: 2767819 - RNA, 16 nt, Human
gacacacugaagaagc

SEQ ID NO: 2767820 - RNA, 15 nt, Human
gacacacugaagaag

SEQ ID NO: 2767821 - RNA, 21 nt, Human
gacagugagacucugucucag

SEQ ID NO: 2767822 - RNA, 17 nt, Human
gacauuugcucauggaa

SEQ ID NO: 2767823 - RNA, 16 nt, Human
gacauuugcucaugga

SEQ ID NO: 2767824 - RNA, 14 nt, Human
gacuguggugacuu

SEQ ID NO: 2767825 - RNA, 13 nt, Human
gacuguggugacu

SEQ ID NO: 2767826 - RNA, 21 nt, Human
gacucuuaagaagacugcauu

SEQ ID NO: 2767827 - RNA, 18 nt, Human
gacucuuaagaagacugc

SEQ ID NO: 2767828 - RNA, 14 nt, Human
gacucuuaagaaga

SEQ ID NO: 2767829 - RNA, 15 nt, Human
gacgcucucuggccu

SEQ ID NO: 2767830 - RNA, 17 nt, Human
gacgcucucuggccuuc

SEQ ID NO: 2767831 - RNA, 16 nt, Human
gacgcucucuggccuu

SEQ ID NO: 2767832 - RNA, 13 nt, Human
gaacugaaaucau

SEQ ID NO: 2767833 - RNA, 14 nt, Human
gaacugaaaucaua

SEQ ID NO: 2767834 - RNA, 19 nt, Human
gaacccgggaggcagaggu

SEQ ID NO: 2767835 - RNA, 23 nt, Human
gaagcaacccaaauguucaucaa

SEQ ID NO: 2767836 - RNA, 14 nt, Human
gaagcaaaauuuuu

SEQ ID NO: 2767837 - RNA, 23 nt, Human
gcacaguuuucugagaaagacua

SEQ ID NO: 2767838 - RNA, 20 nt, Human
gcacaguuuucugagaaaga

SEQ ID NO: 2767839 - RNA, 22 nt, Human
gcacaguuuucugagaaagacu

SEQ ID NO: 2767840 - RNA, 22 nt, Human
gcaauagucaaauugugugaaa

SEQ ID NO: 2767841 - RNA, 20 nt, Human
gcaaguauuagaauaccaca

SEQ ID NO: 2767842 - RNA, 21 nt, Human
gauuuuuuuguuguuuguuua

SEQ ID NO: 2767843 - RNA, 18 nt, Human
gauuuuuuuguuguuugu

SEQ ID NO: 2767844 - RNA, 22 nt, Human
gaugguucccuugaugaagaag

SEQ ID NO: 2767845 - RNA, 18 nt, Human
gauguagaggagaaacug

SEQ ID NO: 2767846 - RNA, 17 nt, Human
gauguagaggagaaacu

SEQ ID NO: 2767847 - RNA, 16 nt, Human
gaugaucuuuaaaaua

SEQ ID NO: 2767848 - RNA, 17 nt, Human
gaucugccuaaggacuu

SEQ ID NO: 2767849 - RNA, 23 nt, Human
gaucugccuaaggacuucuuuaa

SEQ ID NO: 2767850 - RNA, 21 nt, Human
gaucugccuaaggacuucuuu

SEQ ID NO: 2767851 - RNA, 20 nt, Human
gaucugccuaaggacuucuu

SEQ ID NO: 2767852 - RNA, 18 nt, Human
gaucugccuaaggacuuc

SEQ ID NO: 2767853 - RNA, 16 nt, Human
gauuuaccacuugugu

SEQ ID NO: 2767854 - RNA, 23 nt, Human
gauucuucagcaaaaauauuuua

SEQ ID NO: 2767855 - RNA, 15 nt, Human
gauuuaccacuugug

SEQ ID NO: 2767856 - RNA, 22 nt, Human
gauuauucacugauuugacaua

SEQ ID NO: 2767857 - RNA, 21 nt, Human
gauuauucacugauuugacau

SEQ ID NO: 2767858 - RNA, 15 nt, Human
gaggacgcucucugg

SEQ ID NO: 2767859 - RNA, 18 nt, Human
gaggcuccacuuggucug

SEQ ID NO: 2767860 - RNA, 19 nt, Human
gaggcuccacuuggucugu

SEQ ID NO: 2767861 - RNA, 23 nt, Human
gaggcuccacuuggucugugaga

SEQ ID NO: 2767862 - RNA, 21 nt, Human
gagugaguuggguguauugug

SEQ ID NO: 2767863 - RNA, 14 nt, Human
gcccuguuaaaaga

SEQ ID NO: 2767864 - RNA, 17 nt, Human
gcccuguuaaaagauga

SEQ ID NO: 2767865 - RNA, 13 nt, Human
gcccuguuaaaag

SEQ ID NO: 2767866 - RNA, 16 nt, Human
gcccccaggugccagu

SEQ ID NO: 2767867 - RNA, 16 nt, Human
gccauaugaaaaggcu

SEQ ID NO: 2767868 - RNA, 23 nt, Human
gccagcaguucagagcugcccuc

SEQ ID NO: 2767869 - RNA, 22 nt, Human
gccagcaguucagagcugcccu

SEQ ID NO: 2767870 - RNA, 19 nt, Human
gccagauuuuccugaaaac

SEQ ID NO: 2767871 - RNA, 22 nt, Human
gccagacaucaacagauaaaua

SEQ ID NO: 2767872 - RNA, 15 nt, Human
gcuccccucggagaa

SEQ ID NO: 2767873 - RNA, 21 nt, Human
gcuaguaauuggaaaggcagc

SEQ ID NO: 2767874 - RNA, 16 nt, Human
gcuaguaucaaaagaa

SEQ ID NO: 2767875 - RNA, 17 nt, Human
gcuggagcucugcccau

SEQ ID NO: 2767876 - RNA, 14 nt, Human
gcuggagcucugcc

SEQ ID NO: 2767877 - RNA, 20 nt, Human
gcugccuccccuccucugcu

SEQ ID NO: 2767878 - RNA, 17 nt, Human
gcugccuccccuccucu

SEQ ID NO: 2767879 - RNA, 16 nt, Human
gcugccuccccuccuc

SEQ ID NO: 2767880 - RNA, 14 nt, Human
gcugccuccccucc

SEQ ID NO: 2767881 - RNA, 22 nt, Human
gcugccuccccuccucugcuug

SEQ ID NO: 2767882 - RNA, 21 nt, Human
gcugccuccccuccucugcuu

SEQ ID NO: 2767883 - RNA, 19 nt, Human
ggaggcugagaugggagaa

SEQ ID NO: 2767884 - RNA, 15 nt, Human
ggaggcugagauggg

SEQ ID NO: 2767885 - RNA, 23 nt, Human
ggaugguucccuugaugaagaag

SEQ ID NO: 2767886 - RNA, 22 nt, Human
ggaugguucccuugaugaagaa

SEQ ID NO: 2767887 - RNA, 22 nt, Human
ggauguugaaaaaguucugcag

SEQ ID NO: 2767888 - RNA, 16 nt, Human
ggccuccauccugagg

SEQ ID NO: 2767889 - RNA, 20 nt, Human
aaagaggcagcuugaaacug

SEQ ID NO: 2767890 - RNA, 18 nt, Human
aaagagaacuuccagauc

SEQ ID NO: 2767891 - RNA, 22 nt, Human
aaagacuauucaaacagucuca

SEQ ID NO: 2767892 - RNA, 13 nt, Human
aaagacuccaaag

SEQ ID NO: 2767893 - RNA, 23 nt, Human
aaagacuauucaaacagucucag

SEQ ID NO: 2767894 - RNA, 15 nt, Human
aaacuuguguaaaua

SEQ ID NO: 2767895 - RNA, 17 nt, Human
aaacuuguguaaauaca

SEQ ID NO: 2767896 - RNA, 12 nt, Human
aaacuuuucuga

SEQ ID NO: 2767897 - RNA, 14 nt, Human
aaacuuuucugaua

SEQ ID NO: 2767898 - RNA, 13 nt, Human
aaacuuuucugau

SEQ ID NO: 2767899 - RNA, 17 nt, Human
aaacuuuucugauagag

SEQ ID NO: 2767900 - RNA, 16 nt, Human
aaacuuuucugauaga

SEQ ID NO: 2767901 - RNA, 16 nt, Human
aaagaaugauuaugaa

SEQ ID NO: 2767902 - RNA, 13 nt, Human
aaagcuuauuaaa

SEQ ID NO: 2767903 - RNA, 13 nt, Human
aaaggaauuuaaa

SEQ ID NO: 2767904 - RNA, 15 nt, Human
ggugccaguuauggc

SEQ ID NO: 2767905 - RNA, 24 nt, Human
ggucugugagaugcuagaacuccc

SEQ ID NO: 2767906 - RNA, 14 nt, Human
ggucugugagaugc

SEQ ID NO: 2767907 - RNA, 18 nt, Human
aaacggaugauuucuaug

SEQ ID NO: 2767908 - RNA, 16 nt, Human
aaacggaugauuucua

SEQ ID NO: 2767909 - RNA, 16 nt, Human
aaaccacagcaguuga

SEQ ID NO: 2767910 - RNA, 15 nt, Human
aaaccacagcaguug

SEQ ID NO: 2767911 - RNA, 23 nt, Human
aaaauuggggauucuuaaaguug

SEQ ID NO: 2767912 - RNA, 21 nt, Human
aaaauuggggauucuuaaagu

SEQ ID NO: 2767913 - RNA, 22 nt, Human
aaaauggacuguggugacuuug

SEQ ID NO: 2767914 - RNA, 19 nt, Human
aaaauuuuuucucuaggaa

SEQ ID NO: 2767915 - RNA, 17 nt, Human
aaacaaggaugaauuaa

SEQ ID NO: 2767916 - RNA, 14 nt, Human
aaacacaacuauau

SEQ ID NO: 2767917 - RNA, 13 nt, Human
aaacauauauaac

SEQ ID NO: 2767918 - RNA, 19 nt, Human
aaacauauauaacaaugcu

SEQ ID NO: 2767919 - RNA, 16 nt, Human
aaacauauauaacaau

SEQ ID NO: 2767920 - RNA, 21 nt, Human
aaacauauauaacaaugcugu

SEQ ID NO: 2767921 - RNA, 23 nt, Human
aaaauaauuuuuauauuugaaau

SEQ ID NO: 2767922 - RNA, 21 nt, Human
aaaauaauuuuuauauuugaa

SEQ ID NO: 2767923 - RNA, 20 nt, Human
aaaauaauuuuuauauuuga

SEQ ID NO: 2767924 - RNA, 15 nt, Human
gggauucuuaaaguu

SEQ ID NO: 2767925 - RNA, 20 nt, Human
gggauucuuaaaguugaauu

SEQ ID NO: 2767926 - RNA, 23 nt, Human
gggcagcugccuccccuccucug

SEQ ID NO: 2767927 - RNA, 20 nt, Human
gggcagcugccuccccuccu

SEQ ID NO: 2767928 - RNA, 19 nt, Human
gggcagcugccuccccucc

SEQ ID NO: 2767929 - RNA, 14 nt, Human
gggcagcugccucc

SEQ ID NO: 2767930 - RNA, 13 nt, Human
gggcagcugccuc

SEQ ID NO: 2767931 - RNA, 12 nt, Human
gggcagcugccu

SEQ ID NO: 2767932 - RNA, 20 nt, Human
gggaggcagagguugcagug

SEQ ID NO: 2767933 - RNA, 11 nt, Human
gggaggcagag

SEQ ID NO: 2767934 - RNA, 22 nt, Human
aaaagcuccauuuuuagugaaa

SEQ ID NO: 2767935 - RNA, 21 nt, Human
aaaacuuuaugcuaagugaaa

SEQ ID NO: 2767936 - RNA, 14 nt, Human
agccagcaguucag

SEQ ID NO: 2767937 - RNA, 17 nt, Human
agcacugacuucuaagu

SEQ ID NO: 2767938 - RNA, 19 nt, Human
agcacugacuucuaaguaa

SEQ ID NO: 2767939 - RNA, 20 nt, Human
agauagauaggucagugcaa

SEQ ID NO: 2767940 - RNA, 18 nt, Human
agaucugccuaaggacuu

SEQ ID NO: 2767941 - RNA, 13 nt, Human
agaucugccuaag

SEQ ID NO: 2767942 - RNA, 18 nt, Human
agaagacugcauuauauu

SEQ ID NO: 2767943 - RNA, 21 nt, Human
agaagacugcauuauauuuau

SEQ ID NO: 2767944 - RNA, 20 nt, Human
agaagagcuguucacagcca

SEQ ID NO: 2767945 - RNA, 13 nt, Human
agaagauagcagg

SEQ ID NO: 2767946 - RNA, 13 nt, Human
agaagagcuguuc

SEQ ID NO: 2767947 - RNA, 22 nt, Human
agaacagugauuaccagggacu

SEQ ID NO: 2767948 - RNA, 19 nt, Human
agacaaggaaaaaauaaca

SEQ ID NO: 2767949 - RNA, 18 nt, Human
aggaaaaaauaacaauga

SEQ ID NO: 2767950 - RNA, 18 nt, Human
agcuguaugauucccagc

SEQ ID NO: 2767951 - RNA, 17 nt, Human
agcuguaugauucccag

SEQ ID NO: 2767952 - RNA, 14 nt, Human
agcuggugcccugc

SEQ ID NO: 2767953 - RNA, 14 nt, Human
agcuguaugauucc

SEQ ID NO: 2767954 - RNA, 14 nt, Human
agcugcugaaacaa

SEQ ID NO: 2767955 - RNA, 15 nt, Human
agcugcugaaacaac

SEQ ID NO: 2767956 - RNA, 16 nt, Human
agcugcugaaacaaca

SEQ ID NO: 2767957 - RNA, 20 nt, Human
agcugcugaaacaacaaaua

SEQ ID NO: 2767958 - RNA, 15 nt, Human
agcgacagugagacu

SEQ ID NO: 2767959 - RNA, 13 nt, Human
agcgacagugaga

SEQ ID NO: 2767960 - RNA, 12 nt, Human
agcuacaaaugc

SEQ ID NO: 2767961 - RNA, 13 nt, Human
agcuacaaaugca

SEQ ID NO: 2767962 - RNA, 20 nt, Human
aggcagagguugcagugagc

SEQ ID NO: 2767963 - RNA, 23 nt, Human
aggccaugggcacuguggguaga

SEQ ID NO: 2767964 - RNA, 17 nt, Human
agggacaggauaagagg

SEQ ID NO: 2767965 - RNA, 20 nt, Human
agggauuagggagagaagau

SEQ ID NO: 2767966 - RNA, 18 nt, Human
augaaacuuguguaaaua

SEQ ID NO: 2767967 - RNA, 20 nt, Human
augggacauuugcucaugga

SEQ ID NO: 2767968 - RNA, 15 nt, Human
augggacagggagga

SEQ ID NO: 2767969 - RNA, 14 nt, Human
augggaaagcauug

SEQ ID NO: 2767970 - RNA, 20 nt, Human
augggaaagcauuguaaaug

SEQ ID NO: 2767971 - RNA, 16 nt, Human
auggcuuuguauagaa

SEQ ID NO: 2767972 - RNA, 15 nt, Human
auggcuuuguauaga

SEQ ID NO: 2767973 - RNA, 23 nt, Human
auggcuuccuggcaauagucaaa

SEQ ID NO: 2767974 - RNA, 14 nt, Human
aucaaaagaaagaa

SEQ ID NO: 2767975 - RNA, 12 nt, Human
auccuugaagau

SEQ ID NO: 2767976 - RNA, 18 nt, Human
auccagcagauuauucac

SEQ ID NO: 2767977 - RNA, 21 nt, Human
aucaugaauuaguuuuauaug

SEQ ID NO: 2767978 - RNA, 21 nt, Human
agucuggcuguacccaggaau

SEQ ID NO: 2767979 - RNA, 19 nt, Human
agucuggcuguacccagga

SEQ ID NO: 2767980 - RNA, 13 nt, Human
agucauuuaauaa

SEQ ID NO: 2767981 - RNA, 19 nt, Human
agugaugucacuagggcag

SEQ ID NO: 2767982 - RNA, 13 nt, Human
agugauuaccagg

SEQ ID NO: 2767983 - RNA, 13 nt, Human
aguacucauacau

SEQ ID NO: 2767984 - RNA, 17 nt, Human
auacaauuuuguuucug

SEQ ID NO: 2767985 - RNA, 16 nt, Human
auacaauuuuguuucu

SEQ ID NO: 2767986 - RNA, 14 nt, Human
auacaauuuuguuu

SEQ ID NO: 2767987 - RNA, 20 nt, Human
auacacacucaaaucaagaa

SEQ ID NO: 2767988 - RNA, 16 nt, Human
auaaaaaauuaugaca

SEQ ID NO: 2767989 - RNA, 16 nt, Human
auaaaagacagugaaa

SEQ ID NO: 2767990 - RNA, 15 nt, Human
auaaaagacagugaa

SEQ ID NO: 2767991 - RNA, 22 nt, Human
acugauuugacauagucuggcu

SEQ ID NO: 2767992 - RNA, 19 nt, Human
acugauaugggucuugaua

SEQ ID NO: 2767993 - RNA, 19 nt, Human
acucguuaauuuguagugu

SEQ ID NO: 2767994 - RNA, 14 nt, Human
acucguuaauuugu

SEQ ID NO: 2767995 - RNA, 14 nt, Human
acucccuuucaaca

SEQ ID NO: 2767996 - RNA, 20 nt, Human
acuucuuuaauuuuggaauu

SEQ ID NO: 2767997 - RNA, 19 nt, Human
acuucuuuaauuuuggaau

SEQ ID NO: 2767998 - RNA, 18 nt, Human
acuucuuuaauuuuggaa

SEQ ID NO: 2767999 - RNA, 21 nt, Human
acuucagacauagaauuaaca

SEQ ID NO: 2768000 - RNA, 17 nt, Human
acuucaaauccuugaag

SEQ ID NO: 2768001 - RNA, 18 nt, Human
acuucaaauccuugaaga

SEQ ID NO: 2768002 - RNA, 22 nt, Human
acuuaaaaaugguuuaaauggu

SEQ ID NO: 2768003 - RNA, 21 nt, Human
acuuaaaaaugguuuaaaugg

SEQ ID NO: 2768004 - RNA, 16 nt, Human
acuggugacugauucu

SEQ ID NO: 2768005 - RNA, 19 nt, Human
acuggugacugauucuuca

SEQ ID NO: 2768006 - RNA, 18 nt, Human
acuggugacugauucuuc

SEQ ID NO: 2768007 - RNA, 20 nt, Human
acuggugacugauucuucag

SEQ ID NO: 2768008 - RNA, 17 nt, Human
acuguaaaauaauaacu

SEQ ID NO: 2768009 - RNA, 21 nt, Human
acccugucucuacuaaaaaua

SEQ ID NO: 2768010 - RNA, 20 nt, Human
accucugccucagaaaacaa

SEQ ID NO: 2768011 - RNA, 14 nt, Human
acauguuaaaccau

SEQ ID NO: 2768012 - RNA, 23 nt, Human
acauguuaaaccaugggauaaau

SEQ ID NO: 2768013 - RNA, 21 nt, Human
acauguuaaaccaugggauaa

SEQ ID NO: 2768014 - RNA, 16 nt, Human
acauguuaaaccaugg

SEQ ID NO: 2768015 - RNA, 21 nt, Human
acauuuguauaaaauaauuuu

SEQ ID NO: 2768016 - RNA, 19 nt, Human
acauuuguauaaaauaauu

SEQ ID NO: 2768017 - RNA, 16 nt, Human
acauuuguauaaaaua

SEQ ID NO: 2768018 - RNA, 15 nt, Human
acauuugcucaugga

SEQ ID NO: 2768019 - RNA, 19 nt, Human
acagugauuaccagggacu

SEQ ID NO: 2768020 - RNA, 22 nt, Human
acaggaugguucccuugaugaa

SEQ ID NO: 2768021 - RNA, 24 nt, Human
acaggaugguucccuugaugaaga

SEQ ID NO: 2768022 - RNA, 15 nt, Human
acaccaauauucaua

SEQ ID NO: 2768023 - RNA, 17 nt, Human
aauuguaauuauaucug

SEQ ID NO: 2768024 - RNA, 22 nt, Human
aauuucauaccuaucaucuuaa

SEQ ID NO: 2768025 - RNA, 14 nt, Human
aauuguaauuauau

SEQ ID NO: 2768026 - RNA, 16 nt, Human
aauuguaauuauaucu

SEQ ID NO: 2768027 - RNA, 15 nt, Human
aauuguaauuauauc

SEQ ID NO: 2768028 - RNA, 11 nt, Human
aauuguaauag

SEQ ID NO: 2768029 - RNA, 21 nt, Human
aauuauaugcuauuucuauau

SEQ ID NO: 2768030 - RNA, 20 nt, Human
aauuauaugcuauuucuaua

SEQ ID NO: 2768031 - RNA, 19 nt, Human
aauuauaugcuauuucuau

SEQ ID NO: 2768032 - RNA, 23 nt, Human
aauuauaucugaggaauucugua

SEQ ID NO: 2768033 - RNA, 22 nt, Human
aauuauaucugaggaauucugu

SEQ ID NO: 2768034 - RNA, 20 nt, Human
aauuauaucugaggaauucu

SEQ ID NO: 2768035 - RNA, 20 nt, Human
aauucuguauagauuagaga

SEQ ID NO: 2768036 - RNA, 14 nt, Human
aauucuguauagau

SEQ ID NO: 2768037 - RNA, 13 nt, Human
aauucuguauaga

SEQ ID NO: 2768038 - RNA, 12 nt, Human
aauucuguauag

SEQ ID NO: 2768039 - RNA, 15 nt, Human
aauuggagcucgugg

SEQ ID NO: 2768040 - RNA, 23 nt, Human
aaggacuuguuagaucuaguuca

SEQ ID NO: 2768041 - RNA, 23 nt, Human
aaggacuucuuuaauuuuggaau

SEQ ID NO: 2768042 - RNA, 21 nt, Human
aaggacuuguuagaucuaguu

SEQ ID NO: 2768043 - RNA, 15 nt, Human
aaggacuuguuagau

SEQ ID NO: 2768044 - RNA, 15 nt, Human
aagaacugaaaucau

SEQ ID NO: 2768045 - RNA, 11 nt, Human
aagaacugaaa

SEQ ID NO: 2768046 - RNA, 13 nt, Human
aagaacugaaauc

SEQ ID NO: 2768047 - RNA, 12 nt, Human
aagaacugaaau

SEQ ID NO: 2768048 - RNA, 20 nt, Human
aacgcaggcccccaggugcc

SEQ ID NO: 2768049 - RNA, 15 nt, Human
aagaagacugcauua

SEQ ID NO: 2768050 - RNA, 20 nt, Human
aagaagacugcauuauauuu

SEQ ID NO: 2768051 - RNA, 21 nt, Human
aagacaaggaaaaaauaacaa

SEQ ID NO: 2768052 - RNA, 17 nt, Human
aaguuuaauauuaaagc

SEQ ID NO: 2768053 - RNA, 15 nt, Human
aaguuuaauauuaaa

SEQ ID NO: 2768054 - RNA, 24 nt, Human
aaguugaauuuauuggcuuuucug

SEQ ID NO: 2768055 - RNA, 23 nt, Human
aaguugaauuuauuggcuuuucu

SEQ ID NO: 2768056 - RNA, 14 nt, Human
aaguugaauuuauu

SEQ ID NO: 2768057 - RNA, 17 nt, Human
aaguugaauuuauuggc

SEQ ID NO: 2768058 - RNA, 15 nt, Human
aaguugaauuuauug

SEQ ID NO: 2768059 - RNA, 22 nt, Human
aauauuaaagccauguuuauua

SEQ ID NO: 2768060 - RNA, 16 nt, Human
aaucucaauauuucag

SEQ ID NO: 2768061 - RNA, 20 nt, Human
aaugaauacuuuauaaagga

SEQ ID NO: 2768062 - RNA, 23 nt, Human
aaauguugacaugggacauuugc

SEQ ID NO: 2768063 - RNA, 22 nt, Human
aaauguugacaugggacauuug

SEQ ID NO: 2768064 - RNA, 13 nt, Human
aaauguucaucaa

SEQ ID NO: 2768065 - RNA, 23 nt, Human
aaauggacuguggugacuuugga

SEQ ID NO: 2768066 - RNA, 20 nt, Human
aaauggacuguggugacuuu

SEQ ID NO: 2768067 - RNA, 21 nt, Human
aaauggacuguggugacuuug

SEQ ID NO: 2768068 - RNA, 18 nt, Human
aaaucucaauauuucaga

SEQ ID NO: 2768069 - RNA, 21 nt, Human
aaauauuuauuuuaauaaugu

SEQ ID NO: 2768070 - RNA, 22 nt, Human
aaaccaguauuguacaaaguau

SEQ ID NO: 2768071 - RNA, 18 nt, Human
aaaccaguauuguacaaa

SEQ ID NO: 2768072 - RNA, 17 nt, Human
aaaccaguauuguacaa

SEQ ID NO: 2768073 - RNA, 16 nt, Human
aaaccaguauuguaca

SEQ ID NO: 2768074 - RNA, 14 nt, Human
aaaccaguauugua

SEQ ID NO: 2768075 - RNA, 19 nt, Human
aaacccuugccaugugcua

SEQ ID NO: 2768076 - RNA, 15 nt, Human
aaacugcacugucaa

SEQ ID NO: 2768077 - RNA, 21 nt, Human
aaaaucauuucugcaucagcu

SEQ ID NO: 2768078 - RNA, 23 nt, Human
aaagccauguuuauuacaguaua

SEQ ID NO: 2768079 - RNA, 18 nt, Human
aaagccauguuuauuaca

SEQ ID NO: 2768080 - RNA, 17 nt, Human
aaagccauguuuauuac

SEQ ID NO: 2768081 - RNA, 16 nt, Human
aaagccauguuuauua

SEQ ID NO: 2768082 - RNA, 14 nt, Human
aaagccauguuuau

SEQ ID NO: 2768083 - RNA, 15 nt, Human
aaagcauuguaaaug

SEQ ID NO: 2768084 - RNA, 17 nt, Human
aaagcauuguaaaugug

SEQ ID NO: 2768085 - RNA, 18 nt, Human
aaaaguuuaauauuaaag

SEQ ID NO: 2768086 - RNA, 16 nt, Human
aaaaguuuaauauuaa

SEQ ID NO: 2768087 - RNA, 14 nt, Human
aaaaguuuaauauu

SEQ ID NO: 2768088 - RNA, 11 nt, Human
aaaaucauuuc

SEQ ID NO: 2768089 - RNA, 12 nt, Human
aaaaucauuucu

SEQ ID NO: 2768090 - RNA, 10 nt, Human
aaaaucauuu

SEQ ID NO: 2768091 - RNA, 13 nt, Human
aaaagacuccaaa

SEQ ID NO: 2768092 - RNA, 11 nt, Human
aaaagaaugau

SEQ ID NO: 2768093 - RNA, 13 nt, Human
aaaagaauauuuu

SEQ ID NO: 2768094 - RNA, 20 nt, Human
aaaagacaaggaaaaaauaa

SEQ ID NO: 2768095 - RNA, 12 nt, Human
aaaagaauauuu

SEQ ID NO: 2768096 - RNA, 17 nt, Human
aaaagaaagaaaaucag

SEQ ID NO: 2768097 - RNA, 15 nt, Human
uuuuaugauccagca

SEQ ID NO: 2768098 - RNA, 13 nt, Human
uuuuaugauccag

SEQ ID NO: 2768099 - RNA, 19 nt, Human
uuuguuguuuguuuagucu

SEQ ID NO: 2768100 - RNA, 20 nt, Human
uuuuauaugcuucuguuuua

SEQ ID NO: 2768101 - RNA, 15 nt, Human
uuuuauaugcuucug

SEQ ID NO: 2768102 - RNA, 20 nt, Human
uuuuauaucaauuuaaaaaa

SEQ ID NO: 2768103 - RNA, 10 nt, Human
uuuuauauuu

SEQ ID NO: 2768104 - RNA, 15 nt, Human
uuuggaaaucuuuaa

SEQ ID NO: 2768105 - RNA, 16 nt, Human
uuuggaaaucuuuaaa

SEQ ID NO: 2768106 - RNA, 21 nt, Human
uuugcauagauucccugagca

SEQ ID NO: 2768107 - RNA, 12 nt, Human
uuuguguuagag

SEQ ID NO: 2768108 - RNA, 14 nt, Human
uuuguuguuuguuu

SEQ ID NO: 2768109 - RNA, 12 nt, Human
uuuguuguuugu

SEQ ID NO: 2768110 - RNA, 11 nt, Human
uuuguauagaa

SEQ ID NO: 2768111 - RNA, 21 nt, Human
uuuguauaaaauaauuuuuau

SEQ ID NO: 2768112 - RNA, 21 nt, Human
uuuauuggcuuuucugaucca

SEQ ID NO: 2768113 - RNA, 17 nt, Human
uuuauuggcuuuucuga

SEQ ID NO: 2768114 - RNA, 13 nt, Human
uuuaugauccagc

SEQ ID NO: 2768115 - RNA, 20 nt, Human
uuuagaaacacaacuauauu

SEQ ID NO: 2768116 - RNA, 12 nt, Human
uuuagaaacaca

SEQ ID NO: 2768117 - RNA, 22 nt, Human
uuucugagaaagacuauucaaa

SEQ ID NO: 2768118 - RNA, 14 nt, Human
uuucucuuucguua

SEQ ID NO: 2768119 - RNA, 15 nt, Human
uuucugagaaagacu

SEQ ID NO: 2768120 - RNA, 15 nt, Human
uuucagauaaucaca

SEQ ID NO: 2768121 - RNA, 15 nt, Human
uuucagcagcugcag

SEQ ID NO: 2768122 - RNA, 17 nt, Human
uucuaugcugaguuugu

SEQ ID NO: 2768123 - RNA, 14 nt, Human
uucuauauuuucau

SEQ ID NO: 2768124 - RNA, 11 nt, Human
uucuauauuuu

SEQ ID NO: 2768125 - RNA, 21 nt, Human
uucuauauuuucauucuccua

SEQ ID NO: 2768126 - RNA, 18 nt, Human
uucuauauuuucauucuc

SEQ ID NO: 2768127 - RNA, 16 nt, Human
uucuauauuuucauuc

SEQ ID NO: 2768128 - RNA, 15 nt, Human
uucuauauuuucauu

SEQ ID NO: 2768129 - RNA, 18 nt, Human
uucccuugaugaagaagu

SEQ ID NO: 2768130 - RNA, 12 nt, Human
uuccuagugaaa

SEQ ID NO: 2768131 - RNA, 19 nt, Human
uucggccuccauccugagg

SEQ ID NO: 2768132 - RNA, 18 nt, Human
uucggccuccauccugag

SEQ ID NO: 2768133 - RNA, 19 nt, Human
uuccacuuauaggaauuga

SEQ ID NO: 2768134 - RNA, 18 nt, Human
uuacuaaaauggacugug

SEQ ID NO: 2768135 - RNA, 17 nt, Human
uuacuaaaauggacugu

SEQ ID NO: 2768136 - RNA, 16 nt, Human
uuacuaaaauggacug

SEQ ID NO: 2768137 - RNA, 15 nt, Human
uuacuaaaauggacu

SEQ ID NO: 2768138 - RNA, 11 nt, Human
uucacugauuu

SEQ ID NO: 2768139 - RNA, 23 nt, Human
uucagagcugcccucuccugggc

SEQ ID NO: 2768140 - RNA, 22 nt, Human
uucagagcugcccucuccuggg

SEQ ID NO: 2768141 - RNA, 21 nt, Human
uucagagcugcccucuccugg

SEQ ID NO: 2768142 - RNA, 12 nt, Human
uugaugaagaag

SEQ ID NO: 2768143 - RNA, 18 nt, Human
uugcauagauucccugag

SEQ ID NO: 2768144 - RNA, 14 nt, Human
uugaggacacugau

SEQ ID NO: 2768145 - RNA, 15 nt, Human
uugaggacacugaua

SEQ ID NO: 2768146 - RNA, 21 nt, Human
uugaaacggaugauuucuaug

SEQ ID NO: 2768147 - RNA, 20 nt, Human
uugaaacggaugauuucuau

SEQ ID NO: 2768148 - RNA, 22 nt, Human
uugaaacggaugauuucuaugc

SEQ ID NO: 2768149 - RNA, 23 nt, Human
uugaaacugagaugugaacacau

SEQ ID NO: 2768150 - RNA, 16 nt, Human
uugaaaagacuccaaa

SEQ ID NO: 2768151 - RNA, 18 nt, Human
uugaaaagacuccaaaga

SEQ ID NO: 2768152 - RNA, 22 nt, Human
uugaaaagacuccaaagaaaug

SEQ ID NO: 2768153 - RNA, 23 nt, Human
uugaaaagacuccaaagaaaugu

SEQ ID NO: 2768154 - RNA, 15 nt, Human
uucuuauuucauuuc

SEQ ID NO: 2768155 - RNA, 15 nt, Human
uucugagaaagacua

SEQ ID NO: 2768156 - RNA, 14 nt, Human
uucugagcauuuaa

SEQ ID NO: 2768157 - RNA, 21 nt, Human
uuggaccaaaaaccaguauug

SEQ ID NO: 2768158 - RNA, 12 nt, Human
uuggaaaucuuu

SEQ ID NO: 2768159 - RNA, 15 nt, Human
uuggaaaucuuuaaa

SEQ ID NO: 2768160 - RNA, 16 nt, Human
uuguaaaggaauuuaa

SEQ ID NO: 2768161 - RNA, 22 nt, Human
uuguacaaaguauuaagcauau

SEQ ID NO: 2768162 - RNA, 11 nt, Human
uuguaaaugug

SEQ ID NO: 2768163 - RNA, 14 nt, Human
uuguaaaugugcuu

SEQ ID NO: 2768164 - RNA, 18 nt, Human
uuguaaaugugcuuuuaa

SEQ ID NO: 2768165 - RNA, 19 nt, Human
uuguaucacaaaucuuaac

SEQ ID NO: 2768166 - RNA, 14 nt, Human
uuguauuacaaauc

SEQ ID NO: 2768167 - RNA, 15 nt, Human
uuggcuuuucugauc

SEQ ID NO: 2768168 - RNA, 22 nt, Human
uuggcuuuucugauccaguuuu

SEQ ID NO: 2768169 - RNA, 19 nt, Human
uuggcuuuucugauccagu

SEQ ID NO: 2768170 - RNA, 12 nt, Human
uugggaggcuga

SEQ ID NO: 2768171 - RNA, 22 nt, Human
ugugaccacugcagaagacagu

SEQ ID NO: 2768172 - RNA, 22 nt, Human
ugucucaguccaugaagaugua

SEQ ID NO: 2768173 - RNA, 21 nt, Human
ugucucaguccaugaagaugu

SEQ ID NO: 2768174 - RNA, 14 nt, Human
ugugcgcuaaacuu

SEQ ID NO: 2768175 - RNA, 23 nt, Human
ugugcgcuaaacuuuucugauag

SEQ ID NO: 2768176 - RNA, 22 nt, Human
ugugcgcuaaacuuuucugaua

SEQ ID NO: 2768177 - RNA, 19 nt, Human
ugugcgcuaaacuuuucug

SEQ ID NO: 2768178 - RNA, 13 nt, Human
uguacucaauuuu

SEQ ID NO: 2768179 - RNA, 17 nt, Human
uguagauaauacaguuc

SEQ ID NO: 2768180 - RNA, 14 nt, Human
uguaaucacagcua

SEQ ID NO: 2768181 - RNA, 15 nt, Human
uguaaucacagcuac

SEQ ID NO: 2768182 - RNA, 16 nt, Human
uguauagaaccucuuu

SEQ ID NO: 2768183 - RNA, 16 nt, Human
uguaugauucccagcc

SEQ ID NO: 2768184 - RNA, 20 nt, Human
uguugaaacggaugauuucu

SEQ ID NO: 2768185 - RNA, 23 nt, Human
uguugaaacggaugauuucuaug

SEQ ID NO: 2768186 - RNA, 22 nt, Human
uguugaaacggaugauuucuau

SEQ ID NO: 2768187 - RNA, 21 nt, Human
uguugaaacggaugauuucua

SEQ ID NO: 2768188 - RNA, 21 nt, Human
uguuggagaagaacugaaauc

SEQ ID NO: 2768189 - RNA, 14 nt, Human
uguuguuuguuuag

SEQ ID NO: 2768190 - RNA, 13 nt, Human
uguuuaaaaucau

SEQ ID NO: 2768191 - RNA, 23 nt, Human
uguuaaaccaugggauaaaugcc

SEQ ID NO: 2768192 - RNA, 16 nt, Human
uguuaaaccaugggau

SEQ ID NO: 2768193 - RNA, 18 nt, Human
uguuaaaccaugggauaa

SEQ ID NO: 2768194 - RNA, 21 nt, Human
uguuaaaccaugggauaaaug

SEQ ID NO: 2768195 - RNA, 20 nt, Human
uguuaaaccaugggauaaau

SEQ ID NO: 2768196 - RNA, 12 nt, Human
uguuauaaucuu

SEQ ID NO: 2768197 - RNA, 16 nt, Human
uguuagaucuaguuca

SEQ ID NO: 2768198 - RNA, 14 nt, Human
uguuagugcaaauu

SEQ ID NO: 2768199 - RNA, 16 nt, Human
uguucacagccagacu

SEQ ID NO: 2768200 - RNA, 17 nt, Human
ugugugaagugagugag

SEQ ID NO: 2768201 - RNA, 21 nt, Human
uuaccacuuguguuuugcaag

SEQ ID NO: 2768202 - RNA, 15 nt, Human
uuacauuuguauaaa

SEQ ID NO: 2768203 - RNA, 14 nt, Human
uuacauuuguauaa

SEQ ID NO: 2768204 - RNA, 20 nt, Human
uuacagagacagaaagcaga

SEQ ID NO: 2768205 - RNA, 22 nt, Human
uuaaugucaauucuugccaaau

SEQ ID NO: 2768206 - RNA, 16 nt, Human
uuaauaauguuucaaa

SEQ ID NO: 2768207 - RNA, 23 nt, Human
uuaauaauuauaugcuauuucua

SEQ ID NO: 2768208 - RNA, 20 nt, Human
uuaauaauuauaugcuauuu

SEQ ID NO: 2768209 - RNA, 18 nt, Human
uuaauaauuauaugcuau

SEQ ID NO: 2768210 - RNA, 18 nt, Human
uuaauaauguuucaaaca

SEQ ID NO: 2768211 - RNA, 12 nt, Human
uguuuguuuagu

SEQ ID NO: 2768212 - RNA, 21 nt, Human
uguuuguuuagucuugucuca

SEQ ID NO: 2768213 - RNA, 12 nt, Human
uuaacauguuaa

SEQ ID NO: 2768214 - RNA, 19 nt, Human
uuaacauguuaaaccaugg

SEQ ID NO: 2768215 - RNA, 18 nt, Human
uuaacauguuaaaccaug

SEQ ID NO: 2768216 - RNA, 20 nt, Human
uuaaagcuuauuaaaacuca

SEQ ID NO: 2768217 - RNA, 13 nt, Human
uuaaaagaaugau

SEQ ID NO: 2768218 - RNA, 19 nt, Human
uuaaaagaaugauuaugaa

SEQ ID NO: 2768219 - RNA, 18 nt, Human
uggccuucggccuccauc

SEQ ID NO: 2768220 - RNA, 17 nt, Human
uggccuucggccuccau

SEQ ID NO: 2768221 - RNA, 14 nt, Human
uggccuucggccuc

SEQ ID NO: 2768222 - RNA, 20 nt, Human
ugggacauuugcucauggaa

SEQ ID NO: 2768223 - RNA, 19 nt, Human
ugggacauuugcucaugga

SEQ ID NO: 2768224 - RNA, 22 nt, Human
uggcuuuguauagaaccucuuu

SEQ ID NO: 2768225 - RNA, 14 nt, Human
uggcuuuguauaga

SEQ ID NO: 2768226 - RNA, 15 nt, Human
uggcuguacccagga

SEQ ID NO: 2768227 - RNA, 21 nt, Human
ugggacagucaccucauggaa

SEQ ID NO: 2768228 - RNA, 20 nt, Human
ugggacagucaccucaugga

SEQ ID NO: 2768229 - RNA, 18 nt, Human
ugggacagucaccucaug

SEQ ID NO: 2768230 - RNA, 16 nt, Human
uggguagacacacaug

SEQ ID NO: 2768231 - RNA, 17 nt, Human
uggguagacacacauga

SEQ ID NO: 2768232 - RNA, 15 nt, Human
uggcauaacauaaau

SEQ ID NO: 2768233 - RNA, 20 nt, Human
uggauaauaaggaaaaguuu

SEQ ID NO: 2768234 - RNA, 12 nt, Human
ugcuuucagaua

SEQ ID NO: 2768235 - RNA, 21 nt, Human
ugcuuucagauacuggauugu

SEQ ID NO: 2768236 - RNA, 20 nt, Human
ugcuuucagauacuggauug

SEQ ID NO: 2768237 - RNA, 17 nt, Human
ugcuuucagauacugga

SEQ ID NO: 2768238 - RNA, 16 nt, Human
ugcuuucagauacugg

SEQ ID NO: 2768239 - RNA, 14 nt, Human
ugcuucuguuuuau

SEQ ID NO: 2768240 - RNA, 22 nt, Human
uggaaaaguauguuagugcaaa

SEQ ID NO: 2768241 - RNA, 14 nt, Human
uggaacucucgagc

SEQ ID NO: 2768242 - RNA, 15 nt, Human
ugcauuauauuuauu

SEQ ID NO: 2768243 - RNA, 20 nt, Human
ugcauuauauuuauuacugu

SEQ ID NO: 2768244 - RNA, 14 nt, Human
ugcauuauauuuau

SEQ ID NO: 2768245 - RNA, 19 nt, Human
ugcaucagcugcugaaaca

SEQ ID NO: 2768246 - RNA, 22 nt, Human
ugcaucagcugcugaaacaaca

SEQ ID NO: 2768247 - RNA, 20 nt, Human
ugccaucccucccuccaccu

SEQ ID NO: 2768248 - RNA, 19 nt, Human
ugccaucccucccuccacc

SEQ ID NO: 2768249 - RNA, 14 nt, Human
ugccaucccucccu

SEQ ID NO: 2768250 - RNA, 15 nt, Human
ugccaucccucccuc

SEQ ID NO: 2768251 - RNA, 22 nt, Human
ugccaucccucccuccaccucc

SEQ ID NO: 2768252 - RNA, 21 nt, Human
ugccaucccucccuccaccuc

SEQ ID NO: 2768253 - RNA, 15 nt, Human
ugcacaucaaaauau

SEQ ID NO: 2768254 - RNA, 19 nt, Human
ugcacggugaauggcuuug

SEQ ID NO: 2768255 - RNA, 23 nt, Human
ugcacggugaauggcuuuguaua

SEQ ID NO: 2768256 - RNA, 22 nt, Human
ugcacggugaauggcuuuguau

SEQ ID NO: 2768257 - RNA, 16 nt, Human
ugcagauaaacaguag

SEQ ID NO: 2768258 - RNA, 17 nt, Human
ugcugaguuugugcugg

SEQ ID NO: 2768259 - RNA, 15 nt, Human
ugcugaguuugugcu

SEQ ID NO: 2768260 - RNA, 21 nt, Human
ugcuagaacucccuuucaaca

SEQ ID NO: 2768261 - RNA, 20 nt, Human
ugcuagaacucccuuucaac

SEQ ID NO: 2768262 - RNA, 18 nt, Human
ugcuagaacucccuuuca

SEQ ID NO: 2768263 - RNA, 19 nt, Human
ugcuagaacucccuuucaa

SEQ ID NO: 2768264 - RNA, 17 nt, Human
ugccuucucaacuccaa

SEQ ID NO: 2768265 - RNA, 22 nt, Human
ugccuucucaacuccaaacuga

SEQ ID NO: 2768266 - RNA, 23 nt, Human
ugccuaaggacuucuuuaauuuu

SEQ ID NO: 2768267 - RNA, 23 nt, Human
ugccuccccuccucugcuugcca

SEQ ID NO: 2768268 - RNA, 22 nt, Human
ugccuccccuccucugcuugcc

SEQ ID NO: 2768269 - RNA, 19 nt, Human
ugccuccccuccucugcuu

SEQ ID NO: 2768270 - RNA, 18 nt, Human
ugccuccccuccucugcu

SEQ ID NO: 2768271 - RNA, 17 nt, Human
ucuugucucagauuuua

SEQ ID NO: 2768272 - RNA, 19 nt, Human
ucuugucucagauuuuauu

SEQ ID NO: 2768273 - RNA, 19 nt, Human
ucuuuaaaaaaaaaauugg

SEQ ID NO: 2768274 - RNA, 18 nt, Human
ucuuuaaaaaaaaaauug

SEQ ID NO: 2768275 - RNA, 23 nt, Human
ucuggccuucggccuccauccug

SEQ ID NO: 2768276 - RNA, 22 nt, Human
ucuguuuuauaauuuugugaag

SEQ ID NO: 2768277 - RNA, 20 nt, Human
ucuguuuuauaauuuuguga

SEQ ID NO: 2768278 - RNA, 15 nt, Human
ugaaaagacuccaaa

SEQ ID NO: 2768279 - RNA, 16 nt, Human
ugaaaagacuccaaag

SEQ ID NO: 2768280 - RNA, 17 nt, Human
ugaaaagacuccaaaga

SEQ ID NO: 2768281 - RNA, 19 nt, Human
ugaaaagacuccaaagaaa

SEQ ID NO: 2768282 - RNA, 19 nt, Human
ugaaaacuuuaugcuaagu

SEQ ID NO: 2768283 - RNA, 22 nt, Human
ugaaaagacuccaaagaaaugu

SEQ ID NO: 2768284 - RNA, 18 nt, Human
ugaaacccugucucuacu

SEQ ID NO: 2768285 - RNA, 23 nt, Human
ugaaagcagggacuugaacccau

SEQ ID NO: 2768286 - RNA, 19 nt, Human
ugaaagcagggacuugaac

SEQ ID NO: 2768287 - RNA, 18 nt, Human
ugaaagcagggacuugaa

SEQ ID NO: 2768288 - RNA, 22 nt, Human
ugaaguccaagcauuuagaugu

SEQ ID NO: 2768289 - RNA, 21 nt, Human
ugaaguccaagcauuuagaug

SEQ ID NO: 2768290 - RNA, 22 nt, Human
ugaacuuguaaaggaauuuaaa

SEQ ID NO: 2768291 - RNA, 14 nt, Human
ugaacacaucagcu

SEQ ID NO: 2768292 - RNA, 17 nt, Human
ucuacacuaagagagaa

SEQ ID NO: 2768293 - RNA, 17 nt, Human
ucuacacuccagugaga

SEQ ID NO: 2768294 - RNA, 21 nt, Human
ucuacacuaagagagaaugag

SEQ ID NO: 2768295 - RNA, 15 nt, Human
uccuugcaucaauuu

SEQ ID NO: 2768296 - RNA, 18 nt, Human
ucuccugggcagcugccu

SEQ ID NO: 2768297 - RNA, 17 nt, Human
ucuccugggcagcugcc

SEQ ID NO: 2768298 - RNA, 16 nt, Human
ucuccugggcagcugc

SEQ ID NO: 2768299 - RNA, 15 nt, Human
ucuccugggcagcug

SEQ ID NO: 2768300 - RNA, 13 nt, Human
ucuccugggcagc

SEQ ID NO: 2768301 - RNA, 14 nt, Human
ucuccugggcagcu

SEQ ID NO: 2768302 - RNA, 21 nt, Human
ucucagugucaaugcagcccc

SEQ ID NO: 2768303 - RNA, 20 nt, Human
ucuccugggcagcugccucc

SEQ ID NO: 2768304 - RNA, 19 nt, Human
ucuccugggcagcugccuc

SEQ ID NO: 2768305 - RNA, 21 nt, Human
ucuccugggcagcugccuccc

SEQ ID NO: 2768306 - RNA, 13 nt, Human
ucucuaggaaaua

SEQ ID NO: 2768307 - RNA, 19 nt, Human
ucugaggaauucuguauag

SEQ ID NO: 2768308 - RNA, 20 nt, Human
ucugaggaauucuguauaga

SEQ ID NO: 2768309 - RNA, 18 nt, Human
ucucuucacagucacauu

SEQ ID NO: 2768310 - RNA, 13 nt, Human
ucauuauuuuauu

SEQ ID NO: 2768311 - RNA, 15 nt, Human
ucauuauuuuauuau

SEQ ID NO: 2768312 - RNA, 14 nt, Human
ucauuauuuuauua

SEQ ID NO: 2768313 - RNA, 19 nt, Human
ucauuauuuuauuaugaaa

SEQ ID NO: 2768314 - RNA, 18 nt, Human
ucauuauuuuauuaugaa

SEQ ID NO: 2768315 - RNA, 16 nt, Human
ucauuauuuuauuaug

SEQ ID NO: 2768316 - RNA, 13 nt, Human
uccacuuggucug

SEQ ID NO: 2768317 - RNA, 12 nt, Human
uccacuuggucu

SEQ ID NO: 2768318 - RNA, 20 nt, Human
uccagcagauuauucacuga

SEQ ID NO: 2768319 - RNA, 17 nt, Human
uccagcagauuauucac

SEQ ID NO: 2768320 - RNA, 22 nt, Human
uccagcagauuauucacugauu

SEQ ID NO: 2768321 - RNA, 17 nt, Human
uccagauccuggaaauc

SEQ ID NO: 2768322 - RNA, 16 nt, Human
uccagauccuggaaau

SEQ ID NO: 2768323 - RNA, 14 nt, Human
uccagauccuggaa

SEQ ID NO: 2768324 - RNA, 20 nt, Human
uccaagcauuuagauguaua

SEQ ID NO: 2768325 - RNA, 23 nt, Human
uccaccucccugcaauaaaaugg

SEQ ID NO: 2768326 - RNA, 14 nt, Human
uccaccuacaugag

SEQ ID NO: 2768327 - RNA, 23 nt, Human
uccaaacugacucuuaagaagac

SEQ ID NO: 2768328 - RNA, 12 nt, Human
uccaaagaaaug

SEQ ID NO: 2768329 - RNA, 16 nt, Human
ucauuucugcaucagc

SEQ ID NO: 2768330 - RNA, 22 nt, Human
ucauuucugcaucagcugcuga

SEQ ID NO: 2768331 - RNA, 14 nt, Human
ucauuucuuugagu

SEQ ID NO: 2768332 - RNA, 23 nt, Human
uccaagcauaccaacacgagcag

SEQ ID NO: 2768333 - RNA, 17 nt, Human
uccaagcauuuagaugu

SEQ ID NO: 2768334 - RNA, 17 nt, Human
ucccucccuccaccucc

SEQ ID NO: 2768335 - RNA, 16 nt, Human
ucccaaauuucauacc

SEQ ID NO: 2768336 - RNA, 18 nt, Human
ucacucuccauuuaauaa

SEQ ID NO: 2768337 - RNA, 17 nt, Human
ucacuugucaauaaaau

SEQ ID NO: 2768338 - RNA, 19 nt, Human
ucagacauagaauuaacac

SEQ ID NO: 2768339 - RNA, 22 nt, Human
ucagacauagaauuaacacaug

SEQ ID NO: 2768340 - RNA, 23 nt, Human
ucagagcugcccucuccugggca

SEQ ID NO: 2768341 - RNA, 23 nt, Human
ucacaggacagcccuucuuucca

SEQ ID NO: 2768342 - RNA, 19 nt, Human
ucacaggaaguagaggagg

SEQ ID NO: 2768343 - RNA, 14 nt, Human
ucacaggaaguaga

SEQ ID NO: 2768344 - RNA, 19 nt, Human
ucaacuccaaacugacucu

SEQ ID NO: 2768345 - RNA, 12 nt, Human
uauuuuaugauc

SEQ ID NO: 2768346 - RNA, 13 nt, Human
ucaaaacugcacu

SEQ ID NO: 2768347 - RNA, 15 nt, Human
uaucugaggaauucu

SEQ ID NO: 2768348 - RNA, 18 nt, Human
uaucugaagucagaucug

SEQ ID NO: 2768349 - RNA, 17 nt, Human
uaucugaagucagaucu

SEQ ID NO: 2768350 - RNA, 22 nt, Human
uauuucuaugaaauauuauguu

SEQ ID NO: 2768351 - RNA, 21 nt, Human
uauuucuaugaaauauuaugu

SEQ ID NO: 2768352 - RNA, 14 nt, Human
uaaauccauuugga

SEQ ID NO: 2768353 - RNA, 16 nt, Human
uaaauccauuuggaaa

SEQ ID NO: 2768354 - RNA, 15 nt, Human
uaaauccauuuggaa

SEQ ID NO: 2768355 - RNA, 18 nt, Human
uaaauauaugcuaagucu

SEQ ID NO: 2768356 - RNA, 13 nt, Human
uaaaguugaauuu

SEQ ID NO: 2768357 - RNA, 15 nt, Human
uaaaguugaauuuau

SEQ ID NO: 2768358 - RNA, 14 nt, Human
uaaaguugaauuua

SEQ ID NO: 2768359 - RNA, 23 nt, Human
uaaaguugaauuuauuggcuuuu

SEQ ID NO: 2768360 - RNA, 21 nt, Human
uaaaguugaauuuauuggcuu

SEQ ID NO: 2768361 - RNA, 19 nt, Human
uaaaguugaauuuauuggc

SEQ ID NO: 2768362 - RNA, 17 nt, Human
uaaaguugaauuuauug

SEQ ID NO: 2768363 - RNA, 17 nt, Human
uaaauaaaaauaauccu

SEQ ID NO: 2768364 - RNA, 15 nt, Human
uaaacuuuucugaua

SEQ ID NO: 2768365 - RNA, 14 nt, Human
uaaacuuuucugau

SEQ ID NO: 2768366 - RNA, 13 nt, Human
uaaacuuuucuga

SEQ ID NO: 2768367 - RNA, 14 nt, Human
uaaaggaauuuaaa

SEQ ID NO: 2768368 - RNA, 17 nt, Human
uaaaauggguuuuacug

SEQ ID NO: 2768369 - RNA, 18 nt, Human
uaaaauccauacauuugu

SEQ ID NO: 2768370 - RNA, 19 nt, Human
uaaaauccauacauuugug

SEQ ID NO: 2768371 - RNA, 14 nt, Human
uaaaagaugaaaau

SEQ ID NO: 2768372 - RNA, 16 nt, Human
guuuucauuaucucaa

SEQ ID NO: 2768373 - RNA, 12 nt, Human
guuuguuuaguc

SEQ ID NO: 2768374 - RNA, 18 nt, Human
guuuucaggcuagaugua

SEQ ID NO: 2768375 - RNA, 16 nt, Human
uaaaaaagaaacauuu

SEQ ID NO: 2768376 - RNA, 23 nt, Human
guuugugcugguguaugugugaa

SEQ ID NO: 2768377 - RNA, 13 nt, Human
guuuagaaagcuu

SEQ ID NO: 2768378 - RNA, 14 nt, Human
guuuagucuugucu

SEQ ID NO: 2768379 - RNA, 20 nt, Human
guuuaggauguugaaaaagu

SEQ ID NO: 2768380 - RNA, 21 nt, Human
uaagccagacaucaacagaua

SEQ ID NO: 2768381 - RNA, 20 nt, Human
uaagccagacaucaacagau

SEQ ID NO: 2768382 - RNA, 16 nt, Human
uaagcauauauuuuua

SEQ ID NO: 2768383 - RNA, 19 nt, Human
uaagcauauauuuuuauau

SEQ ID NO: 2768384 - RNA, 22 nt, Human
uaagcauauauuuuuauauuua

SEQ ID NO: 2768385 - RNA, 21 nt, Human
uaagcauauauuuuuauauuu

SEQ ID NO: 2768386 - RNA, 23 nt, Human
uaagcauauauuuuuauauuuac

SEQ ID NO: 2768387 - RNA, 18 nt, Human
uaagcauuccaacuaucu

SEQ ID NO: 2768388 - RNA, 16 nt, Human
uaagcauuccaacuau

SEQ ID NO: 2768389 - RNA, 20 nt, Human
uaagcauuccaacuaucuca

SEQ ID NO: 2768390 - RNA, 13 nt, Human
uaagccagacauc

SEQ ID NO: 2768391 - RNA, 23 nt, Human
uaagagagaaugagagacacacu

SEQ ID NO: 2768392 - RNA, 23 nt, Human
uaagagggauuagggagagaaga

SEQ ID NO: 2768393 - RNA, 18 nt, Human
uaacauguuaaaccaugg

SEQ ID NO: 2768394 - RNA, 17 nt, Human
uaacauguuaaaccaug

SEQ ID NO: 2768395 - RNA, 16 nt, Human
uaacauguuaaaccau

SEQ ID NO: 2768396 - RNA, 23 nt, Human
uaaauccauuuggaaaucuuuaa

SEQ ID NO: 2768397 - RNA, 22 nt, Human
uaaauccauuuggaaaucuuua

SEQ ID NO: 2768398 - RNA, 19 nt, Human
uaaauccauuuggaaaucu

SEQ ID NO: 2768399 - RNA, 18 nt, Human
uaaauccauuuggaaauc

SEQ ID NO: 2768400 - RNA, 17 nt, Human
uaaaucccauuauucaa

SEQ ID NO: 2768401 - RNA, 16 nt, Human
uaaaucccauuauuca

SEQ ID NO: 2768402 - RNA, 23 nt, Human
uaaauugacacuuaaaaaugguu

SEQ ID NO: 2768403 - RNA, 19 nt, Human
uaacaaugcuguauuuuaa

SEQ ID NO: 2768404 - RNA, 14 nt, Human
uaauguuucaaaca

SEQ ID NO: 2768405 - RNA, 15 nt, Human
uaauguuucaaacau

SEQ ID NO: 2768406 - RNA, 19 nt, Human
uaauuaacauguuaaacca

SEQ ID NO: 2768407 - RNA, 18 nt, Human
uaauuaacauguuaaacc

SEQ ID NO: 2768408 - RNA, 17 nt, Human
uaauuaacauguuaaac

SEQ ID NO: 2768409 - RNA, 15 nt, Human
uaauuaacauguuaa

SEQ ID NO: 2768410 - RNA, 14 nt, Human
uaauuaacauguua

SEQ ID NO: 2768411 - RNA, 12 nt, Human
uaauuaacaugu

SEQ ID NO: 2768412 - RNA, 20 nt, Human
uaauuaaaagaauauuuuaa

SEQ ID NO: 2768413 - RNA, 22 nt, Human
uaauuggaaaggcagcucuaaa

SEQ ID NO: 2768414 - RNA, 23 nt, Human
uaauuuguaguguuggagaagaa

SEQ ID NO: 2768415 - RNA, 20 nt, Human
uaauuuguaguguuggagaa

SEQ ID NO: 2768416 - RNA, 18 nt, Human
uaauaaggaaaaguuuaa

SEQ ID NO: 2768417 - RNA, 20 nt, Human
uaauaaggaaaaguuuaaua

SEQ ID NO: 2768418 - RNA, 23 nt, Human
uaauaauuauaugcuauuucuau

SEQ ID NO: 2768419 - RNA, 22 nt, Human
uaauaauuauaugcuauuucua

SEQ ID NO: 2768420 - RNA, 20 nt, Human
uaauaauuauaugcuauuuc

SEQ ID NO: 2768421 - RNA, 19 nt, Human
uaauaauuauaugcuauuu

SEQ ID NO: 2768422 - RNA, 16 nt, Human
uaauaauuauaugcua

SEQ ID NO: 2768423 - RNA, 15 nt, Human
uaauaauuauaugcu

SEQ ID NO: 2768424 - RNA, 14 nt, Human
uaauaauguuucaa

SEQ ID NO: 2768425 - RNA, 15 nt, Human
uaauaauguuucaaa

SEQ ID NO: 2768426 - RNA, 12 nt, Human
uaauauuaaagc

SEQ ID NO: 2768427 - RNA, 14 nt, Human
uaauauuaaagcca

SEQ ID NO: 2768428 - RNA, 13 nt, Human
uaauauuaaagcc

SEQ ID NO: 2768429 - RNA, 19 nt, Human
uaaugccacuaaauugaca

SEQ ID NO: 2768430 - RNA, 18 nt, Human
uacaauuuuguuucugua

SEQ ID NO: 2768431 - RNA, 21 nt, Human
uacaauuuuguuucuguacuu

SEQ ID NO: 2768432 - RNA, 19 nt, Human
uacaauuuuguuucuguac

SEQ ID NO: 2768433 - RNA, 13 nt, Human
uaauuuuggaauu

SEQ ID NO: 2768434 - RNA, 12 nt, Human
uaauuuuggaau

SEQ ID NO: 2768435 - RNA, 14 nt, Human
uacaggauuugaaa

SEQ ID NO: 2768436 - RNA, 16 nt, Human
uaccaacacgagcagg

SEQ ID NO: 2768437 - RNA, 16 nt, Human
uacauuuguauaaaau

SEQ ID NO: 2768438 - RNA, 11 nt, Human
uacauuugugu

SEQ ID NO: 2768439 - RNA, 17 nt, Human
uacauuuguauaaaaua

SEQ ID NO: 2768440 - RNA, 22 nt, Human
uacaugagguacugagagugaa

SEQ ID NO: 2768441 - RNA, 21 nt, Human
uacaugagguacugagaguga

SEQ ID NO: 2768442 - RNA, 23 nt, Human
uaccacaggaaccacaagacugc

SEQ ID NO: 2768443 - RNA, 23 nt, Human
uacugauguuccuagugaaagag

SEQ ID NO: 2768444 - RNA, 19 nt, Human
uacugagagugaacaaauu

SEQ ID NO: 2768445 - RNA, 20 nt, Human
uagcagggcauggcugggaa

SEQ ID NO: 2768446 - RNA, 16 nt, Human
uagauguauguacuuc

SEQ ID NO: 2768447 - RNA, 20 nt, Human
uagauguauguacuucaugc

SEQ ID NO: 2768448 - RNA, 17 nt, Human
uagacuggugacugauu

SEQ ID NO: 2768449 - RNA, 14 nt, Human
uagacuggugacug

SEQ ID NO: 2768450 - RNA, 13 nt, Human
uagacuggugacu

SEQ ID NO: 2768451 - RNA, 15 nt, Human
uagagaguguugaaa

SEQ ID NO: 2768452 - RNA, 14 nt, Human
uagagaguguugaa

SEQ ID NO: 2768453 - RNA, 18 nt, Human
uagaguuuagcuggaaaa

SEQ ID NO: 2768454 - RNA, 17 nt, Human
uagaguuuagcuggaaa

SEQ ID NO: 2768455 - RNA, 13 nt, Human
uaggccaugggac

SEQ ID NO: 2768456 - RNA, 20 nt, Human
uaggaauugacccacaagaa

SEQ ID NO: 2768457 - RNA, 23 nt, Human
uaggaauugacccacaagaaaug

SEQ ID NO: 2768458 - RNA, 21 nt, Human
uaguuguaccgcaaugugacu

SEQ ID NO: 2768459 - RNA, 14 nt, Human
uagucaaauugugu

SEQ ID NO: 2768460 - RNA, 18 nt, Human
uagucaaauugugugaaa

SEQ ID NO: 2768461 - RNA, 16 nt, Human
uauaugcuauuucuau

SEQ ID NO: 2768462 - RNA, 18 nt, Human
uauaugcuauuucuauau

SEQ ID NO: 2768463 - RNA, 18 nt, Human
uauauuuuuauauuuacu

SEQ ID NO: 2768464 - RNA, 13 nt, Human
uauauuugaaaua

SEQ ID NO: 2768465 - RNA, 14 nt, Human
uauauuugaaauau

SEQ ID NO: 2768466 - RNA, 23 nt, Human
uauauuuauuacuguaagaaaau

SEQ ID NO: 2768467 - RNA, 20 nt, Human
uauauuuauuacuguaagaa

SEQ ID NO: 2768468 - RNA, 19 nt, Human
uauauuuuuauauuuacua

SEQ ID NO: 2768469 - RNA, 19 nt, Human
uauauuuuuuguuaaauga

SEQ ID NO: 2768470 - RNA, 15 nt, Human
ggggauucuuaaagu

SEQ ID NO: 2768471 - RNA, 11 nt, Human
ggggauucuua

SEQ ID NO: 2768472 - RNA, 16 nt, Human
gguguaugugugaagu

SEQ ID NO: 2768473 - RNA, 20 nt, Human
gguuaucugaagucagaucu

SEQ ID NO: 2768474 - RNA, 18 nt, Human
ggugacuuuggauaauaa

SEQ ID NO: 2768475 - RNA, 14 nt, Human
ggugacuuuggaua

SEQ ID NO: 2768476 - RNA, 21 nt, Human
ggugacuuuggauaauaagga

SEQ ID NO: 2768477 - RNA, 20 nt, Human
ggugacuuuggauaauaagg

SEQ ID NO: 2768478 - RNA, 19 nt, Human
ggugacuuuggauaauaag

SEQ ID NO: 2768479 - RNA, 21 nt, Human
ggugcuacaaaaacacagcaa

SEQ ID NO: 2768480 - RNA, 23 nt, Human
ggugcuacaaaaacacagcaagg

SEQ ID NO: 2768481 - RNA, 17 nt, Human
ggcuuuucugauccagu

SEQ ID NO: 2768482 - RNA, 14 nt, Human
gggaauugaggaca

SEQ ID NO: 2768483 - RNA, 12 nt, Human
ggcuuuucugau

SEQ ID NO: 2768484 - RNA, 16 nt, Human
ggcuuuucugauccag

SEQ ID NO: 2768485 - RNA, 13 nt, Human
ggcuuuucugauc

SEQ ID NO: 2768486 - RNA, 22 nt, Human
ggcuugaguuuaaauuguaaua

SEQ ID NO: 2768487 - RNA, 20 nt, Human
ggaaaaaauaacaaugaaag

SEQ ID NO: 2768488 - RNA, 17 nt, Human
gcuuuuaaaaaaaaaua

SEQ ID NO: 2768489 - RNA, 16 nt, Human
gcuugccaucccuccc

SEQ ID NO: 2768490 - RNA, 21 nt, Human
gcuugccaucccucccuccac

SEQ ID NO: 2768491 - RNA, 18 nt, Human
gcuugccaucccucccuc

SEQ ID NO: 2768492 - RNA, 19 nt, Human
gcuugcccuggugccucac

SEQ ID NO: 2768493 - RNA, 17 nt, Human
gcuugcccuggugccuc

SEQ ID NO: 2768494 - RNA, 15 nt, Human
gcuguucacagccag

SEQ ID NO: 2768495 - RNA, 16 nt, Human
gcuguucacagccaga

SEQ ID NO: 2768496 - RNA, 23 nt, Human
gcuguucacagccagacuggcac

SEQ ID NO: 2768497 - RNA, 21 nt, Human
ggaacgcguugaaauuguaau

SEQ ID NO: 2768498 - RNA, 16 nt, Human
ggaacgcguugaaauu

SEQ ID NO: 2768499 - RNA, 17 nt, Human
ggaacgcguugaaauug

SEQ ID NO: 2768500 - RNA, 18 nt, Human
ggaaaaguuuaauauuaa

SEQ ID NO: 2768501 - RNA, 19 nt, Human
ggaaaaguuuaauauuaaa

SEQ ID NO: 2768502 - RNA, 18 nt, Human
ggaaauauuuauuuuaau

SEQ ID NO: 2768503 - RNA, 17 nt, Human
ggaaauauuuauuuuaa

SEQ ID NO: 2768504 - RNA, 12 nt, Human
ggaaauauuuau

SEQ ID NO: 2768505 - RNA, 15 nt, Human
ggaaauauuuauuuu

SEQ ID NO: 2768506 - RNA, 13 nt, Human
ggaaauauuuauu

SEQ ID NO: 2768507 - RNA, 16 nt, Human
gcuagauguauguacu

SEQ ID NO: 2768508 - RNA, 18 nt, Human
gcuagauguauguacuuc

SEQ ID NO: 2768509 - RNA, 24 nt, Human
gcuggugcccugcuuucagauacu

SEQ ID NO: 2768510 - RNA, 22 nt, Human
gcuggugcccugcuuucagaua

SEQ ID NO: 2768511 - RNA, 22 nt, Human
gcuguauuuuaaaagaaugauu

SEQ ID NO: 2768512 - RNA, 21 nt, Human
ggaggacgcucucuggccuuc

SEQ ID NO: 2768513 - RNA, 20 nt, Human
ggaggacgcucucuggccuu

SEQ ID NO: 2768514 - RNA, 19 nt, Human
ggaggacgcucucuggccu

SEQ ID NO: 2768515 - RNA, 22 nt, Human
ggccaugggacagggaggacgc

SEQ ID NO: 2768516 - RNA, 21 nt, Human
ggcagcugccuccccuccucu

SEQ ID NO: 2768517 - RNA, 18 nt, Human
ggcagcugccuccccucc

SEQ ID NO: 2768518 - RNA, 22 nt, Human
ggcagcugccuccccuccucug

SEQ ID NO: 2768519 - RNA, 16 nt, Human
ggcagcugccuccccu

SEQ ID NO: 2768520 - RNA, 13 nt, Human
gccuaaggacuuc

SEQ ID NO: 2768521 - RNA, 12 nt, Human
gccuaaggacuu

SEQ ID NO: 2768522 - RNA, 18 nt, Human
gccuaaggacuucuuuaa

SEQ ID NO: 2768523 - RNA, 15 nt, Human
gccuaaggacuucuu

SEQ ID NO: 2768524 - RNA, 14 nt, Human
gccuaaggacuucu

SEQ ID NO: 2768525 - RNA, 11 nt, Human
gccuaaaucca

SEQ ID NO: 2768526 - RNA, 19 nt, Human
gcccuucuuuccacagaag

SEQ ID NO: 2768527 - RNA, 14 nt, Human
gccuccccuccucu

SEQ ID NO: 2768528 - RNA, 13 nt, Human
gccuccccuccuc

SEQ ID NO: 2768529 - RNA, 12 nt, Human
gccuccccuccu

SEQ ID NO: 2768530 - RNA, 11 nt, Human
gccuccccucc

SEQ ID NO: 2768531 - RNA, 22 nt, Human
gcuagacuggugacugauucuu

SEQ ID NO: 2768532 - RNA, 20 nt, Human
gcuagacuggugacugauuc

SEQ ID NO: 2768533 - RNA, 19 nt, Human
gcuagacuggugacugauu

SEQ ID NO: 2768534 - RNA, 16 nt, Human
gcuagacuggugacug

SEQ ID NO: 2768535 - RNA, 15 nt, Human
gcuagacuggugacu

SEQ ID NO: 2768536 - RNA, 13 nt, Human
gcuagacugguga

SEQ ID NO: 2768537 - RNA, 18 nt, Human
gccuguaaucacagcuac

SEQ ID NO: 2768538 - RNA, 16 nt, Human
gccuuuuucauuauuu

SEQ ID NO: 2768539 - RNA, 12 nt, Human
gccuuuuucauu

SEQ ID NO: 2768540 - RNA, 22 nt, Human
gccuuuuucauuauuuuauuau

SEQ ID NO: 2768541 - RNA, 20 nt, Human
gccuuuuucauuauuuuauu

SEQ ID NO: 2768542 - RNA, 22 nt, Human
gcgacagugagacucugucuca

SEQ ID NO: 2768543 - RNA, 18 nt, Human
gccuucggccuccauccu

SEQ ID NO: 2768544 - RNA, 19 nt, Human
gccuucggccuccauccug

SEQ ID NO: 2768545 - RNA, 22 nt, Human
gccacguucuuacuaguuuccc

SEQ ID NO: 2768546 - RNA, 14 nt, Human
gccaucccucccuc

SEQ ID NO: 2768547 - RNA, 13 nt, Human
gccaucccucccu

SEQ ID NO: 2768548 - RNA, 11 nt, Human
gccaucccucc

SEQ ID NO: 2768549 - RNA, 16 nt, Human
gccaucccucccucca

SEQ ID NO: 2768550 - RNA, 15 nt, Human
gccaucccucccucc

SEQ ID NO: 2768551 - RNA, 19 nt, Human
gccaugggacagggaggac

SEQ ID NO: 2768552 - RNA, 14 nt, Human
gccaugggacaggg

SEQ ID NO: 2768553 - RNA, 22 nt, Human
gccauuuaaagcuuauuaaaac

SEQ ID NO: 2768554 - RNA, 16 nt, Human
gcccacagcuguauga

SEQ ID NO: 2768555 - RNA, 17 nt, Human
gccccgugggguuccuc

SEQ ID NO: 2768556 - RNA, 19 nt, Human
gccccugcacuccagccug

SEQ ID NO: 2768557 - RNA, 16 nt, Human
gcccucuccugggcag

SEQ ID NO: 2768558 - RNA, 15 nt, Human
gcccucuccugggca

SEQ ID NO: 2768559 - RNA, 14 nt, Human
gcccucuccugggc

SEQ ID NO: 2768560 - RNA, 21 nt, Human
gcccucuccugggcagcugcc

SEQ ID NO: 2768561 - RNA, 19 nt, Human
gcccucuccugggcagcug

SEQ ID NO: 2768562 - RNA, 18 nt, Human
gcccucuccugggcagcu

SEQ ID NO: 2768563 - RNA, 16 nt, Human
gcauauauuuuuauau

SEQ ID NO: 2768564 - RNA, 11 nt, Human
gcauauauuuu

SEQ ID NO: 2768565 - RNA, 15 nt, Human
gcauauauuuuuaua

SEQ ID NO: 2768566 - RNA, 14 nt, Human
gcauauauuuuuau

SEQ ID NO: 2768567 - RNA, 18 nt, Human
gcauagauucccugagca

SEQ ID NO: 2768568 - RNA, 13 nt, Human
gcaguucugaaga

SEQ ID NO: 2768569 - RNA, 15 nt, Human
gcaggcuacugucag

SEQ ID NO: 2768570 - RNA, 20 nt, Human
gcacagccucuuagaugcag

SEQ ID NO: 2768571 - RNA, 18 nt, Human
gcacagccucuuagaugc

SEQ ID NO: 2768572 - RNA, 15 nt, Human
gcacugucaagauga

SEQ ID NO: 2768573 - RNA, 14 nt, Human
gcagaagacaguau

SEQ ID NO: 2768574 - RNA, 14 nt, Human
gauuaaguaaugau

SEQ ID NO: 2768575 - RNA, 22 nt, Human
gauuaaguaaugauaacuggaa

SEQ ID NO: 2768576 - RNA, 16 nt, Human
gaugcuagaacucccu

SEQ ID NO: 2768577 - RNA, 12 nt, Human
gcaagauguggg

SEQ ID NO: 2768578 - RNA, 16 nt, Human
gcaagaugugggcagu

SEQ ID NO: 2768579 - RNA, 23 nt, Human
gaucagcuuauugucuagugaaa

SEQ ID NO: 2768580 - RNA, 21 nt, Human
gauaauaaggaaaaguuuaau

SEQ ID NO: 2768581 - RNA, 20 nt, Human
gauaauaaggaaaaguuuaa

SEQ ID NO: 2768582 - RNA, 22 nt, Human
gauaauaaggaaaaguuuaaua

SEQ ID NO: 2768583 - RNA, 13 nt, Human
gauaaacaguagu

SEQ ID NO: 2768584 - RNA, 17 nt, Human
gaucuaguucacucucc

SEQ ID NO: 2768585 - RNA, 14 nt, Human
gauccuggaaauca

SEQ ID NO: 2768586 - RNA, 13 nt, Human
gauccuggaaauc

SEQ ID NO: 2768587 - RNA, 15 nt, Human
gaacauaaaauacaa

SEQ ID NO: 2768588 - RNA, 20 nt, Human
gaacagugauuaccagggac

SEQ ID NO: 2768589 - RNA, 16 nt, Human
gaacagugauuaccag

SEQ ID NO: 2768590 - RNA, 17 nt, Human
gaaauuguaauuauauc

SEQ ID NO: 2768591 - RNA, 16 nt, Human
gaaauuguauuacaaa

SEQ ID NO: 2768592 - RNA, 17 nt, Human
gaagacugcauuauauu

SEQ ID NO: 2768593 - RNA, 19 nt, Human
gaagacugcauuauauuua

SEQ ID NO: 2768594 - RNA, 12 nt, Human
gaagaacugaaa

SEQ ID NO: 2768595 - RNA, 18 nt, Human
gaagauguagaggagaaa

SEQ ID NO: 2768596 - RNA, 17 nt, Human
gaagauguagaggagaa

SEQ ID NO: 2768597 - RNA, 23 nt, Human
gaaugguccgugcuaaggacuug

SEQ ID NO: 2768598 - RNA, 22 nt, Human
gaaugguccgugcuaaggacuu

SEQ ID NO: 2768599 - RNA, 20 nt, Human
gaaugguccgugcuaaggac

SEQ ID NO: 2768600 - RNA, 21 nt, Human
gaauggcuuuguauagaaccu

SEQ ID NO: 2768601 - RNA, 22 nt, Human
gaauuuauuggcuuuucugauc

SEQ ID NO: 2768602 - RNA, 21 nt, Human
gaauuuauuggcuuuucugau

SEQ ID NO: 2768603 - RNA, 20 nt, Human
gaauuuauuggcuuuucuga

SEQ ID NO: 2768604 - RNA, 16 nt, Human
gaauuuauuggcuuuu

SEQ ID NO: 2768605 - RNA, 14 nt, Human
gaauuuauuggcuu

SEQ ID NO: 2768606 - RNA, 16 nt, Human
gaauauuuuaacuucc

SEQ ID NO: 2768607 - RNA, 22 nt, Human
gaaguccaagcauuuagaugua

SEQ ID NO: 2768608 - RNA, 12 nt, Human
gaaguccaagca

SEQ ID NO: 2768609 - RNA, 14 nt, Human
gaaguauccuucag

SEQ ID NO: 2768610 - RNA, 16 nt, Human
gaaguauccuucagcc

SEQ ID NO: 2768611 - RNA, 14 nt, Human
gacaucaacagaua

SEQ ID NO: 2768612 - RNA, 23 nt, Human
gacaggaugguucccuugaugaa

SEQ ID NO: 2768613 - RNA, 20 nt, Human
gacccaaaaggcagaagcaa

SEQ ID NO: 2768614 - RNA, 19 nt, Human
gacccaaaaggcagaagca

SEQ ID NO: 2768615 - RNA, 18 nt, Human
gacccaaaaggcagaagc

SEQ ID NO: 2768616 - RNA, 18 nt, Human
gaccacugcagaagacag

SEQ ID NO: 2768617 - RNA, 16 nt, Human
gaccacugcagaagac

SEQ ID NO: 2768618 - RNA, 18 nt, Human
gacuggcacaguuuucug

SEQ ID NO: 2768619 - RNA, 22 nt, Human
gacuggcacaguuuucugagaa

SEQ ID NO: 2768620 - RNA, 14 nt, Human
gacuggcacaguuu

SEQ ID NO: 2768621 - RNA, 16 nt, Human
gacugaggggagggga

SEQ ID NO: 2768622 - RNA, 13 nt, Human
gacugauucuuca

SEQ ID NO: 2768623 - RNA, 16 nt, Human
gacugauucuucagca

SEQ ID NO: 2768624 - RNA, 24 nt, Human
gacugcauuauauuuauuacugua

SEQ ID NO: 2768625 - RNA, 14 nt, Human
cuugcccuguuaaa

SEQ ID NO: 2768626 - RNA, 18 nt, Human
cuugcccuggugccucac

SEQ ID NO: 2768627 - RNA, 19 nt, Human
cuugccaucccucccucca

SEQ ID NO: 2768628 - RNA, 16 nt, Human
cuugccaucccucccu

SEQ ID NO: 2768629 - RNA, 15 nt, Human
cuugccaucccuccc

SEQ ID NO: 2768630 - RNA, 17 nt, Human
cuugccaucccucccuc

SEQ ID NO: 2768631 - RNA, 14 nt, Human
cuugccaucccucc

SEQ ID NO: 2768632 - RNA, 20 nt, Human
cuugcuugauuguauggugg

SEQ ID NO: 2768633 - RNA, 22 nt, Human
cuugcccuguuaaaagaugaaa

SEQ ID NO: 2768634 - RNA, 17 nt, Human
cuuuaaaaaaaaaauug

SEQ ID NO: 2768635 - RNA, 16 nt, Human
cuuguuagaucuaguu

SEQ ID NO: 2768636 - RNA, 13 nt, Human
cuuguuagaucua

SEQ ID NO: 2768637 - RNA, 16 nt, Human
cuuggacucauuuuaa

SEQ ID NO: 2768638 - RNA, 16 nt, Human
cuuggggcugaugcag

SEQ ID NO: 2768639 - RNA, 18 nt, Human
cuuggggcugaugcaguu

SEQ ID NO: 2768640 - RNA, 17 nt, Human
cuuguacuuuauuuucu

SEQ ID NO: 2768641 - RNA, 14 nt, Human
cuuuggauaauaag

SEQ ID NO: 2768642 - RNA, 16 nt, Human
cuuuggauaauaagga

SEQ ID NO: 2768643 - RNA, 19 nt, Human
cuuuccucaaaacuucaga

SEQ ID NO: 2768644 - RNA, 14 nt, Human
cuuuuucauuauuu

SEQ ID NO: 2768645 - RNA, 13 nt, Human
cuuuuucauuauu

SEQ ID NO: 2768646 - RNA, 12 nt, Human
cuuuuucauuau

SEQ ID NO: 2768647 - RNA, 15 nt, Human
cuuuuuuaaauaaau

SEQ ID NO: 2768648 - RNA, 18 nt, Human
cuuuucugauccaguuuu

SEQ ID NO: 2768649 - RNA, 16 nt, Human
cuuuucugauccaguu

SEQ ID NO: 2768650 - RNA, 11 nt, Human
cuuuucugauc

SEQ ID NO: 2768651 - RNA, 14 nt, Human
cuuuucugauagag

SEQ ID NO: 2768652 - RNA, 15 nt, Human
cuuuucugauccagu

SEQ ID NO: 2768653 - RNA, 14 nt, Human
cuuuucugauccag

SEQ ID NO: 2768654 - RNA, 14 nt, Human
gaaaacaaggauga

SEQ ID NO: 2768655 - RNA, 14 nt, Human
gaaaaguauguuag

SEQ ID NO: 2768656 - RNA, 20 nt, Human
gaaaaguauguuagugcaaa

SEQ ID NO: 2768657 - RNA, 19 nt, Human
gaaaauaacaauaaaagac

SEQ ID NO: 2768658 - RNA, 18 nt, Human
cuuaaugccacuaaauug

SEQ ID NO: 2768659 - RNA, 19 nt, Human
cuguuuuauaauuuuguga

SEQ ID NO: 2768660 - RNA, 19 nt, Human
cuuacuaguuucccuugca

SEQ ID NO: 2768661 - RNA, 19 nt, Human
cuuagaugcaguucugaag

SEQ ID NO: 2768662 - RNA, 14 nt, Human
cuuauaauuuaaaa

SEQ ID NO: 2768663 - RNA, 19 nt, Human
cuuauaggaauugacccac

SEQ ID NO: 2768664 - RNA, 21 nt, Human
cuuaggguuaugauuaaguaa

SEQ ID NO: 2768665 - RNA, 13 nt, Human
cuuauaauuuaaa

SEQ ID NO: 2768666 - RNA, 19 nt, Human
cuuccagauccuggaaauc

SEQ ID NO: 2768667 - RNA, 16 nt, Human
cuucagcgguuuauau

SEQ ID NO: 2768668 - RNA, 18 nt, Human
cuucagcgguuuauauaa

SEQ ID NO: 2768669 - RNA, 19 nt, Human
cuuccuuggacucauuuua

SEQ ID NO: 2768670 - RNA, 17 nt, Human
cuucggccuccauccug

SEQ ID NO: 2768671 - RNA, 18 nt, Human
cuucggccuccauccuga

SEQ ID NO: 2768672 - RNA, 18 nt, Human
cuccuaucaccugucuug

SEQ ID NO: 2768673 - RNA, 16 nt, Human
cucccuucucuucaca

SEQ ID NO: 2768674 - RNA, 12 nt, Human
cucccuuucaac

SEQ ID NO: 2768675 - RNA, 13 nt, Human
cucccuuucaaca

SEQ ID NO: 2768676 - RNA, 13 nt, Human
cucggagaagagc

SEQ ID NO: 2768677 - RNA, 20 nt, Human
cucggagaagagcuguucac

SEQ ID NO: 2768678 - RNA, 12 nt, Human
cucggagaagag

SEQ ID NO: 2768679 - RNA, 18 nt, Human
cucauuaggauggcuagu

SEQ ID NO: 2768680 - RNA, 17 nt, Human
cucauuaggauggcuag

SEQ ID NO: 2768681 - RNA, 20 nt, Human
cuccauccugaggcuccacu

SEQ ID NO: 2768682 - RNA, 21 nt, Human
cuccauccugaggcuccacuu

SEQ ID NO: 2768683 - RNA, 23 nt, Human
cuccauccugaggcuccacuugg

SEQ ID NO: 2768684 - RNA, 17 nt, Human
cucccagucauuuaaua

SEQ ID NO: 2768685 - RNA, 17 nt, Human
cuccaccucccugcaau

SEQ ID NO: 2768686 - RNA, 16 nt, Human
cuccaccucccugcaa

SEQ ID NO: 2768687 - RNA, 15 nt, Human
cuccaccucccugca

SEQ ID NO: 2768688 - RNA, 14 nt, Human
cuccaccucccugc

SEQ ID NO: 2768689 - RNA, 23 nt, Human
cucugcauacucauuaggauggc

SEQ ID NO: 2768690 - RNA, 13 nt, Human
cucuccauuuaau

SEQ ID NO: 2768691 - RNA, 21 nt, Human
cucuccugggcagcugccucc

SEQ ID NO: 2768692 - RNA, 21 nt, Human
cugaagucagaucugccuaag

SEQ ID NO: 2768693 - RNA, 14 nt, Human
cugaagucagaucu

SEQ ID NO: 2768694 - RNA, 16 nt, Human
cugaagucagaucugc

SEQ ID NO: 2768695 - RNA, 15 nt, Human
cugaagucagaucug

SEQ ID NO: 2768696 - RNA, 20 nt, Human
cugauccaguuuuguuugga

SEQ ID NO: 2768697 - RNA, 20 nt, Human
cugauagaggaagccugauu

SEQ ID NO: 2768698 - RNA, 13 nt, Human
cugauguuccuag

SEQ ID NO: 2768699 - RNA, 18 nt, Human
cugauguuccuagugaaa

SEQ ID NO: 2768700 - RNA, 20 nt, Human
cugauguuccuagugaaaga

SEQ ID NO: 2768701 - RNA, 21 nt, Human
cugauguuccuagugaaagag

SEQ ID NO: 2768702 - RNA, 15 nt, Human
cugauucuucagcaa

SEQ ID NO: 2768703 - RNA, 13 nt, Human
cugcagaagacag

SEQ ID NO: 2768704 - RNA, 23 nt, Human
cugcagaagacaguauggcagcu

SEQ ID NO: 2768705 - RNA, 19 nt, Human
cugccuaaggacuucuuua

SEQ ID NO: 2768706 - RNA, 22 nt, Human
cugccuaaggacuucuuuaauu

SEQ ID NO: 2768707 - RNA, 21 nt, Human
cugccuaaggacuucuuuaau

SEQ ID NO: 2768708 - RNA, 20 nt, Human
cugccuaaggacuucuuuaa

SEQ ID NO: 2768709 - RNA, 15 nt, Human
cugccuaagugcagc

SEQ ID NO: 2768710 - RNA, 16 nt, Human
cugcuuucagauacug

SEQ ID NO: 2768711 - RNA, 21 nt, Human
cugcuuucagauacuggauug

SEQ ID NO: 2768712 - RNA, 18 nt, Human
cugcuuucagauacugga

SEQ ID NO: 2768713 - RNA, 13 nt, Human
cugcugaaacaac

SEQ ID NO: 2768714 - RNA, 23 nt, Human
cuggaauaauccuaaacauauga

SEQ ID NO: 2768715 - RNA, 16 nt, Human
cuggccaacgggguga

SEQ ID NO: 2768716 - RNA, 20 nt, Human
cuggauuguacuuugugcug

SEQ ID NO: 2768717 - RNA, 19 nt, Human
cuggauuguacuuugugcu

SEQ ID NO: 2768718 - RNA, 18 nt, Human
cuggcacaguuuucugag

SEQ ID NO: 2768719 - RNA, 19 nt, Human
cuggcacaguuuucugaga

SEQ ID NO: 2768720 - RNA, 22 nt, Human
cugggaacccaaguccaagcau

SEQ ID NO: 2768721 - RNA, 21 nt, Human
cuggucccagccagcaguuca

SEQ ID NO: 2768722 - RNA, 21 nt, Human
ccucacccacccuuuuuuaaa

SEQ ID NO: 2768723 - RNA, 13 nt, Human
ccgugcuaaggac

SEQ ID NO: 2768724 - RNA, 22 nt, Human
ccgggaggcagagguugcagug

SEQ ID NO: 2768725 - RNA, 16 nt, Human
cccuugaugaagaagu

SEQ ID NO: 2768726 - RNA, 15 nt, Human
cccuugaugaagaag

SEQ ID NO: 2768727 - RNA, 23 nt, Human
ccucuuagaugcaguucugaaga

SEQ ID NO: 2768728 - RNA, 13 nt, Human
ccugaaagaggaa

SEQ ID NO: 2768729 - RNA, 18 nt, Human
ccugaaagaggaaugaag

SEQ ID NO: 2768730 - RNA, 23 nt, Human
ccugaaagaggaaugaaguacuc

SEQ ID NO: 2768731 - RNA, 13 nt, Human
ccugauuaaagaa

SEQ ID NO: 2768732 - RNA, 12 nt, Human
ccugauuaaaga

SEQ ID NO: 2768733 - RNA, 20 nt, Human
ccugaggcuccacuuggucu

SEQ ID NO: 2768734 - RNA, 18 nt, Human
ccugaggcuccacuuggu

SEQ ID NO: 2768735 - RNA, 17 nt, Human
ccugaggcuccacuugg

SEQ ID NO: 2768736 - RNA, 13 nt, Human
ccucuccugggca

SEQ ID NO: 2768737 - RNA, 12 nt, Human
ccucuccugggc

SEQ ID NO: 2768738 - RNA, 11 nt, Human
ccucuccuggg

SEQ ID NO: 2768739 - RNA, 21 nt, Human
ccucugcuugccaucccuccc

SEQ ID NO: 2768740 - RNA, 20 nt, Human
ccucugcuugccaucccucc

SEQ ID NO: 2768741 - RNA, 17 nt, Human
ccucugcuugccauccc

SEQ ID NO: 2768742 - RNA, 20 nt, Human
ccucagaaaacaaggaugaa

SEQ ID NO: 2768743 - RNA, 14 nt, Human
ccuccccuccucug

SEQ ID NO: 2768744 - RNA, 15 nt, Human
ccuccccuccucugc

SEQ ID NO: 2768745 - RNA, 11 nt, Human
ccuccucugcu

SEQ ID NO: 2768746 - RNA, 16 nt, Human
ccucccugcaauaaaa

SEQ ID NO: 2768747 - RNA, 12 nt, Human
ccucccugcaau

SEQ ID NO: 2768748 - RNA, 18 nt, Human
ccuccccuccucugcuug

SEQ ID NO: 2768749 - RNA, 17 nt, Human
ccuccccuccucugcuu

SEQ ID NO: 2768750 - RNA, 12 nt, Human
ccuucagccuga

SEQ ID NO: 2768751 - RNA, 16 nt, Human
ccugcuuucagauacu

SEQ ID NO: 2768752 - RNA, 15 nt, Human
ccugcuuucagauac

SEQ ID NO: 2768753 - RNA, 21 nt, Human
ccugcuuucagauacuggauu

SEQ ID NO: 2768754 - RNA, 18 nt, Human
ccugggcagcugccuccc

SEQ ID NO: 2768755 - RNA, 17 nt, Human
ccugggcagcugccucc

SEQ ID NO: 2768756 - RNA, 16 nt, Human
ccugggcagcugccuc

SEQ ID NO: 2768757 - RNA, 15 nt, Human
ccugggcagcugccu

SEQ ID NO: 2768758 - RNA, 20 nt, Human
ccugggcagcugccuccccu

SEQ ID NO: 2768759 - RNA, 22 nt, Human
cguucauggaacgcguugaaau

SEQ ID NO: 2768760 - RNA, 21 nt, Human
cguucauggaacgcguugaaa

SEQ ID NO: 2768761 - RNA, 23 nt, Human
cguucauggaacgcguugaaauu

SEQ ID NO: 2768762 - RNA, 13 nt, Human
cguugaaauugua

SEQ ID NO: 2768763 - RNA, 21 nt, Human
cgcguugaaauuguaauuaua

SEQ ID NO: 2768764 - RNA, 17 nt, Human
cgcguugaaauuguaau

SEQ ID NO: 2768765 - RNA, 13 nt, Human
cgcguugaaauug

SEQ ID NO: 2768766 - RNA, 16 nt, Human
ccuuucucuuucguua

SEQ ID NO: 2768767 - RNA, 11 nt, Human
cgcaaugugac

SEQ ID NO: 2768768 - RNA, 13 nt, Human
cggaugauuucua

SEQ ID NO: 2768769 - RNA, 14 nt, Human
cggaugauuucuau

SEQ ID NO: 2768770 - RNA, 17 nt, Human
cggccuccauccugagg

SEQ ID NO: 2768771 - RNA, 16 nt, Human
cggccuccauccugag

SEQ ID NO: 2768772 - RNA, 14 nt, Human
cggccuccauccug

SEQ ID NO: 2768773 - RNA, 18 nt, Human
cauuugcucauggaauug

SEQ ID NO: 2768774 - RNA, 13 nt, Human
cauuugcucaugg

SEQ ID NO: 2768775 - RNA, 14 nt, Human
cauuuaauaauuau

SEQ ID NO: 2768776 - RNA, 12 nt, Human
cauuuaauaauu

SEQ ID NO: 2768777 - RNA, 19 nt, Human
cauuuaauaauuauaugcu

SEQ ID NO: 2768778 - RNA, 17 nt, Human
cauuuaauaauuauaug

SEQ ID NO: 2768779 - RNA, 16 nt, Human
cauuuaauaauuauau

SEQ ID NO: 2768780 - RNA, 15 nt, Human
cauuuaauaauuaua

SEQ ID NO: 2768781 - RNA, 23 nt, Human
cauuuaauaauuauaugcuauuu

SEQ ID NO: 2768782 - RNA, 17 nt, Human
cauuuaggccaugggac

SEQ ID NO: 2768783 - RNA, 22 nt, Human
ccaagcauaccaacacgagcag

SEQ ID NO: 2768784 - RNA, 17 nt, Human
ccaagcauuuagaugua

SEQ ID NO: 2768785 - RNA, 14 nt, Human
ccaagcaaguauua

SEQ ID NO: 2768786 - RNA, 23 nt, Human
ccaaauuucauaccuaucaucuu

SEQ ID NO: 2768787 - RNA, 22 nt, Human
ccaaacugacucuuaagaagac

SEQ ID NO: 2768788 - RNA, 20 nt, Human
ccacaggaaccacaagacug

SEQ ID NO: 2768789 - RNA, 16 nt, Human
ccaauauucauagcag

SEQ ID NO: 2768790 - RNA, 18 nt, Human
ccacugcagaagacagua

SEQ ID NO: 2768791 - RNA, 13 nt, Human
ccacugcagaaga

SEQ ID NO: 2768792 - RNA, 20 nt, Human
ccaggaauggagccugcacg

SEQ ID NO: 2768793 - RNA, 17 nt, Human
ccaggugccaguuaugg

SEQ ID NO: 2768794 - RNA, 13 nt, Human
cccaaaaggcaga

SEQ ID NO: 2768795 - RNA, 18 nt, Human
cccaaaaggcagaagcaa

SEQ ID NO: 2768796 - RNA, 16 nt, Human
ccaugauguuuagaaa

SEQ ID NO: 2768797 - RNA, 14 nt, Human
ccaugaagauguag

SEQ ID NO: 2768798 - RNA, 20 nt, Human
ccaucaauaaaaaauuauga

SEQ ID NO: 2768799 - RNA, 19 nt, Human
ccaucaauaaaaaauuaug

SEQ ID NO: 2768800 - RNA, 18 nt, Human
ccaucaaggguacacugc

SEQ ID NO: 2768801 - RNA, 13 nt, Human
cccaggugccagu

SEQ ID NO: 2768802 - RNA, 13 nt, Human
guuuaaaugguca

SEQ ID NO: 2768803 - RNA, 15 nt, Human
ugugacuuaaugcca

SEQ ID NO: 2768804 - RNA, 11 nt, Human
auaaggcuuca

SEQ ID NO: 2768805 - RNA, 18 nt, Human
auaagccaguguugccua

SEQ ID NO: 2768806 - RNA, 20 nt, Human
auaagccaguguugccuaag

SEQ ID NO: 2768807 - RNA, 14 nt, Human
auaaugguugacug

SEQ ID NO: 2768808 - RNA, 18 nt, Human
auaaugguugacuggguu

SEQ ID NO: 2768809 - RNA, 15 nt, Human
auaauguaaauaaag

SEQ ID NO: 2768810 - RNA, 15 nt, Human
auaagggcagaguca

SEQ ID NO: 2768811 - RNA, 13 nt, Human
auaagggcagagu

SEQ ID NO: 2768812 - RNA, 17 nt, Human
auaagggguuugccauu

SEQ ID NO: 2768813 - RNA, 18 nt, Human
auaagggguuugccauuu

SEQ ID NO: 2768814 - RNA, 20 nt, Human
auaagggguuugccauuuga

SEQ ID NO: 2768815 - RNA, 21 nt, Human
auaagggguuugccauuugau

SEQ ID NO: 2768816 - RNA, 19 nt, Human
auaagguguuuucugugua

SEQ ID NO: 2768817 - RNA, 17 nt, Human
auaauggguuucuuuca

SEQ ID NO: 2768818 - RNA, 14 nt, Human
auacaauaacauaa

SEQ ID NO: 2768819 - RNA, 11 nt, Human
auacaauaaug

SEQ ID NO: 2768820 - RNA, 13 nt, Human
auacaauaaugga

SEQ ID NO: 2768821 - RNA, 15 nt, Human
auacaauaauggaaa

SEQ ID NO: 2768822 - RNA, 16 nt, Human
auacaauaauggaaaa

SEQ ID NO: 2768823 - RNA, 18 nt, Human
auacaauaauggaaaaaa

SEQ ID NO: 2768824 - RNA, 19 nt, Human
auacaauaauggaaaaaaa

SEQ ID NO: 2768825 - RNA, 13 nt, Human
auacaauauauaa

SEQ ID NO: 2768826 - RNA, 15 nt, Human
auacaauauauaaaa

SEQ ID NO: 2768827 - RNA, 19 nt, Human
auacaauauauaaaaauau

SEQ ID NO: 2768828 - RNA, 20 nt, Human
auacaauauauaaaaauaua

SEQ ID NO: 2768829 - RNA, 21 nt, Human
auacaauauauaaaaauauau

SEQ ID NO: 2768830 - RNA, 14 nt, Human
auacaauauauagc

SEQ ID NO: 2768831 - RNA, 16 nt, Human
auacaauauauagcug

SEQ ID NO: 2768832 - RNA, 15 nt, Human
auacaauaucaucca

SEQ ID NO: 2768833 - RNA, 17 nt, Human
auacaaugaacacuuau

SEQ ID NO: 2768834 - RNA, 18 nt, Human
auacaaugaacacuuaua

SEQ ID NO: 2768835 - RNA, 13 nt, Human
auaccccccucug

SEQ ID NO: 2768836 - RNA, 19 nt, Human
auacccccugcaaagccca

SEQ ID NO: 2768837 - RNA, 17 nt, Human
auacccccugcaaagcc

SEQ ID NO: 2768838 - RNA, 16 nt, Human
auacacuugcccugcu

SEQ ID NO: 2768839 - RNA, 22 nt, Human
auacacuuggggagauuugcca

SEQ ID NO: 2768840 - RNA, 15 nt, Human
auacacuuguauaaa

SEQ ID NO: 2768841 - RNA, 17 nt, Human
auacacuuguauaaaug

SEQ ID NO: 2768842 - RNA, 18 nt, Human
auacacuuguauaaaugu

SEQ ID NO: 2768843 - RNA, 19 nt, Human
auacacuuguauaaaugua

SEQ ID NO: 2768844 - RNA, 22 nt, Human
auacacuuguauaaauguauau

SEQ ID NO: 2768845 - RNA, 20 nt, Human
auacacuugugauuauaaaa

SEQ ID NO: 2768846 - RNA, 20 nt, Human
auacccccugcaaagcccag

SEQ ID NO: 2768847 - RNA, 17 nt, Human
auacccccccaugcagu

SEQ ID NO: 2768848 - RNA, 16 nt, Human
auaacaaugugcucuc

SEQ ID NO: 2768849 - RNA, 13 nt, Human
auaacaauguuaa

SEQ ID NO: 2768850 - RNA, 14 nt, Human
auaacaauguuaag

SEQ ID NO: 2768851 - RNA, 16 nt, Human
auaacaauguuaagga

SEQ ID NO: 2768852 - RNA, 18 nt, Human
auaacaauguuaaggaaa

SEQ ID NO: 2768853 - RNA, 20 nt, Human
auaaauuguuuggcuuccuc

SEQ ID NO: 2768854 - RNA, 16 nt, Human
auaaauuuacuuuaca

SEQ ID NO: 2768855 - RNA, 15 nt, Human
auaaauuuauaugaa

SEQ ID NO: 2768856 - RNA, 22 nt, Human
auaaagcaacuguuaugaaaua

SEQ ID NO: 2768857 - RNA, 15 nt, Human
auaaagauguuaaaa

SEQ ID NO: 2768858 - RNA, 11 nt, Human
auaacacacau

SEQ ID NO: 2768859 - RNA, 16 nt, Human
auaacacacuuuuuau

SEQ ID NO: 2768860 - RNA, 14 nt, Human
auaacacacagcua

SEQ ID NO: 2768861 - RNA, 23 nt, Human
auaacacacagcuaacacacagc

SEQ ID NO: 2768862 - RNA, 13 nt, Human
auaacacacagcu

SEQ ID NO: 2768863 - RNA, 22 nt, Human
auaacaauguuaaggaaacucu

SEQ ID NO: 2768864 - RNA, 15 nt, Human
auaacaauuguuugg

SEQ ID NO: 2768865 - RNA, 20 nt, Human
auaaaaagccugcaauuuca

SEQ ID NO: 2768866 - RNA, 17 nt, Human
aguuuggcaauaguuug

SEQ ID NO: 2768867 - RNA, 16 nt, Human
aguuuggcaauaguuu

SEQ ID NO: 2768868 - RNA, 13 nt, Human
aguuugcuuagaa

SEQ ID NO: 2768869 - RNA, 14 nt, Human
aguuugcuuagaaa

SEQ ID NO: 2768870 - RNA, 15 nt, Human
aguuugcuuguuucu

SEQ ID NO: 2768871 - RNA, 21 nt, Human
aguuuggagagucagaucuuu

SEQ ID NO: 2768872 - RNA, 18 nt, Human
aguuuggauucuuaugua

SEQ ID NO: 2768873 - RNA, 11 nt, Human
aguuugcuuag

SEQ ID NO: 2768874 - RNA, 14 nt, Human
aguuugcuauuaga

SEQ ID NO: 2768875 - RNA, 20 nt, Human
aguuugcacuguaugcugga

SEQ ID NO: 2768876 - RNA, 22 nt, Human
auaaaaagccugcaauuucaua

SEQ ID NO: 2768877 - RNA, 21 nt, Human
auaaaaagcuuccaugauucu

SEQ ID NO: 2768878 - RNA, 17 nt, Human
auaaaaagcuuccauga

SEQ ID NO: 2768879 - RNA, 14 nt, Human
auaaaaaggacauc

SEQ ID NO: 2768880 - RNA, 11 nt, Human
auaaaaaggac

SEQ ID NO: 2768881 - RNA, 13 nt, Human
auaaaacauuaug

SEQ ID NO: 2768882 - RNA, 22 nt, Human
auaaaacauuaugcuccagaaa

SEQ ID NO: 2768883 - RNA, 19 nt, Human
auaaaaaggacaucagcaa

SEQ ID NO: 2768884 - RNA, 17 nt, Human
auaaaacuuugcugcca

SEQ ID NO: 2768885 - RNA, 18 nt, Human
auaaagauggcugacuuu

SEQ ID NO: 2768886 - RNA, 15 nt, Human
auaaagaugcucuuu

SEQ ID NO: 2768887 - RNA, 14 nt, Human
auaaagaugcucuu

SEQ ID NO: 2768888 - RNA, 22 nt, Human
auaaaaccuuucaaauuucaca

SEQ ID NO: 2768889 - RNA, 21 nt, Human
auaaaaccuuucaaauuucac

SEQ ID NO: 2768890 - RNA, 20 nt, Human
auaaaaccuuucaaauuuca

SEQ ID NO: 2768891 - RNA, 15 nt, Human
auaaaaccuuucaaa

SEQ ID NO: 2768892 - RNA, 14 nt, Human
auaaaaccuuucaa

SEQ ID NO: 2768893 - RNA, 13 nt, Human
auaaaaccuuuca

SEQ ID NO: 2768894 - RNA, 11 nt, Human
auaaaaccuuu

SEQ ID NO: 2768895 - RNA, 23 nt, Human
aguugugccuuuuauagcuauua

SEQ ID NO: 2768896 - RNA, 15 nt, Human
aguuugaaggaaaca

SEQ ID NO: 2768897 - RNA, 16 nt, Human
aguuugaaggaaacag

SEQ ID NO: 2768898 - RNA, 18 nt, Human
aguuugaaggaaacaguu

SEQ ID NO: 2768899 - RNA, 15 nt, Human
aguuugaacuucaua

SEQ ID NO: 2768900 - RNA, 21 nt, Human
aguuucuucugcgccucaggc

SEQ ID NO: 2768901 - RNA, 16 nt, Human
aguuucuugguaaagu

SEQ ID NO: 2768902 - RNA, 17 nt, Human
aguuucuuagcuuuuua

SEQ ID NO: 2768903 - RNA, 15 nt, Human
aguuucuuagcuuuu

SEQ ID NO: 2768904 - RNA, 13 nt, Human
aguuucuuuggga

SEQ ID NO: 2768905 - RNA, 17 nt, Human
auauuauguguuuccau

SEQ ID NO: 2768906 - RNA, 16 nt, Human
auauggcaaaaauggc

SEQ ID NO: 2768907 - RNA, 13 nt, Human
auauggcaagaaa

SEQ ID NO: 2768908 - RNA, 15 nt, Human
auauggcaagaaagc

SEQ ID NO: 2768909 - RNA, 17 nt, Human
auauggcaagaaagcug

SEQ ID NO: 2768910 - RNA, 18 nt, Human
auauggcaagaaagcugg

SEQ ID NO: 2768911 - RNA, 19 nt, Human
auauggcaagaaagcuggu

SEQ ID NO: 2768912 - RNA, 12 nt, Human
auauggcagaag

SEQ ID NO: 2768913 - RNA, 15 nt, Human
auauggcagaagaca

SEQ ID NO: 2768914 - RNA, 17 nt, Human
auauggcagaagacacc

SEQ ID NO: 2768915 - RNA, 20 nt, Human
auaugcagugauauggcaga

SEQ ID NO: 2768916 - RNA, 16 nt, Human
auaugcacuauguaua

SEQ ID NO: 2768917 - RNA, 18 nt, Human
auaugcucuuuuguuugg

SEQ ID NO: 2768918 - RNA, 17 nt, Human
auauggauuuguuacag

SEQ ID NO: 2768919 - RNA, 18 nt, Human
auauggaugauucagaaa

SEQ ID NO: 2768920 - RNA, 16 nt, Human
auauggacucugcaca

SEQ ID NO: 2768921 - RNA, 18 nt, Human
auauggagaauugcugaa

SEQ ID NO: 2768922 - RNA, 21 nt, Human
auauggagaauugcugaaggg

SEQ ID NO: 2768923 - RNA, 15 nt, Human
auauggacucugcac

SEQ ID NO: 2768924 - RNA, 21 nt, Human
auaugcaccuugugucuguac

SEQ ID NO: 2768925 - RNA, 19 nt, Human
auaugcaccuugugucugu

SEQ ID NO: 2768926 - RNA, 20 nt, Human
auaugcaccuugugucugua

SEQ ID NO: 2768927 - RNA, 15 nt, Human
auaugcaccuugugu

SEQ ID NO: 2768928 - RNA, 17 nt, Human
auaugcaccuugugucu

SEQ ID NO: 2768929 - RNA, 14 nt, Human
auaucauauuggua

SEQ ID NO: 2768930 - RNA, 19 nt, Human
auaucauauugguauucac

SEQ ID NO: 2768931 - RNA, 16 nt, Human
auaucagugacaguug

SEQ ID NO: 2768932 - RNA, 12 nt, Human
auaucaguuuga

SEQ ID NO: 2768933 - RNA, 13 nt, Human
auaucauacaaau

SEQ ID NO: 2768934 - RNA, 19 nt, Human
auaucauacuguucaaugg

SEQ ID NO: 2768935 - RNA, 13 nt, Human
auaucauauguau

SEQ ID NO: 2768936 - RNA, 14 nt, Human
auaucauauguaua

SEQ ID NO: 2768937 - RNA, 22 nt, Human
auauucagugcuguggccuggg

SEQ ID NO: 2768938 - RNA, 15 nt, Human
auauucacugggcca

SEQ ID NO: 2768939 - RNA, 16 nt, Human
auauucacugggccaa

SEQ ID NO: 2768940 - RNA, 19 nt, Human
auauucagaaucuuuguua

SEQ ID NO: 2768941 - RNA, 20 nt, Human
auauucagaaucuuuguuaa

SEQ ID NO: 2768942 - RNA, 12 nt, Human
auauucagaauu

SEQ ID NO: 2768943 - RNA, 15 nt, Human
auauggcauuugcag

SEQ ID NO: 2768944 - RNA, 16 nt, Human
auauggcauuugcaga

SEQ ID NO: 2768945 - RNA, 11 nt, Human
auauucaacca

SEQ ID NO: 2768946 - RNA, 12 nt, Human
auauucaaccau

SEQ ID NO: 2768947 - RNA, 17 nt, Human
auauucaaccauggacu

SEQ ID NO: 2768948 - RNA, 21 nt, Human
auauucaaccauggacuuuau

SEQ ID NO: 2768949 - RNA, 23 nt, Human
auauucaaccauggacuuuauaa

SEQ ID NO: 2768950 - RNA, 21 nt, Human
auauuuaugucuauuuaagcc

SEQ ID NO: 2768951 - RNA, 16 nt, Human
auauuuauuaaauaaa

SEQ ID NO: 2768952 - RNA, 18 nt, Human
auauuuauuaaauaaaau

SEQ ID NO: 2768953 - RNA, 20 nt, Human
auauuuauuaaauaaaauca

SEQ ID NO: 2768954 - RNA, 18 nt, Human
auauuuaugucuauuuaa

SEQ ID NO: 2768955 - RNA, 12 nt, Human
auauuuauccaa

SEQ ID NO: 2768956 - RNA, 15 nt, Human
auauuuauccaaaau

SEQ ID NO: 2768957 - RNA, 20 nt, Human
auauuuauccaaaaugugua

SEQ ID NO: 2768958 - RNA, 14 nt, Human
auauuuauccacua

SEQ ID NO: 2768959 - RNA, 21 nt, Human
auauuucccauuugugccaga

SEQ ID NO: 2768960 - RNA, 19 nt, Human
auauuucccuaaaauacau

SEQ ID NO: 2768961 - RNA, 20 nt, Human
auauuucccuaaaauacauu

SEQ ID NO: 2768962 - RNA, 22 nt, Human
auauuucccuaaaauacauuua

SEQ ID NO: 2768963 - RNA, 19 nt, Human
auauuuaugucuauuuaag

SEQ ID NO: 2768964 - RNA, 15 nt, Human
auauuucagauguaa

SEQ ID NO: 2768965 - RNA, 18 nt, Human
auauuucagauguaaugu

SEQ ID NO: 2768966 - RNA, 19 nt, Human
auauuucagauguaauguu

SEQ ID NO: 2768967 - RNA, 20 nt, Human
auauuucagauguaauguuu

SEQ ID NO: 2768968 - RNA, 21 nt, Human
auauuucagauguaauguuuu

SEQ ID NO: 2768969 - RNA, 23 nt, Human
auauucagugcuguggccugggc

SEQ ID NO: 2768970 - RNA, 18 nt, Human
auauucaugcuucuuccu

SEQ ID NO: 2768971 - RNA, 20 nt, Human
auauucaugcuucuuccuua

SEQ ID NO: 2768972 - RNA, 12 nt, Human
auauucauauug

SEQ ID NO: 2768973 - RNA, 14 nt, Human
auauucauauugga

SEQ ID NO: 2768974 - RNA, 17 nt, Human
auauucauauuggaaaa

SEQ ID NO: 2768975 - RNA, 19 nt, Human
auauucauauuggaaaaau

SEQ ID NO: 2768976 - RNA, 17 nt, Human
auauucauucauggacc

SEQ ID NO: 2768977 - RNA, 15 nt, Human
auauuuauauauuua

SEQ ID NO: 2768978 - RNA, 15 nt, Human
auauuuauaacucau

SEQ ID NO: 2768979 - RNA, 23 nt, Human
auauuuauaacucaucauaaaau

SEQ ID NO: 2768980 - RNA, 19 nt, Human
auauuuauagguacccaau

SEQ ID NO: 2768981 - RNA, 22 nt, Human
auauuuauaacucaucauaaaa

SEQ ID NO: 2768982 - RNA, 21 nt, Human
auauuuauaacucaucauaaa

SEQ ID NO: 2768983 - RNA, 20 nt, Human
auauuuauaacucaucauaa

SEQ ID NO: 2768984 - RNA, 17 nt, Human
auauuuauaacucauca

SEQ ID NO: 2768985 - RNA, 15 nt, Human
auauauuuuuauauu

SEQ ID NO: 2768986 - RNA, 21 nt, Human
auauauuuuuauauuuaguua

SEQ ID NO: 2768987 - RNA, 14 nt, Human
auauauuuuuauau

SEQ ID NO: 2768988 - RNA, 16 nt, Human
auaucagcacauauuu

SEQ ID NO: 2768989 - RNA, 14 nt, Human
auauauuuuuugua

SEQ ID NO: 2768990 - RNA, 18 nt, Human
auagcauggauagaguau

SEQ ID NO: 2768991 - RNA, 15 nt, Human
auagcagcaaaaaua

SEQ ID NO: 2768992 - RNA, 19 nt, Human
auagcagcaaaaauauaaa

SEQ ID NO: 2768993 - RNA, 20 nt, Human
auagcagcaaaaauauaaaa

SEQ ID NO: 2768994 - RNA, 13 nt, Human
auagcauucauaa

SEQ ID NO: 2768995 - RNA, 18 nt, Human
auagcauuuuugauuuau

SEQ ID NO: 2768996 - RNA, 19 nt, Human
auagcauuuuugauuuaug

SEQ ID NO: 2768997 - RNA, 21 nt, Human
auagcauuuuugauuuaugca

SEQ ID NO: 2768998 - RNA, 12 nt, Human
auagcauugcuu

SEQ ID NO: 2768999 - RNA, 18 nt, Human
auagaaauauauacgaac

SEQ ID NO: 2769000 - RNA, 12 nt, Human
auagcacuuuga

SEQ ID NO: 2769001 - RNA, 13 nt, Human
auagcacuuugaa

SEQ ID NO: 2769002 - RNA, 14 nt, Human
auagcacuuugaaa

SEQ ID NO: 2769003 - RNA, 15 nt, Human
auagcacuuugaaau

SEQ ID NO: 2769004 - RNA, 19 nt, Human
auagcacuuugaaauaccu

SEQ ID NO: 2769005 - RNA, 20 nt, Human
auagcacuuugaaauaccuc

SEQ ID NO: 2769006 - RNA, 21 nt, Human
auagcacuuugaaauaccuca

SEQ ID NO: 2769007 - RNA, 22 nt, Human
auagcacuuugaaauaccucau

SEQ ID NO: 2769008 - RNA, 19 nt, Human
auagaaauaagugguuauu

SEQ ID NO: 2769009 - RNA, 14 nt, Human
auagaaauauauac

SEQ ID NO: 2769010 - RNA, 22 nt, Human
auagaaauaaaggaugugauug

SEQ ID NO: 2769011 - RNA, 13 nt, Human
auagaaagaaagu

SEQ ID NO: 2769012 - RNA, 12 nt, Human
auagaaagcauu

SEQ ID NO: 2769013 - RNA, 14 nt, Human
auacuuuaguauga

SEQ ID NO: 2769014 - RNA, 13 nt, Human
auacuuugucuga

SEQ ID NO: 2769015 - RNA, 16 nt, Human
auacuuuguggaccaa

SEQ ID NO: 2769016 - RNA, 24 nt, Human
auacuuuguggaccaauuauugau

SEQ ID NO: 2769017 - RNA, 13 nt, Human
auagaaaaguuau

SEQ ID NO: 2769018 - RNA, 14 nt, Human
auagaaaaguuauu

SEQ ID NO: 2769019 - RNA, 15 nt, Human
auagaaaaguuauua

SEQ ID NO: 2769020 - RNA, 11 nt, Human
auagaaacaug

SEQ ID NO: 2769021 - RNA, 13 nt, Human
auagaaacaugac

SEQ ID NO: 2769022 - RNA, 14 nt, Human
auagaaacaugaca

SEQ ID NO: 2769023 - RNA, 15 nt, Human
auagaaacaugacac

SEQ ID NO: 2769024 - RNA, 16 nt, Human
auagaaacaugacacu

SEQ ID NO: 2769025 - RNA, 21 nt, Human
auagaaacaugacacugaccu

SEQ ID NO: 2769026 - RNA, 21 nt, Human
auacuuucauccugacucugc

SEQ ID NO: 2769027 - RNA, 17 nt, Human
auacuugugguuuucaa

SEQ ID NO: 2769028 - RNA, 18 nt, Human
auacuugugguuuucaaa
